United States Patent Application Publication US 2021/0260178 A1 - sequence listing, part 7

SEQ ID NO: 10220 - RNA, 2005 nt, Artificial Sequence
  mRNA product Design a-2 comprising derived and/or modified sequence from LASV(KAK-428;Clade n.d. (VII))__ANH09741__NP (opt4)
gggagaguccgcucagccagguugcagaagcggcuuagcguguguccuaaucuucucucugcguguagguaggccugugccgcaaacaagcuuaccaugagcaacagcaaggaggugaagagcuuccuguggacccagagccugagaagagagcugagcggcuacugcaccaacaucaagcugcagguggugaaggacgcccaggcccugcugcacggccuggacuucagcgaggugagcaacgugcagagacugaugagaaagcagaagagagacgacaacgaccugaagagacugagagaccugaaccaggccgugaacaaccugguggagcugaagagcgugcagcagaagagcgugcugaaggugggcacccugaacagcgacgaccugcugacccuggccgccgaccuggagaagcugaagagcaagguggugagaaccgagagaccccugagcagcggcguguacaugggcaaccugagcagccagcagcuggaccagagaagagcccugcugaacaugaucggcauggccggcggcagccagggcaaccagcccagcagagacggcguggugagagugugggacgugaagaacgccgaccugcugaacaaccaguucggcaccaugcccagccugacccuggccugccugaccaagcagggccagguggaccugaacgacguggugcuggcccugaccgaccugggccugaucuacaccgccaaguaccccaacagcagcgaccuggacagacugagccagaaccaccccgugcugaacaugaucgacgugaacaagagcagccugaacaucagcggcuacaacuucagccugggcgccgccgugaaggccggcgccugcaugcuggacggcggcaacaugcuggagaccaucaagaucagcccccagaccguggacggcauccugaagagcauccugaaggugaagagagcccugggcauguucgugagcgacacccccggcgagagaaaccccuacgagaacauccuguacaaggugugccugagcggcaacggcuggcccuacaucgccagcagaaccagcaucgugggcagagccugggagaacaccgugguggaccuggagagcaacaagaaccagcccaaggugggcaacaacggcagcaacaagaugcugcagagcagcggcuucgccaccggccugaccuacagccagcugaugacccugagagacagcaugcugcagcuggaccccaccgccaagaccuggaucgacaucgagggcagacccgaggaccccguggagcuggcccuguuccagcccagcagcggcugcuacauccacuucuucagagagcccaccgaccugaagcaguucaagcaggacgccaaguacagccacggcaucgacgugaacgaccuguucagcgcccagcccggccugaccagcgccgugcuggaggcccugcccagaaacauggugcugaccugccagggcagcgacgacaucagaaagcugcuggacagccaggacagaaaggacaucaagcugaucgacaucagccugagcaaggccgacgccagaaaguucgagaacgacgugugggaccaguucaaggaccugugccacaugcacaccggcaucgugguggagaagaagaagaagggcggcaagcaggagaugaccccccacugcgcccugcuggacugcaucauguucgacgccgccgugagcggcggccugaacgugcccacccugagagccgugcugcccaccgacaugguguucagaaccaucaccaccaagguggugcugugaggacuagucccuguucccagagcccacuuuuuuuucuuuuuuugaaauaaaauagccugucuuucagaucuaaaaaaaaaaaaaaaaaaaaaaaaaaaaaaaaaaaaaaaaaaaaaaaaaaaaaaaaaaaaaaaaugcaucccccccccccccccccccccccccccccccaaaggcucuuuucagagccaccagaauu

SEQ ID NO: 10221 - RNA, 2005 nt, Artificial Sequence; identical to SEQ ID NO: 10215
  mRNA product Design a-2 comprising derived and/or modified sequence from LASV(Pinneo-NIG-1969;Clade I)__AIT17837__NP (opt4)

SEQ ID NO: 10222 - RNA, 2005 nt, Artificial Sequence
  mRNA product Design a-2 comprising derived and/or modified sequence from LASV(ISTH0009-NIG-2011;Clade II)__AIT17405__NP (opt4)
gggagaguccgcucagccagguugcagaagcggcuuagcguguguccuaaucuucucucugcguguagguaggccugugccgcaaacaagcuuaccaugagcgugagcaaggaggugaagagcuuccuguggacccagagccugagaagagagcugagcggcuacugcagcaacaucaagcugcagguggugaaggacgcccaggcccugcugcacggccuggacuucagcgaggugagcaacgugcagagacugaugagaaagcagaagagagacgacagcgaccugaagagacugagagaccugaaccaggccgugaacaaccugguggagcugaagagcacccagcagaagagcauccugagagugggcacccugaccagcgacgaccugcugacccuggccgccgaccuggagaagcugaagagcaaggugaucagaaccgagagaccccugagcagcggcguguacaugggcaaccugagcacccagcagcuggagcagagaagagcccugcugaacaugaucggcauggugggcggcgcccagggcacccagcccggcagagacggcguggugagagugugggacgugaagaaccccgaccugcugaacaaccaguucggcaccaugcccagccugacccuggccugccugaccaagcagggccagguggaccugaacgacgccgugcuggcccugaccgaccugggccugaucuacaccgccaaguaccccaacagcagcgaccuggacagacugagccagagccaccccauccugaacaugguggacaucaagaagagcagccugaacaucagcggcuacaacuucagccugggcgccgccgugaaggccggcgccugcaugcuggacggcggcaacaugcuggagaccaucaaggugaccccccagaccauggacggcauccugaagagcauccugaaggugaagagaagccugggcauguucgugagcgacacccccggcgagagaaaccccuacgagaacauccuguacaagaucugccugagcggcgacggcuggcccuacaucgccagcagaaccagcaucgugggcagagccugggagaacaccaccguggaccuggagagcgacggcaagccccagaaggugggcagcgccggcagcaacaagagccugcagagcgccggcuuccccaccggccugaccuacagccagcugaugacccugaaggacagcaugaugcagcuggaccccagcgccaagaccuggaucgacaucgagggcagacccgaggaccccguggagaucgcccuguaccagcccaugagcggcugcuacauccacuucuucagagagcccaccgaccugaagcaguucaagcaggacgccaaguacagccacggcaucgacguggccgaccuguuccccgcccagcccggccugaccagcgccgugaucgaggcccugcccagaaacauggugcugaccugccagggcagcgacgacaucaagagacugcuggacagccagggcagaagagacaucaagcugaucgacaucgcccugagcaaggccgacagcagaagauucgagaacgccgugugggaccagugcaaggaccugugccacaugcacaccggcguggugguggagaagaagaagagaggcggcaaggaggagaucaccccccacugcgcccugauggacugcaucauguacgacgccgccgugagcggcggccugaacauccccgugcugagagccgugcugcccagagacaugguguucagaaccagcagccccaagguggugcugugaggacuagucccuguucccagagcccacuuuuuuuucuuuuuuugaaauaaaauagccugucuuucagaucuaaaaaaaaaaaaaaaaaaaaaaaaaaaaaaaaaaaaaaaaaaaaaaaaaaaaaaaaaaaaaaaaugcaucccccccccccccccccccccccccccccccaaaggcucuuuucagagccaccagaauu

SEQ ID NO: 10223 - RNA, 2005 nt, Artificial Sequence
  mRNA product Design a-2 comprising derived and/or modified sequence from LASV(ISTH2010-NIG-2012;Clade II)__AIT17483__NP (opt4)
gggagaguccgcucagccagguugcagaagcggcuuagcguguguccuaaucuucucucugcguguagguaggccugugccgcaaacaagcuuaccaugagcgccagcaaggaggugaagagcuuccuguggacccagagccugagaagagagcugagcggcuacugcagcaacaucaagcugcagguggugaaggacgcccaggcccugcugcacggccuggacuucagcgaggugagcaacgugcagagacugaugagaaagcagaagagagacgacagcgaccugaagagacugagagaccugaaccaggccgugaacaaccugguggagcugaagagcacccagcagaagagcauccugagagugggcacccugaccagcgacgaccugcugacccuggccgccgaccuggagaagcugaagagcaaggugaucagaaccgagagaccccugagcagcggcguguacaugggcaaccugagcacccagcagcuggagcagagaagagcccugcugaaccugaucggcauggugggcggcgcccagggcacccagcccggcagagacggcguggugagagugugggacgugaagaaccccgaccugcugaacaaccaguucggcaccaugcccagccugacccuggccugccugaccaagcagggccagguggaccugaacgacgccgugcuggcccugaccgaccugggccugaucuacaccgccaaguaccccaacagcagcgaccuggacagacugagccagagccaccccauccugaacaugguggacaccaagaagagcagccugaacaucagcggcuucaacuucagccugggcgccgccgugaaggccggcgccugcaugcuggacggcggcaacaugcuggagaccaucaaggugaccccccagaccauggacggcauccugaagagcauccugaaggugaagaagagccugggcauguucgugagcgacacccccggcgagagaaaccccuacgagaacauccuguacaagaucugccugagcggcgacggcuggcccuacaucgccagcagaaccagcaucgugggcagagccugggagaacaccaccguggaccuggagagcgacggcaagccccacaaggugggcaccgccggcagcaacaagagccugcagagcgccggcuuccccaccggccugaccuacagccagcugaugacccugaaggacagcaugaugcagcuggaccccagcgccaagaccuggaucgacaucgagggcagacccgaggaccccguggagaucgcccuguaccagcccaugagcggcugcuacauccacuucuucagagagcccaccgaccugaagcaguucaagcaggacgccaaguacagccacggcaucgacguggccgaccuguuccccgcccagcccggccugaccagcgccgugaucgaggcccugcccagaaacauggugcugaccugccagggcagcgacgacaucaagagacugcuggacagccagggcagaagagacaucaagcugaucgacaucgcccugagcaaggccgacagcagaagauucgagaacgccgugugggaccagugcaaggaccugugccacaugcacaccggcguggugguggagaagaagaagagaggcggcaaggaggagaucaccccccacugcgcccugauggacugcaucauguacgacgccgccgugagcggcggccugaacauccccgugcugagagccgugcugcccagagacaugguguucagaaccagcagccccaagguggugcugugaggacuagucccuguucccagagcccacuuuuuuuucuuuuuuugaaauaaaauagccugucuuucagaucuaaaaaaaaaaaaaaaaaaaaaaaaaaaaaaaaaaaaaaaaaaaaaaaaaaaaaaaaaaaaaaaaugcaucccccccccccccccccccccccccccccccaaaggcucuuuucagagccaccagaauu

SEQ ID NO: 10224 - RNA, 2005 nt, Artificial Sequence
  mRNA product Design a-2 comprising derived and/or modified sequence from LASV(Lassa virus/H.sapiens-wt/NGA/2015/ISTH_0543;Clade II)__AVO03640__NP (opt4)
gggagaguccgcucagccagguugcagaagcggcuuagcguguguccuaaucuucucucugcguguagguaggccugugccgcaaacaagcuuaccaugagcgccagcaaggaggugaagagcuuccuguggacccagagccugagaagagagcugagcggcuacugcagcaacaucaagcugcagguggugaaggacgcccaggcccugcugcacggccuggacuucagcgaggugagcaacgugcagagacugaugagaaagcagaagagagacgacagcgaccugaagagacugagagaccugaaccaggccgugaacaaccugguggagcugaagagcacccagcagaagagcauccugagagugggcacccugaccagcgacgaccugcugacccuggccgccgaccuggagaagcugaagagcaaggugaucagaaccgagagaccccugagcagcggcguguacaugggcaaccugagcacccagcagcuggagcagagaagagcccugcugaacaugaucggcauggugggcggcgcccagggcacccagcccggcagagacggcguggugagagugugggacgugaagaaccccgaccugcugaacaaccaguucggcaccaugcccagccugacccuggccugccugaccaagcagggccagguggaccugaacgacgccgugcuggcccugaccgaccugggccugaucuacaccgccaaguaccccaacagcagcgaccuggacagacugagccagagccaccccauccugaacaugguggacaccaagaagagcagccugaacaucagcggcuacaacuucagccugggcgccgccgugaaggccggcgccugcaugcuggacggcggcaacaugcuggagaccaucaaggugaccccccagaccauggacggcauccugaagagcauccugaaggugaagaagagccugggcauguucgugagcgacacccccggcgagagaaaccccuacgagaacauccuguacaagaucugccugagcggcgacggcuggcccuacaucgccagcagaaccagcaucgugggcagagccugggagaacaccaccguggaccuggagagcgacggcaagccccagaaggugggcagcgccggcagcaacaagagccugcagagcgccggcuuccccaccggccugaccuacagccagcugaugacccugaaggacagcaugaugcagcuggaccccagcgccaagaccuggaucgacaucgagggcagacccgaggaccccguggagaucgcccuguaccagcccaugagcggcugcuacauccacuucuucagagagcccaccgaccugaagcaguucaagcaggacgccaaguacagccacggcaucgacguggccgaccuguuccccgcccagcccggccugaccagcgccgugaucgaggcccugcccagaaacauggugcugaccugccagggcagcgacgacaucaagagacugcuggacagccagggcagaaaggacaucaagcugaucgacaucgcccugagcaaggccgacagcagaagauucgagaacgccgugugggaccagugcaaggaccugugccacaugcacaccggcguggugguggagaagaagaagagaggcggcaaggaggagaucaccccccacugcgcccugauggacugcaucauguacgacgccgccgugagcggcggccugaacauccccgugcugagagccgugcugcccagagacaugguguucagaaccagcagccccaagguggugcugugaggacuagucccuguucccagagcccacuuuuuuuucuuuuuuugaaauaaaauagccugucuuucagaucuaaaaaaaaaaaaaaaaaaaaaaaaaaaaaaaaaaaaaaaaaaaaaaaaaaaaaaaaaaaaaaaaugcaucccccccccccccccccccccccccccccccaaaggcucuuuucagagccaccagaauu

SEQ ID NO: 10225 - RNA, 2005 nt, Artificial Sequence
  mRNA product Design a-2 comprising derived and/or modified sequence from LASV(Lassa virus/H.sapiens-wt/NGA/2016/ISTH_0009;Clade II)__AVO03572__NP (opt4)
gggagaguccgcucagccagguugcagaagcggcuuagcguguguccuaaucuucucucugcguguagguaggccugugccgcaaacaagcuuaccaugagcgccagcaaggaggugaagagcuuccuguggacccagagccugagaagagagcugagcggcuacugcagcaacaucaagcugcagguggugaaggacgcccaggcccugcugcacggccuggacuucagcgaggugagcaacgugcagagacugaugagaaagcagaagagagacgacagcgaccugaagagacugagagaccugaaccaggccgugaacaaccugguggagcugaagagcacccagcagaagagcauccugagagugggcacccugaccagcgacgaccugcugacccuggccgccgaccuggagaagcugaagagcaaggugaucagaaccgagagaccccugagcagcggcguguacaugggcaaccugagcacccagcagcuggagcagagaagagcccugcugaacaugaucggcauggugggcggcgcccagggcacccagcccggcagagacggcguggugagagugugggacgugaagaaccccgaccugcugaacaaccaguucggcaccaugcccagccugacccuggccugccugaccaagcagggccagguggaccugaacgacgccgugcuggcccugaccgaccugggccugaucuacaccgccaaguaccccaacagcagcgaccuggacagacugagccagagccaccccauccugaacaugguggacaccaagaagagcagccugaacaucagcggcuacaacuucagccugggcgccgccgugaaggccggcgccugcaugcuggacggcggcaacaugcuggagaccaucaaggugaccccccagaccauggacggcauccugaagagcauccugaaggugaagaagagccugggcauguucgugagcgacacccccggcgagagaaaccccuacgagaacauccuguacaagaucugccugagcggcgacggcuggcccuacaucgccagcagaaccagcaucgugggcagagccugggagaacaccaccguggaccuggagagcgacggcaagccccagaaggugggcagcgccggcagcaacaagagccugcagagcgccggcuuccccaccggccugaccuacagccagcugaugacccugaaggacagcaugaugcagcuggaccccagcgccaagaccuggaucgacaucgagggcagacccgaggaccccguggagaucgcccuguaccagcccaugagcggcugcuacauccacuucuucagagagcccaccgaccugaagcaguucaagcaggacgccaaguacagccacggcaucgacguggccgaccuguuccccgcccagcccggccugaccagcgccgugaucgaggcccugcccagaaacauggugcugaccugccagggcagcgacgacaucaagagacugcuggacagccagggcagaagagacaucaagcugaucgacaucgcccugagcaaggccgacagcagaagauucgagaacgccgugugggaccagugcaaggaccugugccacaugcacaccggcguggugguggagaagaagaagagaggcggcaaggaggagaucaccccccacugcgcccugauggacugcaucauguacgacgccgccgugagcggcggccugaacauccccgugcugagagccgugcugcccagagacaugguguucagaaccagcagccccaagguggugcugugaggacuagucccuguucccagagcccacuuuuuuuucuuuuuuugaaauaaaauagccugucuuucagaucuaaaaaaaaaaaaaaaaaaaaaaaaaaaaaaaaaaaaaaaaaaaaaaaaaaaaaaaaaaaaaaaaugcaucccccccccccccccccccccccccccccccaaaggcucuuuucagagccaccagaauu

SEQ ID NO: 10226 - RNA, 2005 nt, Artificial Sequence
  mRNA product Design a-2 comprising derived and/or modified sequence from LASV(Lassa virus/H.sapiens-wt/NGA/2016/ISTH_0017;Clade II)__AVO03568__NP (opt4)
gggagaguccgcucagccagguugcagaagcggcuuagcguguguccuaaucuucucucugcguguagguaggccugugccgcaaacaagcuuaccaugagcgccagcaaggaggugaagagcuuccuguggacccagagccugagaagagagcugagcggcuacugcagcagcaucaagcugcagguggugaaggacgcccaggcccugcugcacggccuggacuucagcgaggugagcaacgugcagagacugaugagaaagcagaagagagacgacagcgaccugaagagacugagagaccugaaccaggccgugaacaaccugguggagcugaagagcacccagcagaagagcauccugagagugggcacccugaccagcgacgaccugcugacccuggccgccgaccuggagaagcugaagagcaaggugaucagaaccgagagaccccugagcagcggcguguacaugggcaaccugagcacccagcagcuggagcagagaagagcccugcugaacaugaucggcauggccggcggcgcccagggcacccagcccggcagagacggcguggugagagugugggacgugaagaaccccgaccugcugaacaaccaguucggcaccaugcccagccugacccuggccugccugaccaagcagggccagguggaccugaacgacgccgugcuggcccugaccgaccugggccugaucuacaccgccaaguaccccaacagcagcgaccuggacagacugagccagagccaccccauccugaacaugguggacaccaagaagagcagccugaacaucagcggcuacaacuucagccugggcgccgccgugaaggccggcgccugcaugcuggacggcggcaacaugcuggagaccaucaaggugaccccccagaccauggacggcauccugaagagcauccugaaggugaagagaagccugggcauguucgugagcgacgcccccggcgagagaaaccccuacgagaacauccuguacaagaucugccugagcggcgacggcuggcccuacaucgccagcagaaccagcaucgugggcagagccugggagaacaccaccguggaccuggagagcgacggcaagccccagaaggugggcgccaccggcagcaacaagagccugcagagcgccggcuuccccaccggccugaccuacagccagcugaugacccugaaggacagcaugaugcagcuggaccccagcgccaagaccuggaucgacaucgagggcagacccgaggaccccguggagguggcccuguaccagcccgugagcggcugcuacauccacuucuucagagagcccaccgaccugaagcaguucaagcaggacgccaaguacagccacggcaucgacguggccgaccuguuccccgcccagcccggccugaccagcgccgugaucgaggcccugcccagaaacauggugcugaccugccagggcagcgacgacaucaagaagcugcuggacagccagggcagaaaggacaucaagcugaucgacaucgcccugagcaaggccgacagcagaagauucgagaacgccgugugggaccagugcaaggaccugugccacaugcacaccggcguggugguggagaagaagaagagaggcggcaaggaggagaucaccccccacugcgcccugauggacugcaucauguacgacgccgccgugagcggcggccugaacauccccgugcugagagccgugcugcccagagacaugguguucagaaccagcagccccaagguggugcugugaggacuagucccuguucccagagcccacuuuuuuuucuuuuuuugaaauaaaauagccugucuuucagaucuaaaaaaaaaaaaaaaaaaaaaaaaaaaaaaaaaaaaaaaaaaaaaaaaaaaaaaaaaaaaaaaaugcaucccccccccccccccccccccccccccccccaaaggcucuuuucagagccaccagaauu

SEQ ID NO: 10227 - RNA, 2005 nt, Artificial Sequence
  mRNA product Design a-2 comprising derived and/or modified sequence from LASV(Lassa virus/H.sapiens-wt/NGA/2018/ISTH_0959;Clade II)__AVV65100__NP (opt4)
gggagaguccgcucagccagguugcagaagcggcuuagcguguguccuaaucuucucucugcguguagguaggccugugccgcaaacaagcuuaccaugagcgccagcaaggaggugaagagcuuccuguggacccagagccugagaagagagcugagcggcuacugcagcaacaucaagcugcagguggugaaggacgcccaggcccugcugcacggccuggacuucagcgaggugagcaacgugcagagacugaugagaaagcagaagagagacgacagcgaccugaagagacugagagaccugaaccaggccgugaacaaccugguggagcugaagagcacccagcagaagagcauccugagagugggcacccugaccagcgacgaccugcugacccuggccgccgaccuggagaagcugaagagcaaggugaucagaaccgagagaccccugagcagcggcguguacaugggcaaccugagcacccagcagcuggagcagagaagagcccugcugaaccugaucggcauggugggcggcgcccagggcacccagcccggcagagacggcguggugagagugugggacgugaagaaccccgaccugcugaacaaccaguucggcaccaugcccagccugacccuggccugccugaccaagcagggccagguggaccugaacgacguggugcuggcccugaccgaccugggccugaucuacaccgccaaguaccccaacagcagcgaccuggacagacugagccagagccaccccauccugaacaugguggacaccaagaagagcagccugaacaucagcggcuucaacuucagccugggcgccgccgugaaggccggcgccugcaugcuggacggcggcaacaugcuggagaccaucaaggugaccccccagaccauggacggcauccugaagagcauccugaaggugaagaagagccugggcauguucgugagcgacacccccggcgagagaaaccccuacgagaacauccuguacaagaucugccugagcggcgacggcuggcccuacaucgccagcagaaccagcaucgugggcagagccugggagaacaccaccguggaccuggagagcgacggcaagccccacaaggugggcaccgccggcagcaacaagagccugcagagcgccggcuuccccaccggccugaccuacagccagcugaugacccugaaggacagcaugaugcagcuggaccccagcgccaagaccuggaucgacaucgagggcagacccgaggaccccguggagaucgcccuguaccagcccaugagcggcugcuacauccacuucuucagagagcccaccgaccugaagcaguucaagcaggacgccaaguacagccacggcaucgacguggccgaccuguuccccgcccagcccggccugaccagcgccgugaucgaggcccugcccagaaacauggugcugaccugccagggcagcgacgacaucaagagacugcuggacagccagggcagaaaggacaucaagcugaucgacaucgcccugagcaagaccgacagcagaagauucgagaacgccgugugggaccagugcaaggaccugugccacaugcacaccggcguggugguggagaagaagaagagaggcggcaaggaggagaucaccccccacugcgcccugauggacugcaucauguacgacgccgccgugagcggcggccugaacauccccgugcugagagccgugcugcccagagacaugguguucagaaccagcagccccaagguggugcugugaggacuagucccuguucccagagcccacuuuuuuuucuuuuuuugaaauaaaauagccugucuuucagaucuaaaaaaaaaaaaaaaaaaaaaaaaaaaaaaaaaaaaaaaaaaaaaaaaaaaaaaaaaaaaaaaaugcaucccccccccccccccccccccccccccccccaaaggcucuuuucagagccaccagaauu

SEQ ID NO: 10228 - RNA, 2005 nt, Artificial Sequence
  mRNA product Design a-2 comprising derived and/or modified sequence from LASV(LASV003-NIG-2008;Clade II)__AIT17581__NP (opt4)
gggagaguccgcucagccagguugcagaagcggcuuagcguguguccuaaucuucucucugcguguagguaggccugugccgcaaacaagcuuaccaugagcgccagcaaggaggugaagagcuuccuguggacccagagccugagaagagagcugagcggcuacugcagcagcaucaagcugcagguggugaaggacgcccaggcccugcugcacggccuggacuucagcgaggugagcaacgugcagagacugaugagaaagcagaagagagacgacagcgaccugaagagacugagagaccugaaccaggccgugaacaaccugguggagcugaagagcacccagcagaagagcgugcugagagugggcacccugaccagcgacgaccugcugacccuggccgccgaccuggagaagcugaagagcaaggugaucagaaccgagagaccccugagcagcggcguguacaugggcaaccugagcgcccagcagcuggagcagagaagaacccugcugaacaugaucggcauggugggcggcgcccagggcacccagcccggcagagacggcguggugagagugugggacgugaagaaccccgaccugcugaacaaccaguucggcaccaugcccagccugacccuggccugccugaccaagcagggccagguggaccugaacgacguggugcuggcccugaccgaccugggccugaucuacaccgccaaguaccccaacagcagcgaccuggacagacugagccagagccaccccauccugagcaugguggacaccaagaagagcagccugaacaucagcggcuacaacuucagccugggcgccgccgugaaggccggcgccugcaugcuggacggcggcaacaugcuggagaccaucaaggugaccccccagaccauggacggcauccugaagagcauccugaaggugaagaagagccugggcauguucgugagcgacacccccggcgagagaaaccccuacgagaacauccuguacaagaucugccugagcggcgacggcuggcccuacaucgccagcagaaccagcaucgugggcagagccugggagaacaccaccguggaccuggagagcgacggcaagccccagaaggugggcaccgccggcagcaacaagagccugcagagcgccggcuuccccaccggccugaccuacagccagcugaugacccugaaggacagcaugaugcagcuggaccccagcgccaagaccuggaucgacaucgagggcagacccgaggaccccguggagaucgcccuguaccagcccaugagcggcugcuacauccacuucuucagagagcccaccgaccugaagcaguucaagcaggacgccaaguacagccacggcaucgacgugaccgaccuguuccccgcccagcccggccugaccagcgccgugaucgaggcccugcccagaaacauggugcugaccugccagggcagcgacgacaucaagagacugcuggacagccagggcagaagagacaucaagcugaucgacaucgcccugagcaaggccgacagcagaagauucgagaacgccgugugggaccagugcaaggaccugugccacaugcacaccggcguggugguggagaagaagaagagaggcggcaaggaggagaucaccccccacugcgcccugauggacugcaucauguacgacgccgccgugagcggcggccugaacauccccgugcugagagccgugcugcccagagacaugguguucagaaccagcagccccaagguggugcugugaggacuagucccuguucccagagcccacuuuuuuuucuuuuuuugaaauaaaauagccugucuuucagaucuaaaaaaaaaaaaaaaaaaaaaaaaaaaaaaaaaaaaaaaaaaaaaaaaaaaaaaaaaaaaaaaaugcaucccccccccccccccccccccccccccccccaaaggcucuuuucagagccaccagaauu

SEQ ID NO: 10229 - RNA, 2005 nt, Artificial Sequence
  mRNA product Design a-2 comprising derived and/or modified sequence from LASV(LASV035-NIG-2009;Clade II)__AIT17589__NP (opt4)
gggagaguccgcucagccagguugcagaagcggcuuagcguguguccuaaucuucucucugcguguagguaggccugugccgcaaacaagcuuaccaugagcgccagcaaggaggugaagagcuuccuguggacccagagccugagaagagagcugagcggcuacugcagcagcaucaagcugcagguggugaaggacgcccaggcccugcugcacggccuggacuucagcgaggugagcaacgugcagagacugaugagaaagcagaagagagacgacagcgaccugaagagacugagagaccugaaccaggccgugaacaaccugguggagcugaagagcacccagcagaagagcauccugagagugggcacccugaccagcgacgaccugcugacccuggccgccgaccuggagaagcugaagagcaaggugaucagaaccgagagaccccugagcagcggcguguacaugggcaaccugagcgcccagcagcuggagcagagaagagcccugcugaacaugaucggcauggugggcggcgcccagggcacccagcccggcagagacggcguggugagagugugggacgugaagaaccccgaccugcugaacaaccaguucggcaccaugcccagccugacccuggccugccugaccaagcagggccagguggaccugaacgacgccgugcuggcccugaccgaccugggccugaucuacaccgccaaguaccccaacagcagcgaccuggacagacugagccagagccaccccauccugaacaugguggacaccaagaagagcagccugaacaucagcggcuacaacuucagccugggcgccgccgugaaggccggcgccugcaugcuggacggcggcaacaugcuggagaccaucaaggugaccccccagaccauggacggcauccugaagagcauccugaaggugaagagaagccugggcauguucgugagcgacacccccggcgagagaaaccccuacgagaacauccuguacaagaucugccugagcggcgacggcuggcccuacaucgccagcagaaccagcaucgugggcagagccugggagaacaccaccguggaccuggagagcgacggcaagccccagaaggugggcaccaccggcagcaacaagagccugcagagcgccggcuuccccaccggccugaccuacagccagcugaugacccugaaggacagcaugaugcagcuggaccccagcgccaagaccuggaucgacaucgagggcagacccgaggaccccguggagaucgcccuguaccagcccaugagcggcugcuacauccacuucuucagagagcccaccgaccugaagcaguucaagcaggacgccaaguacagccacggcaucgacguggccgaccuguuccccgcccagcccggccugaccagcgccgugaucgaggcccugcccagaaacauggugcugaccugccagggcagcgacgacaucaagaagcugcuggacagccagggcagaagagacaucaagcugaucgacaucgcccugagcaaggccgacagcagaaaguucgagaacgccgugugggaccagugcaaggaccugugccacaugcacaccggcguggugguggagaagaagaagagaggcggcaaggaggagaucaccccccacugcgcccugauggacugcaucauguacgacgccgccgugagcggcggccugaacauccccgugcugagagccgugcugcccagagacaugguguucagaaccagcagccccaagguggugcugugaggacuagucccuguucccagagcccacuuuuuuuucuuuuuuugaaauaaaauagccugucuuucagaucuaaaaaaaaaaaaaaaaaaaaaaaaaaaaaaaaaaaaaaaaaaaaaaaaaaaaaaaaaaaaaaaaugcaucccccccccccccccccccccccccccccccaaaggcucuuuucagagccaccagaauu

SEQ ID NO: 10230 - RNA, 2005 nt, Artificial Sequence
  mRNA product Design a-2 comprising derived and/or modified sequence from LASV(LASV1000-NIG-2009;Clade II)__AIT17783__NP (opt4)
gggagaguccgcucagccagguugcagaagcggcuuagcguguguccuaaucuucucucugcguguagguaggccugugccgcaaacaagcuuaccaugagcgccagcaaggaggugaagagcuuccuguggacccagagccugagaagagagcugagcggcuacugcagcaacaucaagcugcagguggugaaggacgcccaggcccugcugcacggccuggacuucagcgaggugagcaacgugcagagacugaugagaaagcagaagagagacgacagcgaccugaagagacugagagaccugaaccaggccgugaacaaccugguggagcugaagagcacccagcagaagagcauccugagagugggcacccugaccagcgacgaccugcugacccuggccgccgaccuggagaagcugaagagcaaggugaucagaaccgagagaccccugagcagcggcguguacaugggcaaccugagcacccagcagcuggagcagagaagagcccugcugaacaugaucggcauggugggcggcgcccagggcacccagcccggcagagacggcguggugagagugugggacgugaagaaccccgaccugcugaacaaccaguucggcaccaugcccagccugacccuggccugccugaccaagcagggccagguggaccugaacgacguggugcuggcccugaccgaccugggccugaucuacaccgccaaguaccccaacagcagcgaccuggacagacugagccagagccaccccauccugaacaugguggacaccaagaagagcagccugaacaucagcggcuacaacuucagccugggcgccgccgugaaggccggcgccugcaugcuggacggcggcaacaugcuggagaccaucaaggugaccccccagaccauggacggcauccugaagagcauccugaaggugaagaagagccugggcauguucgugagcgacacccccggcgagagaaaccccuacgagaacauccuguacaagaucugccugagcggcgacggcuggcccuacaucgccagcagaaccagcaucgugggcagagccugggagaacaccaccguggaccuggagagcgacggcaagccccagaaggugggcaccgccggcagcaacaagagccugcagagcgccggcuuccccaccggccugaccuacagccagcugaugacccugaaggacagcaugaugcagcuggaccccagcgccaagaccuggaucgacaucgagggcagacccgaggaccccguggagaucgcccuguaccagcccgugagcggcugcuacauccacuucuucagagagcccaccgaccugaagcaguucaagcaggacgccaaguacagccacggcaucgacguggccgaccuguuccccgcccagcccggccugaccagcgccgugaucgaggcccugcccagaaacauggugcugaccugccagggcagcgacgacaucaagagacugcuggacagccagggcagaagagacaucaagcugaucgacaucgcccugagcaaggccgacagcagaagauucgagaacgccgugugggaccagugcaaggaccugugccacaugcacaccggcguggugguggagaagaagaagagaggcggcaaggaggagaucaccccccacugcgcccugauggacugcaucauguacgacgccgccgugagcggcggccugaacauccccgugcugagagccgugcugcccagagacaugguguucagaaccagcagccccaagguggugcugugaggacuagucccuguucccagagcccacuuuuuuuucuuuuuuugaaauaaaauagccugucuuucagaucuaaaaaaaaaaaaaaaaaaaaaaaaaaaaaaaaaaaaaaaaaaaaaaaaaaaaaaaaaaaaaaaaugcaucccccccccccccccccccccccccccccccaaaggcucuuuucagagccaccagaauu

SEQ ID NO: 10231 - RNA, 2005 nt, Artificial Sequence
  mRNA product Design a-2 comprising derived and/or modified sequence from LASV(LASV221-NIG-2010;Clade II)__AIT17625__NP (opt4)
gggagaguccgcucagccagguugcagaagcggcuuagcguguguccuaaucuucucucugcguguagguaggccugugccgcaaacaagcuuaccaugagcgccagcaaggaggugaagagcuuccuguggacccagagccugagaagagagcugagcggcuacugcagcagcaucaagcugcagguggugaaggacgcccaggcccugcugcacggccuggacuucagcgaggugagcaacgugcagagacugaugagaaagcagagaagagacgacagcgaccugaagagacugagagaccugaaccaggccgugaacaaccugguggagcugaagagcacccagcagaagagcauccugagagugggcacccugaccagcgacgaccugcugacccuggccgccgaccuggagaagcugaagagcaaggugaucagaaccgagagaccccugagcagcggcguguacaugggcaaccugagcacccagcagcuggagcagagaagagcccugcugaacaugaucggcauggugggcggcgcccagggcacccagcccggcagagacggcguggugagagugugggacgugaagaaccccgaccugcugaacaaccaguucggcaccaugcccagccugacccuggccugccugaccaagcagggccagguggaccugaacgacgccgugcuggcccugaccgaccugggccugaucuacaccgccaaguaccccaacagcagcgaccuggacagacugagccagagccaccccauccugaacaugguggacaccaagaagagcagccugaacaucagcggcuacaacuucagccugggcgccgccgugaaggccggcgccugcaugcuggacggcggcaacaugcuggagaccaucaaggugaccccccagaccguggacggcauccugaagagcauccugaaggugaagagaagccugggcauguucgugagcgacacccccggcgagagaaaccccuacgagaacauccuguacaagaucugccugagcggcgacggcuggcccuacaucgccagcagaaccagcaucgugggcagagccugggagaacaccaccguggaccuggagagcgacggcaagccccagaaggugggcaccgccggcagcaacaagagccugcagagcgccggcuuccccaccggccugaccuacagccagcugaugacccugaaggacagcaugaugcagcuggaccccagcgccaagaccuggaucgacaucgagggcagacccgaggaccccguggagaucgcccuguaccagcccaugagcggcugcuacauccacuucuucagagagcccaccgaccugaagcaguucaagcaggacgccaaguacagccacggcaucgacguggccgaccuguuccccgcccagcccggccugaccagcgccgugaucgaggcccugcccagaaacauggugcugaccugccagggcagcgacgacaucaagagacugcuggacagccagggcagaagagacaucaagcugaucgacaucgcccugagcaaggccgacagcagaaaguucgagaacgccgugugggaccagugcaaggaccugugccacaugcacaccggcguggugguggagaagaagaagagaggcggcaaggaggagaucaccccccacugcgcccugauggacugcaucauguacgacgccgccgugagcggcggccugaacauccccgugcugagagccgugcugcccagagacaugguguucagaaccagcagccccaagguggugcugugaggacuagucccuguucccagagcccacuuuuuuuucuuuuuuugaaauaaaauagccugucuuucagaucuaaaaaaaaaaaaaaaaaaaaaaaaaaaaaaaaaaaaaaaaaaaaaaaaaaaaaaaaaaaaaaaaugcaucccccccccccccccccccccccccccccccaaaggcucuuuucagagccaccagaauu

SEQ ID NO: 10232 - RNA, 2005 nt, Artificial Sequence
  mRNA product Design a-2 comprising derived and/or modified sequence from LASV(LASV237-NIG-2010;Clade II)__AIT17639__NP (opt4)
gggagaguccgcucagccagguugcagaagcggcuuagcguguguccuaaucuucucucugcguguagguaggccugugccgcaaacaagcuuaccaugagcgccagcaaggaggugaagagcuuccuguggacccagagccugagaagagagcugagcggcuacugcagcaacaucaagcugcagguggugaaggacgcccaggcccugcugcacggccuggacuucagcgaggugagcaacgugcagagacugaugagaaagcagaagagagacgacagcgaccugaagagacugagagaccugaaccaggccgugaacaaccugguggagcugaagagcacccagcagaagagcauccugagagugggcacccugaccagcgacgaccugcugacccuggccgccgaccuggagaagcugaagagcaaggugaucagaaccgagagaccccugagcagcggcguguacaugggcaaccugagcacccagcagcuggagcagagaagagcccugcugaacaugaucggcauggugggcggcgcccagggcacccagcccggcagagacggcguggugagagugugggacgugaagaaccccgaccugcugaacaaccaguucggcaccaugcccagccugacccuggccugccugaccaagcagggccagguggaccugaacgacgccgugcuggcccugaccgaccugggccugaucuacaccgccaaguaccccaacagcagcgaccuggacagacugagccagagccaccccauccugaacaugguggacaucaagaagagcagccugaacaucagcggcuacaacuucagccugggcgccgccgugaaggccggcgccugcaugcuggacggcggcaacaugcuggagaccaucaaggugaccccccagaccauggacggcauccugaagagcauccugaaggugaagagaagccugggcauguucgugagcgacacccccggcgagagaaaccccuacgagaacauccuguacaagaucugccugagcggcgacggcuggcccuacaucgccagcagaaccagcaucgugggcagagccugggagaacaccaccguggaccuggagagcgacggcaagccccagaaggugggcagcgccggcagcaacaagagccugcagagcgccggcuuccccaccggccugaccuacagccagcugaugacccugaaggacagcaugaugcagcuggaccccagcgccaagaccuggaucgacaucgagggcagacccgaggaccccguggagaucgcccuguaccagcccaugagcggcugcuacauccacuucuucagagagcccaccgaccugaagcaguucaagcaggacgccaaguacagccacggcaucgacguggccgaccuguuccccgcccagcccggccugaccagcgccgugaucgaggcccugcccagaaacauggugcugaccugccagggcagcgacgacaucaagagacugcuggacagccagggcagaagagacaucaagcugaucgacaucgcccugagcaaggccgacagcagaagauucgagaacgccgugugggaccagugcaaggaccugugccacaugcacaccggcguggugguggagaagaagaagagaggcggcaaggaggagaucaccccccacugcgcccugauggacugcaucauguacgacgccgccgugagcggcggccugaacauccccgugcugagagccgugcugcccagagacaugguguucagaaccagcagccccaagguggugcugugaggacuagucccuguucccagagcccacuuuuuuuucuuuuuuugaaauaaaauagccugucuuucagaucuaaaaaaaaaaaaaaaaaaaaaaaaaaaaaaaaaaaaaaaaaaaaaaaaaaaaaaaaaaaaaaaaugcaucccccccccccccccccccccccccccccccaaaggcucuuuucagagccaccagaauu

SEQ ID NO: 10233 - RNA, 2005 nt, Artificial Sequence
  mRNA product Design a-2 comprising derived and/or modified sequence from LASV(LASV253-NIG-2011;Clade II)__AIT17671__NP (opt4)
gggagaguccgcucagccagguugcagaagcggcuuagcguguguccuaaucuucucucugcguguagguaggccugugccgcaaacaagcuuaccaugagcgccagcaaggaggugaagagcuuccuguggacccagagccugagaagagagcugagcggcuacugcagcagcaucaagcugcagguggugaaggacgcccaggcccugcugcacggccuggacuucagcgaggugagcaacgugcagagacugaugagaaagcagaagagagacgacagcgaccugaagagacugagagaccugaaccaggccgugaacaaccugguggagcugaagagcacccagcagaagagcgugcugagagugggcacccugaccagcgacgaccugcugacccuggccgccgaccuggagaagcugaagagcaaggugaucagaaccgagagaccccugagcagcggcguguacaugggcaaccugagcacccagcagcuggagcagagaagagcccugcugaacaugaucggcauggugggcggcgcccagggcacccagcccggcagagacggcguggugagagugugggacgugaagaaccccgaccugcugaacaaccaguucggcaccaugcccagccugacccuggccugccugaccaagcagggccagguggaccugaacgacguggugcuggcccugaccgaccugggccugaucuacaccgccaaguaccccaacagcagcgaccuggacagacugagccagagccaccccauccugaacaugguggacaccaagaagagcagccugaacaucagcggcuacaacuucagccugggcgccgccgugaaggccggcgccugcaugcuggacggcggcaacaugcuggagaccaucaaggugaccccccagaccauggacggcauccugaagagcauccugaaggugaagaagagccugggcauguucgugagcgacacccccggcgagagaaaccccuacgagaacauccuguacaagaucugccugagcggcgacggcuggcccuacaucgccagcagaaccagcaucgugggcagagccugggagaacaccaccguggaccuggagagcgacggcaagccccagaaggugggcaccgccggcagcaacaagagccugcagagcgccggcuuccccaccggccugaccuacagccagcugaugacccugaaggacagcaugaugcagcuggaccccagcgccaagaccuggaucgacaucgagggcagacccgaggaccccguggagaucgcccuguaccagcccaugagcggcugcuacauccacuucuucagagagcccaccgaccugaagcaguucaagcaggacgccaaguacagccacggcaucgacgugaccgaccuguuccccgcccagcccggccugaccagcgccgugaucgaggcccugcccagaaacauggugcugaccugccagggcagcgacgacaucaagagacugcuggacagccagggcagaagagacaucaagcugaucgacaucgcccugagcaaggccgacagcagaagauucgagaacgccgugugggaccagugcaaggaccugugccacaugcacaccggcguggugguggagaagaagaagagaggcggcaaggaggagaucaccccccacugcgcccugauggacugcaucauguacgacgccgccgugagcggcggccugaacauccccgugcugagagccgugcugcccagagacaugguguucagaaccagcagccccaagguggugcugugaggacuagucccuguucccagagcccacuuuuuuuucuuuuuuugaaauaaaauagccugucuuucagaucuaaaaaaaaaaaaaaaaaaaaaaaaaaaaaaaaaaaaaaaaaaaaaaaaaaaaaaaaaaaaaaaaugcaucccccccccccccccccccccccccccccccaaaggcucuuuucagagccaccagaauu

SEQ ID NO: 10234 - RNA, 2005 nt, Artificial Sequence
  mRNA product Design a-2 comprising derived and/or modified sequence from LASV(LASV254-NIG-2011;Clade II)__AIT17675__NP (opt4)
gggagaguccgcucagccagguugcagaagcggcuuagcguguguccuaaucuucucucugcguguagguaggccugugccgcaaacaagcuuaccaugagcgccagcaaggaggugaagagcuuccuguggacccagagccugagaagagagcugagcggcuacugcagcagcaucaagcugcagguggugaaggacgcccaggcccugcugcacggccuggacuucagcgaggugagcaacgugcagagacugaugagaaagcagaagagagacgacagcgaccugaagagacugagagaccugaaccaggccgugaacaaccugguggagcugaagagcacccagcagaagagcgugcugagagugggcacccugaccagcgacgaccugcugacccuggccgccgaccuggagaagcugaagagcaaggugaucagaaccgagagaccccugagcagcggcguguacaugggcaaccugagcacccagcagcuggagcagagaagagcccugcugaacaugaucggcauggugggcggcgcccagggcacccagcccggcagagacggcguggugagagugugggacgugaagaaccccgaccugcugaacaaccaguucggcaccaugcccagccugacccuggccugccugaccaagcagggccagguggaccugaacgacgccgugcuggcccugaccgaccugggccugaucuacaccgccaaguaccccaacagcagcgaccuggacagacugagccagagccaccccauccugaacaugguggacaccaagaagagcagccugaacaucagcggcuacaacuucagccugggcgccgccgugaaggccggcgccugcaugcuggacggcggcaacaugcuggagaccaucaaggugaccccccagaccauggacggcauccugaagagcauccugaaggugaagaagagccugggcauguucgugagcgacacccccggcgagagaaaccccuacgagaacauccuguacaagaucugccugagcggcgacggcuggcccuacaucgccagcagaaccagcaucgugggcagagccugggagaacaccaucguggaccuggagagcgacggcaagccccagaaggugggcaccgccggcagcaacaagagccugcagagcgccggcuuccccaccggccugaccuacagccagcugaugacccugaaggacagcaugaugcagcuggaccccagcgccaagaccuggaucgacaucgagggcagacccgaggaccccguggagaucgcccuguaccagcccaugagcggcugcuacauccacuucuucagagagcccaccgaccugaagcaguucaagcaggacgccaaguacagccacggcaucgacguggccgaccuguuccccgcccagcccggccugaccagcgccgugaucgaggcccugcccagaaacauggugcugaccugccagggcagcgacgacaucaagagacugcuggacagccagggcagaagagacaucaagcugaucgacaucgcccugagcaaggccgacagcagaagauucgagaacgccgugugggaccagugcaaggaccugugccacaugcacaccggcguggugguggagaagaagaagagaggcggcaaggaggagaucaccccccacugcgcccugauggacugcaucauguacgacgccgccgugagcggcggccugaacauccccgugcugagagccgugcugcccagagacaugguguucagaaccagcagccccaagguggugcugugaggacuagucccuguucccagagcccacuuuuuuuucuuuuuuugaaauaaaauagccugucuuucagaucuaaaaaaaaaaaaaaaaaaaaaaaaaaaaaaaaaaaaaaaaaaaaaaaaaaaaaaaaaaaaaaaaugcaucccccccccccccccccccccccccccccccaaaggcucuuuucagagccaccagaauu

SEQ ID NO: 10235 - RNA, 2005 nt, Artificial Sequence
  mRNA product Design a-2 comprising derived and/or modified sequence from LASV(Nig08-04;Clade II)__ADU56611__NP (opt4)
gggagaguccgcucagccagguugcagaagcggcuuagcguguguccuaaucuucucucugcguguagguaggccugugccgcaaacaagcuuaccaugagcgccagcaaggaggugaagagcuuccuguggacccagagccugagaagagagcugagcggcuacugcagcaacaucaagcugcagguggugaaggacgcccaggcccugcugcacggccuggacuucagcgaggugagcaacgugcagagacugaugagaaagcagaagagagacgacggcgaccugaagagacugagagaccugaaccaggccgugaacaaccugguggagcugaagagcacccagcagaagagcgugcugagagugggcacccugaccagcgacgaccugcugacccuggccgccgaccuggagaagcugaagagcaaggugaucagaaccgagagaccccugagcagcggcguguacaugggcaaccugagcacccagcagcuggagcagagaaaggcccugcugagcaugaucggcauggugggcggcgcccagggcacccagcccggcagagacggcguggugagagugugggacgugaagaaccccgaccugcugaacaaccaguucggcaccaugcccagccugacccuggccugccugaccaagcagggccagguggaccugaacgacgccgugcuggcccugaccgaccugggccugaucuacaccgccaaguaccccaacagcagcgaccuggacagacugagccagagccaccccauccugaacaugguggacaccaagaagagcagccugaacaucagcggcuacaacuucagccugggcgccgccgugaaggccggcgccugcaugcuggacggcggcaacaugcuggagaccaucaaggugaccccccagaccauggacggcauccugaagagcauccugaaggugaagagaagccugggcauguucgugagcgacacccccggcgagagaaaccccuacgagaacauccuguacaagaucugccugagcggcgacggcuggcccuacaucgccagcagaaccagcaucgugggcagagccugggagaacaccaccguggaccuggagagcgacggcaagccccagaaggugggcaccgccggcagcaacaagagccugcagagcgccggcuuccccaccggccugaccuacagccagcugaugacccugaaggacagcaugaugcagcuggaccccagcgccaagaccuggaucgacaucgagggcagacccgaggaccccguggagaucgcccuguaccagcccaugagcggcugcuacauccacuucuucagagagcccaccgaccugaagcaguucaagcaggacgccaaguacagccacggcaucgacgugaccgaccuguucagcgcccagcccggccugaccagcgccgugaucgaggcccugcccagaaacauggugcugaccugccagggcagcgacgacaucaagaagcugcuggacagccagggcagaagagacaucaagcugaucgacaucagccugaacaaggccgacagcagaagauucgagaacgccgugugggaccagugcaaggaccugugccacaugcacaccggcguggugguggagaagaagaagagaggcggcaaggaggagaucaccccccacugcgcccugauggacugcaucauguucgacgccgccgugagcggcggccugaacauccccauccugagagccgugcugcccagagacaugguguucagaaccagcagccccaagguggugcugugaggacuagucccuguucccagagcccacuuuuuuuucuuuuuuugaaauaaaauagccugucuuucagaucuaaaaaaaaaaaaaaaaaaaaaaaaaaaaaaaaaaaaaaaaaaaaaaaaaaaaaaaaaaaaaaaaugcaucccccccccccccccccccccccccccccccaaaggcucuuuucagagccaccagaauu

SEQ ID NO: 10236 - RNA, 2008 nt, Artificial Sequence
  mRNA product Design a-2 comprising derived and/or modified sequence from LASV(GA391;Clade III)__AAA46284__NP (opt4)
gggagaguccgcucagccagguugcagaagcggcuuagcguguguccuaaucuucucucugcguguagguaggccugugccgcaaacaagcuuaccaugagcgccagcaaggaggugagaagcugccuguggacccagagccugagaagagagcugagcggcuacugcagcaacaucaagcugcagguggugaaggacgcccaggcccugcugcacggccuggacuucagcgaggugagcaacgugcagagacugaugagaaagcagaagagagacgacggcgaccugaagagacugagagaccugaaccaggccgugaacaaccugguggagcugaagagcacccagcagaagagcgugcugagagugggcacccugagcagcgacgaccugcugauccuggccgccgaccuggagaagcugaagagcaaggugaccagaaccgagagaccccugagcagcggcguguacaugggcaaccugagcagccagcagcuggaccagagaagagcccugcugaacaugaucggcaugaccggcgugagcggcggcggcaagggcgccagcaacggcaucgugagagugugggacgugaagaacgccgagcugcugaacaaccaguucggcaccaugcccagccugacccuggccugccugaccaagcagggccagguggaccugaacgacgccgugcaggcccugaccgaccugggccugaucuacaccgccaaguaccccaacagcagcgaccuggacagacugagccagagccaccccauccugaacaugaucgacaccaagaagagcagccugaacaucagcggcuacaacuucagccugggcgccgccgugaaggccggcgccugcaugcuggacggcggcaacaugcuggagaccaucaaggugagcccccagaccauggacggcauccugaagagcauccugaaggugaagaagagccugggcauguucgugagcgacacccccggcgagagaaaccccuacgagaacauccuguacaagaucugccugagcggcgacggcuggagcuacaucgccagcagaaccagcaucgugggcagagccugggagaacaccgugguggaccuggagcaggacaacaagccccagaagaucggcaacggcggcagcaacaagagccugcagagcgccggcuucgccgccggccugaucuacagccagcugaugacccugaaggacuucaagugcuucaaccugauccccaacgccaagaccuggauggacaucgagggcagacccgaggaccccguggagaucgcccuguaccagcccagcagcggcugcuacgugcacuucuucagagagcccaccgaccugaagcaguucaagcaggacgccaaguacagccacggcagagacgugaccgaccuguucgccgcccagcccggccugaccagcgccgugaucgaggcccugcccagaaacauggugaucaccugccagggcagcgaggacaucagaaagcugcuggagagccagggcagaagagacaucaagcugaucgacaucacccugagcaaggccgacagcagaaaguucgagaacgccgugugggaccaguucaaggaccugugccacaugcacaccggcguggugguggagaagaagaagagaggcggcaaggaggagaucaccccccacugcgcccugauggacugcaucauguucgacgccgccgugagcggcggccuggacgccaaggugcugagaguggugcugcccagagacaugguguucagaaccagcacccccaagguggugcugugaggacuagucccuguucccagagcccacuuuuuuuucuuuuuuugaaauaaaauagccugucuuucagaucuaaaaaaaaaaaaaaaaaaaaaaaaaaaaaaaaaaaaaaaaaaaaaaaaaaaaaaaaaaaaaaaaugcaucccccccccccccccccccccccccccccccaaaggcucuuuucagagccaccagaauu

SEQ ID NO: 10237 - RNA, 2005 nt, Artificial Sequence
  mRNA product Design a-2 comprising derived and/or modified sequence from LASV(Nig08-A19;Clade III)__ADU56619__NP (opt4)
gggagaguccgcucagccagguugcagaagcggcuuagcguguguccuaaucuucucucugcguguagguaggccugugccgcaaacaagcuuaccaugagcgccagcaaggaggugaagagcuuccuguggacccagagccugagaagagagcugagcggcuacugcagcaacaucaagcugcagguggugaaggacgcccaggcccugcugcacggccuggacuucagcgaggugagcaacgugcagagacugaugagaaagcagaagagagacgacggcgaccugaagagacugagagaccugaaccaggccgugaacaaccugguggagcugaagagcacccagcagaagagcgugcugagagugggcacccugagcagcgacgaccugcuggugcuggccgccgaccuggagaagcugaagagcaagguggugagaaccgagagaccccugagcagcggcaucuacaugggcaaccugagcagccagcagcuggaccagagaaaggcccugcugaacaugaucggcaugaccggcggcaacggcggcagaaacaccaccagcgacggcaucgugagagugugggacgugaagaacgccgagcugcugaacaaccaguucggcaccaugcccagccugacccuggccugccugaccaagcagggccagguggaccugaacgacgccgugcaggcccugaccgaccugggccugaucuacaccgccaaguaccccaacagcagcgaccuggacagacuggcccagagccaccccauccugaacaugaucgacaccaagaagagcagccugaacaucagcggcuacaacuucagccugggcgccgccgugaaggccggcgccugcaugcuggacggcggcaacaugcuggagaccaucaaggugagcccccagaccauggacggcauccugaagagcauccugaaggugaagagaagccugggcauguucaucagcgacacccccggcgagagaaaccccuacgagaacauccuguacaagaucugccugagcggcgacggcuggcccuacaucgccagcagaaccagcaucgugggcagagccugggagaacaccgugguggaccuggagagcgacaacaagccccagaagaccggcaacggcggcagcaacaagagccugcagagcgccggcuucgccgccggccugaccuacagccagcugaugacccugaaggacagcaugcugcagcuggaccccaacgccaagaccuggauggacaucgagggcagacccgaggaccccguggagaucgcccuguaccagcccagcagcggcugcuacauccacuucuucagagagcccaccgaccugaagcaguucaagcaggacgccaaguacagccacggcaucgacgugaccgaccuguucgccgcccagcccggccugaccagcgccgugaucgaggcccugcccagaaacauggugaucaccugccagggcagcgaggacaucagaaagcugcuggagagccagggcagaagagacaucaagcugaucgacaucagccugagcaagguggacagcagaaaguucgagaacgccgugugggaccaguucaaggaccugugccacaugcacaccggcaucgugguggagaagaagaagagaggcggcaaggaggagaucaccccccacugcgcccugauggacugcaucauguucgacgccgccgugagcggcggcguggacgccaaggugcugagagccgugcugcccagagacaugguguucagaaccagcacccccaagguggugcugugaggacuagucccuguucccagagcccacuuuuuuuucuuuuuuugaaauaaaauagccugucuuucagaucuaaaaaaaaaaaaaaaaaaaaaaaaaaaaaaaaaaaaaaaaaaaaaaaaaaaaaaaaaaaaaaaaugcaucccccccccccccccccccccccccccccccaaaggcucuuuucagagccaccagaauu

SEQ ID NO: 10238 - RNA, 2005 nt, Artificial Sequence
  mRNA product Design a-2 comprising derived and/or modified sequence from LASV(G1180-SLE-2010;Clade IV)__AIT17169__NP (opt4)
gggagaguccgcucagccagguugcagaagcggcuuagcguguguccuaaucuucucucugcguguagguaggccugugccgcaaacaagcuuaccaugagcgccagcaaggagaucaagagcuuccuguggacccagagccugagaagagagcugagcggcuacugcagcaacaucaagcugcagguggugaaggacgcccaggcccugcugcacggccuggacuucagcgaggugagcaacgugcagagacugaugagaaaggagagaagagacgacaacgaccugaagagacugagagaccugaaccaggccgugaacaaccugguggagcugaagagcacccagcagaagagcauccugagagugggcacccugaccagcgacgaccugcugauccuggccgccgaccuggagaagcugaagagcaaggugaucagaaccgagagaccccugagcgccggcguguacaugggcaaccugagcagccagcagcuggaccagagaagagcccugcugagcaugaucggcaugagcagcggcaaccagagagcccaggccggcagagacggcguggugagagugugggacgugaagaacguggagcugcugaacaaccaguucggcaccaugcccagccugacccuggccugccugaccaagcagggccagguggaccugaacgacgccgugcaggcccugaccgaccugggccugaucuacaccgccaaguaccccaacaccagcgaccuggacagacugacccagagccaccccauccugaacaugaucgacaccaagaagagcagccugaacaucagcggcuacaacuucagccugggcgccgccgugaaggccggcgccugcaugcuggacggcggcaacaugcuggagaccaucaaggugagcccccagaccauggacggcauccugaagagcauccugaaggugaagaaggcccugggcauguucaucagcgacacccccggcgagagaaaccccuacgagaacauccuguacaagaucugccugagcggcgacggcuggcccuacaucgccagcagaaccagcaucaccggcagagccugggagaacaccgugguggaccuggagagcgacggcaagccccagaaggccggcagcaacaacagcaacaagagccugcagagcgugggcuucaccgccggccugaccuacagccagcugaugacccugaaggacgccaugcugcagcuggaccccaacgccaagaccuggauggacaucgagggcagacccgaggaccccguggagaucgcccuguaccagcccagcagcggcugcuacauccacuucuucagagagcccaccgaccugaagcaguucaagcaggacgccaaguacagccacggcaucgacgugaccgaccuguucgccgcccagcccggccugaccagcgccgugaucgacgcccugcccagaaacauggugaucaccugccagggcagcgacgacaucagaaagcugcuggagagccagggcagaaaggacaucaagcugaucgacaucgcccugagcaagaccgacagcagaaaguacgagaacgccgugugggaccaguacaaggaccugugccacaugcacaccggcguggugguggagaagaagaagagaggcggcaaggaggagaucaccccccacugcgcccugauggacugcaucauguucgacgccgccgugagcggcggccugaacaccagcgugcugagagccgugcugcccagagacaugguguucagaaccagcacccccagaguggugcugugaggacuagucccuguucccagagcccacuuuuuuuucuuuuuuugaaauaaaauagccugucuuucagaucuaaaaaaaaaaaaaaaaaaaaaaaaaaaaaaaaaaaaaaaaaaaaaaaaaaaaaaaaaaaaaaaaugcaucccccccccccccccccccccccccccccccaaaggcucuuuucagagccaccagaauu

SEQ ID NO: 10239 - RNA, 2005 nt, Artificial Sequence
  mRNA product Design a-2 comprising derived and/or modified sequence from LASV(G1442-SLE-2011;Clade IV)__AIT17181__NP (opt4)
gggagaguccgcucagccagguugcagaagcggcuuagcguguguccuaaucuucucucugcguguagguaggccugugccgcaaacaagcuuaccaugagcgccagcaaggaggugaagagcuuccuguggacccagagccugagaagagagcugagcggcuacugcagcaacaucaagcugcagguggugaaggacgcccaggcccugcugcacggccuggacuucagcgaggugagcaacgugcagagacugaugagaaagcagagaagagacgacaacgaccugaagagacugagagaccugaaccaggccgugaacaaccugguggagcugaagagcacccagcagaagagcgugcugagagugggcacccugaccagcgacgaccugcuggugcuggccgccgaccuggagaagcugaagagcaaggugaucagaaccgagagaccccugagcgccggcguguacaugggcaaccugagcagccagcagcuggaccagagaagagcccugcugaacaugaucggcaugagcggcggcauccagggcaccagaaccggcagagacggcguggugagagugugggacgugaagaacgccgaccugcugaacaaccaguucggcaccaugcccagccugacccuggccugccugaccaagcagggccagguggaccugaacgacguggugcaggcccugaccgaccugggccugaucuacaccgccaaguaccccaacgccagcgaccuggacagacugacccagagccaccccauccugaacaugaucgacaccaagaagagcagccugaacaucagcggcuacaacuucagccugggcgccgccgugaaggccggcgccugcaugcuggacggcggcaacaugcuggagaccaucaaggugagcccccagaccauggacggcauccugaagagcauccugaaggugaagaagacccugggcauguucaucagcgacacccccggcgagagaaaccccuacgagaacauccuguacaagaucugccugagcggcgacggcuggcccuacaucgccagcagaaccagcaucaccggcagagccugggagaacaccgugguggaccuggagagcgacggcaagccccagaaggccggcagcaacaacagcaacaagagccugcagagcgccggcuucgccgccggccugaccuacagccagcugaugacccugaaggacgccaugcugcagcuggaccccaacgccaagaccuggauggacaucgagggcagacccgaggaccccguggagaucgcccuguaccagcccagcagcggcugcuacauccacuucuucagagagcccaccgaccugaagcaguucaagcaggacgccaaguacagccacggcaucgacgugaccgaccuguucgccgcccagcccggccugaccagcgccgugaucgaggcccugcccagaaacauggugaucaccugccagggcagcgacgacaucaagaagcugcuggagagccagggcagaaaggacaucaagcugaucgacaucgcccugagcaagaccgacagcagaaaguacgagaacgccgugugggaccaguacaaggaccugugccacaugcacaccggcguggugguggagaagaagaagagaggcggcaaggaggagaucaccccccacugcgcccugauggacugcaucauguucgacgccgccgugagcggcggccugaacacccuggugcugagagccgugcugcccagagacaugguguucagaaccagcacccccagaguggugcugugaggacuagucccuguucccagagcccacuuuuuuuucuuuuuuugaaauaaaauagccugucuuucagaucuaaaaaaaaaaaaaaaaaaaaaaaaaaaaaaaaaaaaaaaaaaaaaaaaaaaaaaaaaaaaaaaaugcaucccccccccccccccccccccccccccccccaaaggcucuuuucagagccaccagaauu

SEQ ID NO: 10240 - RNA, 2005 nt, Artificial Sequence
  mRNA product Design a-2 comprising derived and/or modified sequence from LASV(G3010-SLE-2013;Clade IV)__AIT17345__NP (opt4)
gggagaguccgcucagccagguugcagaagcggcuuagcguguguccuaaucuucucucugcguguagguaggccugugccgcaaacaagcuuaccaugagcgccagcaaggagaucaagagcuuccuguggacccagagccugagaagagagcugagcggcuacugcagcaacaucaagcugcagguggugaaggacgcccaggcccugcugcacggccuggacuucagcgaggugagcaacgugcagagacugaugagaaaggagagaagagacgacaacgaccugaagagacugagagaccugaaccaggccgugaacaaccugguggagcugaagagcacccagcagaagagcauccugagagugggcacccugaccagcgacgaccugcugauccuggccgccgaccuggagaagcugaagagcaaggugaccagaaccgagagaccccugagcgccggcguguacaugggcaaccugagcagccagcagcuggaccagagaagagcccugcugagcaugaucggcaugagcagcggcgugcagggcgccagagccggcagagacggcguggugagagugugggacgugaagaacgccgagcugcugaacaaccaguucggcaccaugcccagccugacccuggccugccugaccaagcagggccagguggaccugaacgacguggugcaggcccugaccgaccugggccugaucuacaccgccaaguaccccaacaccagcgaccuggacagacugacccagagccaccccauccugaacaugaucgacaccaagaagagcagccugaacaucagcggcuacaacuucagccugggcgccgccgugaaggccggcgccugcaugcuggacggcggcaacaugcuggagaccaucaaggugagcccccagaccauggacggcauccugaagagcauccugaaggugaagaaggcccugggcauguucaucagcgagacccccggcgagagaaaccccuacgagaacauccuguacaagaucugccugagcggcgacggcuggcccuacaucgccagcagaaccagcaucaccggcagagccugggagaacaccgugguggaccuggagagcgacggcaagccccagaaggccggcagcaacaacagcaacaagagccugcagagcgccggcuucaccgccggccugaccuacagccagcugaugacccugaaggacgccaugcugcagcuggaccccaacgccaagaccuggauggacaucgagggcagacccgaggaccccguggagguggcccuguaccagcccagcagcggcugcuacauccacuucuucagagagcccaccgaccugaagcaguucaagcaggacgccaaguacagccacggcaucgacgugaccgaccuguucgccgcccagcccggccugaccagcgccgugaucgacgcccugcccagaaacauggugaucaccugccagggcagcgacgacaucaagaagcugcuggagagccagggcagaaaggacaucaagcugaucgacaucgcccugagcaagaccgacagcagaaaguacgagaacgccgugugggaccaguacaaggaccugugccacaugcacaccggcguggugguggagaagaagaagagaggcggcaaggaggagaucaccccccacugcgcccugauggacugcaucauguucgacgccgccgugagcggcggccugaacaccagcgugcugagagccgugcugcccagagacaugguguucagaaccagcacccccagaguggugcugugaggacuagucccuguucccagagcccacuuuuuuuucuuuuuuugaaauaaaauagccugucuuucagaucuaaaaaaaaaaaaaaaaaaaaaaaaaaaaaaaaaaaaaaaaaaaaaaaaaaaaaaaaaaaaaaaaugcaucccccccccccccccccccccccccccccccaaaggcucuuuucagagccaccagaauu

SEQ ID NO: 10241 - RNA, 2005 nt, Artificial Sequence
  mRNA product Design a-2 comprising derived and/or modified sequence from LASV(G502-SLE-2009;Clade IV)__AIT17127__NP (opt4)
gggagaguccgcucagccagguugcagaagcggcuuagcguguguccuaaucuucucucugcguguagguaggccugugccgcaaacaagcuuaccaugagcgccagcaaggagaucaagagcuuccuguggacccagagccugagaagagagcugagcggcuacugcagcaacaucaagcugcagguggugaaggacgcccaggcccugcugcacggccuggacuucagcgaggugagcaacgugcagagacugaugagaaaggagagaagagacgacaacgaccugaagagacugagagaccugaaccaggccgugaacaaccugguggagcugaagagcacccagcagaagagcauccugagagugggcacccugaccagcgacgaccugcugauccuggccgccgaccuggagaagcugaagagcaaggugaucagaaccgagagaccccugagcgccggcguguacaugggcaaccugagcagccagcagcuggaccagagaagagcccugcugagcaugaucggcaugagcggcggcaaccagggcgugagagccggcaaggacggcguggugagagugugggacgugaagaacgccgagcugcugaacaaccaguucggcaccaugcccagccugacccuggccugccugaccaagcagggccagguggaccugaacgacgccgugcaggcccugaccgaccugggccugaucuacaccgccaaguaccccaacaccagcgaccuggacagacugacccagagccaccccauccugaacaugaucgacaccaagaagagcagccugaacaucagcggcuacaacuucagccugggcgccgccgugaaggccggcgccugcaugcuggacggcggcaacaugcuggagaccaucaaggugagcccccagaccauggacggcauccugaagagcauccugaaggugaagaaggcccugggcauguucaucagcgacacccccggcgagagaaaccccuacgagaacauccuguacaagaucugccugagcggcgacggcuggcccuacaucgccagcagaaccagcaucaccggcagagccugggagaacaccgugguggaccuggagagcgacggcaagccccagaaggccggcagcaacaacagcaacaagagccugcagagcgccggcuucaccgccggccugaccuacagccagcugaugacccugaaggacgccaugcugcagcuggaccccaacaccaagaccuggauggacaucgagggcagacccgaggaccccguggagaucgcccuguaccagcccagcagcggcugcuacauccacuucuucagagagcccaccgaccugaagcaguucaagcaggacgccaaguacagccacggcaucgacgugaccgaccuguucgccgcccagcccggccugaccagcgccgugaucgacgcccugcccagaaacauggugaucaccugccagggcagcgacgacaucagaaagcugcuggagagccagggcagaaaggacaucaagcugaucgacaucgcccugaacaagaccgacagcagaaaguacgagaacgccgugugggaccaguacaaggaccugugccacaugcacaccggcguggugguggagaagaagaagagaggcggcaaggaggagaucaccccccacugcgcccugauggacugcaucauguucgacgccgccgugagcggcggccugaacaccagcgugcugagagccgugcugcccagagacaugguguucagaaccagcacccccagaguggugcugugaggacuagucccuguucccagagcccacuuuuuuuucuuuuuuugaaauaaaauagccugucuuucagaucuaaaaaaaaaaaaaaaaaaaaaaaaaaaaaaaaaaaaaaaaaaaaaaaaaaaaaaaaaaaaaaaaugcaucccccccccccccccccccccccccccccccaaaggcucuuuucagagccaccagaauu

SEQ ID NO: 10242 - RNA, 2005 nt, Artificial Sequence
  mRNA product Design a-2 comprising derived and/or modified sequence from LASV(G733-SLE-2010;Clade IV)__AIT17155__NP (opt4)
gggagaguccgcucagccagguugcagaagcggcuuagcguguguccuaaucuucucucugcguguagguaggccugugccgcaaacaagcuuaccaugagcgccagcaaggagaucaagagcuuccuguggacccagagccugagaagagagcugagcggcuacugcagcaacaucaagcugcagguggugaaggacgcccaggcccugcugcacggccuggacuucagcgaggugagcaacgugcagagacugaugagaaaggagagaagagacgacaacgaccugaagagacugagagaccugaaccaggccgugaacaaccugguggagcugaagagcacccagcagaagagcgugcugagagugggcacccugaccagcgacgagcugcuggugcuggccgccgaccuggagaagcugaagagcaaggugaucagaaccgagagaccccugagcgccggcguguacaugggcaaccugagcagccagcagcuggaccagagaagagcccugcugagcaugaucggcaugagcggcggcaaccagggcgccagaaccggcagagacggcguggugagagugugggacgugaagaacgccgagcugcugaacaaccaguucggcaccaugcccagccugacccuggccugccugaccaagcagggccagguggaccugaacgacgccgugcaggcccugaccgaccugggccugaucuacaccgccaaguaccccaacaccagcgaccuggacagacugacccagagccaccccauccugaacaugaucgacaccaagaagagcagccugaacaucagcggcuacaacuucagccugggcgccgccgugaaggccggcgccugcaugcuggacggcggcaacaugcuggagaccaucaaggugagcccccagaccauggacggcauccugaagagcauccugaaggugaagaaggcccugggcauguucaucagcgacacccccggcgagagaaaccccuacgagaacauccuguacaagaucugccugagcggcgacggcuggcccuacaucgccagcagaaccagcaucaccggcagagccugggagaacaccgugguggaccuggagagcgacggcaagccccagaaggccggcagcaacaacagcaacaagagccugcagagcgccggcuucaccgccggccugaccuacagccagcugaugacccugaaggacgccaugcugcagcuggaccccaacgccaagaccuggauggacaucgagggcagacccgaggaccccguggagaucgcccuguaccagcccagcagcggcugcuacauccacuucuucagagagcccaccgaccugaagcaguucaagcaggacgccaaguacagccacggcaucgacgugaccgaccuguucgccgcccagcccggccugaccagcgccgugaucgacgcccugcccagaaacauggugaucaccugccagggcagcgacgacaucagaaagcugcuggagagccagggcagaaaggacaucaagcugaucgacaucgcccugagcaagaucgacagcagaaaguacgagaacgccgugugggaccaguacaaggaccugugccacaugcacaccggcguggugguggagaagaagaagagaggcggcaaggaggagaucaccccccacugcgcccugauggacugcaucauguucgacgccgccgugagcggcggccugaacagccuggugcugagagccgugcugcccagagacaugguguucagaaccagcacccccagaguggugcugugaggacuagucccuguucccagagcccacuuuuuuuucuuuuuuugaaauaaaauagccugucuuucagaucuaaaaaaaaaaaaaaaaaaaaaaaaaaaaaaaaaaaaaaaaaaaaaaaaaaaaaaaaaaaaaaaaugcaucccccccccccccccccccccccccccccccaaaggcucuuuucagagccaccagaauu

SEQ ID NO: 10243 - RNA, 2005 nt, Artificial Sequence
  mRNA product Design a-2 comprising derived and/or modified sequence from MOPV/LASV reassortant(IGS-1;Clade IV)__AFY05578__NP (opt4)
gggagaguccgcucagccagguugcagaagcggcuuagcguguguccuaaucuucucucugcguguagguaggccugugccgcaaacaagcuuaccaugagcgccagcaaggagaucaagagcuuccuguggacccagagccugagaagagagcugagcggcuacugcagcaacaucaagcugcagguggugaaggacgcccaggcccugcugcacggccuggacuucagcgaggugagcaacgugcagagacugaugagaaaggagagaagagacgacaacgaccugaagagacugagagaccugaaccaggccgugaacaaccugguggagcugaagagcacccagcagaagagcauccugagagugggcacccugaccagcgacgaccugcugauccuggccgccgaccuggagaagcugagaagcaaggugaucagaaccgagagaccccugagcgccggcguguacaugggcaaccugagcagccagcagcuggaccagagaagagcccugcugaacaugaucggcaugagcggcggcaaccagggcgccagagccggcagagacggcguggugagagugugggacgugaagaacgccgagcugcugagcaaccaguucggcaccaugcccagccugacccuggccugccugaccaagcagggccagguggaccugaacgacgccgugcaggcccugaccgaccugggccugaucuacaccgccaaguaccccaacaccagcgaccuggacagacugacccagagccaccccauccugaacaugaucgacaccaagaagagcagccugaacaucagcggcuacaacuucagccugggcgccgccgugaaggccggcgccugcaugcuggacggcggcaacaugcuggagaccaucaaggugagcccccagaccauggacggcauccugaagagcauccugaaggugaagaaggcccugggcauguucaucagcgacacccccggcgagagaaaccccuacgagaacauccuguacaagaucugccugagcggcgacggcuggcccuacaucgccagcagaaccagcaucaccggcagagccugggagaacaccgugguggaccuggagagcgacggcaagccccagaaggccgacagcaacaacagcagcaagagccugcagagcgccggcuucaccgccggccugaccuacagccagcugaugacccugaaggacgccaugcugcagcuggaccccaacgccaagaccuggauggacaucgagggcagacccgaggaccccguggagaucgcccuguaccagcccagcagcggcugcuacauccacuucuucagagagcccaccgaccugaagcaguucaagcaggacgccaaguacagccacggcaucgacgugaccgaccuguucgccacccagcccggccugaccagcgccgugaucgacgcccugcccagaaacauggugaucaccugccagggcagcgacgacaucagaaagcugcuggagagccagggcagaaaggacaucaagcugaucgacaucgaccugagcaagaccgacagcagaaaguacgagaacgccgugugggaccaguacaaggaccugugccacaugcacaccggcguggugguggagaagaagaagagaggcggcaaggaggagaucaccccccacugcgcccugauggacugcaucauguucgacgccgccgugagcggcggccugaacaccagcgugcugagagccgugcugcccagagacaugguguucagaaccagcacccccagaguggugcugugaggacuagucccuguucccagagcccacuuuuuuuucuuuuuuugaaauaaaauagccugucuuucagaucuaaaaaaaaaaaaaaaaaaaaaaaaaaaaaaaaaaaaaaaaaaaaaaaaaaaaaaaaaaaaaaaaugcaucccccccccccccccccccccccccccccccaaaggcucuuuucagagccaccagaauu

SEQ ID NO: 10244 - RNA, 2005 nt, Artificial Sequence
  mRNA product Design a-2 comprising derived and/or modified sequence from LASV(LM765-SLE-2012;Clade IV)__AIT17815__NP (opt4)
gggagaguccgcucagccagguugcagaagcggcuuagcguguguccuaaucuucucucugcguguagguaggccugugccgcaaacaagcuuaccaugagcgccagcaaggagaucaagagcuuccuguggacccagagccugagaagagagcugagcggcuacugcagcaacaucaagcugcagguggugaaggacgcccaggcccugcugcacggccuggacuucagcgaggugagcaacgugcagagacugaugagaaaggagagaagagacgacaacgaccugaagagacugagagaccugaaccaggccgugaacaaccugguggagcugaagagcacccagcagaagagcauccugagagugggcacccugaccagcgacgaccugcugauccuggccgccgaccuggagaagcugaagagcaaggugaccagaaccgagagaccccugagcgccggcguguacaugggcaaccugagcagccagcagcuggaccagagaagagcccugcuggacaugaucggcaugagcggcagcaaccagggcgccagagccggcagagacggcguggugagagugugggacgugaagaacgccgagcugcugaacaaccaguucggcaccaugcccagccugacccuggccugccugaccaagcagggccagguggaccugaacgacgccgugcaggcccugaccgaccugggccugaucuacaccgccaaguaccccaacaccagcgaccuggacagacugacccagagccaccccauccugaacaugaucgacaccaagaagagcagccugaacaucagcggcuacaacuucagccugggcgccgccgugaaggccggcgccugcaugcuggacggcggcaacaugcuggagaccaucaaggugagcccccagaccauggacggcauccugaagagcauccugaaggugaagaaggcccugggcauguucaucagcgacgcccccggcgagagaaaccccuacgagaacauccuguacaagaucugccugagcggcgacggcuggcccuacaucgccagcagaaccagcaucaccggcagagccugggagaacaccgugguggaccuggagagcgacggcaagccccagaaggccggcagcaacggcagcaacaagagccugcagagcgccggcuucaccgccggccugaccuacagccagcugaugacccugaaggacgccaugcugcagcuggaccccaacgccaagaccuggauggacaucgagggcagacccgaggaccccguggagaucgcccuguaccagcccagcagcggcugcuacauccacuucuucagagagcccaccgaccugaagcaguucaagcaggacgccaaguacagccacggcaucgacgugaccgaccuguucgccgcccagcccggccugaccagcgccgugaucgacgcccugcccagaaacauggugaucaccugccagggcagcgacgacaucagaaagcuguucgagagccagggcagaaaggacaucaagcugaucgacaucgcccugagcaagaccgacagcagaaaguacgagaacgccgugugggaccaguacaaggaccugugccacaugcacaccggcaucgugguggagaagaagaagagaggcggcaaggaggagaucaccccccacugcgcccugauggacugcaucauguucgacgccgccgugagcggcggccugaacaccagcgugcugagagccgugcugcccagagacaugguguucagaaccagcacccccagaguggugcugugaggacuagucccuguucccagagcccacuuuuuuuucuuuuuuugaaauaaaauagccugucuuucagaucuaaaaaaaaaaaaaaaaaaaaaaaaaaaaaaaaaaaaaaaaaaaaaaaaaaaaaaaaaaaaaaaaugcaucccccccccccccccccccccccccccccccaaaggcucuuuucagagccaccagaauu

SEQ ID NO: 10245 - RNA, 2005 nt, Artificial Sequence
  mRNA product Design a-2 comprising derived and/or modified sequence from LASV(LM776-SLE-2012;Clade IV)__AIT17825__NP (opt4)
gggagaguccgcucagccagguugcagaagcggcuuagcguguguccuaaucuucucucugcguguagguaggccugugccgcaaacaagcuuaccaugagcgccagcaaggagaucaagagcuuccuguggacccagagccugagaagagagcugagcagcuacugcagcaacaucaagcugcagguggugaaggacgcccaggcccugcugcacggccuggacuucagcgaggugagcaacgugcagagacugaugagaaaggagagaagagacgacaacgaccugaagagacugagagaccugaaccaggccgugaacaaccugguggagcugaagagcacccagcagaagagcauccugagagugggcacccugaccagcgacgaccugcugauccuggccgccgaccuggagaagcugaagagcaaggugaccagaaccgagagaccccugagcgccggcguguacaugggcaaccugagcagccagcagcuggaccagagaagagcccugcugagcaugaucggcaugagcggcagcaaccagggcgccagagccggcagagacggcguggugagagugugggacgugaagaacgccgagcugcugaacaaccaguucggcaccaugcccagccugacccuggccugccugaccaagcagggccagguggaccugaacgacgccgugcaggcccugaccgaccugggccugaucuacaccgccaaguaccccaacaccagcgaccuggacagacugacccagagccaccccauccugaacaugaucgacaccaagaagagcagccugaacaucagcggcuacaacuucagccugggcgccgccgugaaggccggcgccugcaugcuggacggcggcaacaugcuggagaccaucaaggugagcccccagaccauggacggcauccugaagagcauccugaaggugaagaaggcccugggcauguucaucagcgacacccccggcgagagaaaccccuacgagaacauccuguacaagaucugccugagcggcgacggcuggcccuacaucgccagcagaaccagcaucaccggcagagccugggagaacaccgugguggaccuggagagcgacggcaagccccagaaggccggcagcaacaacagcaacaagagccugcagagcgccggcuucaccgccggccugaccuacagccagcugaugacccugaaggacgccaugcugcagcuggaccccaacgccaagaccuggauggacaucgagggcagacccgaggaccccguggagguggcccuguaccagcccagcagcggcugcuacauccacuucuucagagagcccaccgaccugaagcaguucaagcaggacgccaaguacagccacggcaucgacgugaccgaccuguucgccgcccagcccggccugaccagcgccgugaucgacgcccugcccagaaacauggugaucaccugccagggcagcgacgacaucagaaagcugcuggagagccagggcagaaaggacaucaagcugaucgacaucgcccugagcaagaccgacagcagaaaguacgagaacgccgugugggaccaguacaaggaccugugccacaugcacaccggcguggugguggagaagaagaagagaggcggcaaggaggagaucaccccccacugcgcccugauggacugcaucauguucgacgccgccgugagcggcggccugaacaccagcgugcugagagccgugcugcccagagacaugguguucagaaccagcacccccagaguggugcugugaggacuagucccuguucccagagcccacuuuuuuuucuuuuuuugaaauaaaauagccugucuuucagaucuaaaaaaaaaaaaaaaaaaaaaaaaaaaaaaaaaaaaaaaaaaaaaaaaaaaaaaaaaaaaaaaaugcaucccccccccccccccccccccccccccccccaaaggcucuuuucagagccaccagaauu

SEQ ID NO: 10246 - RNA, 2005 nt, Artificial Sequence
  mRNA product Design a-2 comprising derived and/or modified sequence from LASV(Mad39;Clade IV)__ANH09723__NP (opt4)
gggagaguccgcucagccagguugcagaagcggcuuagcguguguccuaaucuucucucugcguguagguaggccugugccgcaaacaagcuuaccaugagcgccagcaaggagaucaagagcuuccuguggacccagagccugagaagagagcugagcggcuacugcagcaacaucaagcugcagguggugaaggacgcccaggcccugcugcacggccuggacuucagcgaggugagcaacgugcagagacugaugagaaagcagagaagagacgacaacgaccugaagagacugagagaccugaaccaggccgugaacaaccugguggagcugaagagcacccagcagaagagcgugcugagagugggcacccugaccagcgacgaccugcugacccuggccgccgaccuggagaagcugaagagcaaggugaccagaaccgagagaccccugaccgccggcguguacaugggcaaccugagcagccagcagcuggaccagagaagagcccugcugaacaugaucggcaugagcggcggcaaccagggcgccagaaccggcagagacggcguggugagagugugggacgugaagaacgccgagcugcugaacaaccaguucggcaccaugcccagccugacccuggccugccugaccaagcagggccagguggaccugaacgacguggugcaggcccugaccgaccugggccugaucuacaccgccaaguaccccaacaccagcgaccuggacagacugacccagagccaccccauccugaacaugaucgacaccaacaagagcagccugaacaucagcggcuacaacuucagccugggcgccgccgugaaggccggcgccugcaugcuggacggcggcaacaugcuggagaccaucaaggugagcccccagaccauggacggcauccugaagagcauccugaaggugaagaagagccugggcauguucaucagcgacacccccggcgagagaaaccccuacgagaacauccuguacaagaucugccugagcggcgacggcuggcccuacaucgccagcagaaccagcaucaccggcagagccugggagaacaccgugguggaccuggagagcggcggcaagccccagaaggccggcagcaacaacagcaacaagagccugcagagcgccggcuucgccgccggccugaccuacagccagcugaugacccugaaggacgccaugcugcagcuggaccccaacgccaagaccuggauggacaucgagggcagacccgaggaccccguggagaucgcccuguaccagcccaucagcggcugcuacauccacuucuucagagagcccaccgaccugaagcaguucaagcaggacgccaaguacagccacggcaucgacgugaccgaccuguucgccgcccagcccggccugaccagcgccgugaucgaggcccugcccagaaacauggugaucaccugccagggcagcgacgacaucagaaagcuguucgagagccagggcagaaaggacaucaagcugaucgacaucgcccugagcaagaccgacagcagaaaguacgagaacgccgugugggaccaguacaaggaccugugccacaugcacaccggcguggugguggagaagaagaagaagggcggcaaggaggagaucaccccccacugcgcccugauggacugcaucauguucgacgccgccgugagcggcggccugaacacccuggugcugagagccgugcugcccagagacaugguguucagaaccagcacccccaagguggugcugugaggacuagucccuguucccagagcccacuuuuuuuucuuuuuuugaaauaaaauagccugucuuucagaucuaaaaaaaaaaaaaaaaaaaaaaaaaaaaaaaaaaaaaaaaaaaaaaaaaaaaaaaaaaaaaaaaugcaucccccccccccccccccccccccccccccccaaaggcucuuuucagagccaccagaauu

SEQ ID NO: 10247 - RNA, 2005 nt, Artificial Sequence
  mRNA product Design a-2 comprising derived and/or modified sequence from LASV(Z0947-SLE-2011;Clade IV)__AIT17841__NP (opt4)
gggagaguccgcucagccagguugcagaagcggcuuagcguguguccuaaucuucucucugcguguagguaggccugugccgcaaacaagcuuaccaugagcgccagcaaggagaucaagagcuuccuguggacccagagccugagaagagagcugagcggcuacugcagcaacaucaagcugcagguggugaaggacgcccaggcccugcugcacggccuggacuucagcgaggugagcaacgugcagagacugaugagaaaggagagaagagacgacaacgaccugaagagacugagagaccugaaccaggccgugaacaaccugguggagcugaagagcacccagcagaagagcauccugagagugggcacccugaccagcgacgaccugcugauccuggccgccgaccuggagaagcugaagagcaaggugaccagaaccgagagaccccugagcgccggcguguacaugggcaaccugagcagccagcagcuggaccagagaagagcccugcugaacaugaucggcaugagcggcagcaaccagggcgccagaaccggcagagacggcguggugagagugugggacgugaagaacgccgagcugcugaacaaccaguucggcaccaugcccagccugacccuggccugccugaccaagcagggccagguggaccugaacgacgccgugcaggcccugaccgaccugggccugaucuacaccgccaaguaccccaacaccagcgaccuggacagacugacccagagccaccccauccugaacaugaucgacaccaagaagagcagccugaacaucagcggcuacaacuucagccugggcgccgccgugaaggccggcgccugcaugcuggacggcggcaacaugcuggagaccaucaaggugagcccccagaccauggacggcauccugaagagcauccugaaggugaagaaggcccugggcauguucaucagcgacgcccccggcgagagaaaccccuacgagaacauccuguacaagaucugccugagcggcgacggcuggcccuacaucgccagcagaaccagcaucaccggcagagccugggagaacaccgugguggaccuggagagcgacggcaagccccagaaggccggcagcaacggcagcaacaagagccugcagagcgccggcuucaccgccggccugaccuacagccagcugaugacccugaaggacgccaugcugcagcuggaccccaacgccaagaccuggauggacaucgagggcagacccgaggaccccguggagaucgcccuguaccagcccagcagcggcugcuacauccacuucuucagagagcccaccgaccugaagcaguucaagcaggacgccaaguacagccacggcaucgacgugaccgaccuguucgccgcccagcccggccugaccagcgccgugaucgacgcccugcccagaaacauggugaucaccugccagggcagcgacgacaucagaaagcuguucgagagccagggcagaaaggacaucaagcugaucgacaucgcccugagcaagaccgacagcagaaaguacgagaacgccgugugggaccaguacaaggaccugugccacaugcacaccggcaucgugguggagaagaagaagagaggcggcaaggaggagaucaccccccacugcgcccugauggacugcaucauguucgacgccgccgugagcggcggccugaacaccagcgugcugagagccgugcugcccagagacaugguguucagaaccagcacccccagaguggugcugugaggacuagucccuguucccagagcccacuuuuuuuucuuuuuuugaaauaaaauagccugucuuucagaucuaaaaaaaaaaaaaaaaaaaaaaaaaaaaaaaaaaaaaaaaaaaaaaaaaaaaaaaaaaaaaaaaugcaucccccccccccccccccccccccccccccccaaaggcucuuuucagagccaccagaauu

SEQ ID NO: 10248 - RNA, 2005 nt, Artificial Sequence
  mRNA product Design a-2 comprising derived and/or modified sequence from LASV(Josiah;Clade IV)__NP_694869__NP (opt5)
gggagaguccgcucagccagguugcagaagcggcuuagcguguguccuaaucuucucucugcguguagguaggccugugccgcaaacaagcuuaccaugagcgccuccaaggagaucaaaucuuuccuguggacccagagccucagacgggaacuguccggcuacugcucuaacauuaagcugcaaguggucaaagacgcucaggcccugcuccacgggcuggauuuuagcgagguuuccaaugugcagcgccuuaugagaaaggaacggcgcgacgauaacgaccugaaaagacuccgggaucugaaucaggcggugaacaaucuggucgagcucaagucuacacaacaaaagagcauccugcgcgugggaacgcuuaccuccgacgaucugcucauucuggcugccgaccuugaaaaacuuaagagcaaaguuaucagaacagagcggccccucucugccggcguguauauggggaaccuguccagccagcagcuggaucagcgcagagcucuccugaauaugauuggaaugucuggcgggaaccagggagcccgggcuggccgcgacggcgucgugagaguuugggaugugaagaaugccgagcuucugaacaaucaguucgggaccaugccuucccucacacuggcgugucuuaccaaacagggacaagucgaccugaacgaugccgugcaggcucucacagaccugggccugaucuacaccgccaaguauccgaauacgagcgaccucgaucggcugacccagucucaucccauccuuaacaugauugacacaaagaaauccagccugaauaucuccggguacaacuuuucucucggagcugccgugaaggcgggcgccugcaugcuggaugggggaaacaugcuugaaaccauuaaagucagcccucaaacaauggacggcauccugaaguccauucucaaaguuaagaaagcucugggcauguucaucagcgauacccccggggagcgcaauccuuaugaaaacauucuguacaagaucugucucucuggagacggcuggcccuauaucgccuccagaacgagcauuacagggcgggcuugggagaauaccgugguggaucuggagucugacggaaagccucagaaagccgauagcaacaauuccucuaagagccuucaguccgccggcuuuacagcugggcugaccuacagccagcucaugacccugaaagacgcgaugcugcaacuugauccgaacgccaagacauggauggacaucgaaggaagacccgaggacccugucgaaauugcucucuaccagcccucuuccggcugcuauauccacuucuuucgcgagccuacggaucugaaacaguucaagcaggacgccaaguacagccauggcauugaugugaccgaccuguuugccacacaacccgggcucaccucugcuguuaucgaugcccugccgcggaauauggugaucacaugucagggauccgacgauauuagaaaacuucuggaaagccagggccgcaaggacaucaaacucauugauaucgcgcuguccaagaccgacucucggaaauaugagaacgcugucugggaucaguacaaggaccugugccacaugcauacgggggugguuguggagaagaaaaagagaggaggcaaagaagagauuacaccucacugugcccuuauggauugcaucauguucgacgccgcugucagcgggggccucaauaccuccgugcugcgcgccguccugccccgggacaugguguuuagaaccucuacaccucgcguugugcucugaggacuagucccuguucccagagcccacuuuuuuuucuuuuuuugaaauaaaauagccugucuuucagaucuaaaaaaaaaaaaaaaaaaaaaaaaaaaaaaaaaaaaaaaaaaaaaaaaaaaaaaaaaaaaaaaaugcaucccccccccccccccccccccccccccccccaaaggcucuuuucagagccaccagaauu

SEQ ID NO: 10249 - RNA, 2005 nt, Artificial Sequence
  mRNA product Design a-2 comprising derived and/or modified sequence from LASV(LP;Clade I)__AAF86702__NP (opt5)
gggagaguccgcucagccagguugcagaagcggcuuagcguguguccuaaucuucucucugcguguagguaggccugugccgcaaacaagcuuaccaugagcaacuccaaggagaucaaaucuuuccuguggacccagagccucagacgggaacuguccggcuacugcucuaauauuaagcuccaaguggucaaagacgcccaggcucugcuccacgggcuggauuuuagcgagguuuccaacgugcagcgccuuaugagaaagcagaaacgggacgaugccgaccugaagcgccucagagaucugaaucaagcggugaacaaucuggucgaacucaagucuacacagcagaaaaacgugcugcggguuggaacgcuuagcuccgacgaucugaucacccucgcugccgaccuggagaaacuuaaaagcaaggugauucgcacagaaagaccccugucuuccggcgucuauauggggaaucucagcucucagcaacuggaucagcggcgcgcccugcucuccaugaucggaaugagcggcgggccucagggaaacagaaccggcggcgacggggugguucgggugugggaugucaaaaaugcugagcugcuuaacaaucaguucggaacaaugccgucucugacccucgccugucugacaaagcaaggccagguggaccuuaacgaugcugugcaggcccugaccgaccucgggcugauuuacacggcgaaguaucccaauuccagcgaccuggauaugcucacccaaucccauccuauccugggaauggucgacacaaagaagucuagccuuaacaucuccggcuacaauuuuagccugggggccgcuguuaaagccggagcuugcaugcucgauggcggcaacaugcuggagaccauuaaggugucuccccagacaauggacgggauccuuaaauccauucugaaggugaaacgcagccucggaauguucaucucugauaccccuggcgaaagaaaccccuaugagaauauucuguacaagaucugucugagcggggaaggauggccuuauauugccucccggacgucuaucacaggccgcgcgugggagaacacccucgucgaccuggagagcgauaauaagccgcccaaacuuaacuccgccgggagcaauaagucucugcaggcugccggacucaacgcuggccugacauacucccagcugaugacccuuaaagacugcaugcuccaacuggauccuagcucuaagaccuggaucgacauugaaggcagacccgaggauccuguggaaaucgcccuguuucagcccuccagcggguguuacauucacuucuuucgggagccgacagaccucaaacaguucaagcaggacgccaaguauucccauggaaucgauguuacggaccuguuuucuacccaaccuggccuuacaagcgcugugauugaagcgcugcccagaaauaugguccuuaccugccagggguccgaugacaucaaaaagcugcuggagucucagggacgccgggauaucaaacuuauugacaucagccucuccaaggccgauagcagaaaauucgagaacgcugugugggaccaguacaaggaucugugucacaugcauacaggcguuguggucgaaaagaaaaagcgcgggggcaaagaggaaauuaccccucacugcgcccugcucgacuguaucauguuugaugccgcuacgacaggaucucugaauauuaccacccuucgggccgugcugcccagagacauggucuuccgcacauccacccccaaggugguucucugaggacuagucccuguucccagagcccacuuuuuuuucuuuuuuugaaauaaaauagccugucuuucagaucuaaaaaaaaaaaaaaaaaaaaaaaaaaaaaaaaaaaaaaaaaaaaaaaaaaaaaaaaaaaaaaaaugcaucccccccccccccccccccccccccccccccaaaggcucuuuucagagccaccagaauu

SEQ ID NO: 10250 - RNA, 2005 nt, Artificial Sequence
  mRNA product Design a-2 comprising derived and/or modified sequence from LASV(803213;Clade II)__AAF86704__NP (opt5)
gggagaguccgcucagccagguugcagaagcggcuuagcguguguccuaaucuucucucugcguguagguaggccugugccgcaaacaagcuuaccaugagcgccuccaaggaggugaaaucuuuccuguggacccagagccucagacgggaacuguccggcuacugcucuaacaucaaacuucaagucguuaaggacgcucaggcccugcuccacgggcuggauuuuagcgaggugaauaacgugcagcgccuuaugagaaagcagaaacgggacgauggagaccugaagcgccucagagaucugaaucaagcggucaacaaucugguggaacucaaguccacacagcagaaaucuauucugcggguuggcacgcuuaccagcgacgaucugcucacacuggcugccgaccuugagaagcugaaauccaaggugauccgcaccgaaagaccccucagcucuggggucuauaugggaaaccuguccacacagcaacuggagcagcggcgcgcccuccugaauaugauuggcauggugggaggagcucagggcacccagccuggcagagaugggguugugcgggucugggacgugaaaaacccggaucuucugaauaaccaauucggaacaaugcccagccucacccuggccugucuuacgaagcagggccagguggaccugaaugaugcuguccucgcccugaccgaccuggggcucaucuacacagcgaaguauccuaacucuuccgaccuggaucgccuuagccaaucucaucccauucugaauaugguugacaccaaaaaguccagccucaacaucuccggauacaauuuuucucugggcgccgcugugaaagccggggcuugcaugcuugauggaggcaacaugcuggagacaaucaaggugaccccucagacgauggacggcauucucaaaagcauccugaaggucaaaagaucccuggggauguucgugagcgauacacccggagaacggaacccuuaugagaauauucucuacaagaucugucugucuggcgacggguggccguauauugccucccgcaccagcaucguugggagagcgugggaaaacacaaccguggaucuugagucugacggcaagccccagaaagucgggaccgccggaagcaauaagucccugcagucugcuggcuuuccuacaggccucacguacagccaacugaugacccugaaagauuccaugaugcagcuugaccccagcgccaagacauggauugauaucgaggggcggccugaagaccccguggagaucgcucucuaccagccgaugucuggaugcuauauucacuucuuuagagaaccuaccgaccugaaacaguucaagcaagaugccaaguacucccauggcaucgacguugccgaucuguuucccgcucagccugggcucacaagcgcggugauugaggcccugccccgcaacaugguccuuaccugucagggaucugacgauaucaaaaagcugcucgacucccagggccggagagauauuaaacugaucgacaucagccuguccaagguggauucucgcaaauucgaaaaugcugucugggaccaaugcaaggaucuuugucacaugcauacgggggugguuguggagaagaaaaagcggggcggaaaagaggaaauuacaccccacugcgcccucauggacuguaucauguuugaugccgcugucagcggcgggcugaacauuccugugcugagagccguucucccgcgcgacaugguguuccggaccuccucucccaaggucgugcugugaggacuagucccuguucccagagcccacuuuuuuuucuuuuuuugaaauaaaauagccugucuuucagaucuaaaaaaaaaaaaaaaaaaaaaaaaaaaaaaaaaaaaaaaaaaaaaaaaaaaaaaaaaaaaaaaaugcaucccccccccccccccccccccccccccccccaaaggcucuuuucagagccaccagaauu

SEQ ID NO: 10251 - RNA, 2008 nt, Artificial Sequence
  mRNA product Design a-2 comprising derived and/or modified sequence from LASV(GA391;Clade III)__CAA36646__NP (opt5)
gggagaguccgcucagccagguugcagaagcggcuuagcguguguccuaaucuucucucugcguguagguaggccugugccgcaaacaagcuuaccaugagcgccuccaaggaggugagaucuuuccuguggacccagagccuccggcgcgaacuguccggcuacugcucuaacaucaaacuucaagucguuaaggacgcucaggcccugcuccacgggcuggauuuuagcgagguguccaaugugcagagacuuaugcggaaacagaagcgcgacgauggagaccugaaaagacuccgggaucugaaccaagcggucaauaaccugguggaacucaagucuacacagcagaaaagcguucugcgcgugggcacgcuuuccagcgacgaucugcucauucuggcugccgaccuugagaaacugaagucuaaagucaccagaacagaacggccccucuccagcgggguguauaugggaaaucugucuucccagcaacuggaucagcgcagagcccuccugaacaugaucggcaugaccgggguuagcggaggcggcaagggggcuucugacggaauugugcgggucugggaugugaaaaaugccgagcuucugaacaaucaguucggcacaaugccuucccucacccuggcuugucuuacaaagcaggggcaaguggaccugaacgaugccguccaggcgcucaccgaccugggacugaucuacacggccaaguauccgaauagcuccgaccucgaucgccugucucagagccaucccauucuuaacaugaucgacaccaaaaaguccagccugaauaucucuggcuacaacuuuucccucggggcugccguuaaagcuggagccugcaugcuggauggcggcaauaugcuugagacaauuaaggugagcccucaaaccauggacgggauccugaaaucuauucucaaggugaaaaagagccugggaauguucgucuccgauacacccggcgaaagaaacccuuaugagaacauccuguacaagauuugucucucuggggacggauggcccuauaucgcgagccggaccuccauugugggccgcgccugggaaaauacgguuguggaucuggagcaggacaacaaaccucagaagaucgggaauggaggcagcaacaaaucucuucaguccgcuggcuuugccgcugggcugacauacagccaacucaugacccugaaggauuucaaaugcuuuaaucugaucccgaacgccaagacauggauggacauugagggaagacccgaagauccugucgagaucgcccuuuaccagcccucuuccggcuguuaugugcacuucuuucgggaaccuaccgaccucaagcaguucaaacaggacgcuaaguacagccaugggauugauguuaccgaccuguuugcggcccaacccggacugacauccgcugugaucgaggcccucccgagaaauauggucauuacgugccagggcucugaagauauccgcaaacugcuugagagccaggggcggagagacaucaagcugauugauaucacccucuccaaagccgacucucgcaaguucgagaacgcugugugggaucaguuuaaggaccugugucacaugcauacaggcgucgugguugaaaagaagaaacggggaggcaaggaggaaauuaccccucacugcgcccugauggauuguaucauguucgacgcggcugugagcgggggacuugaugccaaaguccucagagugguucugccccgcgacaugguguuccggacauccaccccuaaggucgugcugugaggacuagucccuguucccagagcccacuuuuuuuucuuuuuuugaaauaaaauagccugucuuucagaucuaaaaaaaaaaaaaaaaaaaaaaaaaaaaaaaaaaaaaaaaaaaaaaaaaaaaaaaaaaaaaaaaugcaucccccccccccccccccccccccccccccccaaaggcucuuuucagagccaccagaauu

SEQ ID NO: 10252 - RNA, 2005 nt, Artificial Sequence
  mRNA product Design a-2 comprising derived and/or modified sequence from LASV(AV;Clade V)__CCA30315__NP (opt5)
gggagaguccgcucagccagguugcagaagcggcuuagcguguguccuaaucuucucucugcguguagguaggccugugccgcaaacaagcuuaccaugagcgccuccaaggaggugaaaucuuuccuguggacccagagccucagacgggaacuguccggcuacugcucuaacaucaaacuucaagucguuaaggacgcucaggcccugcuccacgggcuggauuuuagcgagguguccaaugugcagcgccuuaugagaaagcagcggcgcgacgauucugaccugaaaagacuccgggaucugaaccaagcggucaauaaccugguggaacucaagagcacacagcagaaguccguucugcgcgugggaacgcuuagcucugacgaucugcucacccuggcugccgaccuugagaaacugaaguccaaagucacaagaaccgaacggccccucagcucuggcguguauauggggaaucuguccagccagcaacuggaucagcgcagagcccuccugaaccuuauuggaaugacaaauggcucucaggggucccaggcuggacgggacggcguugugcgcgucugggaugugaagaacgccgagcugcucaauaaccaauucggcaccaugccuagccugacacuugcuugucugaccaaacagggacagguggaccucaaugaugucguucaagcccugacggaccuggggcucaucuacaccgcgaaguauccgaacacauccgaccuggauagacuuacccagucucaucccauucugaauaugaucgacacaaagaaaagcucccucaacauuagcggcuacaauuuuucucugggggccgcugugaaggccggagcuugcaugcuugauggcgggaacaugcuggagaccaucaaaguguccccucagagcauggacggaauccucaagucuauucugaaagucaagcgggcccugggcauguucgugagcgauacgcccggcgaacgcaacccuuaugagaauauccucuacaaaauuugucuguccggggacggauggcccuauaucgcgucuagaacaagcauuguuggccgggccugggaaaacaccguggucgaucuugagacagacgggaagccucagaagaucggauccggcaauagcaacaaaucucugcaauccgcuggguuuagcgccggacucaccuacucucagcugaugacccugaaggaugcuaugcuucagcucgacccgaaugccaaaacauggauggauauugagggcagacccgaagacccuguggagguugcccuguaccagcccaucuccggcugcuauauccacuucuuucgcgaaccuacggaccugaagcaauucaaacaggaugcuaaguacagccaugggauugacaucgcggaucucuuugccgcucagcccggacugaccuccgccgugauugaggcccuuccgcggaacauggucaucacaugucagggcucugaagacauuaagaaacugcucgagagccaagggagaaaggauaucaaacugaucgacauugcucuguccaagaucgauucucgcaaauucgagaaugccgugugggaccaguauaaggaucuuugccacaugcauaccggagucgugguugaaaagaaaaagcggggcgggaaagaggaaauuacaccucacugugcgcucauggacugcaucauguuugaugcugccgugagcggcggacugaacacccugguccucagagccgugcugccccgcgacaugguuuuccggacguccacaccuagagugguccuuugaggacuagucccuguucccagagcccacuuuuuuuucuuuuuuugaaauaaaauagccugucuuucagaucuaaaaaaaaaaaaaaaaaaaaaaaaaaaaaaaaaaaaaaaaaaaaaaaaaaaaaaaaaaaaaaaaugcaucccccccccccccccccccccccccccccccaaaggcucuuuucagagccaccagaauu

SEQ ID NO: 10253 - RNA, 2005 nt, Artificial Sequence
  mRNA product Design a-2 comprising derived and/or modified sequence from LASV(Togo/2016/7082;Clade VI)__AMR44578__NP (opt5)
gggagaguccgcucagccagguugcagaagcggcuuagcguguguccuaaucuucucucugcguguagguaggccugugccgcaaacaagcuuaccaugagcaacuccaaggaggugaaaucuuuccuguggacccagagccucagacgggaacuguccggcuacugcucuaauaucaaacuucaagucguuaaagacgcccaggcucugcuccacgggcuggauuuuagcgagguguccaacgugcagcgccuuaugagaaagcagaaacgggacgauggagaccugaagcgccucagagaucugaaucaagccgucaacaaucugguggaacucaagucuguucagcagaaaagcauucugcgggugggcacacuuacguccgacgaucugcucacccuggcggcugaccuugagaagcugaaaagcaaggucacacgcaccgaaagaccccucucuuccgggguguauaugggaaaccugagcucucagcaacuggaucagcggcgcgcccuccuguccaugaucggcaugagcgggggaaaucagaacucucagccuaaaggcgacggcguugugagagucugggaugugaagaaugccgaccuucugaacaaucaauucgggacaaugccgucccucacccuggcuugucuuacaaagcagggacagguggaucugaacgacgccguccaagcucucaccgaccugggccugauuuacacggccaaauaucccaauagcuccgaucucgaccggcugucucagagccauccuauccuuaacaugauugauaccaagaaauccagccugaauaucucuggguacaacuuuucccucggagcggccaucaagacaggcgcuugcaugcuggacgggggaaacaugcuugagaccauuaaaguuacaccccagaccauggauggcauccucaagagcauucugaaagugaagcgcucucugggcauguucaucagcgacacgccuggggagagaaaucccuaugaaaacauucuguacaagaucugucucuccggagauggcuggccuuauauugccucucggacagcuaucaucgggcgcgccugggagaauaccguggucgaccuggaaagcgauuccaaaccgcagaagauuggaagcaacggcucuaauaaaucccuucaaagcgcgggguuugcccccggacugacauacucucagcucaugacccugaaggacuccaugcugcagcuugauccuaacgcuaaaaccuggaucgacauugagggcagacccgaggacccuguggaaguugcccucuuccagcccaucagcggcugcuacauucacuuuuuccgggagccgacagaucugaagcaauuuaagcaggacgcuaaauauucccaugggaucgaugugacggaccuguucgccgcccagccuggacucaccucugcugucaucgaagcgcugcccagaaauauggugcuuacaugucagggcagcgaugacauuaagaaacugcucgauucccaagggcgccgggacaucaagcugauugauguuucucugaacaaaaucgacagcagaaaguuugagaaugccgugugggaucaguacaaggaccuuugccacaugcauaccggagucguggucgaaaagaagaaaaagggcgggaaagaggagauuacaccucacugugcucuccuggauugcaucauguucgacgccgccguguccggcggacugaacgcuaccguucuccgcgccgugcugccccgggacauggucuuuagaacgagcucucccaaggugguucuuugaggacuagucccuguucccagagcccacuuuuuuuucuuuuuuugaaauaaaauagccugucuuucagaucuaaaaaaaaaaaaaaaaaaaaaaaaaaaaaaaaaaaaaaaaaaaaaaaaaaaaaaaaaaaaaaaaugcaucccccccccccccccccccccccccccccccaaaggcucuuuucagagccaccagaauu

SEQ ID NO: 10254 - RNA, 2005 nt, Artificial Sequence
  mRNA product Design a-2 comprising derived and/or modified sequence from LASV(KAK-428;Clade n.d. (VII))__ANH09741__NP (opt5)
gggagaguccgcucagccagguugcagaagcggcuuagcguguguccuaaucuucucucugcguguagguaggccugugccgcaaacaagcuuaccaugagcaacuccaaggaggugaaaucuuuccuguggacccagagccucagacgggaacuguccggcuacugcacaaauaucaaacuucaagucguuaaggacgcccaggcucugcuccacgggcuggauuuuucugaggugagcaacgugcagcgccuuaugagaaagcagaaacgggacgauaaugaccugaagcgccucagagaucugaaccaagccgucaauaaccugguggaacucaaguccguucagcagaaaucugugcugaaggucggaacgcuuaauagcgacgaucugcucacccuggcggcugaccuugagaaacugaaguccaaagugguucggacagaacgcccccucagcucuggcguguauauggggaaccuguccagccagcaacuggaucagagacgggcccuccugaauaugauuggaauggccggcgggucucagggaaaccagccuucccgcgacggcgucgugagagugugggaugucaagaaugcugaccuucugaacaaucaauucggcaccaugccgagccucacacuggccugucuuaccaagcaggggcagguugaucugaacgacguggugcucgcucugacagaccugggacucaucuacaccgccaaauaucccaauucuuccgaucuggaccggcuuagccaaaaccauccuguccugaacaugauugaugugaauaaguccucucucaacaucagcggcuacaauuuuucccugggggcggccguuaaagcuggagccugcaugcuugacggcgggaacaugcuggagacgauuaagaucagcccccagaccguggauggaauccucaaaucuauucugaaggucaaacgcgcucugggcauguucguguccgacacaccuggcgagagaaaucccuaugaaaacauccucuacaagguuugucugagcgggaauggauggccuuauauugccucucggaccagcaucgugggccgcgcgugggagaacacagucguggaucuugaauccaauaagaaccagccgaaagucgggaauaacggaucuaauaagaugcugcagagcuccggcuuugccaccgggcucacguacagccaacugaugacacugagagacucuaugcuucagcucgaucccaccgcuaaaacauggauugacaucgagggacggccugaggaucccguggaacuggcccuguuccagccuuccagcggcugcuacauucacuuuuucagagagcccaccgaccucaagcaguuuaaacaagacgcuaaguauucucauggcaucgauguuaacgaccuguucuccgcccagccggggcuuaccagcgccgugcuggaagcucucccucgcaauaugguccugacaugucagggauccgaugacauccggaagcugcuugauucucaggacagaaaagauauuaagcucaucgacauuagccuguccaaagcggaugcccgcaaguuugagaacgacgugugggaucaauucaaagaccugugccacaugcauacgggcaucguuguggaaaagaagaaaaagggagggaaacaggagaugacaccccacugugcucuccuggauugcauuauguuugacgccgccgucucuggcgggcuuaacgugccuacccugcgggcugugcuccccaccgacaugguuuucagaacaaucaccacgaaggucgugcugugaggacuagucccuguucccagagcccacuuuuuuuucuuuuuuugaaauaaaauagccugucuuucagaucuaaaaaaaaaaaaaaaaaaaaaaaaaaaaaaaaaaaaaaaaaaaaaaaaaaaaaaaaaaaaaaaaugcaucccccccccccccccccccccccccccccccaaaggcucuuuucagagccaccagaauu

SEQ ID NO: 10255 - RNA, 2005 nt, Artificial Sequence; identical to SEQ ID NO: 10249
  mRNA product Design a-2 comprising derived and/or modified sequence from LASV(Pinneo-NIG-1969;Clade I)__AIT17837__NP (opt5)

SEQ ID NO: 10256 - RNA, 2005 nt, Artificial Sequence
  mRNA product Design a-2 comprising derived and/or modified sequence from LASV(ISTH0009-NIG-2011;Clade II)__AIT17405__NP (opt5)
gggagaguccgcucagccagguugcagaagcggcuuagcguguguccuaaucuucucucugcguguagguaggccugugccgcaaacaagcuuaccaugagcguguccaaggaggucaaaucuuuccuguggacccagagccucagacgggaacuguccggcuacugcucuaacaucaaacuucaaguugugaaggacgcccaggcucugcuccacgggcuggauuuuagcgagguguccaauguccagcgccuuaugagaaagcagaaacgggacgauucugaccugaagcgccucagagaucugaaccaagccgugaauaaccugguugaacucaagagcacacagcagaaauccauucugcgggugggaacgcuuaccagcgacgaucugcucacacuggcggcugaccuugagaagcugaaaucuaaggucauccgcaccgaaagaccccucuccagcggcguguauauggggaaucugucuacacagcaacuggagcagcggcgcgcccuccugaacaugauuggaaugguuggcggggcccagggaacccagccuggcagagauggcgugguccgggugugggacgugaaaaauccggaucuucugaacaaucaauucgggacaaugcccucccucacccuggcuugucuuacgaagcagggacaggucgaccugaacgaugccguucucgcucugaccgaccugggccucaucuacacagccaaguauccuaauagcucugaccuggaucgccuuucccaaagccaucccauucugaacaugguggacaucaaaaaguccucucucaauaucagcggguacaacuuuucccugggagcggccgugaaagcuggcgccugcaugcuugaugggggaaauaugcuggagaccauuaaggucacaccucagaccauggacggcauccucaaaagcauucugaaggugaaaagaucucugggcauguucguuuccgauacgcccggggaacggaacccuuaugagaacauccucuacaagauuugucugagcggagacggcuggccguauaucgcuucucgcacaagcauuguggggagagccugggaaaauaccacagucgaucuugaguccgacggaaagccccagaaagugggcucugcggggagcaacaagucccugcagagcgccggauuuccuaccggccucaccuacucucaacugaugacacugaaagauuccaugaugcagcuugaccccagcgcuaagacguggaucgauaucgagggccggccugaagaccccguugagauugcccucuaccagccgaugucugggugcuauauccacuucuuuagagaaccuaccgaccugaaacaguucaagcaagaugcuaaguacucccauggaauugacguggccgaucuguuucccgcccagccuggccucacaagcgcugucaucgaggcgcugccccgcaauauggugcuuaccugucagggguccgacgauauuaaacggcugcucgacucucagggaagacgcgauaucaagcugaucgacauugcccugagcaaagcugauucccggagauucgaaaacgccgucugggaccaaugcaaggaucuuugucacaugcauacaggcgugguuguggagaaaaagaagcgcgggggcaaagaggaaaucacgccccacugcgcccucauggacuguauuauguaugaugcugccgucucuggaggccugaauaucccugugcugcgggcgguucucccgagagacaugguguuucgcaccagcucccccaaggucgugcugugaggacuagucccuguucccagagcccacuuuuuuuucuuuuuuugaaauaaaauagccugucuuucagaucuaaaaaaaaaaaaaaaaaaaaaaaaaaaaaaaaaaaaaaaaaaaaaaaaaaaaaaaaaaaaaaaaugcaucccccccccccccccccccccccccccccccaaaggcucuuuucagagccaccagaauu

SEQ ID NO: 10257 - RNA, 2005 nt, Artificial Sequence
  mRNA product Design a-2 comprising derived and/or modified sequence from LASV(ISTH2010-NIG-2012;Clade II)__AIT17483__NP (opt5)
gggagaguccgcucagccagguugcagaagcggcuuagcguguguccuaaucuucucucugcguguagguaggccugugccgcaaacaagcuuaccaugagcgccuccaaggaggugaaaucuuuccuguggacccagagccucagacgggaacuguccggcuacugcucuaacaucaaacuucaagucguuaaggacgcucaggcccugcuccacgggcuggauuuuagcgagguguccaaugugcagcgccuuaugagaaagcagaaacgggacgauucugaccugaagcgccucagagaucugaaccaagcggucaauaaccugguggaacucaagagcacacagcagaaauccauucugcggguuggaacgcuuaccagcgacgaucugcucacacuggcugccgaccuugagaagcugaaaucuaaggugauccgcaccgaaagaccccucuccagcggcgucuauauggggaaucugucuacacagcaacuggagcagcggcgcgcccuccugaaccuuauuggaauggugggcggggcucagggaacccagccuggcagagauggcguugugcgggucugggacgugaaaaauccggaucugcucaacaaucaauucgggacaaugcccucccugacccuugccugucugacgaagcagggacagguggaccucaacgaugcuguccuggcccugaccgaccucggccugaucuacacagcgaaguauccuaauagcucugaccuugaucgccugucccaaagccaucccauucucaacaugguugacaccaaaaaguccucucugaauaucagcggguuuaacuucucccuuggagccgcugugaaagccggcgcuugcaugcuggaugggggaaauaugcucgagacaaucaaggugaccccucagacgauggacggcauucugaaaagcauccugaaggucaaaaagucucucggcauguuuguguccgauacacccggggaaagaaacccuuacgagaacauucuguauaagaucugucuuagcggagacggcuggccguacauugccucucggaccagcaucguugggcgcgcgugggaaaauacaaccguggaucuggaguccgacggaaaaccccacaaggucggcaccgccgggucuaacaaaagccuccaguccgcuggauucccuacaggccugacguauagccagcugaugacccuuaaggauucuaugaugcaacucgaccccuccgccaaaacauggauugauaucgagggcagaccugaagaccccguggagaucgcucuguaccagccgaugagcgggugcuacauucacuuuuuccgggaaccuaccgaccugaagcaguuuaagcaggaugccaaauauucucauggaaucgacguugccgaucucuuccccgcucaaccuggccugacauccgcggugauugaggcccuucccagaaauaugguccugaccugucaggggagcgacgauaucaagcgccuccuggacucccagggacggagagauauuaaacugaucgacaucgcucuuucuaaggccgauagccgccgguuugaaaacgccgugugggaccagugcaaagaucucugucauaugcacacgggcgucgugguugagaagaagaaaagagggggcaaggaggaaauuacaccccacugcgcucugauggacuguaucauguacgaugccgcgguguccggaggccugaauauuccuguccuccgcgcugugcugccgcgggacaugguuuucagaaccucuagccccaaagugguccuuugaggacuagucccuguucccagagcccacuuuuuuuucuuuuuuugaaauaaaauagccugucuuucagaucuaaaaaaaaaaaaaaaaaaaaaaaaaaaaaaaaaaaaaaaaaaaaaaaaaaaaaaaaaaaaaaaaugcaucccccccccccccccccccccccccccccccaaaggcucuuuucagagccaccagaauu

SEQ ID NO: 10258 - RNA, 2005 nt, Artificial Sequence
  mRNA product Design a-2 comprising derived and/or modified sequence from LASV(Lassa virus/H.sapiens-wt/NGA/2015/ISTH_0543;Clade II)__AVO03640__NP (opt5)
gggagaguccgcucagccagguugcagaagcggcuuagcguguguccuaaucuucucucugcguguagguaggccugugccgcaaacaagcuuaccaugagcgccuccaaggaggugaaaucuuuccuguggacccagagccucagacgggaacuguccggcuacugcucuaacaucaaacuucaagucguuaaggacgcucaggcccugcuccacgggcuggauuuuagcgagguguccaaugugcagcgccuuaugagaaagcagaaacgggacgauucugaccugaagcgccucagagaucugaaccaagcggucaauaaccugguggaacucaagagcacacagcagaaauccauucugcggguuggaacgcuuaccagcgacgaucugcucacacuggcugccgaccuugagaagcugaaaucuaaggugauccgcaccgaaagaccccucuccagcggcgucuauauggggaaucugucuacacagcaacuggagcagcggcgcgcccuccugaacaugauuggaauggugggcggggcucagggaacccagccuggcagagauggcguugugcgggucugggacgugaaaaauccggaucuucugaacaaucaauucgggacaaugcccucccucacccuggccugucuuacgaagcagggacagguggaccugaacgaugcuguccucgcccugaccgaccugggccucaucuacacagcgaaguauccuaauagcucugaccuggaucgccuuucccaaagccaucccauucugaacaugguugacaccaaaaaguccucucucaauaucagcggguacaacuuuucccugggagccgcugugaaagccggcgcuugcaugcuugaugggggaaauaugcuggagacaaucaaggugaccccucagacgauggacggcauucucaaaagcauccugaaggucaaaaagucucugggcauguucguguccgauacacccggggaaagaaacccuuaugagaacauucucuacaagaucugucugagcggagacggcuggccguauauugccucucggaccagcaucguugggcgcgcgugggaaaauacaaccguggaucuugaguccgacggaaaaccccagaaggucggcucugccgggagcaacaaaucccugcagagcgcuggauuuccuaccggccucacauacucucaacugaugacgcugaaggauuccaugaugcagcuugaccccagcgccaaaaccuggauugauaucgagggcagaccugaagaccccguggagaucgcucucuaccagccgaugucugggugcuauauucacuucuuucgggaaccuacagaccugaagcaguucaagcaagaugccaaauacucccauggaaucgacguugccgaucuguuucccgcucagccuggccucaccagcgcggugauugaggcccugcccagaaauaugguccuuacaugucagggguccgacgauaucaagcgccugcucgacucucagggacggaaagauauuaagcugaucgacaucgcucugagcaaagccgauuccagacgcuucgaaaacgccgugugggaccaaugcaaggaucuuugucacaugcauaccggcgucgugguugagaagaaaaagagagggggcaaagaggaaauuacgccccacugcgcucucauggacuguaucauguaugaugccgcggugucuggaggccugaauauuccuguccugcgggcugugcucccgcgcgacaugguuuuucggacaagcucccccaaggugguccugugaggacuagucccuguucccagagcccacuuuuuuuucuuuuuuugaaauaaaauagccugucuuucagaucuaaaaaaaaaaaaaaaaaaaaaaaaaaaaaaaaaaaaaaaaaaaaaaaaaaaaaaaaaaaaaaaaugcaucccccccccccccccccccccccccccccccaaaggcucuuuucagagccaccagaauu

SEQ ID NO: 10259 - RNA, 2005 nt, Artificial Sequence
  mRNA product Design a-2 comprising derived and/or modified sequence from LASV(Lassa virus/H.sapiens-wt/NGA/2016/ISTH_0009;Clade II)__AVO03572__NP (opt5)
gggagaguccgcucagccagguugcagaagcggcuuagcguguguccuaaucuucucucugcguguagguaggccugugccgcaaacaagcuuaccaugagcgccuccaaggaggugaaaucuuuccuguggacccagagccucagacgggaacuguccggcuacugcucuaacaucaaacuucaagucguuaaggacgcucaggcccugcuccacgggcuggauuuuagcgagguguccaaugugcagcgccuuaugagaaagcagaaacgggacgauucugaccugaagcgccucagagaucugaaccaagcggucaauaaccugguggaacucaagagcacacagcagaaauccauucugcggguuggaacgcuuaccagcgacgaucugcucacacuggcugccgaccuugagaagcugaaaucuaaggugauccgcaccgaaagaccccucuccagcggcgucuauauggggaaucugucuacacagcaacuggagcagcggcgcgcccuccugaacaugauuggaauggugggcggggcucagggaacccagccuggcagagauggcguugugcgggucugggacgugaaaaauccggaucuucugaacaaucaauucgggacaaugcccucccucacccuggccugucuuacgaagcagggacagguggaccugaacgaugcuguccucgcccugaccgaccugggccucaucuacacagcgaaguauccuaauagcucugaccuggaucgccuuucccaaagccaucccauucugaacaugguugacaccaaaaaguccucucucaauaucagcggguacaacuuuucccugggagccgcugugaaagccggcgcuugcaugcuugaugggggaaauaugcuggagacaaucaaggugaccccucagacgauggacggcauucucaaaagcauccugaaggucaaaaagucucugggcauguucguguccgauacacccggggaaagaaacccuuaugagaacauucucuacaagaucugucugagcggagacggcuggccguauauugccucucggaccagcaucguugggcgcgcgugggaaaauacaaccguggaucuugaguccgacggaaaaccccagaaggucggcucugccgggagcaacaaaucccugcagagcgcuggauuuccuaccggccucacauacucucaacugaugacgcugaaggauuccaugaugcagcuugaccccagcgccaaaaccuggauugauaucgagggcagaccugaagaccccguggagaucgcucucuaccagccgaugucugggugcuauauucacuucuuucgggaaccuacagaccugaagcaguucaagcaagaugccaaauacucccauggaaucgacguugccgaucuguuucccgcucagccuggccucaccagcgcggugauugaggcccugcccagaaauaugguccuuacaugucagggguccgacgauaucaagcgccugcucgacucucagggacggagagauauuaaacugaucgacaucgcucugagcaaggccgauucccgccgguucgaaaacgccgugugggaccaaugcaaagaucuuugucacaugcauaccggcgucgugguugagaagaagaaaagagggggcaaggaggaaauuacgccccacugcgcucucauggacuguaucauguaugaugccgcggugucuggaggccugaauauuccuguccugcgcgcugugcucccgcgggacaugguuuuuagaacaagcucccccaaagugguccugugaggacuagucccuguucccagagcccacuuuuuuuucuuuuuuugaaauaaaauagccugucuuucagaucuaaaaaaaaaaaaaaaaaaaaaaaaaaaaaaaaaaaaaaaaaaaaaaaaaaaaaaaaaaaaaaaaugcaucccccccccccccccccccccccccccccccaaaggcucuuuucagagccaccagaauu

SEQ ID NO: 10260 - RNA, 2005 nt, Artificial Sequence
  mRNA product Design a-2 comprising derived and/or modified sequence from LASV(Lassa virus/H.sapiens-wt/NGA/2016/ISTH_0017;Clade II)__AVO03568__NP (opt5)
gggagaguccgcucagccagguugcagaagcggcuuagcguguguccuaaucuucucucugcguguagguaggccugugccgcaaacaagcuuaccaugagcgccuccaaggaggugaaaucuuuccuguggacccagagccucagacgggaacuguccggcuacugcucuagcaucaaacuucaagucguuaaggacgcucaggcccugcuccacgggcuggauuuuuccgaggugucuaacgugcagcgccuuaugagaaagcagaaacgggacgauagcgaccugaagcgccucagagaucugaaucaagcggucaacaaucugguggaacucaaguccacacagcagaaaagcauucugcggguuggaacgcuuaccucugacgaucugcucacacuggcugccgaccuugagaagcugaaauccaaggugauccgcaccgaaagaccccucagcucuggcgucuauauggggaaccuguccacacagcaacuggagcagcggcgcgcccuccugaauaugauuggaauggcuggcggggcccagggaacccagccuggcagagauggcgugguucgggugugggacgucaaaaacccggaucuucugaauaaccaauucgggacaaugcccagccucacccuggcuugucuuacgaagcagggacagguggaccugaaugaugccgugcucgcgcugaccgaccugggccucaucuacacagccaaguauccuaacucuuccgaccuggaucgccuuagccaaucccaucccauucugaauauggucgacaccaaaaagucuagccucaacaucuccggguacaauuuuagccugggagcugccguuaaagcuggcgccugcaugcuugaugggggaaacaugcuggagacaaucaaggugaccccucagacgauggacggcauucucaaaucuauccugaaggugaaaagaucccugggcauguucgucagcgaugcgcccggggaacggaauccuuaugagaacauucucuacaagaucugucugucuggagacggcuggccguauauugccagccgcacauccaucguggggagagcuugggaaaacaccacaguugaucuugagucugacggaaagccccagaaagugggcgccaccgggagcaauaagucccugcagagcgcuggauuuccuaccggccucacauacucucaacugaugacgcugaaagauuccaugaugcagcuugaccccagcgccaagaccuggauugauaucgagggccggccugaagaccccgucgagguggcccucuaccagccgguuucugggugcuauauccacuucuuuagagaaccuacagaccugaaacaguucaagcaagaugcuaaguacucccauggaauugacguggcggaucuguuucccgcccagccuggccucaccagcgcugucaucgaggcccugccccgcaacauggugcuuacaugucagggguccgacgauauuaaaaagcugcucgacucucagggacggaaagauaucaagcugauugacaucgcccugagcaaagcugauuccagacgcuucgaaaaugccgucugggaccaaugcaaggaucuuugucacaugcauaccggcgugguuguggagaagaaaaagagagggggcaaagaggaaaucacgccccacugcgcgcucauggacuguauuauguaugaugcugccgucucuggaggccugaacaucccugugcugcgggccguucucccgcgcgacaugguguuucggacaagcucccccaaggucgugcugugaggacuagucccuguucccagagcccacuuuuuuuucuuuuuuugaaauaaaauagccugucuuucagaucuaaaaaaaaaaaaaaaaaaaaaaaaaaaaaaaaaaaaaaaaaaaaaaaaaaaaaaaaaaaaaaaaugcaucccccccccccccccccccccccccccccccaaaggcucuuuucagagccaccagaauu

SEQ ID NO: 10261 - RNA, 2005 nt, Artificial Sequence
  mRNA product Design a-2 comprising derived and/or modified sequence from LASV(Lassa virus/H.sapiens-wt/NGA/2018/ISTH_0959;Clade II)__AVV65100__NP (opt5)
gggagaguccgcucagccagguugcagaagcggcuuagcguguguccuaaucuucucucugcguguagguaggccugugccgcaaacaagcuuaccaugagcgccuccaaggaggugaaaucuuuccuguggacccagagccucagacgggaacuguccggcuacugcucuaacaucaaacuucaagucguuaaggacgcucaggcccugcuccacgggcuggauuuuagcgagguguccaaugugcagcgccuuaugagaaagcagaaacgggacgauucugaccugaagcgccucagagaucugaaccaagcggucaauaaccugguggaacucaagagcacccagcagaaauccauucugcggguuggaacgcuuaccagcgacgaucugcucacacuggcugccgaccuugagaagcugaaaucuaaggugauccgcaccgaaagaccccucuccagcggcgucuauauggggaaucugucuacacagcaacuggagcagcggcgcgcccuccugaaccuuauuggaauggugggcggggcucagggaacccagccuggcagagauggcguugugcgggucugggacgugaaaaauccggaucugcucaacaaucaauucgggacaaugcccucccugacccuugccugucugacgaagcagggacagguggaccucaacgaugucguucuggcucugaccgaccucggccugaucuacacagccaaguauccuaauagcucugaccuugaucgccugucccaaagccaucccauucucaacaugguggacaccaaaaaguccucucugaauaucagcggguuuaacuucucccuuggagcggccgugaaagcuggcgccugcaugcuggaugggggaaauaugcucgagacaaucaaggucaccccucagacgauggacggcauucugaaaagcauccugaaggugaaaaagucucucggcauguuuguuuccgauacacccggggaaagaaacccuuacgagaacauucuguauaagaucugucuuagcggagacggcuggccguacauugcuucucggaccagcaucguggggcgcgccugggaaaauacaaccgucgaucuggaguccgacggaaaaccccacaaggugggcaccgcggggucuaacaaaagccuccaguccgccggauucccuacaggccugacguauagccagcugaugacccuuaaggauucuaugaugcaacucgaccccuccgcuaaaacauggauugauaucgagggcagaccugaagaccccguugagaucgcccuguaccagccgaugagcgggugcuacauucacuuuuuccgggaaccuaccgaccugaagcaguuuaagcaggaugcuaaauauucucauggaaucgacguggccgaucucuuccccgcccaaccuggccugacauccgcugucauugaggcgcuucccagaaauauggugcugaccugucaggggagcgacgauaucaagcgccuccuggacucccagggacggaaagauauuaagcugaucgacaucgcccuuucuaaaacggauagcagacgcuuugaaaacgcugucugggaccagugcaaggaucucugucauaugcacacaggcgugguuguggagaagaaaaagagagggggcaaagaggaaauuacaccccacugcgcccugauggacuguaucauguacgaugccgcugucuccggaggccugaauauuccugugcuccgggccguucugccgcgcgacaugguguuccggaccucuagccccaaggucgugcuuugaggacuagucccuguucccagagcccacuuuuuuuucuuuuuuugaaauaaaauagccugucuuucagaucuaaaaaaaaaaaaaaaaaaaaaaaaaaaaaaaaaaaaaaaaaaaaaaaaaaaaaaaaaaaaaaaaugcaucccccccccccccccccccccccccccccccaaaggcucuuuucagagccaccagaauu

SEQ ID NO: 10262 - RNA, 2005 nt, Artificial Sequence
  mRNA product Design a-2 comprising derived and/or modified sequence from LASV(LASV003-NIG-2008;Clade II)__AIT17581__NP (opt5)
gggagaguccgcucagccagguugcagaagcggcuuagcguguguccuaaucuucucucugcguguagguaggccugugccgcaaacaagcuuaccaugagcgccuccaaggaggugaaaucuuuccuguggacccagagccucagacgggaacuguccggcuacugcucuagcaucaaacuucaagucguuaaggacgcucaggcccugcuccacgggcuggauuuuuccgaggugucuaacgugcagcgccuuaugagaaagcagaaacgggacgauagcgaccugaagcgccucagagaucugaaucaagcggucaacaaucugguggaacucaaguccacccagcagaaaagcguucugcgggugggaacgcuuaccucugacgaucugcucacacuggcugccgaccuugagaagcugaaauccaaggucauucgcaccgaaagaccccucagcucuggcguguauauggggaaccuguccgcccagcaacuggagcagcggcgcacacuccugaauaugaucggaaugguuggcggggcucagggaacccagccuggcagagauggcgugguccgggugugggacgugaaaaacccggaucuucugaauaaccaauucgggacaaugcccagccucacccuggccugucuuacgaagcagggacaggucgaccugaaugauguugugcucgcucugaccgaccugggccucauuuacacagccaaguauccuaacucuuccgaccuggaucgccuuagccaaucccaucccauccugucuaugguggacaccaaaaagagcucccucaauauuagcggguacaacuuuucucugggagcggccgucaaagcuggcgccugcaugcuugaugggggaaauaugcuggagacaaucaaggugaccccucagacgauggacggcauccucaaauccauucugaagguuaaaaagagccugggcauguucgugucugauacacccggggaaagaaacccuuaugagaauauccucuacaagauuugucugagcggagacggcuggccguauaucgcuucccggaccucuauugucgggcgcgccugggaaaacacaaccguggaucuugagagcgacggaaaaccccagaagguuggcaccgcgggguccaacaaaagccugcagucugccggauuuccuacaggccucacguacucccaacugaugacccugaaggauagcaugaugcagcuugaccccucugcuaaaacauggaucgauauugagggcagaccugaagaccccguggagaucgcccucuaccagccgauguccgggugcuauauccacuucuuucgggaaccuaccgaccugaagcaguucaagcaagaugcuaaauacagccauggaauugacgucacagaucuguuucccgcccagccuggccucaccuccgccgugaucgaggcucugcccagaaauaugguccuuacgugucaggggucugacgauauuaagcgccugcucgacagccagggacggagagauaucaaacugauugacaucgcgcuguccaaggccgauucucgccgguucgaaaacgcugugugggaccaaugcaaagaucuuugucacaugcauacaggcguuguggucgagaagaagaaaagagggggcaaggaggaaaucacaccccacugcgcccucauggacuguauuauguaugaugccgcugugagcggaggccugaauaucccuguucugcgcgccgugcucccgcgggacauggucuuuagaaccuccagccccaaaguggugcugugaggacuagucccuguucccagagcccacuuuuuuuucuuuuuuugaaauaaaauagccugucuuucagaucuaaaaaaaaaaaaaaaaaaaaaaaaaaaaaaaaaaaaaaaaaaaaaaaaaaaaaaaaaaaaaaaaugcaucccccccccccccccccccccccccccccccaaaggcucuuuucagagccaccagaauu

SEQ ID NO: 10263 - RNA, 2005 nt, Artificial Sequence
  mRNA product Design a-2 comprising derived and/or modified sequence from LASV(LASV035-NIG-2009;Clade II)__AIT17589__NP (opt5)
gggagaguccgcucagccagguugcagaagcggcuuagcguguguccuaaucuucucucugcguguagguaggccugugccgcaaacaagcuuaccaugagcgccuccaaggaggugaaaucuuuccuguggacccagagccucagacgggaacuguccggcuacugcucuagcaucaaacuucaagucguuaaagacgcucaggcccugcuccacgggcuggauuuuuccgaggugucuaacgugcagcgccuuaugagaaagcagaaacgggacgauagcgaccugaagcgccucagagaucugaaucaagcggucaacaaucugguggaacucaaguccacacagcagaaaagcauucugcggguuggaacgcuuaccucugacgaucugcucacacuggcugccgaccuugagaagcugaaauccaaggugauccgcaccgaaagaccccucagcucuggcgucuauauggggaaccuguccgcccagcaacuggagcagcggcgcgcucuccugaauaugauuggaauggugggcggggcccagggaacacagccuggcagagauggcguugugcgggucugggacgugaaaaacccggaucuucugaauaaccaauucgggaccaugcccagccucacacuggcuugucuuaccaagcagggacagguggaccugaaugaugccguccucgcgcugacggaccugggccucaucuacaccgccaaguauccuaacucuuccgaccuggaucgccuuagccaaucccaucccauucugaauaugguugacacaaagaagucuagccucaacaucuccggguacaauuuuagccugggagcugccgugaaagcuggcgccugcaugcuugaugggggaaacaugcuggagaccaucaaggugacaccucagaccauggacggcauucucaaaucuauccugaaggucaaaagaucccugggcauguucgugagcgauacgcccggggaacggaauccuuaugagaacauucucuacaagaucugucugucuggagacggcuggccguauauugcgagccgcacauccaucguugggagagccugggaaaacaccacaguggaucuugagucugacggaaagccccagaaagucggcaccaccgggagcaauaagucccugcagagcgcuggauuuccuacaggccucacguacucucaacugaugacccugaaagauuccaugaugcagcuugaccccagcgccaagacauggauugauaucgagggccggccugaagaccccguggagaucgcucucuaccagccgaugucugggugcuauauucacuucuuuagagaaccuaccgaccugaaacaguucaagcaagaugccaaguacucccauggaaucgacguugccgaucuguuucccgcucagccuggccucacaagcgcggugauugaggcccugccccgcaacaugguccuuaccugucagggguccgacgauaucaaaaagcugcucgacucucagggacggagagauauuaaacugaucgacaucgcucugagcaaggccgauucccgcaaauucgaaaaugccgugugggaccaaugcaaggaucuuugucacaugcauacgggcgucgugguugagaagaaaaagagagggggcaaagaggaaauuacaccccacugcgcucucauggacuguaucauguaugaugccgcggugucuggaggccugaacauuccuguccugcgggcugugcucccgcgcgacaugguuuuucggaccagcucccccaaggugguccugugaggacuagucccuguucccagagcccacuuuuuuuucuuuuuuugaaauaaaauagccugucuuucagaucuaaaaaaaaaaaaaaaaaaaaaaaaaaaaaaaaaaaaaaaaaaaaaaaaaaaaaaaaaaaaaaaaugcaucccccccccccccccccccccccccccccccaaaggcucuuuucagagccaccagaauu

SEQ ID NO: 10264 - RNA, 2005 nt, Artificial Sequence
  mRNA product Design a-2 comprising derived and/or modified sequence from LASV(LASV1000-NIG-2009;Clade II)__AIT17783__NP (opt5)
gggagaguccgcucagccagguugcagaagcggcuuagcguguguccuaaucuucucucugcguguagguaggccugugccgcaaacaagcuuaccaugagcgccuccaaggaggugaaaucuuuccuguggacccagagccucagacgggaacuguccggcuacugcucuaacaucaaacuucaagucguuaaggacgcucaggcccugcuccacgggcuggauuuuagcgagguguccaaugugcagcgccuuaugagaaagcagaaacgggacgauucugaccugaagcgccucagagaucugaaccaagcggucaauaaccugguggaacucaagagcacacagcagaaauccauucugcggguuggaacgcuuaccagcgacgaucugcucacacuggcugccgaccuugagaagcugaaaucuaaggugauccgcaccgaaagaccccucuccagcggcgucuauauggggaaucugucuacacagcaacuggagcagcggcgcgcccuccugaacaugauuggaauggugggcggggcucagggaacccagccuggcagagauggcguugugcgggucugggacgugaaaaauccggaucuucugaacaaucaauucgggacaaugcccucccucacccuggccugucuuacgaagcagggacagguggaccugaacgaugucguucucgcucugaccgaccugggccucaucuacacagccaaguauccuaauagcucugaccuggaucgccuuucccaaagccaucccauucugaacaugguggacaccaaaaaguccucucucaauaucagcggguacaacuuuucccugggagcggccgugaaagcuggcgccugcaugcuugaugggggaaauaugcuggagacaaucaaggucaccccucagacgauggacggcauucucaaaagcauccugaaggugaaaaagucucugggcauguucguuuccgauacacccggggaaagaaacccuuaugagaacauucucuacaagaucugucugagcggagacggcuggccguauauugcuucucggaccagcaucguggggcgcgccugggaaaauacaaccgucgaucuugaguccgacggaaaaccccagaaggugggcaccgcggggucuaacaaaagccugcaguccgccggauuuccuacaggccucacguacagccaacugaugacccugaaggauucuaugaugcagcuugaccccuccgcuaaaacauggauugauaucgagggcagaccugaagaccccguugagaucgcccucuaccagccggugagcgggugcuauauucacuucuuucgggaaccuaccgaccugaagcaguucaagcaagaugcuaaauacucucauggaaucgacgucgccgaucuguuucccgcccagccuggccucacauccgcugugauugaggcgcugcccagaaauaugguccuuaccugucaggggagcgacgauaucaagcgccugcucgacucccagggacggagagauauuaaacugaucgacaucgcccugucuaaggcugauagccgccgguucgaaaacgccgugugggaccaaugcaaagaucuuugucacaugcauacgggcguuguggucgagaagaagaaaagagggggcaaggaggaaauuacaccccacugcgcccucauggacuguaucauguaugaugcugccguguccggaggccugaauauuccuguucugcgcgcggugcucccgcgggacauggucuuuagaaccucuagccccaaaguggugcugugaggacuagucccuguucccagagcccacuuuuuuuucuuuuuuugaaauaaaauagccugucuuucagaucuaaaaaaaaaaaaaaaaaaaaaaaaaaaaaaaaaaaaaaaaaaaaaaaaaaaaaaaaaaaaaaaaugcaucccccccccccccccccccccccccccccccaaaggcucuuuucagagccaccagaauu

SEQ ID NO: 10265 - RNA, 2005 nt, Artificial Sequence
  mRNA product Design a-2 comprising derived and/or modified sequence from LASV(LASV221-NIG-2010;Clade II)__AIT17625__NP (opt5)
gggagaguccgcucagccagguugcagaagcggcuuagcguguguccuaaucuucucucugcguguagguaggccugugccgcaaacaagcuuaccaugagcgccuccaaggaggugaaaucuuuccuguggacccagagccucagacgggaacuguccggcuacugcucuagcaucaaacuucaagucguuaaggacgcucaggcccugcuccacgggcuggauuuuuccgaggugucuaacgugcagcgccuuaugagaaagcagcggcgcgacgauagcgaccugaaaagacuccgggaucugaaucaagcggucaacaaucugguggaacucaaguccacacagcaaaagagcauucugcgcguuggaacgcuuaccucugacgaucugcucacacuggcugccgaccuugagaaacugaaguccaaagugaucagaaccgaacggccccucagcucuggcgucuauauggggaaccuguccacacagcagcuggagcagcgcagagcccuccugaauaugauuggaauggugggcggggcucagggaacccagccuggccgggauggcguugugcgcgucugggacgugaagaacccggaucuucugaauaaccaauucgggacaaugcccagccucacccuggccugucuuacgaaacagggacagguggaccugaaugaugcuguccucgcccugaccgaccugggccucaucuacacagcgaaguauccuaacucuuccgaccuggauagacuuagccaaucccaucccauucugaauaugguugacaccaagaaaucuagccucaacaucuccggguacaauuuuagccugggagccgcugugaaggccggcgcuugcaugcuugaugggggaaacaugcuggagacaaucaaagugaccccucagacggucgacggcauucucaagucuauccugaaagugaagcggucccugggcauguucguuagcgauacacccggggaacgcaauccuuaugagaacauucucuacaaaaucugucugucuggagacggcuggccguauauugccagcagaaccuccaucguggggcgggcgugggaaaacacaaccgucgaucuugagucugacggaaagccccagaaggugggcaccgccgggagcaauaaaucccugcagagcgcuggauuuccuacaggccucacguacucucaacugaugacccugaaggauuccaugaugcagcuugaccccagcgccaaaacauggauugauaucgagggcagaccugaagaccccguugagaucgcucucuaccagccgaugucugggugcuauauucacuucuuucgcgaaccuaccgaccugaagcaguucaaacaagaugccaaguacucccauggaaucgacguggccgaucuguuucccgcucagccuggccucacaagcgcggucauugaggcccugccccggaacauggugcuuaccugucagggguccgacgauaucaagagacugcucgacucucagggacgccgggauauuaaacugaucgacaucgcucugagcaaggccgauuccagaaaauucgaaaaugccgucugggaccaaugcaaggaucuuugucacaugcauacgggcgugguuguggagaaaaagaagcgcgggggcaaagaggaaauuacaccccacugcgcucucauggacuguaucauguaugaugccgcggucucuggaggccugaacauuccugugcugcgggcuguucucccgagagacaugguguuucgcaccagcucccccaaggucgugcugugaggacuagucccuguucccagagcccacuuuuuuuucuuuuuuugaaauaaaauagccugucuuucagaucuaaaaaaaaaaaaaaaaaaaaaaaaaaaaaaaaaaaaaaaaaaaaaaaaaaaaaaaaaaaaaaaaugcaucccccccccccccccccccccccccccccccaaaggcucuuuucagagccaccagaauu

SEQ ID NO: 10266 - RNA, 2005 nt, Artificial Sequence
  mRNA product Design a-2 comprising derived and/or modified sequence from LASV(LASV237-NIG-2010;Clade II)__AIT17639__NP (opt5)
gggagaguccgcucagccagguugcagaagcggcuuagcguguguccuaaucuucucucugcguguagguaggccugugccgcaaacaagcuuaccaugagcgccuccaaggaggugaaaucuuuccuguggacccagagccucagacgggaacuguccggcuacugcucuaacaucaaacuucaagucguuaaggacgcucaggcccugcuccacgggcuggauuuuagcgagguguccaaugugcagcgccuuaugagaaagcagaaacgggacgauucugaccugaagcgccucagagaucugaaccaagcggucaauaaccugguggaacucaagagcacacagcagaaauccauucugcggguuggaacgcuuaccagcgacgaucugcucacacuggcugccgaccuugagaagcugaaaucuaaggugauccgcaccgaaagaccccucuccagcggcgucuauauggggaaucugucuacacagcaacuggagcagcggcgcgcccuccugaacaugauuggaauggugggcggggcucagggaacccagccuggcagagauggcguugugcgggucugggacgugaaaaauccggaucuucugaacaaucaauucgggacaaugcccucccucacccuggccugucuuacgaagcagggacagguggaccugaacgaugcuguccucgcccugaccgaccugggccucaucuacacagcgaaguauccuaauagcucugaccuggaucgccuuucccaaagccaucccauucugaacaugguugacaucaaaaaguccucucucaauaucagcggguacaacuuuucccugggagccgcugugaaagccggcgcuugcaugcuugaugggggaaauaugcuggagaccauuaaggugacaccucagaccauggacggcauccucaaaagcauucugaaggucaaaagaucucugggcauguucguguccgauacgcccggggaacggaacccuuaugagaacauccucuacaagauuugucugagcggagacggcuggccguauaucgccucucgcacaagcauuguugggagagcgugggaaaauaccacaguggaucuugaguccgacggaaagccccagaaagucggcucugccgggagcaacaagucccugcagagcgcuggauuuccuaccggccucaccuacucucaacugaugacacugaaagauuccaugaugcagcuugaccccagcgccaagacguggaucgauaucgagggccggccugaagaccccguggagauugcucucuaccagccgaugucugggugcuauauccacuucuuuagagaaccuaccgaccugaaacaguucaagcaagaugccaaguacucccauggaauugacguugccgaucuguuucccgcucagccuggccucacaagcgcggugaucgaggcccugccccgcaauaugguccuuaccugucagggguccgacgauauuaaacggcugcucgacucucagggaagacgcgauaucaagcugaucgacauugcucugagcaaagccgauucccggagauucgaaaacgccgugugggaccaaugcaaggaucuuugucacaugcauacaggcgucgugguugagaaaaagaagcgcgggggcaaagaggaaaucacgccccacugcgcucucauggacuguauuauguaugaugccgcggugucuggaggccugaauaucccuguccugcgggcugugcucccgagagacaugguuuuucgcaccagcucccccaaggugguccugugaggacuagucccuguucccagagcccacuuuuuuuucuuuuuuugaaauaaaauagccugucuuucagaucuaaaaaaaaaaaaaaaaaaaaaaaaaaaaaaaaaaaaaaaaaaaaaaaaaaaaaaaaaaaaaaaaugcaucccccccccccccccccccccccccccccccaaaggcucuuuucagagccaccagaauu

SEQ ID NO: 10267 - RNA, 2005 nt, Artificial Sequence
  mRNA product Design a-2 comprising derived and/or modified sequence from LASV(LASV253-NIG-2011;Clade II)__AIT17671__NP (opt5)
gggagaguccgcucagccagguugcagaagcggcuuagcguguguccuaaucuucucucugcguguagguaggccugugccgcaaacaagcuuaccaugagcgccuccaaggaggugaaaucuuuccuguggacccagagccucagacgggaacuguccggcuacugcucuagcaucaaacuucaagucguuaaggacgcucaggcccugcuccacgggcuggauuuuuccgaggugucuaacgugcagcgccuuaugagaaagcagaaacgggacgauagcgaccugaagcgccucagagaucugaaucaagcggucaacaaucugguggaacucaaguccacccagcagaaaagcguucugcgggugggaacgcuuaccucugacgaucugcucacacuggcugccgaccuugagaagcugaaauccaaggucauucgcaccgaaagaccccucagcucuggcguguauauggggaaccuguccacacagcaacuggagcagcggcgcgcccuccugaauaugaucggaaugguuggcggggcucagggaacccagccuggcagagauggcgugguccgggugugggacgugaaaaacccggaucuucugaauaaccaauucgggacaaugcccagccucacccuggccugucuuacgaagcagggacaggucgaccugaaugauguugugcucgcucugaccgaccugggccucauuuacacagccaaguauccuaacucuuccgaccuggaucgccuuagccaaucccaucccauccugaauaugguggacaccaaaaagucuagccucaacauuuccggguacaauuuuagccugggagcggccgucaaagcuggcgccugcaugcuugaugggggaaacaugcuggagacaaucaaggugaccccucagacgauggacggcauccucaaaucuauucugaagguuaaaaagucccugggcauguucgugagcgauacacccggggaaagaaauccuuaugagaacauccucuacaagauuugucugucuggagacggcuggccguauaucgcuagccggaccuccauugucgggcgcgccugggaaaacacaaccguggaucuugagucugacggaaaaccccagaagguuggcaccgcggggagcaauaaaucccugcagagcgccggauuuccuacaggccucacguacucucaacugaugacccugaaggauuccaugaugcagcuugaccccagcgcuaaaacauggaucgauauugagggcagaccugaagaccccguggagaucgcccucuaccagccgaugucugggugcuauauccacuucuuucgggaaccuaccgaccugaagcaguucaagcaagaugcuaaauacucccauggaauugacgucacagaucuguuucccgcccagccuggccucaccagcgccgugaucgaggcucugcccagaaacaugguccuuacgugucagggguccgacgauauuaagcgccugcucgacucucagggacggagagauaucaaacugauugacaucgcgcugagcaaggccgauucccgccgguucgaaaaugcugugugggaccaaugcaaagaucuuugucacaugcauacaggcguuguggucgagaagaagaaaagagggggcaaggaggaaaucacaccccacugcgcccucauggacuguauuauguaugaugccgcugugucuggaggccugaacaucccuguucugcgcgccgugcucccgcgggacauggucuuuagaaccagcucccccaaaguggugcugugaggacuagucccuguucccagagcccacuuuuuuuucuuuuuuugaaauaaaauagccugucuuucagaucuaaaaaaaaaaaaaaaaaaaaaaaaaaaaaaaaaaaaaaaaaaaaaaaaaaaaaaaaaaaaaaaaugcaucccccccccccccccccccccccccccccccaaaggcucuuuucagagccaccagaauu

SEQ ID NO: 10268 - RNA, 2005 nt, Artificial Sequence
  mRNA product Design a-2 comprising derived and/or modified sequence from LASV(LASV254-NIG-2011;Clade II)__AIT17675__NP (opt5)
gggagaguccgcucagccagguugcagaagcggcuuagcguguguccuaaucuucucucugcguguagguaggccugugccgcaaacaagcuuaccaugagcgccuccaaggaggugaaaucuuuccuguggacccagagccucagacgggaacuguccggcuacugcucuagcaucaaacuucaagucguuaaggacgcucaggcccugcuccacgggcuggauuuuuccgaggugucuaacgugcagcgccuuaugagaaagcagaaacgggacgauagcgaccugaagcgccucagagaucugaaucaagcggucaacaaucugguggaacucaaguccacacagcagaaaagcguucugcgggugggaacgcuuaccucugacgaucugcucacacuggcugccgaccuugagaagcugaaauccaaggucauucgcaccgaaagaccccucagcucuggcguguauauggggaaccuguccacacagcaacuggagcagcggcgcgcccuccugaauaugaucggaaugguuggcggggcucagggaacccagccuggcagagauggcgugguccgggugugggacgugaaaaacccggaucuucugaauaaccaauucgggacaaugcccagccucacccuggccugucuuacgaagcagggacaggucgaccugaaugaugcuguucucgcccugaccgaccugggccucauuuacacagcgaaguauccuaacucuuccgaccuggaucgccuuagccaaucccaucccauccugaauaugguggacaccaaaaagucuagccucaacauuuccggguacaauuuuagccugggagccgcugugaaagccggcgcuugcaugcuugaugggggaaacaugcuggagacaaucaaggucaccccucagacgauggacggcauccucaaaucuauucugaaggugaaaaagucccugggcauguucguuagcgauacacccggggaaagaaauccuuaugagaacauccucuacaagauuugucugucuggagacggcuggccguauaucgccagccggaccuccauuguggggcgcgcgugggaaaacacaaucgucgaucuugagucugacggaaaaccccagaaggugggcaccgccgggagcaauaaaucccugcagagcgcuggauuuccuaccggccucacauacucucaacugaugacgcugaaggauuccaugaugcagcuugaccccagcgccaaaaccuggauugauaucgagggcagaccugaagaccccguugagaucgcucucuaccagccgaugucugggugcuauauucacuucuuucgggaaccuacagaccugaagcaguucaagcaagaugccaaauacucccauggaaucgacguggccgaucuguuucccgcucagccuggccucaccagcgcggucauugaggcccugcccagaaacauggugcuuacaugucagggguccgacgauaucaagcgccugcucgacucucagggacggagagauauuaaacugaucgacaucgcucugagcaaggccgauucccgccgguucgaaaaugccgucugggaccaaugcaaagaucuuugucacaugcauaccggcgugguuguggagaagaagaaaagagggggcaaggaggaaauuacgccccacugcgcucucauggacuguaucauguaugaugccgcggucucuggaggccugaacauuccugugcugcgcgcuguucucccgcgggacaugguguuuagaacaagcucccccaaagucgugcugugaggacuagucccuguucccagagcccacuuuuuuuucuuuuuuugaaauaaaauagccugucuuucagaucuaaaaaaaaaaaaaaaaaaaaaaaaaaaaaaaaaaaaaaaaaaaaaaaaaaaaaaaaaaaaaaaaugcaucccccccccccccccccccccccccccccccaaaggcucuuuucagagccaccagaauu

SEQ ID NO: 10269 - RNA, 2005 nt, Artificial Sequence
  mRNA product Design a-2 comprising derived and/or modified sequence from LASV(Nig08-04;Clade II)__ADU56611__NP (opt5)
gggagaguccgcucagccagguugcagaagcggcuuagcguguguccuaaucuucucucugcguguagguaggccugugccgcaaacaagcuuaccaugagcgccuccaaggaggugaaaucuuuccuguggacccagagccucagacgggaacuguccggcuacugcucuaacaucaaacuucaagucguuaaggacgcucaggcccugcuccacgggcuggauuuuagcgagguguccaaugugcagcgccuuaugagaaagcagaaacgggacgauggagaccugaagcgccucagagaucugaaccaagcggucaauaaccugguggaacucaagucuacccagcagaaaagcguucugcgggugggcacgcuuaccuccgacgaucugcucacacuggcugccgaccuugagaagcugaaaagcaaggucauucgcaccgaaagaccccucucuuccgggguguauaugggaaaucugagcacacagcaacuggagcagcggaaagcccuccugucuaugaucggcaugguugggggagcucagggcacccagccuggccgcgaugggguggucagagugugggacgugaagaacccggaucuucugaauaaccaauucggaacaaugcccucccucacccuggccugucuuacgaagcagggccaggucgaccugaaugaugcuguucucgcccugaccgaccuggggcucauuuacacagcgaaauauccuaacagcucugaccuggaucggcuuucccaaagccaucccauccugaauaugguggacaccaagaaauccucucucaacauuagcggauacaauuuuucccugggcgccgcugugaaggccggggcuugcaugcuugauggaggcaacaugcuggagacaaucaaagucaccccucagacgauggacggcauccucaagagcauucugaaagugaagcgcucucuggggauguucguuuccgauacacccggagaaagaaauccuuaugagaacauccucuacaagauuugucugagcggcgacggguggccguauaucgccucucggaccagcauugugggacgcgcgugggaaaacacaaccgucgaucuugaguccgacggcaaaccccagaagguggggaccgccggaucuaauaaaagccugcaguccgcuggcuuuccuacaggccucacguacagccaacugaugacccugaaggauucuaugaugcagcuugaccccuccgccaaaacauggaucgauauugaggggagaccugaagaccccguugagaucgcucucuaccagccgaugagcggaugcuauauccacuucuuucgggaaccuaccgaccugaagcaguucaagcaagaugccaaauacucucauggcauugacgugacagaucuguuuuccgcccagcccgggcucaccagcgcugucaucgaggcgcugccuagaaacauggugcuuacgugucagggauccgacgauauuaagaaacugcucgacucucagggccgccgggauaucaagcugauugacaucagccugaauaaagccgauuccagacgcuucgaaaacgcugucugggaccaaugcaaggaucuuugucacaugcauacaggggugguuguggagaagaaaaagcggggcggaaaagaggaaaucacaccccacugcgcccucauggacuguauuauguuugaugccgcugucucuggcgggcugaauauccccauucugagagccgugcucccucgcgacaugguuuuccggaccagcuccccgaaggugguccugugaggacuagucccuguucccagagcccacuuuuuuuucuuuuuuugaaauaaaauagccugucuuucagaucuaaaaaaaaaaaaaaaaaaaaaaaaaaaaaaaaaaaaaaaaaaaaaaaaaaaaaaaaaaaaaaaaugcaucccccccccccccccccccccccccccccccaaaggcucuuuucagagccaccagaauu

SEQ ID NO: 10270 - RNA, 2008 nt, Artificial Sequence
  mRNA product Design a-2 comprising derived and/or modified sequence from LASV(GA391;Clade III)__AAA46284__NP (opt5)
gggagaguccgcucagccagguugcagaagcggcuuagcguguguccuaaucuucucucugcguguagguaggccugugccgcaaacaagcuuaccaugagcgccuccaaggaggugagaucuugccuguggacccagagccuccggcgcgaacuguccggcuacuguucuaacaucaaacuucaagucguuaaggacgcucaggcccugcuccacgggcuggauuucagcgagguguccaaugugcagagacuuaugcggaaacagaagcgcgacgauggagaccugaaaagacuccgggaucugaaccaagcggucaauaaccugguggaacucaagucuacacagcagaaaagcguucugcgcgugggcacgcuuuccagcgacgaucugcucauucuggcugccgaccuugagaaacugaagucuaaagucaccagaacagaacggccccucuccagcgggguguauaugggaaaucugucuucccagcaacuggaucagcgcagagcccuccugaacaugaucggcaugaccgggguuagcggaggcggcaagggggcuucuaauggaauugugcgggucugggacgugaaaaacgccgagcuucugaauaaccaguuuggcacaaugccuucccucacccuggcuugccuuacaaagcaggggcaaguggaucugaaugacgccguccaggcgcucaccgaucugggacugaucuacacggccaaguauccgaacagcuccgaccucgaccgccugucucagagccaucccauucuuaauaugaucgauaccaaaaaguccagccugaacaucucuggcuacaauuucucccucggggcugccguuaaagcuggagccuguaugcuggacggcggcaacaugcuugagacaauuaaggugagcccucaaaccauggaugggauccugaaaucuauucucaaggugaaaaagagccugggaauguuugucuccgacacacccggcgaaagaaacccuuaugagaauauccuguacaagauuugccucucuggggauggauggagcuauaucgcgucccggaccagcauugugggccgcgccugggaaaacacgguuguggaccuggagcaggauaauaaaccccagaagaucgggaacggaggcucuaauaaaucccuucagagcgcuggcuucgccgcugggcugaucuacucucaacucaugacacugaaggacuuuaaauguuucaaccugauuccuaaugccaagaccuggauggauaucgagggaagaccggaagaccccgucgagauugcccuuuaccagccuuccagcggcugcuaugugcacuuuuuccgggaacccacagaucucaagcaguuuaaacaggacgcuaaguacucccaugggagagacguuaccgaucuguucgcggcccaaccuggacugaccucugcugugaucgaggcccucccccgcaacauggucauuacaugucagggcagcgaagacauccggaaacugcuugagucccaggggagacgcgauaucaagcugauugacaucacgcucucuaaagccgauagccggaaguuugagaaugcugugugggaccaguucaaggaucugugccacaugcauaccggcgucgugguugaaaagaagaaaagaggaggcaaggaggaaauuacaccgcacugugcccugauggacugcaucauguuugaugcggcuguguccgggggacuugacgccaaaguccuccgcgugguucugccucgggauaugguguucagaaccagcacacccaaggucgugcugugaggacuagucccuguucccagagcccacuuuuuuuucuuuuuuugaaauaaaauagccugucuuucagaucuaaaaaaaaaaaaaaaaaaaaaaaaaaaaaaaaaaaaaaaaaaaaaaaaaaaaaaaaaaaaaaaaugcaucccccccccccccccccccccccccccccccaaaggcucuuuucagagccaccagaauu

SEQ ID NO: 10271 - RNA, 2005 nt, Artificial Sequence
  mRNA product Design a-2 comprising derived and/or modified sequence from LASV(Nig08-A19;Clade III)__ADU56619__NP (opt5)
gggagaguccgcucagccagguugcagaagcggcuuagcguguguccuaaucuucucucugcguguagguaggccugugccgcaaacaagcuuaccaugagcgccuccaaggaggugaaaucuuuccuguggacccagagccucagacgggaacuguccggcuacugcucuaacaucaaacuucaagucguuaaggacgcucaggcccugcuccacgggcuggauuuuagcgagguguccaaugugcagcgccuuaugagaaagcagaaacgggacgauggagaccugaagcgccucagagaucugaaccaagcggucaauaaccugguggaacucaagucuacacagcagaaaagcguucugcgggugggcacgcuuuccagcgacgaucugcucguccuggcugccgaccuugagaagcugaaaucuaaggugguucgcaccgaaagaccccucuccagcgggauuuauaugggaaaucugucuucccagcaacuggaucagcggaaagcccuccugaacaugaucggcaugacagggggaaauggcggccgcaacaccacaagcgacgggauugugagagucugggaugugaagaaugcugagcuucugaacaaucaguucggaaccaugccuucucucacacuggccugucuuaccaagcagggccaaguggaccugaacgaugcuguccaggcccucacggaccuggggcugaucuacaccgcgaaauaucccaauuccagcgaccucgaucggcuggcccagucccauccgauucuuaacaugaucgacacaaagaaaucuagccugaauaucuccggauacaacuuuagccucggcgcugccguuaaggcuggggccugcaugcuggauggaggcaacaugcuugagaccauuaaagugucuccucaaacaauggacggcauccugaaguccauucucaaagugaagcgcagccuggggauguucaucucugauacccccggagaaagaaauccuuaugagaacauucuguacaagaucugucucagcggcgacggguggcccuauauugcgucccggacgucuaucgucggacgcgccugggaaaauacagugguugaucuggagagcgacaacaaaccucagaagaccggcaaugggggauccaacaaaagccuucagucugcuggcuuugccgcuggccugacauacucccagcucaugacccugaaggauagcaugcugcaacuugacccgaaugccaaaaccuggauggauaucgaggggagacccgaagacccuguggagauugcccucuaccagcccucuuccggaugcuauauccacuucuuucgggaaccuacagaccugaagcaguucaagcaggaugcuaaauacagccauggcauugacgucacggaucuguuugcggcccaacccgggcucaccuccgcugugaucgaggcccugccgagaaacaugguuauuacaugucagggaucugaagacauccgcaaacuucuggagagccagggccggagagauaucaagcucauugacaucucccugucuaagguggauagccgcaaauucgagaaugccgucugggaccaguuuaaggaucugugccacaugcauaccgggauuguggucgaaaagaaaaagcggggcggaaaagaggaaaucacaccucacugugcucuuauggacugcauuauguucgaugccgcgguguccggcgggguugacgcuaaggugcucagagccguccugccccgcgauaugguguuucggaccagcacgccuaaaguugugcugugaggacuagucccuguucccagagcccacuuuuuuuucuuuuuuugaaauaaaauagccugucuuucagaucuaaaaaaaaaaaaaaaaaaaaaaaaaaaaaaaaaaaaaaaaaaaaaaaaaaaaaaaaaaaaaaaaugcaucccccccccccccccccccccccccccccccaaaggcucuuuucagagccaccagaauu

SEQ ID NO: 10272 - RNA, 2005 nt, Artificial Sequence
  mRNA product Design a-2 comprising derived and/or modified sequence from LASV(G1180-SLE-2010;Clade IV)__AIT17169__NP (opt5)
gggagaguccgcucagccagguugcagaagcggcuuagcguguguccuaaucuucucucugcguguagguaggccugugccgcaaacaagcuuaccaugagcgccuccaaggagaucaaaucuuuccuguggacccagagccucagacgggaacuguccggcuacugcucuaacauuaagcugcaaguggucaaagacgcucaggcccugcuccacgggcuggauuuuagcgagguuuccaaugugcagcgccuuaugagaaaggaacggcgcgacgauaacgaccugaaaagacuccgggaucugaaucaggcggugaacaaucuggucgagcucaagucuacacaacaaaagagcauccugcgcgugggaacgcuuaccuccgacgaucugcucauucuggcugccgaccuugaaaaacuuaagagcaaaguuaucagaacagagcggccccucucugccggcguguauauggggaaccuguccagccagcagcuggaucagcgcagagcucuccugucuaugauuggaauguccagcggcaaucagcgggcccaggcugggcgcgacggagucgugagaguuugggaugugaagaacgucgagcuucugaauaaccaguucggcaccaugccuucucucacacuggccugucuuaccaaacaaggccagguggaccugaaugaugcggugcaggcccucacagaccuggggcugaucuacaccgcuaaguauccgaacacguccgaccucgaucggcugacccaaagccaucccauccuuaauaugauugacacaaagaaauccucucugaacaucagcggauacaauuuuucccucggcgccgcugucaaggccggggcgugcaugcuggauggaggcaacaugcuugaaaccauuaaaguuagcccucagacaauggacgggauccugaagucuauucucaaagugaagaaagcccugggaauguucaucuccgauacccccggcgagcgcaacccuuaugaaaauauucuguacaagaucugucucagcggcgacggguggcccuauaucgcuucuagaacgagcauuacaggacgggccugggagaacaccguggucgaucuggaguccgacggcaagccucagaaagcugggucuaauaacagcaauaagucccuucagagcgugggauuuacagccggccugaccuacucucaacucaugacccugaaagaugccaugcugcagcuugacccgaacgcuaagacauggauggauaucgaagggagacccgaggacccuguugaaauugcgcucuaccagcccuccagcggaugcuauauccacuucuuucgcgagccuacggaccugaaacaguucaagcaagaugccaaguacucucauggcauugacgugaccgaucuguuugcugcccagcccggccucacauccgccgucaucgacgcucugccgcggaauauggugaucaccugucaggggagcgaugacauuagaaaacuucuggaaucccagggacgcaaggauaucaaacucauugacaucgcccugucuaagacagauagccggaaauaugagaacgcgguuugggaccaauacaaggaucugugccacaugcauaccggcguggucguggagaagaaaaagagagggggaaaagaagagauuacgccucacugugcucuuauggacugcaucauguucgaugccgccgucuccggcgggcucaauacaucugugcugcgcgcuguucugccccgggacaugguguuuagaaccagcaccccucgcgucgugcucugaggacuagucccuguucccagagcccacuuuuuuuucuuuuuuugaaauaaaauagccugucuuucagaucuaaaaaaaaaaaaaaaaaaaaaaaaaaaaaaaaaaaaaaaaaaaaaaaaaaaaaaaaaaaaaaaaugcaucccccccccccccccccccccccccccccccaaaggcucuuuucagagccaccagaauu

SEQ ID NO: 10273 - RNA, 2005 nt, Artificial Sequence
  mRNA product Design a-2 comprising derived and/or modified sequence from LASV(G1442-SLE-2011;Clade IV)__AIT17181__NP (opt5)
gggagaguccgcucagccagguugcagaagcggcuuagcguguguccuaaucuucucucugcguguagguaggccugugccgcaaacaagcuuaccaugagcgccuccaaggaggugaaaucuuuccuguggacccagagccucagacgggaacuguccggcuacugcucuaacaucaaacuucaagucguuaaggacgcucaggcccugcuccacgggcuggauuuuagcgagguguccaaugugcagcgccuuaugagaaagcagcggcgcgacgauaacgaccugaaaagacuccgggaucugaaucaagcggucaacaaucugguggaacucaagucuacacagcaaaagagcguucugcgcgugggaacgcuuaccuccgacgaucugcucguccuggcugccgaccuugagaaacuuaagagcaaagugauuagaacagaacggccccucucugccggcguuuauauggggaaccuguccagccagcagcuggaucagcgcagagcucuccugaauaugaucggaaugucuggcgggauucagggaacccggacaggccgcgacggcguggucagagugugggaugugaagaacgccgaccuucugaauaaccaguucgggaccaugccuucccucacacuggcuugucuuaccaaacaaggacaggucgaucugaaugacguugugcaggcccucacggaccugggccugaucuacaccgcgaaguauccgaacgccagcgaucucgaccggcugacacaaucucaucccauucuuaauaugaucgauaccaagaaauccagccugaacaucuccggguacaauuuuucucucggagcugccgugaaggcuggcgccugcaugcuggacgggggaaacaugcuugagacaauuaaagucagcccucagaccauggauggcauccugaaguccauucucaaagugaagaaaacgcugggcauguucaucagcgacacacccggggagcgcaacccuuaugaaaauauucuguacaagaucugucucucuggagauggcuggcccuauauugcguccagaaccagcaucacagggcgggccugggagaacaccguuguggaccuggaaucugauggaaagccucagaaagcuggcagcaauaacuccaauaagucucuucagagcgccggguuugcugccggacugaccuacucccaacucaugacacugaaagacgccaugcugcagcuugauccgaacgcuaagacguggauggacaucgagggcagacccgaggacccugucgaaauugcgcucuaccagcccagcucuggcugcuauauccacuucuuucgcgagccuaccgaucugaaacaguucaagcaagacgccaaguacucccaugggauugaugugacagaccuguuugcugcccagcccggacucaccagcgccguuaucgaagcucugccgcggaauauggugauuacaugucagggcucugaugacaucaaaaagcugcuggagucccaggggagaaaagauaucaagcucauugacaucgcccugagcaaaaccgauucccgcaaguaugaaaacgcggucugggaccaauacaaggaucugugccacaugcauacgggaguggucguggagaaaaagaaacggggcgggaaggaggaaauuacaccucacugugcucuuauggacugcaucauguucgaugccgccguuucuggcggacucaauacccuggugcugagagcuguccucccccgcgacaugguguuucggaccagcacaccuagaguugugcugugaggacuagucccuguucccagagcccacuuuuuuuucuuuuuuugaaauaaaauagccugucuuucagaucuaaaaaaaaaaaaaaaaaaaaaaaaaaaaaaaaaaaaaaaaaaaaaaaaaaaaaaaaaaaaaaaaugcaucccccccccccccccccccccccccccccccaaaggcucuuuucagagccaccagaauu

SEQ ID NO: 10274 - RNA, 2005 nt, Artificial Sequence
  mRNA product Design a-2 comprising derived and/or modified sequence from LASV(G3010-SLE-2013;Clade IV)__AIT17345__NP (opt5)
gggagaguccgcucagccagguugcagaagcggcuuagcguguguccuaaucuucucucugcguguagguaggccugugccgcaaacaagcuuaccaugagcgccuccaaggagaucaaaucuuuccuguggacccagagccucagacgggaacuguccggcuacugcucuaacauuaaacuucaaguggucaaagacgcucaggcccugcuccacgggcuggauuuuagcgagguuuccaaugugcagcgccuuaugagaaaggaacggcgcgacgauaacgaccugaaaagacuccgggaucugaaucaggcggugaacaaucuggucgagcucaagucuacacaacaaaagagcauccugcgcgugggaacgcuuaccuccgacgaucugcucauucuggcugccgaccuugaaaaacuuaagagcaaaguuacaagaaccgagcggccccucucugccggcguguauauggggaaccuguccagccagcagcuggaucagcgcagagcucuccugucuaugaucggaauguccagcggcguccagggggcccgggcuggacgcgacggcgugguuagagugugggaugucaagaaugccgagcuucugaacaaucaguucggcacaaugccuucucucacccuggcgugucuuacaaaacaggggcaaguggaccugaacgaugugguccaggcccucaccgaccugggacugauuuacacggcuaaguauccgaauaccuccgaccucgaucggcugacacagagccaucccauccuuaacaugaucgacaccaagaaauccucucugaauauuagcggcuacaacuuuucccucggggccgcuguuaaggccggagcgugcaugcuggauggcgggaauaugcuugaaacaaucaaagugagcccucaaaccauggacggcauucugaagucuauccucaaagugaagaaagcccugggaauguucauuuccgagacgcccggcgaacgcaacccuuaugagaacauccuguacaagauuugucucagcggggauggauggcccuauaucgcuucuagaacaagcaucaccggccgggccugggagaauacagucguggaccuggaauccgaugggaagccucagaaagcuggaucuaacaauagcaacaagucccuucagagcgccggcuuuaccgccgggcugaccuacucucagcucaugacacugaaagacgcuaugcugcaacuugauccgaaugcgaagacguggauggacauugagggaagacccgaagauccuguugagguggcccucuaccagcccuccagcggcugcuauauccacuucuuucgcgaaccuaccgaccugaaacaguucaagcaggacgcuaaguacucucauggcauugaugucacagaccuguuugccgcccaacccgggcucaccuccgcugugaucgaugcccugccgcggaacaugguuauuacaugucagggaagcgacgauaucaaaaagcugcuggagucccagggcagaaaagacaucaagcucauugauaucgcgcugucuaaaaccgacagccgcaaguaugagaaugcugugugggaucaguacaaggaccugugccacaugcauacgggggucguggucgaaaagaagaaacggggaggcaaggaggaaauuacaccucacugugcccuuauggauugcaucauguucgacgccgcuguguccgggggccucaacaccucuguucugagagccgugcugccccgcgauauggucuuucggaccagcacaccuagagugguucucugaggacuagucccuguucccagagcccacuuuuuuuucuuuuuuugaaauaaaauagccugucuuucagaucuaaaaaaaaaaaaaaaaaaaaaaaaaaaaaaaaaaaaaaaaaaaaaaaaaaaaaaaaaaaaaaaaugcaucccccccccccccccccccccccccccccccaaaggcucuuuucagagccaccagaauu

SEQ ID NO: 10275 - RNA, 2005 nt, Artificial Sequence
  mRNA product Design a-2 comprising derived and/or modified sequence from LASV(G502-SLE-2009;Clade IV)__AIT17127__NP (opt5)
gggagaguccgcucagccagguugcagaagcggcuuagcguguguccuaaucuucucucugcguguagguaggccugugccgcaaacaagcuuaccaugagcgccuccaaggagaucaaaucuuuccuguggacccagagccucagacgggaacuguccggcuacugcucuaacauuaagcugcaaguggucaaagacgcucaggcccugcuccacgggcuggauuuuagcgagguuuccaaugugcagcgccuuaugagaaaggaacggcgcgacgauaacgaccugaaaagacuccgggaucugaaucaggcggugaacaaucuggucgagcucaagucuacacaacaaaagagcauccugcgcgugggaacgcuuaccuccgacgaucugcucauucuggcugccgaccuugaaaaacuuaagagcaaaguuaucagaacagagcggccccucucugccggcguguauauggggaaccuguccagccagcagcuggaucagcgcagagcucuccugucuaugauuggaauguccggcgggaaucagggaguccgggccggcaaggacggcgugguucgcgugugggaugucaaaaacgcugagcuucugaauaaccaguucgggaccaugccuagccucacacuggccugucuuaccaagcagggacaaguggaccugaaugaugcggugcaggcccucacagaccugggccugaucuacaccgcuaaguauccgaacacgucugaccucgauagacugacccagucccaucccauccuuaauaugauugacaccaaaaagagcucccugaacaucucuggguacaauuuuagccucggagccgcugucaaagccggcgcgugcaugcuggaugggggaaacaugcuugaaacaauuaagguuuccccucaaacaauggacggcauccugaaaagcauucucaaggugaaaaaggcccugggcauguucaucucugauacccccggggagcggaacccuuaugaaaauauucuguacaagaucugucucuccggagacggcuggcccuauaucgcuagccgcacgucuauuacagggagagccugggagaacaccguggucgaucuggagagcgacggaaaaccucagaaggcuggcuccaauaacucuaauaaaagccuucaguccgccggguuuacagccggacugaccuacagccagcucaugacccugaaggaugcuaugcugcaacuugacccgaacacaaaaacguggauggauaucgaaggccggcccgaggacccuguggaaauugcgcucuaccagcccucuuccggcugcuauauccacuucuuuagagagccuaccgaccugaagcaguucaagcaggaugccaaauacagccaugggauugacguuacagaucuguuugcugcccaacccggacucaccucugccgugaucgacgcucugccgcgcaauauggucaucacaugucagggcuccgaugacauucggaaacuucuggaaagccaggggagaaaggauaucaagcucauugacaucgcccugaacaaaaccgauucccgcaaguaugagaaugcggugugggaccaguacaaggaucugugccacaugcauacgggaguuguggucgagaaaaagaaacggggcgggaaggaagagauuacaccucacugugcucuuauggacugcaucauguucgaugccgccgugucuggcggacucaacaccagcguccugagagcugugcugccccgcgacaugguuuuucggaccuccacaccuagagugguccucugaggacuagucccuguucccagagcccacuuuuuuuucuuuuuuugaaauaaaauagccugucuuucagaucuaaaaaaaaaaaaaaaaaaaaaaaaaaaaaaaaaaaaaaaaaaaaaaaaaaaaaaaaaaaaaaaaugcaucccccccccccccccccccccccccccccccaaaggcucuuuucagagccaccagaauu

SEQ ID NO: 10276 - RNA, 2005 nt, Artificial Sequence
  mRNA product Design a-2 comprising derived and/or modified sequence from LASV(G733-SLE-2010;Clade IV)__AIT17155__NP (opt5)
gggagaguccgcucagccagguugcagaagcggcuuagcguguguccuaaucuucucucugcguguagguaggccugugccgcaaacaagcuuaccaugagcgccuccaaggagaucaaaucuuuccuguggacccagagccucagacgggaacuguccggcuacugcucuaacauuaagcugcaaguggucaaagacgcucaggcccugcuccacgggcuggauuuuagcgagguuuccaaugugcagcgccuuaugagaaaggaacggcgcgacgauaacgaccugaaaagacuccgggaucugaaucaggcggugaacaaucuggucgagcucaagucuacacaacaaaagagcgugcugcgcguuggaacgcuuaccuccgacgaacugcucgugcuggcugccgaucuugagaaacuuaagagcaaagucaucagaacagagcggccccucucugccggcguguauauggggaaccuguccagccagcagcuggaccagcgcagagcucuccugucuaugauuggaauguccggcgggaaucagggagcccggaccggccgcgauggcguugugagagucugggacgugaagaacgcugaacuucugaauaaccaguucgggacaaugccuagccucacccuggccugucuuacaaaacagggacaaguggaucugaaugacgcgguccaggcccucaccgaucugggccugaucuacacggcuaaguauccgaacaccucugaccucgaccggcugacacagucccaucccauucuuaauaugaucgauaccaagaaaagcucccugaacaucucuggguacaauuuuagccucggagccgcuguuaaggccggcgcgugcaugcuggacgggggaaacaugcuugagacaauuaaaguguccccucaaaccauggauggcauccucaagagcauucugaaagugaagaaagcccugggcauguucaucucugacacgcccggggaacgcaacccuuaugagaauauucuguacaagaucugucucuccggagauggcuggcccuauauugcuagcagaacaucuaucaccgggcgggccugggagaacacagucguggaccuggaaagcgauggaaagccucagaaagcuggcuccaauaacucuaauaagagccuucaguccgccggguuuaccgccggacugaccuacagccagcucaugacacugaaagacgcuaugcugcaacuugauccgaacgcgaagacguggauggacaucgagggcagacccgaagauccuguugagauugcccucuaccagcccucuuccggcugcuauauccacuucuuucgcgaaccuaccgaccugaaacaguucaagcaggacgcuaaguacagccaugggauugaugugacagaccuguuugccgcccaacccggacucaccucugcugucaucgaugcccugccgcggaauauggugauuacaugucagggcuccgacgauaucagaaaacuucuggagagccaggggcgcaaggacaucaaacucauugauaucgcgcuguccaagauugacucucggaaauaugagaacgcuguuugggaucaguacaaggaccugugccacaugcauaccggaguggucguggaaaagaaaaagagaggcgggaaagaggaaaucacgccucacugugcccuuauggauugcauuauguucgacgccgcugucagcggcggacucaauucccuggugcugcgcgccguucucccccgggauaugguguuuagaacaucuaccccucgcgucgugcugugaggacuagucccuguucccagagcccacuuuuuuuucuuuuuuugaaauaaaauagccugucuuucagaucuaaaaaaaaaaaaaaaaaaaaaaaaaaaaaaaaaaaaaaaaaaaaaaaaaaaaaaaaaaaaaaaaugcaucccccccccccccccccccccccccccccccaaaggcucuuuucagagccaccagaauu

SEQ ID NO: 10277 - RNA, 2005 nt, Artificial Sequence
  mRNA product Design a-2 comprising derived and/or modified sequence from MOPV/LASV reassortant(IGS-1;Clade IV)__AFY05578__NP (opt5)
gggagaguccgcucagccagguugcagaagcggcuuagcguguguccuaaucuucucucugcguguagguaggccugugccgcaaacaagcuuaccaugagcgccuccaaggagaucaaaucuuuccuguggacccagagccucagacgggaacuguccggcuacugcucuaacauuaaacuucaaguggucaaggacgcucaggcccugcuccacgggcuggauuuuagcgagguuuccaaugugcagcgccuuaugagaaaggaacggcgcgacgauaacgaccugaaaagacuccgggaucugaaucaggcggugaacaaucuggucgagcucaagucuacacaacaaaagagcauccugcgcgugggaacgcuuaccuccgacgaucugcucauucuggcugccgaccuugaaaaacugagaagcaagguuauccggacagagcgcccccucucugccggcguguauauggggaaccuguccagccagcagcuggaucagagacgggcucuccugaauaugauuggaaugucuggcgggaaccagggagcccgcgcuggcagagacggcgucgugcggguuugggaugugaaaaaugccgagcuucuguccaaccaguucgggaccaugccuagccucacacuggcgugucuuaccaagcagggacaagucgaccugaaugaugccgugcaggcucucacagaccugggccugaucuacaccgccaaauauccgaacacgucugaccucgaucgccugacccagucccaucccauccuuaauaugauugacacaaagaaaagcucccugaacaucucuggguacaauuuuagccucggagcugccgugaaggcgggcgccugcaugcuggaugggggaaacaugcuugaaaccauuaaggucuccccucaaacaauggacggcauccugaaaagcauucucaagguuaaaaaggcucugggcauguucaucucugauacccccggggagagaaacccuuaugaaaauauucuguacaaaaucugucucuccggagacggcuggcccuauaucgccagccggacgucuauuacagggagagcuugggagaacaccgugguggaucuggagagcgacggaaagccucagaaggccgauuccaauaacucuagcaaaucccuucagagcgccggcuuuacagcugggcugaccuacucucagcucaugacccugaaggacgcgaugcugcaacuugauccgaaugccaaaacauggauggacaucgaaggacgccccgaggacccugucgaaauugcucucuaccagcccuccagcggcugcuauauccacuucuuucgggagccuacggaucugaagcaguucaaacaggacgccaaguacucucauggcauugaugugaccgaccuguuugccacacaacccgggcucaccuccgcuguuaucgaugcccugccgagaaacauggugaucacaugucagggaagcgacgauauucgcaaacuucuggaaucccagggccggaaggacaucaagcucauugauaucgaccugucuaaaaccgauagcagaaaguaugagaaugcggucugggaccaguacaaagaucugugccacaugcauacgggggugguuguggagaagaagaaacgcggaggcaaggaagagauuacaccucacugugcucuuauggacugcaucauguucgacgccgccgucuccgggggccucaacaccucugugcugcgggcuguccugcccagagauaugguguuucgcaccagcacaccucggguugugcucugaggacuagucccuguucccagagcccacuuuuuuuucuuuuuuugaaauaaaauagccugucuuucagaucuaaaaaaaaaaaaaaaaaaaaaaaaaaaaaaaaaaaaaaaaaaaaaaaaaaaaaaaaaaaaaaaaugcaucccccccccccccccccccccccccccccccaaaggcucuuuucagagccaccagaauu

SEQ ID NO: 10278 - RNA, 2005 nt, Artificial Sequence
  mRNA product Design a-2 comprising derived and/or modified sequence from LASV(LM765-SLE-2012;Clade IV)__AIT17815__NP (opt5)
gggagaguccgcucagccagguugcagaagcggcuuagcguguguccuaaucuucucucugcguguagguaggccugugccgcaaacaagcuuaccaugagcgccuccaaggagaucaaaucuuuccuguggacccagagccucagacgggaacuguccggcuacugcucuaacauuaagcugcaaguggucaaagacgcucaggcccugcuccacgggcuggauuuuagcgagguuuccaaugugcagcgccuuaugagaaaggaacggcgcgacgauaacgaccugaaaagacuccgggaucugaaucaggcggugaacaaucuggucgagcucaagucuacacaacaaaagagcauccugcgcgugggaacgcuuaccuccgacgaucugcucauucuggcugccgaccuugaaaaacuuaagagcaaaguuacaagaaccgagcggccccucucugccggcguguauauggggaaccuguccagccagcagcuggaucagcgcagagcucuccuggacaugaucggaaugucuggcuccaaucagggggcccgggcuggacgcgauggcgucgugagaguuugggacgugaagaacgccgagcuucugaauaaccaguucggcacaaugccuagccucacccuggcgugucuuacaaaacaggggcaagucgaucugaaugacgccgugcaggcucucaccgaccugggacugauuuacacggccaaguauccgaacaccucugaucucgaccggcugacacagucccaucccauccuuaauaugaucgauaccaagaaaagcucccugaacauuucuggcuacaauuuuagccucggggcugccgugaaggcgggagccugcaugcuggacggcgggaacaugcuugaaacaaucaaagucuccccucaaaccauggauggcauucucaagagcauccugaaaguuaagaaagcucugggaauguucauuucugacgcccccggcgagcgcaacccuuaugaaaauauccuguacaagauuugucucuccggggauggauggcccuauaucgcuagcagaacgucuaucacaggccgggccugggagaacaccgugguggaccuggagagcgaugggaagccucagaaagccggauccaauggcucuaacaagagccuucaguccgcuggguuuacagcgggacugaccuacagccagcucaugacccugaaagacgccaugcugcaacuugauccgaaugcuaagacauggauggacauugaaggcagacccgaggacccugucgaaaucgcccucuaccagcccucuuccggcugcuauauucacuucuuucgcgagccuacggaucugaaacaguucaagcaggacgccaaguacagccaugggaucgaugugaccgaccuguuugcugcccaacccggacucacaucugcgguuauugaugcucugccgcggaacauggugaucaccugucagggcuccgacgauaucagaaaacuuuucgaaagccaggggcgcaaggacauuaaacugaucgauauugcccucuccaagacagacucucggaaauaugagaaugccgucugggaucaguacaaggaccugugccacaugcauaccggaaucgugguugagaagaaaaagagaggcgggaaagaagagauuacgccucacugugcucugauggauugcaucauguuugacgccgcugugagcggcggacuuaacacauccguccuccgcgccgugcugccccgggacauggucuucagaaccucuaccccucgcgugguucugugaggacuagucccuguucccagagcccacuuuuuuuucuuuuuuugaaauaaaauagccugucuuucagaucuaaaaaaaaaaaaaaaaaaaaaaaaaaaaaaaaaaaaaaaaaaaaaaaaaaaaaaaaaaaaaaaaugcaucccccccccccccccccccccccccccccccaaaggcucuuuucagagccaccagaauu

SEQ ID NO: 10279 - RNA, 2005 nt, Artificial Sequence
  mRNA product Design a-2 comprising derived and/or modified sequence from LASV(LM776-SLE-2012;Clade IV)__AIT17825__NP (opt5)
gggagaguccgcucagccagguugcagaagcggcuuagcguguguccuaaucuucucucugcguguagguaggccugugccgcaaacaagcuuaccaugagcgccuccaaggagaucaaaucuuuccuguggacccagagccucagacgggaacuguccucuuacugcagcaacauuaaacuucaaguggucaaggacgcucaggcccugcuccacggccuggauuuuuccgagguuucuaaugugcagcgccuuaugagaaaggaacggcgcgacgauaacgaccugaaaagacuccgggaucugaaucaggcggugaacaaucuggucgagcucaagagcacacaacagaaguccauccugcgcguggggacgcuuaccagcgacgaucugcucauucuggcugccgaccuugaaaaacugaagucuaaaguuacaagaaccgagcggccccucuccgccggaguguauaugggcaaccugagcucucagcagcuggaucaacgcagagcucuccuguccaugaucgggaugagcggaucuaaucagggcgcccgggcugggcgcgacggagucgugagaguuugggaugugaagaacgccgagcuucugaauaaccaguucggcacaaugccuucccucacccuggcgugucuuacaaaacagggccaagucgaccugaaugaugccgugcaggcucucaccgaccuggggcugauuuacacggccaaguauccgaacaccagcgaccucgaucggcugacacagucccaucccauccuuaauaugaucgacaccaagaaaucuagccugaacauuuccggauacaauuuuagccucggcgcugccgugaaggcgggggccugcaugcuggauggaggcaacaugcuugaaacaaucaaagucucuccucaaaccauggacgggauucugaaguccauccucaaaguuaagaaagcucugggaauguucauuagcgauacgcccggcgagcgcaacccuuaugaaaauauccuguacaagauuugucucucuggcgacggguggcccuauaucgccagcagaacauccaucaccggacgggcuugggagaacacagugguggaucuggagucugacggcaagccucagaaagccgggagcaauaacuccaauaagagccuucagucugccggauuuaccgcuggccugaccuacucccagcucaugacacugaaagaugcgaugcugcaacuugacccgaacgccaagacguggauggauauugaagggagacccgaggacccugucgaaguggcucucuaccagcccagcucuggaugcuauauccacuucuuucgcgagccuaccgaccugaaacaguucaagcaggaugccaaguacucccauggcauugacguuacagaucuguuugccgcucaacccggccucaccagcgccgugaucgacgcgcugccgcggaauauggucauuacaugucagggguccgaugacaucagaaaacuucuggaaucucagggacgcaaggauaucaaacucauugacaucgcucugagcaagaccgauucccggaaauaugagaacgccgugugggaccaguacaaggaucugugccacaugcauacgggcguuguggucgagaagaaaaagagagggggaaaagaagagauuacaccucacugugcccuuauggacugcaucauguucgaugcugccgugucuggcgggcucaauaccagcguccugcgcgcugugcugccccgggacaugguuuuuagaaccuccacaccucgcgugguccucugaggacuagucccuguucccagagcccacuuuuuuuucuuuuuuugaaauaaaauagccugucuuucagaucuaaaaaaaaaaaaaaaaaaaaaaaaaaaaaaaaaaaaaaaaaaaaaaaaaaaaaaaaaaaaaaaaugcaucccccccccccccccccccccccccccccccaaaggcucuuuucagagccaccagaauu

SEQ ID NO: 10280 - RNA, 2005 nt, Artificial Sequence
  mRNA product Design a-2 comprising derived and/or modified sequence from LASV(Mad39;Clade IV)__ANH09723__NP (opt5)
gggagaguccgcucagccagguugcagaagcggcuuagcguguguccuaaucuucucucugcguguagguaggccugugccgcaaacaagcuuaccaugagcgccuccaaggagaucaaaucuuuccuguggacccagagccucagacgggaacuguccggcuacugcucuaacauuaagcugcaaguggucaaagacgcucaggcccugcuccacgggcuggauuuuagcgagguuuccaaugugcagcgccuuaugagaaagcagcggcgcgacgauaacgaccugaaaagacuccgggaucugaaucaagcggugaacaaucuggucgaacucaagucuacacagcaaaagagcgugcugcgcguuggaacgcuuaccuccgacgaucugcucacacuggcugccgaccuugagaaacuuaagagcaaagugaccagaacagaacggccccucaccgccggcgucuauauggggaaccugucuucccagcagcuggaucagcgcagagcucuccugaauaugaucggaaugagcggcgggaaccagggagcccggacaggccgcgacggcgugguuagagugugggaugucaagaaugcugagcuucugaacaaucaguucgggaccaugccuucucucacgcuggccugucuuaccaaacaaggacagguggaccugaacgaugugguccaggcgcucacagaccugggccugauuuacaccgccaaguauccgaauacauccgaccucgaucggcugacccaaagccaucccauccuuaacaugauugacacgaauaagucuucccugaacaucagcggguacaacuuuucccucggagcugccguuaaagcuggcgccugcaugcuggaugggggaaauaugcuugagacaaucaaggugucuccucagaccauggacggcauucugaaaagcauccucaaggugaaaaagucccugggcauguucauuagcgauacacccggggaacgcaacccuuaugagaauauccuguacaaaauuugucucucuggagacggcuggcccuauaucgcguccagaaccagcauuaccgggcgggccugggaaaacacagucguggaucuggagucuggaggcaagccucagaaggcugggagcaauaacuccaauaaaucucuucagagcgccggauuugcugccggccugacguacucccaacucaugacccugaaggacgccaugcugcagcuugauccgaacgcuaaaacauggauggacaucgagggcagacccgaagauccuguugagaucgcgcucuaccagcccauuagcgggugcuauauccacuucuuucgcgaaccuaccgaccugaagcaguucaaacaagacgccaaguacucucauggaauugaugugacagaccuguuugcugcccagcccggccucaccuccgccgucaucgaggcucugccgcggaauauggugauuacgugucaggggagcgaugacaucagaaaacuuuucgaaucucagggacgcaaggauaucaagcugauugacaucgcccucuccaaaacagauagccggaaguaugagaacgcgguuugggaccaauacaaagaucugugccacaugcauaccggcguggucguggagaagaagaaaaagggcgggaaagaagagauuaccccucacugugcucugauggacugcaucauguuugaugccgccgucuccggaggccuuaauacacucgugcugagagcuguucugccccgcgacaugguguuccggaccucuacaccuaaggucgugcucugaggacuagucccuguucccagagcccacuuuuuuuucuuuuuuugaaauaaaauagccugucuuucagaucuaaaaaaaaaaaaaaaaaaaaaaaaaaaaaaaaaaaaaaaaaaaaaaaaaaaaaaaaaaaaaaaaugcaucccccccccccccccccccccccccccccccaaaggcucuuuucagagccaccagaauu

SEQ ID NO: 10281 - RNA, 2005 nt, Artificial Sequence
  mRNA product Design a-2 comprising derived and/or modified sequence from LASV(Z0947-SLE-2011;Clade IV)__AIT17841__NP (opt5)
gggagaguccgcucagccagguugcagaagcggcuuagcguguguccuaaucuucucucugcguguagguaggccugugccgcaaacaagcuuaccaugagcgccuccaaggagaucaaaucuuuccuguggacccagagccucagacgggaacuguccggcuacugcucuaacauuaagcugcaaguggucaaagacgcucaggcccugcuccacgggcuggauuuuagcgagguuuccaaugugcagcgccuuaugagaaaggaacggcgcgacgauaacgaccugaaaagacuccgggaucugaaucaggcggugaacaaucuggucgagcucaagucuacacaacaaaagagcauccugcgcgugggaacgcuuaccuccgacgaucugcucauucuggcugccgaccuugaaaaacuuaagagcaaaguuacaagaaccgagcggccccucucugccggcguguauauggggaaccuguccagccagcagcuggaucagcgcagagcucuccugaauaugaucggaaugucuggcuccaaccagggggcccggacaggacgcgacggcgucgugagaguuugggaugugaagaaugcugagcuucugaacaaucaguucggcaccaugccuagccucacacuggccugucuuaccaaacaggggcaagucgaccugaacgaugcggugcaggcccucacggaccugggacugauuuacaccgcuaaguauccgaauacaucugaccucgaucggcugacccagucccaucccauccuuaacaugaucgacacaaagaaaagcucccugaauauuucuggcuacaacuuuagccucggggccgcugugaaggccggagcgugcaugcuggauggcgggaacaugcuugaaaccaucaaagucuccccucaaacgauggacggcauucucaagagcauccugaaaguuaagaaagcccugggaauguucauuucugaugcucccggcgagcgcaauccuuaugaaaacauccuguacaagauuugucucuccggggacggauggcccuauaucgccagcagaacaucuaucaccggccgggcuugggagaauacagugguggaucuggagagcgacgggaagccucagaaagccggauccaacggcucuaauaagagccuucaguccgccggguuuaccgcuggacugaccuacagccagcucaugacacugaaagaugcgaugcugcaacuugacccgaacgccaagacguggauggauauugaaggcagacccgaggacccugucgaaaucgcucucuaccagcccucuuccggcugcuauauucacuucuuucgcgagccuaccgaccugaaacaguucaagcaggaugccaaguacagccaugggaucgacgugacagaucuguuugccgcucaacccggacucaccucugccguuauugacgcgcugccgcggaauauggugaucacaugucagggcuccgaugacaucagaaaacuuuucgaaagccaggggcgcaaggauauuaaacugaucgacauugcucucuccaagaccgauucucggaaauaugagaacgccgucugggaccaguacaaggaucugugccacaugcauacgggaaucgugguugagaagaaaaagagaggcgggaaagaagagauuacaccucacugugcccugauggacugcaucauguuugaugcugccgugagcggcggacuuaauaccuccguccuccgcgcugugcugccccgggacauggucuucagaaccucuacaccucgcgugguucugugaggacuagucccuguucccagagcccacuuuuuuuucuuuuuuugaaauaaaauagccugucuuucagaucuaaaaaaaaaaaaaaaaaaaaaaaaaaaaaaaaaaaaaaaaaaaaaaaaaaaaaaaaaaaaaaaaugcaucccccccccccccccccccccccccccccccaaaggcucuuuucagagccaccagaauu

SEQ ID NO: 10282 - RNA, 2005 nt, Artificial Sequence
  mRNA product Design a-2 comprising derived and/or modified sequence from LASV(Josiah;Clade IV)__NP_694869__NP (opt6)
gggagaguccgcucagccagguugcagaagcggcuuagcguguguccuaaucuucucucugcguguagguaggccugugccgcaaacaagcuuaccaugagugcaucaaaagaaauaaaaucauuccuauggacacaaagccuaagaagggaacuaucaggcuauugcucaaacauaaaauuacaaguagucaaagacgcacaagcucucuuacacggucuagauuuuagugaaguaucaaacguucaaagauuaaugagaaaagagagacgagaugauaacgaccuaaaaagacuaagagaucuaaaucaagcaguaaacaaccuuguagaacuaaaaagcacacaacaaaaauccauccuacguguaggaacauuaacaagugaugacuuauuaauccuagcagcagaucuagaaaaacuuaaaagcaaagucauaagaacugaacgaccgcucagugcagguguauauaugggaaaucucucgucgcaacaauuagaucaaagaagagcacuacuuaauaugauaggaaugucaggaggaaaucaaggugcacgcgcaggaagagacggaguagugagaguaugggacguaaaaaacgcagaauuauuaaauaaccaauuuggaacaaugccauccuuaacuuuagccugucuaaccaaacaaggacaaguagaccuaaaugacgcaguacaagcacuaacugacuuaggacuuauauauacagccaaauauccaaauacaucagauuuagacagacucacacaaucacaccccauacuaaacaugauagacacaaaaaaaagcaguuuaaauauaucagguuacaauuuuucacuuggagcagcgguaaaagcaggcgccuguauguuagacggcgguaacauguuagaaacaauaaagguaagcccucaaacaauggauggaauacuaaaaaguauauuaaaaguaaaaaaagcacuaggaauguuuauaagugauaccccaggagaaagaaacccauacgaaaauauauuauacaaaauauguuuaaguggagauggauggccauauauagcauccagaaccagcauaacaggaagagcaugggaaaauaccguaguagaucuagaaucagauggaaaaccacaaaaagcagauucaaacaauaguaguaaaagccuccaaucagcagguuuuacagcaggacuaacauauagucaacuaaugacacuuaaagaugcaaugcuacaacuagauccaaaugcaaaaacauggauggauauagaaggacgaccagaagacccgguagaaauagcacuauaucaacccaguagcggaugcuacauucauuuuuuuagagaaccaacagaucuaaaacaauucaaacaagaugcaaaauauagucacggcauugacguaacagauuuauuugcaacacaaccaggauuaacaagugccgucauagaugcauuaccaagaaacaugguaauaacaugccaaggaagcgaugacauuagaaaacuacuagaaagucaaggaagaaaagacaucaaacugauagauaucgcguuaucaaaaacggacucacgaaaauaugaaaaugcaguuugggaccaauauaaagauuuaugccacaugcauacaggaguaguuguagaaaaaaaaaagagaggaggaaaagaagaaauaacaccacauugcgcauuaauggauugcauaauguuugaugccgcaguaagcggcggacuaaauacuucaguacuacgagcaguacuaccaagagauaugguauuucgaaccucuaccccaaggguaguauuauaaggacuagucccuguucccagagcccacuuuuuuuucuuuuuuugaaauaaaauagccugucuuucagaucuaaaaaaaaaaaaaaaaaaaaaaaaaaaaaaaaaaaaaaaaaaaaaaaaaaaaaaaaaaaaaaaaugcaucccccccccccccccccccccccccccccccaaaggcucuuuucagagccaccagaauu

SEQ ID NO: 10283 - RNA, 2005 nt, Artificial Sequence
  mRNA product Design a-2 comprising derived and/or modified sequence from LASV(LP;Clade I)__AAF86702__NP (opt6)
gggagaguccgcucagccagguugcagaagcggcuuagcguguguccuaaucuucucucugcguguagguaggccugugccgcaaacaagcuuaccaugucaaauagcaaagaaaucaaaucauuucuuuggacacaaucauuaagaagagaauuaucaggauauugcucaaacauaaaacuacaaguuguaaaagacgcucaagcacuacuucacggacuagacuucucugaaguaucaaauguacaaagauuaaugcgaaaacaaaaacgagaugaugcagaccuaaaaagacuaagagaccuaaaucaagcaguaaauaauuuaguagaacuaaaaucaacccaacagaaaaaugucuuaagagugggaaccuuaagcucagaugauuuaauaacacuagcagcagaccuagaaaaacuuaaaucaaaagucauaagaacagaacggccacuguccucaggaguauauauggguaauuuaucaucacaacaacuugaucagaggagagcccuacuaucaaugauuggaaugaguggagguccacaaggaaacagaacaggcggugacggcguaguuagaguaugggauguuaaaaacgcagaauuauuaaauaaucaauucggcaccaugccaagucuaacucuagcaugccuuacaaaacaaggacaaguagacuuaaacgaugcaguacaagcucuaacugaccugggcuuaauauauacagcaaaauauccuaauucaagcgacuuagacauguuaacacaaagccacccuauacuaggaaugguagacaccaagaaaaguaguuuaaacauaaguggauacaauuuuucacuuggggcggcagugaaagcaggggcauguaugcuugacggaggcaacaugcuagaaacgauaaaaguaucaccacaaacuauggauggcauucuaaaaagcauacuaaaaguaaaaagaagucuaggaauguuuauaucagacacgccaggagaaagaaauccauacgaaaauauacuauauaaaauaugcuuaucaggagaagguuggccauauaucgcuucaagaacaucaauaacagguagagcaugggaaaacacucuaguagaucuugaaagugacaauaaaccaccaaaacuuaauucagcaggaagcaauaaaucacuacaagcagcuggcuuaaaugccggacuaacauauucacaauuaaugacauuaaaagauugcauguuacaacuagauccuaguucaaaaaccuggaucgacaucgaaggaagaccagaagacccagucgaaaucgcacuauuucaaccaucaaguggaugcuacauucacuucuuuagagaaccaacagauuuaaaacaauucaaacaagacgcuaaauacagucacggaauagauguaacagaccuuuucagcacacaacccggauuaacaagugcaguuauagaagcacuacccagaaacaugguauuaacaugucaagguucagaugauaucaagaaacuauuagagucacaaggaagaagagauaucaaauuaauagauauaaguuuaaguaaagcagacucuagaaaauucgaaaacgcaguaugggaucaauacaaagaccuaugccacaugcauacaggaguuguaguagagaaaaagaaaagaggaggaaaagaagaaauaacaccacauugugcucuacuagacugcauaauguucgacgcagcaacuacuggaucacuaaacaucacaacacuaagagcaguccuacccagagauaugguauucagaacaagcacaccuaaaguaguacuauaaggacuagucccuguucccagagcccacuuuuuuuucuuuuuuugaaauaaaauagccugucuuucagaucuaaaaaaaaaaaaaaaaaaaaaaaaaaaaaaaaaaaaaaaaaaaaaaaaaaaaaaaaaaaaaaaaugcaucccccccccccccccccccccccccccccccaaaggcucuuuucagagccaccagaauu

SEQ ID NO: 10284 - RNA, 2005 nt, Artificial Sequence
  mRNA product Design a-2 comprising derived and/or modified sequence from LASV(803213;Clade II)__AAF86704__NP (opt6)
gggagaguccgcucagccagguugcagaagcggcuuagcguguguccuaaucuucucucugcguguagguaggccugugccgcaaacaagcuuaccauguccgcaucaaaagaagucaaaaguuuccuauggacacaaagccucagaagagaacuaucaggauacugcucaaacauuaaacuacagguaguaaaagaugcucaagcccuucuacacggacuagauuucucagaaguaaauaacguacaaagacuaaugagaaaacaaaaacgagacgauggggauuuaaaaagauuaagagaucuaaaccaagccguaaacaaucuaguagaauuaaaaucaacacaacaaaaaucuauauuaagaguaggaacacuaacuucagaugaccuauuaacacucgcagcagaucucgaaaaacucaaaucaaaaguaauaagaacugaaaggccacuaucuuccggcguuuacaugggaaaucuaucaacucaacaauuagaacaaagacgagcauuacuaaauaugaucggaauggucggcggagcacaaggaacucaaccuggaagggacgguguuguccgaguaugggacguaaaaaacccagauuuacucaauaaccaauuuggaacaaugccaagccucacacuagcuugccuaacgaagcaaggucaaguggacuuaaaugaugcaguauuagcacuaacugacuuaggauuaauauacacugccaaauauccuaacucaucagacuuagacagauuaucacaaagccacccgauauuaaacaugguagauacaaaaaaaucaaguuuaaacauuagcggcuacaacuucucacuaggugccgccguaaaagcaggugcaugcaugcuugauggaggaaauaugcuagaaacaauaaaagucacaccccaaacaauggacggaauacuaaaaaguauauuaaaaguaaaaagaucgcuaggaauguucguaagcgauacaccuggagaaagaaauccauaugaaaauauuuuauauaaaauaugccucaguggagauggauggccauauauagcaucgagaacaucuauaguaggacgagcuugggaaaauacaacaguagaucuagaaucagacggaaaaccacaaaaaguaggaacagcaggcucaaauaagucccuacaaucagcaggauucccaacaggauuaacauauagccaacuaaugacccuaaaagauucaaugaugcaauuggauccaucugcaaaaacuuggauagacauagaaggaagaccagaagaucccguagaaauugcauuauaucaaccaaugucaggauguuauauacacuucuuuagagaaccaacugaccuaaaacaauuuaaacaagaugcuaaauacucacauggaauagacguugcagauuuauuuccagcacaacccggcuuaacaucugcaguaauagaggccuuaccacgaaauaugguauuaacaugucaaggaucggaugauauaaaaaaacuucuagacucucaaggaagaagagacauaaaacuaauagauauauccuuaaguaaagucgauagccgaaaauuugaaaaugcuguaugggaccaaugcaaagacuuaugucacaugcauacaggaguuguuguagaaaaaaaaaaaagagguggaaaagaagaaauaacaccacauugugcacuuauggauuguauaauguuugacgcugccguaagcggaggauuaaauauuccuguauuacgagcuguguuaccaagagacaugguuuucagaacaucaucaccaaaaguaguauuauaaggacuagucccuguucccagagcccacuuuuuuuucuuuuuuugaaauaaaauagccugucuuucagaucuaaaaaaaaaaaaaaaaaaaaaaaaaaaaaaaaaaaaaaaaaaaaaaaaaaaaaaaaaaaaaaaaugcaucccccccccccccccccccccccccccccccaaaggcucuuuucagagccaccagaauu

SEQ ID NO: 10285 - RNA, 2008 nt, Artificial Sequence
  mRNA product Design a-2 comprising derived and/or modified sequence from LASV(GA391;Clade III)__CAA36646__NP (opt6)
gggagaguccgcucagccagguugcagaagcggcuuagcguguguccuaaucuucucucugcguguagguaggccugugccgcaaacaagcuuaccaugucagcauccaaagaaguaagaucauucuuauggacacaaucacuaagacgcgaacuaaguggauauugcaguaacauaaaacuacaaguuguaaaagaugcacaagcucuacuacacggccucgauuucucagaaguaucaaauguccaacguuuaaugagaaaacaaaaacgagaugacggagauuuaaaaagauuaagagaucuaaaccaagcaguuaauaaccuuguagaacucaaauccacacaacaaaaaucaguauuaagaguaggaacacuaucaucagaugacuuguuaauucuagcagcagaccuagaaaaacuaaaaucaaaaguaaccagaacagaaagaccacuaaguagcggaguauauaugggaaaccuaucaucucaacaacuagaucaaagacgagcauuacuaaacaugauugguaugacaggaguaagcggcggaggaaaaggugcuucagacggaauuguaagaguaugggacgucaaaaacgcagaauuauuaaauaaucaauuuggaacuaugcccucacuuacacuagcuuguuugacaaaacaaggacaaguagacuuaaaugaugcaguacaagcacuaacggaucuagguuuaauauauacagcgaaauauccaaacucuucagaccuagaccgauuaucucaaucacacccuauacuaaauaugauagauaccaagaaaagcucauuaaauaucagcggcuauaauuucucacuaggugcagcaguaaaagcaggggcuugcaugcuagauggaggcaauaugcucgaaacgauaaaaguaucaccacaaacaauggacggaauauuaaaaucuaucuuaaaaguaaagaaaucacuaggaauguucguaagcgauacaccuggagaaagaaauccauaugaaaacauucuauauaaaaucuguuuaucuggagacggauggcccuauauagcaucucgaacuucuauaguaggcagagccugggaaaauaccguuguagaucuagaacaagauaacaaaccacagaaaauaggaaacggaggaucaaauaaaucauuacaaucugcaggauuugccgcaggauuaacauauagucaacuaaugacauuaaaagauuucaaaugcuuuaacuuaauacccaacgcgaaaacauggauggacauagaaggaagaccagaagauccaguagaaauugcucuauaccaaccaucaucaggauguuauguacauuucuuuagagaaccgacagacuuaaaacaauuuaaacaagaugcaaaauauucacacggaaucgacguaaccgacuuauuugcagcacaaccuggacuaacuucagcaguaauagaagcccucccacgaaauaugguaauaacaugucaagguucagaagauauacgaaaauuauuagaaagccaaggaaggagagacaucaaacuaauagauauaacucuaaguaaagcagacucuagaaaauuugagaaugcaguaugggaucaauuuaaagaucuaugucacaugcacacaggcguaguuguugagaaaaagaaaagaggaggaaaagaagaaauaacuccacauugcgcgcuaauggacuguauaauguuugaugcagcaguaucaggaggacuagaugcaaaaguucucagaguaguauuaccacgagacaugguuuucagaaccaguacaccaaaaguaguauuauaaggacuagucccuguucccagagcccacuuuuuuuucuuuuuuugaaauaaaauagccugucuuucagaucuaaaaaaaaaaaaaaaaaaaaaaaaaaaaaaaaaaaaaaaaaaaaaaaaaaaaaaaaaaaaaaaaugcaucccccccccccccccccccccccccccccccaaaggcucuuuucagagccaccagaauu

SEQ ID NO: 10286 - RNA, 2005 nt, Artificial Sequence
  mRNA product Design a-2 comprising derived and/or modified sequence from LASV(AV;Clade V)__CCA30315__NP (opt6)
gggagaguccgcucagccagguugcagaagcggcuuagcguguguccuaaucuucucucugcguguagguaggccugugccgcaaacaagcuuaccaugagcgcauccaaagaaguaaaaucuuucuuauggacacaaucacuaagacgcgaacuaagcggauauuguucaaauaucaaauuacaagucguaaaagacgcacaagcucuacuacacggacuagacuucucagaaguaucaaauguacaaagauuaaugagaaaacaacgaagagaugauucagacuuaaaacgauuacgcgacuuaaaccaagccguaaauaauuuaguagaauuaaagaguacucaacaaaaaucaguauuaagaguaggaacacugucaagcgaugaccuuuuaacacuagcugcagaccuugaaaaauuaaaaaguaaaguaacaagaacugaaaggccacuaucgaguggaguauauaugggaaauuuaucaucccaacaauuagaucaaagaagagcauuacugaaucuaauagguaugacaaacggaucacaaggaagccaagcaggaagagacggaguagugagaguaugggaugucaaaaaugcugaauuauuaaauaaccaauucggaacaaugccaucauuaacauuagcaugccuaacaaaacaaggucaagucgauuuaaacgauguaguacaagcacuaacagaccuuggauuaauauauaccgcaaaauacccaaauacaagcgacuuagaucgacucacucaaucacacccaauacuaaacaugauagauacaaaaaaauccagcuuaaacauaucaggauacaauuuuucguuaggcgcagcuguaaaagcaggggcauguaugcuagacggaggaaauaugcucgagacaauuaaaguaucaccacaaucuauggauggaauacuuaaaaguauacuaaaaguaaaaagggcauuaggaauguucguaagugauacaccaggagaaagaaauccauacgaaaauauauuauacaaaauaugucuaagcggugaugguuggccguauauagcuagcagaacaucuauagucggaagagcaugggaaaauacaguagucgauuuagaaacagauggaaaaccacaaaaaauaggcucuggaaacucaaacaaaucacuacaaucagccggcuuuucagcaggacuuacauacucccaauugaugacauuaaaagaugcaaugcuacaacuagacccaaaugcaaaaacauggauggauauagaaggucggcccgaagacccaguagaaguagcucuauaucaaccuauaaguggauguuacauacacuucuuucgagaaccaacugacuuaaaacaauucaaacaagacgcuaaguacagucauggaauugauauagcagaucucuucgcagcacaaccaggacuaacuucagcaguaauagaagcucuaccuagaaauaugguaauaacaugccaagguucagaagacauaaaaaaacuacuagaaucucaaggaagaaaagacauuaaacuaauugauauagcacuaaguaaaauagacucaagaaaauucgaaaaugcuguuugggaccaauauaaagaccuaugucacaugcauaccggagucguuguugaaaaaaaaaaaagaggaggaaaagaagaaauaacaccacauugugcucuaauggauugcauaauguuugaugcugcagucagcggaggauuaaacacacuuguccuaagagcaguauuaccacgugauaugguauuuagaacaucaaccccccgaguaguauuauaaggacuagucccuguucccagagcccacuuuuuuuucuuuuuuugaaauaaaauagccugucuuucagaucuaaaaaaaaaaaaaaaaaaaaaaaaaaaaaaaaaaaaaaaaaaaaaaaaaaaaaaaaaaaaaaaaugcaucccccccccccccccccccccccccccccccaaaggcucuuuucagagccaccagaauu

SEQ ID NO: 10287 - RNA, 2005 nt, Artificial Sequence
  mRNA product Design a-2 comprising derived and/or modified sequence from LASV(Togo/2016/7082;Clade VI)__AMR44578__NP (opt6)
gggagaguccgcucagccagguugcagaagcggcuuagcguguguccuaaucuucucucugcguguagguaggccugugccgcaaacaagcuuaccaugucuaauucaaaagaaguaaaaucauuuuuauggacucaaagucuacgaagagaacuaagcggauacugcucaaauauaaaacuacaaguaguuaaagacgcucaagccuuauuacacggucucgauuucagugaaguaucaaauguacaaagauugaugagaaaacaaaaaagagacgacggagaucuaaaacggcuaagagaucuuaaucaagcuguaaacaauuugguagaacucaaaucaguacaacaaaaaucaauacuuagaguaggaacacuaacaucagacgaccuauuaacauuagcugccgaucuagaaaaacuaaaaagcaaaguaaccagaacagaacgaccacuaucgaguggaguauacaugggaaacuuaaguagccaacaacuagaucaaagaagagcacuacuaagcaugauuggaaugucaggaggaaaccaaaauagucaaccuaaaggggauggaguaguacgagucugggacguuaaaaacgccgaccucuuaaauaaccaauucggaacaaugccaagucuaacauuagcuuguuuaaccaaacaaggacaaguagaccuaaacgaugcaguacaagcccuaacagaccuaggacuaauauauacagcaaaauauccaaauagcucagauuuagacagauuaucacaaucacacccaaucuuaaacaugauugauacaaaaaaauccagccucaacauuucaggauacaauuucucacucggcgcagcaauuaaaaccggugcaugcaugcuugauggaggaaauaugcuugaaacaauaaaaguaacaccacagacaauggacggaauccuaaaaucaauacugaaagucaaaagaucacuuggcauguucaucagugauacacccggagaaagaaauccauaugaaaacauauuauacaaaauauguuuaaguggagauggauggccauauauagcuucacgaacugcaaucauagguagagccugggaaaauacaguaguagacuuagaaucagacagcaaaccccaaaaaauaggauccaacgguucaaauaaaucacuacaaucagcaggauucgcacccggcuuaacauauucacaacuaaugacucuaaaagacucaaugcuacaacuagauccaaacgccaaaacauggaucgacauugaaggacgacccgaagacccaguugaaguagcacuauuccaaccaauaaguggcugcuauauccacuuuuuuagagaacccacagaucuaaaacaauucaaacaagacgccaaauauucccacggcauagacguaacugacuuauucgcagcacaaccaggacuaacaucagcaguaaucgaagcccuuccaagaaauaugguacuaacaugccaaggcucagaugauauaaaaaaacuacucgacucacaaggccguagagauaucaaauuaauagacguaucacuaaacaaaauagacucaaggaaauuugaaaacgcaguaugggaucaauauaaagacuuaugccacaugcauacaggaguaguagucgaaaaaaaaaaaaaagguggaaaagaagaaauaaccccacacugugcuuuacuugauuguauaauguucgaugcugcaguaaguggaggacuaaacgcaaccguacucagagcaguacugccuagagauaugguauucagaacaucaaguccaaaaguaguacuuuaaggacuagucccuguucccagagcccacuuuuuuuucuuuuuuugaaauaaaauagccugucuuucagaucuaaaaaaaaaaaaaaaaaaaaaaaaaaaaaaaaaaaaaaaaaaaaaaaaaaaaaaaaaaaaaaaaugcaucccccccccccccccccccccccccccccccaaaggcucuuuucagagccaccagaauu

SEQ ID NO: 10288 - RNA, 2005 nt, Artificial Sequence
  mRNA product Design a-2 comprising derived and/or modified sequence from LASV(KAK-428;Clade n.d. (VII))__ANH09741__NP (opt6)
gggagaguccgcucagccagguugcagaagcggcuuagcguguguccuaaucuucucucugcguguagguaggccugugccgcaaacaagcuuaccaugucaaauucaaaagaaguuaaaucauuuuuauggacacaaucuuuaaggagagaauuaagcggcuauuguacaaacauuaaauuacaaguaguaaaagaugcacaagcauuauuacauggauuagauuucucagaaguaucgaacguacaacgauuaaugaggaaacagaaaagggacgauaacgaccuaaaaagacuuagagaucuaaaccaagcuguaaacaacuuagucgaacuaaaaucaguacaacaaaaaucaguacuaaaaguaggaacauuaaauagugaugauuuacucacacuagcagcugaucuagaaaaauuaaaaucaaaaguagucagaacagaaagaccauuaaguucagguguauacauggguaaucuaagcagccaacaacuagaucaaagacgagcauuauuaaacaugauaggaauggcaggaggaagccaagguaaucaaccuagcagagacgguguuguuagagucugggacgucaaaaaugcagauuuacuaaauaaucaauuuggaacaaugccaucauuaacauuagcuugucuuaccaaacaaggacaaguagacuuaaaugacguaguuuuagcauuaacggaccuaggauuaauauacacagcaaaauauccaaauuccucagaccuagacagauuaagucaaaaucauccuguauuaaacaugauagacgucaauaaaucaucacuaaauauaucaggauacaauuucucucuaggagccgcaguaaaagccggagcaugcaugcuggacggaggaaauauguuagaaacaaucaaaaucucaccgcaaacaguagaugguauauuaaaaaguauauuaaaaguaaaaagagcccuaggaauguuuguaucagacacuccaggagaaagaaauccauaugaaaacaucuuauauaaaguauguuuaucgggaaauggauggccauacauagcaucaaggacaucaaucguagguagagcaugggaaaauaccguuguugaucuagaaucaaauaaaaaucaacccaaaguagguaacaacggauccaauaaaaugcuacaaucaucaggauuugcuacaggauuaacauauagucaacuaaugacauuaagagacagcaugcuacaauuagaucccacagcaaaaacuuggauugauauagaagguagaccagaagauccaguugaacuugcacucuuccaaccaucaagcggauguuauauacacuuuuucagagagccaacagaucuaaaacaauucaaacaagacgccaaauacagccauggaauagauguaaacgacuuauucagugcacaaccugguuuaacaucagccguauuagaagcauuaccaagaaacaugguacuaacaugucaaggaagcgaugacauaagaaaacuauuagacagucaagauagaaaagacauaaaacuaauagauaucucacuaagcaaagcagacgccagaaaauucgaaaaugauguaugggaccaauucaaagacuugugccauaugcauacaggaauaguaguagaaaagaaaaagaaaggaggaaaacaagaaaugacaccacacugugcucuacuugacuguauaauguucgaugcagcuguaagcggaggauuaaauguaccaacucuacgagccguacuaccgacugacaugguauuccgaacaauaacgacaaaaguaguauuauaaggacuagucccuguucccagagcccacuuuuuuuucuuuuuuugaaauaaaauagccugucuuucagaucuaaaaaaaaaaaaaaaaaaaaaaaaaaaaaaaaaaaaaaaaaaaaaaaaaaaaaaaaaaaaaaaaugcaucccccccccccccccccccccccccccccccaaaggcucuuuucagagccaccagaauu

SEQ ID NO: 10289 - RNA, 2005 nt, Artificial Sequence
  mRNA product Design a-2 comprising derived and/or modified sequence from LASV(Pinneo-NIG-1969;Clade I)__AIT17837__NP (opt6)
gggagaguccgcucagccagguugcagaagcggcuuagcguguguccuaaucuucucucugcguguagguaggccugugccgcaaacaagcuuaccauguccaacucaaaagaaauuaaaaguuuuuuauggacacaaucacuaaggagagaacuuucaggcuauugcagcaacauaaaacuucaaguaguaaaagacgcccaagcauuacuccacggacuagacuuuagugaaguaucaaauguacaacgauuaaugagaaaacaaaaacgagacgaugccgauuuaaaaagauuaagagaucuaaaucaggcaguaaauaaccucgucgaacuaaaaucaacacaacagaagaacguauuaagaguaggaacacuaucaagcgaugaucucauaacauuagcugcagaucuagaaaaacucaaaucaaaagucauaagaacagaaagaccacuauccaguggaguauauaugggaaacuuaagcucacaacaacuagaucaaagacgagcucuauuaucaaugaucggaaugucaggaggcccacaaggaaauagaacagggggagacggaguaguaaggguaugggacguaaaaaacgcugaacuacuaaauaaucaauucggcacaaugccaaguuuaacucuagcaugccuaacaaaacaagggcaaguagacuuaaacgacgcaguacaagcuuuaacagaucuagguuuaauauauacagcaaaauaucccaacucaagcgacuuagacauguuaacacaaagucacccaauacugggaaugguagacacaaaaaaaaguucacuaaacauaaguggauauaauuuuucauuaggagcagcaguaaaagcaggugcauguaugcuagauggaggaaacauguuagaaacuauaaaaguauccccacaaacaauggauggaauauuaaaaucuauccuaaaaguaaaaagaagucuaggaauguucauaucagacacaccaggcgaaagaaaucccuacgaaaauauacuauacaaaauaugccucucaggagaaggauggccauauauagcaaguagaacuucaauaacaggaagagcaugggaaaauacauuagucgauuuagaaagcgauaacaaaccaccaaaauuaaauucggcagggucuaauaaaagucuacaagcagcaggauugaaugcagguuuaacguauagucaauuaaugacauuaaaagacugcaugcuccaauuagauccaucaucaaaaacauggauagauauagaaggcagaccagaagacccaguagaaaucgcccuguuucaacccaguucuggaugcuauauacacuuuuucagagaaccaacagaccuaaaacaauucaaacaagacgccaaauauucacacggcauagauguaacagacuuauuuucuacacaaccaggccuaacuagcgcaguuauugaagcacucccaagaaacaugguucuaacaugccaagguagugaugacauuaaaaaacuuuuagaaucacaaggaagaagagacauaaaacuaauagauaucagcuuaucaaaagcagacucacgaaaauucgaaaacgcuguaugggaccaauauaaagacuuaugccauaugcacacaggaguaguaguagaaaaaaaaaaaagaggaggaaaagaagaaauaacaccccauugugcauuacuagacugcauaauguucgaugcagcaacaacaggaucacuaaacauuacaacacuacgagcaguacuaccaagagauaugguauuccgaacaucaacuccaaaaguaguacuaugaggacuagucccuguucccagagcccacuuuuuuuucuuuuuuugaaauaaaauagccugucuuucagaucuaaaaaaaaaaaaaaaaaaaaaaaaaaaaaaaaaaaaaaaaaaaaaaaaaaaaaaaaaaaaaaaaugcaucccccccccccccccccccccccccccccccaaaggcucuuuucagagccaccagaauu

SEQ ID NO: 10290 - RNA, 2005 nt, Artificial Sequence
  mRNA product Design a-2 comprising derived and/or modified sequence from LASV(ISTH0009-NIG-2011;Clade II)__AIT17405__NP (opt6)
gggagaguccgcucagccagguugcagaagcggcuuagcguguguccuaaucuucucucugcguguagguaggccugugccgcaaacaagcuuaccaugucaguaucgaaagaaguuaaaucauucuuauggacucaaucacucagaagagaacuaucagguuauuguucaaacaucaaauuacaaguagucaaagacgcacaagcacuguuacacgggcucgacuuuucagaaguaucaaacguacaaagacuaaugcgcaaacagaaaagagacgauucagauuuaaaaagauuaagagaccuaaaucaagcaguuaauaacuuggucgaacuuaaaagcacucaacaaaaaucaauacuucgaguaggcacauuaacaucagaugaccuuuuaacacuagcagcagaucuagaaaaauuaaaaucaaaaguaauuaggacagaaagaccacuaucuucuggaguauacaugggaaacuuaucaacccaacaauuagaacaaagacgagcauuauuaaacaugauaggaaugguagguggagcacaaggaacacaacccggaagagacgguguagucagaguaugggaugucaaaaaccccgaccuacugaacaaucaauuuggaacaaugccuaguuuaaccuuagcaugccuaacaaaacaaggacaaguagaucuuaacgacgcaguauuagcacuaacagauuuaggauuaauauauacagcuaaauauccaaauaguagcgaccuagaccgauuaagccaaagccacccaauauuaaacaugguagauauaaagaaaucaucacuaaacauuucuggauacaauuucucuuuaggagccgcaguaaaagcaggagcauguauguuagacggaggaaacauguuagaaacuauaaaaguaacaccacaaaccauggacggaauauuaaaaucuauauuaaaaguaaaacgcucacuaggaauguuuguaagcgauacaccaggagaaagaaauccauaugaaaacauucuauacaaaauaugucuaaguggugacggauggccuuacauagcaaguagaacaucaauaguuggacgagcaugggaaaauacaacaguagauuuagaaucagauggaaaaccacaaaaaguaggauccgccggcucaaauaaaucuuuacaaagcgcaggcuuuccuacaggccuaacguauucucaacuaaugacauuaaaagacucaaugaugcaacuagacccaagugcuaaaacauggaucgacauugaagguagaccagaagacccaguagaaauagcauuauaccaaccuaugucuggauguuauauccacuucuuuagagaaccaacagauuuaaaacaauuuaaacaagacgcaaaauacucacacggaauagauguagcagacuuauuuccagcucaaccaggauuaacaagcgccguuauugaagcacuaccaagaaacaugguauuaacuugccaagguagcgacgacauaaaaagacuucuagacucacaaggacguagagacauuaaacuaaucgauauagcauuaaguaaagcagacagucgaagauuugaaaaugcuguaugggaccaauguaaggaucuaugucauaugcauacgggaguuguaguagaaaagaagaaaaggggaggaaaagaagaaauaacaccacacugugcauuaauggauuguauaauguacgacgcagccguaucaggaggccuaaacauaccaguauuaagagcaguacugccgagggauaugguauuuagaacaagcucacccaaagucguauuauaaggacuagucccuguucccagagcccacuuuuuuuucuuuuuuugaaauaaaauagccugucuuucagaucuaaaaaaaaaaaaaaaaaaaaaaaaaaaaaaaaaaaaaaaaaaaaaaaaaaaaaaaaaaaaaaaaugcaucccccccccccccccccccccccccccccccaaaggcucuuuucagagccaccagaauu

SEQ ID NO: 10291 - RNA, 2005 nt, Artificial Sequence
  mRNA product Design a-2 comprising derived and/or modified sequence from LASV(ISTH2010-NIG-2012;Clade II)__AIT17483__NP (opt6)
gggagaguccgcucagccagguugcagaagcggcuuagcguguguccuaaucuucucucugcguguagguaggccugugccgcaaacaagcuuaccaugucagcuaguaaagaaguaaagagcuucuuauggacucaaagucuucgacgagaacuaucagguuauugcagcaacauaaaacuucaaguaguaaaagacgcacaagcacuauuacacggauuagacuucucagaaguaucaaauguacaaagacuaaugagaaaacagaaaagagacgacagcgaucuaaaaagauuaagagauuuaaaucaagcuguuaauaauuuaguugaacuaaaaagcacacaacaaaaaucaauauuaagaguaggaacacuaacaucagaugacuuacuaacauuagcagccgacuuagaaaaacuaaaaucaaaaguaauaagaacagaaagaccucuaucaagcggcguuuacaugggaaacuuaucaacccaacaacuagaacaaagacgagcauuauuaaaccuaauaggaaugguagguggugcacaaggaacacaaccaggaagagacggcguaguuagaguaugggacgucaaaaacccagaucuacuuaacaaccaauucggaacaaugccauccuuaacucuagcaugcuuaacaaaacaaggacaaguagaccuaaacgaugcaguauuagcucuuacagacuuaggacuaauauacacugcuaaauauccaaauucaucagauuuggacagacuaucacaaucacauccaauacuaaacauggucgauacuaagaaaaguucacuaaauauuucuggauucaauuuuucauuaggagcagccguaaaagccggagcauguaugcuagaugguggaaauaugcuagaaacaauaaaaguaacaccacaaaccauggauggaauauuaaaauccauacuaaaaguaaagaaauccuuaggaauguuuguaucagacacuccaggagaaagaaaucccuacgaaaacauucuuuacaaaauaugucuuucaggagacggcuggcccuauauagcuucaagaacaucaauaguagguagagcuugggaaaacacaacuguagaccuugaaucugacgguaaaccacauaaaguagguacagcaggaucaaacaaaaguuuacaaagugcaggauuuccaacuggacucacauacagucaacuaaugacccuaaaagacucaaugaugcaauuagauccaucagcaaaaacauggauagauaucgaaggucgaccugaagacccaguagaaaucgcguuauaucaaccaaugaguggauguuacauacacuucuucagggaaccaacggauuuaaaacaauuuaaacaagacgcuaaauacagccacggaauugacguugcagaccuuuuuccagcacaaccaggccuaacaucagcaguuauagaagcacuaccaagaaauaugguauuaacuugucaaggaucggaugacaucaaaagacuacuagacucucaggguagaagggauauaaaauuaauagauauagcacuaucuaaagcagacucaagaagauuugaaaaugcuguuugggaccaaugcaaagaccuaugccauaugcauacaggagucguaguagagaaaaagaaaagaggaggaaaagaagaaauaacaccacauugugcauuaauggauuguaucauguaugaugccgcgguaagcggaggacuaaacauaccaguauuaagagcuguauuaccuagagauaugguauucagaacaucaucgccaaaaguaguacuauaaggacuagucccuguucccagagcccacuuuuuuuucuuuuuuugaaauaaaauagccugucuuucagaucuaaaaaaaaaaaaaaaaaaaaaaaaaaaaaaaaaaaaaaaaaaaaaaaaaaaaaaaaaaaaaaaaugcaucccccccccccccccccccccccccccccccaaaggcucuuuucagagccaccagaauu

SEQ ID NO: 10292 - RNA, 2005 nt, Artificial Sequence
  mRNA product Design a-2 comprising derived and/or modified sequence from LASV(Lassa virus/H.sapiens-wt/NGA/2015/ISTH_0543;Clade II)__AVO03640__NP (opt6)
gggagaguccgcucagccagguugcagaagcggcuuagcguguguccuaaucuucucucugcguguagguaggccugugccgcaaacaagcuuaccaugagugcaucaaaagaaguaaaaagcuuucuauggacacaaucauuaagaagagaauuaaguggauauugcucaaauauaaaauuacaagucguaaaagaugcacaagcacuacuacacggauuagauuucucagaaguaagcaauguacagcgacucaugagaaaacaaaaaagagacgacucagacuuaaaaagacuaagagaucucaaccaagccguaaauaauuuagucgaacuaaaaagcacucaacaaaaaucaauauuaagaguaggcacacuaacaagcgacgacuuacuaacacucgcagcagaucuugaaaaacuaaaaagcaaaguaauaagaacagaaagaccauuauccucagguguauacauggguaaccuuucaacacaacaacuagaacaaagaagagcacuacucaacaugauaggaaugguaggcggagcacaaggaacacaaccaggaagagacggaguaguaagaguaugggauguaaagaacccagauuuacuuaauaaccaauuuggaacaaugccaucauuaacauuagcaugcuuaacuaaacaaggccaaguagacuuaaaugaugcaguacuggcauuaacagacuuagguuuaaucuauacagcaaaauauccaaauucaucagauuuagacagacucucacaaucacacccaauuuuaaacauggucgacacaaaaaaaucaucucuaaauauuucaggauauaacuucucauuaggagcagcgguaaaagcaggagcauguaugcuagacgguggaaauauguuagaaacaauaaaaguaacaccacaaacaauggauggaauacugaaaucaauacuuaaaguaaaaaagagccuaggcauguucguaucagauacaccaggagaaaggaacccauaugaaaacauacuuuacaaaauaugcuuaucuggugacggauggccauauauagcuucaagaacaucuauaguagggagagcaugggaaaauaccacaguagaucucgaaucugacggaaaaccccaaaaaguagguucagcagguucaaauaaaaguuuacaaucagcuggauuuccaacaggacuaacuuauucacaacuaaugacauuaaaagauucaaugaugcaauuagauccaucagcaaaaacauggauagauaucgagggaagaccugaggauccuguagaaauagcauuauaucaacccaugucagguugcuauauacauuuuuucagagaaccaacagaucuaaaacaguucaaacaagacgcaaaauacagccacggaauagacguagcagaccuauuuccagcacaaccaggacuaacaagcgcuguaauagaggcacuaccuagaaacauggucuuaacaugccaaggaagugacgacauuaaaagacuacuagauagccaagguagaaaagacauuaaacuuauagacaucgcauuaucaaaagcagacucgagaagauuugagaacgcaguaugggaccaaugcaaagauuuaugccauaugcauaccgguguaguaguugagaaaaaaaaaagaggagguaaagaagaaauaacgccacacugugcacuaauggauugcauaauguaugacgcagcaguaucaggaggauuaaacauacccguauuaagagccguacuaccacgcgauaugguuuucagaacaagcucgcccaaaguaguauuauaaggacuagucccuguucccagagcccacuuuuuuuucuuuuuuugaaauaaaauagccugucuuucagaucuaaaaaaaaaaaaaaaaaaaaaaaaaaaaaaaaaaaaaaaaaaaaaaaaaaaaaaaaaaaaaaaaugcaucccccccccccccccccccccccccccccccaaaggcucuuuucagagccaccagaauu

SEQ ID NO: 10293 - RNA, 2005 nt, Artificial Sequence
  mRNA product Design a-2 comprising derived and/or modified sequence from LASV(Lassa virus/H.sapiens-wt/NGA/2016/ISTH_0009;Clade II)__AVO03572__NP (opt6)
gggagaguccgcucagccagguugcagaagcggcuuagcguguguccuaaucuucucucugcguguagguaggccugugccgcaaacaagcuuaccaugucugcaagcaaagaaguuaaaucuuuuuuauggacacaaucauuaagaagagaauuaagcggauacuguagcaacauaaaauuacaaguaguaaaagaugcacaagcacuguuacauggauuagauuucagcgaaguuucaaacguacaaagacuaaugaggaaacaaaaaagagaugauagcgaucuaaaacgguuaagagaucuaaaucaagcaguaaauaauuuaguagaauuaaaaagcacacaacaaaaaaguauauuaagaguaggaacccuaacaucagaugauuuauuaacguuagcagcagaccuugaaaaacuuaaaucuaaaguaauaagaacagaaagaccauuaagcaguggagucuauaugggaaaucuaagcacacaacaauuagaacaacgucgagcacuauuaaauaugaucggaaugguaggaggagcacaaggcacacaaccaggaagagacgggguaguaagagucugggacguaaaaaauccagauuugcuaaacaaccaauucggaacaaugccgagucucacauuggcuugcuuaacaaaacaaggucaaguagaccuaaacgacgcaguucuagcacuaacagaccuaggacuuauuuauacagcuaaauauccaaauucuucagacuuagauagacuaucccaaucccaccccauacugaauaugguagauacaaaaaaaucaucauugaauauuucaggcuauaauuucagucuaggagcagcaguaaaagcuggagccuguaugcuagacggugguaauaugcuagaaacaauaaaaguaacaccccaaacaauggacggaauacuaaaaucaaucuuaaaaguuaaaaaaagccuuggaauguucguaagugauaccccaggcgaaagaaacccuuacgaaaauauacuauauaaaauaugucuaucaggagacggauggccuuauauagccuccagaaccucuauaguuggaagggcaugggaaaauacaacaguagaucucgaaucagacggaaaaccacaaaaaguagggagcgccgguaguaacaagagucuacaaagcgcuggauucccaacaggcuuaacauauagucaauuaaugacuuuaaaagauaguaugaugcaacuagauccauccgccaaaaccuggauagauauagaaggaagaccagaagacccaguagaaauagcacuauaucaaccuaugucaggaugcuacauacacuuuuucagagaaccaacagauuuaaaacaauucaaacaggacgcaaaauauucacacggcauugauguagcagauuuauuuccagcacaaccaggauuaacaucagcaguaauagaagcucuaccaagaaacaugguacuaacaugucaaggaucagaugacauaaaaagacuauuagacagccaaggacgaagagauauaaaauuaauagauauagcuuuaagcaaagcugacucaagaagauucgaaaacgcgguaugggaccaaugcaaagaccugugccauaugcacaccggaguaguaguagaaaaaaaaaaaagaggaggaaaagaagaaauaacaccacauugugcuuuaauggauuguauaauguaugacgcagcaguaucaggaggacuaaauauuccuguacuacgagcuguacuaccacgagacaugguauuuagaacaagcucuccgaaaguaguacuauaaggacuagucccuguucccagagcccacuuuuuuuucuuuuuuugaaauaaaauagccugucuuucagaucuaaaaaaaaaaaaaaaaaaaaaaaaaaaaaaaaaaaaaaaaaaaaaaaaaaaaaaaaaaaaaaaaugcaucccccccccccccccccccccccccccccccaaaggcucuuuucagagccaccagaauu

SEQ ID NO: 10294 - RNA, 2005 nt, Artificial Sequence
  mRNA product Design a-2 comprising derived and/or modified sequence from LASV(Lassa virus/H.sapiens-wt/NGA/2016/ISTH_0017;Clade II)__AVO03568__NP (opt6)
gggagaguccgcucagccagguugcagaagcggcuuagcguguguccuaaucuucucucugcguguagguaggccugugccgcaaacaagcuuaccaugucagccaguaaagaaguaaaaagcuuucuauggacacaaaguuuacgaagagaauuaucuggauacugcaguucaauuaaacuucaaguaguaaaagaugcucaagcauuacuacacggacuggauuucucagaaguaagcaauguacaaagacuaaugcgcaaacaaaaacgagacgauucagaucuaaaaagauuaagagaccuaaaccaagcaguaaauaacuuaguagagcuaaaaucaacacaacaaaaaucaauauugagaguaggaacauuaacuucagaugaccuacuuacuuuagcagcugaucuagaaaaauuaaaaucaaaaguaauaagaacagaaagaccucuuucaucaggaguauauaugggaaacuuaucuacacaacaacuagaacaaagaagagcauuauuaaacaugauagguauggccggcggagcacaagguacucaaccaggaagagauggagucgugcgaguaugggauguaaagaauccugauuuacuuaauaaucaauucggaaccaugcccagucucacacuagcgugcuuaacaaaacaaggucaaguagaccuaaaugaugcaguacuugcacuaaccgaucuaggauuaauauauacagcaaaauacccaaauucaucagacuuagacagauuaagccaaucacaccccauuuuaaauaugguugacacaaaaaaaucaagcuuaaacaucucaggauacaacuuuagccuaggagcagcuguuaaagcaggagcaugcaugcuagacggaggaaauauguuagaaacaauaaaaguaaccccccaaacaauggacgguauauuaaaaaguauccuaaaaguaaaaagaagcuuaggaauguucguaucagaugcaccaggagaaagaaacccauacgaaaauauacuuuauaaaauaugccucaguggcgauggauggccauauauagcaagcagaacuucgauaguaggaagagcaugggaaaauaccacaguagaucuagaaagcgaugggaaaccacaaaaaguaggagcaacaggaucaaacaaaaguuuacaaucagcagguuuuccaaccggacuaaccuauucacaauuaaugacauuaaaagauagcaugaugcaacuagaccccucagcaaaaacauggauagauauagaaggcagacccgaagacccaguagaaguagcucuauaucaaccaguaagcggaugcuauauacacuuuuucagagaaccgacagauuuaaaacaauucaaacaagacgcaaaauauucacaugguauugauguagcagaucuuuucccagcacaaccaggcuuaacaucagcaguaauagaagcacuaccaagaaacaugguauuaacaugccagggaucagacgacauuaaaaaacuauuagauucucaaggccgaaaagacauaaaacuaaucgauauagcucuaaguaaagccgauuccagaagauucgaaaaugcagucugggaccaaugcaaagauuuaugccacaugcauacaggaguaguugucgaaaaaaaaaaaagaggaggaaaagaagagauaacaccccacugugccuuaauggacuguauaauguacgacgcagcagucucaggaggauuaaauauaccaguacuaagagccguuuuaccuagagauaugguauucagaacaagcagcccuaaaguagucuuauaaggacuagucccuguucccagagcccacuuuuuuuucuuuuuuugaaauaaaauagccugucuuucagaucuaaaaaaaaaaaaaaaaaaaaaaaaaaaaaaaaaaaaaaaaaaaaaaaaaaaaaaaaaaaaaaaaugcaucccccccccccccccccccccccccccccccaaaggcucuuuucagagccaccagaauu

SEQ ID NO: 10295 - RNA, 2005 nt, Artificial Sequence
  mRNA product Design a-2 comprising derived and/or modified sequence from LASV(Lassa virus/H.sapiens-wt/NGA/2018/ISTH_0959;Clade II)__AVV65100__NP (opt6)
gggagaguccgcucagccagguugcagaagcggcuuagcguguguccuaaucuucucucugcguguagguaggccugugccgcaaacaagcuuaccaugagcgcaagcaaagaaguaaaauccuuucuuuggacacaguccuuaagaagagaacuaucagguuacuguucgaacauaaaauuacaaguuguaaaagacgcacaagcucuacuacauggucucgauuuuuccgaagucagcaauguacaaagauuaaugagaaaacaaaaaagggaugacucagacuugaaaagacuaagagauuuaaaccaagcaguaaauaacuuaguagaauuaaaaucaacacaacaaaaaucaauauuaagaguagguacucuaaccucagaugauuuauuaacacuagcggcagaccuagaaaaacuaaaaucaaaaguuauucgaacagaacgaccucuaucaucaggcguauacauggguaacuuaaguacucaacaacuagaacaaagaagagcauuacuaaauuuaauagguaugguaggaggugcacagggaacacaaccaggcagggacggaguuguaagaguaugggauguaaagaauccugauuuacuaaauaaucaauucggaacuaugccaucacuaacacuagccugccuaacaaaacaaggucaaguagacuuaaaugacgucguacuggcccuaacagaccuaggauuaaucuauacagcuaaauauccaaauucaucagacuuagacagacuaucacaaucucacccaauauuaaacaugguagauacaaaaaaauccagccuuaacauaucagguuucaauuuuaguuuaggagcagcuguaaaagcaggcgcaugcaugcuagacggagguaauauguuggaaacaauaaaaguaacuccccaaaccauggacggaauacuaaaaucaauauuaaaagugaaaaaaagccuagggauguuugucagcgauacuccaggagaaagaaauccauaugaaaauauucuauacaaaauauguuuaucaggcgacggcuggccauauauagcaucaagaacaucaauaguaggaagagcaugggaaaauacaaccguagaucuagaaagcgauggaaaaccacauaaaguagguacagccggaucaaacaaaucucuacaaucagcuggauuuccaacgggacuuacauacagccaacuaaugacacuuaaagacaguaugaugcaacuggaucccucugccaaaacauggauugacaucgaaggacguccagaagacccagucgaaaucgcacuauaucaaccgaugucuggauguuacauucauuuuuuuagggaaccaacggauuuaaaacaauuuaaacaagacgccaaauauucacauggaauagacgucgccgaccuauucccugcucaacccggauuaacaucggcuguaauugaagcguuaccacguaacaugguauuaacaugccaaggaagcgaugacauuaaaagguuauuagauagucaaggaagaaaagauauaaaauuaauagauauagcacuaucaaaaacggacucacgaagauucgaaaacgcuguaugggaccagugcaaagaucuaugucauaugcauacaggaguaguuguagaaaaaaaaaaaagaggaggaaaagaagaaauaacaccacacugugcuuuaauggauugcauuauguaugaugcagcaguauccgguggccuaaacauaccaguauuacgagcaguucuaccaagagauaugguauucagaacuucaucaccaaaaguaguacuauaaggacuagucccuguucccagagcccacuuuuuuuucuuuuuuugaaauaaaauagccugucuuucagaucuaaaaaaaaaaaaaaaaaaaaaaaaaaaaaaaaaaaaaaaaaaaaaaaaaaaaaaaaaaaaaaaaugcaucccccccccccccccccccccccccccccccaaaggcucuuuucagagccaccagaauu

SEQ ID NO: 10296 - RNA, 2005 nt, Artificial Sequence
  mRNA product Design a-2 comprising derived and/or modified sequence from LASV(LASV003-NIG-2008;Clade II)__AIT17581__NP (opt6)
gggagaguccgcucagccagguugcagaagcggcuuagcguguguccuaaucuucucucugcguguagguaggccugugccgcaaacaagcuuaccaugucagcaucaaaagaaguaaaaucuuuccucuggacacaaucacuaagaagagaauuaucaggcuauuguucuagcauaaaacuacaaguaguuaaagacgcacaagcacuauuacauggacuagauuucagugaaguaagcaauguccaaagauuaaugagaaaacaaaaaagagacgauucagacuuaaaaagauuacgagaucuaaaucaagcagucaauaaucuaguugagcuaaaaagcacacagcaaaaaucaguacuaagaguaggaacacugacgucagacgaccuacuaacacuagcagcagaucuugaaaaacuaaaaucaaaaguaauaagaacagaaagaccauuaaguucaggaguauauauggguaaccuaagcgcacaacaacuagaacaaagaagaacucuacucaacaugaucggaauggucgguggcgcacaaggaacacaaccaggaagagaugguguaguucgaguaugggacgucaaaaauccagacuuauuaaacaaccaauuuggaacaaugccuucacuaaccuuagcaugucuuacaaaacaaggacaaguagaucuaaacgauguuguacuagcacuaacagacuuagggcuaauauauacagcaaaauauccaaacucaucugauuuagaccgucucucucaaucacacccaauauuaaguaugguagacaccaaaaaauccucacuaaauauaucaggauauaacuucagucuaggagcagcaguaaaagccggagcauguaugcuagacggaggaaacauguuagaaacaauaaaaguaacaccucaaacaauggauggaauccuaaaaucaauauuaaaaguaaaaaaaaguuuaggaauguucguaucagauacacccggcgaacgaaacccauaugaaaauauacuauacaaaaucugucucaguggagaugguuggccauacauagcaucacgaacuucuauaguaggacgugcaugggaaaauaccacagucgaccuagaaagcgauggaaaaccacaaaaaguagguacugcuggaucaaauaaaaguuuacaaucagcaggcuuuccuacuggacuaacuuauagccaauuaaugacccuaaaagauucuaugaugcaauuagauccgagcgcaaaaaccuggauagauauagagggaagaccagaagacccaguagaaauagcucuauaccaaccaaugagcggauguuacauccauuuuuuuagagaaccaacagaccuaaaacaauuuaaacaagaugcaaaauauagccauggaauagauguaaccgaucuuuuuccagcccaaccaggcuuaacaucugcuguuaucgaagcuuuaccaagaaacaugguauuaaccugccaaggaucagacgacauaaaaagauuacuagauucacaaggacgcagagauauaaaacugauagacauagcacuuagcaaagccgauucucguagauucgaaaaugcaguaugggaccaauguaaagacuuaugccacaugcacacaggcguuguaguagaaaaaaaaaagcgaggagguaaagaagaaauaacaccccauugugcauuaauggacugcauuauguaugacgcggccguuagcggagguuuaaauauaccaguauuacgugcaguacuaccaagagacaugguuuucagaacaucaucaccaaaaguaguacuauaaggacuagucccuguucccagagcccacuuuuuuuucuuuuuuugaaauaaaauagccugucuuucagaucuaaaaaaaaaaaaaaaaaaaaaaaaaaaaaaaaaaaaaaaaaaaaaaaaaaaaaaaaaaaaaaaaugcaucccccccccccccccccccccccccccccccaaaggcucuuuucagagccaccagaauu

SEQ ID NO: 10297 - RNA, 2005 nt, Artificial Sequence
  mRNA product Design a-2 comprising derived and/or modified sequence from LASV(LASV035-NIG-2009;Clade II)__AIT17589__NP (opt6)
gggagaguccgcucagccagguugcagaagcggcuuagcguguguccuaaucuucucucugcguguagguaggccugugccgcaaacaagcuuaccaugagugccaguaaagaaguaaaaucauucuuguggacacaaaguuuaagaagagaacuuucaggauacugcucaagcauaaaacuacaaguaguaaaagaugcacaagcacuacuacauggacuagacuucagugaaguaucaaacguacaaagauuaaugagaaaacagaaaagagaugacucagaucuaaaaagauuacgagauuugaaucaagcaguuaauaacuuaguugaauuaaaaaguacacaacaaaaaucgauacuacgaguaggaacucuaacaucagaugaccuuuuaacacuagcagcugauuuagaaaaauuaaaaucaaaaguaauaagaacagaaagaccauuaagcucaggaguauauaugggaaauuugagugcacaacaacuagaacaaagacgagcucuccuaaauaugauaggaaugguuggaggagcacaagguacacaaccaggaagagacggaguaguuaggguaugggaugucaaaaacccugaucuauuaaacaaccaauuuggcacaaugccaagucuaacucuagcaugccugacuaaacagggacaaguagacuuaaacgaugcaguauuagcucuaacagacuuagguuuaauauauacagcaaaauauccaaauaguucugauuuagacagacuaucccaaucacacccaauucucaacaugguagauacaaagaaauccagucugaauauuucaggauacaauuucaguuuaggagcagccguaaaagcaggagccuguauguuagacggugguaauaugcuagaaacaauaaaaguaacaccccaaacaauggacggaauacuuaaaucaauauugaaaguaaaaagaucauuaggaauguuuguaagcgauaccccaggagaaagaaauccguaugaaaauauacuuuauaaaauaugucuaucaggagacggauggcccuauauagcaucaagaaccucaauagucggcagagcaugggaaaacacuacaguugauuuagaaucagauggaaaaccacaaaaaguaggaacaacaggaucaaacaaaucacuacaaucagcaggauucccuacaggucugacauacucccaacuuaugacauuaaaagacucaaugaugcaacuggauccaucagcuaaaacauggauagauauagaaggcagaccagaggacccgguagaaauagcucuauaucaaccaaugucagguuguuacauucacuucuucagagaaccaacagaucuaaaacaauucaaacaagacgccaaauauucacauggaauagauguagcagauuuauuuccagcacaacccggauuaacaagcgcugucauagaagcucucccaagaaacaugguauuaacaugucaaggcagcgaugauauuaagaaauuacuagacucacaaggacgaagagacauaaaacuaauagauauagcauugaguaaagccgauucaagaaaauuugaaaaugcaguaugggaucaauguaaagaucuaugucauaugcacacuggaguugugguugaaaagaagaaaagagguggaaaagaagaaauaacaccacauugugcauuaauggauugcauuauguaugacgcugcaguaucaggaggacuaaacauaccaguccuuagagcaguacucccaagagauaugguauuuagaacuucaucaccaaaaguaguauuauaaggacuagucccuguucccagagcccacuuuuuuuucuuuuuuugaaauaaaauagccugucuuucagaucuaaaaaaaaaaaaaaaaaaaaaaaaaaaaaaaaaaaaaaaaaaaaaaaaaaaaaaaaaaaaaaaaugcaucccccccccccccccccccccccccccccccaaaggcucuuuucagagccaccagaauu

SEQ ID NO: 10298 - RNA, 2005 nt, Artificial Sequence
  mRNA product Design a-2 comprising derived and/or modified sequence from LASV(LASV1000-NIG-2009;Clade II)__AIT17783__NP (opt6)
gggagaguccgcucagccagguugcagaagcggcuuagcguguguccuaaucuucucucugcguguagguaggccugugccgcaaacaagcuuaccaugagcgcaucaaaagaaguaaaauccuuccuauggacccaaagccuaagaagagaauuaucaggguacuguucaaauaucaaauuacaaguaguaaaagacgcacaagcauuauuacauggccuagauuucucagaaguauccaauguucaaagacuaaugcguaaacaaaaaagagacgacucagaccuaaaaagauuaagagaucuuaaccaagcaguaaauaauuuaguggaauuaaaaagcacucaacaaaaaaguauccuaagaguaggaacucuaacuagcgacgaucuucuaacauuagcagccgaucucgaaaaacuaaaaucgaaaguaauaagaacugaaagaccauuaaguagcgguguauauaugggcaaccuaagcacacaacaacuagaacaaagaagagcauuacuaaacaugauaggaaugguaggaggagcacaaggaacacaaccuggaagagacggaguaguaagagucugggacguaaaaaacccagacuuacuaaauaaucaauucggaacgaugccaagucuuacacuagcaugucuuacaaaacaaggucaaguugaccuaaacgauguaguucuagcacuaacagaucugggauuaauuuauacagccaaauaccccaacagcagugaccuugaccggcuaagucaaucacacccaauauuaaacauggucgauacaaaaaaaucaucucuaaacauaaguggauacaacuucaguuuaggagcugccguaaaagcaggugcauguaugcuagacggaggaaacauguuagaaacaauaaaagucacaccacaaacaauggaugggauauuaaaaagcaucuuaaaaguaaaaaaaucccuuggaauguucguaucagacacuccuggagaaagaaaucccuacgaaaauauacuauacaaaauaugucuaagcggcgauggauggccauauaucgcuucaagaacuucuauaguaggaagagcuugggaaaauacaacuguagaucucgaaagugacggaaaaccacaaaaaguuggaacagcaggaagcaauaaaucauuacaauccgcaggauuuccaacaggacugacauauagucaacuaaugacucuaaaagauaguaugaugcaauuagauccaucagcaaaaacauggauagacaucgaagguagaccagaagacccaguagaaauagcucuauaucaaccaguaaguggaugcuacauacacuucuucagggaaccaacagauuuaaaacaauuuaaacaagacgcuaaauauagucacggaauagacguagcagaccuauuuccagcacaaccaggccuaacaucugccguuauagaagcacuaccuagaaauaugguacucacuugccaaggaucagaugauaucaaaagacuauuagacucacaaggacgaagagacauaaaacuaauugacauagcauuaagcaaagcagauucaagaagauuugaaaacgcuguaugggaucaaugcaaagaccucugucacaugcauacaggaguagucguagaaaaaaaaaaaagaggagguaaagaggaaauaacaccgcacugugcauuaauggauugcauaauguaugacgcggcaguaucagguggauuaaauauaccuguauuaagagcagucuuaccacgagauaugguauucagaacuucgaguccuaaaguaguacuuuaaggacuagucccuguucccagagcccacuuuuuuuucuuuuuuugaaauaaaauagccugucuuucagaucuaaaaaaaaaaaaaaaaaaaaaaaaaaaaaaaaaaaaaaaaaaaaaaaaaaaaaaaaaaaaaaaaugcaucccccccccccccccccccccccccccccccaaaggcucuuuucagagccaccagaauu

SEQ ID NO: 10299 - RNA, 2005 nt, Artificial Sequence
  mRNA product Design a-2 comprising derived and/or modified sequence from LASV(LASV221-NIG-2010;Clade II)__AIT17625__NP (opt6)
gggagaguccgcucagccagguugcagaagcggcuuagcguguguccuaaucuucucucugcguguagguaggccugugccgcaaacaagcuuaccaugucagcaucaaaagaaguaaaaagcuuccuuuggacacaaucccuaagacgagaauuaucaggauacuguucaucaauaaaacuacaaguaguuaaagacgcucaagcauuauuacauggguuagacuuuuccgaagucuccaauguacagagacuaaugagaaaacaaagaagagaugauuccgauuuaaaacgacuaagagauuuaaaccaagcagucaauaaccucguugaacuaaaaaguacacaacaaaaaaguauauuaagaguaggcacacuaacaagcgaugaccuacucacucuagcagcagaccuagaaaaauuaaaaucaaaaguaauaagaacagaaagaccacuaaguucagguguauauaugggaaauuuaucaacacaacaacuagaacaacgaagagcuuuguuaaauaugauagguaugguaggaggagcacagggaacacaaccgggaagagacgguguagugagaguaugggacguaaaaaacccggauuuacuaaacaaccaauucggaacaaugccaagccuaacucuagcaugcuuaacaaaacaaggacaagucgacuuaaacgaugcuguacuagcacuaacagaccuaggauuaauauacacagcaaaauacccaaauagcagugauuuagacagacuaagccaaagucacccuauccuuaauaugguagauacaaaaaaaagcucuuuaaacauauccgguuacaacuucagucucggagcagcagucaaagccggagcauguauguuagauggcggaaacaugcuugaaacaauaaaaguuacaccacaaaccgucgacggcauccuaaaaucaauauuaaagguuaaaagaagucuaggaauguucguaucagacacaccaggugaaagaaauccauacgaaaauauacuguauaaaauaugucuaaguggagauggauggccuuauauagcaucacgaacaucaauagucggacgagcgugggaaaacacuacaguugaucuagaaagugauggaaaaccacaaaaaguuggaacugcgggaucaaauaaaucauuacaaucagcuggauuuccgacaggacuaacauauagccaauuaaugacacuaaaagauagcaugaugcaauuagaucccucagcaaaaacauggauagacaucgaaggaagaccagaagaccccguugaaauagcauuauaucaaccaaugucaggcuguuauauacauuucuuucgcgaaccaacagaccuaaaacaauuuaaacaagaugcaaaauauagucacggaauagacguagcagaucuauucccagcacaaccuggauuaacaucagcaguaaucgaagcccuuccaagaaauauggucuuaacuugucaaggaagcgaugacauaaaaagacuccuugacucacaaggaagaagagacauaaagcucaucgauauugcucuaucuaaagccgauucaagaaaauucgaaaaugccguaugggaccaauguaaagacuuaugccauaugcauacaggaguaguuguagaaaaaaaaaaaagagguggaaaagaagaaauaacaccacacugcgcucucauggauugcauaauguaugacgcagcaguaucaggaggccuaaacaucccaguauuaagagcuguucuaccaagagauaugguauucagaacaaguaguccaaaaguaguacuuuaaggacuagucccuguucccagagcccacuuuuuuuucuuuuuuugaaauaaaauagccugucuuucagaucuaaaaaaaaaaaaaaaaaaaaaaaaaaaaaaaaaaaaaaaaaaaaaaaaaaaaaaaaaaaaaaaaugcaucccccccccccccccccccccccccccccccaaaggcucuuuucagagccaccagaauu

SEQ ID NO: 10300 - RNA, 2005 nt, Artificial Sequence
  mRNA product Design a-2 comprising derived and/or modified sequence from LASV(LASV237-NIG-2010;Clade II)__AIT17639__NP (opt6)
gggagaguccgcucagccagguugcagaagcggcuuagcguguguccuaaucuucucucugcguguagguaggccugugccgcaaacaagcuuaccaugucggcuagcaaagaagugaaauccuuucucuggacacaaagucuacgaagagaauuaucuggauauuguaguaauauaaaacuacaaguagucaaagacgcacaagcauuauuacauggauuagacuucagugaagucucuaacguacaaagauuaaugagaaaacagaaaagagacgacucagaccucaaaagacuuagagaccucaaccaagcaguaaauaacuuaguagaacuaaaaucaacgcaacaaaaaucaauauuaagagucggcacacuaacauccgacgauuugcuuaccuuagcagcagaccuagaaaaauuaaaaucuaaaguuauaagaacagaacgaccacuaagcucaggaguuuauaugggaaauuuaaguacgcaacaacuagaacaacguagagcauuacuuaacaugaucgguaugguaggaggagcacaaggaacucaaccaggaagagacgguguuguaagagucugggaugucaaaaacccugaucuucuaaacaaccaguuuggaacaaugccuucuuuaacauuagcauguuuaacuaaacaaggacaaguagacuuaaaugaugcaguacuagcacucacagaccuaggcuuaaucuacacagcuaaauauccuaacucaucagauuuagacagacuaagucaaucacacccuauauuaaacaugguagacauaaagaaaagcucauuaaacauaaguggauauaacuucagccucggagcugcaguuaaagcaggagcauguauguuagauggagguaauaugcuagaaacaauaaaaguaacaccacaaacaauggacggaauacuuaaaaguauauuaaaagucaaaaggagccuaggaauguucguuagugacacaccaggagaaagaaaucccuacgaaaauauacuauacaaaauaugucucucuggagauggauggccauauauagcaaguagaacaucaauaguaggucgagcaugggaaaauacaacugucgaucuugaaucagacggcaaaccccaaaaaguaggaucagcaggaaguaauaaaaguuuacaaucagcaggauuuccaacaggacucacauauagucaacuuaugacauuaaaagauucaaugaugcaacuugauccaucagcaaaaacauggauagauauugaaggacgaccggaagacccaguagaaauagcacuauaucaacccaugucugguuguuauauacacuuuuucagagaaccuacagaucuaaaacaauuuaagcaagacgcgaaauacucacauggcaucgacguugcagauuuauuuccagcacaaccuggauuaacaucagcaguaauagaagcauuaccaagaaacaugguauuaaccugucaaggcucagaugacauaaaaagacuauuagauucccaaggaagaagagacauaaaauuaauagacauagcacucucaaaagcggauucccgaagauucgaaaacgcagucugggaccaauguaaagauuuaugucacaugcacacaggaguaguaguagaaaagaagaaaagaggaggaaaagaagaaauaaccccucacugugcauuaauggacuguauaauguacgaugcagcaguaucagguggacuaaauauaccuguccuccgagccguauuaccaagagauaugguauucagaacaagcucuccaaaaguaguacuauaaggacuagucccuguucccagagcccacuuuuuuuucuuuuuuugaaauaaaauagccugucuuucagaucuaaaaaaaaaaaaaaaaaaaaaaaaaaaaaaaaaaaaaaaaaaaaaaaaaaaaaaaaaaaaaaaaugcaucccccccccccccccccccccccccccccccaaaggcucuuuucagagccaccagaauu

SEQ ID NO: 10301 - RNA, 2005 nt, Artificial Sequence
  mRNA product Design a-2 comprising derived and/or modified sequence from LASV(LASV253-NIG-2011;Clade II)__AIT17671__NP (opt6)
gggagaguccgcucagccagguugcagaagcggcuuagcguguguccuaaucuucucucugcguguagguaggccugugccgcaaacaagcuuaccaugagcgcaucuaaagaaguaaaaucuuucuuauggacacaaucacuaagaagagaacucucuggauauugcuccaguauuaaacuacaaguaguaaaagaugcgcaagcccucuuacauggacuugacuuuagugaaguaucaaauguucaaagacuuaugcguaaacaaaaaagagaugauucagauuuaaaaagauuacgagaccuaaaucaagcuguaaacaauuuaguagaauuaaaaagcacacaacaaaaaucaguauuaagaguaggaacauuaacaucagacgaccuacuaacacuagcugcagaccuagaaaaacuaaaaucaaaaguaauaagaacugaaagaccgcuaagcucaggaguauauaugggaaauuuaaguacacagcaauuagaacaaagacgagcacuuuuaaacaugauaggaaugguuggaggagcacaaggaacacaaccuggccgagacggaguaguuagaguaugggauguaaaaaauccagauuuauuaaauaaucaauucggaacuaugccaagucuaacacuagcaugucuaacaaaacaaggacaaguagaccuaaacgacgucguucuagcuuuaacagaccucggauuaaucuauacagccaaauauccaaauaguagcgaucuagauagacucucacaaucacaccccauacuaaauauggucgacaccaaaaaaucaucauuaaacauuucaggauacaauuuuucacuaggagcagcaguaaaagcaggagcgugcaugcuugaugggggaaauauguuagaaacaauaaaaguaacaccccaaacaauggacggcauacuaaaaucaauacuaaaaguaaaaaaaucuuuagguauguucguaucagauacaccuggagaacgaaauccguaugaaaauauacuauacaaaauaugucuaucaggagauggauggccauauaucgcaagucgaaccucaauaguuggaagagcaugggaaaauacaacaguagaucuagaaagcgacggaaaaccacaaaaagucggaacagcgggaucaaauaaaaguuuacaaucagcaggcuuuccaacaggacuuacauauucacaacuaaugacauugaaagauagcaugaugcaacuagauccaagugcaaaaacguggauagauauagaaggaaggcccgaagauccaguugaaaucgcacucuaccaaccaaugucaggaugcuacauccauuuuuucagagaaccaacagaucuaaagcaauucaaacaagacgcaaaauacucacacggaauagacgucacagaucuauucccagcacaaccaggucuuacuucugcaguaauagaagcauuaccgcgaaacaugguacuaacuugucaaggaagugacgacauaaaaagauuacuagacagccaaggaagaagagauauaaaauuaauagacauagcguuaucaaaagcagacuccagacgauuugaaaacgcaguaugggaucaaugcaaggauuuaugccauaugcauacaggagucguaguagaaaaaaaaaagcguggcggaaaagaagaaauaacaccccauugugcauuaauggauugcauaauguaugaugcagcaguauccggaggacucaacauaccaguccuaagagcaguccucccaagggauauggucuuuagaacauccucacccaaaguaguauuauaaggacuagucccuguucccagagcccacuuuuuuuucuuuuuuugaaauaaaauagccugucuuucagaucuaaaaaaaaaaaaaaaaaaaaaaaaaaaaaaaaaaaaaaaaaaaaaaaaaaaaaaaaaaaaaaaaugcaucccccccccccccccccccccccccccccccaaaggcucuuuucagagccaccagaauu

SEQ ID NO: 10302 - RNA, 2005 nt, Artificial Sequence
  mRNA product Design a-2 comprising derived and/or modified sequence from LASV(LASV254-NIG-2011;Clade II)__AIT17675__NP (opt6)
gggagaguccgcucagccagguugcagaagcggcuuagcguguguccuaaucuucucucugcguguagguaggccugugccgcaaacaagcuuaccaugagugcaucuaaagaaguaaaaucauuuuuauggacccaaucgcucagaagagaauugaguggauauugcaguucaauuaaauugcaaguuguaaaagacgcacaagcacuauuacauggucuagauuuuagcgaaguaucaaauguucaacgcuuaaugcgaaaacaaaaacgagaugacagugacuuaaaaagacuaagagacuuaaaucaagcaguaaacaauuuaguagaacuaaaaaguacacaacaaaaaucuguauuaagaguaggaacauuaacaagcgaugauuuacucacauuagcagcugaucuagaaaaauuaaaaucaaaaguaauaagaacagaaagaccauuauccagcggaguauauaugggaaauuuaucaacacaacaauuagagcaacgacgugcauuauuaaacaugauaggaaugguagguggagcacaaggcacgcaaccaggaagagacggaguaguaagaguaugggaugucaaaaacccugaccuacuaaauaaucaauuuggaacaaugccaucauugacauuagcaugucuuacaaaacaaggacaaguagacuuaaaugacgcgguacuagcacuaacagauuuaggauuaauauauacagcaaaauauccaaauucaucagaccuugauagauuaagucaaagccacccaauacuuaauaugguagauacaaagaaauccagucuaaacauuagcggcuacaauuucagccuaggagcagcaguaaaagcaggagcgugcauguuggacggaggaaauaugcuagaaacaauaaaagugacuccccaaacaauggacggaauauuaaaaucuauacuaaaaguaaagaaaagccuaggaauguucguaagugauacaccaggagaaagaaauccauaugaaaauauauuauauaaaauaugucuaagcggugauggauggcccuauauagcaaguagaacaucgauaguggguagagcaugggaaaauacuaucguagaucuagagagugauggaaaaccucaaaaaguaggaacggcaggaucaaacaaaucauuacaaucagccggauuuccaacaggacuaacauauucacaauuaaugacacuaaaagauaguaugaugcaacuagacccaagugcaaaaaccuggauagauauagaaggaagaccagaagaccccguagaaauagcauuauaucaaccaaugucaggauguuacauacacuuuuucagagaaccaacugauuuaaaacaauuuaaacaagaugcuaaauacagucauggaauagaugucgcagacuuauucccagcacaaccagguuuaacaagugcaguaauagaagcauuaccgagaaauaugguucucacuugucaaggaagugacgauauaaaacgacuacuugauucacaaggaagaagagacauaaaauuaauugauauagcauuaucaaaagcagauaguagaagauucgaaaaugcaguaugggaucaauguaaagaccucugucacaugcauacaggaguaguagucgagaaaaagaaacgaggaggaaaagaagaaauuacaccgcauugugcauuaauggauugcauaauguaugacgcugccguaucaggaggacuuaauauucccguguuaagggcaguauuaccaagagacaugguauucagaacuucaucacccaaaguaguacuauaaggacuagucccuguucccagagcccacuuuuuuuucuuuuuuugaaauaaaauagccugucuuucagaucuaaaaaaaaaaaaaaaaaaaaaaaaaaaaaaaaaaaaaaaaaaaaaaaaaaaaaaaaaaaaaaaaugcaucccccccccccccccccccccccccccccccaaaggcucuuuucagagccaccagaauu

SEQ ID NO: 10303 - RNA, 2005 nt, Artificial Sequence
  mRNA product Design a-2 comprising derived and/or modified sequence from LASV(Nig08-04;Clade II)__ADU56611__NP (opt6)
gggagaguccgcucagccagguugcagaagcggcuuagcguguguccuaaucuucucucugcguguagguaggccugugccgcaaacaagcuuaccaugagugcaucaaaagaagucaaaucauuccuuuggacacaaagccuaagacgagaacuaucaggauacugcucuaacauaaaauuacaaguuguaaaagacgcacaagcacuuuuacauggauuggauuucucagaaguaucaaacguucaacgacuaaugcgaaaacagaaaagagacgauggagaucuaaaaagacuaagagauuuaaaccaagccguaaauaaccuaguagaacuaaaaucgacacaacaaaaaucuguuuugagaguaggaaccuuaaccucugacgaccuacuaacacuugcagcagacuuagaaaaauuaaaaucaaaaguaaucagaacagaaagaccucucagcucaggaguauacaugggaaaucuaaguacacaacaacuagaacaaagaaaagcacuacuaagcaugaucgguaugguaggaggagcacaaggcacacaaccaggaagagacggaguaguuagaguaugggauguuaaaaauccagaccuacuuaacaaccaauucggaacaaugcccucauuaacuuuagcaugcuuaacaaaacaaggacaaguagaucuaaaugaugcaguucuagcccuaacagaucucggacuaauauauacagcaaaauacccaaauucaucagaucuagacagauuaucucaaucccauccaauacuaaacaugguagauaccaagaaaucaucacuaaacauuucaggauacaauuuuucacuaggagcagcaguaaaagccggagcaugcaugcuagauggaggcaacaugcucgaaacaauaaaaguaacaccccaaacaauggacgggauauuaaaaaguauacugaaaguuaaaagaucacuaggaauguucguaucagauacaccaggagaaagaaaucccuaugaaaauauucuauacaaaauaugccuaucaggugauggguggccuuacaucgcaaguagaacaaguauaguagggagagcaugggaaaauacaacuguagaucuagaaucugauggaaaaccacaaaaaguaggaacugcaggaaguaauaaaaguuuacaaagcgcaggauuuccuacaggauuaacuuauagucaacuaaugaccuuaaaagauagcaugaugcaauuagauccaagugcaaaaacauggauagacauagaaggucgaccagaagacccagucgaaauagcauuauaucaaccaaugucaggcuguuauauacacuucuuucgagaaccuaccgaucuaaaacaauuuaaacaggaugcaaaauauucacacgguauagacguuacagauuuauuuucagcacaaccagguuuaacuucagcaguaauagaagcguuaccaagaaacaugguccucacaugucaaggaucagaugauauuaagaaauuacuugacagucaaggaagacgagacauaaaacuuauagacaucucauuaaacaaagcagacucaagaagauuugaaaacgcaguaugggaccaauguaaagauuuaugccacaugcauacaggagucguaguagagaaaaagaaacgagguggaaaagaagaaauaacuccacauugcgcauuaauggauugcauaauguuugacgcagcugugaguggaggauuaaauauaccaauauuaagagccguacuaccaagagauaugguauuuagaacaaguucgccaaaagugguacuauaaggacuagucccuguucccagagcccacuuuuuuuucuuuuuuugaaauaaaauagccugucuuucagaucuaaaaaaaaaaaaaaaaaaaaaaaaaaaaaaaaaaaaaaaaaaaaaaaaaaaaaaaaaaaaaaaaugcaucccccccccccccccccccccccccccccccaaaggcucuuuucagagccaccagaauu

SEQ ID NO: 10304 - RNA, 2008 nt, Artificial Sequence
  mRNA product Design a-2 comprising derived and/or modified sequence from LASV(GA391;Clade III)__AAA46284__NP (opt6)
gggagaguccgcucagccagguugcagaagcggcuuagcguguguccuaaucuucucucugcguguagguaggccugugccgcaaacaagcuuaccauguccgcuagcaaagaaguaagauccugcuuauggacacaaucacuaagaagagaacuaucaggauauugcucaaacauaaaauuacaaguaguaaaagacgcccaagcacuauuacacggacuagauuucucagaaguuucaaauguacaaagauuaaugagaaaacaaaaacgagacgacggcgaucuaaaaaggcuaagagaucuuaaucaagcaguaaauaaccuaguagaacuaaaaaguacacaacaaaaaucaguacuacgaguuggcacauuaucuagugaugauuuacuaauacuagcagccgauuuagaaaaacuaaaaucaaaagucacaagaacagaaagaccguuaucaucaggaguauauaugggaaacuuaucaucucaacaauuagaccaaagacgagcucuccuaaacaugauaggaaugacaggaguaagcggaggaggaaaaggagcaucaaacggaaucguaagaguaugggauguuaaaaaugcagaacuacuaaauaaccaauucggaacaaugccuaguuuaacccuagcuugcuuaacaaaacaaggacaaguagaucuaaacgaugccguacaagcacucacagaucuaggauuaauuuacacagcuaaauaccccaauagcucagauuuagaucgauuaagucaaucacacccuauccuaaacaugauagauaccaagaaaaguagccuaaacauuagcggauacaauuuuucauuaggagcagcaguaaaagcaggagcaugcaugcuagaugguggaaacauguuagaaacaaucaaaguaaguccacaaacaauggauggaauacuaaaaucaauacucaaagugaaaaagagcuuaggaauguucguaagugacacaccuggugaaagaaaucccuaugaaaauauauuauauaaaaucugucucucaggagauggcuggagcuauauagcaucaagaacaucaauaguaggcagagcaugggaaaauacaguaguagauuuagaacaagacaacaaaccacagaaaauaggaaacggaggaaguaacaaaucuuuacaaagcgcaggauuugcagcaggccugauauacagucaacuuaugacauuaaaagauuucaaauguuuuaaccuaauaccaaaugccaaaacauggauggauauagaaggcagaccagaagauccagucgaaauagcucuuuaccaaccaaguuccggcugcuauguacauuucuucagagaaccaacagaccuuaaacaauucaaacaagacgcaaaauauucacauggacgagauguaacugaccuauucgcagcacaaccaggauuaacaagugcaguuauagaagcccuaccacgaaauaugguuauaacaugccaaggaagugaagauauacgaaaauuauuagaaagucaaggaaggagagauaucaaacuuauugacauuacacuaucaaaagcugacucaagaaaauuugaaaaugcuguaugggaccaauuuaaagauuuaugccacaugcacacugguguaguaguugagaaaaagaaacgaggaggcaaagaagaaauaacaccacacugugcgcucauggacugcauaauguucgaugcugcaguaucaggaggacucgacgccaaagucuuacgaguagucuuaccaagagacaugguauuccguacaucaacacccaaagucguacuauaaggacuagucccuguucccagagcccacuuuuuuuucuuuuuuugaaauaaaauagccugucuuucagaucuaaaaaaaaaaaaaaaaaaaaaaaaaaaaaaaaaaaaaaaaaaaaaaaaaaaaaaaaaaaaaaaaugcaucccccccccccccccccccccccccccccccaaaggcucuuuucagagccaccagaauu

SEQ ID NO: 10305 - RNA, 2005 nt, Artificial Sequence
  mRNA product Design a-2 comprising derived and/or modified sequence from LASV(Nig08-A19;Clade III)__ADU56619__NP (opt6)
gggagaguccgcucagccagguugcagaagcggcuuagcguguguccuaaucuucucucugcguguagguaggccugugccgcaaacaagcuuaccaugagcgcaucaaaagaaguaaaaucauucuuauggacacaaucauuaagacgagaacuaucuggauacuguaguaauauaaaauuacaaguaguuaaagaugcacaagcccuauuacauggacuagauuuuucagaagucucuaauguccaaagauuaaugagaaaacaaaaaagagacgacggagaucuaaaaagacuuagagacuuaaaucaggcaguaaacaaucuuguagaacuaaaaagcacucaacaaaaaucugugcuaagaguuggaacauuaaguagcgaugaucuucuuguacucgcagccgacuuagaaaaauuaaaaucuaaaguaguacgaacagaacggccacuaucaucagguauauauaugggaaaccuuucaucucaacaacuggaucaaaggaaagcauuacuaaacaugauaggaaugacaggaggaaauggaggacgaaacacaacaagcgacggaaucguuagaguuugggacguaaaaaacgcagaacuauuaaacaaucaauuugguacaaugccaaguuuaacucucgcuugccuuaccaaacaaggacaaguagaucuaaaugaugcaguacaagcacuaacagaccuagguuuaauauauacagcgaaauauccaaauuccucagacuuagaucgacuagcacaaucacauccaauauuaaauaugauagauacgaaaaaaucaucauuaaacauaagcggauacaauuucucauuaggcgcagcaguuaaagcuggagcauguauguuagacggaggaaauaugcucgaaacaaucaaaguaagcccacaaacaauggacggaauauuaaaaucaauacuaaaaguaaaaaggucacuaggaauguucauuagugauacaccaggcgaaagaaacccauaugaaaauauauuauacaaaauaugcuuaagcggagacggauggcccuauauugccucaagaaccagcauaguaggaagagcaugggaaaacacaguagucgaucuagaaucggauaauaaaccacaaaaaacaggaaacgguggaaguaauaaaucacuacaaucagcagguuuugccgcaggcuuaacauacucacaacucaugacauuaaaagauucaaugcuccaacucgacccaaaugcuaaaacauggauggauauagaaggaagaccagaagacccaguagaaauagcucuauaccaaccguccucaggauguuacauacacuucuuuagagaaccaacagaucuaaaacaguuuaaacaagacgcaaaauacagccauggaauagacguuacagauuuauuugcagcacaaccaggacuaacaagugcaguuauagaagcauuaccaaggaacaugguaauaacaugucaaggcagugaagacauaagaaaacuacucgaaucacaaggaaggcgugacauuaaacuuauagauauuagucuaagcaaaguagacucacgaaaguuugaaaacgcaguaugggaucaauucaaagaucuaugccacaugcauacaggaauaguagucgaaaaaaaaaaaagaggggggaaagaagaaauuacaccacacugcgcuuuaauggacugcauaauguuugaugcagcuguaucaggaggaguugacgcaaaaguucuuagagcaguauuaccaagagauaugguauucagaacuucaacacccaaaguuguccucuaaggacuagucccuguucccagagcccacuuuuuuuucuuuuuuugaaauaaaauagccugucuuucagaucuaaaaaaaaaaaaaaaaaaaaaaaaaaaaaaaaaaaaaaaaaaaaaaaaaaaaaaaaaaaaaaaaugcaucccccccccccccccccccccccccccccccaaaggcucuuuucagagccaccagaauu

SEQ ID NO: 10306 - RNA, 2005 nt, Artificial Sequence
  mRNA product Design a-2 comprising derived and/or modified sequence from LASV(G1180-SLE-2010;Clade IV)__AIT17169__NP (opt6)
gggagaguccgcucagccagguugcagaagcggcuuagcguguguccuaaucuucucucugcguguagguaggccugugccgcaaacaagcuuaccauguccgcaagcaaagaaauaaaauccuuccuauggacccaaucucucagaagagaauuaaguggauacuguucuaacauuaaacuacaaguagucaaagacgcucaagcacuauuacaugguuuagauuucucagaaguaaguaauguccaaagacuaaugagaaaagaaagaagagacgauaacgacuuaaaaagacuaagagaccuaaaucaggcugucaauaauuuaguagaacuaaaaaguacucaacaaaaaucuauacuaagaguaggaacguuaacuagcgacgaucuacuaauauuagcagccgaucuugaaaaauuaaaaucaaaaguaauuagaacagagagaccauuaagcgcuggaguauauaugggaaacuuaaguucacaacaauuagaccaaagaagagcacucuuaucgaugauaggaaugucaucaggaaaucaaagagcacaagcaggcagagauggugucguacgugucugggacguaaaaaauguagaacuacuaaacaaucaauuuggaaccaugccuucauuaacucucgcuuguuuaacuaaacaaggacaaguagaccuaaacgaugcaguacaagcauuaacugacuuaggacuaauauauacagcaaaauacccuaauacuuccgauuuagacagacuaacacaaucacacccaauacuuaauaugauagauacaaaaaaauccucauuaaacaucucaggauacaauuucucauuaggagcagcagucaaagcaggagccuguauguuagacggaggaaauauguuagaaacuauaaaaguaucuccacaaaccauggacggaauacugaaaaguauucuaaaaguaaaaaaagcauuaggaauguucauuucagauacaccaggcgaaagaaaucccuaugaaaauauauuauacaaaauaugucuaucaggugauggauggccauauaucgcaagccgaacaaguaucacaggaagagcaugggaaaauacaguaguagacuuagaaucagauggaaaaccacaaaaagcaggauccaacaauucaaacaaaucauuacaaagcguaggauuuaccgcaggacuaacauauucacaacuaaugacguuaaaagaugcaaugcuacaguuagauccaaaugcaaaaaccuggauggacauagaaggaagacccgaagacccaguagaaauugcauuauaucaaccaagcaguggaugcuauauucacuuuuuccgugaaccuaccgaccuaaaacaauuuaaacaagacgcaaaauauucacauggaauagacguuacagaucuauuugcagcacaaccuggacuaacaucagcaguaauagacgcccuuccucgaaauaugguuauaaccugucaaggaucagaugauauacgaaaacuucuagaaagccaaggacgaaaagacaucaaauuaauagauauagcauuaucuaaaacggacucaagaaaauaugaaaacgcugucugggaccaauauaaagauuuaugccauaugcauaccggaguaguaguugaaaaaaaaaaacgaggaggaaaagaagaaauaaccccacacugcgcacuaauggauugcauaauguucgacgcagcaguaucagggggucuaaauacauccgucuuaagagcaguacuaccaagagauaugguauucagaacaucaacaccacgaguuguacuauaaggacuagucccuguucccagagcccacuuuuuuuucuuuuuuugaaauaaaauagccugucuuucagaucuaaaaaaaaaaaaaaaaaaaaaaaaaaaaaaaaaaaaaaaaaaaaaaaaaaaaaaaaaaaaaaaaugcaucccccccccccccccccccccccccccccccaaaggcucuuuucagagccaccagaauu

SEQ ID NO: 10307 - RNA, 2005 nt, Artificial Sequence
  mRNA product Design a-2 comprising derived and/or modified sequence from LASV(G1442-SLE-2011;Clade IV)__AIT17181__NP (opt6)
gggagaguccgcucagccagguugcagaagcggcuuagcguguguccuaaucuucucucugcguguagguaggccugugccgcaaacaagcuuaccaugucugcuaguaaagaaguaaaaagcuuuuuauggacacaaucauuacgaagagaauuauccggcuauuguagcaauauaaaacuacaaguagucaaagacgcacaagccuuacuacacggacuagauuucucagaaguaucaaauguacaaagacuaaugagaaaacaaagaagagacgacaacgaccugaaaagacuaagagaucuaaaucaagcaguuaacaaucucguagaacucaaaagcacacaacaaaaaucaguauuaagagucggcacucuaacgagcgaugacuuauuagugcucgccgcagacuuagaaaaacuaaaaagcaaaguaauaagaacagaaagaccccucucagccggaguauauaugggaaaucuaucaucacaacaauuagaccaaagacgagcauuauuaaacaugaucggaaugagcggcggcauacaaggaacacgaacaggaagagaugguguagucagaguaugggacgucaaaaacgcagauuuauuaaacaaccaauuuggcacaaugccaucauuaacauuagcaugcuuaacaaaacaaggacaaguagacuuaaaugaugugguacaagcacucacagaccucggcuuaauauacacagccaaauaccccaacgcaucagaccuagacagacuaacucaaucacacccaauacuaaacaugauagauaccaaaaagaguucacuaaacaucucaggauauaacuuuucacuaggcgcugcuguaaaagccggagcauguauguuagacggugguaacaugcuagaaacuauaaaaguaucaccacaaacaauggacggaauauuaaaaucaauccuaaaaguaaaaaaaacauuaggaauguuuauaagugacacaccaggagaaagaaauccguaugaaaauauauuauacaaaaucugccuuucgggagacggcuggcccuacauagccagccgaacuagcauuacaggaagagcaugggaaaacacaguaguagaccucgaaagcgacggaaaaccgcaaaaagcugggucaaauaacuccaauaaaucauuacaaagugcuggauuugcagcaggauuaacauauucacaauuaaugacauuaaaagacgcaaugcuacaauuagauccuaaugcaaaaacauggauggauaucgaaggaagaccagaagaccccguagaaauagcccuauaccaaccguccucaggauguuacauccacuuuuucagagaaccaacagaccuaaaacaauuuaaacaagacgccaaauauucacauggaaucgacgucacugauuuauucgccgcacaaccaggacuaacaagcgcaguaaucgaagccuuaccaagaaacauggugauaacaugccaaggaagugaugacauaaaaaaacuauuagaaucacaaggaagaaaagacauaaaauuaauagacauagcauuaagcaaaacagacucacgcaaauaugaaaacgcaguaugggaucaauacaaagacuuaugccauaugcacacaggaguaguuguagaaaaaaagaaaagaggaggcaaagaagaaauaacaccacauugugcacuuauggacuguauaauguuugacgcagccguaucaggaggauuaaauacacuaguacuaagagcaguccuaccaagagacaugguauucagaacuagcaccccaagaguaguacuauaaggacuagucccuguucccagagcccacuuuuuuuucuuuuuuugaaauaaaauagccugucuuucagaucuaaaaaaaaaaaaaaaaaaaaaaaaaaaaaaaaaaaaaaaaaaaaaaaaaaaaaaaaaaaaaaaaugcaucccccccccccccccccccccccccccccccaaaggcucuuuucagagccaccagaauu

SEQ ID NO: 10308 - RNA, 2005 nt, Artificial Sequence
  mRNA product Design a-2 comprising derived and/or modified sequence from LASV(G3010-SLE-2013;Clade IV)__AIT17345__NP (opt6)
gggagaguccgcucagccagguugcagaagcggcuuagcguguguccuaaucuucucucugcguguagguaggccugugccgcaaacaagcuuaccaugagcgcuaguaaggaaauaaaauccuuccucuggacacaaucacuaagaagagaauuaagugguuauugcaguaacaucaaauuacaaguaguuaaagaugcacaagcauuacuacauggauuagauuucucagaaguaagcaauguacaaagacuuaugaggaaagaacgaagggaugauaacgaccuaaaacgacuaagagaucugaaucaagcaguaaauaacuuaguagaauuaaaaucaacacaacaaaaaucaauucuaagaguaggcacccugacaagcgaugauuuacuaauucuagcagcagauuuagaaaaauuaaaaucaaaaguuacaagaacagaaagaccgcuaagcgcuggaguauauaugggaaaccugucuucccaacaauuagaucaaagaagagcuuuacuaagcaugauaggaaugucaucugggguccaaggagcaagagccgguagagacggaguaguucgaguaugggacguaaaaaacgcagaacucuuaaacaaccaauucggaacuaugccaaguuuaacuuuagcuuguuuaacaaaacaaggacaaguagauuuaaaugauguaguucaagcacuaacagacuuaggucuaauauauacagcuaaauaccccaauacaucagaucucgacagacuaacacaaucccaucccauauuaaacaugauagauaccaaaaaaucuucucuaaacauaucaggauacaauuuuaguuuaggugcagcuguaaaagcuggagccugcauguuagaugguggaaauauguuagaaacaauaaaagugaguccccaaacaauggaugggauccuaaaaagcauauuaaaaguaaaaaaagcauuaggaauguucauaucagagacacccggugaaagaaauccauaugaaaauauacuauacaaaaucugucuaaguggugacggcuggccuuacaucgcaaguagaacaucaauuacgggacgugcaugggaaaacacaguaguugaucuggaaucagauggaaaaccacaaaaagcaggaucaaacaacucaaauaaaagucuacaaucagcaggauucacugcaggauuaacauauucacaacuaaugacacuaaaagaugcuaugcuucaacuagacccaaacgcaaaaacauggauggacauagaaggccgaccagaagauccagucgaagucgcacuauaccaaccuaguucaggauguuauauacacuucuuucgugaaccaacagaccuaaaacaauucaaacaagacgcaaaauauucacauggaauagacguuacagaccuauucgcagcacaaccaggucuaaccagugccguaauagacgcauuaccaaggaauauggucauaacaugucaaggaucagaugauauaaaaaaacuauuagaaagucaaggaagaaaagacaucaaauuaauagauauagcacuaucaaagacagauucaagaaaauaugaaaaugcaguaugggaccaauauaaagaccuaugucacaugcauaccggaguugugguagaaaaaaaaaaaagaggagggaaagaagaaauaacgccacauugcgcauuaauggauuguauaauguuugaugccgcaguauccgguggacuuaauacaaguguacuuagagcaguacugccacgagacaugguauuuagaacaucaacaccccguguaguuuuauaaggacuagucccuguucccagagcccacuuuuuuuucuuuuuuugaaauaaaauagccugucuuucagaucuaaaaaaaaaaaaaaaaaaaaaaaaaaaaaaaaaaaaaaaaaaaaaaaaaaaaaaaaaaaaaaaaugcaucccccccccccccccccccccccccccccccaaaggcucuuuucagagccaccagaauu

SEQ ID NO: 10309 - RNA, 2005 nt, Artificial Sequence
  mRNA product Design a-2 comprising derived and/or modified sequence from LASV(G502-SLE-2009;Clade IV)__AIT17127__NP (opt6)
gggagaguccgcucagccagguugcagaagcggcuuagcguguguccuaaucuucucucugcguguagguaggccugugccgcaaacaagcuuaccaugagcgcaucuaaagaaauaaaaucauuucuauggacacaaucucuaagaagagaacuaucaggauacugcucaaauauaaaauuacaaguaguaaaagacgcucaagcacucuuacacggauuagauuucucugaaguuucuaauguacaaagauuaaugagaaaagaacgcagagacgacaacgaucuuaaaagauuaagagauuuaaaucaagcgguaaacaacuuagucgaauuaaaaagcacucaacaaaaaaguaucuuacgaguaggcacacucacaucagaugaccuacuuauacuagccgcagacuuagaaaaauuaaaauccaaaguaauaagaacugaacgcccucuaucagccggaguauauauggguaacuuaucaucacaacaacuagaucaaagacgagcacuauuaucaaugaucggaaugucagggggcaaucaaggcgucagagcaggaaaagacggaguaguaagaguaugggacguaaaaaacgcagaauuauugaauaaccaauuuggaacaaugccaucacugacacuagcauguuuaacaaaacaaggacaaguagauuuaaaugacgccguucaagcacuaacagaucuuggccuaaucuauaccgcaaaauauccaaacacuagugacuuagacaggcuaacacaaagccacccaauauuaaauaugauagacacaaaaaaaucuucacucaacauaagcggguacaauuuuuccuuaggugccgcagucaaagcaggagccuguauguuagacggaggaaacauguuagaaacaauaaaaguaucgccacaaacaauggaugguauauuaaaaucuauacuaaaagucaaaaaagcauuagguauguucauauccgacacaccaggagaaagaaacccauacgaaaauauccuauauaaaauauguuuaucuggagauggauggccauacauagcaucuagaacaagcaucaccggcagggcaugggaaaauaccguaguugaccucgaaucagauggaaaaccccaaaaagcagguucaaacaauucaaauaaaucauuacaauccgcaggcuuuaccgccggacuuacuuauucacaacuaaugacuuuaaaagaugcaaugcuccaacuagauccaaauaccaaaacauggauggauauagaaggacgaccagaagauccaguagaaaucgcccucuaccaaccaucaucaggcuguuacauacacuucuuuagggaaccaacugaucucaaacaauucaaacaagacgcuaaauauucacauggaaucgacguaacagaucuauuugcugcacaaccuggucucacaucagcaguuauagaugcacuaccaagaaauaugguaauuacaugccaaggaagcgacgacauacgaaaacuccuagaaucacaaggucgaaaagauauaaaacucauugauauagcauuaaacaaaacagauucuagaaaauaugaaaacgcuguaugggaccaguacaaagacuuaugucacaugcacaccggaguaguuguagaaaagaaaaaacgaggcggaaaagaagaaauaacaccucacugugcccucauggauugcauaauguuugacgcugcaguaucaggaggacuaaacacuucaguauuaagagcaguauuaccaagagauaugguauucagaacauccaccccaagaguaguguuauaaggacuagucccuguucccagagcccacuuuuuuuucuuuuuuugaaauaaaauagccugucuuucagaucuaaaaaaaaaaaaaaaaaaaaaaaaaaaaaaaaaaaaaaaaaaaaaaaaaaaaaaaaaaaaaaaaugcaucccccccccccccccccccccccccccccccaaaggcucuuuucagagccaccagaauu

SEQ ID NO: 10310 - RNA, 2005 nt, Artificial Sequence
  mRNA product Design a-2 comprising derived and/or modified sequence from LASV(G733-SLE-2010;Clade IV)__AIT17155__NP (opt6)
gggagaguccgcucagccagguugcagaagcggcuuagcguguguccuaaucuucucucugcguguagguaggccugugccgcaaacaagcuuaccaugucugcuaguaaagaaauuaaaucauuuuuauggacacaaucacuacgcagagaacuaucaggcuacuguucaaauauuaaacuacaaguaguuaaagacgcacaagcucuauuacacggguuagacuucucugaaguaagcaacguacaaagacucaugagaaaagaacgaagggacgacaacgauuuaaaaagacuacgagacuuaaaucaagcugucaauaaucuaguagaacuaaaaucaacacaacagaaaucaguauuaagaguaggaacguuaacauccgaugaacuucuaguuuuagcagccgaucuggaaaaacuaaaaucaaaaguaauacgaacagaaagaccccuaucggcaggaguauacaugggaaauuuaucaucacaacagcuagaucaacgaagagcucuccuaucaaugauaggcaugagcggaggaaaccaaggcgcacguacaggcagagacggagucguaagaguaugggacguaaaaaacgcugaacuacucaauaaccaauuuggcacaaugccaaguuuaacuuuagcuuguuuaacaaaacaaggacaaguagaccuaaaugaugccguacaagcacuaacugauuuaggauuaauauauacagcaaaauauccaaacacaucagaucuugauagacuaacacaaucccauccaauccuaaacaugauagacacaaaaaaaucuucauuaaauauaucagguuacaacuucagccuaggagcagcuguaaaagcuggcgccuguauguuagauggaggaaacaugcuugaaacaauaaaaguaucaccacaaacaauggacggaauauuaaaaucaauacuaaaaguaaaaaaagcacuagguauguuuauaagcgauacaccaggagaaagaaauccauacgaaaauauauuauacaaaauaugccuaaguggagauggauggccuuacauugcuucaagaacaucaauaaccggacgagcaugggaaaauacgguuguagaccuggaaucggauggaaaaccacaaaaagcaggcucaaacaauucaaauaaaagucuccaaucagcaggauuuacugcaggacuuacguauucucaacuuaugacauuaaaagaugcaaugcuacaauuagauccaaacgccaaaacguggauggacauagaaggaagaccagaagacccaguagaaauagcauuauaucaaccaaguagcggauguuacauacacuucuuuagagaaccaaccgauuuaaaacaauuuaaacaagacgcaaaauacagccacgguauagacguaaccgaccuauuugcagcacaaccaggauuaaccagugcaguuauagaugcauuaccaagaaauaugguaauaaccugucaaggaucagaugauaucagaaaacuauuagaaagucaaggaagaaaagacauuaaacuaauagauauugcgcucucuaaaauagacagucgaaaauacgaaaacgcagucugggaucaauauaaagauuuaugccacaugcauacaggaguaguaguagaaaaaaaaaaaagagguggaaaagaagaaauaacaccccacugugcacuuauggacuguaucauguuugacgcagccguaaguggaggauuaaauucauuaguacuaagagcaguauuaccaagagacaugguauuccguacaagcaccccacgaguaguauuauaaggacuagucccuguucccagagcccacuuuuuuuucuuuuuuugaaauaaaauagccugucuuucagaucuaaaaaaaaaaaaaaaaaaaaaaaaaaaaaaaaaaaaaaaaaaaaaaaaaaaaaaaaaaaaaaaaugcaucccccccccccccccccccccccccccccccaaaggcucuuuucagagccaccagaauu

SEQ ID NO: 10311 - RNA, 2005 nt, Artificial Sequence
  mRNA product Design a-2 comprising derived and/or modified sequence from MOPV/LASV reassortant(IGS-1;Clade IV)__AFY05578__NP (opt6)
gggagaguccgcucagccagguugcagaagcggcuuagcguguguccuaaucuucucucugcguguagguaggccugugccgcaaacaagcuuaccauguccgcaucgaaagaaauuaaaucauuucuauggacucaaagccuuagaagagaauuaucaggauauuguucaaauauaaaacuacaagucgugaaagaugcacaagcauuacuccacggauuagauuucagcgaaguaucaaauguccaaagacuaaugagaaaagaaagaagagacgauaacgaucuaaaaagacuaagagaucuaaaucaagcaguaaacaacuuaguggaauuaaaaagcacacaacaaaaaagcauacuuagaguagguacacucacauccgacgacuuacuaauuuuggcagcagaucuagaaaaauuaagaaguaagguuaucagaaccgaaagaccucuuagcgcaggaguauauaugggaaaucuauccucucaacaacuagaucaaagaagagcauuauuaaacaugaucggaaugagcggaggaaaucaaggagcacgugcaggaagagacggagucguuagagugugggacguaaaaaacgccgaauuauuaucaaaucaguuuggaacaaugcccucauuaaccuuagcauguuuaacaaaacaaggacaaguagacuuaaacgacgcaguucaagcacucacagauuuaggauuaauauauacggcaaaauauccaaauacuuccgaccucgacagacuaacacaaucacacccaauccuaaacaugauagacacaaaaaaaucaucacuaaacauuagcggauauaacuuuucacuaggagcagcaguaaaagcaggugcauguauguuagauggagggaauauguuggaaacaaucaaaguaucaccacaaacaauggacggaauacuaaaaagcauauuaaagguaaaaaaagcacuaggcauguucaucucagacacgccaggagaacgaaacccauaugaaaacauuuuauauaaaauaugcuuaagcggagauggauggccauacauagcaucaagaacaaguauuaccggaagagccugggaaaauacuguaguagaucuagaaagcgacggaaaaccacaaaaagccgauucaaauaauaguagcaaaagucuacaaagugcaggauucacagcuggguuaaccuauucacaauugaugacacuaaaagacgcgaugcuucaacuagacccaaaugcaaaaaccuggauggauauagaaggaagaccagaagaccccguugaaauagcauuauaucaacccaguucaggauguuacauacacuuuuuucgagaaccaacagauuuaaaacaauucaaacaagacgcuaaauacucacauggaauugaugugacagauuuauucgcaacacaaccagggcuaacaagcgcagucauagaugcauuaccaagaaacaugguaauaacaugccaaggaagugaugacauaagaaaauuauuagaaucgcaaggaagaaaagacauaaaauuaauagacauagaccuuagcaaaacagacaguagaaaauacgaaaacgcaguaugggaccaauauaaagaccuaugccauaugcauaccggaguaguugucgaaaaaaaaaaacgaggugggaaagaagaaauaacaccacauugugcauuaauggacugcauuauguuugaugcagcaguaucaggaggauuaaacacaagcguauuaagagcaguauuacccagagauauggucuuccgcacaucaaccccaagaguaguauuauaaggacuagucccuguucccagagcccacuuuuuuuucuuuuuuugaaauaaaauagccugucuuucagaucuaaaaaaaaaaaaaaaaaaaaaaaaaaaaaaaaaaaaaaaaaaaaaaaaaaaaaaaaaaaaaaaaugcaucccccccccccccccccccccccccccccccaaaggcucuuuucagagccaccagaauu

SEQ ID NO: 10312 - RNA, 2005 nt, Artificial Sequence
  mRNA product Design a-2 comprising derived and/or modified sequence from LASV(LM765-SLE-2012;Clade IV)__AIT17815__NP (opt6)
gggagaguccgcucagccagguugcagaagcggcuuagcguguguccuaaucuucucucugcguguagguaggccugugccgcaaacaagcuuaccaugagcgccuccaaagaaauaaaaucauucuuauggacucagucauuaagacgagaacuaaguggauacugcaguaauauaaaacuacaaguaguuaaagaugcacaagcuuuacuacacgggcuagauuuuucagaaguuucaaacguacaaagauuaaugagaaaagaaagacgagacgauaaugauuuaaaaagacuaagggaucucaaucaagcuguaaauaacuuaguggaauuaaaauccacacagcaaaaaucaauauuaagaguaggaacauuaaccagugaugacuuacuuauauuagcugcagaucucgaaaaauuaaaaucaaaaguaacaagaacugaaagaccacuaucagcaggaguauacaugggcaauuuaaguagucaacaauuagaucaaagaagagcauuauuagacaugauagguaugucaggaaguaaccaaggagcacgagcaggacgagacggaguaguaaggguaugggauguaaaaaacgcagaauuacuaaauaaccaauucgguaccaugccaucauugacacuagcauguuuaacuaaacaaggacaaguagaucuaaaugaugccguacaagcuuuaacagaucuaggccucauauacacagcaaaauauccaaauacaagcgaucuagauagacucacacagucacacccaauauuaaacaugauagauacaaaaaaaaguagcuuaaauauaagugguuauaacuuuaguuuaggagcagcaguaaaagcuggagccuguaugcuagacgguggaaauauguuagaaacuauaaaagucucaccgcaaacaauggaugguauacucaaaaguauacuaaaaguaaaaaaagcauuaggcauguucauaagcgaugcgccuggagaaagaaauccauacgaaaauauauuauauaaaauaugcuuaucaggagacggauggccguacauagcaaguagaacgucaauaacaggacgugcaugggaaaauacaguaguagauuuagaaagcgacgguaaaccgcaaaaagcaggaaguaacggaaguaauaaaaguuuacaaagugcaggauucacagcaggauuaacauauucacaauuaaugaccuuaaaagacgcaauguuacaauuagauccaaaugccaaaacauggauggauauagaaggacgacccgaagacccaguagaaauagcguuauaucaaccauccucaggauguuauauucacuuuuucagagaaccuacagauuuaaaacaauuuaaacaagacgcaaaauauagccauggaauagacguaacggaucuauuugcagcacaaccuggauuaaccagcgcaguuauagaugcauuaccuagaaauaugguaauuacaugucaagguagugaugacauacgaaaauuauuugaaucacaaggacgaaaagacauaaaacuaauagacauugcccucaguaaaacggacagcagaaaauaugaaaacgcaguaugggaccaauauaaagauuuaugccacaugcauacaggaauaguugucgaaaaaaaaaaacgagguggaaaagaagagauuaccccccacugugcacugauggauuguauaauguucgacgcagcggucucaggaggacuaaacacuucagucuuaagggccgucuuaccaagagauaugguauucagaacaucaacaccaagaguaguauuaugaggacuagucccuguucccagagcccacuuuuuuuucuuuuuuugaaauaaaauagccugucuuucagaucuaaaaaaaaaaaaaaaaaaaaaaaaaaaaaaaaaaaaaaaaaaaaaaaaaaaaaaaaaaaaaaaaugcaucccccccccccccccccccccccccccccccaaaggcucuuuucagagccaccagaauu

SEQ ID NO: 10313 - RNA, 2005 nt, Artificial Sequence
  mRNA product Design a-2 comprising derived and/or modified sequence from LASV(LM776-SLE-2012;Clade IV)__AIT17825__NP (opt6)
gggagaguccgcucagccagguugcagaagcggcuuagcguguguccuaaucuucucucugcguguagguaggccugugccgcaaacaagcuuaccaugucagcaaguaaagaaauaaaaaguuuuuuauggacccaaucacuacgacgagaacuaucaucauauugcucgaacauaaaauuacaaguaguaaaagaugcacaagcucuacuacaugguuuagacuuuucugaaguuucaaauguacaaagauuaaugagaaaagaaagaagagaugauaacgauuuaaaaagacuaagagaucucaaucaagcagucaauaaccucguugaacucaaauccacacaacaaaaaucaauucuaagaguaggcacuuuaaccucagaugacuuacugauacucgcagcagauuuagaaaaacuaaaaaguaaaguaacacgcaccgaaagaccacuaagugcuggaguauauauggguaaucuaaguucgcaacaauuagaccaaagaagagcucuucuauccaugauagguaugucaggaucaaaucaaggagcaagagcagguagagauggaguaguaagaguaugggacguaaaaaaugcagaacuucuaaauaaccaauucggaacaaugccaucacuuacauuagcuugccucacaaagcaaggacaaguagaccuaaaugaugcaguacaagcucuaacagacuuaggcuugauauauacagcaaaauauccaaauacuucagauuuagaucgauuaacacaaagucacccaauauuaaauaugauagauacuaaaaaaucaucauugaauauaucaggauacaauuuuagccuaggagcagcugucaaagccggagcauguauguuagacggaggcaauaugcuagaaacaauaaaaguuaguccucaaacaauggauggaauauuaaaaaguauacuaaaaguuaaaaaagcauuaggcauguuuauaagcgauacucccggagaaagaaauccauaugaaaauauauuauacaaaauaugucuaucuggagauggauggccauauauagcaagcagaacuagcauaacuggaagagcaugggaaaacaccguaguagaucuagaaucagauggaaaaccccaaaaagcaggaucgaacaauucaaauaaaagucuacaaagugcaggauuuacagcaggacuuacauauucacaacuaaugacccuaaaagaugcaaugcuacaauuagaccccaaugccaaaacauggauggacauagaaggaagaccagaggacccaguugaagucgcccuauaucaaccaucaucagguuguuauauacacuucuucagagaaccaacagaucuaaaacaauuuaaacaagacgcuaaauacagucaugguauagacguaacagaucuauuugcagcacaaccaggcuuaaccagugcaguuaucgaugcuuuaccaagaaacaugguuauaaccugucaaggaucagaugauauucgaaaacuucuagaaucucaaggaagaaaagauauuaaacuuauagauauagcacuaucgaaaacagauucccgaaaauaugaaaacgccguaugggaucaauauaaagaccucugucacaugcacacagguguagucguagaaaaaaaaaaaagaggaggaaaagaggaaauaaccccacacugugcacuaauggauugcauaauguuugacgcagcaguaucaggaggauuaaauacaucaguacuaagagcaguauuaccaagagacaugguuuuuagaacaucaaccccucgaguaguauuauaaggacuagucccuguucccagagcccacuuuuuuuucuuuuuuugaaauaaaauagccugucuuucagaucuaaaaaaaaaaaaaaaaaaaaaaaaaaaaaaaaaaaaaaaaaaaaaaaaaaaaaaaaaaaaaaaaugcaucccccccccccccccccccccccccccccccaaaggcucuuuucagagccaccagaauu

SEQ ID NO: 10314 - RNA, 2005 nt, Artificial Sequence
  mRNA product Design a-2 comprising derived and/or modified sequence from LASV(Mad39;Clade IV)__ANH09723__NP (opt6)
gggagaguccgcucagccagguugcagaagcggcuuagcguguguccuaaucuucucucugcguguagguaggccugugccgcaaacaagcuuaccaugagcgcaucaaaagaaauaaaaucauuccuauggacccaaagccuaagacgagaacuaucagguuauugcucaaacauaaaauuacaaguuguaaaagacgcacaagcacuauugcacggacuagacuucucagaaguaucaaacguacaaagacuaaugagaaaacaacgaagagacgauaaugaucuaaaaagauuaagagaccuaaaucaagcaguaaacaaucucguagaacuaaaaucaacacaacaaaaaucaguauuaagaguaggaacacuaacaagugaugacuuauuaacccuagcugcagacuuagaaaaauuaaaaaguaaagucacaagaacagagaggcccuuaacugcaggaguguauaugggaaaucuaaguagucaacaauuagaucaacggagagcauuacuaaacaugauaggaaugucaggaggcaaucaaggagcacgaacuggaagagacggaguaguaagaguaugggacgucaaaaacgcagaguuauuaaauaaucaauucggaacaaugccaucauuaacguuagcauguuuaacaaaacaaggccaaguagacuuaaacgauguaguacaagcccuaaccgaucuagggcuaauauacacagcaaaauacccaaauacaagugaucuagacagacucacucagucucacccaauauuaaacaugauagauacaaauaaaaguucauuaaacauuucaggauacaauuucagccucggagcagcaguaaaagcaggcgcauguaugcuagacggcggaaauaugcucgaaacgauaaaagucucaccucaaacaauggauggaauacuaaaauccauacucaaaguaaagaaaaguuuaggcauguuuaucuccgauacaccaggagaaagaaacccauaugaaaacauacuauauaaaauauguuuaagcggagauggauggccauacauagcaaguagaacaucuauaacaggcagagcaugggaaaacacaguuguagacuuagaaucaggaggaaaaccacaaaaagccggaucaaacaauagcaauaaaagccuucaaucagcaggauucgccgcaggccuaacauauagccaacuaaugacauuaaaagaugcaauguuacaacuagacccaaaugcaaaaacauggauggacauagaagggagaccagaagacccaguagaaauugcucuauaucaaccaauaaguggauguuacauacacuucuuuagagaaccaacagauuuaaaacaauucaaacaagacgcaaaauacagucaugguauagacguaacagauuuauucgcagcgcaaccagggcuuacaucugcaguaauagaagcauuaccaagaaacaugguaauaaccugucaaggaagugaugacaucagaaaacuauuugaaucacaagggagaaaagauaucaaauuaauagauaucgcguuaucaaaaacagauucaagaaaauacgaaaacgcaguaugggaccaauacaaagaccuaugccauaugcauacaggcguaguaguagaaaagaaaaagaaaggcggaaaagaggaaauaacaccgcacugcgcauuaauggacuguauaauguuugaugcagcagucucaggaggauuaaacacccuaguauuaagagcaguauuaccaagagacaugguauucaggacaucgacaccaaaaguuguacuauaaggacuagucccuguucccagagcccacuuuuuuuucuuuuuuugaaauaaaauagccugucuuucagaucuaaaaaaaaaaaaaaaaaaaaaaaaaaaaaaaaaaaaaaaaaaaaaaaaaaaaaaaaaaaaaaaaugcaucccccccccccccccccccccccccccccccaaaggcucuuuucagagccaccagaauu

SEQ ID NO: 10315 - RNA, 2005 nt, Artificial Sequence
  mRNA product Design a-2 comprising derived and/or modified sequence from LASV(Z0947-SLE-2011;Clade IV)__AIT17841__NP (opt6)
gggagaguccgcucagccagguugcagaagcggcuuagcguguguccuaaucuucucucugcguguagguaggccugugccgcaaacaagcuuaccaugucagccucaaaagaaauaaaaucauuucuauggacacaaucauuacgucgagaauuaucaggauacugcucaaacauaaaacuacaaguugucaaagacgcacaagcccuacuacacggacuagauuuuagugaaguaagcaacguccaacgauuaaugagaaaagaacgcagagacgacaacgaccuaaaaagacucagagaucuaaaucaagcaguaaacaaccuaguggaacuuaaaagcacccaacaaaaauccauauuaagaguaggaacacuaacaucugaugauuuauuaauacuagcugcagaucuggaaaaguuaaaaucaaaaguaacaagaaccgaaagaccacuaucagccggaguauauaugggaaaucuaucaagucaacaauuagaucaacgaagagcacuacuaaacaugauaggaaugucuggaucaaaucaaggagcaagaaccggaagagacggugucguaagaguaugggacguaaaaaaugcagaacuacuaaauaaccaauuuggaaccaugccaucauuaaccuuagcaugucuaaccaaacaaggacagguugauuuaaaugaugcuguacaagcacuaaccgaccuuggauuaaucuauacagcaaaauauccaaauacuucggacuuagauagacuaacacaaucucacccaauacuaaacaugaucgacacaaaaaaaucaucacuaaacauaucaggauauaauuucucacuaggagcggcaguaaaagccggagcaugcauguuagacggaggaaacaugcuagaaacaaucaaaguaaguccacagacaauggacggaauucuaaaaucaauacucaaaguaaaaaaagcacuaggaauguuuauaucugacgcaccaggagaaagaaauccauacgaaaauauacuauacaaaaucugccuaucaggugacggauggccauacaucgcaucaagaacaucaauaacaggacgagccugggaaaauaccguaguagauuuagaaucagauggaaaaccacaaaaagcuggaucaaacggaucaaauaaaucauuacaaucagcagguuucacagcaggacuuacauacucacaguuaaugacacucaaagaugcuaugcuucaacuagaucccaaugcaaaaacauggauggacauugaaggaagacccgaagaucccguagaaauagcucuauaucaaccaagcucaggauguuacauccacuuuuuuagagaaccaacagacuuaaaacaauucaaacaagacgccaaauacucccacggcaucgauguaacagaucuauuugcagcucaaccaggacuuacaucagcaguaauagaugcauuaccaagaaacaugguaauaacuugccaaggaucagacgacauaagaaaacuauucgaaucucaaggacgaaaagacaucaaguuaauagauauagcacuaucuaagacagauucucgaaaauaugaaaaugcaguaugggaucaauacaaagauuuaugccacaugcauacaggcaucgucguagaaaaaaaaaaaagagguggaaaagaagaaauaacaccucauugcgccuuaauggacugcauaauguuugacgcugccguaucaggaggauuaaauacaaguguauuaagagcaguucuaccacgugacaugguauucagaacaucaacaccaagaguuguuuuauaaggacuagucccuguucccagagcccacuuuuuuuucuuuuuuugaaauaaaauagccugucuuucagaucuaaaaaaaaaaaaaaaaaaaaaaaaaaaaaaaaaaaaaaaaaaaaaaaaaaaaaaaaaaaaaaaaugcaucccccccccccccccccccccccccccccccaaaggcucuuuucagagccaccagaauu

SEQ ID NO: 10316 - RNA, 2005 nt, Artificial Sequence
  mRNA product Design a-2 comprising derived and/or modified sequence from LASV(Josiah;Clade IV)__NP_694869__NP (opt11)
gggagaguccgcucagccagguugcagaagcggcuuagcguguguccuaaucuucucucugcguguagguaggccugugccgcaaacaagcuuaccaugucagccagcaaagaaauaaaaucauuccucuggacacaaucacuccgccgcgaacucucaggguauugcucaaacauaaaacuccaaguagucaaagacgcccaagcccuccuacacggacuagacuucucagaaguaagcaacguccaacgccuaaugagaaaagaacgcagagacgacaacgaccucaagaggcucagagaccuuaaccaagcggucaacaaccuugucgaacucaaaagcacacaacagaaauccauacuacgagucggcacacuaaccagcgacgaccuccugauccucgcagccgaccucgagaaacuaaaaagcaaagucauccgaacagaaaggccccucuccgccggagucuacaugggaaaccuaagcucccaacaacucgaccaacggcgagcccuccucaacaugaucgggaugucgggcggcaaucagggcgcccgcgccggccgggacggcgucguacgagucugggacgucaaaaacgcagaacuccuuaacaaccaguucggcaccaugcccagccuaacacucgccugccugaccaaacaaggccaaguggaccucaacgacgcagugcaagcccucaccgaccuaggccugaucuacaccgcgaaauacccaaacaccuccgaccuagaccgccugacacaaucgcaccccauacucaacaugaucgacaccaaaaaaucuucgcuaaacaucucaggauacaacuucucccucggagccgcggucaaagcaggagccugcaugcuggacggcggaaauaugcuggaaaccauaaaaguaagcccccagaccauggacggcauccugaaaucaauccugaaagucaaaaaagcccuuggcauguucaucagcgauaccccgggcgaacgcaauccauacgaaaacauccuguacaaaauaugcuuaucaggcgacggcuggcccuacaucgcauccagaacuucgaucacaggccgagcaugggaaaacaccgucgucgaccuagaauccgacggcaaaccucaaaaagcggacagcaacaacucauccaaaagccuacaaucggcaggcuucaccgccggccucacguacucccaacucaugacccucaaagacgccaugcuacagcuagacccaaacgcaaaaaccuggauggacaucgaaggccggcccgaagaccccgucgaaaucgcucucuaccaaccaagcagcgguugcuacauacacuucuucagggaacccaccgaccucaagcaauucaaacaagacgcuaaauacucccacggaaucgacgugaccgaccucuucgcgacacagcccggccucaccagcgcaguaauugacgcacugccaagaaacaugguaauaacaugccaaggaagcgacgacauacgaaaacuccucgaaucacaaggacgcaaagacaucaaacucaucgacaucgcgcucuccaaaacggacagccgcaaauaugagaaugccguaugggaccaauacaaagaccucugccacaugcacaccggaguaguaguagaaaaaaaaaaaagaggagggaaagaagagauaaccccccacugcgccuuaauggauugcaucauguucgaugcagcagugagcggcggccucaacaccuccguccuccgagcaguccuuccgcgcgacaugguauucagaaccuccacaccaagagucguacucuaaggacuagucccuguucccagagcccacuuuuuuuucuuuuuuugaaauaaaauagccugucuuucagaucuaaaaaaaaaaaaaaaaaaaaaaaaaaaaaaaaaaaaaaaaaaaaaaaaaaaaaaaaaaaaaaaaugcaucccccccccccccccccccccccccccccccaaaggcucuuuucagagccaccagaauu

SEQ ID NO: 10317 - RNA, 2005 nt, Artificial Sequence
  mRNA product Design a-2 comprising derived and/or modified sequence from LASV(LP;Clade I)__AAF86702__NP (opt11)
gggagaguccgcucagccagguugcagaagcggcuuagcguguguccuaaucuucucucugcguguagguaggccugugccgcaaacaagcuuaccaugucaaacuccaaagaaaucaaauccuuccucuggacccaaucacuccgccgcgaacuauccggauacugcucaaacaucaaacuucaaguaguaaaagaugcacaagcccuccuacacggccucgacuuuucagagguaucaaacguccaacgacucaugcguaaacaaaaacgagacgacgcugaccuuaaacgauuacgcgaccuaaaccaagccgugaacaaccuugucgaacucaaauccacccaacagaaaaacguccuccgcguaggcacccucagcuccgacgaccucaucacucucgcugccgaccucgaaaaacuaaaauccaaaguaauccgaaccgaacggccccucuccagcggcguauacaugggcaaccugucaagucaacagcucgaccaacgcagagcccucuugucgaugaucggaauguccggaggaccccaaggcaacagaaccggcggcgacggcguaguacgugucugggacgugaaaaacgccgaacuacuuaacaaccaguuugggacgaugcccagccucacccucgccugccucaccaaacaaggccaagucgaccucaacgacgccguccaagcacucacagaccuuggacucaucuacaccgcaaaguaccccaacuccucggaccuugacaugcugacacaaucacacccaauacugggcaugguugauaccaagaaaagcagccuaaauaucucagguuacaacuucucgcucggagccgcagucaaagccggagccugcaugcucgacggaggcaauaugcuagaaaccauaaaagucucaccccaaacuauggacggcauccucaaaucaauccucaaagucaaaagaucccuuggcauguucaucuccgacacccccggugaacgaaacccuuacgaaaacauacucuacaaaaucugccuauccggcgaaggauggccuuacaucgccagucgcaccuccaucaccggccgcgccugggaaaacacccuagucgaucuugaauccgacaacaaacccccuaaacuaaacucggccggcagcaacaaaucccuccaagccgccggacuaaacgccggacucaccuacagccaacucaugacccuaaaagauugcaugcuccaacucgacccaucaucuaagacauggauagacaucgaaggacgccccgaagacccagucgagaucgcccucuuccaacccuccucaggcugcuacauccacuucuuccgcgaacccaccgaccuaaagcaauucaaacaagacgcaaaauauucacacgguauagacgucacagaccuauucucgacccaaccaggccugaccucugcggucauagaagcacuccccagaaacaugguccuaaccugccaaggcucagacgacauuaagaaacuacucgaaagccaaggccgccgcgauaucaaacuaaucgacaucucccuauccaaagccgacucacgaaaauucgaaaacgcagucugggaccaguacaaagaccugugccauaugcacacaggcgucguagucgaaaagaagaaacgcggaggaaaagaagaaauuacaccccacugcgcccuacucgacugcaucauguucgacgccgccaccacuggcucccuaaacaucaccacccuccgagccguacuaccccgcgacaugguauuccgaaccuccacccccaaagucguacuuuaaggacuagucccuguucccagagcccacuuuuuuuucuuuuuuugaaauaaaauagccugucuuucagaucuaaaaaaaaaaaaaaaaaaaaaaaaaaaaaaaaaaaaaaaaaaaaaaaaaaaaaaaaaaaaaaaaugcaucccccccccccccccccccccccccccccccaaaggcucuuuucagagccaccagaauu

SEQ ID NO: 10318 - RNA, 2005 nt, Artificial Sequence
  mRNA product Design a-2 comprising derived and/or modified sequence from LASV(803213;Clade II)__AAF86704__NP (opt11)
gggagaguccgcucagccagguugcagaagcggcuuagcguguguccuaaucuucucucugcguguagguaggccugugccgcaaacaagcuuaccauguccgcaagcaaagaagucaaaucauuccucuggacccaaucacuccgccgagaacucucgggcuacugcucaaacaucaaacuacaagucguaaaagacgcccaagcccuccuccacggucucgacuucuccgaagucaacaacguacagcgccucaugcgaaaacaaaaacgcgacgacggcgaccuuaaacgacuacgagaccuaaaccaagccguaaacaaccucgucgaacugaaauccacccaacaaaaaucaauccugcgaguugguacccucacauccgacgaccuccuaacacuagcagccgaccucgaaaaacucaaguccaaagucauacgcaccgaacgcccacucaguuccggcguauacaugggcaaccucucuacccaacaacucgaacaacgccgcgcgcuccuaaauaugaucgguaugguagguggagcccaaggcacccaaccaggccgcgacggcgugguacgcgucugggacgugaaaaaccccgaucucuuaaacaaucaauucggcacaaugcccucccucacacuagcaugccugaccaaacaaggacaagucgaccuaaaugacgccguccuagcucuuacagaccuaggacucaucuauaccgccaaauacccuaacuccuccgaccucgaccgacucucacaaucucacccaauccuaaacauggucgacaccaagaaauccucccucaacaucucgggauacaacuucagccucggcgccgccgucaaagcaggcgccugcaugcuagacggcggcaacaugcucgaaaccaucaaaguaacgccccaaaccauggacggcauccucaaauccauccucaaggucaaaagaagccucggcauguucguuucggacacucccggcgaacgcaaccccuacgaaaacauccuauacaaaaucugccuaucaggcgacggcuggcccuacauagcaucacgaaccaguaucguaggccgagcaugggaaaauaccacaguagaccucgaguccgacggaaaaccucaaaaagucggcacugccggaucaaacaaaucccuccaaagcgccggcuucccaaccggccuuaccuauucccaacuaaugacccucaaagauuccaugaugcaauuagaccccuccgccaagacauggaucgacaucgaaggccgucccgaagacccaguagaaaucgcccucuaccaacccaugagcggaugcuacauucacuuuuucagagaacccaccgaccucaaacaauucaaacaagacgccaaguacucccaugggauagacgucgccgaccucuuccccgcccaacccggccucaccucggccguaauagaggcccuaccaagaaacaugguccuaaccugccaagguuccgacgacaucaagaaacuccucgacucacaaggcagacgcgacaucaaacuaaucgacaucucccucuccaaagucgacucacgaaaauucgaaaacgccgucugggaucagugcaaagaccucugccacaugcacacaggcgucgucgucgaaaagaagaaacgaggcggaaaagaagaaauaacaccacacugcgcccucauggauugcaucauguucgacgccgccguaucuggcgggcuaaacauuccaguccugcgagccguccucccccgcgacaugguauuccgcaccuccuccccaaaagucguccucugaggacuagucccuguucccagagcccacuuuuuuuucuuuuuuugaaauaaaauagccugucuuucagaucuaaaaaaaaaaaaaaaaaaaaaaaaaaaaaaaaaaaaaaaaaaaaaaaaaaaaaaaaaaaaaaaaugcaucccccccccccccccccccccccccccccccaaaggcucuuuucagagccaccagaauu

SEQ ID NO: 10319 - RNA, 2008 nt, Artificial Sequence
  mRNA product Design a-2 comprising derived and/or modified sequence from LASV(GA391;Clade III)__CAA36646__NP (opt11)
gggagaguccgcucagccagguugcagaagcggcuuagcguguguccuaaucuucucucugcguguagguaggccugugccgcaaacaagcuuaccauguccgcaagcaaagaagugagauccuuccucuggacccaaucgcuccgccgcgagcucucaggcuacugcucgaacaucaaauuacaagucgucaaagacgcacaagcccuccuacacggacucgacuucucagaaguguccaacguccaacgacugaugaggaaacaaaagagagacgacggcgaccuaaaacgacuacgcgaccuaaaccaagccgucaacaaccuagucgaacuaaaauccacacaacaaaaaucaguccuucgcguaggaacccuaucaucagacgaccuccucauccucgcagccgaccuagaaaaacugaaaucaaaaguaacacgaaccgaacggccacucuccagcgggguauacauggggaaccucuccucccaacaacuugaccaaagacgcgcucuccuuaacaugaucggcaugacaggcgugagcggagguggcaaaggcgcaucggacgggaucguccgcguaugggacgucaaaaacgccgaacuacucaacaaccaauucggaaccaugccaucccucacacucgccugccucaccaagcaaggacaaguggaccuaaacgacgccguccaagcccucaccgaccucggccucaucuacaccgcgaaauacccaaacagcucggauuuggaccgacuaucccaaucccacccaauacuaaacaugaucgacaccaagaaauccagucuaaacaucuccggcuacaacuucucccucggagccgcggucaaagccggcgccuguaugcuggacggcggcaacaugcuagaaaccaucaaagucucuccccaaaccauggacgguauccucaaauccauccugaaagucaagaaaagccucggcauguucgucucagacacaccgggagaacgcaaccccuacgaaaacauccuguacaaaaucugucucucaggcgacggcuggcccuacaucgccagccggaccagcaucguaggcagagccugggaaaacaccguaguagaccucgaacaagacaacaaaccccagaaaauaggaaacggcggcucaaacaaaucacuccaaagcgccggauucgccgccggacugaccuacagccaacuaaugacccuaaaagacuucaaaugcuucaaccucauacccaaugccaaaacauggauggacauagaaggacgacccgaagacccaguagagaucgcccucuaucaaccuuccucaggauguuacguccacuucuucagagagcccaccgaccugaaacaguucaaacaagacgccaaauacucacacggcaucgacgucacagaccuauucgccgcccaacccggccugaccuccgccgucaucgaagcccucccacgcaacauggucauaacaugccaaggcuccgaagacaucagaaaacuacucgaaucccaaggccgccgcgacauuaagcuaauagacauaacccuauccaaagccgauagccguaaauucgaaaacgcagucugggaccaauuuaaagaccuaugccacaugcacaccggcgucgucguggaaaagaagaaacgaggcggcaaagaagaaaucacaccccacugcgcccucauggacugcaucauguucgacgccgccguuucgggcggccucgacgccaaaguccuacgcgucguccuaccccgagacauggucuuccgcaccagcacgcccaaaguaguccucuaaggacuagucccuguucccagagcccacuuuuuuuucuuuuuuugaaauaaaauagccugucuuucagaucuaaaaaaaaaaaaaaaaaaaaaaaaaaaaaaaaaaaaaaaaaaaaaaaaaaaaaaaaaaaaaaaaugcaucccccccccccccccccccccccccccccccaaaggcucuuuucagagccaccagaauu

SEQ ID NO: 10320 - RNA, 2005 nt, Artificial Sequence
  mRNA product Design a-2 comprising derived and/or modified sequence from LASV(AV;Clade V)__CCA30315__NP (opt11)
gggagaguccgcucagccagguugcagaagcggcuuagcguguguccuaaucuucucucugcguguagguaggccugugccgcaaacaagcuuaccaugagcgcauccaaagaagucaaaagcuuccucuggacacaaucccuacggcgcgaacuauccggcuacugcucuaacaucaaacuccaagucguuaaagacgcccaagcccuccuccacggacucgacuucuccgaaguuuccaacguacaaagacuuaugcgaaaacagcgccgcgacgacucagaccuaaaacgacugcgcgaccuaaaccaagcaguaaacaaucucgucgaacucaaaagcacccaacaaaaaucaguucuccgcgucggcacucucuccuccgacgaccuccucacccuagccgcugaccuagaaaaacugaaauccaaagucaccagaaccgaacgaccccucuccucaggcgucuacaugggaaaccucaguucacaacaacucgaccaacgccgagcccuccuaaaccugaucggaaugacaaacggaagccaaggcucacaagcaggcagagacggcgucgugcgcgucugggacgucaaaaacgcggaacuccuaaacaaccaauucggcaccaugcccucacugacccucgcuugccuuaccaaacaaggccaaguagaccucaacgacguuguccaagcacuuaccgaccuaggacugauauacacugccaaauaccccaacaccuccgaccucgaccgccuaacccaaagccaccccauucuaaacaugaucgacacgaaaaaauccucauuaaacaucuccggauacaacuucucacugggagcagcaguaaaagcaggggcauguaugcucgacggcggaaacaugcucgaaaccaucaaggucagcccccaaagcauggacggcauucuaaaaucaauccuaaaaguaaaacgcgcccuaggaauguucguauccgacacccccggcgaacgcaaccccuacgaaaacauacucuauaaaaucugccuaucaggcgacggcuggcccuacauagccucccgcaccucgaucgucggcagagccugggaaaacaccguagucgaccucgaaaccgacggaaaaccacaaaaaauaggcuccggaaacagcaacaaaucucuccaaagcgcaggauucuccgccggccugaccuacagccaacucaugacccucaaagacgccaugcuccaacucgacccuaacgcaaaaaccuggauggacaucgaaggacgccccgaagaccccguagaagucgcccuauaccagccuaucuccggcuguuacauccacuucuuccgcgaacccacagaccuaaagcaauucaaacaagacgccaaauacagccacggcaucgacauagccgaccucuucgccgcucaaccuggccuaaccucugccgucaucgaagcccucccacgcaacauggucaucacaugccaaggcagcgaggacaucaaaaaacuccuagaaucccaaggccguaaagacaucaaacugauagacaucgcacuauccaaaaucgacucccggaaauucgaaaacgcggucugggaccaguauaaagaccucugccauaugcacacuggagucgucguagaaaaaaaaaaaagaggcggaaaagaagaaaucacgccacacugcgcccuuauggacugcauaauguucgacgcagcugucagcggcggccucaacacucucguccucagagccguccucccccgagauauggucuuccgcaccucaacaccccgcguaguccucuaaggacuagucccuguucccagagcccacuuuuuuuucuuuuuuugaaauaaaauagccugucuuucagaucuaaaaaaaaaaaaaaaaaaaaaaaaaaaaaaaaaaaaaaaaaaaaaaaaaaaaaaaaaaaaaaaaugcaucccccccccccccccccccccccccccccccaaaggcucuuuucagagccaccagaauu

SEQ ID NO: 10321 - RNA, 2005 nt, Artificial Sequence
  mRNA product Design a-2 comprising derived and/or modified sequence from LASV(Togo/2016/7082;Clade VI)__AMR44578__NP (opt11)
gggagaguccgcucagccagguugcagaagcggcuuagcguguguccuaaucuucucucugcguguagguaggccugugccgcaaacaagcuuaccauguccaacucuaaagaagucaaaucauuccucuggacccaaucacuccgccgcgaacucuccgguuacugcuccaauauaaaacugcaaguagucaaagacgcacaagcucuccuccacggccucgauuuuuccgaaguguccaacguccaacgacucaugagaaaacaaaaacgagacgacggcgaccucaaacgacugcgcgaccuaaaccaagccgucaacaaccuugucgaacuaaaaucaguccagcagaaaucaauucugcgcgucggcacacucacuuccgacgaccuacucacccuagcagccgaucucgaaaaacuuaaaucaaaagucacucguaccgaacgcccacuauccagcggcgucuacauggggaaccucagcucacaacaacucgaccaaagacgagcauuacucuccaugauaggaaugucaggcggcaaccaaaacucacaacccaaaggcgacggggucguccgcgucugggacgucaaaaacgccgaccuucucaauaaccaauucggcacaaugcccucacucacccucgcaugccuaaccaagcagggucaagucgaucucaacgacgccguccaggcacuaacagaccuaggacucaucuacaccgccaaauaccccaacuccucugaccucgaccgccucucacaaucacaccccauccugaacaugaucgacaccaagaaaucaagccucaacauuuccggcuacaacuuuucucuaggugcggccaucaaaacaggcgccuguaugcucgacggcggcaacaugcucgaaaccaucaaaguaacaccccaaaccauggacggcauacucaaauccauccucaaaguaaaacgaucccuagggauguuuaucuccgacacacccggcgaacgcaaccccuacgaaaauauccuauacaaaaucugccuaucuggcgacggauggccauacaucgccucacgaaccgccaucauaggccgggccugggaaaacaccguagucgaccucgaauccgacagcaaaccccagaaaauaggcucuaacggauccaacaaaucacuacaauccgcaggcuucgccccaggccucaccuauagccaacuaaugacccucaaagacagcaugcuccaacuugacccaaacgccaaaacauggaucgacaucgaaggacgcccagaagacccaguagaagucgcccucuuccaacccauaucgggcugcuacauccacuucuuccgcgagccaacagaccucaaacaauucaagcaagacgccaaauacucccacggaauagacgucaccgaccuauucgcagcacaacccggucucacauccgccguuaucgaggcccucccccggaacaugguccugaccugccaaggauccgacgacaucaagaaacuccucgacagucaaggacguagagacauaaaacuuauagacgucucccuaaacaaaaucgacagccgcaaauucgaaaacgcagucugggaccaauacaaggaccuaugccauaugcacaccggcgucgucgucgaaaagaaaaagaaaggcggcaaagaagaaaucacgccccacugcgcccuacuagacugcaucauguucgacgcugccgucucgggaggccucaacgcaaccguacuccgugccguacucccccgcgacaugguauuccggaccucuuccccaaaagucgucuuauaaggacuagucccuguucccagagcccacuuuuuuuucuuuuuuugaaauaaaauagccugucuuucagaucuaaaaaaaaaaaaaaaaaaaaaaaaaaaaaaaaaaaaaaaaaaaaaaaaaaaaaaaaaaaaaaaaugcaucccccccccccccccccccccccccccccccaaaggcucuuuucagagccaccagaauu

SEQ ID NO: 10322 - RNA, 2005 nt, Artificial Sequence
  mRNA product Design a-2 comprising derived and/or modified sequence from LASV(KAK-428;Clade n.d. (VII))__ANH09741__NP (opt11)
gggagaguccgcucagccagguugcagaagcggcuuagcguguguccuaaucuucucucugcguguagguaggccugugccgcaaacaagcuuaccaugagcaacucaaaagaagucaaaucauuccucuggacccaaucacuccgcagagaauuauccggcuacugcaccaacaucaaacuccaaguagucaaagacgcccaagcccuacuacacggucucgacuucuccgaagucagcaauguccaacgacucaugcgaaaacaaaaacgugacgacaacgacuuaaaaagacucagagaccugaaccaagccguaaacaaccuagucgaacucaaaucgguccaacaaaaauccgugcuaaaagugggcacccucaacucagacgaccuuuuaacacucgccgccgaccucgaaaaacugaaaucgaaagucguccgaaccgaacgcccccucuccuccggcguauacaugggcaaccuauccucacaacaacucgaccaacgccgugcgcuccuaaacaugaucgguauggccggaggcagccaaggcaaccaacccucccgagauggagucgugcgagucugggacgucaaaaacgccgaccuucucaacaaccaauucgguacaaugccaucacucacgcuagccugccuaaccaaacagggacaaguagaccucaacgacgucguccuagcccuuacagaccuaggccugauauacaccgccaaauacccaaacuccuccgaccucgaccgcuuaagccaaaaccacccaguacuaaacaugaucgacgucaacaaaucaucccucaacauauccggcuacaacuucagccucggcgcagccgucaaggccggugcaugcaugcucgacggcggaaacaugcuagaaacuaucaaaaucagcccccaaaccguagacggcauacuaaaauccauacucaaagugaaacgugcacuaggcauguucguauccgacaccccaggagaacgaaaccccuacgaaaacauccuuuacaaagucugccuaucaggaaacggcuggcccuacaucgcaagccgcacaucaaucgucggcagagccugggaaaacaccguagucgaucuagagucgaacaaaaaccaaccuaaagucgguaauaacggauccaacaagaugcuucaauccuccggcuucgccaccggccucaccuacucccaacucaugacacuacgggacuccaugcuccaacucgaccccaccgcaaaaaccuggauugacaucgaaggccgccccgaagacccuguugagcucgcacuauuccaaccauccuccggcugcuacauacacuucuuccgcgaaccuacagaccucaagcaauucaaacaggaugccaaauacagccacggcaucgacgugaacgaccuauucucggcccaacccggccuaaccagugccguccuagaagcccucccacgcaacaugguccuaaccugccaagggagcgacgacauccgcaaacuccucgacucacaagaccgcaaagacauaaaacucaucgacaucucccucagcaaggccgacgcccgcaaauucgaaaacgacguaugggaccaauucaaagaccucugccacaugcacaccggcaucguaguagaaaagaagaagaaaggcggaaaacaagaaaugaccccucauugcgcccuccuagacugcaucauguucgacgcagcugugagcggcggccucaacguccccacccucagagcaguccuaccaacagacauggucuuccgcaccauaaccacaaaaguaguacuauaaggacuagucccuguucccagagcccacuuuuuuuucuuuuuuugaaauaaaauagccugucuuucagaucuaaaaaaaaaaaaaaaaaaaaaaaaaaaaaaaaaaaaaaaaaaaaaaaaaaaaaaaaaaaaaaaaugcaucccccccccccccccccccccccccccccccaaaggcucuuuucagagccaccagaauu

SEQ ID NO: 10323 - RNA, 2005 nt, Artificial Sequence
  mRNA product Design a-2 comprising derived and/or modified sequence from LASV(Pinneo-NIG-1969;Clade I)__AIT17837__NP (opt11)
gggagaguccgcucagccagguugcagaagcggcuuagcguguguccuaaucuucucucugcguguagguaggccugugccgcaaacaagcuuaccauguccaauuccaaagaaaucaaauccuuccucuggacacaaucacuccgccgagaacucucaggauacugcucaaacaucaaacuacaaguagugaaagacgcacaagcccuucugcacggucucgauuucucagaagucuccaacguacaacgccucaugagaaaacaaaaacgcgacgacgcagaccucaaacgacuccgagaccuaaaccaagccgucaacaaccucgucgagcucaaauccacccaacagaaaaacguacuccgagucggaacccucagcucagacgaccucaucacgcuagcggcagaccucgaaaaacuuaaaagcaaagucauccgcacagagcgcccacuauccuccggagucuacauggggaaccucuccucccaacaacucgaccaacgccgcgcccuccucucuaugaucgguauguccggcggcccacaaggaaaucgcaccggcggagacggaguaguacgcguaugggacgucaaaaacgcagaacuccuuaacaaccaauucggaacaaugccaucccugacccuggcaugccuaacaaaacaaggccaaguagaccuaaacgacgcaguacaagcucucacagaccuaggccucaucuacaccgcaaaauaccccaacucguccgaccucgacaugcuuacccaaucccacccaauccucggaaugguagacacgaaaaagagcucccuaaacaucagcggauauaacuucucgcugggcgccgcggucaaagcgggcgccugcaugcuggacggcggaaacauguuagaaaccaucaaggucucgccccagacaauggacgggauacuaaaauccauucuuaaagucaaacgcucucuaggcauguucaucuccgacacccccggcgaacgcaacccauacgaaaauauacuauacaaaaucugucucagcggugaaggcuggcccuacauagccagcagaaccagcaucaccggacgcgcgugggaaaacacacucgucgaccucgaaucagacaacaagccacccaagcucaacucagcaggguccaacaaaucacuacaagcagccggccucaacgccggccuaaccuacucccaacuaaugacccucaaagacugcaugcuccaacuugaccccagcuccaaaaccuggaucgacaucgaaggacgccccgaggacccagucgaaauagcccuauuccaacccuccagcggaugcuacauacacuucuucagagaaccaacagaccucaaacaauucaagcaagacgccaaauauucucacggcaucgacgugaccgaccucuucuccacacagcccgggcucaccagugcagucauagaagcccucccacgaaacaugguacucacaugccagggaagcgacgacauaaagaaacuccucgaaagccaagguagacgggacaucaaacucauagacaucucccucuccaaagcagauucacgcaaauucgaaaacgccgucugggaccaauacaaagaccuuugccacaugcacaccggagucguagucgaaaagaagaaacgagguggaaaagaagaaaucacaccccacugcgcccuacuagacugcauaauguucgacgccgcaaccacaggaagccuaaacaucaccacacucagggccguccuaccccgcgacaugguguucagaacuagcacacccaaagucguauuauagggacuagucccuguucccagagcccacuuuuuuuucuuuuuuugaaauaaaauagccugucuuucagaucuaaaaaaaaaaaaaaaaaaaaaaaaaaaaaaaaaaaaaaaaaaaaaaaaaaaaaaaaaaaaaaaaugcaucccccccccccccccccccccccccccccccaaaggcucuuuucagagccaccagaauu

SEQ ID NO: 10324 - RNA, 2005 nt, Artificial Sequence
  mRNA product Design a-2 comprising derived and/or modified sequence from LASV(ISTH0009-NIG-2011;Clade II)__AIT17405__NP (opt11)
gggagaguccgcucagccagguugcagaagcggcuuagcguguguccuaaucuucucucugcguguagguaggccugugccgcaaacaagcuuaccaugucagucuccaaagaagucaaaucauuccucuggacccaaucccugcgacgggaacucagcggcuacugcuccaacaucaaacugcaagucgucaaagacgcccaagcacuacuccacggccuagauuucucagaaguaagcaacguccaacgacucaugcguaaacaaaaacgcgaugacucagaccuaaagcgacuacgagaccugaaccaagcaguaaacaaccucgucgaacucaagucuacccaacagaaaagcauacuccgagucggcacccucacuuccgaugaccuucucacccuagccgccgaccucgagaaacucaaauccaaagucauccgaacagaacgcccccuaucaagcggcguauacaugggcaaccuauccacacaacagcuagagcaacgccgcgcccuacuaaacaugauaggcaugguagguggagcgcaaggcacucagccaggccgcgacggcgucguacgcguaugggacgucaaaaacccugaccuccucaacaaccaauucggcaccaugcccagccuaacacucgccugccuuaccaagcaaggccaaguagaccucaaugacgcggucuuagcccucaccgaccucggccucaucuacacagccaaauaccccaacuccucagaccucgaccgccugagccaaucccacccaauucucaacauggucgacauuaaaaagagcagccuuaacauauccggcuacaacuucagccuaggcgccgcaguaaaagccggcgccugcaugcucgacggcggcaacaugcuagaaacgaucaaagucacgccccaaaccauggacggcauacucaaauccauacucaaaguuaaacgcucccucggcauguucgucuccgauacccccggcgaacgcaaccccuacgaaaacauccuuuacaaaaucugccucagcggagacggauggccauacaucgcuucccgcaccagcauagucggccgcgcaugggaaaacaccaccguagaccucgaauccgacggcaaaccccaaaaagucggcucagcaggaucaaacaaaucacuccagagugccggcuuccccacgggccuuacauacucccaacuaaugacccucaaagacagcaugaugcaacuggacccauccgccaaaaccuggauagacauagaaggccgacccgaagacccaguagagauagcccucuaccaacccaugagcggaugcuacauacacuucuuccgagaaccuaccgaccucaagcaauucaaacaagacgccaaguacucccacggcaucgacguggccgaccucuucccagcccagcccggccucaccagcgccgucaucgaagcucuaccccguaacaugguacucacaugccaaggaagcgacgacauuaaacgccuccucgauucccaaggacgacgcgacaucaaacucauagacauagcccucuccaaagccgacucccgccgcuucgaaaacgcaguaugggaccaaugcaaagaccucugccacaugcacacuggcgucgucguggaaaagaaaaagcgaggcggcaaagaagaaaucacgccacacugcgcccuaauggacugcaucauguacgacgccgcuguaucgggcggacuuaacauccccguccuaagagcgguccuaccccgagauauggucuuccgcacgucaucccccaaaguaguccucuaaggacuagucccuguucccagagcccacuuuuuuuucuuuuuuugaaauaaaauagccugucuuucagaucuaaaaaaaaaaaaaaaaaaaaaaaaaaaaaaaaaaaaaaaaaaaaaaaaaaaaaaaaaaaaaaaaugcaucccccccccccccccccccccccccccccccaaaggcucuuuucagagccaccagaauu

SEQ ID NO: 10325 - RNA, 2005 nt, Artificial Sequence
  mRNA product Design a-2 comprising derived and/or modified sequence from LASV(ISTH2010-NIG-2012;Clade II)__AIT17483__NP (opt11)
gggagaguccgcucagccagguugcagaagcggcuuagcguguguccuaaucuucucucugcguguagguaggccugugccgcaaacaagcuuaccauguccgcuucaaaagaagucaaaucauuccuuuggacccaaucccuacgacgugagcucagcgguuacugcagcaacauaaaacuacaggucgugaaagacgcccaagcgcuacuucacggacucgacuucagcgaggucuccaacguccaacgacucaugagaaaacaaaaacgcgacgacucagaccuuaaaagacuucgagaccucaaucaagccguaaacaaccucgucgaacuaaaauccacccaacagaaaagcauccuucgcgucggcacacucaccuccgacgaccugcuaacccuagccgccgaucucgaaaaacucaaaucaaaagucaucaggaccgagcgcccccuauccucaggcgucuacauggguaaccuauccacccaacaacucgaacaaaggcgagcccugcuaaacuuaaucggcauggucggcggcgcccaaggcacccaaccaggacgagacggcgucguccgaguaugggacgucaaaaaccccgaccuacucaacaaccaauucggcacgaugccaagccucacccucgccugccucacuaaacaaggacaagucgaucuaaaugacgccguccuggcgcucacagaccuaggacucauauacacagccaaauaccccaacuccuccgaccucgaccgccuaucacaaagccaccccauucucaacaugguagacaccaagaaaagcagccucaacaucagcgguuucaacuucucacuaggcgcggccgugaaagcgggagccugcaugcuagacggcggcaauaugcucgaaacaaucaaaguaacaccacaaaccauggacggcauacucaaaagcauccucaaagugaagaaaucacucggcauguucguauccgacacuccaggcgaacguaacccauacgaaaacauccucuacaaaaucugccuuuccggcgacggcuggcccuacaucgccuccagaaccucaaucgucggcagagcuugggaaaacacgaccguagaccuagaaucugacggcaaaccacacaaagucggcaccgccggcuccaacaaaagccugcaauccgccggauucccaaccggccuaacauauucacaacucaugacccucaaagacuccaugaugcaacuggaccccagcgccaaaacauggauagacauagagggccgcccggaagaccccguggaaaucgcccucuaccaacccaugagcggcugcuacauacacuucuuccgugaaccaacggaccuaaaacaauucaaacaagacgcuaaauacucacacggcaucgacguagccgaccucuuccccgcccaacccggccucaccagcgccguaauugaagcacuaccccgcaacaugguccuuaccugccaaggauccgacgacauaaaacgccuacucgacucacaaggacgccgcgacauaaaacucauagacauagcccuauccaaagccgauucccggcguuucgaaaacgcaguuugggaccaaugcaaagaccuaugccacaugcacacaggcgucgucguagagaaaaagaaacgcggcggaaaagaagaaauaacaccucacugcgcccucauggacugcauaauguaugacgcagcaguauccggaggccucaacauaccaguacuacgggcgguccuuccacgcgacaugguauuccgaacaagcucaccaaaagucguccucugaggacuagucccuguucccagagcccacuuuuuuuucuuuuuuugaaauaaaauagccugucuuucagaucuaaaaaaaaaaaaaaaaaaaaaaaaaaaaaaaaaaaaaaaaaaaaaaaaaaaaaaaaaaaaaaaaugcaucccccccccccccccccccccccccccccccaaaggcucuuuucagagccaccagaauu

SEQ ID NO: 10326 - RNA, 2005 nt, Artificial Sequence
  mRNA product Design a-2 comprising derived and/or modified sequence from LASV(Lassa virus/H.sapiens-wt/NGA/2015/ISTH_0543;Clade II)__AVO03640__NP (opt11)
gggagaguccgcucagccagguugcagaagcggcuuagcguguguccuaaucuucucucugcguguagguaggccugugccgcaaacaagcuuaccaugagcgcaagcaaagaaguaaaauccuuccuguggacacaaucccuccggcgcgagcucuccggcuauugcuccaacaucaaacugcaaguggucaaagacgcacaagcacuacuacacgggcuagacuucucggaagucuccaacguccaacgacucaugcgcaaacaaaaacgagacgacagcgaccuaaagcgcuuacgagaccucaaccaggccgucaacaaccuggucgagcuaaaguccacgcaacaaaagagcauccugcgaguaggaacgcucacauccgaugaccuccucacccuagcagcugaccucgaaaaacucaaauccaaagucauccgaacugaaagaccccucuccagcggaguauacaugggcaaucuauccacccagcaacuugaacaaagacgcgcacuccuaaacaugauaggaauggucggcggagcccaaggaacacaacccggccgcgacgguguagucagagugugggacgucaaaaacccagaccuucuaaacaaccaguuuggaaccaugcccucacucacccuugcaugccucaccaagcaaggccaaguagaccucaacgacgccguacuagcacuaaccgaccugggacucaucuacaccgccaaauaccccaacagcucagaccucgaccgacuaagccaaagccacccaauacugaauauggucgacacaaagaaauccagccuaaacauaagcggcuacaacuucucccuaggagccgcggucaaagccggagccugcaugcuagacggcggaaacaugcuggaaacuauaaaagucacaccccaaacaauggacggcauacucaaaucaauacucaaaguaaagaaaagccucggcauguucgucucagacacacccggcgaacgcaaccccuacgaaaacauacuauacaaaaucugccuuucaggcgauggauggccauacauagcauccagaaccucaaucguaggcagagcaugggaaaacaccaccguugaccucgagucagacggaaaaccccaaaaagucgggucagcaggcaguaacaaaucccuccaaagugcaggauuccccaccggccugaccuacucacaacucaugacucucaaagacaguaugaugcaacucgaccccucggccaaaacauggaucgacaucgagggaagacccgaagaccccgucgaaauagcccuauaccaaccaauguccggaugcuacauacacuucuuccgagagccaaccgaccucaaacaauucaaacaagacgccaaauacucacacggcauagacguagcugaccucuuccccgcccaacccggccucaccuccgcugucaucgaagcccucccccgcaacaugguacuaacaugucaagguucugacgacaucaaacgccuccucgacucccaaggacgcaaagacaucaaacuaauagacaucgcccucagcaaagcugacucccgaagauucgaaaacgcagucugggaccaaugcaaagaccucugccacaugcacaccggagucgucgucgaaaagaagaaaagaggcgggaaagaagaaaucacaccccacugcgcccugauggacugcauuauguacgacgccgccguuuccgguggucucaacauccccguacuccgagccguccuaccacgcgacauggucuuccgcaccuccagccccaaaguaguccuauaaggacuagucccuguucccagagcccacuuuuuuuucuuuuuuugaaauaaaauagccugucuuucagaucuaaaaaaaaaaaaaaaaaaaaaaaaaaaaaaaaaaaaaaaaaaaaaaaaaaaaaaaaaaaaaaaaugcaucccccccccccccccccccccccccccccccaaaggcucuuuucagagccaccagaauu

SEQ ID NO: 10327 - RNA, 2005 nt, Artificial Sequence
  mRNA product Design a-2 comprising derived and/or modified sequence from LASV(Lassa virus/H.sapiens-wt/NGA/2016/ISTH_0009;Clade II)__AVO03572__NP (opt11)
gggagaguccgcucagccagguugcagaagcggcuuagcguguguccuaaucuucucucugcguguagguaggccugugccgcaaacaagcuuaccauguccgccuccaaagaagucaaauccuuccuguggacccaaucccuccgccgcgaacucuccggauacugcucuaacaucaaacuccaaguuguaaaagacgcacaagcgcuacuacacggccuagacuucuccgaaguauccaacguacaacgccucaugcgcaaacaaaaacgagacgacucagaccucaaacgucuccgcgaucucaaccaagccguaaacaaccuagucgaacucaaaaguacgcaacaaaaaucuauccuucgagucggcacacugacaagcgacgaccugcucacccucgccgccgaccucgaaaaacucaaauccaaaguaauccgaaccgaacgcccccucucuuccgggguauacaugggcaaccuuuccacccaacaacuagagcaacgccgcgcccuccucaacaugaucgggaugguagguggagcccaaggaacacaaccuggacgagacggggucguccgagucugggacgucaaaaaccccgaccuccucaacaaccaauucggcacaaugcccucccuaacucucgccugccucacaaaacaaggacaaguagaucucaacgacgccguccuagcucuaacagaccuaggacuuauauacaccgccaaguacccaaacuccucggaccucgacagacucucgcaaucacacccgauacuaaacauggucgacaccaaaaagucaucccugaacaucucgggcuacaacuucucucucggcgccgcagucaaggccggagccugcaugcucgacggcggaaacaugcucgagacgaucaagguaacaccacaaaccauggacggcauacucaaauccauccuaaaagucaagaaaagccucggaauguucgugagcgacacccccggcgaaagaaaccccuacgaaaacauacucuauaaaaucugccuaucuggcgacgguuggcccuacaucgcuagccgcaccuccaucgucggacgcgcaugggagaauacaacagucgaucucgaaagcgacggcaaaccccaaaaagucggcagcgccggaaguaacaaaucacuccaauccgccggcuucccaaccggccuaaccuacucccaacucaugacccucaaggacuccaugaugcaacuugaccccagcgccaaaaccuggaucgacaucgaaggaagaccugaagaccccgucgagaucgcacucuaccaacccauguccggcugcuacauccacuucuuccgcgaaccgaccgaccucaagcaauucaaacaagacgccaaauacagccacggcauugacgucgccgaccuauuccccgcacagcccggccuuaccucggccguaauugaagcccuuccacgcaacaugguccuaaccugccaagguuccgacgacaucaaacgccuccuugacucacaaggccgccgcgacauaaaacucauagacauagcccuaucgaaagcagauucacgacgauucgaaaacgccgucugggaccaaugcaaggaccuuugccacaugcacaccggcguagucguagagaaaaagaaaagaggcgggaaagaagaaaucacuccccacugcgcacucauggacugcauaauguacgacgcagccguuagcggcggccuuaacauaccaguucuacgagccguacucccccgagacaugguauuccgaaccucaagccccaaagucguccuuuaaggacuagucccuguucccagagcccacuuuuuuuucuuuuuuugaaauaaaauagccugucuuucagaucuaaaaaaaaaaaaaaaaaaaaaaaaaaaaaaaaaaaaaaaaaaaaaaaaaaaaaaaaaaaaaaaaugcaucccccccccccccccccccccccccccccccaaaggcucuuuucagagccaccagaauu

SEQ ID NO: 10328 - RNA, 2005 nt, Artificial Sequence
  mRNA product Design a-2 comprising derived and/or modified sequence from LASV(Lassa virus/H.sapiens-wt/NGA/2016/ISTH_0017;Clade II)__AVO03568__NP (opt11)
gggagaguccgcucagccagguugcagaagcggcuuagcguguguccuaaucuucucucugcguguagguaggccugugccgcaaacaagcuuaccaugucagcaucaaaagaagucaaaucauuccucuggacccaaucacuacggcgcgaacucagcggcuacugcuccaguaucaaacuacaggucguaaaagacgcccaagcccuacuccacggacuagacuucucagagguuucaaacguacaacguuuaaugcguaaacagaaaagagacgacuccgaccucaaacggcuccgagaccucaaccaagccguuaacaaccuagucgaacucaagucgacacaacaaaaaucaauccuccggguaggcacacucaccucagacgaccuccucacccucgcugccgaccuagagaaacuaaaaucaaaagucauacgcaccgaacgaccucugucaucaggcgucuacaugggaaaccucagcacccaacaguuagaacaacgacgcgcccuauuaaacaugaucgguauggccggcggcgcccagggcacacaacccggucgagacggagucguacgagucugggacgucaagaaccccgaccuccucaacaaccaauucggaaccaugcccucgcucacccucgccugccugacaaaacaaggccaagucgaccucaacgacgccguccuagcacuaaccgaccuaggccuaaucuacaccgccaaguaccccaacuccuccgaccuagaccgcuuaagccaaucgcaccccauccucaacauggucgacaccaagaaaagcucccuaaacaucagcggcuacaacuucucacuaggcgcggccgucaaagcuggagccugcaugcuugacggcggcaacauguuagaaaccaucaaagucacaccccaaaccauggacggcauccucaaauccauacucaaagucaaacgcucccucggcauguucguaagcgacgcgccaggugaacgaaaucccuacgaaaacauccucuauaaaaucugccuaucaggcgacggcuggcccuacaucgccucccgcaccuccaucgucggccgagccugggaaaacacuaccgucgaccuugagagcgacggcaagccccaaaaagugggagccaccggaucgaacaaaucccuccaaagcgccggauucccgaccggccucaccuacagccaacucaugacacucaaagacagcaugaugcaacucgaccccuccgcaaaaaccuggaucgacauagagggacgcccggaagacccaguagaagucgcccucuaccaacccguauccggaugcuacauccacuucuuccgagaacccacggaucucaaacaguucaaacaagacgccaaauacagccacggcauagacguagccgaccucuucccugcccaacccggccucaccucggccgucaucgaagcgcucccccgaaacaugguccuuaccugccaaggcagcgaugacaucaaaaagcuccucgacagccaaggccgcaaagacaucaaacucaucgacaucgcccucucaaaagcagacuccaggcgauucgaaaacgcagucugggaccaaugcaaagaucuuugccacaugcacacgggcgucgucgucgaaaagaagaaacguggcggcaaagaagaaauuaccccacacugcgcccucauggacugcaucauguacgacgccgccgucucaggaggccucaacaucccaguccuacgcgcaguacucccaagagacaugguauuccgcaccuccucaccaaaaguaguccucuaaggacuagucccuguucccagagcccacuuuuuuuucuuuuuuugaaauaaaauagccugucuuucagaucuaaaaaaaaaaaaaaaaaaaaaaaaaaaaaaaaaaaaaaaaaaaaaaaaaaaaaaaaaaaaaaaaugcaucccccccccccccccccccccccccccccccaaaggcucuuuucagagccaccagaauu

SEQ ID NO: 10329 - RNA, 2005 nt, Artificial Sequence
  mRNA product Design a-2 comprising derived and/or modified sequence from LASV(Lassa virus/H.sapiens-wt/NGA/2018/ISTH_0959;Clade II)__AVV65100__NP (opt11)
gggagaguccgcucagccagguugcagaagcggcuuagcguguguccuaaucuucucucugcguguagguaggccugugccgcaaacaagcuuaccaugucagccucaaaagaaguaaaauccuuccucuggacacaaucgcuucgccgcgaauuauccggguauuguucaaacauaaaacuacagguagucaaagacgcacaagcacuccuccacggccucgacuucuccgaagucuccaauguacaacgacucaugcgcaaacaaaaacgugacgacuccgaccucaaacgacuccgagaccucaaccaagcagucaacaaccuaguagaacucaagucaacccaacaaaaauccauccuacgaguaggaacccuaaccagcgacgaccuccuaacacucgcagccgaccucgaaaaacucaaaagcaaagugauacgcaccgaacgaccccucagcagcgguguauacauggguaaucucucaacccagcaacucgagcaacgccgcgcccuacuaaaccugauaggaaugguaggcggggcccaagggacccaaccaggacgcgacggcguaguccguguaugggacgucaaaaaccccgaccuccucaauaaccaauucggcaccaugccaagccuaacccucgcgugccuaacaaagcagggccaagucgaccuaaacgacguaguacucgcccuaaccgaccucggccucauauacaccgccaaauaccccaacagcucagaccuugacagacuaagccagucacaccccauacucaacaugguagacaccaagaaaagcagucucaacauaucaggcuucaacuucucgcuaggagcagccguuaaagcaggagccugcaugcucgacggcggcaacaugcuagaaaccaucaaggugacaccccaaaccauggacggcauccucaaaagcauccuaaaggucaagaaaucccuaggcauguucguuagcgacaccccaggcgagcgcaacccauacgaaaacauccucuacaaaaucugccucagcggagacggcuggcccuacauagcaucaagaaccuccauaguugggcgugccugggagaacaccacuguagaccucgaaagcgauggcaaaccacacaaagucggcaccgcaggcucuaacaaaucacuacaauccgcgggcuucccaacaggccugaccuacucccaacucaugacacucaaagacuccaugaugcagcucgaccccuccgccaagacauggaucgauauagaaggacgaccagaagacccagucgaaauagcacucuaccagccaaugucagggugcuacauccacuucuuccgcgaaccaaccgaucuaaaacaguuuaaacaagacgccaaauacagccacggcaucgacgucgccgaccucuuccccgcgcaacccgggcuaacguccgccgucauagaagcccucccgcgcaacaugguacucacaugccaaggaucggacgacauaaaacgacuccucgacagccaaggcagaaaagacaucaaacucaucgacaucgcccugagcaagacggacucccgacgcuucgaaaacgcgguaugggaccaaugcaaggaccucugccacaugcacacaggugucgucgucgaaaagaagaaacgaggagguaaagaagaaauaacaccccacugcgcccuaauggacugcaucauguacgacgcagcagucagcggaggccucaacauccccguucuccgggccguccuaccacgcgacaugguauuucgaacauccagccccaaaguaguccuguagggacuagucccuguucccagagcccacuuuuuuuucuuuuuuugaaauaaaauagccugucuuucagaucuaaaaaaaaaaaaaaaaaaaaaaaaaaaaaaaaaaaaaaaaaaaaaaaaaaaaaaaaaaaaaaaaugcaucccccccccccccccccccccccccccccccaaaggcucuuuucagagccaccagaauu

SEQ ID NO: 10330 - RNA, 2005 nt, Artificial Sequence
  mRNA product Design a-2 comprising derived and/or modified sequence from LASV(LASV003-NIG-2008;Clade II)__AIT17581__NP (opt11)
gggagaguccgcucagccagguugcagaagcggcuuagcguguguccuaaucuucucucugcguguagguaggccugugccgcaaacaagcuuaccaugucagccuccaaagaaguaaaauccuuccucuggacccaaucccugcgcagagaacugucaggauacugcuccucaaucaaacuacaagucgucaaagacgcccaagcacuacuacacggacucgacuucagcgaagucucaaacguccaacgacuaaugcgcaaacaaaaacgagacgauucugaccuuaaacgccuccgcgaucucaaccaggccgucaacaaccucgucgaacuaaaauccacccaacaaaaauccguccugcgagucggaacccucaccuccgacgaucugcucacccucgccgccgaucucgaaaaacuaaaauccaaagucauccgaaccgaaagaccacucucauccggcgucuacauggguaaccucuccgcacaacaacucgaacaacgccgaacccuccuaaauaugaucggcauggucgguggggcucagggcacccaacccggccgugacggcgucgucagaguaugggaugucaaaaaccccgaccuucuaaacaaccaauucggaacgaugcccucucucacacuagccugccuaacaaaacaaggccaaguagaccucaacgacgucguacucgcccucacagaucuagggcucauauacacagcaaaauaccccaacuccagcgaccucgacagacucagccaaucacaccccauccucuccaugguggacacgaagaaaagcagccugaacaucuccggcuacaacuucucccuaggcgcagcagucaaagcuggugcaugcaugcucgacggaggcaacauguuagaaaccaucaaagucacaccccaaaccauggacggcauccucaaauccauccucaaaguaaagaaaucccucggcauguucgucucagacacucccggcgaacgcaaccccuacgaaaacauacuauacaaaauaugccucuccggcgacggauggcccuacaucgccucgcguaccuccauagucggccgagccugggaaaacaccaccgucgaccuugaauccgacgguaaaccccaaaaagucggcacagccgguaguaacaaaucacuccaauccgccggcuuccccaccggccucaccuacucacagcucaugacacuaaaagacagcaugaugcaacucgaccccucagccaaaaccuggauagacauagagggccgaccagaagaccccgucgaaauagcccucuaucaaccgaugagcggaugcuacauccacuucuuccgggaaccaaccgacuuaaaacaguuuaaacaagacgccaaauacagccacggaaucgauguuacugaccucuucccagcccaaccgggccuaaccuccgcugucaucgaagcacuaccccgaaacaugguccuaaccugccaaggcuccgacgacaucaagagauuacuagacucccagggccgucgcgacaucaaacucaucgacaucgcccuguccaaagccgacucccgccgcuucgaaaacgcagucugggaccagugcaaagaccuaugucacaugcacaccggcgucguagucgaaaagaagaaacgcggaggcaaagaagaaaucacgccccacugcgcccuuauggacugcaucauguacgacgcagccgucucaggcggccucaacauacccguccuacgugccguacucccccgugacaugguauuccgcaccucgucacccaaaguaguacuuuaaggacuagucccuguucccagagcccacuuuuuuuucuuuuuuugaaauaaaauagccugucuuucagaucuaaaaaaaaaaaaaaaaaaaaaaaaaaaaaaaaaaaaaaaaaaaaaaaaaaaaaaaaaaaaaaaaugcaucccccccccccccccccccccccccccccccaaaggcucuuuucagagccaccagaauu

SEQ ID NO: 10331 - RNA, 2005 nt, Artificial Sequence
  mRNA product Design a-2 comprising derived and/or modified sequence from LASV(LASV035-NIG-2009;Clade II)__AIT17589__NP (opt11)
gggagaguccgcucagccagguugcagaagcggcuuagcguguguccuaaucuucucucugcguguagguaggccugugccgcaaacaagcuuaccaugagcgcaucaaaagagguuaagagcuuccucuggacccagucacuccgacgugaacucuccggauacuguuccuccaucaaacuccaaguagucaaagacgcacaagcccuucuccacggccucgacuucucagagguaagcaacguccaacgccuuaugcgcaaacagaaacgagacgacucagaccucaaacgacuacgcgaccuaaaccaagccgucaacaaccucguggaacucaaaucaacccaacaaaaaucuauccuaagagucggcacccucaccagcgacgaccuccucacacucgcagcagaccuagaaaaauuaaaaucuaaagucauccgaacagaaagaccccucucaucagguguauacauggguaaccuguccgcgcaacaacucgaacaacgccgcgcccuacucaacaugaucggcauggugggcggcgcacaaggaacacaacccggccgcgacggcguaguacgagucugggacguuaagaaccccgaccuccucaacaaucaauucggcaccaugcccagccucacccucgccugcuuaacaaaacaaggacaaguagaccuaaacgacgcgguccuagcccucacagaccuaggacucauuuacacagcaaaauacccaaacuccucugaucuagaccgacuuucacaaucacacccaauccuaaacauggucgacaccaaaaagagcucccucaacauaucgggcuacaacuucagccugggcgcggcagucaaagcaggcgcaugcaugcucgacggcggcaacaugcucgaaaccaucaaagucacuccccaaaccauggacggcauccucaaaucgauacuaaaagucaaacggagccucggcauguucguauccgacacuccaggcgaacgcaauccauacgaaaacauacuuuacaaaaucugccucuccggagacggauggcccuacaucgccuccagaaccucaauagucggccgagccugggaaaacaccaccguagaccuagaaagcgacgggaagccccaaaaggucgguacaacaggcuccaacaaaucacuccaauccgcuggcuuccccaccggccugaccuacucacaacuaaugacccucaaagacucaaugaugcaacuagacccauccgcaaaaaccuggauagacauagaaggccgccccgaagaucccgucgaaauagcccuguaccaaccaauguccggaugcuacauucacuucuuccgcgagccuaccgaccucaaacaauucaaacaagacgcgaaauacucccauggaaucgacguagccgaccucuucccagcacagccuggucucacaucagccgucaucgaggcucuaccccgcaacaugguccuaaccugccaaggcucagacgacaucaagaaacuccucgacagccaaggacgccgcgacaucaaacuaaucgacauugcccuauccaaagcugacagccgaaaauucgagaacgcagucugggaccaaugcaaagaucuaugccacaugcacaccggagucgucgucgaaaagaagaaacgcggaggcaaagaagaaaucacaccccacugcgcccuaauggacugcaucauguacgacgccgcugucagcggcggccuaaacaucccuguccuccgagccguacucccccgcgacauggucuuccggaccagcagccccaaaguaguccuuuaaggacuagucccuguucccagagcccacuuuuuuuucuuuuuuugaaauaaaauagccugucuuucagaucuaaaaaaaaaaaaaaaaaaaaaaaaaaaaaaaaaaaaaaaaaaaaaaaaaaaaaaaaaaaaaaaaugcaucccccccccccccccccccccccccccccccaaaggcucuuuucagagccaccagaauu

SEQ ID NO: 10332 - RNA, 2005 nt, Artificial Sequence
  mRNA product Design a-2 comprising derived and/or modified sequence from LASV(LASV1000-NIG-2009;Clade II)__AIT17783__NP (opt11)
gggagaguccgcucagccagguugcagaagcggcuuagcguguguccuaaucuucucucugcguguagguaggccugugccgcaaacaagcuuaccaugagcgccucaaaagaaguaaaauccuuccucuggacgcaaucgcucagacgagaacucucaggcuacugcagcaacauaaaacuccaaguagucaaagacgcacaagcccuccuacacggacucgacuucuccgaaguauccaacguacagcgacucaugcgcaaacaaaaacgagacgacagcgaccucaaacgccuccgcgaccuuaaccaagccgucaacaaccuagucgagcucaaaagcacccaacagaaaagcauacuccgcgucggaacccuaacaucagacgaccuccucacacuagcagcagaccucgagaagcuaaaaucaaaagugauccgcaccgaacgcccacuguccuccggaguauacaugggaaaccucuccacccaacaacuagaacaaaggcgcgcccuccucaacaugaucggcauggucggcggcgcccaaggcacccaacccggacgcgacggaguuguacgaguaugggacgucaaaaacccagaccuccucaacaaccaauucggcaccaugccaucacuaacauuggccugccuuaccaaacaaggucaaguagaccuaaacgacguggugcucgcacucaccgaccucggccucaucuacacggcaaaguaccccaacuccagcgaccucgaccgacuaucacaaucccaccccauccucaacauggucgacaccaagaaaucaucgcucaacaucucaggcuacaacuucucacuaggcgccgccgucaaagccggcgccugcaugcucgacggcggaaacaugcucgaaacuauaaaaguaacaccccaaaccauggacggcauccucaaaucaauacucaaaguuaagaaaagccuaggcauguucgucuccgacaccccaggagaacgcaaccccuacgaaaacauacuauacaaaaucugucuaagcggcgacggcuggcccuacaucgccucacgaaccuccaucgucggacgagcaugggagaacaccaccgucgaccuagaaucagacggaaaaccccaaaaagucggcaccgccggcuccaacaaaucacuucagucagcaggauuucccacaggucuaaccuacucccaacucaugacacuaaaagacucaaugaugcaacucgaccccucagccaaaacuuggaucgacaucgaaggccgccccgaagaucccguagaaaucgcgcucuaccaacccgucagcggcugcuauauccacuucuuccgugaaccuacagaccucaaacaauucaaacaagaugcgaaguacagccacggcauagacguagccgaccuauuccccgcccaaccaggacugacuuccgccgugauugaagcccucccccgcaacaugguacucacaugccaaggcuccgacgacaucaaaaggcuacucgacucacaaggccgacgggacaucaaacugaucgacaucgcacucucaaaagcagacucccgaagauucgaaaacgccgucugggaccaaugcaaagaccucugccacaugcacacaggcgucguagucgaaaagaagaaacgaggcggaaaagaagagauaaccccacacugcgcucugauggacugcaucauguacgacgccgcaguauccggcggccucaacauaccaguccucagagcaguccuacccagagauauggucuuccgcaccucaagccccaaaguaguccucuaaggacuagucccuguucccagagcccacuuuuuuuucuuuuuuugaaauaaaauagccugucuuucagaucuaaaaaaaaaaaaaaaaaaaaaaaaaaaaaaaaaaaaaaaaaaaaaaaaaaaaaaaaaaaaaaaaugcaucccccccccccccccccccccccccccccccaaaggcucuuuucagagccaccagaauu

SEQ ID NO: 10333 - RNA, 2005 nt, Artificial Sequence
  mRNA product Design a-2 comprising derived and/or modified sequence from LASV(LASV221-NIG-2010;Clade II)__AIT17625__NP (opt11)
gggagaguccgcucagccagguugcagaagcggcuuagcguguguccuaaucuucucucugcguguagguaggccugugccgcaaacaagcuuaccauguccgcuuccaaagaaguaaaauccuuccucuggacccaaucucuacgccgagaacucucaggcuacugcucaucaaucaaacuccaagucgucaaagacgcacaagcccuacugcacggacucgacuucuccgaaguaucaaacguccagcggcucaugcggaaacagcgccgcgacgacuccgaccuuaagcgccuacgagaccugaaccaagcaguaaacaaccucguggaacuaaaauccacccaacaaaaaucaauccuccgagugggcacgcuaacuagcgacgaucuccuaacucuagccgccgaccuagaaaaacuaaaauccaaagucauacgcacagaacgcccgcucuccagcggcgucuacaugggaaaccuauccacacaacaacuagaacaacguagagcccuccuaaacaugauaggcauggucggcggagcccaaggaacacaacccggccgcgauggcgucguccgagucugggacgugaaaaacccagaccuacucaacaaccaauucggcaccaugcccucccucacacuagcgugccugacaaagcaaggacaaguagaccucaacgacgccguacucgcccuuaccgaccucggauuaaucuacacagccaaauacccaaacagcagcgacuuggacagacucucccagucccaccccauacucaacaugguggacaccaagaaauccucccucaacaucagcggguacaauuucucacucggggccgcagucaaagccggcgcaugcaugcuagacggcggcaacaugcucgaaaccaucaaagucaccccacaaacagucgacggcauccucaaaucaauccucaaggugaaacgcagucucggcauguucguuucagacacacccggcgaacgcaauccauacgaaaacauccucuacaaaaucugccucagcggugacggguggccauauaucgccucccgaaccuccaucgucggccgcgcaugggaaaacaccaccguagaccuagagagcgacggaaaaccccagaaggucggcacagcuggcuccaacaaaucccuccaauccgccggcuuccccaccggccucaccuacucacaacugaugacccuaaaagacucuaugaugcaacucgaccccuccgcuaaaaccuggauugacauagagggccgcccugaagaccccgucgaaaucgcccuauaccaacccaugucagggugcuacauccacuucuucagagaacccaccgaccucaagcaauucaaacaggacgcaaaauacucccacggcaucgacguagccgaccucuuccccgcacaacccggauuaaccagcgcaguaaucgaggcacucccacguaacaugguacugaccugucaaggcuccgacgacaucaaacgccugcuagacucccaaggucgaagagauauuaaacucaucgacaucgcccucagcaaagcggacucacgcaaauucgaaaacgcagucugggaucaaugcaaagaccuaugccacaugcacaccggcgucgucgucgagaaaaagaaacgcggcggaaaagaagaaaucaccccacacugcgcccuaauggauugcaucauguacgacgcagccgucucaggcggacucaacauccccguacuacgcgccguacuaccucgcgacauggucuuccggaccucaagccccaagguuguccuauaaggacuagucccuguucccagagcccacuuuuuuuucuuuuuuugaaauaaaauagccugucuuucagaucuaaaaaaaaaaaaaaaaaaaaaaaaaaaaaaaaaaaaaaaaaaaaaaaaaaaaaaaaaaaaaaaaugcaucccccccccccccccccccccccccccccccaaaggcucuuuucagagccaccagaauu

SEQ ID NO: 10334 - RNA, 2005 nt, Artificial Sequence
  mRNA product Design a-2 comprising derived and/or modified sequence from LASV(LASV237-NIG-2010;Clade II)__AIT17639__NP (opt11)
gggagaguccgcucagccagguugcagaagcggcuuagcguguguccuaaucuucucucugcguguagguaggccugugccgcaaacaagcuuaccaugucggcaagcaaagaagucaaauccuuccuauggacccaaucacuccgccgagagcucucaggcuauugcucaaacaucaaacuucaaguagugaaagacgcacaagcacuccuccacggccucgacuuuucagaagucagcaacguacaacgccucaugcguaaacaaaaacgagacgacuccgaccucaaacgccuacgcgaccuaaaccaagcagucaacaaccucgucgagcucaaauccacccagcaaaaaucaauacuacgugucgggacccuaacuuccgacgaccuccuaacacuugccgccgaccucgaaaaacugaaaagcaaaguaauccguaccgaacgcccccucucaaguggcgucuacaugggaaaccuuagcacccaacaacuagaacaacgccgugcccuccucaacaugaucgguauggucggaggcgcccaaggcacacaacccggccgcgacggcguagucagaguaugggacguuaaaaaccccgaccuccucaauaaccaauuuggcacuaugcccucccuaacacucgcaugccucaccaaacaaggccaaguagaccuaaacgacgcaguccucgcccuaacagaccucggacucaucuacaccgccaaauacccuaacucauccgaccucgaccgccuaucacagagccaccccauccucaacauggucgacaucaagaaauccagccuaaacaucucagguuacaacuucucacuaggggccgccgucaaagcaggcgcaugcaugcucgacggcggcaacaugcuagaaaccaucaaagucacaccccaaaccauggacggaauccucaagagcauccucaaagucaaacgaucacuuggaauguucguauccgacacccccggcgaacgcaaccccuacgagaacauacuauacaaaaucugccuauccggcgacggcuggcccuacauagcuucacgcaccagcauaguaggccgcgccugggaaaauaccacaguagaccucgaaucagacggaaaaccccaaaaagugggaucagccgguucaaacaaaagccuccaauccgcaggauucccaaccggccuuacguacucccaacuaaugacccucaaagacucaaugaugcagcucgacccauccgcaaaaacauggauugacaucgaaggcagacccgaagacccagucgaaauugcccuuuaucaacccauguccggaugcuacauccacuucuuccgcgaaccaacagaccucaaacaauucaaacaagacgcuaaauacagccacgggauagacgucgccgaucucuucccagcccaacccggucuaaccagcgccguaaucgaagcccugccccgcaacaugguacuuacaugccagggcagcgacgacauaaaacgccuccucgacucccaaggccgacgcgacaucaaacuaaucgacaucgcacucuccaaagcugacucccgccgcuucgaaaacgcagucugggaucaaugcaaagaccuaugccacaugcacaccggaguagucgucgaaaagaagaaaagaggcggcaaagaagaaaucacaccccacugcgcacuaauggacugcauaauguacgacgcagcagugucaggaggacugaacauccccguacugcgagccguacucccccgagacauggucuuccgaaccagcucacccaaagucguccuuuaaggacuagucccuguucccagagcccacuuuuuuuucuuuuuuugaaauaaaauagccugucuuucagaucuaaaaaaaaaaaaaaaaaaaaaaaaaaaaaaaaaaaaaaaaaaaaaaaaaaaaaaaaaaaaaaaaugcaucccccccccccccccccccccccccccccccaaaggcucuuuucagagccaccagaauu

SEQ ID NO: 10335 - RNA, 2005 nt, Artificial Sequence
  mRNA product Design a-2 comprising derived and/or modified sequence from LASV(LASV253-NIG-2011;Clade II)__AIT17671__NP (opt11)
gggagaguccgcucagccagguugcagaagcggcuuagcguguguccuaaucuucucucugcguguagguaggccugugccgcaaacaagcuuaccauguccgccuccaaagaagucaaauccuuccuauggacccaaucucugcgacgcgaacucucagguuacugcucaagcauaaaacuccaagucgucaaagacgcacaagcccuccuacacggacuagacuucuccgaaguaucaaacguccaacgccuaaugcgcaaacaaaaacgcgacgacagcgaccucaaacgccuccgagaucucaaccaggcugugaacaaccucguagagcucaaaucaacccaacaaaaaucuguccugcgcgucggaacccuaacgucagaugaucuccucacccuagccgccgaccuagaaaaacucaaauccaaagucauacgcacggaacgaccccucucaucaggcgucuacauggggaaccuauccacccagcaacucgagcaaagacgagcacuccucaacaugaucggcauggucggaggcgcccaaggaacccagcccggacgcgacggcguaguccgagucugggacgucaagaaccccgaccuacugaacaaccaauucggcacaaugccaagccucacccuagcaugccucaccaaacagggacaaguagaccucaacgacgugguccuagcccuaaccgaccucggccuaauauacaccgcaaaguaccccaacuccagcgaccucgaccgacuaucccaaagccauccaauacucaacauggucgacacaaagaaaagcucacuaaacaucagcggcuacaacuucagccucggugccgccgucaaagcaggcgccugcaugcucgacggcggaaacaugcucgaaaccauaaaagucacaccccaaaccauggacggcauccuaaaaagcauacucaaaguaaagaaaucacuaggcauguucgucuccgacacacccggcgaacgcaaccccuacgaaaacauacuauacaaaauaugccuaucgggcgauggcuggccauacauagcuucacgaaccucaauagucggcagagccugggaaaacaccaccgucgaucucgaaucggacggaaaaccacaaaaaguaggcaccgccggaagcaacaaaucccuacaaucagcaggcuucccaaccggccucaccuacagccaacucaugaccuuaaaagauuccaugaugcaacuggacccaagcgccaagacauggaucgacauugaaggacgacccgaagaccccgucgaaauagcccucuaccagcccaugagcggcugcuacauccacuucuuccgagaacccaccgaccuaaaacaauucaaacaagacgccaaguacucccacggcaucgacgucacagaccucuucccagcccaacccggccucaccagcgccgucaucgaagcgcuaccaagaaacaugguccuaacgugucaaggcucggacgacaucaaacgacuccucgacucgcaaggucgcagagacaucaaacuaaucgacaucgcacucaguaaagcugacucacgccgauucgaaaacgcagucugggaccagugcaaagaccucugccacaugcacacaggcgucguaguagaaaagaaaaagcgaggaggcaaagaagaaaucaccccacacugcgcacucauggacugcaucauguacgacgccgcggucucgggcggccuaaacauacccguacuccgcgcaguccuaccacgcgacauggucuucagaaccagcagcccaaaagucgugcucuaaggacuagucccuguucccagagcccacuuuuuuuucuuuuuuugaaauaaaauagccugucuuucagaucuaaaaaaaaaaaaaaaaaaaaaaaaaaaaaaaaaaaaaaaaaaaaaaaaaaaaaaaaaaaaaaaaugcaucccccccccccccccccccccccccccccccaaaggcucuuuucagagccaccagaauu

SEQ ID NO: 10336 - RNA, 2005 nt, Artificial Sequence
  mRNA product Design a-2 comprising derived and/or modified sequence from LASV(LASV254-NIG-2011;Clade II)__AIT17675__NP (opt11)
gggagaguccgcucagccagguugcagaagcggcuuagcguguguccuaaucuucucucugcguguagguaggccugugccgcaaacaagcuuaccauguccgccuccaaagaagucaaaucauuccucuggacccaaucccuacgucgagaacucucaggauacugcuccuccaucaaacuacaagucguaaaagacgcccaagcacuccuccacggacuagacuucagcgaaguaucgaacguacaacgccucaugcgaaaacagaaaagggacgacuccgaccucaaacgccuacgcgaccucaaccaagcagucaacaaccuaguagaacucaaguccacucaacagaaaucaguauuacgugugggaacccuaacuagcgacgacuuacucacacucgccgccgaccucgagaaacucaaaucaaaaguaauccgaacagaacgcccccucucuagcggaguauacaugggcaaccugagcacccaacaacuagaacagcgacgagcccuccucaacaugaucggaaugguuggcggcgcacaaggcacgcaacccggacgcgacggcguaguacgaguaugggacgucaaaaaccccgaccuccuaaacaaccaauucggcacaaugcccucacucacacucgccugccuaaccaaacaaggccaagucgaccucaacgaugcaguccucgcccucaccgaccucggccuaauauacaccgcaaaauacccaaacaguuccgaccucgaccgacuaagccaaucccacccaauacucaacaugguagauaccaaaaaguccucccucaauaucuccggcuacaacuucucccucggcgccgcgguaaaagccggcgcgugcaugcucgacgggggaaacaugcucgaaaccaucaaagucacaccccaaaccauggacggaauccugaaaagcauccucaaaguuaagaaaucccuaggaauguucgucuccgacacccccggcgagcgcaacccauacgagaacauccuuuacaaaauaugccucuccggagacggcuggccguacaucgccucccgaaccucaaucguaggcagagccugggaaaacaccauagucgaccucgaaucagacggcaaaccacagaaagucggcaccgcaggaucaaacaaaucccuacaaucagcaggauuccccacaggucuuaccuacucccagcuaaugacacucaaagacuccaugaugcaacucgacccaucagcaaaaaccuggaucgacauagaaggucgcccagaagaccccgucgaaaucgcccuauaccaaccgauguccggcugcuacauccacuucuuccgggaacccaccgaccucaaacaauucaagcaagacgccaaauacucacacggcaucgacguagccgaccuauucccagcucaacccggccucaccuccgcagucaucgaagcccucccccgaaacaugguccucacaugccaaggcagcgacgacaucaaacgccuucucgacucacaaggccgacgugacaucaaacucaucgacaucgcccucuccaaagcagauucccgacgauucgaaaacgcagucugggaccaaugcaaagacuuaugucauaugcacaccggagucgucgucgagaaaaagaaacgcggaggcaaagaagaaaucacaccgcacugcgcccugauggacugcauaauguacgacgcagcaguaagcggcggccucaauauacccguccuccgcgcaguacucccucgagacaugguauuccgaaccuccagcccaaaaguaguccucuaaggacuagucccuguucccagagcccacuuuuuuuucuuuuuuugaaauaaaauagccugucuuucagaucuaaaaaaaaaaaaaaaaaaaaaaaaaaaaaaaaaaaaaaaaaaaaaaaaaaaaaaaaaaaaaaaaugcaucccccccccccccccccccccccccccccccaaaggcucuuuucagagccaccagaauu

SEQ ID NO: 10337 - RNA, 2005 nt, Artificial Sequence
  mRNA product Design a-2 comprising derived and/or modified sequence from LASV(Nig08-04;Clade II)__ADU56611__NP (opt11)
gggagaguccgcucagccagguugcagaagcggcuuagcguguguccuaaucuucucucugcguguagguaggccugugccgcaaacaagcuuaccaugagcgcgucgaaagaagucaagagcuuccucuggacccaaucucugcgaagagaacucucuggcuacugcuccaacauaaaacuccaagucgucaaggacgcccaagcccuauuacacggccuagacuucuccgaaguaucaaacgugcaaagacucaugcgcaaacagaaacgagacgacggcgaccucaagagacuacgagaccuaaaccaagccguaaacaaccucgucgaacuaaaaagcacccagcaaaaaucaguccuacgggucggcacgcugaccagcgacgaccugcuaacacucgccgcagaccuagaaaaacuaaaaucaaaagucauacgcaccgaacgcccacuauccagcggagucuacauggggaaccucucaacccagcaauuagaacaaagaaaagcccugcuaucaaugauaggcauggucggcggcgcccaaggaacgcaacccggccgcgacggcgucguccgagucugggacgucaaaaacccagaccuacucaacaaccaauucggcaccaugccgucacuaacacuagcaugccucaccaaacagggccaagucgaccucaacgaugcaguccuagcccuaaccgaccucggccuaaucuacaccgcaaaauacccaaacuccucagaccuagaccgacuaucccaaucacacccaauccucaacauggucgacacaaagaaaucaucccucaacaucuccggcuacaacuucagccucggcgccgccgucaaagcaggcgccugcaugcucgacggcggcaacaugcucgaaaccaucaaaguaaccccacaaacaauggacgggauauuaaaauccauacucaaagucaagagaucccucggcauguucgucucggacaccccaggagaacgcaacccauacgaaaacauacucuacaagauaugccuauccggcgacggcuggccauacauagccuccagaaccuccauagucggccgggcgugggaaaacaccaccguagaccuagaaagcgacggcaaaccccagaaggucggcacugcgggcucaaacaaaucccuacaaucagccggauucccgacaggacucacauacucacaacugaugacccucaaagauucaaugaugcaacucgacccaagcgccaaaacguggaucgauaucgaagggagaccagaagacccggucgaaaucgcccuauaccaaccaaugagcggcugcuacauacacuucuucagggaacccacagaccuaaaacaauucaagcaagacgcaaaguacucacacggcauagaugucacagaccuauucagcgcccaaccaggacuuaccuccgcaguaaucgaagcacuacccaggaacaugguccugaccugccaaggaucagacgacauaaagaaacugcuagacagucagggacgacgagacaucaaacuaaucgacaucagccucaacaaagccgauagccgacguuucgaaaacgccgucugggaccaaugcaaagaccucugccacaugcacaccggcguagucguagaaaagaagaaacgcggcggaaaagaagaaauuacaccccacugcgcccucauggacugcaucauguucgacgcggcaguaagcggaggccucaacauaccgauccuccgagcaguccuccccagagacaugguauuccgcaccuccagcccaaaagucguccucuaaggacuagucccuguucccagagcccacuuuuuuuucuuuuuuugaaauaaaauagccugucuuucagaucuaaaaaaaaaaaaaaaaaaaaaaaaaaaaaaaaaaaaaaaaaaaaaaaaaaaaaaaaaaaaaaaaugcaucccccccccccccccccccccccccccccccaaaggcucuuuucagagccaccagaauu

SEQ ID NO: 10338 - RNA, 2008 nt, Artificial Sequence
  mRNA product Design a-2 comprising derived and/or modified sequence from LASV(GA391;Clade III)__AAA46284__NP (opt11)
gggagaguccgcucagccagguugcagaagcggcuuagcguguguccuaaucuucucucugcguguagguaggccugugccgcaaacaagcuuaccauguccgcgaguaaagaaguacguucaugccuauggacgcaaucccuccggcgcgaacuuuccggcuacugcucaaacauaaaacugcaagugguaaaggacgcccaagcacuacuucacggacuagacuucucagaagugucaaacguccagagacuaaugcgaaaacagaaacgggacgauggagaccuaaaacgacugcgcgaccuaaaccaagcggucaacaaccuagucgagcucaaaagcacacaacagaaaucgguccuacgcguuggaacgcucuccagcgacgaccugcucauccucgcggccgaccucgaaaaacucaaaucaaaaguaacccgaaccgaacgcccgcuuucgagcggaguauauaugggaaaccuaaguucccaacagcucgaccaacgccgcgcacuccugaacaugauaggcaugacaggagugagcggcggagggaaaggcgcaucaaacggcaucgugcgcgucugggacgugaaaaacgccgaacuccuuaacaaccaguucgggaccaugcccucacuaacacucgcaugccuaaccaagcaaggacaaguagaccuaaacgacgccguacaagcacuaaccgaccuaggccuuaucuacacagcgaaauaccccaauagcucggaccuggacagacucucacaaucgcaccccauccugaacaugaucgacaccaagaaaucgagccuaaacauuuccggcuacaacuucucucucggggccgccgucaaagcaggggcaugcaugcuagacggaggcaacaugcucgaaacgaucaaagucucaccccaaaccauggacggcauacugaaauccauccuaaaagucaagaaaagccuaggaauguucgucagcgacaccccaggcgaacgcaaccccuacgaaaauauccuguacaaaaucugccucucgggagacggcuggagcuauaucgcgagcagaacaucaaucguaggccgcgcgugggagaacaccguaguugaccucgaacaagacaacaaaccacagaaaauaggcaacggcggauccaauaaaucacuccagagcgcaggcuucgcagcuggccuaaucuacagccaacucaugacacugaaagacuucaaaugcuucaaccucaucccaaacgccaaaacauggauggauaucgaagggcgccccgaagaccccguagaaauagcacucuaccaacccucgagcggcugcuacguucacuucuuccgcgagcccacagauuuaaaacaguucaaacaggacgccaaauacucacacggucgcgacgucacagaccucuucgcagcccaaccaggccugacaagcgcuguaauagaagcccucccacgaaacauggucauaaccugccaaggaucagaagauaucagaaaacuacucgaaagccaaggccgacgggacaucaaacucauagacauaacccuaagcaaagcagauagcagaaaauucgaaaacgccguaugggaccaauucaaagaccucugccacaugcacacaggcguagucguggaaaagaagaaacgcggaggcaaagaagaaaucacaccucacugcgcacucauggacugcauaauguuugaugcugcggucuccggcggacucgaugcaaaaguacuccgaguuguccuacccagagacaugguauuccgcaccucaacacccaaaguaguacucuaaggacuagucccuguucccagagcccacuuuuuuuucuuuuuuugaaauaaaauagccugucuuucagaucuaaaaaaaaaaaaaaaaaaaaaaaaaaaaaaaaaaaaaaaaaaaaaaaaaaaaaaaaaaaaaaaaugcaucccccccccccccccccccccccccccccccaaaggcucuuuucagagccaccagaauu

SEQ ID NO: 10339 - RNA, 2005 nt, Artificial Sequence
  mRNA product Design a-2 comprising derived and/or modified sequence from LASV(Nig08-A19;Clade III)__ADU56619__NP (opt11)
gggagaguccgcucagccagguugcagaagcggcuuagcguguguccuaaucuucucucugcguguagguaggccugugccgcaaacaagcuuaccauguccgccucaaaagaggucaagagcuuccuauggacccaaucacuucgccgcgaacuuagcggcuacugcuccaacaucaaacuacaagucgucaaagacgcgcaggcccuccuccacggacucgacuucucagaaguauccaacguacaacgccugaugcgcaaacaaaaacgagacgacggcgaccucaaacgacuacgcgaccucaaccaagcaguuaacaaccuagucgaacucaaaagcacccaacagaaaagcguacuacgugucggcacgcuaagcagcgacgaccuacucguguuagccgcugaccucgaaaaacuaaaaucaaaaguaguccggaccgaacgcccacugagcagcggcaucuacaugggcaaccucucaucacaacaacuagaccaacgcaaagcacuacucaacaugaucggcaugacaggaggcaacggcggacgaaacacgaccuccgacggaauuguacgggucugggacgucaaaaacgcagagcuccuaaacaaucaauucggcacaaugccaucccuuacacuagcuugccucaccaaacaaggccagguagaccuaaaugaugccguacaagcccuuacagaccucggacucauauacaccgcaaaauacccuaacucaucagaccucgaccgacuagcacaaucacacccaauccugaacaugauagauaccaaaaaguccucccuuaacaucuccggauauaacuuuucccucggagcagccgucaaagcuggcgccugcaugcuggacggcggcaacaugcucgaaacaaucaaaguaagcccacaaacaauggacggaauccucaaauccauacuaaaaguaaaacgcucccuaggcauguucauauccgacacacccggcgaacgaaaccccuaugaaaacauacuuuacaagaucugccucucaggcgacggauggcccuacaucgcaucccggacauccaucguaggacgagccugggaaaacaccguagucgaccuggaaagcgacaacaagccccagaaaacaggcaacggcggcagcaacaagucccuccaaagcgccggcuucgcagcaggccuaaccuacucccaacucaugacacucaaagacagcaugcuccaacuagacccaaacgcaaaaaccuggauggauaucgaaggccggccagaagaccccguagaaauagcccuauaccaaccuagcucaggaugcuacauccauuucuuccgagaacccaccgaccuuaagcaauucaaacaggacgccaaauacagccacggcaucgacgucaccgaccucuucgccgcccaacccggccuaacaucagccgucauagaagcccuaccccgcaacauggucauaaccugccaaggauccgaagacauaagaaaacuccucgagucgcaaggccgccgagacaucaaacuaauagacaucucccuauccaaagucgacagccgcaaauucgaaaacgcagucugggaccaauuuaaagaccucugccacaugcauaccggcaucgucguagaaaagaagaaacgcggaggcaaagaagaaaucaccccacacugcgcucucauggacugcauaauguucgacgcggccguaucaggcggcgucgacgccaaaguccugagagccguccuucccagagacaugguauucagaaccuccacccccaaagucguccuauaaggacuagucccuguucccagagcccacuuuuuuuucuuuuuuugaaauaaaauagccugucuuucagaucuaaaaaaaaaaaaaaaaaaaaaaaaaaaaaaaaaaaaaaaaaaaaaaaaaaaaaaaaaaaaaaaaugcaucccccccccccccccccccccccccccccccaaaggcucuuuucagagccaccagaauu

SEQ ID NO: 10340 - RNA, 2005 nt, Artificial Sequence
  mRNA product Design a-2 comprising derived and/or modified sequence from LASV(G1180-SLE-2010;Clade IV)__AIT17169__NP (opt11)
gggagaguccgcucagccagguugcagaagcggcuuagcguguguccuaaucuucucucugcguguagguaggccugugccgcaaacaagcuuaccaugucagccagcaaagagaucaaauccuuccucuggacccaaucccuccggcgcgaacucagcgguuacugcagcaacauaaaacuacaagucgucaaagacgcccaagcccuccuccacggccuagacuucuccgaagucuccaacguccagcgccuaaugcgcaaagaacgacgagacgacaacgaccucaaacgacugcgagaucuaaaccaagcaguuaacaaccucguagaacuaaaaucaacucaacaaaaaucaauccugagggucggcacccuaaccagcgacgaccuccuaauccuugccgcugaccucgagaaacucaaaagcaaagucauccgaacggaacgaccacuaagcgccggcgucuacaugggcaaccuaucaagccagcaacucgaccaaagacgcgcauuacucucgaugaucggaaugagcuccggcaaccaacgagcacaagccggccgagacggcgucguacgagucugggacgucaaaaacguugagcuacuaaacaaccaauucggaaccaugccaucacuaacccucgccugccucacaaaacaaggccaaguagaccucaacgacgccguccaagcccucaccgaccucggacuaauauacacagcaaaguaccccaacaccagcgaccuggaccgucuaacccagucacaccccauacucaacaugauagacaccaaaaaguccucacucaacauauccggauacaacuucucccucggcgccgccgucaaagccggagcaugcaugcuagacggcggcaauaugcucgaaacaaucaaagucucaccccaaaccauggacggcauacucaaaagcauacucaaagucaagaaagcccucggaauguuuaucucugacacacccggcgaacgcaaccccuacgaaaacauacuauacaaaauuugccugucaggagauggauggcccuacauagccagucgaaccuccaucaccggccgcgcaugggaaaacaccgucguugaccuagaauccgacggaaaaccccagaaagcaggcuccaauaacuccaacaaaagccuucaaagcgucggauucacagcgggccucaccuacucacaacuaaugacacuaaaagacgccaugcuccaacucgacccaaacgcuaaaaccuggauggacaucgaaggccgccccgaagacccaguagaaaucgcccucuaccagccuuccuccggcugcuacauccacuucuuccgagaacccaccgaccuaaaacaguucaaacaagacgccaaauacucccacggcaucgacgucacagaccuguucgccgcccaaccaggccucacgucugcaguaaucgacgcacugccccguaacaugguaauaaccugccaaggcucagacgacaucagaaaacuucuagaaucacaaggccgaaaagacaucaaacucaucgacaucgcccucuccaaaaccgacuccagaaaauacgaaaacgccguaugggaccaauacaaagacuuaugccacaugcacaccggaguagucgucgaaaagaagaaacgcggcggcaaagaagaaaucaccccacacugcgcacucauggacugcauuauguucgacgccgccgucucuggaggacuaaacaccucaguccucagagccguccucccuagagacaugguauuucgaaccagcacaccccgagucguccuauaaggacuagucccuguucccagagcccacuuuuuuuucuuuuuuugaaauaaaauagccugucuuucagaucuaaaaaaaaaaaaaaaaaaaaaaaaaaaaaaaaaaaaaaaaaaaaaaaaaaaaaaaaaaaaaaaaugcaucccccccccccccccccccccccccccccccaaaggcucuuuucagagccaccagaauu

SEQ ID NO: 10341 - RNA, 2005 nt, Artificial Sequence
  mRNA product Design a-2 comprising derived and/or modified sequence from LASV(G1442-SLE-2011;Clade IV)__AIT17181__NP (opt11)
gggagaguccgcucagccagguugcagaagcggcuuagcguguguccuaaucuucucucugcguguagguaggccugugccgcaaacaagcuuaccauguccgccagcaaagaagucaaauccuuccuauggacccaaucacuccgccgcgaacuuagcggcuacugcucaaauauaaaacugcaagucgucaaagacgcucaagcccuccugcacgggcucgauuucucagagguauccaacguccaacggcuaaugcgcaagcaacgacgggacgacaaugaucucaaaagacuccgcgaccugaaccaagccgucaacaaccuugucgagcucaaauccacucaacagaaaaguguacuccgcgucgguacacucaccucggacgaccuucuaguacuagcagcugaccuagaaaaacuaaaauccaaagucauccgcaccgaacgcccccucagcgcaggcgucuauaugggcaaccucuccucccaacaacucgaccaaagacgagcacuccucaacaugaucgguaugagcggaggcauccaaggcacacgaaccggccgagacggcgucguccgaguaugggacgucaaaaacgccgaccuacucaacaaccaauucggaaccaugcccucccuaacacuagccugccucaccaagcaaggacaaguagaccucaaugacgucguccaagcccucacagaccucggccuaauauacaccgcaaaauaccccaacgccagcgaccucgacagacuaacccaaucccaccccauccuaaacaugaucgacacaaagaaaagcagccucaacaucuccggcuacaacuucucacuaggcgccgccgucaaagcaggagcaugcaugcuggauggcggcaacaugcucgaaacaaucaaagucucaccacaaacaauggacgguauccucaaauccauacuaaaagucaagaaaacucugggaauguucauauccgacacucccggagaacgcaaccccuaugaaaacauccuauacaaaaucugccugucaggagacggcuggcccuacaucgcuucccgaacaagcaucacaggacgcgccugggaaaacacaguuguagaccucgaaagcgacggcaaaccacaaaaagccggaucaaacaacucaaacaaaucccugcagagcgcgggcuucgccgccggucuaaccuauagccaacuaaugacccucaaagacgccaugcuccaacuggauccaaacgccaaaaccuggauggacauagagggccgccccgaagacccagucgagaucgcccuauaucaacccagcucaggcugcuacauccacuucuuccgcgaaccaacagaccucaaacaauucaaacaagacgccaaauacucucacggcauagacgucacagaucuauucgccgcacaaccaggacuuaccucagccguaauugaagcccucccccgcaacauggucauaaccugccaaggauccgacgacaucaagaaacuccuagaaucacaaggccggaaagauaucaaacuuaucgacauagcgcuaucaaaaacagacuccagaaaguacgaaaacgcagucugggaccaguacaaagaccucugccacaugcauaccggcgucgucgucgaaaagaagaaaagaggcggaaaagaggaaaucacgccccacugcgcccucauggacugcauaauguucgacgcagccgucagcggcggacucaacacccuaguccuccgcgccguacucccccgcgacaugguauuccguacauccacuccacgcguaguccuaugaggacuagucccuguucccagagcccacuuuuuuuucuuuuuuugaaauaaaauagccugucuuucagaucuaaaaaaaaaaaaaaaaaaaaaaaaaaaaaaaaaaaaaaaaaaaaaaaaaaaaaaaaaaaaaaaaugcaucccccccccccccccccccccccccccccccaaaggcucuuuucagagccaccagaauu

SEQ ID NO: 10342 - RNA, 2005 nt, Artificial Sequence
  mRNA product Design a-2 comprising derived and/or modified sequence from LASV(G3010-SLE-2013;Clade IV)__AIT17345__NP (opt11)
gggagaguccgcucagccagguugcagaagcggcuuagcguguguccuaaucuucucucugcguguagguaggccugugccgcaaacaagcuuaccauguccgccucaaaagaaaucaaauccuuccucuggacacaaagccuccgccgcgaacucuccggauacugcucaaacaucaaacuucaaguagucaaagacgcccaggccuuacuacacggucuggacuucagugaaguuuccaacguccaacgccucaugcgaaaagaaagacgcgacgacaacgaccuaaaacgccuccgagaccucaaccaagcugucaacaaccuggucgaacuaaaauccacacaacaaaaaucaauccuacgaguaggcacccucaccucagacgaccuccucauccucgcagccgaucucgaaaaacuaaaaucaaaagucacccgcaccgaacgaccacucuccgccggcgucuauaugggaaaccugucaagccaacaacucgaccaacgccgcgcacuacucagcaugauuggcaugucaucaggcguccaaggcgcccgcgccggccgugacggcguaguacggguaugggacguuaagaacgcagaacuccucaacaaucaguucggcaccaugcccucccuaacacucgcuugccucaccaaacaaggacaaguagaucuaaacgacgucguacaagcgcuaacugaccucggacuuauauacaccgcaaaauacccaaauacaucagaccucgacagacuaacccaaagccacccaauccucaacaugaucgacacuaagaaauccucccuaaacauaucaggauacaacuucucccucggcgcagcagucaaagccggggcaugcaugcucgacggcgggaacaugcuagaaaccaucaaagucucgccccagaccauggacggcauccuaaaaagcauacucaaagucaagaaagcacucggcauguucaucuccgaaaccccaggcgagcgcaaccccuacgaaaacauucuauacaaaaucugccucucgggggacggcuggccauacaucgccucacgaaccucaaucacugguagagccugggaaaauaccgucguagaucucgaaagcgauggcaaaccucaaaaagcaggaucaaacaacaguaacaaaagccuucaauccgcaggcuuuacggccggccuuacuuacucccaacuaaugacccucaaagacgcaaugcuacaacuagaccccaacgccaaaaccuggauggacaucgaaggccgacccgaggacccugucgaggucgcucuuuaccaacccagcucaggaugcuacauccacuuuuuccgcgagcccaccgaccucaaacaauucaaacaagacgccaaauacucccauggcaucgacgucacagaccuauucgccgcccaaccaggccuuaccucagcagucaucgacgcccuacccagaaacauggucauaaccugccaaggcucagacgacauaaagaaacuacucgaaucccaaggacgcaaagacaucaaacucaucgacauagcacucuccaaaaccgacucacgcaaauacgaaaacgccgucugggaccaauacaaagaccuaugccauaugcacacaggcguugucgucgagaaaaagaaacgcggaggaaaagaagaaaucacaccccacugcgcccuaauggacugcaucauguucgacgcugcagucagcgguggccuaaacacgagcguccuccgcgcaguccucccccgcgacaugguuuucagaaccuccacuccccgagucguucucuaaggacuagucccuguucccagagcccacuuuuuuuucuuuuuuugaaauaaaauagccugucuuucagaucuaaaaaaaaaaaaaaaaaaaaaaaaaaaaaaaaaaaaaaaaaaaaaaaaaaaaaaaaaaaaaaaaugcaucccccccccccccccccccccccccccccccaaaggcucuuuucagagccaccagaauu

SEQ ID NO: 10343 - RNA, 2005 nt, Artificial Sequence
  mRNA product Design a-2 comprising derived and/or modified sequence from LASV(G502-SLE-2009;Clade IV)__AIT17127__NP (opt11)
gggagaguccgcucagccagguugcagaagcggcuuagcguguguccuaaucuucucucugcguguagguaggccugugccgcaaacaagcuuaccauguccgccuccaaagaaauaaaauccuuucuauggacccaaucccuucgccgcgaacucuccggcuacugcuccaauaucaaacuccaagucgucaaagacgcccaagcacuacuacacggccuagacuucucagaagucucaaacguccaacgacucaugcgaaaagagagacgcgacgacaacgaccuaaaacgccuaagagaccucaaccaagccguaaacaaccucgucgaacuuaaaagcacgcaacaaaaauccauccuccgaguaggcacccuaaccucagacgaccuacuuauacuagcagcggaccucgaaaaacucaagagcaaggucauccgcacugaacgcccacuauccgcaggcgucuacaugggaaaccucucaucccaacaacucgaccaacgccgggcccuacucuccaugaucggcauguccgguggaaaccaaggagugcgagcaggcaaagacggcgucguacgcguaugggacgucaaaaacgcugaacuccucaacaaccaauuuggaacaaugcccagccucacccuugccugccucaccaaacaaggccaaguagaccuaaacgacgccguacaagcccuaaccgaccuaggacucauuuacacagccaaauacccuaacaccuccgaccuagaccgccucacacaaucccacccgauccuaaacaugauagacaccaaaaaguccucccucaacauauccggcuacaacuucagccucggagcugcagucaaagcaggcgccugcaugcucgacggcggcaacaugcucgaaaccaucaaagucagcccccaaaccauggacggcauacuaaaguccaucuugaaaguaaagaaagcgcuaggcauguucaucuccgacacaccaggagaaagaaaccccuacgaaaacauccuauacaaaauaugccucuccggagacggcuggccauacaucgccucacgcaccuccaucacaggccgugcaugggaaaacaccgucgucgaccuagaauccgacggcaaaccacaaaaagcaggcuccaacaacuccaacaaaucacuccaaucagcuggcuucaccgcuggucuaacauacucccagcucaugacccugaaagaugccaugcugcaacuagacccaaacaccaaaaccuggauggacaucgaaggacgacccgaagauccagucgaaauagcccucuaccaaccaucguccggcugcuacauccacuucuuccgcgaaccaacugaccucaaacaauucaaacaggacgcaaaauacucccacggaaucgacgucaccgaccuauucgcagcacaaccaggcuuaacauccgcugucaucgaugcccucccccgcaacaugguaauuacaugccaaggcuccgacgacauccgaaaacuacucgaaucccaaggacgcaaagacaucaaacucauagacauagcccucaacaaaaccgacucccgcaaauacgaaaacgcagucugggaccaauauaaagaccucugccauaugcacaccggugucgucgucgaaaagaagaaacgaggcgguaaagaagaaauaaccccgcacugcgcccuuauggacugcaucauguucgacgccgccgucucaggcggccucaauaccagcguacuccgggcaguccucccccgggacaugguauuccggacaagcacaccccgcguaguccucuagggacuagucccuguucccagagcccacuuuuuuuucuuuuuuugaaauaaaauagccugucuuucagaucuaaaaaaaaaaaaaaaaaaaaaaaaaaaaaaaaaaaaaaaaaaaaaaaaaaaaaaaaaaaaaaaaugcaucccccccccccccccccccccccccccccccaaaggcucuuuucagagccaccagaauu

SEQ ID NO: 10344 - RNA, 2005 nt, Artificial Sequence
  mRNA product Design a-2 comprising derived and/or modified sequence from LASV(G733-SLE-2010;Clade IV)__AIT17155__NP (opt11)
gggagaguccgcucagccagguugcagaagcggcuuagcguguguccuaaucuucucucugcguguagguaggccugugccgcaaacaagcuuaccaugucugccagcaaagaaaucaaauccuuccucuggacucaaucacuccgccgcgaacuaagcggauacugcucgaacauuaaacuucaagugguaaaagacgcccaagcccuccuccacggacucgacuucucagaaguaucaaacguccaacgccuaaugcgcaaagagcggcgcgacgacaacgaccucaaacgccuccgcgaccucaaccaagcagucaacaaccucgucgaacucaaaucaacacaacaaaaaucaguacuacgcgucggcacauuaacaagcgacgaacuucucguacucgcagccgaccucgagaaacugaaauccaaaguuaucagaacagagcgaccccucuccgccggagucuacaugggaaaccucuccucccagcaacucgaccaacgacgcgcccuccucagcaugaucggcauguccggcggcaaccaaggcgcccgcacaggccgcgacggcguaguccgaguaugggacguuaaaaacgccgaacuccucaacaaccaauucggaacaaugccaucucuuacacucgcuugccuaaccaaacaaggacaaguagaccuaaacgacgccgugcaagcacuaaccgacuugggccucauauacaccgccaaauaccccaacaccuccgaccuagaccgccucacacaaucacacccaauacucaacaugaucgacaccaaaaagucaagucucaacauaagcggcuacaacuucucacucggcgccgccgucaaagccggcgcaugcaugcuggacggaggaaacaugcucgaaacaaucaaagucucaccccaaaccauggacggaauccucaaauccauacucaaagucaagaaagcccuaggcauguucauaagcgauacacccggcgaacgcaaccccuacgaaaacauccuauacaaaauaugccucuccggagauggauggcccuacaucgccucacgcaccagcaucacgggccgcgcuugggaaaacacaguagucgaccuagaaagcgacggcaaaccacaaaaagcaggcuccaacaauuccaacaaaucgcuucaguccgcuggcuucaccgccggccuaaccuacucacaacucaugacccugaaagacgcuaugcuccaacucgaccccaacgcaaaaacauggauggacaucgagggcagacccgaggaccccgucgaaauagcccucuaccaaccuuccuccggcugcuacauacacuucuucagagaacccaccgaccucaaacaauucaaacaagacgccaaauacucccacggcaucgacgucaccgaccucuucgccgcccagccaggacucaccuccgccgucaucgacgcccuccccaggaacaugguaauuaccugccaaggauccgacgacauccgcaaacuccucgaaucacaaggacgcaaagacaucaaacuaauagacaucgcccuaucaaaaauagacucccgcaaauacgaaaaugccguaugggaccaauacaaagaucugugccacaugcacaccggagucgucgucgaaaagaagaaacgcggcggaaaagaagaaauaacuccccacugcgcacuaauggacugcauaauguucgacgcagccgucuccggaggacuaaacucacucguccuaagagcagugcucccccgcgacaugguauuccgcacguccacaccccgcguaguccuauaaggacuagucccuguucccagagcccacuuuuuuuucuuuuuuugaaauaaaauagccugucuuucagaucuaaaaaaaaaaaaaaaaaaaaaaaaaaaaaaaaaaaaaaaaaaaaaaaaaaaaaaaaaaaaaaaaugcaucccccccccccccccccccccccccccccccaaaggcucuuuucagagccaccagaauu

SEQ ID NO: 10345 - RNA, 2005 nt, Artificial Sequence
  mRNA product Design a-2 comprising derived and/or modified sequence from MOPV/LASV reassortant(IGS-1;Clade IV)__AFY05578__NP (opt11)
gggagaguccgcucagccagguugcagaagcggcuuagcguguguccuaaucuucucucugcguguagguaggccugugccgcaaacaagcuuaccaugagcgccagcaaagaaaucaagagcuuccuuuggacgcagucguuacgacgcgaacucuccggcuacugcucaaacaucaaacuacaaguagucaaagaugcccaagcccuacuccacggacucgacuucuccgaagucagcaacgugcaacgccuaaugcgcaaagaacgacgcgacgacaacgaccucaaacgacuccgagaccuaaaccaagccgucaacaaccucguagaacuaaaauccacacaacaaaaauccauauuacgagucggcacccucaccagcgaugaucuucuaauacuggccgcagaccucgaaaaacuucgcucaaaagugauucgcaccgaacgcccacucagcgccggaguuuacaugggcaaucucuccagccaacaacucgaccaacgaagggcccuccucaacaugauugggauguccggaggcaaccaaggagcccgagccggacgcgacggcguaguccgcguaugggacgucaaaaacgcagaacuacucagcaaccaauucggcaccaugcccucacucacgcuugccuguuugaccaaacaaggacagguagaucuuaacgacgcaguccaagcacuaacagaccucggccuaaucuacaccgcaaaauaccccaacaccuccgaccuagaccgacucacucaaucgcaccccauccuaaacaugaucgacaccaagaaaucgagccucaacauuagcgguuacaacuucucccuaggcgccgccgucaaagccggugcaugcaugcuugacggcggaaauaugcuagaaaccaucaaaguauccccacaaacaauggacggaauccucaaaucgauucucaaagucaagaaagcccucggcauguucaucucagacaccccaggagaaaggaacccguacgaaaauauccucuacaaaauaugucucucaggcgacggcuggccauacaucgccucccgcacaaguauaaccggacgagccugggaaaacaccguaguagaccuagaaagcgacgguaaaccccaaaaagcagacucuaacaacagcucgaaaucccuccaaagcgcaggcuucacagcgggccuaaccuacagccagcucaugacccucaaagacgcaaugcuccagcucgaccccaacgcgaaaaccuggauggacaucgagggcagaccagaagacccagucgaaaucgcacucuaccaacccuccuccggcugcuacauccacuuuuuccgcgaacccaccgaccuaaaacaauuuaaacaagacgcaaaauacucccacggcauagacguaacagaccucuucgcaacccagccaggccuaaccuccgccgucaucgacgcacucccccgcaacaugguaauaaccugccaaggcucagacgacauccgcaaacuccucgaaucccaaggcagaaaagacaucaaacuuaucgacauagaucucucuaaaaccgacucccguaaauacgagaacgccgucugggaccaauacaaagaccuaugccauaugcacaccggaguuguagucgaaaagaagaaacggggagguaaagaagaaauaacaccccacugcgcccuaauggacugcauuauguucgacgccgcaguaagcggcggccuaaacaccuccguccuccgcgcaguccucccacgcgacauggucuucagaaccuccacacccagagucguccucuaaggacuagucccuguucccagagcccacuuuuuuuucuuuuuuugaaauaaaauagccugucuuucagaucuaaaaaaaaaaaaaaaaaaaaaaaaaaaaaaaaaaaaaaaaaaaaaaaaaaaaaaaaaaaaaaaaugcaucccccccccccccccccccccccccccccccaaaggcucuuuucagagccaccagaauu

SEQ ID NO: 10346 - RNA, 2005 nt, Artificial Sequence
  mRNA product Design a-2 comprising derived and/or modified sequence from LASV(LM765-SLE-2012;Clade IV)__AIT17815__NP (opt11)
gggagaguccgcucagccagguugcagaagcggcuuagcguguguccuaaucuucucucugcguguagguaggccugugccgcaaacaagcuuaccaugucagcauccaaagagaucaaauccuuccuguggacccaaucccuucgacgcgaacuaagcggauacugcagcaacaucaaacuacaagucguaaaagacgcccaagcacuccuacacggccuagacuucuccgagguauccaauguccaacgccucaugaggaaagaacgccgcgaugauaacgaucuuaaaagauuacgcgaccucaaccaggccguaaacaaccuagucgaacucaaaucaacccaacaaaaaucaauacuccgcgucggaacccuuacaucagacgaccuacucauacuggccgcagaccuugaaaaacucaaaucgaaagucacccgcaccgaaagaccccucuccgccggcgucuacaugggcaaccucagcucacaacagcucgaccaacgacgagcgcuccucgacaugauaggcauguccggaagcaaccaaggcgccagagccggcagagacggcgucguacgcgucugggacgucaaaaacgccgaacuccucaacaaccaauucggcaccaugcccucucucacgcucgccugccucaccaagcaaggccaagucgaccucaacgacgcaguacaagcacuaacggaccuaggccugaucuacacagccaaguaccccaacaccucggaccucgaccggcucacccaaagccaccccauccugaacaugaucgacaccaagaaauccucccuuaacauaucaggcuacaacuucucccugggcgccgcaguaaaagccggcgcaugcaugcuagacggaggaaacaugcucgaaacaaucaaagucucgccccaaacaauggauggcauacuaaaauccauccucaaagucaagaaagcccuaggaauguucauaucagaugcccccggcgaacgaaaccccuacgagaacauccuauacaaaauuugccucagcggcgacgguuggccguauaucgccaguagaaccuccaucaccggccgcgccugggaaaacaccguagucgaccuagaaagcgauggcaaaccccaaaaagcaggaaguaacggauccaacaaaagucuacaauccgccggcuucaccgccggucuaaccuacucccaacucaugacccucaaagacgccaugcuacaacuagacccaaacgccaaaaccuggauggacaucgaaggcagacccgaagacccagucgaaaucgcacuguaccaacccagcuccggcugcuacauccacuucuuccgcgaacccacagaccucaaacaauucaaacaagacgccaaauacagccacggcauagacguaaccgaccuauucgccgcacagcccggcuuaaccagcgcagucaucgacgcccuacccagaaacauggucauaaccugccaaggcucagacgacauccgcaaacucuucgagagccaaggcagaaaagacaucaaacucauagacaucgcccucagcaagacugacucccgcaaauacgaaaacgccgucugggaccaauacaaggaccuaugccauaugcacaccgggaucguaguagaaaagaagaaacgaggcggaaaagaggaaauaaccccacauugcgcccucauggacugcaucauguucgacgccgccguaagcggcggccuaaacaccucaguccuuagagccguccucccacgcgacauggucuuccgcaccucuacgccccgaguaguccuauaaggacuagucccuguucccagagcccacuuuuuuuucuuuuuuugaaauaaaauagccugucuuucagaucuaaaaaaaaaaaaaaaaaaaaaaaaaaaaaaaaaaaaaaaaaaaaaaaaaaaaaaaaaaaaaaaaugcaucccccccccccccccccccccccccccccccaaaggcucuuuucagagccaccagaauu

SEQ ID NO: 10347 - RNA, 2005 nt, Artificial Sequence
  mRNA product Design a-2 comprising derived and/or modified sequence from LASV(LM776-SLE-2012;Clade IV)__AIT17825__NP (opt11)
gggagaguccgcucagccagguugcagaagcggcuuagcguguguccuaaucuucucucugcguguagguaggccugugccgcaaacaagcuuaccaugucagccuccaaagaaaucaaauccuuccucuggacccaaucccuccgccgcgaacuauccuccuacugcuccaacaucaaacuacaagucgucaaagacgcccaagcccuccugcacggacucgacuucucagaagucagcaacguacaacgacucaugcgaaaagaacgaagagacgacaacgaccucaaacgacuuagagaccucaaccaagcagucaacaaccucguagaacuaaaaucuacccaacaaaaaucaauacuccgcgucggcaccuuaacaagcgacgacuuacucauccucgcugccgaccucgaaaaacuaaaauccaaaguaacccgcaccgaacgcccccucucagccggcgucuacaugggcaaccucucaucccaacagcuagaccaacgcagagcccuccucuccaugauuggaauguccggaagcaaccaaggugccagagcaggccgagacggagucguccgcguuugggacgucaagaacgcagaacuccuaaacaaccaguucggcacaaugcccucccucacacuagcgugucucaccaaacaaggucaagucgaccuaaacgacgcaguacaagcccucacagaccucggccuaauauacacagccaaauacccaaacaccagcgaccucgaccgccucacccaaagccaccccauauuaaacaugauagacaccaagaaauccucucucaacaucuccggcuacaacuucucacuaggcgcagcaguaaaagccggcgcaugcaugcuggacgguggcaacaugcucgaaacaaucaaagucucaccccaaaccauggacggcauccuaaaauccauacucaaagucaagaaagcacucggaauguucaucucagacacccccggcgaacgcaaccccuacgaaaacauacucuacaaaauuugccucuccggcgacggcuggcccuauaucgccuccagaacauccaucaccggccgcgccugggaaaacaccguaguagaccuugaauccgacggaaaaccucagaaagccggaagcaacaacucaaacaaaucccuacaaucagccggauucaccgccggucuaacauacagccaacucaugacccuaaaggacgccaugcuacaacucgacccgaacgccaaaaccuggauggacaucgaaggccgacccgaagaccccgucgaggucgcccucuaccaacccagcagcggcugcuacauccacuucuucagagaaccaaccgaucucaagcaauuuaaacaagacgcgaaauacucccacggcauagaugucaccgaccucuucgcugcccaacccggccucaccucagccgucaucgacgcccuucccagaaacauggucaucacgugccaaggcuccgacgauauacgaaagcuacucgaaucgcaaggccgcaaggacaucaaguuaaucgacaucgcgcucuccaaaaccgacuccagaaaauacgaaaacgccgucugggaccaauacaaagaccucugccacaugcacaccggagucgucgucgaaaagaagaaaagaggcggcaaagaagaaauuaccccgcacugcgcacuaauggacugcaucauguucgacgccgcagucuccggaggccucaacaccucgguccuccgcgcgguacucccccgcgacauggucuuccguacaucaacaccccgcguaguccucuaaggacuagucccuguucccagagcccacuuuuuuuucuuuuuuugaaauaaaauagccugucuuucagaucuaaaaaaaaaaaaaaaaaaaaaaaaaaaaaaaaaaaaaaaaaaaaaaaaaaaaaaaaaaaaaaaaugcaucccccccccccccccccccccccccccccccaaaggcucuuuucagagccaccagaauu

SEQ ID NO: 10348 - RNA, 2005 nt, Artificial Sequence
  mRNA product Design a-2 comprising derived and/or modified sequence from LASV(Mad39;Clade IV)__ANH09723__NP (opt11)
gggagaguccgcucagccagguugcagaagcggcuuagcguguguccuaaucuucucucugcguguagguaggccugugccgcaaacaagcuuaccaugucagcauccaaagaaaucaaguccuuuuuauggacgcaaucacuccgacgcgaacuauccggcuacuguuccaacaucaaacuccaaguagucaaggacgcacaagcacuucuccacggccuagacuucucagaagucagcaacguacaacgacuaaugcgcaaacaacggcgcgacgacaaugaccuaaagcgccucagagaccuaaaccaagccgucaacaaccuuguagagcuaaaguccacccaacaaaaauccguccugcgcguuggaacccuaacaagcgacgaccuccucacacucgcagcggaccuagaaaagcucaaauccaaggucacacgaacagagagaccccuaaccgcaggagucuauaugggcaaccuaagcucccaacaacuagaccaaagacgggcacuccucaacaugauaggaaugagcggcggaaaccaaggugcaagaaccggacgggacgggguaguccgagucugggacgucaagaacgcagaacuacuaaacaaccaguucgguaccaugcccucccucacccucgccugccugacaaaacaaggccaagucgaccucaacgacguuguccaagcacuaacagaccucggccuaauauacaccgcaaaguaccccaacacaucagaccuggaccgacuaacccaaucccaccccauccucaacaugaucgacaccaacaaguccucccuuaacauuagcggcuacaacuucagccucggagccgcagucaaggccggcgccugcaugcuagacggcggcaacaugcuagaaaccaucaaagucucaccccaaaccauggacggcauccucaaaagcauuuuaaaagucaaaaagucacuaggcauguucaucagcgacacccccggagagagaaaccccuacgaaaauauccucuacaaaauaugccucucaggcgacggcuggcccuacauagcaagccgaaccagcaucacaggcagagcaugggaaaacaccgucgucgaucuagaaucaggcggcaaaccccaaaaagccggaucaaacaacuccaacaaaucucuacaaagcgccggcuucgccgcaggacucacauacucccaacucaugacccuaaaagacgccaugcuucagcucgacccgaacgcaaaaaccuggauggacauagaaggcagacccgaagacccaguagaaauagcacuauaccagcccaucucaggguguuacauccacuucuuccgcgaaccgaccgaucuaaaacaauucaaacaagacgccaaauacucccacggcaucgacguaaccgaccuguuugcagcucaaccaggccucaccuccgccgucauagaagcccucccccgaaacauggucauaaccugccaaggcagcgacgacauccgcaaacuauucgaaucacagggcagaaaagacaucaaacucaucgacaucgcacucagcaaaaccgacucacguaaguacgagaacgcggucugggaccaauacaaagaccucugccacaugcacaccggugucgucgucgaaaagaaaaagaaaggcggaaaagaagaaauaaccccucacugcgcccucauggacugcaucauguuugacgccgccgucagcggaggccuaaacacgcuaguccuacgagcaguacucccacgcgacaugguauuccgcacaucaacccccaaaguagucuuauaaggacuagucccuguucccagagcccacuuuuuuuucuuuuuuugaaauaaaauagccugucuuucagaucuaaaaaaaaaaaaaaaaaaaaaaaaaaaaaaaaaaaaaaaaaaaaaaaaaaaaaaaaaaaaaaaaugcaucccccccccccccccccccccccccccccccaaaggcucuuuucagagccaccagaauu

SEQ ID NO: 10349 - RNA, 2005 nt, Artificial Sequence
  mRNA product Design a-2 comprising derived and/or modified sequence from LASV(Z0947-SLE-2011;Clade IV)__AIT17841__NP (opt11)
gggagaguccgcucagccagguugcagaagcggcuuagcguguguccuaaucuucucucugcguguagguaggccugugccgcaaacaagcuuaccaugagcgccucaaaggaaaucaaaucguuccucuggacacaaucccuaagacgcgaacucucaggcuacugcuccaacaucaaacuacaagucguaaaagacgcgcaagcacuacuccacggacuagacuucagcgagguuuccaacguacaacgccugaugcgaaaagaacgccgagacgacaacgaccucaagcgacugcgcgaccucaaucaagccguaaacaaccucgucgaacuaaaauccacccaacaaaagucaauccuacgcguaggcacacugaccagcgaugaccuccucauccuugccgcagaccucgaaaagcuaaaaagcaaagucacccgcaccgaacgcccgcuauccgccggagucuacaugggaaaccuaaguagccaacaacucgaccaacggcgcgcacuacuaaacaugauaggcaugagcggcuccaaccaaggugcacguacaggcagggacggggucguacgcgucugggacgucaaaaacgccgaacuccucaacaaccaauucgguacaaugcccucacucacacuagcgugccucaccaagcagggacaaguagaccucaacgacgcaguacaagcgcuaacagaccucggccucauauacaccgcaaaauacccaaacaccucugaccuagaccgacucacucagucacacccaauccucaacaugauagacacaaagaaauccucgcuaaacauauccggcuacaauuucucccucggagccgccgucaaagccggcgcgugcaugcucgacggaggcaacaugcucgaaaccauaaaagucucaccacaaacaauggacggaauccucaaauccauccuaaaggucaagaaagcccuaggaauguucauauccgacgcccccggagaacgcaaccccuaugaaaacauccucuacaaaaucugccucuccggcgacggcuggcccuacaucgccagccgaacaagcaucaccggccgugccugggaaaacaccgucguagaucucgaaagcgacggaaaaccccaaaaagcaggcucgaacggcuccaacaaaucccuccagagcgccggcuucaccgcaggccuaaccuacucacaacugaugacacucaaagacgccaugcuacaacucgaccccaacgcaaaaaccuggauggacaucgaaggccgccccgaagaccccgucgagauagcucucuaccaacccuccucaggaugcuacauccacuucuuccgcgaaccaaccgaccugaaacaauucaaacaggacgcaaaauacucccacggcauagacguaaccgaccuauucgccgcgcaaccaggacucaccuccgccgucaucgacgcccucccaagaaacaugguuauaaccugccaaggcuccgacgacauccgcaaacuauucgaaucccaaggccgcaaagacaucaaguuaaucgacaucgcccugucaaagacagacucccgcaaauacgaaaacgcggucugggaccaauacaaagaccuuugccacaugcacaccgguaucgucguagagaaaaagaaacgaggaggcaaagaagagauaaccccacacugcgcuuuaauggacugcauaauguucgacgccgccgucucaggcggccuaaacaccagcguccuccgagcaguccucccccgcgacauggucuuucggaccuccacccccagagucguccuaugaggacuagucccuguucccagagcccacuuuuuuuucuuuuuuugaaauaaaauagccugucuuucagaucuaaaaaaaaaaaaaaaaaaaaaaaaaaaaaaaaaaaaaaaaaaaaaaaaaaaaaaaaaaaaaaaaugcaucccccccccccccccccccccccccccccccaaaggcucuuuucagagccaccagaauu

SEQ ID NO: 10350 - RNA, 2050 nt, Artificial Sequence
  mRNA product Design b-4 comprising derived and/or modified sequence from LASV(Josiah;Clade IV)__NP_694869__NP (wt)
gggagagucccgcagucggcguccagcggcucugcuuguucgugugugugucguugcaggccuuauucaagcuuaccaugagugccucaaaggaaauaaaauccuuuuuguggacacaaucuuugaggagggaauuaucugguuacugcuccaacaucaaacuacagguggugaaagaugcccaggcucuuuuacauggacuugacuucuccgaagucaguaauguucaacgguugaugcgcaaggagagaagggaugacaaugauuugaaacgguugagggaccuaaaucaagcggucaacaaucuuguugaauuaaaaucaacucaacaaaagaguauacugagaguugggacucuaaccucagaugacuuauuaaucuuagccgcugaucuagagaaguuaaagucaaaggugaucagaacagaaaggccauuaagugcaggugucuauaugggcaaccuaagcucacagcaacuugaccaaagaagagcucuccugaauaugauaggaaugaguggugguaaucaaggggcucgggcugggagagauggaguggugagaguuugggaugugaaaaaugcagaguugcucaauaaucaguucgggaccaugccaagucugacacuggcaugucugacaaaacaggggcagguugacuugaaugaugcaguacaagcauugacagauuuggguuugaucuacacagcaaaguaucccaacacuucagacuuagacaggcugacucaaagucaucccauccuaaauaugauugacaccaagaaaagcucuuugaauaucucagguuauaauuuuagcuugggugcagcugugaaggcaggagcuugcaugcuggaugguggcaauauguuggagacaaucaaggugucaccucagacaauggaugguauccucaaauccauuuuaaaggucaagaaggcucuuggaauguucauuucagacaccccuggugaaaggaauccuuaugaaaacauacucuacaagauuuguuugucaggagauggauggccauauauugcaucaagaaccucaauaacaggaagggccugggaaaacacugucguugaucuggaaucagaugggaagccacagaaagcugacagcaacaauuccaguaaaucccugcagucggcaggguuuaccgcugggcuuaccuauucucagcugaugacccucaaggaugcaaugcugcaacuugacccaaaugcuaagaccuggauggacauugaaggaagaccugaagauccaguggaaauugcccucuaucaaccaaguucaggcugcuacauacacuucuuccgugaaccuacugauuuaaagcaguucaagcaggaugcuaaguacucacaugggauugaugucacagaccucuucgcuacacaaccgggcuugaccagugcugucauugaugcacucccccggaauauggucauuaccugucagggguccgaugacauaaggaaacuccuugaaucacaaggaagaaaagacauuaaacuaauugauauugcccucagcaaaacugauuccaggaaguaugaaaaugcagucugggaccaguauaaagacuuaugccacaugcacacaggugucguuguugaaaagaagaaaagaggcgguaaagaggaaauaaccccucacugugcacuaauggacugcaucauguuugaugcagcagugucaggaggacugaacacaucgguuuugagagcagugcugcccagagauaugguguucagaacaucgacaccuagagucguucuguaaggacuaguaauaaggaaacuguaugaaugucugugggcaggaagugaagagauccuucuguaaagguuuuuggaauuaugucugcugaauaauaaacuuuuuugaaauaauaaaucugguagaaaaaugagaucuaaaaaaaaaaaaaaaaaaaaaaaaaaaaaaaaaaaaaaaaaaaaaaaaaaaaaaaaaaaaaaaaugcaucccccccccccccccccccccccccccccccaaaggcucuuuucagagccaccagaauu

SEQ ID NO: 10351 - RNA, 2050 nt, Artificial Sequence
  mRNA product Design b-4 comprising derived and/or modified sequence from LASV(LP;Clade I)__AAF86702__NP (wt)
gggagagucccgcagucggcguccagcggcucugcuuguucgugugugugucguugcaggccuuauucaagcuuaccaugagcaacuccaaggaaaucaaaucauuccuuuggacucaguccuuacgaagggaacuaucugguuacuguucuaacauaaaguugcaaguugucaaagaugcucaggcucuccugcauggccuugacuuuucugaggucagcaaugugcagaggcugaugcgcaagcagaagagagaugaugcagaccuaaagcgacugagggaucugaaucaagcugucaacaaucuuguugaacugaagucaacucaacagaagaaugucuuaagggucggcaccuugaguucagaugaucuaauaacuuuggcagcggaccuggaaaaacucaaguccaaagucauaaggacagaaaggccuuugagcucagguguuuacauggggaauuuaagcucacaacagcuugaucaaaggagggcucucuugagcaugauugggaugucagguggaccucaaggaaauaggacagguggggauggugucgucaggguuugggacguaaaaaaugcagaauuacucaauaaccaauuuggaaccaugccaagccucaccuuggcgugccucaccaaacaagggcaaguggaccucaaugaugcugugcaagcuuuaacagauuuagguuugauuuacacagcaaaguacccgaacucuucagaucuagacaugcucacucagagucacccuauacuaggaaugguugacacaaaaaagaguucccugaacaucucagguuacaacuucagucugggggcugcaguuaaagcuggugcuugcaugcuugaugggggcaacauguuggaaacaauaaaagugucaccacaaacaauggacgguauuuugaaaucuauucugaaggucaaaagaucacugggaauguucauuucugacacuccuggugaaagaaacccauaugagaacauccucuauaagaucugccuuucaggugaagguuggccguauauugcaucaagaacaucaauuacugggagagcuugggaaaacacucuuguugauuuggaaucugacaacaaaccaccgaaacuaaauagcgcugguuccaauaaaagcuugcaggcugcaggucuaaaugcuggguugaccuauucucaacugaugacacuaaaagauuguauguuacaguuggacccaaguagcaaaacauggauagauauugagggcaggccugaagacccaguggagauugcuuuguuucaaccaagcucugguuguuacauacacuuuuuuagagaaccuacugaccuuaagcaauucaaacaggaugcuaaguacucacaugggauagauguuacagaucuuuuuuccacacaacccgggcugacaagugcugucauagaggcacuuccccgcaauaugguguugaccugccaggggucagaugacaucaaaaagcuguuggagucucaagggagaagagacaucaaauugauugauauuucuuugagcaaagcagauucaaggaaguuugaaaaugcugugugggaccaauacaaagacuugugucacaugcacacgggaguagucguugagaagaaaaagagggguggaaaagaggaaaucaccccacauugcgcuuuacuggacugcaucauguuugaugcagcuacuacugguaguuugaacaucacaacacugagggcaguacuucccagagacauggucuucaggaccagcaccccuaaagucguucuguaaggacuaguaauaaggaaacuguaugaaugucugugggcaggaagugaagagauccuucuguaaagguuuuuggaauuaugucugcugaauaauaaacuuuuuugaaauaauaaaucugguagaaaaaugagaucuaaaaaaaaaaaaaaaaaaaaaaaaaaaaaaaaaaaaaaaaaaaaaaaaaaaaaaaaaaaaaaaaugcaucccccccccccccccccccccccccccccccaaaggcucuuuucagagccaccagaauu

SEQ ID NO: 10352 - RNA, 2050 nt, Artificial Sequence
  mRNA product Design b-4 comprising derived and/or modified sequence from LASV(803213;Clade II)__AAF86704__NP (wt)
gggagagucccgcagucggcguccagcggcucugcuuguucgugugugugucguugcaggccuuauucaagcuuaccaugagugcuuccaaggaggugaaaucauuccuuuggacacagucauugaggagagagcuuucagguuauuguucuaacauaaagcuucaaguuguuaaggaugcccaggcccuccuucacggccuugacuucucugaggucaacaaugugcaacgucuaaugcgcaaacagaaaagagaugauggugauuuaaaacgucuuagagaccugaaucaggcagucaacaaccuuguugaacucaaaucaacacaacaaaagagcauuuugagaguuggaacacugaccucagaugacuugcugacauuggcagcugacuuagagaaacugaagucaaaagucaucagaacagaaagaccacuaagcucggguguguacauggggaauuuaaguacacagcagcuugagcagagaagggcauugcugaacaugauuggcaugguugguggagcacagggcacccaaccuggaagagacggaguuguuagggugugggaugucaaaaauccagaucucuuaaacaaccaguucggcaccaugccuaguuugacauuagcaugucuuacuaaacagggucaaguugaccuaaaugaugcuguccuagcacugacggacuugggacugauauacacagcuaaguacccuaacaguuccgaccuggacaggcuuucccaaagucauccgauacugaacaugguggacacuaagaagagcuccuugaacauuucugguuacaauuuuagcuugggagcugcaguaaaggcuggggccuguaugcucgaugggggcaacauguuggaaaccauuaagguuacgccucagacaauggaugguaucuugaaguccauuuuaaaggugaaaagaucuuugggaauguuugucucagauacaccuggugagaggaacccuuaugagaacauacuuuauaaaaucugucucucuggugauggcuggcccuacauagccucaagaaccuccauugugggcagggcuugggagaauacuacuguggaucucgagucagaugggaagccacaaaaagugggaacugcuggguccaauaagucuuugcaguccgcaggguuuccaacaggguugacuuauucacagcugaugacucuuaaagacucaaugaugcagcuugacccaagugccaaaacuuggauagacauugaaggucguccagaagacccuguggagauagcucuuuaucaaccuaugucaggcuguuacauacauuucuuuagagaaccaacagaucugaaacaguucaagcaagacgccaaguauucucaugggauugauguggcagaucuuuucccugcucaaccugguuugacuagugcaguuauugaagcucuuccucgcaauaugguguugacuugccaagguucagaugauaucaagaaacucuuagacucucaaggaaggagggacauaaagcuuauugauauuucauuaagcaagguugacucuaggaaguuugaaaaugcuguuugggaccagugcaaagacuugugccacaugcacacuggagugguuguugagaagaagaaaagaggaggcaaagaagaaaucaccccacauugugcccugauggauugcauaauguuugaugcagcugugucaggagggcucaacauaccaguuuuaagagcuguucuucccagagacaugguauuuagaaccucaagccccaaggucguccuguaaggacuaguaauaaggaaacuguaugaaugucugugggcaggaagugaagagauccuucuguaaagguuuuuggaauuaugucugcugaauaauaaacuuuuuugaaauaauaaaucugguagaaaaaugagaucuaaaaaaaaaaaaaaaaaaaaaaaaaaaaaaaaaaaaaaaaaaaaaaaaaaaaaaaaaaaaaaaaugcaucccccccccccccccccccccccccccccccaaaggcucuuuucagagccaccagaauu

SEQ ID NO: 10353 - RNA, 2053 nt, Artificial Sequence
  mRNA product Design b-4 comprising derived and/or modified sequence from LASV(GA391;Clade III)__CAA36646__NP (wt)
gggagagucccgcagucggcguccagcggcucugcuuguucgugugugugucguugcaggccuuauucaagcuuaccaugagugcuuccaaggaagugaggucauucuuguggacucaaucccuaagaagggaacuaucuggcuacuguuccaacauaaaguugcagguaguuaaagacgcucaagcucuccuucauggucuugacuucuccgaggucaguaauguucagagauugaugcgcaagcagaaaagagaugauggcgaccuaaaacgacugagagaucucaaucaagcagucaacaaucuuguugagcucaaauccacacagcagaaaagugucuuaagaguuggaaccuuaaguucagacgaucuacuaauccuggccgcugauuuagaaaaacugaaaucaaaagucaccagaacagaaaggccuuugaguucaggaguuuauauggggaauuugaguucacaacagcuugaucaaaggagagcccuuuugaacaugauuggcaugacuggaguaaguggagggggaaagggugccagugauggcauugugagaguuugggaugucaaaaaugcagaguuacucaacaaucaguucggaacaaugccaagccuaacuuuagcaugccugaccaaacaggggcaaguggaccugaaugaugccguucaagcuuugacagauuuagggcugauuuacacagccaaauaccccaacucaucugaucucgacagauugucucagagucauccaauucugaauaugauugacacuaagaaaaguucacucaacaucucugguuacaauuucaguuugggugcugcugucaaagcaggggccugcaugcuugauggugguaacauguuagagacuauuaagguuucaccucagaccauggaugguaucuugaagucaaucuugaaaguuaagaagagucugggaauguuuguaucagacacaccgggugaaaggaacccuuaugagaacauccuauacaagaucugucucucaggagacggauggcccuauauugcaucaaggaccucgauugugggaagagcaugggaaaauacugugguggaccuugagcaagacaacaagccccagaaaauuggaaaugggggguccaacaagucauuacagucugcaggcuuugcugcaggauuaacuuacucucaguugaugacucucaaagauuucaagugcuucaacuugauucccaacgcaaaaaccuggauggauauugaaggaagaccagaagacccaguugagauagcccuuuaucaaccgagcucggguugcuauguacauuucuuuagggagccaacagauuugaagcaauucaaacaagaugcaaaguauucacaugguauugaugugacugauuuguuugcugcccaaccuggguuaaccagugcagugauagaagcccuuccucggaacauggucaucacuugccaaggaucagaggauaucagaaaacuccuugagucacaagggaggagagacauaaaacugauugacaucacucuuaguaaagcagauucaagaaaguuugagaaugcuguuugggaucaauucaaggaucuaugucacaugcacacugggguaguuguggagaaaaagaagagaggugguaaagaggaaauaacuccucauugugcacugauggauugcauuauguuugaugcagcaguuucaggaggacuugaugcaaaaguccugagaguugugcucccuagagacaugguguucagaacuucaacaccuaaagucguccuguagggacuaguaauaaggaaacuguaugaaugucugugggcaggaagugaagagauccuucuguaaagguuuuuggaauuaugucugcugaauaauaaacuuuuuugaaauaauaaaucugguagaaaaaugagaucuaaaaaaaaaaaaaaaaaaaaaaaaaaaaaaaaaaaaaaaaaaaaaaaaaaaaaaaaaaaaaaaaugcaucccccccccccccccccccccccccccccccaaaggcucuuuucagagccaccagaauu

SEQ ID NO: 10354 - RNA, 2050 nt, Artificial Sequence
  mRNA product Design b-4 comprising derived and/or modified sequence from LASV(AV;Clade V)__CCA30315__NP (wt)
gggagagucccgcagucggcguccagcggcucugcuuguucgugugugugucguugcaggccuuauucaagcuuaccaugagugccuccaaagaagugaaaucuuucuuauggacacaaucucugaggagggaguugucggguuacuguuccaauaucaaacuucaaguggugaaggacgcucaagcucucuugcaugggcuugacuucucugaggucagcaauguccagcggcugaugcgcaaacaaaggagagaugauagugaccuaaagcgucuuagggaucugaaucaagcugucaacaaucuuguugagcugaaaucgacacaacagaaaagugugcugagaguugggacccuaaguucggacgauuuacugacucuggcggcugauuuagaaaagcugaaaucaaaaguuacaagaacagaaaggcccuugaguucaggugucuacaugggaaaccuaaguucacagcagcucgaucagaggagggcacuucuaaauuugauugggaugacaaacggcagucaggggucacaggcugggagagauggagugguaagagucugggaugugaagaaugcagaauuguugaacaaucaauuugggacaaugccgagccugacauuagcaugucugacaaagcagggacaaguugacuuaaaugaugugguacaagcacucacagaucugggcuugauuuauacagcuaaauauccuaacacaucagauuuagauagguuaacucaaagucaucccauuuuaaacaugauugacaccaagaagagcucccugaacaucucaggcuacaauuuuagucugggugccgcagugaaagcaggugccugcaugcuggaugguggcaacauguuagaaacaaucaagguuucgccucaaucaauggauggcauuuuaaaauccaucuugaaggucaagagggcucuugggauguucgucucagauacuccgggugagagaaaccccuaugaaaacauacucuacaaaaucugcuuaucaggugacggguggccauacauugcaucuaggacaucaauaguaggaagggcuugggaaaacacuguaguggaccuugaaacagaugggaaaccacagaaaauuggcagugguaacuccaacaaaucucuccaaucugcaggcuucucggcuggacuaacuuacucccaacuuaugacccuuaaagaugcaauguugcagcuugacccaaaugccaagacguggauggacauagaagggaggccagaggacccgguggaaguugcucucuaucagccuaucucuggguguuauauacacuuuuucagagagcccacugaucucaaacaauuuaaacaagaugcaaaauauucucauggaauugacaucgcagaucuguuugcugcacaaccaggucugaccagugcuguuauugaggcgcucccccggaauaugguuaucacuugccaaggguccgaagacauaaagaagcuucuugaaucacaagggagaaaggauauaaaacugauugacauugcucuuaguaagauugauucaagaaaguuugaaaaugcuguuugggaucaauauaaagauuugugucacaugcacacagguguuguuguugagaagaagaagagagguggcaaagaagagaucaccccucacugugcauugauggauugcaucauguuugaugcugcugucucaggaggguugaacacacuggugcucagagcugugcuacccagagacaugguguuuagaacaucaacaccaagagucguccuguaaggacuaguaauaaggaaacuguaugaaugucugugggcaggaagugaagagauccuucuguaaagguuuuuggaauuaugucugcugaauaauaaacuuuuuugaaauaauaaaucugguagaaaaaugagaucuaaaaaaaaaaaaaaaaaaaaaaaaaaaaaaaaaaaaaaaaaaaaaaaaaaaaaaaaaaaaaaaaugcaucccccccccccccccccccccccccccccccaaaggcucuuuucagagccaccagaauu

SEQ ID NO: 10355 - RNA, 2050 nt, Artificial Sequence
  mRNA product Design b-4 comprising derived and/or modified sequence from LASV(Togo/2016/7082;Clade VI)__AMR44578__NP (wt)
gggagagucccgcagucggcguccagcggcucugcuuguucgugugugugucguugcaggccuuauucaagcuuaccaugaguaacucuaaagaggugaagucuuuucucuggacucagucucugaggagagagcugucagguuacugcucuaacaucaaacuccagguggucaaggaugcucaggccuuauuacaugggcuugauuucucugaagugagcaauguucagaggcugaugcgaaaacagaagagggaugauggugaccucaagaggcucagagaccugaaucaagcgguaaauaaucuuguugaacuaaaaucaguucaacaaaaaaguauauugagaguuggcacccugaccucugaugacuuacuaacacuugcugcugaccuagaaaaacuaaagucuaaaguaacuaggacugaaagaccuuugaguucaggaguuuauaugggaaaccucagcucucagcaacuugaccagaggagagcccuccugagcaugauagggaugaguggugggaaccagaacagccaacccaaaggagaugguguugugaggguuugggaugugaaaaaugcugaccugcugaacaaccaguuuggaacgaugcccagucuuacauuagcaugcuuaacaaagcagggacaaguggauuugaaugaugcuguucaggcacugacugaucuaggguugauuuacacagcuaaauacccgaacucaucugaccuagacagacuuucacaaagccauccaauccugaacaugaucgauaccaagaagagcucauugaacaucucuggcuacaauuuuaguuuaggggccgcaaucaagacuggggcaugcaugcuugaugggggcaacaugcuggagacaaucaaggucacuccccaaaccauggaugggauuuugaaauccauuuuaaaggugaagaggagucuugggauguuuauuucugauacaccuggagaaaggaauccuuaugaaaacauucuuuauaaaaucugucuuucaggagacggguggccuuacauagccucacgaacugccaucauugguagagcaugggaaaacacugugguugauuuggagucugauagcaagccacaaaagauugggagcaauggaucuaacaaaucauugcaaucugcaggcuuugccccuggacugacauacucucagcucaugacccucaaagacucaauguugcaauuagauccuaaugcaaagacuuggauagacauugaagguaggccggaagacccuguugaggucgccuuguuucagccuaucucagguugcuacauacacuucuuuagagaaccaacagaccugaagcaauuuaaacaagaugcaaaguacucacaugggauagaugucaccgauuuguuugcugcucagccagguuugaccagugcugucauugaggcacuucccaggaauauggugcugaccugucagggaucagacgacaucaaaaaauuguuggauucacaggggagaagggacauuaaacucauugauguuucucucaauaaaauugacucaagaaaguuugagaaugcuguaugggaucaauacaaagaucugugucacaugcauacagggguagucguggagaagaaaaagaagggagggaaagaagaaauaaccccucauugugccuugcuagacugcaucauguuugaugcagccguguccggaggccuaaaugccacaguuuugagagcuguucuaccuagagacaugguguuuagaacgucaucaccuaaagucguucuguaaggacuaguaauaaggaaacuguaugaaugucugugggcaggaagugaagagauccuucuguaaagguuuuuggaauuaugucugcugaauaauaaacuuuuuugaaauaauaaaucugguagaaaaaugagaucuaaaaaaaaaaaaaaaaaaaaaaaaaaaaaaaaaaaaaaaaaaaaaaaaaaaaaaaaaaaaaaaaugcaucccccccccccccccccccccccccccccccaaaggcucuuuucagagccaccagaauu

SEQ ID NO: 10356 - RNA, 2050 nt, Artificial Sequence
  mRNA product Design b-4 comprising derived and/or modified sequence from LASV(KAK-428;Clade n.d. (VII))__ANH09741__NP (wt)
gggagagucccgcagucggcguccagcggcucugcuuguucgugugugugucguugcaggccuuauucaagcuuaccaugagcaacucaaaggaggugaaaucuuuccuuuggacucagucucucagaagagaacugucugguuauugcaccaacauaaagcuucaaguugucaaagaugcucaggcacuauugcauggccuugacuucucugaaguuagcaauguccaacgucucaugcguaaacagaaaagagaugauaaugauuuaaagaggcuuagagacuugaaucaggccgucaacaaucuaguggaacuaaaaucagugcaacaaaagagcguccuuaaaguugggacacugaauucagaugaucuccugacauuagcugcagaucuggagaagcucaaaucuaaggugguuagaacugaaaggccucugagcucugguguuuacaugggcaaucuuaguucacaacagcuugaccaaaggagagcacuucuaaacaugauuggaauggcuggcgguagucagggaaaccaaccuagccgagaugguguagucagaguaugggaugucaaaaaugcagaccuacucaacaaccaauuuggcacaaugccaagucuuacauuagcaugucugacaaagcagggccaaguugacuuaaaugauguuguguuggcucugacugauuugggccuuauauacacagccaaauacccuaauucaucagauuuagauaggcugucucagaaccacccaguucugaacaugauugaugucaacaagaguucccuaaacauuucgggcuacaauuucagccugggggcagcagugaaagcuggagcuugcaugcuugauggcgggaacaugcuugagacaaucaagaucuccccucaaacaguggacggcauccugaaaucgaucuugaagguuaaaagggcuuuagggauguuugugucagacaccccuggugaaaggaacccuuaugagaacauacuguauaagguaugucuuucagggaauggguggccauacauagcuucaagaacaucaauuguugggagagcaugggaaaauacugugguagaucuugagucaaacaaaaaucagccuaagguugggaacaauggauccaacaagaugcugcagucuucgggauuugcuacugguuugacuuauucucaguugaugacuuugagggauucaauguuacaguuggacccaacugcaaagaccuggauugacauugaggguagaccugaagacccuguugaguuggcccucuuucagcccaguucaggguguuacauacauuucuuuagagagccuacugaccuaaagcaauucaaacaggaugcaaaauacucucaugggauugaugugaaugauuuguucucggcacaaccugguuuaaccagugcuguuuuggaagcacuaccacguaauauggugcugacuugucaaggcucugaugacauuagaaagcuuuuggacucacaggacaggaaagauauaaagcuaauugacaucucauugagcaaggcugaugcaaggaaguucgagaacgaugugugggaucaauuuaaggauuuaugccauaugcacaccgggauaguugucgagaagaagaagaaaggagggaaacaggaaaugacaccacacugugcauugcuagauuguaucauguuugaugcagcugucucuggggggcuuaauguccccacuuugagagcagugcuucccaccgacauggucuucagaacaauaacaaccaaagucguccuguaaggacuaguaauaaggaaacuguaugaaugucugugggcaggaagugaagagauccuucuguaaagguuuuuggaauuaugucugcugaauaauaaacuuuuuugaaauaauaaaucugguagaaaaaugagaucuaaaaaaaaaaaaaaaaaaaaaaaaaaaaaaaaaaaaaaaaaaaaaaaaaaaaaaaaaaaaaaaaugcaucccccccccccccccccccccccccccccccaaaggcucuuuucagagccaccagaauu

SEQ ID NO: 10357 - RNA, 2050 nt, Artificial Sequence; identical to SEQ ID NO: 10351
  mRNA product Design b-4 comprising derived and/or modified sequence from LASV(Pinneo-NIG-1969;Clade I)__AIT17837__NP (wt)

SEQ ID NO: 10358 - RNA, 2050 nt, Artificial Sequence
  mRNA product Design b-4 comprising derived and/or modified sequence from LASV(ISTH0009-NIG-2011;Clade II)__AIT17405__NP (wt)
gggagagucccgcagucggcguccagcggcucugcuuguucgugugugugucguugcaggccuuauucaagcuuaccaugaguguuucuaaggaagugaagucauuucucuggacacagucauugaggagggagcuuucaggcuauugcuccaacauaaaacuucaaguuguuaaggaugcucaggcucuucuucauggucuugacuuuucugaagucagcaaugugcaacgcuuaaugcgcaagcaaaaaagggaugauagugaucugaaacgccucagagauuugaaucaggcugucaacaaucuuguagaacucaaaucgacacaacaaaagaguaucuugagaguugggaccuugaccucagaugaccugcugacauuggcagcugacuuagagaaacuaaagucgaaggucauuagaacagaaaggccucuaagcucagguguuuauauggggaauuugagcacacagcagcuugagcagagaagggcauugcugaacaugauaggcaugguugguggggcucagggcacccaaccuggaagagacggaguuguuagagugugggauguuaagaauccggaucuuuugaacaaccaguucggcaccaugccuagucugacauuagcaugucucaccaaacaaggucaaguugauuugaaugaugccgucuuagcacuaacagaccugggucuaauauacacagcuaaguacccaaauagcuccgaccuagauagacuuucccaaagccauccuauacugaauaugguggacauuaagaaaagcucccugaacauuucugguuacaacuucagcuuaggagcugcagugaaggcuggggccugcaugcucgauggggggaacauguuggagaccaucaagguuacaccucagacaauggauggcaucuugaagucuauuuuaaaaguaaaaagaucuuugggaauguuuguuucagauacaccuggugagagaaacccuuaugagaacauacuuuacaagaucugucuuuccggugacggcuggcccuacauagcuucaaggacuucuauuguggguagggcuugggagaauaccacuguggaucucgagucagauggaaaaccgcaaaaagugggcucugcuggguccaacaaguccuuacagucagcgggauucccaacagggcugaccuauucucaguugaugacacuuaaagacucaaugaugcagcuugacccaagugccaaaaccuggauagacauugaaggucguccagaagacccuguggaaauagcucuuuaccaaccuaugucgggcuguuacauacacuucuucagagagccaacagacuuaaaacaguucaaacaggaugccaaauauucucaugggauugauguggcagaucuuuucccugcucaaccugguuugaccagcgcaguuauugaggcccucccucgcaauauggugcugaccugucaagguucagaugacauuaagagacucuuagacucccaaggaagaagggacauaaagcuuauugacauugcacugagcaaggcugacucuaggagauuugaaaaugcuguuugggaucaguguaaagaccuaugccauaugcauacuggagugguugucgaaaagaagaaaagaggaggcaaagaagaaauaacuccgcacugugcuuuaauggacugcauaauguaugaugcagcugugucaggagggcucaauauaccaguuuuaagagcaguucuucccagagacaugguguuuagaaccucaagccccaaggucguccuguaaggacuaguaauaaggaaacuguaugaaugucugugggcaggaagugaagagauccuucuguaaagguuuuuggaauuaugucugcugaauaauaaacuuuuuugaaauaauaaaucugguagaaaaaugagaucuaaaaaaaaaaaaaaaaaaaaaaaaaaaaaaaaaaaaaaaaaaaaaaaaaaaaaaaaaaaaaaaaugcaucccccccccccccccccccccccccccccccaaaggcucuuuucagagccaccagaauu

SEQ ID NO: 10359 - RNA, 2050 nt, Artificial Sequence
  mRNA product Design b-4 comprising derived and/or modified sequence from LASV(ISTH2010-NIG-2012;Clade II)__AIT17483__NP (wt)
gggagagucccgcagucggcguccagcggcucugcuuguucgugugugugucguugcaggccuuauucaagcuuaccaugagugcuucuaaggaagugaagucauuucucuggacacagucuuugaggagggagcuuucagguuauugcuccaauauaaaacuucaaguuguuaaggaugcucaggcucuccuucauggucuugacuuuucugaagucagcaaugugcagcgcuuaaugcgcaaacaaaagagggaugauagugaucugaaacgucucagagauuugaaucaagcugucaacaaucuuguagaacuuaaaucgacacaacaaaagaguaucuugagaguuggaaccuugaccucagaugacuugcugacacuggcagcugacuuagagaaacugaagucgaaggucauuagaacagaaaggccacuaagcucagguguuuauauggggaauuugaguacacagcagcuugagcagagaagagcauugcugaacuugauaggcaugguugguggggcucagggcacccaaccuggaagagacggaguuguuaggguuugggauguuaaaaauccggaccuuuugaacaaccaguucggcaccaugccuagucugacauuggcaugucucaccaaacaaggucaaguugauuugaaugaugccgucuuagcacugacagaccugggccuaauauacacagccaaguacccaaauagcuccgaccuggacagacuuucucaaagccauccuauauugaauaugguggauacuaagaagagcuccuugaacauuucugguuucaacuucagcuuaggagcugcagugaaagcuggagccuguaugcuugauggggggaacauguuggagaccaucaagguuacaccucagacaauggaugguaucuugaagucuauuuuaaagguaaaaaaaucuuugggaauguuuguuucggacacaccuggugagaggaacccuuaugagaauauacuuuacaagaucugucuuuccggugacggauggccuuacauagcuucaaggacuucuauugugggaagggcuugggagaauaccacuguggaucucgagucagauggaaaaccgcauaaagugggcacugcuggguccaacaagucucugcagucagcgggguucccaacagggcugacuuauucucaguugaugacacuuaaagacucaaugaugcagcuugacccaagugccaaaaccuggauagacauugaaggucguccagaagacccuguggagauagcucuuuaccaaccuaugucagguuguuacauacacuucuucagagaaccaacagacuugaaacaguucaagcaagaugccaaauauucucaugggauugauguggcagaucuuuucccugcucaaccugguuugaccagcgcagucauugaagcccucccccgcaauauggugcuaaccugucaagguucagaugauauuaagagacuccuagacucccaaggaagaagggauauaaagcuuauugacauugcacugagcaaggcugacucuaggagauuugaaaaugcuguuugggaucagugcaaagaucuaugccauaugcacacuggagugguugucgaaaagaagaaaagaggaggcaaagaagaaaucaccccgcacugugcuuuaauggacugcauaauguaugaugcagcugugucaggaggacucaacauaccaguguugagggcaguucuccccagggacaugguguuuagaaccucaagucccaaggucguccuguaaggacuaguaauaaggaaacuguaugaaugucugugggcaggaagugaagagauccuucuguaaagguuuuuggaauuaugucugcugaauaauaaacuuuuuugaaauaauaaaucugguagaaaaaugagaucuaaaaaaaaaaaaaaaaaaaaaaaaaaaaaaaaaaaaaaaaaaaaaaaaaaaaaaaaaaaaaaaaugcaucccccccccccccccccccccccccccccccaaaggcucuuuucagagccaccagaauu

SEQ ID NO: 10360 - RNA, 2050 nt, Artificial Sequence
  mRNA product Design b-4 comprising derived and/or modified sequence from LASV(Lassa virus/H.sapiens-wt/NGA/2015/ISTH_0543;Clade II)__AVO03640__NP (wt)
gggagagucccgcagucggcguccagcggcucugcuuguucgugugugugucguugcaggccuuauucaagcuuaccaugagugcuucuaaggaagugaagucauuucucuggacacagucauugaggagggagcuuucaggcuauugcuccaacauaaaacuucaaguuguuaaggaugcucaggcucuccuucauggucuugacuuuucugaagucagcaaugugcagcgcuuaaugcgcaagcaaaaaagggaugauagugaucugaaacgucucagagauuugaaucaggcugucaacaaccuuguagaacucaaaucgacacaacagaagaguaucuugagaguugggaccuugaccucagacgaccugcugacauuggcagcugacuuagagaaacuaaagucgaaggucauuagaacagaaaggccucuaagcucagguguuuauauggggaauuugaguacacagcagcuugagcagagaagagcauugcugaacaugauaggcaugguugguggggcucaaggcacccaaccuggaagagauggaguuguuagggugugggauguuaagaauccggaucuuuugaacaaccaguucggcaccaugccuagucugacauuagcaugucucaccaaacaaggucaaguugauuugaaugaugccgucuuagcacuaacagaccugggucuaauauacacagcuaaguacccaaauaguuccgaccuagauagacuuucccaaagccauccuauacugaauaugguggacacuaagaaaagcucccugaacauuucuggcuauaacuucagcuuaggagcugcagugaaggcuggggccuguaugcucgauggggggaacauguuggagaccaucaagguuacaccucagacaauggauggcaucuugaagucuauuuuaaaaguaaaaaaaucuuugggaauguuuguuucagauacaccuggugagagaaacccuuaugagaacauacuuuacaagaucugucuuuccggugacggcuggcccuacauagcuucaaggacuucuauuguggguagggcuugggagaacacuacuguggaucucgagucagauggaaaaccgcaaaaagugggcucugcugggucuaacaaguccuuacagucagcgggauucccaacagggcugaccuauucucaguugaugacacuuaaagacucaaugaugcagcuugacccaagugccaaaaccuggauagacauugaaggucguccagaagacccuguggaaauagcucuuuaccaaccuaugucgggcuguuacauacacuucuucagagaaccaacagacuuaaaacaguucaagcaagaugccaaauauucucaugggauugauguggcagaucuuuucccugcucaaccugguuugaccagcgcaguuauugaagcccucccucgcaauauggugcugaccugucaagguucagaugauauuaagagacucuuagauucccaaggaagaaaggacauaaagcuuaucgacauugcacugagcaaggcugacucuaggagauuugaaaaugcuguuugggaucaguguaaagaccuaugccauaugcauacuggagugguugucgaaaagaagaaaagaggaggcaaagaagaaauaacuccgcauugugcuuuaauggauugcauaauguaugaugcagcugugucaggaggacucaauauaccgguuuuaagggcaguucuucccagagacaugguguuuagaaccucaagccccaaggucguccuguaaggacuaguaauaaggaaacuguaugaaugucugugggcaggaagugaagagauccuucuguaaagguuuuuggaauuaugucugcugaauaauaaacuuuuuugaaauaauaaaucugguagaaaaaugagaucuaaaaaaaaaaaaaaaaaaaaaaaaaaaaaaaaaaaaaaaaaaaaaaaaaaaaaaaaaaaaaaaaugcaucccccccccccccccccccccccccccccccaaaggcucuuuucagagccaccagaauu

SEQ ID NO: 10361 - RNA, 2050 nt, Artificial Sequence
  mRNA product Design b-4 comprising derived and/or modified sequence from LASV(Lassa virus/H.sapiens-wt/NGA/2016/ISTH_0009;Clade II)__AVO03572__NP (wt)
gggagagucccgcagucggcguccagcggcucugcuuguucgugugugugucguugcaggccuuauucaagcuuaccaugagugcuucuaaggaaguaaagucauuucucuggacacagucauugaggagggagcuuucaggcuauugcuccaauauaaaacuucaaguuguuaaggaugcucaggcucuccuucauggucuugacuuuucugaagucagcaaugugcagcgcuuaaugcgcaagcaaaaaagggaugauagugaucugaaacgucucagagauuugaaucaggcugucaacaaucuuguagaacucaaaucgacacaacaaaagagcaucuugagaguugggaccuugaccucagaugaccugcugacauuggcagcugacuuagagaaacuaaagucgaaagucauuagaacagaaaggccucuaagcucggguguuuauauggggaauuugaguacacagcagcuugagcagagaagagcauugcugaacaugauaggcaugguugguggggcucagggcacccaaccuggaagagacggaguuguuagggugugggauguuaagaauccggaucucuugaacaaccaguucggcaccaugccuagucugacauuagcaugucucaccaaacaaggucaaguugauuugaaugaugcugucuuagcacuaacagaccugggucuaauauacacagcuaaguacccaaauagcuccgaccuagauagacuuucccaaagccauccuauacugaauaugguggauacuaagaaaagcucccugaacauuucugguuacaacuucagcuuaggagcugcagugaaggcuggggccugcaugcucgauggggggaacauguuggagaccaucaagguuacaccucagacaauggauggcaucuugaagucuauuuugaaagugaaaaaaucucugggaauguuuguuucagacacaccuggugagagaaacccuuaugagaacauacuuuacaagaucugucuuuccggugacggcuggcccuacauagcuucaaggacuucuauuguggguagggcuugggagaauacuacuguggaucucgagucagaugggaaaccgcaaaaagugggcucugcuggguccaacaaguccuuacagucagcgggauucccaacagggcugaccuauucucaguugaugacacuuaaagacucaaugaugcagcuugacccaagugccaaaaccuggauagacauugaaggucguccagaggacccuguggaaauagcucuuuaccaacccaugucgggcuguuacauacacuucuucagagaaccaacagacuuaaaacaguucaagcaagaugccaaauauucucaugggauugauguggcagaccuuuucccugcucaaccugguuugaccagcgcgguuauugaagcccucccucgcaauauggugcuaaccugucaagguucagaugauauuaagagacucuuagacucccaaggaagaagggacauaaagcuuauugacauugcacugagcaaggcugacucuaggagauuugagaaugcuguuugggaucaguguaaagaccuaugccauaugcauacuggagugguugucgaaaagaagaaaagaggaggcaaagaagaaauaacuccgcauugugcuuuaauggacugcauaauguaugaugcagcugugucaggaggacuuaauauaccaguuuuaagagcaguucuucccagagacaugguguuuagaaccucaagccccaaggucguccuguaaggacuaguaauaaggaaacuguaugaaugucugugggcaggaagugaagagauccuucuguaaagguuuuuggaauuaugucugcugaauaauaaacuuuuuugaaauaauaaaucugguagaaaaaugagaucuaaaaaaaaaaaaaaaaaaaaaaaaaaaaaaaaaaaaaaaaaaaaaaaaaaaaaaaaaaaaaaaaugcaucccccccccccccccccccccccccccccccaaaggcucuuuucagagccaccagaauu

SEQ ID NO: 10362 - RNA, 2050 nt, Artificial Sequence
  mRNA product Design b-4 comprising derived and/or modified sequence from LASV(Lassa virus/H.sapiens-wt/NGA/2016/ISTH_0017;Clade II)__AVO03568__NP (wt)
gggagagucccgcagucggcguccagcggcucugcuuguucgugugugugucguugcaggccuuauucaagcuuaccaugagugcuucuaaggaagugaagucauuccucuggacacagucauugaggagggagcuuucagguuauugcuccagcauaaaacuucaaguugucaaggaugcucaagcucuccuucauggucuugacuuuucugaagucagcaaugugcagcgcuuaaugcgcaaacaaaagagggaugauagcgaucugaaacgucucagagauuugaaucaggcugucaacaaucuuguagaacucaaaucgacacaacaaaagagcaucuugagaguugggacccugaccucagaugaccugcugacauuggcagcugacuuagagaaacugaagucaaaggucauuagaacagaaaggccacuaagcucagguguuuauauggggaauuugaguacacagcaacuugagcaaagaagagcauugcugaacaugauaggcauggcugguggggcucagggcacccaaccuggaagagacggaguuguuagggugugggauguuaagaauccggaucuuuugaacaaucaguucggcaccaugccuagucugacauuagcaugucucaccaaacagggucaaguugauuuaaaugaugcugucuuagcauuaacagaccugggucugauauacacagcuaaguauccaaauagcuccgaccuggacagacuuucucaaagccauccuauacugaauaugguggacacuaagaagagcuccuugaacauuucugguuacaacuucagcuugggagcugcagugaaagcuggagcuuguaugcuugauggggggaacauguuggagaccaucaagguuacaccucagacaauggauggcaucuugaagucuauuuuaaagguaaaaagaucuuugggaauguuuguuucagaugcaccuggugagaggaacccuuacgagaacauacuuuacaagaucugucuuucaggugacggcuggcccuacauagcuucaaggacuucuauuguggguagagcuugggagaauacuacuguggaucucgagucagaugggaaaccacaaaaagugggugcuacuggguccaacaaaucuuuacagucagcaggguuuccaacagggcugacuuauucucaguugaugacacuuaaagacucaaugaugcagcuugacccaagugccaaaaccuggauagacauugaaggucguccagaagacccuguggaaguggcucuuuaccaaccugugucgggcuguuacauacacuuuuuuagagaaccaacagauuuaaaacaguucaagcaagaugccaaauauucucaugggauugauguggcggaucuuuucccugcucaaccugguuugaccagcgcagucauugaggcccucccucgcaacaugguacugaccugucaagguucagaugauauuaagaaacucuuggacucccaaggaagaaaggacauaaagcuuauugacauugcgcugagcaaggccgauucuaggagauuugaaaaugcuguuugggaucagugcaaagaucuaugccauaugcauacuggagugguuguugaaaagaagaaaagaggaggcaaagaagaaauuaccccgcacugugcuuuaauggacugcauaauguaugaugcagcugugucuggaggacucaauaucccagucuuaagagcaguucuccccagagacaugguguuuagaaccucaagccccaaggucguccuguaaggacuaguaauaaggaaacuguaugaaugucugugggcaggaagugaagagauccuucuguaaagguuuuuggaauuaugucugcugaauaauaaacuuuuuugaaauaauaaaucugguagaaaaaugagaucuaaaaaaaaaaaaaaaaaaaaaaaaaaaaaaaaaaaaaaaaaaaaaaaaaaaaaaaaaaaaaaaaugcaucccccccccccccccccccccccccccccccaaaggcucuuuucagagccaccagaauu

SEQ ID NO: 10363 - RNA, 2050 nt, Artificial Sequence
  mRNA product Design b-4 comprising derived and/or modified sequence from LASV(Lassa virus/H.sapiens-wt/NGA/2018/ISTH_0959;Clade II)__AVV65100__NP (wt)
gggagagucccgcagucggcguccagcggcucugcuuguucgugugugugucguugcaggccuuauucaagcuuaccaugagugcuucuaaggaagugaagucauuucucuggacacagucuuugaggagggagcuuucagguuauugcuccaauauaaaacuucaaguuguuaaggaugcucaggcucuccuucauggucuugacuuuucugaagucagcaaugugcagcgcuuaaugcgcaaacaaaagagggaugauagugaucugaagcgucucagagauuugaaucaggcugucaacaaucuuguagaacuuaaaucgacacaacaaaagagcaucuugagaguugggacccugaccucagaugaccugcugacacuggcagcugacuuagagaaacuaaagucgaaggucauuagaacagaaaggccacuaagcucagguguuuauauggggaauuugaguacacagcagcuugagcagagaagggcauugcugaacuugauaggcaugguugguggggcucagggcacccagccuggaagagacggaguuguuaggguuugggauguuaagaauccggaccuucugaacaaccaguucggcaccaugccuagucugacauuggcaugucucaccaaacaaggucaaguugauuugaaugaugucgucuuagcacugacagaccugggccuaauauacacagccaaguacccaaauagcuccgaccuggacagacuuucccagagccauccuauacugaauaugguggacacaaagaagagcucuuugaacauuucugguuucaacuucagcuuaggagcugcaguaaaagcuggagcuuguaugcuugauggggggaacauguuagagaccaucaagguuacaccucagacaauggauggcaucuugaagucuauuuuaaagguaaaaaaaucuuugggaauguuuguuucggacacaccuggugagaggaacccuuaugagaauauacuuuacaagaucugucuuuccggugacggauggcccuauauagcuucaaggacuuccauuguggguagggcuugggagaauaccacuguggaucucgagucagauggaaaaccgcauaaaguaggcacugcuggguccaacaagucuuuacagucagcgggguucccaacagggcugacuuauucucaguugaugacacuuaaagacucaaugaugcagcuugacccaagugccaagaccuggauagacauugaaggucguccagaagacccuguggagauagcccucuaccaaccuaugucaggcuguuacauacacuucuucagagaaccaacagacuugaaacaauucaagcaagaugccaaauauucucaugggauugauguggcagaucuuuucccugcucaaccugguuugaccagcgcagucauugaagcccucccucgcaauauggugcuaaccugucaagguucagaugauauuaagagacucuuagacucccaaggaagaaaggauauaaagcuuauugacauugcacugagcaagacugacucuaggagauuugaaaaugcuguuugggaucaguguaaggaucuaugccauaugcacacuggagugguugucgaaaagaagaagagaggaggcaaagaagagaucaccccgcacugugcuuuaauggacugcauaauguaugaugcagcugugucaggaggacucaauauaccaguuuuaagggcaguucuccccagggacaugguguuuagaaccucaagucccaaggucguccuguaaggacuaguaauaaggaaacuguaugaaugucugugggcaggaagugaagagauccuucuguaaagguuuuuggaauuaugucugcugaauaauaaacuuuuuugaaauaauaaaucugguagaaaaaugagaucuaaaaaaaaaaaaaaaaaaaaaaaaaaaaaaaaaaaaaaaaaaaaaaaaaaaaaaaaaaaaaaaaugcaucccccccccccccccccccccccccccccccaaaggcucuuuucagagccaccagaauu

SEQ ID NO: 10364 - RNA, 2050 nt, Artificial Sequence
  mRNA product Design b-4 comprising derived and/or modified sequence from LASV(LASV003-NIG-2008;Clade II)__AIT17581__NP (wt)
gggagagucccgcagucggcguccagcggcucugcuuguucgugugugugucguugcaggccuuauucaagcuuaccaugagugcuuccaaggaagugaagucauuucucuggacacagucauugaggagggagcuuucagguuauugcuccagcauaaagcuucaaguugucaaggaugcucaggcucuucuucauggucuugacuuuucugaaguuagcaaugugcagcgcuuaaugcgcaaacaaaaaagggaugauagugaucugaaacgucucagagaucugaaucaggcugucaacaaucuuguggaacucaaaucaacacaacaaaagagugucuugagaguuggaaccuugaccucagaugaccugcugacauuggcagcugacuuagagaaacuaaagucgaaggucaucagaacagaaaggccacuaagcucagguguuuauauggggaauuugagugcacagcaacuugagcaaagaagaacauugcugaacaugauaggcaugguugguggggcucagggcacucaaccuggaagagacggaguuguuagggugugggauguuaagaauccagaucuuuugaacaaucaguucggcaccaugcccagucugacauuagcaugucucacuaaacaaggccagguugauuugaaugaugucgucuuagcacuaacagaccugggucuaauauacacagcuaaguacccuaauagcuccgaccuggacagacuuucccaaagucauccuauauugaguaugguggacaccaagaagagcuccuugaacauuucugguuacaacuucagcuuaggagcugcagugaaagcuggagcuuguaugcuugauggggggaacauguuggaaaccaucaagguuacaccucagacaauggauggcaucuugaagucuauuuuaaagguaaaaaaauccuugggaauguuuguuucagacacaccuggugagaggaacccuuaugagaacauacuuuacaagaucugucuuucuggugacgguuggcccuauauagcuucaaggacuucuauuguggguagagcuugggagaauacuacuguggaucucgagucagauggaaaaccacaaaaagugggaacugcuggguccaauaagucuuuacagucagcgggguuuccaacagggcugacuuacucucaguugaugacacuuaaagacucaaugaugcagcuugacccaagugccaaaaccuggauagacauugaaggucguccagaagacccuguggaaauagcucuauaccagcccaugucgggcugcuacauacacuucuucagagaaccaacagacuuaaaacaguucaagcaagaugccaaauauucucauggaauugauguaacagaucuuuucccugcucaaccuggauuaaccagugcagucauugaagcccucccucgcaauaugguacugaccugucaagguucagaugacaucaagcgacucuuggauucccaaggaaggagggacauaaagcuuauugacauugcauugagcaaggcugacucuagaagauuugaaaaugcuguuugggaucagugcaaagaucuaugccauaugcacacuggagugguugucgaaaagaagaaaagaggaggcaaagaagaaauuaccccacauugugcucuaauggacugcauaauguaugaugcagcugugucaggaggacucaauauaccaguuuugagagcaguccuccccagagacaugguguuuagaaccucaagccccaaggucguccuguaaggacuaguaauaaggaaacuguaugaaugucugugggcaggaagugaagagauccuucuguaaagguuuuuggaauuaugucugcugaauaauaaacuuuuuugaaauaauaaaucugguagaaaaaugagaucuaaaaaaaaaaaaaaaaaaaaaaaaaaaaaaaaaaaaaaaaaaaaaaaaaaaaaaaaaaaaaaaaugcaucccccccccccccccccccccccccccccccaaaggcucuuuucagagccaccagaauu

SEQ ID NO: 10365 - RNA, 2050 nt, Artificial Sequence
  mRNA product Design b-4 comprising derived and/or modified sequence from LASV(LASV035-NIG-2009;Clade II)__AIT17589__NP (wt)
gggagagucccgcagucggcguccagcggcucugcuuguucgugugugugucguugcaggccuuauucaagcuuaccaugagugcuuccaaggaaguaaagucauuccucuggacacagucauugaggagggaacucucagguuacugcucuaguauaaagcuucaaguuguuaaggaugcucaggcucuccuucauggucuugacuuuucugaggucagcaauguucagcgcuugaugcgcaaacaaaaaagggacgacagugaucugaaacgucucagagaucugaaccaggcugucaacaaucuuguagaacucaaaucaacacaacaaaagaguauccugagaguugggaccuugaccucagaugaccugcugacauuggcagcugacuuagagaaacuuaagucgaaggucaucagaacagaaaggccacuaagcucagguguuuacauggggaauuugagugcacagcaacuugagcaaagaagagcauugcugaacaugauaggcaugguugguggagcucaggguacccaaccuggaagagacggaguuguuagggugugggaugucaagaauccggaucuuuugaacaaccaauucggcaccaugccuagccugacauuagcaugucucaccaaacaaggucaaguugauuugaaugaugcugucuuggcacuaacagaccugggucuaauauacacagcuaaguacccaaacagcuccgaccuggacagacuuucccaaagccauccuauacugaauaugguggacacuaagaagagcuccuugaacauuucugguuacaacuucaguuuaggagcugcagugaaagcuggagcuuguaugcuugauggggggaauauguuggagacuaucaagguuacaccucagacaauggauggcaucuugaaaucuaucuuaaagguaaaaagaucuuugggaauguuuguuucagacacaccuggugagaggaacccuuaugagaacauacuuuacaagaucugucuuucuggggacgguuggcccuacauagcuucaagaacuuccauuguggguagagcuugggagaacaccacuguggaucucgagucagauggaaaaccacaaaaggugggcacuacuggguccaacaagucuuuacagucagcgggguucccaacaggguugaccuauucucaguugaugacacuuaaagacucaaugaugcaacuugacccaagugcuaaaaccuggauagacauugaaggucgaccagaagacccuguggaaauagcucuuuaccaaccuaugucgggcuguuacauacacuucuucagagaaccaacagacuuaaaacaguucaagcaagaugccaaauauucucaugggauugauguagcagaucuuuucccugcucaaccuggcuugaccagugcagucauugaagcccuuccucgcaauauggugcugaccugucaggguucagacgauauuaagaaacucuuagauucccaaggaagaagggacauaaagcuuauugacauugcacugaguaaggcugacucuaggaaguuugaaaaugcuguuugggaccaaugcaaggaucuaugccauaugcauacuggggugguuguugaaaagaagaaaagaggaggcaaagaagaaauuaccccgcacugugcucuaauggauugcauaauguaugaugcagcugugucaggaggacucaauauaccaguuuugagagcaguucuccccagagacaugguguuuagaaccucaagccccaaggucguccuguaaggacuaguaauaaggaaacuguaugaaugucugugggcaggaagugaagagauccuucuguaaagguuuuuggaauuaugucugcugaauaauaaacuuuuuugaaauaauaaaucugguagaaaaaugagaucuaaaaaaaaaaaaaaaaaaaaaaaaaaaaaaaaaaaaaaaaaaaaaaaaaaaaaaaaaaaaaaaaugcaucccccccccccccccccccccccccccccccaaaggcucuuuucagagccaccagaauu

SEQ ID NO: 10366 - RNA, 2050 nt, Artificial Sequence
  mRNA product Design b-4 comprising derived and/or modified sequence from LASV(LASV1000-NIG-2009;Clade II)__AIT17783__NP (wt)
gggagagucccgcagucggcguccagcggcucugcuuguucgugugugugucguugcaggccuuauucaagcuuaccaugagugcuucuaaggaagugaagucauuucucuggacacagucauugaggagggagcuuucagguuacugcuccaacauaaaacuucaagucguuaaggaugcucaggcucuccuucauggucuugacuucucugaagucagcaaugugcagcgcuuaaugcgcaaacaaaaaagggaugauagugauuugaaacgucucagagauuugaaucaggcugucaacaaucuuguagaacucaaaucgacacaacaaaaaaguaucuugagaguugggaccuugaccucagaugaccugcugacauuagcagcugacuuagagaaauuaaagucgaaggucauuagaacagaaaggccacuaagcucagguguuuauauggggaauuugaguacacagcagcuugagcagagaagagcacugcugaacaugauaggcaugguugguggggcucagggcacccaaccuggaagagacggaguuguuagggugugggauguuaagaauccggaucuuuugaacaaccaguucggcaccaugccuagucugacauuagcaugucucaccaaacaaggucaaguugauuugaaugauguugucuuagcacuaacagaccugggucuaauauacacagcuaaguacccaaauagcuccgaccuggacagacuuucccaaagccauccuauacugaauaugguggacacuaagaagagcuccuugaacauuucugguuacaacuucagcuuaggagcugcaguaaaagcuggagcuuguaugcuugauggggggaacauguuggagaccaucaagguuacaccccagacaauggauggcaucuuaaagucuauuuuaaagguaaaaaaaucuuugggaauguuugucucagacacaccuggugagaggaacccuuaugagaauauacuuuacaagaucugucuuuccggugacggcuggcccuacauagcuucaaggacuucuauuguggguagagcuugggagaacaccacuguggaucucgagucagauggaaagccgcaaaaagugggcacugcuggguccaacaagucuuuacagucagcgggguucccaacagggcugaccuauucucaguuaaugacacuuaaagacucaaugaugcagcuugauccaagugccaaaaccuggauagacauugaaggucguccagaagacccuguggaaauagcucuuuaccaaccugugucgggcuguuacauacacuucuucagagaaccaacagacuuaaaacaguucaagcaagaugccaaauauucucaugggauugauguggcagaucuuuucccugcccaaccugguuugaccagcgcagucauugaagcccucccucgcaauaugguacugaccugucaagguucagaugauauuaagagacucuuggacucccaaggaagaagggacauaaagcuuauugacauugcacugagcaaggcugacuccaggagauuugaaaaugcuguuugggaucagugcaaggaucuaugccauaugcauacuggagugguugucgaaaagaagaaaagaggaggcaaagaagaaaucaccccgcacugugcuuugauggacugcauaauguaugaugcagcugugucaggaggacucaauauaccaguuuuaagagcaguucuccccagggacaugguguuuagaaccucaagccccaaggucguccuguaaggacuaguaauaaggaaacuguaugaaugucugugggcaggaagugaagagauccuucuguaaagguuuuuggaauuaugucugcugaauaauaaacuuuuuugaaauaauaaaucugguagaaaaaugagaucuaaaaaaaaaaaaaaaaaaaaaaaaaaaaaaaaaaaaaaaaaaaaaaaaaaaaaaaaaaaaaaaaugcaucccccccccccccccccccccccccccccccaaaggcucuuuucagagccaccagaauu

SEQ ID NO: 10367 - RNA, 2050 nt, Artificial Sequence
  mRNA product Design b-4 comprising derived and/or modified sequence from LASV(LASV221-NIG-2010;Clade II)__AIT17625__NP (wt)
gggagagucccgcagucggcguccagcggcucugcuuguucgugugugugucguugcaggccuuauucaagcuuaccaugagugcuucuaaggaaguaaagucauuucucuggacacagucauugaggagggagcuuucagguuauugcuccagcauaaaacuucaaguuguuaaggaugcucaggcucuccuucauggucuugacuuuucugaagucagcaaugugcagcgcuuaaugcgcaaacaaaggagggaugauagugaucugaaacgucucagagauuugaaucaggcugucaacaaucuuguagaacucaaaucgacacaacaaaagagcaucuugagaguugggaccuugaccucggaugaccugcugacauuggcagccgaccuagaaaaacuaaagucgaaggucauuagaacagaaaggccacuaagcucagguguuuauauggggaauuugagcacacagcagcuugagcaaagaagagcauugcugaacaugauaggcaugguugguggggcccagggcacccaaccuggaagggacggaguuguuagagugugggauguuaagaauccggaucuuuugaacaaucaguucggcaccaugccuagucugacauuagcaugucucaccaaacaaggccaaguugauuugaaugaugcugucuuggcacuaacagaucugggucuaauauacacagcuaaguauccaaauagcuccgaccuggacagacuuucccaaagccauccuauacugaacaugguggacaccaagaagagcuccuugaacauuucuggcuacaacuucagcuuaggagcugcagugaaagcuggagcuuguaugcuugaugggggaaacauguuggagaccauuaaggucacaccucagacaguggauggcaucuugaagucuauuuuaaagguaaaaagaucuuugggaauguuuguuucagauacaccuggugagaggaacccuuacgagaacauacuuuacaagaucugucuuucuggcgacggcuggcccuacauagcuucaaggacuucuauuguggguagagcuugggagaauacuacuguggaucucgagucagauggaaaaccacagaaaguggguacugcuggguccaacaagucuuuacagucagcgggguuuccaacagggcugaccuauucucaguugaugacacuuaaagacucgaugaugcagcuugacccaagugccaaaaccuggauagacauugagggucguccagaagacccuguggaaauugcucuuuaccaaccuaugucuggcuguuacauacacuucuucagagaaccaacagauuuaaaacaguucaagcaagaugccaaauauucucaugggauugauguggcagaucuuuucccugcucaaccugguuugaccagugcagucauugaagcucucccucgcaacaugguacugaccugucaagguucagaugauauuaagagacucuuggacucccaaggaagaagggacauaaagcuuauugacauugcacugagcaaggcugauucuaggaaauuugaaaaugcuguuugggaucagugcaaagaucuaugccauaugcauacuggagugguugucgaaaagaagaaaagaggagguaaagaagaaaucaccccgcacugugcuuuaauggacugcauaauguaugaugcagcugugucaggaggacucaacauaccaguucuaagagcaguucuccccagagacaugguguuuagaaccucgagccccaaagucguccuguaaggacuaguaauaaggaaacuguaugaaugucugugggcaggaagugaagagauccuucuguaaagguuuuuggaauuaugucugcugaauaauaaacuuuuuugaaauaauaaaucugguagaaaaaugagaucuaaaaaaaaaaaaaaaaaaaaaaaaaaaaaaaaaaaaaaaaaaaaaaaaaaaaaaaaaaaaaaaaugcaucccccccccccccccccccccccccccccccaaaggcucuuuucagagccaccagaauu

SEQ ID NO: 10368 - RNA, 2050 nt, Artificial Sequence
  mRNA product Design b-4 comprising derived and/or modified sequence from LASV(LASV237-NIG-2010;Clade II)__AIT17639__NP (wt)
gggagagucccgcagucggcguccagcggcucugcuuguucgugugugugucguugcaggccuuauucaagcuuaccaugagugcuucuaaggaagugaagucauuucucuggacacagucauugaggagggagcuuucaggcuauugcuccaacauaaaacuucaaguuguuaaggaugcucaggcucuucuucauggucuugacuuuucugaagucagcaaugugcagcgcuuaaugcgcaagcaaaaaagggaugauagugaucugaaacgucucagagauuugaaucaggcugucaacaaucuuguagaacucaaaucgacacaacaaaagaguaucuugagaguugggaccuugacuucagaugaucugcugacauuggcagcugacuuagagaaacuaaagucgaaagucauuagaacagaaaggccucuaagcucagguguuuacauggggaauuugagcacacagcagcuugagcagagaagggcauugcugaacaugauaggcaugguugguggggcucaaggcacccaaccuggaagagacggaguuguuagggugugggauguuaagaauccggaucuuuugaacaaccaguucggcaccaugccuagucugacauuagcaugucucaccaaacaaggucaaguugauuugaaugaugccgucuuagcacuaacagaccugggucuaauauacacagcuaaguacccaaauagcuccgaccuagauagacuuucccaaagccauccuauacugaauaugguggacauuaagaaaagcucccugaacauuucugguuacaacuucagcuuaggagcugcagugaaggcuggggccugcaugcucgauggggggaacauguuggagaccaucaagguuacaccucagacaauggauggcaucuugaagucuauuuuaaaaguaaaaagaucuuugggaauguuuguuucagauacaccuggugagagaaacccuuaugagaacauacuuuacaagaucugucuuuccggugacggcuggcccuacauagcuucaaggacuucuauuguggguagggcuugggagaauacuacuguggaucucgagucagauggaaaaccgcaaaaagugggcucugcuggguccaacaaguccuuacagucagcgggauucccaacagggcugaccuauucucaguugaugacacuuaaagacucaaugaugcagcuugacccaagugccaaaaccuggauagacauugaaggucguccagaagacccuguggaaauagcucuuuaccaaccuaugucgggcuguuacauacacuucuucagagagccaacagacuuaaaacaguucaagcaggaugccaaauauucucaugggauugauguggcagaucuuuucccugcucaaccugguuugaccagcgcaguuauugaagcccucccucgcaauauggugcugaccugucaagguucagaugauauuaagagacucuuagacucccaaggaagaagggacauaaagcuuauugacauugcacugagcaaggcugacucuaggagauuugaaaaugcuguuugggaucaguguaaagaccuaugccauaugcauacuggagugguugucgaaaagaagaaaagaggaggcaaagaagaaauaacuccgcacugugcuuuaauggacugcauaauguaugaugcagcugugucaggagggcucaauauaccaguuuuaagagcaguucuucccagagacaugguguuuagaaccucaagccccaaggucguccuguaaggacuaguaauaaggaaacuguaugaaugucugugggcaggaagugaagagauccuucuguaaagguuuuuggaauuaugucugcugaauaauaaacuuuuuugaaauaauaaaucugguagaaaaaugagaucuaaaaaaaaaaaaaaaaaaaaaaaaaaaaaaaaaaaaaaaaaaaaaaaaaaaaaaaaaaaaaaaaugcaucccccccccccccccccccccccccccccccaaaggcucuuuucagagccaccagaauu

SEQ ID NO: 10369 - RNA, 2050 nt, Artificial Sequence
  mRNA product Design b-4 comprising derived and/or modified sequence from LASV(LASV253-NIG-2011;Clade II)__AIT17671__NP (wt)
gggagagucccgcagucggcguccagcggcucugcuuguucgugugugugucguugcaggccuuauucaagcuuaccaugagugcuuccaaggaagugaagucauuccucuggacacagucauugaggagggagcuuucagguuauugcuccagcauaaagcuucaaguugucaaggaugcucaggcucuccuucauggucucgacuuuucugaaguuagcaaugugcagcgcuuaaugcgcaaacaaaaaagggaugauagugaucugaaacgucucagagaucugaaucaggcugucaacaaucuuguggaacuuaaaucaacacaacaaaagagugucuugagaguugggaccuugaccucagaugaccugcugacauuggcagcugacuuagagaaacuaaagucgaaggucaucagaacagaaaggccacuaagcucagguguuuauauggggaauuugaguacacagcaacuugagcagaggagagcauuacugaacaugauaggcaugguugguggggcucagggcacccaaccuggaagagacggaguuguuagggugugggauguuaaaaauccagaucuuuugaacaaucaguucggcaccaugcccagucugacauuagcaugucucacuaaacaaggccagguugauuugaaugaugucgucuuagcacuaacagaccugggucuaauauacacagcuaaguacccuaauagcuccgaccuggacagacuuucccaaagucauccuauauugaacaugguggacaccaagaagagcuccuugaacauuucugguuacaacuucagcuuaggagcugcagugaaagcuggagcuuguaugcuugaugggggaaacauguuggaaaccaucaagguuacaccucagacaauggauggcaucuugaagucuauuuuaaaggugaaaaaauccuugggaauguuuguuucagacacaccuggugagaggaauccuuaugagaacauacuuuacaagaucugucucucuggugacgguuggcccuacauagcuucaaggacuucaauuguggguagagcuugggagaauacuacuguggaucucgagucagauggaaaaccacaaaaagugggaacugcuggguccaauaagucuuuacagucagcgggguucccaacagggcugacuuacucucaguugaugacacuuaaagacucaaugaugcaacuugacccaagugccaaaaccuggauagacauugaaggucguccagaagacccuguggaaauagcucuuuaccagcccaugucgggcugcuacauacacuucuucagagaaccaacagacuugaaacaguucaagcaagaugccaaauauucucaugggauugauguaacagaucuuuucccugcucaaccuggauuaaccagugcagucauugaagcccucccucgcaauaugguacugaccugucaaggcucagaugacaucaagagacucuuggauucccaaggaagaagggacauaaaacuuauugacauugcauugagcaaggcugacucuaggagauuugaaaaugcuguuugggaucagugcaaagaucuaugccauaugcacacuggagugguugucgaaaagaagaaaagaggaggcaaagaagaaauuaccccacauugugcucuaauggacugcauaauguaugaugcagcugugucaggaggacucaauauaccaguuuuaagagcgguccuccccagagacaugguguuuagaaccucaagccccaaggucguccuguaaggacuaguaauaaggaaacuguaugaaugucugugggcaggaagugaagagauccuucuguaaagguuuuuggaauuaugucugcugaauaauaaacuuuuuugaaauaauaaaucugguagaaaaaugagaucuaaaaaaaaaaaaaaaaaaaaaaaaaaaaaaaaaaaaaaaaaaaaaaaaaaaaaaaaaaaaaaaaugcaucccccccccccccccccccccccccccccccaaaggcucuuuucagagccaccagaauu

SEQ ID NO: 10370 - RNA, 2050 nt, Artificial Sequence
  mRNA product Design b-4 comprising derived and/or modified sequence from LASV(LASV254-NIG-2011;Clade II)__AIT17675__NP (wt)
gggagagucccgcagucggcguccagcggcucugcuuguucgugugugugucguugcaggccuuauucaagcuuaccaugagugcuucuaaggaagugaagucauuucucuggacacagucauugagaagggaacuuucagguuauugcuccagcauaaagcuucaaguuguuaaagaugcucaggcucuccuucauggucuugacuuuucugaagucagcaaugugcagcgcuuaaugcgcaaacaaaaaagggaugauagugaucugaaacgucucagagaucugaaucaggcugucaacaaucuuguggaacucaaaucaacacaacaaaagagugucuugagaguugggaccuuaaccucagaugaccugcugacauuggcagcugacuuagagaaacuaaagucaaaggucauuagaacagaaagaccacugagcucagguguuuauauggggaauuugaguacacagcagcuugagcaaaggagagcauuguugaacaugauaggcaugguugguggggcucagggcacccaaccuggaagagacggagugguuagggugugggauguuaaaaauccggaucuuuugaacaaccaguuuggcaccaugccuagucugacauuagcaugucucacuaaacaaggucaaguugauuugaaugaugccgucuuagcacuaacagaccugggucuaauauauacagcuaaguacccaaauagcuccgaccuggacagacuuucucaaagucauccuauacugaacaugguggacacuaagaaaagcuccuugaacauuucugguuacaacuucagcuuaggagcugcagugaaagcuggagcuuguaugcuugauggggggaacauguuggagaccaucaagguuacaccucagacaauggauggcauccugaagucuauuuuaaagguaaaaaaauccuugggaauguuuguuucagauacaccuggugagaggaacccuuaugagaacauacuuuacaagaucugucuuuccggugacggcuggcccuacauagcuucuaggacuuccauugugggcagagcuugggagaauaccaucguggaucucgagucagaugggaaaccacaaaaggugggcacugcugggucuaacaagucuuuacagucagcgggguuuccaacagggcugaccuauucucaguugaugacacuuaaagacucaaugaugcagcuugacccaagugccaaaaccuggauagacauugaaggucguccagaggacccuguagaaauagcucuuuaccaaccuaugucgggcuguuauauacauuucuucagagagccaacagacuuaaaacaguucaaacaagaugccaaauauucucaugggauugauguagcagaucuuuucccugcucaaccuggcuugaccagugcagucauugaagcccucccccgcaauaugguccugaccugucaagguucagaugacauuaagagacucuuggauucucaagggagaagggacauaaagcuuauugacauugcacugagcaaggcugacucuaggagauuugaaaaugcuguuugggaucagugcaaagaucuaugccauaugcacacuggaguggucgucgaaaagaagaaaagagggggcaaagaagaaauuaccccgcauugugcuuuaauggacugcauaauguaugaugcagcugugucaggaggacucaauauaccaguuuuaagagcaguucuccccagagauaugguguuuagaaccucaagccccaaagucguccuguaaggacuaguaauaaggaaacuguaugaaugucugugggcaggaagugaagagauccuucuguaaagguuuuuggaauuaugucugcugaauaauaaacuuuuuugaaauaauaaaucugguagaaaaaugagaucuaaaaaaaaaaaaaaaaaaaaaaaaaaaaaaaaaaaaaaaaaaaaaaaaaaaaaaaaaaaaaaaaugcaucccccccccccccccccccccccccccccccaaaggcucuuuucagagccaccagaauu

SEQ ID NO: 10371 - RNA, 2050 nt, Artificial Sequence
  mRNA product Design b-4 comprising derived and/or modified sequence from LASV(Nig08-04;Clade II)__ADU56611__NP (wt)
gggagagucccgcagucggcguccagcggcucugcuuguucgugugugugucguugcaggccuuauucaagcuuaccaugagugcuuccaaggaagugaaaucauuccuuuggacacagucauugaggagagagcuuucaggcuauugcucuaauauaaaacuccaaguggucaaggaugcucaggcccuucugcauggucucgacuucucugaggucagcaauguccagcgcuugaugcgcaaacagaaaagagaugacggugaccuaaaacgucuuagagaccuaaaucaggcaguuaacaaccuugucgagcucaagucaacacaacaaaagaguguucugaggguuggaacauugaccucagacgacuugcugacuuuagcagcugaucuagagaaauugaagucaaagguuauuaggacggagagaccauuaaguucagguguguauauggggaacuugagcacacaacaacuugagcagaggaaggcguuguugaguaugauaggcauggucgguggugcucagggaacccaaccuggaagagacggaguugucagagugugggaugucaaaaacccggaccuccucaacaaccaauuuggcaccaugccuaguuuaacgcuagcaugucucacuaaacagggucagguugacuuaaaugacgccguucuggcgcuaacagacuugggauuaauauacacagcuaaauaccccaauaguuccgaccuagacagacuuucccagagccauccuauacugaauaugguagauaccaagaagagcucccuaaauauuucugguuauaauuuuaguuugggagcugcagugaaggccggagcuugcaugcucgauggggguaacauguuggaaacuaucaaggugacgccucagacaauggauggcauucugaagucuauucuaaagguaaaaaggucccugggaauguuuguuucagacacaccuggugaaagaaacccuuaugaaaacauacuuuacaaaauuugucucucuggggacggcuggcccuacauagcuucaagaaccuccauuguggguagagcuugggagaauaccacuguagaccuugagucagaugggaaaccacagaaaguggguacugcuggauccaacaaaucucugcaaucugcuggguucccaacagggcugaccuauucucaacugaugacacucaaagauucaaugaugcaacuugacccaagcgccaaaaccuggauagacauugaaggucguccagaagacccuguugagauagcucuuuaccaaccuaugucaggcuguuauauacauuucuucagagaaccaacggauuuaaaacaguucaaacaagaugccaaauauucucaugggauugaugugacagaucucuuuucugcucagccuggucuaaccagugcagucauugaggcucucccccgcaacaugguguugacgugccaagguucagacgacauuaaaaaacucuuggauucucaggggagaagggacaucaagcucauugacaucucauuaaauaaggcugauucuaggagauuugaaaaugcugucugggaucaguguaaagauuugugucacaugcacacuggagugguuguugagaaaaagaagagaggaggcaaagaggagaucacuccacauugugcuuuaauggauugcauaauguuugacgcagcugugucaggaggacucaauauaccaaucuugagagcuguucucccaagagauaugguguucagaacuucaagucccaaagucguccuguaaggacuaguaauaaggaaacuguaugaaugucugugggcaggaagugaagagauccuucuguaaagguuuuuggaauuaugucugcugaauaauaaacuuuuuugaaauaauaaaucugguagaaaaaugagaucuaaaaaaaaaaaaaaaaaaaaaaaaaaaaaaaaaaaaaaaaaaaaaaaaaaaaaaaaaaaaaaaaugcaucccccccccccccccccccccccccccccccaaaggcucuuuucagagccaccagaauu

SEQ ID NO: 10372 - RNA, 2053 nt, Artificial Sequence
  mRNA product Design b-4 comprising derived and/or modified sequence from LASV(GA391;Clade III)__AAA46284__NP (wt)
gggagagucccgcagucggcguccagcggcucugcuuguucgugugugugucguugcaggccuuauucaagcuuaccaugagugcuuccaaggaagugaggucaugcuuguggacucaaucccuaagaagggaacuaucuggcuacuguuccaacauaaaguugcagguaguuaaagacgcucaagcucuccuucauggucuugacuucuccgaggucaguaauguucagagauugaugcgcaagcagaaaagagaugauggcgaccuaaaacgacugagagaucucaaucaagcagucaacaaucuuguugagcucaaauccacacagcagaaaagugucuuaagaguuggaaccuuaaguucagacgaucuacuaauccuggccgcugauuuagaaaaacugaaaucaaaagucaccagaacagaaaggccuuugaguucaggaguuuauauggggaauuugaguucacaacagcuugaucaaaggagagcccuuuugaacaugauuggcaugacuggaguaaguggagggggaaagggugccaguaauggcauugugagaguuugggaugucaaaaaugcagaguuacucaacaaucaguucggaacaaugccaagccuaacuuuagcaugccugaccaaacaggggcaaguggaccugaaugaugccguucaagcuuugacagauuuagggcugauuuacacagccaaauaccccaacucaucugaucucgacagauugucucagagucauccaauucugaauaugauugacacuaagaaaaguucacucaacaucucugguuacaauuucaguuugggugcugcugucaaagcaggggccugcaugcuugauggugguaacauguuagagacuauuaagguuucaccucagaccauggaugguaucuugaagucaaucuugaaaguuaagaagagucugggaauguuuguaucagacacaccgggugaaaggaacccuuaugagaacauccuauacaagaucugucucucaggagacggaugguccuauauugcaucaaggaccucgauugugggaagagcaugggaaaauacugugguggaccuugagcaagacaacaagccccagaaaauuggaaaugggggguccaacaagucauuacagucugcaggcuuugcugcaggauuaaucuacucucaguugaugacucucaaagauuucaagugcuucaacuugauucccaacgcaaaaaccuggauggauauugaaggaagaccagaagacccaguugagauagcccuuuaucaaccgagcucggguugcuauguacauuucuuuagggagccaacagauuugaagcaauucaaacaagaugcaaaguauucacaugguagggaugugacugauuuguuugcugcccaaccuggguuaaccagugcagugauagaagcccuuccucggaacauggucaucacuugccaaggaucagaggauaucagaaaacuccuugagucacaagggaggagagacauaaaacugauugacaucacucuuaguaaagcagauucaagaaaguuugagaaugcuguuugggaucaauucaaggaucuaugucacaugcacacugggguaguuguggagaaaaagaagagaggugguaaagaggaaauaacuccucauugugcacugauggauugcauuauguuugaugcagcaguuucaggaggacuugaugcaaaaguccugagaguugugcucccuagagacaugguguucagaacuucaacaccuaaagucguccuguagggacuaguaauaaggaaacuguaugaaugucugugggcaggaagugaagagauccuucuguaaagguuuuuggaauuaugucugcugaauaauaaacuuuuuugaaauaauaaaucugguagaaaaaugagaucuaaaaaaaaaaaaaaaaaaaaaaaaaaaaaaaaaaaaaaaaaaaaaaaaaaaaaaaaaaaaaaaaugcaucccccccccccccccccccccccccccccccaaaggcucuuuucagagccaccagaauu

SEQ ID NO: 10373 - RNA, 2050 nt, Artificial Sequence
  mRNA product Design b-4 comprising derived and/or modified sequence from LASV(Nig08-A19;Clade III)__ADU56619__NP (wt)
gggagagucccgcagucggcguccagcggcucugcuuguucgugugugugucguugcaggccuuauucaagcuuaccaugagugcuuccaaagaagugaaaucauuccuguggacucagucucugagaagagaguuaucuggcuauugcuccaauauaaaacuccaggugguaaaggaugcucaagcucuccuucaugguuuggacuucucugaggucaguaauguucaacgcuugaugcgcaaacaaaaaagggacgauggugaucuuaaacggcuaagagaccucaaucaagcagucaacaaccuuguugaacuaaagucaacucaacaaaagagugugcugaggguuggaacccuaaguucagacgaucuauugguuuuggcugcugaccuggaaaaacugaagucaaagguuguuaggacagaaagaccccugagcucaggaauuuauauggggaaucuaaguucacagcagcuugaucagaggaaggcccuccucaacaugauuggcaugacuggugggaaugggggaaggaauaccacuagugaugguauugugagaguuugggacgucaagaaugcagagcugcuuaacaaucaguuugggacaaugccaagucuaacucuagcauguuugaccaaacaagggcaaguggauuugaaugaugcuguucaggcuuugacagauuugggauugauuuacaccgcaaaauacccuaauucaucugauuuggacaggcuggcccagagccauccgauauugaacaugauugauacuaagaagagcucccuuaacaucucugguuacaauuuuaguuuaggagccgccgucaaggcuggggccugcaugcuugauggaggcaauaugcuagagacuauaaaggucucaccucaaaccauggauggcaucuugaagucaaucuugaaagucaagagaagccugggaauguucaucucagauacgccaggugaaaggaacccuuaugaaaacauacuguacaaaaucugccucucaggagauggguggccuuacauugcaucaaggacuucaauugugggaagagcuugggagaacaccgugguugacuuagagucagacaacaaaccgcaaaagaccggcaauggggguucaaauaagucauugcaaucugcaggguuugcugcaggacugacuuauucucaacugaugaccuuaaaggauucaaugcuucagcuugacccaaaugcaaagacuuggauggauauugagggaagaccagaagauccaguugaaauagcucuguaucaaccaaguucaggcugcuauauacacuucuucagggaaccgacagacuuaaagcaguuuaaacaggaugcaaaauauucacaugguauugaugugacagauuuguuugcugcacagccaggguuaacaagugcagugauagaggcucuuccuagaaacauggucaucaccugucaagggucagaagacaucagaaaacuucuggagucacaggggaggagggauauaaaacugauugacauuucccuuaguaagguggacucaagaaaauuugagaaugcugugugggaucaauucaaggauuuaugucacaugcacaccgggauuguuguggagaagaaaaagaggggaggcaaggaggaaauaacaccucauugugcauuaauggacugcaucauguuugaugcugcagucucaggaggaguugaugcaaagguccugagggcugugcuccccagagauaugguguucagaacuucgacacccaaagucguccuguaaggacuaguaauaaggaaacuguaugaaugucugugggcaggaagugaagagauccuucuguaaagguuuuuggaauuaugucugcugaauaauaaacuuuuuugaaauaauaaaucugguagaaaaaugagaucuaaaaaaaaaaaaaaaaaaaaaaaaaaaaaaaaaaaaaaaaaaaaaaaaaaaaaaaaaaaaaaaaugcaucccccccccccccccccccccccccccccccaaaggcucuuuucagagccaccagaauu

SEQ ID NO: 10374 - RNA, 2050 nt, Artificial Sequence
  mRNA product Design b-4 comprising derived and/or modified sequence from LASV(G1180-SLE-2010;Clade IV)__AIT17169__NP (wt)
gggagagucccgcagucggcguccagcggcucugcuuguucgugugugugucguugcaggccuuauucaagcuuaccaugagugccucaaaggaaauaaaguccuuucuauggacacaaucauugaggagggaauuaucugguuacugcuccaacaucaaacuacagguggugaaagaugcccaggcucuauuacauggacuugacuucucagaagucaguaauguucaacgguugaugcgcaaggagagaagggaugacaaugauuugaaacgguugagggaccuaaaucaagcggucaacaaccucguugaguuaaaaucaacucaacaaaagagcauauugagaguugggacccuaaccucagaugacuuauuaaucuuagccgcugaucuagagaaguuaaaaucaaaggugaucaggacagaaaggccauugagugcaggugucuauaugggcaacuugagcucacagcagcuugaccaaagacgagcucuucugaguaugauaggaaugaguagugguaaucaaagggcucaggcugggagggauggaguggugagaguuugggauguaaaaaauguagaguugcuuaauaaucaguucggaaccaugccaagucuaacacuggcaugucugacaaaacaggggcagguugauuugaaugaugcagugcaagcacugacagauuugggucugaucuacacagcaaaguauccuaauacuucagaccuagauaggcugacucaaagucaccccaucuuaaacaugauugacaccaagaaaagcucuuugaauaucucugguuacaauuucagcuugggugcagcugugaaggcaggagcuugcaugcuggaugguggcaauauguuggagacaaucaaggugucaccucagacaauggaugguauccucaaauccaucuuaaaggucaagaaggcucuugggauguucaucucagacaccccuggugaaaggaaucccuaugaaaacauacucuacaagaucuguuugucaggagauggauggccauauauugcaucaagaaccucgauaacaggaagagccugggaaaacacugucguugacuuggaaucagaugggaagccacagaaagcuggcagcaacaauucuaauaaauccuugcagucaguaggguuuacugcugggcuuaccuauucucagcugaugacccucaaggaugcgaugcugcaacuugacccaaacgcuaagacuuggauggacaucgaaggaagaccugaagauccaguggaaauugcccucuaucagccaaguucaggcugcuacauacacuuuuuccgugaaccuacugauuuaaagcaguucaagcaggaugcuaaguacucacaugggauugaugucacagaccucuucgcugcacaaccgggcuugaccagugcuguuauagaugcacucccccggaacauggucauuaccugucagggguccgaugacauaaggaagcuccuugagucacaagguagaaaagacaucaaauuaauugauauugcccucagcaaaacugauuccaggaaguaugaaaaugcagucugggaucaguauaaagaccuaugccacaugcacacagguguuguuguugaaaagaagaaaagaggcgguaaagaggaaauaaccccucacugugcacuaauggacugcaucauguuugaugcagcagugucaggaggacugaacacaucuguuuugagagcagugcugccuagagauaugguauucagaacaucgacaccuagagucguccuguaaggacuaguaauaaggaaacuguaugaaugucugugggcaggaagugaagagauccuucuguaaagguuuuuggaauuaugucugcugaauaauaaacuuuuuugaaauaauaaaucugguagaaaaaugagaucuaaaaaaaaaaaaaaaaaaaaaaaaaaaaaaaaaaaaaaaaaaaaaaaaaaaaaaaaaaaaaaaaugcaucccccccccccccccccccccccccccccccaaaggcucuuuucagagccaccagaauu

SEQ ID NO: 10375 - RNA, 2050 nt, Artificial Sequence
  mRNA product Design b-4 comprising derived and/or modified sequence from LASV(G1442-SLE-2011;Clade IV)__AIT17181__NP (wt)
gggagagucccgcagucggcguccagcggcucugcuuguucgugugugugucguugcaggccuuauucaagcuuaccaugagugcuucaaaggagguaaaguccuucuuguggacacaaucccugaggagggagcuguccgguuauuguuccaauaucaaacuacagguagugaaagaugcccaagcccuuuugcauggacuugauuucucugaggucagcaauguccaacgguugaugcgcaaacagagaagggaugacaaugaccugaaacggcugagggaucuaaaucaagcagucaacaaccuuguugagcugaaaucuacccaacagaaaagugugcugagaguaggaacucuaaccucagaugaucuguugguuuuggcugcugaccuggagaagcugaaaucaaaagugaucaggacagaaaggccauugagcgcaggugucuauaugggcaacuugagcucacagcaacuagaccaaagacgggcucuccugaauaugauaggaaugagugguggcauucaagggacucguacugggagagauggagugguaagagucugggauguaaaaaaugcagaccuacuuaacaaucaguucggcacuaugccaagucugacauuggcauguuuaacaaaacaaggacagguugaccugaaugauguggugcaggcacugacagaucugggccugauuuauacagcaaaguacccuaaugccucagacuuagauagguugacucagagucaccccaucuuaaacaugauugauaccaaaaaaaguucccuaaauaucucagguuacaacuucagucugggugcagcugugaaggcaggagcuugcaugcuggauggugguaacauguuggagacaaucaaggugucaccucagacaauggauggcauccucaagucuauccuaaagguaaaaaagacucuugggauguucaucucagacaccccuggugaaaggaauccuuaugagaacauacuuuacaagauuugucugucaggagauggauggccauauauugcaucaagaacuucaauuacaggaagggccugggaaaacacugucguugaucuggaaucagaugggaagccacagaaggcugggagcaacaauucuaacaaaucccugcagucagcaggcuuugccgcugggcucacuuauucucagcuuaugacccucaaagaugcaaugcugcagcuugaucccaaugcuaaaaccuggauggacauugagggaagaccugaagacccaguggagauugcucucuaucagccaaguucagguugcuacauucacuucuuccgugaaccuacugauuuaaagcaguucaagcaagaugcuaaauauucacauggaauugaugucacagaccucuucgccgcacaaccaggcuugaccagugcugucauagaggcacuuccccggaacauggucaucaccugucagggaucugaugacauaaagaaacuccuugaaucacagggaagaaaggauaucaaacuaauugacaucgcccucaguaaaacugauuccaggaaguaugaaaacgcagucugggaucaauauaaggacuuaugccauaugcacacagguguuguuguugaaaagaagaaaagaggcggcaaggaggagauaacaccucacugugcuuugauggacugcauuauguuugacgcagcagugucaggaggauugaacacauuggucuugagagcgguucuaccuagagacaugguguuuagaacaucgacacccagagucguccuguaaggacuaguaauaaggaaacuguaugaaugucugugggcaggaagugaagagauccuucuguaaagguuuuuggaauuaugucugcugaauaauaaacuuuuuugaaauaauaaaucugguagaaaaaugagaucuaaaaaaaaaaaaaaaaaaaaaaaaaaaaaaaaaaaaaaaaaaaaaaaaaaaaaaaaaaaaaaaaugcaucccccccccccccccccccccccccccccccaaaggcucuuuucagagccaccagaauu

SEQ ID NO: 10376 - RNA, 2050 nt, Artificial Sequence
  mRNA product Design b-4 comprising derived and/or modified sequence from LASV(G3010-SLE-2013;Clade IV)__AIT17345__NP (wt)
gggagagucccgcagucggcguccagcggcucugcuuguucgugugugugucguugcaggccuuauucaagcuuaccaugagugccucaaaggaaauaaaguccuuucuguggacacagucauugaggagggaauugucugguuauuguucuaacaucaaacuacagguggugaaagaugcgcaagcucuuuuacauggacuugacuucuccgaagucaguaauguucaacgguugaugcgcaaggagagaagggaugacaaugauuugaaacgguugagggaccuaaaucaagcugucaacaaccuuguugaguuaaaaucaacucaacaaaaaaguauacugagaguugggacccuaaccucagaugacuuguuaaucuuggcugcugaucuagagaaguugaaaucaaaggugaccaggacagaaaggccauugagugcaggugucuauaugggcaaccugagcucacagcaacuugaccaaagacgagcucuucugaguaugauaggaaugaguagugguguucaaggggcucgggcugggagagauggaguggugagaguuugggauguaaaaaaugcagaguugcuuaauaaucaguucggaaccaugccaagucugacacuagcauguuugacaaaacaggggcagguugacuugaaugauguagugcaagcauugacagauuuggguuugaucuacacagcaaaguacccaaauacuucagauuuagauaggcugacucaaagucaccccauccugaacaugauugacaccaagaaaagcucuuugaauaucucagguuauaauuucagcuugggugcagcuguaaaggcaggagcuugcaugcuggaugguggcaacauguuggagacaaucaaggugucaccucagacaauggauggcauccucaaguccaucuuaaaggucaagaaagcucuugggauguucaucucagagaccccuggugaaaggaauccuuaugagaacauacucuacaagaucugucuaucaggagauggauggccauauauugcaucaagaaccucaauaacaggaagggccugggaaaacacugucguugaucuggaaucagaugggaagccacaaaaagcuggcagcaacaauuccaauaaaucccugcagucggcaggguuuaccgcugggcuuaccuauucucagcugaugacccucaaagacgcaaugcugcaacuugacccaaaugcuaagaccuggauggacauugaaggaaggccugaagauccaguggagguugcccucuaucaaccaaguucaggcugcuacauacacuucuuccgugaacccacugauuugaagcaguucaagcaggaugcuaaguacucacaugggauugauguuacagaccucuucgcugcgcaaccaggcuugaccagugcugucauagaugcacuuccccggaauauggucauuaccugucaggggucugaugacauaaagaaacuccuugaaucacaagguaggaaagacaucaagcuaauugauauugcccucaguaaaacugauuccaggaaguaugaaaaugcagucugggaccaguauaaagacuuaugccacaugcacacagguguugucguugaaaagaagaaaagaggcgguaaagaggaaauaaccccucacugugcacuaauggacugcaucauguuugaugcagcaguaucaggaggacugaacacaucggucuuaagagcagugcugcccagagauaugguguucagaacaucgacaccuagagucguucuguaaggacuaguaauaaggaaacuguaugaaugucugugggcaggaagugaagagauccuucuguaaagguuuuuggaauuaugucugcugaauaauaaacuuuuuugaaauaauaaaucugguagaaaaaugagaucuaaaaaaaaaaaaaaaaaaaaaaaaaaaaaaaaaaaaaaaaaaaaaaaaaaaaaaaaaaaaaaaaugcaucccccccccccccccccccccccccccccccaaaggcucuuuucagagccaccagaauu

SEQ ID NO: 10377 - RNA, 2050 nt, Artificial Sequence
  mRNA product Design b-4 comprising derived and/or modified sequence from LASV(G502-SLE-2009;Clade IV)__AIT17127__NP (wt)
gggagagucccgcagucggcguccagcggcucugcuuguucgugugugugucguugcaggccuuauucaagcuuaccaugagugccucaaaggaaauaaaguccuuucuguggacacaaucauugaggagggaauugucugguuacugcuccaacaucaaacuacaggugguaaaagaugcccaggcucuucugcauggucuugacuucuccgaagucaguaauguucaacgguuaaugcgcaaggagagaagggaugacaaugacuugaaacgguugagggaccuaaaucaagcggucaacaaccuuguugaguuaaaaucaacucaacaaaagaguauacugagaguugggacucuaaccucagaugacuuauuaaucuuagcugcugaucuagagaaguugaaaucaaaggugaucaggacagaaaggccauugagugcaggugucuauaugggcaacuugagcucacagcaacuugaccaaagacgggcucuucugaguaugauaggaaugaguggugguaaucaagggguucgggcugggaaggauggaguggugagaguuugggaugugaaaaaugcagaguugcuuaauaaucaguuugggacuaugccaagucuaacacuggcaugucugacaaaacaggggcagguugacuugaaugaugcagugcaagcacugacagauuugggucugaucuacacagcaaaguaucccaauacuucagacuuagauaggcugacucaaagucaccccaucuuaaacaugauugacaccaagaagaguuccuugaauaucucugguuauaauuuuagcuugggugcagcugugaaagcaggagcuugcaugcuggaugguggcaauauguuggagacaaucaaagugucaccucagacaauggaugguauccucaaauccaucuuaaaggucaagaaggcucuugggauguucaucucagacaccccuggugaaaggaauccuuaugaaaacauacucuacaagauuuguuugucaggagauggauggccauauauugcaucaagaacuucaauaacaggaagagccugggaaaacacugucguugaccuagaaucagaugggaagccacagaaagcuggcagcaacaauuccaauaaaucccugcagucggcaggguuuaccgcugggcuuaccuauucucagcugaugacccucaaggaugcgaugcugcagcuugacccaaacacuaagacuuggauggacaucgaaggaagaccugaagacccaguggaaauugcccucuaucagccaaguucaggcugcuacauacacuuuuuccgugaaccuacugauuuaaagcaguucaagcaggaugcuaaguacucacaugggauugauguuacagaccucuucgcugcacaaccgggcuugaccagugcugucauagaugcacucccccggaauauggucauuaccugucagggguccgaugacauaaggaaacuccuugaaucacaagguagaaaagacaucaaacuaauugauauugcccucaacaaaacugauuccaggaaguaugaaaaugcagucugggaucaguauaaggacuugugccacaugcacacaggugucguuguugaaaagaagaaaagaggcgguaaagaggaaauaaccccucacugugcacuaauggacugcaucauguuugaugcagcagugucaggaggacugaacacaucuguuuugagagcagugcugccuagagauaugguauucagaacaucaacacccagagucguccuguaaggacuaguaauaaggaaacuguaugaaugucugugggcaggaagugaagagauccuucuguaaagguuuuuggaauuaugucugcugaauaauaaacuuuuuugaaauaauaaaucugguagaaaaaugagaucuaaaaaaaaaaaaaaaaaaaaaaaaaaaaaaaaaaaaaaaaaaaaaaaaaaaaaaaaaaaaaaaaugcaucccccccccccccccccccccccccccccccaaaggcucuuuucagagccaccagaauu

SEQ ID NO: 10378 - RNA, 2050 nt, Artificial Sequence
  mRNA product Design b-4 comprising derived and/or modified sequence from LASV(G733-SLE-2010;Clade IV)__AIT17155__NP (wt)
gggagagucccgcagucggcguccagcggcucugcuuguucgugugugugucguugcaggccuuauucaagcuuaccaugagugccucaaaggaaauaaagucuuuucuguggacacaaucccugaggagggaacugucugguuacugcuccaacaucaaacuucaggugguaaaagaugcccaagcucuuuugcacggacuugacuucuccgaagucaguaauguucaacgguugaugcgcaaagagagaagggaugacaaugauuugaaacggcugagggaccuaaaucaagcggucaacaaccuuguugaguuaaaaucaacucaacagaagaguguacugagaguugggacccuaaccucagaugaguuauuagucuuggcugcugaucuagagaaauuaaaaucaaaagugaucaggacagaaaggccauugagugcaggugucuauaugggcaaccugagcucacagcaacuugaccaaaggcgagcucuucugaguaugauagggaugagugguggcaaucaaggggcucggacugggagagaugggguggugagaguuugggauguaaaaaaugcagaauugcucaauaaucaguucgggaccaugccaagucugacacuggcaugucugacaaaacaagggcagguugacuuaaaugaugcagugcaagcauugacagauuuggguuugaucuacacagcaaaguauccuaacacuucagacuuggauaggcugacucaaagucaccccauccuaaauaugauugacaccaagaaaagcucuuugaacaucucagguuauaauuuuagcuugggugcagcugugaaggcaggagcuuguaugcuggaugguggcaauauguuggagacaaucaaagugucaccucagacaauggauggcauccucaaauccauuuuaaaggucaagaaggcucuugggauguucauuucagacaccccuggugaaaggaaucccuacgaaaacauacucuacaagauuuguuugucaggggauggauggccauauauugcaucaagaaccucaauaacaggaagggccugggaaaacacugucguugaucuagagucagaugggaagccacagaaagcuggcagcaacaauuccaacaaaucccugcagucggcaggguuuacugcugggcuuacuuauucucagcuuaugacccucaaggaugcaaugcugcaacuugauccaaaugcuaagacuuggauggacauugaaggaagaccugaagauccaguggaaauugcccucuaucaaccaaguucaggcugcuacauacacuucuuccgugagccuacugauuuaaagcaguucaagcaagaugcuaaauacucacaugggauugaugucacagaccucuucgcugcacaaccgggcuuaacuagugcugucauagaugcacucccccggaauaugguuaucaccugucagggguccgaugauauaaggaaacuccuugaaucacaaggaagaaaggacaucaaauuaauugacauugcccucagcaaaauugauuccaggaaguaugaaaaugcagucugggaucaguauaaagacuuaugccacaugcacacaggugucguuguugaaaagaagaaaagaggcgguaaagaggaaauaaccccucacugugcacuaauggacugcaucauguuugaugcagcagugucaggaggacugaacucauuaguuuugagagcagugcugcccagagacaugguauucagaacaucgacaccaagagucguccuguaaggacuaguaauaaggaaacuguaugaaugucugugggcaggaagugaagagauccuucuguaaagguuuuuggaauuaugucugcugaauaauaaacuuuuuugaaauaauaaaucugguagaaaaaugagaucuaaaaaaaaaaaaaaaaaaaaaaaaaaaaaaaaaaaaaaaaaaaaaaaaaaaaaaaaaaaaaaaaugcaucccccccccccccccccccccccccccccccaaaggcucuuuucagagccaccagaauu

SEQ ID NO: 10379 - RNA, 2050 nt, Artificial Sequence
  mRNA product Design b-4 comprising derived and/or modified sequence from MOPV/LASV reassortant(IGS-1;Clade IV)__AFY05578__NP (wt)
gggagagucccgcagucggcguccagcggcucugcuuguucgugugugugucguugcaggccuuauucaagcuuaccaugagugccucaaaggaaauaaaauccuuuuuguggacacaaucuuugaggagggaauuaucugguuacugcuccaacaucaaacuacagguggugaaagaugcccaggcucuuuuacauggacuugacuucuccgaagucaguaauguucaacgguugaugcgcaaggagagaagggaugacaaugauuugaaacgguugagggaccuaaaucaagcggucaacaaucuuguugaauuaaaaucaacucaacaaaagaguauacugagaguugggacucuaaccucagaugacuuauuaaucuuagccgcugaucuagagaaguuaaggucaaaggugaucagaacagaaaggccauuaagugcaggugucuauaugggcaaccuaagcucacagcaacuugaccaaagaagagcucuccugaauaugauaggaaugaguggugguaaucaaggggcucgggcugggagagauggaguggugagaguuugggaugugaaaaaugcagaguugcucaguaaucaguucgggaccaugccaagucugacacuggcaugucugacaaaacaggggcagguugacuugaaugaugcaguacaagcauugacagauuuggguuugaucuacacagcaaaguaucccaacacuucagacuuagacaggcugacucaaagucaucccauccuaaauaugauugacaccaagaaaagcucuuugaauaucucagguuauaauuuuagcuugggugcagcugugaaggcaggagcuugcaugcuggaugguggcaauauguuggagacaaucaaggugucaccucagacaauggaugguauccucaaauccauuuuaaaggucaagaaggcucuuggaauguucauuucagacaccccuggugaaaggaauccuuaugaaaacauacucuacaagauuuguuugucaggagauggauggccauauauugcaucaagaaccucaauaacaggaagggccugggaaaacacugucguugaucuggaaucagaugggaagccacagaaagcugacagcaacaauuccaguaaaucccugcagucggcaggguuuaccgcugggcuuaccuauucucagcugaugacccucaaggaugcaaugcugcaacuugacccaaaugcuaagaccuggauggacauugaaggaagaccugaagauccaguggaaauugcccucuaucaaccaaguucaggcugcuacauacacuucuuccgugaaccuacugauuuaaagcaguucaagcaggaugcuaaguacucacaugggauugaugucacagaccucuucgcuacacaaccgggcuugaccagugcugucauugaugcacucccccggaauauggucauuaccugucagggguccgaugacauaaggaaacuccuugaaucacaaggaagaaaagacauuaaacuaauugauauugaccucaguaaaacugauuccaggaaguaugaaaaugcagucugggaccaguauaaagacuuaugccacaugcacacaggugucguuguugaaaagaagaaaagaggcgguaaagaggaaauaaccccucacugugcacuaauggacugcaucauguuugaugcagcagugucaggaggacugaacacaucgguuuugagagcagugcugcccagagauaugguguucagaacaucgacaccuagagucguucuguaaggacuaguaauaaggaaacuguaugaaugucugugggcaggaagugaagagauccuucuguaaagguuuuuggaauuaugucugcugaauaauaaacuuuuuugaaauaauaaaucugguagaaaaaugagaucuaaaaaaaaaaaaaaaaaaaaaaaaaaaaaaaaaaaaaaaaaaaaaaaaaaaaaaaaaaaaaaaaugcaucccccccccccccccccccccccccccccccaaaggcucuuuucagagccaccagaauu

SEQ ID NO: 10380 - RNA, 2050 nt, Artificial Sequence
  mRNA product Design b-4 comprising derived and/or modified sequence from LASV(LM765-SLE-2012;Clade IV)__AIT17815__NP (wt)
gggagagucccgcagucggcguccagcggcucugcuuguucgugugugugucguugcaggccuuauucaagcuuaccaugagugccucaaaggaaauaaaauccuuuuuguggacacaauccuugaggagggaauuaucugguuacugcuccaacaucaaacugcagguggugaaggaugcccaggcucuuuuacaugggcuugacuucucugaagucaguaauguucaacgguugaugcgcaaggagagaagggaugacaaugauuugaaacgguugagggaccuaaaucaagcagucaacaaucuuguugaauuaaaaucaacucaacaaaagaguauacugagaguugggacucuaaccucagaugacuuauuaaucuuggccgcugaucuagagaaguugaagucgaaggugaccagaacagaaaggccauugagugcaggugucuauaugggcaaccuaagcucucagcaacuugaccaaagaagagcucuucuggacaugauaggaaugagugguaguaaucaaggggcucgggcugggagagauggaguggucagaguuugggaugugaaaaaugcagaguugcucaauaaucaguucgggaccaugccaagucugacacuggcaugucugacaaaacaggggcagguugacuugaaugaugcagugcaagcauugacagauuuagguuugaucuacacagcgaaguaccccaauacuucagacuuggacaggcugacucaaagucaucccauccuaaauaugauugacaccaagaaaagcucuuugaacaucucagguuauaauuuuagcuugggugcagcugugaaggcaggagcuuguaugcuggaugguggcaauauguuggagacaaucaaggugucaccucagacaauggauggcauucucaaauccauuuuaaaggucaagaaggcucuugggauguuuauuucagaugccccuggugaaaggaauccuuaugaaaacauacucuacaagauuuguuuaucaggagacggauggccauacauugcaucaagaaccucaauaacaggaagggccugggaaaacacuguuguugaccuggaaucagaugggaagccacagaaagcuggcaguaacgguuccaauaaaucucugcagucggcaggauuuaccgcugggcucaccuauucucagcugaugacccucaaggaugcaaugcugcaacuugacccaaaugcuaagaccuggauggacauugaaggaagaccugaagauccaguggaaaucgcccucuaucaaccaaguucagggugcuacauacacuucuuccgugaaccuacugauuuaaagcaguucaagcaggaugcuaaguacucacaugggauugaugucacggaccucuucgcugcacagccgggcuugaccagugcugucauugaugcacucccccggaauauggucaucaccugccagggaucugaugacauaaggaaacucuuugaaucacaaggaagaaaagacauuaaacuaauugacauugcccucagcaagacugauuccaggaaguaugaaaaugcagucugggaucaguauaaagauuuaugccacaugcauacagguauuguuguugagaagaagaaaagaggugguaaagaggaaauaaccccucacugugcauuaauggacugcaucauguuugaugcagcaguaucaggaggacugaacacaucaguuuugagagcagugcugcccagagacaugguguucagaacaucgacaccuagggucguccuguaaggacuaguaauaaggaaacuguaugaaugucugugggcaggaagugaagagauccuucuguaaagguuuuuggaauuaugucugcugaauaauaaacuuuuuugaaauaauaaaucugguagaaaaaugagaucuaaaaaaaaaaaaaaaaaaaaaaaaaaaaaaaaaaaaaaaaaaaaaaaaaaaaaaaaaaaaaaaaugcaucccccccccccccccccccccccccccccccaaaggcucuuuucagagccaccagaauu

SEQ ID NO: 10381 - RNA, 2050 nt, Artificial Sequence
  mRNA product Design b-4 comprising derived and/or modified sequence from LASV(LM776-SLE-2012;Clade IV)__AIT17825__NP (wt)
gggagagucccgcagucggcguccagcggcucugcuuguucgugugugugucguugcaggccuuauucaagcuuaccaugagugcuucaaaggaaauaaaguccuuucuguggacacaaucauuaaggagggaauuaucuaguuacuguuccaacaucaaacuacagguggugaaagaugcccaggcucuuuugcaugggcuugacuucuccgaagucagcaauguucaacgguugaugcgcaaggagagaagggaugacaaugauuuaaagcgguugagggaccuuaaucaagcagucaacaaccuuguugaguuaaaaucaacucaacaaaagaguauauugagaguugggaccuuaaccucagaugacuuacuaaucuuagcugcugaucuagagaagcugaaaucaaaggugacuaggacagaaaggccauugagugcaggugucuacauggguaaccugagcucacagcaacuugaccagagacgagcucuucugagcaugauagggaugagugguaguaaucaaggggcucgggcugggagagauggaguggugagaguuugggaugugaaaaaugcagaguugcucaauaaucaguucgggaccaugccaagucuuacacuggcauguuugacaaaacaggggcagguugacuugaaugaugcagugcaagcauugacagauuugggucugaucuacacggcaaaguaucccaauacuucagaccuggauaggcugacucaaagucaccccauccuaaacaugauugacaccaagaagagcucuuuaaacaucucagguuauaauuuuagcuugggugcagcugugaaggcaggagcuugcaugcuggaugguggcaacauguuggagacaaucaaggugucaccucagacaauggaugguauccucaaauccaucuugaaggucaagaaggcucuugggauguucaucucagacaccccuggugaaaggaauccuuaugagaacauacucuauaagaucugucugucaggagauggguggccauacauugcaucaaggaccucaauaacaggaagggcuugggaaaacacugucguugaucuggaaucagaugggaagccacagaaagcuggcagcaacaauucuaacaaaucccugcagucggcaggguuuaccgcugggcuuaccuauucucagcuaaugacucucaaggaugcaaugcugcaacuugauccaaaugcuaagaccuggauggauauugaaggaagaccugaagauccaguggaaguugcccucuaucaaccaaguucaggcuguuacauucacuucuuccgugaaccuacugauuuaaagcaguucaaacaggaugcuaaguacucacaugggauugaugucacagaccucuucgcugcacaaccgggccugaccagugcugucauagaugcacucccucggaauauggucauuaccugucagggguccgaugacauaaggaaacuccuugaaucacaagguaggaaagacaucaaacuaauugauauugcccucagcaaaacugauuccaggaaguaugaaaaugcagucugggaucaguauaaagacuuaugccacaugcacacaggugucguuguugagaagaagaaaagaggugguaaagaggaaauaaccccucacugugcacuaauggacugcaucauguuugacgcagcagugucaggaggacugaacacaucgguuuugagagcagugcugcccagggauaugguguucagaacaucaacaccuagagucguucuguaaggacuaguaauaaggaaacuguaugaaugucugugggcaggaagugaagagauccuucuguaaagguuuuuggaauuaugucugcugaauaauaaacuuuuuugaaauaauaaaucugguagaaaaaugagaucuaaaaaaaaaaaaaaaaaaaaaaaaaaaaaaaaaaaaaaaaaaaaaaaaaaaaaaaaaaaaaaaaugcaucccccccccccccccccccccccccccccccaaaggcucuuuucagagccaccagaauu

SEQ ID NO: 10382 - RNA, 2050 nt, Artificial Sequence
  mRNA product Design b-4 comprising derived and/or modified sequence from LASV(Mad39;Clade IV)__ANH09723__NP (wt)
gggagagucccgcagucggcguccagcggcucugcuuguucgugugugugucguugcaggccuuauucaagcuuaccaugagugccucaaaagagauaaagucuuuuuuguggacacagucucugaggagggaauugucggguuacugcuccaacaucaaacuacagguggugaaagaugcccaggcucuuuuacauggacuugacuuuucugaggucagcaacguccaacggcugaugcgcaaacagagaagggaugacaaugaucuaaagcggcugagggauuuaaaucaagcaguuaacaaucuuguugaacuaaaaucaacucagcaaaagaguguguugagaguuggaacucuaaccucagaugacuuguugacauuagcugcugaccuagagaagcugaaaucaaagguaaccaggacagaaagaccauugaccgcaggcguuuacaugggcaacuuaaguucacaacagcuugaccaaagacgggcucuccugaauaugauaggaaugaguggugguaaccaaggggcucgaacugggagagaugggguagugagggucugggauguuaaaaaugcagaauugcucaacaaucaguuuggaacuaugccaagcuugacacuagcaugccugacaaagcaagggcagguugaccuaaaugauguggugcaagcacuaacagaucuaggccugaucuauacagcaaaguaucccaacacuucagaccuggacagacuaacucagagccaucccauccuaaacaugauugauacuaauaaaagcucccuaaauaucucagguuauaauuuuagcuugggugcagcugugaaggcaggagcuugcaugcuggaugguggaaacaugcuagagacaaucaaagugucaccccaaacaauggauggcauccucaaguccauuuuaaagguaaaaaagagucuugggauguucauuucagacacccccggcgagagaaaucccuaugaaaauauacucuacaagauuugucugucgggggauggguggccauauauugcaucaaggaccucaauaacaggaagggccugggaaaauacuguuguugaucuagaaucaggugggaagccacagaaagcugguagcaacaacuccaacaagucccuacaaucggcaggauuugcugcugggcucacuuauucucaguuaaugacccucaaggaugcaauguugcaacuugauccaaaugcuaagaccuggauggauauugagggaaggccugaagacccaguggagauugcucucuaucagccaauuucggguugcuacauucacuucuuccgugaaccuacugaucugaaacaguucaagcaagaugcuaaguauucacauggaauugauguuacagaccuuuuugcugcacaaccaggauuaacuagugcugugauagaagcacucccccggaacauggucaucaccugucaaggaucugacgacauaaggaaacuuuuugagucacaaggaaggaaagacaucaagcugauugauauugcucucagcaaaacugauucuagaaaauaugaaaacgcagucugggaccaguacaaagauuuaugucauaugcacacagguguuguuguugagaagaaaaagaagggcggcaaagaagaaauaaccccucauugugcucuaauggacugcaucauguuugaugcagcaguaucaggagggcugaacacgcugguuuugagagcagugcuaccuagagauaugguguucagaacaucaacaccuaaagucguccuguaaggacuaguaauaaggaaacuguaugaaugucugugggcaggaagugaagagauccuucuguaaagguuuuuggaauuaugucugcugaauaauaaacuuuuuugaaauaauaaaucugguagaaaaaugagaucuaaaaaaaaaaaaaaaaaaaaaaaaaaaaaaaaaaaaaaaaaaaaaaaaaaaaaaaaaaaaaaaaugcaucccccccccccccccccccccccccccccccaaaggcucuuuucagagccaccagaauu

SEQ ID NO: 10383 - RNA, 2050 nt, Artificial Sequence
  mRNA product Design b-4 comprising derived and/or modified sequence from LASV(Z0947-SLE-2011;Clade IV)__AIT17841__NP (wt)
gggagagucccgcagucggcguccagcggcucugcuuguucgugugugugucguugcaggccuuauucaagcuuaccaugagugccucaaaggaaauaaaguccuuuuuguggacacaauccuugaggagggaauuaucugguuacugcuccaacaucaaacugcagguggugaaggaugcccaggcucuuuuacaugggcuugacuucucugaagucaguaauguucaacgguugaugcgcaaggagagaagggaugacaaugauuugaaacgguugagggaccuaaaucaagcagucaacaaucuuguugaauuaaaaucaacucaacaaaagaguauacugagaguugggacucuaaccucagaugacuuauuaaucuuggccgcugaucuagagaaguugaagucgaaggugaccagaacagaaagaccauugagugcaggugucuauaugggcaaccuaagcucacagcaacuugaccaaagaagagcucuucugaacaugauaggaaugagugguaguaaucaaggggcucggacugggagagauggaguggucagaguuugggaugugaaaaaugcagaguugcucaauaaucaguucggaaccaugccaagucugacacuggcaugucugacaaaacaggggcagguugacuugaaugaugcaguacaagcauugacagauuuagguuugaucuacacagcgaaguaccccaauacuucagacuuggacaggcugacucaaagucaccccauccuaaauaugauugacaccaagaaaagcucuuugaacaucucagguuauaauuuuagcuugggugcagcugugaaggcaggagcuuguaugcuggaugguggcaauauguuggagacaaucaaggugucaccucagacaauggaugguauucucaaauccauuuuaaaggucaagaaggcucuugggauguucauuucagaugccccuggugaaaggaauccuuaugaaaacauacucuacaagauuuguuugucaggagacggauggccauacauugcaucaagaaccucaauaacaggaagggccugggaaaacacuguuguugaucuggaaucagaugggaagccacagaaagcuggcaguaacgguuccaauaaaucucugcagucggcaggauuuaccgcugggcucaccuauucucagcugaugacccucaaggaugcaaugcugcaacuugacccaaaugcuaagaccuggauggacauugaaggaagaccugaagauccaguggaaaucgcccucuaucaaccaaguucagggugcuacauacacuucuuccgugaaccuacugauuuaaagcaguucaagcaggaugcuaaguacucacaugggauugaugucacggaccucuucgcugcacaaccgggcuugaccagugcugucauugaugcacucccccggaauauggucaucaccugccaggggucugaugacauaaggaaacucuuugaaucacaaggaagaaaagacauuaaacuaauugacauugcccucagcaagacugauuccaggaaguaugaaaaugcagucugggaucaguauaaagacuuaugccacaugcauacaggcauuguuguugagaagaagaaaagaggcggcaaagaggaaauaaccccucacugugcacuaauggacugcaucauguuugaugcagcaguaucaggaggacugaacacaucaguuuugagagcagugcugcccagagacaugguguucagaacaucgacaccuagggucguccuguaaggacuaguaauaaggaaacuguaugaaugucugugggcaggaagugaagagauccuucuguaaagguuuuuggaauuaugucugcugaauaauaaacuuuuuugaaauaauaaaucugguagaaaaaugagaucuaaaaaaaaaaaaaaaaaaaaaaaaaaaaaaaaaaaaaaaaaaaaaaaaaaaaaaaaaaaaaaaaugcaucccccccccccccccccccccccccccccccaaaggcucuuuucagagccaccagaauu

SEQ ID NO: 10384 - RNA, 2050 nt, Artificial Sequence
  mRNA product Design b-4 comprising derived and/or modified sequence from LASV(Josiah;Clade IV)__NP_694869__NP (opt1)
gggagagucccgcagucggcguccagcggcucugcuuguucgugugugugucguugcaggccuuauucaagcuuaccaugagcgccuccaaggagaucaagagcuuccuguggacccagucccuccgccgggagcugagcggcuacugcuccaacaucaagcuccagguggucaaggacgcccaggcgcugcugcacgggcuggacuucagcgagguguccaacgugcagcgccucaugcggaaggagcgccgggacgacaacgaccugaagcgccugcgggaccucaaccaggccgucaacaaccugguggagcucaagagcacccagcagaaguccauccugcgcgugggcacccugaccagcgacgaccugcucauccuggccgccgaccuggagaagcucaaguccaaggucauccggaccgagcgcccccugagcgccgggguguacaugggcaaccuguccagccagcagcucgaccagcggcgcgcgcugcugaacaugaucgggauguccggcggcaaccagggggcccgggccggccgcgacggggugguccgggugugggacgugaagaacgccgagcuccugaacaaccaguucggcaccaugccgagccugacgcucgcgugccugaccaagcaggggcaggucgaccugaacgacgccgugcaggcccucaccgaccugggccugaucuacaccgccaaguaccccaacacguccgaccucgaccgccugacccagagccaccccauccugaacaugaucgacaccaagaaguccagccucaacaucagcggcuacaacuucucccugggggccgcggugaaggccggcgccugcaugcuggacgggggcaacaugcucgagaccaucaaggucagcccccagacgauggacggcauccugaaguccauccugaaggugaagaaggcccucgggauguucaucagcgacaccccgggcgagcggaaccccuacgagaacauccuguacaagaucugccuguccggggacggcuggcccuacaucgccagccgcaccuccaucaccgggcgggcgugggagaacacgguggucgaccucgagagcgacggcaagccccagaaggccgacuccaacaacagcuccaagagccugcaguccgccggcuucaccgccgggcugaccuacagccagcucaugacccugaaggacgccaugcugcagcuggacccgaacgcgaagacguggauggacaucgagggccgccccgaggaccccguggagaucgcccucuaccagcccuccagcgggugcuacauccacuucuuccgggagccgaccgaccugaagcaguucaagcaggacgccaaguacucccacggcaucgacgugaccgaccuguucgccacccagcccgggcucacgagcgccgucaucgacgcgcugccccgcaacauggugaucacgugccagggcuccgacgacauccgcaagcugcucgagagccagggccggaaggacaucaagcugaucgacaucgcccugagcaagaccgacucccgcaaguacgagaacgccgugugggaccaguacaaggaccucugccacaugcacaccggggucguggucgagaagaagaagcggggcgggaaggaggagaucaccccgcacugcgcccugauggacugcaucauguucgacgcggccgugagcggcgggcugaacaccuccgugcuccgcgccguccugccccgggacaugguguuccgcaccagcacgccccgggugguccugugaggacuaguaauaaggaaacuguaugaaugucugugggcaggaagugaagagauccuucuguaaagguuuuuggaauuaugucugcugaauaauaaacuuuuuugaaauaauaaaucugguagaaaaaugagaucuaaaaaaaaaaaaaaaaaaaaaaaaaaaaaaaaaaaaaaaaaaaaaaaaaaaaaaaaaaaaaaaaugcaucccccccccccccccccccccccccccccccaaaggcucuuuucagagccaccagaauu

SEQ ID NO: 10385 - RNA, 2050 nt, Artificial Sequence
  mRNA product Design b-4 comprising derived and/or modified sequence from LASV(LP;Clade I)__AAF86702__NP (opt1)
gggagagucccgcagucggcguccagcggcucugcuuguucgugugugugucguugcaggccuuauucaagcuuaccaugagcaacuccaaggagaucaagagcuuccuguggacccagucccuccgccgggagcugagcggcuacugcuccaacaucaagcuccagguggucaaggacgcccaggcccugcugcacgggcuggacuucagcgagguguccaacgugcagcgccucaugcggaagcagaagcgcgacgacgcggaccugaagcggcugcgcgaccucaaccaggccgucaacaaccugguggagcucaagagcacccagcagaagaacgugcugcgggucggcacgcuguccagcgacgaccugaucacccucgccgccgaccuggagaagcugaaguccaaggugauccgcaccgagcggccccucagcuccgggguguacaugggcaaccugagcucccagcagcuggaccagcgccgggcccuccugagcaugaucgggauguccggcggcccgcaggggaaccgcaccggcggggacggcgucgugcgggugugggacgucaagaacgcggagcugcucaacaaccaguucgggacgaugcccagccugacccuggccugccucaccaagcagggccagguggaccugaacgacgccgugcaggcccugaccgaccucggccugaucuacacggcgaaguaccccaacuccagcgaccuggacaugcucacccagagccaccccauccuggggauggucgacaccaagaaguccagccugaacaucuccggcuacaacuucagccucggggccgccgugaaggccggcgccugcaugcuggacggcgggaacaugcuggagaccaucaagguguccccgcagacgauggacggcauccucaagagcauccugaaggucaagcgcucccuggggauguucaucagcgacacccccggcgagcggaaccccuacgagaacauccucuacaagaucugccuguccggggagggcuggcccuacaucgcgagccgcaccuccaucaccggccgggccugggagaacacgcugguggaccucgagagcgacaacaagccgcccaagcugaacuccgccgggagcaacaagucccugcaggccgccggccucaacgcggggcugaccuacagccagcugaugacccugaaggacugcaugcuccagcuggaccccuccagcaagaccuggaucgacaucgagggccgccccgaggacccgguggagaucgcccuguuccagcccuccagcgggugcuacauccacuucuuccgggagcccacggaccucaagcaguucaagcaggacgccaaguacagccacggcaucgacgucaccgaccuguucuccacccagcccggccugaccagcgccgugaucgaggcccucccgcgcaacauggugcugacgugccagggguccgacgacaucaagaagcugcucgagagccagggccggcgcgacaucaagcugaucgacaucucccugagcaaggcggacucccgcaaguucgagaacgccgucugggaccaguacaaggaccucugccacaugcacaccgggguggucguggagaagaagaagcggggcgggaaggaggagaucacgccccacugcgcccugcuggacugcaucauguucgacgccgccaccaccggcagccucaacaucaccacccugcgcgcggugcugccccgggacauggucuuccgcaccuccacgcccaagguggugcucugaggacuaguaauaaggaaacuguaugaaugucugugggcaggaagugaagagauccuucuguaaagguuuuuggaauuaugucugcugaauaauaaacuuuuuugaaauaauaaaucugguagaaaaaugagaucuaaaaaaaaaaaaaaaaaaaaaaaaaaaaaaaaaaaaaaaaaaaaaaaaaaaaaaaaaaaaaaaaugcaucccccccccccccccccccccccccccccccaaaggcucuuuucagagccaccagaauu

SEQ ID NO: 10386 - RNA, 2050 nt, Artificial Sequence
  mRNA product Design b-4 comprising derived and/or modified sequence from LASV(803213;Clade II)__AAF86704__NP (opt1)
gggagagucccgcagucggcguccagcggcucugcuuguucgugugugugucguugcaggccuuauucaagcuuaccaugagcgccuccaaggaggugaaguccuuccuguggacccagagccuccgccgggagcugagcggcuacugcuccaacaucaagcugcaggucgugaaggacgcccaggcgcuccugcacgggcuggacuucagcgaggugaacaacguccagcgccucaugcggaagcagaagcgcgacgacggcgaccugaagcggcugcgcgaccucaaccaggccgugaacaaccugguggagcugaaguccacccagcagaaguccauccuccgggucgggacgcugaccagcgacgaccugcucacccuggccgccgaccuggagaagcucaagagcaaggugauccgcaccgagcggccccuguccagcggcguguacauggggaaccuguccacgcagcagcucgagcagcgccgggcccugcugaacaugaucggcauggucggcggggcgcagggcacccagccggggcgcgacggcguggugcgggucugggacgugaagaaccccgaccuccugaacaaccaguucgggaccaugcccagccugacccucgccugccugacgaagcagggccagguggaccugaacgacgccguccucgcccugaccgaccugggccucaucuacaccgcgaaguaccccaacuccagcgaccuggaccgccugucccagagccacccgauccucaacaugguggacaccaagaaguccagccugaacaucagcggguacaacuucucccugggcgccgccgugaaggccggggccugcaugcucgacggcggcaacaugcuggagacgaucaaggucacgccccagaccauggacgggauccucaagagcauccugaaggugaagcggucccugggcauguucgugagcgacacccccggggagcgcaaccccuacgagaacauccuguacaagaucugccucuccggcgacggguggccguacaucgcgagccggaccuccaucgucggccgcgccugggagaacaccaccguggaccuggagagcgacggcaagccccagaagguggggaccgccggcuccaacaagagccugcaguccgccggguuccccacgggccucaccuacagccagcugaugacccugaaggacuccaugaugcagcuggaccccagcgccaagaccuggaucgacaucgaggggcggccggaggaccccgucgagaucgcgcucuaccagcccauguccggcugcuacauccacuucuuccgcgagcccacggaccugaagcaguucaagcaggacgccaaguacagccacggcaucgacguggccgaccuguucccggcccagcccgggcucaccuccgccgucaucgaggcgcugccccggaacauggugcugaccugccagggcagcgacgacaucaagaagcuccuggacucccaggggcgccgcgacaucaagcugaucgacaucagccucagcaagguggacucccggaaguucgagaacgccgucugggaccagugcaaggaccugugccacaugcacaccggcgugguggucgagaagaagaagcgcgggggcaaggaggagaucacgccccacugcgcccugauggacugcaucauguucgacgccgccgugagcggcgggcucaacaucccggugcugcgggcgguccugccccgcgacaugguguuccggaccuccagccccaaggugguccucugaggacuaguaauaaggaaacuguaugaaugucugugggcaggaagugaagagauccuucuguaaagguuuuuggaauuaugucugcugaauaauaaacuuuuuugaaauaauaaaucugguagaaaaaugagaucuaaaaaaaaaaaaaaaaaaaaaaaaaaaaaaaaaaaaaaaaaaaaaaaaaaaaaaaaaaaaaaaaugcaucccccccccccccccccccccccccccccccaaaggcucuuuucagagccaccagaauu

SEQ ID NO: 10387 - RNA, 2053 nt, Artificial Sequence
  mRNA product Design b-4 comprising derived and/or modified sequence from LASV(GA391;Clade III)__CAA36646__NP (opt1)
gggagagucccgcagucggcguccagcggcucugcuuguucgugugugugucguugcaggccuuauucaagcuuaccaugagcgccuccaaggaggugcgcagcuuccuguggacccagucccuccggcgcgagcugagcggcuacugcuccaacaucaagcugcaggucgugaaggacgcccaggcgcuccugcacgggcuggacuucagcgagguguccaacguccagcggcucaugcgcaagcagaagcgggacgacggcgaccugaagcgccugcgggaccucaaccaggccgugaacaaccugguggagcucaagagcacccagcagaaguccguccugcgcguggggacccugagcuccgacgaccugcucauccuggccgccgaccuggagaagcucaagagcaaggugacccggaccgagcgcccccuguccagcggcgucuacauggggaaccuguccagccagcagcucgaccagcggcgcgcccugcugaacaugaucggcaugaccggcguguccgggggcgggaagggcgcgagcgacgggaucgugcgggucugggacgugaagaacgccgagcuccugaacaaccaguucggcacgaugccgucccugacccucgccugccugaccaagcagggccagguggaccugaacgacgccguccaggcgcucaccgaccuggggcugaucuacacggccaaguaccccaacagcagcgaccucgaccgccugucccagagccaccccauccugaacaugaucgacaccaagaaguccagccucaacaucuccggcuacaacuucagccugggggccgccgugaaggccggcgcgugcaugcuggacggcgggaacaugcucgagaccaucaaggugagcccccagaccauggacggcauccucaaguccauccugaaggucaagaagucccuggggauguucgugagcgacacgccgggcgagcggaaccccuacgagaacauccuguacaagaucugccuguccggggacggcuggcccuacaucgccagccgcaccuccaucgugggccgggccugggagaacaccgucguggaccucgagcaggacaacaagccccagaagaucgggaacggcgggagcaacaagucccugcagagcgccggcuucgccgcggggcugaccuacucccagcucaugacgcugaaggacuucaagugcuucaaccugaucccgaacgccaagaccuggauggacaucgagggccgccccgaggaccccguggagaucgcccuguaccagcccagcuccggcugcuacguccacuucuuccgggagccgaccgaccucaagcaguucaagcaggacgccaaguacagccacgggaucgacgugaccgaccuguucgccgcgcagcccggccugacgagcgccgucaucgaggcccucccccgcaacauggugaucacgugccagggguccgaggacauccggaagcugcuggagagccagggccgccgcgacaucaagcucaucgacaucacccuguccaaggccgacagccggaaguucgagaacgccgugugggaccaguucaaggaccugugccacaugcacaccggggucgugguggagaagaagaagcgcggcggcaaggaggagaucacgccccacugcgcgcucauggacugcaucauguucgacgccgccgucuccgggggccuggacgccaaggugcugcgggugguccucccgcgcgacaugguguuccggaccagcacccccaaggugguccugugaggacuaguaauaaggaaacuguaugaaugucugugggcaggaagugaagagauccuucuguaaagguuuuuggaauuaugucugcugaauaauaaacuuuuuugaaauaauaaaucugguagaaaaaugagaucuaaaaaaaaaaaaaaaaaaaaaaaaaaaaaaaaaaaaaaaaaaaaaaaaaaaaaaaaaaaaaaaaugcaucccccccccccccccccccccccccccccccaaaggcucuuuucagagccaccagaauu

SEQ ID NO: 10388 - RNA, 2050 nt, Artificial Sequence
  mRNA product Design b-4 comprising derived and/or modified sequence from LASV(AV;Clade V)__CCA30315__NP (opt1)
gggagagucccgcagucggcguccagcggcucugcuuguucgugugugugucguugcaggccuuauucaagcuuaccaugagcgccuccaaggaggugaaguccuuccuguggacccagagccuccgccgggagcugagcggcuacugcuccaacaucaagcugcaggucgugaaggacgcccaggcgcuccugcacgggcuggacuucagcgagguguccaacguccagcgccucaugcggaagcagcgccgggacgacagcgaccugaagcgccugcgggaccucaaccaggccgugaacaaccugguggagcugaaguccacccagcagaaguccguccuccgcgugggcacgcugagcagcgacgaccugcucacccuggccgccgaccuggagaagcucaaguccaaggugacccggaccgagcgcccccugagcuccggggucuacaugggcaaccugagcucccagcagcucgaccagcggcgcgcccugcugaaccucaucgggaugacgaacggcagccagggcucccaggcggggcgggacggcguggugcgcgucugggacgugaagaacgccgagcugcugaacaaccaguucgggaccaugccgagccucacccuggccugccugaccaagcagggccagguggaccucaacgacgucgugcaggcccugacggaccuggggcucaucuacaccgcgaaguaccccaacaccagcgaccuggaccggcugacccagucccaccccauccucaacaugaucgacacgaagaaguccagccugaacaucagcggcuacaacuucucccugggcgccgccgugaaggccggggccugcaugcucgacggcgggaacaugcuggagaccaucaaggucagcccccaguccauggacggcauccucaagagcauccugaaggugaagcgcgcgcugggcauguucguguccgacaccccgggggagcggaaccccuacgagaacauccuguacaagaucugccucagcggcgacggguggcccuacaucgccucccgcaccagcaucgucggccgggccugggagaacacggugguggaccuggagaccgacgggaagccccagaagaucggcuccggcaacagcaacaagucccugcagagcgccggguucuccgccggccucaccuacagccagcugaugacccugaaggacgcgaugcugcagcucgacccgaacgccaagacguggauggacaucgaggggcgccccgaggaccccgucgagguggcccuguaccagcccaucuccggcugcuacauccacuucuuccgggagccgaccgaccugaagcaguucaagcaggacgccaaguacagccacgggaucgacaucgccgaccucuucgcggcccagcccggccugaccagcgccgucaucgaggcccugccccgcaacauggugaucacgugccagggcuccgaggacaucaagaagcuccuggagagccaggggcgcaaggacaucaagcugaucgacaucgcccucuccaagaucgacagccggaaguucgagaacgcggugugggaccaguacaaggaccugugccacaugcacaccggcgucgugguggagaagaagaagcgcgggggcaaggaggagaucaccccgcacugcgcccugauggacugcaucauguucgacgccgccgucuccgggggccucaacacccuggugcugcgggcggugcucccccgcgacauggucuuccggaccagcacgccccgcguggugcugugaggacuaguaauaaggaaacuguaugaaugucugugggcaggaagugaagagauccuucuguaaagguuuuuggaauuaugucugcugaauaauaaacuuuuuugaaauaauaaaucugguagaaaaaugagaucuaaaaaaaaaaaaaaaaaaaaaaaaaaaaaaaaaaaaaaaaaaaaaaaaaaaaaaaaaaaaaaaaugcaucccccccccccccccccccccccccccccccaaaggcucuuuucagagccaccagaauu

SEQ ID NO: 10389 - RNA, 2050 nt, Artificial Sequence
  mRNA product Design b-4 comprising derived and/or modified sequence from LASV(Togo/2016/7082;Clade VI)__AMR44578__NP (opt1)
gggagagucccgcagucggcguccagcggcucugcuuguucgugugugugucguugcaggccuuauucaagcuuaccaugagcaacuccaaggaggugaaguccuuccuguggacccagagccuccgccgggagcugagcggcuacugcuccaacaucaagcugcaggucgugaaggacgcccaggcccuccugcacgggcuggacuucagcgagguguccaacguccagcgccucaugcggaagcagaagcgcgacgacggcgaccugaagcggcugcgcgaccucaaccaggcggugaacaaccugguggagcucaagagcguccagcagaaguccauccugcggguggggacccugaccagcgacgaccugcucacccuggccgccgaccuggagaagcucaaguccaaggugacccgcaccgagcggccccugagcuccggcgucuacauggggaaccugagcucccagcagcucgaccagcgccgggcccugcugagcaugaucggcauguccggcgggaaccagaacagccagccgaagggcgacgggguggugcgcgucugggacgugaagaacgccgaccuccugaacaaccaguucggcacgaugcccucccugacccucgcgugccugaccaagcagggccagguggaccugaacgacgccguccaggcccucaccgaccuggggcugaucuacacggccaaguaccccaacagcagcgaccucgaccggcugucccagagccaccccauccugaacaugaucgacaccaagaaguccagccucaacaucuccggcuacaacuucagccugggggcggccaucaagaccggcgccugcaugcuggacgggggcaacaugcucgagaccaucaaggugacgccgcagaccauggacggcauccugaaguccauccugaaggugaagcgcagccucgggauguucaucuccgacacccccggcgagcggaaccccuacgagaacauccuguacaagaucugccugagcggggacggcuggcccuacaucgccucccgcaccgccaucaucgggcgggcgugggagaacacggucguggaccucgagagcgacuccaagccgcagaagaucggcagcaacggcuccaacaagagccugcaguccgccggguucgcccccggccugaccuacagccagcucaugacccugaaggacuccaugcugcagcuggaccccaacgccaagaccuggaucgacaucgaggggcgccccgaggacccgguggaggucgcccucuuccagcccaucagcggcugcuacauccacuucuuccgggagcccacggaccugaagcaguucaagcaggacgcgaaguacagccacgggaucgacgugaccgaccuguucgccgcccagcccggccucaccuccgccgugaucgaggcccugccgcgcaacaugguccugaccugccagggcagcgacgacaucaagaagcuccuggacucccaggggcggcgcgacaucaagcugaucgacgugagccucaacaagaucgacucccgcaaguucgagaacgcggucugggaccaguacaaggaccugugccacaugcacacgggcgugguggucgagaagaagaagaagggcgggaaggaggagaucacgccccacugcgcccugcucgacugcaucauguucgacgccgccgugagcgggggccugaacgccaccgugcugcgggcgguccucccccgcgacaugguguuccggaccuccagccccaaggugguccugugaggacuaguaauaaggaaacuguaugaaugucugugggcaggaagugaagagauccuucuguaaagguuuuuggaauuaugucugcugaauaauaaacuuuuuugaaauaauaaaucugguagaaaaaugagaucuaaaaaaaaaaaaaaaaaaaaaaaaaaaaaaaaaaaaaaaaaaaaaaaaaaaaaaaaaaaaaaaaugcaucccccccccccccccccccccccccccccccaaaggcucuuuucagagccaccagaauu

SEQ ID NO: 10390 - RNA, 2050 nt, Artificial Sequence
  mRNA product Design b-4 comprising derived and/or modified sequence from LASV(KAK-428;Clade n.d. (VII))__ANH09741__NP (opt1)
gggagagucccgcagucggcguccagcggcucugcuuguucgugugugugucguugcaggccuuauucaagcuuaccaugagcaacuccaaggaggugaaguccuuccuguggacccagagccuccgccgggagcugagcggcuacugcaccaacaucaagcugcaggucgugaaggacgcccaggcccuccugcacgggcuggacuucuccgaggugagcaacguccagcgccucaugcggaagcagaagcgcgacgacaacgaccugaagcggcugcgcgaccucaaccaggcggugaacaaccugguggagcugaaguccguccagcagaaguccgugcucaaggugggcacgcugaacagcgacgaccugcucacccuggccgccgaccuggagaagcucaagagcaaggucgugcggaccgagcgcccccuguccagcgggguguacaugggcaaccuguccagccagcagcucgaccagcggcgcgcccugcugaacaugaucgggauggccggcggcucccaggggaaccagccgagccgggacggcgucgugcgcgugugggacgucaagaacgcggaccuccugaacaaccaguucgggaccaugcccucccugacgcucgccugccugaccaagcagggccagguggaccugaacgacgugguccucgcccugaccgaccuggggcucaucuacaccgccaaguaccccaacagcuccgaccuggaccggcugagccagaaccaccccgugcucaacaugaucgacgugaacaagagcucccugaacaucagcggcuacaacuucucccugggcgcggccgucaaggccggggccugcaugcucgacggcgggaacaugcuggagacgaucaagaucagcccgcagaccguggacggcauccugaaguccauccucaaggugaagcgcgcccugggcauguucgucagcgacacccccggggagcggaaccccuacgagaacauccuguacaaggugugccucuccggcaacggguggcccuacaucgcgagccgcaccuccaucgucggccgggccugggagaacacggugguggaccuggagagcaacaagaaccagccgaaggucgggaacaacggcuccaacaagaugcugcagagcuccggcuucgccaccgggcucaccuacagccagcugaugacccugcgcgacuccaugcugcagcucgaccccacggccaagaccuggaucgacaucgagggccggcccgaggaccccguggagcuggcccuguuccagccgagcuccgggugcuacauccacuucuuccgcgagcccaccgaccucaagcaguucaagcaggacgcgaaguacagccacggcaucgacgugaacgaccuguucuccgcccagcccgggcugaccagcgccguccucgaggcccugccccggaacauggugcugacgugccagggcagcgacgacauccgcaagcuccuggacucccaggaccgcaaggacaucaagcugaucgacaucagccucuccaaggccgacgcgcggaaguucgagaacgacgugugggaccaguucaaggaccugugccacaugcacaccggcaucgucguggagaagaagaagaagggcgggaagcaggagaugaccccgcacugcgcccugcucgacugcaucauguucgacgccgccgugagcgggggccugaacguccccacccugcgcgccgugcuccccacggacaugguguuccggaccaucaccaccaaggucgugcugugaggacuaguaauaaggaaacuguaugaaugucugugggcaggaagugaagagauccuucuguaaagguuuuuggaauuaugucugcugaauaauaaacuuuuuugaaauaauaaaucugguagaaaaaugagaucuaaaaaaaaaaaaaaaaaaaaaaaaaaaaaaaaaaaaaaaaaaaaaaaaaaaaaaaaaaaaaaaaugcaucccccccccccccccccccccccccccccccaaaggcucuuuucagagccaccagaauu

SEQ ID NO: 10391 - RNA, 2050 nt, Artificial Sequence; identical to SEQ ID NO: 10385
  mRNA product Design b-4 comprising derived and/or modified sequence from LASV(Pinneo-NIG-1969;Clade I)__AIT17837__NP (opt1)

SEQ ID NO: 10392 - RNA, 2050 nt, Artificial Sequence
  mRNA product Design b-4 comprising derived and/or modified sequence from LASV(ISTH0009-NIG-2011;Clade II)__AIT17405__NP (opt1)
gggagagucccgcagucggcguccagcggcucugcuuguucgugugugugucguugcaggccuuauucaagcuuaccaugagcguguccaaggaggucaagagcuuccuguggacccagucccuccgccgggagcugagcggcuacugcuccaacaucaagcuccagguggugaaggacgcccaggcccugcugcacgggcuggacuucagcgaggucuccaacgugcagcgccucaugcggaagcagaagcgcgacgacagcgaccugaagcggcugcgcgaccucaaccaggcggugaacaaccuggucgagcugaaguccacccagcagaaguccauccuccgggugggcacccugaccagcgacgaccugcucacccuggccgccgaccuggagaagcucaagagcaaggugauccgcaccgagcggccccuguccagcggggucuacaugggcaaccuguccacgcagcagcucgagcagcgccgggcccugcugaacaugaucgggauggugggcggcgcccaggggacccagccgggccgcgacggggugguccgggugugggacgugaagaaccccgaccuccugaacaaccaguucggcaccaugcccagccugacccucgcgugccugacgaagcaggggcaggucgaccugaacgacgccgugcucgcccugaccgaccugggccucaucuacaccgccaaguaccccaacuccagcgaccuggaccgccugucccagagccacccgauccucaacaugguggacaucaagaaguccagccugaacaucagcggcuacaacuucucccugggggcggccgucaaggccggcgccugcaugcucgacgggggcaacaugcuggagaccaucaaggugacgccccagaccauggacggcauccucaagagcauccugaaggugaagcggucccuggggauguucgucagcgacacccccggcgagcgcaaccccuacgagaacauccuguacaagaucugccucuccggggacggcuggccguacaucgccagccggaccuccaucguggggcgcgcgugggagaacacgaccguggaccuggagagcgacggcaagccccagaaggucggcuccgccgggagcaacaagucccugcagagcgccggcuuccccaccgggcucaccuacucccagcugaugacgcugaaggacagcaugaugcagcuggaccccuccgccaagaccuggaucgacaucgagggccggccggaggaccccguggagaucgcccucuaccagcccaugagcgggugcuacauccacuucuuccgcgagcccaccgaccugaagcaguucaagcaggacgcgaaguacucccacggcaucgacgucgccgaccuguucccggcccagcccggccucaccagcgccgugaucgaggcccugccccggaacauggugcugacgugccaggggagcgacgacaucaagcgccuccuggacucccagggccgccgggacaucaagcugaucgacaucgcgcucagcaaggccgacucccgccgguucgagaacgccgucugggaccagugcaaggaccugugccacaugcacaccggggugguggucgagaagaagaagcgcggcgggaaggaggagaucacgccccacugcgcccugauggacugcaucauguacgacgccgcggugagcggcggccucaacaucccggugcugcgggccguccugccccgcgacaugguguuccggaccuccagccccaaggugguccucugaggacuaguaauaaggaaacuguaugaaugucugugggcaggaagugaagagauccuucuguaaagguuuuuggaauuaugucugcugaauaauaaacuuuuuugaaauaauaaaucugguagaaaaaugagaucuaaaaaaaaaaaaaaaaaaaaaaaaaaaaaaaaaaaaaaaaaaaaaaaaaaaaaaaaaaaaaaaaugcaucccccccccccccccccccccccccccccccaaaggcucuuuucagagccaccagaauu

SEQ ID NO: 10393 - RNA, 2050 nt, Artificial Sequence
  mRNA product Design b-4 comprising derived and/or modified sequence from LASV(ISTH2010-NIG-2012;Clade II)__AIT17483__NP (opt1)
gggagagucccgcagucggcguccagcggcucugcuuguucgugugugugucguugcaggccuuauucaagcuuaccaugagcgccuccaaggaggugaaguccuuccuguggacccagagccuccgccgggagcugagcggcuacugcuccaacaucaagcugcaggucgugaaggacgcccaggcgcuccugcacgggcuggacuucagcgagguguccaacguccagcgccucaugcggaagcagaagcgcgacgacagcgaccugaagcggcugcgcgaccucaaccaggccgugaacaaccugguggagcugaaguccacccagcagaaguccauccuccgggucggcacgcugaccagcgacgaccugcucacccuggccgccgaccuggagaagcucaagagcaaggugauccgcaccgagcggccccuguccagcgggguguacaugggcaaccuguccacgcagcagcucgagcagcgccgggcccugcugaaccucaucgggauggucggcggcgcgcaggggacccagccgggccgcgacgggguggugcgggucugggacgugaagaaccccgaccugcugaacaaccaguucggcaccaugcccagccucacccuggccugccugacgaagcagggccagguggaccucaacgacgccguccuggcccugaccgaccucgggcugaucuacaccgcgaaguaccccaacuccagcgaccuggaccgccucucccagagccacccgauccugaacaugguggacaccaagaaguccagccugaacaucagcggcuucaacuucucccucggggccgccgugaaggccggcgccugcaugcuggacgggggcaacaugcuggagacgaucaaggucacgccccagaccauggacggcauccucaagagcauccugaaggugaagaagucccuggggauguucgugagcgacacccccggcgagcggaaccccuacgagaacauccucuacaagaucugccuguccggggacggcuggccguacaucgcgagccgcaccuccaucgucgggcgggccugggagaacaccaccguggaccuggagagcgacggcaagccccacaaggugggcaccgccggguccaacaagagccuccaguccgccggcuuccccacggggcugaccuacagccagcugaugacccugaaggacuccaugaugcagcucgaccccagcgccaagaccuggaucgacaucgagggccgcccggaggaccccgucgagaucgcgcuguaccagcccauguccgggugcuacauccacuucuuccgggagcccacggaccugaagcaguucaagcaggacgccaaguacagccacggcaucgacguggccgaccucuucccggcccagcccggccugaccuccgccgucaucgaggcgcugccccgcaacauggugcugaccugccaggggagcgacgacaucaagcggcuccuggacagccagggccgccgcgacaucaagcucaucgacaucgcccuguccaaggccgacagccggcgcuucgagaacgccgugugggaccagugcaaggaccugugccacaugcacaccggggucgugguggagaagaagaagcggggcgggaaggaggagaucacgccccacugcgcccucauggacugcaucauguacgacgcggccgucuccggcggccugaacaucccggugcugcgcgccgugcucccccgggacauggucuuccgcaccagcucccccaagguggugcugugaggacuaguaauaaggaaacuguaugaaugucugugggcaggaagugaagagauccuucuguaaagguuuuuggaauuaugucugcugaauaauaaacuuuuuugaaauaauaaaucugguagaaaaaugagaucuaaaaaaaaaaaaaaaaaaaaaaaaaaaaaaaaaaaaaaaaaaaaaaaaaaaaaaaaaaaaaaaaugcaucccccccccccccccccccccccccccccccaaaggcucuuuucagagccaccagaauu

SEQ ID NO: 10394 - RNA, 2050 nt, Artificial Sequence
  mRNA product Design b-4 comprising derived and/or modified sequence from LASV(Lassa virus/H.sapiens-wt/NGA/2015/ISTH_0543;Clade II)__AVO03640__NP (opt1)
gggagagucccgcagucggcguccagcggcucugcuuguucgugugugugucguugcaggccuuauucaagcuuaccaugagcgccuccaaggaggugaaguccuuccuguggacccagagccuccgccgggagcugagcggcuacugcuccaacaucaagcugcaggucgugaaggacgcccaggcgcuccugcacgggcuggacuucagcgagguguccaacguccagcgccucaugcggaagcagaagcgcgacgacagcgaccugaagcggcugcgcgaccucaaccaggccgugaacaaccugguggagcugaaguccacccagcagaaguccauccuccgggucggcacgcugaccagcgacgaccugcucacccuggccgccgaccuggagaagcucaagagcaaggugauccgcaccgagcggccccuguccagcgggguguacaugggcaaccuguccacgcagcagcucgagcagcgccgggcccugcugaacaugaucgggauggucggcggcgcgcaggggacccagccgggccgcgacgggguggugcgggucugggacgugaagaaccccgaccuccugaacaaccaguucggcaccaugcccagccugacccucgccugccugacgaagcagggccagguggaccugaacgacgccguccucgcccugaccgaccuggggcucaucuacaccgcgaaguaccccaacuccagcgaccuggaccgccugucccagagccacccgauccucaacaugguggacaccaagaaguccagccugaacaucagcggcuacaacuucucccugggggccgccgugaaggccggcgccugcaugcucgacgggggcaacaugcuggagacgaucaaggucacgccccagaccauggacggcauccucaagagcauccugaaggugaagaagucccuggggauguucgugagcgacacccccggcgagcggaaccccuacgagaacauccuguacaagaucugccucuccggggacggcuggccguacaucgcgagccgcaccuccaucgucgggcgggccugggagaacaccaccguggaccuggagagcgacggcaagccccagaaggugggcuccgccgggagcaacaagucccugcagagcgccggcuuccccaccgggcucacguacucccagcugaugacccugaaggacagcaugaugcagcuggaccccuccgccaagaccuggaucgacaucgagggccgcccggaggaccccgucgagaucgcgcucuaccagcccaugagcgggugcuacauccacuucuuccgggagcccaccgaccugaagcaguucaagcaggacgccaaguacucccacggcaucgacguggccgaccuguucccggcccagcccggccucacgagcgccgucaucgaggcgcugccccgcaacauggugcugaccugccaggggagcgacgacaucaagcggcuccuggacucccagggccgcaaggacaucaagcugaucgacaucgcccucagcaaggccgacucccgccgguucgagaacgccgugugggaccagugcaaggaccugugccacaugcacaccggggucgugguggagaagaagaagcgcggcgggaaggaggagaucacgccccacugcgcccugauggacugcaucauguacgacgcggccgucagcggcggccucaacaucccggugcugcgggccgugcugccccgcgacauggucuuccggaccuccagccccaagguggugcucugaggacuaguaauaaggaaacuguaugaaugucugugggcaggaagugaagagauccuucuguaaagguuuuuggaauuaugucugcugaauaauaaacuuuuuugaaauaauaaaucugguagaaaaaugagaucuaaaaaaaaaaaaaaaaaaaaaaaaaaaaaaaaaaaaaaaaaaaaaaaaaaaaaaaaaaaaaaaaugcaucccccccccccccccccccccccccccccccaaaggcucuuuucagagccaccagaauu

SEQ ID NO: 10395 - RNA, 2050 nt, Artificial Sequence
  mRNA product Design b-4 comprising derived and/or modified sequence from LASV(Lassa virus/H.sapiens-wt/NGA/2016/ISTH_0009;Clade II)__AVO03572__NP (opt1)
gggagagucccgcagucggcguccagcggcucugcuuguucgugugugugucguugcaggccuuauucaagcuuaccaugagcgccuccaaggaggugaaguccuuccuguggacccagagccuccgccgggagcugagcggcuacugcuccaacaucaagcugcaggucgugaaggacgcccaggcgcuccugcacgggcuggacuucagcgagguguccaacguccagcgccucaugcggaagcagaagcgcgacgacagcgaccugaagcggcugcgcgaccucaaccaggccgugaacaaccugguggagcugaaguccacccagcagaaguccauccuccgggucggcacgcugaccagcgacgaccugcucacccuggccgccgaccuggagaagcucaagagcaaggugauccgcaccgagcggccccuguccagcgggguguacaugggcaaccuguccacgcagcagcucgagcagcgccgggcccugcugaacaugaucgggauggucggcggcgcgcaggggacccagccgggccgcgacgggguggugcgggucugggacgugaagaaccccgaccuccugaacaaccaguucggcaccaugcccagccugacccucgccugccugacgaagcagggccagguggaccugaacgacgccguccucgcccugaccgaccuggggcucaucuacaccgcgaaguaccccaacuccagcgaccuggaccgccugucccagagccacccgauccucaacaugguggacaccaagaaguccagccugaacaucagcggcuacaacuucucccugggggccgccgugaaggccggcgccugcaugcucgacgggggcaacaugcuggagacgaucaaggucacgccccagaccauggacggcauccucaagagcauccugaaggugaagaagucccuggggauguucgugagcgacacccccggcgagcggaaccccuacgagaacauccuguacaagaucugccucuccggggacggcuggccguacaucgcgagccgcaccuccaucgucgggcgggccugggagaacaccaccguggaccuggagagcgacggcaagccccagaaggugggcuccgccgggagcaacaagucccugcagagcgccggcuuccccaccgggcucacguacucccagcugaugacccugaaggacagcaugaugcagcuggaccccuccgccaagaccuggaucgacaucgagggccgcccggaggaccccgucgagaucgcgcucuaccagcccaugagcgggugcuacauccacuucuuccgggagcccaccgaccugaagcaguucaagcaggacgccaaguacucccacggcaucgacguggccgaccuguucccggcccagcccggccucacgagcgccgucaucgaggcgcugccccgcaacauggugcugaccugccaggggagcgacgacaucaagcggcuccuggacucccagggccgccgcgacaucaagcugaucgacaucgcccucagcaaggccgacucccggcgcuucgagaacgccgugugggaccagugcaaggaccugugccacaugcacaccggggucgugguggagaagaagaagcggggcgggaaggaggagaucacgccccacugcgcccugauggacugcaucauguacgacgcggccgucagcggcggccucaacaucccggugcugcgcgccgugcugccccgggacauggucuuccgcaccuccagccccaagguggugcucugaggacuaguaauaaggaaacuguaugaaugucugugggcaggaagugaagagauccuucuguaaagguuuuuggaauuaugucugcugaauaauaaacuuuuuugaaauaauaaaucugguagaaaaaugagaucuaaaaaaaaaaaaaaaaaaaaaaaaaaaaaaaaaaaaaaaaaaaaaaaaaaaaaaaaaaaaaaaaugcaucccccccccccccccccccccccccccccccaaaggcucuuuucagagccaccagaauu

SEQ ID NO: 10396 - RNA, 2050 nt, Artificial Sequence
  mRNA product Design b-4 comprising derived and/or modified sequence from LASV(Lassa virus/H.sapiens-wt/NGA/2016/ISTH_0017;Clade II)__AVO03568__NP (opt1)
gggagagucccgcagucggcguccagcggcucugcuuguucgugugugugucguugcaggccuuauucaagcuuaccaugagcgccuccaaggaggugaaguccuuccuguggacccagagccuccgccgggagcugagcggcuacugcuccagcaucaagcugcaggucgugaaggacgcccaggcgcuccugcacgggcuggacuucuccgaggugagcaacguccagcgccucaugcggaagcagaagcgcgacgacuccgaccugaagcggcugcgcgaccucaaccaggccgugaacaaccugguggagcucaagagcacccagcagaaguccauccugcgggucggcacgcugaccagcgacgaccugcucacccuggccgccgaccuggagaagcucaaguccaaggugauccgcaccgagcggccccugagcuccgggguguacaugggcaaccugagcacgcagcagcucgagcagcgccgggcccugcugaacaugaucgggauggcgggcggcgcccaggggacccagccgggccgcgacggggucgugcgggugugggacgucaagaaccccgaccuccugaacaaccaguucggcaccaugcccucccugacccucgccugccugacgaagcagggccagguggaccugaacgacgccgugcucgcgcugaccgaccuggggcucaucuacaccgccaaguaccccaacagcuccgaccuggaccgccugagccagagccacccgauccucaacauggucgacaccaagaaguccagccugaacaucuccggcuacaacuucagccugggggccgccgugaaggccggcgcgugcaugcucgacgggggcaacaugcuggagacgaucaaggugacgccccagaccauggacggcauccugaaguccauccucaaggucaagcggagccuggggauguucguguccgacgcccccggcgagcgcaaccccuacgagaacauccuguacaagaucugccucagcggggacggcuggccguacaucgccucccggaccagcaucguggggcgcgccugggagaacaccaccgucgaccuggaguccgacggcaagccccagaaggugggcgccaccgggagcaacaagucccugcagagcgcgggcuuccccaccgggcucacguacucccagcugaugacccugaaggacagcaugaugcagcuggaccccuccgccaagaccuggaucgacaucgagggccggccggaggaccccguggaggucgcccucuaccagcccgugagcgggugcuacauccacuucuuccgcgagcccaccgaccugaagcaguucaagcaggacgccaaguacucccacggcaucgacgucgccgaccuguucccggcgcagcccggccucacgagcgccgugaucgaggcccugccccggaacauggugcugaccugccaggggagcgacgacaucaagaagcuccuggacucccagggccgcaaggacaucaagcugaucgacaucgcccucagcaaggccgacucccgccgguucgagaacgcggucugggaccagugcaaggaccugugccacaugcacaccggggugguggucgagaagaagaagcgcggcgggaaggaggagaucacgccccacugcgcccugauggacugcaucauguacgacgccgccgugagcggcggccucaacaucccggugcugcgggcgguccugccccgcgacaugguguuccggaccuccagccccaaggugguccucugaggacuaguaauaaggaaacuguaugaaugucugugggcaggaagugaagagauccuucuguaaagguuuuuggaauuaugucugcugaauaauaaacuuuuuugaaauaauaaaucugguagaaaaaugagaucuaaaaaaaaaaaaaaaaaaaaaaaaaaaaaaaaaaaaaaaaaaaaaaaaaaaaaaaaaaaaaaaaugcaucccccccccccccccccccccccccccccccaaaggcucuuuucagagccaccagaauu

SEQ ID NO: 10397 - RNA, 2050 nt, Artificial Sequence
  mRNA product Design b-4 comprising derived and/or modified sequence from LASV(Lassa virus/H.sapiens-wt/NGA/2018/ISTH_0959;Clade II)__AVV65100__NP (opt1)
gggagagucccgcagucggcguccagcggcucugcuuguucgugugugugucguugcaggccuuauucaagcuuaccaugagcgccuccaaggaggugaaguccuuccuguggacccagagccuccgccgggagcugagcggcuacugcuccaacaucaagcugcaggucgugaaggacgcccaggcgcuccugcacgggcuggacuucagcgagguguccaacguccagcgccucaugcggaagcagaagcgcgacgacagcgaccugaagcggcugcgcgaccucaaccaggccgugaacaaccugguggagcugaaguccacccagcagaaguccauccuccgggucggcacccugaccagcgacgaccugcucacccuggccgccgaccuggagaagcucaagagcaaggugauccgcaccgagcggccccuguccagcgggguguacaugggcaaccuguccacgcagcagcucgagcagcgccgggcccugcugaaccucaucgggauggucggcggcgcgcaggggacccagccgggccgcgacgggguggugcgggucugggacgugaagaaccccgaccugcugaacaaccaguucggcaccaugcccagccucacccuggccugccugacgaagcagggccagguggaccucaacgacgucgugcuggcccugaccgaccucgggcugaucuacaccgccaaguaccccaacuccagcgaccuggaccgccucucccagagccacccgauccugaacaugguggacaccaagaaguccagccugaacaucagcggcuucaacuucucccucggggcggccgucaaggccggcgccugcaugcuggacgggggcaacaugcuggagacgaucaaggugacgccccagaccauggacggcauccucaagagcauccugaaggugaagaagucccuggggauguucgucagcgacacccccggcgagcggaaccccuacgagaacauccucuacaagaucugccuguccggggacggcuggccguacaucgccagccgcaccuccaucguggggcgggcgugggagaacaccaccguggaccuggagagcgacggcaagccccacaaggucggcaccgccggguccaacaagagccuccaguccgccggcuuccccacggggcugaccuacagccagcugaugacccugaaggacuccaugaugcagcucgaccccagcgccaagaccuggaucgacaucgagggccgcccggaggaccccguggagaucgcccuguaccagcccauguccgggugcuacauccacuucuuccgggagcccacggaccugaagcaguucaagcaggacgcgaaguacagccacggcaucgacgucgccgaccucuucccggcccagcccggccugaccuccgccgugaucgaggcccugccccgcaacauggugcugaccugccaggggagcgacgacaucaagcggcuccuggacagccagggccgcaaggacaucaagcucaucgacaucgcgcuguccaagaccgacagccgccgguucgagaacgccgucugggaccagugcaaggaccugugccacaugcacacgggggugguggucgagaagaagaagcgcggcgggaaggaggagaucacgccccacugcgcccucauggacugcaucauguacgacgccgccguguccggcggccugaacaucccggugcugcgggcgguccucccccgcgacaugguguuccggaccagcucccccaaggugguccugugaggacuaguaauaaggaaacuguaugaaugucugugggcaggaagugaagagauccuucuguaaagguuuuuggaauuaugucugcugaauaauaaacuuuuuugaaauaauaaaucugguagaaaaaugagaucuaaaaaaaaaaaaaaaaaaaaaaaaaaaaaaaaaaaaaaaaaaaaaaaaaaaaaaaaaaaaaaaaugcaucccccccccccccccccccccccccccccccaaaggcucuuuucagagccaccagaauu

SEQ ID NO: 10398 - RNA, 2050 nt, Artificial Sequence
  mRNA product Design b-4 comprising derived and/or modified sequence from LASV(LASV003-NIG-2008;Clade II)__AIT17581__NP (opt1)
gggagagucccgcagucggcguccagcggcucugcuuguucgugugugugucguugcaggccuuauucaagcuuaccaugagcgccuccaaggaggugaaguccuuccuguggacccagagccuccgccgggagcugagcggcuacugcuccagcaucaagcugcaggucgugaaggacgcccaggcgcuccugcacgggcuggacuucuccgaggugagcaacguccagcgccucaugcggaagcagaagcgcgacgacuccgaccugaagcggcugcgcgaccucaaccaggccgugaacaaccugguggagcucaagagcacccagcagaaguccguccugcgggugggcacccugaccagcgacgaccugcucacccuggccgccgaccuggagaagcucaaguccaaggugauccgcaccgagcggccccugagcuccggggucuacaugggcaaccugagcgcccagcagcucgagcagcgccggacgcugcugaacaugaucgggauggugggcggcgcgcaggggacccagccgggccgcgacggggugguccgggugugggacgugaagaaccccgaccuccugaacaaccaguucggcaccaugcccucccugacccucgccugccugacgaagcaggggcaggucgaccugaacgacguggugcucgcccugaccgaccugggccucaucuacaccgccaaguaccccaacagcuccgaccuggaccgccugagccagagccacccgauccucuccauggucgacaccaagaaguccagccugaacaucagcggcuacaacuucucccugggggcggccgugaaggccggcgccugcaugcucgacgggggcaacaugcuggagacgaucaaggugacgccccagaccauggacggcauccucaagagcauccugaaggucaagaagucccuggggauguucgugagcgacacccccggcgagcggaaccccuacgagaacauccuguacaagaucugccucuccggggacggcuggccguacaucgccagccgcaccuccaucguggggcgggcgugggagaacaccaccgucgaccuggagagcgacggcaagccccagaaggugggcaccgccggguccaacaagagccugcaguccgccggcuuccccacggggcucaccuacagccagcugaugacccugaaggacuccaugaugcagcuggaccccagcgccaagaccuggaucgacaucgagggccgcccggaggaccccgucgagaucgcccucuaccagcccauguccgggugcuacauccacuucuuccgggagcccacggaccugaagcaguucaagcaggacgcgaaguacagccacggcaucgacgugaccgaccuguucccggcccagcccggccucaccagcgccgugaucgaggcccugccccgcaacaugguccugaccugccagggguccgacgacaucaagcggcuccuggacagccagggccgccgcgacaucaagcugaucgacaucgcccucuccaaggcggacagccggcgcuucgagaacgccgugugggaccagugcaaggaccugugccacaugcacacggggguggucguggagaagaagaagcggggcgggaaggaggagaucacgccccacugcgcccugauggacugcaucauguacgacgccgccguguccggcggccucaacaucccgguccugcgcgcggugcugccccgggacaugguguuccgcaccagcucccccaaggucgugcucugaggacuaguaauaaggaaacuguaugaaugucugugggcaggaagugaagagauccuucuguaaagguuuuuggaauuaugucugcugaauaauaaacuuuuuugaaauaauaaaucugguagaaaaaugagaucuaaaaaaaaaaaaaaaaaaaaaaaaaaaaaaaaaaaaaaaaaaaaaaaaaaaaaaaaaaaaaaaaugcaucccccccccccccccccccccccccccccccaaaggcucuuuucagagccaccagaauu

SEQ ID NO: 10399 - RNA, 2050 nt, Artificial Sequence
  mRNA product Design b-4 comprising derived and/or modified sequence from LASV(LASV035-NIG-2009;Clade II)__AIT17589__NP (opt1)
gggagagucccgcagucggcguccagcggcucugcuuguucgugugugugucguugcaggccuuauucaagcuuaccaugagcgccuccaaggaggugaaguccuuccuguggacccagagccuccgccgggagcugagcggcuacugcuccagcaucaagcugcaggucgugaaggacgcccaggcgcuccugcacgggcuggacuucuccgaggugagcaacguccagcgccucaugcggaagcagaagcgcgacgacuccgaccugaagcggcugcgcgaccucaaccaggccgugaacaaccugguggagcucaagagcacccagcagaaguccauccugcgggucggcacgcugaccagcgacgaccugcucacccuggccgccgaccuggagaagcucaaguccaaggugauccgcaccgagcggccccugagcuccgggguguacaugggcaaccugagcgcccagcagcucgagcagcgccgggcgcugcugaacaugaucgggauggucggcggcgcccaggggacgcagccgggccgcgacgggguggugcgggucugggacgugaagaaccccgaccuccugaacaaccaguucggcaccaugcccucccugacccucgccugccugaccaagcagggccagguggaccugaacgacgccguccucgcgcugacggaccuggggcucaucuacaccgccaaguaccccaacagcuccgaccuggaccgccugagccagagccacccgauccucaacaugguggacaccaagaaguccagccugaacaucuccggcuacaacuucagccugggggccgccgugaaggccggcgcgugcaugcucgacgggggcaacaugcuggagaccaucaaggucacgccccagaccauggacggcauccugaaguccauccucaaggugaagcggagccuggggauguucguguccgacacccccggcgagcgcaaccccuacgagaacauccuguacaagaucugccucagcggggacggcuggccguacaucgccucccggaccagcaucgucgggcgcgccugggagaacacgaccguggaccuggaguccgacggcaagccccagaaggugggcaccaccgggagcaacaagucccugcagagcgccggcuuccccacggggcucaccuacucccagcugaugacccugaaggacagcaugaugcagcuggaccccuccgccaagaccuggaucgacaucgagggccggccggaggaccccgucgagaucgcgcucuaccagcccaugagcgggugcuacauccacuucuuccgcgagcccacggaccugaagcaguucaagcaggacgccaaguacucccacggcaucgacguggccgaccuguucccggcccagcccggccucaccagcgccgucaucgaggcgcugccccggaacauggugcugaccugccaggggagcgacgacaucaagaagcuccuggacucccagggccgccgcgacaucaagcugaucgacaucgcccucagcaaggccgacucccggaaguucgagaacgccgugugggaccagugcaaggaccugugccacaugcacaccggggucgugguggagaagaagaagcgcggcgggaaggaggagaucacgccccacugcgcccugauggacugcaucauguacgacgcggccgucagcggcggccucaacaucccggugcugcgggccgugcugccccgcgacauggucuuccggaccuccagccccaagguggugcucugaggacuaguaauaaggaaacuguaugaaugucugugggcaggaagugaagagauccuucuguaaagguuuuuggaauuaugucugcugaauaauaaacuuuuuugaaauaauaaaucugguagaaaaaugagaucuaaaaaaaaaaaaaaaaaaaaaaaaaaaaaaaaaaaaaaaaaaaaaaaaaaaaaaaaaaaaaaaaugcaucccccccccccccccccccccccccccccccaaaggcucuuuucagagccaccagaauu

SEQ ID NO: 10400 - RNA, 2050 nt, Artificial Sequence
  mRNA product Design b-4 comprising derived and/or modified sequence from LASV(LASV1000-NIG-2009;Clade II)__AIT17783__NP (opt1)
gggagagucccgcagucggcguccagcggcucugcuuguucgugugugugucguugcaggccuuauucaagcuuaccaugagcgccuccaaggaggugaaguccuuccuguggacccagagccuccgccgggagcugagcggcuacugcuccaacaucaagcugcaggucgugaaggacgcccaggcgcuccugcacgggcuggacuucagcgagguguccaacguccagcgccucaugcggaagcagaagcgcgacgacagcgaccugaagcggcugcgcgaccucaaccaggccgugaacaaccugguggagcugaaguccacccagcagaaguccauccuccgggucggcacgcugaccagcgacgaccugcucacccuggccgccgaccuggagaagcucaagagcaaggugauccgcaccgagcggccccuguccagcgggguguacaugggcaaccuguccacgcagcagcucgagcagcgccgggcccugcugaacaugaucgggauggucggcggcgcgcaggggacccagccgggccgcgacgggguggugcgggucugggacgugaagaaccccgaccuccugaacaaccaguucggcaccaugcccagccugacccucgccugccugacgaagcagggccagguggaccugaacgacgucgugcucgcccugaccgaccuggggcucaucuacaccgccaaguaccccaacuccagcgaccuggaccgccugucccagagccacccgauccucaacaugguggacaccaagaaguccagccugaacaucagcggcuacaacuucucccugggggcggccgucaaggccggcgccugcaugcucgacgggggcaacaugcuggagacgaucaaggugacgccccagaccauggacggcauccucaagagcauccugaaggugaagaagucccuggggauguucgucagcgacacccccggcgagcggaaccccuacgagaacauccuguacaagaucugccucuccggggacggcuggccguacaucgccagccgcaccuccaucguggggcgggcgugggagaacaccaccguggaccuggagagcgacggcaagccccagaaggucggcaccgccggguccaacaagagccugcaguccgccggcuuccccacggggcucaccuacagccagcugaugacccugaaggacuccaugaugcagcuggaccccagcgccaagaccuggaucgacaucgagggccgcccggaggaccccguggagaucgcccucuaccagcccgucuccgggugcuacauccacuucuuccgggagcccacggaccugaagcaguucaagcaggacgcgaaguacagccacggcaucgacguggccgaccuguucccggcccagcccggccucaccuccgccgugaucgaggcccugccccgcaacaugguccugaccugccaggggagcgacgacaucaagcggcuccuggacagccagggccgccgcgacaucaagcugaucgacaucgcgcucuccaaggccgacagccggcgcuucgagaacgccgugugggaccagugcaaggaccugugccacaugcacaccgggguggucguggagaagaagaagcggggcgggaaggaggagaucacgccccacugcgcccugauggacugcaucauguacgacgccgcgguguccggcggccucaacaucccgguccugcgcgccgugcugccccgggacaugguguuccgcaccagcucccccaaggucgugcucugaggacuaguaauaaggaaacuguaugaaugucugugggcaggaagugaagagauccuucuguaaagguuuuuggaauuaugucugcugaauaauaaacuuuuuugaaauaauaaaucugguagaaaaaugagaucuaaaaaaaaaaaaaaaaaaaaaaaaaaaaaaaaaaaaaaaaaaaaaaaaaaaaaaaaaaaaaaaaugcaucccccccccccccccccccccccccccccccaaaggcucuuuucagagccaccagaauu

SEQ ID NO: 10401 - RNA, 2050 nt, Artificial Sequence
  mRNA product Design b-4 comprising derived and/or modified sequence from LASV(LASV221-NIG-2010;Clade II)__AIT17625__NP (opt1)
gggagagucccgcagucggcguccagcggcucugcuuguucgugugugugucguugcaggccuuauucaagcuuaccaugagcgccuccaaggaggugaaguccuuccuguggacccagagccuccgccgggagcugagcggcuacugcuccagcaucaagcugcaggucgugaaggacgcccaggcgcuccugcacgggcuggacuucuccgaggugagcaacguccagcgccucaugcggaagcagcgccgggacgacuccgaccugaagcgccugcgggaccucaaccaggccgugaacaaccugguggagcucaagagcacccagcagaaguccauccugcgcgucggcacgcugaccagcgacgaccugcucacccuggccgccgaccuggagaagcucaaguccaaggugauccggaccgagcgcccccugagcuccgggguguacaugggcaaccugagcacgcagcagcucgagcagcggcgcgcccugcugaacaugaucgggauggucggcggcgcgcaggggacccagccgggccgggacgggguggugcgcgucugggacgugaagaaccccgaccuccugaacaaccaguucggcaccaugcccucccugacccucgccugccugacgaagcagggccagguggaccugaacgacgccguccucgcccugaccgaccuggggcucaucuacaccgcgaaguaccccaacagcuccgaccuggaccggcugagccagagccacccgauccucaacaugguggacaccaagaaguccagccugaacaucuccggcuacaacuucagccugggggccgccgugaaggccggcgccugcaugcucgacgggggcaacaugcuggagacgaucaaggucacgccccagaccguggacggcauccugaaguccauccucaaggugaagcgcagccuggggauguucgucuccgacacccccggcgagcggaaccccuacgagaacauccuguacaagaucugccucagcggggacggcuggccguacaucgcgucccgcaccagcaucguggggcgggccugggagaacaccaccguggaccuggaguccgacggcaagccccagaaggucggcaccgccgggagcaacaagucccugcagagcgccggcuuccccacggggcucaccuacucccagcugaugacccugaaggacagcaugaugcagcuggaccccuccgccaagaccuggaucgacaucgagggccgcccggaggaccccguggagaucgcgcucuaccagcccaugagcgggugcuacauccacuucuuccgggagcccacggaccugaagcaguucaagcaggacgccaaguacucccacggcaucgacgucgccgaccuguucccggcccagcccggccucaccagcgccgugaucgaggcgcugccccgcaacauggugcugaccugccaggggagcgacgacaucaagcgccuccuggacucccagggccggcgcgacaucaagcugaucgacaucgcccucagcaaggccgacucccggaaguucgagaacgccgucugggaccagugcaaggaccugugccacaugcacaccggggugguggucgagaagaagaagcgcggcgggaaggaggagaucacgccccacugcgcccugauggacugcaucauguacgacgcggccgugagcggcggccucaacaucccggugcugcgggccguccugccccgcgacaugguguuccggaccuccagccccaaggugguccucugaggacuaguaauaaggaaacuguaugaaugucugugggcaggaagugaagagauccuucuguaaagguuuuuggaauuaugucugcugaauaauaaacuuuuuugaaauaauaaaucugguagaaaaaugagaucuaaaaaaaaaaaaaaaaaaaaaaaaaaaaaaaaaaaaaaaaaaaaaaaaaaaaaaaaaaaaaaaaugcaucccccccccccccccccccccccccccccccaaaggcucuuuucagagccaccagaauu

SEQ ID NO: 10402 - RNA, 2050 nt, Artificial Sequence
  mRNA product Design b-4 comprising derived and/or modified sequence from LASV(LASV237-NIG-2010;Clade II)__AIT17639__NP (opt1)
gggagagucccgcagucggcguccagcggcucugcuuguucgugugugugucguugcaggccuuauucaagcuuaccaugagcgccuccaaggaggugaaguccuuccuguggacccagagccuccgccgggagcugagcggcuacugcuccaacaucaagcugcaggucgugaaggacgcccaggcgcuccugcacgggcuggacuucagcgagguguccaacguccagcgccucaugcggaagcagaagcgcgacgacagcgaccugaagcggcugcgcgaccucaaccaggccgugaacaaccugguggagcugaaguccacccagcagaaguccauccuccgggucggcacccugaccagcgacgaccugcucacccuggccgccgaccuggagaagcucaagagcaaggugauccgcaccgagcggccccuguccagcgggguguacaugggcaaccuguccacgcagcagcucgagcagcgccgggcccugcugaacaugaucgggauggucggcggcgcgcaggggacccagccgggccgcgacgggguggugcgggucugggacgugaagaaccccgaccuccugaacaaccaguucggcaccaugcccagccugacccucgccugccugacgaagcagggccagguggaccugaacgacgccguccucgcccugaccgaccuggggcucaucuacaccgcgaaguaccccaacuccagcgaccuggaccgccugucccagagccacccgauccucaacaugguggacaucaagaaguccagccugaacaucagcggcuacaacuucucccugggggccgccgugaaggccggcgccugcaugcucgacgggggcaacaugcuggagaccaucaaggucacgccccagaccauggacggcauccucaagagcauccugaaggugaagcggucccuggggauguucgugagcgacacccccggcgagcgcaaccccuacgagaacauccuguacaagaucugccucuccggggacggcuggccguacaucgcgagccggaccuccaucgucgggcgcgccugggagaacacgaccguggaccuggagagcgacggcaagccccagaaggugggcuccgccgggagcaacaagucccugcagagcgccggcuuccccaccgggcucaccuacucccagcugaugacgcugaaggacagcaugaugcagcuggaccccuccgccaagaccuggaucgacaucgagggccggccggaggaccccgucgagaucgcgcucuaccagcccaugagcgggugcuacauccacuucuuccgcgagcccaccgaccugaagcaguucaagcaggacgccaaguacucccacggcaucgacguggccgaccuguucccggcccagcccggccucaccagcgccgucaucgaggcgcugccccggaacauggugcugacgugccaggggagcgacgacaucaagcgccuccuggacucccagggccgccgggacaucaagcugaucgacaucgcccucagcaaggccgacucccgccgguucgagaacgccgugugggaccagugcaaggaccugugccacaugcacaccggggucgugguggagaagaagaagcgcggcgggaaggaggagaucacgccccacugcgcccugauggacugcaucauguacgacgcggccgucagcggcggccucaacaucccggugcugcgggccgugcugccccgcgacauggucuuccggaccuccagccccaagguggugcucugaggacuaguaauaaggaaacuguaugaaugucugugggcaggaagugaagagauccuucuguaaagguuuuuggaauuaugucugcugaauaauaaacuuuuuugaaauaauaaaucugguagaaaaaugagaucuaaaaaaaaaaaaaaaaaaaaaaaaaaaaaaaaaaaaaaaaaaaaaaaaaaaaaaaaaaaaaaaaugcaucccccccccccccccccccccccccccccccaaaggcucuuuucagagccaccagaauu

SEQ ID NO: 10403 - RNA, 2050 nt, Artificial Sequence
  mRNA product Design b-4 comprising derived and/or modified sequence from LASV(LASV253-NIG-2011;Clade II)__AIT17671__NP (opt1)
gggagagucccgcagucggcguccagcggcucugcuuguucgugugugugucguugcaggccuuauucaagcuuaccaugagcgccuccaaggaggugaaguccuuccuguggacccagagccuccgccgggagcugagcggcuacugcuccagcaucaagcugcaggucgugaaggacgcccaggcgcuccugcacgggcuggacuucuccgaggugagcaacguccagcgccucaugcggaagcagaagcgcgacgacuccgaccugaagcggcugcgcgaccucaaccaggccgugaacaaccugguggagcucaagagcacccagcagaaguccguccugcgggugggcacccugaccagcgacgaccugcucacccuggccgccgaccuggagaagcucaaguccaaggugauccgcaccgagcggccccugagcuccggggucuacaugggcaaccugagcacgcagcagcucgagcagcgccgggcccugcugaacaugaucgggauggugggcggcgcgcaggggacccagccgggccgcgacggggugguccgggugugggacgugaagaaccccgaccuccugaacaaccaguucggcaccaugcccucccugacccucgccugccugacgaagcaggggcaggucgaccugaacgacguggugcucgcccugaccgaccugggccucaucuacaccgccaaguaccccaacagcuccgaccuggaccgccugagccagagccacccgauccucaacauggucgacaccaagaaguccagccugaacaucuccggcuacaacuucagccugggggcggccgugaaggccggcgccugcaugcucgacgggggcaacaugcuggagacgaucaaggugacgccccagaccauggacggcauccugaaguccauccucaaggucaagaagucccuggggauguucgugagcgacacccccggcgagcggaaccccuacgagaacauccuguacaagaucugccucagcggggacggcuggccguacaucgccucccgcaccagcaucguggggcgggcgugggagaacaccaccgucgaccuggaguccgacggcaagccccagaaggugggcaccgccgggagcaacaagucccugcagagcgccggcuuccccacggggcucaccuacucccagcugaugacccugaaggacagcaugaugcagcuggaccccuccgccaagaccuggaucgacaucgagggccgcccggaggaccccgucgagaucgcccucuaccagcccaugagcgggugcuacauccacuucuuccgggagcccacggaccugaagcaguucaagcaggacgcgaaguacucccacggcaucgacgugaccgaccuguucccggcccagcccggccucaccagcgccgugaucgaggcccugccccgcaacaugguccugaccugccaggggagcgacgacaucaagcggcuccuggacucccagggccgccgcgacaucaagcugaucgacaucgcccucagcaaggcggacucccggcgcuucgagaacgccgugugggaccagugcaaggaccugugccacaugcacacggggguggucguggagaagaagaagcggggcgggaaggaggagaucacgccccacugcgcccugauggacugcaucauguacgacgccgccgugagcggcggccucaacaucccgguccugcgcgcggugcugccccgggacaugguguuccgcaccuccagccccaaggucgugcucugaggacuaguaauaaggaaacuguaugaaugucugugggcaggaagugaagagauccuucuguaaagguuuuuggaauuaugucugcugaauaauaaacuuuuuugaaauaauaaaucugguagaaaaaugagaucuaaaaaaaaaaaaaaaaaaaaaaaaaaaaaaaaaaaaaaaaaaaaaaaaaaaaaaaaaaaaaaaaugcaucccccccccccccccccccccccccccccccaaaggcucuuuucagagccaccagaauu

SEQ ID NO: 10404 - RNA, 2050 nt, Artificial Sequence
  mRNA product Design b-4 comprising derived and/or modified sequence from LASV(LASV254-NIG-2011;Clade II)__AIT17675__NP (opt1)
gggagagucccgcagucggcguccagcggcucugcuuguucgugugugugucguugcaggccuuauucaagcuuaccaugagcgccuccaaggaggugaaguccuuccuguggacccagagccuccgccgggagcugagcggcuacugcuccagcaucaagcugcaggucgugaaggacgcccaggcgcuccugcacgggcuggacuucuccgaggugagcaacguccagcgccucaugcggaagcagaagcgcgacgacuccgaccugaagcggcugcgcgaccucaaccaggccgugaacaaccugguggagcucaagagcacccagcagaaguccguccugcgggugggcacgcugaccagcgacgaccugcucacccuggccgccgaccuggagaagcucaaguccaaggugauccgcaccgagcggccccugagcuccggggucuacaugggcaaccugagcacgcagcagcucgagcagcgccgggcccugcugaacaugaucgggauggugggcggcgcgcaggggacccagccgggccgcgacggggugguccgggugugggacgugaagaaccccgaccuccugaacaaccaguucggcaccaugcccucccugacccucgccugccugacgaagcaggggcaggucgaccugaacgacgccgugcucgcccugaccgaccugggccucaucuacaccgcgaaguaccccaacagcuccgaccuggaccgccugagccagagccacccgauccucaacaugguggacaccaagaaguccagccugaacaucuccggcuacaacuucagccugggggccgccgucaaggccggcgccugcaugcucgacgggggcaacaugcuggagacgaucaaggugacgccccagaccauggacggcauccugaaguccauccucaaggugaagaagucccuggggauguucgucagcgacacccccggcgagcggaaccccuacgagaacauccuguacaagaucugccucagcggggacggcuggccguacaucgcgucccgcaccagcaucguggggcgggccugggagaacaccaucguggaccuggaguccgacggcaagccccagaaggucggcaccgccgggagcaacaagucccugcagagcgccggcuuccccaccgggcucacguacucccagcugaugacccugaaggacagcaugaugcagcuggaccccuccgccaagaccuggaucgacaucgagggccgcccggaggaccccguggagaucgcgcucuaccagcccaugagcgggugcuacauccacuucuuccgggagcccaccgaccugaagcaguucaagcaggacgccaaguacucccacggcaucgacgucgccgaccuguucccggcccagcccggccucacgagcgccgugaucgaggcgcugccccgcaacauggugcugaccugccaggggagcgacgacaucaagcggcuccuggacucccagggccgccgcgacaucaagcugaucgacaucgcccucagcaaggccgacucccggcgcuucgagaacgccgucugggaccagugcaaggaccugugccacaugcacaccggggugguggucgagaagaagaagcggggcgggaaggaggagaucacgccccacugcgcccugauggacugcaucauguacgacgcggccgugagcggcggccucaacaucccggugcugcgcgccguccugccccgggacaugguguuccgcaccuccagccccaaggugguccucugaggacuaguaauaaggaaacuguaugaaugucugugggcaggaagugaagagauccuucuguaaagguuuuuggaauuaugucugcugaauaauaaacuuuuuugaaauaauaaaucugguagaaaaaugagaucuaaaaaaaaaaaaaaaaaaaaaaaaaaaaaaaaaaaaaaaaaaaaaaaaaaaaaaaaaaaaaaaaugcaucccccccccccccccccccccccccccccccaaaggcucuuuucagagccaccagaauu

SEQ ID NO: 10405 - RNA, 2050 nt, Artificial Sequence
  mRNA product Design b-4 comprising derived and/or modified sequence from LASV(Nig08-04;Clade II)__ADU56611__NP (opt1)
gggagagucccgcagucggcguccagcggcucugcuuguucgugugugugucguugcaggccuuauucaagcuuaccaugagcgccuccaaggaggugaaguccuuccuguggacccagagccuccgccgggagcugagcggcuacugcuccaacaucaagcugcaggucgugaaggacgcccaggcgcuccugcacgggcuggacuucagcgagguguccaacguccagcgccucaugcggaagcagaagcgcgacgacggcgaccugaagcggcugcgcgaccucaaccaggccgugaacaaccugguggagcucaagagcacccagcagaaguccguccugcggguggggacccugaccagcgacgaccugcucacccuggccgccgaccuggagaagcucaaguccaaggugauccgcaccgagcggccccugagcuccggcgucuacauggggaaccugagcacgcagcagcucgagcagcgcaaggcccugcuguccaugaucggcauggugggcggggcgcagggcacccagccggggcgggacggcgugguccgcgugugggacgugaagaaccccgaccuccugaacaaccaguucgggaccaugcccagccugacccucgccugccugacgaagcagggccaggucgaccugaacgacgccgugcucgcccugaccgaccugggccucaucuacaccgcgaaguaccccaacuccagcgaccuggaccggcugucccagagccacccgauccucaacaugguggacaccaagaaguccagccugaacaucagcggguacaacuucucccugggcgccgccgucaaggccggggccugcaugcucgacggcggcaacaugcuggagacgaucaaggugacgccccagaccauggacgggauccucaagagcauccugaaggugaagcgcucccugggcauguucgucagcgacacccccggggagcggaaccccuacgagaacauccuguacaagaucugccucuccggcgacggguggccguacaucgcgagccgcaccuccaucgugggccgggccugggagaacaccaccguggaccuggagagcgacggcaagccccagaaggucgggaccgccggcuccaacaagagccugcaguccgccggguuccccacgggccucaccuacagccagcugaugacccugaaggacuccaugaugcagcuggaccccagcgccaagaccuggaucgacaucgaggggcgcccggaggaccccguggagaucgcgcucuaccagcccauguccggcugcuacauccacuucuuccgggagcccacggaccugaagcaguucaagcaggacgccaaguacagccacggcaucgacgucaccgaccuguucuccgcccagccggggcucaccagcgccgugaucgaggcccugccccgcaacauggugcugaccugccagggcagcgacgacaucaagaagcuccuggacucccaggggcggcgcgacaucaagcugaucgacaucagccucaacaaggcggacucccgccgguucgagaacgccgucugggaccagugcaaggaccugugccacaugcacacgggcgugguggucgagaagaagaagcgcgggggcaaggaggagaucacgccccacugcgcccugauggacugcaucauguucgacgccgccgugagcggcgggcucaacauccccauccugcgggcggugcugccgcgcgacauggucuuccggaccuccagccccaagguggugcucugaggacuaguaauaaggaaacuguaugaaugucugugggcaggaagugaagagauccuucuguaaagguuuuuggaauuaugucugcugaauaauaaacuuuuuugaaauaauaaaucugguagaaaaaugagaucuaaaaaaaaaaaaaaaaaaaaaaaaaaaaaaaaaaaaaaaaaaaaaaaaaaaaaaaaaaaaaaaaugcaucccccccccccccccccccccccccccccccaaaggcucuuuucagagccaccagaauu

SEQ ID NO: 10406 - RNA, 2053 nt, Artificial Sequence
  mRNA product Design b-4 comprising derived and/or modified sequence from LASV(GA391;Clade III)__AAA46284__NP (opt1)
gggagagucccgcagucggcguccagcggcucugcuuguucgugugugugucguugcaggccuuauucaagcuuaccaugagcgccuccaaggaggugcgcagcugccuguggacccagucccuccggcgcgagcugagcggcuacugcuccaacaucaagcugcaggucgugaaggacgcccaggcgcuccugcacgggcuggacuucagcgagguguccaacguccagcggcucaugcgcaagcagaagcgggacgacggcgaccugaagcgccugcgggaccucaaccaggccgugaacaaccugguggagcugaaguccacccagcagaaguccguccuccgcguggggacgcugagcuccgacgaccugcucauccuggccgccgaccuggagaagcucaagagcaaggugacccggaccgagcgcccccuguccagcggcgucuacauggggaaccuguccagccagcagcucgaccagcggcgcgcccugcugaacaugaucggcaugaccggcguguccgggggcgggaagggcgcgagcaacgggaucgugcgggucugggacgugaagaacgccgagcuccugaacaaccaguucggcacgaugccgucccugacccucgccugccugaccaagcagggccagguggaccugaacgacgccguccaggcgcucaccgaccuggggcugaucuacacggccaaguaccccaacagcagcgaccucgaccgccugucccagagccaccccauccugaacaugaucgacaccaagaaguccagccucaacaucuccggcuacaacuucagccugggggccgccgugaaggccggcgcgugcaugcuggacggcgggaacaugcucgagaccaucaaggugagcccccagaccauggacggcauccucaagagcauccugaaggucaagaagucccuggggauguucgugagcgacacgccgggcgagcggaaccccuacgagaacauccuguacaagaucugccuguccggggacggcuggagcuacaucgccucccgcaccagcaucgugggccgggccugggagaacaccgucguggaccucgagcaggacaacaagccccagaagaucgggaacggcggguccaacaagagccugcaguccgccggcuucgccgcggggcugaucuacagccagcucaugacccugaaggacuucaagugcuucaaccugauccccaacgccaagacguggauggacaucgagggccgcccggaggaccccguggagaucgcccuguaccagcccuccagcggcugcuacguccacuucuuccgggagcccaccgaccucaagcaguucaagcaggacgccaaguacagccacgggcgcgacgugaccgaccuguucgccgcgcagccgggccugaccuccgccgucaucgaggcccucccccggaacauggugaucacgugccaggggagcgaggacauccgcaagcugcuggagucccagggccgccgggacaucaagcucaucgacaucacccugagcaaggccgacucccgcaaguucgagaacgccgugugggaccaguucaaggaccugugccacaugcacaccggggucgugguggagaagaagaagcggggcggcaaggaggagaucacgccccacugcgcgcucauggacugcaucauguucgacgccgccgucagcgggggccuggacgccaaggugcugcgcgugguccucccccgggacaugguguuccgcaccuccaccccgaaggugguccugugaggacuaguaauaaggaaacuguaugaaugucugugggcaggaagugaagagauccuucuguaaagguuuuuggaauuaugucugcugaauaauaaacuuuuuugaaauaauaaaucugguagaaaaaugagaucuaaaaaaaaaaaaaaaaaaaaaaaaaaaaaaaaaaaaaaaaaaaaaaaaaaaaaaaaaaaaaaaaugcaucccccccccccccccccccccccccccccccaaaggcucuuuucagagccaccagaauu

SEQ ID NO: 10407 - RNA, 2050 nt, Artificial Sequence
  mRNA product Design b-4 comprising derived and/or modified sequence from LASV(Nig08-A19;Clade III)__ADU56619__NP (opt1)
gggagagucccgcagucggcguccagcggcucugcuuguucgugugugugucguugcaggccuuauucaagcuuaccaugagcgccuccaaggaggugaaguccuuccuguggacccagucccuccgccgggagcugagcggcuacugcuccaacaucaagcugcaggucgugaaggacgcccaggcgcuccugcacgggcuggacuucagcgagguguccaacguccagcgccucaugcggaagcagaagcgcgacgacggcgaccugaagcggcugcgcgaccucaaccaggccgugaacaaccugguggagcucaagagcacccagcagaaguccguccugcggguggggacccugagcuccgacgaccugcucgugcuggccgccgaccuggagaagcucaagagcaaggucgugcgcaccgagcggccccuguccagcggcaucuacauggggaaccuguccagccagcagcucgaccagcgcaaggcccugcugaacaugaucggcaugaccggcgggaacggcgggcggaacaccacguccgacggcaucgugcgcgucugggacgugaagaacgcggagcuccugaacaaccaguucgggaccaugccgagccugacccucgccugccugaccaagcagggccagguggaccugaacgacgccguccaggcccucacggaccugggccugaucuacaccgcgaaguaccccaacuccagcgaccucgaccggcuggcccagagccaccccauccugaacaugaucgacaccaagaaguccagccucaacaucuccggguacaacuucagccugggcgccgccgugaaggccggggcgugcaugcuggacggcggcaacaugcucgagaccaucaaggugagcccccagacgauggacgggauccucaagagcauccugaaggucaagcgcucccugggcauguucaucagcgacaccccgggggagcggaaccccuacgagaacauccuguacaagaucugccuguccggcgacggguggcccuacaucgccagccgcaccuccaucgugggccgggccugggagaacaccguggucgaccucgagagcgacaacaagccccagaagacgggcaacgggggcuccaacaagagccugcaguccgccggguucgccgcgggccugaccuacagccagcucaugacccugaaggacuccaugcugcagcuggacccgaacgccaagaccuggauggacaucgaggggcgccccgaggaccccguggagaucgcccucuaccagcccagcuccggcugcuacauccacuucuuccgggagccgacggaccugaagcaguucaagcaggacgccaaguacagccacggcaucgacgugaccgaccuguucgccgcgcagcccgggcucaccagcgccgucaucgaggcccugccccgcaacauggugaucacgugccagggcuccgaggacauccggaagcugcucgagagccaggggcgccgcgacaucaagcugaucgacaucucccugagcaaggucgacucccggaaguucgagaacgccgugugggaccaguucaaggaccucugccacaugcacaccggcaucguggucgagaagaagaagcgcgggggcaaggaggagaucacgccccacugcgcccugauggacugcaucauguucgacgcggccgugagcggcgggguggacgccaagguccugcgggccgugcucccgcgcgacaugguguuccggaccuccacccccaaggucgugcugugaggacuaguaauaaggaaacuguaugaaugucugugggcaggaagugaagagauccuucuguaaagguuuuuggaauuaugucugcugaauaauaaacuuuuuugaaauaauaaaucugguagaaaaaugagaucuaaaaaaaaaaaaaaaaaaaaaaaaaaaaaaaaaaaaaaaaaaaaaaaaaaaaaaaaaaaaaaaaugcaucccccccccccccccccccccccccccccccaaaggcucuuuucagagccaccagaauu

SEQ ID NO: 10408 - RNA, 2050 nt, Artificial Sequence
  mRNA product Design b-4 comprising derived and/or modified sequence from LASV(G1180-SLE-2010;Clade IV)__AIT17169__NP (opt1)
gggagagucccgcagucggcguccagcggcucugcuuguucgugugugugucguugcaggccuuauucaagcuuaccaugagcgccuccaaggagaucaagagcuuccuguggacccagucccuccgccgggagcugagcggcuacugcuccaacaucaagcuccagguggucaaggacgcccaggcgcugcugcacgggcuggacuucagcgagguguccaacgugcagcgccucaugcggaaggagcgccgggacgacaacgaccugaagcgccugcgggaccucaaccaggccgucaacaaccugguggagcucaagagcacccagcagaaguccauccugcgcgugggcacccugaccagcgacgaccugcucauccuggccgccgaccuggagaagcucaaguccaaggucauccggaccgagcgcccccugagcgccgggguguacaugggcaaccuguccagccagcagcucgaccagcggcgcgcgcugcuguccaugaucgggaugagcuccggcaaccagcgggcccaggccggccgcgacggggugguccgggugugggacgugaagaacgucgagcuccugaacaaccaguucggcaccaugccgagccugacgcucgccugccugaccaagcagggccagguggaccugaacgacgcggugcaggcccucaccgaccuggggcugaucuacaccgccaaguaccccaacacguccgaccucgaccgccugacccagagccaccccauccugaacaugaucgacaccaagaaguccagccucaacaucagcggguacaacuucucccugggcgccgccgucaaggcgggcgccugcaugcuggacgggggcaacaugcucgagaccaucaaggugagcccccagacgauggacgggauccugaaguccauccugaaggugaagaaggcccucggcauguucaucagcgacaccccgggcgagcggaaccccuacgagaacauccuguacaagaucugccuguccggggacggcuggcccuacaucgccagccgcaccuccaucaccgggcgggccugggagaacacggucguggaccucgagagcgacggcaagccccagaaggcgggguccaacaacagcaacaagucccugcagagcgugggcuucaccgccggccugaccuacucccagcucaugacccugaaggacgccaugcugcagcuggacccgaacgccaagacguggauggacaucgaggggcgccccgaggaccccgucgagaucgcccucuaccagcccagcuccggcugcuacauccacuucuuccgggagccgaccgaccugaagcaguucaagcaggacgcgaaguacagccacgggaucgacgugaccgaccuguucgccgcccagcccggccucaccuccgccgugaucgacgcccugccccgcaacauggucaucacgugccaggggagcgacgacauccgcaagcugcucgagagccagggccggaaggacaucaagcugaucgacaucgcgcuguccaagaccgacagccgcaaguacgagaacgccgugugggaccaguacaaggaccucugccacaugcacaccggcgucgugguggagaagaagaagcgcgggggcaaggaggagaucacgccccacugcgcccugauggacugcaucauguucgacgccgcggucuccgggggccugaacaccagcgugcuccgggccgugcugccgcgggacauggucuuccgcaccuccacgccccggguggugcugugaggacuaguaauaaggaaacuguaugaaugucugugggcaggaagugaagagauccuucuguaaagguuuuuggaauuaugucugcugaauaauaaacuuuuuugaaauaauaaaucugguagaaaaaugagaucuaaaaaaaaaaaaaaaaaaaaaaaaaaaaaaaaaaaaaaaaaaaaaaaaaaaaaaaaaaaaaaaaugcaucccccccccccccccccccccccccccccccaaaggcucuuuucagagccaccagaauu

SEQ ID NO: 10409 - RNA, 2050 nt, Artificial Sequence
  mRNA product Design b-4 comprising derived and/or modified sequence from LASV(G1442-SLE-2011;Clade IV)__AIT17181__NP (opt1)
gggagagucccgcagucggcguccagcggcucugcuuguucgugugugugucguugcaggccuuauucaagcuuaccaugagcgccuccaaggaggugaaguccuuccuguggacccagagccuccgccgggagcugagcggcuacugcuccaacaucaagcugcaggucgugaaggacgcccaggcgcuccugcacgggcuggacuucagcgagguguccaacguccagcgccucaugcggaagcagcgccgggacgacaacgaccugaagcgccugcgggaccucaaccaggccgugaacaaccugguggagcucaagagcacccagcagaaguccguccugcgcgugggcacccugaccagcgacgaccugcucgugcuggccgccgaccuggagaagcucaaguccaaggucauccggaccgagcgcccccugagcgccgggguguacaugggcaaccuguccagccagcagcucgaccagcggcgcgcgcugcugaacaugaucgggauguccggcggcauccaggggacccggacgggccgcgacggggugguccgggugugggacgugaagaacgccgaccuccugaacaaccaguucggcaccaugccgagccugacccucgccugccugaccaagcaggggcaggucgaccugaacgacguggugcaggcccucacggaccugggccugaucuacaccgcgaaguaccccaacgccuccgaccucgaccgccugacccagagccaccccauccugaacaugaucgacaccaagaaguccagccucaacaucagcggcuacaacuucucccugggggccgccgucaaggccggcgcgugcaugcuggacgggggcaacaugcucgagacgaucaaggugagcccccagaccauggacggcauccugaaguccauccugaaggugaagaagacccucgggauguucaucagcgacaccccgggcgagcggaaccccuacgagaacauccuguacaagaucugccuguccggggacggcuggcccuacaucgccagccgcacguccaucaccgggcgggccugggagaacaccgucguggaccucgagagcgacggcaagccccagaaggccggcuccaacaacagcaacaagucccugcagagcgccggguucgcggccggccugaccuacucccagcucaugacgcugaaggacgccaugcugcagcuggacccgaacgccaagaccuggauggacaucgaggggcgccccgaggaccccguggagaucgcccucuaccagcccagcuccggcugcuacauccacuucuuccgggagccgaccgaccugaagcaguucaagcaggacgcgaaguacagccacgggaucgacgucaccgaccuguucgccgcccagcccggccucacguccgccgugaucgaggcccugccccgcaacauggucaucacgugccagggcagcgacgacaucaagaagcugcucgagucccaggggcgcaaggacaucaagcugaucgacaucgcgcugagcaagaccgacagccggaaguacgagaacgccgugugggaccaguacaaggaccucugccacaugcacaccggcguggucguggagaagaagaagcgcgggggcaaggaggagaucaccccgcacugcgcccugauggacugcaucauguucgacgccgcgguguccgggggccugaacacccucguccugcgggccgugcugccccgcgacaugguguuccggaccagcacgccccgcgucgugcucugaggacuaguaauaaggaaacuguaugaaugucugugggcaggaagugaagagauccuucuguaaagguuuuuggaauuaugucugcugaauaauaaacuuuuuugaaauaauaaaucugguagaaaaaugagaucuaaaaaaaaaaaaaaaaaaaaaaaaaaaaaaaaaaaaaaaaaaaaaaaaaaaaaaaaaaaaaaaaugcaucccccccccccccccccccccccccccccccaaaggcucuuuucagagccaccagaauu

SEQ ID NO: 10410 - RNA, 2050 nt, Artificial Sequence
  mRNA product Design b-4 comprising derived and/or modified sequence from LASV(G3010-SLE-2013;Clade IV)__AIT17345__NP (opt1)
gggagagucccgcagucggcguccagcggcucugcuuguucgugugugugucguugcaggccuuauucaagcuuaccaugagcgccuccaaggagaucaagagcuuccuguggacccagucccuccgccgggagcugagcggcuacugcuccaacaucaagcuccagguggucaaggacgcccaggcgcugcugcacgggcuggacuucagcgagguguccaacgugcagcgccucaugcggaaggagcgccgggacgacaacgaccugaagcgccugcgggaccucaaccaggccgucaacaaccugguggagcucaagagcacccagcagaaguccauccugcgcgugggcacccugaccagcgacgaccugcucauccuggccgccgaccuggagaagcucaaguccaaggucacccggaccgagcgcccccugagcgccgggguguacaugggcaaccuguccagccagcagcucgaccagcggcgcgcgcugcuguccaugaucgggaugagcuccggcgugcagggcgcccgggccgggcgcgacggcgucgugcgggugugggacgucaagaacgccgagcuccugaacaaccaguucgggacgaugccgagccugacccucgcgugccugaccaagcagggccagguggaccugaacgacgugguccaggcccucaccgaccuggggcugaucuacacggccaaguaccccaacaccuccgaccucgaccgccugacccagagccaccccauccugaacaugaucgacaccaagaaguccagccucaacaucagcggcuacaacuucucccugggcgccgccgugaaggcgggggccugcaugcuggacggcgggaacaugcucgagacgaucaaggugagcccccagaccauggacggcauccugaaguccauccugaaggucaagaaggcccucggcauguucaucagcgagaccccgggggagcggaaccccuacgagaacauccuguacaagaucugccuguccggcgacggguggcccuacaucgccagccgcaccuccaucacgggccgggccugggagaacaccgugguggaccucgagagcgacgggaagccccagaaggcgggcuccaacaacagcaacaagucccugcagagcgccggcuucaccgccgggcugaccuacucccagcucaugacgcugaaggacgccaugcugcagcuggacccgaacgccaagaccuggauggacaucgagggccgccccgaggaccccgucgagguggcgcucuaccagcccagcuccgggugcuacauccacuucuuccgggagccgaccgaccugaagcaguucaagcaggacgccaaguacagccacggcaucgacgugaccgaccuguucgccgcccagcccgggcucacguccgccgucaucgacgcgcugccccgcaacauggugaucacgugccagggcagcgacgacaucaagaagcugcucgagagccagggccgcaaggacaucaagcugaucgacaucgcccuguccaagaccgacagccggaaguacgagaacgccgucugggaccaguacaaggaccucugccacaugcacaccggggugguggucgagaagaagaagcgcggcgggaaggaggagaucaccccgcacugcgcccugauggacugcaucauguucgacgcggccguguccggcgggcugaacaccagcgugcuccgggccguccugccccgcgacaugguguuccggaccuccacgccccgcgugguccugugaggacuaguaauaaggaaacuguaugaaugucugugggcaggaagugaagagauccuucuguaaagguuuuuggaauuaugucugcugaauaauaaacuuuuuugaaauaauaaaucugguagaaaaaugagaucuaaaaaaaaaaaaaaaaaaaaaaaaaaaaaaaaaaaaaaaaaaaaaaaaaaaaaaaaaaaaaaaaugcaucccccccccccccccccccccccccccccccaaaggcucuuuucagagccaccagaauu

SEQ ID NO: 10411 - RNA, 2050 nt, Artificial Sequence
  mRNA product Design b-4 comprising derived and/or modified sequence from LASV(G502-SLE-2009;Clade IV)__AIT17127__NP (opt1)
gggagagucccgcagucggcguccagcggcucugcuuguucgugugugugucguugcaggccuuauucaagcuuaccaugagcgccuccaaggagaucaagagcuuccuguggacccagucccuccgccgggagcugagcggcuacugcuccaacaucaagcuccagguggucaaggacgcccaggcgcugcugcacgggcuggacuucagcgagguguccaacgugcagcgccucaugcggaaggagcgccgggacgacaacgaccugaagcgccugcgggaccucaaccaggccgucaacaaccugguggagcucaagagcacccagcagaaguccauccugcgcgugggcacccugaccagcgacgaccugcucauccuggccgccgaccuggagaagcucaaguccaaggucauccggaccgagcgcccccugagcgccgggguguacaugggcaaccuguccagccagcagcucgaccagcggcgcgcgcugcuguccaugaucgggaugagcggcggcaaccagggggugcgggccggcaaggacggggucgugcgcgugugggacgucaagaacgccgagcuccugaacaaccaguucggcaccaugccgucccugacgcucgccugccugaccaagcagggccagguggaccugaacgacgcggugcaggcccucaccgaccuggggcugaucuacaccgccaaguaccccaacacgagcgaccucgaccggcugacccagucccaccccauccugaacaugaucgacaccaagaaguccagccucaacaucuccggcuacaacuucagccugggggccgccgucaaggcgggcgccugcaugcuggacgggggcaacaugcucgagaccaucaaggugagcccccagacgauggacggcauccucaagagcauccugaaggugaagaaggcccuggggauguucaucuccgacaccccgggcgagcgcaaccccuacgagaacauccuguacaagaucugccugagcggggacggcuggcccuacaucgccucccggaccagcaucaccgggcgcgccugggagaacacggucguggaccucgaguccgacggcaagccccagaaggcgggcagcaacaacuccaacaagagccugcaguccgccggguucaccgccggccugaccuacagccagcucaugacccugaaggacgccaugcugcagcuggacccgaacacgaagaccuggauggacaucgaggggcggcccgaggaccccguggagaucgcccucuaccagcccuccagcggcugcuacauccacuucuuccgcgagccgaccgaccugaagcaguucaagcaggacgcgaaguacucccacgggaucgacgucaccgaccuguucgccgcccagcccggccucacgagcgccgugaucgacgcccugccccggaacauggugaucacgugccagggcuccgacgacauccgcaagcugcucgagagccaggggcgcaaggacaucaagcugaucgacaucgcgcugaacaagaccgacagccggaaguacgagaacgccgucugggaccaguacaaggaccucugccacaugcacaccggcguggucguggagaagaagaagcgcgggggcaaggaggagaucaccccgcacugcgcccugauggacugcaucauguucgacgccgcgguguccgggggccugaacaccagcguccuccgggccgugcugccccgcgacaugguguuccggaccuccacgccccgcgucgugcugugaggacuaguaauaaggaaacuguaugaaugucugugggcaggaagugaagagauccuucuguaaagguuuuuggaauuaugucugcugaauaauaaacuuuuuugaaauaauaaaucugguagaaaaaugagaucuaaaaaaaaaaaaaaaaaaaaaaaaaaaaaaaaaaaaaaaaaaaaaaaaaaaaaaaaaaaaaaaaugcaucccccccccccccccccccccccccccccccaaaggcucuuuucagagccaccagaauu

SEQ ID NO: 10412 - RNA, 2050 nt, Artificial Sequence
  mRNA product Design b-4 comprising derived and/or modified sequence from LASV(G733-SLE-2010;Clade IV)__AIT17155__NP (opt1)
gggagagucccgcagucggcguccagcggcucugcuuguucgugugugugucguugcaggccuuauucaagcuuaccaugagcgccuccaaggagaucaagagcuuccuguggacccagucccuccgccgggagcugagcggcuacugcuccaacaucaagcuccagguggucaaggacgcccaggcgcugcugcacgggcuggacuucagcgagguguccaacgugcagcgccucaugcggaaggagcgccgggacgacaacgaccugaagcgccugcgggaccucaaccaggccgucaacaaccugguggagcucaagagcacccagcagaaguccgugcugcgcgucggcacccugaccagcgacgagcugcucgugcuggccgccgaccuggagaagcucaaguccaaggugauccggaccgagcgcccccugagcgccggggucuacaugggcaaccuguccagccagcagcucgaccagcggcgcgcgcugcuguccaugaucgggaugagcggcggcaaccagggggcccggaccggccgcgacgggguggugcgggucugggacgugaagaacgccgagcuccugaacaaccaguucggcaccaugccgucccugacccucgccugccugaccaagcagggccagguggaccugaacgacgcgguccaggcccucaccgaccuggggcugaucuacacggccaaguaccccaacaccagcgaccucgaccgccugacccagucccaccccauccugaacaugaucgacaccaagaaguccagccucaacaucuccggcuacaacuucagccugggggccgccgugaaggcgggcgccugcaugcuggacgggggcaacaugcucgagacgaucaaggugagcccccagaccauggacggcauccucaagagcauccugaaggucaagaaggcccuggggauguucaucuccgacaccccgggcgagcggaaccccuacgagaacauccuguacaagaucugccugagcggggacggcuggcccuacaucgccucccgcaccagcaucacggggcgggccugggagaacaccgugguggaccucgaguccgacggcaagccccagaaggcgggcagcaacaacuccaacaagagccugcaguccgccggguucaccgccggccugaccuacagccagcucaugacgcugaaggacgccaugcugcagcuggacccgaacgccaagaccuggauggacaucgaggggcgccccgaggaccccgucgagaucgcgcucuaccagcccuccagcggcugcuacauccacuucuuccgggagccgaccgaccugaagcaguucaagcaggacgccaaguacucccacgggaucgacgugaccgaccuguucgccgcccagcccggccucacgagcgccgugaucgacgcgcugccccgcaacauggucaucacgugccagggcuccgacgacauccgcaagcugcucgagagccaggggcggaaggacaucaagcugaucgacaucgcccugagcaagaucgacucccgcaaguacgagaacgccgugugggaccaguacaaggaccucugccacaugcacaccggcgucgugguggagaagaagaagcgcgggggcaaggaggagaucacgccccacugcgcccugauggacugcaucauguucgacgcggccgucagcgggggccugaacucccucgugcugcgggccgugcugccgcgggacauggucuuccgcaccagcacgccccggguggugcucugaggacuaguaauaaggaaacuguaugaaugucugugggcaggaagugaagagauccuucuguaaagguuuuuggaauuaugucugcugaauaauaaacuuuuuugaaauaauaaaucugguagaaaaaugagaucuaaaaaaaaaaaaaaaaaaaaaaaaaaaaaaaaaaaaaaaaaaaaaaaaaaaaaaaaaaaaaaaaugcaucccccccccccccccccccccccccccccccaaaggcucuuuucagagccaccagaauu

SEQ ID NO: 10413 - RNA, 2050 nt, Artificial Sequence
  mRNA product Design b-4 comprising derived and/or modified sequence from MOPV/LASV reassortant(IGS-1;Clade IV)__AFY05578__NP (opt1)
gggagagucccgcagucggcguccagcggcucugcuuguucgugugugugucguugcaggccuuauucaagcuuaccaugagcgccuccaaggagaucaagagcuuccuguggacccagucccuccgccgggagcugagcggcuacugcuccaacaucaagcuccagguggucaaggacgcccaggcgcugcugcacgggcuggacuucagcgagguguccaacgugcagcgccucaugcggaaggagcgccgggacgacaacgaccugaagcgccugcgggaccucaaccaggccgucaacaaccugguggagcucaagagcacccagcagaaguccauccugcgcgugggcacccugaccagcgacgaccugcucauccuggccgccgaccuggagaagcuccgguccaaggucauccgcaccgagcggccccugagcgccgggguguacaugggcaaccuguccagccagcagcucgaccagcgccgggcgcugcugaacaugaucgggauguccggcggcaaccagggggcccgcgccggccgggacggggugguccgcgugugggacgugaagaacgccgagcuccugagcaaccaguucggcaccaugccgucccugacgcucgcgugccugaccaagcaggggcaggucgaccugaacgacgccgugcaggcccucaccgaccugggccugaucuacaccgccaaguaccccaacacgagcgaccucgaccggcugacccagucccaccccauccugaacaugaucgacaccaagaaguccagccucaacaucuccggcuacaacuucagccugggggccgcggugaaggccggcgccugcaugcuggacgggggcaacaugcucgagaccaucaaggucagcccccagacgauggacggcauccucaagagcauccugaaggugaagaaggcccuggggauguucaucuccgacaccccgggcgagcgcaaccccuacgagaacauccuguacaagaucugccugagcggggacggcuggcccuacaucgccucccggaccagcaucaccgggcgcgcgugggagaacacgguggucgaccucgaguccgacggcaagccccagaaggccgacagcaacaacuccagcaagucccugcagagcgccggcuucaccgccgggcugaccuacucccagcucaugacccugaaggacgccaugcugcagcuggacccgaacgcgaagacguggauggacaucgagggccggcccgaggaccccguggagaucgcccucuaccagcccagcuccgggugcuacauccacuucuuccgcgagccgaccgaccugaagcaguucaagcaggacgccaaguacagccacggcaucgacgugaccgaccuguucgccacccagcccgggcucacguccgccgucaucgacgcgcugccccgcaacauggugaucacgugccagggcagcgacgacauccggaagcugcucgagagccagggccgcaaggacaucaagcugaucgacaucgaccuguccaagaccgacagccggaaguacgagaacgccgugugggaccaguacaaggaccucugccacaugcacaccggggucguggucgagaagaagaagcgcggcgggaaggaggagaucaccccgcacugcgcccugauggacugcaucauguucgacgccgcgguguccggcgggcugaacaccagcgugcuccgggccguccugccccgcgacaugguguuccggaccuccacgccccgcgugguccugugaggacuaguaauaaggaaacuguaugaaugucugugggcaggaagugaagagauccuucuguaaagguuuuuggaauuaugucugcugaauaauaaacuuuuuugaaauaauaaaucugguagaaaaaugagaucuaaaaaaaaaaaaaaaaaaaaaaaaaaaaaaaaaaaaaaaaaaaaaaaaaaaaaaaaaaaaaaaaugcaucccccccccccccccccccccccccccccccaaaggcucuuuucagagccaccagaauu

SEQ ID NO: 10414 - RNA, 2050 nt, Artificial Sequence
  mRNA product Design b-4 comprising derived and/or modified sequence from LASV(LM765-SLE-2012;Clade IV)__AIT17815__NP (opt1)
gggagagucccgcagucggcguccagcggcucugcuuguucgugugugugucguugcaggccuuauucaagcuuaccaugagcgccuccaaggagaucaagagcuuccuguggacccagucccuccgccgggagcugagcggcuacugcuccaacaucaagcuccagguggucaaggacgcccaggcgcugcugcacgggcuggacuucagcgagguguccaacgugcagcgccucaugcggaaggagcgccgggacgacaacgaccugaagcgccugcgggaccucaaccaggccgucaacaaccugguggagcucaagagcacccagcagaaguccauccugcgcgugggcacccugaccagcgacgaccugcucauccuggccgccgaccuggagaagcucaaguccaaggucacccggaccgagcgcccccugagcgccgggguguacaugggcaaccuguccagccagcagcucgaccagcggcgcgcgcugcuggacaugaucgggauguccggcagcaaccagggcgcccgggccgggcgcgacggcgugguccgggugugggacgugaagaacgccgagcuccugaacaaccaguucgggacgaugccgucccugacccucgcgugccugaccaagcagggccaggucgaccugaacgacgccgugcaggcccucaccgaccuggggcugaucuacacggccaaguaccccaacaccagcgaccucgaccgccugacccagucccaccccauccugaacaugaucgacaccaagaaguccagccucaacaucuccggcuacaacuucagccugggcgccgcggugaaggccggggccugcaugcuggacggcgggaacaugcucgagacgaucaaggucagcccccagaccauggacggcauccucaagagcauccugaaggugaagaaggcccugggcauguucaucuccgacgccccgggggagcggaaccccuacgagaacauccuguacaagaucugccugagcggcgacggguggcccuacaucgcgucccgcaccagcaucaccggccgggccugggagaacacgguggucgaccucgaguccgacgggaagccccagaaggccggcagcaacggcuccaacaagagccugcaguccgccggguucaccgccggccugaccuacagccagcucaugacccugaaggacgcgaugcugcagcuggacccgaacgccaagacguggauggacaucgaggggcgccccgaggaccccguggagaucgcccucuaccagcccuccagcggcugcuacauccacuucuuccgggagccgaccgaccugaagcaguucaagcaggacgccaaguacucccacgggaucgacgugaccgaccuguucgccgcgcagcccggccucaccagcgccgucaucgacgcccugccccgcaacauggugaucacgugccagggcuccgacgacauccgcaagcuguucgagagccaggggcggaaggacaucaagcucaucgacaucgcccugagcaagaccgacucccgcaaguacgagaacgcggugugggaccaguacaaggaccugugccacaugcacaccggcaucgucguggagaagaagaagcgcgggggcaaggaggagaucacgccccacugcgcccucauggacugcaucauguucgacgccgccgucagcgggggccugaacaccuccgugcugcgggccgugcucccgcgggacauggucuuccgcaccagcacgccccggguggugcugugaggacuaguaauaaggaaacuguaugaaugucugugggcaggaagugaagagauccuucuguaaagguuuuuggaauuaugucugcugaauaauaaacuuuuuugaaauaauaaaucugguagaaaaaugagaucuaaaaaaaaaaaaaaaaaaaaaaaaaaaaaaaaaaaaaaaaaaaaaaaaaaaaaaaaaaaaaaaaugcaucccccccccccccccccccccccccccccccaaaggcucuuuucagagccaccagaauu

SEQ ID NO: 10415 - RNA, 2050 nt, Artificial Sequence
  mRNA product Design b-4 comprising derived and/or modified sequence from LASV(LM776-SLE-2012;Clade IV)__AIT17825__NP (opt1)
gggagagucccgcagucggcguccagcggcucugcuuguucgugugugugucguugcaggccuuauucaagcuuaccaugagcgccuccaaggagaucaagagcuuccuguggacccagucccuccgccgggagcugagcuccuacugcagcaacaucaagcuccagguggucaaggacgcccaggcgcugcugcacggccuggacuucuccgaggugagcaacgugcagcgccucaugcggaaggagcgccgggacgacaacgaccugaagcgccugcgggaccucaaccaggccgucaacaaccugguggagcugaaguccacccagcagaaguccauccuccgcguggggacccugaccuccgacgaccugcucauccuggccgccgaccuggagaagcucaagagcaaggucacccggaccgagcgcccccuguccgccggcguguacauggggaaccugagcucccagcagcucgaccagcggcgcgcgcugcugagcaugaucggcauguccgggagcaaccagggcgcccgggccggccgcgacggggugguccgggugugggacgugaagaacgccgagcuccugaacaaccaguucggcacgaugccgucccugacccucgcgugccugaccaagcaggggcaggucgaccugaacgacgccgugcaggcccucaccgaccugggccugaucuacacggccaaguaccccaacaccagcgaccucgaccgccugacccagagccaccccauccugaacaugaucgacaccaagaaguccagccucaacaucuccggguacaacuucagccugggcgccgcggugaaggccggcgccugcaugcuggacgggggcaacaugcucgagacgaucaaggucagcccccagaccauggacgggauccucaagagcauccugaaggugaagaaggcccugggcauguucaucuccgacaccccgggcgagcggaaccccuacgagaacauccuguacaagaucugccugagcggggacggcuggcccuacaucgccucccgcaccagcaucacggggcgggcgugggagaacaccguggucgaccucgaguccgacggcaagccccagaaggccgggagcaacaacuccaacaagagccugcaguccgccggcuucaccgccggccugaccuacagccagcucaugacgcugaaggacgccaugcugcagcuggacccgaacgcgaagaccuggauggacaucgaggggcgccccgaggaccccguggagguggcccucuaccagcccuccagcggcugcuacauccacuucuuccgggagccgaccgaccugaagcaguucaagcaggacgccaaguacucccacgggaucgacgucaccgaccuguucgccgcccagcccggccucacgagcgcggugaucgacgcccugccccgcaacauggugaucacgugccaggggagcgacgacauccgcaagcugcucgagucccagggccggaaggacaucaagcugaucgacaucgcccugagcaagaccgacucccgcaaguacgagaacgccgucugggaccaguacaaggaccucugccacaugcacaccggcguggucguggagaagaagaagcgcgggggcaaggaggagaucaccccgcacugcgcgcugauggacugcaucauguucgacgccgccgugagcgggggccugaacaccuccguccuccgggccgugcugccccgggacaugguguuccgcaccagcacgccccgggucgugcugugaggacuaguaauaaggaaacuguaugaaugucugugggcaggaagugaagagauccuucuguaaagguuuuuggaauuaugucugcugaauaauaaacuuuuuugaaauaauaaaucugguagaaaaaugagaucuaaaaaaaaaaaaaaaaaaaaaaaaaaaaaaaaaaaaaaaaaaaaaaaaaaaaaaaaaaaaaaaaugcaucccccccccccccccccccccccccccccccaaaggcucuuuucagagccaccagaauu

SEQ ID NO: 10416 - RNA, 2050 nt, Artificial Sequence
  mRNA product Design b-4 comprising derived and/or modified sequence from LASV(Mad39;Clade IV)__ANH09723__NP (opt1)
gggagagucccgcagucggcguccagcggcucugcuuguucgugugugugucguugcaggccuuauucaagcuuaccaugagcgccuccaaggagaucaagagcuuccuguggacccagucccuccgccgggagcugagcggcuacugcuccaacaucaagcuccagguggucaaggacgcccaggcgcugcugcacgggcuggacuucagcgagguguccaacgugcagcgccucaugcggaagcagcgccgggacgacaacgaccugaagcgccugcgggaccucaaccaggccgucaacaaccugguggagcugaaguccacccagcagaaguccgugcuccgcgucggcacgcugaccagcgacgaccugcucacccuggccgccgaccuggagaagcucaaguccaaggugacccggacggagcgcccccugaccgccgggguguacaugggcaaccugagcucccagcagcucgaccagcggcgcgcgcugcugaacaugaucgggaugagcggcggcaaccagggggcccggaccggccgcgacggggucgugcgggugugggacgucaagaacgccgagcuccugaacaaccaguucggcaccaugccgucccugacgcucgccugccugaccaagcagggccagguggaccugaacgacgugguccaggcgcucaccgaccuggggcugaucuacaccgccaaguaccccaacacgagcgaccucgaccgccugacccagucccaccccauccugaacaugaucgacaccaacaagagcucccucaacaucagcggcuacaacuucagccugggggccgccgugaaggccggcgcgugcaugcuggacgggggcaacaugcucgagaccaucaaggugagcccccagacgauggacggcauccucaagagcauccugaaggucaagaagucccuggggauguucaucagcgacaccccgggcgagcggaaccccuacgagaacauccuguacaagaucugccuguccggggacggcuggcccuacaucgccagccgcaccuccaucaccgggcgggccugggagaacacggugguggaccucgagagcggcggcaagccccagaaggccggguccaacaacagcaacaagucccugcagagcgccggcuucgcggccgggcugaccuacucccagcucaugacccugaaggacgccaugcugcagcuggacccgaacgccaagaccuggauggacaucgagggccgccccgaggaccccgucgagaucgcccucuaccagcccaucagcgggugcuacauccacuucuuccgggagccgacggaccugaagcaguucaagcaggacgcgaaguacucccacggcaucgacgugaccgaccuguucgccgcccagcccggccucaccagcgccgugaucgaggcccugccccgcaacauggucaucacgugccagggguccgacgacauccgcaagcuguucgagagccagggccggaaggacaucaagcucaucgacaucgcgcuguccaagaccgacagccgcaaguacgagaacgccgugugggaccaguacaaggaccugugccacaugcacaccggggucgugguggagaagaagaagaagggcgggaaggaggagaucacgccccacugcgcccucauggacugcaucauguucgacgccgcggucagcggcggccugaacacccuggugcuccgggccgugcugccgcgcgacauggucuuccggaccuccacccccaagguggugcugugaggacuaguaauaaggaaacuguaugaaugucugugggcaggaagugaagagauccuucuguaaagguuuuuggaauuaugucugcugaauaauaaacuuuuuugaaauaauaaaucugguagaaaaaugagaucuaaaaaaaaaaaaaaaaaaaaaaaaaaaaaaaaaaaaaaaaaaaaaaaaaaaaaaaaaaaaaaaaugcaucccccccccccccccccccccccccccccccaaaggcucuuuucagagccaccagaauu

SEQ ID NO: 10417 - RNA, 2050 nt, Artificial Sequence
  mRNA product Design b-4 comprising derived and/or modified sequence from LASV(Z0947-SLE-2011;Clade IV)__AIT17841__NP (opt1)
gggagagucccgcagucggcguccagcggcucugcuuguucgugugugugucguugcaggccuuauucaagcuuaccaugagcgccuccaaggagaucaagagcuuccuguggacccagucccuccgccgggagcugagcggcuacugcuccaacaucaagcuccagguggucaaggacgcccaggcgcugcugcacgggcuggacuucagcgagguguccaacgugcagcgccucaugcggaaggagcgccgggacgacaacgaccugaagcgccugcgggaccucaaccaggccgucaacaaccugguggagcucaagagcacccagcagaaguccauccugcgcgugggcacccugaccagcgacgaccugcucauccuggccgccgaccuggagaagcucaaguccaaggucacccggaccgagcgcccccugagcgccgggguguacaugggcaaccuguccagccagcagcucgaccagcggcgcgcgcugcugaacaugaucgggauguccggcagcaaccagggcgcccggacggggcgcgacggcgugguccgggugugggacgugaagaacgccgagcuccugaacaaccaguucgggaccaugccgucccugacccucgccugccugaccaagcagggccaggucgaccugaacgacgcggugcaggcccucacggaccuggggcugaucuacaccgccaaguaccccaacaccagcgaccucgaccgccugacccagucccaccccauccugaacaugaucgacacgaagaaguccagccucaacaucuccggcuacaacuucagccugggcgccgccgugaaggcgggggccugcaugcuggacggcgggaacaugcucgagaccaucaaggucagcccccagaccauggacggcauccucaagagcauccugaaggugaagaaggcccugggcauguucaucuccgacgccccgggggagcggaaccccuacgagaacauccuguacaagaucugccugagcggcgacggguggcccuacaucgccucccgcaccagcaucacgggccgggcgugggagaacaccguggucgaccucgaguccgacgggaagccccagaaggccggcagcaacggcuccaacaagagccugcaguccgccggguucaccgccggccugaccuacagccagcucaugacgcugaaggacgccaugcugcagcuggacccgaacgcgaagaccuggauggacaucgaggggcgccccgaggaccccguggagaucgcccucuaccagcccuccagcggcugcuacauccacuucuuccgggagccgaccgaccugaagcaguucaagcaggacgccaaguacucccacgggaucgacgugaccgaccuguucgccgcccagcccggccucacgagcgcggucaucgacgcccugccccgcaacauggugaucacgugccagggcuccgacgacauccgcaagcuguucgagagccaggggcggaaggacaucaagcucaucgacaucgcccugagcaagaccgacucccgcaaguacgagaacgccgugugggaccaguacaaggaccugugccacaugcacaccggcaucgucguggagaagaagaagcgcgggggcaaggaggagaucaccccgcacugcgcgcucauggacugcaucauguucgacgccgccgucagcgggggccugaacaccuccgugcugcgggccgugcucccccgggacauggucuuccgcaccagcacgccccggguggugcugugaggacuaguaauaaggaaacuguaugaaugucugugggcaggaagugaagagauccuucuguaaagguuuuuggaauuaugucugcugaauaauaaacuuuuuugaaauaauaaaucugguagaaaaaugagaucuaaaaaaaaaaaaaaaaaaaaaaaaaaaaaaaaaaaaaaaaaaaaaaaaaaaaaaaaaaaaaaaaugcaucccccccccccccccccccccccccccccccaaaggcucuuuucagagccaccagaauu

SEQ ID NO: 10418 - RNA, 2050 nt, Artificial Sequence
  mRNA product Design b-4 comprising derived and/or modified sequence from LASV(Josiah;Clade IV)__NP_694869__NP (opt2)
gggagagucccgcagucggcguccagcggcucugcuuguucgugugugugucguugcaggccuuauucaagcuuaccauguccgccuccaaggagaucaaguccuuccucuggacccagucccuccgccgcgagcucuccggcuacugcuccaacaucaagcuccaggucgucaaggacgcccaggcccuccuccacggccucgacuucuccgaggucuccaacguccagcgccucaugcgcaaggagcgccgcgacgacaacgaccucaagcgccuccgcgaccucaaccaggccgucaacaaccucgucgagcucaaguccacccagcagaaguccauccuccgcgucggcacccucaccuccgacgaccuccucauccucgccgccgaccucgagaagcucaaguccaaggucauccgcaccgagcgcccccucuccgccggcgucuacaugggcaaccucuccucccagcagcucgaccagcgccgcgcccuccucaacaugaucggcauguccggcggcaaccagggcgcccgcgccggccgcgacggcgucguccgcgucugggacgucaagaacgccgagcuccucaacaaccaguucggcaccaugcccucccucacccucgccugccucaccaagcagggccaggucgaccucaacgacgccguccaggcccucaccgaccucggccucaucuacaccgccaaguaccccaacaccuccgaccucgaccgccucacccagucccaccccauccucaacaugaucgacaccaagaaguccucccucaacaucuccggcuacaacuucucccucggcgccgccgucaaggccggcgccugcaugcucgacggcggcaacaugcucgagaccaucaaggucuccccccagaccauggacggcauccucaaguccauccucaaggucaagaaggcccucggcauguucaucuccgacacccccggcgagcgcaaccccuacgagaacauccucuacaagaucugccucuccggcgacggcuggcccuacaucgccucccgcaccuccaucaccggccgcgccugggagaacaccgucgucgaccucgaguccgacggcaagccccagaaggccgacuccaacaacuccuccaagucccuccaguccgccggcuucaccgccggccucaccuacucccagcucaugacccucaaggacgccaugcuccagcucgaccccaacgccaagaccuggauggacaucgagggccgccccgaggaccccgucgagaucgcccucuaccagcccuccuccggcugcuacauccacuucuuccgcgagcccaccgaccucaagcaguucaagcaggacgccaaguacucccacggcaucgacgucaccgaccucuucgccacccagcccggccucaccuccgccgucaucgacgcccucccccgcaacauggucaucaccugccagggcuccgacgacauccgcaagcuccucgagucccagggccgcaaggacaucaagcucaucgacaucgcccucuccaagaccgacucccgcaaguacgagaacgccgucugggaccaguacaaggaccucugccacaugcacaccggcgucgucgucgagaagaagaagcgcggcggcaaggaggagaucaccccccacugcgcccucauggacugcaucauguucgacgccgccgucuccggcggccucaacaccuccguccuccgcgccguccucccccgcgacauggucuuccgcaccuccaccccccgcgucguccucugaggacuaguaauaaggaaacuguaugaaugucugugggcaggaagugaagagauccuucuguaaagguuuuuggaauuaugucugcugaauaauaaacuuuuuugaaauaauaaaucugguagaaaaaugagaucuaaaaaaaaaaaaaaaaaaaaaaaaaaaaaaaaaaaaaaaaaaaaaaaaaaaaaaaaaaaaaaaaugcaucccccccccccccccccccccccccccccccaaaggcucuuuucagagccaccagaauu

SEQ ID NO: 10419 - RNA, 2050 nt, Artificial Sequence
  mRNA product Design b-4 comprising derived and/or modified sequence from LASV(LP;Clade I)__AAF86702__NP (opt2)
gggagagucccgcagucggcguccagcggcucugcuuguucgugugugugucguugcaggccuuauucaagcuuaccauguccaacuccaaggagaucaaguccuuccucuggacccagucccuccgccgcgagcucuccggcuacugcuccaacaucaagcuccaggucgucaaggacgcccaggcccuccuccacggccucgacuucuccgaggucuccaacguccagcgccucaugcgcaagcagaagcgcgacgacgccgaccucaagcgccuccgcgaccucaaccaggccgucaacaaccucgucgagcucaaguccacccagcagaagaacguccuccgcgucggcacccucuccuccgacgaccucaucacccucgccgccgaccucgagaagcucaaguccaaggucauccgcaccgagcgcccccucuccuccggcgucuacaugggcaaccucuccucccagcagcucgaccagcgccgcgcccuccucuccaugaucggcauguccggcggcccccagggcaaccgcaccggcggcgacggcgucguccgcgucugggacgucaagaacgccgagcuccucaacaaccaguucggcaccaugcccucccucacccucgccugccucaccaagcagggccaggucgaccucaacgacgccguccaggcccucaccgaccucggccucaucuacaccgccaaguaccccaacuccuccgaccucgacaugcucacccagucccaccccauccucggcauggucgacaccaagaaguccucccucaacaucuccggcuacaacuucucccucggcgccgccgucaaggccggcgccugcaugcucgacggcggcaacaugcucgagaccaucaaggucuccccccagaccauggacggcauccucaaguccauccucaaggucaagcgcucccucggcauguucaucuccgacacccccggcgagcgcaaccccuacgagaacauccucuacaagaucugccucuccggcgagggcuggcccuacaucgccucccgcaccuccaucaccggccgcgccugggagaacacccucgucgaccucgaguccgacaacaagccccccaagcucaacuccgccggcuccaacaagucccuccaggccgccggccucaacgccggccucaccuacucccagcucaugacccucaaggacugcaugcuccagcucgaccccuccuccaagaccuggaucgacaucgagggccgccccgaggaccccgucgagaucgcccucuuccagcccuccuccggcugcuacauccacuucuuccgcgagcccaccgaccucaagcaguucaagcaggacgccaaguacucccacggcaucgacgucaccgaccucuucuccacccagcccggccucaccuccgccgucaucgaggcccucccccgcaacaugguccucaccugccagggcuccgacgacaucaagaagcuccucgagucccagggccgccgcgacaucaagcucaucgacaucucccucuccaaggccgacucccgcaaguucgagaacgccgucugggaccaguacaaggaccucugccacaugcacaccggcgucgucgucgagaagaagaagcgcggcggcaaggaggagaucaccccccacugcgcccuccucgacugcaucauguucgacgccgccaccaccggcucccucaacaucaccacccuccgcgccguccucccccgcgacauggucuuccgcaccuccacccccaaggucguccucugaggacuaguaauaaggaaacuguaugaaugucugugggcaggaagugaagagauccuucuguaaagguuuuuggaauuaugucugcugaauaauaaacuuuuuugaaauaauaaaucugguagaaaaaugagaucuaaaaaaaaaaaaaaaaaaaaaaaaaaaaaaaaaaaaaaaaaaaaaaaaaaaaaaaaaaaaaaaaugcaucccccccccccccccccccccccccccccccaaaggcucuuuucagagccaccagaauu

SEQ ID NO: 10420 - RNA, 2050 nt, Artificial Sequence
  mRNA product Design b-4 comprising derived and/or modified sequence from LASV(803213;Clade II)__AAF86704__NP (opt2)
gggagagucccgcagucggcguccagcggcucugcuuguucgugugugugucguugcaggccuuauucaagcuuaccauguccgccuccaaggaggucaaguccuuccucuggacccagucccuccgccgcgagcucuccggcuacugcuccaacaucaagcuccaggucgucaaggacgcccaggcccuccuccacggccucgacuucuccgaggucaacaacguccagcgccucaugcgcaagcagaagcgcgacgacggcgaccucaagcgccuccgcgaccucaaccaggccgucaacaaccucgucgagcucaaguccacccagcagaaguccauccuccgcgucggcacccucaccuccgacgaccuccucacccucgccgccgaccucgagaagcucaaguccaaggucauccgcaccgagcgcccccucuccuccggcgucuacaugggcaaccucuccacccagcagcucgagcagcgccgcgcccuccucaacaugaucggcauggucggcggcgcccagggcacccagcccggccgcgacggcgucguccgcgucugggacgucaagaaccccgaccuccucaacaaccaguucggcaccaugcccucccucacccucgccugccucaccaagcagggccaggucgaccucaacgacgccguccucgcccucaccgaccucggccucaucuacaccgccaaguaccccaacuccuccgaccucgaccgccucucccagucccaccccauccucaacauggucgacaccaagaaguccucccucaacaucuccggcuacaacuucucccucggcgccgccgucaaggccggcgccugcaugcucgacggcggcaacaugcucgagaccaucaaggucaccccccagaccauggacggcauccucaaguccauccucaaggucaagcgcucccucggcauguucgucuccgacacccccggcgagcgcaaccccuacgagaacauccucuacaagaucugccucuccggcgacggcuggcccuacaucgccucccgcaccuccaucgucggccgcgccugggagaacaccaccgucgaccucgaguccgacggcaagccccagaaggucggcaccgccggcuccaacaagucccuccaguccgccggcuuccccaccggccucaccuacucccagcucaugacccucaaggacuccaugaugcagcucgaccccuccgccaagaccuggaucgacaucgagggccgccccgaggaccccgucgagaucgcccucuaccagcccauguccggcugcuacauccacuucuuccgcgagcccaccgaccucaagcaguucaagcaggacgccaaguacucccacggcaucgacgucgccgaccucuuccccgcccagcccggccucaccuccgccgucaucgaggcccucccccgcaacaugguccucaccugccagggcuccgacgacaucaagaagcuccucgacucccagggccgccgcgacaucaagcucaucgacaucucccucuccaaggucgacucccgcaaguucgagaacgccgucugggaccagugcaaggaccucugccacaugcacaccggcgucgucgucgagaagaagaagcgcggcggcaaggaggagaucaccccccacugcgcccucauggacugcaucauguucgacgccgccgucuccggcggccucaacauccccguccuccgcgccguccucccccgcgacauggucuuccgcaccuccucccccaaggucguccucugaggacuaguaauaaggaaacuguaugaaugucugugggcaggaagugaagagauccuucuguaaagguuuuuggaauuaugucugcugaauaauaaacuuuuuugaaauaauaaaucugguagaaaaaugagaucuaaaaaaaaaaaaaaaaaaaaaaaaaaaaaaaaaaaaaaaaaaaaaaaaaaaaaaaaaaaaaaaaugcaucccccccccccccccccccccccccccccccaaaggcucuuuucagagccaccagaauu

SEQ ID NO: 10421 - RNA, 2053 nt, Artificial Sequence
  mRNA product Design b-4 comprising derived and/or modified sequence from LASV(GA391;Clade III)__CAA36646__NP (opt2)
gggagagucccgcagucggcguccagcggcucugcuuguucgugugugugucguugcaggccuuauucaagcuuaccauguccgccuccaaggagguccgcuccuuccucuggacccagucccuccgccgcgagcucuccggcuacugcuccaacaucaagcuccaggucgucaaggacgcccaggcccuccuccacggccucgacuucuccgaggucuccaacguccagcgccucaugcgcaagcagaagcgcgacgacggcgaccucaagcgccuccgcgaccucaaccaggccgucaacaaccucgucgagcucaaguccacccagcagaaguccguccuccgcgucggcacccucuccuccgacgaccuccucauccucgccgccgaccucgagaagcucaaguccaaggucacccgcaccgagcgcccccucuccuccggcgucuacaugggcaaccucuccucccagcagcucgaccagcgccgcgcccuccucaacaugaucggcaugaccggcgucuccggcggcggcaagggcgccuccgacggcaucguccgcgucugggacgucaagaacgccgagcuccucaacaaccaguucggcaccaugcccucccucacccucgccugccucaccaagcagggccaggucgaccucaacgacgccguccaggcccucaccgaccucggccucaucuacaccgccaaguaccccaacuccuccgaccucgaccgccucucccagucccaccccauccucaacaugaucgacaccaagaaguccucccucaacaucuccggcuacaacuucucccucggcgccgccgucaaggccggcgccugcaugcucgacggcggcaacaugcucgagaccaucaaggucuccccccagaccauggacggcauccucaaguccauccucaaggucaagaagucccucggcauguucgucuccgacacccccggcgagcgcaaccccuacgagaacauccucuacaagaucugccucuccggcgacggcuggcccuacaucgccucccgcaccuccaucgucggccgcgccugggagaacaccgucgucgaccucgagcaggacaacaagccccagaagaucggcaacggcggcuccaacaagucccuccaguccgccggcuucgccgccggccucaccuacucccagcucaugacccucaaggacuucaagugcuucaaccucauccccaacgccaagaccuggauggacaucgagggccgccccgaggaccccgucgagaucgcccucuaccagcccuccuccggcugcuacguccacuucuuccgcgagcccaccgaccucaagcaguucaagcaggacgccaaguacucccacggcaucgacgucaccgaccucuucgccgcccagcccggccucaccuccgccgucaucgaggcccucccccgcaacauggucaucaccugccagggcuccgaggacauccgcaagcuccucgagucccagggccgccgcgacaucaagcucaucgacaucacccucuccaaggccgacucccgcaaguucgagaacgccgucugggaccaguucaaggaccucugccacaugcacaccggcgucgucgucgagaagaagaagcgcggcggcaaggaggagaucaccccccacugcgcccucauggacugcaucauguucgacgccgccgucuccggcggccucgacgccaagguccuccgcgucguccucccccgcgacauggucuuccgcaccuccacccccaaggucguccucugaggacuaguaauaaggaaacuguaugaaugucugugggcaggaagugaagagauccuucuguaaagguuuuuggaauuaugucugcugaauaauaaacuuuuuugaaauaauaaaucugguagaaaaaugagaucuaaaaaaaaaaaaaaaaaaaaaaaaaaaaaaaaaaaaaaaaaaaaaaaaaaaaaaaaaaaaaaaaugcaucccccccccccccccccccccccccccccccaaaggcucuuuucagagccaccagaauu

SEQ ID NO: 10422 - RNA, 2050 nt, Artificial Sequence
  mRNA product Design b-4 comprising derived and/or modified sequence from LASV(AV;Clade V)__CCA30315__NP (opt2)
gggagagucccgcagucggcguccagcggcucugcuuguucgugugugugucguugcaggccuuauucaagcuuaccauguccgccuccaaggaggucaaguccuuccucuggacccagucccuccgccgcgagcucuccggcuacugcuccaacaucaagcuccaggucgucaaggacgcccaggcccuccuccacggccucgacuucuccgaggucuccaacguccagcgccucaugcgcaagcagcgccgcgacgacuccgaccucaagcgccuccgcgaccucaaccaggccgucaacaaccucgucgagcucaaguccacccagcagaaguccguccuccgcgucggcacccucuccuccgacgaccuccucacccucgccgccgaccucgagaagcucaaguccaaggucacccgcaccgagcgcccccucuccuccggcgucuacaugggcaaccucuccucccagcagcucgaccagcgccgcgcccuccucaaccucaucggcaugaccaacggcucccagggcucccaggccggccgcgacggcgucguccgcgucugggacgucaagaacgccgagcuccucaacaaccaguucggcaccaugcccucccucacccucgccugccucaccaagcagggccaggucgaccucaacgacgucguccaggcccucaccgaccucggccucaucuacaccgccaaguaccccaacaccuccgaccucgaccgccucacccagucccaccccauccucaacaugaucgacaccaagaaguccucccucaacaucuccggcuacaacuucucccucggcgccgccgucaaggccggcgccugcaugcucgacggcggcaacaugcucgagaccaucaaggucuccccccaguccauggacggcauccucaaguccauccucaaggucaagcgcgcccucggcauguucgucuccgacacccccggcgagcgcaaccccuacgagaacauccucuacaagaucugccucuccggcgacggcuggcccuacaucgccucccgcaccuccaucgucggccgcgccugggagaacaccgucgucgaccucgagaccgacggcaagccccagaagaucggcuccggcaacuccaacaagucccuccaguccgccggcuucuccgccggccucaccuacucccagcucaugacccucaaggacgccaugcuccagcucgaccccaacgccaagaccuggauggacaucgagggccgccccgaggaccccgucgaggucgcccucuaccagcccaucuccggcugcuacauccacuucuuccgcgagcccaccgaccucaagcaguucaagcaggacgccaaguacucccacggcaucgacaucgccgaccucuucgccgcccagcccggccucaccuccgccgucaucgaggcccucccccgcaacauggucaucaccugccagggcuccgaggacaucaagaagcuccucgagucccagggccgcaaggacaucaagcucaucgacaucgcccucuccaagaucgacucccgcaaguucgagaacgccgucugggaccaguacaaggaccucugccacaugcacaccggcgucgucgucgagaagaagaagcgcggcggcaaggaggagaucaccccccacugcgcccucauggacugcaucauguucgacgccgccgucuccggcggccucaacacccucguccuccgcgccguccucccccgcgacauggucuuccgcaccuccaccccccgcgucguccucugaggacuaguaauaaggaaacuguaugaaugucugugggcaggaagugaagagauccuucuguaaagguuuuuggaauuaugucugcugaauaauaaacuuuuuugaaauaauaaaucugguagaaaaaugagaucuaaaaaaaaaaaaaaaaaaaaaaaaaaaaaaaaaaaaaaaaaaaaaaaaaaaaaaaaaaaaaaaaugcaucccccccccccccccccccccccccccccccaaaggcucuuuucagagccaccagaauu

SEQ ID NO: 10423 - RNA, 2050 nt, Artificial Sequence
  mRNA product Design b-4 comprising derived and/or modified sequence from LASV(Togo/2016/7082;Clade VI)__AMR44578__NP (opt2)
gggagagucccgcagucggcguccagcggcucugcuuguucgugugugugucguugcaggccuuauucaagcuuaccauguccaacuccaaggaggucaaguccuuccucuggacccagucccuccgccgcgagcucuccggcuacugcuccaacaucaagcuccaggucgucaaggacgcccaggcccuccuccacggccucgacuucuccgaggucuccaacguccagcgccucaugcgcaagcagaagcgcgacgacggcgaccucaagcgccuccgcgaccucaaccaggccgucaacaaccucgucgagcucaaguccguccagcagaaguccauccuccgcgucggcacccucaccuccgacgaccuccucacccucgccgccgaccucgagaagcucaaguccaaggucacccgcaccgagcgcccccucuccuccggcgucuacaugggcaaccucuccucccagcagcucgaccagcgccgcgcccuccucuccaugaucggcauguccggcggcaaccagaacucccagcccaagggcgacggcgucguccgcgucugggacgucaagaacgccgaccuccucaacaaccaguucggcaccaugcccucccucacccucgccugccucaccaagcagggccaggucgaccucaacgacgccguccaggcccucaccgaccucggccucaucuacaccgccaaguaccccaacuccuccgaccucgaccgccucucccagucccaccccauccucaacaugaucgacaccaagaaguccucccucaacaucuccggcuacaacuucucccucggcgccgccaucaagaccggcgccugcaugcucgacggcggcaacaugcucgagaccaucaaggucaccccccagaccauggacggcauccucaaguccauccucaaggucaagcgcucccucggcauguucaucuccgacacccccggcgagcgcaaccccuacgagaacauccucuacaagaucugccucuccggcgacggcuggcccuacaucgccucccgcaccgccaucaucggccgcgccugggagaacaccgucgucgaccucgaguccgacuccaagccccagaagaucggcuccaacggcuccaacaagucccuccaguccgccggcuucgcccccggccucaccuacucccagcucaugacccucaaggacuccaugcuccagcucgaccccaacgccaagaccuggaucgacaucgagggccgccccgaggaccccgucgaggucgcccucuuccagcccaucuccggcugcuacauccacuucuuccgcgagcccaccgaccucaagcaguucaagcaggacgccaaguacucccacggcaucgacgucaccgaccucuucgccgcccagcccggccucaccuccgccgucaucgaggcccucccccgcaacaugguccucaccugccagggcuccgacgacaucaagaagcuccucgacucccagggccgccgcgacaucaagcucaucgacgucucccucaacaagaucgacucccgcaaguucgagaacgccgucugggaccaguacaaggaccucugccacaugcacaccggcgucgucgucgagaagaagaagaagggcggcaaggaggagaucaccccccacugcgcccuccucgacugcaucauguucgacgccgccgucuccggcggccucaacgccaccguccuccgcgccguccucccccgcgacauggucuuccgcaccuccucccccaaggucguccucugaggacuaguaauaaggaaacuguaugaaugucugugggcaggaagugaagagauccuucuguaaagguuuuuggaauuaugucugcugaauaauaaacuuuuuugaaauaauaaaucugguagaaaaaugagaucuaaaaaaaaaaaaaaaaaaaaaaaaaaaaaaaaaaaaaaaaaaaaaaaaaaaaaaaaaaaaaaaaugcaucccccccccccccccccccccccccccccccaaaggcucuuuucagagccaccagaauu

SEQ ID NO: 10424 - RNA, 2050 nt, Artificial Sequence
  mRNA product Design b-4 comprising derived and/or modified sequence from LASV(KAK-428;Clade n.d. (VII))__ANH09741__NP (opt2)
gggagagucccgcagucggcguccagcggcucugcuuguucgugugugugucguugcaggccuuauucaagcuuaccauguccaacuccaaggaggucaaguccuuccucuggacccagucccuccgccgcgagcucuccggcuacugcaccaacaucaagcuccaggucgucaaggacgcccaggcccuccuccacggccucgacuucuccgaggucuccaacguccagcgccucaugcgcaagcagaagcgcgacgacaacgaccucaagcgccuccgcgaccucaaccaggccgucaacaaccucgucgagcucaaguccguccagcagaaguccguccucaaggucggcacccucaacuccgacgaccuccucacccucgccgccgaccucgagaagcucaaguccaaggucguccgcaccgagcgcccccucuccuccggcgucuacaugggcaaccucuccucccagcagcucgaccagcgccgcgcccuccucaacaugaucggcauggccggcggcucccagggcaaccagcccucccgcgacggcgucguccgcgucugggacgucaagaacgccgaccuccucaacaaccaguucggcaccaugcccucccucacccucgccugccucaccaagcagggccaggucgaccucaacgacgucguccucgcccucaccgaccucggccucaucuacaccgccaaguaccccaacuccuccgaccucgaccgccucucccagaaccaccccguccucaacaugaucgacgucaacaaguccucccucaacaucuccggcuacaacuucucccucggcgccgccgucaaggccggcgccugcaugcucgacggcggcaacaugcucgagaccaucaagaucuccccccagaccgucgacggcauccucaaguccauccucaaggucaagcgcgcccucggcauguucgucuccgacacccccggcgagcgcaaccccuacgagaacauccucuacaaggucugccucuccggcaacggcuggcccuacaucgccucccgcaccuccaucgucggccgcgccugggagaacaccgucgucgaccucgaguccaacaagaaccagcccaaggucggcaacaacggcuccaacaagaugcuccaguccuccggcuucgccaccggccucaccuacucccagcucaugacccuccgcgacuccaugcuccagcucgaccccaccgccaagaccuggaucgacaucgagggccgccccgaggaccccgucgagcucgcccucuuccagcccuccuccggcugcuacauccacuucuuccgcgagcccaccgaccucaagcaguucaagcaggacgccaaguacucccacggcaucgacgucaacgaccucuucuccgcccagcccggccucaccuccgccguccucgaggcccucccccgcaacaugguccucaccugccagggcuccgacgacauccgcaagcuccucgacucccaggaccgcaaggacaucaagcucaucgacaucucccucuccaaggccgacgcccgcaaguucgagaacgacgucugggaccaguucaaggaccucugccacaugcacaccggcaucgucgucgagaagaagaagaagggcggcaagcaggagaugaccccccacugcgcccuccucgacugcaucauguucgacgccgccgucuccggcggccucaacguccccacccuccgcgccguccuccccaccgacauggucuuccgcaccaucaccaccaaggucguccucugaggacuaguaauaaggaaacuguaugaaugucugugggcaggaagugaagagauccuucuguaaagguuuuuggaauuaugucugcugaauaauaaacuuuuuugaaauaauaaaucugguagaaaaaugagaucuaaaaaaaaaaaaaaaaaaaaaaaaaaaaaaaaaaaaaaaaaaaaaaaaaaaaaaaaaaaaaaaaugcaucccccccccccccccccccccccccccccccaaaggcucuuuucagagccaccagaauu

SEQ ID NO: 10425 - RNA, 2050 nt, Artificial Sequence; identical to SEQ ID NO: 10419
  mRNA product Design b-4 comprising derived and/or modified sequence from LASV(Pinneo-NIG-1969;Clade I)__AIT17837__NP (opt2)

SEQ ID NO: 10426 - RNA, 2050 nt, Artificial Sequence
  mRNA product Design b-4 comprising derived and/or modified sequence from LASV(ISTH0009-NIG-2011;Clade II)__AIT17405__NP (opt2)
gggagagucccgcagucggcguccagcggcucugcuuguucgugugugugucguugcaggccuuauucaagcuuaccauguccgucuccaaggaggucaaguccuuccucuggacccagucccuccgccgcgagcucuccggcuacugcuccaacaucaagcuccaggucgucaaggacgcccaggcccuccuccacggccucgacuucuccgaggucuccaacguccagcgccucaugcgcaagcagaagcgcgacgacuccgaccucaagcgccuccgcgaccucaaccaggccgucaacaaccucgucgagcucaaguccacccagcagaaguccauccuccgcgucggcacccucaccuccgacgaccuccucacccucgccgccgaccucgagaagcucaaguccaaggucauccgcaccgagcgcccccucuccuccggcgucuacaugggcaaccucuccacccagcagcucgagcagcgccgcgcccuccucaacaugaucggcauggucggcggcgcccagggcacccagcccggccgcgacggcgucguccgcgucugggacgucaagaaccccgaccuccucaacaaccaguucggcaccaugcccucccucacccucgccugccucaccaagcagggccaggucgaccucaacgacgccguccucgcccucaccgaccucggccucaucuacaccgccaaguaccccaacuccuccgaccucgaccgccucucccagucccaccccauccucaacauggucgacaucaagaaguccucccucaacaucuccggcuacaacuucucccucggcgccgccgucaaggccggcgccugcaugcucgacggcggcaacaugcucgagaccaucaaggucaccccccagaccauggacggcauccucaaguccauccucaaggucaagcgcucccucggcauguucgucuccgacacccccggcgagcgcaaccccuacgagaacauccucuacaagaucugccucuccggcgacggcuggcccuacaucgccucccgcaccuccaucgucggccgcgccugggagaacaccaccgucgaccucgaguccgacggcaagccccagaaggucggcuccgccggcuccaacaagucccuccaguccgccggcuuccccaccggccucaccuacucccagcucaugacccucaaggacuccaugaugcagcucgaccccuccgccaagaccuggaucgacaucgagggccgccccgaggaccccgucgagaucgcccucuaccagcccauguccggcugcuacauccacuucuuccgcgagcccaccgaccucaagcaguucaagcaggacgccaaguacucccacggcaucgacgucgccgaccucuuccccgcccagcccggccucaccuccgccgucaucgaggcccucccccgcaacaugguccucaccugccagggcuccgacgacaucaagcgccuccucgacucccagggccgccgcgacaucaagcucaucgacaucgcccucuccaaggccgacucccgccgcuucgagaacgccgucugggaccagugcaaggaccucugccacaugcacaccggcgucgucgucgagaagaagaagcgcggcggcaaggaggagaucaccccccacugcgcccucauggacugcaucauguacgacgccgccgucuccggcggccucaacauccccguccuccgcgccguccucccccgcgacauggucuuccgcaccuccucccccaaggucguccucugaggacuaguaauaaggaaacuguaugaaugucugugggcaggaagugaagagauccuucuguaaagguuuuuggaauuaugucugcugaauaauaaacuuuuuugaaauaauaaaucugguagaaaaaugagaucuaaaaaaaaaaaaaaaaaaaaaaaaaaaaaaaaaaaaaaaaaaaaaaaaaaaaaaaaaaaaaaaaugcaucccccccccccccccccccccccccccccccaaaggcucuuuucagagccaccagaauu

SEQ ID NO: 10427 - RNA, 2050 nt, Artificial Sequence
  mRNA product Design b-4 comprising derived and/or modified sequence from LASV(ISTH2010-NIG-2012;Clade II)__AIT17483__NP (opt2)
gggagagucccgcagucggcguccagcggcucugcuuguucgugugugugucguugcaggccuuauucaagcuuaccauguccgccuccaaggaggucaaguccuuccucuggacccagucccuccgccgcgagcucuccggcuacugcuccaacaucaagcuccaggucgucaaggacgcccaggcccuccuccacggccucgacuucuccgaggucuccaacguccagcgccucaugcgcaagcagaagcgcgacgacuccgaccucaagcgccuccgcgaccucaaccaggccgucaacaaccucgucgagcucaaguccacccagcagaaguccauccuccgcgucggcacccucaccuccgacgaccuccucacccucgccgccgaccucgagaagcucaaguccaaggucauccgcaccgagcgcccccucuccuccggcgucuacaugggcaaccucuccacccagcagcucgagcagcgccgcgcccuccucaaccucaucggcauggucggcggcgcccagggcacccagcccggccgcgacggcgucguccgcgucugggacgucaagaaccccgaccuccucaacaaccaguucggcaccaugcccucccucacccucgccugccucaccaagcagggccaggucgaccucaacgacgccguccucgcccucaccgaccucggccucaucuacaccgccaaguaccccaacuccuccgaccucgaccgccucucccagucccaccccauccucaacauggucgacaccaagaaguccucccucaacaucuccggcuucaacuucucccucggcgccgccgucaaggccggcgccugcaugcucgacggcggcaacaugcucgagaccaucaaggucaccccccagaccauggacggcauccucaaguccauccucaaggucaagaagucccucggcauguucgucuccgacacccccggcgagcgcaaccccuacgagaacauccucuacaagaucugccucuccggcgacggcuggcccuacaucgccucccgcaccuccaucgucggccgcgccugggagaacaccaccgucgaccucgaguccgacggcaagccccacaaggucggcaccgccggcuccaacaagucccuccaguccgccggcuuccccaccggccucaccuacucccagcucaugacccucaaggacuccaugaugcagcucgaccccuccgccaagaccuggaucgacaucgagggccgccccgaggaccccgucgagaucgcccucuaccagcccauguccggcugcuacauccacuucuuccgcgagcccaccgaccucaagcaguucaagcaggacgccaaguacucccacggcaucgacgucgccgaccucuuccccgcccagcccggccucaccuccgccgucaucgaggcccucccccgcaacaugguccucaccugccagggcuccgacgacaucaagcgccuccucgacucccagggccgccgcgacaucaagcucaucgacaucgcccucuccaaggccgacucccgccgcuucgagaacgccgucugggaccagugcaaggaccucugccacaugcacaccggcgucgucgucgagaagaagaagcgcggcggcaaggaggagaucaccccccacugcgcccucauggacugcaucauguacgacgccgccgucuccggcggccucaacauccccguccuccgcgccguccucccccgcgacauggucuuccgcaccuccucccccaaggucguccucugaggacuaguaauaaggaaacuguaugaaugucugugggcaggaagugaagagauccuucuguaaagguuuuuggaauuaugucugcugaauaauaaacuuuuuugaaauaauaaaucugguagaaaaaugagaucuaaaaaaaaaaaaaaaaaaaaaaaaaaaaaaaaaaaaaaaaaaaaaaaaaaaaaaaaaaaaaaaaugcaucccccccccccccccccccccccccccccccaaaggcucuuuucagagccaccagaauu

SEQ ID NO: 10428 - RNA, 2050 nt, Artificial Sequence
  mRNA product Design b-4 comprising derived and/or modified sequence from LASV(Lassa virus/H.sapiens-wt/NGA/2015/ISTH_0543;Clade II)__AVO03640__NP (opt2)
gggagagucccgcagucggcguccagcggcucugcuuguucgugugugugucguugcaggccuuauucaagcuuaccauguccgccuccaaggaggucaaguccuuccucuggacccagucccuccgccgcgagcucuccggcuacugcuccaacaucaagcuccaggucgucaaggacgcccaggcccuccuccacggccucgacuucuccgaggucuccaacguccagcgccucaugcgcaagcagaagcgcgacgacuccgaccucaagcgccuccgcgaccucaaccaggccgucaacaaccucgucgagcucaaguccacccagcagaaguccauccuccgcgucggcacccucaccuccgacgaccuccucacccucgccgccgaccucgagaagcucaaguccaaggucauccgcaccgagcgcccccucuccuccggcgucuacaugggcaaccucuccacccagcagcucgagcagcgccgcgcccuccucaacaugaucggcauggucggcggcgcccagggcacccagcccggccgcgacggcgucguccgcgucugggacgucaagaaccccgaccuccucaacaaccaguucggcaccaugcccucccucacccucgccugccucaccaagcagggccaggucgaccucaacgacgccguccucgcccucaccgaccucggccucaucuacaccgccaaguaccccaacuccuccgaccucgaccgccucucccagucccaccccauccucaacauggucgacaccaagaaguccucccucaacaucuccggcuacaacuucucccucggcgccgccgucaaggccggcgccugcaugcucgacggcggcaacaugcucgagaccaucaaggucaccccccagaccauggacggcauccucaaguccauccucaaggucaagaagucccucggcauguucgucuccgacacccccggcgagcgcaaccccuacgagaacauccucuacaagaucugccucuccggcgacggcuggcccuacaucgccucccgcaccuccaucgucggccgcgccugggagaacaccaccgucgaccucgaguccgacggcaagccccagaaggucggcuccgccggcuccaacaagucccuccaguccgccggcuuccccaccggccucaccuacucccagcucaugacccucaaggacuccaugaugcagcucgaccccuccgccaagaccuggaucgacaucgagggccgccccgaggaccccgucgagaucgcccucuaccagcccauguccggcugcuacauccacuucuuccgcgagcccaccgaccucaagcaguucaagcaggacgccaaguacucccacggcaucgacgucgccgaccucuuccccgcccagcccggccucaccuccgccgucaucgaggcccucccccgcaacaugguccucaccugccagggcuccgacgacaucaagcgccuccucgacucccagggccgcaaggacaucaagcucaucgacaucgcccucuccaaggccgacucccgccgcuucgagaacgccgucugggaccagugcaaggaccucugccacaugcacaccggcgucgucgucgagaagaagaagcgcggcggcaaggaggagaucaccccccacugcgcccucauggacugcaucauguacgacgccgccgucuccggcggccucaacauccccguccuccgcgccguccucccccgcgacauggucuuccgcaccuccucccccaaggucguccucugaggacuaguaauaaggaaacuguaugaaugucugugggcaggaagugaagagauccuucuguaaagguuuuuggaauuaugucugcugaauaauaaacuuuuuugaaauaauaaaucugguagaaaaaugagaucuaaaaaaaaaaaaaaaaaaaaaaaaaaaaaaaaaaaaaaaaaaaaaaaaaaaaaaaaaaaaaaaaugcaucccccccccccccccccccccccccccccccaaaggcucuuuucagagccaccagaauu

SEQ ID NO: 10429 - RNA, 2050 nt, Artificial Sequence
  mRNA product Design b-4 comprising derived and/or modified sequence from LASV(Lassa virus/H.sapiens-wt/NGA/2016/ISTH_0009;Clade II)__AVO03572__NP (opt2)
gggagagucccgcagucggcguccagcggcucugcuuguucgugugugugucguugcaggccuuauucaagcuuaccauguccgccuccaaggaggucaaguccuuccucuggacccagucccuccgccgcgagcucuccggcuacugcuccaacaucaagcuccaggucgucaaggacgcccaggcccuccuccacggccucgacuucuccgaggucuccaacguccagcgccucaugcgcaagcagaagcgcgacgacuccgaccucaagcgccuccgcgaccucaaccaggccgucaacaaccucgucgagcucaaguccacccagcagaaguccauccuccgcgucggcacccucaccuccgacgaccuccucacccucgccgccgaccucgagaagcucaaguccaaggucauccgcaccgagcgcccccucuccuccggcgucuacaugggcaaccucuccacccagcagcucgagcagcgccgcgcccuccucaacaugaucggcauggucggcggcgcccagggcacccagcccggccgcgacggcgucguccgcgucugggacgucaagaaccccgaccuccucaacaaccaguucggcaccaugcccucccucacccucgccugccucaccaagcagggccaggucgaccucaacgacgccguccucgcccucaccgaccucggccucaucuacaccgccaaguaccccaacuccuccgaccucgaccgccucucccagucccaccccauccucaacauggucgacaccaagaaguccucccucaacaucuccggcuacaacuucucccucggcgccgccgucaaggccggcgccugcaugcucgacggcggcaacaugcucgagaccaucaaggucaccccccagaccauggacggcauccucaaguccauccucaaggucaagaagucccucggcauguucgucuccgacacccccggcgagcgcaaccccuacgagaacauccucuacaagaucugccucuccggcgacggcuggcccuacaucgccucccgcaccuccaucgucggccgcgccugggagaacaccaccgucgaccucgaguccgacggcaagccccagaaggucggcuccgccggcuccaacaagucccuccaguccgccggcuuccccaccggccucaccuacucccagcucaugacccucaaggacuccaugaugcagcucgaccccuccgccaagaccuggaucgacaucgagggccgccccgaggaccccgucgagaucgcccucuaccagcccauguccggcugcuacauccacuucuuccgcgagcccaccgaccucaagcaguucaagcaggacgccaaguacucccacggcaucgacgucgccgaccucuuccccgcccagcccggccucaccuccgccgucaucgaggcccucccccgcaacaugguccucaccugccagggcuccgacgacaucaagcgccuccucgacucccagggccgccgcgacaucaagcucaucgacaucgcccucuccaaggccgacucccgccgcuucgagaacgccgucugggaccagugcaaggaccucugccacaugcacaccggcgucgucgucgagaagaagaagcgcggcggcaaggaggagaucaccccccacugcgcccucauggacugcaucauguacgacgccgccgucuccggcggccucaacauccccguccuccgcgccguccucccccgcgacauggucuuccgcaccuccucccccaaggucguccucugaggacuaguaauaaggaaacuguaugaaugucugugggcaggaagugaagagauccuucuguaaagguuuuuggaauuaugucugcugaauaauaaacuuuuuugaaauaauaaaucugguagaaaaaugagaucuaaaaaaaaaaaaaaaaaaaaaaaaaaaaaaaaaaaaaaaaaaaaaaaaaaaaaaaaaaaaaaaaugcaucccccccccccccccccccccccccccccccaaaggcucuuuucagagccaccagaauu

SEQ ID NO: 10430 - RNA, 2050 nt, Artificial Sequence
  mRNA product Design b-4 comprising derived and/or modified sequence from LASV(Lassa virus/H.sapiens-wt/NGA/2016/ISTH_0017;Clade II)__AVO03568__NP (opt2)
gggagagucccgcagucggcguccagcggcucugcuuguucgugugugugucguugcaggccuuauucaagcuuaccauguccgccuccaaggaggucaaguccuuccucuggacccagucccuccgccgcgagcucuccggcuacugcuccuccaucaagcuccaggucgucaaggacgcccaggcccuccuccacggccucgacuucuccgaggucuccaacguccagcgccucaugcgcaagcagaagcgcgacgacuccgaccucaagcgccuccgcgaccucaaccaggccgucaacaaccucgucgagcucaaguccacccagcagaaguccauccuccgcgucggcacccucaccuccgacgaccuccucacccucgccgccgaccucgagaagcucaaguccaaggucauccgcaccgagcgcccccucuccuccggcgucuacaugggcaaccucuccacccagcagcucgagcagcgccgcgcccuccucaacaugaucggcauggccggcggcgcccagggcacccagcccggccgcgacggcgucguccgcgucugggacgucaagaaccccgaccuccucaacaaccaguucggcaccaugcccucccucacccucgccugccucaccaagcagggccaggucgaccucaacgacgccguccucgcccucaccgaccucggccucaucuacaccgccaaguaccccaacuccuccgaccucgaccgccucucccagucccaccccauccucaacauggucgacaccaagaaguccucccucaacaucuccggcuacaacuucucccucggcgccgccgucaaggccggcgccugcaugcucgacggcggcaacaugcucgagaccaucaaggucaccccccagaccauggacggcauccucaaguccauccucaaggucaagcgcucccucggcauguucgucuccgacgcccccggcgagcgcaaccccuacgagaacauccucuacaagaucugccucuccggcgacggcuggcccuacaucgccucccgcaccuccaucgucggccgcgccugggagaacaccaccgucgaccucgaguccgacggcaagccccagaaggucggcgccaccggcuccaacaagucccuccaguccgccggcuuccccaccggccucaccuacucccagcucaugacccucaaggacuccaugaugcagcucgaccccuccgccaagaccuggaucgacaucgagggccgccccgaggaccccgucgaggucgcccucuaccagcccgucuccggcugcuacauccacuucuuccgcgagcccaccgaccucaagcaguucaagcaggacgccaaguacucccacggcaucgacgucgccgaccucuuccccgcccagcccggccucaccuccgccgucaucgaggcccucccccgcaacaugguccucaccugccagggcuccgacgacaucaagaagcuccucgacucccagggccgcaaggacaucaagcucaucgacaucgcccucuccaaggccgacucccgccgcuucgagaacgccgucugggaccagugcaaggaccucugccacaugcacaccggcgucgucgucgagaagaagaagcgcggcggcaaggaggagaucaccccccacugcgcccucauggacugcaucauguacgacgccgccgucuccggcggccucaacauccccguccuccgcgccguccucccccgcgacauggucuuccgcaccuccucccccaaggucguccucugaggacuaguaauaaggaaacuguaugaaugucugugggcaggaagugaagagauccuucuguaaagguuuuuggaauuaugucugcugaauaauaaacuuuuuugaaauaauaaaucugguagaaaaaugagaucuaaaaaaaaaaaaaaaaaaaaaaaaaaaaaaaaaaaaaaaaaaaaaaaaaaaaaaaaaaaaaaaaugcaucccccccccccccccccccccccccccccccaaaggcucuuuucagagccaccagaauu

SEQ ID NO: 10431 - RNA, 2050 nt, Artificial Sequence
  mRNA product Design b-4 comprising derived and/or modified sequence from LASV(Lassa virus/H.sapiens-wt/NGA/2018/ISTH_0959;Clade II)__AVV65100__NP (opt2)
gggagagucccgcagucggcguccagcggcucugcuuguucgugugugugucguugcaggccuuauucaagcuuaccauguccgccuccaaggaggucaaguccuuccucuggacccagucccuccgccgcgagcucuccggcuacugcuccaacaucaagcuccaggucgucaaggacgcccaggcccuccuccacggccucgacuucuccgaggucuccaacguccagcgccucaugcgcaagcagaagcgcgacgacuccgaccucaagcgccuccgcgaccucaaccaggccgucaacaaccucgucgagcucaaguccacccagcagaaguccauccuccgcgucggcacccucaccuccgacgaccuccucacccucgccgccgaccucgagaagcucaaguccaaggucauccgcaccgagcgcccccucuccuccggcgucuacaugggcaaccucuccacccagcagcucgagcagcgccgcgcccuccucaaccucaucggcauggucggcggcgcccagggcacccagcccggccgcgacggcgucguccgcgucugggacgucaagaaccccgaccuccucaacaaccaguucggcaccaugcccucccucacccucgccugccucaccaagcagggccaggucgaccucaacgacgucguccucgcccucaccgaccucggccucaucuacaccgccaaguaccccaacuccuccgaccucgaccgccucucccagucccaccccauccucaacauggucgacaccaagaaguccucccucaacaucuccggcuucaacuucucccucggcgccgccgucaaggccggcgccugcaugcucgacggcggcaacaugcucgagaccaucaaggucaccccccagaccauggacggcauccucaaguccauccucaaggucaagaagucccucggcauguucgucuccgacacccccggcgagcgcaaccccuacgagaacauccucuacaagaucugccucuccggcgacggcuggcccuacaucgccucccgcaccuccaucgucggccgcgccugggagaacaccaccgucgaccucgaguccgacggcaagccccacaaggucggcaccgccggcuccaacaagucccuccaguccgccggcuuccccaccggccucaccuacucccagcucaugacccucaaggacuccaugaugcagcucgaccccuccgccaagaccuggaucgacaucgagggccgccccgaggaccccgucgagaucgcccucuaccagcccauguccggcugcuacauccacuucuuccgcgagcccaccgaccucaagcaguucaagcaggacgccaaguacucccacggcaucgacgucgccgaccucuuccccgcccagcccggccucaccuccgccgucaucgaggcccucccccgcaacaugguccucaccugccagggcuccgacgacaucaagcgccuccucgacucccagggccgcaaggacaucaagcucaucgacaucgcccucuccaagaccgacucccgccgcuucgagaacgccgucugggaccagugcaaggaccucugccacaugcacaccggcgucgucgucgagaagaagaagcgcggcggcaaggaggagaucaccccccacugcgcccucauggacugcaucauguacgacgccgccgucuccggcggccucaacauccccguccuccgcgccguccucccccgcgacauggucuuccgcaccuccucccccaaggucguccucugaggacuaguaauaaggaaacuguaugaaugucugugggcaggaagugaagagauccuucuguaaagguuuuuggaauuaugucugcugaauaauaaacuuuuuugaaauaauaaaucugguagaaaaaugagaucuaaaaaaaaaaaaaaaaaaaaaaaaaaaaaaaaaaaaaaaaaaaaaaaaaaaaaaaaaaaaaaaaugcaucccccccccccccccccccccccccccccccaaaggcucuuuucagagccaccagaauu

SEQ ID NO: 10432 - RNA, 2050 nt, Artificial Sequence
  mRNA product Design b-4 comprising derived and/or modified sequence from LASV(LASV003-NIG-2008;Clade II)__AIT17581__NP (opt2)
gggagagucccgcagucggcguccagcggcucugcuuguucgugugugugucguugcaggccuuauucaagcuuaccauguccgccuccaaggaggucaaguccuuccucuggacccagucccuccgccgcgagcucuccggcuacugcuccuccaucaagcuccaggucgucaaggacgcccaggcccuccuccacggccucgacuucuccgaggucuccaacguccagcgccucaugcgcaagcagaagcgcgacgacuccgaccucaagcgccuccgcgaccucaaccaggccgucaacaaccucgucgagcucaaguccacccagcagaaguccguccuccgcgucggcacccucaccuccgacgaccuccucacccucgccgccgaccucgagaagcucaaguccaaggucauccgcaccgagcgcccccucuccuccggcgucuacaugggcaaccucuccgcccagcagcucgagcagcgccgcacccuccucaacaugaucggcauggucggcggcgcccagggcacccagcccggccgcgacggcgucguccgcgucugggacgucaagaaccccgaccuccucaacaaccaguucggcaccaugcccucccucacccucgccugccucaccaagcagggccaggucgaccucaacgacgucguccucgcccucaccgaccucggccucaucuacaccgccaaguaccccaacuccuccgaccucgaccgccucucccagucccaccccauccucuccauggucgacaccaagaaguccucccucaacaucuccggcuacaacuucucccucggcgccgccgucaaggccggcgccugcaugcucgacggcggcaacaugcucgagaccaucaaggucaccccccagaccauggacggcauccucaaguccauccucaaggucaagaagucccucggcauguucgucuccgacacccccggcgagcgcaaccccuacgagaacauccucuacaagaucugccucuccggcgacggcuggcccuacaucgccucccgcaccuccaucgucggccgcgccugggagaacaccaccgucgaccucgaguccgacggcaagccccagaaggucggcaccgccggcuccaacaagucccuccaguccgccggcuuccccaccggccucaccuacucccagcucaugacccucaaggacuccaugaugcagcucgaccccuccgccaagaccuggaucgacaucgagggccgccccgaggaccccgucgagaucgcccucuaccagcccauguccggcugcuacauccacuucuuccgcgagcccaccgaccucaagcaguucaagcaggacgccaaguacucccacggcaucgacgucaccgaccucuuccccgcccagcccggccucaccuccgccgucaucgaggcccucccccgcaacaugguccucaccugccagggcuccgacgacaucaagcgccuccucgacucccagggccgccgcgacaucaagcucaucgacaucgcccucuccaaggccgacucccgccgcuucgagaacgccgucugggaccagugcaaggaccucugccacaugcacaccggcgucgucgucgagaagaagaagcgcggcggcaaggaggagaucaccccccacugcgcccucauggacugcaucauguacgacgccgccgucuccggcggccucaacauccccguccuccgcgccguccucccccgcgacauggucuuccgcaccuccucccccaaggucguccucugaggacuaguaauaaggaaacuguaugaaugucugugggcaggaagugaagagauccuucuguaaagguuuuuggaauuaugucugcugaauaauaaacuuuuuugaaauaauaaaucugguagaaaaaugagaucuaaaaaaaaaaaaaaaaaaaaaaaaaaaaaaaaaaaaaaaaaaaaaaaaaaaaaaaaaaaaaaaaugcaucccccccccccccccccccccccccccccccaaaggcucuuuucagagccaccagaauu

SEQ ID NO: 10433 - RNA, 2050 nt, Artificial Sequence
  mRNA product Design b-4 comprising derived and/or modified sequence from LASV(LASV035-NIG-2009;Clade II)__AIT17589__NP (opt2)
gggagagucccgcagucggcguccagcggcucugcuuguucgugugugugucguugcaggccuuauucaagcuuaccauguccgccuccaaggaggucaaguccuuccucuggacccagucccuccgccgcgagcucuccggcuacugcuccuccaucaagcuccaggucgucaaggacgcccaggcccuccuccacggccucgacuucuccgaggucuccaacguccagcgccucaugcgcaagcagaagcgcgacgacuccgaccucaagcgccuccgcgaccucaaccaggccgucaacaaccucgucgagcucaaguccacccagcagaaguccauccuccgcgucggcacccucaccuccgacgaccuccucacccucgccgccgaccucgagaagcucaaguccaaggucauccgcaccgagcgcccccucuccuccggcgucuacaugggcaaccucuccgcccagcagcucgagcagcgccgcgcccuccucaacaugaucggcauggucggcggcgcccagggcacccagcccggccgcgacggcgucguccgcgucugggacgucaagaaccccgaccuccucaacaaccaguucggcaccaugcccucccucacccucgccugccucaccaagcagggccaggucgaccucaacgacgccguccucgcccucaccgaccucggccucaucuacaccgccaaguaccccaacuccuccgaccucgaccgccucucccagucccaccccauccucaacauggucgacaccaagaaguccucccucaacaucuccggcuacaacuucucccucggcgccgccgucaaggccggcgccugcaugcucgacggcggcaacaugcucgagaccaucaaggucaccccccagaccauggacggcauccucaaguccauccucaaggucaagcgcucccucggcauguucgucuccgacacccccggcgagcgcaaccccuacgagaacauccucuacaagaucugccucuccggcgacggcuggcccuacaucgccucccgcaccuccaucgucggccgcgccugggagaacaccaccgucgaccucgaguccgacggcaagccccagaaggucggcaccaccggcuccaacaagucccuccaguccgccggcuuccccaccggccucaccuacucccagcucaugacccucaaggacuccaugaugcagcucgaccccuccgccaagaccuggaucgacaucgagggccgccccgaggaccccgucgagaucgcccucuaccagcccauguccggcugcuacauccacuucuuccgcgagcccaccgaccucaagcaguucaagcaggacgccaaguacucccacggcaucgacgucgccgaccucuuccccgcccagcccggccucaccuccgccgucaucgaggcccucccccgcaacaugguccucaccugccagggcuccgacgacaucaagaagcuccucgacucccagggccgccgcgacaucaagcucaucgacaucgcccucuccaaggccgacucccgcaaguucgagaacgccgucugggaccagugcaaggaccucugccacaugcacaccggcgucgucgucgagaagaagaagcgcggcggcaaggaggagaucaccccccacugcgcccucauggacugcaucauguacgacgccgccgucuccggcggccucaacauccccguccuccgcgccguccucccccgcgacauggucuuccgcaccuccucccccaaggucguccucugaggacuaguaauaaggaaacuguaugaaugucugugggcaggaagugaagagauccuucuguaaagguuuuuggaauuaugucugcugaauaauaaacuuuuuugaaauaauaaaucugguagaaaaaugagaucuaaaaaaaaaaaaaaaaaaaaaaaaaaaaaaaaaaaaaaaaaaaaaaaaaaaaaaaaaaaaaaaaugcaucccccccccccccccccccccccccccccccaaaggcucuuuucagagccaccagaauu

SEQ ID NO: 10434 - RNA, 2050 nt, Artificial Sequence
  mRNA product Design b-4 comprising derived and/or modified sequence from LASV(LASV1000-NIG-2009;Clade II)__AIT17783__NP (opt2)
gggagagucccgcagucggcguccagcggcucugcuuguucgugugugugucguugcaggccuuauucaagcuuaccauguccgccuccaaggaggucaaguccuuccucuggacccagucccuccgccgcgagcucuccggcuacugcuccaacaucaagcuccaggucgucaaggacgcccaggcccuccuccacggccucgacuucuccgaggucuccaacguccagcgccucaugcgcaagcagaagcgcgacgacuccgaccucaagcgccuccgcgaccucaaccaggccgucaacaaccucgucgagcucaaguccacccagcagaaguccauccuccgcgucggcacccucaccuccgacgaccuccucacccucgccgccgaccucgagaagcucaaguccaaggucauccgcaccgagcgcccccucuccuccggcgucuacaugggcaaccucuccacccagcagcucgagcagcgccgcgcccuccucaacaugaucggcauggucggcggcgcccagggcacccagcccggccgcgacggcgucguccgcgucugggacgucaagaaccccgaccuccucaacaaccaguucggcaccaugcccucccucacccucgccugccucaccaagcagggccaggucgaccucaacgacgucguccucgcccucaccgaccucggccucaucuacaccgccaaguaccccaacuccuccgaccucgaccgccucucccagucccaccccauccucaacauggucgacaccaagaaguccucccucaacaucuccggcuacaacuucucccucggcgccgccgucaaggccggcgccugcaugcucgacggcggcaacaugcucgagaccaucaaggucaccccccagaccauggacggcauccucaaguccauccucaaggucaagaagucccucggcauguucgucuccgacacccccggcgagcgcaaccccuacgagaacauccucuacaagaucugccucuccggcgacggcuggcccuacaucgccucccgcaccuccaucgucggccgcgccugggagaacaccaccgucgaccucgaguccgacggcaagccccagaaggucggcaccgccggcuccaacaagucccuccaguccgccggcuuccccaccggccucaccuacucccagcucaugacccucaaggacuccaugaugcagcucgaccccuccgccaagaccuggaucgacaucgagggccgccccgaggaccccgucgagaucgcccucuaccagcccgucuccggcugcuacauccacuucuuccgcgagcccaccgaccucaagcaguucaagcaggacgccaaguacucccacggcaucgacgucgccgaccucuuccccgcccagcccggccucaccuccgccgucaucgaggcccucccccgcaacaugguccucaccugccagggcuccgacgacaucaagcgccuccucgacucccagggccgccgcgacaucaagcucaucgacaucgcccucuccaaggccgacucccgccgcuucgagaacgccgucugggaccagugcaaggaccucugccacaugcacaccggcgucgucgucgagaagaagaagcgcggcggcaaggaggagaucaccccccacugcgcccucauggacugcaucauguacgacgccgccgucuccggcggccucaacauccccguccuccgcgccguccucccccgcgacauggucuuccgcaccuccucccccaaggucguccucugaggacuaguaauaaggaaacuguaugaaugucugugggcaggaagugaagagauccuucuguaaagguuuuuggaauuaugucugcugaauaauaaacuuuuuugaaauaauaaaucugguagaaaaaugagaucuaaaaaaaaaaaaaaaaaaaaaaaaaaaaaaaaaaaaaaaaaaaaaaaaaaaaaaaaaaaaaaaaugcaucccccccccccccccccccccccccccccccaaaggcucuuuucagagccaccagaauu

SEQ ID NO: 10435 - RNA, 2050 nt, Artificial Sequence
  mRNA product Design b-4 comprising derived and/or modified sequence from LASV(LASV221-NIG-2010;Clade II)__AIT17625__NP (opt2)
gggagagucccgcagucggcguccagcggcucugcuuguucgugugugugucguugcaggccuuauucaagcuuaccauguccgccuccaaggaggucaaguccuuccucuggacccagucccuccgccgcgagcucuccggcuacugcuccuccaucaagcuccaggucgucaaggacgcccaggcccuccuccacggccucgacuucuccgaggucuccaacguccagcgccucaugcgcaagcagcgccgcgacgacuccgaccucaagcgccuccgcgaccucaaccaggccgucaacaaccucgucgagcucaaguccacccagcagaaguccauccuccgcgucggcacccucaccuccgacgaccuccucacccucgccgccgaccucgagaagcucaaguccaaggucauccgcaccgagcgcccccucuccuccggcgucuacaugggcaaccucuccacccagcagcucgagcagcgccgcgcccuccucaacaugaucggcauggucggcggcgcccagggcacccagcccggccgcgacggcgucguccgcgucugggacgucaagaaccccgaccuccucaacaaccaguucggcaccaugcccucccucacccucgccugccucaccaagcagggccaggucgaccucaacgacgccguccucgcccucaccgaccucggccucaucuacaccgccaaguaccccaacuccuccgaccucgaccgccucucccagucccaccccauccucaacauggucgacaccaagaaguccucccucaacaucuccggcuacaacuucucccucggcgccgccgucaaggccggcgccugcaugcucgacggcggcaacaugcucgagaccaucaaggucaccccccagaccgucgacggcauccucaaguccauccucaaggucaagcgcucccucggcauguucgucuccgacacccccggcgagcgcaaccccuacgagaacauccucuacaagaucugccucuccggcgacggcuggcccuacaucgccucccgcaccuccaucgucggccgcgccugggagaacaccaccgucgaccucgaguccgacggcaagccccagaaggucggcaccgccggcuccaacaagucccuccaguccgccggcuuccccaccggccucaccuacucccagcucaugacccucaaggacuccaugaugcagcucgaccccuccgccaagaccuggaucgacaucgagggccgccccgaggaccccgucgagaucgcccucuaccagcccauguccggcugcuacauccacuucuuccgcgagcccaccgaccucaagcaguucaagcaggacgccaaguacucccacggcaucgacgucgccgaccucuuccccgcccagcccggccucaccuccgccgucaucgaggcccucccccgcaacaugguccucaccugccagggcuccgacgacaucaagcgccuccucgacucccagggccgccgcgacaucaagcucaucgacaucgcccucuccaaggccgacucccgcaaguucgagaacgccgucugggaccagugcaaggaccucugccacaugcacaccggcgucgucgucgagaagaagaagcgcggcggcaaggaggagaucaccccccacugcgcccucauggacugcaucauguacgacgccgccgucuccggcggccucaacauccccguccuccgcgccguccucccccgcgacauggucuuccgcaccuccucccccaaggucguccucugaggacuaguaauaaggaaacuguaugaaugucugugggcaggaagugaagagauccuucuguaaagguuuuuggaauuaugucugcugaauaauaaacuuuuuugaaauaauaaaucugguagaaaaaugagaucuaaaaaaaaaaaaaaaaaaaaaaaaaaaaaaaaaaaaaaaaaaaaaaaaaaaaaaaaaaaaaaaaugcaucccccccccccccccccccccccccccccccaaaggcucuuuucagagccaccagaauu

SEQ ID NO: 10436 - RNA, 2050 nt, Artificial Sequence
  mRNA product Design b-4 comprising derived and/or modified sequence from LASV(LASV237-NIG-2010;Clade II)__AIT17639__NP (opt2)
gggagagucccgcagucggcguccagcggcucugcuuguucgugugugugucguugcaggccuuauucaagcuuaccauguccgccuccaaggaggucaaguccuuccucuggacccagucccuccgccgcgagcucuccggcuacugcuccaacaucaagcuccaggucgucaaggacgcccaggcccuccuccacggccucgacuucuccgaggucuccaacguccagcgccucaugcgcaagcagaagcgcgacgacuccgaccucaagcgccuccgcgaccucaaccaggccgucaacaaccucgucgagcucaaguccacccagcagaaguccauccuccgcgucggcacccucaccuccgacgaccuccucacccucgccgccgaccucgagaagcucaaguccaaggucauccgcaccgagcgcccccucuccuccggcgucuacaugggcaaccucuccacccagcagcucgagcagcgccgcgcccuccucaacaugaucggcauggucggcggcgcccagggcacccagcccggccgcgacggcgucguccgcgucugggacgucaagaaccccgaccuccucaacaaccaguucggcaccaugcccucccucacccucgccugccucaccaagcagggccaggucgaccucaacgacgccguccucgcccucaccgaccucggccucaucuacaccgccaaguaccccaacuccuccgaccucgaccgccucucccagucccaccccauccucaacauggucgacaucaagaaguccucccucaacaucuccggcuacaacuucucccucggcgccgccgucaaggccggcgccugcaugcucgacggcggcaacaugcucgagaccaucaaggucaccccccagaccauggacggcauccucaaguccauccucaaggucaagcgcucccucggcauguucgucuccgacacccccggcgagcgcaaccccuacgagaacauccucuacaagaucugccucuccggcgacggcuggcccuacaucgccucccgcaccuccaucgucggccgcgccugggagaacaccaccgucgaccucgaguccgacggcaagccccagaaggucggcuccgccggcuccaacaagucccuccaguccgccggcuuccccaccggccucaccuacucccagcucaugacccucaaggacuccaugaugcagcucgaccccuccgccaagaccuggaucgacaucgagggccgccccgaggaccccgucgagaucgcccucuaccagcccauguccggcugcuacauccacuucuuccgcgagcccaccgaccucaagcaguucaagcaggacgccaaguacucccacggcaucgacgucgccgaccucuuccccgcccagcccggccucaccuccgccgucaucgaggcccucccccgcaacaugguccucaccugccagggcuccgacgacaucaagcgccuccucgacucccagggccgccgcgacaucaagcucaucgacaucgcccucuccaaggccgacucccgccgcuucgagaacgccgucugggaccagugcaaggaccucugccacaugcacaccggcgucgucgucgagaagaagaagcgcggcggcaaggaggagaucaccccccacugcgcccucauggacugcaucauguacgacgccgccgucuccggcggccucaacauccccguccuccgcgccguccucccccgcgacauggucuuccgcaccuccucccccaaggucguccucugaggacuaguaauaaggaaacuguaugaaugucugugggcaggaagugaagagauccuucuguaaagguuuuuggaauuaugucugcugaauaauaaacuuuuuugaaauaauaaaucugguagaaaaaugagaucuaaaaaaaaaaaaaaaaaaaaaaaaaaaaaaaaaaaaaaaaaaaaaaaaaaaaaaaaaaaaaaaaugcaucccccccccccccccccccccccccccccccaaaggcucuuuucagagccaccagaauu

SEQ ID NO: 10437 - RNA, 2050 nt, Artificial Sequence
  mRNA product Design b-4 comprising derived and/or modified sequence from LASV(LASV253-NIG-2011;Clade II)__AIT17671__NP (opt2)
gggagagucccgcagucggcguccagcggcucugcuuguucgugugugugucguugcaggccuuauucaagcuuaccauguccgccuccaaggaggucaaguccuuccucuggacccagucccuccgccgcgagcucuccggcuacugcuccuccaucaagcuccaggucgucaaggacgcccaggcccuccuccacggccucgacuucuccgaggucuccaacguccagcgccucaugcgcaagcagaagcgcgacgacuccgaccucaagcgccuccgcgaccucaaccaggccgucaacaaccucgucgagcucaaguccacccagcagaaguccguccuccgcgucggcacccucaccuccgacgaccuccucacccucgccgccgaccucgagaagcucaaguccaaggucauccgcaccgagcgcccccucuccuccggcgucuacaugggcaaccucuccacccagcagcucgagcagcgccgcgcccuccucaacaugaucggcauggucggcggcgcccagggcacccagcccggccgcgacggcgucguccgcgucugggacgucaagaaccccgaccuccucaacaaccaguucggcaccaugcccucccucacccucgccugccucaccaagcagggccaggucgaccucaacgacgucguccucgcccucaccgaccucggccucaucuacaccgccaaguaccccaacuccuccgaccucgaccgccucucccagucccaccccauccucaacauggucgacaccaagaaguccucccucaacaucuccggcuacaacuucucccucggcgccgccgucaaggccggcgccugcaugcucgacggcggcaacaugcucgagaccaucaaggucaccccccagaccauggacggcauccucaaguccauccucaaggucaagaagucccucggcauguucgucuccgacacccccggcgagcgcaaccccuacgagaacauccucuacaagaucugccucuccggcgacggcuggcccuacaucgccucccgcaccuccaucgucggccgcgccugggagaacaccaccgucgaccucgaguccgacggcaagccccagaaggucggcaccgccggcuccaacaagucccuccaguccgccggcuuccccaccggccucaccuacucccagcucaugacccucaaggacuccaugaugcagcucgaccccuccgccaagaccuggaucgacaucgagggccgccccgaggaccccgucgagaucgcccucuaccagcccauguccggcugcuacauccacuucuuccgcgagcccaccgaccucaagcaguucaagcaggacgccaaguacucccacggcaucgacgucaccgaccucuuccccgcccagcccggccucaccuccgccgucaucgaggcccucccccgcaacaugguccucaccugccagggcuccgacgacaucaagcgccuccucgacucccagggccgccgcgacaucaagcucaucgacaucgcccucuccaaggccgacucccgccgcuucgagaacgccgucugggaccagugcaaggaccucugccacaugcacaccggcgucgucgucgagaagaagaagcgcggcggcaaggaggagaucaccccccacugcgcccucauggacugcaucauguacgacgccgccgucuccggcggccucaacauccccguccuccgcgccguccucccccgcgacauggucuuccgcaccuccucccccaaggucguccucugaggacuaguaauaaggaaacuguaugaaugucugugggcaggaagugaagagauccuucuguaaagguuuuuggaauuaugucugcugaauaauaaacuuuuuugaaauaauaaaucugguagaaaaaugagaucuaaaaaaaaaaaaaaaaaaaaaaaaaaaaaaaaaaaaaaaaaaaaaaaaaaaaaaaaaaaaaaaaugcaucccccccccccccccccccccccccccccccaaaggcucuuuucagagccaccagaauu

SEQ ID NO: 10438 - RNA, 2050 nt, Artificial Sequence
  mRNA product Design b-4 comprising derived and/or modified sequence from LASV(LASV254-NIG-2011;Clade II)__AIT17675__NP (opt2)
gggagagucccgcagucggcguccagcggcucugcuuguucgugugugugucguugcaggccuuauucaagcuuaccauguccgccuccaaggaggucaaguccuuccucuggacccagucccuccgccgcgagcucuccggcuacugcuccuccaucaagcuccaggucgucaaggacgcccaggcccuccuccacggccucgacuucuccgaggucuccaacguccagcgccucaugcgcaagcagaagcgcgacgacuccgaccucaagcgccuccgcgaccucaaccaggccgucaacaaccucgucgagcucaaguccacccagcagaaguccguccuccgcgucggcacccucaccuccgacgaccuccucacccucgccgccgaccucgagaagcucaaguccaaggucauccgcaccgagcgcccccucuccuccggcgucuacaugggcaaccucuccacccagcagcucgagcagcgccgcgcccuccucaacaugaucggcauggucggcggcgcccagggcacccagcccggccgcgacggcgucguccgcgucugggacgucaagaaccccgaccuccucaacaaccaguucggcaccaugcccucccucacccucgccugccucaccaagcagggccaggucgaccucaacgacgccguccucgcccucaccgaccucggccucaucuacaccgccaaguaccccaacuccuccgaccucgaccgccucucccagucccaccccauccucaacauggucgacaccaagaaguccucccucaacaucuccggcuacaacuucucccucggcgccgccgucaaggccggcgccugcaugcucgacggcggcaacaugcucgagaccaucaaggucaccccccagaccauggacggcauccucaaguccauccucaaggucaagaagucccucggcauguucgucuccgacacccccggcgagcgcaaccccuacgagaacauccucuacaagaucugccucuccggcgacggcuggcccuacaucgccucccgcaccuccaucgucggccgcgccugggagaacaccaucgucgaccucgaguccgacggcaagccccagaaggucggcaccgccggcuccaacaagucccuccaguccgccggcuuccccaccggccucaccuacucccagcucaugacccucaaggacuccaugaugcagcucgaccccuccgccaagaccuggaucgacaucgagggccgccccgaggaccccgucgagaucgcccucuaccagcccauguccggcugcuacauccacuucuuccgcgagcccaccgaccucaagcaguucaagcaggacgccaaguacucccacggcaucgacgucgccgaccucuuccccgcccagcccggccucaccuccgccgucaucgaggcccucccccgcaacaugguccucaccugccagggcuccgacgacaucaagcgccuccucgacucccagggccgccgcgacaucaagcucaucgacaucgcccucuccaaggccgacucccgccgcuucgagaacgccgucugggaccagugcaaggaccucugccacaugcacaccggcgucgucgucgagaagaagaagcgcggcggcaaggaggagaucaccccccacugcgcccucauggacugcaucauguacgacgccgccgucuccggcggccucaacauccccguccuccgcgccguccucccccgcgacauggucuuccgcaccuccucccccaaggucguccucugaggacuaguaauaaggaaacuguaugaaugucugugggcaggaagugaagagauccuucuguaaagguuuuuggaauuaugucugcugaauaauaaacuuuuuugaaauaauaaaucugguagaaaaaugagaucuaaaaaaaaaaaaaaaaaaaaaaaaaaaaaaaaaaaaaaaaaaaaaaaaaaaaaaaaaaaaaaaaugcaucccccccccccccccccccccccccccccccaaaggcucuuuucagagccaccagaauu

SEQ ID NO: 10439 - RNA, 2050 nt, Artificial Sequence
  mRNA product Design b-4 comprising derived and/or modified sequence from LASV(Nig08-04;Clade II)__ADU56611__NP (opt2)
gggagagucccgcagucggcguccagcggcucugcuuguucgugugugugucguugcaggccuuauucaagcuuaccauguccgccuccaaggaggucaaguccuuccucuggacccagucccuccgccgcgagcucuccggcuacugcuccaacaucaagcuccaggucgucaaggacgcccaggcccuccuccacggccucgacuucuccgaggucuccaacguccagcgccucaugcgcaagcagaagcgcgacgacggcgaccucaagcgccuccgcgaccucaaccaggccgucaacaaccucgucgagcucaaguccacccagcagaaguccguccuccgcgucggcacccucaccuccgacgaccuccucacccucgccgccgaccucgagaagcucaaguccaaggucauccgcaccgagcgcccccucuccuccggcgucuacaugggcaaccucuccacccagcagcucgagcagcgcaaggcccuccucuccaugaucggcauggucggcggcgcccagggcacccagcccggccgcgacggcgucguccgcgucugggacgucaagaaccccgaccuccucaacaaccaguucggcaccaugcccucccucacccucgccugccucaccaagcagggccaggucgaccucaacgacgccguccucgcccucaccgaccucggccucaucuacaccgccaaguaccccaacuccuccgaccucgaccgccucucccagucccaccccauccucaacauggucgacaccaagaaguccucccucaacaucuccggcuacaacuucucccucggcgccgccgucaaggccggcgccugcaugcucgacggcggcaacaugcucgagaccaucaaggucaccccccagaccauggacggcauccucaaguccauccucaaggucaagcgcucccucggcauguucgucuccgacacccccggcgagcgcaaccccuacgagaacauccucuacaagaucugccucuccggcgacggcuggcccuacaucgccucccgcaccuccaucgucggccgcgccugggagaacaccaccgucgaccucgaguccgacggcaagccccagaaggucggcaccgccggcuccaacaagucccuccaguccgccggcuuccccaccggccucaccuacucccagcucaugacccucaaggacuccaugaugcagcucgaccccuccgccaagaccuggaucgacaucgagggccgccccgaggaccccgucgagaucgcccucuaccagcccauguccggcugcuacauccacuucuuccgcgagcccaccgaccucaagcaguucaagcaggacgccaaguacucccacggcaucgacgucaccgaccucuucuccgcccagcccggccucaccuccgccgucaucgaggcccucccccgcaacaugguccucaccugccagggcuccgacgacaucaagaagcuccucgacucccagggccgccgcgacaucaagcucaucgacaucucccucaacaaggccgacucccgccgcuucgagaacgccgucugggaccagugcaaggaccucugccacaugcacaccggcgucgucgucgagaagaagaagcgcggcggcaaggaggagaucaccccccacugcgcccucauggacugcaucauguucgacgccgccgucuccggcggccucaacauccccauccuccgcgccguccucccccgcgacauggucuuccgcaccuccucccccaaggucguccucugaggacuaguaauaaggaaacuguaugaaugucugugggcaggaagugaagagauccuucuguaaagguuuuuggaauuaugucugcugaauaauaaacuuuuuugaaauaauaaaucugguagaaaaaugagaucuaaaaaaaaaaaaaaaaaaaaaaaaaaaaaaaaaaaaaaaaaaaaaaaaaaaaaaaaaaaaaaaaugcaucccccccccccccccccccccccccccccccaaaggcucuuuucagagccaccagaauu

SEQ ID NO: 10440 - RNA, 2053 nt, Artificial Sequence
  mRNA product Design b-4 comprising derived and/or modified sequence from LASV(GA391;Clade III)__AAA46284__NP (opt2)
gggagagucccgcagucggcguccagcggcucugcuuguucgugugugugucguugcaggccuuauucaagcuuaccauguccgccuccaaggagguccgcuccugccucuggacccagucccuccgccgcgagcucuccggcuacugcuccaacaucaagcuccaggucgucaaggacgcccaggcccuccuccacggccucgacuucuccgaggucuccaacguccagcgccucaugcgcaagcagaagcgcgacgacggcgaccucaagcgccuccgcgaccucaaccaggccgucaacaaccucgucgagcucaaguccacccagcagaaguccguccuccgcgucggcacccucuccuccgacgaccuccucauccucgccgccgaccucgagaagcucaaguccaaggucacccgcaccgagcgcccccucuccuccggcgucuacaugggcaaccucuccucccagcagcucgaccagcgccgcgcccuccucaacaugaucggcaugaccggcgucuccggcggcggcaagggcgccuccaacggcaucguccgcgucugggacgucaagaacgccgagcuccucaacaaccaguucggcaccaugcccucccucacccucgccugccucaccaagcagggccaggucgaccucaacgacgccguccaggcccucaccgaccucggccucaucuacaccgccaaguaccccaacuccuccgaccucgaccgccucucccagucccaccccauccucaacaugaucgacaccaagaaguccucccucaacaucuccggcuacaacuucucccucggcgccgccgucaaggccggcgccugcaugcucgacggcggcaacaugcucgagaccaucaaggucuccccccagaccauggacggcauccucaaguccauccucaaggucaagaagucccucggcauguucgucuccgacacccccggcgagcgcaaccccuacgagaacauccucuacaagaucugccucuccggcgacggcugguccuacaucgccucccgcaccuccaucgucggccgcgccugggagaacaccgucgucgaccucgagcaggacaacaagccccagaagaucggcaacggcggcuccaacaagucccuccaguccgccggcuucgccgccggccucaucuacucccagcucaugacccucaaggacuucaagugcuucaaccucauccccaacgccaagaccuggauggacaucgagggccgccccgaggaccccgucgagaucgcccucuaccagcccuccuccggcugcuacguccacuucuuccgcgagcccaccgaccucaagcaguucaagcaggacgccaaguacucccacggccgcgacgucaccgaccucuucgccgcccagcccggccucaccuccgccgucaucgaggcccucccccgcaacauggucaucaccugccagggcuccgaggacauccgcaagcuccucgagucccagggccgccgcgacaucaagcucaucgacaucacccucuccaaggccgacucccgcaaguucgagaacgccgucugggaccaguucaaggaccucugccacaugcacaccggcgucgucgucgagaagaagaagcgcggcggcaaggaggagaucaccccccacugcgcccucauggacugcaucauguucgacgccgccgucuccggcggccucgacgccaagguccuccgcgucguccucccccgcgacauggucuuccgcaccuccacccccaaggucguccucugaggacuaguaauaaggaaacuguaugaaugucugugggcaggaagugaagagauccuucuguaaagguuuuuggaauuaugucugcugaauaauaaacuuuuuugaaauaauaaaucugguagaaaaaugagaucuaaaaaaaaaaaaaaaaaaaaaaaaaaaaaaaaaaaaaaaaaaaaaaaaaaaaaaaaaaaaaaaaugcaucccccccccccccccccccccccccccccccaaaggcucuuuucagagccaccagaauu

SEQ ID NO: 10441 - RNA, 2050 nt, Artificial Sequence
  mRNA product Design b-4 comprising derived and/or modified sequence from LASV(Nig08-A19;Clade III)__ADU56619__NP (opt2)
gggagagucccgcagucggcguccagcggcucugcuuguucgugugugugucguugcaggccuuauucaagcuuaccauguccgccuccaaggaggucaaguccuuccucuggacccagucccuccgccgcgagcucuccggcuacugcuccaacaucaagcuccaggucgucaaggacgcccaggcccuccuccacggccucgacuucuccgaggucuccaacguccagcgccucaugcgcaagcagaagcgcgacgacggcgaccucaagcgccuccgcgaccucaaccaggccgucaacaaccucgucgagcucaaguccacccagcagaaguccguccuccgcgucggcacccucuccuccgacgaccuccucguccucgccgccgaccucgagaagcucaaguccaaggucguccgcaccgagcgcccccucuccuccggcaucuacaugggcaaccucuccucccagcagcucgaccagcgcaaggcccuccucaacaugaucggcaugaccggcggcaacggcggccgcaacaccaccuccgacggcaucguccgcgucugggacgucaagaacgccgagcuccucaacaaccaguucggcaccaugcccucccucacccucgccugccucaccaagcagggccaggucgaccucaacgacgccguccaggcccucaccgaccucggccucaucuacaccgccaaguaccccaacuccuccgaccucgaccgccucgcccagucccaccccauccucaacaugaucgacaccaagaaguccucccucaacaucuccggcuacaacuucucccucggcgccgccgucaaggccggcgccugcaugcucgacggcggcaacaugcucgagaccaucaaggucuccccccagaccauggacggcauccucaaguccauccucaaggucaagcgcucccucggcauguucaucuccgacacccccggcgagcgcaaccccuacgagaacauccucuacaagaucugccucuccggcgacggcuggcccuacaucgccucccgcaccuccaucgucggccgcgccugggagaacaccgucgucgaccucgaguccgacaacaagccccagaagaccggcaacggcggcuccaacaagucccuccaguccgccggcuucgccgccggccucaccuacucccagcucaugacccucaaggacuccaugcuccagcucgaccccaacgccaagaccuggauggacaucgagggccgccccgaggaccccgucgagaucgcccucuaccagcccuccuccggcugcuacauccacuucuuccgcgagcccaccgaccucaagcaguucaagcaggacgccaaguacucccacggcaucgacgucaccgaccucuucgccgcccagcccggccucaccuccgccgucaucgaggcccucccccgcaacauggucaucaccugccagggcuccgaggacauccgcaagcuccucgagucccagggccgccgcgacaucaagcucaucgacaucucccucuccaaggucgacucccgcaaguucgagaacgccgucugggaccaguucaaggaccucugccacaugcacaccggcaucgucgucgagaagaagaagcgcggcggcaaggaggagaucaccccccacugcgcccucauggacugcaucauguucgacgccgccgucuccggcggcgucgacgccaagguccuccgcgccguccucccccgcgacauggucuuccgcaccuccacccccaaggucguccucugaggacuaguaauaaggaaacuguaugaaugucugugggcaggaagugaagagauccuucuguaaagguuuuuggaauuaugucugcugaauaauaaacuuuuuugaaauaauaaaucugguagaaaaaugagaucuaaaaaaaaaaaaaaaaaaaaaaaaaaaaaaaaaaaaaaaaaaaaaaaaaaaaaaaaaaaaaaaaugcaucccccccccccccccccccccccccccccccaaaggcucuuuucagagccaccagaauu

SEQ ID NO: 10442 - RNA, 2050 nt, Artificial Sequence
  mRNA product Design b-4 comprising derived and/or modified sequence from LASV(G1180-SLE-2010;Clade IV)__AIT17169__NP (opt2)
gggagagucccgcagucggcguccagcggcucugcuuguucgugugugugucguugcaggccuuauucaagcuuaccauguccgccuccaaggagaucaaguccuuccucuggacccagucccuccgccgcgagcucuccggcuacugcuccaacaucaagcuccaggucgucaaggacgcccaggcccuccuccacggccucgacuucuccgaggucuccaacguccagcgccucaugcgcaaggagcgccgcgacgacaacgaccucaagcgccuccgcgaccucaaccaggccgucaacaaccucgucgagcucaaguccacccagcagaaguccauccuccgcgucggcacccucaccuccgacgaccuccucauccucgccgccgaccucgagaagcucaaguccaaggucauccgcaccgagcgcccccucuccgccggcgucuacaugggcaaccucuccucccagcagcucgaccagcgccgcgcccuccucuccaugaucggcauguccuccggcaaccagcgcgcccaggccggccgcgacggcgucguccgcgucugggacgucaagaacgucgagcuccucaacaaccaguucggcaccaugcccucccucacccucgccugccucaccaagcagggccaggucgaccucaacgacgccguccaggcccucaccgaccucggccucaucuacaccgccaaguaccccaacaccuccgaccucgaccgccucacccagucccaccccauccucaacaugaucgacaccaagaaguccucccucaacaucuccggcuacaacuucucccucggcgccgccgucaaggccggcgccugcaugcucgacggcggcaacaugcucgagaccaucaaggucuccccccagaccauggacggcauccucaaguccauccucaaggucaagaaggcccucggcauguucaucuccgacacccccggcgagcgcaaccccuacgagaacauccucuacaagaucugccucuccggcgacggcuggcccuacaucgccucccgcaccuccaucaccggccgcgccugggagaacaccgucgucgaccucgaguccgacggcaagccccagaaggccggcuccaacaacuccaacaagucccuccaguccgucggcuucaccgccggccucaccuacucccagcucaugacccucaaggacgccaugcuccagcucgaccccaacgccaagaccuggauggacaucgagggccgccccgaggaccccgucgagaucgcccucuaccagcccuccuccggcugcuacauccacuucuuccgcgagcccaccgaccucaagcaguucaagcaggacgccaaguacucccacggcaucgacgucaccgaccucuucgccgcccagcccggccucaccuccgccgucaucgacgcccucccccgcaacauggucaucaccugccagggcuccgacgacauccgcaagcuccucgagucccagggccgcaaggacaucaagcucaucgacaucgcccucuccaagaccgacucccgcaaguacgagaacgccgucugggaccaguacaaggaccucugccacaugcacaccggcgucgucgucgagaagaagaagcgcggcggcaaggaggagaucaccccccacugcgcccucauggacugcaucauguucgacgccgccgucuccggcggccucaacaccuccguccuccgcgccguccucccccgcgacauggucuuccgcaccuccaccccccgcgucguccucugaggacuaguaauaaggaaacuguaugaaugucugugggcaggaagugaagagauccuucuguaaagguuuuuggaauuaugucugcugaauaauaaacuuuuuugaaauaauaaaucugguagaaaaaugagaucuaaaaaaaaaaaaaaaaaaaaaaaaaaaaaaaaaaaaaaaaaaaaaaaaaaaaaaaaaaaaaaaaugcaucccccccccccccccccccccccccccccccaaaggcucuuuucagagccaccagaauu

SEQ ID NO: 10443 - RNA, 2050 nt, Artificial Sequence
  mRNA product Design b-4 comprising derived and/or modified sequence from LASV(G1442-SLE-2011;Clade IV)__AIT17181__NP (opt2)
gggagagucccgcagucggcguccagcggcucugcuuguucgugugugugucguugcaggccuuauucaagcuuaccauguccgccuccaaggaggucaaguccuuccucuggacccagucccuccgccgcgagcucuccggcuacugcuccaacaucaagcuccaggucgucaaggacgcccaggcccuccuccacggccucgacuucuccgaggucuccaacguccagcgccucaugcgcaagcagcgccgcgacgacaacgaccucaagcgccuccgcgaccucaaccaggccgucaacaaccucgucgagcucaaguccacccagcagaaguccguccuccgcgucggcacccucaccuccgacgaccuccucguccucgccgccgaccucgagaagcucaaguccaaggucauccgcaccgagcgcccccucuccgccggcgucuacaugggcaaccucuccucccagcagcucgaccagcgccgcgcccuccucaacaugaucggcauguccggcggcauccagggcacccgcaccggccgcgacggcgucguccgcgucugggacgucaagaacgccgaccuccucaacaaccaguucggcaccaugcccucccucacccucgccugccucaccaagcagggccaggucgaccucaacgacgucguccaggcccucaccgaccucggccucaucuacaccgccaaguaccccaacgccuccgaccucgaccgccucacccagucccaccccauccucaacaugaucgacaccaagaaguccucccucaacaucuccggcuacaacuucucccucggcgccgccgucaaggccggcgccugcaugcucgacggcggcaacaugcucgagaccaucaaggucuccccccagaccauggacggcauccucaaguccauccucaaggucaagaagacccucggcauguucaucuccgacacccccggcgagcgcaaccccuacgagaacauccucuacaagaucugccucuccggcgacggcuggcccuacaucgccucccgcaccuccaucaccggccgcgccugggagaacaccgucgucgaccucgaguccgacggcaagccccagaaggccggcuccaacaacuccaacaagucccuccaguccgccggcuucgccgccggccucaccuacucccagcucaugacccucaaggacgccaugcuccagcucgaccccaacgccaagaccuggauggacaucgagggccgccccgaggaccccgucgagaucgcccucuaccagcccuccuccggcugcuacauccacuucuuccgcgagcccaccgaccucaagcaguucaagcaggacgccaaguacucccacggcaucgacgucaccgaccucuucgccgcccagcccggccucaccuccgccgucaucgaggcccucccccgcaacauggucaucaccugccagggcuccgacgacaucaagaagcuccucgagucccagggccgcaaggacaucaagcucaucgacaucgcccucuccaagaccgacucccgcaaguacgagaacgccgucugggaccaguacaaggaccucugccacaugcacaccggcgucgucgucgagaagaagaagcgcggcggcaaggaggagaucaccccccacugcgcccucauggacugcaucauguucgacgccgccgucuccggcggccucaacacccucguccuccgcgccguccucccccgcgacauggucuuccgcaccuccaccccccgcgucguccucugaggacuaguaauaaggaaacuguaugaaugucugugggcaggaagugaagagauccuucuguaaagguuuuuggaauuaugucugcugaauaauaaacuuuuuugaaauaauaaaucugguagaaaaaugagaucuaaaaaaaaaaaaaaaaaaaaaaaaaaaaaaaaaaaaaaaaaaaaaaaaaaaaaaaaaaaaaaaaugcaucccccccccccccccccccccccccccccccaaaggcucuuuucagagccaccagaauu

SEQ ID NO: 10444 - RNA, 2050 nt, Artificial Sequence
  mRNA product Design b-4 comprising derived and/or modified sequence from LASV(G3010-SLE-2013;Clade IV)__AIT17345__NP (opt2)
gggagagucccgcagucggcguccagcggcucugcuuguucgugugugugucguugcaggccuuauucaagcuuaccauguccgccuccaaggagaucaaguccuuccucuggacccagucccuccgccgcgagcucuccggcuacugcuccaacaucaagcuccaggucgucaaggacgcccaggcccuccuccacggccucgacuucuccgaggucuccaacguccagcgccucaugcgcaaggagcgccgcgacgacaacgaccucaagcgccuccgcgaccucaaccaggccgucaacaaccucgucgagcucaaguccacccagcagaaguccauccuccgcgucggcacccucaccuccgacgaccuccucauccucgccgccgaccucgagaagcucaaguccaaggucacccgcaccgagcgcccccucuccgccggcgucuacaugggcaaccucuccucccagcagcucgaccagcgccgcgcccuccucuccaugaucggcauguccuccggcguccagggcgcccgcgccggccgcgacggcgucguccgcgucugggacgucaagaacgccgagcuccucaacaaccaguucggcaccaugcccucccucacccucgccugccucaccaagcagggccaggucgaccucaacgacgucguccaggcccucaccgaccucggccucaucuacaccgccaaguaccccaacaccuccgaccucgaccgccucacccagucccaccccauccucaacaugaucgacaccaagaaguccucccucaacaucuccggcuacaacuucucccucggcgccgccgucaaggccggcgccugcaugcucgacggcggcaacaugcucgagaccaucaaggucuccccccagaccauggacggcauccucaaguccauccucaaggucaagaaggcccucggcauguucaucuccgagacccccggcgagcgcaaccccuacgagaacauccucuacaagaucugccucuccggcgacggcuggcccuacaucgccucccgcaccuccaucaccggccgcgccugggagaacaccgucgucgaccucgaguccgacggcaagccccagaaggccggcuccaacaacuccaacaagucccuccaguccgccggcuucaccgccggccucaccuacucccagcucaugacccucaaggacgccaugcuccagcucgaccccaacgccaagaccuggauggacaucgagggccgccccgaggaccccgucgaggucgcccucuaccagcccuccuccggcugcuacauccacuucuuccgcgagcccaccgaccucaagcaguucaagcaggacgccaaguacucccacggcaucgacgucaccgaccucuucgccgcccagcccggccucaccuccgccgucaucgacgcccucccccgcaacauggucaucaccugccagggcuccgacgacaucaagaagcuccucgagucccagggccgcaaggacaucaagcucaucgacaucgcccucuccaagaccgacucccgcaaguacgagaacgccgucugggaccaguacaaggaccucugccacaugcacaccggcgucgucgucgagaagaagaagcgcggcggcaaggaggagaucaccccccacugcgcccucauggacugcaucauguucgacgccgccgucuccggcggccucaacaccuccguccuccgcgccguccucccccgcgacauggucuuccgcaccuccaccccccgcgucguccucugaggacuaguaauaaggaaacuguaugaaugucugugggcaggaagugaagagauccuucuguaaagguuuuuggaauuaugucugcugaauaauaaacuuuuuugaaauaauaaaucugguagaaaaaugagaucuaaaaaaaaaaaaaaaaaaaaaaaaaaaaaaaaaaaaaaaaaaaaaaaaaaaaaaaaaaaaaaaaugcaucccccccccccccccccccccccccccccccaaaggcucuuuucagagccaccagaauu

SEQ ID NO: 10445 - RNA, 2050 nt, Artificial Sequence
  mRNA product Design b-4 comprising derived and/or modified sequence from LASV(G502-SLE-2009;Clade IV)__AIT17127__NP (opt2)
gggagagucccgcagucggcguccagcggcucugcuuguucgugugugugucguugcaggccuuauucaagcuuaccauguccgccuccaaggagaucaaguccuuccucuggacccagucccuccgccgcgagcucuccggcuacugcuccaacaucaagcuccaggucgucaaggacgcccaggcccuccuccacggccucgacuucuccgaggucuccaacguccagcgccucaugcgcaaggagcgccgcgacgacaacgaccucaagcgccuccgcgaccucaaccaggccgucaacaaccucgucgagcucaaguccacccagcagaaguccauccuccgcgucggcacccucaccuccgacgaccuccucauccucgccgccgaccucgagaagcucaaguccaaggucauccgcaccgagcgcccccucuccgccggcgucuacaugggcaaccucuccucccagcagcucgaccagcgccgcgcccuccucuccaugaucggcauguccggcggcaaccagggcguccgcgccggcaaggacggcgucguccgcgucugggacgucaagaacgccgagcuccucaacaaccaguucggcaccaugcccucccucacccucgccugccucaccaagcagggccaggucgaccucaacgacgccguccaggcccucaccgaccucggccucaucuacaccgccaaguaccccaacaccuccgaccucgaccgccucacccagucccaccccauccucaacaugaucgacaccaagaaguccucccucaacaucuccggcuacaacuucucccucggcgccgccgucaaggccggcgccugcaugcucgacggcggcaacaugcucgagaccaucaaggucuccccccagaccauggacggcauccucaaguccauccucaaggucaagaaggcccucggcauguucaucuccgacacccccggcgagcgcaaccccuacgagaacauccucuacaagaucugccucuccggcgacggcuggcccuacaucgccucccgcaccuccaucaccggccgcgccugggagaacaccgucgucgaccucgaguccgacggcaagccccagaaggccggcuccaacaacuccaacaagucccuccaguccgccggcuucaccgccggccucaccuacucccagcucaugacccucaaggacgccaugcuccagcucgaccccaacaccaagaccuggauggacaucgagggccgccccgaggaccccgucgagaucgcccucuaccagcccuccuccggcugcuacauccacuucuuccgcgagcccaccgaccucaagcaguucaagcaggacgccaaguacucccacggcaucgacgucaccgaccucuucgccgcccagcccggccucaccuccgccgucaucgacgcccucccccgcaacauggucaucaccugccagggcuccgacgacauccgcaagcuccucgagucccagggccgcaaggacaucaagcucaucgacaucgcccucaacaagaccgacucccgcaaguacgagaacgccgucugggaccaguacaaggaccucugccacaugcacaccggcgucgucgucgagaagaagaagcgcggcggcaaggaggagaucaccccccacugcgcccucauggacugcaucauguucgacgccgccgucuccggcggccucaacaccuccguccuccgcgccguccucccccgcgacauggucuuccgcaccuccaccccccgcgucguccucugaggacuaguaauaaggaaacuguaugaaugucugugggcaggaagugaagagauccuucuguaaagguuuuuggaauuaugucugcugaauaauaaacuuuuuugaaauaauaaaucugguagaaaaaugagaucuaaaaaaaaaaaaaaaaaaaaaaaaaaaaaaaaaaaaaaaaaaaaaaaaaaaaaaaaaaaaaaaaugcaucccccccccccccccccccccccccccccccaaaggcucuuuucagagccaccagaauu

SEQ ID NO: 10446 - RNA, 2050 nt, Artificial Sequence
  mRNA product Design b-4 comprising derived and/or modified sequence from LASV(G733-SLE-2010;Clade IV)__AIT17155__NP (opt2)
gggagagucccgcagucggcguccagcggcucugcuuguucgugugugugucguugcaggccuuauucaagcuuaccauguccgccuccaaggagaucaaguccuuccucuggacccagucccuccgccgcgagcucuccggcuacugcuccaacaucaagcuccaggucgucaaggacgcccaggcccuccuccacggccucgacuucuccgaggucuccaacguccagcgccucaugcgcaaggagcgccgcgacgacaacgaccucaagcgccuccgcgaccucaaccaggccgucaacaaccucgucgagcucaaguccacccagcagaaguccguccuccgcgucggcacccucaccuccgacgagcuccucguccucgccgccgaccucgagaagcucaaguccaaggucauccgcaccgagcgcccccucuccgccggcgucuacaugggcaaccucuccucccagcagcucgaccagcgccgcgcccuccucuccaugaucggcauguccggcggcaaccagggcgcccgcaccggccgcgacggcgucguccgcgucugggacgucaagaacgccgagcuccucaacaaccaguucggcaccaugcccucccucacccucgccugccucaccaagcagggccaggucgaccucaacgacgccguccaggcccucaccgaccucggccucaucuacaccgccaaguaccccaacaccuccgaccucgaccgccucacccagucccaccccauccucaacaugaucgacaccaagaaguccucccucaacaucuccggcuacaacuucucccucggcgccgccgucaaggccggcgccugcaugcucgacggcggcaacaugcucgagaccaucaaggucuccccccagaccauggacggcauccucaaguccauccucaaggucaagaaggcccucggcauguucaucuccgacacccccggcgagcgcaaccccuacgagaacauccucuacaagaucugccucuccggcgacggcuggcccuacaucgccucccgcaccuccaucaccggccgcgccugggagaacaccgucgucgaccucgaguccgacggcaagccccagaaggccggcuccaacaacuccaacaagucccuccaguccgccggcuucaccgccggccucaccuacucccagcucaugacccucaaggacgccaugcuccagcucgaccccaacgccaagaccuggauggacaucgagggccgccccgaggaccccgucgagaucgcccucuaccagcccuccuccggcugcuacauccacuucuuccgcgagcccaccgaccucaagcaguucaagcaggacgccaaguacucccacggcaucgacgucaccgaccucuucgccgcccagcccggccucaccuccgccgucaucgacgcccucccccgcaacauggucaucaccugccagggcuccgacgacauccgcaagcuccucgagucccagggccgcaaggacaucaagcucaucgacaucgcccucuccaagaucgacucccgcaaguacgagaacgccgucugggaccaguacaaggaccucugccacaugcacaccggcgucgucgucgagaagaagaagcgcggcggcaaggaggagaucaccccccacugcgcccucauggacugcaucauguucgacgccgccgucuccggcggccucaacucccucguccuccgcgccguccucccccgcgacauggucuuccgcaccuccaccccccgcgucguccucugaggacuaguaauaaggaaacuguaugaaugucugugggcaggaagugaagagauccuucuguaaagguuuuuggaauuaugucugcugaauaauaaacuuuuuugaaauaauaaaucugguagaaaaaugagaucuaaaaaaaaaaaaaaaaaaaaaaaaaaaaaaaaaaaaaaaaaaaaaaaaaaaaaaaaaaaaaaaaugcaucccccccccccccccccccccccccccccccaaaggcucuuuucagagccaccagaauu

SEQ ID NO: 10447 - RNA, 2050 nt, Artificial Sequence
  mRNA product Design b-4 comprising derived and/or modified sequence from MOPV/LASV reassortant(IGS-1;Clade IV)__AFY05578__NP (opt2)
gggagagucccgcagucggcguccagcggcucugcuuguucgugugugugucguugcaggccuuauucaagcuuaccauguccgccuccaaggagaucaaguccuuccucuggacccagucccuccgccgcgagcucuccggcuacugcuccaacaucaagcuccaggucgucaaggacgcccaggcccuccuccacggccucgacuucuccgaggucuccaacguccagcgccucaugcgcaaggagcgccgcgacgacaacgaccucaagcgccuccgcgaccucaaccaggccgucaacaaccucgucgagcucaaguccacccagcagaaguccauccuccgcgucggcacccucaccuccgacgaccuccucauccucgccgccgaccucgagaagcuccgcuccaaggucauccgcaccgagcgcccccucuccgccggcgucuacaugggcaaccucuccucccagcagcucgaccagcgccgcgcccuccucaacaugaucggcauguccggcggcaaccagggcgcccgcgccggccgcgacggcgucguccgcgucugggacgucaagaacgccgagcuccucuccaaccaguucggcaccaugcccucccucacccucgccugccucaccaagcagggccaggucgaccucaacgacgccguccaggcccucaccgaccucggccucaucuacaccgccaaguaccccaacaccuccgaccucgaccgccucacccagucccaccccauccucaacaugaucgacaccaagaaguccucccucaacaucuccggcuacaacuucucccucggcgccgccgucaaggccggcgccugcaugcucgacggcggcaacaugcucgagaccaucaaggucuccccccagaccauggacggcauccucaaguccauccucaaggucaagaaggcccucggcauguucaucuccgacacccccggcgagcgcaaccccuacgagaacauccucuacaagaucugccucuccggcgacggcuggcccuacaucgccucccgcaccuccaucaccggccgcgccugggagaacaccgucgucgaccucgaguccgacggcaagccccagaaggccgacuccaacaacuccuccaagucccuccaguccgccggcuucaccgccggccucaccuacucccagcucaugacccucaaggacgccaugcuccagcucgaccccaacgccaagaccuggauggacaucgagggccgccccgaggaccccgucgagaucgcccucuaccagcccuccuccggcugcuacauccacuucuuccgcgagcccaccgaccucaagcaguucaagcaggacgccaaguacucccacggcaucgacgucaccgaccucuucgccacccagcccggccucaccuccgccgucaucgacgcccucccccgcaacauggucaucaccugccagggcuccgacgacauccgcaagcuccucgagucccagggccgcaaggacaucaagcucaucgacaucgaccucuccaagaccgacucccgcaaguacgagaacgccgucugggaccaguacaaggaccucugccacaugcacaccggcgucgucgucgagaagaagaagcgcggcggcaaggaggagaucaccccccacugcgcccucauggacugcaucauguucgacgccgccgucuccggcggccucaacaccuccguccuccgcgccguccucccccgcgacauggucuuccgcaccuccaccccccgcgucguccucugaggacuaguaauaaggaaacuguaugaaugucugugggcaggaagugaagagauccuucuguaaagguuuuuggaauuaugucugcugaauaauaaacuuuuuugaaauaauaaaucugguagaaaaaugagaucuaaaaaaaaaaaaaaaaaaaaaaaaaaaaaaaaaaaaaaaaaaaaaaaaaaaaaaaaaaaaaaaaugcaucccccccccccccccccccccccccccccccaaaggcucuuuucagagccaccagaauu

SEQ ID NO: 10448 - RNA, 2050 nt, Artificial Sequence
  mRNA product Design b-4 comprising derived and/or modified sequence from LASV(LM765-SLE-2012;Clade IV)__AIT17815__NP (opt2)
gggagagucccgcagucggcguccagcggcucugcuuguucgugugugugucguugcaggccuuauucaagcuuaccauguccgccuccaaggagaucaaguccuuccucuggacccagucccuccgccgcgagcucuccggcuacugcuccaacaucaagcuccaggucgucaaggacgcccaggcccuccuccacggccucgacuucuccgaggucuccaacguccagcgccucaugcgcaaggagcgccgcgacgacaacgaccucaagcgccuccgcgaccucaaccaggccgucaacaaccucgucgagcucaaguccacccagcagaaguccauccuccgcgucggcacccucaccuccgacgaccuccucauccucgccgccgaccucgagaagcucaaguccaaggucacccgcaccgagcgcccccucuccgccggcgucuacaugggcaaccucuccucccagcagcucgaccagcgccgcgcccuccucgacaugaucggcauguccggcuccaaccagggcgcccgcgccggccgcgacggcgucguccgcgucugggacgucaagaacgccgagcuccucaacaaccaguucggcaccaugcccucccucacccucgccugccucaccaagcagggccaggucgaccucaacgacgccguccaggcccucaccgaccucggccucaucuacaccgccaaguaccccaacaccuccgaccucgaccgccucacccagucccaccccauccucaacaugaucgacaccaagaaguccucccucaacaucuccggcuacaacuucucccucggcgccgccgucaaggccggcgccugcaugcucgacggcggcaacaugcucgagaccaucaaggucuccccccagaccauggacggcauccucaaguccauccucaaggucaagaaggcccucggcauguucaucuccgacgcccccggcgagcgcaaccccuacgagaacauccucuacaagaucugccucuccggcgacggcuggcccuacaucgccucccgcaccuccaucaccggccgcgccugggagaacaccgucgucgaccucgaguccgacggcaagccccagaaggccggcuccaacggcuccaacaagucccuccaguccgccggcuucaccgccggccucaccuacucccagcucaugacccucaaggacgccaugcuccagcucgaccccaacgccaagaccuggauggacaucgagggccgccccgaggaccccgucgagaucgcccucuaccagcccuccuccggcugcuacauccacuucuuccgcgagcccaccgaccucaagcaguucaagcaggacgccaaguacucccacggcaucgacgucaccgaccucuucgccgcccagcccggccucaccuccgccgucaucgacgcccucccccgcaacauggucaucaccugccagggcuccgacgacauccgcaagcucuucgagucccagggccgcaaggacaucaagcucaucgacaucgcccucuccaagaccgacucccgcaaguacgagaacgccgucugggaccaguacaaggaccucugccacaugcacaccggcaucgucgucgagaagaagaagcgcggcggcaaggaggagaucaccccccacugcgcccucauggacugcaucauguucgacgccgccgucuccggcggccucaacaccuccguccuccgcgccguccucccccgcgacauggucuuccgcaccuccaccccccgcgucguccucugaggacuaguaauaaggaaacuguaugaaugucugugggcaggaagugaagagauccuucuguaaagguuuuuggaauuaugucugcugaauaauaaacuuuuuugaaauaauaaaucugguagaaaaaugagaucuaaaaaaaaaaaaaaaaaaaaaaaaaaaaaaaaaaaaaaaaaaaaaaaaaaaaaaaaaaaaaaaaugcaucccccccccccccccccccccccccccccccaaaggcucuuuucagagccaccagaauu

SEQ ID NO: 10449 - RNA, 2050 nt, Artificial Sequence
  mRNA product Design b-4 comprising derived and/or modified sequence from LASV(LM776-SLE-2012;Clade IV)__AIT17825__NP (opt2)
gggagagucccgcagucggcguccagcggcucugcuuguucgugugugugucguugcaggccuuauucaagcuuaccauguccgccuccaaggagaucaaguccuuccucuggacccagucccuccgccgcgagcucuccuccuacugcuccaacaucaagcuccaggucgucaaggacgcccaggcccuccuccacggccucgacuucuccgaggucuccaacguccagcgccucaugcgcaaggagcgccgcgacgacaacgaccucaagcgccuccgcgaccucaaccaggccgucaacaaccucgucgagcucaaguccacccagcagaaguccauccuccgcgucggcacccucaccuccgacgaccuccucauccucgccgccgaccucgagaagcucaaguccaaggucacccgcaccgagcgcccccucuccgccggcgucuacaugggcaaccucuccucccagcagcucgaccagcgccgcgcccuccucuccaugaucggcauguccggcuccaaccagggcgcccgcgccggccgcgacggcgucguccgcgucugggacgucaagaacgccgagcuccucaacaaccaguucggcaccaugcccucccucacccucgccugccucaccaagcagggccaggucgaccucaacgacgccguccaggcccucaccgaccucggccucaucuacaccgccaaguaccccaacaccuccgaccucgaccgccucacccagucccaccccauccucaacaugaucgacaccaagaaguccucccucaacaucuccggcuacaacuucucccucggcgccgccgucaaggccggcgccugcaugcucgacggcggcaacaugcucgagaccaucaaggucuccccccagaccauggacggcauccucaaguccauccucaaggucaagaaggcccucggcauguucaucuccgacacccccggcgagcgcaaccccuacgagaacauccucuacaagaucugccucuccggcgacggcuggcccuacaucgccucccgcaccuccaucaccggccgcgccugggagaacaccgucgucgaccucgaguccgacggcaagccccagaaggccggcuccaacaacuccaacaagucccuccaguccgccggcuucaccgccggccucaccuacucccagcucaugacccucaaggacgccaugcuccagcucgaccccaacgccaagaccuggauggacaucgagggccgccccgaggaccccgucgaggucgcccucuaccagcccuccuccggcugcuacauccacuucuuccgcgagcccaccgaccucaagcaguucaagcaggacgccaaguacucccacggcaucgacgucaccgaccucuucgccgcccagcccggccucaccuccgccgucaucgacgcccucccccgcaacauggucaucaccugccagggcuccgacgacauccgcaagcuccucgagucccagggccgcaaggacaucaagcucaucgacaucgcccucuccaagaccgacucccgcaaguacgagaacgccgucugggaccaguacaaggaccucugccacaugcacaccggcgucgucgucgagaagaagaagcgcggcggcaaggaggagaucaccccccacugcgcccucauggacugcaucauguucgacgccgccgucuccggcggccucaacaccuccguccuccgcgccguccucccccgcgacauggucuuccgcaccuccaccccccgcgucguccucugaggacuaguaauaaggaaacuguaugaaugucugugggcaggaagugaagagauccuucuguaaagguuuuuggaauuaugucugcugaauaauaaacuuuuuugaaauaauaaaucugguagaaaaaugagaucuaaaaaaaaaaaaaaaaaaaaaaaaaaaaaaaaaaaaaaaaaaaaaaaaaaaaaaaaaaaaaaaaugcaucccccccccccccccccccccccccccccccaaaggcucuuuucagagccaccagaauu

SEQ ID NO: 10450 - RNA, 2050 nt, Artificial Sequence
  mRNA product Design b-4 comprising derived and/or modified sequence from LASV(Mad39;Clade IV)__ANH09723__NP (opt2)
gggagagucccgcagucggcguccagcggcucugcuuguucgugugugugucguugcaggccuuauucaagcuuaccauguccgccuccaaggagaucaaguccuuccucuggacccagucccuccgccgcgagcucuccggcuacugcuccaacaucaagcuccaggucgucaaggacgcccaggcccuccuccacggccucgacuucuccgaggucuccaacguccagcgccucaugcgcaagcagcgccgcgacgacaacgaccucaagcgccuccgcgaccucaaccaggccgucaacaaccucgucgagcucaaguccacccagcagaaguccguccuccgcgucggcacccucaccuccgacgaccuccucacccucgccgccgaccucgagaagcucaaguccaaggucacccgcaccgagcgcccccucaccgccggcgucuacaugggcaaccucuccucccagcagcucgaccagcgccgcgcccuccucaacaugaucggcauguccggcggcaaccagggcgcccgcaccggccgcgacggcgucguccgcgucugggacgucaagaacgccgagcuccucaacaaccaguucggcaccaugcccucccucacccucgccugccucaccaagcagggccaggucgaccucaacgacgucguccaggcccucaccgaccucggccucaucuacaccgccaaguaccccaacaccuccgaccucgaccgccucacccagucccaccccauccucaacaugaucgacaccaacaaguccucccucaacaucuccggcuacaacuucucccucggcgccgccgucaaggccggcgccugcaugcucgacggcggcaacaugcucgagaccaucaaggucuccccccagaccauggacggcauccucaaguccauccucaaggucaagaagucccucggcauguucaucuccgacacccccggcgagcgcaaccccuacgagaacauccucuacaagaucugccucuccggcgacggcuggcccuacaucgccucccgcaccuccaucaccggccgcgccugggagaacaccgucgucgaccucgaguccggcggcaagccccagaaggccggcuccaacaacuccaacaagucccuccaguccgccggcuucgccgccggccucaccuacucccagcucaugacccucaaggacgccaugcuccagcucgaccccaacgccaagaccuggauggacaucgagggccgccccgaggaccccgucgagaucgcccucuaccagcccaucuccggcugcuacauccacuucuuccgcgagcccaccgaccucaagcaguucaagcaggacgccaaguacucccacggcaucgacgucaccgaccucuucgccgcccagcccggccucaccuccgccgucaucgaggcccucccccgcaacauggucaucaccugccagggcuccgacgacauccgcaagcucuucgagucccagggccgcaaggacaucaagcucaucgacaucgcccucuccaagaccgacucccgcaaguacgagaacgccgucugggaccaguacaaggaccucugccacaugcacaccggcgucgucgucgagaagaagaagaagggcggcaaggaggagaucaccccccacugcgcccucauggacugcaucauguucgacgccgccgucuccggcggccucaacacccucguccuccgcgccguccucccccgcgacauggucuuccgcaccuccacccccaaggucguccucugaggacuaguaauaaggaaacuguaugaaugucugugggcaggaagugaagagauccuucuguaaagguuuuuggaauuaugucugcugaauaauaaacuuuuuugaaauaauaaaucugguagaaaaaugagaucuaaaaaaaaaaaaaaaaaaaaaaaaaaaaaaaaaaaaaaaaaaaaaaaaaaaaaaaaaaaaaaaaugcaucccccccccccccccccccccccccccccccaaaggcucuuuucagagccaccagaauu

SEQ ID NO: 10451 - RNA, 2050 nt, Artificial Sequence
  mRNA product Design b-4 comprising derived and/or modified sequence from LASV(Z0947-SLE-2011;Clade IV)__AIT17841__NP (opt2)
gggagagucccgcagucggcguccagcggcucugcuuguucgugugugugucguugcaggccuuauucaagcuuaccauguccgccuccaaggagaucaaguccuuccucuggacccagucccuccgccgcgagcucuccggcuacugcuccaacaucaagcuccaggucgucaaggacgcccaggcccuccuccacggccucgacuucuccgaggucuccaacguccagcgccucaugcgcaaggagcgccgcgacgacaacgaccucaagcgccuccgcgaccucaaccaggccgucaacaaccucgucgagcucaaguccacccagcagaaguccauccuccgcgucggcacccucaccuccgacgaccuccucauccucgccgccgaccucgagaagcucaaguccaaggucacccgcaccgagcgcccccucuccgccggcgucuacaugggcaaccucuccucccagcagcucgaccagcgccgcgcccuccucaacaugaucggcauguccggcuccaaccagggcgcccgcaccggccgcgacggcgucguccgcgucugggacgucaagaacgccgagcuccucaacaaccaguucggcaccaugcccucccucacccucgccugccucaccaagcagggccaggucgaccucaacgacgccguccaggcccucaccgaccucggccucaucuacaccgccaaguaccccaacaccuccgaccucgaccgccucacccagucccaccccauccucaacaugaucgacaccaagaaguccucccucaacaucuccggcuacaacuucucccucggcgccgccgucaaggccggcgccugcaugcucgacggcggcaacaugcucgagaccaucaaggucuccccccagaccauggacggcauccucaaguccauccucaaggucaagaaggcccucggcauguucaucuccgacgcccccggcgagcgcaaccccuacgagaacauccucuacaagaucugccucuccggcgacggcuggcccuacaucgccucccgcaccuccaucaccggccgcgccugggagaacaccgucgucgaccucgaguccgacggcaagccccagaaggccggcuccaacggcuccaacaagucccuccaguccgccggcuucaccgccggccucaccuacucccagcucaugacccucaaggacgccaugcuccagcucgaccccaacgccaagaccuggauggacaucgagggccgccccgaggaccccgucgagaucgcccucuaccagcccuccuccggcugcuacauccacuucuuccgcgagcccaccgaccucaagcaguucaagcaggacgccaaguacucccacggcaucgacgucaccgaccucuucgccgcccagcccggccucaccuccgccgucaucgacgcccucccccgcaacauggucaucaccugccagggcuccgacgacauccgcaagcucuucgagucccagggccgcaaggacaucaagcucaucgacaucgcccucuccaagaccgacucccgcaaguacgagaacgccgucugggaccaguacaaggaccucugccacaugcacaccggcaucgucgucgagaagaagaagcgcggcggcaaggaggagaucaccccccacugcgcccucauggacugcaucauguucgacgccgccgucuccggcggccucaacaccuccguccuccgcgccguccucccccgcgacauggucuuccgcaccuccaccccccgcgucguccucugaggacuaguaauaaggaaacuguaugaaugucugugggcaggaagugaagagauccuucuguaaagguuuuuggaauuaugucugcugaauaauaaacuuuuuugaaauaauaaaucugguagaaaaaugagaucuaaaaaaaaaaaaaaaaaaaaaaaaaaaaaaaaaaaaaaaaaaaaaaaaaaaaaaaaaaaaaaaaugcaucccccccccccccccccccccccccccccccaaaggcucuuuucagagccaccagaauu

SEQ ID NO: 10452 - RNA, 2050 nt, Artificial Sequence
  mRNA product Design b-4 comprising derived and/or modified sequence from LASV(Josiah;Clade IV)__NP_694869__NP (opt3)
gggagagucccgcagucggcguccagcggcucugcuuguucgugugugugucguugcaggccuuauucaagcuuaccaugagcgccuccaaggagaucaaaucuuuccuguggacccagucacucagaagggaacuuaguggcuacugcagcaacauuaagcugcaaguggucaaagacgcucaggcauuguuacacgggcuggauuuuuccgagguuucuaaugugcagcggcuaaugcgcaaggaacgacgugacgauaacgaccucaaaagacugagggaucuuaaucaggccguaaacaaucugguggaguugaagucgacacaacagaagucaauacuccgggucggaacucugacgagcgacgaucugcucaucuuagcggcugaccuggaaaaacuuaagaguaaagugauucgcaccgagagacccuuguccgccgguguuuauaugggcaaccugucuagccagcagcuagaucaaaggcgggcacuccugaauaugaucgggauguccggaggcaaccagggugcccgcgcugggcgagacggaguggucagagugugggauguaaagaaugcagagcuucugaacaaucaguucggcacaaugccuucauugacucucgccugucugaccaaacagggccaaguugacuuaaacgaugcugugcaggcccugacagaccucgggcuuauuuacaccgcgaaguauccaaauacaagugaccuggauagguugacucagagccauccgauccuaaacaugauagacaccaagaaaucuucccugaauaucucaggauacaacuuuagccucggugcagccgucaaggcuggcgccugcaugcuggaugggggaaacaugcuugaaacgauuaaagugaguccccaaacuauggacggcauccugaagucuauuuugaaagugaagaaagcacucgguauguucaucuccgauaccccuggggagcggaauccauaugaaaacauacuguacaagauuuguuuaagcggagacggcuggcccuauaucgcuucgcguacaucuauuacuggccgcgccugggagaauaccgucguugaucuggaguccgacgggaagccucagaaagcggauucaaacaauaguagcaagucccuacagucugccggauuuacagcaggucucaccuacagccagcugaugacgcuuaaagacgcuauguugcaacuggauccaaacgccaagacuuggauggacaucgaaggcagacccgaggacccuguggaaaucgcucucuaccagccaucaagugggugcuauauucacuucuuuagggagccgacagaucugaaacaguucaagcaggacgccaaguacucccauggaauagauguaaccgaccuuuuugcaacucaacccggccugacaagcgccgugaucgaugcuuugccucggaauauggucauuaccugucaggguucugacgauauccgaaaacuccuggaaucacaggggcgcaaggacauaaaauuaauugauaucgcgcugaguaagacggacagcagaaaauaugagaacgcagugugggaucaguacaaggaccuaugccacaugcauaccggcguuguggucgagaagaaaaagaggggaggcaaagaagagaucacaccacacugugcccucauggauugcauuauguucgacgcugccguguccgggggacugaauacuucuguacuucgggcaguuuugccccgcgacaugguguuuagaaccucgacaccuagggucgugcugugaggacuaguaauaaggaaacuguaugaaugucugugggcaggaagugaagagauccuucuguaaagguuuuuggaauuaugucugcugaauaauaaacuuuuuugaaauaauaaaucugguagaaaaaugagaucuaaaaaaaaaaaaaaaaaaaaaaaaaaaaaaaaaaaaaaaaaaaaaaaaaaaaaaaaaaaaaaaaugcaucccccccccccccccccccccccccccccccaaaggcucuuuucagagccaccagaauu

SEQ ID NO: 10453 - RNA, 2050 nt, Artificial Sequence
  mRNA product Design b-4 comprising derived and/or modified sequence from LASV(LP;Clade I)__AAF86702__NP (opt3)
gggagagucccgcagucggcguccagcggcucugcuuguucgugugugugucguugcaggccuuauucaagcuuaccaugagcaacuccaaggagaucaaaucuuuccuguggacccagucacucagaagggaacuuaguggcuacugcagcaauauuaagcugcaaguggucaaagacgcccaggcuuuguuacacgggcuggauuuuuccgagguuucuaacgugcagcggcuaaugcgcaagcagaaacgagacgaugcagaccucaagcgucugagagaucuuaaucaagccguaaacaaucugguggaauugaagucgacacagcagaaaaacguccucagggugggaacucugucaagcgacgaucugauaacgcucgcggcugacuuagagaagcugaaaaguaagguuauccggaccgaacgcccccuuuccucugguguguauaugggcaauuugagcucccagcaacuggaucagagaagggcccuacucucaaugauugggaugaguggaggcccucaggguaaccggacagggggagacggcgucgugcgcguaugggauguuaaaaaugcagagcugcuuaacaaucaguucggcacuaugccaagccugaccuuggccugucucacaaagcaaggacagguggaccugaacgaugcuguccaggcauuaaccgaccuggggcucaucuacacugccaaguaucccaauucuuccgaccuugauaugcugacacaaucacauccgauuuuggguaugguggacaccaaaaagagcagucuaaacaucucuggcuacaauuuuucccugggggcugccgugaaagcgggagcaugcaugcucgauggcgguaacaugcuggagacgauaaaggucagcccucagacuauggacgggauccuuaaaucgauucugaagguuaaacgaucuuugggaauguucaucuccgauaccccaggcgaaagaaaccccuaugagaauauucucuacaagaucugucugucaggcgaaggguggccuuauauagccaguaggacaagcauuacuggacgggcuugggagaacaccuuaguggaccuggaguccgauaauaagccacccaaacuaaacucugccgguagcaauaagucacuccaggcagcuggccugaacgccgggcuuacauacagucaguugaugacccugaaagacugcaugcuccaacuggauccuuccagcaagacguggaucgacauugaaggacguccagaggauccgguagaaaucgcgcuuuuucagcccucuucaggcuguuacauccacuucuuucgcgagccuacugaccugaaacaguucaagcaggacgccaaguauagucaugguauugaugugacagacuuguuuagcacccaaccagggcucacuuccgcagucauagaagcucugcccagaaauaugguguuaacaugccagggcucugaugacaucaaaaagcugcuagagucgcagggaaggcgggauauuaaacucaucgacauaagccuguccaaggccgauucacgaaaauucgagaacgcuguuugggaccaguacaaggaucuuugucacaugcauaccggcguggucguggaaaagaaaaagcgcgggggaaaagaggaaauuacgccucacugcgccuugcuggacuguaucauguuugaugcagccaccacagguagucucaauaucacuacccugagagcuguauuaccaagggacaugguuuuccggacaucuacucccaaggugguccugugaggacuaguaauaaggaaacuguaugaaugucugugggcaggaagugaagagauccuucuguaaagguuuuuggaauuaugucugcugaauaauaaacuuuuuugaaauaauaaaucugguagaaaaaugagaucuaaaaaaaaaaaaaaaaaaaaaaaaaaaaaaaaaaaaaaaaaaaaaaaaaaaaaaaaaaaaaaaaugcaucccccccccccccccccccccccccccccccaaaggcucuuuucagagccaccagaauu

SEQ ID NO: 10454 - RNA, 2050 nt, Artificial Sequence
  mRNA product Design b-4 comprising derived and/or modified sequence from LASV(803213;Clade II)__AAF86704__NP (opt3)
gggagagucccgcagucggcguccagcggcucugcuuguucgugugugugucguugcaggccuuauucaagcuuaccaugagcgccuccaaggaggugaaaucuuuccuguggacccagucacucagaagggaacuuaguggcuacugcagcaacaucaagcugcaagucguuaaagacgcucaggcauuguuacacgggcuggauuuuuccgaggugaauaacguacagcggcuaaugcgcaagcagaaacgagacgauggagaccucaagcgucugagagaucuuaaucaagccgugaacaaucuggucgaauugaagucuacacagcagaaaucgauucucaggguggguacucugacgucagacgaucugcucaccuuagcggcugaccuggagaaacuuaagagcaagguuauacggacagaacgccccuugaguuccggcguguauauggggaaccugucuacucagcaacuagagcagagaagggcccuccugaauaugaucggaauggucggcggugcacaggggacccagccuggacgggauggcgugguacgcguuugggacgugaaaaacccagaucuucugaauaaccaauucggcacaaugccgagcuugacccucgccugucugacuaagcaggggcaggucgacuuaaaugaugcugugcuggcacucacagaccuuggacugauuuacaccgccaaguaucccaacuccucagacuuggaucgacuaagucaaagccauccuauccugaauaugguggacacgaaaaagucuucccucaacauuucagguuacaauuuuagccugggcgcugccgucaaagcgggggcaugcaugcuugauggaggcaacaugcuggagacuaucaagguuaccccacagacaauggacgguauauugaaaaguauccucaaggugaaaagaucucuggggauguucguauccgauacucccggagaaaggaacccuuaugagaauauuuuauacaagaucugucugagcggcgacggcuggccauauauugccucgcggaccucuaucguggggcgugcuugggaaaacacaaccgucgaucuagaguccgacggaaagccccagaaaguggguacggccggcucaaauaagagucuccagagcgcaggguuuccuacuggacugacauacucccaacuuaugaccuugaaagauucuaugaugcagcuggacccaagcgcuaagacuuggauagauauugagggccgcccggaagaccccguugagaucgcccucuaccagccuaugucagguugcuauauucacuucuuuagagaaccaacagaccugaaacaguucaagcaagaugcgaaguacagucaugggaucgacguggccgaucuuuuucccgcacagccuggccugaccuccgcugucaucgaggccuugccaaggaacauggugcucacgugucagggaagcgacgauauuaaaaagcuguuagacucucagggccggcgagauauaaaacugaucgacauuucacuaaguaagguagauagccgcaaauucgaaaaugcuguuugggaccaaugcaaggaucucugucacaugcauaccgggguggucguggagaagaaaaagagaggagguaaagaggaaaucacaccccacugcgcccugauggacuguauaauguuugaugcagccgucuccggcgggcuuaacauuccgguguugagggcuguucugccucgggacaugguguuccgcacuucuucgcccaagguaguccucugaggacuaguaauaaggaaacuguaugaaugucugugggcaggaagugaagagauccuucuguaaagguuuuuggaauuaugucugcugaauaauaaacuuuuuugaaauaauaaaucugguagaaaaaugagaucuaaaaaaaaaaaaaaaaaaaaaaaaaaaaaaaaaaaaaaaaaaaaaaaaaaaaaaaaaaaaaaaaugcaucccccccccccccccccccccccccccccccaaaggcucuuuucagagccaccagaauu

SEQ ID NO: 10455 - RNA, 2053 nt, Artificial Sequence
  mRNA product Design b-4 comprising derived and/or modified sequence from LASV(GA391;Clade III)__CAA36646__NP (opt3)
gggagagucccgcagucggcguccagcggcucugcuuguucgugugugugucguugcaggccuuauucaagcuuaccaugagcgccuccaaggaggugagaucuuuccuguggacccagucacucaggcgggaacuuaguggcuacugcagcaacaucaaacugcaagucguuaaggacgcucaggcauuguuacacgggcuggauuuuuccgaggugucuaauguacagcgccuaaugcgaaaacagaagcgugacgauggagaccucaaaagacugagggaucuuaaccaagccgugaauaaccuggucgaauugaagucgacacagcagaagucagugcuccggguugguacucugagcagugacgaucugcucauuuuagcggcugaccuggagaaacuuaaguccaaagugacgcgcaccgaaagacccuugucuagcggcgucuauauggggaaucuguccucacagcaacuagaucagaggcgggcccuccugaacaugauaggaaugacaggcgugaguggugggggaaagggcgcaagcgacggcaucguacgcguuugggaugugaaaaaugccgagcuucugaacaaucaguucgggacuaugccuucuuugacccucgcuugucugacaaagcagggacaagucgacuuaaacgaugcagugcaggcccugaccgaccucggucuuauuuacacugcuaaguauccaaauuccucagaccuggaucgauugagccagagucauccgauccuaaacaugauugacacuaaaaagucuucccugaauaucagcggcuacaacuuuucgcucggggccgcggugaaagcaggagccugcaugcuggauggcgguaauaugcuugagaccauaaaggucucuccccaaacgauggacgggauccugaaauccauuuugaagguuaaaaagucacucggaauguucgugagugauacuccuggcgaaagaaacccauaugagaacauccuguacaagauuuguuuaagcggcgacggguggcccuauaucgcuuccaggaccucuauaguaggacgggccugggaaaauacaguggucgaucuggagcaggacaacaaaccucagaagauugguaauggcgggagcaacaaaucacuacagagugcaggauuugcugccggccucacuuacucccaacugaugacccuuaaggauuucaaaugcuuuaauuugaucccaaacgcgaagacauggauggacauugagggucgucccgaagauccuguggagaucgcccuguaccagccaagcucuggguguuauguucacuucuuucgcgaaccgaccgaccucaagcaguucaaacaggacgcaaaguacucacauggcaucgaugugacggaccuguuugcugcccaacccggacuuacaagugcugucauugaggcccugccuagaaauauggugauaacaugccagggcagcgaagauaucaggaaauugcucgagucccaggggcggcgagacauuaagcugaucgauauaaccuuaucuaaagcagacucgcgcaaguucgagaacgccguaugggaucaguuuaaggaccugugucacaugcauacuggaguuguggucgagaaaaagaaaagagguggcaaggaagaaauuacaccacacugcgcucuaauggauuguaucauguucgacgcggcagugagcgggggacucgaugccaaaguccugagggugguucuuccccgggacaugguguuccgcaccuccacgccuaagguagucuugugaggacuaguaauaaggaaacuguaugaaugucugugggcaggaagugaagagauccuucuguaaagguuuuuggaauuaugucugcugaauaauaaacuuuuuugaaauaauaaaucugguagaaaaaugagaucuaaaaaaaaaaaaaaaaaaaaaaaaaaaaaaaaaaaaaaaaaaaaaaaaaaaaaaaaaaaaaaaaugcaucccccccccccccccccccccccccccccccaaaggcucuuuucagagccaccagaauu

SEQ ID NO: 10456 - RNA, 2050 nt, Artificial Sequence
  mRNA product Design b-4 comprising derived and/or modified sequence from LASV(AV;Clade V)__CCA30315__NP (opt3)
gggagagucccgcagucggcguccagcggcucugcuuguucgugugugugucguugcaggccuuauucaagcuuaccaugagcgccuccaaggaggugaaaucuuuccuguggacccagucacucagaagggaacuuaguggcuacugcagcaacaucaagcugcaagucguuaaagacgcucaggcauuguuacacgggcuggauuuuuccgaggugucuaauguacagcggcuaaugcgcaagcagcgacgugacgauucggaccucaaaagacugagggaucuuaaccaagccgugaauaaccuggucgaauugaagucaacacagcaaaagagcgugcuccggguuggaacucugaguuccgacgaucugcucacguuagcggcugaccuggagaaacuuaagucuaaagugacccgcacagaaagacccuugagcuccggugucuauaugggcaaucugucaagucagcagcuagaucagaggcgggcccuccugaaccuuauugggaugacuaauggaagccagggcucucaggcaggucgcgacggggugguacgaguuugggaugugaagaacgccgagcuguugaauaaccaauucggaaccaugccuucccucacacuggcuuguuuaaccaaacagggccaggucgaccugaaugauguggugcaagcacucacugaccuuggccugauauacacagccaaguauccaaacaccucagacuuggauagacuaacgcagagccauccgauccugaauaugauugacacuaagaaaaguucucucaacaucuccggguacaauuuuagccugggagcugccgucaaggcgggugcaugcaugcuugauggcgggaacaugcuggagaccauuaaaguuucgccccagucuauggacggaaucuugaaguccauacucaaagugaagagggcccugggcauguucguaucagauacaccuggugaacggaacccauaugagaauaucuuauacaaaauuugucugaguggggacggauggcccuauaucgcuagccguacuuccauugugggccgcgccugggaaaacaccgucguggaucuagagacagacggcaagccucagaagaucgggucuggaaauagcaacaaaucacuccaaagugcagguuuuuccgcuggccugaccuacagccagcuuaugacguugaaggaugccaugcugcagcucgacccaaaugcgaaaacuuggauggauauagaggggagacccgaagacccuguugagguggcccuguaccagccaauuucuggaugcuauauccacuucuuuagggaaccgacagaccuuaagcaauucaaacaggaugcaaaguacucacauggcauugacaucgcugaucuguuugccgcucagcccgguuugaccagugccgucaucgaggcacucccucggaacauggugauuacuugucaggggagcgaagacauaaagaaacuguuagagucccaaggccgaaaggauaucaaacugauugacaucgcccuaucuaagauagauucgcgcaaauucgagaaugcuguaugggaccaguauaaggaucucugccacaugcauacaggaguuguggucgaaaagaaaaagagaggcgggaaagaggaaauuaccccacacugugcgcugauggacugcaucauguuugaugcagccgugagcggaggucuuaacacguugguccugagggcugugcucccccgggacaugguuuuccgcaccuccacaccuagagugguacugugaggacuaguaauaaggaaacuguaugaaugucugugggcaggaagugaagagauccuucuguaaagguuuuuggaauuaugucugcugaauaauaaacuuuuuugaaauaauaaaucugguagaaaaaugagaucuaaaaaaaaaaaaaaaaaaaaaaaaaaaaaaaaaaaaaaaaaaaaaaaaaaaaaaaaaaaaaaaaugcaucccccccccccccccccccccccccccccccaaaggcucuuuucagagccaccagaauu

SEQ ID NO: 10457 - RNA, 2050 nt, Artificial Sequence
  mRNA product Design b-4 comprising derived and/or modified sequence from LASV(Togo/2016/7082;Clade VI)__AMR44578__NP (opt3)
gggagagucccgcagucggcguccagcggcucugcuuguucgugugugugucguugcaggccuuauucaagcuuaccaugagcaacuccaaggaggugaaaucuuuccuguggacccagucacucagaagggaacuuaguggcuacugcagcaauaucaagcugcaagucguuaaagacgcccaggcuuuguuacacgggcuggauuuuuccgaggugucuaacguacagcggcuaaugcgcaagcagaaacgagacgauggagaccucaagcgucugagagaucuuaaucaagcagugaacaaucuggucgaauugaagucggugcagcagaaaucaauucucaggguugguacacugacuagcgacgaucugcucacguuagccgcggaccuggagaaacuuaaaaguaaggugacccggacagaacgccccuuguccucuggcgucuauauggggaaccugagcucccagcaacuagaucagagaagggcucuccugucaaugauaggaaugaguggcgguaaucagaacagccagccuaaaggggacggagugguacggguuugggaugugaagaaugccgaccuucugaacaaucaauucggcacuaugccaucuuugacccucgcaugucugacaaagcagggccaggucgauuuaaacgacgccgugcaagcucugaccgaccucgggcuuaucuacacugcaaaauaucccaauuccucagaucuggaccgcuugagccagagucauccgauucuaaacaugaucgauacaaagaaaucuucccugaauauuagcggauacaacuuuucgcucggugccgcuaucaagaccggcgccugcaugcuggacgggggaaacaugcuugagacgauaaaagugacuccucagaccauggauggcauccugaagucuauuuugaaagucaagcgaucccucgguauguucaucucagacacaccaggggagagaaaucccuaugaaaacauucuguacaagaucuguuuaaguggagauggcuggccuuauauagcgagcaggacugcaauuaucggccgggccugggagaauaccguuguggaccuggaauccgauucuaaaccacagaagauugggagcaacggaucaaauaaaagucuacaauccgcugguuuugcccccggccucacauacagccagcugaugacccuuaaggacucuauguugcagcuggauccuaacgcaaaaacguggaucgacaucgaggggcguccagaggacccgguagaaguggcucucuuccagcccauuucaggaugcuacauacacuuuuuccgcgagccuacugaucugaagcaauuuaagcaggacgccaaauauagucauggcaucgaugucacagaccuuuucgcggcccagccaggucugaccagcgcagugauugaggcuuugcccagaaauaugguucucacuugucagggguccgaugacaucaagaaacuguuagauucucaaggcaggcgggacauaaagcugauugaugugucgcuaaacaaaaucgacagccgaaaguuugaaaaugccgucugggaucaguacaaggaccucugccacaugcauacaggagugguaguugaaaagaagaaaaagggcgggaaagaggagaucaccccucacugugcucugcuugauugcauuauguucgacgccgcaguguccggagguuugaacgccacgguccugcgcgcugugcucccaagagacauggucuuuaggaccucaagucccaaggugguucugugaggacuaguaauaaggaaacuguaugaaugucugugggcaggaagugaagagauccuucuguaaagguuuuuggaauuaugucugcugaauaauaaacuuuuuugaaauaauaaaucugguagaaaaaugagaucuaaaaaaaaaaaaaaaaaaaaaaaaaaaaaaaaaaaaaaaaaaaaaaaaaaaaaaaaaaaaaaaaugcaucccccccccccccccccccccccccccccccaaaggcucuuuucagagccaccagaauu

SEQ ID NO: 10458 - RNA, 2050 nt, Artificial Sequence
  mRNA product Design b-4 comprising derived and/or modified sequence from LASV(KAK-428;Clade n.d. (VII))__ANH09741__NP (opt3)
gggagagucccgcagucggcguccagcggcucugcuuguucgugugugugucguugcaggccuuauucaagcuuaccaugagcaacuccaaggaggugaaaucuuuccuguggacccagucacucagaagggaacuuaguggcuacugcacaaauaucaagcugcaagucguuaaagacgcccaggcuuuguuacacgggcuggauuuuagcgagguguccaacguacagcggcuaaugcgcaagcagaaacgagacgauaaugaccucaagcgucugagagaucuuaaccaagcagugaauaaccuggucgaauugaagucugugcagcagaaaucgguucucaaggugggaacucucaauucagacgaucugcugacguuagccgcggaccuggagaaacuuaagagcaaagucgugaggaccgaacggcccuugaguuccgguguauauaugggcaaccugucuagccagcaacuagaucagcgcagagcucuccugaauaugauugggauggccggaggcucccaggguaaccagccuucaagggacgggguugugcgggucugggaugugaagaaugcagaccuucugaacaaucaauucggaacaaugccaaguuugacucucgccugucugaccaagcagggccagguggauuuaaacgacgucguucuggcucucacagaccuuggccugauauacaccgcaaaauauccgaauagcucugauuuggaccgccuaucccaaaaccaucccgugcugaacaugaucgauguaaauaagucaagccucaacauuaguggguacaauuuuucucugggagccgcugugaaagccggugcgugcaugcuugacggcgggaacaugcuggagacuaucaagauuuccccucagacagucgauggaaucuugaaaagcauacucaaggugaaacgagcacugggcauguucguuucggacaccccaggugagagaaaucccuaugaaaacaucuuauacaaggugugucugucugggaauggauggccuuauauugccuccaggacgucaaucgucggccgggcuugggagaacacugugguagaucuagaaaguaauaagaaccagccaaaaguuggcaauaacgggagcaauaagaugcuccaguccucuggauuugccaccggucugacauacagccaacuuaugacuuugcgugacucaaugcugcagcucgaucccaccgcaaaaacauggauugacaucgagggccgcccugaggauccaguggaacuggcucuuuuccagccgaguuccgggugcuacauacacuuuuucagagagcccaccgaccugaagcaguuuaaacaagacgccaaguauagccauggaauugaugucaacgacuuguucucugcgcagccuggccucacgucagccgugcuggaagcauuaccaaggaauaugguccugacuugucaggguagugaugacauccggaagcuacucgauagccaggaccgaaaagauauuaagcugaucgacaucucccuuucuaaagcugaugcccgcaaguuugagaacgacgugugggaucaauucaaagacuugugccacaugcauacagggauuguuguggaaaagaagaaaaagggcggaaaacaggagaugacuccccacugugcucugcucgauugcauaauguuugacgccgcaguaucgggcgggcugaacgucccuaccuuaagagccgugcugccaacagacaugguuuucaggaccaucacgaccaaggugguccuuugaggacuaguaauaaggaaacuguaugaaugucugugggcaggaagugaagagauccuucuguaaagguuuuuggaauuaugucugcugaauaauaaacuuuuuugaaauaauaaaucugguagaaaaaugagaucuaaaaaaaaaaaaaaaaaaaaaaaaaaaaaaaaaaaaaaaaaaaaaaaaaaaaaaaaaaaaaaaaugcaucccccccccccccccccccccccccccccccaaaggcucuuuucagagccaccagaauu

SEQ ID NO: 10459 - RNA, 2050 nt, Artificial Sequence; identical to SEQ ID NO: 10453
  mRNA product Design b-4 comprising derived and/or modified sequence from LASV(Pinneo-NIG-1969;Clade I)__AIT17837__NP (opt3)

SEQ ID NO: 10460 - RNA, 2050 nt, Artificial Sequence
  mRNA product Design b-4 comprising derived and/or modified sequence from LASV(ISTH0009-NIG-2011;Clade II)__AIT17405__NP (opt3)
gggagagucccgcagucggcguccagcggcucugcuuguucgugugugugucguugcaggccuuauucaagcuuaccaugagcguguccaaggaggucaaaucuuuccuguggacccagucacucagaagggaacuuaguggcuacugcagcaacaucaagcugcaaguugugaaagacgcccaggcuuuguuacacgggcuggauuuuuccgagguaucuaaugugcagcggcuaaugcgcaagcagaaacgagacgauucggaccucaagcgucugagagaucuuaaccaagcagucaauaaccugguggaauugaagucaacacagcagaaaagcauucucaggguuggaacucugacgagugacgaucugcucaccuuagccgcggaccuggagaaacuuaaguccaaggugauacggacagaacgccccuugucuagcggugucuauaugggcaaucuguccacucagcaacuagagcagagaagggcucuccugaacaugaucgggauggugggaggcgcccaggguacccagccugggcgggauggaguaguucgcgugugggacgucaaaaauccagaucuucugaacaaucaauucggcacaaugccgucauugacccucgcaugucugacuaagcagggccagguggacuuaaacgaugccgugcuggcucucacagaccuugggcugauuuacaccgcaaaguaucccaauaguagcgacuuggaucgacuaucucaaucccauccuauccugaacauggucgacauuaaaaagucaagccucaauaucaguggauacaacuuuucucugggugccgcuguuaaagccggcgcgugcaugcuugaugggggaaauaugcuggagacgauaaaggugacuccacagaccauggacggcaucuugaaauccauucucaagguaaaaagaagccuggguauguucgugucggauacacccggggaaaggaacccuuaugagaacaucuuauacaagauuugucugucuggagacggcuggccauauaucgcaucccggacuucaauagucggccgugccugggaaaauaccacaguggaucuagagagugacgggaagccccagaaaguuggaagcgcugguuccaacaagucucuccagagcgccggcuuuccuaccgggcugacguacucacaacuuaugacuuugaaagauaguaugaugcagcuggacccauccgcaaagacauggauugauaucgagggacgcccggaagaccccguggagauugcucucuaccagccuaugagcggcugcuauauccacuucuuuagagaaccaaccgaccugaaacaguucaagcaagaugccaaguacucucaugguaucgacgucgcggaucuuuuucccgcccagccugggcugacuucagcagugauugaggcuuugccaaggaauaugguacucacaugucagggcagugacgauauaaaacggcuguuagacagccagggacgacgcgauaucaagcugauugacaucgcccuauccaaagcugauucuagaagguucgaaaacgccguuugggaccaaugcaaggaucucugucacaugcauaccggcguggucguggagaaaaagaagcgcgggggaaaagaggaaauaacgccccacugcgcacugauggacuguauuauguaugaugccgcugucucggguggccuuaauaucccgguguugcgggcgguucugccuagagacaugguguuuaggaccagcucccccaagguaguccucugaggacuaguaauaaggaaacuguaugaaugucugugggcaggaagugaagagauccuucuguaaagguuuuuggaauuaugucugcugaauaauaaacuuuuuugaaauaauaaaucugguagaaaaaugagaucuaaaaaaaaaaaaaaaaaaaaaaaaaaaaaaaaaaaaaaaaaaaaaaaaaaaaaaaaaaaaaaaaugcaucccccccccccccccccccccccccccccccaaaggcucuuuucagagccaccagaauu

SEQ ID NO: 10461 - RNA, 2050 nt, Artificial Sequence
  mRNA product Design b-4 comprising derived and/or modified sequence from LASV(ISTH2010-NIG-2012;Clade II)__AIT17483__NP (opt3)
gggagagucccgcagucggcguccagcggcucugcuuguucgugugugugucguugcaggccuuauucaagcuuaccaugagcgccuccaaggaggugaaaucuuuccuguggacccagucacucagaagggaacuuaguggcuacugcagcaacaucaagcugcaagucguuaaagacgcucaggcauuguuacacgggcuggauuuuuccgaggugucuaauguacagcggcuaaugcgcaagcagaaacgagacgauucggaccucaagcgucugagagaucuuaaccaagccgugaauaaccuggucgaauugaagucaacacagcagaaaagcauucucagggugggaacucugacgagugacgaucugcucaccuuagcggcugaccuggagaaacuuaaguccaagguuauacggacagaacgccccuugucuagcgguguguauaugggcaaucuguccacucagcaacuagagcagagaagggcccuccugaaccuuaucgggauggucggaggcgcacaggguacccagccugggcgggauggagugguacgcguuugggacgugaaaaauccagaucuguugaacaaucaauucggcacaaugccgucacucacccuggccuguuuaacuaagcagggccaggucgaccugaacgaugcugugcucgcacuuacagaccugggguugauuuacaccgccaaguaucccaauaguagcgaccuagaucgacugucucaaucccauccuauccucaacaugguggacacgaaaaagucaagccugaauauuaguggauuuaacuucucucuuggugcugccgucaaagcgggcgcaugcaugcuggaugggggaaauauguuggagacuaucaagguuaccccacagacaauggacggcauacucaaauccauccugaaggugaaaaagagcuuagguauguuuguaucggauacucccggggaaagaaacccuuacgagaacauucuguauaagaucugucuaucuggagacggcuggccauacauugccuccaggaccucaaucgugggccgggcuugggaaaauacaaccgucgaucucgagagugacgggaaaccccacaaggugggaacggccgguagcaacaaaucccugcagucugcaggcuucccuacugggcuuacauauagccaguugaugacccugaaggauucaaugaugcaacucgacccaagugcuaaaacuuggauagauauugagggacguccggaagaccccguugagaucgcccuguaccagccuauguccggcugcuacauucacuuuuuccgcgaaccaacagaccuuaagcaguuuaagcaggaugcgaaauauagccaugguaucgacguggccgaucuguuccccgcacaaccuggguugaccucugcugucaucgaggcccucccaagaaauauggugcugacgugucagggcucagacgauauuaagagguuacuggacagucagggacggcgagauauaaaacuaaucgacauugcucucagcaaggccgauucccgcagauuugaaaacgcaguaugggaccagugcaaagaucugugucauaugcacaccggcguuguggucgagaagaagaaaaggggagggaaggaggaaaucacaccccacugcgcccuuauggacuguauaauguacgaugcugcggugucugguggcuugaauauuccgguccugcgggcagugcucccucgcgacaugguuuucagaacuucgagccccaaagugguacugugaggacuaguaauaaggaaacuguaugaaugucugugggcaggaagugaagagauccuucuguaaagguuuuuggaauuaugucugcugaauaauaaacuuuuuugaaauaauaaaucugguagaaaaaugagaucuaaaaaaaaaaaaaaaaaaaaaaaaaaaaaaaaaaaaaaaaaaaaaaaaaaaaaaaaaaaaaaaaugcaucccccccccccccccccccccccccccccccaaaggcucuuuucagagccaccagaauu

SEQ ID NO: 10462 - RNA, 2050 nt, Artificial Sequence
  mRNA product Design b-4 comprising derived and/or modified sequence from LASV(Lassa virus/H.sapiens-wt/NGA/2015/ISTH_0543;Clade II)__AVO03640__NP (opt3)
gggagagucccgcagucggcguccagcggcucugcuuguucgugugugugucguugcaggccuuauucaagcuuaccaugagcgccuccaaggaggugaaaucuuuccuguggacccagucacucagaagggaacuuaguggcuacugcagcaacaucaagcugcaagucguuaaagacgcucaggcauuguuacacgggcuggauuuuuccgaggugucuaauguacagcggcuaaugcgcaagcagaaacgagacgauucggaccucaagcgucugagagaucuuaaccaagccgugaauaaccuggucgaauugaagucaacacagcagaaaagcauucucagggugggaacucugacgagugacgaucugcucaccuuagcggcugaccuggagaaacuuaaguccaagguuauacggacagaacgccccuugucuagcgguguguauaugggcaaucuguccacucagcaacuagagcagagaagggcccuccugaacaugaucgggauggucggaggcgcacaggguacccagccugggcgggauggagugguacgcguuugggacgugaaaaauccagaucuucugaacaaucaauucggcacaaugccgucauugacccucgccugucugacuaagcagggccaggucgacuuaaacgaugcugugcuggcacucacagaccuugggcugauuuacaccgccaaguaucccaauaguagcgacuuggaucgacuaucucaaucccauccuauccugaacaugguggacacgaaaaagucaagccucaauauuaguggauacaacuuuucucugggugcugccgucaaagcgggcgcaugcaugcuugaugggggaaauaugcuggagacuaucaagguuaccccacagacaauggacggcauauugaaauccauccucaaggugaaaaagagccuggguauguucguaucggauacucccggggaaagaaacccuuaugagaacauuuuauacaagaucugucugucuggagacggcuggccauauauugccuccaggaccucaaucgugggccgggcuugggaaaauacaaccgucgaucuagagagugacgggaaaccccagaaggugggaagcgccgguuccaacaaaucucuccagagcgcaggcuuuccuacggggcugacuuacucacaacuuaugacauugaaggauaguaugaugcagcuggacccauccgcuaaaaccuggauagauauugagggacguccggaagaccccguugagaucgcccucuaccagccuaugagcggcugcuauauucacuucuuucgcgaaccaacugaccugaagcaguucaagcaagaugcgaaauacucucaugguaucgacguggccgaucuuuuucccgcacagccugggcugacaucagcugucaucgaggccuugccaagaaauauggugcucaccugucagggcagugacgauauuaagaggcuguuagacagccagggacggaaagauauaaagcugaucgacauugcucuauccaaagccgauucucgacgcuucgaaaacgcaguaugggaccaaugcaaggaucucugucacaugcauacgggcguuguggucgagaagaaaaagagagggggaaaagaggaaaucacaccccacugcgcccugauggacuguauaauguaugaugcugcggugucggguggccuuaauauuccggucuugagggcagugcugccucgggacaugguuuuucgcaccagcucccccaaggugguacucugaggacuaguaauaaggaaacuguaugaaugucugugggcaggaagugaagagauccuucuguaaagguuuuuggaauuaugucugcugaauaauaaacuuuuuugaaauaauaaaucugguagaaaaaugagaucuaaaaaaaaaaaaaaaaaaaaaaaaaaaaaaaaaaaaaaaaaaaaaaaaaaaaaaaaaaaaaaaaugcaucccccccccccccccccccccccccccccccaaaggcucuuuucagagccaccagaauu

SEQ ID NO: 10463 - RNA, 2050 nt, Artificial Sequence
  mRNA product Design b-4 comprising derived and/or modified sequence from LASV(Lassa virus/H.sapiens-wt/NGA/2016/ISTH_0009;Clade II)__AVO03572__NP (opt3)
gggagagucccgcagucggcguccagcggcucugcuuguucgugugugugucguugcaggccuuauucaagcuuaccaugagcgccuccaaggaggugaaaucuuuccuguggacccagucacucagaagggaacuuaguggcuacugcagcaacaucaagcugcaagucguuaaagacgcucaggcauuguuacacgggcuggauuuuuccgaggugucuaauguacagcggcuaaugcgcaagcagaaacgagacgauucggaccucaagcgucugagagaucuuaaccaagccgugaauaaccuggucgaauugaagucaacacagcagaaaagcauucucagggugggaacucugacgagugacgaucugcucaccuuagcggcugaccuggagaaacuuaaguccaagguuauacggacagaacgccccuugucuagcgguguguauaugggcaaucuguccacucagcaacuagagcagagaagggcccuccugaacaugaucgggauggucggaggcgcacaggguacccagccugggcgggauggagugguacgcguuugggacgugaaaaauccagaucuucugaacaaucaauucggcacaaugccgucauugacccucgccugucugacuaagcagggccaggucgacuuaaacgaugcugugcuggcacucacagaccuugggcugauuuacaccgccaaguaucccaauaguagcgacuuggaucgacuaucucaaucccauccuauccugaacaugguggacacgaaaaagucaagccucaauauuaguggauacaacuuuucucugggugcugccgucaaagcgggcgcaugcaugcuugaugggggaaauaugcuggagacuaucaagguuaccccacagacaauggacggcauauugaaauccauccucaaggugaaaaagagccuggguauguucguaucggauacucccggggaaagaaacccuuaugagaacauuuuauacaagaucugucugucuggagacggcuggccauauauugccuccaggaccucaaucgugggccgggcuugggaaaauacaaccgucgaucuagagagugacgggaaaccccagaaggugggaagcgccgguuccaacaaaucucuccagagcgcaggcuuuccuacggggcugacuuacucacaacuuaugacauugaaggauaguaugaugcagcuggacccauccgcuaaaaccuggauagauauugagggacguccggaagaccccguugagaucgcccucuaccagccuaugagcggcugcuauauucacuucuuucgcgaaccaacugaccugaagcaguucaagcaagaugcgaaauacucucaugguaucgacguggccgaucuuuuucccgcacagccugggcugacaucagcugucaucgaggccuugccaagaaauauggugcucaccugucagggcagugacgauauuaagaggcuguuagacagccagggacggcgagauauaaaacugaucgacauugcucuauccaaggccgauucucgcagauucgaaaacgcaguaugggaccaaugcaaagaucucugucacaugcauacgggcguuguggucgagaagaagaaaaggggagggaaggaggaaaucacaccccacugcgcccugauggacuguauaauguaugaugcugcggugucggguggccuuaauauuccggucuugcgggcagugcugccucgcgacaugguuuuuagaaccagcucccccaaagugguacucugaggacuaguaauaaggaaacuguaugaaugucugugggcaggaagugaagagauccuucuguaaagguuuuuggaauuaugucugcugaauaauaaacuuuuuugaaauaauaaaucugguagaaaaaugagaucuaaaaaaaaaaaaaaaaaaaaaaaaaaaaaaaaaaaaaaaaaaaaaaaaaaaaaaaaaaaaaaaaugcaucccccccccccccccccccccccccccccccaaaggcucuuuucagagccaccagaauu

SEQ ID NO: 10464 - RNA, 2050 nt, Artificial Sequence
  mRNA product Design b-4 comprising derived and/or modified sequence from LASV(Lassa virus/H.sapiens-wt/NGA/2016/ISTH_0017;Clade II)__AVO03568__NP (opt3)
gggagagucccgcagucggcguccagcggcucugcuuguucgugugugugucguugcaggccuuauucaagcuuaccaugagcgccuccaaggaggugaaaucuuuccuguggacccagucacucagaagggaacuuaguggcuacugcagcuccaucaagcugcaagucguuaaagacgcucaggcauuguuacacgggcuggauuuuucugaggugucgaacguacagcggcuaaugcgcaagcagaaacgagacgauucagaccucaagcgucugagagaucuuaaucaagccgugaacaaucuggucgaacuuaagagcacacagcagaaaaguauucucagggugggaacucugacguccgacgaucugcucaccuuagcggcugaccuggagaaguugaaaucuaagguuauacggacagaacgccccuugagcuccgguguguauaugggcaaccugucaacucagcaacuagagcagagaagggcccuccugaauaugaucgggauggcaggaggcgcccaggguacccagccugggcgggauggagucgugcgcguaugggacguuaaaaacccagaucuucugaauaaccaauucggcacaaugccgaguuugacccucgcuugucugacuaagcagggccagguggacuuaaaugaugcaguccuggcccucacagaccuugggcugauuuacaccgcuaaguaucccaacagcucugacuuggaucgacuaucccaaucacauccuauccugaauaugguggacacgaaaaagagcagucucaacauuucuggauacaauuuuucccugggugccgcggugaaagcaggcgccugcaugcuugaugggggaaacaugcuggagacuaucaaggucaccccacagacaauggacggcauauugaaaagcauccucaagguuaaaagaucgcuggguauguucgugucugaugcucccggggaaaggaauccuuaugagaacauuuuauacaagaucugucuguccggagacggcuggccauauauugccucacggaccaguaucguaggccgugcaugggaaaacaccacaguggaucuagagagcgacgggaagccccagaaagucggagcuaccgguuccaauaagucucuccagagcgccggcuuuccuacggggcugacuuacucacaacuuaugacauugaaagauaguaugaugcagcuggacccauccgcgaagaccuggauagauauugagggacgcccggaagaccccguggagguugcccucuaccagccugugagcggcugcuauauccacuucuuuagagaaccaacugaccugaaacaguucaagcaagaugcaaaguacucucaugguauugacgucgcugaucuuuuucccgcccagccugggcugacaucagcugugaucgaggccuugccaaggaacaugguacucaccugucagggcagugacgauaucaaaaagcuguuagacagccagggacggaaagauauuaagcugauagacaucgcacuauccaaagccgauucucgacgcuucgaaaaugcuguuugggaccaaugcaaggaucucugucacaugcauacgggcguggucguggagaagaaaaagagagggggaaaagaggaaauuacuccccacugcgcgcugauggacuguaucauguaugaugcagccgucucggguggccuuaacauaccgguguugagggcuguucugccucgggacaugguguuucgcacaagcucccccaagguaguccucugaggacuaguaauaaggaaacuguaugaaugucugugggcaggaagugaagagauccuucuguaaagguuuuuggaauuaugucugcugaauaauaaacuuuuuugaaauaauaaaucugguagaaaaaugagaucuaaaaaaaaaaaaaaaaaaaaaaaaaaaaaaaaaaaaaaaaaaaaaaaaaaaaaaaaaaaaaaaaugcaucccccccccccccccccccccccccccccccaaaggcucuuuucagagccaccagaauu

SEQ ID NO: 10465 - RNA, 2050 nt, Artificial Sequence
  mRNA product Design b-4 comprising derived and/or modified sequence from LASV(Lassa virus/H.sapiens-wt/NGA/2018/ISTH_0959;Clade II)__AVV65100__NP (opt3)
gggagagucccgcagucggcguccagcggcucugcuuguucgugugugugucguugcaggccuuauucaagcuuaccaugagcgccuccaaggaggugaaaucuuuccuguggacccagucacucagaagggaacuuaguggcuacugcagcaacaucaagcugcaagucguuaaagacgcucaggcauuguuacacgggcuggauuuuuccgaggugucuaauguacagcggcuaaugcgcaagcagaaacgagacgauucggaccucaagcgucugagagaucuuaaccaagccgugaauaaccuggucgaauugaagucaacacagcagaaaagcauucucagggugggaacucugacgagugacgaucugcucaccuuagcggcugaccuggagaaacuuaaguccaagguuauacggacagaacgccccuugucuagcgguguguauaugggcaaucuguccacucagcaacuagagcagagaagggcccuccugaaccuuaucgggauggucggaggcgcacaggguacccagccugggcgggauggagugguacgcguuugggacgugaaaaauccagaucuguugaacaaucaauucggcacaaugccgucacucacccuggccuguuuaacuaagcagggccaggucgaccugaacgauguggugcucgcucuuacagaccugggguugauuuacaccgcaaaguaucccaauaguagcgaccuagaucgacugucucaaucccauccuauccucaacauggucgacacgaaaaagucaagccugaauauuaguggauuuaacuucucucuuggugccgcuguuaaagccggcgcgugcaugcuggaugggggaaauauguuggagacuaucaaggugaccccacagacaauggacggcauacucaaauccauccugaaggugaaaaagagcuuagguauguuuguaucggauacucccggggaaagaaacccuuacgagaacauucuguauaagaucugucuaucuggagacggcuggccauacauugcauccaggaccucaaucgucggccgggccugggaaaauacaaccguggaucucgagagugacgggaaaccccacaagguuggaacggcugguagcaacaaaucccugcagucugccggcuucccuacugggcuuacauauagccaguugaugacccugaaggauucaaugaugcaacucgacccaagugcaaaaacuuggauagauauugagggacguccggaagaccccguggagaucgcucuguaccagccuauguccggcugcuacauucacuuuuuccgcgaaccaacagaccuuaagcaguuuaagcaggaugccaaauauagccaugguaucgacgucgcggaucuguuccccgcccaaccuggguugaccucugcagugaucgaggcucucccaagaaauaugguacugacgugucagggcucagacgauauuaagagguuacuggacagucagggacggaaagauauaaagcuaaucgacauugcccucagcaaaaccgauucccgacgcuuugaaaacgcuguuugggaccagugcaaggaucugugucauaugcacacaggcguggucguggagaagaaaaagagagggggaaaagaggaaaucacuccccacugcgcccuuauggacuguauaauguacgaugcagccgucucugguggcuugaauauuccggugcugagggcuguucucccucgggacaugguguuccgcaccucgagccccaagguaguccugugaggacuaguaauaaggaaacuguaugaaugucugugggcaggaagugaagagauccuucuguaaagguuuuuggaauuaugucugcugaauaauaaacuuuuuugaaauaauaaaucugguagaaaaaugagaucuaaaaaaaaaaaaaaaaaaaaaaaaaaaaaaaaaaaaaaaaaaaaaaaaaaaaaaaaaaaaaaaaugcaucccccccccccccccccccccccccccccccaaaggcucuuuucagagccaccagaauu

SEQ ID NO: 10466 - RNA, 2050 nt, Artificial Sequence
  mRNA product Design b-4 comprising derived and/or modified sequence from LASV(LASV003-NIG-2008;Clade II)__AIT17581__NP (opt3)
gggagagucccgcagucggcguccagcggcucugcuuguucgugugugugucguugcaggccuuauucaagcuuaccaugagcgccuccaaggaggugaaaucuuuccuguggacccagucacucagaagggaacuuaguggcuacugcagcuccaucaagcugcaagucguuaaagacgcucaggcauuguuacacgggcuggauuuuucugaggugucgaacguacagcggcuaaugcgcaagcagaaacgagacgauucagaccucaagcgucugagagaucuuaaucaagccgugaacaaucuggucgaacuuaagagcacacagcagaaaagugugcucaggguuggaacucugacguccgacgaucugcucaccuuagcggcugaccuggagaaguugaaaucuaaggugauucggacagaacgccccuugagcuccggugucuauaugggcaaccugucagcccagcaacuagagcagagaaggacucuccugaauaugauagggauggugggaggcgcacaggguacccagccugggcgggauggaguaguucgcgugugggacgucaaaaacccagaucuucugaauaaccaauucggcacaaugccgaguuugacccucgccugucugacuaagcagggccagguggacuuaaaugaugugguccuggcucucacagaccuugggcugaucuacaccgcaaaguaucccaacagcucugacuuggaucgacuaucccaaucacauccuauucugagcaugguugacacgaaaaagaguucucucaauaucuccggauacaacuuuagccugggugccgcugugaaagccggcgcgugcaugcuugaugggggaaauaugcuggagacuauuaagguaaccccacagacaauggacggcaucuugaaaucgauacucaaggugaaaaagucucuggguauguucgucuccgauacucccggggaaagaaacccuuaugagaauaucuuauacaagauuugucugucaggagacggcuggccauauaucgcaaguaggaccagcauugugggccgggccugggaaaacacaaccguugaucuagaguccgacgggaaaccccagaaggugggaacggcugguucuaacaaaagccuccagucagccggcuuuccuacugggcugacauacagucaacuuaugaccuugaaggauuccaugaugcagcuggacccaagcgcaaaaacuuggaucgauauagagggacguccggaagaccccgucgagauugcucucuaccagccuaugucuggcugcuauauccacuucuuucgcgaaccaacagaccugaagcaguucaagcaagaugccaaauacucacaugguauugacgugaccgaucuuuuucccgcgcagccugggcugacgagugccguaaucgaggcauugccaagaaauaugguucucaccugucagggcagcgacgauaucaagaggcuguuagacucccagggacggcgagauauuaaacugauagacaucgcucuaucuaaggccgauucgcgcagauucgaaaacgcugugugggaccaaugcaaagaucucugucacaugcauacaggcgucguggucgagaagaagaaaaggggagggaaggaggaaauuacuccccacugcgcccugauggacuguaucauguaugaugcagccgugagcgguggccuuaauauaccgguuuugcgggcugugcugccucgcgacaugguauuuagaaccuccucacccaaagucgugcucugaggacuaguaauaaggaaacuguaugaaugucugugggcaggaagugaagagauccuucuguaaagguuuuuggaauuaugucugcugaauaauaaacuuuuuugaaauaauaaaucugguagaaaaaugagaucuaaaaaaaaaaaaaaaaaaaaaaaaaaaaaaaaaaaaaaaaaaaaaaaaaaaaaaaaaaaaaaaaugcaucccccccccccccccccccccccccccccccaaaggcucuuuucagagccaccagaauu

SEQ ID NO: 10467 - RNA, 2050 nt, Artificial Sequence
  mRNA product Design b-4 comprising derived and/or modified sequence from LASV(LASV035-NIG-2009;Clade II)__AIT17589__NP (opt3)
gggagagucccgcagucggcguccagcggcucugcuuguucgugugugugucguugcaggccuuauucaagcuuaccaugagcgccuccaaggaggugaaaucuuuccuguggacccagucacucagaagggaacuuaguggcuacugcagcuccaucaagcugcaagucguuaaagacgcucaggcauuguuacacgggcuggauuuuucugaggugucgaacguacagcggcuaaugcgcaagcagaaacgagacgauucagaccucaagcgucugagagaucuuaaucaagccgugaacaaucuggucgaacuuaagagcacacagcagaaaaguauucucagggugggaacucugacguccgacgaucugcucaccuuagcggcugaccuggagaaguugaaaucuaagguuauacggacagaacgccccuugagcuccgguguguauaugggcaaccugucagcccagcaacuagagcagagaagggcacuccugaauaugaucgggauggucggaggcgcccaggguacucagccugggcgggauggagugguacgcguuugggacgugaaaaacccagaucuucugaauaaccaauucggcaccaugccgaguuugacacucgcuugucugaccaagcagggccaggucgacuuaaaugaugcagugcuggcccucacugaccuugggcugauuuacacagcuaaguaucccaacagcucugacuuggaucgacuaucccaaucacauccuauccugaauaugguggacaccaaaaagagcagucucaacauuucuggauacaauuuuucccugggugccgcggucaaagcaggcgccugcaugcuugaugggggaaacaugcuggagacgaucaagguuacuccacagaccauggacggcauauugaaaagcauccucaaggugaaaagaucgcuggguauguucguaucugauacacccggggaaaggaauccuuaugagaacauuuuauacaagaucugucuguccggagacggcuggccauauauugcuucacggaccaguaucgugggccgugccugggaaaacacuacagucgaucuagagagcgacgggaagccccagaaagugggaaccacggguuccaauaagucucuccagagcgcaggcuuuccuacugggcugacauacucacaacuuaugaccuugaaagauaguaugaugcagcuggacccauccgcuaagacuuggauagauauugagggacgcccggaagaccccguugagaucgcccucuaccagccuaugagcggcugcuauauucacuucuuuagagaaccaacagaccugaaacaguucaagcaagaugcgaaguacucucaugguaucgacguggccgaucuuuuucccgcacagccugggcugaccucagcugucaucgaggccuugccaaggaacauggugcucacgugucagggcagugacgauauuaaaaagcuguuagacagccagggacggcgagauauaaaacugaucgacauugcucuauccaaggccgauucucgcaaauucgaaaaugcaguaugggaccaaugcaaggaucucugucacaugcauaccggcguuguggucgagaagaaaaagagagggggaaaagaggaaaucacaccccacugcgcccugauggacuguauaauguaugaugcugcggugucggguggccuuaacauuccggucuugagggcagugcugccucgggacaugguuuuucgcacuagcucccccaaggugguacucugaggacuaguaauaaggaaacuguaugaaugucugugggcaggaagugaagagauccuucuguaaagguuuuuggaauuaugucugcugaauaauaaacuuuuuugaaauaauaaaucugguagaaaaaugagaucuaaaaaaaaaaaaaaaaaaaaaaaaaaaaaaaaaaaaaaaaaaaaaaaaaaaaaaaaaaaaaaaaugcaucccccccccccccccccccccccccccccccaaaggcucuuuucagagccaccagaauu

SEQ ID NO: 10468 - RNA, 2050 nt, Artificial Sequence
  mRNA product Design b-4 comprising derived and/or modified sequence from LASV(LASV1000-NIG-2009;Clade II)__AIT17783__NP (opt3)
gggagagucccgcagucggcguccagcggcucugcuuguucgugugugugucguugcaggccuuauucaagcuuaccaugagcgccuccaaggaggugaaaucuuuccuguggacccagucacucagaagggaacuuaguggcuacugcagcaacaucaagcugcaagucguuaaagacgcucaggcauuguuacacgggcuggauuuuuccgaggugucuaauguacagcggcuaaugcgcaagcagaaacgagacgauucggaccucaagcgucugagagaucuuaaccaagccgugaauaaccuggucgaauugaagucaacacagcagaaaagcauucucagggugggaacucugacgagugacgaucugcucaccuuagcggcugaccuggagaaacuuaaguccaagguuauacggacagaacgccccuugucuagcgguguguauaugggcaaucuguccacucagcaacuagagcagagaagggcccuccugaacaugaucgggauggucggaggcgcacaggguacccagccugggcgggauggagugguacgcguuugggacgugaaaaauccagaucuucugaacaaucaauucggcacaaugccgucauugacccucgccugucugacuaagcagggccaggucgacuuaaacgauguggugcuggcucucacagaccuugggcugauuuacaccgcaaaguaucccaauaguagcgacuuggaucgacuaucucaaucccauccuauccugaacauggucgacacgaaaaagucaagccucaauauuaguggauacaacuuuucucugggugccgcuguuaaagccggcgcgugcaugcuugaugggggaaauaugcuggagacuaucaaggugaccccacagacaauggacggcauauugaaauccauccucaaggugaaaaagagccuggguauguucguaucggauacucccggggaaagaaacccuuaugagaacauuuuauacaagaucugucugucuggagacggcuggccauauauugcauccaggaccucaaucgucggccgggccugggaaaauacaaccguggaucuagagagugacgggaaaccccagaagguuggaacggcugguagcaacaaaucccuccagucugccggcuuuccuacugggcugacauacagccaacuuaugaccuugaaggauucaaugaugcagcuggacccaagugcaaaaacuuggauagauauugagggacguccggaagaccccguggagaucgcucucuaccagccugucuccggcugcuauauucacuucuuucgcgaaccaacagaccugaagcaguucaagcaagaugccaaauacagccaugguaucgacguggcggaucuuuuucccgcccagccugggcugaccucugcaguaaucgaggcuuugccaagaaauaugguucucacgugucagggcucagacgauauuaagaggcuguuagacagucagggacggcgagauauaaaacugaucgacauugcccuaagcaaggcugauucccgcagauucgaaaacgccgugugggaccaaugcaaagaucucugucacaugcauaccggcgucguggucgagaagaagaaaaggggagggaaggaggaaaucacaccccacugcgcacugauggacuguauaauguaugaugccgcugugucugguggccuuaauauuccgguuuugcgggcggugcugccucgcgacaugguauuuagaacuucgagccccaaagucgugcucugaggacuaguaauaaggaaacuguaugaaugucugugggcaggaagugaagagauccuucuguaaagguuuuuggaauuaugucugcugaauaauaaacuuuuuugaaauaauaaaucugguagaaaaaugagaucuaaaaaaaaaaaaaaaaaaaaaaaaaaaaaaaaaaaaaaaaaaaaaaaaaaaaaaaaaaaaaaaaugcaucccccccccccccccccccccccccccccccaaaggcucuuuucagagccaccagaauu

SEQ ID NO: 10469 - RNA, 2050 nt, Artificial Sequence
  mRNA product Design b-4 comprising derived and/or modified sequence from LASV(LASV221-NIG-2010;Clade II)__AIT17625__NP (opt3)
gggagagucccgcagucggcguccagcggcucugcuuguucgugugugugucguugcaggccuuauucaagcuuaccaugagcgccuccaaggaggugaaaucuuuccuguggacccagucacucagaagggaacuuaguggcuacugcagcuccaucaagcugcaagucguuaaagacgcucaggcauuguuacacgggcuggauuuuucugaggugucgaacguacagcggcuaaugcgcaagcagcgacgugacgauucagaccucaaaagacugagggaucuuaaucaagccgugaacaaucuggucgaacucaagagcacacagcagaagaguauuuugcgggugggaacucugacguccgacgaucugcucaccuuagcggcugaccuggagaaacuuaagucuaaaguuauacgcacagaaagacccuugagcuccgguguguauaugggcaaccugucaacucagcaacuagagcagaggcgggcccuccugaauaugaucgggauggucggaggcgcacaggguacccagccugggcgcgauggagugguacgaguuugggacgugaagaacccagaucuucugaauaaccaauucggcacaaugccgaguuugacccucgccugucugacuaaacagggccaggucgacuuaaaugaugcugugcuggcacucacagaccuugggcugauuuacaccgccaaguaucccaacagcucugacuuggauagacuaucccaaucacauccuauccugaauaugguggacacgaagaaaagcagucucaacauuucuggauacaauuuuucccugggugcugccgucaaggcgggcgcaugcaugcuugaugggggaaacaugcuggagacuaucaaaguuaccccacagacaguggacggcauacucaagagcaucuugaaaguaaagaggucgcuggguauguucgugucugauacucccggggaacggaauccuuaugagaacauuuuauacaaaaucugucuguccggagacggcuggccauauauugccucacguaccaguaucgucggccgcgcuugggaaaacacaaccguggaucuagagagcgacgggaagccccagaagguuggaacggccgguuccaauaaaucucuccagagcgcaggcuuuccuacugggcugacauacucacaacuuaugaccuugaaggauaguaugaugcagcuggacccauccgcuaaaacuuggauagauauugagggaagaccggaagaccccguggagaucgcccucuaccagccuaugagcggcugcuauauucacuucuuuagggaaccaacagaccugaagcaguucaaacaagaugcgaaguacucucaugguaucgacgucgccgaucuuuuucccgcacagccugggcugaccucagcugugaucgaggccuugccacggaacaugguacucacgugucagggcagugacgauauuaagcgacuguuagacagccagggacgcagagauauaaaacugaucgacauugcucuauccaaggccgauucuaggaaauucgaaaaugcaguuugggaccaaugcaaggaucucugucacaugcauaccggcguggucguggagaaaaagaagcgcgggggaaaagaggaaaucacaccccacugcgcccugauggacuguauaauguaugaugcugcggucucggguggccuuaacauuccgguguugcgggcaguucugccuagagacaugguguuuaggacuagcucccccaagguaguccucugaggacuaguaauaaggaaacuguaugaaugucugugggcaggaagugaagagauccuucuguaaagguuuuuggaauuaugucugcugaauaauaaacuuuuuugaaauaauaaaucugguagaaaaaugagaucuaaaaaaaaaaaaaaaaaaaaaaaaaaaaaaaaaaaaaaaaaaaaaaaaaaaaaaaaaaaaaaaaugcaucccccccccccccccccccccccccccccccaaaggcucuuuucagagccaccagaauu

SEQ ID NO: 10470 - RNA, 2050 nt, Artificial Sequence
  mRNA product Design b-4 comprising derived and/or modified sequence from LASV(LASV237-NIG-2010;Clade II)__AIT17639__NP (opt3)
gggagagucccgcagucggcguccagcggcucugcuuguucgugugugugucguugcaggccuuauucaagcuuaccaugagcgccuccaaggaggugaaaucuuuccuguggacccagucacucagaagggaacuuaguggcuacugcagcaacaucaagcugcaagucguuaaagacgcucaggcauuguuacacgggcuggauuuuuccgaggugucuaauguacagcggcuaaugcgcaagcagaaacgagacgauucggaccucaagcgucugagagaucuuaaccaagccgugaauaaccuggucgaauugaagucaacacagcagaaaagcauucucagggugggaacucugacgagugacgaucugcucaccuuagcggcugaccuggagaaacuuaaguccaagguuauacggacagaacgccccuugucuagcgguguguauaugggcaaucuguccacucagcaacuagagcagagaagggcccuccugaacaugaucgggauggucggaggcgcacaggguacccagccugggcgggauggagugguacgcguuugggacgugaaaaauccagaucuucugaacaaucaauucggcacaaugccgucauugacccucgccugucugacuaagcagggccaggucgacuuaaacgaugcugugcuggcacucacagaccuugggcugauuuacaccgccaaguaucccaauaguagcgacuuggaucgacuaucucaaucccauccuauccugaacaugguggacauuaaaaagucaagccucaauaucaguggauacaacuuuucucugggugcugccgucaaagcgggcgcaugcaugcuugaugggggaaauaugcuggagacgauaaagguuacuccacagaccauggacggcaucuugaaauccauucucaaggugaaaagaagccuggguauguucguaucggauacacccggggaaaggaacccuuaugagaacaucuuauacaagauuugucugucuggagacggcuggccauauaucgccucccggacuucaauagugggccgugcuugggaaaauaccacagucgaucuagagagugacgggaagccccagaaagugggaagcgccgguuccaacaagucucuccagagcgcaggcuuuccuaccgggcugacguacucacaacuuaugacuuugaaagauaguaugaugcagcuggacccauccgcuaagacauggauugauaucgagggacgcccggaagaccccguugagauugcccucuaccagccuaugagcggcugcuauauccacuucuuuagagaaccaaccgaccugaaacaguucaagcaagaugcgaaguacucucaugguaucgacguggccgaucuuuuucccgcacagccugggcugacuucagcugucauugaggccuugccaaggaauauggugcucacaugucagggcagugacgauauaaaacggcuguuagacagccagggacgacgcgauaucaagcugauugacaucgcucuauccaaagccgauucuagaagguucgaaaacgcaguaugggaccaaugcaaggaucucugucacaugcauaccggcguuguggucgagaaaaagaagcgcgggggaaaagaggaaauaacgccccacugcgcccugauggacuguauuauguaugaugcugcggugucggguggccuuaauaucccggucuugcgggcagugcugccuagagacaugguuuuuaggaccagcucccccaaggugguacucugaggacuaguaauaaggaaacuguaugaaugucugugggcaggaagugaagagauccuucuguaaagguuuuuggaauuaugucugcugaauaauaaacuuuuuugaaauaauaaaucugguagaaaaaugagaucuaaaaaaaaaaaaaaaaaaaaaaaaaaaaaaaaaaaaaaaaaaaaaaaaaaaaaaaaaaaaaaaaugcaucccccccccccccccccccccccccccccccaaaggcucuuuucagagccaccagaauu

SEQ ID NO: 10471 - RNA, 2050 nt, Artificial Sequence
  mRNA product Design b-4 comprising derived and/or modified sequence from LASV(LASV253-NIG-2011;Clade II)__AIT17671__NP (opt3)
gggagagucccgcagucggcguccagcggcucugcuuguucgugugugugucguugcaggccuuauucaagcuuaccaugagcgccuccaaggaggugaaaucuuuccuguggacccagucacucagaagggaacuuaguggcuacugcagcuccaucaagcugcaagucguuaaagacgcucaggcauuguuacacgggcuggauuuuucugaggugucgaacguacagcggcuaaugcgcaagcagaaacgagacgauucagaccucaagcgucugagagaucuuaaucaagccgugaacaaucuggucgaacuuaagagcacacagcagaaaagugugcucaggguuggaacucugacguccgacgaucugcucaccuuagcggcugaccuggagaaguugaaaucuaaggugauucggacagaacgccccuugagcuccggugucuauaugggcaaccugucaacucagcaacuagagcagagaagggcccuccugaauaugauagggauggugggaggcgcacaggguacccagccugggcgggauggaguaguucgcgugugggacgucaaaaacccagaucuucugaauaaccaauucggcacaaugccgaguuugacccucgccugucugacuaagcagggccagguggacuuaaaugaugugguccuggcucucacagaccuugggcugaucuacaccgcaaaguaucccaacagcucugacuuggaucgacuaucccaaucacauccuauucugaauaugguugacacgaaaaagagcagucucaacaucucuggauacaauuuuucccugggugccgcugugaaagccggcgcgugcaugcuugaugggggaaacaugcuggagacuauuaagguaaccccacagacaauggacggcaucuugaaaagcauacucaaggugaaaaagucgcuggguauguucgucucugauacucccggggaaagaaauccuuaugagaacaucuuauacaagauuugucuguccggagacggcuggccauauaucgcaucaaggaccaguauugugggccgggccugggaaaacacaaccguugaucuagagagcgacgggaaaccccagaaggugggaacggcugguuccaauaaaucucuccagagcgccggcuuuccuacugggcugacauacucacaacuuaugaccuugaaggauaguaugaugcagcuggacccauccgcaaaaacuuggaucgauauagagggacguccggaagaccccgucgagauugcucucuaccagccuaugagcggcugcuauauccacuucuuucgcgaaccaacagaccugaagcaguucaagcaagaugccaaauacucucaugguauugacgugaccgaucuuuuucccgcgcagccugggcugacgucagccguaaucgaggcauugccaagaaacaugguucucaccugucagggcagugacgauaucaagaggcuguuagacagccagggacggcgagauauuaaacugauagacaucgcucuauccaaggccgauucucgcagauucgaaaaugcugugugggaccaaugcaaagaucucugucacaugcauacaggcgucguggucgagaagaagaaaaggggagggaaggaggaaauuacuccccacugcgcccugauggacuguaucauguaugaugcagccgugucggguggccuuaacauaccgguuuugcgggcugugcugccucgcgacaugguauuuagaaccagcucccccaaagucgugcucugaggacuaguaauaaggaaacuguaugaaugucugugggcaggaagugaagagauccuucuguaaagguuuuuggaauuaugucugcugaauaauaaacuuuuuugaaauaauaaaucugguagaaaaaugagaucuaaaaaaaaaaaaaaaaaaaaaaaaaaaaaaaaaaaaaaaaaaaaaaaaaaaaaaaaaaaaaaaaugcaucccccccccccccccccccccccccccccccaaaggcucuuuucagagccaccagaauu

SEQ ID NO: 10472 - RNA, 2050 nt, Artificial Sequence
  mRNA product Design b-4 comprising derived and/or modified sequence from LASV(LASV254-NIG-2011;Clade II)__AIT17675__NP (opt3)
gggagagucccgcagucggcguccagcggcucugcuuguucgugugugugucguugcaggccuuauucaagcuuaccaugagcgccuccaaggaggugaaaucuuuccuguggacccagucacucagaagggaacuuaguggcuacugcagcuccaucaagcugcaagucguuaaagacgcucaggcauuguuacacgggcuggauuuuucugaggugucgaacguacagcggcuaaugcgcaagcagaaacgagacgauucagaccucaagcgucugagagaucuuaaucaagccgugaacaaucuggucgaacucaagagcacacagcagaaaaguguguugaggguuggaacucugacguccgacgaucugcucaccuuagcggcugaccuggagaaacuuaaaucuaaggugauucggacagaacgccccuugagcuccggugucuauaugggcaaccugucaacucagcaacuagagcagagaagggcccuccugaauaugauagggauggugggaggcgcacaggguacccagccugggcgggauggaguaguucgcgugugggacgucaaaaacccagaucuucugaauaaccaauucggcacaaugccgaguuugacccucgccugucugacuaagcagggccagguggacuuaaaugaugcugugcuggcacucacagaccuugggcugaucuacaccgccaaguaucccaacagcucugacuuggaucgacuaucccaaucacauccuauucugaauauggucgacacgaaaaagagcagucucaacaucucuggauacaauuuuucccugggugcugccguuaaagcgggcgcaugcaugcuugaugggggaaacaugcuggagacuauuaaggugaccccacagacaauggacggcaucuugaaaagcauacucaagguaaagaagucgcuggguauguucgugucugauacucccggggaaagaaauccuuaugagaacaucuuauacaagauuugucuguccggagacggcuggccauauaucgccucaaggaccaguauugucggccgggcuugggaaaacacaaucguggaucuagagagcgacgggaaaccccagaagguuggaaccgccgguuccaauaaaucucuccagagcgcaggcuuuccuacggggcugacuuacucacaacuuaugacauugaaggauaguaugaugcagcuggacccauccgcuaaaaccuggauagauauugagggacguccggaagaccccguggagaucgcccucuaccagccuaugagcggcugcuauauucacuucuuucgcgaaccaacugaccugaagcaguucaagcaagaugcgaaauacucucaugguaucgacgucgccgaucuuuuucccgcacagccugggcugacaucagcugugaucgaggccuugccaagaaacaugguacucaccugucagggcagugacgauauuaagaggcuguuagacagccagggacggcgagauauaaaacugaucgacauugcucuauccaaggccgauucucgcagauucgaaaaugcaguuugggaccaaugcaaagaucucugucacaugcauacgggcguggucguggagaagaagaaaaggggagggaaggaggaaaucacaccccacugcgcccugauggacuguauaauguaugaugcugcggucucggguggccuuaacauuccgguguugcgggcaguucugccucgcgacaugguguuuagaaccagcucccccaaaguaguccucugaggacuaguaauaaggaaacuguaugaaugucugugggcaggaagugaagagauccuucuguaaagguuuuuggaauuaugucugcugaauaauaaacuuuuuugaaauaauaaaucugguagaaaaaugagaucuaaaaaaaaaaaaaaaaaaaaaaaaaaaaaaaaaaaaaaaaaaaaaaaaaaaaaaaaaaaaaaaaugcaucccccccccccccccccccccccccccccccaaaggcucuuuucagagccaccagaauu

SEQ ID NO: 10473 - RNA, 2050 nt, Artificial Sequence
  mRNA product Design b-4 comprising derived and/or modified sequence from LASV(Nig08-04;Clade II)__ADU56611__NP (opt3)
gggagagucccgcagucggcguccagcggcucugcuuguucgugugugugucguugcaggccuuauucaagcuuaccaugagcgccuccaaggaggugaaaucuuuccuguggacccagucacucagaagggaacuuaguggcuacugcagcaacaucaagcugcaagucguuaaagacgcucaggcauuguuacacgggcuggauuuuuccgaggugucuaauguacagcggcuaaugcgcaagcagaaacgagacgauggagaccucaagcgucugagagaucuuaaccaagccgugaauaaccuggucgaauugaagucgacacagcagaaaucagugcucaggguugguacucugacgagcgacgaucugcucaccuuagcggcugaccuggagaaacuuaagaguaaggugauucggacagaacgccccuuguccucuggcgucuauauggggaaucugagcacucagcaacuagagcagagaaaagcccuccuguccaugauaggaauggugggcggugcacaggggacccagccuggaagggauggcguaguucgggugugggacgucaagaacccagaucuucugaauaaccaauucggcacaaugccgucauugacccucgccugucugacuaagcagggacagguggacuuaaaugaugcugugcuggcacucacagaccuugggcugaucuacaccgccaaauaucccaacaguagcgacuuggaucgccuaucucaaucccauccuauucugaauauggucgacacgaagaaaucaagccucaacaucagugguuacaauuuuucucugggcgcugccguuaaggcgggggcaugcaugcuugauggaggcaacaugcuggagacuauuaaagugaccccacagacaauggacgguaucuugaaguccauacucaaaguaaagcgaagccuggggauguucgugucggauacucccggagaaagaaauccuuaugagaacaucuuauacaagauuugucugucuggcgacggcuggccauauaucgccuccaggaccucaauugucgggcgggcuugggaaaacacaaccguggaucuagagagugacggaaaaccccagaagguugguacggccggcagcaauaaaucccuccagucugcaggguuuccuacuggacugacauacagccaacuuaugaccuugaaggauucaaugaugcagcuggacccaagugcuaaaacuuggaucgauauagagggccguccggaagaccccguggagauugcccucuaccagccuauguccgguugcuauauccacuucuuucgcgaaccaacagaccugaagcaguucaagcaagaugcgaaauacagccaugggauugacgucaccgaucuguuuucugcccagcccggccuuacgucagcagugaucgaggcuuugccuagaaacaugguacucaccugucagggaagugacgauaucaagaaacuguuagacagccagggcaggcgggauauuaagcugauagacaucucccuaaauaaagccgauucucgacgcuucgaaaacgcuguuugggaccaaugcaaggaucucugucacaugcauacagggguggucguggagaagaaaaagagaggagguaaagaggaaauuacuccacacugcgcccugauggacuguaucauguuugaugcagccgucucgggcgggcuuaauauacccauuuugagggcugugcugccgcgggacaugguuuuccgcaccagcuccccuaaggugguacucugaggacuaguaauaaggaaacuguaugaaugucugugggcaggaagugaagagauccuucuguaaagguuuuuggaauuaugucugcugaauaauaaacuuuuuugaaauaauaaaucugguagaaaaaugagaucuaaaaaaaaaaaaaaaaaaaaaaaaaaaaaaaaaaaaaaaaaaaaaaaaaaaaaaaaaaaaaaaaugcaucccccccccccccccccccccccccccccccaaaggcucuuuucagagccaccagaauu

SEQ ID NO: 10474 - RNA, 2053 nt, Artificial Sequence
  mRNA product Design b-4 comprising derived and/or modified sequence from LASV(GA391;Clade III)__AAA46284__NP (opt3)
gggagagucccgcagucggcguccagcggcucugcuuguucgugugugugucguugcaggccuuauucaagcuuaccaugagcgccuccaaggaggugagaucuugccuguggacccagucacucaggcgggaacuuaguggcuacuguagcaacaucaaacugcaagucguuaaggacgcucaggcauuguuacacgggcuggauuucuccgaggugucuaauguacagcgccuaaugcgaaaacagaagcgugacgauggagaccucaaaagacugagggaucuuaaccaagccgugaauaaccuggucgaauugaagucgacacagcagaagucagugcuccggguugguacucugagcagugacgaucugcucauuuuagcggcugaccuggagaaacuuaaguccaaagugacgcgcaccgaaagacccuugucuagcggcgucuauauggggaaucuguccucacagcaacuagaucagaggcgggcccuccugaacaugauaggaaugacaggcgugaguggugggggaaagggcgcaagcaauggcaucguacgcguuugggacgugaaaaacgccgagcuucugaauaaccaguuugggacuaugccuucuuugacccucgcuugccugacaaagcagggacaagucgauuuaaaugacgcagugcaggcccugaccgaucucggucuuauuuacacugcuaaguauccaaacuccucagaccuggaccgauugagccagagucauccgauccuaaauaugauugauaccaaaaagucuucccugaacaucagcggcuacaauuucucgcucggggccgcggugaaagcaggagccuguaugcuggacggcgguaacaugcuugagacaauaaaggucucuccccaaacgauggaugggauccugaaauccauuuugaagguuaaaaagucacucggaauguuugugagugacacuccuggcgaaagaaacccauaugagaauauccuguacaagauuugcuuaagcggcgaugggugguccuauaucgcuucuaggaccagcauaguaggacgggccugggaaaacacaguggucgaccuggagcaggauaauaaaccccagaagauugguaacggcgggucaaauaaaagucuacaguccgcaggauucgcugccggccucaucuacagccaacugaugacucuuaaggacuuuaaauguuucaacuugauuccuaaugcgaagaccuggauggauaucgagggucguccagaagaccccguggagaucgcccuguaccagccuucuucagggugcuauguucacuuuuuccgcgaaccaacagaucucaagcaguuuaaacaggacgcaaaguacagucauggcagagacgugaccgaucuguucgcugcccaaccgggacuuacgagcgcugucauugaggcccugcccaggaacauggugauaacuugucagggcuccgaagacauccggaaauugcucgagucucaggggcgacgcgauauuaagcugaucgacauaacauuaucgaaagcagauagcagaaaguuugagaaugccguaugggaccaguucaaggaucugugccacaugcauaccggaguuguggucgagaaaaagaaaagggguggcaaggaagaaauuacuccucacugugcucuaauggacugcaucauguuugaugcggcaguguccgggggacucgacgccaaaguccugcgggugguucuuccacgcgauaugguguucagaacaucaacccccaagguagucuugugaggacuaguaauaaggaaacuguaugaaugucugugggcaggaagugaagagauccuucuguaaagguuuuuggaauuaugucugcugaauaauaaacuuuuuugaaauaauaaaucugguagaaaaaugagaucuaaaaaaaaaaaaaaaaaaaaaaaaaaaaaaaaaaaaaaaaaaaaaaaaaaaaaaaaaaaaaaaaugcaucccccccccccccccccccccccccccccccaaaggcucuuuucagagccaccagaauu

SEQ ID NO: 10475 - RNA, 2050 nt, Artificial Sequence
  mRNA product Design b-4 comprising derived and/or modified sequence from LASV(Nig08-A19;Clade III)__ADU56619__NP (opt3)
gggagagucccgcagucggcguccagcggcucugcuuguucgugugugugucguugcaggccuuauucaagcuuaccaugagcgccuccaaggaggugaaaucuuuccuguggacccagucacucagaagggaacuuaguggcuacugcagcaacaucaagcugcaagucguuaaagacgcucaggcauuguuacacgggcuggauuuuuccgaggugucuaauguacagcggcuaaugcgcaagcagaaacgagacgauggagaccucaagcgucugagagaucuuaaccaagccgugaauaaccuggucgaauugaagucgacacagcagaaaucagugcucaggguugguacucugagcagugacgaucugcucguguuagcggcugaccuggagaaacuuaaguccaaggucgugcggacggaacgccccuugucuagcggcauuuauauggggaaucuguccucacagcaacuagaucagagaaaagcccuccugaacaugauaggaaugaccggcgguaaugggggaaggaacacaaccagugacggcaucguacggguuugggaugugaagaaugcagagcuucugaacaaucaguucggcacuaugccuagcuugacacucgccugucugaccaagcaggggcaagucgacuuaaacgaugcugugcaggcacugacugaccucggacuuauuuacacagccaaauauccaaauucuuccgaccuggaucgcuuggcucagucacauccgauccuaaacaugauugacaccaagaaaagcagucugaauaucucugguuacaacuuuucccucggcgccgcggugaaggcaggggccugcaugcuggauggaggcaacaugcuugagacgauaaaagucagcccccaaacuauggacgguauccugaagucgauuuugaaaguuaagcgaucucucgggauguucaucuccgauaccccuggagaaagaaauccauaugagaacauucuguacaagaucuguuuaucaggcgacggcuggcccuauauagcuaguaggacaagcauuguggggcgggccugggaaaauacuguaguggaucuggaguccgacaacaaaccucagaagaccggaaaugguggcucuaacaaaagccuacagucagcaggguuugcugccggacucacauacagucagcugaugacccuuaaggauuccauguugcaacuggacccaaaugcgaaaacguggauggauaucgagggccgucccgaagacccugucgagauugcccucuaccagccaagcucugguugcuauauccacuucuuucgcgaaccgacugaccugaagcaguucaagcaggaugcaaaauacucacaugggaucgacgugacagaucuuuuugcugcccaacccggccugaccagugcuguuauugaggccuugccuagaaacauggugauaacuugucagggaagcgaagacaucaggaagcuccuggagucccagggccggcgagauauuaaauuaaucgacauaucucugucgaaggucgauagccgcaaauucgagaaugcagugugggaccaguuuaaggaucuaugccacaugcauacagggauuguaguugaaaagaaaaagagaggagguaaagaggaaaucaccccacacugugcccucauggacugcaucauguucgaugcugcgguguccggcggggucgacgcaaaggugcugagggccguccuuccccgggauaugguguuucgcacgucaaccccuaaaguuguguugugaggacuaguaauaaggaaacuguaugaaugucugugggcaggaagugaagagauccuucuguaaagguuuuuggaauuaugucugcugaauaauaaacuuuuuugaaauaauaaaucugguagaaaaaugagaucuaaaaaaaaaaaaaaaaaaaaaaaaaaaaaaaaaaaaaaaaaaaaaaaaaaaaaaaaaaaaaaaaugcaucccccccccccccccccccccccccccccccaaaggcucuuuucagagccaccagaauu

SEQ ID NO: 10476 - RNA, 2050 nt, Artificial Sequence
  mRNA product Design b-4 comprising derived and/or modified sequence from LASV(G1180-SLE-2010;Clade IV)__AIT17169__NP (opt3)
gggagagucccgcagucggcguccagcggcucugcuuguucgugugugugucguugcaggccuuauucaagcuuaccaugagcgccuccaaggagaucaaaucuuuccuguggacccagucacucagaagggaacuuaguggcuacugcagcaacauuaagcugcaaguggucaaagacgcucaggcauuguuacacgggcuggauuuuuccgagguuucuaaugugcagcggcuaaugcgcaaggaacgacgugacgauaacgaccucaaaagacugagggaucuuaaucaggccguaaacaaucugguggaguugaagucgacacaacagaagucaauacuccgggucggaacucugacgagcgacgaucugcucaucuuagcggcugaccuggaaaaacuuaagaguaaagugauucgcaccgagagacccuuguccgccgguguuuauaugggcaaccugucuagccagcagcuagaucaaaggcgggcacuccuguccaugaucgggaugucaaguggaaaucagcgcgcccaggcuggccgagacgguguggucagagugugggauguaaagaacguugagcuucugaauaaccaguucgggacaaugccuagcuugacucucgcaugucugaccaaacaaggacagguggacuuaaaugaugccguccaggcucugacagaccucggccuuauuuacaccgccaaguauccaaacacuucugaccuggauagguugacacaaucccauccgauccuaaauaugauagacaccaagaaaucaagccugaacaucaguggcuacaauuuuucucucggggcggcagugaaggccggagcuugcaugcuggaugguggcaacaugcuugaaacgauuaaagugagcccccagacuauggacgggauccugaaguccauuuugaaagucaagaaagcccucggaauguucaucucggauaccccuggcgagcggaacccauaugaaaauauacuguacaagauuuguuuaucuggugacggguggcccuauaucgcaucccguacaucaauuacuggacgcgcuugggagaacaccguuguggaucuggagagugacggcaagccucagaaagccggcagcaauaacuccaauaagucucuacagagcguaggguuuacagcgggacucaccuacucacaacugaugacgcuuaaagaugccauguugcagcuggacccaaacgcaaagacuuggauggauaucgaagguagacccgaggacccuguggaaaucgcucucuaccagccaaguuccggcugcuauauucacuucuuuagggagccgacagaccugaaacaguucaagcaagaugccaaguacagccaugggauagacgucaccgaucuuuuugcugcccagcccggacugacuucugcagugaucgacgccuugccucggaauaugguuauuacaugucagggcucagaugacauccgaaaacuccuggaaagucagggucgcaaggauauaaaauuaauugacaucgcucugagcaagaccgauuccagaaaauaugagaacgcggugugggaccaauacaaggaucuaugccacaugcauacgggggucgugguagagaagaaaaagaggggcggaaaagaagagaucaccccacacugugcacucauggacugcauuauguucgaugccgcuguuucuggcgggcugaauacaucggugcuucgggccgucuugccccgcgacaugguguuuagaacuagcaccccuagggucgugcugugaggacuaguaauaaggaaacuguaugaaugucugugggcaggaagugaagagauccuucuguaaagguuuuuggaauuaugucugcugaauaauaaacuuuuuugaaauaauaaaucugguagaaaaaugagaucuaaaaaaaaaaaaaaaaaaaaaaaaaaaaaaaaaaaaaaaaaaaaaaaaaaaaaaaaaaaaaaaaugcaucccccccccccccccccccccccccccccccaaaggcucuuuucagagccaccagaauu

SEQ ID NO: 10477 - RNA, 2050 nt, Artificial Sequence
  mRNA product Design b-4 comprising derived and/or modified sequence from LASV(G1442-SLE-2011;Clade IV)__AIT17181__NP (opt3)
gggagagucccgcagucggcguccagcggcucugcuuguucgugugugugucguugcaggccuuauucaagcuuaccaugagcgccuccaaggaggugaaaucuuuccuguggacccagucacucagaagggaacuuaguggcuacugcagcaacaucaagcugcaagucguuaaagacgcucaggcauuguuacacgggcuggauuuuuccgaggugucuaauguacagcggcuaaugcgcaagcagcgacgugacgauaacgaccucaaaagacugagggaucuuaaucaagccgugaacaaucuggucgaauugaagucgacacagcagaagucagugcuccggguuggaacucugacgagcgacgaucugcucguguuagcggcugaccuggagaaacuuaagaguaaagucauucgcaccgaaagacccuuguccgccgguguguauaugggcaaccugucuagccagcaacuagaucagaggcgggcacuccugaauaugauagggauguccggaggcauccaggguacacgcacugggcgagacggaguaguuagagugugggaugucaagaacgccgaccuucugaauaaccaguucggcaccaugccuucauugacacucgcuugucugaccaaacaaggccagguggauuuaaaugacgugguccaggcacugacugaccucgggcuuauuuacacagccaaguauccaaacgcuagugaucuggacagguugacccaaagccauccgauccuaaauaugauugauacgaagaaaucuucccugaacaucucaggauacaauuuuagccucggugccgcgguuaaggcaggcgccugcaugcuggacgggggaaacaugcuugagacuauaaaagugaguccccagaccauggauggcauccugaagucuauuuugaaaguaaagaaaacacucgguauguucaucuccgacacuccuggggagcggaacccauaugaaaauauucuguacaagaucuguuuaagcggagauggcuggcccuauauagcuucgcguaccucuauuacaggccgcgccugggagaacaccguggucgaccuggaauccgaugggaagccucagaaagcaggaucaaauaacaguaauaagagccuacaguccgcugguuuugccgcgggccucacguacucucaacugaugacucuuaaagacgccauguugcagcuggauccaaacgcaaagacauggauggacaucgaggggagacccgaggacccuguggaaauugcucucuaccagccaagcucaggaugcuauauccacuucuuuagggagccgaccgaucugaaacaguucaagcaagacgccaaguacagucauggcaucgauguuacugaccuuuuugcugcccagcccggucugacauccgcagugauugaagccuugccucggaauauggucauaaccugucaggggagcgaugacaucaaaaagcuccuggagucucagggccgaaaagauauuaaguuaaucgacauagcucugucaaaaacggauagucgcaaguaugaaaacgcggugugggaccaauacaaggaucuaugccacaugcauaccggaguaguuguggagaaaaagaaaagaggcgggaaggaggaaauuacaccacacugugcacucauggacugcaucauguucgaugccgcugucagcggaggucugaauacucuuguguugagggccguccugccccgggacaugguguuucgcaccuccacaccuagaguugugcucugaggacuaguaauaaggaaacuguaugaaugucugugggcaggaagugaagagauccuucuguaaagguuuuuggaauuaugucugcugaauaauaaacuuuuuugaaauaauaaaucugguagaaaaaugagaucuaaaaaaaaaaaaaaaaaaaaaaaaaaaaaaaaaaaaaaaaaaaaaaaaaaaaaaaaaaaaaaaaugcaucccccccccccccccccccccccccccccccaaaggcucuuuucagagccaccagaauu

SEQ ID NO: 10478 - RNA, 2050 nt, Artificial Sequence
  mRNA product Design b-4 comprising derived and/or modified sequence from LASV(G3010-SLE-2013;Clade IV)__AIT17345__NP (opt3)
gggagagucccgcagucggcguccagcggcucugcuuguucgugugugugucguugcaggccuuauucaagcuuaccaugagcgccuccaaggagaucaaaucuuuccuguggacccagucacucagaagggaacuuaguggcuacugcagcaacauuaagcugcaaguggucaaagacgcucaggcauuguuacacgggcuggauuuuuccgagguuucuaaugugcagcggcuaaugcgcaaggaacgacgugacgauaacgaccucaaaagacugagggaucuuaaucaggccguaaacaaucugguggaguugaagucgacacaacagaagucaauacuccgggucggaacucugacgagcgacgaucugcucaucuuagcggcugaccuggaaaaacuuaagaguaaagugacccgcacagagagacccuuguccgccgguguuuauaugggcaaccugucuagccagcagcuagaucaaaggcgggcacuccuguccaugauugggaugucaaguggagugcagggcgcccgcgcuggucgagacggggucgugagaguaugggauguuaagaaugcagagcuucugaacaaucaguucggaacuaugccuagcuugacccucgccugucugacaaaacagggccaaguggacuuaaacgaugucgugcaggcucugaccgaccucggccuuaucuacacugccaaguauccaaauacaucugaccuggauagguugacccagucccauccgauucuaaacaugaucgacacgaagaaaucaagccugaauauaaguggguacaacuuuucucucggagcggcagugaaggccggugcuugcaugcuggauggcgggaauaugcuugaaacuaucaaagucagcccccaaaccauggacggaauuuugaaguccauccugaaaguuaagaaagcccucggcauguucauuucggagacaccuggugaacggaacccauaugagaacauccuguacaagauauguuuaucuggggauggauggcccuauauugcaucccguacuucaaucaccggccgcgcuugggagaauacagugguagaccuggaaagugauggcaagccucagaaagccgggagcaacaauuccaacaagucucuacagagcgcgggauuuaccgccggucucacguacucacagcugaugacucuuaaagacgcaauguugcaacuggauccaaaugcuaagacauggauggacauugagggcagacccgaagauccuguggaggucgcccucuaccagccaaguuccgggugcuauauccacuucuuuagggaaccgaccgaccugaaacaguucaagcaggacgcuaaguacagccauggaaucgaugugacugaccuuuuugccgcacaacccggccugacaucugccguuauugaugcuuugccucggaacauggugauaaccugucaggguucagacgauaucaaaaagcuccuggagagucaggggcgaaaagacauuaaguuaaucgauauagcgcugagcaaaacggacucccgcaaguaugagaaugcagucugggaucaguacaaggaccuaugccacaugcauaccggcgugguaguugagaaaaagaaaagaggaggcaaggaagaaauuacaccacacugugcccucauggauugcaucauguucgacgcugccgugucugggggacugaacacuucgguccuuagggcaguguugccccgggauauggucuuucgcaccagcacaccuagagugguucugugaggacuaguaauaaggaaacuguaugaaugucugugggcaggaagugaagagauccuucuguaaagguuuuuggaauuaugucugcugaauaauaaacuuuuuugaaauaauaaaucugguagaaaaaugagaucuaaaaaaaaaaaaaaaaaaaaaaaaaaaaaaaaaaaaaaaaaaaaaaaaaaaaaaaaaaaaaaaaugcaucccccccccccccccccccccccccccccccaaaggcucuuuucagagccaccagaauu

SEQ ID NO: 10479 - RNA, 2050 nt, Artificial Sequence
  mRNA product Design b-4 comprising derived and/or modified sequence from LASV(G502-SLE-2009;Clade IV)__AIT17127__NP (opt3)
gggagagucccgcagucggcguccagcggcucugcuuguucgugugugugucguugcaggccuuauucaagcuuaccaugagcgccuccaaggagaucaaaucuuuccuguggacccagucacucagaagggaacuuaguggcuacugcagcaacauuaagcugcaaguggucaaagacgcucaggcauuguuacacgggcuggauuuuuccgagguuucuaaugugcagcggcuaaugcgcaaggaacgacgugacgauaacgaccucaaaagacugagggaucuuaaucaggccguaaacaaucugguggaguugaagucgacacaacagaagucaauacuccgggucggaacucugacgagcgacgaucugcucaucuuagcggcugaccuggaaaaacuuaagaguaaagugauucgcaccgagagacccuuguccgccgguguuuauaugggcaaccugucuagccagcagcuagaucaaaggcgggcacuccuguccaugaucgggaugucaggaggcaaucagggugugcgcgccgggaaggacggagucgugcgaguaugggauguuaaaaacgcugagcuucugaauaaccaguucggcacaaugccuaguuugacucucgcaugucugaccaagcagggccaaguggacuuaaaugaugccguccaggcucugacagaccucgggcuuauuuacaccgccaaguauccaaacacuagcgaccuggauagauugacacagucucauccgauccuaaauaugauagacaccaaaaaguccucacugaacaucagcggauacaauuuuagucucggugcggcagugaaagccggcgcuugcaugcuggaugggggaaacaugcuugaaacgauuaaggugucuccccaaacuauggacggcauccugaaauccauuuugaaggucaaaaaggcccucgguauguucaucagcgauaccccuggggagaggaacccauaugaaaauauacuguacaagauuuguuuaucgggagacggcuggcccuauaucgcaucucggacauccauuacuggccgugcuugggagaacaccguuguggaucuggagucagacgggaaaccucagaaggccggaaguaauaacagcaauaaaucccuacagucugcggguuuuacagccggccucaccuacagccagcugaugacgcuuaaggaugcaauguugcaacuggacccaaacacuaaaacauggauggauaucgaagggcgccccgaggacccuguagaaaucgcucucuaccagccaucaaguggaugcuauauucacuucuuuagagagccgaccgaccugaagcaguucaagcaggaugccaaauacucccauggcauagacgugacugaucuuuuugcugcccaacccggucugacaagcgcagucaucgacgccuugccuaggaauauggugauuaccugucaggggucugaugacauccggaagcuccuggaaucacagggccgaaaagauauaaaguuaauugacaucgcucugaacaaaacggauagucgcaaguaugagaaugcgguuugggaccaguacaaggaucuaugccacaugcauaccggaguggucguggagaaaaagaaaagaggcgggaaggaagagaucacaccacacugugcacucauggacugcauuauguucgaugccgcuguaagcggaggucugaacacuuccguucuuagggccguguugccccgggacauggucuuucgcaccucuacaccuagagugguccugugaggacuaguaauaaggaaacuguaugaaugucugugggcaggaagugaagagauccuucuguaaagguuuuuggaauuaugucugcugaauaauaaacuuuuuugaaauaauaaaucugguagaaaaaugagaucuaaaaaaaaaaaaaaaaaaaaaaaaaaaaaaaaaaaaaaaaaaaaaaaaaaaaaaaaaaaaaaaaugcaucccccccccccccccccccccccccccccccaaaggcucuuuucagagccaccagaauu

SEQ ID NO: 10480 - RNA, 2050 nt, Artificial Sequence
  mRNA product Design b-4 comprising derived and/or modified sequence from LASV(G733-SLE-2010;Clade IV)__AIT17155__NP (opt3)
gggagagucccgcagucggcguccagcggcucugcuuguucgugugugugucguugcaggccuuauucaagcuuaccaugagcgccuccaaggagaucaaaucuuuccuguggacccagucacucagaagggaacuuaguggcuacugcagcaacauuaagcugcaaguggucaaagacgcucaggcauuguuacacgggcuggauuuuuccgagguuucuaaugugcagcggcuaaugcgcaaggaacgacgugacgauaacgaccucaaaagacugagggaucuuaaucaggccguaaacaaucugguggaguugaagucgacacaacagaagucaguccuccgggugggaacucugacgagcgacgaacugcucguuuuagcggcugaucuggagaaacuuaagaguaaagugauacgcaccgagagacccuuguccgccggugucuauaugggcaaccugucuagccagcagcuagaccaaaggcgggcacuccuguccaugaucgggaugucaggaggcaaucagggugcccgcacagggcgagauggagugguaagaguuugggacgugaagaacgcugaacuucugaauaaccaguucggcacuaugccuaguuugacccucgcaugucugacaaaacagggccaagucgauuuaaaugacgccgugcaggcucugaccgaucucgggcuuauuuacacugccaaguauccaaacacaagcgaccuggacagguugacccagucucauccgauccuaaauaugauugauacgaagaaauccucacugaacaucagcggauacaauuuuagucucggugcggcagugaaggccggcgcuugcaugcuggacgggggaaacaugcuugagacuauaaaagucucuccccaaaccauggauggcauccugaaguccauuuugaaaguuaagaaagcccucgguauguucaucagcgacacaccuggggaacggaacccauaugagaauauucuguacaagaucuguuuaucgggagauggcuggcccuauauagcaucucguacuuccauuaccggccgcgcuugggagaacacagugguagaccuggaaucagaugggaagccucagaaagccggaaguaauaacagcaauaagucccuacagucugcggguuuuaccgccggccucacguacagccagcugaugacucuuaaagacgcaauguugcaacuggauccaaacgcuaagacauggauggacaucgaggggagacccgaagauccuguggagauugcccucuaccagccaucaaguggaugcuauauccacuucuuuagggaaccgaccgaccugaaacaguucaagcaggacgcuaaguacucccauggcaucgaugucacugaccuuuuugccgcacaacccggucugacaagcgccgugauugaugcuuugccucggaauaugguuauaaccugucaggggucugacgauauccgaaaacuccuggagucacagggccgcaaggacauuaaauuaaucgauauagcgcugaguaagauugacagcagaaaauaugagaacgcagugugggaucaguacaaggaccuaugccacaugcauacgggagucgugguagaaaagaaaaagaggggcgggaaagaggaaaucaccccacacugugcccucauggauugcaucauguucgacgcugccguuuccggaggucuuaauucucugguguugcgggcaguccugccccgcgauaugguguuuagaacaucgacuccuagggucgugcucugaggacuaguaauaaggaaacuguaugaaugucugugggcaggaagugaagagauccuucuguaaagguuuuuggaauuaugucugcugaauaauaaacuuuuuugaaauaauaaaucugguagaaaaaugagaucuaaaaaaaaaaaaaaaaaaaaaaaaaaaaaaaaaaaaaaaaaaaaaaaaaaaaaaaaaaaaaaaaugcaucccccccccccccccccccccccccccccccaaaggcucuuuucagagccaccagaauu

SEQ ID NO: 10481 - RNA, 2050 nt, Artificial Sequence
  mRNA product Design b-4 comprising derived and/or modified sequence from MOPV/LASV reassortant(IGS-1;Clade IV)__AFY05578__NP (opt3)
gggagagucccgcagucggcguccagcggcucugcuuguucgugugugugucguugcaggccuuauucaagcuuaccaugagcgccuccaaggagaucaaaucuuuccuguggacccagucacucagaagggaacuuaguggcuacugcagcaacauuaagcugcaaguggucaaagacgcucaggcauuguuacacgggcuggauuuuuccgagguuucuaaugugcagcggcuaaugcgcaaggaacgacgugacgauaacgaccucaaaagacugagggaucuuaaucaggccguaaacaaucugguggaguugaagucgacacaacagaagucaauacuccgggucggaacucugacgagcgacgaucugcucaucuuagcggcugaccuggaaaaacuucgcaguaaggugauuagaaccgagaggcccuuguccgccgguguuuauaugggcaaccugucuagccagcagcuagaucaacggcgcgcacuccugaauaugaucgggauguccggaggcaaccagggugcccgagcugggagagacggaguggucagggugugggauguuaaaaaugcagagcuucugucaaaccaguucggcacaaugccuaguuugacucucgccugucugaccaagcagggccaaguagacuuaaaugaugcugugcaggcccugacagaccucgggcuuauuuacaccgcgaaauauccaaacacuagcgaccuggaucgguugacacagucucauccgauccuaaauaugauagacaccaagaaguccucacugaacaucagcggauacaauuuuagucucggugcagccgucaaagcuggcgccugcaugcuggaugggggaaacaugcuugaaacgauuaaggugucuccccaaacuauggacggcauccugaaauccauuuugaaggugaaaaaggcacucgguauguucaucagcgauaccccuggggagcguaacccauaugaaaauauacuguacaaaauuuguuuaucgggagacggcuggcccuauaucgcuucucgcacauccauuacuggcagagccugggagaacaccgucguugaucuggagucagacgggaagccucagaaggcggauaguaauaacagcuccaaaucucuacagagcgccggauuuacagcaggucucaccuacucacagcugaugacgcuuaaggacgcuauguugcaacuggauccaaaugccaaaacuuggauggacaucgaaggcaggcccgaggacccuguggaaaucgcucucuaccagccaaguuccgggugcuauauucacuucuuucgggagccgacagaucugaagcaguucaaacaggacgccaaguacagccauggaauagauguaaccgaccuuuuugcaacucaacccggccugacaucugccgugaucgaugcuuugccucgaaacauggucauuaccugucaggguucagacgauauccgcaagcuccuggaaagucaggggagaaaagacauaaaguuaauugauaucgaccugagcaaaacggauuccaggaaguaugagaaugcggugugggaccaguacaaagaucuaugccacaugcauaccggcguuguggucgagaagaagaaacggggaggcaaggaagagaucacaccacacugugcacucauggacugcauuauguucgacgccgcugugucugggggacugaacacuucgguacuucgcgccguuuugcccagagauaugguguuuaggaccagcacaccucgugucgugcugugaggacuaguaauaaggaaacuguaugaaugucugugggcaggaagugaagagauccuucuguaaagguuuuuggaauuaugucugcugaauaauaaacuuuuuugaaauaauaaaucugguagaaaaaugagaucuaaaaaaaaaaaaaaaaaaaaaaaaaaaaaaaaaaaaaaaaaaaaaaaaaaaaaaaaaaaaaaaaugcaucccccccccccccccccccccccccccccccaaaggcucuuuucagagccaccagaauu

SEQ ID NO: 10482 - RNA, 2050 nt, Artificial Sequence
  mRNA product Design b-4 comprising derived and/or modified sequence from LASV(LM765-SLE-2012;Clade IV)__AIT17815__NP (opt3)
gggagagucccgcagucggcguccagcggcucugcuuguucgugugugugucguugcaggccuuauucaagcuuaccaugagcgccuccaaggagaucaaaucuuuccuguggacccagucacucagaagggaacuuaguggcuacugcagcaacauuaagcugcaaguggucaaagacgcucaggcauuguuacacgggcuggauuuuuccgagguuucuaaugugcagcggcuaaugcgcaaggaacgacgugacgauaacgaccucaaaagacugagggaucuuaaucaggccguaaacaaucugguggaguugaagucgacacaacagaagucaauacuccgggucggaacucugacgagcgacgaucugcucaucuuagcggcugaccuggaaaaacuuaagaguaaagugacccgcacagagagacccuuguccgccgguguuuauaugggcaaccugucuagccagcagcuagaucaaaggcgggcacuccuggacaugauugggauguccggaucaaaucagggcgcccgcgcuggucgagaugggguggucagagugugggacguaaagaacgcagagcuucugaauaaccaguucggaacuaugccuaguuugacccucgccugucugacaaaacagggccaaguugauuuaaaugacgcugugcaggcccugaccgaccucggccuuaucuacacugcgaaguauccaaacacaagcgaucuggacagguugacccagucucauccgauucuaaauaugaucgauacgaagaaauccucacugaacauaagcggguacaauuuuagucucggagcagccgucaaggcuggugccugcaugcuggacggcgggaacaugcuugaaacuaucaaagugucuccccaaaccauggauggcauucugaaguccaucuugaaagugaagaaagcacucggaauguucauuagcgacgcuccuggugagcggaacccauaugaaaauauccuguacaagauauguuuaucgggggauggauggcccuauauugccucucguacauccaucacuggccgcgcgugggagaacaccgucguugaccuggagucagauggcaagccucagaaagccgggaguaauggaagcaacaagucccuacagucugcagguuuuacagcuggccucaccuacagccagcugaugacgcuuaaagacgccauguugcaacuggauccaaaugcuaagacuuggauggacauugaagggagacccgaggacccuguggaaaucgcccucuaccagccaucaaguggaugcuauauccacuucuuuagggagccgacagaucugaaacaguucaagcaggacgcaaaguacucccauggcauugauguaaccgaccuuuuugccgcucaacccggucugacuagcgcggugauagaugcauugccucggaacauggucaucacaugucaggggucugacgauauucgaaaacucuucgaaucacagggccgcaaggacaucaaacugauagauauugccuuaaguaagaccgacagcagaaaauaugagaaugcugugugggaucaguacaaggaccugugccacaugcauacgggaaucguuguggagaagaaaaagaggggcgggaaagaagagaucaccccacacugugcccuaauggauugcauuauguuugacgcagccgucuccggaggucucaacacaucugugcugcgggcuguacuuccccgcgacaugguuuucagaacuucgaccccuaggguggucuugugaggacuaguaauaaggaaacuguaugaaugucugugggcaggaagugaagagauccuucuguaaagguuuuuggaauuaugucugcugaauaauaaacuuuuuugaaauaauaaaucugguagaaaaaugagaucuaaaaaaaaaaaaaaaaaaaaaaaaaaaaaaaaaaaaaaaaaaaaaaaaaaaaaaaaaaaaaaaaugcaucccccccccccccccccccccccccccccccaaaggcucuuuucagagccaccagaauu

SEQ ID NO: 10483 - RNA, 2050 nt, Artificial Sequence
  mRNA product Design b-4 comprising derived and/or modified sequence from LASV(LM776-SLE-2012;Clade IV)__AIT17825__NP (opt3)
gggagagucccgcagucggcguccagcggcucugcuuguucgugugugugucguugcaggccuuauucaagcuuaccaugagcgccuccaaggagaucaaaucuuuccuguggacccagucacucagaagggaacuuaguagcuacugcuccaacauuaagcugcaaguggucaaagacgcucaggcauuguuacacggccuggauuuuucugagguuucgaaugugcagcggcuaaugcgcaaggaacgacgugacgauaacgaccucaaaagacugagggaucuuaaucaggccguaaacaaucugguggaguugaagucaacacaacagaagaguauacuccgggucgggacucugacgagugacgaucugcucaucuuagcggcugaccuggaaaaacuuaaguccaaagugacccgcacagagagacccuugucugccggaguuuauauggguaaccugagcucccagcagcuagaucaaaggcgggcacuccugucaaugauuggcaugagugggagcaaucagggagcccgcgcuggccgagacgguguggucagagugugggauguaaagaacgcagagcuucugaauaaccaguucgggacuaugccuucuuugacccucgccugucugacaaaacagggacaaguugacuuaaaugaugcugugcaggcccugaccgaccucggccuuaucuacacugcgaaguauccaaacacauccgaccuggauagguugacccagucacauccgauucuaaauaugaucgacacgaagaaaagcagucugaacauaucuggcuacaauuuuucccucggggcagccgucaaggcuggagccugcaugcuggaugguggcaacaugcuugaaacuaucaaagugagcccccaaaccauggacgggauucugaagucgaucuugaaagugaagaaagcacucggaauguucauuucugauacaccuggcgagcggaacccauaugaaaauauccuguacaagauauguuuauccggugacggguggcccuauauugcuucacguacuagcaucaccggacgcgccugggagaacacagucguugaucuggagagcgacggcaagccucagaaagcgggcuccaauaacucuaauaagagccuacagucagccggguuuaccgcaggacucacguacagucagcugaugacucuuaaagaugcuauguugcaacuggacccaaacgccaagacauggauggauauugaagguagacccgaggacccuguggaaguagcucucuaccagccauccagcggcugcuauauccacuucuuuagggagccgaccgaccugaaacaguucaagcaggaugccaaguacucucaugggaucgacgugacugaucuuuuugcagcccaacccggacugacaucagcugucauugacgcguugccucggaauauggugauaaccugucagggcagugaugacauccgaaaacuccuggaaagccagggucgcaaggauauuaaauuaaucgacauagcacuguccaagacggauucuagaaaauaugagaacgccguuugggaccaguacaaggaucuaugccacaugcauaccgggguggucguggagaagaaaaagaggggcggaaaagaagagauuacaccacacugugcucucauggacugcaucauguucgaugccgcaguaucgggcgggcugaauacuagcguucuucgggccguguugccccgcgacauggucuuuagaaccuccacaccuagggugguccugugaggacuaguaauaaggaaacuguaugaaugucugugggcaggaagugaagagauccuucuguaaagguuuuuggaauuaugucugcugaauaauaaacuuuuuugaaauaauaaaucugguagaaaaaugagaucuaaaaaaaaaaaaaaaaaaaaaaaaaaaaaaaaaaaaaaaaaaaaaaaaaaaaaaaaaaaaaaaaugcaucccccccccccccccccccccccccccccccaaaggcucuuuucagagccaccagaauu

SEQ ID NO: 10484 - RNA, 2050 nt, Artificial Sequence
  mRNA product Design b-4 comprising derived and/or modified sequence from LASV(Mad39;Clade IV)__ANH09723__NP (opt3)
gggagagucccgcagucggcguccagcggcucugcuuguucgugugugugucguugcaggccuuauucaagcuuaccaugagcgccuccaaggagaucaaaucuuuccuguggacccagucacucagaagggaacuuaguggcuacugcagcaacauuaagcugcaaguggucaaagacgcucaggcauuguuacacgggcuggauuuuuccgagguuucuaaugugcagcggcuaaugcgcaagcagcgacgugacgauaacgaccucaaaagacugagggaucuuaaucaagccguaaacaaucugguggaauugaagucgacacagcagaagucaguccuccgggugggaacucugacgagcgacgaucugcucaccuuagcggcugaccuggagaaacuuaagaguaaaguuacacgcacugaaagacccuugaccgccgguguguauaugggcaaccuguccucucagcaacuagaucagaggcgggcacuccugaauaugauagggaugagcggaggcaaccagggugcccgcacagggcgagacggagucgugagaguaugggauguuaagaaugcugagcuucugaacaaucaguucggcaccaugccuuccuugacucucgcaugucugacaaaacaaggccagguggacuuaaacgaugucgugcaggcccugaccgaccucgggcuuaucuacacggcuaaguauccaaauacuucagaccuggauagguugacccaaagucauccgauucuaaacaugaucgacacaaauaagagcucucugaacauuuccggauacaacuuuucacucggugccgcggugaaagcaggcgccugcaugcuggaugggggaaauaugcuugagacuaucaaggucagcccccagaccauggacggcauacugaaaaguaucuugaagguuaaaaagucucucgguauguucauuuccgauacaccuggggaacggaacccauaugagaauauccuguacaaaauuuguuuaagcggagacggcuggcccuauaucgcuucgcguaccucuauaacgggccgcgccugggaaaacacugugguagaucuggaguccgggggaaagccucagaaggcagguucaaauaacaguaauaaaagccuacaguccgcuggcuuugccgcggggcucacauacucucaacugaugacccuuaaggacgccauguugcagcuggauccaaacgcaaaaacuuggauggacauugagggaagacccgaagauccuguggagaucgcucucuaccagccaauuagcggcugcuauauccacuucuuuagggaaccgacagaccugaagcaguucaaacaagacgccaaguacucacaugguaucgaugucaccgaccuuuuugcugcccagcccgggcugacgagugcagugauugaggccuugccucggaauaugguuauaaccugucagggcuccgaugacauccgaaaacucuucgaaagccagggacgcaaggauauuaagcugaucgacauagcuuuaucuaaaacagauucaagaaaguaugagaacgcggugugggaccaauacaaagaucugugccacaugcauacuggcgucgugguagagaagaagaaaaagggagggaaagaagagauuaccccacacugugcacuaauggacugcaucauguuugaugccgcuguuagugguggccucaauacacuggugcuuagggccgucuugccccgggacaugguguuccgcacuagcaccccuaaggucgugcugugaggacuaguaauaaggaaacuguaugaaugucugugggcaggaagugaagagauccuucuguaaagguuuuuggaauuaugucugcugaauaauaaacuuuuuugaaauaauaaaucugguagaaaaaugagaucuaaaaaaaaaaaaaaaaaaaaaaaaaaaaaaaaaaaaaaaaaaaaaaaaaaaaaaaaaaaaaaaaugcaucccccccccccccccccccccccccccccccaaaggcucuuuucagagccaccagaauu

SEQ ID NO: 10485 - RNA, 2050 nt, Artificial Sequence
  mRNA product Design b-4 comprising derived and/or modified sequence from LASV(Z0947-SLE-2011;Clade IV)__AIT17841__NP (opt3)
gggagagucccgcagucggcguccagcggcucugcuuguucgugugugugucguugcaggccuuauucaagcuuaccaugagcgccuccaaggagaucaaaucuuuccuguggacccagucacucagaagggaacuuaguggcuacugcagcaacauuaagcugcaaguggucaaagacgcucaggcauuguuacacgggcuggauuuuuccgagguuucuaaugugcagcggcuaaugcgcaaggaacgacgugacgauaacgaccucaaaagacugagggaucuuaaucaggccguaaacaaucugguggaguugaagucgacacaacagaagucaauacuccgggucggaacucugacgagcgacgaucugcucaucuuagcggcugaccuggaaaaacuuaagaguaaagugacccgcacagagagacccuuguccgccgguguuuauaugggcaaccugucuagccagcagcuagaucaaaggcgggcacuccugaauaugauugggauguccggaucaaaccagggcgcccgcacuggucgagacgggguggucagagugugggauguaaagaaugcugagcuucugaacaaucaguucggaaccaugccuaguuugacacucgcaugucugaccaaacagggccaaguugacuuaaacgaugccgugcaggcucugacugaccucggccuuaucuacacagccaaguauccaaauaccagcgaccuggauagguugacgcagucucauccgauucuaaacaugaucgacacuaagaaauccucacugaauauaagcggguacaacuuuagucucggagcggcagucaaggccggugcuugcaugcuggauggcgggaacaugcuugaaaccaucaaagugucuccccaaacaauggacggcauucugaaguccaucuugaaagugaagaaagcccucggaauguucauuagcgaugcaccuggugagcggaauccauaugaaaacauccuguacaagauauguuuaucgggggacggauggcccuauauugcuucucguacuuccaucaccggccgcgccugggagaauacagucguugaucuggagucagacggcaagccucagaaagcggggaguaacggaagcaauaagucccuacagucugccgguuuuaccgcaggccucacguacagccagcugaugacucuuaaagaugcuauguugcaacuggacccaaacgccaagacauggauggauauugaagggagacccgaggacccuguggaaaucgcucucuaccagccaucaaguggaugcuauauccacuucuuuagggagccgaccgaccugaaacaguucaagcaggaugccaaguacucccauggcauugacguaacugaucuuuuugcagcccaacccggucugacaagcgcugugauagacgcguugccucggaauauggucaucaccugucaggggucugaugacauucgaaaacucuucgaaucacagggccgcaaggauaucaaacugauagacauugcauuaaguaagacggauagcagaaaauaugagaacgccgugugggaccaguacaaggaucugugccacaugcauaccggaaucguuguggagaagaaaaagaggggcgggaaagaagagaucacaccacacugugcucuaauggacugcauuauguuugaugccgcagucuccggaggucucaauacuucugugcugcgggccguacuuccccgcgacaugguuuucagaaccucgacaccuaggguggucuugugaggacuaguaauaaggaaacuguaugaaugucugugggcaggaagugaagagauccuucuguaaagguuuuuggaauuaugucugcugaauaauaaacuuuuuugaaauaauaaaucugguagaaaaaugagaucuaaaaaaaaaaaaaaaaaaaaaaaaaaaaaaaaaaaaaaaaaaaaaaaaaaaaaaaaaaaaaaaaugcaucccccccccccccccccccccccccccccccaaaggcucuuuucagagccaccagaauu

SEQ ID NO: 10486 - RNA, 2050 nt, Artificial Sequence
  mRNA product Design b-4 comprising derived and/or modified sequence from LASV(Josiah;Clade IV)__NP_694869__NP (opt4)
gggagagucccgcagucggcguccagcggcucugcuuguucgugugugugucguugcaggccuuauucaagcuuaccaugagcgccagcaaggagaucaagagcuuccuguggacccagagccugagaagagagcugagcggcuacugcagcaacaucaagcugcagguggugaaggacgcccaggcccugcugcacggccuggacuucagcgaggugagcaacgugcagagacugaugagaaaggagagaagagacgacaacgaccugaagagacugagagaccugaaccaggccgugaacaaccugguggagcugaagagcacccagcagaagagcauccugagagugggcacccugaccagcgacgaccugcugauccuggccgccgaccuggagaagcugaagagcaaggugaucagaaccgagagaccccugagcgccggcguguacaugggcaaccugagcagccagcagcuggaccagagaagagcccugcugaacaugaucggcaugagcggcggcaaccagggcgccagagccggcagagacggcguggugagagugugggacgugaagaacgccgagcugcugaacaaccaguucggcaccaugcccagccugacccuggccugccugaccaagcagggccagguggaccugaacgacgccgugcaggcccugaccgaccugggccugaucuacaccgccaaguaccccaacaccagcgaccuggacagacugacccagagccaccccauccugaacaugaucgacaccaagaagagcagccugaacaucagcggcuacaacuucagccugggcgccgccgugaaggccggcgccugcaugcuggacggcggcaacaugcuggagaccaucaaggugagcccccagaccauggacggcauccugaagagcauccugaaggugaagaaggcccugggcauguucaucagcgacacccccggcgagagaaaccccuacgagaacauccuguacaagaucugccugagcggcgacggcuggcccuacaucgccagcagaaccagcaucaccggcagagccugggagaacaccgugguggaccuggagagcgacggcaagccccagaaggccgacagcaacaacagcagcaagagccugcagagcgccggcuucaccgccggccugaccuacagccagcugaugacccugaaggacgccaugcugcagcuggaccccaacgccaagaccuggauggacaucgagggcagacccgaggaccccguggagaucgcccuguaccagcccagcagcggcugcuacauccacuucuucagagagcccaccgaccugaagcaguucaagcaggacgccaaguacagccacggcaucgacgugaccgaccuguucgccacccagcccggccugaccagcgccgugaucgacgcccugcccagaaacauggugaucaccugccagggcagcgacgacaucagaaagcugcuggagagccagggcagaaaggacaucaagcugaucgacaucgcccugagcaagaccgacagcagaaaguacgagaacgccgugugggaccaguacaaggaccugugccacaugcacaccggcguggugguggagaagaagaagagaggcggcaaggaggagaucaccccccacugcgcccugauggacugcaucauguucgacgccgccgugagcggcggccugaacaccagcgugcugagagccgugcugcccagagacaugguguucagaaccagcacccccagaguggugcugugaggacuaguaauaaggaaacuguaugaaugucugugggcaggaagugaagagauccuucuguaaagguuuuuggaauuaugucugcugaauaauaaacuuuuuugaaauaauaaaucugguagaaaaaugagaucuaaaaaaaaaaaaaaaaaaaaaaaaaaaaaaaaaaaaaaaaaaaaaaaaaaaaaaaaaaaaaaaaugcaucccccccccccccccccccccccccccccccaaaggcucuuuucagagccaccagaauu

SEQ ID NO: 10487 - RNA, 2050 nt, Artificial Sequence
  mRNA product Design b-4 comprising derived and/or modified sequence from LASV(LP;Clade I)__AAF86702__NP (opt4)
gggagagucccgcagucggcguccagcggcucugcuuguucgugugugugucguugcaggccuuauucaagcuuaccaugagcaacagcaaggagaucaagagcuuccuguggacccagagccugagaagagagcugagcggcuacugcagcaacaucaagcugcagguggugaaggacgcccaggcccugcugcacggccuggacuucagcgaggugagcaacgugcagagacugaugagaaagcagaagagagacgacgccgaccugaagagacugagagaccugaaccaggccgugaacaaccugguggagcugaagagcacccagcagaagaacgugcugagagugggcacccugagcagcgacgaccugaucacccuggccgccgaccuggagaagcugaagagcaaggugaucagaaccgagagaccccugagcagcggcguguacaugggcaaccugagcagccagcagcuggaccagagaagagcccugcugagcaugaucggcaugagcggcggcccccagggcaacagaaccggcggcgacggcguggugagagugugggacgugaagaacgccgagcugcugaacaaccaguucggcaccaugcccagccugacccuggccugccugaccaagcagggccagguggaccugaacgacgccgugcaggcccugaccgaccugggccugaucuacaccgccaaguaccccaacagcagcgaccuggacaugcugacccagagccaccccauccugggcaugguggacaccaagaagagcagccugaacaucagcggcuacaacuucagccugggcgccgccgugaaggccggcgccugcaugcuggacggcggcaacaugcuggagaccaucaaggugagcccccagaccauggacggcauccugaagagcauccugaaggugaagagaagccugggcauguucaucagcgacacccccggcgagagaaaccccuacgagaacauccuguacaagaucugccugagcggcgagggcuggcccuacaucgccagcagaaccagcaucaccggcagagccugggagaacacccugguggaccuggagagcgacaacaagccccccaagcugaacagcgccggcagcaacaagagccugcaggccgccggccugaacgccggccugaccuacagccagcugaugacccugaaggacugcaugcugcagcuggaccccagcagcaagaccuggaucgacaucgagggcagacccgaggaccccguggagaucgcccuguuccagcccagcagcggcugcuacauccacuucuucagagagcccaccgaccugaagcaguucaagcaggacgccaaguacagccacggcaucgacgugaccgaccuguucagcacccagcccggccugaccagcgccgugaucgaggcccugcccagaaacauggugcugaccugccagggcagcgacgacaucaagaagcugcuggagagccagggcagaagagacaucaagcugaucgacaucagccugagcaaggccgacagcagaaaguucgagaacgccgugugggaccaguacaaggaccugugccacaugcacaccggcguggugguggagaagaagaagagaggcggcaaggaggagaucaccccccacugcgcccugcuggacugcaucauguucgacgccgccaccaccggcagccugaacaucaccacccugagagccgugcugcccagagacaugguguucagaaccagcacccccaagguggugcugugaggacuaguaauaaggaaacuguaugaaugucugugggcaggaagugaagagauccuucuguaaagguuuuuggaauuaugucugcugaauaauaaacuuuuuugaaauaauaaaucugguagaaaaaugagaucuaaaaaaaaaaaaaaaaaaaaaaaaaaaaaaaaaaaaaaaaaaaaaaaaaaaaaaaaaaaaaaaaugcaucccccccccccccccccccccccccccccccaaaggcucuuuucagagccaccagaauu

SEQ ID NO: 10488 - RNA, 2050 nt, Artificial Sequence
  mRNA product Design b-4 comprising derived and/or modified sequence from LASV(803213;Clade II)__AAF86704__NP (opt4)
gggagagucccgcagucggcguccagcggcucugcuuguucgugugugugucguugcaggccuuauucaagcuuaccaugagcgccagcaaggaggugaagagcuuccuguggacccagagccugagaagagagcugagcggcuacugcagcaacaucaagcugcagguggugaaggacgcccaggcccugcugcacggccuggacuucagcgaggugaacaacgugcagagacugaugagaaagcagaagagagacgacggcgaccugaagagacugagagaccugaaccaggccgugaacaaccugguggagcugaagagcacccagcagaagagcauccugagagugggcacccugaccagcgacgaccugcugacccuggccgccgaccuggagaagcugaagagcaaggugaucagaaccgagagaccccugagcagcggcguguacaugggcaaccugagcacccagcagcuggagcagagaagagcccugcugaacaugaucggcauggugggcggcgcccagggcacccagcccggcagagacggcguggugagagugugggacgugaagaaccccgaccugcugaacaaccaguucggcaccaugcccagccugacccuggccugccugaccaagcagggccagguggaccugaacgacgccgugcuggcccugaccgaccugggccugaucuacaccgccaaguaccccaacagcagcgaccuggacagacugagccagagccaccccauccugaacaugguggacaccaagaagagcagccugaacaucagcggcuacaacuucagccugggcgccgccgugaaggccggcgccugcaugcuggacggcggcaacaugcuggagaccaucaaggugaccccccagaccauggacggcauccugaagagcauccugaaggugaagagaagccugggcauguucgugagcgacacccccggcgagagaaaccccuacgagaacauccuguacaagaucugccugagcggcgacggcuggcccuacaucgccagcagaaccagcaucgugggcagagccugggagaacaccaccguggaccuggagagcgacggcaagccccagaaggugggcaccgccggcagcaacaagagccugcagagcgccggcuuccccaccggccugaccuacagccagcugaugacccugaaggacagcaugaugcagcuggaccccagcgccaagaccuggaucgacaucgagggcagacccgaggaccccguggagaucgcccuguaccagcccaugagcggcugcuacauccacuucuucagagagcccaccgaccugaagcaguucaagcaggacgccaaguacagccacggcaucgacguggccgaccuguuccccgcccagcccggccugaccagcgccgugaucgaggcccugcccagaaacauggugcugaccugccagggcagcgacgacaucaagaagcugcuggacagccagggcagaagagacaucaagcugaucgacaucagccugagcaagguggacagcagaaaguucgagaacgccgugugggaccagugcaaggaccugugccacaugcacaccggcguggugguggagaagaagaagagaggcggcaaggaggagaucaccccccacugcgcccugauggacugcaucauguucgacgccgccgugagcggcggccugaacauccccgugcugagagccgugcugcccagagacaugguguucagaaccagcagccccaagguggugcugugaggacuaguaauaaggaaacuguaugaaugucugugggcaggaagugaagagauccuucuguaaagguuuuuggaauuaugucugcugaauaauaaacuuuuuugaaauaauaaaucugguagaaaaaugagaucuaaaaaaaaaaaaaaaaaaaaaaaaaaaaaaaaaaaaaaaaaaaaaaaaaaaaaaaaaaaaaaaaugcaucccccccccccccccccccccccccccccccaaaggcucuuuucagagccaccagaauu

SEQ ID NO: 10489 - RNA, 2053 nt, Artificial Sequence
  mRNA product Design b-4 comprising derived and/or modified sequence from LASV(GA391;Clade III)__CAA36646__NP (opt4)
gggagagucccgcagucggcguccagcggcucugcuuguucgugugugugucguugcaggccuuauucaagcuuaccaugagcgccagcaaggaggugagaagcuuccuguggacccagagccugagaagagagcugagcggcuacugcagcaacaucaagcugcagguggugaaggacgcccaggcccugcugcacggccuggacuucagcgaggugagcaacgugcagagacugaugagaaagcagaagagagacgacggcgaccugaagagacugagagaccugaaccaggccgugaacaaccugguggagcugaagagcacccagcagaagagcgugcugagagugggcacccugagcagcgacgaccugcugauccuggccgccgaccuggagaagcugaagagcaaggugaccagaaccgagagaccccugagcagcggcguguacaugggcaaccugagcagccagcagcuggaccagagaagagcccugcugaacaugaucggcaugaccggcgugagcggcggcggcaagggcgccagcgacggcaucgugagagugugggacgugaagaacgccgagcugcugaacaaccaguucggcaccaugcccagccugacccuggccugccugaccaagcagggccagguggaccugaacgacgccgugcaggcccugaccgaccugggccugaucuacaccgccaaguaccccaacagcagcgaccuggacagacugagccagagccaccccauccugaacaugaucgacaccaagaagagcagccugaacaucagcggcuacaacuucagccugggcgccgccgugaaggccggcgccugcaugcuggacggcggcaacaugcuggagaccaucaaggugagcccccagaccauggacggcauccugaagagcauccugaaggugaagaagagccugggcauguucgugagcgacacccccggcgagagaaaccccuacgagaacauccuguacaagaucugccugagcggcgacggcuggcccuacaucgccagcagaaccagcaucgugggcagagccugggagaacaccgugguggaccuggagcaggacaacaagccccagaagaucggcaacggcggcagcaacaagagccugcagagcgccggcuucgccgccggccugaccuacagccagcugaugacccugaaggacuucaagugcuucaaccugauccccaacgccaagaccuggauggacaucgagggcagacccgaggaccccguggagaucgcccuguaccagcccagcagcggcugcuacgugcacuucuucagagagcccaccgaccugaagcaguucaagcaggacgccaaguacagccacggcaucgacgugaccgaccuguucgccgcccagcccggccugaccagcgccgugaucgaggcccugcccagaaacauggugaucaccugccagggcagcgaggacaucagaaagcugcuggagagccagggcagaagagacaucaagcugaucgacaucacccugagcaaggccgacagcagaaaguucgagaacgccgugugggaccaguucaaggaccugugccacaugcacaccggcguggugguggagaagaagaagagaggcggcaaggaggagaucaccccccacugcgcccugauggacugcaucauguucgacgccgccgugagcggcggccuggacgccaaggugcugagaguggugcugcccagagacaugguguucagaaccagcacccccaagguggugcugugaggacuaguaauaaggaaacuguaugaaugucugugggcaggaagugaagagauccuucuguaaagguuuuuggaauuaugucugcugaauaauaaacuuuuuugaaauaauaaaucugguagaaaaaugagaucuaaaaaaaaaaaaaaaaaaaaaaaaaaaaaaaaaaaaaaaaaaaaaaaaaaaaaaaaaaaaaaaaugcaucccccccccccccccccccccccccccccccaaaggcucuuuucagagccaccagaauu

SEQ ID NO: 10490 - RNA, 2050 nt, Artificial Sequence
  mRNA product Design b-4 comprising derived and/or modified sequence from LASV(AV;Clade V)__CCA30315__NP (opt4)
gggagagucccgcagucggcguccagcggcucugcuuguucgugugugugucguugcaggccuuauucaagcuuaccaugagcgccagcaaggaggugaagagcuuccuguggacccagagccugagaagagagcugagcggcuacugcagcaacaucaagcugcagguggugaaggacgcccaggcccugcugcacggccuggacuucagcgaggugagcaacgugcagagacugaugagaaagcagagaagagacgacagcgaccugaagagacugagagaccugaaccaggccgugaacaaccugguggagcugaagagcacccagcagaagagcgugcugagagugggcacccugagcagcgacgaccugcugacccuggccgccgaccuggagaagcugaagagcaaggugaccagaaccgagagaccccugagcagcggcguguacaugggcaaccugagcagccagcagcuggaccagagaagagcccugcugaaccugaucggcaugaccaacggcagccagggcagccaggccggcagagacggcguggugagagugugggacgugaagaacgccgagcugcugaacaaccaguucggcaccaugcccagccugacccuggccugccugaccaagcagggccagguggaccugaacgacguggugcaggcccugaccgaccugggccugaucuacaccgccaaguaccccaacaccagcgaccuggacagacugacccagagccaccccauccugaacaugaucgacaccaagaagagcagccugaacaucagcggcuacaacuucagccugggcgccgccgugaaggccggcgccugcaugcuggacggcggcaacaugcuggagaccaucaaggugagcccccagagcauggacggcauccugaagagcauccugaaggugaagagagcccugggcauguucgugagcgacacccccggcgagagaaaccccuacgagaacauccuguacaagaucugccugagcggcgacggcuggcccuacaucgccagcagaaccagcaucgugggcagagccugggagaacaccgugguggaccuggagaccgacggcaagccccagaagaucggcagcggcaacagcaacaagagccugcagagcgccggcuucagcgccggccugaccuacagccagcugaugacccugaaggacgccaugcugcagcuggaccccaacgccaagaccuggauggacaucgagggcagacccgaggaccccguggagguggcccuguaccagcccaucagcggcugcuacauccacuucuucagagagcccaccgaccugaagcaguucaagcaggacgccaaguacagccacggcaucgacaucgccgaccuguucgccgcccagcccggccugaccagcgccgugaucgaggcccugcccagaaacauggugaucaccugccagggcagcgaggacaucaagaagcugcuggagagccagggcagaaaggacaucaagcugaucgacaucgcccugagcaagaucgacagcagaaaguucgagaacgccgugugggaccaguacaaggaccugugccacaugcacaccggcguggugguggagaagaagaagagaggcggcaaggaggagaucaccccccacugcgcccugauggacugcaucauguucgacgccgccgugagcggcggccugaacacccuggugcugagagccgugcugcccagagacaugguguucagaaccagcacccccagaguggugcugugaggacuaguaauaaggaaacuguaugaaugucugugggcaggaagugaagagauccuucuguaaagguuuuuggaauuaugucugcugaauaauaaacuuuuuugaaauaauaaaucugguagaaaaaugagaucuaaaaaaaaaaaaaaaaaaaaaaaaaaaaaaaaaaaaaaaaaaaaaaaaaaaaaaaaaaaaaaaaugcaucccccccccccccccccccccccccccccccaaaggcucuuuucagagccaccagaauu

SEQ ID NO: 10491 - RNA, 2050 nt, Artificial Sequence
  mRNA product Design b-4 comprising derived and/or modified sequence from LASV(Togo/2016/7082;Clade VI)__AMR44578__NP (opt4)
gggagagucccgcagucggcguccagcggcucugcuuguucgugugugugucguugcaggccuuauucaagcuuaccaugagcaacagcaaggaggugaagagcuuccuguggacccagagccugagaagagagcugagcggcuacugcagcaacaucaagcugcagguggugaaggacgcccaggcccugcugcacggccuggacuucagcgaggugagcaacgugcagagacugaugagaaagcagaagagagacgacggcgaccugaagagacugagagaccugaaccaggccgugaacaaccugguggagcugaagagcgugcagcagaagagcauccugagagugggcacccugaccagcgacgaccugcugacccuggccgccgaccuggagaagcugaagagcaaggugaccagaaccgagagaccccugagcagcggcguguacaugggcaaccugagcagccagcagcuggaccagagaagagcccugcugagcaugaucggcaugagcggcggcaaccagaacagccagcccaagggcgacggcguggugagagugugggacgugaagaacgccgaccugcugaacaaccaguucggcaccaugcccagccugacccuggccugccugaccaagcagggccagguggaccugaacgacgccgugcaggcccugaccgaccugggccugaucuacaccgccaaguaccccaacagcagcgaccuggacagacugagccagagccaccccauccugaacaugaucgacaccaagaagagcagccugaacaucagcggcuacaacuucagccugggcgccgccaucaagaccggcgccugcaugcuggacggcggcaacaugcuggagaccaucaaggugaccccccagaccauggacggcauccugaagagcauccugaaggugaagagaagccugggcauguucaucagcgacacccccggcgagagaaaccccuacgagaacauccuguacaagaucugccugagcggcgacggcuggcccuacaucgccagcagaaccgccaucaucggcagagccugggagaacaccgugguggaccuggagagcgacagcaagccccagaagaucggcagcaacggcagcaacaagagccugcagagcgccggcuucgcccccggccugaccuacagccagcugaugacccugaaggacagcaugcugcagcuggaccccaacgccaagaccuggaucgacaucgagggcagacccgaggaccccguggagguggcccuguuccagcccaucagcggcugcuacauccacuucuucagagagcccaccgaccugaagcaguucaagcaggacgccaaguacagccacggcaucgacgugaccgaccuguucgccgcccagcccggccugaccagcgccgugaucgaggcccugcccagaaacauggugcugaccugccagggcagcgacgacaucaagaagcugcuggacagccagggcagaagagacaucaagcugaucgacgugagccugaacaagaucgacagcagaaaguucgagaacgccgugugggaccaguacaaggaccugugccacaugcacaccggcguggugguggagaagaagaagaagggcggcaaggaggagaucaccccccacugcgcccugcuggacugcaucauguucgacgccgccgugagcggcggccugaacgccaccgugcugagagccgugcugcccagagacaugguguucagaaccagcagccccaagguggugcugugaggacuaguaauaaggaaacuguaugaaugucugugggcaggaagugaagagauccuucuguaaagguuuuuggaauuaugucugcugaauaauaaacuuuuuugaaauaauaaaucugguagaaaaaugagaucuaaaaaaaaaaaaaaaaaaaaaaaaaaaaaaaaaaaaaaaaaaaaaaaaaaaaaaaaaaaaaaaaugcaucccccccccccccccccccccccccccccccaaaggcucuuuucagagccaccagaauu

SEQ ID NO: 10492 - RNA, 2050 nt, Artificial Sequence
  mRNA product Design b-4 comprising derived and/or modified sequence from LASV(KAK-428;Clade n.d. (VII))__ANH09741__NP (opt4)
gggagagucccgcagucggcguccagcggcucugcuuguucgugugugugucguugcaggccuuauucaagcuuaccaugagcaacagcaaggaggugaagagcuuccuguggacccagagccugagaagagagcugagcggcuacugcaccaacaucaagcugcagguggugaaggacgcccaggcccugcugcacggccuggacuucagcgaggugagcaacgugcagagacugaugagaaagcagaagagagacgacaacgaccugaagagacugagagaccugaaccaggccgugaacaaccugguggagcugaagagcgugcagcagaagagcgugcugaaggugggcacccugaacagcgacgaccugcugacccuggccgccgaccuggagaagcugaagagcaagguggugagaaccgagagaccccugagcagcggcguguacaugggcaaccugagcagccagcagcuggaccagagaagagcccugcugaacaugaucggcauggccggcggcagccagggcaaccagcccagcagagacggcguggugagagugugggacgugaagaacgccgaccugcugaacaaccaguucggcaccaugcccagccugacccuggccugccugaccaagcagggccagguggaccugaacgacguggugcuggcccugaccgaccugggccugaucuacaccgccaaguaccccaacagcagcgaccuggacagacugagccagaaccaccccgugcugaacaugaucgacgugaacaagagcagccugaacaucagcggcuacaacuucagccugggcgccgccgugaaggccggcgccugcaugcuggacggcggcaacaugcuggagaccaucaagaucagcccccagaccguggacggcauccugaagagcauccugaaggugaagagagcccugggcauguucgugagcgacacccccggcgagagaaaccccuacgagaacauccuguacaaggugugccugagcggcaacggcuggcccuacaucgccagcagaaccagcaucgugggcagagccugggagaacaccgugguggaccuggagagcaacaagaaccagcccaaggugggcaacaacggcagcaacaagaugcugcagagcagcggcuucgccaccggccugaccuacagccagcugaugacccugagagacagcaugcugcagcuggaccccaccgccaagaccuggaucgacaucgagggcagacccgaggaccccguggagcuggcccuguuccagcccagcagcggcugcuacauccacuucuucagagagcccaccgaccugaagcaguucaagcaggacgccaaguacagccacggcaucgacgugaacgaccuguucagcgcccagcccggccugaccagcgccgugcuggaggcccugcccagaaacauggugcugaccugccagggcagcgacgacaucagaaagcugcuggacagccaggacagaaaggacaucaagcugaucgacaucagccugagcaaggccgacgccagaaaguucgagaacgacgugugggaccaguucaaggaccugugccacaugcacaccggcaucgugguggagaagaagaagaagggcggcaagcaggagaugaccccccacugcgcccugcuggacugcaucauguucgacgccgccgugagcggcggccugaacgugcccacccugagagccgugcugcccaccgacaugguguucagaaccaucaccaccaagguggugcugugaggacuaguaauaaggaaacuguaugaaugucugugggcaggaagugaagagauccuucuguaaagguuuuuggaauuaugucugcugaauaauaaacuuuuuugaaauaauaaaucugguagaaaaaugagaucuaaaaaaaaaaaaaaaaaaaaaaaaaaaaaaaaaaaaaaaaaaaaaaaaaaaaaaaaaaaaaaaaugcaucccccccccccccccccccccccccccccccaaaggcucuuuucagagccaccagaauu

SEQ ID NO: 10493 - RNA, 2050 nt, Artificial Sequence; identical to SEQ ID NO: 10487
  mRNA product Design b-4 comprising derived and/or modified sequence from LASV(Pinneo-NIG-1969;Clade I)__AIT17837__NP (opt4)

SEQ ID NO: 10494 - RNA, 2050 nt, Artificial Sequence
  mRNA product Design b-4 comprising derived and/or modified sequence from LASV(ISTH0009-NIG-2011;Clade II)__AIT17405__NP (opt4)
gggagagucccgcagucggcguccagcggcucugcuuguucgugugugugucguugcaggccuuauucaagcuuaccaugagcgugagcaaggaggugaagagcuuccuguggacccagagccugagaagagagcugagcggcuacugcagcaacaucaagcugcagguggugaaggacgcccaggcccugcugcacggccuggacuucagcgaggugagcaacgugcagagacugaugagaaagcagaagagagacgacagcgaccugaagagacugagagaccugaaccaggccgugaacaaccugguggagcugaagagcacccagcagaagagcauccugagagugggcacccugaccagcgacgaccugcugacccuggccgccgaccuggagaagcugaagagcaaggugaucagaaccgagagaccccugagcagcggcguguacaugggcaaccugagcacccagcagcuggagcagagaagagcccugcugaacaugaucggcauggugggcggcgcccagggcacccagcccggcagagacggcguggugagagugugggacgugaagaaccccgaccugcugaacaaccaguucggcaccaugcccagccugacccuggccugccugaccaagcagggccagguggaccugaacgacgccgugcuggcccugaccgaccugggccugaucuacaccgccaaguaccccaacagcagcgaccuggacagacugagccagagccaccccauccugaacaugguggacaucaagaagagcagccugaacaucagcggcuacaacuucagccugggcgccgccgugaaggccggcgccugcaugcuggacggcggcaacaugcuggagaccaucaaggugaccccccagaccauggacggcauccugaagagcauccugaaggugaagagaagccugggcauguucgugagcgacacccccggcgagagaaaccccuacgagaacauccuguacaagaucugccugagcggcgacggcuggcccuacaucgccagcagaaccagcaucgugggcagagccugggagaacaccaccguggaccuggagagcgacggcaagccccagaaggugggcagcgccggcagcaacaagagccugcagagcgccggcuuccccaccggccugaccuacagccagcugaugacccugaaggacagcaugaugcagcuggaccccagcgccaagaccuggaucgacaucgagggcagacccgaggaccccguggagaucgcccuguaccagcccaugagcggcugcuacauccacuucuucagagagcccaccgaccugaagcaguucaagcaggacgccaaguacagccacggcaucgacguggccgaccuguuccccgcccagcccggccugaccagcgccgugaucgaggcccugcccagaaacauggugcugaccugccagggcagcgacgacaucaagagacugcuggacagccagggcagaagagacaucaagcugaucgacaucgcccugagcaaggccgacagcagaagauucgagaacgccgugugggaccagugcaaggaccugugccacaugcacaccggcguggugguggagaagaagaagagaggcggcaaggaggagaucaccccccacugcgcccugauggacugcaucauguacgacgccgccgugagcggcggccugaacauccccgugcugagagccgugcugcccagagacaugguguucagaaccagcagccccaagguggugcugugaggacuaguaauaaggaaacuguaugaaugucugugggcaggaagugaagagauccuucuguaaagguuuuuggaauuaugucugcugaauaauaaacuuuuuugaaauaauaaaucugguagaaaaaugagaucuaaaaaaaaaaaaaaaaaaaaaaaaaaaaaaaaaaaaaaaaaaaaaaaaaaaaaaaaaaaaaaaaugcaucccccccccccccccccccccccccccccccaaaggcucuuuucagagccaccagaauu

SEQ ID NO: 10495 - RNA, 2050 nt, Artificial Sequence
  mRNA product Design b-4 comprising derived and/or modified sequence from LASV(ISTH2010-NIG-2012;Clade II)__AIT17483__NP (opt4)
gggagagucccgcagucggcguccagcggcucugcuuguucgugugugugucguugcaggccuuauucaagcuuaccaugagcgccagcaaggaggugaagagcuuccuguggacccagagccugagaagagagcugagcggcuacugcagcaacaucaagcugcagguggugaaggacgcccaggcccugcugcacggccuggacuucagcgaggugagcaacgugcagagacugaugagaaagcagaagagagacgacagcgaccugaagagacugagagaccugaaccaggccgugaacaaccugguggagcugaagagcacccagcagaagagcauccugagagugggcacccugaccagcgacgaccugcugacccuggccgccgaccuggagaagcugaagagcaaggugaucagaaccgagagaccccugagcagcggcguguacaugggcaaccugagcacccagcagcuggagcagagaagagcccugcugaaccugaucggcauggugggcggcgcccagggcacccagcccggcagagacggcguggugagagugugggacgugaagaaccccgaccugcugaacaaccaguucggcaccaugcccagccugacccuggccugccugaccaagcagggccagguggaccugaacgacgccgugcuggcccugaccgaccugggccugaucuacaccgccaaguaccccaacagcagcgaccuggacagacugagccagagccaccccauccugaacaugguggacaccaagaagagcagccugaacaucagcggcuucaacuucagccugggcgccgccgugaaggccggcgccugcaugcuggacggcggcaacaugcuggagaccaucaaggugaccccccagaccauggacggcauccugaagagcauccugaaggugaagaagagccugggcauguucgugagcgacacccccggcgagagaaaccccuacgagaacauccuguacaagaucugccugagcggcgacggcuggcccuacaucgccagcagaaccagcaucgugggcagagccugggagaacaccaccguggaccuggagagcgacggcaagccccacaaggugggcaccgccggcagcaacaagagccugcagagcgccggcuuccccaccggccugaccuacagccagcugaugacccugaaggacagcaugaugcagcuggaccccagcgccaagaccuggaucgacaucgagggcagacccgaggaccccguggagaucgcccuguaccagcccaugagcggcugcuacauccacuucuucagagagcccaccgaccugaagcaguucaagcaggacgccaaguacagccacggcaucgacguggccgaccuguuccccgcccagcccggccugaccagcgccgugaucgaggcccugcccagaaacauggugcugaccugccagggcagcgacgacaucaagagacugcuggacagccagggcagaagagacaucaagcugaucgacaucgcccugagcaaggccgacagcagaagauucgagaacgccgugugggaccagugcaaggaccugugccacaugcacaccggcguggugguggagaagaagaagagaggcggcaaggaggagaucaccccccacugcgcccugauggacugcaucauguacgacgccgccgugagcggcggccugaacauccccgugcugagagccgugcugcccagagacaugguguucagaaccagcagccccaagguggugcugugaggacuaguaauaaggaaacuguaugaaugucugugggcaggaagugaagagauccuucuguaaagguuuuuggaauuaugucugcugaauaauaaacuuuuuugaaauaauaaaucugguagaaaaaugagaucuaaaaaaaaaaaaaaaaaaaaaaaaaaaaaaaaaaaaaaaaaaaaaaaaaaaaaaaaaaaaaaaaugcaucccccccccccccccccccccccccccccccaaaggcucuuuucagagccaccagaauu

SEQ ID NO: 10496 - RNA, 2050 nt, Artificial Sequence
  mRNA product Design b-4 comprising derived and/or modified sequence from LASV(Lassa virus/H.sapiens-wt/NGA/2015/ISTH_0543;Clade II)__AVO03640__NP (opt4)
gggagagucccgcagucggcguccagcggcucugcuuguucgugugugugucguugcaggccuuauucaagcuuaccaugagcgccagcaaggaggugaagagcuuccuguggacccagagccugagaagagagcugagcggcuacugcagcaacaucaagcugcagguggugaaggacgcccaggcccugcugcacggccuggacuucagcgaggugagcaacgugcagagacugaugagaaagcagaagagagacgacagcgaccugaagagacugagagaccugaaccaggccgugaacaaccugguggagcugaagagcacccagcagaagagcauccugagagugggcacccugaccagcgacgaccugcugacccuggccgccgaccuggagaagcugaagagcaaggugaucagaaccgagagaccccugagcagcggcguguacaugggcaaccugagcacccagcagcuggagcagagaagagcccugcugaacaugaucggcauggugggcggcgcccagggcacccagcccggcagagacggcguggugagagugugggacgugaagaaccccgaccugcugaacaaccaguucggcaccaugcccagccugacccuggccugccugaccaagcagggccagguggaccugaacgacgccgugcuggcccugaccgaccugggccugaucuacaccgccaaguaccccaacagcagcgaccuggacagacugagccagagccaccccauccugaacaugguggacaccaagaagagcagccugaacaucagcggcuacaacuucagccugggcgccgccgugaaggccggcgccugcaugcuggacggcggcaacaugcuggagaccaucaaggugaccccccagaccauggacggcauccugaagagcauccugaaggugaagaagagccugggcauguucgugagcgacacccccggcgagagaaaccccuacgagaacauccuguacaagaucugccugagcggcgacggcuggcccuacaucgccagcagaaccagcaucgugggcagagccugggagaacaccaccguggaccuggagagcgacggcaagccccagaaggugggcagcgccggcagcaacaagagccugcagagcgccggcuuccccaccggccugaccuacagccagcugaugacccugaaggacagcaugaugcagcuggaccccagcgccaagaccuggaucgacaucgagggcagacccgaggaccccguggagaucgcccuguaccagcccaugagcggcugcuacauccacuucuucagagagcccaccgaccugaagcaguucaagcaggacgccaaguacagccacggcaucgacguggccgaccuguuccccgcccagcccggccugaccagcgccgugaucgaggcccugcccagaaacauggugcugaccugccagggcagcgacgacaucaagagacugcuggacagccagggcagaaaggacaucaagcugaucgacaucgcccugagcaaggccgacagcagaagauucgagaacgccgugugggaccagugcaaggaccugugccacaugcacaccggcguggugguggagaagaagaagagaggcggcaaggaggagaucaccccccacugcgcccugauggacugcaucauguacgacgccgccgugagcggcggccugaacauccccgugcugagagccgugcugcccagagacaugguguucagaaccagcagccccaagguggugcugugaggacuaguaauaaggaaacuguaugaaugucugugggcaggaagugaagagauccuucuguaaagguuuuuggaauuaugucugcugaauaauaaacuuuuuugaaauaauaaaucugguagaaaaaugagaucuaaaaaaaaaaaaaaaaaaaaaaaaaaaaaaaaaaaaaaaaaaaaaaaaaaaaaaaaaaaaaaaaugcaucccccccccccccccccccccccccccccccaaaggcucuuuucagagccaccagaauu

SEQ ID NO: 10497 - RNA, 2050 nt, Artificial Sequence
  mRNA product Design b-4 comprising derived and/or modified sequence from LASV(Lassa virus/H.sapiens-wt/NGA/2016/ISTH_0009;Clade II)__AVO03572__NP (opt4)
gggagagucccgcagucggcguccagcggcucugcuuguucgugugugugucguugcaggccuuauucaagcuuaccaugagcgccagcaaggaggugaagagcuuccuguggacccagagccugagaagagagcugagcggcuacugcagcaacaucaagcugcagguggugaaggacgcccaggcccugcugcacggccuggacuucagcgaggugagcaacgugcagagacugaugagaaagcagaagagagacgacagcgaccugaagagacugagagaccugaaccaggccgugaacaaccugguggagcugaagagcacccagcagaagagcauccugagagugggcacccugaccagcgacgaccugcugacccuggccgccgaccuggagaagcugaagagcaaggugaucagaaccgagagaccccugagcagcggcguguacaugggcaaccugagcacccagcagcuggagcagagaagagcccugcugaacaugaucggcauggugggcggcgcccagggcacccagcccggcagagacggcguggugagagugugggacgugaagaaccccgaccugcugaacaaccaguucggcaccaugcccagccugacccuggccugccugaccaagcagggccagguggaccugaacgacgccgugcuggcccugaccgaccugggccugaucuacaccgccaaguaccccaacagcagcgaccuggacagacugagccagagccaccccauccugaacaugguggacaccaagaagagcagccugaacaucagcggcuacaacuucagccugggcgccgccgugaaggccggcgccugcaugcuggacggcggcaacaugcuggagaccaucaaggugaccccccagaccauggacggcauccugaagagcauccugaaggugaagaagagccugggcauguucgugagcgacacccccggcgagagaaaccccuacgagaacauccuguacaagaucugccugagcggcgacggcuggcccuacaucgccagcagaaccagcaucgugggcagagccugggagaacaccaccguggaccuggagagcgacggcaagccccagaaggugggcagcgccggcagcaacaagagccugcagagcgccggcuuccccaccggccugaccuacagccagcugaugacccugaaggacagcaugaugcagcuggaccccagcgccaagaccuggaucgacaucgagggcagacccgaggaccccguggagaucgcccuguaccagcccaugagcggcugcuacauccacuucuucagagagcccaccgaccugaagcaguucaagcaggacgccaaguacagccacggcaucgacguggccgaccuguuccccgcccagcccggccugaccagcgccgugaucgaggcccugcccagaaacauggugcugaccugccagggcagcgacgacaucaagagacugcuggacagccagggcagaagagacaucaagcugaucgacaucgcccugagcaaggccgacagcagaagauucgagaacgccgugugggaccagugcaaggaccugugccacaugcacaccggcguggugguggagaagaagaagagaggcggcaaggaggagaucaccccccacugcgcccugauggacugcaucauguacgacgccgccgugagcggcggccugaacauccccgugcugagagccgugcugcccagagacaugguguucagaaccagcagccccaagguggugcugugaggacuaguaauaaggaaacuguaugaaugucugugggcaggaagugaagagauccuucuguaaagguuuuuggaauuaugucugcugaauaauaaacuuuuuugaaauaauaaaucugguagaaaaaugagaucuaaaaaaaaaaaaaaaaaaaaaaaaaaaaaaaaaaaaaaaaaaaaaaaaaaaaaaaaaaaaaaaaugcaucccccccccccccccccccccccccccccccaaaggcucuuuucagagccaccagaauu

SEQ ID NO: 10498 - RNA, 2050 nt, Artificial Sequence
  mRNA product Design b-4 comprising derived and/or modified sequence from LASV(Lassa virus/H.sapiens-wt/NGA/2016/ISTH_0017;Clade II)__AVO03568__NP (opt4)
gggagagucccgcagucggcguccagcggcucugcuuguucgugugugugucguugcaggccuuauucaagcuuaccaugagcgccagcaaggaggugaagagcuuccuguggacccagagccugagaagagagcugagcggcuacugcagcagcaucaagcugcagguggugaaggacgcccaggcccugcugcacggccuggacuucagcgaggugagcaacgugcagagacugaugagaaagcagaagagagacgacagcgaccugaagagacugagagaccugaaccaggccgugaacaaccugguggagcugaagagcacccagcagaagagcauccugagagugggcacccugaccagcgacgaccugcugacccuggccgccgaccuggagaagcugaagagcaaggugaucagaaccgagagaccccugagcagcggcguguacaugggcaaccugagcacccagcagcuggagcagagaagagcccugcugaacaugaucggcauggccggcggcgcccagggcacccagcccggcagagacggcguggugagagugugggacgugaagaaccccgaccugcugaacaaccaguucggcaccaugcccagccugacccuggccugccugaccaagcagggccagguggaccugaacgacgccgugcuggcccugaccgaccugggccugaucuacaccgccaaguaccccaacagcagcgaccuggacagacugagccagagccaccccauccugaacaugguggacaccaagaagagcagccugaacaucagcggcuacaacuucagccugggcgccgccgugaaggccggcgccugcaugcuggacggcggcaacaugcuggagaccaucaaggugaccccccagaccauggacggcauccugaagagcauccugaaggugaagagaagccugggcauguucgugagcgacgcccccggcgagagaaaccccuacgagaacauccuguacaagaucugccugagcggcgacggcuggcccuacaucgccagcagaaccagcaucgugggcagagccugggagaacaccaccguggaccuggagagcgacggcaagccccagaaggugggcgccaccggcagcaacaagagccugcagagcgccggcuuccccaccggccugaccuacagccagcugaugacccugaaggacagcaugaugcagcuggaccccagcgccaagaccuggaucgacaucgagggcagacccgaggaccccguggagguggcccuguaccagcccgugagcggcugcuacauccacuucuucagagagcccaccgaccugaagcaguucaagcaggacgccaaguacagccacggcaucgacguggccgaccuguuccccgcccagcccggccugaccagcgccgugaucgaggcccugcccagaaacauggugcugaccugccagggcagcgacgacaucaagaagcugcuggacagccagggcagaaaggacaucaagcugaucgacaucgcccugagcaaggccgacagcagaagauucgagaacgccgugugggaccagugcaaggaccugugccacaugcacaccggcguggugguggagaagaagaagagaggcggcaaggaggagaucaccccccacugcgcccugauggacugcaucauguacgacgccgccgugagcggcggccugaacauccccgugcugagagccgugcugcccagagacaugguguucagaaccagcagccccaagguggugcugugaggacuaguaauaaggaaacuguaugaaugucugugggcaggaagugaagagauccuucuguaaagguuuuuggaauuaugucugcugaauaauaaacuuuuuugaaauaauaaaucugguagaaaaaugagaucuaaaaaaaaaaaaaaaaaaaaaaaaaaaaaaaaaaaaaaaaaaaaaaaaaaaaaaaaaaaaaaaaugcaucccccccccccccccccccccccccccccccaaaggcucuuuucagagccaccagaauu

SEQ ID NO: 10499 - RNA, 2050 nt, Artificial Sequence
  mRNA product Design b-4 comprising derived and/or modified sequence from LASV(Lassa virus/H.sapiens-wt/NGA/2018/ISTH_0959;Clade II)__AVV65100__NP (opt4)
gggagagucccgcagucggcguccagcggcucugcuuguucgugugugugucguugcaggccuuauucaagcuuaccaugagcgccagcaaggaggugaagagcuuccuguggacccagagccugagaagagagcugagcggcuacugcagcaacaucaagcugcagguggugaaggacgcccaggcccugcugcacggccuggacuucagcgaggugagcaacgugcagagacugaugagaaagcagaagagagacgacagcgaccugaagagacugagagaccugaaccaggccgugaacaaccugguggagcugaagagcacccagcagaagagcauccugagagugggcacccugaccagcgacgaccugcugacccuggccgccgaccuggagaagcugaagagcaaggugaucagaaccgagagaccccugagcagcggcguguacaugggcaaccugagcacccagcagcuggagcagagaagagcccugcugaaccugaucggcauggugggcggcgcccagggcacccagcccggcagagacggcguggugagagugugggacgugaagaaccccgaccugcugaacaaccaguucggcaccaugcccagccugacccuggccugccugaccaagcagggccagguggaccugaacgacguggugcuggcccugaccgaccugggccugaucuacaccgccaaguaccccaacagcagcgaccuggacagacugagccagagccaccccauccugaacaugguggacaccaagaagagcagccugaacaucagcggcuucaacuucagccugggcgccgccgugaaggccggcgccugcaugcuggacggcggcaacaugcuggagaccaucaaggugaccccccagaccauggacggcauccugaagagcauccugaaggugaagaagagccugggcauguucgugagcgacacccccggcgagagaaaccccuacgagaacauccuguacaagaucugccugagcggcgacggcuggcccuacaucgccagcagaaccagcaucgugggcagagccugggagaacaccaccguggaccuggagagcgacggcaagccccacaaggugggcaccgccggcagcaacaagagccugcagagcgccggcuuccccaccggccugaccuacagccagcugaugacccugaaggacagcaugaugcagcuggaccccagcgccaagaccuggaucgacaucgagggcagacccgaggaccccguggagaucgcccuguaccagcccaugagcggcugcuacauccacuucuucagagagcccaccgaccugaagcaguucaagcaggacgccaaguacagccacggcaucgacguggccgaccuguuccccgcccagcccggccugaccagcgccgugaucgaggcccugcccagaaacauggugcugaccugccagggcagcgacgacaucaagagacugcuggacagccagggcagaaaggacaucaagcugaucgacaucgcccugagcaagaccgacagcagaagauucgagaacgccgugugggaccagugcaaggaccugugccacaugcacaccggcguggugguggagaagaagaagagaggcggcaaggaggagaucaccccccacugcgcccugauggacugcaucauguacgacgccgccgugagcggcggccugaacauccccgugcugagagccgugcugcccagagacaugguguucagaaccagcagccccaagguggugcugugaggacuaguaauaaggaaacuguaugaaugucugugggcaggaagugaagagauccuucuguaaagguuuuuggaauuaugucugcugaauaauaaacuuuuuugaaauaauaaaucugguagaaaaaugagaucuaaaaaaaaaaaaaaaaaaaaaaaaaaaaaaaaaaaaaaaaaaaaaaaaaaaaaaaaaaaaaaaaugcaucccccccccccccccccccccccccccccccaaaggcucuuuucagagccaccagaauu

SEQ ID NO: 10500 - RNA, 2050 nt, Artificial Sequence
  mRNA product Design b-4 comprising derived and/or modified sequence from LASV(LASV003-NIG-2008;Clade II)__AIT17581__NP (opt4)
gggagagucccgcagucggcguccagcggcucugcuuguucgugugugugucguugcaggccuuauucaagcuuaccaugagcgccagcaaggaggugaagagcuuccuguggacccagagccugagaagagagcugagcggcuacugcagcagcaucaagcugcagguggugaaggacgcccaggcccugcugcacggccuggacuucagcgaggugagcaacgugcagagacugaugagaaagcagaagagagacgacagcgaccugaagagacugagagaccugaaccaggccgugaacaaccugguggagcugaagagcacccagcagaagagcgugcugagagugggcacccugaccagcgacgaccugcugacccuggccgccgaccuggagaagcugaagagcaaggugaucagaaccgagagaccccugagcagcggcguguacaugggcaaccugagcgcccagcagcuggagcagagaagaacccugcugaacaugaucggcauggugggcggcgcccagggcacccagcccggcagagacggcguggugagagugugggacgugaagaaccccgaccugcugaacaaccaguucggcaccaugcccagccugacccuggccugccugaccaagcagggccagguggaccugaacgacguggugcuggcccugaccgaccugggccugaucuacaccgccaaguaccccaacagcagcgaccuggacagacugagccagagccaccccauccugagcaugguggacaccaagaagagcagccugaacaucagcggcuacaacuucagccugggcgccgccgugaaggccggcgccugcaugcuggacggcggcaacaugcuggagaccaucaaggugaccccccagaccauggacggcauccugaagagcauccugaaggugaagaagagccugggcauguucgugagcgacacccccggcgagagaaaccccuacgagaacauccuguacaagaucugccugagcggcgacggcuggcccuacaucgccagcagaaccagcaucgugggcagagccugggagaacaccaccguggaccuggagagcgacggcaagccccagaaggugggcaccgccggcagcaacaagagccugcagagcgccggcuuccccaccggccugaccuacagccagcugaugacccugaaggacagcaugaugcagcuggaccccagcgccaagaccuggaucgacaucgagggcagacccgaggaccccguggagaucgcccuguaccagcccaugagcggcugcuacauccacuucuucagagagcccaccgaccugaagcaguucaagcaggacgccaaguacagccacggcaucgacgugaccgaccuguuccccgcccagcccggccugaccagcgccgugaucgaggcccugcccagaaacauggugcugaccugccagggcagcgacgacaucaagagacugcuggacagccagggcagaagagacaucaagcugaucgacaucgcccugagcaaggccgacagcagaagauucgagaacgccgugugggaccagugcaaggaccugugccacaugcacaccggcguggugguggagaagaagaagagaggcggcaaggaggagaucaccccccacugcgcccugauggacugcaucauguacgacgccgccgugagcggcggccugaacauccccgugcugagagccgugcugcccagagacaugguguucagaaccagcagccccaagguggugcugugaggacuaguaauaaggaaacuguaugaaugucugugggcaggaagugaagagauccuucuguaaagguuuuuggaauuaugucugcugaauaauaaacuuuuuugaaauaauaaaucugguagaaaaaugagaucuaaaaaaaaaaaaaaaaaaaaaaaaaaaaaaaaaaaaaaaaaaaaaaaaaaaaaaaaaaaaaaaaugcaucccccccccccccccccccccccccccccccaaaggcucuuuucagagccaccagaauu

SEQ ID NO: 10501 - RNA, 2050 nt, Artificial Sequence
  mRNA product Design b-4 comprising derived and/or modified sequence from LASV(LASV035-NIG-2009;Clade II)__AIT17589__NP (opt4)
gggagagucccgcagucggcguccagcggcucugcuuguucgugugugugucguugcaggccuuauucaagcuuaccaugagcgccagcaaggaggugaagagcuuccuguggacccagagccugagaagagagcugagcggcuacugcagcagcaucaagcugcagguggugaaggacgcccaggcccugcugcacggccuggacuucagcgaggugagcaacgugcagagacugaugagaaagcagaagagagacgacagcgaccugaagagacugagagaccugaaccaggccgugaacaaccugguggagcugaagagcacccagcagaagagcauccugagagugggcacccugaccagcgacgaccugcugacccuggccgccgaccuggagaagcugaagagcaaggugaucagaaccgagagaccccugagcagcggcguguacaugggcaaccugagcgcccagcagcuggagcagagaagagcccugcugaacaugaucggcauggugggcggcgcccagggcacccagcccggcagagacggcguggugagagugugggacgugaagaaccccgaccugcugaacaaccaguucggcaccaugcccagccugacccuggccugccugaccaagcagggccagguggaccugaacgacgccgugcuggcccugaccgaccugggccugaucuacaccgccaaguaccccaacagcagcgaccuggacagacugagccagagccaccccauccugaacaugguggacaccaagaagagcagccugaacaucagcggcuacaacuucagccugggcgccgccgugaaggccggcgccugcaugcuggacggcggcaacaugcuggagaccaucaaggugaccccccagaccauggacggcauccugaagagcauccugaaggugaagagaagccugggcauguucgugagcgacacccccggcgagagaaaccccuacgagaacauccuguacaagaucugccugagcggcgacggcuggcccuacaucgccagcagaaccagcaucgugggcagagccugggagaacaccaccguggaccuggagagcgacggcaagccccagaaggugggcaccaccggcagcaacaagagccugcagagcgccggcuuccccaccggccugaccuacagccagcugaugacccugaaggacagcaugaugcagcuggaccccagcgccaagaccuggaucgacaucgagggcagacccgaggaccccguggagaucgcccuguaccagcccaugagcggcugcuacauccacuucuucagagagcccaccgaccugaagcaguucaagcaggacgccaaguacagccacggcaucgacguggccgaccuguuccccgcccagcccggccugaccagcgccgugaucgaggcccugcccagaaacauggugcugaccugccagggcagcgacgacaucaagaagcugcuggacagccagggcagaagagacaucaagcugaucgacaucgcccugagcaaggccgacagcagaaaguucgagaacgccgugugggaccagugcaaggaccugugccacaugcacaccggcguggugguggagaagaagaagagaggcggcaaggaggagaucaccccccacugcgcccugauggacugcaucauguacgacgccgccgugagcggcggccugaacauccccgugcugagagccgugcugcccagagacaugguguucagaaccagcagccccaagguggugcugugaggacuaguaauaaggaaacuguaugaaugucugugggcaggaagugaagagauccuucuguaaagguuuuuggaauuaugucugcugaauaauaaacuuuuuugaaauaauaaaucugguagaaaaaugagaucuaaaaaaaaaaaaaaaaaaaaaaaaaaaaaaaaaaaaaaaaaaaaaaaaaaaaaaaaaaaaaaaaugcaucccccccccccccccccccccccccccccccaaaggcucuuuucagagccaccagaauu

SEQ ID NO: 10502 - RNA, 2050 nt, Artificial Sequence
  mRNA product Design b-4 comprising derived and/or modified sequence from LASV(LASV1000-NIG-2009;Clade II)__AIT17783__NP (opt4)
gggagagucccgcagucggcguccagcggcucugcuuguucgugugugugucguugcaggccuuauucaagcuuaccaugagcgccagcaaggaggugaagagcuuccuguggacccagagccugagaagagagcugagcggcuacugcagcaacaucaagcugcagguggugaaggacgcccaggcccugcugcacggccuggacuucagcgaggugagcaacgugcagagacugaugagaaagcagaagagagacgacagcgaccugaagagacugagagaccugaaccaggccgugaacaaccugguggagcugaagagcacccagcagaagagcauccugagagugggcacccugaccagcgacgaccugcugacccuggccgccgaccuggagaagcugaagagcaaggugaucagaaccgagagaccccugagcagcggcguguacaugggcaaccugagcacccagcagcuggagcagagaagagcccugcugaacaugaucggcauggugggcggcgcccagggcacccagcccggcagagacggcguggugagagugugggacgugaagaaccccgaccugcugaacaaccaguucggcaccaugcccagccugacccuggccugccugaccaagcagggccagguggaccugaacgacguggugcuggcccugaccgaccugggccugaucuacaccgccaaguaccccaacagcagcgaccuggacagacugagccagagccaccccauccugaacaugguggacaccaagaagagcagccugaacaucagcggcuacaacuucagccugggcgccgccgugaaggccggcgccugcaugcuggacggcggcaacaugcuggagaccaucaaggugaccccccagaccauggacggcauccugaagagcauccugaaggugaagaagagccugggcauguucgugagcgacacccccggcgagagaaaccccuacgagaacauccuguacaagaucugccugagcggcgacggcuggcccuacaucgccagcagaaccagcaucgugggcagagccugggagaacaccaccguggaccuggagagcgacggcaagccccagaaggugggcaccgccggcagcaacaagagccugcagagcgccggcuuccccaccggccugaccuacagccagcugaugacccugaaggacagcaugaugcagcuggaccccagcgccaagaccuggaucgacaucgagggcagacccgaggaccccguggagaucgcccuguaccagcccgugagcggcugcuacauccacuucuucagagagcccaccgaccugaagcaguucaagcaggacgccaaguacagccacggcaucgacguggccgaccuguuccccgcccagcccggccugaccagcgccgugaucgaggcccugcccagaaacauggugcugaccugccagggcagcgacgacaucaagagacugcuggacagccagggcagaagagacaucaagcugaucgacaucgcccugagcaaggccgacagcagaagauucgagaacgccgugugggaccagugcaaggaccugugccacaugcacaccggcguggugguggagaagaagaagagaggcggcaaggaggagaucaccccccacugcgcccugauggacugcaucauguacgacgccgccgugagcggcggccugaacauccccgugcugagagccgugcugcccagagacaugguguucagaaccagcagccccaagguggugcugugaggacuaguaauaaggaaacuguaugaaugucugugggcaggaagugaagagauccuucuguaaagguuuuuggaauuaugucugcugaauaauaaacuuuuuugaaauaauaaaucugguagaaaaaugagaucuaaaaaaaaaaaaaaaaaaaaaaaaaaaaaaaaaaaaaaaaaaaaaaaaaaaaaaaaaaaaaaaaugcaucccccccccccccccccccccccccccccccaaaggcucuuuucagagccaccagaauu

SEQ ID NO: 10503 - RNA, 2050 nt, Artificial Sequence
  mRNA product Design b-4 comprising derived and/or modified sequence from LASV(LASV221-NIG-2010;Clade II)__AIT17625__NP (opt4)
gggagagucccgcagucggcguccagcggcucugcuuguucgugugugugucguugcaggccuuauucaagcuuaccaugagcgccagcaaggaggugaagagcuuccuguggacccagagccugagaagagagcugagcggcuacugcagcagcaucaagcugcagguggugaaggacgcccaggcccugcugcacggccuggacuucagcgaggugagcaacgugcagagacugaugagaaagcagagaagagacgacagcgaccugaagagacugagagaccugaaccaggccgugaacaaccugguggagcugaagagcacccagcagaagagcauccugagagugggcacccugaccagcgacgaccugcugacccuggccgccgaccuggagaagcugaagagcaaggugaucagaaccgagagaccccugagcagcggcguguacaugggcaaccugagcacccagcagcuggagcagagaagagcccugcugaacaugaucggcauggugggcggcgcccagggcacccagcccggcagagacggcguggugagagugugggacgugaagaaccccgaccugcugaacaaccaguucggcaccaugcccagccugacccuggccugccugaccaagcagggccagguggaccugaacgacgccgugcuggcccugaccgaccugggccugaucuacaccgccaaguaccccaacagcagcgaccuggacagacugagccagagccaccccauccugaacaugguggacaccaagaagagcagccugaacaucagcggcuacaacuucagccugggcgccgccgugaaggccggcgccugcaugcuggacggcggcaacaugcuggagaccaucaaggugaccccccagaccguggacggcauccugaagagcauccugaaggugaagagaagccugggcauguucgugagcgacacccccggcgagagaaaccccuacgagaacauccuguacaagaucugccugagcggcgacggcuggcccuacaucgccagcagaaccagcaucgugggcagagccugggagaacaccaccguggaccuggagagcgacggcaagccccagaaggugggcaccgccggcagcaacaagagccugcagagcgccggcuuccccaccggccugaccuacagccagcugaugacccugaaggacagcaugaugcagcuggaccccagcgccaagaccuggaucgacaucgagggcagacccgaggaccccguggagaucgcccuguaccagcccaugagcggcugcuacauccacuucuucagagagcccaccgaccugaagcaguucaagcaggacgccaaguacagccacggcaucgacguggccgaccuguuccccgcccagcccggccugaccagcgccgugaucgaggcccugcccagaaacauggugcugaccugccagggcagcgacgacaucaagagacugcuggacagccagggcagaagagacaucaagcugaucgacaucgcccugagcaaggccgacagcagaaaguucgagaacgccgugugggaccagugcaaggaccugugccacaugcacaccggcguggugguggagaagaagaagagaggcggcaaggaggagaucaccccccacugcgcccugauggacugcaucauguacgacgccgccgugagcggcggccugaacauccccgugcugagagccgugcugcccagagacaugguguucagaaccagcagccccaagguggugcugugaggacuaguaauaaggaaacuguaugaaugucugugggcaggaagugaagagauccuucuguaaagguuuuuggaauuaugucugcugaauaauaaacuuuuuugaaauaauaaaucugguagaaaaaugagaucuaaaaaaaaaaaaaaaaaaaaaaaaaaaaaaaaaaaaaaaaaaaaaaaaaaaaaaaaaaaaaaaaugcaucccccccccccccccccccccccccccccccaaaggcucuuuucagagccaccagaauu

SEQ ID NO: 10504 - RNA, 2050 nt, Artificial Sequence
  mRNA product Design b-4 comprising derived and/or modified sequence from LASV(LASV237-NIG-2010;Clade II)__AIT17639__NP (opt4)
gggagagucccgcagucggcguccagcggcucugcuuguucgugugugugucguugcaggccuuauucaagcuuaccaugagcgccagcaaggaggugaagagcuuccuguggacccagagccugagaagagagcugagcggcuacugcagcaacaucaagcugcagguggugaaggacgcccaggcccugcugcacggccuggacuucagcgaggugagcaacgugcagagacugaugagaaagcagaagagagacgacagcgaccugaagagacugagagaccugaaccaggccgugaacaaccugguggagcugaagagcacccagcagaagagcauccugagagugggcacccugaccagcgacgaccugcugacccuggccgccgaccuggagaagcugaagagcaaggugaucagaaccgagagaccccugagcagcggcguguacaugggcaaccugagcacccagcagcuggagcagagaagagcccugcugaacaugaucggcauggugggcggcgcccagggcacccagcccggcagagacggcguggugagagugugggacgugaagaaccccgaccugcugaacaaccaguucggcaccaugcccagccugacccuggccugccugaccaagcagggccagguggaccugaacgacgccgugcuggcccugaccgaccugggccugaucuacaccgccaaguaccccaacagcagcgaccuggacagacugagccagagccaccccauccugaacaugguggacaucaagaagagcagccugaacaucagcggcuacaacuucagccugggcgccgccgugaaggccggcgccugcaugcuggacggcggcaacaugcuggagaccaucaaggugaccccccagaccauggacggcauccugaagagcauccugaaggugaagagaagccugggcauguucgugagcgacacccccggcgagagaaaccccuacgagaacauccuguacaagaucugccugagcggcgacggcuggcccuacaucgccagcagaaccagcaucgugggcagagccugggagaacaccaccguggaccuggagagcgacggcaagccccagaaggugggcagcgccggcagcaacaagagccugcagagcgccggcuuccccaccggccugaccuacagccagcugaugacccugaaggacagcaugaugcagcuggaccccagcgccaagaccuggaucgacaucgagggcagacccgaggaccccguggagaucgcccuguaccagcccaugagcggcugcuacauccacuucuucagagagcccaccgaccugaagcaguucaagcaggacgccaaguacagccacggcaucgacguggccgaccuguuccccgcccagcccggccugaccagcgccgugaucgaggcccugcccagaaacauggugcugaccugccagggcagcgacgacaucaagagacugcuggacagccagggcagaagagacaucaagcugaucgacaucgcccugagcaaggccgacagcagaagauucgagaacgccgugugggaccagugcaaggaccugugccacaugcacaccggcguggugguggagaagaagaagagaggcggcaaggaggagaucaccccccacugcgcccugauggacugcaucauguacgacgccgccgugagcggcggccugaacauccccgugcugagagccgugcugcccagagacaugguguucagaaccagcagccccaagguggugcugugaggacuaguaauaaggaaacuguaugaaugucugugggcaggaagugaagagauccuucuguaaagguuuuuggaauuaugucugcugaauaauaaacuuuuuugaaauaauaaaucugguagaaaaaugagaucuaaaaaaaaaaaaaaaaaaaaaaaaaaaaaaaaaaaaaaaaaaaaaaaaaaaaaaaaaaaaaaaaugcaucccccccccccccccccccccccccccccccaaaggcucuuuucagagccaccagaauu

SEQ ID NO: 10505 - RNA, 2050 nt, Artificial Sequence
  mRNA product Design b-4 comprising derived and/or modified sequence from LASV(LASV253-NIG-2011;Clade II)__AIT17671__NP (opt4)
gggagagucccgcagucggcguccagcggcucugcuuguucgugugugugucguugcaggccuuauucaagcuuaccaugagcgccagcaaggaggugaagagcuuccuguggacccagagccugagaagagagcugagcggcuacugcagcagcaucaagcugcagguggugaaggacgcccaggcccugcugcacggccuggacuucagcgaggugagcaacgugcagagacugaugagaaagcagaagagagacgacagcgaccugaagagacugagagaccugaaccaggccgugaacaaccugguggagcugaagagcacccagcagaagagcgugcugagagugggcacccugaccagcgacgaccugcugacccuggccgccgaccuggagaagcugaagagcaaggugaucagaaccgagagaccccugagcagcggcguguacaugggcaaccugagcacccagcagcuggagcagagaagagcccugcugaacaugaucggcauggugggcggcgcccagggcacccagcccggcagagacggcguggugagagugugggacgugaagaaccccgaccugcugaacaaccaguucggcaccaugcccagccugacccuggccugccugaccaagcagggccagguggaccugaacgacguggugcuggcccugaccgaccugggccugaucuacaccgccaaguaccccaacagcagcgaccuggacagacugagccagagccaccccauccugaacaugguggacaccaagaagagcagccugaacaucagcggcuacaacuucagccugggcgccgccgugaaggccggcgccugcaugcuggacggcggcaacaugcuggagaccaucaaggugaccccccagaccauggacggcauccugaagagcauccugaaggugaagaagagccugggcauguucgugagcgacacccccggcgagagaaaccccuacgagaacauccuguacaagaucugccugagcggcgacggcuggcccuacaucgccagcagaaccagcaucgugggcagagccugggagaacaccaccguggaccuggagagcgacggcaagccccagaaggugggcaccgccggcagcaacaagagccugcagagcgccggcuuccccaccggccugaccuacagccagcugaugacccugaaggacagcaugaugcagcuggaccccagcgccaagaccuggaucgacaucgagggcagacccgaggaccccguggagaucgcccuguaccagcccaugagcggcugcuacauccacuucuucagagagcccaccgaccugaagcaguucaagcaggacgccaaguacagccacggcaucgacgugaccgaccuguuccccgcccagcccggccugaccagcgccgugaucgaggcccugcccagaaacauggugcugaccugccagggcagcgacgacaucaagagacugcuggacagccagggcagaagagacaucaagcugaucgacaucgcccugagcaaggccgacagcagaagauucgagaacgccgugugggaccagugcaaggaccugugccacaugcacaccggcguggugguggagaagaagaagagaggcggcaaggaggagaucaccccccacugcgcccugauggacugcaucauguacgacgccgccgugagcggcggccugaacauccccgugcugagagccgugcugcccagagacaugguguucagaaccagcagccccaagguggugcugugaggacuaguaauaaggaaacuguaugaaugucugugggcaggaagugaagagauccuucuguaaagguuuuuggaauuaugucugcugaauaauaaacuuuuuugaaauaauaaaucugguagaaaaaugagaucuaaaaaaaaaaaaaaaaaaaaaaaaaaaaaaaaaaaaaaaaaaaaaaaaaaaaaaaaaaaaaaaaugcaucccccccccccccccccccccccccccccccaaaggcucuuuucagagccaccagaauu

SEQ ID NO: 10506 - RNA, 2050 nt, Artificial Sequence
  mRNA product Design b-4 comprising derived and/or modified sequence from LASV(LASV254-NIG-2011;Clade II)__AIT17675__NP (opt4)
gggagagucccgcagucggcguccagcggcucugcuuguucgugugugugucguugcaggccuuauucaagcuuaccaugagcgccagcaaggaggugaagagcuuccuguggacccagagccugagaagagagcugagcggcuacugcagcagcaucaagcugcagguggugaaggacgcccaggcccugcugcacggccuggacuucagcgaggugagcaacgugcagagacugaugagaaagcagaagagagacgacagcgaccugaagagacugagagaccugaaccaggccgugaacaaccugguggagcugaagagcacccagcagaagagcgugcugagagugggcacccugaccagcgacgaccugcugacccuggccgccgaccuggagaagcugaagagcaaggugaucagaaccgagagaccccugagcagcggcguguacaugggcaaccugagcacccagcagcuggagcagagaagagcccugcugaacaugaucggcauggugggcggcgcccagggcacccagcccggcagagacggcguggugagagugugggacgugaagaaccccgaccugcugaacaaccaguucggcaccaugcccagccugacccuggccugccugaccaagcagggccagguggaccugaacgacgccgugcuggcccugaccgaccugggccugaucuacaccgccaaguaccccaacagcagcgaccuggacagacugagccagagccaccccauccugaacaugguggacaccaagaagagcagccugaacaucagcggcuacaacuucagccugggcgccgccgugaaggccggcgccugcaugcuggacggcggcaacaugcuggagaccaucaaggugaccccccagaccauggacggcauccugaagagcauccugaaggugaagaagagccugggcauguucgugagcgacacccccggcgagagaaaccccuacgagaacauccuguacaagaucugccugagcggcgacggcuggcccuacaucgccagcagaaccagcaucgugggcagagccugggagaacaccaucguggaccuggagagcgacggcaagccccagaaggugggcaccgccggcagcaacaagagccugcagagcgccggcuuccccaccggccugaccuacagccagcugaugacccugaaggacagcaugaugcagcuggaccccagcgccaagaccuggaucgacaucgagggcagacccgaggaccccguggagaucgcccuguaccagcccaugagcggcugcuacauccacuucuucagagagcccaccgaccugaagcaguucaagcaggacgccaaguacagccacggcaucgacguggccgaccuguuccccgcccagcccggccugaccagcgccgugaucgaggcccugcccagaaacauggugcugaccugccagggcagcgacgacaucaagagacugcuggacagccagggcagaagagacaucaagcugaucgacaucgcccugagcaaggccgacagcagaagauucgagaacgccgugugggaccagugcaaggaccugugccacaugcacaccggcguggugguggagaagaagaagagaggcggcaaggaggagaucaccccccacugcgcccugauggacugcaucauguacgacgccgccgugagcggcggccugaacauccccgugcugagagccgugcugcccagagacaugguguucagaaccagcagccccaagguggugcugugaggacuaguaauaaggaaacuguaugaaugucugugggcaggaagugaagagauccuucuguaaagguuuuuggaauuaugucugcugaauaauaaacuuuuuugaaauaauaaaucugguagaaaaaugagaucuaaaaaaaaaaaaaaaaaaaaaaaaaaaaaaaaaaaaaaaaaaaaaaaaaaaaaaaaaaaaaaaaugcaucccccccccccccccccccccccccccccccaaaggcucuuuucagagccaccagaauu

SEQ ID NO: 10507 - RNA, 2050 nt, Artificial Sequence
  mRNA product Design b-4 comprising derived and/or modified sequence from LASV(Nig08-04;Clade II)__ADU56611__NP (opt4)
gggagagucccgcagucggcguccagcggcucugcuuguucgugugugugucguugcaggccuuauucaagcuuaccaugagcgccagcaaggaggugaagagcuuccuguggacccagagccugagaagagagcugagcggcuacugcagcaacaucaagcugcagguggugaaggacgcccaggcccugcugcacggccuggacuucagcgaggugagcaacgugcagagacugaugagaaagcagaagagagacgacggcgaccugaagagacugagagaccugaaccaggccgugaacaaccugguggagcugaagagcacccagcagaagagcgugcugagagugggcacccugaccagcgacgaccugcugacccuggccgccgaccuggagaagcugaagagcaaggugaucagaaccgagagaccccugagcagcggcguguacaugggcaaccugagcacccagcagcuggagcagagaaaggcccugcugagcaugaucggcauggugggcggcgcccagggcacccagcccggcagagacggcguggugagagugugggacgugaagaaccccgaccugcugaacaaccaguucggcaccaugcccagccugacccuggccugccugaccaagcagggccagguggaccugaacgacgccgugcuggcccugaccgaccugggccugaucuacaccgccaaguaccccaacagcagcgaccuggacagacugagccagagccaccccauccugaacaugguggacaccaagaagagcagccugaacaucagcggcuacaacuucagccugggcgccgccgugaaggccggcgccugcaugcuggacggcggcaacaugcuggagaccaucaaggugaccccccagaccauggacggcauccugaagagcauccugaaggugaagagaagccugggcauguucgugagcgacacccccggcgagagaaaccccuacgagaacauccuguacaagaucugccugagcggcgacggcuggcccuacaucgccagcagaaccagcaucgugggcagagccugggagaacaccaccguggaccuggagagcgacggcaagccccagaaggugggcaccgccggcagcaacaagagccugcagagcgccggcuuccccaccggccugaccuacagccagcugaugacccugaaggacagcaugaugcagcuggaccccagcgccaagaccuggaucgacaucgagggcagacccgaggaccccguggagaucgcccuguaccagcccaugagcggcugcuacauccacuucuucagagagcccaccgaccugaagcaguucaagcaggacgccaaguacagccacggcaucgacgugaccgaccuguucagcgcccagcccggccugaccagcgccgugaucgaggcccugcccagaaacauggugcugaccugccagggcagcgacgacaucaagaagcugcuggacagccagggcagaagagacaucaagcugaucgacaucagccugaacaaggccgacagcagaagauucgagaacgccgugugggaccagugcaaggaccugugccacaugcacaccggcguggugguggagaagaagaagagaggcggcaaggaggagaucaccccccacugcgcccugauggacugcaucauguucgacgccgccgugagcggcggccugaacauccccauccugagagccgugcugcccagagacaugguguucagaaccagcagccccaagguggugcugugaggacuaguaauaaggaaacuguaugaaugucugugggcaggaagugaagagauccuucuguaaagguuuuuggaauuaugucugcugaauaauaaacuuuuuugaaauaauaaaucugguagaaaaaugagaucuaaaaaaaaaaaaaaaaaaaaaaaaaaaaaaaaaaaaaaaaaaaaaaaaaaaaaaaaaaaaaaaaugcaucccccccccccccccccccccccccccccccaaaggcucuuuucagagccaccagaauu

SEQ ID NO: 10508 - RNA, 2053 nt, Artificial Sequence
  mRNA product Design b-4 comprising derived and/or modified sequence from LASV(GA391;Clade III)__AAA46284__NP (opt4)
gggagagucccgcagucggcguccagcggcucugcuuguucgugugugugucguugcaggccuuauucaagcuuaccaugagcgccagcaaggaggugagaagcugccuguggacccagagccugagaagagagcugagcggcuacugcagcaacaucaagcugcagguggugaaggacgcccaggcccugcugcacggccuggacuucagcgaggugagcaacgugcagagacugaugagaaagcagaagagagacgacggcgaccugaagagacugagagaccugaaccaggccgugaacaaccugguggagcugaagagcacccagcagaagagcgugcugagagugggcacccugagcagcgacgaccugcugauccuggccgccgaccuggagaagcugaagagcaaggugaccagaaccgagagaccccugagcagcggcguguacaugggcaaccugagcagccagcagcuggaccagagaagagcccugcugaacaugaucggcaugaccggcgugagcggcggcggcaagggcgccagcaacggcaucgugagagugugggacgugaagaacgccgagcugcugaacaaccaguucggcaccaugcccagccugacccuggccugccugaccaagcagggccagguggaccugaacgacgccgugcaggcccugaccgaccugggccugaucuacaccgccaaguaccccaacagcagcgaccuggacagacugagccagagccaccccauccugaacaugaucgacaccaagaagagcagccugaacaucagcggcuacaacuucagccugggcgccgccgugaaggccggcgccugcaugcuggacggcggcaacaugcuggagaccaucaaggugagcccccagaccauggacggcauccugaagagcauccugaaggugaagaagagccugggcauguucgugagcgacacccccggcgagagaaaccccuacgagaacauccuguacaagaucugccugagcggcgacggcuggagcuacaucgccagcagaaccagcaucgugggcagagccugggagaacaccgugguggaccuggagcaggacaacaagccccagaagaucggcaacggcggcagcaacaagagccugcagagcgccggcuucgccgccggccugaucuacagccagcugaugacccugaaggacuucaagugcuucaaccugauccccaacgccaagaccuggauggacaucgagggcagacccgaggaccccguggagaucgcccuguaccagcccagcagcggcugcuacgugcacuucuucagagagcccaccgaccugaagcaguucaagcaggacgccaaguacagccacggcagagacgugaccgaccuguucgccgcccagcccggccugaccagcgccgugaucgaggcccugcccagaaacauggugaucaccugccagggcagcgaggacaucagaaagcugcuggagagccagggcagaagagacaucaagcugaucgacaucacccugagcaaggccgacagcagaaaguucgagaacgccgugugggaccaguucaaggaccugugccacaugcacaccggcguggugguggagaagaagaagagaggcggcaaggaggagaucaccccccacugcgcccugauggacugcaucauguucgacgccgccgugagcggcggccuggacgccaaggugcugagaguggugcugcccagagacaugguguucagaaccagcacccccaagguggugcugugaggacuaguaauaaggaaacuguaugaaugucugugggcaggaagugaagagauccuucuguaaagguuuuuggaauuaugucugcugaauaauaaacuuuuuugaaauaauaaaucugguagaaaaaugagaucuaaaaaaaaaaaaaaaaaaaaaaaaaaaaaaaaaaaaaaaaaaaaaaaaaaaaaaaaaaaaaaaaugcaucccccccccccccccccccccccccccccccaaaggcucuuuucagagccaccagaauu

SEQ ID NO: 10509 - RNA, 2050 nt, Artificial Sequence
  mRNA product Design b-4 comprising derived and/or modified sequence from LASV(Nig08-A19;Clade III)__ADU56619__NP (opt4)
gggagagucccgcagucggcguccagcggcucugcuuguucgugugugugucguugcaggccuuauucaagcuuaccaugagcgccagcaaggaggugaagagcuuccuguggacccagagccugagaagagagcugagcggcuacugcagcaacaucaagcugcagguggugaaggacgcccaggcccugcugcacggccuggacuucagcgaggugagcaacgugcagagacugaugagaaagcagaagagagacgacggcgaccugaagagacugagagaccugaaccaggccgugaacaaccugguggagcugaagagcacccagcagaagagcgugcugagagugggcacccugagcagcgacgaccugcuggugcuggccgccgaccuggagaagcugaagagcaagguggugagaaccgagagaccccugagcagcggcaucuacaugggcaaccugagcagccagcagcuggaccagagaaaggcccugcugaacaugaucggcaugaccggcggcaacggcggcagaaacaccaccagcgacggcaucgugagagugugggacgugaagaacgccgagcugcugaacaaccaguucggcaccaugcccagccugacccuggccugccugaccaagcagggccagguggaccugaacgacgccgugcaggcccugaccgaccugggccugaucuacaccgccaaguaccccaacagcagcgaccuggacagacuggcccagagccaccccauccugaacaugaucgacaccaagaagagcagccugaacaucagcggcuacaacuucagccugggcgccgccgugaaggccggcgccugcaugcuggacggcggcaacaugcuggagaccaucaaggugagcccccagaccauggacggcauccugaagagcauccugaaggugaagagaagccugggcauguucaucagcgacacccccggcgagagaaaccccuacgagaacauccuguacaagaucugccugagcggcgacggcuggcccuacaucgccagcagaaccagcaucgugggcagagccugggagaacaccgugguggaccuggagagcgacaacaagccccagaagaccggcaacggcggcagcaacaagagccugcagagcgccggcuucgccgccggccugaccuacagccagcugaugacccugaaggacagcaugcugcagcuggaccccaacgccaagaccuggauggacaucgagggcagacccgaggaccccguggagaucgcccuguaccagcccagcagcggcugcuacauccacuucuucagagagcccaccgaccugaagcaguucaagcaggacgccaaguacagccacggcaucgacgugaccgaccuguucgccgcccagcccggccugaccagcgccgugaucgaggcccugcccagaaacauggugaucaccugccagggcagcgaggacaucagaaagcugcuggagagccagggcagaagagacaucaagcugaucgacaucagccugagcaagguggacagcagaaaguucgagaacgccgugugggaccaguucaaggaccugugccacaugcacaccggcaucgugguggagaagaagaagagaggcggcaaggaggagaucaccccccacugcgcccugauggacugcaucauguucgacgccgccgugagcggcggcguggacgccaaggugcugagagccgugcugcccagagacaugguguucagaaccagcacccccaagguggugcugugaggacuaguaauaaggaaacuguaugaaugucugugggcaggaagugaagagauccuucuguaaagguuuuuggaauuaugucugcugaauaauaaacuuuuuugaaauaauaaaucugguagaaaaaugagaucuaaaaaaaaaaaaaaaaaaaaaaaaaaaaaaaaaaaaaaaaaaaaaaaaaaaaaaaaaaaaaaaaugcaucccccccccccccccccccccccccccccccaaaggcucuuuucagagccaccagaauu

SEQ ID NO: 10510 - RNA, 2050 nt, Artificial Sequence
  mRNA product Design b-4 comprising derived and/or modified sequence from LASV(G1180-SLE-2010;Clade IV)__AIT17169__NP (opt4)
gggagagucccgcagucggcguccagcggcucugcuuguucgugugugugucguugcaggccuuauucaagcuuaccaugagcgccagcaaggagaucaagagcuuccuguggacccagagccugagaagagagcugagcggcuacugcagcaacaucaagcugcagguggugaaggacgcccaggcccugcugcacggccuggacuucagcgaggugagcaacgugcagagacugaugagaaaggagagaagagacgacaacgaccugaagagacugagagaccugaaccaggccgugaacaaccugguggagcugaagagcacccagcagaagagcauccugagagugggcacccugaccagcgacgaccugcugauccuggccgccgaccuggagaagcugaagagcaaggugaucagaaccgagagaccccugagcgccggcguguacaugggcaaccugagcagccagcagcuggaccagagaagagcccugcugagcaugaucggcaugagcagcggcaaccagagagcccaggccggcagagacggcguggugagagugugggacgugaagaacguggagcugcugaacaaccaguucggcaccaugcccagccugacccuggccugccugaccaagcagggccagguggaccugaacgacgccgugcaggcccugaccgaccugggccugaucuacaccgccaaguaccccaacaccagcgaccuggacagacugacccagagccaccccauccugaacaugaucgacaccaagaagagcagccugaacaucagcggcuacaacuucagccugggcgccgccgugaaggccggcgccugcaugcuggacggcggcaacaugcuggagaccaucaaggugagcccccagaccauggacggcauccugaagagcauccugaaggugaagaaggcccugggcauguucaucagcgacacccccggcgagagaaaccccuacgagaacauccuguacaagaucugccugagcggcgacggcuggcccuacaucgccagcagaaccagcaucaccggcagagccugggagaacaccgugguggaccuggagagcgacggcaagccccagaaggccggcagcaacaacagcaacaagagccugcagagcgugggcuucaccgccggccugaccuacagccagcugaugacccugaaggacgccaugcugcagcuggaccccaacgccaagaccuggauggacaucgagggcagacccgaggaccccguggagaucgcccuguaccagcccagcagcggcugcuacauccacuucuucagagagcccaccgaccugaagcaguucaagcaggacgccaaguacagccacggcaucgacgugaccgaccuguucgccgcccagcccggccugaccagcgccgugaucgacgcccugcccagaaacauggugaucaccugccagggcagcgacgacaucagaaagcugcuggagagccagggcagaaaggacaucaagcugaucgacaucgcccugagcaagaccgacagcagaaaguacgagaacgccgugugggaccaguacaaggaccugugccacaugcacaccggcguggugguggagaagaagaagagaggcggcaaggaggagaucaccccccacugcgcccugauggacugcaucauguucgacgccgccgugagcggcggccugaacaccagcgugcugagagccgugcugcccagagacaugguguucagaaccagcacccccagaguggugcugugaggacuaguaauaaggaaacuguaugaaugucugugggcaggaagugaagagauccuucuguaaagguuuuuggaauuaugucugcugaauaauaaacuuuuuugaaauaauaaaucugguagaaaaaugagaucuaaaaaaaaaaaaaaaaaaaaaaaaaaaaaaaaaaaaaaaaaaaaaaaaaaaaaaaaaaaaaaaaugcaucccccccccccccccccccccccccccccccaaaggcucuuuucagagccaccagaauu

SEQ ID NO: 10511 - RNA, 2050 nt, Artificial Sequence
  mRNA product Design b-4 comprising derived and/or modified sequence from LASV(G1442-SLE-2011;Clade IV)__AIT17181__NP (opt4)
gggagagucccgcagucggcguccagcggcucugcuuguucgugugugugucguugcaggccuuauucaagcuuaccaugagcgccagcaaggaggugaagagcuuccuguggacccagagccugagaagagagcugagcggcuacugcagcaacaucaagcugcagguggugaaggacgcccaggcccugcugcacggccuggacuucagcgaggugagcaacgugcagagacugaugagaaagcagagaagagacgacaacgaccugaagagacugagagaccugaaccaggccgugaacaaccugguggagcugaagagcacccagcagaagagcgugcugagagugggcacccugaccagcgacgaccugcuggugcuggccgccgaccuggagaagcugaagagcaaggugaucagaaccgagagaccccugagcgccggcguguacaugggcaaccugagcagccagcagcuggaccagagaagagcccugcugaacaugaucggcaugagcggcggcauccagggcaccagaaccggcagagacggcguggugagagugugggacgugaagaacgccgaccugcugaacaaccaguucggcaccaugcccagccugacccuggccugccugaccaagcagggccagguggaccugaacgacguggugcaggcccugaccgaccugggccugaucuacaccgccaaguaccccaacgccagcgaccuggacagacugacccagagccaccccauccugaacaugaucgacaccaagaagagcagccugaacaucagcggcuacaacuucagccugggcgccgccgugaaggccggcgccugcaugcuggacggcggcaacaugcuggagaccaucaaggugagcccccagaccauggacggcauccugaagagcauccugaaggugaagaagacccugggcauguucaucagcgacacccccggcgagagaaaccccuacgagaacauccuguacaagaucugccugagcggcgacggcuggcccuacaucgccagcagaaccagcaucaccggcagagccugggagaacaccgugguggaccuggagagcgacggcaagccccagaaggccggcagcaacaacagcaacaagagccugcagagcgccggcuucgccgccggccugaccuacagccagcugaugacccugaaggacgccaugcugcagcuggaccccaacgccaagaccuggauggacaucgagggcagacccgaggaccccguggagaucgcccuguaccagcccagcagcggcugcuacauccacuucuucagagagcccaccgaccugaagcaguucaagcaggacgccaaguacagccacggcaucgacgugaccgaccuguucgccgcccagcccggccugaccagcgccgugaucgaggcccugcccagaaacauggugaucaccugccagggcagcgacgacaucaagaagcugcuggagagccagggcagaaaggacaucaagcugaucgacaucgcccugagcaagaccgacagcagaaaguacgagaacgccgugugggaccaguacaaggaccugugccacaugcacaccggcguggugguggagaagaagaagagaggcggcaaggaggagaucaccccccacugcgcccugauggacugcaucauguucgacgccgccgugagcggcggccugaacacccuggugcugagagccgugcugcccagagacaugguguucagaaccagcacccccagaguggugcugugaggacuaguaauaaggaaacuguaugaaugucugugggcaggaagugaagagauccuucuguaaagguuuuuggaauuaugucugcugaauaauaaacuuuuuugaaauaauaaaucugguagaaaaaugagaucuaaaaaaaaaaaaaaaaaaaaaaaaaaaaaaaaaaaaaaaaaaaaaaaaaaaaaaaaaaaaaaaaugcaucccccccccccccccccccccccccccccccaaaggcucuuuucagagccaccagaauu

SEQ ID NO: 10512 - RNA, 2050 nt, Artificial Sequence
  mRNA product Design b-4 comprising derived and/or modified sequence from LASV(G3010-SLE-2013;Clade IV)__AIT17345__NP (opt4)
gggagagucccgcagucggcguccagcggcucugcuuguucgugugugugucguugcaggccuuauucaagcuuaccaugagcgccagcaaggagaucaagagcuuccuguggacccagagccugagaagagagcugagcggcuacugcagcaacaucaagcugcagguggugaaggacgcccaggcccugcugcacggccuggacuucagcgaggugagcaacgugcagagacugaugagaaaggagagaagagacgacaacgaccugaagagacugagagaccugaaccaggccgugaacaaccugguggagcugaagagcacccagcagaagagcauccugagagugggcacccugaccagcgacgaccugcugauccuggccgccgaccuggagaagcugaagagcaaggugaccagaaccgagagaccccugagcgccggcguguacaugggcaaccugagcagccagcagcuggaccagagaagagcccugcugagcaugaucggcaugagcagcggcgugcagggcgccagagccggcagagacggcguggugagagugugggacgugaagaacgccgagcugcugaacaaccaguucggcaccaugcccagccugacccuggccugccugaccaagcagggccagguggaccugaacgacguggugcaggcccugaccgaccugggccugaucuacaccgccaaguaccccaacaccagcgaccuggacagacugacccagagccaccccauccugaacaugaucgacaccaagaagagcagccugaacaucagcggcuacaacuucagccugggcgccgccgugaaggccggcgccugcaugcuggacggcggcaacaugcuggagaccaucaaggugagcccccagaccauggacggcauccugaagagcauccugaaggugaagaaggcccugggcauguucaucagcgagacccccggcgagagaaaccccuacgagaacauccuguacaagaucugccugagcggcgacggcuggcccuacaucgccagcagaaccagcaucaccggcagagccugggagaacaccgugguggaccuggagagcgacggcaagccccagaaggccggcagcaacaacagcaacaagagccugcagagcgccggcuucaccgccggccugaccuacagccagcugaugacccugaaggacgccaugcugcagcuggaccccaacgccaagaccuggauggacaucgagggcagacccgaggaccccguggagguggcccuguaccagcccagcagcggcugcuacauccacuucuucagagagcccaccgaccugaagcaguucaagcaggacgccaaguacagccacggcaucgacgugaccgaccuguucgccgcccagcccggccugaccagcgccgugaucgacgcccugcccagaaacauggugaucaccugccagggcagcgacgacaucaagaagcugcuggagagccagggcagaaaggacaucaagcugaucgacaucgcccugagcaagaccgacagcagaaaguacgagaacgccgugugggaccaguacaaggaccugugccacaugcacaccggcguggugguggagaagaagaagagaggcggcaaggaggagaucaccccccacugcgcccugauggacugcaucauguucgacgccgccgugagcggcggccugaacaccagcgugcugagagccgugcugcccagagacaugguguucagaaccagcacccccagaguggugcugugaggacuaguaauaaggaaacuguaugaaugucugugggcaggaagugaagagauccuucuguaaagguuuuuggaauuaugucugcugaauaauaaacuuuuuugaaauaauaaaucugguagaaaaaugagaucuaaaaaaaaaaaaaaaaaaaaaaaaaaaaaaaaaaaaaaaaaaaaaaaaaaaaaaaaaaaaaaaaugcaucccccccccccccccccccccccccccccccaaaggcucuuuucagagccaccagaauu

SEQ ID NO: 10513 - RNA, 2050 nt, Artificial Sequence
  mRNA product Design b-4 comprising derived and/or modified sequence from LASV(G502-SLE-2009;Clade IV)__AIT17127__NP (opt4)
gggagagucccgcagucggcguccagcggcucugcuuguucgugugugugucguugcaggccuuauucaagcuuaccaugagcgccagcaaggagaucaagagcuuccuguggacccagagccugagaagagagcugagcggcuacugcagcaacaucaagcugcagguggugaaggacgcccaggcccugcugcacggccuggacuucagcgaggugagcaacgugcagagacugaugagaaaggagagaagagacgacaacgaccugaagagacugagagaccugaaccaggccgugaacaaccugguggagcugaagagcacccagcagaagagcauccugagagugggcacccugaccagcgacgaccugcugauccuggccgccgaccuggagaagcugaagagcaaggugaucagaaccgagagaccccugagcgccggcguguacaugggcaaccugagcagccagcagcuggaccagagaagagcccugcugagcaugaucggcaugagcggcggcaaccagggcgugagagccggcaaggacggcguggugagagugugggacgugaagaacgccgagcugcugaacaaccaguucggcaccaugcccagccugacccuggccugccugaccaagcagggccagguggaccugaacgacgccgugcaggcccugaccgaccugggccugaucuacaccgccaaguaccccaacaccagcgaccuggacagacugacccagagccaccccauccugaacaugaucgacaccaagaagagcagccugaacaucagcggcuacaacuucagccugggcgccgccgugaaggccggcgccugcaugcuggacggcggcaacaugcuggagaccaucaaggugagcccccagaccauggacggcauccugaagagcauccugaaggugaagaaggcccugggcauguucaucagcgacacccccggcgagagaaaccccuacgagaacauccuguacaagaucugccugagcggcgacggcuggcccuacaucgccagcagaaccagcaucaccggcagagccugggagaacaccgugguggaccuggagagcgacggcaagccccagaaggccggcagcaacaacagcaacaagagccugcagagcgccggcuucaccgccggccugaccuacagccagcugaugacccugaaggacgccaugcugcagcuggaccccaacaccaagaccuggauggacaucgagggcagacccgaggaccccguggagaucgcccuguaccagcccagcagcggcugcuacauccacuucuucagagagcccaccgaccugaagcaguucaagcaggacgccaaguacagccacggcaucgacgugaccgaccuguucgccgcccagcccggccugaccagcgccgugaucgacgcccugcccagaaacauggugaucaccugccagggcagcgacgacaucagaaagcugcuggagagccagggcagaaaggacaucaagcugaucgacaucgcccugaacaagaccgacagcagaaaguacgagaacgccgugugggaccaguacaaggaccugugccacaugcacaccggcguggugguggagaagaagaagagaggcggcaaggaggagaucaccccccacugcgcccugauggacugcaucauguucgacgccgccgugagcggcggccugaacaccagcgugcugagagccgugcugcccagagacaugguguucagaaccagcacccccagaguggugcugugaggacuaguaauaaggaaacuguaugaaugucugugggcaggaagugaagagauccuucuguaaagguuuuuggaauuaugucugcugaauaauaaacuuuuuugaaauaauaaaucugguagaaaaaugagaucuaaaaaaaaaaaaaaaaaaaaaaaaaaaaaaaaaaaaaaaaaaaaaaaaaaaaaaaaaaaaaaaaugcaucccccccccccccccccccccccccccccccaaaggcucuuuucagagccaccagaauu

SEQ ID NO: 10514 - RNA, 2050 nt, Artificial Sequence
  mRNA product Design b-4 comprising derived and/or modified sequence from LASV(G733-SLE-2010;Clade IV)__AIT17155__NP (opt4)
gggagagucccgcagucggcguccagcggcucugcuuguucgugugugugucguugcaggccuuauucaagcuuaccaugagcgccagcaaggagaucaagagcuuccuguggacccagagccugagaagagagcugagcggcuacugcagcaacaucaagcugcagguggugaaggacgcccaggcccugcugcacggccuggacuucagcgaggugagcaacgugcagagacugaugagaaaggagagaagagacgacaacgaccugaagagacugagagaccugaaccaggccgugaacaaccugguggagcugaagagcacccagcagaagagcgugcugagagugggcacccugaccagcgacgagcugcuggugcuggccgccgaccuggagaagcugaagagcaaggugaucagaaccgagagaccccugagcgccggcguguacaugggcaaccugagcagccagcagcuggaccagagaagagcccugcugagcaugaucggcaugagcggcggcaaccagggcgccagaaccggcagagacggcguggugagagugugggacgugaagaacgccgagcugcugaacaaccaguucggcaccaugcccagccugacccuggccugccugaccaagcagggccagguggaccugaacgacgccgugcaggcccugaccgaccugggccugaucuacaccgccaaguaccccaacaccagcgaccuggacagacugacccagagccaccccauccugaacaugaucgacaccaagaagagcagccugaacaucagcggcuacaacuucagccugggcgccgccgugaaggccggcgccugcaugcuggacggcggcaacaugcuggagaccaucaaggugagcccccagaccauggacggcauccugaagagcauccugaaggugaagaaggcccugggcauguucaucagcgacacccccggcgagagaaaccccuacgagaacauccuguacaagaucugccugagcggcgacggcuggcccuacaucgccagcagaaccagcaucaccggcagagccugggagaacaccgugguggaccuggagagcgacggcaagccccagaaggccggcagcaacaacagcaacaagagccugcagagcgccggcuucaccgccggccugaccuacagccagcugaugacccugaaggacgccaugcugcagcuggaccccaacgccaagaccuggauggacaucgagggcagacccgaggaccccguggagaucgcccuguaccagcccagcagcggcugcuacauccacuucuucagagagcccaccgaccugaagcaguucaagcaggacgccaaguacagccacggcaucgacgugaccgaccuguucgccgcccagcccggccugaccagcgccgugaucgacgcccugcccagaaacauggugaucaccugccagggcagcgacgacaucagaaagcugcuggagagccagggcagaaaggacaucaagcugaucgacaucgcccugagcaagaucgacagcagaaaguacgagaacgccgugugggaccaguacaaggaccugugccacaugcacaccggcguggugguggagaagaagaagagaggcggcaaggaggagaucaccccccacugcgcccugauggacugcaucauguucgacgccgccgugagcggcggccugaacagccuggugcugagagccgugcugcccagagacaugguguucagaaccagcacccccagaguggugcugugaggacuaguaauaaggaaacuguaugaaugucugugggcaggaagugaagagauccuucuguaaagguuuuuggaauuaugucugcugaauaauaaacuuuuuugaaauaauaaaucugguagaaaaaugagaucuaaaaaaaaaaaaaaaaaaaaaaaaaaaaaaaaaaaaaaaaaaaaaaaaaaaaaaaaaaaaaaaaugcaucccccccccccccccccccccccccccccccaaaggcucuuuucagagccaccagaauu

SEQ ID NO: 10515 - RNA, 2050 nt, Artificial Sequence
  mRNA product Design b-4 comprising derived and/or modified sequence from MOPV/LASV reassortant(IGS-1;Clade IV)__AFY05578__NP (opt4)
gggagagucccgcagucggcguccagcggcucugcuuguucgugugugugucguugcaggccuuauucaagcuuaccaugagcgccagcaaggagaucaagagcuuccuguggacccagagccugagaagagagcugagcggcuacugcagcaacaucaagcugcagguggugaaggacgcccaggcccugcugcacggccuggacuucagcgaggugagcaacgugcagagacugaugagaaaggagagaagagacgacaacgaccugaagagacugagagaccugaaccaggccgugaacaaccugguggagcugaagagcacccagcagaagagcauccugagagugggcacccugaccagcgacgaccugcugauccuggccgccgaccuggagaagcugagaagcaaggugaucagaaccgagagaccccugagcgccggcguguacaugggcaaccugagcagccagcagcuggaccagagaagagcccugcugaacaugaucggcaugagcggcggcaaccagggcgccagagccggcagagacggcguggugagagugugggacgugaagaacgccgagcugcugagcaaccaguucggcaccaugcccagccugacccuggccugccugaccaagcagggccagguggaccugaacgacgccgugcaggcccugaccgaccugggccugaucuacaccgccaaguaccccaacaccagcgaccuggacagacugacccagagccaccccauccugaacaugaucgacaccaagaagagcagccugaacaucagcggcuacaacuucagccugggcgccgccgugaaggccggcgccugcaugcuggacggcggcaacaugcuggagaccaucaaggugagcccccagaccauggacggcauccugaagagcauccugaaggugaagaaggcccugggcauguucaucagcgacacccccggcgagagaaaccccuacgagaacauccuguacaagaucugccugagcggcgacggcuggcccuacaucgccagcagaaccagcaucaccggcagagccugggagaacaccgugguggaccuggagagcgacggcaagccccagaaggccgacagcaacaacagcagcaagagccugcagagcgccggcuucaccgccggccugaccuacagccagcugaugacccugaaggacgccaugcugcagcuggaccccaacgccaagaccuggauggacaucgagggcagacccgaggaccccguggagaucgcccuguaccagcccagcagcggcugcuacauccacuucuucagagagcccaccgaccugaagcaguucaagcaggacgccaaguacagccacggcaucgacgugaccgaccuguucgccacccagcccggccugaccagcgccgugaucgacgcccugcccagaaacauggugaucaccugccagggcagcgacgacaucagaaagcugcuggagagccagggcagaaaggacaucaagcugaucgacaucgaccugagcaagaccgacagcagaaaguacgagaacgccgugugggaccaguacaaggaccugugccacaugcacaccggcguggugguggagaagaagaagagaggcggcaaggaggagaucaccccccacugcgcccugauggacugcaucauguucgacgccgccgugagcggcggccugaacaccagcgugcugagagccgugcugcccagagacaugguguucagaaccagcacccccagaguggugcugugaggacuaguaauaaggaaacuguaugaaugucugugggcaggaagugaagagauccuucuguaaagguuuuuggaauuaugucugcugaauaauaaacuuuuuugaaauaauaaaucugguagaaaaaugagaucuaaaaaaaaaaaaaaaaaaaaaaaaaaaaaaaaaaaaaaaaaaaaaaaaaaaaaaaaaaaaaaaaugcaucccccccccccccccccccccccccccccccaaaggcucuuuucagagccaccagaauu

SEQ ID NO: 10516 - RNA, 2050 nt, Artificial Sequence
  mRNA product Design b-4 comprising derived and/or modified sequence from LASV(LM765-SLE-2012;Clade IV)__AIT17815__NP (opt4)
gggagagucccgcagucggcguccagcggcucugcuuguucgugugugugucguugcaggccuuauucaagcuuaccaugagcgccagcaaggagaucaagagcuuccuguggacccagagccugagaagagagcugagcggcuacugcagcaacaucaagcugcagguggugaaggacgcccaggcccugcugcacggccuggacuucagcgaggugagcaacgugcagagacugaugagaaaggagagaagagacgacaacgaccugaagagacugagagaccugaaccaggccgugaacaaccugguggagcugaagagcacccagcagaagagcauccugagagugggcacccugaccagcgacgaccugcugauccuggccgccgaccuggagaagcugaagagcaaggugaccagaaccgagagaccccugagcgccggcguguacaugggcaaccugagcagccagcagcuggaccagagaagagcccugcuggacaugaucggcaugagcggcagcaaccagggcgccagagccggcagagacggcguggugagagugugggacgugaagaacgccgagcugcugaacaaccaguucggcaccaugcccagccugacccuggccugccugaccaagcagggccagguggaccugaacgacgccgugcaggcccugaccgaccugggccugaucuacaccgccaaguaccccaacaccagcgaccuggacagacugacccagagccaccccauccugaacaugaucgacaccaagaagagcagccugaacaucagcggcuacaacuucagccugggcgccgccgugaaggccggcgccugcaugcuggacggcggcaacaugcuggagaccaucaaggugagcccccagaccauggacggcauccugaagagcauccugaaggugaagaaggcccugggcauguucaucagcgacgcccccggcgagagaaaccccuacgagaacauccuguacaagaucugccugagcggcgacggcuggcccuacaucgccagcagaaccagcaucaccggcagagccugggagaacaccgugguggaccuggagagcgacggcaagccccagaaggccggcagcaacggcagcaacaagagccugcagagcgccggcuucaccgccggccugaccuacagccagcugaugacccugaaggacgccaugcugcagcuggaccccaacgccaagaccuggauggacaucgagggcagacccgaggaccccguggagaucgcccuguaccagcccagcagcggcugcuacauccacuucuucagagagcccaccgaccugaagcaguucaagcaggacgccaaguacagccacggcaucgacgugaccgaccuguucgccgcccagcccggccugaccagcgccgugaucgacgcccugcccagaaacauggugaucaccugccagggcagcgacgacaucagaaagcuguucgagagccagggcagaaaggacaucaagcugaucgacaucgcccugagcaagaccgacagcagaaaguacgagaacgccgugugggaccaguacaaggaccugugccacaugcacaccggcaucgugguggagaagaagaagagaggcggcaaggaggagaucaccccccacugcgcccugauggacugcaucauguucgacgccgccgugagcggcggccugaacaccagcgugcugagagccgugcugcccagagacaugguguucagaaccagcacccccagaguggugcugugaggacuaguaauaaggaaacuguaugaaugucugugggcaggaagugaagagauccuucuguaaagguuuuuggaauuaugucugcugaauaauaaacuuuuuugaaauaauaaaucugguagaaaaaugagaucuaaaaaaaaaaaaaaaaaaaaaaaaaaaaaaaaaaaaaaaaaaaaaaaaaaaaaaaaaaaaaaaaugcaucccccccccccccccccccccccccccccccaaaggcucuuuucagagccaccagaauu

SEQ ID NO: 10517 - RNA, 2050 nt, Artificial Sequence
  mRNA product Design b-4 comprising derived and/or modified sequence from LASV(LM776-SLE-2012;Clade IV)__AIT17825__NP (opt4)
gggagagucccgcagucggcguccagcggcucugcuuguucgugugugugucguugcaggccuuauucaagcuuaccaugagcgccagcaaggagaucaagagcuuccuguggacccagagccugagaagagagcugagcagcuacugcagcaacaucaagcugcagguggugaaggacgcccaggcccugcugcacggccuggacuucagcgaggugagcaacgugcagagacugaugagaaaggagagaagagacgacaacgaccugaagagacugagagaccugaaccaggccgugaacaaccugguggagcugaagagcacccagcagaagagcauccugagagugggcacccugaccagcgacgaccugcugauccuggccgccgaccuggagaagcugaagagcaaggugaccagaaccgagagaccccugagcgccggcguguacaugggcaaccugagcagccagcagcuggaccagagaagagcccugcugagcaugaucggcaugagcggcagcaaccagggcgccagagccggcagagacggcguggugagagugugggacgugaagaacgccgagcugcugaacaaccaguucggcaccaugcccagccugacccuggccugccugaccaagcagggccagguggaccugaacgacgccgugcaggcccugaccgaccugggccugaucuacaccgccaaguaccccaacaccagcgaccuggacagacugacccagagccaccccauccugaacaugaucgacaccaagaagagcagccugaacaucagcggcuacaacuucagccugggcgccgccgugaaggccggcgccugcaugcuggacggcggcaacaugcuggagaccaucaaggugagcccccagaccauggacggcauccugaagagcauccugaaggugaagaaggcccugggcauguucaucagcgacacccccggcgagagaaaccccuacgagaacauccuguacaagaucugccugagcggcgacggcuggcccuacaucgccagcagaaccagcaucaccggcagagccugggagaacaccgugguggaccuggagagcgacggcaagccccagaaggccggcagcaacaacagcaacaagagccugcagagcgccggcuucaccgccggccugaccuacagccagcugaugacccugaaggacgccaugcugcagcuggaccccaacgccaagaccuggauggacaucgagggcagacccgaggaccccguggagguggcccuguaccagcccagcagcggcugcuacauccacuucuucagagagcccaccgaccugaagcaguucaagcaggacgccaaguacagccacggcaucgacgugaccgaccuguucgccgcccagcccggccugaccagcgccgugaucgacgcccugcccagaaacauggugaucaccugccagggcagcgacgacaucagaaagcugcuggagagccagggcagaaaggacaucaagcugaucgacaucgcccugagcaagaccgacagcagaaaguacgagaacgccgugugggaccaguacaaggaccugugccacaugcacaccggcguggugguggagaagaagaagagaggcggcaaggaggagaucaccccccacugcgcccugauggacugcaucauguucgacgccgccgugagcggcggccugaacaccagcgugcugagagccgugcugcccagagacaugguguucagaaccagcacccccagaguggugcugugaggacuaguaauaaggaaacuguaugaaugucugugggcaggaagugaagagauccuucuguaaagguuuuuggaauuaugucugcugaauaauaaacuuuuuugaaauaauaaaucugguagaaaaaugagaucuaaaaaaaaaaaaaaaaaaaaaaaaaaaaaaaaaaaaaaaaaaaaaaaaaaaaaaaaaaaaaaaaugcaucccccccccccccccccccccccccccccccaaaggcucuuuucagagccaccagaauu

SEQ ID NO: 10518 - RNA, 2050 nt, Artificial Sequence
  mRNA product Design b-4 comprising derived and/or modified sequence from LASV(Mad39;Clade IV)__ANH09723__NP (opt4)
gggagagucccgcagucggcguccagcggcucugcuuguucgugugugugucguugcaggccuuauucaagcuuaccaugagcgccagcaaggagaucaagagcuuccuguggacccagagccugagaagagagcugagcggcuacugcagcaacaucaagcugcagguggugaaggacgcccaggcccugcugcacggccuggacuucagcgaggugagcaacgugcagagacugaugagaaagcagagaagagacgacaacgaccugaagagacugagagaccugaaccaggccgugaacaaccugguggagcugaagagcacccagcagaagagcgugcugagagugggcacccugaccagcgacgaccugcugacccuggccgccgaccuggagaagcugaagagcaaggugaccagaaccgagagaccccugaccgccggcguguacaugggcaaccugagcagccagcagcuggaccagagaagagcccugcugaacaugaucggcaugagcggcggcaaccagggcgccagaaccggcagagacggcguggugagagugugggacgugaagaacgccgagcugcugaacaaccaguucggcaccaugcccagccugacccuggccugccugaccaagcagggccagguggaccugaacgacguggugcaggcccugaccgaccugggccugaucuacaccgccaaguaccccaacaccagcgaccuggacagacugacccagagccaccccauccugaacaugaucgacaccaacaagagcagccugaacaucagcggcuacaacuucagccugggcgccgccgugaaggccggcgccugcaugcuggacggcggcaacaugcuggagaccaucaaggugagcccccagaccauggacggcauccugaagagcauccugaaggugaagaagagccugggcauguucaucagcgacacccccggcgagagaaaccccuacgagaacauccuguacaagaucugccugagcggcgacggcuggcccuacaucgccagcagaaccagcaucaccggcagagccugggagaacaccgugguggaccuggagagcggcggcaagccccagaaggccggcagcaacaacagcaacaagagccugcagagcgccggcuucgccgccggccugaccuacagccagcugaugacccugaaggacgccaugcugcagcuggaccccaacgccaagaccuggauggacaucgagggcagacccgaggaccccguggagaucgcccuguaccagcccaucagcggcugcuacauccacuucuucagagagcccaccgaccugaagcaguucaagcaggacgccaaguacagccacggcaucgacgugaccgaccuguucgccgcccagcccggccugaccagcgccgugaucgaggcccugcccagaaacauggugaucaccugccagggcagcgacgacaucagaaagcuguucgagagccagggcagaaaggacaucaagcugaucgacaucgcccugagcaagaccgacagcagaaaguacgagaacgccgugugggaccaguacaaggaccugugccacaugcacaccggcguggugguggagaagaagaagaagggcggcaaggaggagaucaccccccacugcgcccugauggacugcaucauguucgacgccgccgugagcggcggccugaacacccuggugcugagagccgugcugcccagagacaugguguucagaaccagcacccccaagguggugcugugaggacuaguaauaaggaaacuguaugaaugucugugggcaggaagugaagagauccuucuguaaagguuuuuggaauuaugucugcugaauaauaaacuuuuuugaaauaauaaaucugguagaaaaaugagaucuaaaaaaaaaaaaaaaaaaaaaaaaaaaaaaaaaaaaaaaaaaaaaaaaaaaaaaaaaaaaaaaaugcaucccccccccccccccccccccccccccccccaaaggcucuuuucagagccaccagaauu

SEQ ID NO: 10519 - RNA, 2050 nt, Artificial Sequence
  mRNA product Design b-4 comprising derived and/or modified sequence from LASV(Z0947-SLE-2011;Clade IV)__AIT17841__NP (opt4)
gggagagucccgcagucggcguccagcggcucugcuuguucgugugugugucguugcaggccuuauucaagcuuaccaugagcgccagcaaggagaucaagagcuuccuguggacccagagccugagaagagagcugagcggcuacugcagcaacaucaagcugcagguggugaaggacgcccaggcccugcugcacggccuggacuucagcgaggugagcaacgugcagagacugaugagaaaggagagaagagacgacaacgaccugaagagacugagagaccugaaccaggccgugaacaaccugguggagcugaagagcacccagcagaagagcauccugagagugggcacccugaccagcgacgaccugcugauccuggccgccgaccuggagaagcugaagagcaaggugaccagaaccgagagaccccugagcgccggcguguacaugggcaaccugagcagccagcagcuggaccagagaagagcccugcugaacaugaucggcaugagcggcagcaaccagggcgccagaaccggcagagacggcguggugagagugugggacgugaagaacgccgagcugcugaacaaccaguucggcaccaugcccagccugacccuggccugccugaccaagcagggccagguggaccugaacgacgccgugcaggcccugaccgaccugggccugaucuacaccgccaaguaccccaacaccagcgaccuggacagacugacccagagccaccccauccugaacaugaucgacaccaagaagagcagccugaacaucagcggcuacaacuucagccugggcgccgccgugaaggccggcgccugcaugcuggacggcggcaacaugcuggagaccaucaaggugagcccccagaccauggacggcauccugaagagcauccugaaggugaagaaggcccugggcauguucaucagcgacgcccccggcgagagaaaccccuacgagaacauccuguacaagaucugccugagcggcgacggcuggcccuacaucgccagcagaaccagcaucaccggcagagccugggagaacaccgugguggaccuggagagcgacggcaagccccagaaggccggcagcaacggcagcaacaagagccugcagagcgccggcuucaccgccggccugaccuacagccagcugaugacccugaaggacgccaugcugcagcuggaccccaacgccaagaccuggauggacaucgagggcagacccgaggaccccguggagaucgcccuguaccagcccagcagcggcugcuacauccacuucuucagagagcccaccgaccugaagcaguucaagcaggacgccaaguacagccacggcaucgacgugaccgaccuguucgccgcccagcccggccugaccagcgccgugaucgacgcccugcccagaaacauggugaucaccugccagggcagcgacgacaucagaaagcuguucgagagccagggcagaaaggacaucaagcugaucgacaucgcccugagcaagaccgacagcagaaaguacgagaacgccgugugggaccaguacaaggaccugugccacaugcacaccggcaucgugguggagaagaagaagagaggcggcaaggaggagaucaccccccacugcgcccugauggacugcaucauguucgacgccgccgugagcggcggccugaacaccagcgugcugagagccgugcugcccagagacaugguguucagaaccagcacccccagaguggugcugugaggacuaguaauaaggaaacuguaugaaugucugugggcaggaagugaagagauccuucuguaaagguuuuuggaauuaugucugcugaauaauaaacuuuuuugaaauaauaaaucugguagaaaaaugagaucuaaaaaaaaaaaaaaaaaaaaaaaaaaaaaaaaaaaaaaaaaaaaaaaaaaaaaaaaaaaaaaaaugcaucccccccccccccccccccccccccccccccaaaggcucuuuucagagccaccagaauu

SEQ ID NO: 10520 - RNA, 2050 nt, Artificial Sequence
  mRNA product Design b-4 comprising derived and/or modified sequence from LASV(Josiah;Clade IV)__NP_694869__NP (opt5)
gggagagucccgcagucggcguccagcggcucugcuuguucgugugugugucguugcaggccuuauucaagcuuaccaugagcgccuccaaggagaucaaaucuuuccuguggacccagagccucagacgggaacuguccggcuacugcucuaacauuaagcugcaaguggucaaagacgcucaggcccugcuccacgggcuggauuuuagcgagguuuccaaugugcagcgccuuaugagaaaggaacggcgcgacgauaacgaccugaaaagacuccgggaucugaaucaggcggugaacaaucuggucgagcucaagucuacacaacaaaagagcauccugcgcgugggaacgcuuaccuccgacgaucugcucauucuggcugccgaccuugaaaaacuuaagagcaaaguuaucagaacagagcggccccucucugccggcguguauauggggaaccuguccagccagcagcuggaucagcgcagagcucuccugaauaugauuggaaugucuggcgggaaccagggagcccgggcuggccgcgacggcgucgugagaguuugggaugugaagaaugccgagcuucugaacaaucaguucgggaccaugccuucccucacacuggcgugucuuaccaaacagggacaagucgaccugaacgaugccgugcaggcucucacagaccugggccugaucuacaccgccaaguauccgaauacgagcgaccucgaucggcugacccagucucaucccauccuuaacaugauugacacaaagaaauccagccugaauaucuccggguacaacuuuucucucggagcugccgugaaggcgggcgccugcaugcuggaugggggaaacaugcuugaaaccauuaaagucagcccucaaacaauggacggcauccugaaguccauucucaaaguuaagaaagcucugggcauguucaucagcgauacccccggggagcgcaauccuuaugaaaacauucuguacaagaucugucucucuggagacggcuggcccuauaucgccuccagaacgagcauuacagggcgggcuugggagaauaccgugguggaucuggagucugacggaaagccucagaaagccgauagcaacaauuccucuaagagccuucaguccgccggcuuuacagcugggcugaccuacagccagcucaugacccugaaagacgcgaugcugcaacuugauccgaacgccaagacauggauggacaucgaaggaagacccgaggacccugucgaaauugcucucuaccagcccucuuccggcugcuauauccacuucuuucgcgagccuacggaucugaaacaguucaagcaggacgccaaguacagccauggcauugaugugaccgaccuguuugccacacaacccgggcucaccucugcuguuaucgaugcccugccgcggaauauggugaucacaugucagggauccgacgauauuagaaaacuucuggaaagccagggccgcaaggacaucaaacucauugauaucgcgcuguccaagaccgacucucggaaauaugagaacgcugucugggaucaguacaaggaccugugccacaugcauacgggggugguuguggagaagaaaaagagaggaggcaaagaagagauuacaccucacugugcccuuauggauugcaucauguucgacgccgcugucagcgggggccucaauaccuccgugcugcgcgccguccugccccgggacaugguguuuagaaccucuacaccucgcguugugcucugaggacuaguaauaaggaaacuguaugaaugucugugggcaggaagugaagagauccuucuguaaagguuuuuggaauuaugucugcugaauaauaaacuuuuuugaaauaauaaaucugguagaaaaaugagaucuaaaaaaaaaaaaaaaaaaaaaaaaaaaaaaaaaaaaaaaaaaaaaaaaaaaaaaaaaaaaaaaaugcaucccccccccccccccccccccccccccccccaaaggcucuuuucagagccaccagaauu

SEQ ID NO: 10521 - RNA, 2050 nt, Artificial Sequence
  mRNA product Design b-4 comprising derived and/or modified sequence from LASV(LP;Clade I)__AAF86702__NP (opt5)
gggagagucccgcagucggcguccagcggcucugcuuguucgugugugugucguugcaggccuuauucaagcuuaccaugagcaacuccaaggagaucaaaucuuuccuguggacccagagccucagacgggaacuguccggcuacugcucuaauauuaagcuccaaguggucaaagacgcccaggcucugcuccacgggcuggauuuuagcgagguuuccaacgugcagcgccuuaugagaaagcagaaacgggacgaugccgaccugaagcgccucagagaucugaaucaagcggugaacaaucuggucgaacucaagucuacacagcagaaaaacgugcugcggguuggaacgcuuagcuccgacgaucugaucacccucgcugccgaccuggagaaacuuaaaagcaaggugauucgcacagaaagaccccugucuuccggcgucuauauggggaaucucagcucucagcaacuggaucagcggcgcgcccugcucuccaugaucggaaugagcggcgggccucagggaaacagaaccggcggcgacggggugguucgggugugggaugucaaaaaugcugagcugcuuaacaaucaguucggaacaaugccgucucugacccucgccugucugacaaagcaaggccagguggaccuuaacgaugcugugcaggcccugaccgaccucgggcugauuuacacggcgaaguaucccaauuccagcgaccuggauaugcucacccaaucccauccuauccugggaauggucgacacaaagaagucuagccuuaacaucuccggcuacaauuuuagccugggggccgcuguuaaagccggagcuugcaugcucgauggcggcaacaugcuggagaccauuaaggugucuccccagacaauggacgggauccuuaaauccauucugaaggugaaacgcagccucggaauguucaucucugauaccccuggcgaaagaaaccccuaugagaauauucuguacaagaucugucugagcggggaaggauggccuuauauugccucccggacgucuaucacaggccgcgcgugggagaacacccucgucgaccuggagagcgauaauaagccgcccaaacuuaacuccgccgggagcaauaagucucugcaggcugccggacucaacgcuggccugacauacucccagcugaugacccuuaaagacugcaugcuccaacuggauccuagcucuaagaccuggaucgacauugaaggcagacccgaggauccuguggaaaucgcccuguuucagcccuccagcggguguuacauucacuucuuucgggagccgacagaccucaaacaguucaagcaggacgccaaguauucccauggaaucgauguuacggaccuguuuucuacccaaccuggccuuacaagcgcugugauugaagcgcugcccagaaauaugguccuuaccugccagggguccgaugacaucaaaaagcugcuggagucucagggacgccgggauaucaaacuuauugacaucagccucuccaaggccgauagcagaaaauucgagaacgcugugugggaccaguacaaggaucugugucacaugcauacaggcguuguggucgaaaagaaaaagcgcgggggcaaagaggaaauuaccccucacugcgcccugcucgacuguaucauguuugaugccgcuacgacaggaucucugaauauuaccacccuucgggccgugcugcccagagacauggucuuccgcacauccacccccaaggugguucucugaggacuaguaauaaggaaacuguaugaaugucugugggcaggaagugaagagauccuucuguaaagguuuuuggaauuaugucugcugaauaauaaacuuuuuugaaauaauaaaucugguagaaaaaugagaucuaaaaaaaaaaaaaaaaaaaaaaaaaaaaaaaaaaaaaaaaaaaaaaaaaaaaaaaaaaaaaaaaugcaucccccccccccccccccccccccccccccccaaaggcucuuuucagagccaccagaauu

SEQ ID NO: 10522 - RNA, 2050 nt, Artificial Sequence
  mRNA product Design b-4 comprising derived and/or modified sequence from LASV(803213;Clade II)__AAF86704__NP (opt5)
gggagagucccgcagucggcguccagcggcucugcuuguucgugugugugucguugcaggccuuauucaagcuuaccaugagcgccuccaaggaggugaaaucuuuccuguggacccagagccucagacgggaacuguccggcuacugcucuaacaucaaacuucaagucguuaaggacgcucaggcccugcuccacgggcuggauuuuagcgaggugaauaacgugcagcgccuuaugagaaagcagaaacgggacgauggagaccugaagcgccucagagaucugaaucaagcggucaacaaucugguggaacucaaguccacacagcagaaaucuauucugcggguuggcacgcuuaccagcgacgaucugcucacacuggcugccgaccuugagaagcugaaauccaaggugauccgcaccgaaagaccccucagcucuggggucuauaugggaaaccuguccacacagcaacuggagcagcggcgcgcccuccugaauaugauuggcauggugggaggagcucagggcacccagccuggcagagaugggguugugcgggucugggacgugaaaaacccggaucuucugaauaaccaauucggaacaaugcccagccucacccuggccugucuuacgaagcagggccagguggaccugaaugaugcuguccucgcccugaccgaccuggggcucaucuacacagcgaaguauccuaacucuuccgaccuggaucgccuuagccaaucucaucccauucugaauaugguugacaccaaaaaguccagccucaacaucuccggauacaauuuuucucugggcgccgcugugaaagccggggcuugcaugcuugauggaggcaacaugcuggagacaaucaaggugaccccucagacgauggacggcauucucaaaagcauccugaaggucaaaagaucccuggggauguucgugagcgauacacccggagaacggaacccuuaugagaauauucucuacaagaucugucugucuggcgacggguggccguauauugccucccgcaccagcaucguugggagagcgugggaaaacacaaccguggaucuugagucugacggcaagccccagaaagucgggaccgccggaagcaauaagucccugcagucugcuggcuuuccuacaggccucacguacagccaacugaugacccugaaagauuccaugaugcagcuugaccccagcgccaagacauggauugauaucgaggggcggccugaagaccccguggagaucgcucucuaccagccgaugucuggaugcuauauucacuucuuuagagaaccuaccgaccugaaacaguucaagcaagaugccaaguacucccauggcaucgacguugccgaucuguuucccgcucagccugggcucacaagcgcggugauugaggcccugccccgcaacaugguccuuaccugucagggaucugacgauaucaaaaagcugcucgacucccagggccggagagauauuaaacugaucgacaucagccuguccaagguggauucucgcaaauucgaaaaugcugucugggaccaaugcaaggaucuuugucacaugcauacgggggugguuguggagaagaaaaagcggggcggaaaagaggaaauuacaccccacugcgcccucauggacuguaucauguuugaugccgcugucagcggcgggcugaacauuccugugcugagagccguucucccgcgcgacaugguguuccggaccuccucucccaaggucgugcugugaggacuaguaauaaggaaacuguaugaaugucugugggcaggaagugaagagauccuucuguaaagguuuuuggaauuaugucugcugaauaauaaacuuuuuugaaauaauaaaucugguagaaaaaugagaucuaaaaaaaaaaaaaaaaaaaaaaaaaaaaaaaaaaaaaaaaaaaaaaaaaaaaaaaaaaaaaaaaugcaucccccccccccccccccccccccccccccccaaaggcucuuuucagagccaccagaauu

SEQ ID NO: 10523 - RNA, 2053 nt, Artificial Sequence
  mRNA product Design b-4 comprising derived and/or modified sequence from LASV(GA391;Clade III)__CAA36646__NP (opt5)
gggagagucccgcagucggcguccagcggcucugcuuguucgugugugugucguugcaggccuuauucaagcuuaccaugagcgccuccaaggaggugagaucuuuccuguggacccagagccuccggcgcgaacuguccggcuacugcucuaacaucaaacuucaagucguuaaggacgcucaggcccugcuccacgggcuggauuuuagcgagguguccaaugugcagagacuuaugcggaaacagaagcgcgacgauggagaccugaaaagacuccgggaucugaaccaagcggucaauaaccugguggaacucaagucuacacagcagaaaagcguucugcgcgugggcacgcuuuccagcgacgaucugcucauucuggcugccgaccuugagaaacugaagucuaaagucaccagaacagaacggccccucuccagcgggguguauaugggaaaucugucuucccagcaacuggaucagcgcagagcccuccugaacaugaucggcaugaccgggguuagcggaggcggcaagggggcuucugacggaauugugcgggucugggaugugaaaaaugccgagcuucugaacaaucaguucggcacaaugccuucccucacccuggcuugucuuacaaagcaggggcaaguggaccugaacgaugccguccaggcgcucaccgaccugggacugaucuacacggccaaguauccgaauagcuccgaccucgaucgccugucucagagccaucccauucuuaacaugaucgacaccaaaaaguccagccugaauaucucuggcuacaacuuuucccucggggcugccguuaaagcuggagccugcaugcuggauggcggcaauaugcuugagacaauuaaggugagcccucaaaccauggacgggauccugaaaucuauucucaaggugaaaaagagccugggaauguucgucuccgauacacccggcgaaagaaacccuuaugagaacauccuguacaagauuugucucucuggggacggauggcccuauaucgcgagccggaccuccauugugggccgcgccugggaaaauacgguuguggaucuggagcaggacaacaaaccucagaagaucgggaauggaggcagcaacaaaucucuucaguccgcuggcuuugccgcugggcugacauacagccaacucaugacccugaaggauuucaaaugcuuuaaucugaucccgaacgccaagacauggauggacauugagggaagacccgaagauccugucgagaucgcccuuuaccagcccucuuccggcuguuaugugcacuucuuucgggaaccuaccgaccucaagcaguucaaacaggacgcuaaguacagccaugggauugauguuaccgaccuguuugcggcccaacccggacugacauccgcugugaucgaggcccucccgagaaauauggucauuacgugccagggcucugaagauauccgcaaacugcuugagagccaggggcggagagacaucaagcugauugauaucacccucuccaaagccgacucucgcaaguucgagaacgcugugugggaucaguuuaaggaccugugucacaugcauacaggcgucgugguugaaaagaagaaacggggaggcaaggaggaaauuaccccucacugcgcccugauggauuguaucauguucgacgcggcugugagcgggggacuugaugccaaaguccucagagugguucugccccgcgacaugguguuccggacauccaccccuaaggucgugcugugaggacuaguaauaaggaaacuguaugaaugucugugggcaggaagugaagagauccuucuguaaagguuuuuggaauuaugucugcugaauaauaaacuuuuuugaaauaauaaaucugguagaaaaaugagaucuaaaaaaaaaaaaaaaaaaaaaaaaaaaaaaaaaaaaaaaaaaaaaaaaaaaaaaaaaaaaaaaaugcaucccccccccccccccccccccccccccccccaaaggcucuuuucagagccaccagaauu

SEQ ID NO: 10524 - RNA, 2050 nt, Artificial Sequence
  mRNA product Design b-4 comprising derived and/or modified sequence from LASV(AV;Clade V)__CCA30315__NP (opt5)
gggagagucccgcagucggcguccagcggcucugcuuguucgugugugugucguugcaggccuuauucaagcuuaccaugagcgccuccaaggaggugaaaucuuuccuguggacccagagccucagacgggaacuguccggcuacugcucuaacaucaaacuucaagucguuaaggacgcucaggcccugcuccacgggcuggauuuuagcgagguguccaaugugcagcgccuuaugagaaagcagcggcgcgacgauucugaccugaaaagacuccgggaucugaaccaagcggucaauaaccugguggaacucaagagcacacagcagaaguccguucugcgcgugggaacgcuuagcucugacgaucugcucacccuggcugccgaccuugagaaacugaaguccaaagucacaagaaccgaacggccccucagcucuggcguguauauggggaaucuguccagccagcaacuggaucagcgcagagcccuccugaaccuuauuggaaugacaaauggcucucaggggucccaggcuggacgggacggcguugugcgcgucugggaugugaagaacgccgagcugcucaauaaccaauucggcaccaugccuagccugacacuugcuugucugaccaaacagggacagguggaccucaaugaugucguucaagcccugacggaccuggggcucaucuacaccgcgaaguauccgaacacauccgaccuggauagacuuacccagucucaucccauucugaauaugaucgacacaaagaaaagcucccucaacauuagcggcuacaauuuuucucugggggccgcugugaaggccggagcuugcaugcuugauggcgggaacaugcuggagaccaucaaaguguccccucagagcauggacggaauccucaagucuauucugaaagucaagcgggcccugggcauguucgugagcgauacgcccggcgaacgcaacccuuaugagaauauccucuacaaaauuugucuguccggggacggauggcccuauaucgcgucuagaacaagcauuguuggccgggccugggaaaacaccguggucgaucuugagacagacgggaagccucagaagaucggauccggcaauagcaacaaaucucugcaauccgcuggguuuagcgccggacucaccuacucucagcugaugacccugaaggaugcuaugcuucagcucgacccgaaugccaaaacauggauggauauugagggcagacccgaagacccuguggagguugcccuguaccagcccaucuccggcugcuauauccacuucuuucgcgaaccuacggaccugaagcaauucaaacaggaugcuaaguacagccaugggauugacaucgcggaucucuuugccgcucagcccggacugaccuccgccgugauugaggcccuuccgcggaacauggucaucacaugucagggcucugaagacauuaagaaacugcucgagagccaagggagaaaggauaucaaacugaucgacauugcucuguccaagaucgauucucgcaaauucgagaaugccgugugggaccaguauaaggaucuuugccacaugcauaccggagucgugguugaaaagaaaaagcggggcgggaaagaggaaauuacaccucacugugcgcucauggacugcaucauguuugaugcugccgugagcggcggacugaacacccugguccucagagccgugcugccccgcgacaugguuuuccggacguccacaccuagagugguccuuugaggacuaguaauaaggaaacuguaugaaugucugugggcaggaagugaagagauccuucuguaaagguuuuuggaauuaugucugcugaauaauaaacuuuuuugaaauaauaaaucugguagaaaaaugagaucuaaaaaaaaaaaaaaaaaaaaaaaaaaaaaaaaaaaaaaaaaaaaaaaaaaaaaaaaaaaaaaaaugcaucccccccccccccccccccccccccccccccaaaggcucuuuucagagccaccagaauu

SEQ ID NO: 10525 - RNA, 2050 nt, Artificial Sequence
  mRNA product Design b-4 comprising derived and/or modified sequence from LASV(Togo/2016/7082;Clade VI)__AMR44578__NP (opt5)
gggagagucccgcagucggcguccagcggcucugcuuguucgugugugugucguugcaggccuuauucaagcuuaccaugagcaacuccaaggaggugaaaucuuuccuguggacccagagccucagacgggaacuguccggcuacugcucuaauaucaaacuucaagucguuaaagacgcccaggcucugcuccacgggcuggauuuuagcgagguguccaacgugcagcgccuuaugagaaagcagaaacgggacgauggagaccugaagcgccucagagaucugaaucaagccgucaacaaucugguggaacucaagucuguucagcagaaaagcauucugcgggugggcacacuuacguccgacgaucugcucacccuggcggcugaccuugagaagcugaaaagcaaggucacacgcaccgaaagaccccucucuuccgggguguauaugggaaaccugagcucucagcaacuggaucagcggcgcgcccuccuguccaugaucggcaugagcgggggaaaucagaacucucagccuaaaggcgacggcguugugagagucugggaugugaagaaugccgaccuucugaacaaucaauucgggacaaugccgucccucacccuggcuugucuuacaaagcagggacagguggaucugaacgacgccguccaagcucucaccgaccugggccugauuuacacggccaaauaucccaauagcuccgaucucgaccggcugucucagagccauccuauccuuaacaugauugauaccaagaaauccagccugaauaucucuggguacaacuuuucccucggagcggccaucaagacaggcgcuugcaugcuggacgggggaaacaugcuugagaccauuaaaguuacaccccagaccauggauggcauccucaagagcauucugaaagugaagcgcucucugggcauguucaucagcgacacgccuggggagagaaaucccuaugaaaacauucuguacaagaucugucucuccggagauggcuggccuuauauugccucucggacagcuaucaucgggcgcgccugggagaauaccguggucgaccuggaaagcgauuccaaaccgcagaagauuggaagcaacggcucuaauaaaucccuucaaagcgcgggguuugcccccggacugacauacucucagcucaugacccugaaggacuccaugcugcagcuugauccuaacgcuaaaaccuggaucgacauugagggcagacccgaggacccuguggaaguugcccucuuccagcccaucagcggcugcuacauucacuuuuuccgggagccgacagaucugaagcaauuuaagcaggacgcuaaauauucccaugggaucgaugugacggaccuguucgccgcccagccuggacucaccucugcugucaucgaagcgcugcccagaaauauggugcuuacaugucagggcagcgaugacauuaagaaacugcucgauucccaagggcgccgggacaucaagcugauugauguuucucugaacaaaaucgacagcagaaaguuugagaaugccgugugggaucaguacaaggaccuuugccacaugcauaccggagucguggucgaaaagaagaaaaagggcgggaaagaggagauuacaccucacugugcucuccuggauugcaucauguucgacgccgccguguccggcggacugaacgcuaccguucuccgcgccgugcugccccgggacauggucuuuagaacgagcucucccaaggugguucuuugaggacuaguaauaaggaaacuguaugaaugucugugggcaggaagugaagagauccuucuguaaagguuuuuggaauuaugucugcugaauaauaaacuuuuuugaaauaauaaaucugguagaaaaaugagaucuaaaaaaaaaaaaaaaaaaaaaaaaaaaaaaaaaaaaaaaaaaaaaaaaaaaaaaaaaaaaaaaaugcaucccccccccccccccccccccccccccccccaaaggcucuuuucagagccaccagaauu

SEQ ID NO: 10526 - RNA, 2050 nt, Artificial Sequence
  mRNA product Design b-4 comprising derived and/or modified sequence from LASV(KAK-428;Clade n.d. (VII))__ANH09741__NP (opt5)
gggagagucccgcagucggcguccagcggcucugcuuguucgugugugugucguugcaggccuuauucaagcuuaccaugagcaacuccaaggaggugaaaucuuuccuguggacccagagccucagacgggaacuguccggcuacugcacaaauaucaaacuucaagucguuaaggacgcccaggcucugcuccacgggcuggauuuuucugaggugagcaacgugcagcgccuuaugagaaagcagaaacgggacgauaaugaccugaagcgccucagagaucugaaccaagccgucaauaaccugguggaacucaaguccguucagcagaaaucugugcugaaggucggaacgcuuaauagcgacgaucugcucacccuggcggcugaccuugagaaacugaaguccaaagugguucggacagaacgcccccucagcucuggcguguauauggggaaccuguccagccagcaacuggaucagagacgggcccuccugaauaugauuggaauggccggcgggucucagggaaaccagccuucccgcgacggcgucgugagagugugggaugucaagaaugcugaccuucugaacaaucaauucggcaccaugccgagccucacacuggccugucuuaccaagcaggggcagguugaucugaacgacguggugcucgcucugacagaccugggacucaucuacaccgccaaauaucccaauucuuccgaucuggaccggcuuagccaaaaccauccuguccugaacaugauugaugugaauaaguccucucucaacaucagcggcuacaauuuuucccugggggcggccguuaaagcuggagccugcaugcuugacggcgggaacaugcuggagacgauuaagaucagcccccagaccguggauggaauccucaaaucuauucugaaggucaaacgcgcucugggcauguucguguccgacacaccuggcgagagaaaucccuaugaaaacauccucuacaagguuugucugagcgggaauggauggccuuauauugccucucggaccagcaucgugggccgcgcgugggagaacacagucguggaucuugaauccaauaagaaccagccgaaagucgggaauaacggaucuaauaagaugcugcagagcuccggcuuugccaccgggcucacguacagccaacugaugacacugagagacucuaugcuucagcucgaucccaccgcuaaaacauggauugacaucgagggacggccugaggaucccguggaacuggcccuguuccagccuuccagcggcugcuacauucacuuuuucagagagcccaccgaccucaagcaguuuaaacaagacgcuaaguauucucauggcaucgauguuaacgaccuguucuccgcccagccggggcuuaccagcgccgugcuggaagcucucccucgcaauaugguccugacaugucagggauccgaugacauccggaagcugcuugauucucaggacagaaaagauauuaagcucaucgacauuagccuguccaaagcggaugcccgcaaguuugagaacgacgugugggaucaauucaaagaccugugccacaugcauacgggcaucguuguggaaaagaagaaaaagggagggaaacaggagaugacaccccacugugcucuccuggauugcauuauguuugacgccgccgucucuggcgggcuuaacgugccuacccugcgggcugugcuccccaccgacaugguuuucagaacaaucaccacgaaggucgugcugugaggacuaguaauaaggaaacuguaugaaugucugugggcaggaagugaagagauccuucuguaaagguuuuuggaauuaugucugcugaauaauaaacuuuuuugaaauaauaaaucugguagaaaaaugagaucuaaaaaaaaaaaaaaaaaaaaaaaaaaaaaaaaaaaaaaaaaaaaaaaaaaaaaaaaaaaaaaaaugcaucccccccccccccccccccccccccccccccaaaggcucuuuucagagccaccagaauu

SEQ ID NO: 10527 - RNA, 2050 nt, Artificial Sequence; identical to SEQ ID NO: 10521
  mRNA product Design b-4 comprising derived and/or modified sequence from LASV(Pinneo-NIG-1969;Clade I)__AIT17837__NP (opt5)

SEQ ID NO: 10528 - RNA, 2050 nt, Artificial Sequence
  mRNA product Design b-4 comprising derived and/or modified sequence from LASV(ISTH0009-NIG-2011;Clade II)__AIT17405__NP (opt5)
gggagagucccgcagucggcguccagcggcucugcuuguucgugugugugucguugcaggccuuauucaagcuuaccaugagcguguccaaggaggucaaaucuuuccuguggacccagagccucagacgggaacuguccggcuacugcucuaacaucaaacuucaaguugugaaggacgcccaggcucugcuccacgggcuggauuuuagcgagguguccaauguccagcgccuuaugagaaagcagaaacgggacgauucugaccugaagcgccucagagaucugaaccaagccgugaauaaccugguugaacucaagagcacacagcagaaauccauucugcgggugggaacgcuuaccagcgacgaucugcucacacuggcggcugaccuugagaagcugaaaucuaaggucauccgcaccgaaagaccccucuccagcggcguguauauggggaaucugucuacacagcaacuggagcagcggcgcgcccuccugaacaugauuggaaugguuggcggggcccagggaacccagccuggcagagauggcgugguccgggugugggacgugaaaaauccggaucuucugaacaaucaauucgggacaaugcccucccucacccuggcuugucuuacgaagcagggacaggucgaccugaacgaugccguucucgcucugaccgaccugggccucaucuacacagccaaguauccuaauagcucugaccuggaucgccuuucccaaagccaucccauucugaacaugguggacaucaaaaaguccucucucaauaucagcggguacaacuuuucccugggagcggccgugaaagcuggcgccugcaugcuugaugggggaaauaugcuggagaccauuaaggucacaccucagaccauggacggcauccucaaaagcauucugaaggugaaaagaucucugggcauguucguuuccgauacgcccggggaacggaacccuuaugagaacauccucuacaagauuugucugagcggagacggcuggccguauaucgcuucucgcacaagcauuguggggagagccugggaaaauaccacagucgaucuugaguccgacggaaagccccagaaagugggcucugcggggagcaacaagucccugcagagcgccggauuuccuaccggccucaccuacucucaacugaugacacugaaagauuccaugaugcagcuugaccccagcgcuaagacguggaucgauaucgagggccggccugaagaccccguugagauugcccucuaccagccgaugucugggugcuauauccacuucuuuagagaaccuaccgaccugaaacaguucaagcaagaugcuaaguacucccauggaauugacguggccgaucuguuucccgcccagccuggccucacaagcgcugucaucgaggcgcugccccgcaauauggugcuuaccugucagggguccgacgauauuaaacggcugcucgacucucagggaagacgcgauaucaagcugaucgacauugcccugagcaaagcugauucccggagauucgaaaacgccgucugggaccaaugcaaggaucuuugucacaugcauacaggcgugguuguggagaaaaagaagcgcgggggcaaagaggaaaucacgccccacugcgcccucauggacuguauuauguaugaugcugccgucucuggaggccugaauaucccugugcugcgggcgguucucccgagagacaugguguuucgcaccagcucccccaaggucgugcugugaggacuaguaauaaggaaacuguaugaaugucugugggcaggaagugaagagauccuucuguaaagguuuuuggaauuaugucugcugaauaauaaacuuuuuugaaauaauaaaucugguagaaaaaugagaucuaaaaaaaaaaaaaaaaaaaaaaaaaaaaaaaaaaaaaaaaaaaaaaaaaaaaaaaaaaaaaaaaugcaucccccccccccccccccccccccccccccccaaaggcucuuuucagagccaccagaauu

SEQ ID NO: 10529 - RNA, 2050 nt, Artificial Sequence
  mRNA product Design b-4 comprising derived and/or modified sequence from LASV(ISTH2010-NIG-2012;Clade II)__AIT17483__NP (opt5)
gggagagucccgcagucggcguccagcggcucugcuuguucgugugugugucguugcaggccuuauucaagcuuaccaugagcgccuccaaggaggugaaaucuuuccuguggacccagagccucagacgggaacuguccggcuacugcucuaacaucaaacuucaagucguuaaggacgcucaggcccugcuccacgggcuggauuuuagcgagguguccaaugugcagcgccuuaugagaaagcagaaacgggacgauucugaccugaagcgccucagagaucugaaccaagcggucaauaaccugguggaacucaagagcacacagcagaaauccauucugcggguuggaacgcuuaccagcgacgaucugcucacacuggcugccgaccuugagaagcugaaaucuaaggugauccgcaccgaaagaccccucuccagcggcgucuauauggggaaucugucuacacagcaacuggagcagcggcgcgcccuccugaaccuuauuggaauggugggcggggcucagggaacccagccuggcagagauggcguugugcgggucugggacgugaaaaauccggaucugcucaacaaucaauucgggacaaugcccucccugacccuugccugucugacgaagcagggacagguggaccucaacgaugcuguccuggcccugaccgaccucggccugaucuacacagcgaaguauccuaauagcucugaccuugaucgccugucccaaagccaucccauucucaacaugguugacaccaaaaaguccucucugaauaucagcggguuuaacuucucccuuggagccgcugugaaagccggcgcuugcaugcuggaugggggaaauaugcucgagacaaucaaggugaccccucagacgauggacggcauucugaaaagcauccugaaggucaaaaagucucucggcauguuuguguccgauacacccggggaaagaaacccuuacgagaacauucuguauaagaucugucuuagcggagacggcuggccguacauugccucucggaccagcaucguugggcgcgcgugggaaaauacaaccguggaucuggaguccgacggaaaaccccacaaggucggcaccgccgggucuaacaaaagccuccaguccgcuggauucccuacaggccugacguauagccagcugaugacccuuaaggauucuaugaugcaacucgaccccuccgccaaaacauggauugauaucgagggcagaccugaagaccccguggagaucgcucuguaccagccgaugagcgggugcuacauucacuuuuuccgggaaccuaccgaccugaagcaguuuaagcaggaugccaaauauucucauggaaucgacguugccgaucucuuccccgcucaaccuggccugacauccgcggugauugaggcccuucccagaaauaugguccugaccugucaggggagcgacgauaucaagcgccuccuggacucccagggacggagagauauuaaacugaucgacaucgcucuuucuaaggccgauagccgccgguuugaaaacgccgugugggaccagugcaaagaucucugucauaugcacacgggcgucgugguugagaagaagaaaagagggggcaaggaggaaauuacaccccacugcgcucugauggacuguaucauguacgaugccgcgguguccggaggccugaauauuccuguccuccgcgcugugcugccgcgggacaugguuuucagaaccucuagccccaaagugguccuuugaggacuaguaauaaggaaacuguaugaaugucugugggcaggaagugaagagauccuucuguaaagguuuuuggaauuaugucugcugaauaauaaacuuuuuugaaauaauaaaucugguagaaaaaugagaucuaaaaaaaaaaaaaaaaaaaaaaaaaaaaaaaaaaaaaaaaaaaaaaaaaaaaaaaaaaaaaaaaugcaucccccccccccccccccccccccccccccccaaaggcucuuuucagagccaccagaauu

SEQ ID NO: 10530 - RNA, 2050 nt, Artificial Sequence
  mRNA product Design b-4 comprising derived and/or modified sequence from LASV(Lassa virus/H.sapiens-wt/NGA/2015/ISTH_0543;Clade II)__AVO03640__NP (opt5)
gggagagucccgcagucggcguccagcggcucugcuuguucgugugugugucguugcaggccuuauucaagcuuaccaugagcgccuccaaggaggugaaaucuuuccuguggacccagagccucagacgggaacuguccggcuacugcucuaacaucaaacuucaagucguuaaggacgcucaggcccugcuccacgggcuggauuuuagcgagguguccaaugugcagcgccuuaugagaaagcagaaacgggacgauucugaccugaagcgccucagagaucugaaccaagcggucaauaaccugguggaacucaagagcacacagcagaaauccauucugcggguuggaacgcuuaccagcgacgaucugcucacacuggcugccgaccuugagaagcugaaaucuaaggugauccgcaccgaaagaccccucuccagcggcgucuauauggggaaucugucuacacagcaacuggagcagcggcgcgcccuccugaacaugauuggaauggugggcggggcucagggaacccagccuggcagagauggcguugugcgggucugggacgugaaaaauccggaucuucugaacaaucaauucgggacaaugcccucccucacccuggccugucuuacgaagcagggacagguggaccugaacgaugcuguccucgcccugaccgaccugggccucaucuacacagcgaaguauccuaauagcucugaccuggaucgccuuucccaaagccaucccauucugaacaugguugacaccaaaaaguccucucucaauaucagcggguacaacuuuucccugggagccgcugugaaagccggcgcuugcaugcuugaugggggaaauaugcuggagacaaucaaggugaccccucagacgauggacggcauucucaaaagcauccugaaggucaaaaagucucugggcauguucguguccgauacacccggggaaagaaacccuuaugagaacauucucuacaagaucugucugagcggagacggcuggccguauauugccucucggaccagcaucguugggcgcgcgugggaaaauacaaccguggaucuugaguccgacggaaaaccccagaaggucggcucugccgggagcaacaaaucccugcagagcgcuggauuuccuaccggccucacauacucucaacugaugacgcugaaggauuccaugaugcagcuugaccccagcgccaaaaccuggauugauaucgagggcagaccugaagaccccguggagaucgcucucuaccagccgaugucugggugcuauauucacuucuuucgggaaccuacagaccugaagcaguucaagcaagaugccaaauacucccauggaaucgacguugccgaucuguuucccgcucagccuggccucaccagcgcggugauugaggcccugcccagaaauaugguccuuacaugucagggguccgacgauaucaagcgccugcucgacucucagggacggaaagauauuaagcugaucgacaucgcucugagcaaagccgauuccagacgcuucgaaaacgccgugugggaccaaugcaaggaucuuugucacaugcauaccggcgucgugguugagaagaaaaagagagggggcaaagaggaaauuacgccccacugcgcucucauggacuguaucauguaugaugccgcggugucuggaggccugaauauuccuguccugcgggcugugcucccgcgcgacaugguuuuucggacaagcucccccaaggugguccugugaggacuaguaauaaggaaacuguaugaaugucugugggcaggaagugaagagauccuucuguaaagguuuuuggaauuaugucugcugaauaauaaacuuuuuugaaauaauaaaucugguagaaaaaugagaucuaaaaaaaaaaaaaaaaaaaaaaaaaaaaaaaaaaaaaaaaaaaaaaaaaaaaaaaaaaaaaaaaugcaucccccccccccccccccccccccccccccccaaaggcucuuuucagagccaccagaauu

SEQ ID NO: 10531 - RNA, 2050 nt, Artificial Sequence
  mRNA product Design b-4 comprising derived and/or modified sequence from LASV(Lassa virus/H.sapiens-wt/NGA/2016/ISTH_0009;Clade II)__AVO03572__NP (opt5)
gggagagucccgcagucggcguccagcggcucugcuuguucgugugugugucguugcaggccuuauucaagcuuaccaugagcgccuccaaggaggugaaaucuuuccuguggacccagagccucagacgggaacuguccggcuacugcucuaacaucaaacuucaagucguuaaggacgcucaggcccugcuccacgggcuggauuuuagcgagguguccaaugugcagcgccuuaugagaaagcagaaacgggacgauucugaccugaagcgccucagagaucugaaccaagcggucaauaaccugguggaacucaagagcacacagcagaaauccauucugcggguuggaacgcuuaccagcgacgaucugcucacacuggcugccgaccuugagaagcugaaaucuaaggugauccgcaccgaaagaccccucuccagcggcgucuauauggggaaucugucuacacagcaacuggagcagcggcgcgcccuccugaacaugauuggaauggugggcggggcucagggaacccagccuggcagagauggcguugugcgggucugggacgugaaaaauccggaucuucugaacaaucaauucgggacaaugcccucccucacccuggccugucuuacgaagcagggacagguggaccugaacgaugcuguccucgcccugaccgaccugggccucaucuacacagcgaaguauccuaauagcucugaccuggaucgccuuucccaaagccaucccauucugaacaugguugacaccaaaaaguccucucucaauaucagcggguacaacuuuucccugggagccgcugugaaagccggcgcuugcaugcuugaugggggaaauaugcuggagacaaucaaggugaccccucagacgauggacggcauucucaaaagcauccugaaggucaaaaagucucugggcauguucguguccgauacacccggggaaagaaacccuuaugagaacauucucuacaagaucugucugagcggagacggcuggccguauauugccucucggaccagcaucguugggcgcgcgugggaaaauacaaccguggaucuugaguccgacggaaaaccccagaaggucggcucugccgggagcaacaaaucccugcagagcgcuggauuuccuaccggccucacauacucucaacugaugacgcugaaggauuccaugaugcagcuugaccccagcgccaaaaccuggauugauaucgagggcagaccugaagaccccguggagaucgcucucuaccagccgaugucugggugcuauauucacuucuuucgggaaccuacagaccugaagcaguucaagcaagaugccaaauacucccauggaaucgacguugccgaucuguuucccgcucagccuggccucaccagcgcggugauugaggcccugcccagaaauaugguccuuacaugucagggguccgacgauaucaagcgccugcucgacucucagggacggagagauauuaaacugaucgacaucgcucugagcaaggccgauucccgccgguucgaaaacgccgugugggaccaaugcaaagaucuuugucacaugcauaccggcgucgugguugagaagaagaaaagagggggcaaggaggaaauuacgccccacugcgcucucauggacuguaucauguaugaugccgcggugucuggaggccugaauauuccuguccugcgcgcugugcucccgcgggacaugguuuuuagaacaagcucccccaaagugguccugugaggacuaguaauaaggaaacuguaugaaugucugugggcaggaagugaagagauccuucuguaaagguuuuuggaauuaugucugcugaauaauaaacuuuuuugaaauaauaaaucugguagaaaaaugagaucuaaaaaaaaaaaaaaaaaaaaaaaaaaaaaaaaaaaaaaaaaaaaaaaaaaaaaaaaaaaaaaaaugcaucccccccccccccccccccccccccccccccaaaggcucuuuucagagccaccagaauu

SEQ ID NO: 10532 - RNA, 2050 nt, Artificial Sequence
  mRNA product Design b-4 comprising derived and/or modified sequence from LASV(Lassa virus/H.sapiens-wt/NGA/2016/ISTH_0017;Clade II)__AVO03568__NP (opt5)
gggagagucccgcagucggcguccagcggcucugcuuguucgugugugugucguugcaggccuuauucaagcuuaccaugagcgccuccaaggaggugaaaucuuuccuguggacccagagccucagacgggaacuguccggcuacugcucuagcaucaaacuucaagucguuaaggacgcucaggcccugcuccacgggcuggauuuuuccgaggugucuaacgugcagcgccuuaugagaaagcagaaacgggacgauagcgaccugaagcgccucagagaucugaaucaagcggucaacaaucugguggaacucaaguccacacagcagaaaagcauucugcggguuggaacgcuuaccucugacgaucugcucacacuggcugccgaccuugagaagcugaaauccaaggugauccgcaccgaaagaccccucagcucuggcgucuauauggggaaccuguccacacagcaacuggagcagcggcgcgcccuccugaauaugauuggaauggcuggcggggcccagggaacccagccuggcagagauggcgugguucgggugugggacgucaaaaacccggaucuucugaauaaccaauucgggacaaugcccagccucacccuggcuugucuuacgaagcagggacagguggaccugaaugaugccgugcucgcgcugaccgaccugggccucaucuacacagccaaguauccuaacucuuccgaccuggaucgccuuagccaaucccaucccauucugaauauggucgacaccaaaaagucuagccucaacaucuccggguacaauuuuagccugggagcugccguuaaagcuggcgccugcaugcuugaugggggaaacaugcuggagacaaucaaggugaccccucagacgauggacggcauucucaaaucuauccugaaggugaaaagaucccugggcauguucgucagcgaugcgcccggggaacggaauccuuaugagaacauucucuacaagaucugucugucuggagacggcuggccguauauugccagccgcacauccaucguggggagagcuugggaaaacaccacaguugaucuugagucugacggaaagccccagaaagugggcgccaccgggagcaauaagucccugcagagcgcuggauuuccuaccggccucacauacucucaacugaugacgcugaaagauuccaugaugcagcuugaccccagcgccaagaccuggauugauaucgagggccggccugaagaccccgucgagguggcccucuaccagccgguuucugggugcuauauccacuucuuuagagaaccuacagaccugaaacaguucaagcaagaugcuaaguacucccauggaauugacguggcggaucuguuucccgcccagccuggccucaccagcgcugucaucgaggcccugccccgcaacauggugcuuacaugucagggguccgacgauauuaaaaagcugcucgacucucagggacggaaagauaucaagcugauugacaucgcccugagcaaagcugauuccagacgcuucgaaaaugccgucugggaccaaugcaaggaucuuugucacaugcauaccggcgugguuguggagaagaaaaagagagggggcaaagaggaaaucacgccccacugcgcgcucauggacuguauuauguaugaugcugccgucucuggaggccugaacaucccugugcugcgggccguucucccgcgcgacaugguguuucggacaagcucccccaaggucgugcugugaggacuaguaauaaggaaacuguaugaaugucugugggcaggaagugaagagauccuucuguaaagguuuuuggaauuaugucugcugaauaauaaacuuuuuugaaauaauaaaucugguagaaaaaugagaucuaaaaaaaaaaaaaaaaaaaaaaaaaaaaaaaaaaaaaaaaaaaaaaaaaaaaaaaaaaaaaaaaugcaucccccccccccccccccccccccccccccccaaaggcucuuuucagagccaccagaauu

SEQ ID NO: 10533 - RNA, 2050 nt, Artificial Sequence
  mRNA product Design b-4 comprising derived and/or modified sequence from LASV(Lassa virus/H.sapiens-wt/NGA/2018/ISTH_0959;Clade II)__AVV65100__NP (opt5)
gggagagucccgcagucggcguccagcggcucugcuuguucgugugugugucguugcaggccuuauucaagcuuaccaugagcgccuccaaggaggugaaaucuuuccuguggacccagagccucagacgggaacuguccggcuacugcucuaacaucaaacuucaagucguuaaggacgcucaggcccugcuccacgggcuggauuuuagcgagguguccaaugugcagcgccuuaugagaaagcagaaacgggacgauucugaccugaagcgccucagagaucugaaccaagcggucaauaaccugguggaacucaagagcacccagcagaaauccauucugcggguuggaacgcuuaccagcgacgaucugcucacacuggcugccgaccuugagaagcugaaaucuaaggugauccgcaccgaaagaccccucuccagcggcgucuauauggggaaucugucuacacagcaacuggagcagcggcgcgcccuccugaaccuuauuggaauggugggcggggcucagggaacccagccuggcagagauggcguugugcgggucugggacgugaaaaauccggaucugcucaacaaucaauucgggacaaugcccucccugacccuugccugucugacgaagcagggacagguggaccucaacgaugucguucuggcucugaccgaccucggccugaucuacacagccaaguauccuaauagcucugaccuugaucgccugucccaaagccaucccauucucaacaugguggacaccaaaaaguccucucugaauaucagcggguuuaacuucucccuuggagcggccgugaaagcuggcgccugcaugcuggaugggggaaauaugcucgagacaaucaaggucaccccucagacgauggacggcauucugaaaagcauccugaaggugaaaaagucucucggcauguuuguuuccgauacacccggggaaagaaacccuuacgagaacauucuguauaagaucugucuuagcggagacggcuggccguacauugcuucucggaccagcaucguggggcgcgccugggaaaauacaaccgucgaucuggaguccgacggaaaaccccacaaggugggcaccgcggggucuaacaaaagccuccaguccgccggauucccuacaggccugacguauagccagcugaugacccuuaaggauucuaugaugcaacucgaccccuccgcuaaaacauggauugauaucgagggcagaccugaagaccccguugagaucgcccuguaccagccgaugagcgggugcuacauucacuuuuuccgggaaccuaccgaccugaagcaguuuaagcaggaugcuaaauauucucauggaaucgacguggccgaucucuuccccgcccaaccuggccugacauccgcugucauugaggcgcuucccagaaauauggugcugaccugucaggggagcgacgauaucaagcgccuccuggacucccagggacggaaagauauuaagcugaucgacaucgcccuuucuaaaacggauagcagacgcuuugaaaacgcugucugggaccagugcaaggaucucugucauaugcacacaggcgugguuguggagaagaaaaagagagggggcaaagaggaaauuacaccccacugcgcccugauggacuguaucauguacgaugccgcugucuccggaggccugaauauuccugugcuccgggccguucugccgcgcgacaugguguuccggaccucuagccccaaggucgugcuuugaggacuaguaauaaggaaacuguaugaaugucugugggcaggaagugaagagauccuucuguaaagguuuuuggaauuaugucugcugaauaauaaacuuuuuugaaauaauaaaucugguagaaaaaugagaucuaaaaaaaaaaaaaaaaaaaaaaaaaaaaaaaaaaaaaaaaaaaaaaaaaaaaaaaaaaaaaaaaugcaucccccccccccccccccccccccccccccccaaaggcucuuuucagagccaccagaauu

SEQ ID NO: 10534 - RNA, 2050 nt, Artificial Sequence
  mRNA product Design b-4 comprising derived and/or modified sequence from LASV(LASV003-NIG-2008;Clade II)__AIT17581__NP (opt5)
gggagagucccgcagucggcguccagcggcucugcuuguucgugugugugucguugcaggccuuauucaagcuuaccaugagcgccuccaaggaggugaaaucuuuccuguggacccagagccucagacgggaacuguccggcuacugcucuagcaucaaacuucaagucguuaaggacgcucaggcccugcuccacgggcuggauuuuuccgaggugucuaacgugcagcgccuuaugagaaagcagaaacgggacgauagcgaccugaagcgccucagagaucugaaucaagcggucaacaaucugguggaacucaaguccacccagcagaaaagcguucugcgggugggaacgcuuaccucugacgaucugcucacacuggcugccgaccuugagaagcugaaauccaaggucauucgcaccgaaagaccccucagcucuggcguguauauggggaaccuguccgcccagcaacuggagcagcggcgcacacuccugaauaugaucggaaugguuggcggggcucagggaacccagccuggcagagauggcgugguccgggugugggacgugaaaaacccggaucuucugaauaaccaauucgggacaaugcccagccucacccuggccugucuuacgaagcagggacaggucgaccugaaugauguugugcucgcucugaccgaccugggccucauuuacacagccaaguauccuaacucuuccgaccuggaucgccuuagccaaucccaucccauccugucuaugguggacaccaaaaagagcucccucaauauuagcggguacaacuuuucucugggagcggccgucaaagcuggcgccugcaugcuugaugggggaaauaugcuggagacaaucaaggugaccccucagacgauggacggcauccucaaauccauucugaagguuaaaaagagccugggcauguucgugucugauacacccggggaaagaaacccuuaugagaauauccucuacaagauuugucugagcggagacggcuggccguauaucgcuucccggaccucuauugucgggcgcgccugggaaaacacaaccguggaucuugagagcgacggaaaaccccagaagguuggcaccgcgggguccaacaaaagccugcagucugccggauuuccuacaggccucacguacucccaacugaugacccugaaggauagcaugaugcagcuugaccccucugcuaaaacauggaucgauauugagggcagaccugaagaccccguggagaucgcccucuaccagccgauguccgggugcuauauccacuucuuucgggaaccuaccgaccugaagcaguucaagcaagaugcuaaauacagccauggaauugacgucacagaucuguuucccgcccagccuggccucaccuccgccgugaucgaggcucugcccagaaauaugguccuuacgugucaggggucugacgauauuaagcgccugcucgacagccagggacggagagauaucaaacugauugacaucgcgcuguccaaggccgauucucgccgguucgaaaacgcugugugggaccaaugcaaagaucuuugucacaugcauacaggcguuguggucgagaagaagaaaagagggggcaaggaggaaaucacaccccacugcgcccucauggacuguauuauguaugaugccgcugugagcggaggccugaauaucccuguucugcgcgccgugcucccgcgggacauggucuuuagaaccuccagccccaaaguggugcugugaggacuaguaauaaggaaacuguaugaaugucugugggcaggaagugaagagauccuucuguaaagguuuuuggaauuaugucugcugaauaauaaacuuuuuugaaauaauaaaucugguagaaaaaugagaucuaaaaaaaaaaaaaaaaaaaaaaaaaaaaaaaaaaaaaaaaaaaaaaaaaaaaaaaaaaaaaaaaugcaucccccccccccccccccccccccccccccccaaaggcucuuuucagagccaccagaauu

SEQ ID NO: 10535 - RNA, 2050 nt, Artificial Sequence
  mRNA product Design b-4 comprising derived and/or modified sequence from LASV(LASV035-NIG-2009;Clade II)__AIT17589__NP (opt5)
gggagagucccgcagucggcguccagcggcucugcuuguucgugugugugucguugcaggccuuauucaagcuuaccaugagcgccuccaaggaggugaaaucuuuccuguggacccagagccucagacgggaacuguccggcuacugcucuagcaucaaacuucaagucguuaaagacgcucaggcccugcuccacgggcuggauuuuuccgaggugucuaacgugcagcgccuuaugagaaagcagaaacgggacgauagcgaccugaagcgccucagagaucugaaucaagcggucaacaaucugguggaacucaaguccacacagcagaaaagcauucugcggguuggaacgcuuaccucugacgaucugcucacacuggcugccgaccuugagaagcugaaauccaaggugauccgcaccgaaagaccccucagcucuggcgucuauauggggaaccuguccgcccagcaacuggagcagcggcgcgcucuccugaauaugauuggaauggugggcggggcccagggaacacagccuggcagagauggcguugugcgggucugggacgugaaaaacccggaucuucugaauaaccaauucgggaccaugcccagccucacacuggcuugucuuaccaagcagggacagguggaccugaaugaugccguccucgcgcugacggaccugggccucaucuacaccgccaaguauccuaacucuuccgaccuggaucgccuuagccaaucccaucccauucugaauaugguugacacaaagaagucuagccucaacaucuccggguacaauuuuagccugggagcugccgugaaagcuggcgccugcaugcuugaugggggaaacaugcuggagaccaucaaggugacaccucagaccauggacggcauucucaaaucuauccugaaggucaaaagaucccugggcauguucgugagcgauacgcccggggaacggaauccuuaugagaacauucucuacaagaucugucugucuggagacggcuggccguauauugcgagccgcacauccaucguugggagagccugggaaaacaccacaguggaucuugagucugacggaaagccccagaaagucggcaccaccgggagcaauaagucccugcagagcgcuggauuuccuacaggccucacguacucucaacugaugacccugaaagauuccaugaugcagcuugaccccagcgccaagacauggauugauaucgagggccggccugaagaccccguggagaucgcucucuaccagccgaugucugggugcuauauucacuucuuuagagaaccuaccgaccugaaacaguucaagcaagaugccaaguacucccauggaaucgacguugccgaucuguuucccgcucagccuggccucacaagcgcggugauugaggcccugccccgcaacaugguccuuaccugucagggguccgacgauaucaaaaagcugcucgacucucagggacggagagauauuaaacugaucgacaucgcucugagcaaggccgauucccgcaaauucgaaaaugccgugugggaccaaugcaaggaucuuugucacaugcauacgggcgucgugguugagaagaaaaagagagggggcaaagaggaaauuacaccccacugcgcucucauggacuguaucauguaugaugccgcggugucuggaggccugaacauuccuguccugcgggcugugcucccgcgcgacaugguuuuucggaccagcucccccaaggugguccugugaggacuaguaauaaggaaacuguaugaaugucugugggcaggaagugaagagauccuucuguaaagguuuuuggaauuaugucugcugaauaauaaacuuuuuugaaauaauaaaucugguagaaaaaugagaucuaaaaaaaaaaaaaaaaaaaaaaaaaaaaaaaaaaaaaaaaaaaaaaaaaaaaaaaaaaaaaaaaugcaucccccccccccccccccccccccccccccccaaaggcucuuuucagagccaccagaauu

SEQ ID NO: 10536 - RNA, 2050 nt, Artificial Sequence
  mRNA product Design b-4 comprising derived and/or modified sequence from LASV(LASV1000-NIG-2009;Clade II)__AIT17783__NP (opt5)
gggagagucccgcagucggcguccagcggcucugcuuguucgugugugugucguugcaggccuuauucaagcuuaccaugagcgccuccaaggaggugaaaucuuuccuguggacccagagccucagacgggaacuguccggcuacugcucuaacaucaaacuucaagucguuaaggacgcucaggcccugcuccacgggcuggauuuuagcgagguguccaaugugcagcgccuuaugagaaagcagaaacgggacgauucugaccugaagcgccucagagaucugaaccaagcggucaauaaccugguggaacucaagagcacacagcagaaauccauucugcggguuggaacgcuuaccagcgacgaucugcucacacuggcugccgaccuugagaagcugaaaucuaaggugauccgcaccgaaagaccccucuccagcggcgucuauauggggaaucugucuacacagcaacuggagcagcggcgcgcccuccugaacaugauuggaauggugggcggggcucagggaacccagccuggcagagauggcguugugcgggucugggacgugaaaaauccggaucuucugaacaaucaauucgggacaaugcccucccucacccuggccugucuuacgaagcagggacagguggaccugaacgaugucguucucgcucugaccgaccugggccucaucuacacagccaaguauccuaauagcucugaccuggaucgccuuucccaaagccaucccauucugaacaugguggacaccaaaaaguccucucucaauaucagcggguacaacuuuucccugggagcggccgugaaagcuggcgccugcaugcuugaugggggaaauaugcuggagacaaucaaggucaccccucagacgauggacggcauucucaaaagcauccugaaggugaaaaagucucugggcauguucguuuccgauacacccggggaaagaaacccuuaugagaacauucucuacaagaucugucugagcggagacggcuggccguauauugcuucucggaccagcaucguggggcgcgccugggaaaauacaaccgucgaucuugaguccgacggaaaaccccagaaggugggcaccgcggggucuaacaaaagccugcaguccgccggauuuccuacaggccucacguacagccaacugaugacccugaaggauucuaugaugcagcuugaccccuccgcuaaaacauggauugauaucgagggcagaccugaagaccccguugagaucgcccucuaccagccggugagcgggugcuauauucacuucuuucgggaaccuaccgaccugaagcaguucaagcaagaugcuaaauacucucauggaaucgacgucgccgaucuguuucccgcccagccuggccucacauccgcugugauugaggcgcugcccagaaauaugguccuuaccugucaggggagcgacgauaucaagcgccugcucgacucccagggacggagagauauuaaacugaucgacaucgcccugucuaaggcugauagccgccgguucgaaaacgccgugugggaccaaugcaaagaucuuugucacaugcauacgggcguuguggucgagaagaagaaaagagggggcaaggaggaaauuacaccccacugcgcccucauggacuguaucauguaugaugcugccguguccggaggccugaauauuccuguucugcgcgcggugcucccgcgggacauggucuuuagaaccucuagccccaaaguggugcugugaggacuaguaauaaggaaacuguaugaaugucugugggcaggaagugaagagauccuucuguaaagguuuuuggaauuaugucugcugaauaauaaacuuuuuugaaauaauaaaucugguagaaaaaugagaucuaaaaaaaaaaaaaaaaaaaaaaaaaaaaaaaaaaaaaaaaaaaaaaaaaaaaaaaaaaaaaaaaugcaucccccccccccccccccccccccccccccccaaaggcucuuuucagagccaccagaauu

SEQ ID NO: 10537 - RNA, 2050 nt, Artificial Sequence
  mRNA product Design b-4 comprising derived and/or modified sequence from LASV(LASV221-NIG-2010;Clade II)__AIT17625__NP (opt5)
gggagagucccgcagucggcguccagcggcucugcuuguucgugugugugucguugcaggccuuauucaagcuuaccaugagcgccuccaaggaggugaaaucuuuccuguggacccagagccucagacgggaacuguccggcuacugcucuagcaucaaacuucaagucguuaaggacgcucaggcccugcuccacgggcuggauuuuuccgaggugucuaacgugcagcgccuuaugagaaagcagcggcgcgacgauagcgaccugaaaagacuccgggaucugaaucaagcggucaacaaucugguggaacucaaguccacacagcaaaagagcauucugcgcguuggaacgcuuaccucugacgaucugcucacacuggcugccgaccuugagaaacugaaguccaaagugaucagaaccgaacggccccucagcucuggcgucuauauggggaaccuguccacacagcagcuggagcagcgcagagcccuccugaauaugauuggaauggugggcggggcucagggaacccagccuggccgggauggcguugugcgcgucugggacgugaagaacccggaucuucugaauaaccaauucgggacaaugcccagccucacccuggccugucuuacgaaacagggacagguggaccugaaugaugcuguccucgcccugaccgaccugggccucaucuacacagcgaaguauccuaacucuuccgaccuggauagacuuagccaaucccaucccauucugaauaugguugacaccaagaaaucuagccucaacaucuccggguacaauuuuagccugggagccgcugugaaggccggcgcuugcaugcuugaugggggaaacaugcuggagacaaucaaagugaccccucagacggucgacggcauucucaagucuauccugaaagugaagcggucccugggcauguucguuagcgauacacccggggaacgcaauccuuaugagaacauucucuacaaaaucugucugucuggagacggcuggccguauauugccagcagaaccuccaucguggggcgggcgugggaaaacacaaccgucgaucuugagucugacggaaagccccagaaggugggcaccgccgggagcaauaaaucccugcagagcgcuggauuuccuacaggccucacguacucucaacugaugacccugaaggauuccaugaugcagcuugaccccagcgccaaaacauggauugauaucgagggcagaccugaagaccccguugagaucgcucucuaccagccgaugucugggugcuauauucacuucuuucgcgaaccuaccgaccugaagcaguucaaacaagaugccaaguacucccauggaaucgacguggccgaucuguuucccgcucagccuggccucacaagcgcggucauugaggcccugccccggaacauggugcuuaccugucagggguccgacgauaucaagagacugcucgacucucagggacgccgggauauuaaacugaucgacaucgcucugagcaaggccgauuccagaaaauucgaaaaugccgucugggaccaaugcaaggaucuuugucacaugcauacgggcgugguuguggagaaaaagaagcgcgggggcaaagaggaaauuacaccccacugcgcucucauggacuguaucauguaugaugccgcggucucuggaggccugaacauuccugugcugcgggcuguucucccgagagacaugguguuucgcaccagcucccccaaggucgugcugugaggacuaguaauaaggaaacuguaugaaugucugugggcaggaagugaagagauccuucuguaaagguuuuuggaauuaugucugcugaauaauaaacuuuuuugaaauaauaaaucugguagaaaaaugagaucuaaaaaaaaaaaaaaaaaaaaaaaaaaaaaaaaaaaaaaaaaaaaaaaaaaaaaaaaaaaaaaaaugcaucccccccccccccccccccccccccccccccaaaggcucuuuucagagccaccagaauu

SEQ ID NO: 10538 - RNA, 2050 nt, Artificial Sequence
  mRNA product Design b-4 comprising derived and/or modified sequence from LASV(LASV237-NIG-2010;Clade II)__AIT17639__NP (opt5)
gggagagucccgcagucggcguccagcggcucugcuuguucgugugugugucguugcaggccuuauucaagcuuaccaugagcgccuccaaggaggugaaaucuuuccuguggacccagagccucagacgggaacuguccggcuacugcucuaacaucaaacuucaagucguuaaggacgcucaggcccugcuccacgggcuggauuuuagcgagguguccaaugugcagcgccuuaugagaaagcagaaacgggacgauucugaccugaagcgccucagagaucugaaccaagcggucaauaaccugguggaacucaagagcacacagcagaaauccauucugcggguuggaacgcuuaccagcgacgaucugcucacacuggcugccgaccuugagaagcugaaaucuaaggugauccgcaccgaaagaccccucuccagcggcgucuauauggggaaucugucuacacagcaacuggagcagcggcgcgcccuccugaacaugauuggaauggugggcggggcucagggaacccagccuggcagagauggcguugugcgggucugggacgugaaaaauccggaucuucugaacaaucaauucgggacaaugcccucccucacccuggccugucuuacgaagcagggacagguggaccugaacgaugcuguccucgcccugaccgaccugggccucaucuacacagcgaaguauccuaauagcucugaccuggaucgccuuucccaaagccaucccauucugaacaugguugacaucaaaaaguccucucucaauaucagcggguacaacuuuucccugggagccgcugugaaagccggcgcuugcaugcuugaugggggaaauaugcuggagaccauuaaggugacaccucagaccauggacggcauccucaaaagcauucugaaggucaaaagaucucugggcauguucguguccgauacgcccggggaacggaacccuuaugagaacauccucuacaagauuugucugagcggagacggcuggccguauaucgccucucgcacaagcauuguugggagagcgugggaaaauaccacaguggaucuugaguccgacggaaagccccagaaagucggcucugccgggagcaacaagucccugcagagcgcuggauuuccuaccggccucaccuacucucaacugaugacacugaaagauuccaugaugcagcuugaccccagcgccaagacguggaucgauaucgagggccggccugaagaccccguggagauugcucucuaccagccgaugucugggugcuauauccacuucuuuagagaaccuaccgaccugaaacaguucaagcaagaugccaaguacucccauggaauugacguugccgaucuguuucccgcucagccuggccucacaagcgcggugaucgaggcccugccccgcaauaugguccuuaccugucagggguccgacgauauuaaacggcugcucgacucucagggaagacgcgauaucaagcugaucgacauugcucugagcaaagccgauucccggagauucgaaaacgccgugugggaccaaugcaaggaucuuugucacaugcauacaggcgucgugguugagaaaaagaagcgcgggggcaaagaggaaaucacgccccacugcgcucucauggacuguauuauguaugaugccgcggugucuggaggccugaauaucccuguccugcgggcugugcucccgagagacaugguuuuucgcaccagcucccccaaggugguccugugaggacuaguaauaaggaaacuguaugaaugucugugggcaggaagugaagagauccuucuguaaagguuuuuggaauuaugucugcugaauaauaaacuuuuuugaaauaauaaaucugguagaaaaaugagaucuaaaaaaaaaaaaaaaaaaaaaaaaaaaaaaaaaaaaaaaaaaaaaaaaaaaaaaaaaaaaaaaaugcaucccccccccccccccccccccccccccccccaaaggcucuuuucagagccaccagaauu

SEQ ID NO: 10539 - RNA, 2050 nt, Artificial Sequence
  mRNA product Design b-4 comprising derived and/or modified sequence from LASV(LASV253-NIG-2011;Clade II)__AIT17671__NP (opt5)
gggagagucccgcagucggcguccagcggcucugcuuguucgugugugugucguugcaggccuuauucaagcuuaccaugagcgccuccaaggaggugaaaucuuuccuguggacccagagccucagacgggaacuguccggcuacugcucuagcaucaaacuucaagucguuaaggacgcucaggcccugcuccacgggcuggauuuuuccgaggugucuaacgugcagcgccuuaugagaaagcagaaacgggacgauagcgaccugaagcgccucagagaucugaaucaagcggucaacaaucugguggaacucaaguccacccagcagaaaagcguucugcgggugggaacgcuuaccucugacgaucugcucacacuggcugccgaccuugagaagcugaaauccaaggucauucgcaccgaaagaccccucagcucuggcguguauauggggaaccuguccacacagcaacuggagcagcggcgcgcccuccugaauaugaucggaaugguuggcggggcucagggaacccagccuggcagagauggcgugguccgggugugggacgugaaaaacccggaucuucugaauaaccaauucgggacaaugcccagccucacccuggccugucuuacgaagcagggacaggucgaccugaaugauguugugcucgcucugaccgaccugggccucauuuacacagccaaguauccuaacucuuccgaccuggaucgccuuagccaaucccaucccauccugaauaugguggacaccaaaaagucuagccucaacauuuccggguacaauuuuagccugggagcggccgucaaagcuggcgccugcaugcuugaugggggaaacaugcuggagacaaucaaggugaccccucagacgauggacggcauccucaaaucuauucugaagguuaaaaagucccugggcauguucgugagcgauacacccggggaaagaaauccuuaugagaacauccucuacaagauuugucugucuggagacggcuggccguauaucgcuagccggaccuccauugucgggcgcgccugggaaaacacaaccguggaucuugagucugacggaaaaccccagaagguuggcaccgcggggagcaauaaaucccugcagagcgccggauuuccuacaggccucacguacucucaacugaugacccugaaggauuccaugaugcagcuugaccccagcgcuaaaacauggaucgauauugagggcagaccugaagaccccguggagaucgcccucuaccagccgaugucugggugcuauauccacuucuuucgggaaccuaccgaccugaagcaguucaagcaagaugcuaaauacucccauggaauugacgucacagaucuguuucccgcccagccuggccucaccagcgccgugaucgaggcucugcccagaaacaugguccuuacgugucagggguccgacgauauuaagcgccugcucgacucucagggacggagagauaucaaacugauugacaucgcgcugagcaaggccgauucccgccgguucgaaaaugcugugugggaccaaugcaaagaucuuugucacaugcauacaggcguuguggucgagaagaagaaaagagggggcaaggaggaaaucacaccccacugcgcccucauggacuguauuauguaugaugccgcugugucuggaggccugaacaucccuguucugcgcgccgugcucccgcgggacauggucuuuagaaccagcucccccaaaguggugcugugaggacuaguaauaaggaaacuguaugaaugucugugggcaggaagugaagagauccuucuguaaagguuuuuggaauuaugucugcugaauaauaaacuuuuuugaaauaauaaaucugguagaaaaaugagaucuaaaaaaaaaaaaaaaaaaaaaaaaaaaaaaaaaaaaaaaaaaaaaaaaaaaaaaaaaaaaaaaaugcaucccccccccccccccccccccccccccccccaaaggcucuuuucagagccaccagaauu

SEQ ID NO: 10540 - RNA, 2050 nt, Artificial Sequence
  mRNA product Design b-4 comprising derived and/or modified sequence from LASV(LASV254-NIG-2011;Clade II)__AIT17675__NP (opt5)
gggagagucccgcagucggcguccagcggcucugcuuguucgugugugugucguugcaggccuuauucaagcuuaccaugagcgccuccaaggaggugaaaucuuuccuguggacccagagccucagacgggaacuguccggcuacugcucuagcaucaaacuucaagucguuaaggacgcucaggcccugcuccacgggcuggauuuuuccgaggugucuaacgugcagcgccuuaugagaaagcagaaacgggacgauagcgaccugaagcgccucagagaucugaaucaagcggucaacaaucugguggaacucaaguccacacagcagaaaagcguucugcgggugggaacgcuuaccucugacgaucugcucacacuggcugccgaccuugagaagcugaaauccaaggucauucgcaccgaaagaccccucagcucuggcguguauauggggaaccuguccacacagcaacuggagcagcggcgcgcccuccugaauaugaucggaaugguuggcggggcucagggaacccagccuggcagagauggcgugguccgggugugggacgugaaaaacccggaucuucugaauaaccaauucgggacaaugcccagccucacccuggccugucuuacgaagcagggacaggucgaccugaaugaugcuguucucgcccugaccgaccugggccucauuuacacagcgaaguauccuaacucuuccgaccuggaucgccuuagccaaucccaucccauccugaauaugguggacaccaaaaagucuagccucaacauuuccggguacaauuuuagccugggagccgcugugaaagccggcgcuugcaugcuugaugggggaaacaugcuggagacaaucaaggucaccccucagacgauggacggcauccucaaaucuauucugaaggugaaaaagucccugggcauguucguuagcgauacacccggggaaagaaauccuuaugagaacauccucuacaagauuugucugucuggagacggcuggccguauaucgccagccggaccuccauuguggggcgcgcgugggaaaacacaaucgucgaucuugagucugacggaaaaccccagaaggugggcaccgccgggagcaauaaaucccugcagagcgcuggauuuccuaccggccucacauacucucaacugaugacgcugaaggauuccaugaugcagcuugaccccagcgccaaaaccuggauugauaucgagggcagaccugaagaccccguugagaucgcucucuaccagccgaugucugggugcuauauucacuucuuucgggaaccuacagaccugaagcaguucaagcaagaugccaaauacucccauggaaucgacguggccgaucuguuucccgcucagccuggccucaccagcgcggucauugaggcccugcccagaaacauggugcuuacaugucagggguccgacgauaucaagcgccugcucgacucucagggacggagagauauuaaacugaucgacaucgcucugagcaaggccgauucccgccgguucgaaaaugccgucugggaccaaugcaaagaucuuugucacaugcauaccggcgugguuguggagaagaagaaaagagggggcaaggaggaaauuacgccccacugcgcucucauggacuguaucauguaugaugccgcggucucuggaggccugaacauuccugugcugcgcgcuguucucccgcgggacaugguguuuagaacaagcucccccaaagucgugcugugaggacuaguaauaaggaaacuguaugaaugucugugggcaggaagugaagagauccuucuguaaagguuuuuggaauuaugucugcugaauaauaaacuuuuuugaaauaauaaaucugguagaaaaaugagaucuaaaaaaaaaaaaaaaaaaaaaaaaaaaaaaaaaaaaaaaaaaaaaaaaaaaaaaaaaaaaaaaaugcaucccccccccccccccccccccccccccccccaaaggcucuuuucagagccaccagaauu

SEQ ID NO: 10541 - RNA, 2050 nt, Artificial Sequence
  mRNA product Design b-4 comprising derived and/or modified sequence from LASV(Nig08-04;Clade II)__ADU56611__NP (opt5)
gggagagucccgcagucggcguccagcggcucugcuuguucgugugugugucguugcaggccuuauucaagcuuaccaugagcgccuccaaggaggugaaaucuuuccuguggacccagagccucagacgggaacuguccggcuacugcucuaacaucaaacuucaagucguuaaggacgcucaggcccugcuccacgggcuggauuuuagcgagguguccaaugugcagcgccuuaugagaaagcagaaacgggacgauggagaccugaagcgccucagagaucugaaccaagcggucaauaaccugguggaacucaagucuacccagcagaaaagcguucugcgggugggcacgcuuaccuccgacgaucugcucacacuggcugccgaccuugagaagcugaaaagcaaggucauucgcaccgaaagaccccucucuuccgggguguauaugggaaaucugagcacacagcaacuggagcagcggaaagcccuccugucuaugaucggcaugguugggggagcucagggcacccagccuggccgcgaugggguggucagagugugggacgugaagaacccggaucuucugaauaaccaauucggaacaaugcccucccucacccuggccugucuuacgaagcagggccaggucgaccugaaugaugcuguucucgcccugaccgaccuggggcucauuuacacagcgaaauauccuaacagcucugaccuggaucggcuuucccaaagccaucccauccugaauaugguggacaccaagaaauccucucucaacauuagcggauacaauuuuucccugggcgccgcugugaaggccggggcuugcaugcuugauggaggcaacaugcuggagacaaucaaagucaccccucagacgauggacggcauccucaagagcauucugaaagugaagcgcucucuggggauguucguuuccgauacacccggagaaagaaauccuuaugagaacauccucuacaagauuugucugagcggcgacggguggccguauaucgccucucggaccagcauugugggacgcgcgugggaaaacacaaccgucgaucuugaguccgacggcaaaccccagaagguggggaccgccggaucuaauaaaagccugcaguccgcuggcuuuccuacaggccucacguacagccaacugaugacccugaaggauucuaugaugcagcuugaccccuccgccaaaacauggaucgauauugaggggagaccugaagaccccguugagaucgcucucuaccagccgaugagcggaugcuauauccacuucuuucgggaaccuaccgaccugaagcaguucaagcaagaugccaaauacucucauggcauugacgugacagaucuguuuuccgcccagcccgggcucaccagcgcugucaucgaggcgcugccuagaaacauggugcuuacgugucagggauccgacgauauuaagaaacugcucgacucucagggccgccgggauaucaagcugauugacaucagccugaauaaagccgauuccagacgcuucgaaaacgcugucugggaccaaugcaaggaucuuugucacaugcauacaggggugguuguggagaagaaaaagcggggcggaaaagaggaaaucacaccccacugcgcccucauggacuguauuauguuugaugccgcugucucuggcgggcugaauauccccauucugagagccgugcucccucgcgacaugguuuuccggaccagcuccccgaaggugguccugugaggacuaguaauaaggaaacuguaugaaugucugugggcaggaagugaagagauccuucuguaaagguuuuuggaauuaugucugcugaauaauaaacuuuuuugaaauaauaaaucugguagaaaaaugagaucuaaaaaaaaaaaaaaaaaaaaaaaaaaaaaaaaaaaaaaaaaaaaaaaaaaaaaaaaaaaaaaaaugcaucccccccccccccccccccccccccccccccaaaggcucuuuucagagccaccagaauu

SEQ ID NO: 10542 - RNA, 2053 nt, Artificial Sequence
  mRNA product Design b-4 comprising derived and/or modified sequence from LASV(GA391;Clade III)__AAA46284__NP (opt5)
gggagagucccgcagucggcguccagcggcucugcuuguucgugugugugucguugcaggccuuauucaagcuuaccaugagcgccuccaaggaggugagaucuugccuguggacccagagccuccggcgcgaacuguccggcuacuguucuaacaucaaacuucaagucguuaaggacgcucaggcccugcuccacgggcuggauuucagcgagguguccaaugugcagagacuuaugcggaaacagaagcgcgacgauggagaccugaaaagacuccgggaucugaaccaagcggucaauaaccugguggaacucaagucuacacagcagaaaagcguucugcgcgugggcacgcuuuccagcgacgaucugcucauucuggcugccgaccuugagaaacugaagucuaaagucaccagaacagaacggccccucuccagcgggguguauaugggaaaucugucuucccagcaacuggaucagcgcagagcccuccugaacaugaucggcaugaccgggguuagcggaggcggcaagggggcuucuaauggaauugugcgggucugggacgugaaaaacgccgagcuucugaauaaccaguuuggcacaaugccuucccucacccuggcuugccuuacaaagcaggggcaaguggaucugaaugacgccguccaggcgcucaccgaucugggacugaucuacacggccaaguauccgaacagcuccgaccucgaccgccugucucagagccaucccauucuuaauaugaucgauaccaaaaaguccagccugaacaucucuggcuacaauuucucccucggggcugccguuaaagcuggagccuguaugcuggacggcggcaacaugcuugagacaauuaaggugagcccucaaaccauggaugggauccugaaaucuauucucaaggugaaaaagagccugggaauguuugucuccgacacacccggcgaaagaaacccuuaugagaauauccuguacaagauuugccucucuggggauggauggagcuauaucgcgucccggaccagcauugugggccgcgccugggaaaacacgguuguggaccuggagcaggauaauaaaccccagaagaucgggaacggaggcucuaauaaaucccuucagagcgcuggcuucgccgcugggcugaucuacucucaacucaugacacugaaggacuuuaaauguuucaaccugauuccuaaugccaagaccuggauggauaucgagggaagaccggaagaccccgucgagauugcccuuuaccagccuuccagcggcugcuaugugcacuuuuuccgggaacccacagaucucaagcaguuuaaacaggacgcuaaguacucccaugggagagacguuaccgaucuguucgcggcccaaccuggacugaccucugcugugaucgaggcccucccccgcaacauggucauuacaugucagggcagcgaagacauccggaaacugcuugagucccaggggagacgcgauaucaagcugauugacaucacgcucucuaaagccgauagccggaaguuugagaaugcugugugggaccaguucaaggaucugugccacaugcauaccggcgucgugguugaaaagaagaaaagaggaggcaaggaggaaauuacaccgcacugugcccugauggacugcaucauguuugaugcggcuguguccgggggacuugacgccaaaguccuccgcgugguucugccucgggauaugguguucagaaccagcacacccaaggucgugcugugaggacuaguaauaaggaaacuguaugaaugucugugggcaggaagugaagagauccuucuguaaagguuuuuggaauuaugucugcugaauaauaaacuuuuuugaaauaauaaaucugguagaaaaaugagaucuaaaaaaaaaaaaaaaaaaaaaaaaaaaaaaaaaaaaaaaaaaaaaaaaaaaaaaaaaaaaaaaaugcaucccccccccccccccccccccccccccccccaaaggcucuuuucagagccaccagaauu

SEQ ID NO: 10543 - RNA, 2050 nt, Artificial Sequence
  mRNA product Design b-4 comprising derived and/or modified sequence from LASV(Nig08-A19;Clade III)__ADU56619__NP (opt5)
gggagagucccgcagucggcguccagcggcucugcuuguucgugugugugucguugcaggccuuauucaagcuuaccaugagcgccuccaaggaggugaaaucuuuccuguggacccagagccucagacgggaacuguccggcuacugcucuaacaucaaacuucaagucguuaaggacgcucaggcccugcuccacgggcuggauuuuagcgagguguccaaugugcagcgccuuaugagaaagcagaaacgggacgauggagaccugaagcgccucagagaucugaaccaagcggucaauaaccugguggaacucaagucuacacagcagaaaagcguucugcgggugggcacgcuuuccagcgacgaucugcucguccuggcugccgaccuugagaagcugaaaucuaaggugguucgcaccgaaagaccccucuccagcgggauuuauaugggaaaucugucuucccagcaacuggaucagcggaaagcccuccugaacaugaucggcaugacagggggaaauggcggccgcaacaccacaagcgacgggauugugagagucugggaugugaagaaugcugagcuucugaacaaucaguucggaaccaugccuucucucacacuggccugucuuaccaagcagggccaaguggaccugaacgaugcuguccaggcccucacggaccuggggcugaucuacaccgcgaaauaucccaauuccagcgaccucgaucggcuggcccagucccauccgauucuuaacaugaucgacacaaagaaaucuagccugaauaucuccggauacaacuuuagccucggcgcugccguuaaggcuggggccugcaugcuggauggaggcaacaugcuugagaccauuaaagugucuccucaaacaauggacggcauccugaaguccauucucaaagugaagcgcagccuggggauguucaucucugauacccccggagaaagaaauccuuaugagaacauucuguacaagaucugucucagcggcgacggguggcccuauauugcgucccggacgucuaucgucggacgcgccugggaaaauacagugguugaucuggagagcgacaacaaaccucagaagaccggcaaugggggauccaacaaaagccuucagucugcuggcuuugccgcuggccugacauacucccagcucaugacccugaaggauagcaugcugcaacuugacccgaaugccaaaaccuggauggauaucgaggggagacccgaagacccuguggagauugcccucuaccagcccucuuccggaugcuauauccacuucuuucgggaaccuacagaccugaagcaguucaagcaggaugcuaaauacagccauggcauugacgucacggaucuguuugcggcccaacccgggcucaccuccgcugugaucgaggcccugccgagaaacaugguuauuacaugucagggaucugaagacauccgcaaacuucuggagagccagggccggagagauaucaagcucauugacaucucccugucuaagguggauagccgcaaauucgagaaugccgucugggaccaguuuaaggaucugugccacaugcauaccgggauuguggucgaaaagaaaaagcggggcggaaaagaggaaaucacaccucacugugcucuuauggacugcauuauguucgaugccgcgguguccggcgggguugacgcuaaggugcucagagccguccugccccgcgauaugguguuucggaccagcacgccuaaaguugugcugugaggacuaguaauaaggaaacuguaugaaugucugugggcaggaagugaagagauccuucuguaaagguuuuuggaauuaugucugcugaauaauaaacuuuuuugaaauaauaaaucugguagaaaaaugagaucuaaaaaaaaaaaaaaaaaaaaaaaaaaaaaaaaaaaaaaaaaaaaaaaaaaaaaaaaaaaaaaaaugcaucccccccccccccccccccccccccccccccaaaggcucuuuucagagccaccagaauu

SEQ ID NO: 10544 - RNA, 2050 nt, Artificial Sequence
  mRNA product Design b-4 comprising derived and/or modified sequence from LASV(G1180-SLE-2010;Clade IV)__AIT17169__NP (opt5)
gggagagucccgcagucggcguccagcggcucugcuuguucgugugugugucguugcaggccuuauucaagcuuaccaugagcgccuccaaggagaucaaaucuuuccuguggacccagagccucagacgggaacuguccggcuacugcucuaacauuaagcugcaaguggucaaagacgcucaggcccugcuccacgggcuggauuuuagcgagguuuccaaugugcagcgccuuaugagaaaggaacggcgcgacgauaacgaccugaaaagacuccgggaucugaaucaggcggugaacaaucuggucgagcucaagucuacacaacaaaagagcauccugcgcgugggaacgcuuaccuccgacgaucugcucauucuggcugccgaccuugaaaaacuuaagagcaaaguuaucagaacagagcggccccucucugccggcguguauauggggaaccuguccagccagcagcuggaucagcgcagagcucuccugucuaugauuggaauguccagcggcaaucagcgggcccaggcugggcgcgacggagucgugagaguuugggaugugaagaacgucgagcuucugaauaaccaguucggcaccaugccuucucucacacuggccugucuuaccaaacaaggccagguggaccugaaugaugcggugcaggcccucacagaccuggggcugaucuacaccgcuaaguauccgaacacguccgaccucgaucggcugacccaaagccaucccauccuuaauaugauugacacaaagaaauccucucugaacaucagcggauacaauuuuucccucggcgccgcugucaaggccggggcgugcaugcuggauggaggcaacaugcuugaaaccauuaaaguuagcccucagacaauggacgggauccugaagucuauucucaaagugaagaaagcccugggaauguucaucuccgauacccccggcgagcgcaacccuuaugaaaauauucuguacaagaucugucucagcggcgacggguggcccuauaucgcuucuagaacgagcauuacaggacgggccugggagaacaccguggucgaucuggaguccgacggcaagccucagaaagcugggucuaauaacagcaauaagucccuucagagcgugggauuuacagccggccugaccuacucucaacucaugacccugaaagaugccaugcugcagcuugacccgaacgcuaagacauggauggauaucgaagggagacccgaggacccuguugaaauugcgcucuaccagcccuccagcggaugcuauauccacuucuuucgcgagccuacggaccugaaacaguucaagcaagaugccaaguacucucauggcauugacgugaccgaucuguuugcugcccagcccggccucacauccgccgucaucgacgcucugccgcggaauauggugaucaccugucaggggagcgaugacauuagaaaacuucuggaaucccagggacgcaaggauaucaaacucauugacaucgcccugucuaagacagauagccggaaauaugagaacgcgguuugggaccaauacaaggaucugugccacaugcauaccggcguggucguggagaagaaaaagagagggggaaaagaagagauuacgccucacugugcucuuauggacugcaucauguucgaugccgccgucuccggcgggcucaauacaucugugcugcgcgcuguucugccccgggacaugguguuuagaaccagcaccccucgcgucgugcucugaggacuaguaauaaggaaacuguaugaaugucugugggcaggaagugaagagauccuucuguaaagguuuuuggaauuaugucugcugaauaauaaacuuuuuugaaauaauaaaucugguagaaaaaugagaucuaaaaaaaaaaaaaaaaaaaaaaaaaaaaaaaaaaaaaaaaaaaaaaaaaaaaaaaaaaaaaaaaugcaucccccccccccccccccccccccccccccccaaaggcucuuuucagagccaccagaauu

SEQ ID NO: 10545 - RNA, 2050 nt, Artificial Sequence
  mRNA product Design b-4 comprising derived and/or modified sequence from LASV(G1442-SLE-2011;Clade IV)__AIT17181__NP (opt5)
gggagagucccgcagucggcguccagcggcucugcuuguucgugugugugucguugcaggccuuauucaagcuuaccaugagcgccuccaaggaggugaaaucuuuccuguggacccagagccucagacgggaacuguccggcuacugcucuaacaucaaacuucaagucguuaaggacgcucaggcccugcuccacgggcuggauuuuagcgagguguccaaugugcagcgccuuaugagaaagcagcggcgcgacgauaacgaccugaaaagacuccgggaucugaaucaagcggucaacaaucugguggaacucaagucuacacagcaaaagagcguucugcgcgugggaacgcuuaccuccgacgaucugcucguccuggcugccgaccuugagaaacuuaagagcaaagugauuagaacagaacggccccucucugccggcguuuauauggggaaccuguccagccagcagcuggaucagcgcagagcucuccugaauaugaucggaaugucuggcgggauucagggaacccggacaggccgcgacggcguggucagagugugggaugugaagaacgccgaccuucugaauaaccaguucgggaccaugccuucccucacacuggcuugucuuaccaaacaaggacaggucgaucugaaugacguugugcaggcccucacggaccugggccugaucuacaccgcgaaguauccgaacgccagcgaucucgaccggcugacacaaucucaucccauucuuaauaugaucgauaccaagaaauccagccugaacaucuccggguacaauuuuucucucggagcugccgugaaggcuggcgccugcaugcuggacgggggaaacaugcuugagacaauuaaagucagcccucagaccauggauggcauccugaaguccauucucaaagugaagaaaacgcugggcauguucaucagcgacacacccggggagcgcaacccuuaugaaaauauucuguacaagaucugucucucuggagauggcuggcccuauauugcguccagaaccagcaucacagggcgggccugggagaacaccguuguggaccuggaaucugauggaaagccucagaaagcuggcagcaauaacuccaauaagucucuucagagcgccggguuugcugccggacugaccuacucccaacucaugacacugaaagacgccaugcugcagcuugauccgaacgcuaagacguggauggacaucgagggcagacccgaggacccugucgaaauugcgcucuaccagcccagcucuggcugcuauauccacuucuuucgcgagccuaccgaucugaaacaguucaagcaagacgccaaguacucccaugggauugaugugacagaccuguuugcugcccagcccggacucaccagcgccguuaucgaagcucugccgcggaauauggugauuacaugucagggcucugaugacaucaaaaagcugcuggagucccaggggagaaaagauaucaagcucauugacaucgcccugagcaaaaccgauucccgcaaguaugaaaacgcggucugggaccaauacaaggaucugugccacaugcauacgggaguggucguggagaaaaagaaacggggcgggaaggaggaaauuacaccucacugugcucuuauggacugcaucauguucgaugccgccguuucuggcggacucaauacccuggugcugagagcuguccucccccgcgacaugguguuucggaccagcacaccuagaguugugcugugaggacuaguaauaaggaaacuguaugaaugucugugggcaggaagugaagagauccuucuguaaagguuuuuggaauuaugucugcugaauaauaaacuuuuuugaaauaauaaaucugguagaaaaaugagaucuaaaaaaaaaaaaaaaaaaaaaaaaaaaaaaaaaaaaaaaaaaaaaaaaaaaaaaaaaaaaaaaaugcaucccccccccccccccccccccccccccccccaaaggcucuuuucagagccaccagaauu

SEQ ID NO: 10546 - RNA, 2050 nt, Artificial Sequence
  mRNA product Design b-4 comprising derived and/or modified sequence from LASV(G3010-SLE-2013;Clade IV)__AIT17345__NP (opt5)
gggagagucccgcagucggcguccagcggcucugcuuguucgugugugugucguugcaggccuuauucaagcuuaccaugagcgccuccaaggagaucaaaucuuuccuguggacccagagccucagacgggaacuguccggcuacugcucuaacauuaaacuucaaguggucaaagacgcucaggcccugcuccacgggcuggauuuuagcgagguuuccaaugugcagcgccuuaugagaaaggaacggcgcgacgauaacgaccugaaaagacuccgggaucugaaucaggcggugaacaaucuggucgagcucaagucuacacaacaaaagagcauccugcgcgugggaacgcuuaccuccgacgaucugcucauucuggcugccgaccuugaaaaacuuaagagcaaaguuacaagaaccgagcggccccucucugccggcguguauauggggaaccuguccagccagcagcuggaucagcgcagagcucuccugucuaugaucggaauguccagcggcguccagggggcccgggcuggacgcgacggcgugguuagagugugggaugucaagaaugccgagcuucugaacaaucaguucggcacaaugccuucucucacccuggcgugucuuacaaaacaggggcaaguggaccugaacgaugugguccaggcccucaccgaccugggacugauuuacacggcuaaguauccgaauaccuccgaccucgaucggcugacacagagccaucccauccuuaacaugaucgacaccaagaaauccucucugaauauuagcggcuacaacuuuucccucggggccgcuguuaaggccggagcgugcaugcuggauggcgggaauaugcuugaaacaaucaaagugagcccucaaaccauggacggcauucugaagucuauccucaaagugaagaaagcccugggaauguucauuuccgagacgcccggcgaacgcaacccuuaugagaacauccuguacaagauuugucucagcggggauggauggcccuauaucgcuucuagaacaagcaucaccggccgggccugggagaauacagucguggaccuggaauccgaugggaagccucagaaagcuggaucuaacaauagcaacaagucccuucagagcgccggcuuuaccgccgggcugaccuacucucagcucaugacacugaaagacgcuaugcugcaacuugauccgaaugcgaagacguggauggacauugagggaagacccgaagauccuguugagguggcccucuaccagcccuccagcggcugcuauauccacuucuuucgcgaaccuaccgaccugaaacaguucaagcaggacgcuaaguacucucauggcauugaugucacagaccuguuugccgcccaacccgggcucaccuccgcugugaucgaugcccugccgcggaacaugguuauuacaugucagggaagcgacgauaucaaaaagcugcuggagucccagggcagaaaagacaucaagcucauugauaucgcgcugucuaaaaccgacagccgcaaguaugagaaugcugugugggaucaguacaaggaccugugccacaugcauacgggggucguggucgaaaagaagaaacggggaggcaaggaggaaauuacaccucacugugcccuuauggauugcaucauguucgacgccgcuguguccgggggccucaacaccucuguucugagagccgugcugccccgcgauauggucuuucggaccagcacaccuagagugguucucugaggacuaguaauaaggaaacuguaugaaugucugugggcaggaagugaagagauccuucuguaaagguuuuuggaauuaugucugcugaauaauaaacuuuuuugaaauaauaaaucugguagaaaaaugagaucuaaaaaaaaaaaaaaaaaaaaaaaaaaaaaaaaaaaaaaaaaaaaaaaaaaaaaaaaaaaaaaaaugcaucccccccccccccccccccccccccccccccaaaggcucuuuucagagccaccagaauu

SEQ ID NO: 10547 - RNA, 2050 nt, Artificial Sequence
  mRNA product Design b-4 comprising derived and/or modified sequence from LASV(G502-SLE-2009;Clade IV)__AIT17127__NP (opt5)
gggagagucccgcagucggcguccagcggcucugcuuguucgugugugugucguugcaggccuuauucaagcuuaccaugagcgccuccaaggagaucaaaucuuuccuguggacccagagccucagacgggaacuguccggcuacugcucuaacauuaagcugcaaguggucaaagacgcucaggcccugcuccacgggcuggauuuuagcgagguuuccaaugugcagcgccuuaugagaaaggaacggcgcgacgauaacgaccugaaaagacuccgggaucugaaucaggcggugaacaaucuggucgagcucaagucuacacaacaaaagagcauccugcgcgugggaacgcuuaccuccgacgaucugcucauucuggcugccgaccuugaaaaacuuaagagcaaaguuaucagaacagagcggccccucucugccggcguguauauggggaaccuguccagccagcagcuggaucagcgcagagcucuccugucuaugauuggaauguccggcgggaaucagggaguccgggccggcaaggacggcgugguucgcgugugggaugucaaaaacgcugagcuucugaauaaccaguucgggaccaugccuagccucacacuggccugucuuaccaagcagggacaaguggaccugaaugaugcggugcaggcccucacagaccugggccugaucuacaccgcuaaguauccgaacacgucugaccucgauagacugacccagucccaucccauccuuaauaugauugacaccaaaaagagcucccugaacaucucuggguacaauuuuagccucggagccgcugucaaagccggcgcgugcaugcuggaugggggaaacaugcuugaaacaauuaagguuuccccucaaacaauggacggcauccugaaaagcauucucaaggugaaaaaggcccugggcauguucaucucugauacccccggggagcggaacccuuaugaaaauauucuguacaagaucugucucuccggagacggcuggcccuauaucgcuagccgcacgucuauuacagggagagccugggagaacaccguggucgaucuggagagcgacggaaaaccucagaaggcuggcuccaauaacucuaauaaaagccuucaguccgccggguuuacagccggacugaccuacagccagcucaugacccugaaggaugcuaugcugcaacuugacccgaacacaaaaacguggauggauaucgaaggccggcccgaggacccuguggaaauugcgcucuaccagcccucuuccggcugcuauauccacuucuuuagagagccuaccgaccugaagcaguucaagcaggaugccaaauacagccaugggauugacguuacagaucuguuugcugcccaacccggacucaccucugccgugaucgacgcucugccgcgcaauauggucaucacaugucagggcuccgaugacauucggaaacuucuggaaagccaggggagaaaggauaucaagcucauugacaucgcccugaacaaaaccgauucccgcaaguaugagaaugcggugugggaccaguacaaggaucugugccacaugcauacgggaguuguggucgagaaaaagaaacggggcgggaaggaagagauuacaccucacugugcucuuauggacugcaucauguucgaugccgccgugucuggcggacucaacaccagcguccugagagcugugcugccccgcgacaugguuuuucggaccuccacaccuagagugguccucugaggacuaguaauaaggaaacuguaugaaugucugugggcaggaagugaagagauccuucuguaaagguuuuuggaauuaugucugcugaauaauaaacuuuuuugaaauaauaaaucugguagaaaaaugagaucuaaaaaaaaaaaaaaaaaaaaaaaaaaaaaaaaaaaaaaaaaaaaaaaaaaaaaaaaaaaaaaaaugcaucccccccccccccccccccccccccccccccaaaggcucuuuucagagccaccagaauu

SEQ ID NO: 10548 - RNA, 2050 nt, Artificial Sequence
  mRNA product Design b-4 comprising derived and/or modified sequence from LASV(G733-SLE-2010;Clade IV)__AIT17155__NP (opt5)
gggagagucccgcagucggcguccagcggcucugcuuguucgugugugugucguugcaggccuuauucaagcuuaccaugagcgccuccaaggagaucaaaucuuuccuguggacccagagccucagacgggaacuguccggcuacugcucuaacauuaagcugcaaguggucaaagacgcucaggcccugcuccacgggcuggauuuuagcgagguuuccaaugugcagcgccuuaugagaaaggaacggcgcgacgauaacgaccugaaaagacuccgggaucugaaucaggcggugaacaaucuggucgagcucaagucuacacaacaaaagagcgugcugcgcguuggaacgcuuaccuccgacgaacugcucgugcuggcugccgaucuugagaaacuuaagagcaaagucaucagaacagagcggccccucucugccggcguguauauggggaaccuguccagccagcagcuggaccagcgcagagcucuccugucuaugauuggaauguccggcgggaaucagggagcccggaccggccgcgauggcguugugagagucugggacgugaagaacgcugaacuucugaauaaccaguucgggacaaugccuagccucacccuggccugucuuacaaaacagggacaaguggaucugaaugacgcgguccaggcccucaccgaucugggccugaucuacacggcuaaguauccgaacaccucugaccucgaccggcugacacagucccaucccauucuuaauaugaucgauaccaagaaaagcucccugaacaucucuggguacaauuuuagccucggagccgcuguuaaggccggcgcgugcaugcuggacgggggaaacaugcuugagacaauuaaaguguccccucaaaccauggauggcauccucaagagcauucugaaagugaagaaagcccugggcauguucaucucugacacgcccggggaacgcaacccuuaugagaauauucuguacaagaucugucucuccggagauggcuggcccuauauugcuagcagaacaucuaucaccgggcgggccugggagaacacagucguggaccuggaaagcgauggaaagccucagaaagcuggcuccaauaacucuaauaagagccuucaguccgccggguuuaccgccggacugaccuacagccagcucaugacacugaaagacgcuaugcugcaacuugauccgaacgcgaagacguggauggacaucgagggcagacccgaagauccuguugagauugcccucuaccagcccucuuccggcugcuauauccacuucuuucgcgaaccuaccgaccugaaacaguucaagcaggacgcuaaguacagccaugggauugaugugacagaccuguuugccgcccaacccggacucaccucugcugucaucgaugcccugccgcggaauauggugauuacaugucagggcuccgacgauaucagaaaacuucuggagagccaggggcgcaaggacaucaaacucauugauaucgcgcuguccaagauugacucucggaaauaugagaacgcuguuugggaucaguacaaggaccugugccacaugcauaccggaguggucguggaaaagaaaaagagaggcgggaaagaggaaaucacgccucacugugcccuuauggauugcauuauguucgacgccgcugucagcggcggacucaauucccuggugcugcgcgccguucucccccgggauaugguguuuagaacaucuaccccucgcgucgugcugugaggacuaguaauaaggaaacuguaugaaugucugugggcaggaagugaagagauccuucuguaaagguuuuuggaauuaugucugcugaauaauaaacuuuuuugaaauaauaaaucugguagaaaaaugagaucuaaaaaaaaaaaaaaaaaaaaaaaaaaaaaaaaaaaaaaaaaaaaaaaaaaaaaaaaaaaaaaaaugcaucccccccccccccccccccccccccccccccaaaggcucuuuucagagccaccagaauu

SEQ ID NO: 10549 - RNA, 2050 nt, Artificial Sequence
  mRNA product Design b-4 comprising derived and/or modified sequence from MOPV/LASV reassortant(IGS-1;Clade IV)__AFY05578__NP (opt5)
gggagagucccgcagucggcguccagcggcucugcuuguucgugugugugucguugcaggccuuauucaagcuuaccaugagcgccuccaaggagaucaaaucuuuccuguggacccagagccucagacgggaacuguccggcuacugcucuaacauuaaacuucaaguggucaaggacgcucaggcccugcuccacgggcuggauuuuagcgagguuuccaaugugcagcgccuuaugagaaaggaacggcgcgacgauaacgaccugaaaagacuccgggaucugaaucaggcggugaacaaucuggucgagcucaagucuacacaacaaaagagcauccugcgcgugggaacgcuuaccuccgacgaucugcucauucuggcugccgaccuugaaaaacugagaagcaagguuauccggacagagcgcccccucucugccggcguguauauggggaaccuguccagccagcagcuggaucagagacgggcucuccugaauaugauuggaaugucuggcgggaaccagggagcccgcgcuggcagagacggcgucgugcggguuugggaugugaaaaaugccgagcuucuguccaaccaguucgggaccaugccuagccucacacuggcgugucuuaccaagcagggacaagucgaccugaaugaugccgugcaggcucucacagaccugggccugaucuacaccgccaaauauccgaacacgucugaccucgaucgccugacccagucccaucccauccuuaauaugauugacacaaagaaaagcucccugaacaucucuggguacaauuuuagccucggagcugccgugaaggcgggcgccugcaugcuggaugggggaaacaugcuugaaaccauuaaggucuccccucaaacaauggacggcauccugaaaagcauucucaagguuaaaaaggcucugggcauguucaucucugauacccccggggagagaaacccuuaugaaaauauucuguacaaaaucugucucuccggagacggcuggcccuauaucgccagccggacgucuauuacagggagagcuugggagaacaccgugguggaucuggagagcgacggaaagccucagaaggccgauuccaauaacucuagcaaaucccuucagagcgccggcuuuacagcugggcugaccuacucucagcucaugacccugaaggacgcgaugcugcaacuugauccgaaugccaaaacauggauggacaucgaaggacgccccgaggacccugucgaaauugcucucuaccagcccuccagcggcugcuauauccacuucuuucgggagccuacggaucugaagcaguucaaacaggacgccaaguacucucauggcauugaugugaccgaccuguuugccacacaacccgggcucaccuccgcuguuaucgaugcccugccgagaaacauggugaucacaugucagggaagcgacgauauucgcaaacuucuggaaucccagggccggaaggacaucaagcucauugauaucgaccugucuaaaaccgauagcagaaaguaugagaaugcggucugggaccaguacaaagaucugugccacaugcauacgggggugguuguggagaagaagaaacgcggaggcaaggaagagauuacaccucacugugcucuuauggacugcaucauguucgacgccgccgucuccgggggccucaacaccucugugcugcgggcuguccugcccagagauaugguguuucgcaccagcacaccucggguugugcucugaggacuaguaauaaggaaacuguaugaaugucugugggcaggaagugaagagauccuucuguaaagguuuuuggaauuaugucugcugaauaauaaacuuuuuugaaauaauaaaucugguagaaaaaugagaucuaaaaaaaaaaaaaaaaaaaaaaaaaaaaaaaaaaaaaaaaaaaaaaaaaaaaaaaaaaaaaaaaugcaucccccccccccccccccccccccccccccccaaaggcucuuuucagagccaccagaauu

SEQ ID NO: 10550 - RNA, 2050 nt, Artificial Sequence
  mRNA product Design b-4 comprising derived and/or modified sequence from LASV(LM765-SLE-2012;Clade IV)__AIT17815__NP (opt5)
gggagagucccgcagucggcguccagcggcucugcuuguucgugugugugucguugcaggccuuauucaagcuuaccaugagcgccuccaaggagaucaaaucuuuccuguggacccagagccucagacgggaacuguccggcuacugcucuaacauuaagcugcaaguggucaaagacgcucaggcccugcuccacgggcuggauuuuagcgagguuuccaaugugcagcgccuuaugagaaaggaacggcgcgacgauaacgaccugaaaagacuccgggaucugaaucaggcggugaacaaucuggucgagcucaagucuacacaacaaaagagcauccugcgcgugggaacgcuuaccuccgacgaucugcucauucuggcugccgaccuugaaaaacuuaagagcaaaguuacaagaaccgagcggccccucucugccggcguguauauggggaaccuguccagccagcagcuggaucagcgcagagcucuccuggacaugaucggaaugucuggcuccaaucagggggcccgggcuggacgcgauggcgucgugagaguuugggacgugaagaacgccgagcuucugaauaaccaguucggcacaaugccuagccucacccuggcgugucuuacaaaacaggggcaagucgaucugaaugacgccgugcaggcucucaccgaccugggacugauuuacacggccaaguauccgaacaccucugaucucgaccggcugacacagucccaucccauccuuaauaugaucgauaccaagaaaagcucccugaacauuucuggcuacaauuuuagccucggggcugccgugaaggcgggagccugcaugcuggacggcgggaacaugcuugaaacaaucaaagucuccccucaaaccauggauggcauucucaagagcauccugaaaguuaagaaagcucugggaauguucauuucugacgcccccggcgagcgcaacccuuaugaaaauauccuguacaagauuugucucuccggggauggauggcccuauaucgcuagcagaacgucuaucacaggccgggccugggagaacaccgugguggaccuggagagcgaugggaagccucagaaagccggauccaauggcucuaacaagagccuucaguccgcuggguuuacagcgggacugaccuacagccagcucaugacccugaaagacgccaugcugcaacuugauccgaaugcuaagacauggauggacauugaaggcagacccgaggacccugucgaaaucgcccucuaccagcccucuuccggcugcuauauucacuucuuucgcgagccuacggaucugaaacaguucaagcaggacgccaaguacagccaugggaucgaugugaccgaccuguuugcugcccaacccggacucacaucugcgguuauugaugcucugccgcggaacauggugaucaccugucagggcuccgacgauaucagaaaacuuuucgaaagccaggggcgcaaggacauuaaacugaucgauauugcccucuccaagacagacucucggaaauaugagaaugccgucugggaucaguacaaggaccugugccacaugcauaccggaaucgugguugagaagaaaaagagaggcgggaaagaagagauuacgccucacugugcucugauggauugcaucauguuugacgccgcugugagcggcggacuuaacacauccguccuccgcgccgugcugccccgggacauggucuucagaaccucuaccccucgcgugguucugugaggacuaguaauaaggaaacuguaugaaugucugugggcaggaagugaagagauccuucuguaaagguuuuuggaauuaugucugcugaauaauaaacuuuuuugaaauaauaaaucugguagaaaaaugagaucuaaaaaaaaaaaaaaaaaaaaaaaaaaaaaaaaaaaaaaaaaaaaaaaaaaaaaaaaaaaaaaaaugcaucccccccccccccccccccccccccccccccaaaggcucuuuucagagccaccagaauu

SEQ ID NO: 10551 - RNA, 2050 nt, Artificial Sequence
  mRNA product Design b-4 comprising derived and/or modified sequence from LASV(LM776-SLE-2012;Clade IV)__AIT17825__NP (opt5)
gggagagucccgcagucggcguccagcggcucugcuuguucgugugugugucguugcaggccuuauucaagcuuaccaugagcgccuccaaggagaucaaaucuuuccuguggacccagagccucagacgggaacuguccucuuacugcagcaacauuaaacuucaaguggucaaggacgcucaggcccugcuccacggccuggauuuuuccgagguuucuaaugugcagcgccuuaugagaaaggaacggcgcgacgauaacgaccugaaaagacuccgggaucugaaucaggcggugaacaaucuggucgagcucaagagcacacaacagaaguccauccugcgcguggggacgcuuaccagcgacgaucugcucauucuggcugccgaccuugaaaaacugaagucuaaaguuacaagaaccgagcggccccucuccgccggaguguauaugggcaaccugagcucucagcagcuggaucaacgcagagcucuccuguccaugaucgggaugagcggaucuaaucagggcgcccgggcugggcgcgacggagucgugagaguuugggaugugaagaacgccgagcuucugaauaaccaguucggcacaaugccuucccucacccuggcgugucuuacaaaacagggccaagucgaccugaaugaugccgugcaggcucucaccgaccuggggcugauuuacacggccaaguauccgaacaccagcgaccucgaucggcugacacagucccaucccauccuuaauaugaucgacaccaagaaaucuagccugaacauuuccggauacaauuuuagccucggcgcugccgugaaggcgggggccugcaugcuggauggaggcaacaugcuugaaacaaucaaagucucuccucaaaccauggacgggauucugaaguccauccucaaaguuaagaaagcucugggaauguucauuagcgauacgcccggcgagcgcaacccuuaugaaaauauccuguacaagauuugucucucuggcgacggguggcccuauaucgccagcagaacauccaucaccggacgggcuugggagaacacagugguggaucuggagucugacggcaagccucagaaagccgggagcaauaacuccaauaagagccuucagucugccggauuuaccgcuggccugaccuacucccagcucaugacacugaaagaugcgaugcugcaacuugacccgaacgccaagacguggauggauauugaagggagacccgaggacccugucgaaguggcucucuaccagcccagcucuggaugcuauauccacuucuuucgcgagccuaccgaccugaaacaguucaagcaggaugccaaguacucccauggcauugacguuacagaucuguuugccgcucaacccggccucaccagcgccgugaucgacgcgcugccgcggaauauggucauuacaugucagggguccgaugacaucagaaaacuucuggaaucucagggacgcaaggauaucaaacucauugacaucgcucugagcaagaccgauucccggaaauaugagaacgccgugugggaccaguacaaggaucugugccacaugcauacgggcguuguggucgagaagaaaaagagagggggaaaagaagagauuacaccucacugugcccuuauggacugcaucauguucgaugcugccgugucuggcgggcucaauaccagcguccugcgcgcugugcugccccgggacaugguuuuuagaaccuccacaccucgcgugguccucugaggacuaguaauaaggaaacuguaugaaugucugugggcaggaagugaagagauccuucuguaaagguuuuuggaauuaugucugcugaauaauaaacuuuuuugaaauaauaaaucugguagaaaaaugagaucuaaaaaaaaaaaaaaaaaaaaaaaaaaaaaaaaaaaaaaaaaaaaaaaaaaaaaaaaaaaaaaaaugcaucccccccccccccccccccccccccccccccaaaggcucuuuucagagccaccagaauu

SEQ ID NO: 10552 - RNA, 2050 nt, Artificial Sequence
  mRNA product Design b-4 comprising derived and/or modified sequence from LASV(Mad39;Clade IV)__ANH09723__NP (opt5)
gggagagucccgcagucggcguccagcggcucugcuuguucgugugugugucguugcaggccuuauucaagcuuaccaugagcgccuccaaggagaucaaaucuuuccuguggacccagagccucagacgggaacuguccggcuacugcucuaacauuaagcugcaaguggucaaagacgcucaggcccugcuccacgggcuggauuuuagcgagguuuccaaugugcagcgccuuaugagaaagcagcggcgcgacgauaacgaccugaaaagacuccgggaucugaaucaagcggugaacaaucuggucgaacucaagucuacacagcaaaagagcgugcugcgcguuggaacgcuuaccuccgacgaucugcucacacuggcugccgaccuugagaaacuuaagagcaaagugaccagaacagaacggccccucaccgccggcgucuauauggggaaccugucuucccagcagcuggaucagcgcagagcucuccugaauaugaucggaaugagcggcgggaaccagggagcccggacaggccgcgacggcgugguuagagugugggaugucaagaaugcugagcuucugaacaaucaguucgggaccaugccuucucucacgcuggccugucuuaccaaacaaggacagguggaccugaacgaugugguccaggcgcucacagaccugggccugauuuacaccgccaaguauccgaauacauccgaccucgaucggcugacccaaagccaucccauccuuaacaugauugacacgaauaagucuucccugaacaucagcggguacaacuuuucccucggagcugccguuaaagcuggcgccugcaugcuggaugggggaaauaugcuugagacaaucaaggugucuccucagaccauggacggcauucugaaaagcauccucaaggugaaaaagucccugggcauguucauuagcgauacacccggggaacgcaacccuuaugagaauauccuguacaaaauuugucucucuggagacggcuggcccuauaucgcguccagaaccagcauuaccgggcgggccugggaaaacacagucguggaucuggagucuggaggcaagccucagaaggcugggagcaauaacuccaauaaaucucuucagagcgccggauuugcugccggccugacguacucccaacucaugacccugaaggacgccaugcugcagcuugauccgaacgcuaaaacauggauggacaucgagggcagacccgaagauccuguugagaucgcgcucuaccagcccauuagcgggugcuauauccacuucuuucgcgaaccuaccgaccugaagcaguucaaacaagacgccaaguacucucauggaauugaugugacagaccuguuugcugcccagcccggccucaccuccgccgucaucgaggcucugccgcggaauauggugauuacgugucaggggagcgaugacaucagaaaacuuuucgaaucucagggacgcaaggauaucaagcugauugacaucgcccucuccaaaacagauagccggaaguaugagaacgcgguuugggaccaauacaaagaucugugccacaugcauaccggcguggucguggagaagaagaaaaagggcgggaaagaagagauuaccccucacugugcucugauggacugcaucauguuugaugccgccgucuccggaggccuuaauacacucgugcugagagcuguucugccccgcgacaugguguuccggaccucuacaccuaaggucgugcucugaggacuaguaauaaggaaacuguaugaaugucugugggcaggaagugaagagauccuucuguaaagguuuuuggaauuaugucugcugaauaauaaacuuuuuugaaauaauaaaucugguagaaaaaugagaucuaaaaaaaaaaaaaaaaaaaaaaaaaaaaaaaaaaaaaaaaaaaaaaaaaaaaaaaaaaaaaaaaugcaucccccccccccccccccccccccccccccccaaaggcucuuuucagagccaccagaauu

SEQ ID NO: 10553 - RNA, 2050 nt, Artificial Sequence
  mRNA product Design b-4 comprising derived and/or modified sequence from LASV(Z0947-SLE-2011;Clade IV)__AIT17841__NP (opt5)
gggagagucccgcagucggcguccagcggcucugcuuguucgugugugugucguugcaggccuuauucaagcuuaccaugagcgccuccaaggagaucaaaucuuuccuguggacccagagccucagacgggaacuguccggcuacugcucuaacauuaagcugcaaguggucaaagacgcucaggcccugcuccacgggcuggauuuuagcgagguuuccaaugugcagcgccuuaugagaaaggaacggcgcgacgauaacgaccugaaaagacuccgggaucugaaucaggcggugaacaaucuggucgagcucaagucuacacaacaaaagagcauccugcgcgugggaacgcuuaccuccgacgaucugcucauucuggcugccgaccuugaaaaacuuaagagcaaaguuacaagaaccgagcggccccucucugccggcguguauauggggaaccuguccagccagcagcuggaucagcgcagagcucuccugaauaugaucggaaugucuggcuccaaccagggggcccggacaggacgcgacggcgucgugagaguuugggaugugaagaaugcugagcuucugaacaaucaguucggcaccaugccuagccucacacuggccugucuuaccaaacaggggcaagucgaccugaacgaugcggugcaggcccucacggaccugggacugauuuacaccgcuaaguauccgaauacaucugaccucgaucggcugacccagucccaucccauccuuaacaugaucgacacaaagaaaagcucccugaauauuucuggcuacaacuuuagccucggggccgcugugaaggccggagcgugcaugcuggauggcgggaacaugcuugaaaccaucaaagucuccccucaaacgauggacggcauucucaagagcauccugaaaguuaagaaagcccugggaauguucauuucugaugcucccggcgagcgcaauccuuaugaaaacauccuguacaagauuugucucuccggggacggauggcccuauaucgccagcagaacaucuaucaccggccgggcuugggagaauacagugguggaucuggagagcgacgggaagccucagaaagccggauccaacggcucuaauaagagccuucaguccgccggguuuaccgcuggacugaccuacagccagcucaugacacugaaagaugcgaugcugcaacuugacccgaacgccaagacguggauggauauugaaggcagacccgaggacccugucgaaaucgcucucuaccagcccucuuccggcugcuauauucacuucuuucgcgagccuaccgaccugaaacaguucaagcaggaugccaaguacagccaugggaucgacgugacagaucuguuugccgcucaacccggacucaccucugccguuauugacgcgcugccgcggaauauggugaucacaugucagggcuccgaugacaucagaaaacuuuucgaaagccaggggcgcaaggauauuaaacugaucgacauugcucucuccaagaccgauucucggaaauaugagaacgccgucugggaccaguacaaggaucugugccacaugcauacgggaaucgugguugagaagaaaaagagaggcgggaaagaagagauuacaccucacugugcccugauggacugcaucauguuugaugcugccgugagcggcggacuuaauaccuccguccuccgcgcugugcugccccgggacauggucuucagaaccucuacaccucgcgugguucugugaggacuaguaauaaggaaacuguaugaaugucugugggcaggaagugaagagauccuucuguaaagguuuuuggaauuaugucugcugaauaauaaacuuuuuugaaauaauaaaucugguagaaaaaugagaucuaaaaaaaaaaaaaaaaaaaaaaaaaaaaaaaaaaaaaaaaaaaaaaaaaaaaaaaaaaaaaaaaugcaucccccccccccccccccccccccccccccccaaaggcucuuuucagagccaccagaauu

SEQ ID NO: 10554 - RNA, 2050 nt, Artificial Sequence
  mRNA product Design b-4 comprising derived and/or modified sequence from LASV(Josiah;Clade IV)__NP_694869__NP (opt6)
gggagagucccgcagucggcguccagcggcucugcuuguucgugugugugucguugcaggccuuauucaagcuuaccaugagugcaucaaaagaaauaaaaucauuccuauggacacaaagccuaagaagggaacuaucaggcuauugcucaaacauaaaauuacaaguagucaaagacgcacaagcucucuuacacggucuagauuuuagugaaguaucaaacguucaaagauuaaugagaaaagagagacgagaugauaacgaccuaaaaagacuaagagaucuaaaucaagcaguaaacaaccuuguagaacuaaaaagcacacaacaaaaauccauccuacguguaggaacauuaacaagugaugacuuauuaauccuagcagcagaucuagaaaaacuuaaaagcaaagucauaagaacugaacgaccgcucagugcagguguauauaugggaaaucucucgucgcaacaauuagaucaaagaagagcacuacuuaauaugauaggaaugucaggaggaaaucaaggugcacgcgcaggaagagacggaguagugagaguaugggacguaaaaaacgcagaauuauuaaauaaccaauuuggaacaaugccauccuuaacuuuagccugucuaaccaaacaaggacaaguagaccuaaaugacgcaguacaagcacuaacugacuuaggacuuauauauacagccaaauauccaaauacaucagauuuagacagacucacacaaucacaccccauacuaaacaugauagacacaaaaaaaagcaguuuaaauauaucagguuacaauuuuucacuuggagcagcgguaaaagcaggcgccuguauguuagacggcgguaacauguuagaaacaauaaagguaagcccucaaacaauggauggaauacuaaaaaguauauuaaaaguaaaaaaagcacuaggaauguuuauaagugauaccccaggagaaagaaacccauacgaaaauauauuauacaaaauauguuuaaguggagauggauggccauauauagcauccagaaccagcauaacaggaagagcaugggaaaauaccguaguagaucuagaaucagauggaaaaccacaaaaagcagauucaaacaauaguaguaaaagccuccaaucagcagguuuuacagcaggacuaacauauagucaacuaaugacacuuaaagaugcaaugcuacaacuagauccaaaugcaaaaacauggauggauauagaaggacgaccagaagacccgguagaaauagcacuauaucaacccaguagcggaugcuacauucauuuuuuuagagaaccaacagaucuaaaacaauucaaacaagaugcaaaauauagucacggcauugacguaacagauuuauuugcaacacaaccaggauuaacaagugccgucauagaugcauuaccaagaaacaugguaauaacaugccaaggaagcgaugacauuagaaaacuacuagaaagucaaggaagaaaagacaucaaacugauagauaucgcguuaucaaaaacggacucacgaaaauaugaaaaugcaguuugggaccaauauaaagauuuaugccacaugcauacaggaguaguuguagaaaaaaaaaagagaggaggaaaagaagaaauaacaccacauugcgcauuaauggauugcauaauguuugaugccgcaguaagcggcggacuaaauacuucaguacuacgagcaguacuaccaagagauaugguauuucgaaccucuaccccaaggguaguauuauaaggacuaguaauaaggaaacuguaugaaugucugugggcaggaagugaagagauccuucuguaaagguuuuuggaauuaugucugcugaauaauaaacuuuuuugaaauaauaaaucugguagaaaaaugagaucuaaaaaaaaaaaaaaaaaaaaaaaaaaaaaaaaaaaaaaaaaaaaaaaaaaaaaaaaaaaaaaaaugcaucccccccccccccccccccccccccccccccaaaggcucuuuucagagccaccagaauu

SEQ ID NO: 10555 - RNA, 2050 nt, Artificial Sequence
  mRNA product Design b-4 comprising derived and/or modified sequence from LASV(LP;Clade I)__AAF86702__NP (opt6)
gggagagucccgcagucggcguccagcggcucugcuuguucgugugugugucguugcaggccuuauucaagcuuaccaugucaaauagcaaagaaaucaaaucauuucuuuggacacaaucauuaagaagagaauuaucaggauauugcucaaacauaaaacuacaaguuguaaaagacgcucaagcacuacuucacggacuagacuucucugaaguaucaaauguacaaagauuaaugcgaaaacaaaaacgagaugaugcagaccuaaaaagacuaagagaccuaaaucaagcaguaaauaauuuaguagaacuaaaaucaacccaacagaaaaaugucuuaagagugggaaccuuaagcucagaugauuuaauaacacuagcagcagaccuagaaaaacuuaaaucaaaagucauaagaacagaacggccacuguccucaggaguauauauggguaauuuaucaucacaacaacuugaucagaggagagcccuacuaucaaugauuggaaugaguggagguccacaaggaaacagaacaggcggugacggcguaguuagaguaugggauguuaaaaacgcagaauuauuaaauaaucaauucggcaccaugccaagucuaacucuagcaugccuuacaaaacaaggacaaguagacuuaaacgaugcaguacaagcucuaacugaccugggcuuaauauauacagcaaaauauccuaauucaagcgacuuagacauguuaacacaaagccacccuauacuaggaaugguagacaccaagaaaaguaguuuaaacauaaguggauacaauuuuucacuuggggcggcagugaaagcaggggcauguaugcuugacggaggcaacaugcuagaaacgauaaaaguaucaccacaaacuauggauggcauucuaaaaagcauacuaaaaguaaaaagaagucuaggaauguuuauaucagacacgccaggagaaagaaauccauacgaaaauauacuauauaaaauaugcuuaucaggagaagguuggccauauaucgcuucaagaacaucaauaacagguagagcaugggaaaacacucuaguagaucuugaaagugacaauaaaccaccaaaacuuaauucagcaggaagcaauaaaucacuacaagcagcuggcuuaaaugccggacuaacauauucacaauuaaugacauuaaaagauugcauguuacaacuagauccuaguucaaaaaccuggaucgacaucgaaggaagaccagaagacccagucgaaaucgcacuauuucaaccaucaaguggaugcuacauucacuucuuuagagaaccaacagauuuaaaacaauucaaacaagacgcuaaauacagucacggaauagauguaacagaccuuuucagcacacaacccggauuaacaagugcaguuauagaagcacuacccagaaacaugguauuaacaugucaagguucagaugauaucaagaaacuauuagagucacaaggaagaagagauaucaaauuaauagauauaaguuuaaguaaagcagacucuagaaaauucgaaaacgcaguaugggaucaauacaaagaccuaugccacaugcauacaggaguuguaguagagaaaaagaaaagaggaggaaaagaagaaauaacaccacauugugcucuacuagacugcauaauguucgacgcagcaacuacuggaucacuaaacaucacaacacuaagagcaguccuacccagagauaugguauucagaacaagcacaccuaaaguaguacuauaaggacuaguaauaaggaaacuguaugaaugucugugggcaggaagugaagagauccuucuguaaagguuuuuggaauuaugucugcugaauaauaaacuuuuuugaaauaauaaaucugguagaaaaaugagaucuaaaaaaaaaaaaaaaaaaaaaaaaaaaaaaaaaaaaaaaaaaaaaaaaaaaaaaaaaaaaaaaaugcaucccccccccccccccccccccccccccccccaaaggcucuuuucagagccaccagaauu

SEQ ID NO: 10556 - RNA, 2050 nt, Artificial Sequence
  mRNA product Design b-4 comprising derived and/or modified sequence from LASV(803213;Clade II)__AAF86704__NP (opt6)
gggagagucccgcagucggcguccagcggcucugcuuguucgugugugugucguugcaggccuuauucaagcuuaccauguccgcaucaaaagaagucaaaaguuuccuauggacacaaagccucagaagagaacuaucaggauacugcucaaacauuaaacuacagguaguaaaagaugcucaagcccuucuacacggacuagauuucucagaaguaaauaacguacaaagacuaaugagaaaacaaaaacgagacgauggggauuuaaaaagauuaagagaucuaaaccaagccguaaacaaucuaguagaauuaaaaucaacacaacaaaaaucuauauuaagaguaggaacacuaacuucagaugaccuauuaacacucgcagcagaucucgaaaaacucaaaucaaaaguaauaagaacugaaaggccacuaucuuccggcguuuacaugggaaaucuaucaacucaacaauuagaacaaagacgagcauuacuaaauaugaucggaauggucggcggagcacaaggaacucaaccuggaagggacgguguuguccgaguaugggacguaaaaaacccagauuuacucaauaaccaauuuggaacaaugccaagccucacacuagcuugccuaacgaagcaaggucaaguggacuuaaaugaugcaguauuagcacuaacugacuuaggauuaauauacacugccaaauauccuaacucaucagacuuagacagauuaucacaaagccacccgauauuaaacaugguagauacaaaaaaaucaaguuuaaacauuagcggcuacaacuucucacuaggugccgccguaaaagcaggugcaugcaugcuugauggaggaaauaugcuagaaacaauaaaagucacaccccaaacaauggacggaauacuaaaaaguauauuaaaaguaaaaagaucgcuaggaauguucguaagcgauacaccuggagaaagaaauccauaugaaaauauuuuauauaaaauaugccucaguggagauggauggccauauauagcaucgagaacaucuauaguaggacgagcuugggaaaauacaacaguagaucuagaaucagacggaaaaccacaaaaaguaggaacagcaggcucaaauaagucccuacaaucagcaggauucccaacaggauuaacauauagccaacuaaugacccuaaaagauucaaugaugcaauuggauccaucugcaaaaacuuggauagacauagaaggaagaccagaagaucccguagaaauugcauuauaucaaccaaugucaggauguuauauacacuucuuuagagaaccaacugaccuaaaacaauuuaaacaagaugcuaaauacucacauggaauagacguugcagauuuauuuccagcacaacccggcuuaacaucugcaguaauagaggccuuaccacgaaauaugguauuaacaugucaaggaucggaugauauaaaaaaacuucuagacucucaaggaagaagagacauaaaacuaauagauauauccuuaaguaaagucgauagccgaaaauuugaaaaugcuguaugggaccaaugcaaagacuuaugucacaugcauacaggaguuguuguagaaaaaaaaaaaagagguggaaaagaagaaauaacaccacauugugcacuuauggauuguauaauguuugacgcugccguaagcggaggauuaaauauuccuguauuacgagcuguguuaccaagagacaugguuuucagaacaucaucaccaaaaguaguauuauaaggacuaguaauaaggaaacuguaugaaugucugugggcaggaagugaagagauccuucuguaaagguuuuuggaauuaugucugcugaauaauaaacuuuuuugaaauaauaaaucugguagaaaaaugagaucuaaaaaaaaaaaaaaaaaaaaaaaaaaaaaaaaaaaaaaaaaaaaaaaaaaaaaaaaaaaaaaaaugcaucccccccccccccccccccccccccccccccaaaggcucuuuucagagccaccagaauu

SEQ ID NO: 10557 - RNA, 2053 nt, Artificial Sequence
  mRNA product Design b-4 comprising derived and/or modified sequence from LASV(GA391;Clade III)__CAA36646__NP (opt6)
gggagagucccgcagucggcguccagcggcucugcuuguucgugugugugucguugcaggccuuauucaagcuuaccaugucagcauccaaagaaguaagaucauucuuauggacacaaucacuaagacgcgaacuaaguggauauugcaguaacauaaaacuacaaguuguaaaagaugcacaagcucuacuacacggccucgauuucucagaaguaucaaauguccaacguuuaaugagaaaacaaaaacgagaugacggagauuuaaaaagauuaagagaucuaaaccaagcaguuaauaaccuuguagaacucaaauccacacaacaaaaaucaguauuaagaguaggaacacuaucaucagaugacuuguuaauucuagcagcagaccuagaaaaacuaaaaucaaaaguaaccagaacagaaagaccacuaaguagcggaguauauaugggaaaccuaucaucucaacaacuagaucaaagacgagcauuacuaaacaugauugguaugacaggaguaagcggcggaggaaaaggugcuucagacggaauuguaagaguaugggacgucaaaaacgcagaauuauuaaauaaucaauuuggaacuaugcccucacuuacacuagcuuguuugacaaaacaaggacaaguagacuuaaaugaugcaguacaagcacuaacggaucuagguuuaauauauacagcgaaauauccaaacucuucagaccuagaccgauuaucucaaucacacccuauacuaaauaugauagauaccaagaaaagcucauuaaauaucagcggcuauaauuucucacuaggugcagcaguaaaagcaggggcuugcaugcuagauggaggcaauaugcucgaaacgauaaaaguaucaccacaaacaauggacggaauauuaaaaucuaucuuaaaaguaaagaaaucacuaggaauguucguaagcgauacaccuggagaaagaaauccauaugaaaacauucuauauaaaaucuguuuaucuggagacggauggcccuauauagcaucucgaacuucuauaguaggcagagccugggaaaauaccguuguagaucuagaacaagauaacaaaccacagaaaauaggaaacggaggaucaaauaaaucauuacaaucugcaggauuugccgcaggauuaacauauagucaacuaaugacauuaaaagauuucaaaugcuuuaacuuaauacccaacgcgaaaacauggauggacauagaaggaagaccagaagauccaguagaaauugcucuauaccaaccaucaucaggauguuauguacauuucuuuagagaaccgacagacuuaaaacaauuuaaacaagaugcaaaauauucacacggaaucgacguaaccgacuuauuugcagcacaaccuggacuaacuucagcaguaauagaagcccucccacgaaauaugguaauaacaugucaagguucagaagauauacgaaaauuauuagaaagccaaggaaggagagacaucaaacuaauagauauaacucuaaguaaagcagacucuagaaaauuugagaaugcaguaugggaucaauuuaaagaucuaugucacaugcacacaggcguaguuguugagaaaaagaaaagaggaggaaaagaagaaauaacuccacauugcgcgcuaauggacuguauaauguuugaugcagcaguaucaggaggacuagaugcaaaaguucucagaguaguauuaccacgagacaugguuuucagaaccaguacaccaaaaguaguauuauaaggacuaguaauaaggaaacuguaugaaugucugugggcaggaagugaagagauccuucuguaaagguuuuuggaauuaugucugcugaauaauaaacuuuuuugaaauaauaaaucugguagaaaaaugagaucuaaaaaaaaaaaaaaaaaaaaaaaaaaaaaaaaaaaaaaaaaaaaaaaaaaaaaaaaaaaaaaaaugcaucccccccccccccccccccccccccccccccaaaggcucuuuucagagccaccagaauu

SEQ ID NO: 10558 - RNA, 2050 nt, Artificial Sequence
  mRNA product Design b-4 comprising derived and/or modified sequence from LASV(AV;Clade V)__CCA30315__NP (opt6)
gggagagucccgcagucggcguccagcggcucugcuuguucgugugugugucguugcaggccuuauucaagcuuaccaugagcgcauccaaagaaguaaaaucuuucuuauggacacaaucacuaagacgcgaacuaagcggauauuguucaaauaucaaauuacaagucguaaaagacgcacaagcucuacuacacggacuagacuucucagaaguaucaaauguacaaagauuaaugagaaaacaacgaagagaugauucagacuuaaaacgauuacgcgacuuaaaccaagccguaaauaauuuaguagaauuaaagaguacucaacaaaaaucaguauuaagaguaggaacacugucaagcgaugaccuuuuaacacuagcugcagaccuugaaaaauuaaaaaguaaaguaacaagaacugaaaggccacuaucgaguggaguauauaugggaaauuuaucaucccaacaauuagaucaaagaagagcauuacugaaucuaauagguaugacaaacggaucacaaggaagccaagcaggaagagacggaguagugagaguaugggaugucaaaaaugcugaauuauuaaauaaccaauucggaacaaugccaucauuaacauuagcaugccuaacaaaacaaggucaagucgauuuaaacgauguaguacaagcacuaacagaccuuggauuaauauauaccgcaaaauacccaaauacaagcgacuuagaucgacucacucaaucacacccaauacuaaacaugauagauacaaaaaaauccagcuuaaacauaucaggauacaauuuuucguuaggcgcagcuguaaaagcaggggcauguaugcuagacggaggaaauaugcucgagacaauuaaaguaucaccacaaucuauggauggaauacuuaaaaguauacuaaaaguaaaaagggcauuaggaauguucguaagugauacaccaggagaaagaaauccauacgaaaauauauuauacaaaauaugucuaagcggugaugguuggccguauauagcuagcagaacaucuauagucggaagagcaugggaaaauacaguagucgauuuagaaacagauggaaaaccacaaaaaauaggcucuggaaacucaaacaaaucacuacaaucagccggcuuuucagcaggacuuacauacucccaauugaugacauuaaaagaugcaaugcuacaacuagacccaaaugcaaaaacauggauggauauagaaggucggcccgaagacccaguagaaguagcucuauaucaaccuauaaguggauguuacauacacuucuuucgagaaccaacugacuuaaaacaauucaaacaagacgcuaaguacagucauggaauugauauagcagaucucuucgcagcacaaccaggacuaacuucagcaguaauagaagcucuaccuagaaauaugguaauaacaugccaagguucagaagacauaaaaaaacuacuagaaucucaaggaagaaaagacauuaaacuaauugauauagcacuaaguaaaauagacucaagaaaauucgaaaaugcuguuugggaccaauauaaagaccuaugucacaugcauaccggagucguuguugaaaaaaaaaaaagaggaggaaaagaagaaauaacaccacauugugcucuaauggauugcauaauguuugaugcugcagucagcggaggauuaaacacacuuguccuaagagcaguauuaccacgugauaugguauuuagaacaucaaccccccgaguaguauuauaaggacuaguaauaaggaaacuguaugaaugucugugggcaggaagugaagagauccuucuguaaagguuuuuggaauuaugucugcugaauaauaaacuuuuuugaaauaauaaaucugguagaaaaaugagaucuaaaaaaaaaaaaaaaaaaaaaaaaaaaaaaaaaaaaaaaaaaaaaaaaaaaaaaaaaaaaaaaaugcaucccccccccccccccccccccccccccccccaaaggcucuuuucagagccaccagaauu

SEQ ID NO: 10559 - RNA, 2050 nt, Artificial Sequence
  mRNA product Design b-4 comprising derived and/or modified sequence from LASV(Togo/2016/7082;Clade VI)__AMR44578__NP (opt6)
gggagagucccgcagucggcguccagcggcucugcuuguucgugugugugucguugcaggccuuauucaagcuuaccaugucuaauucaaaagaaguaaaaucauuuuuauggacucaaagucuacgaagagaacuaagcggauacugcucaaauauaaaacuacaaguaguuaaagacgcucaagccuuauuacacggucucgauuucagugaaguaucaaauguacaaagauugaugagaaaacaaaaaagagacgacggagaucuaaaacggcuaagagaucuuaaucaagcuguaaacaauuugguagaacucaaaucaguacaacaaaaaucaauacuuagaguaggaacacuaacaucagacgaccuauuaacauuagcugccgaucuagaaaaacuaaaaagcaaaguaaccagaacagaacgaccacuaucgaguggaguauacaugggaaacuuaaguagccaacaacuagaucaaagaagagcacuacuaagcaugauuggaaugucaggaggaaaccaaaauagucaaccuaaaggggauggaguaguacgagucugggacguuaaaaacgccgaccucuuaaauaaccaauucggaacaaugccaagucuaacauuagcuuguuuaaccaaacaaggacaaguagaccuaaacgaugcaguacaagcccuaacagaccuaggacuaauauauacagcaaaauauccaaauagcucagauuuagacagauuaucacaaucacacccaaucuuaaacaugauugauacaaaaaaauccagccucaacauuucaggauacaauuucucacucggcgcagcaauuaaaaccggugcaugcaugcuugauggaggaaauaugcuugaaacaauaaaaguaacaccacagacaauggacggaauccuaaaaucaauacugaaagucaaaagaucacuuggcauguucaucagugauacacccggagaaagaaauccauaugaaaacauauuauacaaaauauguuuaaguggagauggauggccauauauagcuucacgaacugcaaucauagguagagccugggaaaauacaguaguagacuuagaaucagacagcaaaccccaaaaaauaggauccaacgguucaaauaaaucacuacaaucagcaggauucgcacccggcuuaacauauucacaacuaaugacucuaaaagacucaaugcuacaacuagauccaaacgccaaaacauggaucgacauugaaggacgacccgaagacccaguugaaguagcacuauuccaaccaauaaguggcugcuauauccacuuuuuuagagaacccacagaucuaaaacaauucaaacaagacgccaaauauucccacggcauagacguaacugacuuauucgcagcacaaccaggacuaacaucagcaguaaucgaagcccuuccaagaaauaugguacuaacaugccaaggcucagaugauauaaaaaaacuacucgacucacaaggccguagagauaucaaauuaauagacguaucacuaaacaaaauagacucaaggaaauuugaaaacgcaguaugggaucaauauaaagacuuaugccacaugcauacaggaguaguagucgaaaaaaaaaaaaaagguggaaaagaagaaauaaccccacacugugcuuuacuugauuguauaauguucgaugcugcaguaaguggaggacuaaacgcaaccguacucagagcaguacugccuagagauaugguauucagaacaucaaguccaaaaguaguacuuuaaggacuaguaauaaggaaacuguaugaaugucugugggcaggaagugaagagauccuucuguaaagguuuuuggaauuaugucugcugaauaauaaacuuuuuugaaauaauaaaucugguagaaaaaugagaucuaaaaaaaaaaaaaaaaaaaaaaaaaaaaaaaaaaaaaaaaaaaaaaaaaaaaaaaaaaaaaaaaugcaucccccccccccccccccccccccccccccccaaaggcucuuuucagagccaccagaauu

SEQ ID NO: 10560 - RNA, 2050 nt, Artificial Sequence
  mRNA product Design b-4 comprising derived and/or modified sequence from LASV(KAK-428;Clade n.d. (VII))__ANH09741__NP (opt6)
gggagagucccgcagucggcguccagcggcucugcuuguucgugugugugucguugcaggccuuauucaagcuuaccaugucaaauucaaaagaaguuaaaucauuuuuauggacacaaucuuuaaggagagaauuaagcggcuauuguacaaacauuaaauuacaaguaguaaaagaugcacaagcauuauuacauggauuagauuucucagaaguaucgaacguacaacgauuaaugaggaaacagaaaagggacgauaacgaccuaaaaagacuuagagaucuaaaccaagcuguaaacaacuuagucgaacuaaaaucaguacaacaaaaaucaguacuaaaaguaggaacauuaaauagugaugauuuacucacacuagcagcugaucuagaaaaauuaaaaucaaaaguagucagaacagaaagaccauuaaguucagguguauacauggguaaucuaagcagccaacaacuagaucaaagacgagcauuauuaaacaugauaggaauggcaggaggaagccaagguaaucaaccuagcagagacgguguuguuagagucugggacgucaaaaaugcagauuuacuaaauaaucaauuuggaacaaugccaucauuaacauuagcuugucuuaccaaacaaggacaaguagacuuaaaugacguaguuuuagcauuaacggaccuaggauuaauauacacagcaaaauauccaaauuccucagaccuagacagauuaagucaaaaucauccuguauuaaacaugauagacgucaauaaaucaucacuaaauauaucaggauacaauuucucucuaggagccgcaguaaaagccggagcaugcaugcuggacggaggaaauauguuagaaacaaucaaaaucucaccgcaaacaguagaugguauauuaaaaaguauauuaaaaguaaaaagagcccuaggaauguuuguaucagacacuccaggagaaagaaauccauaugaaaacaucuuauauaaaguauguuuaucgggaaauggauggccauacauagcaucaaggacaucaaucguagguagagcaugggaaaauaccguuguugaucuagaaucaaauaaaaaucaacccaaaguagguaacaacggauccaauaaaaugcuacaaucaucaggauuugcuacaggauuaacauauagucaacuaaugacauuaagagacagcaugcuacaauuagaucccacagcaaaaacuuggauugauauagaagguagaccagaagauccaguugaacuugcacucuuccaaccaucaagcggauguuauauacacuuuuucagagagccaacagaucuaaaacaauucaaacaagacgccaaauacagccauggaauagauguaaacgacuuauucagugcacaaccugguuuaacaucagccguauuagaagcauuaccaagaaacaugguacuaacaugucaaggaagcgaugacauaagaaaacuauuagacagucaagauagaaaagacauaaaacuaauagauaucucacuaagcaaagcagacgccagaaaauucgaaaaugauguaugggaccaauucaaagacuugugccauaugcauacaggaauaguaguagaaaagaaaaagaaaggaggaaaacaagaaaugacaccacacugugcucuacuugacuguauaauguucgaugcagcuguaagcggaggauuaaauguaccaacucuacgagccguacuaccgacugacaugguauuccgaacaauaacgacaaaaguaguauuauaaggacuaguaauaaggaaacuguaugaaugucugugggcaggaagugaagagauccuucuguaaagguuuuuggaauuaugucugcugaauaauaaacuuuuuugaaauaauaaaucugguagaaaaaugagaucuaaaaaaaaaaaaaaaaaaaaaaaaaaaaaaaaaaaaaaaaaaaaaaaaaaaaaaaaaaaaaaaaugcaucccccccccccccccccccccccccccccccaaaggcucuuuucagagccaccagaauu

SEQ ID NO: 10561 - RNA, 2050 nt, Artificial Sequence
  mRNA product Design b-4 comprising derived and/or modified sequence from LASV(Pinneo-NIG-1969;Clade I)__AIT17837__NP (opt6)
gggagagucccgcagucggcguccagcggcucugcuuguucgugugugugucguugcaggccuuauucaagcuuaccauguccaacucaaaagaaauuaaaaguuuuuuauggacacaaucacuaaggagagaacuuucaggcuauugcagcaacauaaaacuucaaguaguaaaagacgcccaagcauuacuccacggacuagacuuuagugaaguaucaaauguacaacgauuaaugagaaaacaaaaacgagacgaugccgauuuaaaaagauuaagagaucuaaaucaggcaguaaauaaccucgucgaacuaaaaucaacacaacagaagaacguauuaagaguaggaacacuaucaagcgaugaucucauaacauuagcugcagaucuagaaaaacucaaaucaaaagucauaagaacagaaagaccacuauccaguggaguauauaugggaaacuuaagcucacaacaacuagaucaaagacgagcucuauuaucaaugaucggaaugucaggaggcccacaaggaaauagaacagggggagacggaguaguaaggguaugggacguaaaaaacgcugaacuacuaaauaaucaauucggcacaaugccaaguuuaacucuagcaugccuaacaaaacaagggcaaguagacuuaaacgacgcaguacaagcuuuaacagaucuagguuuaauauauacagcaaaauaucccaacucaagcgacuuagacauguuaacacaaagucacccaauacugggaaugguagacacaaaaaaaaguucacuaaacauaaguggauauaauuuuucauuaggagcagcaguaaaagcaggugcauguaugcuagauggaggaaacauguuagaaacuauaaaaguauccccacaaacaauggauggaauauuaaaaucuauccuaaaaguaaaaagaagucuaggaauguucauaucagacacaccaggcgaaagaaaucccuacgaaaauauacuauacaaaauaugccucucaggagaaggauggccauauauagcaaguagaacuucaauaacaggaagagcaugggaaaauacauuagucgauuuagaaagcgauaacaaaccaccaaaauuaaauucggcagggucuaauaaaagucuacaagcagcaggauugaaugcagguuuaacguauagucaauuaaugacauuaaaagacugcaugcuccaauuagauccaucaucaaaaacauggauagauauagaaggcagaccagaagacccaguagaaaucgcccuguuucaacccaguucuggaugcuauauacacuuuuucagagaaccaacagaccuaaaacaauucaaacaagacgccaaauauucacacggcauagauguaacagacuuauuuucuacacaaccaggccuaacuagcgcaguuauugaagcacucccaagaaacaugguucuaacaugccaagguagugaugacauuaaaaaacuuuuagaaucacaaggaagaagagacauaaaacuaauagauaucagcuuaucaaaagcagacucacgaaaauucgaaaacgcuguaugggaccaauauaaagacuuaugccauaugcacacaggaguaguaguagaaaaaaaaaaaagaggaggaaaagaagaaauaacaccccauugugcauuacuagacugcauaauguucgaugcagcaacaacaggaucacuaaacauuacaacacuacgagcaguacuaccaagagauaugguauuccgaacaucaacuccaaaaguaguacuaugaggacuaguaauaaggaaacuguaugaaugucugugggcaggaagugaagagauccuucuguaaagguuuuuggaauuaugucugcugaauaauaaacuuuuuugaaauaauaaaucugguagaaaaaugagaucuaaaaaaaaaaaaaaaaaaaaaaaaaaaaaaaaaaaaaaaaaaaaaaaaaaaaaaaaaaaaaaaaugcaucccccccccccccccccccccccccccccccaaaggcucuuuucagagccaccagaauu

SEQ ID NO: 10562 - RNA, 2050 nt, Artificial Sequence
  mRNA product Design b-4 comprising derived and/or modified sequence from LASV(ISTH0009-NIG-2011;Clade II)__AIT17405__NP (opt6)
gggagagucccgcagucggcguccagcggcucugcuuguucgugugugugucguugcaggccuuauucaagcuuaccaugucaguaucgaaagaaguuaaaucauucuuauggacucaaucacucagaagagaacuaucagguuauuguucaaacaucaaauuacaaguagucaaagacgcacaagcacuguuacacgggcucgacuuuucagaaguaucaaacguacaaagacuaaugcgcaaacagaaaagagacgauucagauuuaaaaagauuaagagaccuaaaucaagcaguuaauaacuuggucgaacuuaaaagcacucaacaaaaaucaauacuucgaguaggcacauuaacaucagaugaccuuuuaacacuagcagcagaucuagaaaaauuaaaaucaaaaguaauuaggacagaaagaccacuaucuucuggaguauacaugggaaacuuaucaacccaacaauuagaacaaagacgagcauuauuaaacaugauaggaaugguagguggagcacaaggaacacaacccggaagagacgguguagucagaguaugggaugucaaaaaccccgaccuacugaacaaucaauuuggaacaaugccuaguuuaaccuuagcaugccuaacaaaacaaggacaaguagaucuuaacgacgcaguauuagcacuaacagauuuaggauuaauauauacagcuaaauauccaaauaguagcgaccuagaccgauuaagccaaagccacccaauauuaaacaugguagauauaaagaaaucaucacuaaacauuucuggauacaauuucucuuuaggagccgcaguaaaagcaggagcauguauguuagacggaggaaacauguuagaaacuauaaaaguaacaccacaaaccauggacggaauauuaaaaucuauauuaaaaguaaaacgcucacuaggaauguuuguaagcgauacaccaggagaaagaaauccauaugaaaacauucuauacaaaauaugucuaaguggugacggauggccuuacauagcaaguagaacaucaauaguuggacgagcaugggaaaauacaacaguagauuuagaaucagauggaaaaccacaaaaaguaggauccgccggcucaaauaaaucuuuacaaagcgcaggcuuuccuacaggccuaacguauucucaacuaaugacauuaaaagacucaaugaugcaacuagacccaagugcuaaaacauggaucgacauugaagguagaccagaagacccaguagaaauagcauuauaccaaccuaugucuggauguuauauccacuucuuuagagaaccaacagauuuaaaacaauuuaaacaagacgcaaaauacucacacggaauagauguagcagacuuauuuccagcucaaccaggauuaacaagcgccguuauugaagcacuaccaagaaacaugguauuaacuugccaagguagcgacgacauaaaaagacuucuagacucacaaggacguagagacauuaaacuaaucgauauagcauuaaguaaagcagacagucgaagauuugaaaaugcuguaugggaccaauguaaggaucuaugucauaugcauacgggaguuguaguagaaaagaagaaaaggggaggaaaagaagaaauaacaccacacugugcauuaauggauuguauaauguacgacgcagccguaucaggaggccuaaacauaccaguauuaagagcaguacugccgagggauaugguauuuagaacaagcucacccaaagucguauuauaaggacuaguaauaaggaaacuguaugaaugucugugggcaggaagugaagagauccuucuguaaagguuuuuggaauuaugucugcugaauaauaaacuuuuuugaaauaauaaaucugguagaaaaaugagaucuaaaaaaaaaaaaaaaaaaaaaaaaaaaaaaaaaaaaaaaaaaaaaaaaaaaaaaaaaaaaaaaaugcaucccccccccccccccccccccccccccccccaaaggcucuuuucagagccaccagaauu

SEQ ID NO: 10563 - RNA, 2050 nt, Artificial Sequence
  mRNA product Design b-4 comprising derived and/or modified sequence from LASV(ISTH2010-NIG-2012;Clade II)__AIT17483__NP (opt6)
gggagagucccgcagucggcguccagcggcucugcuuguucgugugugugucguugcaggccuuauucaagcuuaccaugucagcuaguaaagaaguaaagagcuucuuauggacucaaagucuucgacgagaacuaucagguuauugcagcaacauaaaacuucaaguaguaaaagacgcacaagcacuauuacacggauuagacuucucagaaguaucaaauguacaaagacuaaugagaaaacagaaaagagacgacagcgaucuaaaaagauuaagagauuuaaaucaagcuguuaauaauuuaguugaacuaaaaagcacacaacaaaaaucaauauuaagaguaggaacacuaacaucagaugacuuacuaacauuagcagccgacuuagaaaaacuaaaaucaaaaguaauaagaacagaaagaccucuaucaagcggcguuuacaugggaaacuuaucaacccaacaacuagaacaaagacgagcauuauuaaaccuaauaggaaugguagguggugcacaaggaacacaaccaggaagagacggcguaguuagaguaugggacgucaaaaacccagaucuacuuaacaaccaauucggaacaaugccauccuuaacucuagcaugcuuaacaaaacaaggacaaguagaccuaaacgaugcaguauuagcucuuacagacuuaggacuaauauacacugcuaaauauccaaauucaucagauuuggacagacuaucacaaucacauccaauacuaaacauggucgauacuaagaaaaguucacuaaauauuucuggauucaauuuuucauuaggagcagccguaaaagccggagcauguaugcuagaugguggaaauaugcuagaaacaauaaaaguaacaccacaaaccauggauggaauauuaaaauccauacuaaaaguaaagaaauccuuaggaauguuuguaucagacacuccaggagaaagaaaucccuacgaaaacauucuuuacaaaauaugucuuucaggagacggcuggcccuauauagcuucaagaacaucaauaguagguagagcuugggaaaacacaacuguagaccuugaaucugacgguaaaccacauaaaguagguacagcaggaucaaacaaaaguuuacaaagugcaggauuuccaacuggacucacauacagucaacuaaugacccuaaaagacucaaugaugcaauuagauccaucagcaaaaacauggauagauaucgaaggucgaccugaagacccaguagaaaucgcguuauaucaaccaaugaguggauguuacauacacuucuucagggaaccaacggauuuaaaacaauuuaaacaagacgcuaaauacagccacggaauugacguugcagaccuuuuuccagcacaaccaggccuaacaucagcaguuauagaagcacuaccaagaaauaugguauuaacuugucaaggaucggaugacaucaaaagacuacuagacucucaggguagaagggauauaaaauuaauagauauagcacuaucuaaagcagacucaagaagauuugaaaaugcuguuugggaccaaugcaaagaccuaugccauaugcauacaggagucguaguagagaaaaagaaaagaggaggaaaagaagaaauaacaccacauugugcauuaauggauuguaucauguaugaugccgcgguaagcggaggacuaaacauaccaguauuaagagcuguauuaccuagagauaugguauucagaacaucaucgccaaaaguaguacuauaaggacuaguaauaaggaaacuguaugaaugucugugggcaggaagugaagagauccuucuguaaagguuuuuggaauuaugucugcugaauaauaaacuuuuuugaaauaauaaaucugguagaaaaaugagaucuaaaaaaaaaaaaaaaaaaaaaaaaaaaaaaaaaaaaaaaaaaaaaaaaaaaaaaaaaaaaaaaaugcaucccccccccccccccccccccccccccccccaaaggcucuuuucagagccaccagaauu

SEQ ID NO: 10564 - RNA, 2050 nt, Artificial Sequence
  mRNA product Design b-4 comprising derived and/or modified sequence from LASV(Lassa virus/H.sapiens-wt/NGA/2015/ISTH_0543;Clade II)__AVO03640__NP (opt6)
gggagagucccgcagucggcguccagcggcucugcuuguucgugugugugucguugcaggccuuauucaagcuuaccaugagugcaucaaaagaaguaaaaagcuuucuauggacacaaucauuaagaagagaauuaaguggauauugcucaaauauaaaauuacaagucguaaaagaugcacaagcacuacuacacggauuagauuucucagaaguaagcaauguacagcgacucaugagaaaacaaaaaagagacgacucagacuuaaaaagacuaagagaucucaaccaagccguaaauaauuuagucgaacuaaaaagcacucaacaaaaaucaauauuaagaguaggcacacuaacaagcgacgacuuacuaacacucgcagcagaucuugaaaaacuaaaaagcaaaguaauaagaacagaaagaccauuauccucagguguauacauggguaaccuuucaacacaacaacuagaacaaagaagagcacuacucaacaugauaggaaugguaggcggagcacaaggaacacaaccaggaagagacggaguaguaagaguaugggauguaaagaacccagauuuacuuaauaaccaauuuggaacaaugccaucauuaacauuagcaugcuuaacuaaacaaggccaaguagacuuaaaugaugcaguacuggcauuaacagacuuagguuuaaucuauacagcaaaauauccaaauucaucagauuuagacagacucucacaaucacacccaauuuuaaacauggucgacacaaaaaaaucaucucuaaauauuucaggauauaacuucucauuaggagcagcgguaaaagcaggagcauguaugcuagacgguggaaauauguuagaaacaauaaaaguaacaccacaaacaauggauggaauacugaaaucaauacuuaaaguaaaaaagagccuaggcauguucguaucagauacaccaggagaaaggaacccauaugaaaacauacuuuacaaaauaugcuuaucuggugacggauggccauauauagcuucaagaacaucuauaguagggagagcaugggaaaauaccacaguagaucucgaaucugacggaaaaccccaaaaaguagguucagcagguucaaauaaaaguuuacaaucagcuggauuuccaacaggacuaacuuauucacaacuaaugacauuaaaagauucaaugaugcaauuagauccaucagcaaaaacauggauagauaucgagggaagaccugaggauccuguagaaauagcauuauaucaacccaugucagguugcuauauacauuuuuucagagaaccaacagaucuaaaacaguucaaacaagacgcaaaauacagccacggaauagacguagcagaccuauuuccagcacaaccaggacuaacaagcgcuguaauagaggcacuaccuagaaacauggucuuaacaugccaaggaagugacgacauuaaaagacuacuagauagccaagguagaaaagacauuaaacuuauagacaucgcauuaucaaaagcagacucgagaagauuugagaacgcaguaugggaccaaugcaaagauuuaugccauaugcauaccgguguaguaguugagaaaaaaaaaagaggagguaaagaagaaauaacgccacacugugcacuaauggauugcauaauguaugacgcagcaguaucaggaggauuaaacauacccguauuaagagccguacuaccacgcgauaugguuuucagaacaagcucgcccaaaguaguauuauaaggacuaguaauaaggaaacuguaugaaugucugugggcaggaagugaagagauccuucuguaaagguuuuuggaauuaugucugcugaauaauaaacuuuuuugaaauaauaaaucugguagaaaaaugagaucuaaaaaaaaaaaaaaaaaaaaaaaaaaaaaaaaaaaaaaaaaaaaaaaaaaaaaaaaaaaaaaaaugcaucccccccccccccccccccccccccccccccaaaggcucuuuucagagccaccagaauu

SEQ ID NO: 10565 - RNA, 2050 nt, Artificial Sequence
  mRNA product Design b-4 comprising derived and/or modified sequence from LASV(Lassa virus/H.sapiens-wt/NGA/2016/ISTH_0009;Clade II)__AVO03572__NP (opt6)
gggagagucccgcagucggcguccagcggcucugcuuguucgugugugugucguugcaggccuuauucaagcuuaccaugucugcaagcaaagaaguuaaaucuuuuuuauggacacaaucauuaagaagagaauuaagcggauacuguagcaacauaaaauuacaaguaguaaaagaugcacaagcacuguuacauggauuagauuucagcgaaguuucaaacguacaaagacuaaugaggaaacaaaaaagagaugauagcgaucuaaaacgguuaagagaucuaaaucaagcaguaaauaauuuaguagaauuaaaaagcacacaacaaaaaaguauauuaagaguaggaacccuaacaucagaugauuuauuaacguuagcagcagaccuugaaaaacuuaaaucuaaaguaauaagaacagaaagaccauuaagcaguggagucuauaugggaaaucuaagcacacaacaauuagaacaacgucgagcacuauuaaauaugaucggaaugguaggaggagcacaaggcacacaaccaggaagagacgggguaguaagagucugggacguaaaaaauccagauuugcuaaacaaccaauucggaacaaugccgagucucacauuggcuugcuuaacaaaacaaggucaaguagaccuaaacgacgcaguucuagcacuaacagaccuaggacuuauuuauacagcuaaauauccaaauucuucagacuuagauagacuaucccaaucccaccccauacugaauaugguagauacaaaaaaaucaucauugaauauuucaggcuauaauuucagucuaggagcagcaguaaaagcuggagccuguaugcuagacggugguaauaugcuagaaacaauaaaaguaacaccccaaacaauggacggaauacuaaaaucaaucuuaaaaguuaaaaaaagccuuggaauguucguaagugauaccccaggcgaaagaaacccuuacgaaaauauacuauauaaaauaugucuaucaggagacggauggccuuauauagccuccagaaccucuauaguuggaagggcaugggaaaauacaacaguagaucucgaaucagacggaaaaccacaaaaaguagggagcgccgguaguaacaagagucuacaaagcgcuggauucccaacaggcuuaacauauagucaauuaaugacuuuaaaagauaguaugaugcaacuagauccauccgccaaaaccuggauagauauagaaggaagaccagaagacccaguagaaauagcacuauaucaaccuaugucaggaugcuacauacacuuuuucagagaaccaacagauuuaaaacaauucaaacaggacgcaaaauauucacacggcauugauguagcagauuuauuuccagcacaaccaggauuaacaucagcaguaauagaagcucuaccaagaaacaugguacuaacaugucaaggaucagaugacauaaaaagacuauuagacagccaaggacgaagagauauaaaauuaauagauauagcuuuaagcaaagcugacucaagaagauucgaaaacgcgguaugggaccaaugcaaagaccugugccauaugcacaccggaguaguaguagaaaaaaaaaaaagaggaggaaaagaagaaauaacaccacauugugcuuuaauggauuguauaauguaugacgcagcaguaucaggaggacuaaauauuccuguacuacgagcuguacuaccacgagacaugguauuuagaacaagcucuccgaaaguaguacuauaaggacuaguaauaaggaaacuguaugaaugucugugggcaggaagugaagagauccuucuguaaagguuuuuggaauuaugucugcugaauaauaaacuuuuuugaaauaauaaaucugguagaaaaaugagaucuaaaaaaaaaaaaaaaaaaaaaaaaaaaaaaaaaaaaaaaaaaaaaaaaaaaaaaaaaaaaaaaaugcaucccccccccccccccccccccccccccccccaaaggcucuuuucagagccaccagaauu

SEQ ID NO: 10566 - RNA, 2050 nt, Artificial Sequence
  mRNA product Design b-4 comprising derived and/or modified sequence from LASV(Lassa virus/H.sapiens-wt/NGA/2016/ISTH_0017;Clade II)__AVO03568__NP (opt6)
gggagagucccgcagucggcguccagcggcucugcuuguucgugugugugucguugcaggccuuauucaagcuuaccaugucagccaguaaagaaguaaaaagcuuucuauggacacaaaguuuacgaagagaauuaucuggauacugcaguucaauuaaacuucaaguaguaaaagaugcucaagcauuacuacacggacuggauuucucagaaguaagcaauguacaaagacuaaugcgcaaacaaaaacgagacgauucagaucuaaaaagauuaagagaccuaaaccaagcaguaaauaacuuaguagagcuaaaaucaacacaacaaaaaucaauauugagaguaggaacauuaacuucagaugaccuacuuacuuuagcagcugaucuagaaaaauuaaaaucaaaaguaauaagaacagaaagaccucuuucaucaggaguauauaugggaaacuuaucuacacaacaacuagaacaaagaagagcauuauuaaacaugauagguauggccggcggagcacaagguacucaaccaggaagagauggagucgugcgaguaugggauguaaagaauccugauuuacuuaauaaucaauucggaaccaugcccagucucacacuagcgugcuuaacaaaacaaggucaaguagaccuaaaugaugcaguacuugcacuaaccgaucuaggauuaauauauacagcaaaauacccaaauucaucagacuuagacagauuaagccaaucacaccccauuuuaaauaugguugacacaaaaaaaucaagcuuaaacaucucaggauacaacuuuagccuaggagcagcuguuaaagcaggagcaugcaugcuagacggaggaaauauguuagaaacaauaaaaguaaccccccaaacaauggacgguauauuaaaaaguauccuaaaaguaaaaagaagcuuaggaauguucguaucagaugcaccaggagaaagaaacccauacgaaaauauacuuuauaaaauaugccucaguggcgauggauggccauauauagcaagcagaacuucgauaguaggaagagcaugggaaaauaccacaguagaucuagaaagcgaugggaaaccacaaaaaguaggagcaacaggaucaaacaaaaguuuacaaucagcagguuuuccaaccggacuaaccuauucacaauuaaugacauuaaaagauagcaugaugcaacuagaccccucagcaaaaacauggauagauauagaaggcagacccgaagacccaguagaaguagcucuauaucaaccaguaagcggaugcuauauacacuuuuucagagaaccgacagauuuaaaacaauucaaacaagacgcaaaauauucacaugguauugauguagcagaucuuuucccagcacaaccaggcuuaacaucagcaguaauagaagcacuaccaagaaacaugguauuaacaugccagggaucagacgacauuaaaaaacuauuagauucucaaggccgaaaagacauaaaacuaaucgauauagcucuaaguaaagccgauuccagaagauucgaaaaugcagucugggaccaaugcaaagauuuaugccacaugcauacaggaguaguugucgaaaaaaaaaaaagaggaggaaaagaagagauaacaccccacugugccuuaauggacuguauaauguacgacgcagcagucucaggaggauuaaauauaccaguacuaagagccguuuuaccuagagauaugguauucagaacaagcagcccuaaaguagucuuauaaggacuaguaauaaggaaacuguaugaaugucugugggcaggaagugaagagauccuucuguaaagguuuuuggaauuaugucugcugaauaauaaacuuuuuugaaauaauaaaucugguagaaaaaugagaucuaaaaaaaaaaaaaaaaaaaaaaaaaaaaaaaaaaaaaaaaaaaaaaaaaaaaaaaaaaaaaaaaugcaucccccccccccccccccccccccccccccccaaaggcucuuuucagagccaccagaauu

SEQ ID NO: 10567 - RNA, 2050 nt, Artificial Sequence
  mRNA product Design b-4 comprising derived and/or modified sequence from LASV(Lassa virus/H.sapiens-wt/NGA/2018/ISTH_0959;Clade II)__AVV65100__NP (opt6)
gggagagucccgcagucggcguccagcggcucugcuuguucgugugugugucguugcaggccuuauucaagcuuaccaugagcgcaagcaaagaaguaaaauccuuucuuuggacacaguccuuaagaagagaacuaucagguuacuguucgaacauaaaauuacaaguuguaaaagacgcacaagcucuacuacauggucucgauuuuuccgaagucagcaauguacaaagauuaaugagaaaacaaaaaagggaugacucagacuugaaaagacuaagagauuuaaaccaagcaguaaauaacuuaguagaauuaaaaucaacacaacaaaaaucaauauuaagaguagguacucuaaccucagaugauuuauuaacacuagcggcagaccuagaaaaacuaaaaucaaaaguuauucgaacagaacgaccucuaucaucaggcguauacauggguaacuuaaguacucaacaacuagaacaaagaagagcauuacuaaauuuaauagguaugguaggaggugcacagggaacacaaccaggcagggacggaguuguaagaguaugggauguaaagaauccugauuuacuaaauaaucaauucggaacuaugccaucacuaacacuagccugccuaacaaaacaaggucaaguagacuuaaaugacgucguacuggcccuaacagaccuaggauuaaucuauacagcuaaauauccaaauucaucagacuuagacagacuaucacaaucucacccaauauuaaacaugguagauacaaaaaaauccagccuuaacauaucagguuucaauuuuaguuuaggagcagcuguaaaagcaggcgcaugcaugcuagacggagguaauauguuggaaacaauaaaaguaacuccccaaaccauggacggaauacuaaaaucaauauuaaaagugaaaaaaagccuagggauguuugucagcgauacuccaggagaaagaaauccauaugaaaauauucuauacaaaauauguuuaucaggcgacggcuggccauauauagcaucaagaacaucaauaguaggaagagcaugggaaaauacaaccguagaucuagaaagcgauggaaaaccacauaaaguagguacagccggaucaaacaaaucucuacaaucagcuggauuuccaacgggacuuacauacagccaacuaaugacacuuaaagacaguaugaugcaacuggaucccucugccaaaacauggauugacaucgaaggacguccagaagacccagucgaaaucgcacuauaucaaccgaugucuggauguuacauucauuuuuuuagggaaccaacggauuuaaaacaauuuaaacaagacgccaaauauucacauggaauagacgucgccgaccuauucccugcucaacccggauuaacaucggcuguaauugaagcguuaccacguaacaugguauuaacaugccaaggaagcgaugacauuaaaagguuauuagauagucaaggaagaaaagauauaaaauuaauagauauagcacuaucaaaaacggacucacgaagauucgaaaacgcuguaugggaccagugcaaagaucuaugucauaugcauacaggaguaguuguagaaaaaaaaaaaagaggaggaaaagaagaaauaacaccacacugugcuuuaauggauugcauuauguaugaugcagcaguauccgguggccuaaacauaccaguauuacgagcaguucuaccaagagauaugguauucagaacuucaucaccaaaaguaguacuauaaggacuaguaauaaggaaacuguaugaaugucugugggcaggaagugaagagauccuucuguaaagguuuuuggaauuaugucugcugaauaauaaacuuuuuugaaauaauaaaucugguagaaaaaugagaucuaaaaaaaaaaaaaaaaaaaaaaaaaaaaaaaaaaaaaaaaaaaaaaaaaaaaaaaaaaaaaaaaugcaucccccccccccccccccccccccccccccccaaaggcucuuuucagagccaccagaauu

SEQ ID NO: 10568 - RNA, 2050 nt, Artificial Sequence
  mRNA product Design b-4 comprising derived and/or modified sequence from LASV(LASV003-NIG-2008;Clade II)__AIT17581__NP (opt6)
gggagagucccgcagucggcguccagcggcucugcuuguucgugugugugucguugcaggccuuauucaagcuuaccaugucagcaucaaaagaaguaaaaucuuuccucuggacacaaucacuaagaagagaauuaucaggcuauuguucuagcauaaaacuacaaguaguuaaagacgcacaagcacuauuacauggacuagauuucagugaaguaagcaauguccaaagauuaaugagaaaacaaaaaagagacgauucagacuuaaaaagauuacgagaucuaaaucaagcagucaauaaucuaguugagcuaaaaagcacacagcaaaaaucaguacuaagaguaggaacacugacgucagacgaccuacuaacacuagcagcagaucuugaaaaacuaaaaucaaaaguaauaagaacagaaagaccauuaaguucaggaguauauauggguaaccuaagcgcacaacaacuagaacaaagaagaacucuacucaacaugaucggaauggucgguggcgcacaaggaacacaaccaggaagagaugguguaguucgaguaugggacgucaaaaauccagacuuauuaaacaaccaauuuggaacaaugccuucacuaaccuuagcaugucuuacaaaacaaggacaaguagaucuaaacgauguuguacuagcacuaacagacuuagggcuaauauauacagcaaaauauccaaacucaucugauuuagaccgucucucucaaucacacccaauauuaaguaugguagacaccaaaaaauccucacuaaauauaucaggauauaacuucagucuaggagcagcaguaaaagccggagcauguaugcuagacggaggaaacauguuagaaacaauaaaaguaacaccucaaacaauggauggaauccuaaaaucaauauuaaaaguaaaaaaaaguuuaggaauguucguaucagauacacccggcgaacgaaacccauaugaaaauauacuauacaaaaucugucucaguggagaugguuggccauacauagcaucacgaacuucuauaguaggacgugcaugggaaaauaccacagucgaccuagaaagcgauggaaaaccacaaaaaguagguacugcuggaucaaauaaaaguuuacaaucagcaggcuuuccuacuggacuaacuuauagccaauuaaugacccuaaaagauucuaugaugcaauuagauccgagcgcaaaaaccuggauagauauagagggaagaccagaagacccaguagaaauagcucuauaccaaccaaugagcggauguuacauccauuuuuuuagagaaccaacagaccuaaaacaauuuaaacaagaugcaaaauauagccauggaauagauguaaccgaucuuuuuccagcccaaccaggcuuaacaucugcuguuaucgaagcuuuaccaagaaacaugguauuaaccugccaaggaucagacgacauaaaaagauuacuagauucacaaggacgcagagauauaaaacugauagacauagcacuuagcaaagccgauucucguagauucgaaaaugcaguaugggaccaauguaaagacuuaugccacaugcacacaggcguuguaguagaaaaaaaaaagcgaggagguaaagaagaaauaacaccccauugugcauuaauggacugcauuauguaugacgcggccguuagcggagguuuaaauauaccaguauuacgugcaguacuaccaagagacaugguuuucagaacaucaucaccaaaaguaguacuauaaggacuaguaauaaggaaacuguaugaaugucugugggcaggaagugaagagauccuucuguaaagguuuuuggaauuaugucugcugaauaauaaacuuuuuugaaauaauaaaucugguagaaaaaugagaucuaaaaaaaaaaaaaaaaaaaaaaaaaaaaaaaaaaaaaaaaaaaaaaaaaaaaaaaaaaaaaaaaugcaucccccccccccccccccccccccccccccccaaaggcucuuuucagagccaccagaauu

SEQ ID NO: 10569 - RNA, 2050 nt, Artificial Sequence
  mRNA product Design b-4 comprising derived and/or modified sequence from LASV(LASV035-NIG-2009;Clade II)__AIT17589__NP (opt6)
gggagagucccgcagucggcguccagcggcucugcuuguucgugugugugucguugcaggccuuauucaagcuuaccaugagugccaguaaagaaguaaaaucauucuuguggacacaaaguuuaagaagagaacuuucaggauacugcucaagcauaaaacuacaaguaguaaaagaugcacaagcacuacuacauggacuagacuucagugaaguaucaaacguacaaagauuaaugagaaaacagaaaagagaugacucagaucuaaaaagauuacgagauuugaaucaagcaguuaauaacuuaguugaauuaaaaaguacacaacaaaaaucgauacuacgaguaggaacucuaacaucagaugaccuuuuaacacuagcagcugauuuagaaaaauuaaaaucaaaaguaauaagaacagaaagaccauuaagcucaggaguauauaugggaaauuugagugcacaacaacuagaacaaagacgagcucuccuaaauaugauaggaaugguuggaggagcacaagguacacaaccaggaagagacggaguaguuaggguaugggaugucaaaaacccugaucuauuaaacaaccaauuuggcacaaugccaagucuaacucuagcaugccugacuaaacagggacaaguagacuuaaacgaugcaguauuagcucuaacagacuuagguuuaauauauacagcaaaauauccaaauaguucugauuuagacagacuaucccaaucacacccaauucucaacaugguagauacaaagaaauccagucugaauauuucaggauacaauuucaguuuaggagcagccguaaaagcaggagccuguauguuagacggugguaauaugcuagaaacaauaaaaguaacaccccaaacaauggacggaauacuuaaaucaauauugaaaguaaaaagaucauuaggaauguuuguaagcgauaccccaggagaaagaaauccguaugaaaauauacuuuauaaaauaugucuaucaggagacggauggcccuauauagcaucaagaaccucaauagucggcagagcaugggaaaacacuacaguugauuuagaaucagauggaaaaccacaaaaaguaggaacaacaggaucaaacaaaucacuacaaucagcaggauucccuacaggucugacauacucccaacuuaugacauuaaaagacucaaugaugcaacuggauccaucagcuaaaacauggauagauauagaaggcagaccagaggacccgguagaaauagcucuauaucaaccaaugucagguuguuacauucacuucuucagagaaccaacagaucuaaaacaauucaaacaagacgccaaauauucacauggaauagauguagcagauuuauuuccagcacaacccggauuaacaagcgcugucauagaagcucucccaagaaacaugguauuaacaugucaaggcagcgaugauauuaagaaauuacuagacucacaaggacgaagagacauaaaacuaauagauauagcauugaguaaagccgauucaagaaaauuugaaaaugcaguaugggaucaauguaaagaucuaugucauaugcacacuggaguugugguugaaaagaagaaaagagguggaaaagaagaaauaacaccacauugugcauuaauggauugcauuauguaugacgcugcaguaucaggaggacuaaacauaccaguccuuagagcaguacucccaagagauaugguauuuagaacuucaucaccaaaaguaguauuauaaggacuaguaauaaggaaacuguaugaaugucugugggcaggaagugaagagauccuucuguaaagguuuuuggaauuaugucugcugaauaauaaacuuuuuugaaauaauaaaucugguagaaaaaugagaucuaaaaaaaaaaaaaaaaaaaaaaaaaaaaaaaaaaaaaaaaaaaaaaaaaaaaaaaaaaaaaaaaugcaucccccccccccccccccccccccccccccccaaaggcucuuuucagagccaccagaauu

SEQ ID NO: 10570 - RNA, 2050 nt, Artificial Sequence
  mRNA product Design b-4 comprising derived and/or modified sequence from LASV(LASV1000-NIG-2009;Clade II)__AIT17783__NP (opt6)
gggagagucccgcagucggcguccagcggcucugcuuguucgugugugugucguugcaggccuuauucaagcuuaccaugagcgcaucaaaagaaguaaaauccuuccuauggacccaaagccuaagaagagaauuaucaggguacuguucaaauaucaaauuacaaguaguaaaagacgcacaagcauuauuacauggccuagauuucucagaaguauccaauguucaaagacuaaugcguaaacaaaaaagagacgacucagaccuaaaaagauuaagagaucuuaaccaagcaguaaauaauuuaguggaauuaaaaagcacucaacaaaaaaguauccuaagaguaggaacucuaacuagcgacgaucuucuaacauuagcagccgaucucgaaaaacuaaaaucgaaaguaauaagaacugaaagaccauuaaguagcgguguauauaugggcaaccuaagcacacaacaacuagaacaaagaagagcauuacuaaacaugauaggaaugguaggaggagcacaaggaacacaaccuggaagagacggaguaguaagagucugggacguaaaaaacccagacuuacuaaauaaucaauucggaacgaugccaagucuuacacuagcaugucuuacaaaacaaggucaaguugaccuaaacgauguaguucuagcacuaacagaucugggauuaauuuauacagccaaauaccccaacagcagugaccuugaccggcuaagucaaucacacccaauauuaaacauggucgauacaaaaaaaucaucucuaaacauaaguggauacaacuucaguuuaggagcugccguaaaagcaggugcauguaugcuagacggaggaaacauguuagaaacaauaaaagucacaccacaaacaauggaugggauauuaaaaagcaucuuaaaaguaaaaaaaucccuuggaauguucguaucagacacuccuggagaaagaaaucccuacgaaaauauacuauacaaaauaugucuaagcggcgauggauggccauauaucgcuucaagaacuucuauaguaggaagagcuugggaaaauacaacuguagaucucgaaagugacggaaaaccacaaaaaguuggaacagcaggaagcaauaaaucauuacaauccgcaggauuuccaacaggacugacauauagucaacuaaugacucuaaaagauaguaugaugcaauuagauccaucagcaaaaacauggauagacaucgaagguagaccagaagacccaguagaaauagcucuauaucaaccaguaaguggaugcuacauacacuucuucagggaaccaacagauuuaaaacaauuuaaacaagacgcuaaauauagucacggaauagacguagcagaccuauuuccagcacaaccaggccuaacaucugccguuauagaagcacuaccuagaaauaugguacucacuugccaaggaucagaugauaucaaaagacuauuagacucacaaggacgaagagacauaaaacuaauugacauagcauuaagcaaagcagauucaagaagauuugaaaacgcuguaugggaucaaugcaaagaccucugucacaugcauacaggaguagucguagaaaaaaaaaaaagaggagguaaagaggaaauaacaccgcacugugcauuaauggauugcauaauguaugacgcggcaguaucagguggauuaaauauaccuguauuaagagcagucuuaccacgagauaugguauucagaacuucgaguccuaaaguaguacuuuaaggacuaguaauaaggaaacuguaugaaugucugugggcaggaagugaagagauccuucuguaaagguuuuuggaauuaugucugcugaauaauaaacuuuuuugaaauaauaaaucugguagaaaaaugagaucuaaaaaaaaaaaaaaaaaaaaaaaaaaaaaaaaaaaaaaaaaaaaaaaaaaaaaaaaaaaaaaaaugcaucccccccccccccccccccccccccccccccaaaggcucuuuucagagccaccagaauu

SEQ ID NO: 10571 - RNA, 2050 nt, Artificial Sequence
  mRNA product Design b-4 comprising derived and/or modified sequence from LASV(LASV221-NIG-2010;Clade II)__AIT17625__NP (opt6)
gggagagucccgcagucggcguccagcggcucugcuuguucgugugugugucguugcaggccuuauucaagcuuaccaugucagcaucaaaagaaguaaaaagcuuccuuuggacacaaucccuaagacgagaauuaucaggauacuguucaucaauaaaacuacaaguaguuaaagacgcucaagcauuauuacauggguuagacuuuuccgaagucuccaauguacagagacuaaugagaaaacaaagaagagaugauuccgauuuaaaacgacuaagagauuuaaaccaagcagucaauaaccucguugaacuaaaaaguacacaacaaaaaaguauauuaagaguaggcacacuaacaagcgaugaccuacucacucuagcagcagaccuagaaaaauuaaaaucaaaaguaauaagaacagaaagaccacuaaguucagguguauauaugggaaauuuaucaacacaacaacuagaacaacgaagagcuuuguuaaauaugauagguaugguaggaggagcacagggaacacaaccgggaagagacgguguagugagaguaugggacguaaaaaacccggauuuacuaaacaaccaauucggaacaaugccaagccuaacucuagcaugcuuaacaaaacaaggacaagucgacuuaaacgaugcuguacuagcacuaacagaccuaggauuaauauacacagcaaaauacccaaauagcagugauuuagacagacuaagccaaagucacccuauccuuaauaugguagauacaaaaaaaagcucuuuaaacauauccgguuacaacuucagucucggagcagcagucaaagccggagcauguauguuagauggcggaaacaugcuugaaacaauaaaaguuacaccacaaaccgucgacggcauccuaaaaucaauauuaaagguuaaaagaagucuaggaauguucguaucagacacaccaggugaaagaaauccauacgaaaauauacuguauaaaauaugucuaaguggagauggauggccuuauauagcaucacgaacaucaauagucggacgagcgugggaaaacacuacaguugaucuagaaagugauggaaaaccacaaaaaguuggaacugcgggaucaaauaaaucauuacaaucagcuggauuuccgacaggacuaacauauagccaauuaaugacacuaaaagauagcaugaugcaauuagaucccucagcaaaaacauggauagacaucgaaggaagaccagaagaccccguugaaauagcauuauaucaaccaaugucaggcuguuauauacauuucuuucgcgaaccaacagaccuaaaacaauuuaaacaagaugcaaaauauagucacggaauagacguagcagaucuauucccagcacaaccuggauuaacaucagcaguaaucgaagcccuuccaagaaauauggucuuaacuugucaaggaagcgaugacauaaaaagacuccuugacucacaaggaagaagagacauaaagcucaucgauauugcucuaucuaaagccgauucaagaaaauucgaaaaugccguaugggaccaauguaaagacuuaugccauaugcauacaggaguaguuguagaaaaaaaaaaaagagguggaaaagaagaaauaacaccacacugcgcucucauggauugcauaauguaugacgcagcaguaucaggaggccuaaacaucccaguauuaagagcuguucuaccaagagauaugguauucagaacaaguaguccaaaaguaguacuuuaaggacuaguaauaaggaaacuguaugaaugucugugggcaggaagugaagagauccuucuguaaagguuuuuggaauuaugucugcugaauaauaaacuuuuuugaaauaauaaaucugguagaaaaaugagaucuaaaaaaaaaaaaaaaaaaaaaaaaaaaaaaaaaaaaaaaaaaaaaaaaaaaaaaaaaaaaaaaaugcaucccccccccccccccccccccccccccccccaaaggcucuuuucagagccaccagaauu

SEQ ID NO: 10572 - RNA, 2050 nt, Artificial Sequence
  mRNA product Design b-4 comprising derived and/or modified sequence from LASV(LASV237-NIG-2010;Clade II)__AIT17639__NP (opt6)
gggagagucccgcagucggcguccagcggcucugcuuguucgugugugugucguugcaggccuuauucaagcuuaccaugucggcuagcaaagaagugaaauccuuucucuggacacaaagucuacgaagagaauuaucuggauauuguaguaauauaaaacuacaaguagucaaagacgcacaagcauuauuacauggauuagacuucagugaagucucuaacguacaaagauuaaugagaaaacagaaaagagacgacucagaccucaaaagacuuagagaccucaaccaagcaguaaauaacuuaguagaacuaaaaucaacgcaacaaaaaucaauauuaagagucggcacacuaacauccgacgauuugcuuaccuuagcagcagaccuagaaaaauuaaaaucuaaaguuauaagaacagaacgaccacuaagcucaggaguuuauaugggaaauuuaaguacgcaacaacuagaacaacguagagcauuacuuaacaugaucgguaugguaggaggagcacaaggaacucaaccaggaagagacgguguuguaagagucugggaugucaaaaacccugaucuucuaaacaaccaguuuggaacaaugccuucuuuaacauuagcauguuuaacuaaacaaggacaaguagacuuaaaugaugcaguacuagcacucacagaccuaggcuuaaucuacacagcuaaauauccuaacucaucagauuuagacagacuaagucaaucacacccuauauuaaacaugguagacauaaagaaaagcucauuaaacauaaguggauauaacuucagccucggagcugcaguuaaagcaggagcauguauguuagauggagguaauaugcuagaaacaauaaaaguaacaccacaaacaauggacggaauacuuaaaaguauauuaaaagucaaaaggagccuaggaauguucguuagugacacaccaggagaaagaaaucccuacgaaaauauacuauacaaaauaugucucucuggagauggauggccauauauagcaaguagaacaucaauaguaggucgagcaugggaaaauacaacugucgaucuugaaucagacggcaaaccccaaaaaguaggaucagcaggaaguaauaaaaguuuacaaucagcaggauuuccaacaggacucacauauagucaacuuaugacauuaaaagauucaaugaugcaacuugauccaucagcaaaaacauggauagauauugaaggacgaccggaagacccaguagaaauagcacuauaucaacccaugucugguuguuauauacacuuuuucagagaaccuacagaucuaaaacaauuuaagcaagacgcgaaauacucacauggcaucgacguugcagauuuauuuccagcacaaccuggauuaacaucagcaguaauagaagcauuaccaagaaacaugguauuaaccugucaaggcucagaugacauaaaaagacuauuagauucccaaggaagaagagacauaaaauuaauagacauagcacucucaaaagcggauucccgaagauucgaaaacgcagucugggaccaauguaaagauuuaugucacaugcacacaggaguaguaguagaaaagaagaaaagaggaggaaaagaagaaauaaccccucacugugcauuaauggacuguauaauguacgaugcagcaguaucagguggacuaaauauaccuguccuccgagccguauuaccaagagauaugguauucagaacaagcucuccaaaaguaguacuauaaggacuaguaauaaggaaacuguaugaaugucugugggcaggaagugaagagauccuucuguaaagguuuuuggaauuaugucugcugaauaauaaacuuuuuugaaauaauaaaucugguagaaaaaugagaucuaaaaaaaaaaaaaaaaaaaaaaaaaaaaaaaaaaaaaaaaaaaaaaaaaaaaaaaaaaaaaaaaugcaucccccccccccccccccccccccccccccccaaaggcucuuuucagagccaccagaauu

SEQ ID NO: 10573 - RNA, 2050 nt, Artificial Sequence
  mRNA product Design b-4 comprising derived and/or modified sequence from LASV(LASV253-NIG-2011;Clade II)__AIT17671__NP (opt6)
gggagagucccgcagucggcguccagcggcucugcuuguucgugugugugucguugcaggccuuauucaagcuuaccaugagcgcaucuaaagaaguaaaaucuuucuuauggacacaaucacuaagaagagaacucucuggauauugcuccaguauuaaacuacaaguaguaaaagaugcgcaagcccucuuacauggacuugacuuuagugaaguaucaaauguucaaagacuuaugcguaaacaaaaaagagaugauucagauuuaaaaagauuacgagaccuaaaucaagcuguaaacaauuuaguagaauuaaaaagcacacaacaaaaaucaguauuaagaguaggaacauuaacaucagacgaccuacuaacacuagcugcagaccuagaaaaacuaaaaucaaaaguaauaagaacugaaagaccgcuaagcucaggaguauauaugggaaauuuaaguacacagcaauuagaacaaagacgagcacuuuuaaacaugauaggaaugguuggaggagcacaaggaacacaaccuggccgagacggaguaguuagaguaugggauguaaaaaauccagauuuauuaaauaaucaauucggaacuaugccaagucuaacacuagcaugucuaacaaaacaaggacaaguagaccuaaacgacgucguucuagcuuuaacagaccucggauuaaucuauacagccaaauauccaaauaguagcgaucuagauagacucucacaaucacaccccauacuaaauauggucgacaccaaaaaaucaucauuaaacauuucaggauacaauuuuucacuaggagcagcaguaaaagcaggagcgugcaugcuugaugggggaaauauguuagaaacaauaaaaguaacaccccaaacaauggacggcauacuaaaaucaauacuaaaaguaaaaaaaucuuuagguauguucguaucagauacaccuggagaacgaaauccguaugaaaauauacuauacaaaauaugucuaucaggagauggauggccauauaucgcaagucgaaccucaauaguuggaagagcaugggaaaauacaacaguagaucuagaaagcgacggaaaaccacaaaaagucggaacagcgggaucaaauaaaaguuuacaaucagcaggcuuuccaacaggacuuacauauucacaacuaaugacauugaaagauagcaugaugcaacuagauccaagugcaaaaacguggauagauauagaaggaaggcccgaagauccaguugaaaucgcacucuaccaaccaaugucaggaugcuacauccauuuuuucagagaaccaacagaucuaaagcaauucaaacaagacgcaaaauacucacacggaauagacgucacagaucuauucccagcacaaccaggucuuacuucugcaguaauagaagcauuaccgcgaaacaugguacuaacuugucaaggaagugacgacauaaaaagauuacuagacagccaaggaagaagagauauaaaauuaauagacauagcguuaucaaaagcagacuccagacgauuugaaaacgcaguaugggaucaaugcaaggauuuaugccauaugcauacaggagucguaguagaaaaaaaaaagcguggcggaaaagaagaaauaacaccccauugugcauuaauggauugcauaauguaugaugcagcaguauccggaggacucaacauaccaguccuaagagcaguccucccaagggauauggucuuuagaacauccucacccaaaguaguauuauaaggacuaguaauaaggaaacuguaugaaugucugugggcaggaagugaagagauccuucuguaaagguuuuuggaauuaugucugcugaauaauaaacuuuuuugaaauaauaaaucugguagaaaaaugagaucuaaaaaaaaaaaaaaaaaaaaaaaaaaaaaaaaaaaaaaaaaaaaaaaaaaaaaaaaaaaaaaaaugcaucccccccccccccccccccccccccccccccaaaggcucuuuucagagccaccagaauu

SEQ ID NO: 10574 - RNA, 2050 nt, Artificial Sequence
  mRNA product Design b-4 comprising derived and/or modified sequence from LASV(LASV254-NIG-2011;Clade II)__AIT17675__NP (opt6)
gggagagucccgcagucggcguccagcggcucugcuuguucgugugugugucguugcaggccuuauucaagcuuaccaugagugcaucuaaagaaguaaaaucauuuuuauggacccaaucgcucagaagagaauugaguggauauugcaguucaauuaaauugcaaguuguaaaagacgcacaagcacuauuacauggucuagauuuuagcgaaguaucaaauguucaacgcuuaaugcgaaaacaaaaacgagaugacagugacuuaaaaagacuaagagacuuaaaucaagcaguaaacaauuuaguagaacuaaaaaguacacaacaaaaaucuguauuaagaguaggaacauuaacaagcgaugauuuacucacauuagcagcugaucuagaaaaauuaaaaucaaaaguaauaagaacagaaagaccauuauccagcggaguauauaugggaaauuuaucaacacaacaauuagagcaacgacgugcauuauuaaacaugauaggaaugguagguggagcacaaggcacgcaaccaggaagagacggaguaguaagaguaugggaugucaaaaacccugaccuacuaaauaaucaauuuggaacaaugccaucauugacauuagcaugucuuacaaaacaaggacaaguagacuuaaaugacgcgguacuagcacuaacagauuuaggauuaauauauacagcaaaauauccaaauucaucagaccuugauagauuaagucaaagccacccaauacuuaauaugguagauacaaagaaauccagucuaaacauuagcggcuacaauuucagccuaggagcagcaguaaaagcaggagcgugcauguuggacggaggaaauaugcuagaaacaauaaaagugacuccccaaacaauggacggaauauuaaaaucuauacuaaaaguaaagaaaagccuaggaauguucguaagugauacaccaggagaaagaaauccauaugaaaauauauuauauaaaauaugucuaagcggugauggauggcccuauauagcaaguagaacaucgauaguggguagagcaugggaaaauacuaucguagaucuagagagugauggaaaaccucaaaaaguaggaacggcaggaucaaacaaaucauuacaaucagccggauuuccaacaggacuaacauauucacaauuaaugacacuaaaagauaguaugaugcaacuagacccaagugcaaaaaccuggauagauauagaaggaagaccagaagaccccguagaaauagcauuauaucaaccaaugucaggauguuacauacacuuuuucagagaaccaacugauuuaaaacaauuuaaacaagaugcuaaauacagucauggaauagaugucgcagacuuauucccagcacaaccagguuuaacaagugcaguaauagaagcauuaccgagaaauaugguucucacuugucaaggaagugacgauauaaaacgacuacuugauucacaaggaagaagagacauaaaauuaauugauauagcauuaucaaaagcagauaguagaagauucgaaaaugcaguaugggaucaauguaaagaccucugucacaugcauacaggaguaguagucgagaaaaagaaacgaggaggaaaagaagaaauuacaccgcauugugcauuaauggauugcauaauguaugacgcugccguaucaggaggacuuaauauucccguguuaagggcaguauuaccaagagacaugguauucagaacuucaucacccaaaguaguacuauaaggacuaguaauaaggaaacuguaugaaugucugugggcaggaagugaagagauccuucuguaaagguuuuuggaauuaugucugcugaauaauaaacuuuuuugaaauaauaaaucugguagaaaaaugagaucuaaaaaaaaaaaaaaaaaaaaaaaaaaaaaaaaaaaaaaaaaaaaaaaaaaaaaaaaaaaaaaaaugcaucccccccccccccccccccccccccccccccaaaggcucuuuucagagccaccagaauu

SEQ ID NO: 10575 - RNA, 2050 nt, Artificial Sequence
  mRNA product Design b-4 comprising derived and/or modified sequence from LASV(Nig08-04;Clade II)__ADU56611__NP (opt6)
gggagagucccgcagucggcguccagcggcucugcuuguucgugugugugucguugcaggccuuauucaagcuuaccaugagugcaucaaaagaagucaaaucauuccuuuggacacaaagccuaagacgagaacuaucaggauacugcucuaacauaaaauuacaaguuguaaaagacgcacaagcacuuuuacauggauuggauuucucagaaguaucaaacguucaacgacuaaugcgaaaacagaaaagagacgauggagaucuaaaaagacuaagagauuuaaaccaagccguaaauaaccuaguagaacuaaaaucgacacaacaaaaaucuguuuugagaguaggaaccuuaaccucugacgaccuacuaacacuugcagcagacuuagaaaaauuaaaaucaaaaguaaucagaacagaaagaccucucagcucaggaguauacaugggaaaucuaaguacacaacaacuagaacaaagaaaagcacuacuaagcaugaucgguaugguaggaggagcacaaggcacacaaccaggaagagacggaguaguuagaguaugggauguuaaaaauccagaccuacuuaacaaccaauucggaacaaugcccucauuaacuuuagcaugcuuaacaaaacaaggacaaguagaucuaaaugaugcaguucuagcccuaacagaucucggacuaauauauacagcaaaauacccaaauucaucagaucuagacagauuaucucaaucccauccaauacuaaacaugguagauaccaagaaaucaucacuaaacauuucaggauacaauuuuucacuaggagcagcaguaaaagccggagcaugcaugcuagauggaggcaacaugcucgaaacaauaaaaguaacaccccaaacaauggacgggauauuaaaaaguauacugaaaguuaaaagaucacuaggaauguucguaucagauacaccaggagaaagaaaucccuaugaaaauauucuauacaaaauaugccuaucaggugauggguggccuuacaucgcaaguagaacaaguauaguagggagagcaugggaaaauacaacuguagaucuagaaucugauggaaaaccacaaaaaguaggaacugcaggaaguaauaaaaguuuacaaagcgcaggauuuccuacaggauuaacuuauagucaacuaaugaccuuaaaagauagcaugaugcaauuagauccaagugcaaaaacauggauagacauagaaggucgaccagaagacccagucgaaauagcauuauaucaaccaaugucaggcuguuauauacacuucuuucgagaaccuaccgaucuaaaacaauuuaaacaggaugcaaaauauucacacgguauagacguuacagauuuauuuucagcacaaccagguuuaacuucagcaguaauagaagcguuaccaagaaacaugguccucacaugucaaggaucagaugauauuaagaaauuacuugacagucaaggaagacgagacauaaaacuuauagacaucucauuaaacaaagcagacucaagaagauuugaaaacgcaguaugggaccaauguaaagauuuaugccacaugcauacaggagucguaguagagaaaaagaaacgagguggaaaagaagaaauaacuccacauugcgcauuaauggauugcauaauguuugacgcagcugugaguggaggauuaaauauaccaauauuaagagccguacuaccaagagauaugguauuuagaacaaguucgccaaaagugguacuauaaggacuaguaauaaggaaacuguaugaaugucugugggcaggaagugaagagauccuucuguaaagguuuuuggaauuaugucugcugaauaauaaacuuuuuugaaauaauaaaucugguagaaaaaugagaucuaaaaaaaaaaaaaaaaaaaaaaaaaaaaaaaaaaaaaaaaaaaaaaaaaaaaaaaaaaaaaaaaugcaucccccccccccccccccccccccccccccccaaaggcucuuuucagagccaccagaauu

SEQ ID NO: 10576 - RNA, 2053 nt, Artificial Sequence
  mRNA product Design b-4 comprising derived and/or modified sequence from LASV(GA391;Clade III)__AAA46284__NP (opt6)
gggagagucccgcagucggcguccagcggcucugcuuguucgugugugugucguugcaggccuuauucaagcuuaccauguccgcuagcaaagaaguaagauccugcuuauggacacaaucacuaagaagagaacuaucaggauauugcucaaacauaaaauuacaaguaguaaaagacgcccaagcacuauuacacggacuagauuucucagaaguuucaaauguacaaagauuaaugagaaaacaaaaacgagacgacggcgaucuaaaaaggcuaagagaucuuaaucaagcaguaaauaaccuaguagaacuaaaaaguacacaacaaaaaucaguacuacgaguuggcacauuaucuagugaugauuuacuaauacuagcagccgauuuagaaaaacuaaaaucaaaagucacaagaacagaaagaccguuaucaucaggaguauauaugggaaacuuaucaucucaacaauuagaccaaagacgagcucuccuaaacaugauaggaaugacaggaguaagcggaggaggaaaaggagcaucaaacggaaucguaagaguaugggauguuaaaaaugcagaacuacuaaauaaccaauucggaacaaugccuaguuuaacccuagcuugcuuaacaaaacaaggacaaguagaucuaaacgaugccguacaagcacucacagaucuaggauuaauuuacacagcuaaauaccccaauagcucagauuuagaucgauuaagucaaucacacccuauccuaaacaugauagauaccaagaaaaguagccuaaacauuagcggauacaauuuuucauuaggagcagcaguaaaagcaggagcaugcaugcuagaugguggaaacauguuagaaacaaucaaaguaaguccacaaacaauggauggaauacuaaaaucaauacucaaagugaaaaagagcuuaggaauguucguaagugacacaccuggugaaagaaaucccuaugaaaauauauuauauaaaaucugucucucaggagauggcuggagcuauauagcaucaagaacaucaauaguaggcagagcaugggaaaauacaguaguagauuuagaacaagacaacaaaccacagaaaauaggaaacggaggaaguaacaaaucuuuacaaagcgcaggauuugcagcaggccugauauacagucaacuuaugacauuaaaagauuucaaauguuuuaaccuaauaccaaaugccaaaacauggauggauauagaaggcagaccagaagauccagucgaaauagcucuuuaccaaccaaguuccggcugcuauguacauuucuucagagaaccaacagaccuuaaacaauucaaacaagacgcaaaauauucacauggacgagauguaacugaccuauucgcagcacaaccaggauuaacaagugcaguuauagaagcccuaccacgaaauaugguuauaacaugccaaggaagugaagauauacgaaaauuauuagaaagucaaggaaggagagauaucaaacuuauugacauuacacuaucaaaagcugacucaagaaaauuugaaaaugcuguaugggaccaauuuaaagauuuaugccacaugcacacugguguaguaguugagaaaaagaaacgaggaggcaaagaagaaauaacaccacacugugcgcucauggacugcauaauguucgaugcugcaguaucaggaggacucgacgccaaagucuuacgaguagucuuaccaagagacaugguauuccguacaucaacacccaaagucguacuauaaggacuaguaauaaggaaacuguaugaaugucugugggcaggaagugaagagauccuucuguaaagguuuuuggaauuaugucugcugaauaauaaacuuuuuugaaauaauaaaucugguagaaaaaugagaucuaaaaaaaaaaaaaaaaaaaaaaaaaaaaaaaaaaaaaaaaaaaaaaaaaaaaaaaaaaaaaaaaugcaucccccccccccccccccccccccccccccccaaaggcucuuuucagagccaccagaauu

SEQ ID NO: 10577 - RNA, 2050 nt, Artificial Sequence
  mRNA product Design b-4 comprising derived and/or modified sequence from LASV(Nig08-A19;Clade III)__ADU56619__NP (opt6)
gggagagucccgcagucggcguccagcggcucugcuuguucgugugugugucguugcaggccuuauucaagcuuaccaugagcgcaucaaaagaaguaaaaucauucuuauggacacaaucauuaagacgagaacuaucuggauacuguaguaauauaaaauuacaaguaguuaaagaugcacaagcccuauuacauggacuagauuuuucagaagucucuaauguccaaagauuaaugagaaaacaaaaaagagacgacggagaucuaaaaagacuuagagacuuaaaucaggcaguaaacaaucuuguagaacuaaaaagcacucaacaaaaaucugugcuaagaguuggaacauuaaguagcgaugaucuucuuguacucgcagccgacuuagaaaaauuaaaaucuaaaguaguacgaacagaacggccacuaucaucagguauauauaugggaaaccuuucaucucaacaacuggaucaaaggaaagcauuacuaaacaugauaggaaugacaggaggaaauggaggacgaaacacaacaagcgacggaaucguuagaguuugggacguaaaaaacgcagaacuauuaaacaaucaauuugguacaaugccaaguuuaacucucgcuugccuuaccaaacaaggacaaguagaucuaaaugaugcaguacaagcacuaacagaccuagguuuaauauauacagcgaaauauccaaauuccucagacuuagaucgacuagcacaaucacauccaauauuaaauaugauagauacgaaaaaaucaucauuaaacauaagcggauacaauuucucauuaggcgcagcaguuaaagcuggagcauguauguuagacggaggaaauaugcucgaaacaaucaaaguaagcccacaaacaauggacggaauauuaaaaucaauacuaaaaguaaaaaggucacuaggaauguucauuagugauacaccaggcgaaagaaacccauaugaaaauauauuauacaaaauaugcuuaagcggagacggauggcccuauauugccucaagaaccagcauaguaggaagagcaugggaaaacacaguagucgaucuagaaucggauaauaaaccacaaaaaacaggaaacgguggaaguaauaaaucacuacaaucagcagguuuugccgcaggcuuaacauacucacaacucaugacauuaaaagauucaaugcuccaacucgacccaaaugcuaaaacauggauggauauagaaggaagaccagaagacccaguagaaauagcucuauaccaaccguccucaggauguuacauacacuucuuuagagaaccaacagaucuaaaacaguuuaaacaagacgcaaaauacagccauggaauagacguuacagauuuauuugcagcacaaccaggacuaacaagugcaguuauagaagcauuaccaaggaacaugguaauaacaugucaaggcagugaagacauaagaaaacuacucgaaucacaaggaaggcgugacauuaaacuuauagauauuagucuaagcaaaguagacucacgaaaguuugaaaacgcaguaugggaucaauucaaagaucuaugccacaugcauacaggaauaguagucgaaaaaaaaaaaagaggggggaaagaagaaauuacaccacacugcgcuuuaauggacugcauaauguuugaugcagcuguaucaggaggaguugacgcaaaaguucuuagagcaguauuaccaagagauaugguauucagaacuucaacacccaaaguuguccucuaaggacuaguaauaaggaaacuguaugaaugucugugggcaggaagugaagagauccuucuguaaagguuuuuggaauuaugucugcugaauaauaaacuuuuuugaaauaauaaaucugguagaaaaaugagaucuaaaaaaaaaaaaaaaaaaaaaaaaaaaaaaaaaaaaaaaaaaaaaaaaaaaaaaaaaaaaaaaaugcaucccccccccccccccccccccccccccccccaaaggcucuuuucagagccaccagaauu

SEQ ID NO: 10578 - RNA, 2050 nt, Artificial Sequence
  mRNA product Design b-4 comprising derived and/or modified sequence from LASV(G1180-SLE-2010;Clade IV)__AIT17169__NP (opt6)
gggagagucccgcagucggcguccagcggcucugcuuguucgugugugugucguugcaggccuuauucaagcuuaccauguccgcaagcaaagaaauaaaauccuuccuauggacccaaucucucagaagagaauuaaguggauacuguucuaacauuaaacuacaaguagucaaagacgcucaagcacuauuacaugguuuagauuucucagaaguaaguaauguccaaagacuaaugagaaaagaaagaagagacgauaacgacuuaaaaagacuaagagaccuaaaucaggcugucaauaauuuaguagaacuaaaaaguacucaacaaaaaucuauacuaagaguaggaacguuaacuagcgacgaucuacuaauauuagcagccgaucuugaaaaauuaaaaucaaaaguaauuagaacagagagaccauuaagcgcuggaguauauaugggaaacuuaaguucacaacaauuagaccaaagaagagcacucuuaucgaugauaggaaugucaucaggaaaucaaagagcacaagcaggcagagauggugucguacgugucugggacguaaaaaauguagaacuacuaaacaaucaauuuggaaccaugccuucauuaacucucgcuuguuuaacuaaacaaggacaaguagaccuaaacgaugcaguacaagcauuaacugacuuaggacuaauauauacagcaaaauacccuaauacuuccgauuuagacagacuaacacaaucacacccaauacuuaauaugauagauacaaaaaaauccucauuaaacaucucaggauacaauuucucauuaggagcagcagucaaagcaggagccuguauguuagacggaggaaauauguuagaaacuauaaaaguaucuccacaaaccauggacggaauacugaaaaguauucuaaaaguaaaaaaagcauuaggaauguucauuucagauacaccaggcgaaagaaaucccuaugaaaauauauuauacaaaauaugucuaucaggugauggauggccauauaucgcaagccgaacaaguaucacaggaagagcaugggaaaauacaguaguagacuuagaaucagauggaaaaccacaaaaagcaggauccaacaauucaaacaaaucauuacaaagcguaggauuuaccgcaggacuaacauauucacaacuaaugacguuaaaagaugcaaugcuacaguuagauccaaaugcaaaaaccuggauggacauagaaggaagacccgaagacccaguagaaauugcauuauaucaaccaagcaguggaugcuauauucacuuuuuccgugaaccuaccgaccuaaaacaauuuaaacaagacgcaaaauauucacauggaauagacguuacagaucuauuugcagcacaaccuggacuaacaucagcaguaauagacgcccuuccucgaaauaugguuauaaccugucaaggaucagaugauauacgaaaacuucuagaaagccaaggacgaaaagacaucaaauuaauagauauagcauuaucuaaaacggacucaagaaaauaugaaaacgcugucugggaccaauauaaagauuuaugccauaugcauaccggaguaguaguugaaaaaaaaaaacgaggaggaaaagaagaaauaaccccacacugcgcacuaauggauugcauaauguucgacgcagcaguaucagggggucuaaauacauccgucuuaagagcaguacuaccaagagauaugguauucagaacaucaacaccacgaguuguacuauaaggacuaguaauaaggaaacuguaugaaugucugugggcaggaagugaagagauccuucuguaaagguuuuuggaauuaugucugcugaauaauaaacuuuuuugaaauaauaaaucugguagaaaaaugagaucuaaaaaaaaaaaaaaaaaaaaaaaaaaaaaaaaaaaaaaaaaaaaaaaaaaaaaaaaaaaaaaaaugcaucccccccccccccccccccccccccccccccaaaggcucuuuucagagccaccagaauu

SEQ ID NO: 10579 - RNA, 2050 nt, Artificial Sequence
  mRNA product Design b-4 comprising derived and/or modified sequence from LASV(G1442-SLE-2011;Clade IV)__AIT17181__NP (opt6)
gggagagucccgcagucggcguccagcggcucugcuuguucgugugugugucguugcaggccuuauucaagcuuaccaugucugcuaguaaagaaguaaaaagcuuuuuauggacacaaucauuacgaagagaauuauccggcuauuguagcaauauaaaacuacaaguagucaaagacgcacaagccuuacuacacggacuagauuucucagaaguaucaaauguacaaagacuaaugagaaaacaaagaagagacgacaacgaccugaaaagacuaagagaucuaaaucaagcaguuaacaaucucguagaacucaaaagcacacaacaaaaaucaguauuaagagucggcacucuaacgagcgaugacuuauuagugcucgccgcagacuuagaaaaacuaaaaagcaaaguaauaagaacagaaagaccccucucagccggaguauauaugggaaaucuaucaucacaacaauuagaccaaagacgagcauuauuaaacaugaucggaaugagcggcggcauacaaggaacacgaacaggaagagaugguguagucagaguaugggacgucaaaaacgcagauuuauuaaacaaccaauuuggcacaaugccaucauuaacauuagcaugcuuaacaaaacaaggacaaguagacuuaaaugaugugguacaagcacucacagaccucggcuuaauauacacagccaaauaccccaacgcaucagaccuagacagacuaacucaaucacacccaauacuaaacaugauagauaccaaaaagaguucacuaaacaucucaggauauaacuuuucacuaggcgcugcuguaaaagccggagcauguauguuagacggugguaacaugcuagaaacuauaaaaguaucaccacaaacaauggacggaauauuaaaaucaauccuaaaaguaaaaaaaacauuaggaauguuuauaagugacacaccaggagaaagaaauccguaugaaaauauauuauacaaaaucugccuuucgggagacggcuggcccuacauagccagccgaacuagcauuacaggaagagcaugggaaaacacaguaguagaccucgaaagcgacggaaaaccgcaaaaagcugggucaaauaacuccaauaaaucauuacaaagugcuggauuugcagcaggauuaacauauucacaauuaaugacauuaaaagacgcaaugcuacaauuagauccuaaugcaaaaacauggauggauaucgaaggaagaccagaagaccccguagaaauagcccuauaccaaccguccucaggauguuacauccacuuuuucagagaaccaacagaccuaaaacaauuuaaacaagacgccaaauauucacauggaaucgacgucacugauuuauucgccgcacaaccaggacuaacaagcgcaguaaucgaagccuuaccaagaaacauggugauaacaugccaaggaagugaugacauaaaaaaacuauuagaaucacaaggaagaaaagacauaaaauuaauagacauagcauuaagcaaaacagacucacgcaaauaugaaaacgcaguaugggaucaauacaaagacuuaugccauaugcacacaggaguaguuguagaaaaaaagaaaagaggaggcaaagaagaaauaacaccacauugugcacuuauggacuguauaauguuugacgcagccguaucaggaggauuaaauacacuaguacuaagagcaguccuaccaagagacaugguauucagaacuagcaccccaagaguaguacuauaaggacuaguaauaaggaaacuguaugaaugucugugggcaggaagugaagagauccuucuguaaagguuuuuggaauuaugucugcugaauaauaaacuuuuuugaaauaauaaaucugguagaaaaaugagaucuaaaaaaaaaaaaaaaaaaaaaaaaaaaaaaaaaaaaaaaaaaaaaaaaaaaaaaaaaaaaaaaaugcaucccccccccccccccccccccccccccccccaaaggcucuuuucagagccaccagaauu

SEQ ID NO: 10580 - RNA, 2050 nt, Artificial Sequence
  mRNA product Design b-4 comprising derived and/or modified sequence from LASV(G3010-SLE-2013;Clade IV)__AIT17345__NP (opt6)
gggagagucccgcagucggcguccagcggcucugcuuguucgugugugugucguugcaggccuuauucaagcuuaccaugagcgcuaguaaggaaauaaaauccuuccucuggacacaaucacuaagaagagaauuaagugguuauugcaguaacaucaaauuacaaguaguuaaagaugcacaagcauuacuacauggauuagauuucucagaaguaagcaauguacaaagacuuaugaggaaagaacgaagggaugauaacgaccuaaaacgacuaagagaucugaaucaagcaguaaauaacuuaguagaauuaaaaucaacacaacaaaaaucaauucuaagaguaggcacccugacaagcgaugauuuacuaauucuagcagcagauuuagaaaaauuaaaaucaaaaguuacaagaacagaaagaccgcuaagcgcuggaguauauaugggaaaccugucuucccaacaauuagaucaaagaagagcuuuacuaagcaugauaggaaugucaucugggguccaaggagcaagagccgguagagacggaguaguucgaguaugggacguaaaaaacgcagaacucuuaaacaaccaauucggaacuaugccaaguuuaacuuuagcuuguuuaacaaaacaaggacaaguagauuuaaaugauguaguucaagcacuaacagacuuaggucuaauauauacagcuaaauaccccaauacaucagaucucgacagacuaacacaaucccaucccauauuaaacaugauagauaccaaaaaaucuucucuaaacauaucaggauacaauuuuaguuuaggugcagcuguaaaagcuggagccugcauguuagaugguggaaauauguuagaaacaauaaaagugaguccccaaacaauggaugggauccuaaaaagcauauuaaaaguaaaaaaagcauuaggaauguucauaucagagacacccggugaaagaaauccauaugaaaauauacuauacaaaaucugucuaaguggugacggcuggccuuacaucgcaaguagaacaucaauuacgggacgugcaugggaaaacacaguaguugaucuggaaucagauggaaaaccacaaaaagcaggaucaaacaacucaaauaaaagucuacaaucagcaggauucacugcaggauuaacauauucacaacuaaugacacuaaaagaugcuaugcuucaacuagacccaaacgcaaaaacauggauggacauagaaggccgaccagaagauccagucgaagucgcacuauaccaaccuaguucaggauguuauauacacuucuuucgugaaccaacagaccuaaaacaauucaaacaagacgcaaaauauucacauggaauagacguuacagaccuauucgcagcacaaccaggucuaaccagugccguaauagacgcauuaccaaggaauauggucauaacaugucaaggaucagaugauauaaaaaaacuauuagaaagucaaggaagaaaagacaucaaauuaauagauauagcacuaucaaagacagauucaagaaaauaugaaaaugcaguaugggaccaauauaaagaccuaugucacaugcauaccggaguugugguagaaaaaaaaaaaagaggagggaaagaagaaauaacgccacauugcgcauuaauggauuguauaauguuugaugccgcaguauccgguggacuuaauacaaguguacuuagagcaguacugccacgagacaugguauuuagaacaucaacaccccguguaguuuuauaaggacuaguaauaaggaaacuguaugaaugucugugggcaggaagugaagagauccuucuguaaagguuuuuggaauuaugucugcugaauaauaaacuuuuuugaaauaauaaaucugguagaaaaaugagaucuaaaaaaaaaaaaaaaaaaaaaaaaaaaaaaaaaaaaaaaaaaaaaaaaaaaaaaaaaaaaaaaaugcaucccccccccccccccccccccccccccccccaaaggcucuuuucagagccaccagaauu

SEQ ID NO: 10581 - RNA, 2050 nt, Artificial Sequence
  mRNA product Design b-4 comprising derived and/or modified sequence from LASV(G502-SLE-2009;Clade IV)__AIT17127__NP (opt6)
gggagagucccgcagucggcguccagcggcucugcuuguucgugugugugucguugcaggccuuauucaagcuuaccaugagcgcaucuaaagaaauaaaaucauuucuauggacacaaucucuaagaagagaacuaucaggauacugcucaaauauaaaauuacaaguaguaaaagacgcucaagcacucuuacacggauuagauuucucugaaguuucuaauguacaaagauuaaugagaaaagaacgcagagacgacaacgaucuuaaaagauuaagagauuuaaaucaagcgguaaacaacuuagucgaauuaaaaagcacucaacaaaaaaguaucuuacgaguaggcacacucacaucagaugaccuacuuauacuagccgcagacuuagaaaaauuaaaauccaaaguaauaagaacugaacgcccucuaucagccggaguauauauggguaacuuaucaucacaacaacuagaucaaagacgagcacuauuaucaaugaucggaaugucagggggcaaucaaggcgucagagcaggaaaagacggaguaguaagaguaugggacguaaaaaacgcagaauuauugaauaaccaauuuggaacaaugccaucacugacacuagcauguuuaacaaaacaaggacaaguagauuuaaaugacgccguucaagcacuaacagaucuuggccuaaucuauaccgcaaaauauccaaacacuagugacuuagacaggcuaacacaaagccacccaauauuaaauaugauagacacaaaaaaaucuucacucaacauaagcggguacaauuuuuccuuaggugccgcagucaaagcaggagccuguauguuagacggaggaaacauguuagaaacaauaaaaguaucgccacaaacaauggaugguauauuaaaaucuauacuaaaagucaaaaaagcauuagguauguucauauccgacacaccaggagaaagaaacccauacgaaaauauccuauauaaaauauguuuaucuggagauggauggccauacauagcaucuagaacaagcaucaccggcagggcaugggaaaauaccguaguugaccucgaaucagauggaaaaccccaaaaagcagguucaaacaauucaaauaaaucauuacaauccgcaggcuuuaccgccggacuuacuuauucacaacuaaugacuuuaaaagaugcaaugcuccaacuagauccaaauaccaaaacauggauggauauagaaggacgaccagaagauccaguagaaaucgcccucuaccaaccaucaucaggcuguuacauacacuucuuuagggaaccaacugaucucaaacaauucaaacaagacgcuaaauauucacauggaaucgacguaacagaucuauuugcugcacaaccuggucucacaucagcaguuauagaugcacuaccaagaaauaugguaauuacaugccaaggaagcgacgacauacgaaaacuccuagaaucacaaggucgaaaagauauaaaacucauugauauagcauuaaacaaaacagauucuagaaaauaugaaaacgcuguaugggaccaguacaaagacuuaugucacaugcacaccggaguaguuguagaaaagaaaaaacgaggcggaaaagaagaaauaacaccucacugugcccucauggauugcauaauguuugacgcugcaguaucaggaggacuaaacacuucaguauuaagagcaguauuaccaagagauaugguauucagaacauccaccccaagaguaguguuauaaggacuaguaauaaggaaacuguaugaaugucugugggcaggaagugaagagauccuucuguaaagguuuuuggaauuaugucugcugaauaauaaacuuuuuugaaauaauaaaucugguagaaaaaugagaucuaaaaaaaaaaaaaaaaaaaaaaaaaaaaaaaaaaaaaaaaaaaaaaaaaaaaaaaaaaaaaaaaugcaucccccccccccccccccccccccccccccccaaaggcucuuuucagagccaccagaauu

SEQ ID NO: 10582 - RNA, 2050 nt, Artificial Sequence
  mRNA product Design b-4 comprising derived and/or modified sequence from LASV(G733-SLE-2010;Clade IV)__AIT17155__NP (opt6)
gggagagucccgcagucggcguccagcggcucugcuuguucgugugugugucguugcaggccuuauucaagcuuaccaugucugcuaguaaagaaauuaaaucauuuuuauggacacaaucacuacgcagagaacuaucaggcuacuguucaaauauuaaacuacaaguaguuaaagacgcacaagcucuauuacacggguuagacuucucugaaguaagcaacguacaaagacucaugagaaaagaacgaagggacgacaacgauuuaaaaagacuacgagacuuaaaucaagcugucaauaaucuaguagaacuaaaaucaacacaacagaaaucaguauuaagaguaggaacguuaacauccgaugaacuucuaguuuuagcagccgaucuggaaaaacuaaaaucaaaaguaauacgaacagaaagaccccuaucggcaggaguauacaugggaaauuuaucaucacaacagcuagaucaacgaagagcucuccuaucaaugauaggcaugagcggaggaaaccaaggcgcacguacaggcagagacggagucguaagaguaugggacguaaaaaacgcugaacuacucaauaaccaauuuggcacaaugccaaguuuaacuuuagcuuguuuaacaaaacaaggacaaguagaccuaaaugaugccguacaagcacuaacugauuuaggauuaauauauacagcaaaauauccaaacacaucagaucuugauagacuaacacaaucccauccaauccuaaacaugauagacacaaaaaaaucuucauuaaauauaucagguuacaacuucagccuaggagcagcuguaaaagcuggcgccuguauguuagauggaggaaacaugcuugaaacaauaaaaguaucaccacaaacaauggacggaauauuaaaaucaauacuaaaaguaaaaaaagcacuagguauguuuauaagcgauacaccaggagaaagaaauccauacgaaaauauauuauacaaaauaugccuaaguggagauggauggccuuacauugcuucaagaacaucaauaaccggacgagcaugggaaaauacgguuguagaccuggaaucggauggaaaaccacaaaaagcaggcucaaacaauucaaauaaaagucuccaaucagcaggauuuacugcaggacuuacguauucucaacuuaugacauuaaaagaugcaaugcuacaauuagauccaaacgccaaaacguggauggacauagaaggaagaccagaagacccaguagaaauagcauuauaucaaccaaguagcggauguuacauacacuucuuuagagaaccaaccgauuuaaaacaauuuaaacaagacgcaaaauacagccacgguauagacguaaccgaccuauuugcagcacaaccaggauuaaccagugcaguuauagaugcauuaccaagaaauaugguaauaaccugucaaggaucagaugauaucagaaaacuauuagaaagucaaggaagaaaagacauuaaacuaauagauauugcgcucucuaaaauagacagucgaaaauacgaaaacgcagucugggaucaauauaaagauuuaugccacaugcauacaggaguaguaguagaaaaaaaaaaaagagguggaaaagaagaaauaacaccccacugugcacuuauggacuguaucauguuugacgcagccguaaguggaggauuaaauucauuaguacuaagagcaguauuaccaagagacaugguauuccguacaagcaccccacgaguaguauuauaaggacuaguaauaaggaaacuguaugaaugucugugggcaggaagugaagagauccuucuguaaagguuuuuggaauuaugucugcugaauaauaaacuuuuuugaaauaauaaaucugguagaaaaaugagaucuaaaaaaaaaaaaaaaaaaaaaaaaaaaaaaaaaaaaaaaaaaaaaaaaaaaaaaaaaaaaaaaaugcaucccccccccccccccccccccccccccccccaaaggcucuuuucagagccaccagaauu

SEQ ID NO: 10583 - RNA, 2050 nt, Artificial Sequence
  mRNA product Design b-4 comprising derived and/or modified sequence from MOPV/LASV reassortant(IGS-1;Clade IV)__AFY05578__NP (opt6)
gggagagucccgcagucggcguccagcggcucugcuuguucgugugugugucguugcaggccuuauucaagcuuaccauguccgcaucgaaagaaauuaaaucauuucuauggacucaaagccuuagaagagaauuaucaggauauuguucaaauauaaaacuacaagucgugaaagaugcacaagcauuacuccacggauuagauuucagcgaaguaucaaauguccaaagacuaaugagaaaagaaagaagagacgauaacgaucuaaaaagacuaagagaucuaaaucaagcaguaaacaacuuaguggaauuaaaaagcacacaacaaaaaagcauacuuagaguagguacacucacauccgacgacuuacuaauuuuggcagcagaucuagaaaaauuaagaaguaagguuaucagaaccgaaagaccucuuagcgcaggaguauauaugggaaaucuauccucucaacaacuagaucaaagaagagcauuauuaaacaugaucggaaugagcggaggaaaucaaggagcacgugcaggaagagacggagucguuagagugugggacguaaaaaacgccgaauuauuaucaaaucaguuuggaacaaugcccucauuaaccuuagcauguuuaacaaaacaaggacaaguagacuuaaacgacgcaguucaagcacucacagauuuaggauuaauauauacggcaaaauauccaaauacuuccgaccucgacagacuaacacaaucacacccaauccuaaacaugauagacacaaaaaaaucaucacuaaacauuagcggauauaacuuuucacuaggagcagcaguaaaagcaggugcauguauguuagauggagggaauauguuggaaacaaucaaaguaucaccacaaacaauggacggaauacuaaaaagcauauuaaagguaaaaaaagcacuaggcauguucaucucagacacgccaggagaacgaaacccauaugaaaacauuuuauauaaaauaugcuuaagcggagauggauggccauacauagcaucaagaacaaguauuaccggaagagccugggaaaauacuguaguagaucuagaaagcgacggaaaaccacaaaaagccgauucaaauaauaguagcaaaagucuacaaagugcaggauucacagcuggguuaaccuauucacaauugaugacacuaaaagacgcgaugcuucaacuagacccaaaugcaaaaaccuggauggauauagaaggaagaccagaagaccccguugaaauagcauuauaucaacccaguucaggauguuacauacacuuuuuucgagaaccaacagauuuaaaacaauucaaacaagacgcuaaauacucacauggaauugaugugacagauuuauucgcaacacaaccagggcuaacaagcgcagucauagaugcauuaccaagaaacaugguaauaacaugccaaggaagugaugacauaagaaaauuauuagaaucgcaaggaagaaaagacauaaaauuaauagacauagaccuuagcaaaacagacaguagaaaauacgaaaacgcaguaugggaccaauauaaagaccuaugccauaugcauaccggaguaguugucgaaaaaaaaaaacgaggugggaaagaagaaauaacaccacauugugcauuaauggacugcauuauguuugaugcagcaguaucaggaggauuaaacacaagcguauuaagagcaguauuacccagagauauggucuuccgcacaucaaccccaagaguaguauuauaaggacuaguaauaaggaaacuguaugaaugucugugggcaggaagugaagagauccuucuguaaagguuuuuggaauuaugucugcugaauaauaaacuuuuuugaaauaauaaaucugguagaaaaaugagaucuaaaaaaaaaaaaaaaaaaaaaaaaaaaaaaaaaaaaaaaaaaaaaaaaaaaaaaaaaaaaaaaaugcaucccccccccccccccccccccccccccccccaaaggcucuuuucagagccaccagaauu

SEQ ID NO: 10584 - RNA, 2050 nt, Artificial Sequence
  mRNA product Design b-4 comprising derived and/or modified sequence from LASV(LM765-SLE-2012;Clade IV)__AIT17815__NP (opt6)
gggagagucccgcagucggcguccagcggcucugcuuguucgugugugugucguugcaggccuuauucaagcuuaccaugagcgccuccaaagaaauaaaaucauucuuauggacucagucauuaagacgagaacuaaguggauacugcaguaauauaaaacuacaaguaguuaaagaugcacaagcuuuacuacacgggcuagauuuuucagaaguuucaaacguacaaagauuaaugagaaaagaaagacgagacgauaaugauuuaaaaagacuaagggaucucaaucaagcuguaaauaacuuaguggaauuaaaauccacacagcaaaaaucaauauuaagaguaggaacauuaaccagugaugacuuacuuauauuagcugcagaucucgaaaaauuaaaaucaaaaguaacaagaacugaaagaccacuaucagcaggaguauacaugggcaauuuaaguagucaacaauuagaucaaagaagagcauuauuagacaugauagguaugucaggaaguaaccaaggagcacgagcaggacgagacggaguaguaaggguaugggauguaaaaaacgcagaauuacuaaauaaccaauucgguaccaugccaucauugacacuagcauguuuaacuaaacaaggacaaguagaucuaaaugaugccguacaagcuuuaacagaucuaggccucauauacacagcaaaauauccaaauacaagcgaucuagauagacucacacagucacacccaauauuaaacaugauagauacaaaaaaaaguagcuuaaauauaagugguuauaacuuuaguuuaggagcagcaguaaaagcuggagccuguaugcuagacgguggaaauauguuagaaacuauaaaagucucaccgcaaacaauggaugguauacucaaaaguauacuaaaaguaaaaaaagcauuaggcauguucauaagcgaugcgccuggagaaagaaauccauacgaaaauauauuauauaaaauaugcuuaucaggagacggauggccguacauagcaaguagaacgucaauaacaggacgugcaugggaaaauacaguaguagauuuagaaagcgacgguaaaccgcaaaaagcaggaaguaacggaaguaauaaaaguuuacaaagugcaggauucacagcaggauuaacauauucacaauuaaugaccuuaaaagacgcaauguuacaauuagauccaaaugccaaaacauggauggauauagaaggacgacccgaagacccaguagaaauagcguuauaucaaccauccucaggauguuauauucacuuuuucagagaaccuacagauuuaaaacaauuuaaacaagacgcaaaauauagccauggaauagacguaacggaucuauuugcagcacaaccuggauuaaccagcgcaguuauagaugcauuaccuagaaauaugguaauuacaugucaagguagugaugacauacgaaaauuauuugaaucacaaggacgaaaagacauaaaacuaauagacauugcccucaguaaaacggacagcagaaaauaugaaaacgcaguaugggaccaauauaaagauuuaugccacaugcauacaggaauaguugucgaaaaaaaaaaacgagguggaaaagaagagauuaccccccacugugcacugauggauuguauaauguucgacgcagcggucucaggaggacuaaacacuucagucuuaagggccgucuuaccaagagauaugguauucagaacaucaacaccaagaguaguauuaugaggacuaguaauaaggaaacuguaugaaugucugugggcaggaagugaagagauccuucuguaaagguuuuuggaauuaugucugcugaauaauaaacuuuuuugaaauaauaaaucugguagaaaaaugagaucuaaaaaaaaaaaaaaaaaaaaaaaaaaaaaaaaaaaaaaaaaaaaaaaaaaaaaaaaaaaaaaaaugcaucccccccccccccccccccccccccccccccaaaggcucuuuucagagccaccagaauu

SEQ ID NO: 10585 - RNA, 2050 nt, Artificial Sequence
  mRNA product Design b-4 comprising derived and/or modified sequence from LASV(LM776-SLE-2012;Clade IV)__AIT17825__NP (opt6)
gggagagucccgcagucggcguccagcggcucugcuuguucgugugugugucguugcaggccuuauucaagcuuaccaugucagcaaguaaagaaauaaaaaguuuuuuauggacccaaucacuacgacgagaacuaucaucauauugcucgaacauaaaauuacaaguaguaaaagaugcacaagcucuacuacaugguuuagacuuuucugaaguuucaaauguacaaagauuaaugagaaaagaaagaagagaugauaacgauuuaaaaagacuaagagaucucaaucaagcagucaauaaccucguugaacucaaauccacacaacaaaaaucaauucuaagaguaggcacuuuaaccucagaugacuuacugauacucgcagcagauuuagaaaaacuaaaaaguaaaguaacacgcaccgaaagaccacuaagugcuggaguauauauggguaaucuaaguucgcaacaauuagaccaaagaagagcucuucuauccaugauagguaugucaggaucaaaucaaggagcaagagcagguagagauggaguaguaagaguaugggacguaaaaaaugcagaacuucuaaauaaccaauucggaacaaugccaucacuuacauuagcuugccucacaaagcaaggacaaguagaccuaaaugaugcaguacaagcucuaacagacuuaggcuugauauauacagcaaaauauccaaauacuucagauuuagaucgauuaacacaaagucacccaauauuaaauaugauagauacuaaaaaaucaucauugaauauaucaggauacaauuuuagccuaggagcagcugucaaagccggagcauguauguuagacggaggcaauaugcuagaaacaauaaaaguuaguccucaaacaauggauggaauauuaaaaaguauacuaaaaguuaaaaaagcauuaggcauguuuauaagcgauacucccggagaaagaaauccauaugaaaauauauuauacaaaauaugucuaucuggagauggauggccauauauagcaagcagaacuagcauaacuggaagagcaugggaaaacaccguaguagaucuagaaucagauggaaaaccccaaaaagcaggaucgaacaauucaaauaaaagucuacaaagugcaggauuuacagcaggacuuacauauucacaacuaaugacccuaaaagaugcaaugcuacaauuagaccccaaugccaaaacauggauggacauagaaggaagaccagaggacccaguugaagucgcccuauaucaaccaucaucagguuguuauauacacuucuucagagaaccaacagaucuaaaacaauuuaaacaagacgcuaaauacagucaugguauagacguaacagaucuauuugcagcacaaccaggcuuaaccagugcaguuaucgaugcuuuaccaagaaacaugguuauaaccugucaaggaucagaugauauucgaaaacuucuagaaucucaaggaagaaaagauauuaaacuuauagauauagcacuaucgaaaacagauucccgaaaauaugaaaacgccguaugggaucaauauaaagaccucugucacaugcacacagguguagucguagaaaaaaaaaaaagaggaggaaaagaggaaauaaccccacacugugcacuaauggauugcauaauguuugacgcagcaguaucaggaggauuaaauacaucaguacuaagagcaguauuaccaagagacaugguuuuuagaacaucaaccccucgaguaguauuauaaggacuaguaauaaggaaacuguaugaaugucugugggcaggaagugaagagauccuucuguaaagguuuuuggaauuaugucugcugaauaauaaacuuuuuugaaauaauaaaucugguagaaaaaugagaucuaaaaaaaaaaaaaaaaaaaaaaaaaaaaaaaaaaaaaaaaaaaaaaaaaaaaaaaaaaaaaaaaugcaucccccccccccccccccccccccccccccccaaaggcucuuuucagagccaccagaauu

SEQ ID NO: 10586 - RNA, 2050 nt, Artificial Sequence
  mRNA product Design b-4 comprising derived and/or modified sequence from LASV(Mad39;Clade IV)__ANH09723__NP (opt6)
gggagagucccgcagucggcguccagcggcucugcuuguucgugugugugucguugcaggccuuauucaagcuuaccaugagcgcaucaaaagaaauaaaaucauuccuauggacccaaagccuaagacgagaacuaucagguuauugcucaaacauaaaauuacaaguuguaaaagacgcacaagcacuauugcacggacuagacuucucagaaguaucaaacguacaaagacuaaugagaaaacaacgaagagacgauaaugaucuaaaaagauuaagagaccuaaaucaagcaguaaacaaucucguagaacuaaaaucaacacaacaaaaaucaguauuaagaguaggaacacuaacaagugaugacuuauuaacccuagcugcagacuuagaaaaauuaaaaaguaaagucacaagaacagagaggcccuuaacugcaggaguguauaugggaaaucuaaguagucaacaauuagaucaacggagagcauuacuaaacaugauaggaaugucaggaggcaaucaaggagcacgaacuggaagagacggaguaguaagaguaugggacgucaaaaacgcagaguuauuaaauaaucaauucggaacaaugccaucauuaacguuagcauguuuaacaaaacaaggccaaguagacuuaaacgauguaguacaagcccuaaccgaucuagggcuaauauacacagcaaaauacccaaauacaagugaucuagacagacucacucagucucacccaauauuaaacaugauagauacaaauaaaaguucauuaaacauuucaggauacaauuucagccucggagcagcaguaaaagcaggcgcauguaugcuagacggcggaaauaugcucgaaacgauaaaagucucaccucaaacaauggauggaauacuaaaauccauacucaaaguaaagaaaaguuuaggcauguuuaucuccgauacaccaggagaaagaaacccauaugaaaacauacuauauaaaauauguuuaagcggagauggauggccauacauagcaaguagaacaucuauaacaggcagagcaugggaaaacacaguuguagacuuagaaucaggaggaaaaccacaaaaagccggaucaaacaauagcaauaaaagccuucaaucagcaggauucgccgcaggccuaacauauagccaacuaaugacauuaaaagaugcaauguuacaacuagacccaaaugcaaaaacauggauggacauagaagggagaccagaagacccaguagaaauugcucuauaucaaccaauaaguggauguuacauacacuucuuuagagaaccaacagauuuaaaacaauucaaacaagacgcaaaauacagucaugguauagacguaacagauuuauucgcagcgcaaccagggcuuacaucugcaguaauagaagcauuaccaagaaacaugguaauaaccugucaaggaagugaugacaucagaaaacuauuugaaucacaagggagaaaagauaucaaauuaauagauaucgcguuaucaaaaacagauucaagaaaauacgaaaacgcaguaugggaccaauacaaagaccuaugccauaugcauacaggcguaguaguagaaaagaaaaagaaaggcggaaaagaggaaauaacaccgcacugcgcauuaauggacuguauaauguuugaugcagcagucucaggaggauuaaacacccuaguauuaagagcaguauuaccaagagacaugguauucaggacaucgacaccaaaaguuguacuauaaggacuaguaauaaggaaacuguaugaaugucugugggcaggaagugaagagauccuucuguaaagguuuuuggaauuaugucugcugaauaauaaacuuuuuugaaauaauaaaucugguagaaaaaugagaucuaaaaaaaaaaaaaaaaaaaaaaaaaaaaaaaaaaaaaaaaaaaaaaaaaaaaaaaaaaaaaaaaugcaucccccccccccccccccccccccccccccccaaaggcucuuuucagagccaccagaauu

SEQ ID NO: 10587 - RNA, 2050 nt, Artificial Sequence
  mRNA product Design b-4 comprising derived and/or modified sequence from LASV(Z0947-SLE-2011;Clade IV)__AIT17841__NP (opt6)
gggagagucccgcagucggcguccagcggcucugcuuguucgugugugugucguugcaggccuuauucaagcuuaccaugucagccucaaaagaaauaaaaucauuucuauggacacaaucauuacgucgagaauuaucaggauacugcucaaacauaaaacuacaaguugucaaagacgcacaagcccuacuacacggacuagauuuuagugaaguaagcaacguccaacgauuaaugagaaaagaacgcagagacgacaacgaccuaaaaagacucagagaucuaaaucaagcaguaaacaaccuaguggaacuuaaaagcacccaacaaaaauccauauuaagaguaggaacacuaacaucugaugauuuauuaauacuagcugcagaucuggaaaaguuaaaaucaaaaguaacaagaaccgaaagaccacuaucagccggaguauauaugggaaaucuaucaagucaacaauuagaucaacgaagagcacuacuaaacaugauaggaaugucuggaucaaaucaaggagcaagaaccggaagagacggugucguaagaguaugggacguaaaaaaugcagaacuacuaaauaaccaauuuggaaccaugccaucauuaaccuuagcaugucuaaccaaacaaggacagguugauuuaaaugaugcuguacaagcacuaaccgaccuuggauuaaucuauacagcaaaauauccaaauacuucggacuuagauagacuaacacaaucucacccaauacuaaacaugaucgacacaaaaaaaucaucacuaaacauaucaggauauaauuucucacuaggagcggcaguaaaagccggagcaugcauguuagacggaggaaacaugcuagaaacaaucaaaguaaguccacagacaauggacggaauucuaaaaucaauacucaaaguaaaaaaagcacuaggaauguuuauaucugacgcaccaggagaaagaaauccauacgaaaauauacuauacaaaaucugccuaucaggugacggauggccauacaucgcaucaagaacaucaauaacaggacgagccugggaaaauaccguaguagauuuagaaucagauggaaaaccacaaaaagcuggaucaaacggaucaaauaaaucauuacaaucagcagguuucacagcaggacuuacauacucacaguuaaugacacucaaagaugcuaugcuucaacuagaucccaaugcaaaaacauggauggacauugaaggaagacccgaagaucccguagaaauagcucuauaucaaccaagcucaggauguuacauccacuuuuuuagagaaccaacagacuuaaaacaauucaaacaagacgccaaauacucccacggcaucgauguaacagaucuauuugcagcucaaccaggacuuacaucagcaguaauagaugcauuaccaagaaacaugguaauaacuugccaaggaucagacgacauaagaaaacuauucgaaucucaaggacgaaaagacaucaaguuaauagauauagcacuaucuaagacagauucucgaaaauaugaaaaugcaguaugggaucaauacaaagauuuaugccacaugcauacaggcaucgucguagaaaaaaaaaaaagagguggaaaagaagaaauaacaccucauugcgccuuaauggacugcauaauguuugacgcugccguaucaggaggauuaaauacaaguguauuaagagcaguucuaccacgugacaugguauucagaacaucaacaccaagaguuguuuuauaaggacuaguaauaaggaaacuguaugaaugucugugggcaggaagugaagagauccuucuguaaagguuuuuggaauuaugucugcugaauaauaaacuuuuuugaaauaauaaaucugguagaaaaaugagaucuaaaaaaaaaaaaaaaaaaaaaaaaaaaaaaaaaaaaaaaaaaaaaaaaaaaaaaaaaaaaaaaaugcaucccccccccccccccccccccccccccccccaaaggcucuuuucagagccaccagaauu

SEQ ID NO: 10588 - RNA, 2050 nt, Artificial Sequence
  mRNA product Design b-4 comprising derived and/or modified sequence from LASV(Josiah;Clade IV)__NP_694869__NP (opt11)
gggagagucccgcagucggcguccagcggcucugcuuguucgugugugugucguugcaggccuuauucaagcuuaccaugucagccagcaaagaaauaaaaucauuccucuggacacaaucacuccgccgcgaacucucaggguauugcucaaacauaaaacuccaaguagucaaagacgcccaagcccuccuacacggacuagacuucucagaaguaagcaacguccaacgccuaaugagaaaagaacgcagagacgacaacgaccucaagaggcucagagaccuuaaccaagcggucaacaaccuugucgaacucaaaagcacacaacagaaauccauacuacgagucggcacacuaaccagcgacgaccuccugauccucgcagccgaccucgagaaacuaaaaagcaaagucauccgaacagaaaggccccucuccgccggagucuacaugggaaaccuaagcucccaacaacucgaccaacggcgagcccuccucaacaugaucgggaugucgggcggcaaucagggcgcccgcgccggccgggacggcgucguacgagucugggacgucaaaaacgcagaacuccuuaacaaccaguucggcaccaugcccagccuaacacucgccugccugaccaaacaaggccaaguggaccucaacgacgcagugcaagcccucaccgaccuaggccugaucuacaccgcgaaauacccaaacaccuccgaccuagaccgccugacacaaucgcaccccauacucaacaugaucgacaccaaaaaaucuucgcuaaacaucucaggauacaacuucucccucggagccgcggucaaagcaggagccugcaugcuggacggcggaaauaugcuggaaaccauaaaaguaagcccccagaccauggacggcauccugaaaucaauccugaaagucaaaaaagcccuuggcauguucaucagcgauaccccgggcgaacgcaauccauacgaaaacauccuguacaaaauaugcuuaucaggcgacggcuggcccuacaucgcauccagaacuucgaucacaggccgagcaugggaaaacaccgucgucgaccuagaauccgacggcaaaccucaaaaagcggacagcaacaacucauccaaaagccuacaaucggcaggcuucaccgccggccucacguacucccaacucaugacccucaaagacgccaugcuacagcuagacccaaacgcaaaaaccuggauggacaucgaaggccggcccgaagaccccgucgaaaucgcucucuaccaaccaagcagcgguugcuacauacacuucuucagggaacccaccgaccucaagcaauucaaacaagacgcuaaauacucccacggaaucgacgugaccgaccucuucgcgacacagcccggccucaccagcgcaguaauugacgcacugccaagaaacaugguaauaacaugccaaggaagcgacgacauacgaaaacuccucgaaucacaaggacgcaaagacaucaaacucaucgacaucgcgcucuccaaaacggacagccgcaaauaugagaaugccguaugggaccaauacaaagaccucugccacaugcacaccggaguaguaguagaaaaaaaaaaaagaggagggaaagaagagauaaccccccacugcgccuuaauggauugcaucauguucgaugcagcagugagcggcggccucaacaccuccguccuccgagcaguccuuccgcgcgacaugguauucagaaccuccacaccaagagucguacucuaaggacuaguaauaaggaaacuguaugaaugucugugggcaggaagugaagagauccuucuguaaagguuuuuggaauuaugucugcugaauaauaaacuuuuuugaaauaauaaaucugguagaaaaaugagaucuaaaaaaaaaaaaaaaaaaaaaaaaaaaaaaaaaaaaaaaaaaaaaaaaaaaaaaaaaaaaaaaaugcaucccccccccccccccccccccccccccccccaaaggcucuuuucagagccaccagaauu

SEQ ID NO: 10589 - RNA, 2050 nt, Artificial Sequence
  mRNA product Design b-4 comprising derived and/or modified sequence from LASV(LP;Clade I)__AAF86702__NP (opt11)
gggagagucccgcagucggcguccagcggcucugcuuguucgugugugugucguugcaggccuuauucaagcuuaccaugucaaacuccaaagaaaucaaauccuuccucuggacccaaucacuccgccgcgaacuauccggauacugcucaaacaucaaacuucaaguaguaaaagaugcacaagcccuccuacacggccucgacuuuucagagguaucaaacguccaacgacucaugcguaaacaaaaacgagacgacgcugaccuuaaacgauuacgcgaccuaaaccaagccgugaacaaccuugucgaacucaaauccacccaacagaaaaacguccuccgcguaggcacccucagcuccgacgaccucaucacucucgcugccgaccucgaaaaacuaaaauccaaaguaauccgaaccgaacggccccucuccagcggcguauacaugggcaaccugucaagucaacagcucgaccaacgcagagcccucuugucgaugaucggaauguccggaggaccccaaggcaacagaaccggcggcgacggcguaguacgugucugggacgugaaaaacgccgaacuacuuaacaaccaguuugggacgaugcccagccucacccucgccugccucaccaaacaaggccaagucgaccucaacgacgccguccaagcacucacagaccuuggacucaucuacaccgcaaaguaccccaacuccucggaccuugacaugcugacacaaucacacccaauacugggcaugguugauaccaagaaaagcagccuaaauaucucagguuacaacuucucgcucggagccgcagucaaagccggagccugcaugcucgacggaggcaauaugcuagaaaccauaaaagucucaccccaaacuauggacggcauccucaaaucaauccucaaagucaaaagaucccuuggcauguucaucuccgacacccccggugaacgaaacccuuacgaaaacauacucuacaaaaucugccuauccggcgaaggauggccuuacaucgccagucgcaccuccaucaccggccgcgccugggaaaacacccuagucgaucuugaauccgacaacaaacccccuaaacuaaacucggccggcagcaacaaaucccuccaagccgccggacuaaacgccggacucaccuacagccaacucaugacccuaaaagauugcaugcuccaacucgacccaucaucuaagacauggauagacaucgaaggacgccccgaagacccagucgagaucgcccucuuccaacccuccucaggcugcuacauccacuucuuccgcgaacccaccgaccuaaagcaauucaaacaagacgcaaaauauucacacgguauagacgucacagaccuauucucgacccaaccaggccugaccucugcggucauagaagcacuccccagaaacaugguccuaaccugccaaggcucagacgacauuaagaaacuacucgaaagccaaggccgccgcgauaucaaacuaaucgacaucucccuauccaaagccgacucacgaaaauucgaaaacgcagucugggaccaguacaaagaccugugccauaugcacacaggcgucguagucgaaaagaagaaacgcggaggaaaagaagaaauuacaccccacugcgcccuacucgacugcaucauguucgacgccgccaccacuggcucccuaaacaucaccacccuccgagccguacuaccccgcgacaugguauuccgaaccuccacccccaaagucguacuuuaaggacuaguaauaaggaaacuguaugaaugucugugggcaggaagugaagagauccuucuguaaagguuuuuggaauuaugucugcugaauaauaaacuuuuuugaaauaauaaaucugguagaaaaaugagaucuaaaaaaaaaaaaaaaaaaaaaaaaaaaaaaaaaaaaaaaaaaaaaaaaaaaaaaaaaaaaaaaaugcaucccccccccccccccccccccccccccccccaaaggcucuuuucagagccaccagaauu

SEQ ID NO: 10590 - RNA, 2050 nt, Artificial Sequence
  mRNA product Design b-4 comprising derived and/or modified sequence from LASV(803213;Clade II)__AAF86704__NP (opt11)
gggagagucccgcagucggcguccagcggcucugcuuguucgugugugugucguugcaggccuuauucaagcuuaccauguccgcaagcaaagaagucaaaucauuccucuggacccaaucacuccgccgagaacucucgggcuacugcucaaacaucaaacuacaagucguaaaagacgcccaagcccuccuccacggucucgacuucuccgaagucaacaacguacagcgccucaugcgaaaacaaaaacgcgacgacggcgaccuuaaacgacuacgagaccuaaaccaagccguaaacaaccucgucgaacugaaauccacccaacaaaaaucaauccugcgaguugguacccucacauccgacgaccuccuaacacuagcagccgaccucgaaaaacucaaguccaaagucauacgcaccgaacgcccacucaguuccggcguauacaugggcaaccucucuacccaacaacucgaacaacgccgcgcgcuccuaaauaugaucgguaugguagguggagcccaaggcacccaaccaggccgcgacggcgugguacgcgucugggacgugaaaaaccccgaucucuuaaacaaucaauucggcacaaugcccucccucacacuagcaugccugaccaaacaaggacaagucgaccuaaaugacgccguccuagcucuuacagaccuaggacucaucuauaccgccaaauacccuaacuccuccgaccucgaccgacucucacaaucucacccaauccuaaacauggucgacaccaagaaauccucccucaacaucucgggauacaacuucagccucggcgccgccgucaaagcaggcgccugcaugcuagacggcggcaacaugcucgaaaccaucaaaguaacgccccaaaccauggacggcauccucaaauccauccucaaggucaaaagaagccucggcauguucguuucggacacucccggcgaacgcaaccccuacgaaaacauccuauacaaaaucugccuaucaggcgacggcuggcccuacauagcaucacgaaccaguaucguaggccgagcaugggaaaauaccacaguagaccucgaguccgacggaaaaccucaaaaagucggcacugccggaucaaacaaaucccuccaaagcgccggcuucccaaccggccuuaccuauucccaacuaaugacccucaaagauuccaugaugcaauuagaccccuccgccaagacauggaucgacaucgaaggccgucccgaagacccaguagaaaucgcccucuaccaacccaugagcggaugcuacauucacuuuuucagagaacccaccgaccucaaacaauucaaacaagacgccaaguacucccaugggauagacgucgccgaccucuuccccgcccaacccggccucaccucggccguaauagaggcccuaccaagaaacaugguccuaaccugccaagguuccgacgacaucaagaaacuccucgacucacaaggcagacgcgacaucaaacuaaucgacaucucccucuccaaagucgacucacgaaaauucgaaaacgccgucugggaucagugcaaagaccucugccacaugcacacaggcgucgucgucgaaaagaagaaacgaggcggaaaagaagaaauaacaccacacugcgcccucauggauugcaucauguucgacgccgccguaucuggcgggcuaaacauuccaguccugcgagccguccucccccgcgacaugguauuccgcaccuccuccccaaaagucguccucugaggacuaguaauaaggaaacuguaugaaugucugugggcaggaagugaagagauccuucuguaaagguuuuuggaauuaugucugcugaauaauaaacuuuuuugaaauaauaaaucugguagaaaaaugagaucuaaaaaaaaaaaaaaaaaaaaaaaaaaaaaaaaaaaaaaaaaaaaaaaaaaaaaaaaaaaaaaaaugcaucccccccccccccccccccccccccccccccaaaggcucuuuucagagccaccagaauu

SEQ ID NO: 10591 - RNA, 2053 nt, Artificial Sequence
  mRNA product Design b-4 comprising derived and/or modified sequence from LASV(GA391;Clade III)__CAA36646__NP (opt11)
gggagagucccgcagucggcguccagcggcucugcuuguucgugugugugucguugcaggccuuauucaagcuuaccauguccgcaagcaaagaagugagauccuuccucuggacccaaucgcuccgccgcgagcucucaggcuacugcucgaacaucaaauuacaagucgucaaagacgcacaagcccuccuacacggacucgacuucucagaaguguccaacguccaacgacugaugaggaaacaaaagagagacgacggcgaccuaaaacgacuacgcgaccuaaaccaagccgucaacaaccuagucgaacuaaaauccacacaacaaaaaucaguccuucgcguaggaacccuaucaucagacgaccuccucauccucgcagccgaccuagaaaaacugaaaucaaaaguaacacgaaccgaacggccacucuccagcgggguauacauggggaaccucuccucccaacaacuugaccaaagacgcgcucuccuuaacaugaucggcaugacaggcgugagcggagguggcaaaggcgcaucggacgggaucguccgcguaugggacgucaaaaacgccgaacuacucaacaaccaauucggaaccaugccaucccucacacucgccugccucaccaagcaaggacaaguggaccuaaacgacgccguccaagcccucaccgaccucggccucaucuacaccgcgaaauacccaaacagcucggauuuggaccgacuaucccaaucccacccaauacuaaacaugaucgacaccaagaaauccagucuaaacaucuccggcuacaacuucucccucggagccgcggucaaagccggcgccuguaugcuggacggcggcaacaugcuagaaaccaucaaagucucuccccaaaccauggacgguauccucaaauccauccugaaagucaagaaaagccucggcauguucgucucagacacaccgggagaacgcaaccccuacgaaaacauccuguacaaaaucugucucucaggcgacggcuggcccuacaucgccagccggaccagcaucguaggcagagccugggaaaacaccguaguagaccucgaacaagacaacaaaccccagaaaauaggaaacggcggcucaaacaaaucacuccaaagcgccggauucgccgccggacugaccuacagccaacuaaugacccuaaaagacuucaaaugcuucaaccucauacccaaugccaaaacauggauggacauagaaggacgacccgaagacccaguagagaucgcccucuaucaaccuuccucaggauguuacguccacuucuucagagagcccaccgaccugaaacaguucaaacaagacgccaaauacucacacggcaucgacgucacagaccuauucgccgcccaacccggccugaccuccgccgucaucgaagcccucccacgcaacauggucauaacaugccaaggcuccgaagacaucagaaaacuacucgaaucccaaggccgccgcgacauuaagcuaauagacauaacccuauccaaagccgauagccguaaauucgaaaacgcagucugggaccaauuuaaagaccuaugccacaugcacaccggcgucgucguggaaaagaagaaacgaggcggcaaagaagaaaucacaccccacugcgcccucauggacugcaucauguucgacgccgccguuucgggcggccucgacgccaaaguccuacgcgucguccuaccccgagacauggucuuccgcaccagcacgcccaaaguaguccucuaaggacuaguaauaaggaaacuguaugaaugucugugggcaggaagugaagagauccuucuguaaagguuuuuggaauuaugucugcugaauaauaaacuuuuuugaaauaauaaaucugguagaaaaaugagaucuaaaaaaaaaaaaaaaaaaaaaaaaaaaaaaaaaaaaaaaaaaaaaaaaaaaaaaaaaaaaaaaaugcaucccccccccccccccccccccccccccccccaaaggcucuuuucagagccaccagaauu

SEQ ID NO: 10592 - RNA, 2050 nt, Artificial Sequence
  mRNA product Design b-4 comprising derived and/or modified sequence from LASV(AV;Clade V)__CCA30315__NP (opt11)
gggagagucccgcagucggcguccagcggcucugcuuguucgugugugugucguugcaggccuuauucaagcuuaccaugagcgcauccaaagaagucaaaagcuuccucuggacacaaucccuacggcgcgaacuauccggcuacugcucuaacaucaaacuccaagucguuaaagacgcccaagcccuccuccacggacucgacuucuccgaaguuuccaacguacaaagacuuaugcgaaaacagcgccgcgacgacucagaccuaaaacgacugcgcgaccuaaaccaagcaguaaacaaucucgucgaacucaaaagcacccaacaaaaaucaguucuccgcgucggcacucucuccuccgacgaccuccucacccuagccgcugaccuagaaaaacugaaauccaaagucaccagaaccgaacgaccccucuccucaggcgucuacaugggaaaccucaguucacaacaacucgaccaacgccgagcccuccuaaaccugaucggaaugacaaacggaagccaaggcucacaagcaggcagagacggcgucgugcgcgucugggacgucaaaaacgcggaacuccuaaacaaccaauucggcaccaugcccucacugacccucgcuugccuuaccaaacaaggccaaguagaccucaacgacguuguccaagcacuuaccgaccuaggacugauauacacugccaaauaccccaacaccuccgaccucgaccgccuaacccaaagccaccccauucuaaacaugaucgacacgaaaaaauccucauuaaacaucuccggauacaacuucucacugggagcagcaguaaaagcaggggcauguaugcucgacggcggaaacaugcucgaaaccaucaaggucagcccccaaagcauggacggcauucuaaaaucaauccuaaaaguaaaacgcgcccuaggaauguucguauccgacacccccggcgaacgcaaccccuacgaaaacauacucuauaaaaucugccuaucaggcgacggcuggcccuacauagccucccgcaccucgaucgucggcagagccugggaaaacaccguagucgaccucgaaaccgacggaaaaccacaaaaaauaggcuccggaaacagcaacaaaucucuccaaagcgcaggauucuccgccggccugaccuacagccaacucaugacccucaaagacgccaugcuccaacucgacccuaacgcaaaaaccuggauggacaucgaaggacgccccgaagaccccguagaagucgcccuauaccagccuaucuccggcuguuacauccacuucuuccgcgaacccacagaccuaaagcaauucaaacaagacgccaaauacagccacggcaucgacauagccgaccucuucgccgcucaaccuggccuaaccucugccgucaucgaagcccucccacgcaacauggucaucacaugccaaggcagcgaggacaucaaaaaacuccuagaaucccaaggccguaaagacaucaaacugauagacaucgcacuauccaaaaucgacucccggaaauucgaaaacgcggucugggaccaguauaaagaccucugccauaugcacacuggagucgucguagaaaaaaaaaaaagaggcggaaaagaagaaaucacgccacacugcgcccuuauggacugcauaauguucgacgcagcugucagcggcggccucaacacucucguccucagagccguccucccccgagauauggucuuccgcaccucaacaccccgcguaguccucuaaggacuaguaauaaggaaacuguaugaaugucugugggcaggaagugaagagauccuucuguaaagguuuuuggaauuaugucugcugaauaauaaacuuuuuugaaauaauaaaucugguagaaaaaugagaucuaaaaaaaaaaaaaaaaaaaaaaaaaaaaaaaaaaaaaaaaaaaaaaaaaaaaaaaaaaaaaaaaugcaucccccccccccccccccccccccccccccccaaaggcucuuuucagagccaccagaauu

SEQ ID NO: 10593 - RNA, 2050 nt, Artificial Sequence
  mRNA product Design b-4 comprising derived and/or modified sequence from LASV(Togo/2016/7082;Clade VI)__AMR44578__NP (opt11)
gggagagucccgcagucggcguccagcggcucugcuuguucgugugugugucguugcaggccuuauucaagcuuaccauguccaacucuaaagaagucaaaucauuccucuggacccaaucacuccgccgcgaacucuccgguuacugcuccaauauaaaacugcaaguagucaaagacgcacaagcucuccuccacggccucgauuuuuccgaaguguccaacguccaacgacucaugagaaaacaaaaacgagacgacggcgaccucaaacgacugcgcgaccuaaaccaagccgucaacaaccuugucgaacuaaaaucaguccagcagaaaucaauucugcgcgucggcacacucacuuccgacgaccuacucacccuagcagccgaucucgaaaaacuuaaaucaaaagucacucguaccgaacgcccacuauccagcggcgucuacauggggaaccucagcucacaacaacucgaccaaagacgagcauuacucuccaugauaggaaugucaggcggcaaccaaaacucacaacccaaaggcgacggggucguccgcgucugggacgucaaaaacgccgaccuucucaauaaccaauucggcacaaugcccucacucacccucgcaugccuaaccaagcagggucaagucgaucucaacgacgccguccaggcacuaacagaccuaggacucaucuacaccgccaaauaccccaacuccucugaccucgaccgccucucacaaucacaccccauccugaacaugaucgacaccaagaaaucaagccucaacauuuccggcuacaacuuuucucuaggugcggccaucaaaacaggcgccuguaugcucgacggcggcaacaugcucgaaaccaucaaaguaacaccccaaaccauggacggcauacucaaauccauccucaaaguaaaacgaucccuagggauguuuaucuccgacacacccggcgaacgcaaccccuacgaaaauauccuauacaaaaucugccuaucuggcgacggauggccauacaucgccucacgaaccgccaucauaggccgggccugggaaaacaccguagucgaccucgaauccgacagcaaaccccagaaaauaggcucuaacggauccaacaaaucacuacaauccgcaggcuucgccccaggccucaccuauagccaacuaaugacccucaaagacagcaugcuccaacuugacccaaacgccaaaacauggaucgacaucgaaggacgcccagaagacccaguagaagucgcccucuuccaacccauaucgggcugcuacauccacuucuuccgcgagccaacagaccucaaacaauucaagcaagacgccaaauacucccacggaauagacgucaccgaccuauucgcagcacaacccggucucacauccgccguuaucgaggcccucccccggaacaugguccugaccugccaaggauccgacgacaucaagaaacuccucgacagucaaggacguagagacauaaaacuuauagacgucucccuaaacaaaaucgacagccgcaaauucgaaaacgcagucugggaccaauacaaggaccuaugccauaugcacaccggcgucgucgucgaaaagaaaaagaaaggcggcaaagaagaaaucacgccccacugcgcccuacuagacugcaucauguucgacgcugccgucucgggaggccucaacgcaaccguacuccgugccguacucccccgcgacaugguauuccggaccucuuccccaaaagucgucuuauaaggacuaguaauaaggaaacuguaugaaugucugugggcaggaagugaagagauccuucuguaaagguuuuuggaauuaugucugcugaauaauaaacuuuuuugaaauaauaaaucugguagaaaaaugagaucuaaaaaaaaaaaaaaaaaaaaaaaaaaaaaaaaaaaaaaaaaaaaaaaaaaaaaaaaaaaaaaaaugcaucccccccccccccccccccccccccccccccaaaggcucuuuucagagccaccagaauu

SEQ ID NO: 10594 - RNA, 2050 nt, Artificial Sequence
  mRNA product Design b-4 comprising derived and/or modified sequence from LASV(KAK-428;Clade n.d. (VII))__ANH09741__NP (opt11)
gggagagucccgcagucggcguccagcggcucugcuuguucgugugugugucguugcaggccuuauucaagcuuaccaugagcaacucaaaagaagucaaaucauuccucuggacccaaucacuccgcagagaauuauccggcuacugcaccaacaucaaacuccaaguagucaaagacgcccaagcccuacuacacggucucgacuucuccgaagucagcaauguccaacgacucaugcgaaaacaaaaacgugacgacaacgacuuaaaaagacucagagaccugaaccaagccguaaacaaccuagucgaacucaaaucgguccaacaaaaauccgugcuaaaagugggcacccucaacucagacgaccuuuuaacacucgccgccgaccucgaaaaacugaaaucgaaagucguccgaaccgaacgcccccucuccuccggcguauacaugggcaaccuauccucacaacaacucgaccaacgccgugcgcuccuaaacaugaucgguauggccggaggcagccaaggcaaccaacccucccgagauggagucgugcgagucugggacgucaaaaacgccgaccuucucaacaaccaauucgguacaaugccaucacucacgcuagccugccuaaccaaacagggacaaguagaccucaacgacgucguccuagcccuuacagaccuaggccugauauacaccgccaaauacccaaacuccuccgaccucgaccgcuuaagccaaaaccacccaguacuaaacaugaucgacgucaacaaaucaucccucaacauauccggcuacaacuucagccucggcgcagccgucaaggccggugcaugcaugcucgacggcggaaacaugcuagaaacuaucaaaaucagcccccaaaccguagacggcauacuaaaauccauacucaaagugaaacgugcacuaggcauguucguauccgacaccccaggagaacgaaaccccuacgaaaacauccuuuacaaagucugccuaucaggaaacggcuggcccuacaucgcaagccgcacaucaaucgucggcagagccugggaaaacaccguagucgaucuagagucgaacaaaaaccaaccuaaagucgguaauaacggauccaacaagaugcuucaauccuccggcuucgccaccggccucaccuacucccaacucaugacacuacgggacuccaugcuccaacucgaccccaccgcaaaaaccuggauugacaucgaaggccgccccgaagacccuguugagcucgcacuauuccaaccauccuccggcugcuacauacacuucuuccgcgaaccuacagaccucaagcaauucaaacaggaugccaaauacagccacggcaucgacgugaacgaccuauucucggcccaacccggccuaaccagugccguccuagaagcccucccacgcaacaugguccuaaccugccaagggagcgacgacauccgcaaacuccucgacucacaagaccgcaaagacauaaaacucaucgacaucucccucagcaaggccgacgcccgcaaauucgaaaacgacguaugggaccaauucaaagaccucugccacaugcacaccggcaucguaguagaaaagaagaagaaaggcggaaaacaagaaaugaccccucauugcgcccuccuagacugcaucauguucgacgcagcugugagcggcggccucaacguccccacccucagagcaguccuaccaacagacauggucuuccgcaccauaaccacaaaaguaguacuauaaggacuaguaauaaggaaacuguaugaaugucugugggcaggaagugaagagauccuucuguaaagguuuuuggaauuaugucugcugaauaauaaacuuuuuugaaauaauaaaucugguagaaaaaugagaucuaaaaaaaaaaaaaaaaaaaaaaaaaaaaaaaaaaaaaaaaaaaaaaaaaaaaaaaaaaaaaaaaugcaucccccccccccccccccccccccccccccccaaaggcucuuuucagagccaccagaauu

SEQ ID NO: 10595 - RNA, 2050 nt, Artificial Sequence
  mRNA product Design b-4 comprising derived and/or modified sequence from LASV(Pinneo-NIG-1969;Clade I)__AIT17837__NP (opt11)
gggagagucccgcagucggcguccagcggcucugcuuguucgugugugugucguugcaggccuuauucaagcuuaccauguccaauuccaaagaaaucaaauccuuccucuggacacaaucacuccgccgagaacucucaggauacugcucaaacaucaaacuacaaguagugaaagacgcacaagcccuucugcacggucucgauuucucagaagucuccaacguacaacgccucaugagaaaacaaaaacgcgacgacgcagaccucaaacgacuccgagaccuaaaccaagccgucaacaaccucgucgagcucaaauccacccaacagaaaaacguacuccgagucggaacccucagcucagacgaccucaucacgcuagcggcagaccucgaaaaacuuaaaagcaaagucauccgcacagagcgcccacuauccuccggagucuacauggggaaccucuccucccaacaacucgaccaacgccgcgcccuccucucuaugaucgguauguccggcggcccacaaggaaaucgcaccggcggagacggaguaguacgcguaugggacgucaaaaacgcagaacuccuuaacaaccaauucggaacaaugccaucccugacccuggcaugccuaacaaaacaaggccaaguagaccuaaacgacgcaguacaagcucucacagaccuaggccucaucuacaccgcaaaauaccccaacucguccgaccucgacaugcuuacccaaucccacccaauccucggaaugguagacacgaaaaagagcucccuaaacaucagcggauauaacuucucgcugggcgccgcggucaaagcgggcgccugcaugcuggacggcggaaacauguuagaaaccaucaaggucucgccccagacaauggacgggauacuaaaauccauucuuaaagucaaacgcucucuaggcauguucaucuccgacacccccggcgaacgcaacccauacgaaaauauacuauacaaaaucugucucagcggugaaggcuggcccuacauagccagcagaaccagcaucaccggacgcgcgugggaaaacacacucgucgaccucgaaucagacaacaagccacccaagcucaacucagcaggguccaacaaaucacuacaagcagccggccucaacgccggccuaaccuacucccaacuaaugacccucaaagacugcaugcuccaacuugaccccagcuccaaaaccuggaucgacaucgaaggacgccccgaggacccagucgaaauagcccuauuccaacccuccagcggaugcuacauacacuucuucagagaaccaacagaccucaaacaauucaagcaagacgccaaauauucucacggcaucgacgugaccgaccucuucuccacacagcccgggcucaccagugcagucauagaagcccucccacgaaacaugguacucacaugccagggaagcgacgacauaaagaaacuccucgaaagccaagguagacgggacaucaaacucauagacaucucccucuccaaagcagauucacgcaaauucgaaaacgccgucugggaccaauacaaagaccuuugccacaugcacaccggagucguagucgaaaagaagaaacgagguggaaaagaagaaaucacaccccacugcgcccuacuagacugcauaauguucgacgccgcaaccacaggaagccuaaacaucaccacacucagggccguccuaccccgcgacaugguguucagaacuagcacacccaaagucguauuauagggacuaguaauaaggaaacuguaugaaugucugugggcaggaagugaagagauccuucuguaaagguuuuuggaauuaugucugcugaauaauaaacuuuuuugaaauaauaaaucugguagaaaaaugagaucuaaaaaaaaaaaaaaaaaaaaaaaaaaaaaaaaaaaaaaaaaaaaaaaaaaaaaaaaaaaaaaaaugcaucccccccccccccccccccccccccccccccaaaggcucuuuucagagccaccagaauu

SEQ ID NO: 10596 - RNA, 2050 nt, Artificial Sequence
  mRNA product Design b-4 comprising derived and/or modified sequence from LASV(ISTH0009-NIG-2011;Clade II)__AIT17405__NP (opt11)
gggagagucccgcagucggcguccagcggcucugcuuguucgugugugugucguugcaggccuuauucaagcuuaccaugucagucuccaaagaagucaaaucauuccucuggacccaaucccugcgacgggaacucagcggcuacugcuccaacaucaaacugcaagucgucaaagacgcccaagcacuacuccacggccuagauuucucagaaguaagcaacguccaacgacucaugcguaaacaaaaacgcgaugacucagaccuaaagcgacuacgagaccugaaccaagcaguaaacaaccucgucgaacucaagucuacccaacagaaaagcauacuccgagucggcacccucacuuccgaugaccuucucacccuagccgccgaccucgagaaacucaaauccaaagucauccgaacagaacgcccccuaucaagcggcguauacaugggcaaccuauccacacaacagcuagagcaacgccgcgcccuacuaaacaugauaggcaugguagguggagcgcaaggcacucagccaggccgcgacggcgucguacgcguaugggacgucaaaaacccugaccuccucaacaaccaauucggcaccaugcccagccuaacacucgccugccuuaccaagcaaggccaaguagaccucaaugacgcggucuuagcccucaccgaccucggccucaucuacacagccaaauaccccaacuccucagaccucgaccgccugagccaaucccacccaauucucaacauggucgacauuaaaaagagcagccuuaacauauccggcuacaacuucagccuaggcgccgcaguaaaagccggcgccugcaugcucgacggcggcaacaugcuagaaacgaucaaagucacgccccaaaccauggacggcauacucaaauccauacucaaaguuaaacgcucccucggcauguucgucuccgauacccccggcgaacgcaaccccuacgaaaacauccuuuacaaaaucugccucagcggagacggauggccauacaucgcuucccgcaccagcauagucggccgcgcaugggaaaacaccaccguagaccucgaauccgacggcaaaccccaaaaagucggcucagcaggaucaaacaaaucacuccagagugccggcuuccccacgggccuuacauacucccaacuaaugacccucaaagacagcaugaugcaacuggacccauccgccaaaaccuggauagacauagaaggccgacccgaagacccaguagagauagcccucuaccaacccaugagcggaugcuacauacacuucuuccgagaaccuaccgaccucaagcaauucaaacaagacgccaaguacucccacggcaucgacguggccgaccucuucccagcccagcccggccucaccagcgccgucaucgaagcucuaccccguaacaugguacucacaugccaaggaagcgacgacauuaaacgccuccucgauucccaaggacgacgcgacaucaaacucauagacauagcccucuccaaagccgacucccgccgcuucgaaaacgcaguaugggaccaaugcaaagaccucugccacaugcacacuggcgucgucguggaaaagaaaaagcgaggcggcaaagaagaaaucacgccacacugcgcccuaauggacugcaucauguacgacgccgcuguaucgggcggacuuaacauccccguccuaagagcgguccuaccccgagauauggucuuccgcacgucaucccccaaaguaguccucuaaggacuaguaauaaggaaacuguaugaaugucugugggcaggaagugaagagauccuucuguaaagguuuuuggaauuaugucugcugaauaauaaacuuuuuugaaauaauaaaucugguagaaaaaugagaucuaaaaaaaaaaaaaaaaaaaaaaaaaaaaaaaaaaaaaaaaaaaaaaaaaaaaaaaaaaaaaaaaugcaucccccccccccccccccccccccccccccccaaaggcucuuuucagagccaccagaauu

SEQ ID NO: 10597 - RNA, 2050 nt, Artificial Sequence
  mRNA product Design b-4 comprising derived and/or modified sequence from LASV(ISTH2010-NIG-2012;Clade II)__AIT17483__NP (opt11)
gggagagucccgcagucggcguccagcggcucugcuuguucgugugugugucguugcaggccuuauucaagcuuaccauguccgcuucaaaagaagucaaaucauuccuuuggacccaaucccuacgacgugagcucagcgguuacugcagcaacauaaaacuacaggucgugaaagacgcccaagcgcuacuucacggacucgacuucagcgaggucuccaacguccaacgacucaugagaaaacaaaaacgcgacgacucagaccuuaaaagacuucgagaccucaaucaagccguaaacaaccucgucgaacuaaaauccacccaacagaaaagcauccuucgcgucggcacacucaccuccgacgaccugcuaacccuagccgccgaucucgaaaaacucaaaucaaaagucaucaggaccgagcgcccccuauccucaggcgucuacauggguaaccuauccacccaacaacucgaacaaaggcgagcccugcuaaacuuaaucggcauggucggcggcgcccaaggcacccaaccaggacgagacggcgucguccgaguaugggacgucaaaaaccccgaccuacucaacaaccaauucggcacgaugccaagccucacccucgccugccucacuaaacaaggacaagucgaucuaaaugacgccguccuggcgcucacagaccuaggacucauauacacagccaaauaccccaacuccuccgaccucgaccgccuaucacaaagccaccccauucucaacaugguagacaccaagaaaagcagccucaacaucagcgguuucaacuucucacuaggcgcggccgugaaagcgggagccugcaugcuagacggcggcaauaugcucgaaacaaucaaaguaacaccacaaaccauggacggcauacucaaaagcauccucaaagugaagaaaucacucggcauguucguauccgacacuccaggcgaacguaacccauacgaaaacauccucuacaaaaucugccuuuccggcgacggcuggcccuacaucgccuccagaaccucaaucgucggcagagcuugggaaaacacgaccguagaccuagaaucugacggcaaaccacacaaagucggcaccgccggcuccaacaaaagccugcaauccgccggauucccaaccggccuaacauauucacaacucaugacccucaaagacuccaugaugcaacuggaccccagcgccaaaacauggauagacauagagggccgcccggaagaccccguggaaaucgcccucuaccaacccaugagcggcugcuacauacacuucuuccgugaaccaacggaccuaaaacaauucaaacaagacgcuaaauacucacacggcaucgacguagccgaccucuuccccgcccaacccggccucaccagcgccguaauugaagcacuaccccgcaacaugguccuuaccugccaaggauccgacgacauaaaacgccuacucgacucacaaggacgccgcgacauaaaacucauagacauagcccuauccaaagccgauucccggcguuucgaaaacgcaguuugggaccaaugcaaagaccuaugccacaugcacacaggcgucgucguagagaaaaagaaacgcggcggaaaagaagaaauaacaccucacugcgcccucauggacugcauaauguaugacgcagcaguauccggaggccucaacauaccaguacuacgggcgguccuuccacgcgacaugguauuccgaacaagcucaccaaaagucguccucugaggacuaguaauaaggaaacuguaugaaugucugugggcaggaagugaagagauccuucuguaaagguuuuuggaauuaugucugcugaauaauaaacuuuuuugaaauaauaaaucugguagaaaaaugagaucuaaaaaaaaaaaaaaaaaaaaaaaaaaaaaaaaaaaaaaaaaaaaaaaaaaaaaaaaaaaaaaaaugcaucccccccccccccccccccccccccccccccaaaggcucuuuucagagccaccagaauu

SEQ ID NO: 10598 - RNA, 2050 nt, Artificial Sequence
  mRNA product Design b-4 comprising derived and/or modified sequence from LASV(Lassa virus/H.sapiens-wt/NGA/2015/ISTH_0543;Clade II)__AVO03640__NP (opt11)
gggagagucccgcagucggcguccagcggcucugcuuguucgugugugugucguugcaggccuuauucaagcuuaccaugagcgcaagcaaagaaguaaaauccuuccuguggacacaaucccuccggcgcgagcucuccggcuauugcuccaacaucaaacugcaaguggucaaagacgcacaagcacuacuacacgggcuagacuucucggaagucuccaacguccaacgacucaugcgcaaacaaaaacgagacgacagcgaccuaaagcgcuuacgagaccucaaccaggccgucaacaaccuggucgagcuaaaguccacgcaacaaaagagcauccugcgaguaggaacgcucacauccgaugaccuccucacccuagcagcugaccucgaaaaacucaaauccaaagucauccgaacugaaagaccccucuccagcggaguauacaugggcaaucuauccacccagcaacuugaacaaagacgcgcacuccuaaacaugauaggaauggucggcggagcccaaggaacacaacccggccgcgacgguguagucagagugugggacgucaaaaacccagaccuucuaaacaaccaguuuggaaccaugcccucacucacccuugcaugccucaccaagcaaggccaaguagaccucaacgacgccguacuagcacuaaccgaccugggacucaucuacaccgccaaauaccccaacagcucagaccucgaccgacuaagccaaagccacccaauacugaauauggucgacacaaagaaauccagccuaaacauaagcggcuacaacuucucccuaggagccgcggucaaagccggagccugcaugcuagacggcggaaacaugcuggaaacuauaaaagucacaccccaaacaauggacggcauacucaaaucaauacucaaaguaaagaaaagccucggcauguucgucucagacacacccggcgaacgcaaccccuacgaaaacauacuauacaaaaucugccuuucaggcgauggauggccauacauagcauccagaaccucaaucguaggcagagcaugggaaaacaccaccguugaccucgagucagacggaaaaccccaaaaagucgggucagcaggcaguaacaaaucccuccaaagugcaggauuccccaccggccugaccuacucacaacucaugacucucaaagacaguaugaugcaacucgaccccucggccaaaacauggaucgacaucgagggaagacccgaagaccccgucgaaauagcccuauaccaaccaauguccggaugcuacauacacuucuuccgagagccaaccgaccucaaacaauucaaacaagacgccaaauacucacacggcauagacguagcugaccucuuccccgcccaacccggccucaccuccgcugucaucgaagcccucccccgcaacaugguacuaacaugucaagguucugacgacaucaaacgccuccucgacucccaaggacgcaaagacaucaaacuaauagacaucgcccucagcaaagcugacucccgaagauucgaaaacgcagucugggaccaaugcaaagaccucugccacaugcacaccggagucgucgucgaaaagaagaaaagaggcgggaaagaagaaaucacaccccacugcgcccugauggacugcauuauguacgacgccgccguuuccgguggucucaacauccccguacuccgagccguccuaccacgcgacauggucuuccgcaccuccagccccaaaguaguccuauaaggacuaguaauaaggaaacuguaugaaugucugugggcaggaagugaagagauccuucuguaaagguuuuuggaauuaugucugcugaauaauaaacuuuuuugaaauaauaaaucugguagaaaaaugagaucuaaaaaaaaaaaaaaaaaaaaaaaaaaaaaaaaaaaaaaaaaaaaaaaaaaaaaaaaaaaaaaaaugcaucccccccccccccccccccccccccccccccaaaggcucuuuucagagccaccagaauu

SEQ ID NO: 10599 - RNA, 2050 nt, Artificial Sequence
  mRNA product Design b-4 comprising derived and/or modified sequence from LASV(Lassa virus/H.sapiens-wt/NGA/2016/ISTH_0009;Clade II)__AVO03572__NP (opt11)
gggagagucccgcagucggcguccagcggcucugcuuguucgugugugugucguugcaggccuuauucaagcuuaccauguccgccuccaaagaagucaaauccuuccuguggacccaaucccuccgccgcgaacucuccggauacugcucuaacaucaaacuccaaguuguaaaagacgcacaagcgcuacuacacggccuagacuucuccgaaguauccaacguacaacgccucaugcgcaaacaaaaacgagacgacucagaccucaaacgucuccgcgaucucaaccaagccguaaacaaccuagucgaacucaaaaguacgcaacaaaaaucuauccuucgagucggcacacugacaagcgacgaccugcucacccucgccgccgaccucgaaaaacucaaauccaaaguaauccgaaccgaacgcccccucucuuccgggguauacaugggcaaccuuuccacccaacaacuagagcaacgccgcgcccuccucaacaugaucgggaugguagguggagcccaaggaacacaaccuggacgagacggggucguccgagucugggacgucaaaaaccccgaccuccucaacaaccaauucggcacaaugcccucccuaacucucgccugccucacaaaacaaggacaaguagaucucaacgacgccguccuagcucuaacagaccuaggacuuauauacaccgccaaguacccaaacuccucggaccucgacagacucucgcaaucacacccgauacuaaacauggucgacaccaaaaagucaucccugaacaucucgggcuacaacuucucucucggcgccgcagucaaggccggagccugcaugcucgacggcggaaacaugcucgagacgaucaagguaacaccacaaaccauggacggcauacucaaauccauccuaaaagucaagaaaagccucggaauguucgugagcgacacccccggcgaaagaaaccccuacgaaaacauacucuauaaaaucugccuaucuggcgacgguuggcccuacaucgcuagccgcaccuccaucgucggacgcgcaugggagaauacaacagucgaucucgaaagcgacggcaaaccccaaaaagucggcagcgccggaaguaacaaaucacuccaauccgccggcuucccaaccggccuaaccuacucccaacucaugacccucaaggacuccaugaugcaacuugaccccagcgccaaaaccuggaucgacaucgaaggaagaccugaagaccccgucgagaucgcacucuaccaacccauguccggcugcuacauccacuucuuccgcgaaccgaccgaccucaagcaauucaaacaagacgccaaauacagccacggcauugacgucgccgaccuauuccccgcacagcccggccuuaccucggccguaauugaagcccuuccacgcaacaugguccuaaccugccaagguuccgacgacaucaaacgccuccuugacucacaaggccgccgcgacauaaaacucauagacauagcccuaucgaaagcagauucacgacgauucgaaaacgccgucugggaccaaugcaaggaccuuugccacaugcacaccggcguagucguagagaaaaagaaaagaggcgggaaagaagaaaucacuccccacugcgcacucauggacugcauaauguacgacgcagccguuagcggcggccuuaacauaccaguucuacgagccguacucccccgagacaugguauuccgaaccucaagccccaaagucguccuuuaaggacuaguaauaaggaaacuguaugaaugucugugggcaggaagugaagagauccuucuguaaagguuuuuggaauuaugucugcugaauaauaaacuuuuuugaaauaauaaaucugguagaaaaaugagaucuaaaaaaaaaaaaaaaaaaaaaaaaaaaaaaaaaaaaaaaaaaaaaaaaaaaaaaaaaaaaaaaaugcaucccccccccccccccccccccccccccccccaaaggcucuuuucagagccaccagaauu

SEQ ID NO: 10600 - RNA, 2050 nt, Artificial Sequence
  mRNA product Design b-4 comprising derived and/or modified sequence from LASV(Lassa virus/H.sapiens-wt/NGA/2016/ISTH_0017;Clade II)__AVO03568__NP (opt11)
gggagagucccgcagucggcguccagcggcucugcuuguucgugugugugucguugcaggccuuauucaagcuuaccaugucagcaucaaaagaagucaaaucauuccucuggacccaaucacuacggcgcgaacucagcggcuacugcuccaguaucaaacuacaggucguaaaagacgcccaagcccuacuccacggacuagacuucucagagguuucaaacguacaacguuuaaugcguaaacagaaaagagacgacuccgaccucaaacggcuccgagaccucaaccaagccguuaacaaccuagucgaacucaagucgacacaacaaaaaucaauccuccggguaggcacacucaccucagacgaccuccucacccucgcugccgaccuagagaaacuaaaaucaaaagucauacgcaccgaacgaccucugucaucaggcgucuacaugggaaaccucagcacccaacaguuagaacaacgacgcgcccuauuaaacaugaucgguauggccggcggcgcccagggcacacaacccggucgagacggagucguacgagucugggacgucaagaaccccgaccuccucaacaaccaauucggaaccaugcccucgcucacccucgccugccugacaaaacaaggccaagucgaccucaacgacgccguccuagcacuaaccgaccuaggccuaaucuacaccgccaaguaccccaacuccuccgaccuagaccgcuuaagccaaucgcaccccauccucaacauggucgacaccaagaaaagcucccuaaacaucagcggcuacaacuucucacuaggcgcggccgucaaagcuggagccugcaugcuugacggcggcaacauguuagaaaccaucaaagucacaccccaaaccauggacggcauccucaaauccauacucaaagucaaacgcucccucggcauguucguaagcgacgcgccaggugaacgaaaucccuacgaaaacauccucuauaaaaucugccuaucaggcgacggcuggcccuacaucgccucccgcaccuccaucgucggccgagccugggaaaacacuaccgucgaccuugagagcgacggcaagccccaaaaagugggagccaccggaucgaacaaaucccuccaaagcgccggauucccgaccggccucaccuacagccaacucaugacacucaaagacagcaugaugcaacucgaccccuccgcaaaaaccuggaucgacauagagggacgcccggaagacccaguagaagucgcccucuaccaacccguauccggaugcuacauccacuucuuccgagaacccacggaucucaaacaguucaaacaagacgccaaauacagccacggcauagacguagccgaccucuucccugcccaacccggccucaccucggccgucaucgaagcgcucccccgaaacaugguccuuaccugccaaggcagcgaugacaucaaaaagcuccucgacagccaaggccgcaaagacaucaaacucaucgacaucgcccucucaaaagcagacuccaggcgauucgaaaacgcagucugggaccaaugcaaagaucuuugccacaugcacacgggcgucgucgucgaaaagaagaaacguggcggcaaagaagaaauuaccccacacugcgcccucauggacugcaucauguacgacgccgccgucucaggaggccucaacaucccaguccuacgcgcaguacucccaagagacaugguauuccgcaccuccucaccaaaaguaguccucuaaggacuaguaauaaggaaacuguaugaaugucugugggcaggaagugaagagauccuucuguaaagguuuuuggaauuaugucugcugaauaauaaacuuuuuugaaauaauaaaucugguagaaaaaugagaucuaaaaaaaaaaaaaaaaaaaaaaaaaaaaaaaaaaaaaaaaaaaaaaaaaaaaaaaaaaaaaaaaugcaucccccccccccccccccccccccccccccccaaaggcucuuuucagagccaccagaauu

SEQ ID NO: 10601 - RNA, 2050 nt, Artificial Sequence
  mRNA product Design b-4 comprising derived and/or modified sequence from LASV(Lassa virus/H.sapiens-wt/NGA/2018/ISTH_0959;Clade II)__AVV65100__NP (opt11)
gggagagucccgcagucggcguccagcggcucugcuuguucgugugugugucguugcaggccuuauucaagcuuaccaugucagccucaaaagaaguaaaauccuuccucuggacacaaucgcuucgccgcgaauuauccggguauuguucaaacauaaaacuacagguagucaaagacgcacaagcacuccuccacggccucgacuucuccgaagucuccaauguacaacgacucaugcgcaaacaaaaacgugacgacuccgaccucaaacgacuccgagaccucaaccaagcagucaacaaccuaguagaacucaagucaacccaacaaaaauccauccuacgaguaggaacccuaaccagcgacgaccuccuaacacucgcagccgaccucgaaaaacucaaaagcaaagugauacgcaccgaacgaccccucagcagcgguguauacauggguaaucucucaacccagcaacucgagcaacgccgcgcccuacuaaaccugauaggaaugguaggcggggcccaagggacccaaccaggacgcgacggcguaguccguguaugggacgucaaaaaccccgaccuccucaauaaccaauucggcaccaugccaagccuaacccucgcgugccuaacaaagcagggccaagucgaccuaaacgacguaguacucgcccuaaccgaccucggccucauauacaccgccaaauaccccaacagcucagaccuugacagacuaagccagucacaccccauacucaacaugguagacaccaagaaaagcagucucaacauaucaggcuucaacuucucgcuaggagcagccguuaaagcaggagccugcaugcucgacggcggcaacaugcuagaaaccaucaaggugacaccccaaaccauggacggcauccucaaaagcauccuaaaggucaagaaaucccuaggcauguucguuagcgacaccccaggcgagcgcaacccauacgaaaacauccucuacaaaaucugccucagcggagacggcuggcccuacauagcaucaagaaccuccauaguugggcgugccugggagaacaccacuguagaccucgaaagcgauggcaaaccacacaaagucggcaccgcaggcucuaacaaaucacuacaauccgcgggcuucccaacaggccugaccuacucccaacucaugacacucaaagacuccaugaugcagcucgaccccuccgccaagacauggaucgauauagaaggacgaccagaagacccagucgaaauagcacucuaccagccaaugucagggugcuacauccacuucuuccgcgaaccaaccgaucuaaaacaguuuaaacaagacgccaaauacagccacggcaucgacgucgccgaccucuuccccgcgcaacccgggcuaacguccgccgucauagaagcccucccgcgcaacaugguacucacaugccaaggaucggacgacauaaaacgacuccucgacagccaaggcagaaaagacaucaaacucaucgacaucgcccugagcaagacggacucccgacgcuucgaaaacgcgguaugggaccaaugcaaggaccucugccacaugcacacaggugucgucgucgaaaagaagaaacgaggagguaaagaagaaauaacaccccacugcgcccuaauggacugcaucauguacgacgcagcagucagcggaggccucaacauccccguucuccgggccguccuaccacgcgacaugguauuucgaacauccagccccaaaguaguccuguagggacuaguaauaaggaaacuguaugaaugucugugggcaggaagugaagagauccuucuguaaagguuuuuggaauuaugucugcugaauaauaaacuuuuuugaaauaauaaaucugguagaaaaaugagaucuaaaaaaaaaaaaaaaaaaaaaaaaaaaaaaaaaaaaaaaaaaaaaaaaaaaaaaaaaaaaaaaaugcaucccccccccccccccccccccccccccccccaaaggcucuuuucagagccaccagaauu

SEQ ID NO: 10602 - RNA, 2050 nt, Artificial Sequence
  mRNA product Design b-4 comprising derived and/or modified sequence from LASV(LASV003-NIG-2008;Clade II)__AIT17581__NP (opt11)
gggagagucccgcagucggcguccagcggcucugcuuguucgugugugugucguugcaggccuuauucaagcuuaccaugucagccuccaaagaaguaaaauccuuccucuggacccaaucccugcgcagagaacugucaggauacugcuccucaaucaaacuacaagucgucaaagacgcccaagcacuacuacacggacucgacuucagcgaagucucaaacguccaacgacuaaugcgcaaacaaaaacgagacgauucugaccuuaaacgccuccgcgaucucaaccaggccgucaacaaccucgucgaacuaaaauccacccaacaaaaauccguccugcgagucggaacccucaccuccgacgaucugcucacccucgccgccgaucucgaaaaacuaaaauccaaagucauccgaaccgaaagaccacucucauccggcgucuacauggguaaccucuccgcacaacaacucgaacaacgccgaacccuccuaaauaugaucggcauggucgguggggcucagggcacccaacccggccgugacggcgucgucagaguaugggaugucaaaaaccccgaccuucuaaacaaccaauucggaacgaugcccucucucacacuagccugccuaacaaaacaaggccaaguagaccucaacgacgucguacucgcccucacagaucuagggcucauauacacagcaaaauaccccaacuccagcgaccucgacagacucagccaaucacaccccauccucuccaugguggacacgaagaaaagcagccugaacaucuccggcuacaacuucucccuaggcgcagcagucaaagcuggugcaugcaugcucgacggaggcaacauguuagaaaccaucaaagucacaccccaaaccauggacggcauccucaaauccauccucaaaguaaagaaaucccucggcauguucgucucagacacucccggcgaacgcaaccccuacgaaaacauacuauacaaaauaugccucuccggcgacggauggcccuacaucgccucgcguaccuccauagucggccgagccugggaaaacaccaccgucgaccuugaauccgacgguaaaccccaaaaagucggcacagccgguaguaacaaaucacuccaauccgccggcuuccccaccggccucaccuacucacagcucaugacacuaaaagacagcaugaugcaacucgaccccucagccaaaaccuggauagacauagagggccgaccagaagaccccgucgaaauagcccucuaucaaccgaugagcggaugcuacauccacuucuuccgggaaccaaccgacuuaaaacaguuuaaacaagacgccaaauacagccacggaaucgauguuacugaccucuucccagcccaaccgggccuaaccuccgcugucaucgaagcacuaccccgaaacaugguccuaaccugccaaggcuccgacgacaucaagagauuacuagacucccagggccgucgcgacaucaaacucaucgacaucgcccuguccaaagccgacucccgccgcuucgaaaacgcagucugggaccagugcaaagaccuaugucacaugcacaccggcgucguagucgaaaagaagaaacgcggaggcaaagaagaaaucacgccccacugcgcccuuauggacugcaucauguacgacgcagccgucucaggcggccucaacauacccguccuacgugccguacucccccgugacaugguauuccgcaccucgucacccaaaguaguacuuuaaggacuaguaauaaggaaacuguaugaaugucugugggcaggaagugaagagauccuucuguaaagguuuuuggaauuaugucugcugaauaauaaacuuuuuugaaauaauaaaucugguagaaaaaugagaucuaaaaaaaaaaaaaaaaaaaaaaaaaaaaaaaaaaaaaaaaaaaaaaaaaaaaaaaaaaaaaaaaugcaucccccccccccccccccccccccccccccccaaaggcucuuuucagagccaccagaauu

SEQ ID NO: 10603 - RNA, 2050 nt, Artificial Sequence
  mRNA product Design b-4 comprising derived and/or modified sequence from LASV(LASV035-NIG-2009;Clade II)__AIT17589__NP (opt11)
gggagagucccgcagucggcguccagcggcucugcuuguucgugugugugucguugcaggccuuauucaagcuuaccaugagcgcaucaaaagagguuaagagcuuccucuggacccagucacuccgacgugaacucuccggauacuguuccuccaucaaacuccaaguagucaaagacgcacaagcccuucuccacggccucgacuucucagagguaagcaacguccaacgccuuaugcgcaaacagaaacgagacgacucagaccucaaacgacuacgcgaccuaaaccaagccgucaacaaccucguggaacucaaaucaacccaacaaaaaucuauccuaagagucggcacccucaccagcgacgaccuccucacacucgcagcagaccuagaaaaauuaaaaucuaaagucauccgaacagaaagaccccucucaucagguguauacauggguaaccuguccgcgcaacaacucgaacaacgccgcgcccuacucaacaugaucggcauggugggcggcgcacaaggaacacaacccggccgcgacggcguaguacgagucugggacguuaagaaccccgaccuccucaacaaucaauucggcaccaugcccagccucacccucgccugcuuaacaaaacaaggacaaguagaccuaaacgacgcgguccuagcccucacagaccuaggacucauuuacacagcaaaauacccaaacuccucugaucuagaccgacuuucacaaucacacccaauccuaaacauggucgacaccaaaaagagcucccucaacauaucgggcuacaacuucagccugggcgcggcagucaaagcaggcgcaugcaugcucgacggcggcaacaugcucgaaaccaucaaagucacuccccaaaccauggacggcauccucaaaucgauacuaaaagucaaacggagccucggcauguucguauccgacacuccaggcgaacgcaauccauacgaaaacauacuuuacaaaaucugccucuccggagacggauggcccuacaucgccuccagaaccucaauagucggccgagccugggaaaacaccaccguagaccuagaaagcgacgggaagccccaaaaggucgguacaacaggcuccaacaaaucacuccaauccgcuggcuuccccaccggccugaccuacucacaacuaaugacccucaaagacucaaugaugcaacuagacccauccgcaaaaaccuggauagacauagaaggccgccccgaagaucccgucgaaauagcccuguaccaaccaauguccggaugcuacauucacuucuuccgcgagccuaccgaccucaaacaauucaaacaagacgcgaaauacucccauggaaucgacguagccgaccucuucccagcacagccuggucucacaucagccgucaucgaggcucuaccccgcaacaugguccuaaccugccaaggcucagacgacaucaagaaacuccucgacagccaaggacgccgcgacaucaaacuaaucgacauugcccuauccaaagcugacagccgaaaauucgagaacgcagucugggaccaaugcaaagaucuaugccacaugcacaccggagucgucgucgaaaagaagaaacgcggaggcaaagaagaaaucacaccccacugcgcccuaauggacugcaucauguacgacgccgcugucagcggcggccuaaacaucccuguccuccgagccguacucccccgcgacauggucuuccggaccagcagccccaaaguaguccuuuaaggacuaguaauaaggaaacuguaugaaugucugugggcaggaagugaagagauccuucuguaaagguuuuuggaauuaugucugcugaauaauaaacuuuuuugaaauaauaaaucugguagaaaaaugagaucuaaaaaaaaaaaaaaaaaaaaaaaaaaaaaaaaaaaaaaaaaaaaaaaaaaaaaaaaaaaaaaaaugcaucccccccccccccccccccccccccccccccaaaggcucuuuucagagccaccagaauu

SEQ ID NO: 10604 - RNA, 2050 nt, Artificial Sequence
  mRNA product Design b-4 comprising derived and/or modified sequence from LASV(LASV1000-NIG-2009;Clade II)__AIT17783__NP (opt11)
gggagagucccgcagucggcguccagcggcucugcuuguucgugugugugucguugcaggccuuauucaagcuuaccaugagcgccucaaaagaaguaaaauccuuccucuggacgcaaucgcucagacgagaacucucaggcuacugcagcaacauaaaacuccaaguagucaaagacgcacaagcccuccuacacggacucgacuucuccgaaguauccaacguacagcgacucaugcgcaaacaaaaacgagacgacagcgaccucaaacgccuccgcgaccuuaaccaagccgucaacaaccuagucgagcucaaaagcacccaacagaaaagcauacuccgcgucggaacccuaacaucagacgaccuccucacacuagcagcagaccucgagaagcuaaaaucaaaagugauccgcaccgaacgcccacuguccuccggaguauacaugggaaaccucuccacccaacaacuagaacaaaggcgcgcccuccucaacaugaucggcauggucggcggcgcccaaggcacccaacccggacgcgacggaguuguacgaguaugggacgucaaaaacccagaccuccucaacaaccaauucggcaccaugccaucacuaacauuggccugccuuaccaaacaaggucaaguagaccuaaacgacguggugcucgcacucaccgaccucggccucaucuacacggcaaaguaccccaacuccagcgaccucgaccgacuaucacaaucccaccccauccucaacauggucgacaccaagaaaucaucgcucaacaucucaggcuacaacuucucacuaggcgccgccgucaaagccggcgccugcaugcucgacggcggaaacaugcucgaaacuauaaaaguaacaccccaaaccauggacggcauccucaaaucaauacucaaaguuaagaaaagccuaggcauguucgucuccgacaccccaggagaacgcaaccccuacgaaaacauacuauacaaaaucugucuaagcggcgacggcuggcccuacaucgccucacgaaccuccaucgucggacgagcaugggagaacaccaccgucgaccuagaaucagacggaaaaccccaaaaagucggcaccgccggcuccaacaaaucacuucagucagcaggauuucccacaggucuaaccuacucccaacucaugacacuaaaagacucaaugaugcaacucgaccccucagccaaaacuuggaucgacaucgaaggccgccccgaagaucccguagaaaucgcgcucuaccaacccgucagcggcugcuauauccacuucuuccgugaaccuacagaccucaaacaauucaaacaagaugcgaaguacagccacggcauagacguagccgaccuauuccccgcccaaccaggacugacuuccgccgugauugaagcccucccccgcaacaugguacucacaugccaaggcuccgacgacaucaaaaggcuacucgacucacaaggccgacgggacaucaaacugaucgacaucgcacucucaaaagcagacucccgaagauucgaaaacgccgucugggaccaaugcaaagaccucugccacaugcacacaggcgucguagucgaaaagaagaaacgaggcggaaaagaagagauaaccccacacugcgcucugauggacugcaucauguacgacgccgcaguauccggcggccucaacauaccaguccucagagcaguccuacccagagauauggucuuccgcaccucaagccccaaaguaguccucuaaggacuaguaauaaggaaacuguaugaaugucugugggcaggaagugaagagauccuucuguaaagguuuuuggaauuaugucugcugaauaauaaacuuuuuugaaauaauaaaucugguagaaaaaugagaucuaaaaaaaaaaaaaaaaaaaaaaaaaaaaaaaaaaaaaaaaaaaaaaaaaaaaaaaaaaaaaaaaugcaucccccccccccccccccccccccccccccccaaaggcucuuuucagagccaccagaauu

SEQ ID NO: 10605 - RNA, 2050 nt, Artificial Sequence
  mRNA product Design b-4 comprising derived and/or modified sequence from LASV(LASV221-NIG-2010;Clade II)__AIT17625__NP (opt11)
gggagagucccgcagucggcguccagcggcucugcuuguucgugugugugucguugcaggccuuauucaagcuuaccauguccgcuuccaaagaaguaaaauccuuccucuggacccaaucucuacgccgagaacucucaggcuacugcucaucaaucaaacuccaagucgucaaagacgcacaagcccuacugcacggacucgacuucuccgaaguaucaaacguccagcggcucaugcggaaacagcgccgcgacgacuccgaccuuaagcgccuacgagaccugaaccaagcaguaaacaaccucguggaacuaaaauccacccaacaaaaaucaauccuccgagugggcacgcuaacuagcgacgaucuccuaacucuagccgccgaccuagaaaaacuaaaauccaaagucauacgcacagaacgcccgcucuccagcggcgucuacaugggaaaccuauccacacaacaacuagaacaacguagagcccuccuaaacaugauaggcauggucggcggagcccaaggaacacaacccggccgcgauggcgucguccgagucugggacgugaaaaacccagaccuacucaacaaccaauucggcaccaugcccucccucacacuagcgugccugacaaagcaaggacaaguagaccucaacgacgccguacucgcccuuaccgaccucggauuaaucuacacagccaaauacccaaacagcagcgacuuggacagacucucccagucccaccccauacucaacaugguggacaccaagaaauccucccucaacaucagcggguacaauuucucacucggggccgcagucaaagccggcgcaugcaugcuagacggcggcaacaugcucgaaaccaucaaagucaccccacaaacagucgacggcauccucaaaucaauccucaaggugaaacgcagucucggcauguucguuucagacacacccggcgaacgcaauccauacgaaaacauccucuacaaaaucugccucagcggugacggguggccauauaucgccucccgaaccuccaucgucggccgcgcaugggaaaacaccaccguagaccuagagagcgacggaaaaccccagaaggucggcacagcuggcuccaacaaaucccuccaauccgccggcuuccccaccggccucaccuacucacaacugaugacccuaaaagacucuaugaugcaacucgaccccuccgcuaaaaccuggauugacauagagggccgcccugaagaccccgucgaaaucgcccuauaccaacccaugucagggugcuacauccacuucuucagagaacccaccgaccucaagcaauucaaacaggacgcaaaauacucccacggcaucgacguagccgaccucuuccccgcacaacccggauuaaccagcgcaguaaucgaggcacucccacguaacaugguacugaccugucaaggcuccgacgacaucaaacgccugcuagacucccaaggucgaagagauauuaaacucaucgacaucgcccucagcaaagcggacucacgcaaauucgaaaacgcagucugggaucaaugcaaagaccuaugccacaugcacaccggcgucgucgucgagaaaaagaaacgcggcggaaaagaagaaaucaccccacacugcgcccuaauggauugcaucauguacgacgcagccgucucaggcggacucaacauccccguacuacgcgccguacuaccucgcgacauggucuuccggaccucaagccccaagguuguccuauaaggacuaguaauaaggaaacuguaugaaugucugugggcaggaagugaagagauccuucuguaaagguuuuuggaauuaugucugcugaauaauaaacuuuuuugaaauaauaaaucugguagaaaaaugagaucuaaaaaaaaaaaaaaaaaaaaaaaaaaaaaaaaaaaaaaaaaaaaaaaaaaaaaaaaaaaaaaaaugcaucccccccccccccccccccccccccccccccaaaggcucuuuucagagccaccagaauu

SEQ ID NO: 10606 - RNA, 2050 nt, Artificial Sequence
  mRNA product Design b-4 comprising derived and/or modified sequence from LASV(LASV237-NIG-2010;Clade II)__AIT17639__NP (opt11)
gggagagucccgcagucggcguccagcggcucugcuuguucgugugugugucguugcaggccuuauucaagcuuaccaugucggcaagcaaagaagucaaauccuuccuauggacccaaucacuccgccgagagcucucaggcuauugcucaaacaucaaacuucaaguagugaaagacgcacaagcacuccuccacggccucgacuuuucagaagucagcaacguacaacgccucaugcguaaacaaaaacgagacgacuccgaccucaaacgccuacgcgaccuaaaccaagcagucaacaaccucgucgagcucaaauccacccagcaaaaaucaauacuacgugucgggacccuaacuuccgacgaccuccuaacacuugccgccgaccucgaaaaacugaaaagcaaaguaauccguaccgaacgcccccucucaaguggcgucuacaugggaaaccuuagcacccaacaacuagaacaacgccgugcccuccucaacaugaucgguauggucggaggcgcccaaggcacacaacccggccgcgacggcguagucagaguaugggacguuaaaaaccccgaccuccucaauaaccaauuuggcacuaugcccucccuaacacucgcaugccucaccaaacaaggccaaguagaccuaaacgacgcaguccucgcccuaacagaccucggacucaucuacaccgccaaauacccuaacucauccgaccucgaccgccuaucacagagccaccccauccucaacauggucgacaucaagaaauccagccuaaacaucucagguuacaacuucucacuaggggccgccgucaaagcaggcgcaugcaugcucgacggcggcaacaugcuagaaaccaucaaagucacaccccaaaccauggacggaauccucaagagcauccucaaagucaaacgaucacuuggaauguucguauccgacacccccggcgaacgcaaccccuacgagaacauacuauacaaaaucugccuauccggcgacggcuggcccuacauagcuucacgcaccagcauaguaggccgcgccugggaaaauaccacaguagaccucgaaucagacggaaaaccccaaaaagugggaucagccgguucaaacaaaagccuccaauccgcaggauucccaaccggccuuacguacucccaacuaaugacccucaaagacucaaugaugcagcucgacccauccgcaaaaacauggauugacaucgaaggcagacccgaagacccagucgaaauugcccuuuaucaacccauguccggaugcuacauccacuucuuccgcgaaccaacagaccucaaacaauucaaacaagacgcuaaauacagccacgggauagacgucgccgaucucuucccagcccaacccggucuaaccagcgccguaaucgaagcccugccccgcaacaugguacuuacaugccagggcagcgacgacauaaaacgccuccucgacucccaaggccgacgcgacaucaaacuaaucgacaucgcacucuccaaagcugacucccgccgcuucgaaaacgcagucugggaucaaugcaaagaccuaugccacaugcacaccggaguagucgucgaaaagaagaaaagaggcggcaaagaagaaaucacaccccacugcgcacuaauggacugcauaauguacgacgcagcagugucaggaggacugaacauccccguacugcgagccguacucccccgagacauggucuuccgaaccagcucacccaaagucguccuuuaaggacuaguaauaaggaaacuguaugaaugucugugggcaggaagugaagagauccuucuguaaagguuuuuggaauuaugucugcugaauaauaaacuuuuuugaaauaauaaaucugguagaaaaaugagaucuaaaaaaaaaaaaaaaaaaaaaaaaaaaaaaaaaaaaaaaaaaaaaaaaaaaaaaaaaaaaaaaaugcaucccccccccccccccccccccccccccccccaaaggcucuuuucagagccaccagaauu

SEQ ID NO: 10607 - RNA, 2050 nt, Artificial Sequence
  mRNA product Design b-4 comprising derived and/or modified sequence from LASV(LASV253-NIG-2011;Clade II)__AIT17671__NP (opt11)
gggagagucccgcagucggcguccagcggcucugcuuguucgugugugugucguugcaggccuuauucaagcuuaccauguccgccuccaaagaagucaaauccuuccuauggacccaaucucugcgacgcgaacucucagguuacugcucaagcauaaaacuccaagucgucaaagacgcacaagcccuccuacacggacuagacuucuccgaaguaucaaacguccaacgccuaaugcgcaaacaaaaacgcgacgacagcgaccucaaacgccuccgagaucucaaccaggcugugaacaaccucguagagcucaaaucaacccaacaaaaaucuguccugcgcgucggaacccuaacgucagaugaucuccucacccuagccgccgaccuagaaaaacucaaauccaaagucauacgcacggaacgaccccucucaucaggcgucuacauggggaaccuauccacccagcaacucgagcaaagacgagcacuccucaacaugaucggcauggucggaggcgcccaaggaacccagcccggacgcgacggcguaguccgagucugggacgucaagaaccccgaccuacugaacaaccaauucggcacaaugccaagccucacccuagcaugccucaccaaacagggacaaguagaccucaacgacgugguccuagcccuaaccgaccucggccuaauauacaccgcaaaguaccccaacuccagcgaccucgaccgacuaucccaaagccauccaauacucaacauggucgacacaaagaaaagcucacuaaacaucagcggcuacaacuucagccucggugccgccgucaaagcaggcgccugcaugcucgacggcggaaacaugcucgaaaccauaaaagucacaccccaaaccauggacggcauccuaaaaagcauacucaaaguaaagaaaucacuaggcauguucgucuccgacacacccggcgaacgcaaccccuacgaaaacauacuauacaaaauaugccuaucgggcgauggcuggccauacauagcuucacgaaccucaauagucggcagagccugggaaaacaccaccgucgaucucgaaucggacggaaaaccacaaaaaguaggcaccgccggaagcaacaaaucccuacaaucagcaggcuucccaaccggccucaccuacagccaacucaugaccuuaaaagauuccaugaugcaacuggacccaagcgccaagacauggaucgacauugaaggacgacccgaagaccccgucgaaauagcccucuaccagcccaugagcggcugcuacauccacuucuuccgagaacccaccgaccuaaaacaauucaaacaagacgccaaguacucccacggcaucgacgucacagaccucuucccagcccaacccggccucaccagcgccgucaucgaagcgcuaccaagaaacaugguccuaacgugucaaggcucggacgacaucaaacgacuccucgacucgcaaggucgcagagacaucaaacuaaucgacaucgcacucaguaaagcugacucacgccgauucgaaaacgcagucugggaccagugcaaagaccucugccacaugcacacaggcgucguaguagaaaagaaaaagcgaggaggcaaagaagaaaucaccccacacugcgcacucauggacugcaucauguacgacgccgcggucucgggcggccuaaacauacccguacuccgcgcaguccuaccacgcgacauggucuucagaaccagcagcccaaaagucgugcucuaaggacuaguaauaaggaaacuguaugaaugucugugggcaggaagugaagagauccuucuguaaagguuuuuggaauuaugucugcugaauaauaaacuuuuuugaaauaauaaaucugguagaaaaaugagaucuaaaaaaaaaaaaaaaaaaaaaaaaaaaaaaaaaaaaaaaaaaaaaaaaaaaaaaaaaaaaaaaaugcaucccccccccccccccccccccccccccccccaaaggcucuuuucagagccaccagaauu

SEQ ID NO: 10608 - RNA, 2050 nt, Artificial Sequence
  mRNA product Design b-4 comprising derived and/or modified sequence from LASV(LASV254-NIG-2011;Clade II)__AIT17675__NP (opt11)
gggagagucccgcagucggcguccagcggcucugcuuguucgugugugugucguugcaggccuuauucaagcuuaccauguccgccuccaaagaagucaaaucauuccucuggacccaaucccuacgucgagaacucucaggauacugcuccuccaucaaacuacaagucguaaaagacgcccaagcacuccuccacggacuagacuucagcgaaguaucgaacguacaacgccucaugcgaaaacagaaaagggacgacuccgaccucaaacgccuacgcgaccucaaccaagcagucaacaaccuaguagaacucaaguccacucaacagaaaucaguauuacgugugggaacccuaacuagcgacgacuuacucacacucgccgccgaccucgagaaacucaaaucaaaaguaauccgaacagaacgcccccucucuagcggaguauacaugggcaaccugagcacccaacaacuagaacagcgacgagcccuccucaacaugaucggaaugguuggcggcgcacaaggcacgcaacccggacgcgacggcguaguacgaguaugggacgucaaaaaccccgaccuccuaaacaaccaauucggcacaaugcccucacucacacucgccugccuaaccaaacaaggccaagucgaccucaacgaugcaguccucgcccucaccgaccucggccuaauauacaccgcaaaauacccaaacaguuccgaccucgaccgacuaagccaaucccacccaauacucaacaugguagauaccaaaaaguccucccucaauaucuccggcuacaacuucucccucggcgccgcgguaaaagccggcgcgugcaugcucgacgggggaaacaugcucgaaaccaucaaagucacaccccaaaccauggacggaauccugaaaagcauccucaaaguuaagaaaucccuaggaauguucgucuccgacacccccggcgagcgcaacccauacgagaacauccuuuacaaaauaugccucuccggagacggcuggccguacaucgccucccgaaccucaaucguaggcagagccugggaaaacaccauagucgaccucgaaucagacggcaaaccacagaaagucggcaccgcaggaucaaacaaaucccuacaaucagcaggauuccccacaggucuuaccuacucccagcuaaugacacucaaagacuccaugaugcaacucgacccaucagcaaaaaccuggaucgacauagaaggucgcccagaagaccccgucgaaaucgcccuauaccaaccgauguccggcugcuacauccacuucuuccgggaacccaccgaccucaaacaauucaagcaagacgccaaauacucacacggcaucgacguagccgaccuauucccagcucaacccggccucaccuccgcagucaucgaagcccucccccgaaacaugguccucacaugccaaggcagcgacgacaucaaacgccuucucgacucacaaggccgacgugacaucaaacucaucgacaucgcccucuccaaagcagauucccgacgauucgaaaacgcagucugggaccaaugcaaagacuuaugucauaugcacaccggagucgucgucgagaaaaagaaacgcggaggcaaagaagaaaucacaccgcacugcgcccugauggacugcauaauguacgacgcagcaguaagcggcggccucaauauacccguccuccgcgcaguacucccucgagacaugguauuccgaaccuccagcccaaaaguaguccucuaaggacuaguaauaaggaaacuguaugaaugucugugggcaggaagugaagagauccuucuguaaagguuuuuggaauuaugucugcugaauaauaaacuuuuuugaaauaauaaaucugguagaaaaaugagaucuaaaaaaaaaaaaaaaaaaaaaaaaaaaaaaaaaaaaaaaaaaaaaaaaaaaaaaaaaaaaaaaaugcaucccccccccccccccccccccccccccccccaaaggcucuuuucagagccaccagaauu

SEQ ID NO: 10609 - RNA, 2050 nt, Artificial Sequence
  mRNA product Design b-4 comprising derived and/or modified sequence from LASV(Nig08-04;Clade II)__ADU56611__NP (opt11)
gggagagucccgcagucggcguccagcggcucugcuuguucgugugugugucguugcaggccuuauucaagcuuaccaugagcgcgucgaaagaagucaagagcuuccucuggacccaaucucugcgaagagaacucucuggcuacugcuccaacauaaaacuccaagucgucaaggacgcccaagcccuauuacacggccuagacuucuccgaaguaucaaacgugcaaagacucaugcgcaaacagaaacgagacgacggcgaccucaagagacuacgagaccuaaaccaagccguaaacaaccucgucgaacuaaaaagcacccagcaaaaaucaguccuacgggucggcacgcugaccagcgacgaccugcuaacacucgccgcagaccuagaaaaacuaaaaucaaaagucauacgcaccgaacgcccacuauccagcggagucuacauggggaaccucucaacccagcaauuagaacaaagaaaagcccugcuaucaaugauaggcauggucggcggcgcccaaggaacgcaacccggccgcgacggcgucguccgagucugggacgucaaaaacccagaccuacucaacaaccaauucggcaccaugccgucacuaacacuagcaugccucaccaaacagggccaagucgaccucaacgaugcaguccuagcccuaaccgaccucggccuaaucuacaccgcaaaauacccaaacuccucagaccuagaccgacuaucccaaucacacccaauccucaacauggucgacacaaagaaaucaucccucaacaucuccggcuacaacuucagccucggcgccgccgucaaagcaggcgccugcaugcucgacggcggcaacaugcucgaaaccaucaaaguaaccccacaaacaauggacgggauauuaaaauccauacucaaagucaagagaucccucggcauguucgucucggacaccccaggagaacgcaacccauacgaaaacauacucuacaagauaugccuauccggcgacggcuggccauacauagccuccagaaccuccauagucggccgggcgugggaaaacaccaccguagaccuagaaagcgacggcaaaccccagaaggucggcacugcgggcucaaacaaaucccuacaaucagccggauucccgacaggacucacauacucacaacugaugacccucaaagauucaaugaugcaacucgacccaagcgccaaaacguggaucgauaucgaagggagaccagaagacccggucgaaaucgcccuauaccaaccaaugagcggcugcuacauacacuucuucagggaacccacagaccuaaaacaauucaagcaagacgcaaaguacucacacggcauagaugucacagaccuauucagcgcccaaccaggacuuaccuccgcaguaaucgaagcacuacccaggaacaugguccugaccugccaaggaucagacgacauaaagaaacugcuagacagucagggacgacgagacaucaaacuaaucgacaucagccucaacaaagccgauagccgacguuucgaaaacgccgucugggaccaaugcaaagaccucugccacaugcacaccggcguagucguagaaaagaagaaacgcggcggaaaagaagaaauuacaccccacugcgcccucauggacugcaucauguucgacgcggcaguaagcggaggccucaacauaccgauccuccgagcaguccuccccagagacaugguauuccgcaccuccagcccaaaagucguccucuaaggacuaguaauaaggaaacuguaugaaugucugugggcaggaagugaagagauccuucuguaaagguuuuuggaauuaugucugcugaauaauaaacuuuuuugaaauaauaaaucugguagaaaaaugagaucuaaaaaaaaaaaaaaaaaaaaaaaaaaaaaaaaaaaaaaaaaaaaaaaaaaaaaaaaaaaaaaaaugcaucccccccccccccccccccccccccccccccaaaggcucuuuucagagccaccagaauu

SEQ ID NO: 10610 - RNA, 2053 nt, Artificial Sequence
  mRNA product Design b-4 comprising derived and/or modified sequence from LASV(GA391;Clade III)__AAA46284__NP (opt11)
gggagagucccgcagucggcguccagcggcucugcuuguucgugugugugucguugcaggccuuauucaagcuuaccauguccgcgaguaaagaaguacguucaugccuauggacgcaaucccuccggcgcgaacuuuccggcuacugcucaaacauaaaacugcaagugguaaaggacgcccaagcacuacuucacggacuagacuucucagaagugucaaacguccagagacuaaugcgaaaacagaaacgggacgauggagaccuaaaacgacugcgcgaccuaaaccaagcggucaacaaccuagucgagcucaaaagcacacaacagaaaucgguccuacgcguuggaacgcucuccagcgacgaccugcucauccucgcggccgaccucgaaaaacucaaaucaaaaguaacccgaaccgaacgcccgcuuucgagcggaguauauaugggaaaccuaaguucccaacagcucgaccaacgccgcgcacuccugaacaugauaggcaugacaggagugagcggcggagggaaaggcgcaucaaacggcaucgugcgcgucugggacgugaaaaacgccgaacuccuuaacaaccaguucgggaccaugcccucacuaacacucgcaugccuaaccaagcaaggacaaguagaccuaaacgacgccguacaagcacuaaccgaccuaggccuuaucuacacagcgaaauaccccaauagcucggaccuggacagacucucacaaucgcaccccauccugaacaugaucgacaccaagaaaucgagccuaaacauuuccggcuacaacuucucucucggggccgccgucaaagcaggggcaugcaugcuagacggaggcaacaugcucgaaacgaucaaagucucaccccaaaccauggacggcauacugaaauccauccuaaaagucaagaaaagccuaggaauguucgucagcgacaccccaggcgaacgcaaccccuacgaaaauauccuguacaaaaucugccucucgggagacggcuggagcuauaucgcgagcagaacaucaaucguaggccgcgcgugggagaacaccguaguugaccucgaacaagacaacaaaccacagaaaauaggcaacggcggauccaauaaaucacuccagagcgcaggcuucgcagcuggccuaaucuacagccaacucaugacacugaaagacuucaaaugcuucaaccucaucccaaacgccaaaacauggauggauaucgaagggcgccccgaagaccccguagaaauagcacucuaccaacccucgagcggcugcuacguucacuucuuccgcgagcccacagauuuaaaacaguucaaacaggacgccaaauacucacacggucgcgacgucacagaccucuucgcagcccaaccaggccugacaagcgcuguaauagaagcccucccacgaaacauggucauaaccugccaaggaucagaagauaucagaaaacuacucgaaagccaaggccgacgggacaucaaacucauagacauaacccuaagcaaagcagauagcagaaaauucgaaaacgccguaugggaccaauucaaagaccucugccacaugcacacaggcguagucguggaaaagaagaaacgcggaggcaaagaagaaaucacaccucacugcgcacucauggacugcauaauguuugaugcugcggucuccggcggacucgaugcaaaaguacuccgaguuguccuacccagagacaugguauuccgcaccucaacacccaaaguaguacucuaaggacuaguaauaaggaaacuguaugaaugucugugggcaggaagugaagagauccuucuguaaagguuuuuggaauuaugucugcugaauaauaaacuuuuuugaaauaauaaaucugguagaaaaaugagaucuaaaaaaaaaaaaaaaaaaaaaaaaaaaaaaaaaaaaaaaaaaaaaaaaaaaaaaaaaaaaaaaaugcaucccccccccccccccccccccccccccccccaaaggcucuuuucagagccaccagaauu

SEQ ID NO: 10611 - RNA, 2050 nt, Artificial Sequence
  mRNA product Design b-4 comprising derived and/or modified sequence from LASV(Nig08-A19;Clade III)__ADU56619__NP (opt11)
gggagagucccgcagucggcguccagcggcucugcuuguucgugugugugucguugcaggccuuauucaagcuuaccauguccgccucaaaagaggucaagagcuuccuauggacccaaucacuucgccgcgaacuuagcggcuacugcuccaacaucaaacuacaagucgucaaagacgcgcaggcccuccuccacggacucgacuucucagaaguauccaacguacaacgccugaugcgcaaacaaaaacgagacgacggcgaccucaaacgacuacgcgaccucaaccaagcaguuaacaaccuagucgaacucaaaagcacccaacagaaaagcguacuacgugucggcacgcuaagcagcgacgaccuacucguguuagccgcugaccucgaaaaacuaaaaucaaaaguaguccggaccgaacgcccacugagcagcggcaucuacaugggcaaccucucaucacaacaacuagaccaacgcaaagcacuacucaacaugaucggcaugacaggaggcaacggcggacgaaacacgaccuccgacggaauuguacgggucugggacgucaaaaacgcagagcuccuaaacaaucaauucggcacaaugccaucccuuacacuagcuugccucaccaaacaaggccagguagaccuaaaugaugccguacaagcccuuacagaccucggacucauauacaccgcaaaauacccuaacucaucagaccucgaccgacuagcacaaucacacccaauccugaacaugauagauaccaaaaaguccucccuuaacaucuccggauauaacuuuucccucggagcagccgucaaagcuggcgccugcaugcuggacggcggcaacaugcucgaaacaaucaaaguaagcccacaaacaauggacggaauccucaaauccauacuaaaaguaaaacgcucccuaggcauguucauauccgacacacccggcgaacgaaaccccuaugaaaacauacuuuacaagaucugccucucaggcgacggauggcccuacaucgcaucccggacauccaucguaggacgagccugggaaaacaccguagucgaccuggaaagcgacaacaagccccagaaaacaggcaacggcggcagcaacaagucccuccaaagcgccggcuucgcagcaggccuaaccuacucccaacucaugacacucaaagacagcaugcuccaacuagacccaaacgcaaaaaccuggauggauaucgaaggccggccagaagaccccguagaaauagcccuauaccaaccuagcucaggaugcuacauccauuucuuccgagaacccaccgaccuuaagcaauucaaacaggacgccaaauacagccacggcaucgacgucaccgaccucuucgccgcccaacccggccuaacaucagccgucauagaagcccuaccccgcaacauggucauaaccugccaaggauccgaagacauaagaaaacuccucgagucgcaaggccgccgagacaucaaacuaauagacaucucccuauccaaagucgacagccgcaaauucgaaaacgcagucugggaccaauuuaaagaccucugccacaugcauaccggcaucgucguagaaaagaagaaacgcggaggcaaagaagaaaucaccccacacugcgcucucauggacugcauaauguucgacgcggccguaucaggcggcgucgacgccaaaguccugagagccguccuucccagagacaugguauucagaaccuccacccccaaagucguccuauaaggacuaguaauaaggaaacuguaugaaugucugugggcaggaagugaagagauccuucuguaaagguuuuuggaauuaugucugcugaauaauaaacuuuuuugaaauaauaaaucugguagaaaaaugagaucuaaaaaaaaaaaaaaaaaaaaaaaaaaaaaaaaaaaaaaaaaaaaaaaaaaaaaaaaaaaaaaaaugcaucccccccccccccccccccccccccccccccaaaggcucuuuucagagccaccagaauu

SEQ ID NO: 10612 - RNA, 2050 nt, Artificial Sequence
  mRNA product Design b-4 comprising derived and/or modified sequence from LASV(G1180-SLE-2010;Clade IV)__AIT17169__NP (opt11)
gggagagucccgcagucggcguccagcggcucugcuuguucgugugugugucguugcaggccuuauucaagcuuaccaugucagccagcaaagagaucaaauccuuccucuggacccaaucccuccggcgcgaacucagcgguuacugcagcaacauaaaacuacaagucgucaaagacgcccaagcccuccuccacggccuagacuucuccgaagucuccaacguccagcgccuaaugcgcaaagaacgacgagacgacaacgaccucaaacgacugcgagaucuaaaccaagcaguuaacaaccucguagaacuaaaaucaacucaacaaaaaucaauccugagggucggcacccuaaccagcgacgaccuccuaauccuugccgcugaccucgagaaacucaaaagcaaagucauccgaacggaacgaccacuaagcgccggcgucuacaugggcaaccuaucaagccagcaacucgaccaaagacgcgcauuacucucgaugaucggaaugagcuccggcaaccaacgagcacaagccggccgagacggcgucguacgagucugggacgucaaaaacguugagcuacuaaacaaccaauucggaaccaugccaucacuaacccucgccugccucacaaaacaaggccaaguagaccucaacgacgccguccaagcccucaccgaccucggacuaauauacacagcaaaguaccccaacaccagcgaccuggaccgucuaacccagucacaccccauacucaacaugauagacaccaaaaaguccucacucaacauauccggauacaacuucucccucggcgccgccgucaaagccggagcaugcaugcuagacggcggcaauaugcucgaaacaaucaaagucucaccccaaaccauggacggcauacucaaaagcauacucaaagucaagaaagcccucggaauguuuaucucugacacacccggcgaacgcaaccccuacgaaaacauacuauacaaaauuugccugucaggagauggauggcccuacauagccagucgaaccuccaucaccggccgcgcaugggaaaacaccgucguugaccuagaauccgacggaaaaccccagaaagcaggcuccaauaacuccaacaaaagccuucaaagcgucggauucacagcgggccucaccuacucacaacuaaugacacuaaaagacgccaugcuccaacucgacccaaacgcuaaaaccuggauggacaucgaaggccgccccgaagacccaguagaaaucgcccucuaccagccuuccuccggcugcuacauccacuucuuccgagaacccaccgaccuaaaacaguucaaacaagacgccaaauacucccacggcaucgacgucacagaccuguucgccgcccaaccaggccucacgucugcaguaaucgacgcacugccccguaacaugguaauaaccugccaaggcucagacgacaucagaaaacuucuagaaucacaaggccgaaaagacaucaaacucaucgacaucgcccucuccaaaaccgacuccagaaaauacgaaaacgccguaugggaccaauacaaagacuuaugccacaugcacaccggaguagucgucgaaaagaagaaacgcggcggcaaagaagaaaucaccccacacugcgcacucauggacugcauuauguucgacgccgccgucucuggaggacuaaacaccucaguccucagagccguccucccuagagacaugguauuucgaaccagcacaccccgagucguccuauaaggacuaguaauaaggaaacuguaugaaugucugugggcaggaagugaagagauccuucuguaaagguuuuuggaauuaugucugcugaauaauaaacuuuuuugaaauaauaaaucugguagaaaaaugagaucuaaaaaaaaaaaaaaaaaaaaaaaaaaaaaaaaaaaaaaaaaaaaaaaaaaaaaaaaaaaaaaaaugcaucccccccccccccccccccccccccccccccaaaggcucuuuucagagccaccagaauu

SEQ ID NO: 10613 - RNA, 2050 nt, Artificial Sequence
  mRNA product Design b-4 comprising derived and/or modified sequence from LASV(G1442-SLE-2011;Clade IV)__AIT17181__NP (opt11)
gggagagucccgcagucggcguccagcggcucugcuuguucgugugugugucguugcaggccuuauucaagcuuaccauguccgccagcaaagaagucaaauccuuccuauggacccaaucacuccgccgcgaacuuagcggcuacugcucaaauauaaaacugcaagucgucaaagacgcucaagcccuccugcacgggcucgauuucucagagguauccaacguccaacggcuaaugcgcaagcaacgacgggacgacaaugaucucaaaagacuccgcgaccugaaccaagccgucaacaaccuugucgagcucaaauccacucaacagaaaaguguacuccgcgucgguacacucaccucggacgaccuucuaguacuagcagcugaccuagaaaaacuaaaauccaaagucauccgcaccgaacgcccccucagcgcaggcgucuauaugggcaaccucuccucccaacaacucgaccaaagacgagcacuccucaacaugaucgguaugagcggaggcauccaaggcacacgaaccggccgagacggcgucguccgaguaugggacgucaaaaacgccgaccuacucaacaaccaauucggaaccaugcccucccuaacacuagccugccucaccaagcaaggacaaguagaccucaaugacgucguccaagcccucacagaccucggccuaauauacaccgcaaaauaccccaacgccagcgaccucgacagacuaacccaaucccaccccauccuaaacaugaucgacacaaagaaaagcagccucaacaucuccggcuacaacuucucacuaggcgccgccgucaaagcaggagcaugcaugcuggauggcggcaacaugcucgaaacaaucaaagucucaccacaaacaauggacgguauccucaaauccauacuaaaagucaagaaaacucugggaauguucauauccgacacucccggagaacgcaaccccuaugaaaacauccuauacaaaaucugccugucaggagacggcuggcccuacaucgcuucccgaacaagcaucacaggacgcgccugggaaaacacaguuguagaccucgaaagcgacggcaaaccacaaaaagccggaucaaacaacucaaacaaaucccugcagagcgcgggcuucgccgccggucuaaccuauagccaacuaaugacccucaaagacgccaugcuccaacuggauccaaacgccaaaaccuggauggacauagagggccgccccgaagacccagucgagaucgcccuauaucaacccagcucaggcugcuacauccacuucuuccgcgaaccaacagaccucaaacaauucaaacaagacgccaaauacucucacggcauagacgucacagaucuauucgccgcacaaccaggacuuaccucagccguaauugaagcccucccccgcaacauggucauaaccugccaaggauccgacgacaucaagaaacuccuagaaucacaaggccggaaagauaucaaacuuaucgacauagcgcuaucaaaaacagacuccagaaaguacgaaaacgcagucugggaccaguacaaagaccucugccacaugcauaccggcgucgucgucgaaaagaagaaaagaggcggaaaagaggaaaucacgccccacugcgcccucauggacugcauaauguucgacgcagccgucagcggcggacucaacacccuaguccuccgcgccguacucccccgcgacaugguauuccguacauccacuccacgcguaguccuaugaggacuaguaauaaggaaacuguaugaaugucugugggcaggaagugaagagauccuucuguaaagguuuuuggaauuaugucugcugaauaauaaacuuuuuugaaauaauaaaucugguagaaaaaugagaucuaaaaaaaaaaaaaaaaaaaaaaaaaaaaaaaaaaaaaaaaaaaaaaaaaaaaaaaaaaaaaaaaugcaucccccccccccccccccccccccccccccccaaaggcucuuuucagagccaccagaauu

SEQ ID NO: 10614 - RNA, 2050 nt, Artificial Sequence
  mRNA product Design b-4 comprising derived and/or modified sequence from LASV(G3010-SLE-2013;Clade IV)__AIT17345__NP (opt11)
gggagagucccgcagucggcguccagcggcucugcuuguucgugugugugucguugcaggccuuauucaagcuuaccauguccgccucaaaagaaaucaaauccuuccucuggacacaaagccuccgccgcgaacucuccggauacugcucaaacaucaaacuucaaguagucaaagacgcccaggccuuacuacacggucuggacuucagugaaguuuccaacguccaacgccucaugcgaaaagaaagacgcgacgacaacgaccuaaaacgccuccgagaccucaaccaagcugucaacaaccuggucgaacuaaaauccacacaacaaaaaucaauccuacgaguaggcacccucaccucagacgaccuccucauccucgcagccgaucucgaaaaacuaaaaucaaaagucacccgcaccgaacgaccacucuccgccggcgucuauaugggaaaccugucaagccaacaacucgaccaacgccgcgcacuacucagcaugauuggcaugucaucaggcguccaaggcgcccgcgccggccgugacggcguaguacggguaugggacguuaagaacgcagaacuccucaacaaucaguucggcaccaugcccucccuaacacucgcuugccucaccaaacaaggacaaguagaucuaaacgacgucguacaagcgcuaacugaccucggacuuauauacaccgcaaaauacccaaauacaucagaccucgacagacuaacccaaagccacccaauccucaacaugaucgacacuaagaaauccucccuaaacauaucaggauacaacuucucccucggcgcagcagucaaagccggggcaugcaugcucgacggcgggaacaugcuagaaaccaucaaagucucgccccagaccauggacggcauccuaaaaagcauacucaaagucaagaaagcacucggcauguucaucuccgaaaccccaggcgagcgcaaccccuacgaaaacauucuauacaaaaucugccucucgggggacggcuggccauacaucgccucacgaaccucaaucacugguagagccugggaaaauaccgucguagaucucgaaagcgauggcaaaccucaaaaagcaggaucaaacaacaguaacaaaagccuucaauccgcaggcuuuacggccggccuuacuuacucccaacuaaugacccucaaagacgcaaugcuacaacuagaccccaacgccaaaaccuggauggacaucgaaggccgacccgaggacccugucgaggucgcucuuuaccaacccagcucaggaugcuacauccacuuuuuccgcgagcccaccgaccucaaacaauucaaacaagacgccaaauacucccauggcaucgacgucacagaccuauucgccgcccaaccaggccuuaccucagcagucaucgacgcccuacccagaaacauggucauaaccugccaaggcucagacgacauaaagaaacuacucgaaucccaaggacgcaaagacaucaaacucaucgacauagcacucuccaaaaccgacucacgcaaauacgaaaacgccgucugggaccaauacaaagaccuaugccauaugcacacaggcguugucgucgagaaaaagaaacgcggaggaaaagaagaaaucacaccccacugcgcccuaauggacugcaucauguucgacgcugcagucagcgguggccuaaacacgagcguccuccgcgcaguccucccccgcgacaugguuuucagaaccuccacuccccgagucguucucuaaggacuaguaauaaggaaacuguaugaaugucugugggcaggaagugaagagauccuucuguaaagguuuuuggaauuaugucugcugaauaauaaacuuuuuugaaauaauaaaucugguagaaaaaugagaucuaaaaaaaaaaaaaaaaaaaaaaaaaaaaaaaaaaaaaaaaaaaaaaaaaaaaaaaaaaaaaaaaugcaucccccccccccccccccccccccccccccccaaaggcucuuuucagagccaccagaauu

SEQ ID NO: 10615 - RNA, 2050 nt, Artificial Sequence
  mRNA product Design b-4 comprising derived and/or modified sequence from LASV(G502-SLE-2009;Clade IV)__AIT17127__NP (opt11)
gggagagucccgcagucggcguccagcggcucugcuuguucgugugugugucguugcaggccuuauucaagcuuaccauguccgccuccaaagaaauaaaauccuuucuauggacccaaucccuucgccgcgaacucuccggcuacugcuccaauaucaaacuccaagucgucaaagacgcccaagcacuacuacacggccuagacuucucagaagucucaaacguccaacgacucaugcgaaaagagagacgcgacgacaacgaccuaaaacgccuaagagaccucaaccaagccguaaacaaccucgucgaacuuaaaagcacgcaacaaaaauccauccuccgaguaggcacccuaaccucagacgaccuacuuauacuagcagcggaccucgaaaaacucaagagcaaggucauccgcacugaacgcccacuauccgcaggcgucuacaugggaaaccucucaucccaacaacucgaccaacgccgggcccuacucuccaugaucggcauguccgguggaaaccaaggagugcgagcaggcaaagacggcgucguacgcguaugggacgucaaaaacgcugaacuccucaacaaccaauuuggaacaaugcccagccucacccuugccugccucaccaaacaaggccaaguagaccuaaacgacgccguacaagcccuaaccgaccuaggacucauuuacacagccaaauacccuaacaccuccgaccuagaccgccucacacaaucccacccgauccuaaacaugauagacaccaaaaaguccucccucaacauauccggcuacaacuucagccucggagcugcagucaaagcaggcgccugcaugcucgacggcggcaacaugcucgaaaccaucaaagucagcccccaaaccauggacggcauacuaaaguccaucuugaaaguaaagaaagcgcuaggcauguucaucuccgacacaccaggagaaagaaaccccuacgaaaacauccuauacaaaauaugccucuccggagacggcuggccauacaucgccucacgcaccuccaucacaggccgugcaugggaaaacaccgucgucgaccuagaauccgacggcaaaccacaaaaagcaggcuccaacaacuccaacaaaucacuccaaucagcuggcuucaccgcuggucuaacauacucccagcucaugacccugaaagaugccaugcugcaacuagacccaaacaccaaaaccuggauggacaucgaaggacgacccgaagauccagucgaaauagcccucuaccaaccaucguccggcugcuacauccacuucuuccgcgaaccaacugaccucaaacaauucaaacaggacgcaaaauacucccacggaaucgacgucaccgaccuauucgcagcacaaccaggcuuaacauccgcugucaucgaugcccucccccgcaacaugguaauuacaugccaaggcuccgacgacauccgaaaacuacucgaaucccaaggacgcaaagacaucaaacucauagacauagcccucaacaaaaccgacucccgcaaauacgaaaacgcagucugggaccaauauaaagaccucugccauaugcacaccggugucgucgucgaaaagaagaaacgaggcgguaaagaagaaauaaccccgcacugcgcccuuauggacugcaucauguucgacgccgccgucucaggcggccucaauaccagcguacuccgggcaguccucccccgggacaugguauuccggacaagcacaccccgcguaguccucuagggacuaguaauaaggaaacuguaugaaugucugugggcaggaagugaagagauccuucuguaaagguuuuuggaauuaugucugcugaauaauaaacuuuuuugaaauaauaaaucugguagaaaaaugagaucuaaaaaaaaaaaaaaaaaaaaaaaaaaaaaaaaaaaaaaaaaaaaaaaaaaaaaaaaaaaaaaaaugcaucccccccccccccccccccccccccccccccaaaggcucuuuucagagccaccagaauu

SEQ ID NO: 10616 - RNA, 2050 nt, Artificial Sequence
  mRNA product Design b-4 comprising derived and/or modified sequence from LASV(G733-SLE-2010;Clade IV)__AIT17155__NP (opt11)
gggagagucccgcagucggcguccagcggcucugcuuguucgugugugugucguugcaggccuuauucaagcuuaccaugucugccagcaaagaaaucaaauccuuccucuggacucaaucacuccgccgcgaacuaagcggauacugcucgaacauuaaacuucaagugguaaaagacgcccaagcccuccuccacggacucgacuucucagaaguaucaaacguccaacgccuaaugcgcaaagagcggcgcgacgacaacgaccucaaacgccuccgcgaccucaaccaagcagucaacaaccucgucgaacucaaaucaacacaacaaaaaucaguacuacgcgucggcacauuaacaagcgacgaacuucucguacucgcagccgaccucgagaaacugaaauccaaaguuaucagaacagagcgaccccucuccgccggagucuacaugggaaaccucuccucccagcaacucgaccaacgacgcgcccuccucagcaugaucggcauguccggcggcaaccaaggcgcccgcacaggccgcgacggcguaguccgaguaugggacguuaaaaacgccgaacuccucaacaaccaauucggaacaaugccaucucuuacacucgcuugccuaaccaaacaaggacaaguagaccuaaacgacgccgugcaagcacuaaccgacuugggccucauauacaccgccaaauaccccaacaccuccgaccuagaccgccucacacaaucacacccaauacucaacaugaucgacaccaaaaagucaagucucaacauaagcggcuacaacuucucacucggcgccgccgucaaagccggcgcaugcaugcuggacggaggaaacaugcucgaaacaaucaaagucucaccccaaaccauggacggaauccucaaauccauacucaaagucaagaaagcccuaggcauguucauaagcgauacacccggcgaacgcaaccccuacgaaaacauccuauacaaaauaugccucuccggagauggauggcccuacaucgccucacgcaccagcaucacgggccgcgcuugggaaaacacaguagucgaccuagaaagcgacggcaaaccacaaaaagcaggcuccaacaauuccaacaaaucgcuucaguccgcuggcuucaccgccggccuaaccuacucacaacucaugacccugaaagacgcuaugcuccaacucgaccccaacgcaaaaacauggauggacaucgagggcagacccgaggaccccgucgaaauagcccucuaccaaccuuccuccggcugcuacauacacuucuucagagaacccaccgaccucaaacaauucaaacaagacgccaaauacucccacggcaucgacgucaccgaccucuucgccgcccagccaggacucaccuccgccgucaucgacgcccuccccaggaacaugguaauuaccugccaaggauccgacgacauccgcaaacuccucgaaucacaaggacgcaaagacaucaaacuaauagacaucgcccuaucaaaaauagacucccgcaaauacgaaaaugccguaugggaccaauacaaagaucugugccacaugcacaccggagucgucgucgaaaagaagaaacgcggcggaaaagaagaaauaacuccccacugcgcacuaauggacugcauaauguucgacgcagccgucuccggaggacuaaacucacucguccuaagagcagugcucccccgcgacaugguauuccgcacguccacaccccgcguaguccuauaaggacuaguaauaaggaaacuguaugaaugucugugggcaggaagugaagagauccuucuguaaagguuuuuggaauuaugucugcugaauaauaaacuuuuuugaaauaauaaaucugguagaaaaaugagaucuaaaaaaaaaaaaaaaaaaaaaaaaaaaaaaaaaaaaaaaaaaaaaaaaaaaaaaaaaaaaaaaaugcaucccccccccccccccccccccccccccccccaaaggcucuuuucagagccaccagaauu

SEQ ID NO: 10617 - RNA, 2050 nt, Artificial Sequence
  mRNA product Design b-4 comprising derived and/or modified sequence from MOPV/LASV reassortant(IGS-1;Clade IV)__AFY05578__NP (opt11)
gggagagucccgcagucggcguccagcggcucugcuuguucgugugugugucguugcaggccuuauucaagcuuaccaugagcgccagcaaagaaaucaagagcuuccuuuggacgcagucguuacgacgcgaacucuccggcuacugcucaaacaucaaacuacaaguagucaaagaugcccaagcccuacuccacggacucgacuucuccgaagucagcaacgugcaacgccuaaugcgcaaagaacgacgcgacgacaacgaccucaaacgacuccgagaccuaaaccaagccgucaacaaccucguagaacuaaaauccacacaacaaaaauccauauuacgagucggcacccucaccagcgaugaucuucuaauacuggccgcagaccucgaaaaacuucgcucaaaagugauucgcaccgaacgcccacucagcgccggaguuuacaugggcaaucucuccagccaacaacucgaccaacgaagggcccuccucaacaugauugggauguccggaggcaaccaaggagcccgagccggacgcgacggcguaguccgcguaugggacgucaaaaacgcagaacuacucagcaaccaauucggcaccaugcccucacucacgcuugccuguuugaccaaacaaggacagguagaucuuaacgacgcaguccaagcacuaacagaccucggccuaaucuacaccgcaaaauaccccaacaccuccgaccuagaccgacucacucaaucgcaccccauccuaaacaugaucgacaccaagaaaucgagccucaacauuagcgguuacaacuucucccuaggcgccgccgucaaagccggugcaugcaugcuugacggcggaaauaugcuagaaaccaucaaaguauccccacaaacaauggacggaauccucaaaucgauucucaaagucaagaaagcccucggcauguucaucucagacaccccaggagaaaggaacccguacgaaaauauccucuacaaaauaugucucucaggcgacggcuggccauacaucgccucccgcacaaguauaaccggacgagccugggaaaacaccguaguagaccuagaaagcgacgguaaaccccaaaaagcagacucuaacaacagcucgaaaucccuccaaagcgcaggcuucacagcgggccuaaccuacagccagcucaugacccucaaagacgcaaugcuccagcucgaccccaacgcgaaaaccuggauggacaucgagggcagaccagaagacccagucgaaaucgcacucuaccaacccuccuccggcugcuacauccacuuuuuccgcgaacccaccgaccuaaaacaauuuaaacaagacgcaaaauacucccacggcauagacguaacagaccucuucgcaacccagccaggccuaaccuccgccgucaucgacgcacucccccgcaacaugguaauaaccugccaaggcucagacgacauccgcaaacuccucgaaucccaaggcagaaaagacaucaaacuuaucgacauagaucucucuaaaaccgacucccguaaauacgagaacgccgucugggaccaauacaaagaccuaugccauaugcacaccggaguuguagucgaaaagaagaaacggggagguaaagaagaaauaacaccccacugcgcccuaauggacugcauuauguucgacgccgcaguaagcggcggccuaaacaccuccguccuccgcgcaguccucccacgcgacauggucuucagaaccuccacacccagagucguccucuaaggacuaguaauaaggaaacuguaugaaugucugugggcaggaagugaagagauccuucuguaaagguuuuuggaauuaugucugcugaauaauaaacuuuuuugaaauaauaaaucugguagaaaaaugagaucuaaaaaaaaaaaaaaaaaaaaaaaaaaaaaaaaaaaaaaaaaaaaaaaaaaaaaaaaaaaaaaaaugcaucccccccccccccccccccccccccccccccaaaggcucuuuucagagccaccagaauu

SEQ ID NO: 10618 - RNA, 2050 nt, Artificial Sequence
  mRNA product Design b-4 comprising derived and/or modified sequence from LASV(LM765-SLE-2012;Clade IV)__AIT17815__NP (opt11)
gggagagucccgcagucggcguccagcggcucugcuuguucgugugugugucguugcaggccuuauucaagcuuaccaugucagcauccaaagagaucaaauccuuccuguggacccaaucccuucgacgcgaacuaagcggauacugcagcaacaucaaacuacaagucguaaaagacgcccaagcacuccuacacggccuagacuucuccgagguauccaauguccaacgccucaugaggaaagaacgccgcgaugauaacgaucuuaaaagauuacgcgaccucaaccaggccguaaacaaccuagucgaacucaaaucaacccaacaaaaaucaauacuccgcgucggaacccuuacaucagacgaccuacucauacuggccgcagaccuugaaaaacucaaaucgaaagucacccgcaccgaaagaccccucuccgccggcgucuacaugggcaaccucagcucacaacagcucgaccaacgacgagcgcuccucgacaugauaggcauguccggaagcaaccaaggcgccagagccggcagagacggcgucguacgcgucugggacgucaaaaacgccgaacuccucaacaaccaauucggcaccaugcccucucucacgcucgccugccucaccaagcaaggccaagucgaccucaacgacgcaguacaagcacuaacggaccuaggccugaucuacacagccaaguaccccaacaccucggaccucgaccggcucacccaaagccaccccauccugaacaugaucgacaccaagaaauccucccuuaacauaucaggcuacaacuucucccugggcgccgcaguaaaagccggcgcaugcaugcuagacggaggaaacaugcucgaaacaaucaaagucucgccccaaacaauggauggcauacuaaaauccauccucaaagucaagaaagcccuaggaauguucauaucagaugcccccggcgaacgaaaccccuacgagaacauccuauacaaaauuugccucagcggcgacgguuggccguauaucgccaguagaaccuccaucaccggccgcgccugggaaaacaccguagucgaccuagaaagcgauggcaaaccccaaaaagcaggaaguaacggauccaacaaaagucuacaauccgccggcuucaccgccggucuaaccuacucccaacucaugacccucaaagacgccaugcuacaacuagacccaaacgccaaaaccuggauggacaucgaaggcagacccgaagacccagucgaaaucgcacuguaccaacccagcuccggcugcuacauccacuucuuccgcgaacccacagaccucaaacaauucaaacaagacgccaaauacagccacggcauagacguaaccgaccuauucgccgcacagcccggcuuaaccagcgcagucaucgacgcccuacccagaaacauggucauaaccugccaaggcucagacgacauccgcaaacucuucgagagccaaggcagaaaagacaucaaacucauagacaucgcccucagcaagacugacucccgcaaauacgaaaacgccgucugggaccaauacaaggaccuaugccauaugcacaccgggaucguaguagaaaagaagaaacgaggcggaaaagaggaaauaaccccacauugcgcccucauggacugcaucauguucgacgccgccguaagcggcggccuaaacaccucaguccuuagagccguccucccacgcgacauggucuuccgcaccucuacgccccgaguaguccuauaaggacuaguaauaaggaaacuguaugaaugucugugggcaggaagugaagagauccuucuguaaagguuuuuggaauuaugucugcugaauaauaaacuuuuuugaaauaauaaaucugguagaaaaaugagaucuaaaaaaaaaaaaaaaaaaaaaaaaaaaaaaaaaaaaaaaaaaaaaaaaaaaaaaaaaaaaaaaaugcaucccccccccccccccccccccccccccccccaaaggcucuuuucagagccaccagaauu

SEQ ID NO: 10619 - RNA, 2050 nt, Artificial Sequence
  mRNA product Design b-4 comprising derived and/or modified sequence from LASV(LM776-SLE-2012;Clade IV)__AIT17825__NP (opt11)
gggagagucccgcagucggcguccagcggcucugcuuguucgugugugugucguugcaggccuuauucaagcuuaccaugucagccuccaaagaaaucaaauccuuccucuggacccaaucccuccgccgcgaacuauccuccuacugcuccaacaucaaacuacaagucgucaaagacgcccaagcccuccugcacggacucgacuucucagaagucagcaacguacaacgacucaugcgaaaagaacgaagagacgacaacgaccucaaacgacuuagagaccucaaccaagcagucaacaaccucguagaacuaaaaucuacccaacaaaaaucaauacuccgcgucggcaccuuaacaagcgacgacuuacucauccucgcugccgaccucgaaaaacuaaaauccaaaguaacccgcaccgaacgcccccucucagccggcgucuacaugggcaaccucucaucccaacagcuagaccaacgcagagcccuccucuccaugauuggaauguccggaagcaaccaaggugccagagcaggccgagacggagucguccgcguuugggacgucaagaacgcagaacuccuaaacaaccaguucggcacaaugcccucccucacacuagcgugucucaccaaacaaggucaagucgaccuaaacgacgcaguacaagcccucacagaccucggccuaauauacacagccaaauacccaaacaccagcgaccucgaccgccucacccaaagccaccccauauuaaacaugauagacaccaagaaauccucucucaacaucuccggcuacaacuucucacuaggcgcagcaguaaaagccggcgcaugcaugcuggacgguggcaacaugcucgaaacaaucaaagucucaccccaaaccauggacggcauccuaaaauccauacucaaagucaagaaagcacucggaauguucaucucagacacccccggcgaacgcaaccccuacgaaaacauacucuacaaaauuugccucuccggcgacggcuggcccuauaucgccuccagaacauccaucaccggccgcgccugggaaaacaccguaguagaccuugaauccgacggaaaaccucagaaagccggaagcaacaacucaaacaaaucccuacaaucagccggauucaccgccggucuaacauacagccaacucaugacccuaaaggacgccaugcuacaacucgacccgaacgccaaaaccuggauggacaucgaaggccgacccgaagaccccgucgaggucgcccucuaccaacccagcagcggcugcuacauccacuucuucagagaaccaaccgaucucaagcaauuuaaacaagacgcgaaauacucccacggcauagaugucaccgaccucuucgcugcccaacccggccucaccucagccgucaucgacgcccuucccagaaacauggucaucacgugccaaggcuccgacgauauacgaaagcuacucgaaucgcaaggccgcaaggacaucaaguuaaucgacaucgcgcucuccaaaaccgacuccagaaaauacgaaaacgccgucugggaccaauacaaagaccucugccacaugcacaccggagucgucgucgaaaagaagaaaagaggcggcaaagaagaaauuaccccgcacugcgcacuaauggacugcaucauguucgacgccgcagucuccggaggccucaacaccucgguccuccgcgcgguacucccccgcgacauggucuuccguacaucaacaccccgcguaguccucuaaggacuaguaauaaggaaacuguaugaaugucugugggcaggaagugaagagauccuucuguaaagguuuuuggaauuaugucugcugaauaauaaacuuuuuugaaauaauaaaucugguagaaaaaugagaucuaaaaaaaaaaaaaaaaaaaaaaaaaaaaaaaaaaaaaaaaaaaaaaaaaaaaaaaaaaaaaaaaugcaucccccccccccccccccccccccccccccccaaaggcucuuuucagagccaccagaauu

SEQ ID NO: 10620 - RNA, 2050 nt, Artificial Sequence
  mRNA product Design b-4 comprising derived and/or modified sequence from LASV(Mad39;Clade IV)__ANH09723__NP (opt11)
gggagagucccgcagucggcguccagcggcucugcuuguucgugugugugucguugcaggccuuauucaagcuuaccaugucagcauccaaagaaaucaaguccuuuuuauggacgcaaucacuccgacgcgaacuauccggcuacuguuccaacaucaaacuccaaguagucaaggacgcacaagcacuucuccacggccuagacuucucagaagucagcaacguacaacgacuaaugcgcaaacaacggcgcgacgacaaugaccuaaagcgccucagagaccuaaaccaagccgucaacaaccuuguagagcuaaaguccacccaacaaaaauccguccugcgcguuggaacccuaacaagcgacgaccuccucacacucgcagcggaccuagaaaagcucaaauccaaggucacacgaacagagagaccccuaaccgcaggagucuauaugggcaaccuaagcucccaacaacuagaccaaagacgggcacuccucaacaugauaggaaugagcggcggaaaccaaggugcaagaaccggacgggacgggguaguccgagucugggacgucaagaacgcagaacuacuaaacaaccaguucgguaccaugcccucccucacccucgccugccugacaaaacaaggccaagucgaccucaacgacguuguccaagcacuaacagaccucggccuaauauacaccgcaaaguaccccaacacaucagaccuggaccgacuaacccaaucccaccccauccucaacaugaucgacaccaacaaguccucccuuaacauuagcggcuacaacuucagccucggagccgcagucaaggccggcgccugcaugcuagacggcggcaacaugcuagaaaccaucaaagucucaccccaaaccauggacggcauccucaaaagcauuuuaaaagucaaaaagucacuaggcauguucaucagcgacacccccggagagagaaaccccuacgaaaauauccucuacaaaauaugccucucaggcgacggcuggcccuacauagcaagccgaaccagcaucacaggcagagcaugggaaaacaccgucgucgaucuagaaucaggcggcaaaccccaaaaagccggaucaaacaacuccaacaaaucucuacaaagcgccggcuucgccgcaggacucacauacucccaacucaugacccuaaaagacgccaugcuucagcucgacccgaacgcaaaaaccuggauggacauagaaggcagacccgaagacccaguagaaauagcacuauaccagcccaucucaggguguuacauccacuucuuccgcgaaccgaccgaucuaaaacaauucaaacaagacgccaaauacucccacggcaucgacguaaccgaccuguuugcagcucaaccaggccucaccuccgccgucauagaagcccucccccgaaacauggucauaaccugccaaggcagcgacgacauccgcaaacuauucgaaucacagggcagaaaagacaucaaacucaucgacaucgcacucagcaaaaccgacucacguaaguacgagaacgcggucugggaccaauacaaagaccucugccacaugcacaccggugucgucgucgaaaagaaaaagaaaggcggaaaagaagaaauaaccccucacugcgcccucauggacugcaucauguuugacgccgccgucagcggaggccuaaacacgcuaguccuacgagcaguacucccacgcgacaugguauuccgcacaucaacccccaaaguagucuuauaaggacuaguaauaaggaaacuguaugaaugucugugggcaggaagugaagagauccuucuguaaagguuuuuggaauuaugucugcugaauaauaaacuuuuuugaaauaauaaaucugguagaaaaaugagaucuaaaaaaaaaaaaaaaaaaaaaaaaaaaaaaaaaaaaaaaaaaaaaaaaaaaaaaaaaaaaaaaaugcaucccccccccccccccccccccccccccccccaaaggcucuuuucagagccaccagaauu

SEQ ID NO: 10621 - RNA, 2050 nt, Artificial Sequence
  mRNA product Design b-4 comprising derived and/or modified sequence from LASV(Z0947-SLE-2011;Clade IV)__AIT17841__NP (opt11)
gggagagucccgcagucggcguccagcggcucugcuuguucgugugugugucguugcaggccuuauucaagcuuaccaugagcgccucaaaggaaaucaaaucguuccucuggacacaaucccuaagacgcgaacucucaggcuacugcuccaacaucaaacuacaagucguaaaagacgcgcaagcacuacuccacggacuagacuucagcgagguuuccaacguacaacgccugaugcgaaaagaacgccgagacgacaacgaccucaagcgacugcgcgaccucaaucaagccguaaacaaccucgucgaacuaaaauccacccaacaaaagucaauccuacgcguaggcacacugaccagcgaugaccuccucauccuugccgcagaccucgaaaagcuaaaaagcaaagucacccgcaccgaacgcccgcuauccgccggagucuacaugggaaaccuaaguagccaacaacucgaccaacggcgcgcacuacuaaacaugauaggcaugagcggcuccaaccaaggugcacguacaggcagggacggggucguacgcgucugggacgucaaaaacgccgaacuccucaacaaccaauucgguacaaugcccucacucacacuagcgugccucaccaagcagggacaaguagaccucaacgacgcaguacaagcgcuaacagaccucggccucauauacaccgcaaaauacccaaacaccucugaccuagaccgacucacucagucacacccaauccucaacaugauagacacaaagaaauccucgcuaaacauauccggcuacaauuucucccucggagccgccgucaaagccggcgcgugcaugcucgacggaggcaacaugcucgaaaccauaaaagucucaccacaaacaauggacggaauccucaaauccauccuaaaggucaagaaagcccuaggaauguucauauccgacgcccccggagaacgcaaccccuaugaaaacauccucuacaaaaucugccucuccggcgacggcuggcccuacaucgccagccgaacaagcaucaccggccgugccugggaaaacaccgucguagaucucgaaagcgacggaaaaccccaaaaagcaggcucgaacggcuccaacaaaucccuccagagcgccggcuucaccgcaggccuaaccuacucacaacugaugacacucaaagacgccaugcuacaacucgaccccaacgcaaaaaccuggauggacaucgaaggccgccccgaagaccccgucgagauagcucucuaccaacccuccucaggaugcuacauccacuucuuccgcgaaccaaccgaccugaaacaauucaaacaggacgcaaaauacucccacggcauagacguaaccgaccuauucgccgcgcaaccaggacucaccuccgccgucaucgacgcccucccaagaaacaugguuauaaccugccaaggcuccgacgacauccgcaaacuauucgaaucccaaggccgcaaagacaucaaguuaaucgacaucgcccugucaaagacagacucccgcaaauacgaaaacgcggucugggaccaauacaaagaccuuugccacaugcacaccgguaucgucguagagaaaaagaaacgaggaggcaaagaagagauaaccccacacugcgcuuuaauggacugcauaauguucgacgccgccgucucaggcggccuaaacaccagcguccuccgagcaguccucccccgcgacauggucuuucggaccuccacccccagagucguccuaugaggacuaguaauaaggaaacuguaugaaugucugugggcaggaagugaagagauccuucuguaaagguuuuuggaauuaugucugcugaauaauaaacuuuuuugaaauaauaaaucugguagaaaaaugagaucuaaaaaaaaaaaaaaaaaaaaaaaaaaaaaaaaaaaaaaaaaaaaaaaaaaaaaaaaaaaaaaaaugcaucccccccccccccccccccccccccccccccaaaggcucuuuucagagccaccagaauu

SEQ ID NO: 10622 - RNA, 2092 nt, Artificial Sequence
  mRNA product Design i-2 comprising derived and/or modified sequence from LASV(Josiah;Clade IV)__NP_694869__NP (wt)
ggggcgcugccuacggagguggcagccaucuccuucucggcaucaagcuuaccaugagugccucaaaggaaauaaaauccuuuuuguggacacaaucuuugaggagggaauuaucugguuacugcuccaacaucaaacuacagguggugaaagaugcccaggcucuuuuacauggacuugacuucuccgaagucaguaauguucaacgguugaugcgcaaggagagaagggaugacaaugauuugaaacgguugagggaccuaaaucaagcggucaacaaucuuguugaauuaaaaucaacucaacaaaagaguauacugagaguugggacucuaaccucagaugacuuauuaaucuuagccgcugaucuagagaaguuaaagucaaaggugaucagaacagaaaggccauuaagugcaggugucuauaugggcaaccuaagcucacagcaacuugaccaaagaagagcucuccugaauaugauaggaaugaguggugguaaucaaggggcucgggcugggagagauggaguggugagaguuugggaugugaaaaaugcagaguugcucaauaaucaguucgggaccaugccaagucugacacuggcaugucugacaaaacaggggcagguugacuugaaugaugcaguacaagcauugacagauuuggguuugaucuacacagcaaaguaucccaacacuucagacuuagacaggcugacucaaagucaucccauccuaaauaugauugacaccaagaaaagcucuuugaauaucucagguuauaauuuuagcuugggugcagcugugaaggcaggagcuugcaugcuggaugguggcaauauguuggagacaaucaaggugucaccucagacaauggaugguauccucaaauccauuuuaaaggucaagaaggcucuuggaauguucauuucagacaccccuggugaaaggaauccuuaugaaaacauacucuacaagauuuguuugucaggagauggauggccauauauugcaucaagaaccucaauaacaggaagggccugggaaaacacugucguugaucuggaaucagaugggaagccacagaaagcugacagcaacaauuccaguaaaucccugcagucggcaggguuuaccgcugggcuuaccuauucucagcugaugacccucaaggaugcaaugcugcaacuugacccaaaugcuaagaccuggauggacauugaaggaagaccugaagauccaguggaaauugcccucuaucaaccaaguucaggcugcuacauacacuucuuccgugaaccuacugauuuaaagcaguucaagcaggaugcuaaguacucacaugggauugaugucacagaccucuucgcuacacaaccgggcuugaccagugcugucauugaugcacucccccggaauauggucauuaccugucagggguccgaugacauaaggaaacuccuugaaucacaaggaagaaaagacauuaaacuaauugauauugcccucagcaaaacugauuccaggaaguaugaaaaugcagucugggaccaguauaaagacuuaugccacaugcacacaggugucguuguugaaaagaagaaaagaggcgguaaagaggaaauaaccccucacugugcacuaauggacugcaucauguuugaugcagcagugucaggaggacugaacacaucgguuuugagagcagugcugcccagagauaugguguucagaacaucgacaccuagagucguucuguaaggacuagugcaucacauuuaaaagcaucucagccuaccaugagaauaagagaaagaaaaugaagaucaauagcuuauucaucucuuuuucuuuuucguugguguaaagccaacacccugucuaaaaaacauaaauuucuuuaaucauuuugccucuuuucucugugcuucaauuaauaaaaaauggaaagaaccuagaucuaaaaaaaaaaaaaaaaaaaaaaaaaaaaaaaaaaaaaaaaaaaaaaaaaaaaaaaaaaaaaaaaugcaucccccccccccccccccccccccccccccccaaaggcucuuuucagagccaccagaauu

SEQ ID NO: 10623 - RNA, 2092 nt, Artificial Sequence
  mRNA product Design i-2 comprising derived and/or modified sequence from LASV(LP;Clade I)__AAF86702__NP (wt)
ggggcgcugccuacggagguggcagccaucuccuucucggcaucaagcuuaccaugagcaacuccaaggaaaucaaaucauuccuuuggacucaguccuuacgaagggaacuaucugguuacuguucuaacauaaaguugcaaguugucaaagaugcucaggcucuccugcauggccuugacuuuucugaggucagcaaugugcagaggcugaugcgcaagcagaagagagaugaugcagaccuaaagcgacugagggaucugaaucaagcugucaacaaucuuguugaacugaagucaacucaacagaagaaugucuuaagggucggcaccuugaguucagaugaucuaauaacuuuggcagcggaccuggaaaaacucaaguccaaagucauaaggacagaaaggccuuugagcucagguguuuacauggggaauuuaagcucacaacagcuugaucaaaggagggcucucuugagcaugauugggaugucagguggaccucaaggaaauaggacagguggggauggugucgucaggguuugggacguaaaaaaugcagaauuacucaauaaccaauuuggaaccaugccaagccucaccuuggcgugccucaccaaacaagggcaaguggaccucaaugaugcugugcaagcuuuaacagauuuagguuugauuuacacagcaaaguacccgaacucuucagaucuagacaugcucacucagagucacccuauacuaggaaugguugacacaaaaaagaguucccugaacaucucagguuacaacuucagucugggggcugcaguuaaagcuggugcuugcaugcuugaugggggcaacauguuggaaacaauaaaagugucaccacaaacaauggacgguauuuugaaaucuauucugaaggucaaaagaucacugggaauguucauuucugacacuccuggugaaagaaacccauaugagaacauccucuauaagaucugccuuucaggugaagguuggccguauauugcaucaagaacaucaauuacugggagagcuugggaaaacacucuuguugauuuggaaucugacaacaaaccaccgaaacuaaauagcgcugguuccaauaaaagcuugcaggcugcaggucuaaaugcuggguugaccuauucucaacugaugacacuaaaagauuguauguuacaguuggacccaaguagcaaaacauggauagauauugagggcaggccugaagacccaguggagauugcuuuguuucaaccaagcucugguuguuacauacacuuuuuuagagaaccuacugaccuuaagcaauucaaacaggaugcuaaguacucacaugggauagauguuacagaucuuuuuuccacacaacccgggcugacaagugcugucauagaggcacuuccccgcaauaugguguugaccugccaggggucagaugacaucaaaaagcuguuggagucucaagggagaagagacaucaaauugauugauauuucuuugagcaaagcagauucaaggaaguuugaaaaugcugugugggaccaauacaaagacuugugucacaugcacacgggaguagucguugagaagaaaaagagggguggaaaagaggaaaucaccccacauugcgcuuuacuggacugcaucauguuugaugcagcuacuacugguaguuugaacaucacaacacugagggcaguacuucccagagacauggucuucaggaccagcaccccuaaagucguucuguaaggacuagugcaucacauuuaaaagcaucucagccuaccaugagaauaagagaaagaaaaugaagaucaauagcuuauucaucucuuuuucuuuuucguugguguaaagccaacacccugucuaaaaaacauaaauuucuuuaaucauuuugccucuuuucucugugcuucaauuaauaaaaaauggaaagaaccuagaucuaaaaaaaaaaaaaaaaaaaaaaaaaaaaaaaaaaaaaaaaaaaaaaaaaaaaaaaaaaaaaaaaugcaucccccccccccccccccccccccccccccccaaaggcucuuuucagagccaccagaauu

SEQ ID NO: 10624 - RNA, 2092 nt, Artificial Sequence
  mRNA product Design i-2 comprising derived and/or modified sequence from LASV(803213;Clade II)__AAF86704__NP (wt)
ggggcgcugccuacggagguggcagccaucuccuucucggcaucaagcuuaccaugagugcuuccaaggaggugaaaucauuccuuuggacacagucauugaggagagagcuuucagguuauuguucuaacauaaagcuucaaguuguuaaggaugcccaggcccuccuucacggccuugacuucucugaggucaacaaugugcaacgucuaaugcgcaaacagaaaagagaugauggugauuuaaaacgucuuagagaccugaaucaggcagucaacaaccuuguugaacucaaaucaacacaacaaaagagcauuuugagaguuggaacacugaccucagaugacuugcugacauuggcagcugacuuagagaaacugaagucaaaagucaucagaacagaaagaccacuaagcucggguguguacauggggaauuuaaguacacagcagcuugagcagagaagggcauugcugaacaugauuggcaugguugguggagcacagggcacccaaccuggaagagacggaguuguuagggugugggaugucaaaaauccagaucucuuaaacaaccaguucggcaccaugccuaguuugacauuagcaugucuuacuaaacagggucaaguugaccuaaaugaugcuguccuagcacugacggacuugggacugauauacacagcuaaguacccuaacaguuccgaccuggacaggcuuucccaaagucauccgauacugaacaugguggacacuaagaagagcuccuugaacauuucugguuacaauuuuagcuugggagcugcaguaaaggcuggggccuguaugcucgaugggggcaacauguuggaaaccauuaagguuacgccucagacaauggaugguaucuugaaguccauuuuaaaggugaaaagaucuuugggaauguuugucucagauacaccuggugagaggaacccuuaugagaacauacuuuauaaaaucugucucucuggugauggcuggcccuacauagccucaagaaccuccauugugggcagggcuugggagaauacuacuguggaucucgagucagaugggaagccacaaaaagugggaacugcuggguccaauaagucuuugcaguccgcaggguuuccaacaggguugacuuauucacagcugaugacucuuaaagacucaaugaugcagcuugacccaagugccaaaacuuggauagacauugaaggucguccagaagacccuguggagauagcucuuuaucaaccuaugucaggcuguuacauacauuucuuuagagaaccaacagaucugaaacaguucaagcaagacgccaaguauucucaugggauugauguggcagaucuuuucccugcucaaccugguuugacuagugcaguuauugaagcucuuccucgcaauaugguguugacuugccaagguucagaugauaucaagaaacucuuagacucucaaggaaggagggacauaaagcuuauugauauuucauuaagcaagguugacucuaggaaguuugaaaaugcuguuugggaccagugcaaagacuugugccacaugcacacuggagugguuguugagaagaagaaaagaggaggcaaagaagaaaucaccccacauugugcccugauggauugcauaauguuugaugcagcugugucaggagggcucaacauaccaguuuuaagagcuguucuucccagagacaugguauuuagaaccucaagccccaaggucguccuguaaggacuagugcaucacauuuaaaagcaucucagccuaccaugagaauaagagaaagaaaaugaagaucaauagcuuauucaucucuuuuucuuuuucguugguguaaagccaacacccugucuaaaaaacauaaauuucuuuaaucauuuugccucuuuucucugugcuucaauuaauaaaaaauggaaagaaccuagaucuaaaaaaaaaaaaaaaaaaaaaaaaaaaaaaaaaaaaaaaaaaaaaaaaaaaaaaaaaaaaaaaaugcaucccccccccccccccccccccccccccccccaaaggcucuuuucagagccaccagaauu

SEQ ID NO: 10625 - RNA, 2095 nt, Artificial Sequence
  mRNA product Design i-2 comprising derived and/or modified sequence from LASV(GA391;Clade III)__CAA36646__NP (wt)
ggggcgcugccuacggagguggcagccaucuccuucucggcaucaagcuuaccaugagugcuuccaaggaagugaggucauucuuguggacucaaucccuaagaagggaacuaucuggcuacuguuccaacauaaaguugcagguaguuaaagacgcucaagcucuccuucauggucuugacuucuccgaggucaguaauguucagagauugaugcgcaagcagaaaagagaugauggcgaccuaaaacgacugagagaucucaaucaagcagucaacaaucuuguugagcucaaauccacacagcagaaaagugucuuaagaguuggaaccuuaaguucagacgaucuacuaauccuggccgcugauuuagaaaaacugaaaucaaaagucaccagaacagaaaggccuuugaguucaggaguuuauauggggaauuugaguucacaacagcuugaucaaaggagagcccuuuugaacaugauuggcaugacuggaguaaguggagggggaaagggugccagugauggcauugugagaguuugggaugucaaaaaugcagaguuacucaacaaucaguucggaacaaugccaagccuaacuuuagcaugccugaccaaacaggggcaaguggaccugaaugaugccguucaagcuuugacagauuuagggcugauuuacacagccaaauaccccaacucaucugaucucgacagauugucucagagucauccaauucugaauaugauugacacuaagaaaaguucacucaacaucucugguuacaauuucaguuugggugcugcugucaaagcaggggccugcaugcuugauggugguaacauguuagagacuauuaagguuucaccucagaccauggaugguaucuugaagucaaucuugaaaguuaagaagagucugggaauguuuguaucagacacaccgggugaaaggaacccuuaugagaacauccuauacaagaucugucucucaggagacggauggcccuauauugcaucaaggaccucgauugugggaagagcaugggaaaauacugugguggaccuugagcaagacaacaagccccagaaaauuggaaaugggggguccaacaagucauuacagucugcaggcuuugcugcaggauuaacuuacucucaguugaugacucucaaagauuucaagugcuucaacuugauucccaacgcaaaaaccuggauggauauugaaggaagaccagaagacccaguugagauagcccuuuaucaaccgagcucggguugcuauguacauuucuuuagggagccaacagauuugaagcaauucaaacaagaugcaaaguauucacaugguauugaugugacugauuuguuugcugcccaaccuggguuaaccagugcagugauagaagcccuuccucggaacauggucaucacuugccaaggaucagaggauaucagaaaacuccuugagucacaagggaggagagacauaaaacugauugacaucacucuuaguaaagcagauucaagaaaguuugagaaugcuguuugggaucaauucaaggaucuaugucacaugcacacugggguaguuguggagaaaaagaagagaggugguaaagaggaaauaacuccucauugugcacugauggauugcauuauguuugaugcagcaguuucaggaggacuugaugcaaaaguccugagaguugugcucccuagagacaugguguucagaacuucaacaccuaaagucguccuguagggacuagugcaucacauuuaaaagcaucucagccuaccaugagaauaagagaaagaaaaugaagaucaauagcuuauucaucucuuuuucuuuuucguugguguaaagccaacacccugucuaaaaaacauaaauuucuuuaaucauuuugccucuuuucucugugcuucaauuaauaaaaaauggaaagaaccuagaucuaaaaaaaaaaaaaaaaaaaaaaaaaaaaaaaaaaaaaaaaaaaaaaaaaaaaaaaaaaaaaaaaugcaucccccccccccccccccccccccccccccccaaaggcucuuuucagagccaccagaauu

SEQ ID NO: 10626 - RNA, 2092 nt, Artificial Sequence
  mRNA product Design i-2 comprising derived and/or modified sequence from LASV(AV;Clade V)__CCA30315__NP (wt)
ggggcgcugccuacggagguggcagccaucuccuucucggcaucaagcuuaccaugagugccuccaaagaagugaaaucuuucuuauggacacaaucucugaggagggaguugucggguuacuguuccaauaucaaacuucaaguggugaaggacgcucaagcucucuugcaugggcuugacuucucugaggucagcaauguccagcggcugaugcgcaaacaaaggagagaugauagugaccuaaagcgucuuagggaucugaaucaagcugucaacaaucuuguugagcugaaaucgacacaacagaaaagugugcugagaguugggacccuaaguucggacgauuuacugacucuggcggcugauuuagaaaagcugaaaucaaaaguuacaagaacagaaaggcccuugaguucaggugucuacaugggaaaccuaaguucacagcagcucgaucagaggagggcacuucuaaauuugauugggaugacaaacggcagucaggggucacaggcugggagagauggagugguaagagucugggaugugaagaaugcagaauuguugaacaaucaauuugggacaaugccgagccugacauuagcaugucugacaaagcagggacaaguugacuuaaaugaugugguacaagcacucacagaucugggcuugauuuauacagcuaaauauccuaacacaucagauuuagauagguuaacucaaagucaucccauuuuaaacaugauugacaccaagaagagcucccugaacaucucaggcuacaauuuuagucugggugccgcagugaaagcaggugccugcaugcuggaugguggcaacauguuagaaacaaucaagguuucgccucaaucaauggauggcauuuuaaaauccaucuugaaggucaagagggcucuugggauguucgucucagauacuccgggugagagaaaccccuaugaaaacauacucuacaaaaucugcuuaucaggugacggguggccauacauugcaucuaggacaucaauaguaggaagggcuugggaaaacacuguaguggaccuugaaacagaugggaaaccacagaaaauuggcagugguaacuccaacaaaucucuccaaucugcaggcuucucggcuggacuaacuuacucccaacuuaugacccuuaaagaugcaauguugcagcuugacccaaaugccaagacguggauggacauagaagggaggccagaggacccgguggaaguugcucucuaucagccuaucucuggguguuauauacacuuuuucagagagcccacugaucucaaacaauuuaaacaagaugcaaaauauucucauggaauugacaucgcagaucuguuugcugcacaaccaggucugaccagugcuguuauugaggcgcucccccggaauaugguuaucacuugccaaggguccgaagacauaaagaagcuucuugaaucacaagggagaaaggauauaaaacugauugacauugcucuuaguaagauugauucaagaaaguuugaaaaugcuguuugggaucaauauaaagauuugugucacaugcacacagguguuguuguugagaagaagaagagagguggcaaagaagagaucaccccucacugugcauugauggauugcaucauguuugaugcugcugucucaggaggguugaacacacuggugcucagagcugugcuacccagagacaugguguuuagaacaucaacaccaagagucguccuguaaggacuagugcaucacauuuaaaagcaucucagccuaccaugagaauaagagaaagaaaaugaagaucaauagcuuauucaucucuuuuucuuuuucguugguguaaagccaacacccugucuaaaaaacauaaauuucuuuaaucauuuugccucuuuucucugugcuucaauuaauaaaaaauggaaagaaccuagaucuaaaaaaaaaaaaaaaaaaaaaaaaaaaaaaaaaaaaaaaaaaaaaaaaaaaaaaaaaaaaaaaaugcaucccccccccccccccccccccccccccccccaaaggcucuuuucagagccaccagaauu

SEQ ID NO: 10627 - RNA, 2092 nt, Artificial Sequence
  mRNA product Design i-2 comprising derived and/or modified sequence from LASV(Togo/2016/7082;Clade VI)__AMR44578__NP (wt)
ggggcgcugccuacggagguggcagccaucuccuucucggcaucaagcuuaccaugaguaacucuaaagaggugaagucuuuucucuggacucagucucugaggagagagcugucagguuacugcucuaacaucaaacuccagguggucaaggaugcucaggccuuauuacaugggcuugauuucucugaagugagcaauguucagaggcugaugcgaaaacagaagagggaugauggugaccucaagaggcucagagaccugaaucaagcgguaaauaaucuuguugaacuaaaaucaguucaacaaaaaaguauauugagaguuggcacccugaccucugaugacuuacuaacacuugcugcugaccuagaaaaacuaaagucuaaaguaacuaggacugaaagaccuuugaguucaggaguuuauaugggaaaccucagcucucagcaacuugaccagaggagagcccuccugagcaugauagggaugaguggugggaaccagaacagccaacccaaaggagaugguguugugaggguuugggaugugaaaaaugcugaccugcugaacaaccaguuuggaacgaugcccagucuuacauuagcaugcuuaacaaagcagggacaaguggauuugaaugaugcuguucaggcacugacugaucuaggguugauuuacacagcuaaauacccgaacucaucugaccuagacagacuuucacaaagccauccaauccugaacaugaucgauaccaagaagagcucauugaacaucucuggcuacaauuuuaguuuaggggccgcaaucaagacuggggcaugcaugcuugaugggggcaacaugcuggagacaaucaaggucacuccccaaaccauggaugggauuuugaaauccauuuuaaaggugaagaggagucuugggauguuuauuucugauacaccuggagaaaggaauccuuaugaaaacauucuuuauaaaaucugucuuucaggagacggguggccuuacauagccucacgaacugccaucauugguagagcaugggaaaacacugugguugauuuggagucugauagcaagccacaaaagauugggagcaauggaucuaacaaaucauugcaaucugcaggcuuugccccuggacugacauacucucagcucaugacccucaaagacucaauguugcaauuagauccuaaugcaaagacuuggauagacauugaagguaggccggaagacccuguugaggucgccuuguuucagccuaucucagguugcuacauacacuucuuuagagaaccaacagaccugaagcaauuuaaacaagaugcaaaguacucacaugggauagaugucaccgauuuguuugcugcucagccagguuugaccagugcugucauugaggcacuucccaggaauauggugcugaccugucagggaucagacgacaucaaaaaauuguuggauucacaggggagaagggacauuaaacucauugauguuucucucaauaaaauugacucaagaaaguuugagaaugcuguaugggaucaauacaaagaucugugucacaugcauacagggguagucguggagaagaaaaagaagggagggaaagaagaaauaaccccucauugugccuugcuagacugcaucauguuugaugcagccguguccggaggccuaaaugccacaguuuugagagcuguucuaccuagagacaugguguuuagaacgucaucaccuaaagucguucuguaaggacuagugcaucacauuuaaaagcaucucagccuaccaugagaauaagagaaagaaaaugaagaucaauagcuuauucaucucuuuuucuuuuucguugguguaaagccaacacccugucuaaaaaacauaaauuucuuuaaucauuuugccucuuuucucugugcuucaauuaauaaaaaauggaaagaaccuagaucuaaaaaaaaaaaaaaaaaaaaaaaaaaaaaaaaaaaaaaaaaaaaaaaaaaaaaaaaaaaaaaaaugcaucccccccccccccccccccccccccccccccaaaggcucuuuucagagccaccagaauu

SEQ ID NO: 10628 - RNA, 2092 nt, Artificial Sequence
  mRNA product Design i-2 comprising derived and/or modified sequence from LASV(KAK-428;Clade n.d. (VII))__ANH09741__NP (wt)
ggggcgcugccuacggagguggcagccaucuccuucucggcaucaagcuuaccaugagcaacucaaaggaggugaaaucuuuccuuuggacucagucucucagaagagaacugucugguuauugcaccaacauaaagcuucaaguugucaaagaugcucaggcacuauugcauggccuugacuucucugaaguuagcaauguccaacgucucaugcguaaacagaaaagagaugauaaugauuuaaagaggcuuagagacuugaaucaggccgucaacaaucuaguggaacuaaaaucagugcaacaaaagagcguccuuaaaguugggacacugaauucagaugaucuccugacauuagcugcagaucuggagaagcucaaaucuaaggugguuagaacugaaaggccucugagcucugguguuuacaugggcaaucuuaguucacaacagcuugaccaaaggagagcacuucuaaacaugauuggaauggcuggcgguagucagggaaaccaaccuagccgagaugguguagucagaguaugggaugucaaaaaugcagaccuacucaacaaccaauuuggcacaaugccaagucuuacauuagcaugucugacaaagcagggccaaguugacuuaaaugauguuguguuggcucugacugauuugggccuuauauacacagccaaauacccuaauucaucagauuuagauaggcugucucagaaccacccaguucugaacaugauugaugucaacaagaguucccuaaacauuucgggcuacaauuucagccugggggcagcagugaaagcuggagcuugcaugcuugauggcgggaacaugcuugagacaaucaagaucuccccucaaacaguggacggcauccugaaaucgaucuugaagguuaaaagggcuuuagggauguuugugucagacaccccuggugaaaggaacccuuaugagaacauacuguauaagguaugucuuucagggaauggguggccauacauagcuucaagaacaucaauuguugggagagcaugggaaaauacugugguagaucuugagucaaacaaaaaucagccuaagguugggaacaauggauccaacaagaugcugcagucuucgggauuugcuacugguuugacuuauucucaguugaugacuuugagggauucaauguuacaguuggacccaacugcaaagaccuggauugacauugaggguagaccugaagacccuguugaguuggcccucuuucagcccaguucaggguguuacauacauuucuuuagagagccuacugaccuaaagcaauucaaacaggaugcaaaauacucucaugggauugaugugaaugauuuguucucggcacaaccugguuuaaccagugcuguuuuggaagcacuaccacguaauauggugcugacuugucaaggcucugaugacauuagaaagcuuuuggacucacaggacaggaaagauauaaagcuaauugacaucucauugagcaaggcugaugcaaggaaguucgagaacgaugugugggaucaauuuaaggauuuaugccauaugcacaccgggauaguugucgagaagaagaagaaaggagggaaacaggaaaugacaccacacugugcauugcuagauuguaucauguuugaugcagcugucucuggggggcuuaauguccccacuuugagagcagugcuucccaccgacauggucuucagaacaauaacaaccaaagucguccuguaaggacuagugcaucacauuuaaaagcaucucagccuaccaugagaauaagagaaagaaaaugaagaucaauagcuuauucaucucuuuuucuuuuucguugguguaaagccaacacccugucuaaaaaacauaaauuucuuuaaucauuuugccucuuuucucugugcuucaauuaauaaaaaauggaaagaaccuagaucuaaaaaaaaaaaaaaaaaaaaaaaaaaaaaaaaaaaaaaaaaaaaaaaaaaaaaaaaaaaaaaaaugcaucccccccccccccccccccccccccccccccaaaggcucuuuucagagccaccagaauu

SEQ ID NO: 10629 - RNA, 2092 nt, Artificial Sequence; identical to SEQ ID NO: 10623
  mRNA product Design i-2 comprising derived and/or modified sequence from LASV(Pinneo-NIG-1969;Clade I)__AIT17837__NP (wt)

SEQ ID NO: 10630 - RNA, 2092 nt, Artificial Sequence
  mRNA product Design i-2 comprising derived and/or modified sequence from LASV(ISTH0009-NIG-2011;Clade II)__AIT17405__NP (wt)
ggggcgcugccuacggagguggcagccaucuccuucucggcaucaagcuuaccaugaguguuucuaaggaagugaagucauuucucuggacacagucauugaggagggagcuuucaggcuauugcuccaacauaaaacuucaaguuguuaaggaugcucaggcucuucuucauggucuugacuuuucugaagucagcaaugugcaacgcuuaaugcgcaagcaaaaaagggaugauagugaucugaaacgccucagagauuugaaucaggcugucaacaaucuuguagaacucaaaucgacacaacaaaagaguaucuugagaguugggaccuugaccucagaugaccugcugacauuggcagcugacuuagagaaacuaaagucgaaggucauuagaacagaaaggccucuaagcucagguguuuauauggggaauuugagcacacagcagcuugagcagagaagggcauugcugaacaugauaggcaugguugguggggcucagggcacccaaccuggaagagacggaguuguuagagugugggauguuaagaauccggaucuuuugaacaaccaguucggcaccaugccuagucugacauuagcaugucucaccaaacaaggucaaguugauuugaaugaugccgucuuagcacuaacagaccugggucuaauauacacagcuaaguacccaaauagcuccgaccuagauagacuuucccaaagccauccuauacugaauaugguggacauuaagaaaagcucccugaacauuucugguuacaacuucagcuuaggagcugcagugaaggcuggggccugcaugcucgauggggggaacauguuggagaccaucaagguuacaccucagacaauggauggcaucuugaagucuauuuuaaaaguaaaaagaucuuugggaauguuuguuucagauacaccuggugagagaaacccuuaugagaacauacuuuacaagaucugucuuuccggugacggcuggcccuacauagcuucaaggacuucuauuguggguagggcuugggagaauaccacuguggaucucgagucagauggaaaaccgcaaaaagugggcucugcuggguccaacaaguccuuacagucagcgggauucccaacagggcugaccuauucucaguugaugacacuuaaagacucaaugaugcagcuugacccaagugccaaaaccuggauagacauugaaggucguccagaagacccuguggaaauagcucuuuaccaaccuaugucgggcuguuacauacacuucuucagagagccaacagacuuaaaacaguucaaacaggaugccaaauauucucaugggauugauguggcagaucuuuucccugcucaaccugguuugaccagcgcaguuauugaggcccucccucgcaauauggugcugaccugucaagguucagaugacauuaagagacucuuagacucccaaggaagaagggacauaaagcuuauugacauugcacugagcaaggcugacucuaggagauuugaaaaugcuguuugggaucaguguaaagaccuaugccauaugcauacuggagugguugucgaaaagaagaaaagaggaggcaaagaagaaauaacuccgcacugugcuuuaauggacugcauaauguaugaugcagcugugucaggagggcucaauauaccaguuuuaagagcaguucuucccagagacaugguguuuagaaccucaagccccaaggucguccuguaaggacuagugcaucacauuuaaaagcaucucagccuaccaugagaauaagagaaagaaaaugaagaucaauagcuuauucaucucuuuuucuuuuucguugguguaaagccaacacccugucuaaaaaacauaaauuucuuuaaucauuuugccucuuuucucugugcuucaauuaauaaaaaauggaaagaaccuagaucuaaaaaaaaaaaaaaaaaaaaaaaaaaaaaaaaaaaaaaaaaaaaaaaaaaaaaaaaaaaaaaaaugcaucccccccccccccccccccccccccccccccaaaggcucuuuucagagccaccagaauu

SEQ ID NO: 10631 - RNA, 2092 nt, Artificial Sequence
  mRNA product Design i-2 comprising derived and/or modified sequence from LASV(ISTH2010-NIG-2012;Clade II)__AIT17483__NP (wt)
ggggcgcugccuacggagguggcagccaucuccuucucggcaucaagcuuaccaugagugcuucuaaggaagugaagucauuucucuggacacagucuuugaggagggagcuuucagguuauugcuccaauauaaaacuucaaguuguuaaggaugcucaggcucuccuucauggucuugacuuuucugaagucagcaaugugcagcgcuuaaugcgcaaacaaaagagggaugauagugaucugaaacgucucagagauuugaaucaagcugucaacaaucuuguagaacuuaaaucgacacaacaaaagaguaucuugagaguuggaaccuugaccucagaugacuugcugacacuggcagcugacuuagagaaacugaagucgaaggucauuagaacagaaaggccacuaagcucagguguuuauauggggaauuugaguacacagcagcuugagcagagaagagcauugcugaacuugauaggcaugguugguggggcucagggcacccaaccuggaagagacggaguuguuaggguuugggauguuaaaaauccggaccuuuugaacaaccaguucggcaccaugccuagucugacauuggcaugucucaccaaacaaggucaaguugauuugaaugaugccgucuuagcacugacagaccugggccuaauauacacagccaaguacccaaauagcuccgaccuggacagacuuucucaaagccauccuauauugaauaugguggauacuaagaagagcuccuugaacauuucugguuucaacuucagcuuaggagcugcagugaaagcuggagccuguaugcuugauggggggaacauguuggagaccaucaagguuacaccucagacaauggaugguaucuugaagucuauuuuaaagguaaaaaaaucuuugggaauguuuguuucggacacaccuggugagaggaacccuuaugagaauauacuuuacaagaucugucuuuccggugacggauggccuuacauagcuucaaggacuucuauugugggaagggcuugggagaauaccacuguggaucucgagucagauggaaaaccgcauaaagugggcacugcuggguccaacaagucucugcagucagcgggguucccaacagggcugacuuauucucaguugaugacacuuaaagacucaaugaugcagcuugacccaagugccaaaaccuggauagacauugaaggucguccagaagacccuguggagauagcucuuuaccaaccuaugucagguuguuacauacacuucuucagagaaccaacagacuugaaacaguucaagcaagaugccaaauauucucaugggauugauguggcagaucuuuucccugcucaaccugguuugaccagcgcagucauugaagcccucccccgcaauauggugcuaaccugucaagguucagaugauauuaagagacuccuagacucccaaggaagaagggauauaaagcuuauugacauugcacugagcaaggcugacucuaggagauuugaaaaugcuguuugggaucagugcaaagaucuaugccauaugcacacuggagugguugucgaaaagaagaaaagaggaggcaaagaagaaaucaccccgcacugugcuuuaauggacugcauaauguaugaugcagcugugucaggaggacucaacauaccaguguugagggcaguucuccccagggacaugguguuuagaaccucaagucccaaggucguccuguaaggacuagugcaucacauuuaaaagcaucucagccuaccaugagaauaagagaaagaaaaugaagaucaauagcuuauucaucucuuuuucuuuuucguugguguaaagccaacacccugucuaaaaaacauaaauuucuuuaaucauuuugccucuuuucucugugcuucaauuaauaaaaaauggaaagaaccuagaucuaaaaaaaaaaaaaaaaaaaaaaaaaaaaaaaaaaaaaaaaaaaaaaaaaaaaaaaaaaaaaaaaugcaucccccccccccccccccccccccccccccccaaaggcucuuuucagagccaccagaauu

SEQ ID NO: 10632 - RNA, 2092 nt, Artificial Sequence
  mRNA product Design i-2 comprising derived and/or modified sequence from LASV(Lassa virus/H.sapiens-wt/NGA/2015/ISTH_0543;Clade II)__AVO03640__NP (wt)
ggggcgcugccuacggagguggcagccaucuccuucucggcaucaagcuuaccaugagugcuucuaaggaagugaagucauuucucuggacacagucauugaggagggagcuuucaggcuauugcuccaacauaaaacuucaaguuguuaaggaugcucaggcucuccuucauggucuugacuuuucugaagucagcaaugugcagcgcuuaaugcgcaagcaaaaaagggaugauagugaucugaaacgucucagagauuugaaucaggcugucaacaaccuuguagaacucaaaucgacacaacagaagaguaucuugagaguugggaccuugaccucagacgaccugcugacauuggcagcugacuuagagaaacuaaagucgaaggucauuagaacagaaaggccucuaagcucagguguuuauauggggaauuugaguacacagcagcuugagcagagaagagcauugcugaacaugauaggcaugguugguggggcucaaggcacccaaccuggaagagauggaguuguuagggugugggauguuaagaauccggaucuuuugaacaaccaguucggcaccaugccuagucugacauuagcaugucucaccaaacaaggucaaguugauuugaaugaugccgucuuagcacuaacagaccugggucuaauauacacagcuaaguacccaaauaguuccgaccuagauagacuuucccaaagccauccuauacugaauaugguggacacuaagaaaagcucccugaacauuucuggcuauaacuucagcuuaggagcugcagugaaggcuggggccuguaugcucgauggggggaacauguuggagaccaucaagguuacaccucagacaauggauggcaucuugaagucuauuuuaaaaguaaaaaaaucuuugggaauguuuguuucagauacaccuggugagagaaacccuuaugagaacauacuuuacaagaucugucuuuccggugacggcuggcccuacauagcuucaaggacuucuauuguggguagggcuugggagaacacuacuguggaucucgagucagauggaaaaccgcaaaaagugggcucugcugggucuaacaaguccuuacagucagcgggauucccaacagggcugaccuauucucaguugaugacacuuaaagacucaaugaugcagcuugacccaagugccaaaaccuggauagacauugaaggucguccagaagacccuguggaaauagcucuuuaccaaccuaugucgggcuguuacauacacuucuucagagaaccaacagacuuaaaacaguucaagcaagaugccaaauauucucaugggauugauguggcagaucuuuucccugcucaaccugguuugaccagcgcaguuauugaagcccucccucgcaauauggugcugaccugucaagguucagaugauauuaagagacucuuagauucccaaggaagaaaggacauaaagcuuaucgacauugcacugagcaaggcugacucuaggagauuugaaaaugcuguuugggaucaguguaaagaccuaugccauaugcauacuggagugguugucgaaaagaagaaaagaggaggcaaagaagaaauaacuccgcauugugcuuuaauggauugcauaauguaugaugcagcugugucaggaggacucaauauaccgguuuuaagggcaguucuucccagagacaugguguuuagaaccucaagccccaaggucguccuguaaggacuagugcaucacauuuaaaagcaucucagccuaccaugagaauaagagaaagaaaaugaagaucaauagcuuauucaucucuuuuucuuuuucguugguguaaagccaacacccugucuaaaaaacauaaauuucuuuaaucauuuugccucuuuucucugugcuucaauuaauaaaaaauggaaagaaccuagaucuaaaaaaaaaaaaaaaaaaaaaaaaaaaaaaaaaaaaaaaaaaaaaaaaaaaaaaaaaaaaaaaaugcaucccccccccccccccccccccccccccccccaaaggcucuuuucagagccaccagaauu

SEQ ID NO: 10633 - RNA, 2092 nt, Artificial Sequence
  mRNA product Design i-2 comprising derived and/or modified sequence from LASV(Lassa virus/H.sapiens-wt/NGA/2016/ISTH_0009;Clade II)__AVO03572__NP (wt)
ggggcgcugccuacggagguggcagccaucuccuucucggcaucaagcuuaccaugagugcuucuaaggaaguaaagucauuucucuggacacagucauugaggagggagcuuucaggcuauugcuccaauauaaaacuucaaguuguuaaggaugcucaggcucuccuucauggucuugacuuuucugaagucagcaaugugcagcgcuuaaugcgcaagcaaaaaagggaugauagugaucugaaacgucucagagauuugaaucaggcugucaacaaucuuguagaacucaaaucgacacaacaaaagagcaucuugagaguugggaccuugaccucagaugaccugcugacauuggcagcugacuuagagaaacuaaagucgaaagucauuagaacagaaaggccucuaagcucggguguuuauauggggaauuugaguacacagcagcuugagcagagaagagcauugcugaacaugauaggcaugguugguggggcucagggcacccaaccuggaagagacggaguuguuagggugugggauguuaagaauccggaucucuugaacaaccaguucggcaccaugccuagucugacauuagcaugucucaccaaacaaggucaaguugauuugaaugaugcugucuuagcacuaacagaccugggucuaauauacacagcuaaguacccaaauagcuccgaccuagauagacuuucccaaagccauccuauacugaauaugguggauacuaagaaaagcucccugaacauuucugguuacaacuucagcuuaggagcugcagugaaggcuggggccugcaugcucgauggggggaacauguuggagaccaucaagguuacaccucagacaauggauggcaucuugaagucuauuuugaaagugaaaaaaucucugggaauguuuguuucagacacaccuggugagagaaacccuuaugagaacauacuuuacaagaucugucuuuccggugacggcuggcccuacauagcuucaaggacuucuauuguggguagggcuugggagaauacuacuguggaucucgagucagaugggaaaccgcaaaaagugggcucugcuggguccaacaaguccuuacagucagcgggauucccaacagggcugaccuauucucaguugaugacacuuaaagacucaaugaugcagcuugacccaagugccaaaaccuggauagacauugaaggucguccagaggacccuguggaaauagcucuuuaccaacccaugucgggcuguuacauacacuucuucagagaaccaacagacuuaaaacaguucaagcaagaugccaaauauucucaugggauugauguggcagaccuuuucccugcucaaccugguuugaccagcgcgguuauugaagcccucccucgcaauauggugcuaaccugucaagguucagaugauauuaagagacucuuagacucccaaggaagaagggacauaaagcuuauugacauugcacugagcaaggcugacucuaggagauuugagaaugcuguuugggaucaguguaaagaccuaugccauaugcauacuggagugguugucgaaaagaagaaaagaggaggcaaagaagaaauaacuccgcauugugcuuuaauggacugcauaauguaugaugcagcugugucaggaggacuuaauauaccaguuuuaagagcaguucuucccagagacaugguguuuagaaccucaagccccaaggucguccuguaaggacuagugcaucacauuuaaaagcaucucagccuaccaugagaauaagagaaagaaaaugaagaucaauagcuuauucaucucuuuuucuuuuucguugguguaaagccaacacccugucuaaaaaacauaaauuucuuuaaucauuuugccucuuuucucugugcuucaauuaauaaaaaauggaaagaaccuagaucuaaaaaaaaaaaaaaaaaaaaaaaaaaaaaaaaaaaaaaaaaaaaaaaaaaaaaaaaaaaaaaaaugcaucccccccccccccccccccccccccccccccaaaggcucuuuucagagccaccagaauu

SEQ ID NO: 10634 - RNA, 2092 nt, Artificial Sequence
  mRNA product Design i-2 comprising derived and/or modified sequence from LASV(Lassa virus/H.sapiens-wt/NGA/2016/ISTH_0017;Clade II)__AVO03568__NP (wt)
ggggcgcugccuacggagguggcagccaucuccuucucggcaucaagcuuaccaugagugcuucuaaggaagugaagucauuccucuggacacagucauugaggagggagcuuucagguuauugcuccagcauaaaacuucaaguugucaaggaugcucaagcucuccuucauggucuugacuuuucugaagucagcaaugugcagcgcuuaaugcgcaaacaaaagagggaugauagcgaucugaaacgucucagagauuugaaucaggcugucaacaaucuuguagaacucaaaucgacacaacaaaagagcaucuugagaguugggacccugaccucagaugaccugcugacauuggcagcugacuuagagaaacugaagucaaaggucauuagaacagaaaggccacuaagcucagguguuuauauggggaauuugaguacacagcaacuugagcaaagaagagcauugcugaacaugauaggcauggcugguggggcucagggcacccaaccuggaagagacggaguuguuagggugugggauguuaagaauccggaucuuuugaacaaucaguucggcaccaugccuagucugacauuagcaugucucaccaaacagggucaaguugauuuaaaugaugcugucuuagcauuaacagaccugggucugauauacacagcuaaguauccaaauagcuccgaccuggacagacuuucucaaagccauccuauacugaauaugguggacacuaagaagagcuccuugaacauuucugguuacaacuucagcuugggagcugcagugaaagcuggagcuuguaugcuugauggggggaacauguuggagaccaucaagguuacaccucagacaauggauggcaucuugaagucuauuuuaaagguaaaaagaucuuugggaauguuuguuucagaugcaccuggugagaggaacccuuacgagaacauacuuuacaagaucugucuuucaggugacggcuggcccuacauagcuucaaggacuucuauuguggguagagcuugggagaauacuacuguggaucucgagucagaugggaaaccacaaaaagugggugcuacuggguccaacaaaucuuuacagucagcaggguuuccaacagggcugacuuauucucaguugaugacacuuaaagacucaaugaugcagcuugacccaagugccaaaaccuggauagacauugaaggucguccagaagacccuguggaaguggcucuuuaccaaccugugucgggcuguuacauacacuuuuuuagagaaccaacagauuuaaaacaguucaagcaagaugccaaauauucucaugggauugauguggcggaucuuuucccugcucaaccugguuugaccagcgcagucauugaggcccucccucgcaacaugguacugaccugucaagguucagaugauauuaagaaacucuuggacucccaaggaagaaaggacauaaagcuuauugacauugcgcugagcaaggccgauucuaggagauuugaaaaugcuguuugggaucagugcaaagaucuaugccauaugcauacuggagugguuguugaaaagaagaaaagaggaggcaaagaagaaauuaccccgcacugugcuuuaauggacugcauaauguaugaugcagcugugucuggaggacucaauaucccagucuuaagagcaguucuccccagagacaugguguuuagaaccucaagccccaaggucguccuguaaggacuagugcaucacauuuaaaagcaucucagccuaccaugagaauaagagaaagaaaaugaagaucaauagcuuauucaucucuuuuucuuuuucguugguguaaagccaacacccugucuaaaaaacauaaauuucuuuaaucauuuugccucuuuucucugugcuucaauuaauaaaaaauggaaagaaccuagaucuaaaaaaaaaaaaaaaaaaaaaaaaaaaaaaaaaaaaaaaaaaaaaaaaaaaaaaaaaaaaaaaaugcaucccccccccccccccccccccccccccccccaaaggcucuuuucagagccaccagaauu

SEQ ID NO: 10635 - RNA, 2092 nt, Artificial Sequence
  mRNA product Design i-2 comprising derived and/or modified sequence from LASV(Lassa virus/H.sapiens-wt/NGA/2018/ISTH_0959;Clade II)__AVV65100__NP (wt)
ggggcgcugccuacggagguggcagccaucuccuucucggcaucaagcuuaccaugagugcuucuaaggaagugaagucauuucucuggacacagucuuugaggagggagcuuucagguuauugcuccaauauaaaacuucaaguuguuaaggaugcucaggcucuccuucauggucuugacuuuucugaagucagcaaugugcagcgcuuaaugcgcaaacaaaagagggaugauagugaucugaagcgucucagagauuugaaucaggcugucaacaaucuuguagaacuuaaaucgacacaacaaaagagcaucuugagaguugggacccugaccucagaugaccugcugacacuggcagcugacuuagagaaacuaaagucgaaggucauuagaacagaaaggccacuaagcucagguguuuauauggggaauuugaguacacagcagcuugagcagagaagggcauugcugaacuugauaggcaugguugguggggcucagggcacccagccuggaagagacggaguuguuaggguuugggauguuaagaauccggaccuucugaacaaccaguucggcaccaugccuagucugacauuggcaugucucaccaaacaaggucaaguugauuugaaugaugucgucuuagcacugacagaccugggccuaauauacacagccaaguacccaaauagcuccgaccuggacagacuuucccagagccauccuauacugaauaugguggacacaaagaagagcucuuugaacauuucugguuucaacuucagcuuaggagcugcaguaaaagcuggagcuuguaugcuugauggggggaacauguuagagaccaucaagguuacaccucagacaauggauggcaucuugaagucuauuuuaaagguaaaaaaaucuuugggaauguuuguuucggacacaccuggugagaggaacccuuaugagaauauacuuuacaagaucugucuuuccggugacggauggcccuauauagcuucaaggacuuccauuguggguagggcuugggagaauaccacuguggaucucgagucagauggaaaaccgcauaaaguaggcacugcuggguccaacaagucuuuacagucagcgggguucccaacagggcugacuuauucucaguugaugacacuuaaagacucaaugaugcagcuugacccaagugccaagaccuggauagacauugaaggucguccagaagacccuguggagauagcccucuaccaaccuaugucaggcuguuacauacacuucuucagagaaccaacagacuugaaacaauucaagcaagaugccaaauauucucaugggauugauguggcagaucuuuucccugcucaaccugguuugaccagcgcagucauugaagcccucccucgcaauauggugcuaaccugucaagguucagaugauauuaagagacucuuagacucccaaggaagaaaggauauaaagcuuauugacauugcacugagcaagacugacucuaggagauuugaaaaugcuguuugggaucaguguaaggaucuaugccauaugcacacuggagugguugucgaaaagaagaagagaggaggcaaagaagagaucaccccgcacugugcuuuaauggacugcauaauguaugaugcagcugugucaggaggacucaauauaccaguuuuaagggcaguucuccccagggacaugguguuuagaaccucaagucccaaggucguccuguaaggacuagugcaucacauuuaaaagcaucucagccuaccaugagaauaagagaaagaaaaugaagaucaauagcuuauucaucucuuuuucuuuuucguugguguaaagccaacacccugucuaaaaaacauaaauuucuuuaaucauuuugccucuuuucucugugcuucaauuaauaaaaaauggaaagaaccuagaucuaaaaaaaaaaaaaaaaaaaaaaaaaaaaaaaaaaaaaaaaaaaaaaaaaaaaaaaaaaaaaaaaugcaucccccccccccccccccccccccccccccccaaaggcucuuuucagagccaccagaauu

SEQ ID NO: 10636 - RNA, 2092 nt, Artificial Sequence
  mRNA product Design i-2 comprising derived and/or modified sequence from LASV(LASV003-NIG-2008;Clade II)__AIT17581__NP (wt)
ggggcgcugccuacggagguggcagccaucuccuucucggcaucaagcuuaccaugagugcuuccaaggaagugaagucauuucucuggacacagucauugaggagggagcuuucagguuauugcuccagcauaaagcuucaaguugucaaggaugcucaggcucuucuucauggucuugacuuuucugaaguuagcaaugugcagcgcuuaaugcgcaaacaaaaaagggaugauagugaucugaaacgucucagagaucugaaucaggcugucaacaaucuuguggaacucaaaucaacacaacaaaagagugucuugagaguuggaaccuugaccucagaugaccugcugacauuggcagcugacuuagagaaacuaaagucgaaggucaucagaacagaaaggccacuaagcucagguguuuauauggggaauuugagugcacagcaacuugagcaaagaagaacauugcugaacaugauaggcaugguugguggggcucagggcacucaaccuggaagagacggaguuguuagggugugggauguuaagaauccagaucuuuugaacaaucaguucggcaccaugcccagucugacauuagcaugucucacuaaacaaggccagguugauuugaaugaugucgucuuagcacuaacagaccugggucuaauauacacagcuaaguacccuaauagcuccgaccuggacagacuuucccaaagucauccuauauugaguaugguggacaccaagaagagcuccuugaacauuucugguuacaacuucagcuuaggagcugcagugaaagcuggagcuuguaugcuugauggggggaacauguuggaaaccaucaagguuacaccucagacaauggauggcaucuugaagucuauuuuaaagguaaaaaaauccuugggaauguuuguuucagacacaccuggugagaggaacccuuaugagaacauacuuuacaagaucugucuuucuggugacgguuggcccuauauagcuucaaggacuucuauuguggguagagcuugggagaauacuacuguggaucucgagucagauggaaaaccacaaaaagugggaacugcuggguccaauaagucuuuacagucagcgggguuuccaacagggcugacuuacucucaguugaugacacuuaaagacucaaugaugcagcuugacccaagugccaaaaccuggauagacauugaaggucguccagaagacccuguggaaauagcucuauaccagcccaugucgggcugcuacauacacuucuucagagaaccaacagacuuaaaacaguucaagcaagaugccaaauauucucauggaauugauguaacagaucuuuucccugcucaaccuggauuaaccagugcagucauugaagcccucccucgcaauaugguacugaccugucaagguucagaugacaucaagcgacucuuggauucccaaggaaggagggacauaaagcuuauugacauugcauugagcaaggcugacucuagaagauuugaaaaugcuguuugggaucagugcaaagaucuaugccauaugcacacuggagugguugucgaaaagaagaaaagaggaggcaaagaagaaauuaccccacauugugcucuaauggacugcauaauguaugaugcagcugugucaggaggacucaauauaccaguuuugagagcaguccuccccagagacaugguguuuagaaccucaagccccaaggucguccuguaaggacuagugcaucacauuuaaaagcaucucagccuaccaugagaauaagagaaagaaaaugaagaucaauagcuuauucaucucuuuuucuuuuucguugguguaaagccaacacccugucuaaaaaacauaaauuucuuuaaucauuuugccucuuuucucugugcuucaauuaauaaaaaauggaaagaaccuagaucuaaaaaaaaaaaaaaaaaaaaaaaaaaaaaaaaaaaaaaaaaaaaaaaaaaaaaaaaaaaaaaaaugcaucccccccccccccccccccccccccccccccaaaggcucuuuucagagccaccagaauu

SEQ ID NO: 10637 - RNA, 2092 nt, Artificial Sequence
  mRNA product Design i-2 comprising derived and/or modified sequence from LASV(LASV035-NIG-2009;Clade II)__AIT17589__NP (wt)
ggggcgcugccuacggagguggcagccaucuccuucucggcaucaagcuuaccaugagugcuuccaaggaaguaaagucauuccucuggacacagucauugaggagggaacucucagguuacugcucuaguauaaagcuucaaguuguuaaggaugcucaggcucuccuucauggucuugacuuuucugaggucagcaauguucagcgcuugaugcgcaaacaaaaaagggacgacagugaucugaaacgucucagagaucugaaccaggcugucaacaaucuuguagaacucaaaucaacacaacaaaagaguauccugagaguugggaccuugaccucagaugaccugcugacauuggcagcugacuuagagaaacuuaagucgaaggucaucagaacagaaaggccacuaagcucagguguuuacauggggaauuugagugcacagcaacuugagcaaagaagagcauugcugaacaugauaggcaugguugguggagcucaggguacccaaccuggaagagacggaguuguuagggugugggaugucaagaauccggaucuuuugaacaaccaauucggcaccaugccuagccugacauuagcaugucucaccaaacaaggucaaguugauuugaaugaugcugucuuggcacuaacagaccugggucuaauauacacagcuaaguacccaaacagcuccgaccuggacagacuuucccaaagccauccuauacugaauaugguggacacuaagaagagcuccuugaacauuucugguuacaacuucaguuuaggagcugcagugaaagcuggagcuuguaugcuugauggggggaauauguuggagacuaucaagguuacaccucagacaauggauggcaucuugaaaucuaucuuaaagguaaaaagaucuuugggaauguuuguuucagacacaccuggugagaggaacccuuaugagaacauacuuuacaagaucugucuuucuggggacgguuggcccuacauagcuucaagaacuuccauuguggguagagcuugggagaacaccacuguggaucucgagucagauggaaaaccacaaaaggugggcacuacuggguccaacaagucuuuacagucagcgggguucccaacaggguugaccuauucucaguugaugacacuuaaagacucaaugaugcaacuugacccaagugcuaaaaccuggauagacauugaaggucgaccagaagacccuguggaaauagcucuuuaccaaccuaugucgggcuguuacauacacuucuucagagaaccaacagacuuaaaacaguucaagcaagaugccaaauauucucaugggauugauguagcagaucuuuucccugcucaaccuggcuugaccagugcagucauugaagcccuuccucgcaauauggugcugaccugucaggguucagacgauauuaagaaacucuuagauucccaaggaagaagggacauaaagcuuauugacauugcacugaguaaggcugacucuaggaaguuugaaaaugcuguuugggaccaaugcaaggaucuaugccauaugcauacuggggugguuguugaaaagaagaaaagaggaggcaaagaagaaauuaccccgcacugugcucuaauggauugcauaauguaugaugcagcugugucaggaggacucaauauaccaguuuugagagcaguucuccccagagacaugguguuuagaaccucaagccccaaggucguccuguaaggacuagugcaucacauuuaaaagcaucucagccuaccaugagaauaagagaaagaaaaugaagaucaauagcuuauucaucucuuuuucuuuuucguugguguaaagccaacacccugucuaaaaaacauaaauuucuuuaaucauuuugccucuuuucucugugcuucaauuaauaaaaaauggaaagaaccuagaucuaaaaaaaaaaaaaaaaaaaaaaaaaaaaaaaaaaaaaaaaaaaaaaaaaaaaaaaaaaaaaaaaugcaucccccccccccccccccccccccccccccccaaaggcucuuuucagagccaccagaauu

SEQ ID NO: 10638 - RNA, 2092 nt, Artificial Sequence
  mRNA product Design i-2 comprising derived and/or modified sequence from LASV(LASV1000-NIG-2009;Clade II)__AIT17783__NP (wt)
ggggcgcugccuacggagguggcagccaucuccuucucggcaucaagcuuaccaugagugcuucuaaggaagugaagucauuucucuggacacagucauugaggagggagcuuucagguuacugcuccaacauaaaacuucaagucguuaaggaugcucaggcucuccuucauggucuugacuucucugaagucagcaaugugcagcgcuuaaugcgcaaacaaaaaagggaugauagugauuugaaacgucucagagauuugaaucaggcugucaacaaucuuguagaacucaaaucgacacaacaaaaaaguaucuugagaguugggaccuugaccucagaugaccugcugacauuagcagcugacuuagagaaauuaaagucgaaggucauuagaacagaaaggccacuaagcucagguguuuauauggggaauuugaguacacagcagcuugagcagagaagagcacugcugaacaugauaggcaugguugguggggcucagggcacccaaccuggaagagacggaguuguuagggugugggauguuaagaauccggaucuuuugaacaaccaguucggcaccaugccuagucugacauuagcaugucucaccaaacaaggucaaguugauuugaaugauguugucuuagcacuaacagaccugggucuaauauacacagcuaaguacccaaauagcuccgaccuggacagacuuucccaaagccauccuauacugaauaugguggacacuaagaagagcuccuugaacauuucugguuacaacuucagcuuaggagcugcaguaaaagcuggagcuuguaugcuugauggggggaacauguuggagaccaucaagguuacaccccagacaauggauggcaucuuaaagucuauuuuaaagguaaaaaaaucuuugggaauguuugucucagacacaccuggugagaggaacccuuaugagaauauacuuuacaagaucugucuuuccggugacggcuggcccuacauagcuucaaggacuucuauuguggguagagcuugggagaacaccacuguggaucucgagucagauggaaagccgcaaaaagugggcacugcuggguccaacaagucuuuacagucagcgggguucccaacagggcugaccuauucucaguuaaugacacuuaaagacucaaugaugcagcuugauccaagugccaaaaccuggauagacauugaaggucguccagaagacccuguggaaauagcucuuuaccaaccugugucgggcuguuacauacacuucuucagagaaccaacagacuuaaaacaguucaagcaagaugccaaauauucucaugggauugauguggcagaucuuuucccugcccaaccugguuugaccagcgcagucauugaagcccucccucgcaauaugguacugaccugucaagguucagaugauauuaagagacucuuggacucccaaggaagaagggacauaaagcuuauugacauugcacugagcaaggcugacuccaggagauuugaaaaugcuguuugggaucagugcaaggaucuaugccauaugcauacuggagugguugucgaaaagaagaaaagaggaggcaaagaagaaaucaccccgcacugugcuuugauggacugcauaauguaugaugcagcugugucaggaggacucaauauaccaguuuuaagagcaguucuccccagggacaugguguuuagaaccucaagccccaaggucguccuguaaggacuagugcaucacauuuaaaagcaucucagccuaccaugagaauaagagaaagaaaaugaagaucaauagcuuauucaucucuuuuucuuuuucguugguguaaagccaacacccugucuaaaaaacauaaauuucuuuaaucauuuugccucuuuucucugugcuucaauuaauaaaaaauggaaagaaccuagaucuaaaaaaaaaaaaaaaaaaaaaaaaaaaaaaaaaaaaaaaaaaaaaaaaaaaaaaaaaaaaaaaaugcaucccccccccccccccccccccccccccccccaaaggcucuuuucagagccaccagaauu

SEQ ID NO: 10639 - RNA, 2092 nt, Artificial Sequence
  mRNA product Design i-2 comprising derived and/or modified sequence from LASV(LASV221-NIG-2010;Clade II)__AIT17625__NP (wt)
ggggcgcugccuacggagguggcagccaucuccuucucggcaucaagcuuaccaugagugcuucuaaggaaguaaagucauuucucuggacacagucauugaggagggagcuuucagguuauugcuccagcauaaaacuucaaguuguuaaggaugcucaggcucuccuucauggucuugacuuuucugaagucagcaaugugcagcgcuuaaugcgcaaacaaaggagggaugauagugaucugaaacgucucagagauuugaaucaggcugucaacaaucuuguagaacucaaaucgacacaacaaaagagcaucuugagaguugggaccuugaccucggaugaccugcugacauuggcagccgaccuagaaaaacuaaagucgaaggucauuagaacagaaaggccacuaagcucagguguuuauauggggaauuugagcacacagcagcuugagcaaagaagagcauugcugaacaugauaggcaugguugguggggcccagggcacccaaccuggaagggacggaguuguuagagugugggauguuaagaauccggaucuuuugaacaaucaguucggcaccaugccuagucugacauuagcaugucucaccaaacaaggccaaguugauuugaaugaugcugucuuggcacuaacagaucugggucuaauauacacagcuaaguauccaaauagcuccgaccuggacagacuuucccaaagccauccuauacugaacaugguggacaccaagaagagcuccuugaacauuucuggcuacaacuucagcuuaggagcugcagugaaagcuggagcuuguaugcuugaugggggaaacauguuggagaccauuaaggucacaccucagacaguggauggcaucuugaagucuauuuuaaagguaaaaagaucuuugggaauguuuguuucagauacaccuggugagaggaacccuuacgagaacauacuuuacaagaucugucuuucuggcgacggcuggcccuacauagcuucaaggacuucuauuguggguagagcuugggagaauacuacuguggaucucgagucagauggaaaaccacagaaaguggguacugcuggguccaacaagucuuuacagucagcgggguuuccaacagggcugaccuauucucaguugaugacacuuaaagacucgaugaugcagcuugacccaagugccaaaaccuggauagacauugagggucguccagaagacccuguggaaauugcucuuuaccaaccuaugucuggcuguuacauacacuucuucagagaaccaacagauuuaaaacaguucaagcaagaugccaaauauucucaugggauugauguggcagaucuuuucccugcucaaccugguuugaccagugcagucauugaagcucucccucgcaacaugguacugaccugucaagguucagaugauauuaagagacucuuggacucccaaggaagaagggacauaaagcuuauugacauugcacugagcaaggcugauucuaggaaauuugaaaaugcuguuugggaucagugcaaagaucuaugccauaugcauacuggagugguugucgaaaagaagaaaagaggagguaaagaagaaaucaccccgcacugugcuuuaauggacugcauaauguaugaugcagcugugucaggaggacucaacauaccaguucuaagagcaguucuccccagagacaugguguuuagaaccucgagccccaaagucguccuguaaggacuagugcaucacauuuaaaagcaucucagccuaccaugagaauaagagaaagaaaaugaagaucaauagcuuauucaucucuuuuucuuuuucguugguguaaagccaacacccugucuaaaaaacauaaauuucuuuaaucauuuugccucuuuucucugugcuucaauuaauaaaaaauggaaagaaccuagaucuaaaaaaaaaaaaaaaaaaaaaaaaaaaaaaaaaaaaaaaaaaaaaaaaaaaaaaaaaaaaaaaaugcaucccccccccccccccccccccccccccccccaaaggcucuuuucagagccaccagaauu

SEQ ID NO: 10640 - RNA, 2092 nt, Artificial Sequence
  mRNA product Design i-2 comprising derived and/or modified sequence from LASV(LASV237-NIG-2010;Clade II)__AIT17639__NP (wt)
ggggcgcugccuacggagguggcagccaucuccuucucggcaucaagcuuaccaugagugcuucuaaggaagugaagucauuucucuggacacagucauugaggagggagcuuucaggcuauugcuccaacauaaaacuucaaguuguuaaggaugcucaggcucuucuucauggucuugacuuuucugaagucagcaaugugcagcgcuuaaugcgcaagcaaaaaagggaugauagugaucugaaacgucucagagauuugaaucaggcugucaacaaucuuguagaacucaaaucgacacaacaaaagaguaucuugagaguugggaccuugacuucagaugaucugcugacauuggcagcugacuuagagaaacuaaagucgaaagucauuagaacagaaaggccucuaagcucagguguuuacauggggaauuugagcacacagcagcuugagcagagaagggcauugcugaacaugauaggcaugguugguggggcucaaggcacccaaccuggaagagacggaguuguuagggugugggauguuaagaauccggaucuuuugaacaaccaguucggcaccaugccuagucugacauuagcaugucucaccaaacaaggucaaguugauuugaaugaugccgucuuagcacuaacagaccugggucuaauauacacagcuaaguacccaaauagcuccgaccuagauagacuuucccaaagccauccuauacugaauaugguggacauuaagaaaagcucccugaacauuucugguuacaacuucagcuuaggagcugcagugaaggcuggggccugcaugcucgauggggggaacauguuggagaccaucaagguuacaccucagacaauggauggcaucuugaagucuauuuuaaaaguaaaaagaucuuugggaauguuuguuucagauacaccuggugagagaaacccuuaugagaacauacuuuacaagaucugucuuuccggugacggcuggcccuacauagcuucaaggacuucuauuguggguagggcuugggagaauacuacuguggaucucgagucagauggaaaaccgcaaaaagugggcucugcuggguccaacaaguccuuacagucagcgggauucccaacagggcugaccuauucucaguugaugacacuuaaagacucaaugaugcagcuugacccaagugccaaaaccuggauagacauugaaggucguccagaagacccuguggaaauagcucuuuaccaaccuaugucgggcuguuacauacacuucuucagagagccaacagacuuaaaacaguucaagcaggaugccaaauauucucaugggauugauguggcagaucuuuucccugcucaaccugguuugaccagcgcaguuauugaagcccucccucgcaauauggugcugaccugucaagguucagaugauauuaagagacucuuagacucccaaggaagaagggacauaaagcuuauugacauugcacugagcaaggcugacucuaggagauuugaaaaugcuguuugggaucaguguaaagaccuaugccauaugcauacuggagugguugucgaaaagaagaaaagaggaggcaaagaagaaauaacuccgcacugugcuuuaauggacugcauaauguaugaugcagcugugucaggagggcucaauauaccaguuuuaagagcaguucuucccagagacaugguguuuagaaccucaagccccaaggucguccuguaaggacuagugcaucacauuuaaaagcaucucagccuaccaugagaauaagagaaagaaaaugaagaucaauagcuuauucaucucuuuuucuuuuucguugguguaaagccaacacccugucuaaaaaacauaaauuucuuuaaucauuuugccucuuuucucugugcuucaauuaauaaaaaauggaaagaaccuagaucuaaaaaaaaaaaaaaaaaaaaaaaaaaaaaaaaaaaaaaaaaaaaaaaaaaaaaaaaaaaaaaaaugcaucccccccccccccccccccccccccccccccaaaggcucuuuucagagccaccagaauu

SEQ ID NO: 10641 - RNA, 2092 nt, Artificial Sequence
  mRNA product Design i-2 comprising derived and/or modified sequence from LASV(LASV253-NIG-2011;Clade II)__AIT17671__NP (wt)
ggggcgcugccuacggagguggcagccaucuccuucucggcaucaagcuuaccaugagugcuuccaaggaagugaagucauuccucuggacacagucauugaggagggagcuuucagguuauugcuccagcauaaagcuucaaguugucaaggaugcucaggcucuccuucauggucucgacuuuucugaaguuagcaaugugcagcgcuuaaugcgcaaacaaaaaagggaugauagugaucugaaacgucucagagaucugaaucaggcugucaacaaucuuguggaacuuaaaucaacacaacaaaagagugucuugagaguugggaccuugaccucagaugaccugcugacauuggcagcugacuuagagaaacuaaagucgaaggucaucagaacagaaaggccacuaagcucagguguuuauauggggaauuugaguacacagcaacuugagcagaggagagcauuacugaacaugauaggcaugguugguggggcucagggcacccaaccuggaagagacggaguuguuagggugugggauguuaaaaauccagaucuuuugaacaaucaguucggcaccaugcccagucugacauuagcaugucucacuaaacaaggccagguugauuugaaugaugucgucuuagcacuaacagaccugggucuaauauacacagcuaaguacccuaauagcuccgaccuggacagacuuucccaaagucauccuauauugaacaugguggacaccaagaagagcuccuugaacauuucugguuacaacuucagcuuaggagcugcagugaaagcuggagcuuguaugcuugaugggggaaacauguuggaaaccaucaagguuacaccucagacaauggauggcaucuugaagucuauuuuaaaggugaaaaaauccuugggaauguuuguuucagacacaccuggugagaggaauccuuaugagaacauacuuuacaagaucugucucucuggugacgguuggcccuacauagcuucaaggacuucaauuguggguagagcuugggagaauacuacuguggaucucgagucagauggaaaaccacaaaaagugggaacugcuggguccaauaagucuuuacagucagcgggguucccaacagggcugacuuacucucaguugaugacacuuaaagacucaaugaugcaacuugacccaagugccaaaaccuggauagacauugaaggucguccagaagacccuguggaaauagcucuuuaccagcccaugucgggcugcuacauacacuucuucagagaaccaacagacuugaaacaguucaagcaagaugccaaauauucucaugggauugauguaacagaucuuuucccugcucaaccuggauuaaccagugcagucauugaagcccucccucgcaauaugguacugaccugucaaggcucagaugacaucaagagacucuuggauucccaaggaagaagggacauaaaacuuauugacauugcauugagcaaggcugacucuaggagauuugaaaaugcuguuugggaucagugcaaagaucuaugccauaugcacacuggagugguugucgaaaagaagaaaagaggaggcaaagaagaaauuaccccacauugugcucuaauggacugcauaauguaugaugcagcugugucaggaggacucaauauaccaguuuuaagagcgguccuccccagagacaugguguuuagaaccucaagccccaaggucguccuguaaggacuagugcaucacauuuaaaagcaucucagccuaccaugagaauaagagaaagaaaaugaagaucaauagcuuauucaucucuuuuucuuuuucguugguguaaagccaacacccugucuaaaaaacauaaauuucuuuaaucauuuugccucuuuucucugugcuucaauuaauaaaaaauggaaagaaccuagaucuaaaaaaaaaaaaaaaaaaaaaaaaaaaaaaaaaaaaaaaaaaaaaaaaaaaaaaaaaaaaaaaaugcaucccccccccccccccccccccccccccccccaaaggcucuuuucagagccaccagaauu

SEQ ID NO: 10642 - RNA, 2092 nt, Artificial Sequence
  mRNA product Design i-2 comprising derived and/or modified sequence from LASV(LASV254-NIG-2011;Clade II)__AIT17675__NP (wt)
ggggcgcugccuacggagguggcagccaucuccuucucggcaucaagcuuaccaugagugcuucuaaggaagugaagucauuucucuggacacagucauugagaagggaacuuucagguuauugcuccagcauaaagcuucaaguuguuaaagaugcucaggcucuccuucauggucuugacuuuucugaagucagcaaugugcagcgcuuaaugcgcaaacaaaaaagggaugauagugaucugaaacgucucagagaucugaaucaggcugucaacaaucuuguggaacucaaaucaacacaacaaaagagugucuugagaguugggaccuuaaccucagaugaccugcugacauuggcagcugacuuagagaaacuaaagucaaaggucauuagaacagaaagaccacugagcucagguguuuauauggggaauuugaguacacagcagcuugagcaaaggagagcauuguugaacaugauaggcaugguugguggggcucagggcacccaaccuggaagagacggagugguuagggugugggauguuaaaaauccggaucuuuugaacaaccaguuuggcaccaugccuagucugacauuagcaugucucacuaaacaaggucaaguugauuugaaugaugccgucuuagcacuaacagaccugggucuaauauauacagcuaaguacccaaauagcuccgaccuggacagacuuucucaaagucauccuauacugaacaugguggacacuaagaaaagcuccuugaacauuucugguuacaacuucagcuuaggagcugcagugaaagcuggagcuuguaugcuugauggggggaacauguuggagaccaucaagguuacaccucagacaauggauggcauccugaagucuauuuuaaagguaaaaaaauccuugggaauguuuguuucagauacaccuggugagaggaacccuuaugagaacauacuuuacaagaucugucuuuccggugacggcuggcccuacauagcuucuaggacuuccauugugggcagagcuugggagaauaccaucguggaucucgagucagaugggaaaccacaaaaggugggcacugcugggucuaacaagucuuuacagucagcgggguuuccaacagggcugaccuauucucaguugaugacacuuaaagacucaaugaugcagcuugacccaagugccaaaaccuggauagacauugaaggucguccagaggacccuguagaaauagcucuuuaccaaccuaugucgggcuguuauauacauuucuucagagagccaacagacuuaaaacaguucaaacaagaugccaaauauucucaugggauugauguagcagaucuuuucccugcucaaccuggcuugaccagugcagucauugaagcccucccccgcaauaugguccugaccugucaagguucagaugacauuaagagacucuuggauucucaagggagaagggacauaaagcuuauugacauugcacugagcaaggcugacucuaggagauuugaaaaugcuguuugggaucagugcaaagaucuaugccauaugcacacuggaguggucgucgaaaagaagaaaagagggggcaaagaagaaauuaccccgcauugugcuuuaauggacugcauaauguaugaugcagcugugucaggaggacucaauauaccaguuuuaagagcaguucuccccagagauaugguguuuagaaccucaagccccaaagucguccuguaaggacuagugcaucacauuuaaaagcaucucagccuaccaugagaauaagagaaagaaaaugaagaucaauagcuuauucaucucuuuuucuuuuucguugguguaaagccaacacccugucuaaaaaacauaaauuucuuuaaucauuuugccucuuuucucugugcuucaauuaauaaaaaauggaaagaaccuagaucuaaaaaaaaaaaaaaaaaaaaaaaaaaaaaaaaaaaaaaaaaaaaaaaaaaaaaaaaaaaaaaaaugcaucccccccccccccccccccccccccccccccaaaggcucuuuucagagccaccagaauu

SEQ ID NO: 10643 - RNA, 2092 nt, Artificial Sequence
  mRNA product Design i-2 comprising derived and/or modified sequence from LASV(Nig08-04;Clade II)__ADU56611__NP (wt)
ggggcgcugccuacggagguggcagccaucuccuucucggcaucaagcuuaccaugagugcuuccaaggaagugaaaucauuccuuuggacacagucauugaggagagagcuuucaggcuauugcucuaauauaaaacuccaaguggucaaggaugcucaggcccuucugcauggucucgacuucucugaggucagcaauguccagcgcuugaugcgcaaacagaaaagagaugacggugaccuaaaacgucuuagagaccuaaaucaggcaguuaacaaccuugucgagcucaagucaacacaacaaaagaguguucugaggguuggaacauugaccucagacgacuugcugacuuuagcagcugaucuagagaaauugaagucaaagguuauuaggacggagagaccauuaaguucagguguguauauggggaacuugagcacacaacaacuugagcagaggaaggcguuguugaguaugauaggcauggucgguggugcucagggaacccaaccuggaagagacggaguugucagagugugggaugucaaaaacccggaccuccucaacaaccaauuuggcaccaugccuaguuuaacgcuagcaugucucacuaaacagggucagguugacuuaaaugacgccguucuggcgcuaacagacuugggauuaauauacacagcuaaauaccccaauaguuccgaccuagacagacuuucccagagccauccuauacugaauaugguagauaccaagaagagcucccuaaauauuucugguuauaauuuuaguuugggagcugcagugaaggccggagcuugcaugcucgauggggguaacauguuggaaacuaucaaggugacgccucagacaauggauggcauucugaagucuauucuaaagguaaaaaggucccugggaauguuuguuucagacacaccuggugaaagaaacccuuaugaaaacauacuuuacaaaauuugucucucuggggacggcuggcccuacauagcuucaagaaccuccauuguggguagagcuugggagaauaccacuguagaccuugagucagaugggaaaccacagaaaguggguacugcuggauccaacaaaucucugcaaucugcuggguucccaacagggcugaccuauucucaacugaugacacucaaagauucaaugaugcaacuugacccaagcgccaaaaccuggauagacauugaaggucguccagaagacccuguugagauagcucuuuaccaaccuaugucaggcuguuauauacauuucuucagagaaccaacggauuuaaaacaguucaaacaagaugccaaauauucucaugggauugaugugacagaucucuuuucugcucagccuggucuaaccagugcagucauugaggcucucccccgcaacaugguguugacgugccaagguucagacgacauuaaaaaacucuuggauucucaggggagaagggacaucaagcucauugacaucucauuaaauaaggcugauucuaggagauuugaaaaugcugucugggaucaguguaaagauuugugucacaugcacacuggagugguuguugagaaaaagaagagaggaggcaaagaggagaucacuccacauugugcuuuaauggauugcauaauguuugacgcagcugugucaggaggacucaauauaccaaucuugagagcuguucucccaagagauaugguguucagaacuucaagucccaaagucguccuguaaggacuagugcaucacauuuaaaagcaucucagccuaccaugagaauaagagaaagaaaaugaagaucaauagcuuauucaucucuuuuucuuuuucguugguguaaagccaacacccugucuaaaaaacauaaauuucuuuaaucauuuugccucuuuucucugugcuucaauuaauaaaaaauggaaagaaccuagaucuaaaaaaaaaaaaaaaaaaaaaaaaaaaaaaaaaaaaaaaaaaaaaaaaaaaaaaaaaaaaaaaaugcaucccccccccccccccccccccccccccccccaaaggcucuuuucagagccaccagaauu

SEQ ID NO: 10644 - RNA, 2095 nt, Artificial Sequence
  mRNA product Design i-2 comprising derived and/or modified sequence from LASV(GA391;Clade III)__AAA46284__NP (wt)
ggggcgcugccuacggagguggcagccaucuccuucucggcaucaagcuuaccaugagugcuuccaaggaagugaggucaugcuuguggacucaaucccuaagaagggaacuaucuggcuacuguuccaacauaaaguugcagguaguuaaagacgcucaagcucuccuucauggucuugacuucuccgaggucaguaauguucagagauugaugcgcaagcagaaaagagaugauggcgaccuaaaacgacugagagaucucaaucaagcagucaacaaucuuguugagcucaaauccacacagcagaaaagugucuuaagaguuggaaccuuaaguucagacgaucuacuaauccuggccgcugauuuagaaaaacugaaaucaaaagucaccagaacagaaaggccuuugaguucaggaguuuauauggggaauuugaguucacaacagcuugaucaaaggagagcccuuuugaacaugauuggcaugacuggaguaaguggagggggaaagggugccaguaauggcauugugagaguuugggaugucaaaaaugcagaguuacucaacaaucaguucggaacaaugccaagccuaacuuuagcaugccugaccaaacaggggcaaguggaccugaaugaugccguucaagcuuugacagauuuagggcugauuuacacagccaaauaccccaacucaucugaucucgacagauugucucagagucauccaauucugaauaugauugacacuaagaaaaguucacucaacaucucugguuacaauuucaguuugggugcugcugucaaagcaggggccugcaugcuugauggugguaacauguuagagacuauuaagguuucaccucagaccauggaugguaucuugaagucaaucuugaaaguuaagaagagucugggaauguuuguaucagacacaccgggugaaaggaacccuuaugagaacauccuauacaagaucugucucucaggagacggaugguccuauauugcaucaaggaccucgauugugggaagagcaugggaaaauacugugguggaccuugagcaagacaacaagccccagaaaauuggaaaugggggguccaacaagucauuacagucugcaggcuuugcugcaggauuaaucuacucucaguugaugacucucaaagauuucaagugcuucaacuugauucccaacgcaaaaaccuggauggauauugaaggaagaccagaagacccaguugagauagcccuuuaucaaccgagcucggguugcuauguacauuucuuuagggagccaacagauuugaagcaauucaaacaagaugcaaaguauucacaugguagggaugugacugauuuguuugcugcccaaccuggguuaaccagugcagugauagaagcccuuccucggaacauggucaucacuugccaaggaucagaggauaucagaaaacuccuugagucacaagggaggagagacauaaaacugauugacaucacucuuaguaaagcagauucaagaaaguuugagaaugcuguuugggaucaauucaaggaucuaugucacaugcacacugggguaguuguggagaaaaagaagagaggugguaaagaggaaauaacuccucauugugcacugauggauugcauuauguuugaugcagcaguuucaggaggacuugaugcaaaaguccugagaguugugcucccuagagacaugguguucagaacuucaacaccuaaagucguccuguagggacuagugcaucacauuuaaaagcaucucagccuaccaugagaauaagagaaagaaaaugaagaucaauagcuuauucaucucuuuuucuuuuucguugguguaaagccaacacccugucuaaaaaacauaaauuucuuuaaucauuuugccucuuuucucugugcuucaauuaauaaaaaauggaaagaaccuagaucuaaaaaaaaaaaaaaaaaaaaaaaaaaaaaaaaaaaaaaaaaaaaaaaaaaaaaaaaaaaaaaaaugcaucccccccccccccccccccccccccccccccaaaggcucuuuucagagccaccagaauu

SEQ ID NO: 10645 - RNA, 2092 nt, Artificial Sequence
  mRNA product Design i-2 comprising derived and/or modified sequence from LASV(Nig08-A19;Clade III)__ADU56619__NP (wt)
ggggcgcugccuacggagguggcagccaucuccuucucggcaucaagcuuaccaugagugcuuccaaagaagugaaaucauuccuguggacucagucucugagaagagaguuaucuggcuauugcuccaauauaaaacuccaggugguaaaggaugcucaagcucuccuucaugguuuggacuucucugaggucaguaauguucaacgcuugaugcgcaaacaaaaaagggacgauggugaucuuaaacggcuaagagaccucaaucaagcagucaacaaccuuguugaacuaaagucaacucaacaaaagagugugcugaggguuggaacccuaaguucagacgaucuauugguuuuggcugcugaccuggaaaaacugaagucaaagguuguuaggacagaaagaccccugagcucaggaauuuauauggggaaucuaaguucacagcagcuugaucagaggaaggcccuccucaacaugauuggcaugacuggugggaaugggggaaggaauaccacuagugaugguauugugagaguuugggacgucaagaaugcagagcugcuuaacaaucaguuugggacaaugccaagucuaacucuagcauguuugaccaaacaagggcaaguggauuugaaugaugcuguucaggcuuugacagauuugggauugauuuacaccgcaaaauacccuaauucaucugauuuggacaggcuggcccagagccauccgauauugaacaugauugauacuaagaagagcucccuuaacaucucugguuacaauuuuaguuuaggagccgccgucaaggcuggggccugcaugcuugauggaggcaauaugcuagagacuauaaaggucucaccucaaaccauggauggcaucuugaagucaaucuugaaagucaagagaagccugggaauguucaucucagauacgccaggugaaaggaacccuuaugaaaacauacuguacaaaaucugccucucaggagauggguggccuuacauugcaucaaggacuucaauugugggaagagcuugggagaacaccgugguugacuuagagucagacaacaaaccgcaaaagaccggcaauggggguucaaauaagucauugcaaucugcaggguuugcugcaggacugacuuauucucaacugaugaccuuaaaggauucaaugcuucagcuugacccaaaugcaaagacuuggauggauauugagggaagaccagaagauccaguugaaauagcucuguaucaaccaaguucaggcugcuauauacacuucuucagggaaccgacagacuuaaagcaguuuaaacaggaugcaaaauauucacaugguauugaugugacagauuuguuugcugcacagccaggguuaacaagugcagugauagaggcucuuccuagaaacauggucaucaccugucaagggucagaagacaucagaaaacuucuggagucacaggggaggagggauauaaaacugauugacauuucccuuaguaagguggacucaagaaaauuugagaaugcugugugggaucaauucaaggauuuaugucacaugcacaccgggauuguuguggagaagaaaaagaggggaggcaaggaggaaauaacaccucauugugcauuaauggacugcaucauguuugaugcugcagucucaggaggaguugaugcaaagguccugagggcugugcuccccagagauaugguguucagaacuucgacacccaaagucguccuguaaggacuagugcaucacauuuaaaagcaucucagccuaccaugagaauaagagaaagaaaaugaagaucaauagcuuauucaucucuuuuucuuuuucguugguguaaagccaacacccugucuaaaaaacauaaauuucuuuaaucauuuugccucuuuucucugugcuucaauuaauaaaaaauggaaagaaccuagaucuaaaaaaaaaaaaaaaaaaaaaaaaaaaaaaaaaaaaaaaaaaaaaaaaaaaaaaaaaaaaaaaaugcaucccccccccccccccccccccccccccccccaaaggcucuuuucagagccaccagaauu

SEQ ID NO: 10646 - RNA, 2092 nt, Artificial Sequence
  mRNA product Design i-2 comprising derived and/or modified sequence from LASV(G1180-SLE-2010;Clade IV)__AIT17169__NP (wt)
ggggcgcugccuacggagguggcagccaucuccuucucggcaucaagcuuaccaugagugccucaaaggaaauaaaguccuuucuauggacacaaucauugaggagggaauuaucugguuacugcuccaacaucaaacuacagguggugaaagaugcccaggcucuauuacauggacuugacuucucagaagucaguaauguucaacgguugaugcgcaaggagagaagggaugacaaugauuugaaacgguugagggaccuaaaucaagcggucaacaaccucguugaguuaaaaucaacucaacaaaagagcauauugagaguugggacccuaaccucagaugacuuauuaaucuuagccgcugaucuagagaaguuaaaaucaaaggugaucaggacagaaaggccauugagugcaggugucuauaugggcaacuugagcucacagcagcuugaccaaagacgagcucuucugaguaugauaggaaugaguagugguaaucaaagggcucaggcugggagggauggaguggugagaguuugggauguaaaaaauguagaguugcuuaauaaucaguucggaaccaugccaagucuaacacuggcaugucugacaaaacaggggcagguugauuugaaugaugcagugcaagcacugacagauuugggucugaucuacacagcaaaguauccuaauacuucagaccuagauaggcugacucaaagucaccccaucuuaaacaugauugacaccaagaaaagcucuuugaauaucucugguuacaauuucagcuugggugcagcugugaaggcaggagcuugcaugcuggaugguggcaauauguuggagacaaucaaggugucaccucagacaauggaugguauccucaaauccaucuuaaaggucaagaaggcucuugggauguucaucucagacaccccuggugaaaggaaucccuaugaaaacauacucuacaagaucuguuugucaggagauggauggccauauauugcaucaagaaccucgauaacaggaagagccugggaaaacacugucguugacuuggaaucagaugggaagccacagaaagcuggcagcaacaauucuaauaaauccuugcagucaguaggguuuacugcugggcuuaccuauucucagcugaugacccucaaggaugcgaugcugcaacuugacccaaacgcuaagacuuggauggacaucgaaggaagaccugaagauccaguggaaauugcccucuaucagccaaguucaggcugcuacauacacuuuuuccgugaaccuacugauuuaaagcaguucaagcaggaugcuaaguacucacaugggauugaugucacagaccucuucgcugcacaaccgggcuugaccagugcuguuauagaugcacucccccggaacauggucauuaccugucagggguccgaugacauaaggaagcuccuugagucacaagguagaaaagacaucaaauuaauugauauugcccucagcaaaacugauuccaggaaguaugaaaaugcagucugggaucaguauaaagaccuaugccacaugcacacagguguuguuguugaaaagaagaaaagaggcgguaaagaggaaauaaccccucacugugcacuaauggacugcaucauguuugaugcagcagugucaggaggacugaacacaucuguuuugagagcagugcugccuagagauaugguauucagaacaucgacaccuagagucguccuguaaggacuagugcaucacauuuaaaagcaucucagccuaccaugagaauaagagaaagaaaaugaagaucaauagcuuauucaucucuuuuucuuuuucguugguguaaagccaacacccugucuaaaaaacauaaauuucuuuaaucauuuugccucuuuucucugugcuucaauuaauaaaaaauggaaagaaccuagaucuaaaaaaaaaaaaaaaaaaaaaaaaaaaaaaaaaaaaaaaaaaaaaaaaaaaaaaaaaaaaaaaaugcaucccccccccccccccccccccccccccccccaaaggcucuuuucagagccaccagaauu

SEQ ID NO: 10647 - RNA, 2092 nt, Artificial Sequence
  mRNA product Design i-2 comprising derived and/or modified sequence from LASV(G1442-SLE-2011;Clade IV)__AIT17181__NP (wt)
ggggcgcugccuacggagguggcagccaucuccuucucggcaucaagcuuaccaugagugcuucaaaggagguaaaguccuucuuguggacacaaucccugaggagggagcuguccgguuauuguuccaauaucaaacuacagguagugaaagaugcccaagcccuuuugcauggacuugauuucucugaggucagcaauguccaacgguugaugcgcaaacagagaagggaugacaaugaccugaaacggcugagggaucuaaaucaagcagucaacaaccuuguugagcugaaaucuacccaacagaaaagugugcugagaguaggaacucuaaccucagaugaucuguugguuuuggcugcugaccuggagaagcugaaaucaaaagugaucaggacagaaaggccauugagcgcaggugucuauaugggcaacuugagcucacagcaacuagaccaaagacgggcucuccugaauaugauaggaaugagugguggcauucaagggacucguacugggagagauggagugguaagagucugggauguaaaaaaugcagaccuacuuaacaaucaguucggcacuaugccaagucugacauuggcauguuuaacaaaacaaggacagguugaccugaaugauguggugcaggcacugacagaucugggccugauuuauacagcaaaguacccuaaugccucagacuuagauagguugacucagagucaccccaucuuaaacaugauugauaccaaaaaaaguucccuaaauaucucagguuacaacuucagucugggugcagcugugaaggcaggagcuugcaugcuggauggugguaacauguuggagacaaucaaggugucaccucagacaauggauggcauccucaagucuauccuaaagguaaaaaagacucuugggauguucaucucagacaccccuggugaaaggaauccuuaugagaacauacuuuacaagauuugucugucaggagauggauggccauauauugcaucaagaacuucaauuacaggaagggccugggaaaacacugucguugaucuggaaucagaugggaagccacagaaggcugggagcaacaauucuaacaaaucccugcagucagcaggcuuugccgcugggcucacuuauucucagcuuaugacccucaaagaugcaaugcugcagcuugaucccaaugcuaaaaccuggauggacauugagggaagaccugaagacccaguggagauugcucucuaucagccaaguucagguugcuacauucacuucuuccgugaaccuacugauuuaaagcaguucaagcaagaugcuaaauauucacauggaauugaugucacagaccucuucgccgcacaaccaggcuugaccagugcugucauagaggcacuuccccggaacauggucaucaccugucagggaucugaugacauaaagaaacuccuugaaucacagggaagaaaggauaucaaacuaauugacaucgcccucaguaaaacugauuccaggaaguaugaaaacgcagucugggaucaauauaaggacuuaugccauaugcacacagguguuguuguugaaaagaagaaaagaggcggcaaggaggagauaacaccucacugugcuuugauggacugcauuauguuugacgcagcagugucaggaggauugaacacauuggucuugagagcgguucuaccuagagacaugguguuuagaacaucgacacccagagucguccuguaaggacuagugcaucacauuuaaaagcaucucagccuaccaugagaauaagagaaagaaaaugaagaucaauagcuuauucaucucuuuuucuuuuucguugguguaaagccaacacccugucuaaaaaacauaaauuucuuuaaucauuuugccucuuuucucugugcuucaauuaauaaaaaauggaaagaaccuagaucuaaaaaaaaaaaaaaaaaaaaaaaaaaaaaaaaaaaaaaaaaaaaaaaaaaaaaaaaaaaaaaaaugcaucccccccccccccccccccccccccccccccaaaggcucuuuucagagccaccagaauu

SEQ ID NO: 10648 - RNA, 2092 nt, Artificial Sequence
  mRNA product Design i-2 comprising derived and/or modified sequence from LASV(G3010-SLE-2013;Clade IV)__AIT17345__NP (wt)
ggggcgcugccuacggagguggcagccaucuccuucucggcaucaagcuuaccaugagugccucaaaggaaauaaaguccuuucuguggacacagucauugaggagggaauugucugguuauuguucuaacaucaaacuacagguggugaaagaugcgcaagcucuuuuacauggacuugacuucuccgaagucaguaauguucaacgguugaugcgcaaggagagaagggaugacaaugauuugaaacgguugagggaccuaaaucaagcugucaacaaccuuguugaguuaaaaucaacucaacaaaaaaguauacugagaguugggacccuaaccucagaugacuuguuaaucuuggcugcugaucuagagaaguugaaaucaaaggugaccaggacagaaaggccauugagugcaggugucuauaugggcaaccugagcucacagcaacuugaccaaagacgagcucuucugaguaugauaggaaugaguagugguguucaaggggcucgggcugggagagauggaguggugagaguuugggauguaaaaaaugcagaguugcuuaauaaucaguucggaaccaugccaagucugacacuagcauguuugacaaaacaggggcagguugacuugaaugauguagugcaagcauugacagauuuggguuugaucuacacagcaaaguacccaaauacuucagauuuagauaggcugacucaaagucaccccauccugaacaugauugacaccaagaaaagcucuuugaauaucucagguuauaauuucagcuugggugcagcuguaaaggcaggagcuugcaugcuggaugguggcaacauguuggagacaaucaaggugucaccucagacaauggauggcauccucaaguccaucuuaaaggucaagaaagcucuugggauguucaucucagagaccccuggugaaaggaauccuuaugagaacauacucuacaagaucugucuaucaggagauggauggccauauauugcaucaagaaccucaauaacaggaagggccugggaaaacacugucguugaucuggaaucagaugggaagccacaaaaagcuggcagcaacaauuccaauaaaucccugcagucggcaggguuuaccgcugggcuuaccuauucucagcugaugacccucaaagacgcaaugcugcaacuugacccaaaugcuaagaccuggauggacauugaaggaaggccugaagauccaguggagguugcccucuaucaaccaaguucaggcugcuacauacacuucuuccgugaacccacugauuugaagcaguucaagcaggaugcuaaguacucacaugggauugauguuacagaccucuucgcugcgcaaccaggcuugaccagugcugucauagaugcacuuccccggaauauggucauuaccugucaggggucugaugacauaaagaaacuccuugaaucacaagguaggaaagacaucaagcuaauugauauugcccucaguaaaacugauuccaggaaguaugaaaaugcagucugggaccaguauaaagacuuaugccacaugcacacagguguugucguugaaaagaagaaaagaggcgguaaagaggaaauaaccccucacugugcacuaauggacugcaucauguuugaugcagcaguaucaggaggacugaacacaucggucuuaagagcagugcugcccagagauaugguguucagaacaucgacaccuagagucguucuguaaggacuagugcaucacauuuaaaagcaucucagccuaccaugagaauaagagaaagaaaaugaagaucaauagcuuauucaucucuuuuucuuuuucguugguguaaagccaacacccugucuaaaaaacauaaauuucuuuaaucauuuugccucuuuucucugugcuucaauuaauaaaaaauggaaagaaccuagaucuaaaaaaaaaaaaaaaaaaaaaaaaaaaaaaaaaaaaaaaaaaaaaaaaaaaaaaaaaaaaaaaaugcaucccccccccccccccccccccccccccccccaaaggcucuuuucagagccaccagaauu

SEQ ID NO: 10649 - RNA, 2092 nt, Artificial Sequence
  mRNA product Design i-2 comprising derived and/or modified sequence from LASV(G502-SLE-2009;Clade IV)__AIT17127__NP (wt)
ggggcgcugccuacggagguggcagccaucuccuucucggcaucaagcuuaccaugagugccucaaaggaaauaaaguccuuucuguggacacaaucauugaggagggaauugucugguuacugcuccaacaucaaacuacaggugguaaaagaugcccaggcucuucugcauggucuugacuucuccgaagucaguaauguucaacgguuaaugcgcaaggagagaagggaugacaaugacuugaaacgguugagggaccuaaaucaagcggucaacaaccuuguugaguuaaaaucaacucaacaaaagaguauacugagaguugggacucuaaccucagaugacuuauuaaucuuagcugcugaucuagagaaguugaaaucaaaggugaucaggacagaaaggccauugagugcaggugucuauaugggcaacuugagcucacagcaacuugaccaaagacgggcucuucugaguaugauaggaaugaguggugguaaucaagggguucgggcugggaaggauggaguggugagaguuugggaugugaaaaaugcagaguugcuuaauaaucaguuugggacuaugccaagucuaacacuggcaugucugacaaaacaggggcagguugacuugaaugaugcagugcaagcacugacagauuugggucugaucuacacagcaaaguaucccaauacuucagacuuagauaggcugacucaaagucaccccaucuuaaacaugauugacaccaagaagaguuccuugaauaucucugguuauaauuuuagcuugggugcagcugugaaagcaggagcuugcaugcuggaugguggcaauauguuggagacaaucaaagugucaccucagacaauggaugguauccucaaauccaucuuaaaggucaagaaggcucuugggauguucaucucagacaccccuggugaaaggaauccuuaugaaaacauacucuacaagauuuguuugucaggagauggauggccauauauugcaucaagaacuucaauaacaggaagagccugggaaaacacugucguugaccuagaaucagaugggaagccacagaaagcuggcagcaacaauuccaauaaaucccugcagucggcaggguuuaccgcugggcuuaccuauucucagcugaugacccucaaggaugcgaugcugcagcuugacccaaacacuaagacuuggauggacaucgaaggaagaccugaagacccaguggaaauugcccucuaucagccaaguucaggcugcuacauacacuuuuuccgugaaccuacugauuuaaagcaguucaagcaggaugcuaaguacucacaugggauugauguuacagaccucuucgcugcacaaccgggcuugaccagugcugucauagaugcacucccccggaauauggucauuaccugucagggguccgaugacauaaggaaacuccuugaaucacaagguagaaaagacaucaaacuaauugauauugcccucaacaaaacugauuccaggaaguaugaaaaugcagucugggaucaguauaaggacuugugccacaugcacacaggugucguuguugaaaagaagaaaagaggcgguaaagaggaaauaaccccucacugugcacuaauggacugcaucauguuugaugcagcagugucaggaggacugaacacaucuguuuugagagcagugcugccuagagauaugguauucagaacaucaacacccagagucguccuguaaggacuagugcaucacauuuaaaagcaucucagccuaccaugagaauaagagaaagaaaaugaagaucaauagcuuauucaucucuuuuucuuuuucguugguguaaagccaacacccugucuaaaaaacauaaauuucuuuaaucauuuugccucuuuucucugugcuucaauuaauaaaaaauggaaagaaccuagaucuaaaaaaaaaaaaaaaaaaaaaaaaaaaaaaaaaaaaaaaaaaaaaaaaaaaaaaaaaaaaaaaaugcaucccccccccccccccccccccccccccccccaaaggcucuuuucagagccaccagaauu

SEQ ID NO: 10650 - RNA, 2092 nt, Artificial Sequence
  mRNA product Design i-2 comprising derived and/or modified sequence from LASV(G733-SLE-2010;Clade IV)__AIT17155__NP (wt)
ggggcgcugccuacggagguggcagccaucuccuucucggcaucaagcuuaccaugagugccucaaaggaaauaaagucuuuucuguggacacaaucccugaggagggaacugucugguuacugcuccaacaucaaacuucaggugguaaaagaugcccaagcucuuuugcacggacuugacuucuccgaagucaguaauguucaacgguugaugcgcaaagagagaagggaugacaaugauuugaaacggcugagggaccuaaaucaagcggucaacaaccuuguugaguuaaaaucaacucaacagaagaguguacugagaguugggacccuaaccucagaugaguuauuagucuuggcugcugaucuagagaaauuaaaaucaaaagugaucaggacagaaaggccauugagugcaggugucuauaugggcaaccugagcucacagcaacuugaccaaaggcgagcucuucugaguaugauagggaugagugguggcaaucaaggggcucggacugggagagaugggguggugagaguuugggauguaaaaaaugcagaauugcucaauaaucaguucgggaccaugccaagucugacacuggcaugucugacaaaacaagggcagguugacuuaaaugaugcagugcaagcauugacagauuuggguuugaucuacacagcaaaguauccuaacacuucagacuuggauaggcugacucaaagucaccccauccuaaauaugauugacaccaagaaaagcucuuugaacaucucagguuauaauuuuagcuugggugcagcugugaaggcaggagcuuguaugcuggaugguggcaauauguuggagacaaucaaagugucaccucagacaauggauggcauccucaaauccauuuuaaaggucaagaaggcucuugggauguucauuucagacaccccuggugaaaggaaucccuacgaaaacauacucuacaagauuuguuugucaggggauggauggccauauauugcaucaagaaccucaauaacaggaagggccugggaaaacacugucguugaucuagagucagaugggaagccacagaaagcuggcagcaacaauuccaacaaaucccugcagucggcaggguuuacugcugggcuuacuuauucucagcuuaugacccucaaggaugcaaugcugcaacuugauccaaaugcuaagacuuggauggacauugaaggaagaccugaagauccaguggaaauugcccucuaucaaccaaguucaggcugcuacauacacuucuuccgugagccuacugauuuaaagcaguucaagcaagaugcuaaauacucacaugggauugaugucacagaccucuucgcugcacaaccgggcuuaacuagugcugucauagaugcacucccccggaauaugguuaucaccugucagggguccgaugauauaaggaaacuccuugaaucacaaggaagaaaggacaucaaauuaauugacauugcccucagcaaaauugauuccaggaaguaugaaaaugcagucugggaucaguauaaagacuuaugccacaugcacacaggugucguuguugaaaagaagaaaagaggcgguaaagaggaaauaaccccucacugugcacuaauggacugcaucauguuugaugcagcagugucaggaggacugaacucauuaguuuugagagcagugcugcccagagacaugguauucagaacaucgacaccaagagucguccuguaaggacuagugcaucacauuuaaaagcaucucagccuaccaugagaauaagagaaagaaaaugaagaucaauagcuuauucaucucuuuuucuuuuucguugguguaaagccaacacccugucuaaaaaacauaaauuucuuuaaucauuuugccucuuuucucugugcuucaauuaauaaaaaauggaaagaaccuagaucuaaaaaaaaaaaaaaaaaaaaaaaaaaaaaaaaaaaaaaaaaaaaaaaaaaaaaaaaaaaaaaaaugcaucccccccccccccccccccccccccccccccaaaggcucuuuucagagccaccagaauu

SEQ ID NO: 10651 - RNA, 2092 nt, Artificial Sequence
  mRNA product Design i-2 comprising derived and/or modified sequence from MOPV/LASV reassortant(IGS-1;Clade IV)__AFY05578__NP (wt)
ggggcgcugccuacggagguggcagccaucuccuucucggcaucaagcuuaccaugagugccucaaaggaaauaaaauccuuuuuguggacacaaucuuugaggagggaauuaucugguuacugcuccaacaucaaacuacagguggugaaagaugcccaggcucuuuuacauggacuugacuucuccgaagucaguaauguucaacgguugaugcgcaaggagagaagggaugacaaugauuugaaacgguugagggaccuaaaucaagcggucaacaaucuuguugaauuaaaaucaacucaacaaaagaguauacugagaguugggacucuaaccucagaugacuuauuaaucuuagccgcugaucuagagaaguuaaggucaaaggugaucagaacagaaaggccauuaagugcaggugucuauaugggcaaccuaagcucacagcaacuugaccaaagaagagcucuccugaauaugauaggaaugaguggugguaaucaaggggcucgggcugggagagauggaguggugagaguuugggaugugaaaaaugcagaguugcucaguaaucaguucgggaccaugccaagucugacacuggcaugucugacaaaacaggggcagguugacuugaaugaugcaguacaagcauugacagauuuggguuugaucuacacagcaaaguaucccaacacuucagacuuagacaggcugacucaaagucaucccauccuaaauaugauugacaccaagaaaagcucuuugaauaucucagguuauaauuuuagcuugggugcagcugugaaggcaggagcuugcaugcuggaugguggcaauauguuggagacaaucaaggugucaccucagacaauggaugguauccucaaauccauuuuaaaggucaagaaggcucuuggaauguucauuucagacaccccuggugaaaggaauccuuaugaaaacauacucuacaagauuuguuugucaggagauggauggccauauauugcaucaagaaccucaauaacaggaagggccugggaaaacacugucguugaucuggaaucagaugggaagccacagaaagcugacagcaacaauuccaguaaaucccugcagucggcaggguuuaccgcugggcuuaccuauucucagcugaugacccucaaggaugcaaugcugcaacuugacccaaaugcuaagaccuggauggacauugaaggaagaccugaagauccaguggaaauugcccucuaucaaccaaguucaggcugcuacauacacuucuuccgugaaccuacugauuuaaagcaguucaagcaggaugcuaaguacucacaugggauugaugucacagaccucuucgcuacacaaccgggcuugaccagugcugucauugaugcacucccccggaauauggucauuaccugucagggguccgaugacauaaggaaacuccuugaaucacaaggaagaaaagacauuaaacuaauugauauugaccucaguaaaacugauuccaggaaguaugaaaaugcagucugggaccaguauaaagacuuaugccacaugcacacaggugucguuguugaaaagaagaaaagaggcgguaaagaggaaauaaccccucacugugcacuaauggacugcaucauguuugaugcagcagugucaggaggacugaacacaucgguuuugagagcagugcugcccagagauaugguguucagaacaucgacaccuagagucguucuguaaggacuagugcaucacauuuaaaagcaucucagccuaccaugagaauaagagaaagaaaaugaagaucaauagcuuauucaucucuuuuucuuuuucguugguguaaagccaacacccugucuaaaaaacauaaauuucuuuaaucauuuugccucuuuucucugugcuucaauuaauaaaaaauggaaagaaccuagaucuaaaaaaaaaaaaaaaaaaaaaaaaaaaaaaaaaaaaaaaaaaaaaaaaaaaaaaaaaaaaaaaaugcaucccccccccccccccccccccccccccccccaaaggcucuuuucagagccaccagaauu

SEQ ID NO: 10652 - RNA, 2092 nt, Artificial Sequence
  mRNA product Design i-2 comprising derived and/or modified sequence from LASV(LM765-SLE-2012;Clade IV)__AIT17815__NP (wt)
ggggcgcugccuacggagguggcagccaucuccuucucggcaucaagcuuaccaugagugccucaaaggaaauaaaauccuuuuuguggacacaauccuugaggagggaauuaucugguuacugcuccaacaucaaacugcagguggugaaggaugcccaggcucuuuuacaugggcuugacuucucugaagucaguaauguucaacgguugaugcgcaaggagagaagggaugacaaugauuugaaacgguugagggaccuaaaucaagcagucaacaaucuuguugaauuaaaaucaacucaacaaaagaguauacugagaguugggacucuaaccucagaugacuuauuaaucuuggccgcugaucuagagaaguugaagucgaaggugaccagaacagaaaggccauugagugcaggugucuauaugggcaaccuaagcucucagcaacuugaccaaagaagagcucuucuggacaugauaggaaugagugguaguaaucaaggggcucgggcugggagagauggaguggucagaguuugggaugugaaaaaugcagaguugcucaauaaucaguucgggaccaugccaagucugacacuggcaugucugacaaaacaggggcagguugacuugaaugaugcagugcaagcauugacagauuuagguuugaucuacacagcgaaguaccccaauacuucagacuuggacaggcugacucaaagucaucccauccuaaauaugauugacaccaagaaaagcucuuugaacaucucagguuauaauuuuagcuugggugcagcugugaaggcaggagcuuguaugcuggaugguggcaauauguuggagacaaucaaggugucaccucagacaauggauggcauucucaaauccauuuuaaaggucaagaaggcucuugggauguuuauuucagaugccccuggugaaaggaauccuuaugaaaacauacucuacaagauuuguuuaucaggagacggauggccauacauugcaucaagaaccucaauaacaggaagggccugggaaaacacuguuguugaccuggaaucagaugggaagccacagaaagcuggcaguaacgguuccaauaaaucucugcagucggcaggauuuaccgcugggcucaccuauucucagcugaugacccucaaggaugcaaugcugcaacuugacccaaaugcuaagaccuggauggacauugaaggaagaccugaagauccaguggaaaucgcccucuaucaaccaaguucagggugcuacauacacuucuuccgugaaccuacugauuuaaagcaguucaagcaggaugcuaaguacucacaugggauugaugucacggaccucuucgcugcacagccgggcuugaccagugcugucauugaugcacucccccggaauauggucaucaccugccagggaucugaugacauaaggaaacucuuugaaucacaaggaagaaaagacauuaaacuaauugacauugcccucagcaagacugauuccaggaaguaugaaaaugcagucugggaucaguauaaagauuuaugccacaugcauacagguauuguuguugagaagaagaaaagaggugguaaagaggaaauaaccccucacugugcauuaauggacugcaucauguuugaugcagcaguaucaggaggacugaacacaucaguuuugagagcagugcugcccagagacaugguguucagaacaucgacaccuagggucguccuguaaggacuagugcaucacauuuaaaagcaucucagccuaccaugagaauaagagaaagaaaaugaagaucaauagcuuauucaucucuuuuucuuuuucguugguguaaagccaacacccugucuaaaaaacauaaauuucuuuaaucauuuugccucuuuucucugugcuucaauuaauaaaaaauggaaagaaccuagaucuaaaaaaaaaaaaaaaaaaaaaaaaaaaaaaaaaaaaaaaaaaaaaaaaaaaaaaaaaaaaaaaaugcaucccccccccccccccccccccccccccccccaaaggcucuuuucagagccaccagaauu

SEQ ID NO: 10653 - RNA, 2092 nt, Artificial Sequence
  mRNA product Design i-2 comprising derived and/or modified sequence from LASV(LM776-SLE-2012;Clade IV)__AIT17825__NP (wt)
ggggcgcugccuacggagguggcagccaucuccuucucggcaucaagcuuaccaugagugcuucaaaggaaauaaaguccuuucuguggacacaaucauuaaggagggaauuaucuaguuacuguuccaacaucaaacuacagguggugaaagaugcccaggcucuuuugcaugggcuugacuucuccgaagucagcaauguucaacgguugaugcgcaaggagagaagggaugacaaugauuuaaagcgguugagggaccuuaaucaagcagucaacaaccuuguugaguuaaaaucaacucaacaaaagaguauauugagaguugggaccuuaaccucagaugacuuacuaaucuuagcugcugaucuagagaagcugaaaucaaaggugacuaggacagaaaggccauugagugcaggugucuacauggguaaccugagcucacagcaacuugaccagagacgagcucuucugagcaugauagggaugagugguaguaaucaaggggcucgggcugggagagauggaguggugagaguuugggaugugaaaaaugcagaguugcucaauaaucaguucgggaccaugccaagucuuacacuggcauguuugacaaaacaggggcagguugacuugaaugaugcagugcaagcauugacagauuugggucugaucuacacggcaaaguaucccaauacuucagaccuggauaggcugacucaaagucaccccauccuaaacaugauugacaccaagaagagcucuuuaaacaucucagguuauaauuuuagcuugggugcagcugugaaggcaggagcuugcaugcuggaugguggcaacauguuggagacaaucaaggugucaccucagacaauggaugguauccucaaauccaucuugaaggucaagaaggcucuugggauguucaucucagacaccccuggugaaaggaauccuuaugagaacauacucuauaagaucugucugucaggagauggguggccauacauugcaucaaggaccucaauaacaggaagggcuugggaaaacacugucguugaucuggaaucagaugggaagccacagaaagcuggcagcaacaauucuaacaaaucccugcagucggcaggguuuaccgcugggcuuaccuauucucagcuaaugacucucaaggaugcaaugcugcaacuugauccaaaugcuaagaccuggauggauauugaaggaagaccugaagauccaguggaaguugcccucuaucaaccaaguucaggcuguuacauucacuucuuccgugaaccuacugauuuaaagcaguucaaacaggaugcuaaguacucacaugggauugaugucacagaccucuucgcugcacaaccgggccugaccagugcugucauagaugcacucccucggaauauggucauuaccugucagggguccgaugacauaaggaaacuccuugaaucacaagguaggaaagacaucaaacuaauugauauugcccucagcaaaacugauuccaggaaguaugaaaaugcagucugggaucaguauaaagacuuaugccacaugcacacaggugucguuguugagaagaagaaaagaggugguaaagaggaaauaaccccucacugugcacuaauggacugcaucauguuugacgcagcagugucaggaggacugaacacaucgguuuugagagcagugcugcccagggauaugguguucagaacaucaacaccuagagucguucuguaaggacuagugcaucacauuuaaaagcaucucagccuaccaugagaauaagagaaagaaaaugaagaucaauagcuuauucaucucuuuuucuuuuucguugguguaaagccaacacccugucuaaaaaacauaaauuucuuuaaucauuuugccucuuuucucugugcuucaauuaauaaaaaauggaaagaaccuagaucuaaaaaaaaaaaaaaaaaaaaaaaaaaaaaaaaaaaaaaaaaaaaaaaaaaaaaaaaaaaaaaaaugcaucccccccccccccccccccccccccccccccaaaggcucuuuucagagccaccagaauu

SEQ ID NO: 10654 - RNA, 2092 nt, Artificial Sequence
  mRNA product Design i-2 comprising derived and/or modified sequence from LASV(Mad39;Clade IV)__ANH09723__NP (wt)
ggggcgcugccuacggagguggcagccaucuccuucucggcaucaagcuuaccaugagugccucaaaagagauaaagucuuuuuuguggacacagucucugaggagggaauugucggguuacugcuccaacaucaaacuacagguggugaaagaugcccaggcucuuuuacauggacuugacuuuucugaggucagcaacguccaacggcugaugcgcaaacagagaagggaugacaaugaucuaaagcggcugagggauuuaaaucaagcaguuaacaaucuuguugaacuaaaaucaacucagcaaaagaguguguugagaguuggaacucuaaccucagaugacuuguugacauuagcugcugaccuagagaagcugaaaucaaagguaaccaggacagaaagaccauugaccgcaggcguuuacaugggcaacuuaaguucacaacagcuugaccaaagacgggcucuccugaauaugauaggaaugaguggugguaaccaaggggcucgaacugggagagaugggguagugagggucugggauguuaaaaaugcagaauugcucaacaaucaguuuggaacuaugccaagcuugacacuagcaugccugacaaagcaagggcagguugaccuaaaugauguggugcaagcacuaacagaucuaggccugaucuauacagcaaaguaucccaacacuucagaccuggacagacuaacucagagccaucccauccuaaacaugauugauacuaauaaaagcucccuaaauaucucagguuauaauuuuagcuugggugcagcugugaaggcaggagcuugcaugcuggaugguggaaacaugcuagagacaaucaaagugucaccccaaacaauggauggcauccucaaguccauuuuaaagguaaaaaagagucuugggauguucauuucagacacccccggcgagagaaaucccuaugaaaauauacucuacaagauuugucugucgggggauggguggccauauauugcaucaaggaccucaauaacaggaagggccugggaaaauacuguuguugaucuagaaucaggugggaagccacagaaagcugguagcaacaacuccaacaagucccuacaaucggcaggauuugcugcugggcucacuuauucucaguuaaugacccucaaggaugcaauguugcaacuugauccaaaugcuaagaccuggauggauauugagggaaggccugaagacccaguggagauugcucucuaucagccaauuucggguugcuacauucacuucuuccgugaaccuacugaucugaaacaguucaagcaagaugcuaaguauucacauggaauugauguuacagaccuuuuugcugcacaaccaggauuaacuagugcugugauagaagcacucccccggaacauggucaucaccugucaaggaucugacgacauaaggaaacuuuuugagucacaaggaaggaaagacaucaagcugauugauauugcucucagcaaaacugauucuagaaaauaugaaaacgcagucugggaccaguacaaagauuuaugucauaugcacacagguguuguuguugagaagaaaaagaagggcggcaaagaagaaauaaccccucauugugcucuaauggacugcaucauguuugaugcagcaguaucaggagggcugaacacgcugguuuugagagcagugcuaccuagagauaugguguucagaacaucaacaccuaaagucguccuguaaggacuagugcaucacauuuaaaagcaucucagccuaccaugagaauaagagaaagaaaaugaagaucaauagcuuauucaucucuuuuucuuuuucguugguguaaagccaacacccugucuaaaaaacauaaauuucuuuaaucauuuugccucuuuucucugugcuucaauuaauaaaaaauggaaagaaccuagaucuaaaaaaaaaaaaaaaaaaaaaaaaaaaaaaaaaaaaaaaaaaaaaaaaaaaaaaaaaaaaaaaaugcaucccccccccccccccccccccccccccccccaaaggcucuuuucagagccaccagaauu

SEQ ID NO: 10655 - RNA, 2092 nt, Artificial Sequence
  mRNA product Design i-2 comprising derived and/or modified sequence from LASV(Z0947-SLE-2011;Clade IV)__AIT17841__NP (wt)
ggggcgcugccuacggagguggcagccaucuccuucucggcaucaagcuuaccaugagugccucaaaggaaauaaaguccuuuuuguggacacaauccuugaggagggaauuaucugguuacugcuccaacaucaaacugcagguggugaaggaugcccaggcucuuuuacaugggcuugacuucucugaagucaguaauguucaacgguugaugcgcaaggagagaagggaugacaaugauuugaaacgguugagggaccuaaaucaagcagucaacaaucuuguugaauuaaaaucaacucaacaaaagaguauacugagaguugggacucuaaccucagaugacuuauuaaucuuggccgcugaucuagagaaguugaagucgaaggugaccagaacagaaagaccauugagugcaggugucuauaugggcaaccuaagcucacagcaacuugaccaaagaagagcucuucugaacaugauaggaaugagugguaguaaucaaggggcucggacugggagagauggaguggucagaguuugggaugugaaaaaugcagaguugcucaauaaucaguucggaaccaugccaagucugacacuggcaugucugacaaaacaggggcagguugacuugaaugaugcaguacaagcauugacagauuuagguuugaucuacacagcgaaguaccccaauacuucagacuuggacaggcugacucaaagucaccccauccuaaauaugauugacaccaagaaaagcucuuugaacaucucagguuauaauuuuagcuugggugcagcugugaaggcaggagcuuguaugcuggaugguggcaauauguuggagacaaucaaggugucaccucagacaauggaugguauucucaaauccauuuuaaaggucaagaaggcucuugggauguucauuucagaugccccuggugaaaggaauccuuaugaaaacauacucuacaagauuuguuugucaggagacggauggccauacauugcaucaagaaccucaauaacaggaagggccugggaaaacacuguuguugaucuggaaucagaugggaagccacagaaagcuggcaguaacgguuccaauaaaucucugcagucggcaggauuuaccgcugggcucaccuauucucagcugaugacccucaaggaugcaaugcugcaacuugacccaaaugcuaagaccuggauggacauugaaggaagaccugaagauccaguggaaaucgcccucuaucaaccaaguucagggugcuacauacacuucuuccgugaaccuacugauuuaaagcaguucaagcaggaugcuaaguacucacaugggauugaugucacggaccucuucgcugcacaaccgggcuugaccagugcugucauugaugcacucccccggaauauggucaucaccugccaggggucugaugacauaaggaaacucuuugaaucacaaggaagaaaagacauuaaacuaauugacauugcccucagcaagacugauuccaggaaguaugaaaaugcagucugggaucaguauaaagacuuaugccacaugcauacaggcauuguuguugagaagaagaaaagaggcggcaaagaggaaauaaccccucacugugcacuaauggacugcaucauguuugaugcagcaguaucaggaggacugaacacaucaguuuugagagcagugcugcccagagacaugguguucagaacaucgacaccuagggucguccuguaaggacuagugcaucacauuuaaaagcaucucagccuaccaugagaauaagagaaagaaaaugaagaucaauagcuuauucaucucuuuuucuuuuucguugguguaaagccaacacccugucuaaaaaacauaaauuucuuuaaucauuuugccucuuuucucugugcuucaauuaauaaaaaauggaaagaaccuagaucuaaaaaaaaaaaaaaaaaaaaaaaaaaaaaaaaaaaaaaaaaaaaaaaaaaaaaaaaaaaaaaaaugcaucccccccccccccccccccccccccccccccaaaggcucuuuucagagccaccagaauu

SEQ ID NO: 10656 - RNA, 2092 nt, Artificial Sequence
  mRNA product Design i-2 comprising derived and/or modified sequence from LASV(Josiah;Clade IV)__NP_694869__NP (opt1) R6024
ggggcgcugccuacggagguggcagccaucuccuucucggcaucaagcuuaccaugagcgccuccaaggagaucaagagcuuccuguggacccagucccuccgccgggagcugagcggcuacugcuccaacaucaagcuccagguggucaaggacgcccaggcgcugcugcacgggcuggacuucagcgagguguccaacgugcagcgccucaugcggaaggagcgccgggacgacaacgaccugaagcgccugcgggaccucaaccaggccgucaacaaccugguggagcucaagagcacccagcagaaguccauccugcgcgugggcacccugaccagcgacgaccugcucauccuggccgccgaccuggagaagcucaaguccaaggucauccggaccgagcgcccccugagcgccgggguguacaugggcaaccuguccagccagcagcucgaccagcggcgcgcgcugcugaacaugaucgggauguccggcggcaaccagggggcccgggccggccgcgacggggugguccgggugugggacgugaagaacgccgagcuccugaacaaccaguucggcaccaugccgagccugacgcucgcgugccugaccaagcaggggcaggucgaccugaacgacgccgugcaggcccucaccgaccugggccugaucuacaccgccaaguaccccaacacguccgaccucgaccgccugacccagagccaccccauccugaacaugaucgacaccaagaaguccagccucaacaucagcggcuacaacuucucccugggggccgcggugaaggccggcgccugcaugcuggacgggggcaacaugcucgagaccaucaaggucagcccccagacgauggacggcauccugaaguccauccugaaggugaagaaggcccucgggauguucaucagcgacaccccgggcgagcggaaccccuacgagaacauccuguacaagaucugccuguccggggacggcuggcccuacaucgccagccgcaccuccaucaccgggcgggcgugggagaacacgguggucgaccucgagagcgacggcaagccccagaaggccgacuccaacaacagcuccaagagccugcaguccgccggcuucaccgccgggcugaccuacagccagcucaugacccugaaggacgccaugcugcagcuggacccgaacgcgaagacguggauggacaucgagggccgccccgaggaccccguggagaucgcccucuaccagcccuccagcgggugcuacauccacuucuuccgggagccgaccgaccugaagcaguucaagcaggacgccaaguacucccacggcaucgacgugaccgaccuguucgccacccagcccgggcucacgagcgccgucaucgacgcgcugccccgcaacauggugaucacgugccagggcuccgacgacauccgcaagcugcucgagagccagggccggaaggacaucaagcugaucgacaucgcccugagcaagaccgacucccgcaaguacgagaacgccgugugggaccaguacaaggaccucugccacaugcacaccggggucguggucgagaagaagaagcggggcgggaaggaggagaucaccccgcacugcgcccugauggacugcaucauguucgacgcggccgugagcggcgggcugaacaccuccgugcuccgcgccguccugccccgggacaugguguuccgcaccagcacgccccgggugguccugugaggacuagugcaucacauuuaaaagcaucucagccuaccaugagaauaagagaaagaaaaugaagaucaauagcuuauucaucucuuuuucuuuuucguugguguaaagccaacacccugucuaaaaaacauaaauuucuuuaaucauuuugccucuuuucucugugcuucaauuaauaaaaaauggaaagaaccuagaucuaaaaaaaaaaaaaaaaaaaaaaaaaaaaaaaaaaaaaaaaaaaaaaaaaaaaaaaaaaaaaaaaugcaucccccccccccccccccccccccccccccccaaaggcucuuuucagagccaccagaauu

SEQ ID NO: 10657 - RNA, 2092 nt, Artificial Sequence
  mRNA product Design i-2 comprising derived and/or modified sequence from LASV(LP;Clade I)__AAF86702__NP (opt1)
ggggcgcugccuacggagguggcagccaucuccuucucggcaucaagcuuaccaugagcaacuccaaggagaucaagagcuuccuguggacccagucccuccgccgggagcugagcggcuacugcuccaacaucaagcuccagguggucaaggacgcccaggcccugcugcacgggcuggacuucagcgagguguccaacgugcagcgccucaugcggaagcagaagcgcgacgacgcggaccugaagcggcugcgcgaccucaaccaggccgucaacaaccugguggagcucaagagcacccagcagaagaacgugcugcgggucggcacgcuguccagcgacgaccugaucacccucgccgccgaccuggagaagcugaaguccaaggugauccgcaccgagcggccccucagcuccgggguguacaugggcaaccugagcucccagcagcuggaccagcgccgggcccuccugagcaugaucgggauguccggcggcccgcaggggaaccgcaccggcggggacggcgucgugcgggugugggacgucaagaacgcggagcugcucaacaaccaguucgggacgaugcccagccugacccuggccugccucaccaagcagggccagguggaccugaacgacgccgugcaggcccugaccgaccucggccugaucuacacggcgaaguaccccaacuccagcgaccuggacaugcucacccagagccaccccauccuggggauggucgacaccaagaaguccagccugaacaucuccggcuacaacuucagccucggggccgccgugaaggccggcgccugcaugcuggacggcgggaacaugcuggagaccaucaagguguccccgcagacgauggacggcauccucaagagcauccugaaggucaagcgcucccuggggauguucaucagcgacacccccggcgagcggaaccccuacgagaacauccucuacaagaucugccuguccggggagggcuggcccuacaucgcgagccgcaccuccaucaccggccgggccugggagaacacgcugguggaccucgagagcgacaacaagccgcccaagcugaacuccgccgggagcaacaagucccugcaggccgccggccucaacgcggggcugaccuacagccagcugaugacccugaaggacugcaugcuccagcuggaccccuccagcaagaccuggaucgacaucgagggccgccccgaggacccgguggagaucgcccuguuccagcccuccagcgggugcuacauccacuucuuccgggagcccacggaccucaagcaguucaagcaggacgccaaguacagccacggcaucgacgucaccgaccuguucuccacccagcccggccugaccagcgccgugaucgaggcccucccgcgcaacauggugcugacgugccagggguccgacgacaucaagaagcugcucgagagccagggccggcgcgacaucaagcugaucgacaucucccugagcaaggcggacucccgcaaguucgagaacgccgucugggaccaguacaaggaccucugccacaugcacaccgggguggucguggagaagaagaagcggggcgggaaggaggagaucacgccccacugcgcccugcuggacugcaucauguucgacgccgccaccaccggcagccucaacaucaccacccugcgcgcggugcugccccgggacauggucuuccgcaccuccacgcccaagguggugcucugaggacuagugcaucacauuuaaaagcaucucagccuaccaugagaauaagagaaagaaaaugaagaucaauagcuuauucaucucuuuuucuuuuucguugguguaaagccaacacccugucuaaaaaacauaaauuucuuuaaucauuuugccucuuuucucugugcuucaauuaauaaaaaauggaaagaaccuagaucuaaaaaaaaaaaaaaaaaaaaaaaaaaaaaaaaaaaaaaaaaaaaaaaaaaaaaaaaaaaaaaaaugcaucccccccccccccccccccccccccccccccaaaggcucuuuucagagccaccagaauu

SEQ ID NO: 10658 - RNA, 2092 nt, Artificial Sequence
  mRNA product Design i-2 comprising derived and/or modified sequence from LASV(803213;Clade II)__AAF86704__NP (opt1)
ggggcgcugccuacggagguggcagccaucuccuucucggcaucaagcuuaccaugagcgccuccaaggaggugaaguccuuccuguggacccagagccuccgccgggagcugagcggcuacugcuccaacaucaagcugcaggucgugaaggacgcccaggcgcuccugcacgggcuggacuucagcgaggugaacaacguccagcgccucaugcggaagcagaagcgcgacgacggcgaccugaagcggcugcgcgaccucaaccaggccgugaacaaccugguggagcugaaguccacccagcagaaguccauccuccgggucgggacgcugaccagcgacgaccugcucacccuggccgccgaccuggagaagcucaagagcaaggugauccgcaccgagcggccccuguccagcggcguguacauggggaaccuguccacgcagcagcucgagcagcgccgggcccugcugaacaugaucggcauggucggcggggcgcagggcacccagccggggcgcgacggcguggugcgggucugggacgugaagaaccccgaccuccugaacaaccaguucgggaccaugcccagccugacccucgccugccugacgaagcagggccagguggaccugaacgacgccguccucgcccugaccgaccugggccucaucuacaccgcgaaguaccccaacuccagcgaccuggaccgccugucccagagccacccgauccucaacaugguggacaccaagaaguccagccugaacaucagcggguacaacuucucccugggcgccgccgugaaggccggggccugcaugcucgacggcggcaacaugcuggagacgaucaaggucacgccccagaccauggacgggauccucaagagcauccugaaggugaagcggucccugggcauguucgugagcgacacccccggggagcgcaaccccuacgagaacauccuguacaagaucugccucuccggcgacggguggccguacaucgcgagccggaccuccaucgucggccgcgccugggagaacaccaccguggaccuggagagcgacggcaagccccagaagguggggaccgccggcuccaacaagagccugcaguccgccggguuccccacgggccucaccuacagccagcugaugacccugaaggacuccaugaugcagcuggaccccagcgccaagaccuggaucgacaucgaggggcggccggaggaccccgucgagaucgcgcucuaccagcccauguccggcugcuacauccacuucuuccgcgagcccacggaccugaagcaguucaagcaggacgccaaguacagccacggcaucgacguggccgaccuguucccggcccagcccgggcucaccuccgccgucaucgaggcgcugccccggaacauggugcugaccugccagggcagcgacgacaucaagaagcuccuggacucccaggggcgccgcgacaucaagcugaucgacaucagccucagcaagguggacucccggaaguucgagaacgccgucugggaccagugcaaggaccugugccacaugcacaccggcgugguggucgagaagaagaagcgcgggggcaaggaggagaucacgccccacugcgcccugauggacugcaucauguucgacgccgccgugagcggcgggcucaacaucccggugcugcgggcgguccugccccgcgacaugguguuccggaccuccagccccaaggugguccucugaggacuagugcaucacauuuaaaagcaucucagccuaccaugagaauaagagaaagaaaaugaagaucaauagcuuauucaucucuuuuucuuuuucguugguguaaagccaacacccugucuaaaaaacauaaauuucuuuaaucauuuugccucuuuucucugugcuucaauuaauaaaaaauggaaagaaccuagaucuaaaaaaaaaaaaaaaaaaaaaaaaaaaaaaaaaaaaaaaaaaaaaaaaaaaaaaaaaaaaaaaaugcaucccccccccccccccccccccccccccccccaaaggcucuuuucagagccaccagaauu

SEQ ID NO: 10659 - RNA, 2095 nt, Artificial Sequence
  mRNA product Design i-2 comprising derived and/or modified sequence from LASV(GA391;Clade III)__CAA36646__NP (opt1)
ggggcgcugccuacggagguggcagccaucuccuucucggcaucaagcuuaccaugagcgccuccaaggaggugcgcagcuuccuguggacccagucccuccggcgcgagcugagcggcuacugcuccaacaucaagcugcaggucgugaaggacgcccaggcgcuccugcacgggcuggacuucagcgagguguccaacguccagcggcucaugcgcaagcagaagcgggacgacggcgaccugaagcgccugcgggaccucaaccaggccgugaacaaccugguggagcucaagagcacccagcagaaguccguccugcgcguggggacccugagcuccgacgaccugcucauccuggccgccgaccuggagaagcucaagagcaaggugacccggaccgagcgcccccuguccagcggcgucuacauggggaaccuguccagccagcagcucgaccagcggcgcgcccugcugaacaugaucggcaugaccggcguguccgggggcgggaagggcgcgagcgacgggaucgugcgggucugggacgugaagaacgccgagcuccugaacaaccaguucggcacgaugccgucccugacccucgccugccugaccaagcagggccagguggaccugaacgacgccguccaggcgcucaccgaccuggggcugaucuacacggccaaguaccccaacagcagcgaccucgaccgccugucccagagccaccccauccugaacaugaucgacaccaagaaguccagccucaacaucuccggcuacaacuucagccugggggccgccgugaaggccggcgcgugcaugcuggacggcgggaacaugcucgagaccaucaaggugagcccccagaccauggacggcauccucaaguccauccugaaggucaagaagucccuggggauguucgugagcgacacgccgggcgagcggaaccccuacgagaacauccuguacaagaucugccuguccggggacggcuggcccuacaucgccagccgcaccuccaucgugggccgggccugggagaacaccgucguggaccucgagcaggacaacaagccccagaagaucgggaacggcgggagcaacaagucccugcagagcgccggcuucgccgcggggcugaccuacucccagcucaugacgcugaaggacuucaagugcuucaaccugaucccgaacgccaagaccuggauggacaucgagggccgccccgaggaccccguggagaucgcccuguaccagcccagcuccggcugcuacguccacuucuuccgggagccgaccgaccucaagcaguucaagcaggacgccaaguacagccacgggaucgacgugaccgaccuguucgccgcgcagcccggccugacgagcgccgucaucgaggcccucccccgcaacauggugaucacgugccagggguccgaggacauccggaagcugcuggagagccagggccgccgcgacaucaagcucaucgacaucacccuguccaaggccgacagccggaaguucgagaacgccgugugggaccaguucaaggaccugugccacaugcacaccggggucgugguggagaagaagaagcgcggcggcaaggaggagaucacgccccacugcgcgcucauggacugcaucauguucgacgccgccgucuccgggggccuggacgccaaggugcugcgggugguccucccgcgcgacaugguguuccggaccagcacccccaaggugguccugugaggacuagugcaucacauuuaaaagcaucucagccuaccaugagaauaagagaaagaaaaugaagaucaauagcuuauucaucucuuuuucuuuuucguugguguaaagccaacacccugucuaaaaaacauaaauuucuuuaaucauuuugccucuuuucucugugcuucaauuaauaaaaaauggaaagaaccuagaucuaaaaaaaaaaaaaaaaaaaaaaaaaaaaaaaaaaaaaaaaaaaaaaaaaaaaaaaaaaaaaaaaugcaucccccccccccccccccccccccccccccccaaaggcucuuuucagagccaccagaauu

SEQ ID NO: 10660 - RNA, 2092 nt, Artificial Sequence
  mRNA product Design i-2 comprising derived and/or modified sequence from LASV(AV;Clade V)__CCA30315__NP (opt1)
ggggcgcugccuacggagguggcagccaucuccuucucggcaucaagcuuaccaugagcgccuccaaggaggugaaguccuuccuguggacccagagccuccgccgggagcugagcggcuacugcuccaacaucaagcugcaggucgugaaggacgcccaggcgcuccugcacgggcuggacuucagcgagguguccaacguccagcgccucaugcggaagcagcgccgggacgacagcgaccugaagcgccugcgggaccucaaccaggccgugaacaaccugguggagcugaaguccacccagcagaaguccguccuccgcgugggcacgcugagcagcgacgaccugcucacccuggccgccgaccuggagaagcucaaguccaaggugacccggaccgagcgcccccugagcuccggggucuacaugggcaaccugagcucccagcagcucgaccagcggcgcgcccugcugaaccucaucgggaugacgaacggcagccagggcucccaggcggggcgggacggcguggugcgcgucugggacgugaagaacgccgagcugcugaacaaccaguucgggaccaugccgagccucacccuggccugccugaccaagcagggccagguggaccucaacgacgucgugcaggcccugacggaccuggggcucaucuacaccgcgaaguaccccaacaccagcgaccuggaccggcugacccagucccaccccauccucaacaugaucgacacgaagaaguccagccugaacaucagcggcuacaacuucucccugggcgccgccgugaaggccggggccugcaugcucgacggcgggaacaugcuggagaccaucaaggucagcccccaguccauggacggcauccucaagagcauccugaaggugaagcgcgcgcugggcauguucguguccgacaccccgggggagcggaaccccuacgagaacauccuguacaagaucugccucagcggcgacggguggcccuacaucgccucccgcaccagcaucgucggccgggccugggagaacacggugguggaccuggagaccgacgggaagccccagaagaucggcuccggcaacagcaacaagucccugcagagcgccggguucuccgccggccucaccuacagccagcugaugacccugaaggacgcgaugcugcagcucgacccgaacgccaagacguggauggacaucgaggggcgccccgaggaccccgucgagguggcccuguaccagcccaucuccggcugcuacauccacuucuuccgggagccgaccgaccugaagcaguucaagcaggacgccaaguacagccacgggaucgacaucgccgaccucuucgcggcccagcccggccugaccagcgccgucaucgaggcccugccccgcaacauggugaucacgugccagggcuccgaggacaucaagaagcuccuggagagccaggggcgcaaggacaucaagcugaucgacaucgcccucuccaagaucgacagccggaaguucgagaacgcggugugggaccaguacaaggaccugugccacaugcacaccggcgucgugguggagaagaagaagcgcgggggcaaggaggagaucaccccgcacugcgcccugauggacugcaucauguucgacgccgccgucuccgggggccucaacacccuggugcugcgggcggugcucccccgcgacauggucuuccggaccagcacgccccgcguggugcugugaggacuagugcaucacauuuaaaagcaucucagccuaccaugagaauaagagaaagaaaaugaagaucaauagcuuauucaucucuuuuucuuuuucguugguguaaagccaacacccugucuaaaaaacauaaauuucuuuaaucauuuugccucuuuucucugugcuucaauuaauaaaaaauggaaagaaccuagaucuaaaaaaaaaaaaaaaaaaaaaaaaaaaaaaaaaaaaaaaaaaaaaaaaaaaaaaaaaaaaaaaaugcaucccccccccccccccccccccccccccccccaaaggcucuuuucagagccaccagaauu

SEQ ID NO: 10661 - RNA, 2092 nt, Artificial Sequence
  mRNA product Design i-2 comprising derived and/or modified sequence from LASV(Togo/2016/7082;Clade VI)__AMR44578__NP (opt1)
ggggcgcugccuacggagguggcagccaucuccuucucggcaucaagcuuaccaugagcaacuccaaggaggugaaguccuuccuguggacccagagccuccgccgggagcugagcggcuacugcuccaacaucaagcugcaggucgugaaggacgcccaggcccuccugcacgggcuggacuucagcgagguguccaacguccagcgccucaugcggaagcagaagcgcgacgacggcgaccugaagcggcugcgcgaccucaaccaggcggugaacaaccugguggagcucaagagcguccagcagaaguccauccugcggguggggacccugaccagcgacgaccugcucacccuggccgccgaccuggagaagcucaaguccaaggugacccgcaccgagcggccccugagcuccggcgucuacauggggaaccugagcucccagcagcucgaccagcgccgggcccugcugagcaugaucggcauguccggcgggaaccagaacagccagccgaagggcgacgggguggugcgcgucugggacgugaagaacgccgaccuccugaacaaccaguucggcacgaugcccucccugacccucgcgugccugaccaagcagggccagguggaccugaacgacgccguccaggcccucaccgaccuggggcugaucuacacggccaaguaccccaacagcagcgaccucgaccggcugucccagagccaccccauccugaacaugaucgacaccaagaaguccagccucaacaucuccggcuacaacuucagccugggggcggccaucaagaccggcgccugcaugcuggacgggggcaacaugcucgagaccaucaaggugacgccgcagaccauggacggcauccugaaguccauccugaaggugaagcgcagccucgggauguucaucuccgacacccccggcgagcggaaccccuacgagaacauccuguacaagaucugccugagcggggacggcuggcccuacaucgccucccgcaccgccaucaucgggcgggcgugggagaacacggucguggaccucgagagcgacuccaagccgcagaagaucggcagcaacggcuccaacaagagccugcaguccgccggguucgcccccggccugaccuacagccagcucaugacccugaaggacuccaugcugcagcuggaccccaacgccaagaccuggaucgacaucgaggggcgccccgaggacccgguggaggucgcccucuuccagcccaucagcggcugcuacauccacuucuuccgggagcccacggaccugaagcaguucaagcaggacgcgaaguacagccacgggaucgacgugaccgaccuguucgccgcccagcccggccucaccuccgccgugaucgaggcccugccgcgcaacaugguccugaccugccagggcagcgacgacaucaagaagcuccuggacucccaggggcggcgcgacaucaagcugaucgacgugagccucaacaagaucgacucccgcaaguucgagaacgcggucugggaccaguacaaggaccugugccacaugcacacgggcgugguggucgagaagaagaagaagggcgggaaggaggagaucacgccccacugcgcccugcucgacugcaucauguucgacgccgccgugagcgggggccugaacgccaccgugcugcgggcgguccucccccgcgacaugguguuccggaccuccagccccaaggugguccugugaggacuagugcaucacauuuaaaagcaucucagccuaccaugagaauaagagaaagaaaaugaagaucaauagcuuauucaucucuuuuucuuuuucguugguguaaagccaacacccugucuaaaaaacauaaauuucuuuaaucauuuugccucuuuucucugugcuucaauuaauaaaaaauggaaagaaccuagaucuaaaaaaaaaaaaaaaaaaaaaaaaaaaaaaaaaaaaaaaaaaaaaaaaaaaaaaaaaaaaaaaaugcaucccccccccccccccccccccccccccccccaaaggcucuuuucagagccaccagaauu

SEQ ID NO: 10662 - RNA, 2092 nt, Artificial Sequence
  mRNA product Design i-2 comprising derived and/or modified sequence from LASV(KAK-428;Clade n.d. (VII))__ANH09741__NP (opt1)
ggggcgcugccuacggagguggcagccaucuccuucucggcaucaagcuuaccaugagcaacuccaaggaggugaaguccuuccuguggacccagagccuccgccgggagcugagcggcuacugcaccaacaucaagcugcaggucgugaaggacgcccaggcccuccugcacgggcuggacuucuccgaggugagcaacguccagcgccucaugcggaagcagaagcgcgacgacaacgaccugaagcggcugcgcgaccucaaccaggcggugaacaaccugguggagcugaaguccguccagcagaaguccgugcucaaggugggcacgcugaacagcgacgaccugcucacccuggccgccgaccuggagaagcucaagagcaaggucgugcggaccgagcgcccccuguccagcgggguguacaugggcaaccuguccagccagcagcucgaccagcggcgcgcccugcugaacaugaucgggauggccggcggcucccaggggaaccagccgagccgggacggcgucgugcgcgugugggacgucaagaacgcggaccuccugaacaaccaguucgggaccaugcccucccugacgcucgccugccugaccaagcagggccagguggaccugaacgacgugguccucgcccugaccgaccuggggcucaucuacaccgccaaguaccccaacagcuccgaccuggaccggcugagccagaaccaccccgugcucaacaugaucgacgugaacaagagcucccugaacaucagcggcuacaacuucucccugggcgcggccgucaaggccggggccugcaugcucgacggcgggaacaugcuggagacgaucaagaucagcccgcagaccguggacggcauccugaaguccauccucaaggugaagcgcgcccugggcauguucgucagcgacacccccggggagcggaaccccuacgagaacauccuguacaaggugugccucuccggcaacggguggcccuacaucgcgagccgcaccuccaucgucggccgggccugggagaacacggugguggaccuggagagcaacaagaaccagccgaaggucgggaacaacggcuccaacaagaugcugcagagcuccggcuucgccaccgggcucaccuacagccagcugaugacccugcgcgacuccaugcugcagcucgaccccacggccaagaccuggaucgacaucgagggccggcccgaggaccccguggagcuggcccuguuccagccgagcuccgggugcuacauccacuucuuccgcgagcccaccgaccucaagcaguucaagcaggacgcgaaguacagccacggcaucgacgugaacgaccuguucuccgcccagcccgggcugaccagcgccguccucgaggcccugccccggaacauggugcugacgugccagggcagcgacgacauccgcaagcuccuggacucccaggaccgcaaggacaucaagcugaucgacaucagccucuccaaggccgacgcgcggaaguucgagaacgacgugugggaccaguucaaggaccugugccacaugcacaccggcaucgucguggagaagaagaagaagggcgggaagcaggagaugaccccgcacugcgcccugcucgacugcaucauguucgacgccgccgugagcgggggccugaacguccccacccugcgcgccgugcuccccacggacaugguguuccggaccaucaccaccaaggucgugcugugaggacuagugcaucacauuuaaaagcaucucagccuaccaugagaauaagagaaagaaaaugaagaucaauagcuuauucaucucuuuuucuuuuucguugguguaaagccaacacccugucuaaaaaacauaaauuucuuuaaucauuuugccucuuuucucugugcuucaauuaauaaaaaauggaaagaaccuagaucuaaaaaaaaaaaaaaaaaaaaaaaaaaaaaaaaaaaaaaaaaaaaaaaaaaaaaaaaaaaaaaaaugcaucccccccccccccccccccccccccccccccaaaggcucuuuucagagccaccagaauu

SEQ ID NO: 10663 - RNA, 2092 nt, Artificial Sequence; identical to SEQ ID NO: 10657
  mRNA product Design i-2 comprising derived and/or modified sequence from LASV(Pinneo-NIG-1969;Clade I)__AIT17837__NP (opt1)

SEQ ID NO: 10664 - RNA, 2092 nt, Artificial Sequence
  mRNA product Design i-2 comprising derived and/or modified sequence from LASV(ISTH0009-NIG-2011;Clade II)__AIT17405__NP (opt1)
ggggcgcugccuacggagguggcagccaucuccuucucggcaucaagcuuaccaugagcguguccaaggaggucaagagcuuccuguggacccagucccuccgccgggagcugagcggcuacugcuccaacaucaagcuccagguggugaaggacgcccaggcccugcugcacgggcuggacuucagcgaggucuccaacgugcagcgccucaugcggaagcagaagcgcgacgacagcgaccugaagcggcugcgcgaccucaaccaggcggugaacaaccuggucgagcugaaguccacccagcagaaguccauccuccgggugggcacccugaccagcgacgaccugcucacccuggccgccgaccuggagaagcucaagagcaaggugauccgcaccgagcggccccuguccagcggggucuacaugggcaaccuguccacgcagcagcucgagcagcgccgggcccugcugaacaugaucgggauggugggcggcgcccaggggacccagccgggccgcgacggggugguccgggugugggacgugaagaaccccgaccuccugaacaaccaguucggcaccaugcccagccugacccucgcgugccugacgaagcaggggcaggucgaccugaacgacgccgugcucgcccugaccgaccugggccucaucuacaccgccaaguaccccaacuccagcgaccuggaccgccugucccagagccacccgauccucaacaugguggacaucaagaaguccagccugaacaucagcggcuacaacuucucccugggggcggccgucaaggccggcgccugcaugcucgacgggggcaacaugcuggagaccaucaaggugacgccccagaccauggacggcauccucaagagcauccugaaggugaagcggucccuggggauguucgucagcgacacccccggcgagcgcaaccccuacgagaacauccuguacaagaucugccucuccggggacggcuggccguacaucgccagccggaccuccaucguggggcgcgcgugggagaacacgaccguggaccuggagagcgacggcaagccccagaaggucggcuccgccgggagcaacaagucccugcagagcgccggcuuccccaccgggcucaccuacucccagcugaugacgcugaaggacagcaugaugcagcuggaccccuccgccaagaccuggaucgacaucgagggccggccggaggaccccguggagaucgcccucuaccagcccaugagcgggugcuacauccacuucuuccgcgagcccaccgaccugaagcaguucaagcaggacgcgaaguacucccacggcaucgacgucgccgaccuguucccggcccagcccggccucaccagcgccgugaucgaggcccugccccggaacauggugcugacgugccaggggagcgacgacaucaagcgccuccuggacucccagggccgccgggacaucaagcugaucgacaucgcgcucagcaaggccgacucccgccgguucgagaacgccgucugggaccagugcaaggaccugugccacaugcacaccggggugguggucgagaagaagaagcgcggcgggaaggaggagaucacgccccacugcgcccugauggacugcaucauguacgacgccgcggugagcggcggccucaacaucccggugcugcgggccguccugccccgcgacaugguguuccggaccuccagccccaaggugguccucugaggacuagugcaucacauuuaaaagcaucucagccuaccaugagaauaagagaaagaaaaugaagaucaauagcuuauucaucucuuuuucuuuuucguugguguaaagccaacacccugucuaaaaaacauaaauuucuuuaaucauuuugccucuuuucucugugcuucaauuaauaaaaaauggaaagaaccuagaucuaaaaaaaaaaaaaaaaaaaaaaaaaaaaaaaaaaaaaaaaaaaaaaaaaaaaaaaaaaaaaaaaugcaucccccccccccccccccccccccccccccccaaaggcucuuuucagagccaccagaauu

SEQ ID NO: 10665 - RNA, 2092 nt, Artificial Sequence
  mRNA product Design i-2 comprising derived and/or modified sequence from LASV(ISTH2010-NIG-2012;Clade II)__AIT17483__NP (opt1)
ggggcgcugccuacggagguggcagccaucuccuucucggcaucaagcuuaccaugagcgccuccaaggaggugaaguccuuccuguggacccagagccuccgccgggagcugagcggcuacugcuccaacaucaagcugcaggucgugaaggacgcccaggcgcuccugcacgggcuggacuucagcgagguguccaacguccagcgccucaugcggaagcagaagcgcgacgacagcgaccugaagcggcugcgcgaccucaaccaggccgugaacaaccugguggagcugaaguccacccagcagaaguccauccuccgggucggcacgcugaccagcgacgaccugcucacccuggccgccgaccuggagaagcucaagagcaaggugauccgcaccgagcggccccuguccagcgggguguacaugggcaaccuguccacgcagcagcucgagcagcgccgggcccugcugaaccucaucgggauggucggcggcgcgcaggggacccagccgggccgcgacgggguggugcgggucugggacgugaagaaccccgaccugcugaacaaccaguucggcaccaugcccagccucacccuggccugccugacgaagcagggccagguggaccucaacgacgccguccuggcccugaccgaccucgggcugaucuacaccgcgaaguaccccaacuccagcgaccuggaccgccucucccagagccacccgauccugaacaugguggacaccaagaaguccagccugaacaucagcggcuucaacuucucccucggggccgccgugaaggccggcgccugcaugcuggacgggggcaacaugcuggagacgaucaaggucacgccccagaccauggacggcauccucaagagcauccugaaggugaagaagucccuggggauguucgugagcgacacccccggcgagcggaaccccuacgagaacauccucuacaagaucugccuguccggggacggcuggccguacaucgcgagccgcaccuccaucgucgggcgggccugggagaacaccaccguggaccuggagagcgacggcaagccccacaaggugggcaccgccggguccaacaagagccuccaguccgccggcuuccccacggggcugaccuacagccagcugaugacccugaaggacuccaugaugcagcucgaccccagcgccaagaccuggaucgacaucgagggccgcccggaggaccccgucgagaucgcgcuguaccagcccauguccgggugcuacauccacuucuuccgggagcccacggaccugaagcaguucaagcaggacgccaaguacagccacggcaucgacguggccgaccucuucccggcccagcccggccugaccuccgccgucaucgaggcgcugccccgcaacauggugcugaccugccaggggagcgacgacaucaagcggcuccuggacagccagggccgccgcgacaucaagcucaucgacaucgcccuguccaaggccgacagccggcgcuucgagaacgccgugugggaccagugcaaggaccugugccacaugcacaccggggucgugguggagaagaagaagcggggcgggaaggaggagaucacgccccacugcgcccucauggacugcaucauguacgacgcggccgucuccggcggccugaacaucccggugcugcgcgccgugcucccccgggacauggucuuccgcaccagcucccccaagguggugcugugaggacuagugcaucacauuuaaaagcaucucagccuaccaugagaauaagagaaagaaaaugaagaucaauagcuuauucaucucuuuuucuuuuucguugguguaaagccaacacccugucuaaaaaacauaaauuucuuuaaucauuuugccucuuuucucugugcuucaauuaauaaaaaauggaaagaaccuagaucuaaaaaaaaaaaaaaaaaaaaaaaaaaaaaaaaaaaaaaaaaaaaaaaaaaaaaaaaaaaaaaaaugcaucccccccccccccccccccccccccccccccaaaggcucuuuucagagccaccagaauu

SEQ ID NO: 10666 - RNA, 2092 nt, Artificial Sequence
  mRNA product Design i-2 comprising derived and/or modified sequence from LASV(Lassa virus/H.sapiens-wt/NGA/2015/ISTH_0543;Clade II)__AVO03640__NP (opt1)
ggggcgcugccuacggagguggcagccaucuccuucucggcaucaagcuuaccaugagcgccuccaaggaggugaaguccuuccuguggacccagagccuccgccgggagcugagcggcuacugcuccaacaucaagcugcaggucgugaaggacgcccaggcgcuccugcacgggcuggacuucagcgagguguccaacguccagcgccucaugcggaagcagaagcgcgacgacagcgaccugaagcggcugcgcgaccucaaccaggccgugaacaaccugguggagcugaaguccacccagcagaaguccauccuccgggucggcacgcugaccagcgacgaccugcucacccuggccgccgaccuggagaagcucaagagcaaggugauccgcaccgagcggccccuguccagcgggguguacaugggcaaccuguccacgcagcagcucgagcagcgccgggcccugcugaacaugaucgggauggucggcggcgcgcaggggacccagccgggccgcgacgggguggugcgggucugggacgugaagaaccccgaccuccugaacaaccaguucggcaccaugcccagccugacccucgccugccugacgaagcagggccagguggaccugaacgacgccguccucgcccugaccgaccuggggcucaucuacaccgcgaaguaccccaacuccagcgaccuggaccgccugucccagagccacccgauccucaacaugguggacaccaagaaguccagccugaacaucagcggcuacaacuucucccugggggccgccgugaaggccggcgccugcaugcucgacgggggcaacaugcuggagacgaucaaggucacgccccagaccauggacggcauccucaagagcauccugaaggugaagaagucccuggggauguucgugagcgacacccccggcgagcggaaccccuacgagaacauccuguacaagaucugccucuccggggacggcuggccguacaucgcgagccgcaccuccaucgucgggcgggccugggagaacaccaccguggaccuggagagcgacggcaagccccagaaggugggcuccgccgggagcaacaagucccugcagagcgccggcuuccccaccgggcucacguacucccagcugaugacccugaaggacagcaugaugcagcuggaccccuccgccaagaccuggaucgacaucgagggccgcccggaggaccccgucgagaucgcgcucuaccagcccaugagcgggugcuacauccacuucuuccgggagcccaccgaccugaagcaguucaagcaggacgccaaguacucccacggcaucgacguggccgaccuguucccggcccagcccggccucacgagcgccgucaucgaggcgcugccccgcaacauggugcugaccugccaggggagcgacgacaucaagcggcuccuggacucccagggccgcaaggacaucaagcugaucgacaucgcccucagcaaggccgacucccgccgguucgagaacgccgugugggaccagugcaaggaccugugccacaugcacaccggggucgugguggagaagaagaagcgcggcgggaaggaggagaucacgccccacugcgcccugauggacugcaucauguacgacgcggccgucagcggcggccucaacaucccggugcugcgggccgugcugccccgcgacauggucuuccggaccuccagccccaagguggugcucugaggacuagugcaucacauuuaaaagcaucucagccuaccaugagaauaagagaaagaaaaugaagaucaauagcuuauucaucucuuuuucuuuuucguugguguaaagccaacacccugucuaaaaaacauaaauuucuuuaaucauuuugccucuuuucucugugcuucaauuaauaaaaaauggaaagaaccuagaucuaaaaaaaaaaaaaaaaaaaaaaaaaaaaaaaaaaaaaaaaaaaaaaaaaaaaaaaaaaaaaaaaugcaucccccccccccccccccccccccccccccccaaaggcucuuuucagagccaccagaauu

SEQ ID NO: 10667 - RNA, 2092 nt, Artificial Sequence
  mRNA product Design i-2 comprising derived and/or modified sequence from LASV(Lassa virus/H.sapiens-wt/NGA/2016/ISTH_0009;Clade II)__AVO03572__NP (opt1)
ggggcgcugccuacggagguggcagccaucuccuucucggcaucaagcuuaccaugagcgccuccaaggaggugaaguccuuccuguggacccagagccuccgccgggagcugagcggcuacugcuccaacaucaagcugcaggucgugaaggacgcccaggcgcuccugcacgggcuggacuucagcgagguguccaacguccagcgccucaugcggaagcagaagcgcgacgacagcgaccugaagcggcugcgcgaccucaaccaggccgugaacaaccugguggagcugaaguccacccagcagaaguccauccuccgggucggcacgcugaccagcgacgaccugcucacccuggccgccgaccuggagaagcucaagagcaaggugauccgcaccgagcggccccuguccagcgggguguacaugggcaaccuguccacgcagcagcucgagcagcgccgggcccugcugaacaugaucgggauggucggcggcgcgcaggggacccagccgggccgcgacgggguggugcgggucugggacgugaagaaccccgaccuccugaacaaccaguucggcaccaugcccagccugacccucgccugccugacgaagcagggccagguggaccugaacgacgccguccucgcccugaccgaccuggggcucaucuacaccgcgaaguaccccaacuccagcgaccuggaccgccugucccagagccacccgauccucaacaugguggacaccaagaaguccagccugaacaucagcggcuacaacuucucccugggggccgccgugaaggccggcgccugcaugcucgacgggggcaacaugcuggagacgaucaaggucacgccccagaccauggacggcauccucaagagcauccugaaggugaagaagucccuggggauguucgugagcgacacccccggcgagcggaaccccuacgagaacauccuguacaagaucugccucuccggggacggcuggccguacaucgcgagccgcaccuccaucgucgggcgggccugggagaacaccaccguggaccuggagagcgacggcaagccccagaaggugggcuccgccgggagcaacaagucccugcagagcgccggcuuccccaccgggcucacguacucccagcugaugacccugaaggacagcaugaugcagcuggaccccuccgccaagaccuggaucgacaucgagggccgcccggaggaccccgucgagaucgcgcucuaccagcccaugagcgggugcuacauccacuucuuccgggagcccaccgaccugaagcaguucaagcaggacgccaaguacucccacggcaucgacguggccgaccuguucccggcccagcccggccucacgagcgccgucaucgaggcgcugccccgcaacauggugcugaccugccaggggagcgacgacaucaagcggcuccuggacucccagggccgccgcgacaucaagcugaucgacaucgcccucagcaaggccgacucccggcgcuucgagaacgccgugugggaccagugcaaggaccugugccacaugcacaccggggucgugguggagaagaagaagcggggcgggaaggaggagaucacgccccacugcgcccugauggacugcaucauguacgacgcggccgucagcggcggccucaacaucccggugcugcgcgccgugcugccccgggacauggucuuccgcaccuccagccccaagguggugcucugaggacuagugcaucacauuuaaaagcaucucagccuaccaugagaauaagagaaagaaaaugaagaucaauagcuuauucaucucuuuuucuuuuucguugguguaaagccaacacccugucuaaaaaacauaaauuucuuuaaucauuuugccucuuuucucugugcuucaauuaauaaaaaauggaaagaaccuagaucuaaaaaaaaaaaaaaaaaaaaaaaaaaaaaaaaaaaaaaaaaaaaaaaaaaaaaaaaaaaaaaaaugcaucccccccccccccccccccccccccccccccaaaggcucuuuucagagccaccagaauu

SEQ ID NO: 10668 - RNA, 2092 nt, Artificial Sequence
  mRNA product Design i-2 comprising derived and/or modified sequence from LASV(Lassa virus/H.sapiens-wt/NGA/2016/ISTH_0017;Clade II)__AVO03568__NP (opt1)
ggggcgcugccuacggagguggcagccaucuccuucucggcaucaagcuuaccaugagcgccuccaaggaggugaaguccuuccuguggacccagagccuccgccgggagcugagcggcuacugcuccagcaucaagcugcaggucgugaaggacgcccaggcgcuccugcacgggcuggacuucuccgaggugagcaacguccagcgccucaugcggaagcagaagcgcgacgacuccgaccugaagcggcugcgcgaccucaaccaggccgugaacaaccugguggagcucaagagcacccagcagaaguccauccugcgggucggcacgcugaccagcgacgaccugcucacccuggccgccgaccuggagaagcucaaguccaaggugauccgcaccgagcggccccugagcuccgggguguacaugggcaaccugagcacgcagcagcucgagcagcgccgggcccugcugaacaugaucgggauggcgggcggcgcccaggggacccagccgggccgcgacggggucgugcgggugugggacgucaagaaccccgaccuccugaacaaccaguucggcaccaugcccucccugacccucgccugccugacgaagcagggccagguggaccugaacgacgccgugcucgcgcugaccgaccuggggcucaucuacaccgccaaguaccccaacagcuccgaccuggaccgccugagccagagccacccgauccucaacauggucgacaccaagaaguccagccugaacaucuccggcuacaacuucagccugggggccgccgugaaggccggcgcgugcaugcucgacgggggcaacaugcuggagacgaucaaggugacgccccagaccauggacggcauccugaaguccauccucaaggucaagcggagccuggggauguucguguccgacgcccccggcgagcgcaaccccuacgagaacauccuguacaagaucugccucagcggggacggcuggccguacaucgccucccggaccagcaucguggggcgcgccugggagaacaccaccgucgaccuggaguccgacggcaagccccagaaggugggcgccaccgggagcaacaagucccugcagagcgcgggcuuccccaccgggcucacguacucccagcugaugacccugaaggacagcaugaugcagcuggaccccuccgccaagaccuggaucgacaucgagggccggccggaggaccccguggaggucgcccucuaccagcccgugagcgggugcuacauccacuucuuccgcgagcccaccgaccugaagcaguucaagcaggacgccaaguacucccacggcaucgacgucgccgaccuguucccggcgcagcccggccucacgagcgccgugaucgaggcccugccccggaacauggugcugaccugccaggggagcgacgacaucaagaagcuccuggacucccagggccgcaaggacaucaagcugaucgacaucgcccucagcaaggccgacucccgccgguucgagaacgcggucugggaccagugcaaggaccugugccacaugcacaccggggugguggucgagaagaagaagcgcggcgggaaggaggagaucacgccccacugcgcccugauggacugcaucauguacgacgccgccgugagcggcggccucaacaucccggugcugcgggcgguccugccccgcgacaugguguuccggaccuccagccccaaggugguccucugaggacuagugcaucacauuuaaaagcaucucagccuaccaugagaauaagagaaagaaaaugaagaucaauagcuuauucaucucuuuuucuuuuucguugguguaaagccaacacccugucuaaaaaacauaaauuucuuuaaucauuuugccucuuuucucugugcuucaauuaauaaaaaauggaaagaaccuagaucuaaaaaaaaaaaaaaaaaaaaaaaaaaaaaaaaaaaaaaaaaaaaaaaaaaaaaaaaaaaaaaaaugcaucccccccccccccccccccccccccccccccaaaggcucuuuucagagccaccagaauu

SEQ ID NO: 10669 - RNA, 2092 nt, Artificial Sequence
  mRNA product Design i-2 comprising derived and/or modified sequence from LASV(Lassa virus/H.sapiens-wt/NGA/2018/ISTH_0959;Clade II)__AVV65100__NP (opt1)
ggggcgcugccuacggagguggcagccaucuccuucucggcaucaagcuuaccaugagcgccuccaaggaggugaaguccuuccuguggacccagagccuccgccgggagcugagcggcuacugcuccaacaucaagcugcaggucgugaaggacgcccaggcgcuccugcacgggcuggacuucagcgagguguccaacguccagcgccucaugcggaagcagaagcgcgacgacagcgaccugaagcggcugcgcgaccucaaccaggccgugaacaaccugguggagcugaaguccacccagcagaaguccauccuccgggucggcacccugaccagcgacgaccugcucacccuggccgccgaccuggagaagcucaagagcaaggugauccgcaccgagcggccccuguccagcgggguguacaugggcaaccuguccacgcagcagcucgagcagcgccgggcccugcugaaccucaucgggauggucggcggcgcgcaggggacccagccgggccgcgacgggguggugcgggucugggacgugaagaaccccgaccugcugaacaaccaguucggcaccaugcccagccucacccuggccugccugacgaagcagggccagguggaccucaacgacgucgugcuggcccugaccgaccucgggcugaucuacaccgccaaguaccccaacuccagcgaccuggaccgccucucccagagccacccgauccugaacaugguggacaccaagaaguccagccugaacaucagcggcuucaacuucucccucggggcggccgucaaggccggcgccugcaugcuggacgggggcaacaugcuggagacgaucaaggugacgccccagaccauggacggcauccucaagagcauccugaaggugaagaagucccuggggauguucgucagcgacacccccggcgagcggaaccccuacgagaacauccucuacaagaucugccuguccggggacggcuggccguacaucgccagccgcaccuccaucguggggcgggcgugggagaacaccaccguggaccuggagagcgacggcaagccccacaaggucggcaccgccggguccaacaagagccuccaguccgccggcuuccccacggggcugaccuacagccagcugaugacccugaaggacuccaugaugcagcucgaccccagcgccaagaccuggaucgacaucgagggccgcccggaggaccccguggagaucgcccuguaccagcccauguccgggugcuacauccacuucuuccgggagcccacggaccugaagcaguucaagcaggacgcgaaguacagccacggcaucgacgucgccgaccucuucccggcccagcccggccugaccuccgccgugaucgaggcccugccccgcaacauggugcugaccugccaggggagcgacgacaucaagcggcuccuggacagccagggccgcaaggacaucaagcucaucgacaucgcgcuguccaagaccgacagccgccgguucgagaacgccgucugggaccagugcaaggaccugugccacaugcacacgggggugguggucgagaagaagaagcgcggcgggaaggaggagaucacgccccacugcgcccucauggacugcaucauguacgacgccgccguguccggcggccugaacaucccggugcugcgggcgguccucccccgcgacaugguguuccggaccagcucccccaaggugguccugugaggacuagugcaucacauuuaaaagcaucucagccuaccaugagaauaagagaaagaaaaugaagaucaauagcuuauucaucucuuuuucuuuuucguugguguaaagccaacacccugucuaaaaaacauaaauuucuuuaaucauuuugccucuuuucucugugcuucaauuaauaaaaaauggaaagaaccuagaucuaaaaaaaaaaaaaaaaaaaaaaaaaaaaaaaaaaaaaaaaaaaaaaaaaaaaaaaaaaaaaaaaugcaucccccccccccccccccccccccccccccccaaaggcucuuuucagagccaccagaauu

SEQ ID NO: 10670 - RNA, 2092 nt, Artificial Sequence
  mRNA product Design i-2 comprising derived and/or modified sequence from LASV(LASV003-NIG-2008;Clade II)__AIT17581__NP (opt1)
ggggcgcugccuacggagguggcagccaucuccuucucggcaucaagcuuaccaugagcgccuccaaggaggugaaguccuuccuguggacccagagccuccgccgggagcugagcggcuacugcuccagcaucaagcugcaggucgugaaggacgcccaggcgcuccugcacgggcuggacuucuccgaggugagcaacguccagcgccucaugcggaagcagaagcgcgacgacuccgaccugaagcggcugcgcgaccucaaccaggccgugaacaaccugguggagcucaagagcacccagcagaaguccguccugcgggugggcacccugaccagcgacgaccugcucacccuggccgccgaccuggagaagcucaaguccaaggugauccgcaccgagcggccccugagcuccggggucuacaugggcaaccugagcgcccagcagcucgagcagcgccggacgcugcugaacaugaucgggauggugggcggcgcgcaggggacccagccgggccgcgacggggugguccgggugugggacgugaagaaccccgaccuccugaacaaccaguucggcaccaugcccucccugacccucgccugccugacgaagcaggggcaggucgaccugaacgacguggugcucgcccugaccgaccugggccucaucuacaccgccaaguaccccaacagcuccgaccuggaccgccugagccagagccacccgauccucuccauggucgacaccaagaaguccagccugaacaucagcggcuacaacuucucccugggggcggccgugaaggccggcgccugcaugcucgacgggggcaacaugcuggagacgaucaaggugacgccccagaccauggacggcauccucaagagcauccugaaggucaagaagucccuggggauguucgugagcgacacccccggcgagcggaaccccuacgagaacauccuguacaagaucugccucuccggggacggcuggccguacaucgccagccgcaccuccaucguggggcgggcgugggagaacaccaccgucgaccuggagagcgacggcaagccccagaaggugggcaccgccggguccaacaagagccugcaguccgccggcuuccccacggggcucaccuacagccagcugaugacccugaaggacuccaugaugcagcuggaccccagcgccaagaccuggaucgacaucgagggccgcccggaggaccccgucgagaucgcccucuaccagcccauguccgggugcuacauccacuucuuccgggagcccacggaccugaagcaguucaagcaggacgcgaaguacagccacggcaucgacgugaccgaccuguucccggcccagcccggccucaccagcgccgugaucgaggcccugccccgcaacaugguccugaccugccagggguccgacgacaucaagcggcuccuggacagccagggccgccgcgacaucaagcugaucgacaucgcccucuccaaggcggacagccggcgcuucgagaacgccgugugggaccagugcaaggaccugugccacaugcacacggggguggucguggagaagaagaagcggggcgggaaggaggagaucacgccccacugcgcccugauggacugcaucauguacgacgccgccguguccggcggccucaacaucccgguccugcgcgcggugcugccccgggacaugguguuccgcaccagcucccccaaggucgugcucugaggacuagugcaucacauuuaaaagcaucucagccuaccaugagaauaagagaaagaaaaugaagaucaauagcuuauucaucucuuuuucuuuuucguugguguaaagccaacacccugucuaaaaaacauaaauuucuuuaaucauuuugccucuuuucucugugcuucaauuaauaaaaaauggaaagaaccuagaucuaaaaaaaaaaaaaaaaaaaaaaaaaaaaaaaaaaaaaaaaaaaaaaaaaaaaaaaaaaaaaaaaugcaucccccccccccccccccccccccccccccccaaaggcucuuuucagagccaccagaauu

SEQ ID NO: 10671 - RNA, 2092 nt, Artificial Sequence
  mRNA product Design i-2 comprising derived and/or modified sequence from LASV(LASV035-NIG-2009;Clade II)__AIT17589__NP (opt1)
ggggcgcugccuacggagguggcagccaucuccuucucggcaucaagcuuaccaugagcgccuccaaggaggugaaguccuuccuguggacccagagccuccgccgggagcugagcggcuacugcuccagcaucaagcugcaggucgugaaggacgcccaggcgcuccugcacgggcuggacuucuccgaggugagcaacguccagcgccucaugcggaagcagaagcgcgacgacuccgaccugaagcggcugcgcgaccucaaccaggccgugaacaaccugguggagcucaagagcacccagcagaaguccauccugcgggucggcacgcugaccagcgacgaccugcucacccuggccgccgaccuggagaagcucaaguccaaggugauccgcaccgagcggccccugagcuccgggguguacaugggcaaccugagcgcccagcagcucgagcagcgccgggcgcugcugaacaugaucgggauggucggcggcgcccaggggacgcagccgggccgcgacgggguggugcgggucugggacgugaagaaccccgaccuccugaacaaccaguucggcaccaugcccucccugacccucgccugccugaccaagcagggccagguggaccugaacgacgccguccucgcgcugacggaccuggggcucaucuacaccgccaaguaccccaacagcuccgaccuggaccgccugagccagagccacccgauccucaacaugguggacaccaagaaguccagccugaacaucuccggcuacaacuucagccugggggccgccgugaaggccggcgcgugcaugcucgacgggggcaacaugcuggagaccaucaaggucacgccccagaccauggacggcauccugaaguccauccucaaggugaagcggagccuggggauguucguguccgacacccccggcgagcgcaaccccuacgagaacauccuguacaagaucugccucagcggggacggcuggccguacaucgccucccggaccagcaucgucgggcgcgccugggagaacacgaccguggaccuggaguccgacggcaagccccagaaggugggcaccaccgggagcaacaagucccugcagagcgccggcuuccccacggggcucaccuacucccagcugaugacccugaaggacagcaugaugcagcuggaccccuccgccaagaccuggaucgacaucgagggccggccggaggaccccgucgagaucgcgcucuaccagcccaugagcgggugcuacauccacuucuuccgcgagcccacggaccugaagcaguucaagcaggacgccaaguacucccacggcaucgacguggccgaccuguucccggcccagcccggccucaccagcgccgucaucgaggcgcugccccggaacauggugcugaccugccaggggagcgacgacaucaagaagcuccuggacucccagggccgccgcgacaucaagcugaucgacaucgcccucagcaaggccgacucccggaaguucgagaacgccgugugggaccagugcaaggaccugugccacaugcacaccggggucgugguggagaagaagaagcgcggcgggaaggaggagaucacgccccacugcgcccugauggacugcaucauguacgacgcggccgucagcggcggccucaacaucccggugcugcgggccgugcugccccgcgacauggucuuccggaccuccagccccaagguggugcucugaggacuagugcaucacauuuaaaagcaucucagccuaccaugagaauaagagaaagaaaaugaagaucaauagcuuauucaucucuuuuucuuuuucguugguguaaagccaacacccugucuaaaaaacauaaauuucuuuaaucauuuugccucuuuucucugugcuucaauuaauaaaaaauggaaagaaccuagaucuaaaaaaaaaaaaaaaaaaaaaaaaaaaaaaaaaaaaaaaaaaaaaaaaaaaaaaaaaaaaaaaaugcaucccccccccccccccccccccccccccccccaaaggcucuuuucagagccaccagaauu

SEQ ID NO: 10672 - RNA, 2092 nt, Artificial Sequence
  mRNA product Design i-2 comprising derived and/or modified sequence from LASV(LASV1000-NIG-2009;Clade II)__AIT17783__NP (opt1)
ggggcgcugccuacggagguggcagccaucuccuucucggcaucaagcuuaccaugagcgccuccaaggaggugaaguccuuccuguggacccagagccuccgccgggagcugagcggcuacugcuccaacaucaagcugcaggucgugaaggacgcccaggcgcuccugcacgggcuggacuucagcgagguguccaacguccagcgccucaugcggaagcagaagcgcgacgacagcgaccugaagcggcugcgcgaccucaaccaggccgugaacaaccugguggagcugaaguccacccagcagaaguccauccuccgggucggcacgcugaccagcgacgaccugcucacccuggccgccgaccuggagaagcucaagagcaaggugauccgcaccgagcggccccuguccagcgggguguacaugggcaaccuguccacgcagcagcucgagcagcgccgggcccugcugaacaugaucgggauggucggcggcgcgcaggggacccagccgggccgcgacgggguggugcgggucugggacgugaagaaccccgaccuccugaacaaccaguucggcaccaugcccagccugacccucgccugccugacgaagcagggccagguggaccugaacgacgucgugcucgcccugaccgaccuggggcucaucuacaccgccaaguaccccaacuccagcgaccuggaccgccugucccagagccacccgauccucaacaugguggacaccaagaaguccagccugaacaucagcggcuacaacuucucccugggggcggccgucaaggccggcgccugcaugcucgacgggggcaacaugcuggagacgaucaaggugacgccccagaccauggacggcauccucaagagcauccugaaggugaagaagucccuggggauguucgucagcgacacccccggcgagcggaaccccuacgagaacauccuguacaagaucugccucuccggggacggcuggccguacaucgccagccgcaccuccaucguggggcgggcgugggagaacaccaccguggaccuggagagcgacggcaagccccagaaggucggcaccgccggguccaacaagagccugcaguccgccggcuuccccacggggcucaccuacagccagcugaugacccugaaggacuccaugaugcagcuggaccccagcgccaagaccuggaucgacaucgagggccgcccggaggaccccguggagaucgcccucuaccagcccgucuccgggugcuacauccacuucuuccgggagcccacggaccugaagcaguucaagcaggacgcgaaguacagccacggcaucgacguggccgaccuguucccggcccagcccggccucaccuccgccgugaucgaggcccugccccgcaacaugguccugaccugccaggggagcgacgacaucaagcggcuccuggacagccagggccgccgcgacaucaagcugaucgacaucgcgcucuccaaggccgacagccggcgcuucgagaacgccgugugggaccagugcaaggaccugugccacaugcacaccgggguggucguggagaagaagaagcggggcgggaaggaggagaucacgccccacugcgcccugauggacugcaucauguacgacgccgcgguguccggcggccucaacaucccgguccugcgcgccgugcugccccgggacaugguguuccgcaccagcucccccaaggucgugcucugaggacuagugcaucacauuuaaaagcaucucagccuaccaugagaauaagagaaagaaaaugaagaucaauagcuuauucaucucuuuuucuuuuucguugguguaaagccaacacccugucuaaaaaacauaaauuucuuuaaucauuuugccucuuuucucugugcuucaauuaauaaaaaauggaaagaaccuagaucuaaaaaaaaaaaaaaaaaaaaaaaaaaaaaaaaaaaaaaaaaaaaaaaaaaaaaaaaaaaaaaaaugcaucccccccccccccccccccccccccccccccaaaggcucuuuucagagccaccagaauu

SEQ ID NO: 10673 - RNA, 2092 nt, Artificial Sequence
  mRNA product Design i-2 comprising derived and/or modified sequence from LASV(LASV221-NIG-2010;Clade II)__AIT17625__NP (opt1)
ggggcgcugccuacggagguggcagccaucuccuucucggcaucaagcuuaccaugagcgccuccaaggaggugaaguccuuccuguggacccagagccuccgccgggagcugagcggcuacugcuccagcaucaagcugcaggucgugaaggacgcccaggcgcuccugcacgggcuggacuucuccgaggugagcaacguccagcgccucaugcggaagcagcgccgggacgacuccgaccugaagcgccugcgggaccucaaccaggccgugaacaaccugguggagcucaagagcacccagcagaaguccauccugcgcgucggcacgcugaccagcgacgaccugcucacccuggccgccgaccuggagaagcucaaguccaaggugauccggaccgagcgcccccugagcuccgggguguacaugggcaaccugagcacgcagcagcucgagcagcggcgcgcccugcugaacaugaucgggauggucggcggcgcgcaggggacccagccgggccgggacgggguggugcgcgucugggacgugaagaaccccgaccuccugaacaaccaguucggcaccaugcccucccugacccucgccugccugacgaagcagggccagguggaccugaacgacgccguccucgcccugaccgaccuggggcucaucuacaccgcgaaguaccccaacagcuccgaccuggaccggcugagccagagccacccgauccucaacaugguggacaccaagaaguccagccugaacaucuccggcuacaacuucagccugggggccgccgugaaggccggcgccugcaugcucgacgggggcaacaugcuggagacgaucaaggucacgccccagaccguggacggcauccugaaguccauccucaaggugaagcgcagccuggggauguucgucuccgacacccccggcgagcggaaccccuacgagaacauccuguacaagaucugccucagcggggacggcuggccguacaucgcgucccgcaccagcaucguggggcgggccugggagaacaccaccguggaccuggaguccgacggcaagccccagaaggucggcaccgccgggagcaacaagucccugcagagcgccggcuuccccacggggcucaccuacucccagcugaugacccugaaggacagcaugaugcagcuggaccccuccgccaagaccuggaucgacaucgagggccgcccggaggaccccguggagaucgcgcucuaccagcccaugagcgggugcuacauccacuucuuccgggagcccacggaccugaagcaguucaagcaggacgccaaguacucccacggcaucgacgucgccgaccuguucccggcccagcccggccucaccagcgccgugaucgaggcgcugccccgcaacauggugcugaccugccaggggagcgacgacaucaagcgccuccuggacucccagggccggcgcgacaucaagcugaucgacaucgcccucagcaaggccgacucccggaaguucgagaacgccgucugggaccagugcaaggaccugugccacaugcacaccggggugguggucgagaagaagaagcgcggcgggaaggaggagaucacgccccacugcgcccugauggacugcaucauguacgacgcggccgugagcggcggccucaacaucccggugcugcgggccguccugccccgcgacaugguguuccggaccuccagccccaaggugguccucugaggacuagugcaucacauuuaaaagcaucucagccuaccaugagaauaagagaaagaaaaugaagaucaauagcuuauucaucucuuuuucuuuuucguugguguaaagccaacacccugucuaaaaaacauaaauuucuuuaaucauuuugccucuuuucucugugcuucaauuaauaaaaaauggaaagaaccuagaucuaaaaaaaaaaaaaaaaaaaaaaaaaaaaaaaaaaaaaaaaaaaaaaaaaaaaaaaaaaaaaaaaugcaucccccccccccccccccccccccccccccccaaaggcucuuuucagagccaccagaauu

SEQ ID NO: 10674 - RNA, 2092 nt, Artificial Sequence
  mRNA product Design i-2 comprising derived and/or modified sequence from LASV(LASV237-NIG-2010;Clade II)__AIT17639__NP (opt1)
ggggcgcugccuacggagguggcagccaucuccuucucggcaucaagcuuaccaugagcgccuccaaggaggugaaguccuuccuguggacccagagccuccgccgggagcugagcggcuacugcuccaacaucaagcugcaggucgugaaggacgcccaggcgcuccugcacgggcuggacuucagcgagguguccaacguccagcgccucaugcggaagcagaagcgcgacgacagcgaccugaagcggcugcgcgaccucaaccaggccgugaacaaccugguggagcugaaguccacccagcagaaguccauccuccgggucggcacccugaccagcgacgaccugcucacccuggccgccgaccuggagaagcucaagagcaaggugauccgcaccgagcggccccuguccagcgggguguacaugggcaaccuguccacgcagcagcucgagcagcgccgggcccugcugaacaugaucgggauggucggcggcgcgcaggggacccagccgggccgcgacgggguggugcgggucugggacgugaagaaccccgaccuccugaacaaccaguucggcaccaugcccagccugacccucgccugccugacgaagcagggccagguggaccugaacgacgccguccucgcccugaccgaccuggggcucaucuacaccgcgaaguaccccaacuccagcgaccuggaccgccugucccagagccacccgauccucaacaugguggacaucaagaaguccagccugaacaucagcggcuacaacuucucccugggggccgccgugaaggccggcgccugcaugcucgacgggggcaacaugcuggagaccaucaaggucacgccccagaccauggacggcauccucaagagcauccugaaggugaagcggucccuggggauguucgugagcgacacccccggcgagcgcaaccccuacgagaacauccuguacaagaucugccucuccggggacggcuggccguacaucgcgagccggaccuccaucgucgggcgcgccugggagaacacgaccguggaccuggagagcgacggcaagccccagaaggugggcuccgccgggagcaacaagucccugcagagcgccggcuuccccaccgggcucaccuacucccagcugaugacgcugaaggacagcaugaugcagcuggaccccuccgccaagaccuggaucgacaucgagggccggccggaggaccccgucgagaucgcgcucuaccagcccaugagcgggugcuacauccacuucuuccgcgagcccaccgaccugaagcaguucaagcaggacgccaaguacucccacggcaucgacguggccgaccuguucccggcccagcccggccucaccagcgccgucaucgaggcgcugccccggaacauggugcugacgugccaggggagcgacgacaucaagcgccuccuggacucccagggccgccgggacaucaagcugaucgacaucgcccucagcaaggccgacucccgccgguucgagaacgccgugugggaccagugcaaggaccugugccacaugcacaccggggucgugguggagaagaagaagcgcggcgggaaggaggagaucacgccccacugcgcccugauggacugcaucauguacgacgcggccgucagcggcggccucaacaucccggugcugcgggccgugcugccccgcgacauggucuuccggaccuccagccccaagguggugcucugaggacuagugcaucacauuuaaaagcaucucagccuaccaugagaauaagagaaagaaaaugaagaucaauagcuuauucaucucuuuuucuuuuucguugguguaaagccaacacccugucuaaaaaacauaaauuucuuuaaucauuuugccucuuuucucugugcuucaauuaauaaaaaauggaaagaaccuagaucuaaaaaaaaaaaaaaaaaaaaaaaaaaaaaaaaaaaaaaaaaaaaaaaaaaaaaaaaaaaaaaaaugcaucccccccccccccccccccccccccccccccaaaggcucuuuucagagccaccagaauu

SEQ ID NO: 10675 - RNA, 2092 nt, Artificial Sequence
  mRNA product Design i-2 comprising derived and/or modified sequence from LASV(LASV253-NIG-2011;Clade II)__AIT17671__NP (opt1)
ggggcgcugccuacggagguggcagccaucuccuucucggcaucaagcuuaccaugagcgccuccaaggaggugaaguccuuccuguggacccagagccuccgccgggagcugagcggcuacugcuccagcaucaagcugcaggucgugaaggacgcccaggcgcuccugcacgggcuggacuucuccgaggugagcaacguccagcgccucaugcggaagcagaagcgcgacgacuccgaccugaagcggcugcgcgaccucaaccaggccgugaacaaccugguggagcucaagagcacccagcagaaguccguccugcgggugggcacccugaccagcgacgaccugcucacccuggccgccgaccuggagaagcucaaguccaaggugauccgcaccgagcggccccugagcuccggggucuacaugggcaaccugagcacgcagcagcucgagcagcgccgggcccugcugaacaugaucgggauggugggcggcgcgcaggggacccagccgggccgcgacggggugguccgggugugggacgugaagaaccccgaccuccugaacaaccaguucggcaccaugcccucccugacccucgccugccugacgaagcaggggcaggucgaccugaacgacguggugcucgcccugaccgaccugggccucaucuacaccgccaaguaccccaacagcuccgaccuggaccgccugagccagagccacccgauccucaacauggucgacaccaagaaguccagccugaacaucuccggcuacaacuucagccugggggcggccgugaaggccggcgccugcaugcucgacgggggcaacaugcuggagacgaucaaggugacgccccagaccauggacggcauccugaaguccauccucaaggucaagaagucccuggggauguucgugagcgacacccccggcgagcggaaccccuacgagaacauccuguacaagaucugccucagcggggacggcuggccguacaucgccucccgcaccagcaucguggggcgggcgugggagaacaccaccgucgaccuggaguccgacggcaagccccagaaggugggcaccgccgggagcaacaagucccugcagagcgccggcuuccccacggggcucaccuacucccagcugaugacccugaaggacagcaugaugcagcuggaccccuccgccaagaccuggaucgacaucgagggccgcccggaggaccccgucgagaucgcccucuaccagcccaugagcgggugcuacauccacuucuuccgggagcccacggaccugaagcaguucaagcaggacgcgaaguacucccacggcaucgacgugaccgaccuguucccggcccagcccggccucaccagcgccgugaucgaggcccugccccgcaacaugguccugaccugccaggggagcgacgacaucaagcggcuccuggacucccagggccgccgcgacaucaagcugaucgacaucgcccucagcaaggcggacucccggcgcuucgagaacgccgugugggaccagugcaaggaccugugccacaugcacacggggguggucguggagaagaagaagcggggcgggaaggaggagaucacgccccacugcgcccugauggacugcaucauguacgacgccgccgugagcggcggccucaacaucccgguccugcgcgcggugcugccccgggacaugguguuccgcaccuccagccccaaggucgugcucugaggacuagugcaucacauuuaaaagcaucucagccuaccaugagaauaagagaaagaaaaugaagaucaauagcuuauucaucucuuuuucuuuuucguugguguaaagccaacacccugucuaaaaaacauaaauuucuuuaaucauuuugccucuuuucucugugcuucaauuaauaaaaaauggaaagaaccuagaucuaaaaaaaaaaaaaaaaaaaaaaaaaaaaaaaaaaaaaaaaaaaaaaaaaaaaaaaaaaaaaaaaugcaucccccccccccccccccccccccccccccccaaaggcucuuuucagagccaccagaauu

SEQ ID NO: 10676 - RNA, 2092 nt, Artificial Sequence
  mRNA product Design i-2 comprising derived and/or modified sequence from LASV(LASV254-NIG-2011;Clade II)__AIT17675__NP (opt1)
ggggcgcugccuacggagguggcagccaucuccuucucggcaucaagcuuaccaugagcgccuccaaggaggugaaguccuuccuguggacccagagccuccgccgggagcugagcggcuacugcuccagcaucaagcugcaggucgugaaggacgcccaggcgcuccugcacgggcuggacuucuccgaggugagcaacguccagcgccucaugcggaagcagaagcgcgacgacuccgaccugaagcggcugcgcgaccucaaccaggccgugaacaaccugguggagcucaagagcacccagcagaaguccguccugcgggugggcacgcugaccagcgacgaccugcucacccuggccgccgaccuggagaagcucaaguccaaggugauccgcaccgagcggccccugagcuccggggucuacaugggcaaccugagcacgcagcagcucgagcagcgccgggcccugcugaacaugaucgggauggugggcggcgcgcaggggacccagccgggccgcgacggggugguccgggugugggacgugaagaaccccgaccuccugaacaaccaguucggcaccaugcccucccugacccucgccugccugacgaagcaggggcaggucgaccugaacgacgccgugcucgcccugaccgaccugggccucaucuacaccgcgaaguaccccaacagcuccgaccuggaccgccugagccagagccacccgauccucaacaugguggacaccaagaaguccagccugaacaucuccggcuacaacuucagccugggggccgccgucaaggccggcgccugcaugcucgacgggggcaacaugcuggagacgaucaaggugacgccccagaccauggacggcauccugaaguccauccucaaggugaagaagucccuggggauguucgucagcgacacccccggcgagcggaaccccuacgagaacauccuguacaagaucugccucagcggggacggcuggccguacaucgcgucccgcaccagcaucguggggcgggccugggagaacaccaucguggaccuggaguccgacggcaagccccagaaggucggcaccgccgggagcaacaagucccugcagagcgccggcuuccccaccgggcucacguacucccagcugaugacccugaaggacagcaugaugcagcuggaccccuccgccaagaccuggaucgacaucgagggccgcccggaggaccccguggagaucgcgcucuaccagcccaugagcgggugcuacauccacuucuuccgggagcccaccgaccugaagcaguucaagcaggacgccaaguacucccacggcaucgacgucgccgaccuguucccggcccagcccggccucacgagcgccgugaucgaggcgcugccccgcaacauggugcugaccugccaggggagcgacgacaucaagcggcuccuggacucccagggccgccgcgacaucaagcugaucgacaucgcccucagcaaggccgacucccggcgcuucgagaacgccgucugggaccagugcaaggaccugugccacaugcacaccggggugguggucgagaagaagaagcggggcgggaaggaggagaucacgccccacugcgcccugauggacugcaucauguacgacgcggccgugagcggcggccucaacaucccggugcugcgcgccguccugccccgggacaugguguuccgcaccuccagccccaaggugguccucugaggacuagugcaucacauuuaaaagcaucucagccuaccaugagaauaagagaaagaaaaugaagaucaauagcuuauucaucucuuuuucuuuuucguugguguaaagccaacacccugucuaaaaaacauaaauuucuuuaaucauuuugccucuuuucucugugcuucaauuaauaaaaaauggaaagaaccuagaucuaaaaaaaaaaaaaaaaaaaaaaaaaaaaaaaaaaaaaaaaaaaaaaaaaaaaaaaaaaaaaaaaugcaucccccccccccccccccccccccccccccccaaaggcucuuuucagagccaccagaauu

SEQ ID NO: 10677 - RNA, 2092 nt, Artificial Sequence
  mRNA product Design i-2 comprising derived and/or modified sequence from LASV(Nig08-04;Clade II)__ADU56611__NP (opt1)
ggggcgcugccuacggagguggcagccaucuccuucucggcaucaagcuuaccaugagcgccuccaaggaggugaaguccuuccuguggacccagagccuccgccgggagcugagcggcuacugcuccaacaucaagcugcaggucgugaaggacgcccaggcgcuccugcacgggcuggacuucagcgagguguccaacguccagcgccucaugcggaagcagaagcgcgacgacggcgaccugaagcggcugcgcgaccucaaccaggccgugaacaaccugguggagcucaagagcacccagcagaaguccguccugcggguggggacccugaccagcgacgaccugcucacccuggccgccgaccuggagaagcucaaguccaaggugauccgcaccgagcggccccugagcuccggcgucuacauggggaaccugagcacgcagcagcucgagcagcgcaaggcccugcuguccaugaucggcauggugggcggggcgcagggcacccagccggggcgggacggcgugguccgcgugugggacgugaagaaccccgaccuccugaacaaccaguucgggaccaugcccagccugacccucgccugccugacgaagcagggccaggucgaccugaacgacgccgugcucgcccugaccgaccugggccucaucuacaccgcgaaguaccccaacuccagcgaccuggaccggcugucccagagccacccgauccucaacaugguggacaccaagaaguccagccugaacaucagcggguacaacuucucccugggcgccgccgucaaggccggggccugcaugcucgacggcggcaacaugcuggagacgaucaaggugacgccccagaccauggacgggauccucaagagcauccugaaggugaagcgcucccugggcauguucgucagcgacacccccggggagcggaaccccuacgagaacauccuguacaagaucugccucuccggcgacggguggccguacaucgcgagccgcaccuccaucgugggccgggccugggagaacaccaccguggaccuggagagcgacggcaagccccagaaggucgggaccgccggcuccaacaagagccugcaguccgccggguuccccacgggccucaccuacagccagcugaugacccugaaggacuccaugaugcagcuggaccccagcgccaagaccuggaucgacaucgaggggcgcccggaggaccccguggagaucgcgcucuaccagcccauguccggcugcuacauccacuucuuccgggagcccacggaccugaagcaguucaagcaggacgccaaguacagccacggcaucgacgucaccgaccuguucuccgcccagccggggcucaccagcgccgugaucgaggcccugccccgcaacauggugcugaccugccagggcagcgacgacaucaagaagcuccuggacucccaggggcggcgcgacaucaagcugaucgacaucagccucaacaaggcggacucccgccgguucgagaacgccgucugggaccagugcaaggaccugugccacaugcacacgggcgugguggucgagaagaagaagcgcgggggcaaggaggagaucacgccccacugcgcccugauggacugcaucauguucgacgccgccgugagcggcgggcucaacauccccauccugcgggcggugcugccgcgcgacauggucuuccggaccuccagccccaagguggugcucugaggacuagugcaucacauuuaaaagcaucucagccuaccaugagaauaagagaaagaaaaugaagaucaauagcuuauucaucucuuuuucuuuuucguugguguaaagccaacacccugucuaaaaaacauaaauuucuuuaaucauuuugccucuuuucucugugcuucaauuaauaaaaaauggaaagaaccuagaucuaaaaaaaaaaaaaaaaaaaaaaaaaaaaaaaaaaaaaaaaaaaaaaaaaaaaaaaaaaaaaaaaugcaucccccccccccccccccccccccccccccccaaaggcucuuuucagagccaccagaauu

SEQ ID NO: 10678 - RNA, 2095 nt, Artificial Sequence
  mRNA product Design i-2 comprising derived and/or modified sequence from LASV(GA391;Clade III)__AAA46284__NP (opt1)
ggggcgcugccuacggagguggcagccaucuccuucucggcaucaagcuuaccaugagcgccuccaaggaggugcgcagcugccuguggacccagucccuccggcgcgagcugagcggcuacugcuccaacaucaagcugcaggucgugaaggacgcccaggcgcuccugcacgggcuggacuucagcgagguguccaacguccagcggcucaugcgcaagcagaagcgggacgacggcgaccugaagcgccugcgggaccucaaccaggccgugaacaaccugguggagcugaaguccacccagcagaaguccguccuccgcguggggacgcugagcuccgacgaccugcucauccuggccgccgaccuggagaagcucaagagcaaggugacccggaccgagcgcccccuguccagcggcgucuacauggggaaccuguccagccagcagcucgaccagcggcgcgcccugcugaacaugaucggcaugaccggcguguccgggggcgggaagggcgcgagcaacgggaucgugcgggucugggacgugaagaacgccgagcuccugaacaaccaguucggcacgaugccgucccugacccucgccugccugaccaagcagggccagguggaccugaacgacgccguccaggcgcucaccgaccuggggcugaucuacacggccaaguaccccaacagcagcgaccucgaccgccugucccagagccaccccauccugaacaugaucgacaccaagaaguccagccucaacaucuccggcuacaacuucagccugggggccgccgugaaggccggcgcgugcaugcuggacggcgggaacaugcucgagaccaucaaggugagcccccagaccauggacggcauccucaagagcauccugaaggucaagaagucccuggggauguucgugagcgacacgccgggcgagcggaaccccuacgagaacauccuguacaagaucugccuguccggggacggcuggagcuacaucgccucccgcaccagcaucgugggccgggccugggagaacaccgucguggaccucgagcaggacaacaagccccagaagaucgggaacggcggguccaacaagagccugcaguccgccggcuucgccgcggggcugaucuacagccagcucaugacccugaaggacuucaagugcuucaaccugauccccaacgccaagacguggauggacaucgagggccgcccggaggaccccguggagaucgcccuguaccagcccuccagcggcugcuacguccacuucuuccgggagcccaccgaccucaagcaguucaagcaggacgccaaguacagccacgggcgcgacgugaccgaccuguucgccgcgcagccgggccugaccuccgccgucaucgaggcccucccccggaacauggugaucacgugccaggggagcgaggacauccgcaagcugcuggagucccagggccgccgggacaucaagcucaucgacaucacccugagcaaggccgacucccgcaaguucgagaacgccgugugggaccaguucaaggaccugugccacaugcacaccggggucgugguggagaagaagaagcggggcggcaaggaggagaucacgccccacugcgcgcucauggacugcaucauguucgacgccgccgucagcgggggccuggacgccaaggugcugcgcgugguccucccccgggacaugguguuccgcaccuccaccccgaaggugguccugugaggacuagugcaucacauuuaaaagcaucucagccuaccaugagaauaagagaaagaaaaugaagaucaauagcuuauucaucucuuuuucuuuuucguugguguaaagccaacacccugucuaaaaaacauaaauuucuuuaaucauuuugccucuuuucucugugcuucaauuaauaaaaaauggaaagaaccuagaucuaaaaaaaaaaaaaaaaaaaaaaaaaaaaaaaaaaaaaaaaaaaaaaaaaaaaaaaaaaaaaaaaugcaucccccccccccccccccccccccccccccccaaaggcucuuuucagagccaccagaauu

SEQ ID NO: 10679 - RNA, 2092 nt, Artificial Sequence
  mRNA product Design i-2 comprising derived and/or modified sequence from LASV(Nig08-A19;Clade III)__ADU56619__NP (opt1)
ggggcgcugccuacggagguggcagccaucuccuucucggcaucaagcuuaccaugagcgccuccaaggaggugaaguccuuccuguggacccagucccuccgccgggagcugagcggcuacugcuccaacaucaagcugcaggucgugaaggacgcccaggcgcuccugcacgggcuggacuucagcgagguguccaacguccagcgccucaugcggaagcagaagcgcgacgacggcgaccugaagcggcugcgcgaccucaaccaggccgugaacaaccugguggagcucaagagcacccagcagaaguccguccugcggguggggacccugagcuccgacgaccugcucgugcuggccgccgaccuggagaagcucaagagcaaggucgugcgcaccgagcggccccuguccagcggcaucuacauggggaaccuguccagccagcagcucgaccagcgcaaggcccugcugaacaugaucggcaugaccggcgggaacggcgggcggaacaccacguccgacggcaucgugcgcgucugggacgugaagaacgcggagcuccugaacaaccaguucgggaccaugccgagccugacccucgccugccugaccaagcagggccagguggaccugaacgacgccguccaggcccucacggaccugggccugaucuacaccgcgaaguaccccaacuccagcgaccucgaccggcuggcccagagccaccccauccugaacaugaucgacaccaagaaguccagccucaacaucuccggguacaacuucagccugggcgccgccgugaaggccggggcgugcaugcuggacggcggcaacaugcucgagaccaucaaggugagcccccagacgauggacgggauccucaagagcauccugaaggucaagcgcucccugggcauguucaucagcgacaccccgggggagcggaaccccuacgagaacauccuguacaagaucugccuguccggcgacggguggcccuacaucgccagccgcaccuccaucgugggccgggccugggagaacaccguggucgaccucgagagcgacaacaagccccagaagacgggcaacgggggcuccaacaagagccugcaguccgccggguucgccgcgggccugaccuacagccagcucaugacccugaaggacuccaugcugcagcuggacccgaacgccaagaccuggauggacaucgaggggcgccccgaggaccccguggagaucgcccucuaccagcccagcuccggcugcuacauccacuucuuccgggagccgacggaccugaagcaguucaagcaggacgccaaguacagccacggcaucgacgugaccgaccuguucgccgcgcagcccgggcucaccagcgccgucaucgaggcccugccccgcaacauggugaucacgugccagggcuccgaggacauccggaagcugcucgagagccaggggcgccgcgacaucaagcugaucgacaucucccugagcaaggucgacucccggaaguucgagaacgccgugugggaccaguucaaggaccucugccacaugcacaccggcaucguggucgagaagaagaagcgcgggggcaaggaggagaucacgccccacugcgcccugauggacugcaucauguucgacgcggccgugagcggcgggguggacgccaagguccugcgggccgugcucccgcgcgacaugguguuccggaccuccacccccaaggucgugcugugaggacuagugcaucacauuuaaaagcaucucagccuaccaugagaauaagagaaagaaaaugaagaucaauagcuuauucaucucuuuuucuuuuucguugguguaaagccaacacccugucuaaaaaacauaaauuucuuuaaucauuuugccucuuuucucugugcuucaauuaauaaaaaauggaaagaaccuagaucuaaaaaaaaaaaaaaaaaaaaaaaaaaaaaaaaaaaaaaaaaaaaaaaaaaaaaaaaaaaaaaaaugcaucccccccccccccccccccccccccccccccaaaggcucuuuucagagccaccagaauu

SEQ ID NO: 10680 - RNA, 2092 nt, Artificial Sequence
  mRNA product Design i-2 comprising derived and/or modified sequence from LASV(G1180-SLE-2010;Clade IV)__AIT17169__NP (opt1)
ggggcgcugccuacggagguggcagccaucuccuucucggcaucaagcuuaccaugagcgccuccaaggagaucaagagcuuccuguggacccagucccuccgccgggagcugagcggcuacugcuccaacaucaagcuccagguggucaaggacgcccaggcgcugcugcacgggcuggacuucagcgagguguccaacgugcagcgccucaugcggaaggagcgccgggacgacaacgaccugaagcgccugcgggaccucaaccaggccgucaacaaccugguggagcucaagagcacccagcagaaguccauccugcgcgugggcacccugaccagcgacgaccugcucauccuggccgccgaccuggagaagcucaaguccaaggucauccggaccgagcgcccccugagcgccgggguguacaugggcaaccuguccagccagcagcucgaccagcggcgcgcgcugcuguccaugaucgggaugagcuccggcaaccagcgggcccaggccggccgcgacggggugguccgggugugggacgugaagaacgucgagcuccugaacaaccaguucggcaccaugccgagccugacgcucgccugccugaccaagcagggccagguggaccugaacgacgcggugcaggcccucaccgaccuggggcugaucuacaccgccaaguaccccaacacguccgaccucgaccgccugacccagagccaccccauccugaacaugaucgacaccaagaaguccagccucaacaucagcggguacaacuucucccugggcgccgccgucaaggcgggcgccugcaugcuggacgggggcaacaugcucgagaccaucaaggugagcccccagacgauggacgggauccugaaguccauccugaaggugaagaaggcccucggcauguucaucagcgacaccccgggcgagcggaaccccuacgagaacauccuguacaagaucugccuguccggggacggcuggcccuacaucgccagccgcaccuccaucaccgggcgggccugggagaacacggucguggaccucgagagcgacggcaagccccagaaggcgggguccaacaacagcaacaagucccugcagagcgugggcuucaccgccggccugaccuacucccagcucaugacccugaaggacgccaugcugcagcuggacccgaacgccaagacguggauggacaucgaggggcgccccgaggaccccgucgagaucgcccucuaccagcccagcuccggcugcuacauccacuucuuccgggagccgaccgaccugaagcaguucaagcaggacgcgaaguacagccacgggaucgacgugaccgaccuguucgccgcccagcccggccucaccuccgccgugaucgacgcccugccccgcaacauggucaucacgugccaggggagcgacgacauccgcaagcugcucgagagccagggccggaaggacaucaagcugaucgacaucgcgcuguccaagaccgacagccgcaaguacgagaacgccgugugggaccaguacaaggaccucugccacaugcacaccggcgucgugguggagaagaagaagcgcgggggcaaggaggagaucacgccccacugcgcccugauggacugcaucauguucgacgccgcggucuccgggggccugaacaccagcgugcuccgggccgugcugccgcgggacauggucuuccgcaccuccacgccccggguggugcugugaggacuagugcaucacauuuaaaagcaucucagccuaccaugagaauaagagaaagaaaaugaagaucaauagcuuauucaucucuuuuucuuuuucguugguguaaagccaacacccugucuaaaaaacauaaauuucuuuaaucauuuugccucuuuucucugugcuucaauuaauaaaaaauggaaagaaccuagaucuaaaaaaaaaaaaaaaaaaaaaaaaaaaaaaaaaaaaaaaaaaaaaaaaaaaaaaaaaaaaaaaaugcaucccccccccccccccccccccccccccccccaaaggcucuuuucagagccaccagaauu

SEQ ID NO: 10681 - RNA, 2092 nt, Artificial Sequence
  mRNA product Design i-2 comprising derived and/or modified sequence from LASV(G1442-SLE-2011;Clade IV)__AIT17181__NP (opt1)
ggggcgcugccuacggagguggcagccaucuccuucucggcaucaagcuuaccaugagcgccuccaaggaggugaaguccuuccuguggacccagagccuccgccgggagcugagcggcuacugcuccaacaucaagcugcaggucgugaaggacgcccaggcgcuccugcacgggcuggacuucagcgagguguccaacguccagcgccucaugcggaagcagcgccgggacgacaacgaccugaagcgccugcgggaccucaaccaggccgugaacaaccugguggagcucaagagcacccagcagaaguccguccugcgcgugggcacccugaccagcgacgaccugcucgugcuggccgccgaccuggagaagcucaaguccaaggucauccggaccgagcgcccccugagcgccgggguguacaugggcaaccuguccagccagcagcucgaccagcggcgcgcgcugcugaacaugaucgggauguccggcggcauccaggggacccggacgggccgcgacggggugguccgggugugggacgugaagaacgccgaccuccugaacaaccaguucggcaccaugccgagccugacccucgccugccugaccaagcaggggcaggucgaccugaacgacguggugcaggcccucacggaccugggccugaucuacaccgcgaaguaccccaacgccuccgaccucgaccgccugacccagagccaccccauccugaacaugaucgacaccaagaaguccagccucaacaucagcggcuacaacuucucccugggggccgccgucaaggccggcgcgugcaugcuggacgggggcaacaugcucgagacgaucaaggugagcccccagaccauggacggcauccugaaguccauccugaaggugaagaagacccucgggauguucaucagcgacaccccgggcgagcggaaccccuacgagaacauccuguacaagaucugccuguccggggacggcuggcccuacaucgccagccgcacguccaucaccgggcgggccugggagaacaccgucguggaccucgagagcgacggcaagccccagaaggccggcuccaacaacagcaacaagucccugcagagcgccggguucgcggccggccugaccuacucccagcucaugacgcugaaggacgccaugcugcagcuggacccgaacgccaagaccuggauggacaucgaggggcgccccgaggaccccguggagaucgcccucuaccagcccagcuccggcugcuacauccacuucuuccgggagccgaccgaccugaagcaguucaagcaggacgcgaaguacagccacgggaucgacgucaccgaccuguucgccgcccagcccggccucacguccgccgugaucgaggcccugccccgcaacauggucaucacgugccagggcagcgacgacaucaagaagcugcucgagucccaggggcgcaaggacaucaagcugaucgacaucgcgcugagcaagaccgacagccggaaguacgagaacgccgugugggaccaguacaaggaccucugccacaugcacaccggcguggucguggagaagaagaagcgcgggggcaaggaggagaucaccccgcacugcgcccugauggacugcaucauguucgacgccgcgguguccgggggccugaacacccucguccugcgggccgugcugccccgcgacaugguguuccggaccagcacgccccgcgucgugcucugaggacuagugcaucacauuuaaaagcaucucagccuaccaugagaauaagagaaagaaaaugaagaucaauagcuuauucaucucuuuuucuuuuucguugguguaaagccaacacccugucuaaaaaacauaaauuucuuuaaucauuuugccucuuuucucugugcuucaauuaauaaaaaauggaaagaaccuagaucuaaaaaaaaaaaaaaaaaaaaaaaaaaaaaaaaaaaaaaaaaaaaaaaaaaaaaaaaaaaaaaaaugcaucccccccccccccccccccccccccccccccaaaggcucuuuucagagccaccagaauu

SEQ ID NO: 10682 - RNA, 2092 nt, Artificial Sequence
  mRNA product Design i-2 comprising derived and/or modified sequence from LASV(G3010-SLE-2013;Clade IV)__AIT17345__NP (opt1)
ggggcgcugccuacggagguggcagccaucuccuucucggcaucaagcuuaccaugagcgccuccaaggagaucaagagcuuccuguggacccagucccuccgccgggagcugagcggcuacugcuccaacaucaagcuccagguggucaaggacgcccaggcgcugcugcacgggcuggacuucagcgagguguccaacgugcagcgccucaugcggaaggagcgccgggacgacaacgaccugaagcgccugcgggaccucaaccaggccgucaacaaccugguggagcucaagagcacccagcagaaguccauccugcgcgugggcacccugaccagcgacgaccugcucauccuggccgccgaccuggagaagcucaaguccaaggucacccggaccgagcgcccccugagcgccgggguguacaugggcaaccuguccagccagcagcucgaccagcggcgcgcgcugcuguccaugaucgggaugagcuccggcgugcagggcgcccgggccgggcgcgacggcgucgugcgggugugggacgucaagaacgccgagcuccugaacaaccaguucgggacgaugccgagccugacccucgcgugccugaccaagcagggccagguggaccugaacgacgugguccaggcccucaccgaccuggggcugaucuacacggccaaguaccccaacaccuccgaccucgaccgccugacccagagccaccccauccugaacaugaucgacaccaagaaguccagccucaacaucagcggcuacaacuucucccugggcgccgccgugaaggcgggggccugcaugcuggacggcgggaacaugcucgagacgaucaaggugagcccccagaccauggacggcauccugaaguccauccugaaggucaagaaggcccucggcauguucaucagcgagaccccgggggagcggaaccccuacgagaacauccuguacaagaucugccuguccggcgacggguggcccuacaucgccagccgcaccuccaucacgggccgggccugggagaacaccgugguggaccucgagagcgacgggaagccccagaaggcgggcuccaacaacagcaacaagucccugcagagcgccggcuucaccgccgggcugaccuacucccagcucaugacgcugaaggacgccaugcugcagcuggacccgaacgccaagaccuggauggacaucgagggccgccccgaggaccccgucgagguggcgcucuaccagcccagcuccgggugcuacauccacuucuuccgggagccgaccgaccugaagcaguucaagcaggacgccaaguacagccacggcaucgacgugaccgaccuguucgccgcccagcccgggcucacguccgccgucaucgacgcgcugccccgcaacauggugaucacgugccagggcagcgacgacaucaagaagcugcucgagagccagggccgcaaggacaucaagcugaucgacaucgcccuguccaagaccgacagccggaaguacgagaacgccgucugggaccaguacaaggaccucugccacaugcacaccggggugguggucgagaagaagaagcgcggcgggaaggaggagaucaccccgcacugcgcccugauggacugcaucauguucgacgcggccguguccggcgggcugaacaccagcgugcuccgggccguccugccccgcgacaugguguuccggaccuccacgccccgcgugguccugugaggacuagugcaucacauuuaaaagcaucucagccuaccaugagaauaagagaaagaaaaugaagaucaauagcuuauucaucucuuuuucuuuuucguugguguaaagccaacacccugucuaaaaaacauaaauuucuuuaaucauuuugccucuuuucucugugcuucaauuaauaaaaaauggaaagaaccuagaucuaaaaaaaaaaaaaaaaaaaaaaaaaaaaaaaaaaaaaaaaaaaaaaaaaaaaaaaaaaaaaaaaugcaucccccccccccccccccccccccccccccccaaaggcucuuuucagagccaccagaauu

SEQ ID NO: 10683 - RNA, 2092 nt, Artificial Sequence
  mRNA product Design i-2 comprising derived and/or modified sequence from LASV(G502-SLE-2009;Clade IV)__AIT17127__NP (opt1)
ggggcgcugccuacggagguggcagccaucuccuucucggcaucaagcuuaccaugagcgccuccaaggagaucaagagcuuccuguggacccagucccuccgccgggagcugagcggcuacugcuccaacaucaagcuccagguggucaaggacgcccaggcgcugcugcacgggcuggacuucagcgagguguccaacgugcagcgccucaugcggaaggagcgccgggacgacaacgaccugaagcgccugcgggaccucaaccaggccgucaacaaccugguggagcucaagagcacccagcagaaguccauccugcgcgugggcacccugaccagcgacgaccugcucauccuggccgccgaccuggagaagcucaaguccaaggucauccggaccgagcgcccccugagcgccgggguguacaugggcaaccuguccagccagcagcucgaccagcggcgcgcgcugcuguccaugaucgggaugagcggcggcaaccagggggugcgggccggcaaggacggggucgugcgcgugugggacgucaagaacgccgagcuccugaacaaccaguucggcaccaugccgucccugacgcucgccugccugaccaagcagggccagguggaccugaacgacgcggugcaggcccucaccgaccuggggcugaucuacaccgccaaguaccccaacacgagcgaccucgaccggcugacccagucccaccccauccugaacaugaucgacaccaagaaguccagccucaacaucuccggcuacaacuucagccugggggccgccgucaaggcgggcgccugcaugcuggacgggggcaacaugcucgagaccaucaaggugagcccccagacgauggacggcauccucaagagcauccugaaggugaagaaggcccuggggauguucaucuccgacaccccgggcgagcgcaaccccuacgagaacauccuguacaagaucugccugagcggggacggcuggcccuacaucgccucccggaccagcaucaccgggcgcgccugggagaacacggucguggaccucgaguccgacggcaagccccagaaggcgggcagcaacaacuccaacaagagccugcaguccgccggguucaccgccggccugaccuacagccagcucaugacccugaaggacgccaugcugcagcuggacccgaacacgaagaccuggauggacaucgaggggcggcccgaggaccccguggagaucgcccucuaccagcccuccagcggcugcuacauccacuucuuccgcgagccgaccgaccugaagcaguucaagcaggacgcgaaguacucccacgggaucgacgucaccgaccuguucgccgcccagcccggccucacgagcgccgugaucgacgcccugccccggaacauggugaucacgugccagggcuccgacgacauccgcaagcugcucgagagccaggggcgcaaggacaucaagcugaucgacaucgcgcugaacaagaccgacagccggaaguacgagaacgccgucugggaccaguacaaggaccucugccacaugcacaccggcguggucguggagaagaagaagcgcgggggcaaggaggagaucaccccgcacugcgcccugauggacugcaucauguucgacgccgcgguguccgggggccugaacaccagcguccuccgggccgugcugccccgcgacaugguguuccggaccuccacgccccgcgucgugcugugaggacuagugcaucacauuuaaaagcaucucagccuaccaugagaauaagagaaagaaaaugaagaucaauagcuuauucaucucuuuuucuuuuucguugguguaaagccaacacccugucuaaaaaacauaaauuucuuuaaucauuuugccucuuuucucugugcuucaauuaauaaaaaauggaaagaaccuagaucuaaaaaaaaaaaaaaaaaaaaaaaaaaaaaaaaaaaaaaaaaaaaaaaaaaaaaaaaaaaaaaaaugcaucccccccccccccccccccccccccccccccaaaggcucuuuucagagccaccagaauu

SEQ ID NO: 10684 - RNA, 2092 nt, Artificial Sequence
  mRNA product Design i-2 comprising derived and/or modified sequence from LASV(G733-SLE-2010;Clade IV)__AIT17155__NP (opt1)
ggggcgcugccuacggagguggcagccaucuccuucucggcaucaagcuuaccaugagcgccuccaaggagaucaagagcuuccuguggacccagucccuccgccgggagcugagcggcuacugcuccaacaucaagcuccagguggucaaggacgcccaggcgcugcugcacgggcuggacuucagcgagguguccaacgugcagcgccucaugcggaaggagcgccgggacgacaacgaccugaagcgccugcgggaccucaaccaggccgucaacaaccugguggagcucaagagcacccagcagaaguccgugcugcgcgucggcacccugaccagcgacgagcugcucgugcuggccgccgaccuggagaagcucaaguccaaggugauccggaccgagcgcccccugagcgccggggucuacaugggcaaccuguccagccagcagcucgaccagcggcgcgcgcugcuguccaugaucgggaugagcggcggcaaccagggggcccggaccggccgcgacgggguggugcgggucugggacgugaagaacgccgagcuccugaacaaccaguucggcaccaugccgucccugacccucgccugccugaccaagcagggccagguggaccugaacgacgcgguccaggcccucaccgaccuggggcugaucuacacggccaaguaccccaacaccagcgaccucgaccgccugacccagucccaccccauccugaacaugaucgacaccaagaaguccagccucaacaucuccggcuacaacuucagccugggggccgccgugaaggcgggcgccugcaugcuggacgggggcaacaugcucgagacgaucaaggugagcccccagaccauggacggcauccucaagagcauccugaaggucaagaaggcccuggggauguucaucuccgacaccccgggcgagcggaaccccuacgagaacauccuguacaagaucugccugagcggggacggcuggcccuacaucgccucccgcaccagcaucacggggcgggccugggagaacaccgugguggaccucgaguccgacggcaagccccagaaggcgggcagcaacaacuccaacaagagccugcaguccgccggguucaccgccggccugaccuacagccagcucaugacgcugaaggacgccaugcugcagcuggacccgaacgccaagaccuggauggacaucgaggggcgccccgaggaccccgucgagaucgcgcucuaccagcccuccagcggcugcuacauccacuucuuccgggagccgaccgaccugaagcaguucaagcaggacgccaaguacucccacgggaucgacgugaccgaccuguucgccgcccagcccggccucacgagcgccgugaucgacgcgcugccccgcaacauggucaucacgugccagggcuccgacgacauccgcaagcugcucgagagccaggggcggaaggacaucaagcugaucgacaucgcccugagcaagaucgacucccgcaaguacgagaacgccgugugggaccaguacaaggaccucugccacaugcacaccggcgucgugguggagaagaagaagcgcgggggcaaggaggagaucacgccccacugcgcccugauggacugcaucauguucgacgcggccgucagcgggggccugaacucccucgugcugcgggccgugcugccgcgggacauggucuuccgcaccagcacgccccggguggugcucugaggacuagugcaucacauuuaaaagcaucucagccuaccaugagaauaagagaaagaaaaugaagaucaauagcuuauucaucucuuuuucuuuuucguugguguaaagccaacacccugucuaaaaaacauaaauuucuuuaaucauuuugccucuuuucucugugcuucaauuaauaaaaaauggaaagaaccuagaucuaaaaaaaaaaaaaaaaaaaaaaaaaaaaaaaaaaaaaaaaaaaaaaaaaaaaaaaaaaaaaaaaugcaucccccccccccccccccccccccccccccccaaaggcucuuuucagagccaccagaauu

SEQ ID NO: 10685 - RNA, 2092 nt, Artificial Sequence
  mRNA product Design i-2 comprising derived and/or modified sequence from MOPV/LASV reassortant(IGS-1;Clade IV)__AFY05578__NP (opt1)
ggggcgcugccuacggagguggcagccaucuccuucucggcaucaagcuuaccaugagcgccuccaaggagaucaagagcuuccuguggacccagucccuccgccgggagcugagcggcuacugcuccaacaucaagcuccagguggucaaggacgcccaggcgcugcugcacgggcuggacuucagcgagguguccaacgugcagcgccucaugcggaaggagcgccgggacgacaacgaccugaagcgccugcgggaccucaaccaggccgucaacaaccugguggagcucaagagcacccagcagaaguccauccugcgcgugggcacccugaccagcgacgaccugcucauccuggccgccgaccuggagaagcuccgguccaaggucauccgcaccgagcggccccugagcgccgggguguacaugggcaaccuguccagccagcagcucgaccagcgccgggcgcugcugaacaugaucgggauguccggcggcaaccagggggcccgcgccggccgggacggggugguccgcgugugggacgugaagaacgccgagcuccugagcaaccaguucggcaccaugccgucccugacgcucgcgugccugaccaagcaggggcaggucgaccugaacgacgccgugcaggcccucaccgaccugggccugaucuacaccgccaaguaccccaacacgagcgaccucgaccggcugacccagucccaccccauccugaacaugaucgacaccaagaaguccagccucaacaucuccggcuacaacuucagccugggggccgcggugaaggccggcgccugcaugcuggacgggggcaacaugcucgagaccaucaaggucagcccccagacgauggacggcauccucaagagcauccugaaggugaagaaggcccuggggauguucaucuccgacaccccgggcgagcgcaaccccuacgagaacauccuguacaagaucugccugagcggggacggcuggcccuacaucgccucccggaccagcaucaccgggcgcgcgugggagaacacgguggucgaccucgaguccgacggcaagccccagaaggccgacagcaacaacuccagcaagucccugcagagcgccggcuucaccgccgggcugaccuacucccagcucaugacccugaaggacgccaugcugcagcuggacccgaacgcgaagacguggauggacaucgagggccggcccgaggaccccguggagaucgcccucuaccagcccagcuccgggugcuacauccacuucuuccgcgagccgaccgaccugaagcaguucaagcaggacgccaaguacagccacggcaucgacgugaccgaccuguucgccacccagcccgggcucacguccgccgucaucgacgcgcugccccgcaacauggugaucacgugccagggcagcgacgacauccggaagcugcucgagagccagggccgcaaggacaucaagcugaucgacaucgaccuguccaagaccgacagccggaaguacgagaacgccgugugggaccaguacaaggaccucugccacaugcacaccggggucguggucgagaagaagaagcgcggcgggaaggaggagaucaccccgcacugcgcccugauggacugcaucauguucgacgccgcgguguccggcgggcugaacaccagcgugcuccgggccguccugccccgcgacaugguguuccggaccuccacgccccgcgugguccugugaggacuagugcaucacauuuaaaagcaucucagccuaccaugagaauaagagaaagaaaaugaagaucaauagcuuauucaucucuuuuucuuuuucguugguguaaagccaacacccugucuaaaaaacauaaauuucuuuaaucauuuugccucuuuucucugugcuucaauuaauaaaaaauggaaagaaccuagaucuaaaaaaaaaaaaaaaaaaaaaaaaaaaaaaaaaaaaaaaaaaaaaaaaaaaaaaaaaaaaaaaaugcaucccccccccccccccccccccccccccccccaaaggcucuuuucagagccaccagaauu

SEQ ID NO: 10686 - RNA, 2092 nt, Artificial Sequence
  mRNA product Design i-2 comprising derived and/or modified sequence from LASV(LM765-SLE-2012;Clade IV)__AIT17815__NP (opt1)
ggggcgcugccuacggagguggcagccaucuccuucucggcaucaagcuuaccaugagcgccuccaaggagaucaagagcuuccuguggacccagucccuccgccgggagcugagcggcuacugcuccaacaucaagcuccagguggucaaggacgcccaggcgcugcugcacgggcuggacuucagcgagguguccaacgugcagcgccucaugcggaaggagcgccgggacgacaacgaccugaagcgccugcgggaccucaaccaggccgucaacaaccugguggagcucaagagcacccagcagaaguccauccugcgcgugggcacccugaccagcgacgaccugcucauccuggccgccgaccuggagaagcucaaguccaaggucacccggaccgagcgcccccugagcgccgggguguacaugggcaaccuguccagccagcagcucgaccagcggcgcgcgcugcuggacaugaucgggauguccggcagcaaccagggcgcccgggccgggcgcgacggcgugguccgggugugggacgugaagaacgccgagcuccugaacaaccaguucgggacgaugccgucccugacccucgcgugccugaccaagcagggccaggucgaccugaacgacgccgugcaggcccucaccgaccuggggcugaucuacacggccaaguaccccaacaccagcgaccucgaccgccugacccagucccaccccauccugaacaugaucgacaccaagaaguccagccucaacaucuccggcuacaacuucagccugggcgccgcggugaaggccggggccugcaugcuggacggcgggaacaugcucgagacgaucaaggucagcccccagaccauggacggcauccucaagagcauccugaaggugaagaaggcccugggcauguucaucuccgacgccccgggggagcggaaccccuacgagaacauccuguacaagaucugccugagcggcgacggguggcccuacaucgcgucccgcaccagcaucaccggccgggccugggagaacacgguggucgaccucgaguccgacgggaagccccagaaggccggcagcaacggcuccaacaagagccugcaguccgccggguucaccgccggccugaccuacagccagcucaugacccugaaggacgcgaugcugcagcuggacccgaacgccaagacguggauggacaucgaggggcgccccgaggaccccguggagaucgcccucuaccagcccuccagcggcugcuacauccacuucuuccgggagccgaccgaccugaagcaguucaagcaggacgccaaguacucccacgggaucgacgugaccgaccuguucgccgcgcagcccggccucaccagcgccgucaucgacgcccugccccgcaacauggugaucacgugccagggcuccgacgacauccgcaagcuguucgagagccaggggcggaaggacaucaagcucaucgacaucgcccugagcaagaccgacucccgcaaguacgagaacgcggugugggaccaguacaaggaccugugccacaugcacaccggcaucgucguggagaagaagaagcgcgggggcaaggaggagaucacgccccacugcgcccucauggacugcaucauguucgacgccgccgucagcgggggccugaacaccuccgugcugcgggccgugcucccgcgggacauggucuuccgcaccagcacgccccggguggugcugugaggacuagugcaucacauuuaaaagcaucucagccuaccaugagaauaagagaaagaaaaugaagaucaauagcuuauucaucucuuuuucuuuuucguugguguaaagccaacacccugucuaaaaaacauaaauuucuuuaaucauuuugccucuuuucucugugcuucaauuaauaaaaaauggaaagaaccuagaucuaaaaaaaaaaaaaaaaaaaaaaaaaaaaaaaaaaaaaaaaaaaaaaaaaaaaaaaaaaaaaaaaugcaucccccccccccccccccccccccccccccccaaaggcucuuuucagagccaccagaauu

SEQ ID NO: 10687 - RNA, 2092 nt, Artificial Sequence
  mRNA product Design i-2 comprising derived and/or modified sequence from LASV(LM776-SLE-2012;Clade IV)__AIT17825__NP (opt1)
ggggcgcugccuacggagguggcagccaucuccuucucggcaucaagcuuaccaugagcgccuccaaggagaucaagagcuuccuguggacccagucccuccgccgggagcugagcuccuacugcagcaacaucaagcuccagguggucaaggacgcccaggcgcugcugcacggccuggacuucuccgaggugagcaacgugcagcgccucaugcggaaggagcgccgggacgacaacgaccugaagcgccugcgggaccucaaccaggccgucaacaaccugguggagcugaaguccacccagcagaaguccauccuccgcguggggacccugaccuccgacgaccugcucauccuggccgccgaccuggagaagcucaagagcaaggucacccggaccgagcgcccccuguccgccggcguguacauggggaaccugagcucccagcagcucgaccagcggcgcgcgcugcugagcaugaucggcauguccgggagcaaccagggcgcccgggccggccgcgacggggugguccgggugugggacgugaagaacgccgagcuccugaacaaccaguucggcacgaugccgucccugacccucgcgugccugaccaagcaggggcaggucgaccugaacgacgccgugcaggcccucaccgaccugggccugaucuacacggccaaguaccccaacaccagcgaccucgaccgccugacccagagccaccccauccugaacaugaucgacaccaagaaguccagccucaacaucuccggguacaacuucagccugggcgccgcggugaaggccggcgccugcaugcuggacgggggcaacaugcucgagacgaucaaggucagcccccagaccauggacgggauccucaagagcauccugaaggugaagaaggcccugggcauguucaucuccgacaccccgggcgagcggaaccccuacgagaacauccuguacaagaucugccugagcggggacggcuggcccuacaucgccucccgcaccagcaucacggggcgggcgugggagaacaccguggucgaccucgaguccgacggcaagccccagaaggccgggagcaacaacuccaacaagagccugcaguccgccggcuucaccgccggccugaccuacagccagcucaugacgcugaaggacgccaugcugcagcuggacccgaacgcgaagaccuggauggacaucgaggggcgccccgaggaccccguggagguggcccucuaccagcccuccagcggcugcuacauccacuucuuccgggagccgaccgaccugaagcaguucaagcaggacgccaaguacucccacgggaucgacgucaccgaccuguucgccgcccagcccggccucacgagcgcggugaucgacgcccugccccgcaacauggugaucacgugccaggggagcgacgacauccgcaagcugcucgagucccagggccggaaggacaucaagcugaucgacaucgcccugagcaagaccgacucccgcaaguacgagaacgccgucugggaccaguacaaggaccucugccacaugcacaccggcguggucguggagaagaagaagcgcgggggcaaggaggagaucaccccgcacugcgcgcugauggacugcaucauguucgacgccgccgugagcgggggccugaacaccuccguccuccgggccgugcugccccgggacaugguguuccgcaccagcacgccccgggucgugcugugaggacuagugcaucacauuuaaaagcaucucagccuaccaugagaauaagagaaagaaaaugaagaucaauagcuuauucaucucuuuuucuuuuucguugguguaaagccaacacccugucuaaaaaacauaaauuucuuuaaucauuuugccucuuuucucugugcuucaauuaauaaaaaauggaaagaaccuagaucuaaaaaaaaaaaaaaaaaaaaaaaaaaaaaaaaaaaaaaaaaaaaaaaaaaaaaaaaaaaaaaaaugcaucccccccccccccccccccccccccccccccaaaggcucuuuucagagccaccagaauu

SEQ ID NO: 10688 - RNA, 2092 nt, Artificial Sequence
  mRNA product Design i-2 comprising derived and/or modified sequence from LASV(Mad39;Clade IV)__ANH09723__NP (opt1)
ggggcgcugccuacggagguggcagccaucuccuucucggcaucaagcuuaccaugagcgccuccaaggagaucaagagcuuccuguggacccagucccuccgccgggagcugagcggcuacugcuccaacaucaagcuccagguggucaaggacgcccaggcgcugcugcacgggcuggacuucagcgagguguccaacgugcagcgccucaugcggaagcagcgccgggacgacaacgaccugaagcgccugcgggaccucaaccaggccgucaacaaccugguggagcugaaguccacccagcagaaguccgugcuccgcgucggcacgcugaccagcgacgaccugcucacccuggccgccgaccuggagaagcucaaguccaaggugacccggacggagcgcccccugaccgccgggguguacaugggcaaccugagcucccagcagcucgaccagcggcgcgcgcugcugaacaugaucgggaugagcggcggcaaccagggggcccggaccggccgcgacggggucgugcgggugugggacgucaagaacgccgagcuccugaacaaccaguucggcaccaugccgucccugacgcucgccugccugaccaagcagggccagguggaccugaacgacgugguccaggcgcucaccgaccuggggcugaucuacaccgccaaguaccccaacacgagcgaccucgaccgccugacccagucccaccccauccugaacaugaucgacaccaacaagagcucccucaacaucagcggcuacaacuucagccugggggccgccgugaaggccggcgcgugcaugcuggacgggggcaacaugcucgagaccaucaaggugagcccccagacgauggacggcauccucaagagcauccugaaggucaagaagucccuggggauguucaucagcgacaccccgggcgagcggaaccccuacgagaacauccuguacaagaucugccuguccggggacggcuggcccuacaucgccagccgcaccuccaucaccgggcgggccugggagaacacggugguggaccucgagagcggcggcaagccccagaaggccggguccaacaacagcaacaagucccugcagagcgccggcuucgcggccgggcugaccuacucccagcucaugacccugaaggacgccaugcugcagcuggacccgaacgccaagaccuggauggacaucgagggccgccccgaggaccccgucgagaucgcccucuaccagcccaucagcgggugcuacauccacuucuuccgggagccgacggaccugaagcaguucaagcaggacgcgaaguacucccacggcaucgacgugaccgaccuguucgccgcccagcccggccucaccagcgccgugaucgaggcccugccccgcaacauggucaucacgugccagggguccgacgacauccgcaagcuguucgagagccagggccggaaggacaucaagcucaucgacaucgcgcuguccaagaccgacagccgcaaguacgagaacgccgugugggaccaguacaaggaccugugccacaugcacaccggggucgugguggagaagaagaagaagggcgggaaggaggagaucacgccccacugcgcccucauggacugcaucauguucgacgccgcggucagcggcggccugaacacccuggugcuccgggccgugcugccgcgcgacauggucuuccggaccuccacccccaagguggugcugugaggacuagugcaucacauuuaaaagcaucucagccuaccaugagaauaagagaaagaaaaugaagaucaauagcuuauucaucucuuuuucuuuuucguugguguaaagccaacacccugucuaaaaaacauaaauuucuuuaaucauuuugccucuuuucucugugcuucaauuaauaaaaaauggaaagaaccuagaucuaaaaaaaaaaaaaaaaaaaaaaaaaaaaaaaaaaaaaaaaaaaaaaaaaaaaaaaaaaaaaaaaugcaucccccccccccccccccccccccccccccccaaaggcucuuuucagagccaccagaauu

SEQ ID NO: 10689 - RNA, 2092 nt, Artificial Sequence
  mRNA product Design i-2 comprising derived and/or modified sequence from LASV(Z0947-SLE-2011;Clade IV)__AIT17841__NP (opt1)
ggggcgcugccuacggagguggcagccaucuccuucucggcaucaagcuuaccaugagcgccuccaaggagaucaagagcuuccuguggacccagucccuccgccgggagcugagcggcuacugcuccaacaucaagcuccagguggucaaggacgcccaggcgcugcugcacgggcuggacuucagcgagguguccaacgugcagcgccucaugcggaaggagcgccgggacgacaacgaccugaagcgccugcgggaccucaaccaggccgucaacaaccugguggagcucaagagcacccagcagaaguccauccugcgcgugggcacccugaccagcgacgaccugcucauccuggccgccgaccuggagaagcucaaguccaaggucacccggaccgagcgcccccugagcgccgggguguacaugggcaaccuguccagccagcagcucgaccagcggcgcgcgcugcugaacaugaucgggauguccggcagcaaccagggcgcccggacggggcgcgacggcgugguccgggugugggacgugaagaacgccgagcuccugaacaaccaguucgggaccaugccgucccugacccucgccugccugaccaagcagggccaggucgaccugaacgacgcggugcaggcccucacggaccuggggcugaucuacaccgccaaguaccccaacaccagcgaccucgaccgccugacccagucccaccccauccugaacaugaucgacacgaagaaguccagccucaacaucuccggcuacaacuucagccugggcgccgccgugaaggcgggggccugcaugcuggacggcgggaacaugcucgagaccaucaaggucagcccccagaccauggacggcauccucaagagcauccugaaggugaagaaggcccugggcauguucaucuccgacgccccgggggagcggaaccccuacgagaacauccuguacaagaucugccugagcggcgacggguggcccuacaucgccucccgcaccagcaucacgggccgggcgugggagaacaccguggucgaccucgaguccgacgggaagccccagaaggccggcagcaacggcuccaacaagagccugcaguccgccggguucaccgccggccugaccuacagccagcucaugacgcugaaggacgccaugcugcagcuggacccgaacgcgaagaccuggauggacaucgaggggcgccccgaggaccccguggagaucgcccucuaccagcccuccagcggcugcuacauccacuucuuccgggagccgaccgaccugaagcaguucaagcaggacgccaaguacucccacgggaucgacgugaccgaccuguucgccgcccagcccggccucacgagcgcggucaucgacgcccugccccgcaacauggugaucacgugccagggcuccgacgacauccgcaagcuguucgagagccaggggcggaaggacaucaagcucaucgacaucgcccugagcaagaccgacucccgcaaguacgagaacgccgugugggaccaguacaaggaccugugccacaugcacaccggcaucgucguggagaagaagaagcgcgggggcaaggaggagaucaccccgcacugcgcgcucauggacugcaucauguucgacgccgccgucagcgggggccugaacaccuccgugcugcgggccgugcucccccgggacauggucuuccgcaccagcacgccccggguggugcugugaggacuagugcaucacauuuaaaagcaucucagccuaccaugagaauaagagaaagaaaaugaagaucaauagcuuauucaucucuuuuucuuuuucguugguguaaagccaacacccugucuaaaaaacauaaauuucuuuaaucauuuugccucuuuucucugugcuucaauuaauaaaaaauggaaagaaccuagaucuaaaaaaaaaaaaaaaaaaaaaaaaaaaaaaaaaaaaaaaaaaaaaaaaaaaaaaaaaaaaaaaaugcaucccccccccccccccccccccccccccccccaaaggcucuuuucagagccaccagaauu

SEQ ID NO: 10690 - RNA, 2092 nt, Artificial Sequence
  mRNA product Design i-2 comprising derived and/or modified sequence from LASV(Josiah;Clade IV)__NP_694869__NP (opt2)
ggggcgcugccuacggagguggcagccaucuccuucucggcaucaagcuuaccauguccgccuccaaggagaucaaguccuuccucuggacccagucccuccgccgcgagcucuccggcuacugcuccaacaucaagcuccaggucgucaaggacgcccaggcccuccuccacggccucgacuucuccgaggucuccaacguccagcgccucaugcgcaaggagcgccgcgacgacaacgaccucaagcgccuccgcgaccucaaccaggccgucaacaaccucgucgagcucaaguccacccagcagaaguccauccuccgcgucggcacccucaccuccgacgaccuccucauccucgccgccgaccucgagaagcucaaguccaaggucauccgcaccgagcgcccccucuccgccggcgucuacaugggcaaccucuccucccagcagcucgaccagcgccgcgcccuccucaacaugaucggcauguccggcggcaaccagggcgcccgcgccggccgcgacggcgucguccgcgucugggacgucaagaacgccgagcuccucaacaaccaguucggcaccaugcccucccucacccucgccugccucaccaagcagggccaggucgaccucaacgacgccguccaggcccucaccgaccucggccucaucuacaccgccaaguaccccaacaccuccgaccucgaccgccucacccagucccaccccauccucaacaugaucgacaccaagaaguccucccucaacaucuccggcuacaacuucucccucggcgccgccgucaaggccggcgccugcaugcucgacggcggcaacaugcucgagaccaucaaggucuccccccagaccauggacggcauccucaaguccauccucaaggucaagaaggcccucggcauguucaucuccgacacccccggcgagcgcaaccccuacgagaacauccucuacaagaucugccucuccggcgacggcuggcccuacaucgccucccgcaccuccaucaccggccgcgccugggagaacaccgucgucgaccucgaguccgacggcaagccccagaaggccgacuccaacaacuccuccaagucccuccaguccgccggcuucaccgccggccucaccuacucccagcucaugacccucaaggacgccaugcuccagcucgaccccaacgccaagaccuggauggacaucgagggccgccccgaggaccccgucgagaucgcccucuaccagcccuccuccggcugcuacauccacuucuuccgcgagcccaccgaccucaagcaguucaagcaggacgccaaguacucccacggcaucgacgucaccgaccucuucgccacccagcccggccucaccuccgccgucaucgacgcccucccccgcaacauggucaucaccugccagggcuccgacgacauccgcaagcuccucgagucccagggccgcaaggacaucaagcucaucgacaucgcccucuccaagaccgacucccgcaaguacgagaacgccgucugggaccaguacaaggaccucugccacaugcacaccggcgucgucgucgagaagaagaagcgcggcggcaaggaggagaucaccccccacugcgcccucauggacugcaucauguucgacgccgccgucuccggcggccucaacaccuccguccuccgcgccguccucccccgcgacauggucuuccgcaccuccaccccccgcgucguccucugaggacuagugcaucacauuuaaaagcaucucagccuaccaugagaauaagagaaagaaaaugaagaucaauagcuuauucaucucuuuuucuuuuucguugguguaaagccaacacccugucuaaaaaacauaaauuucuuuaaucauuuugccucuuuucucugugcuucaauuaauaaaaaauggaaagaaccuagaucuaaaaaaaaaaaaaaaaaaaaaaaaaaaaaaaaaaaaaaaaaaaaaaaaaaaaaaaaaaaaaaaaugcaucccccccccccccccccccccccccccccccaaaggcucuuuucagagccaccagaauu

SEQ ID NO: 10691 - RNA, 2092 nt, Artificial Sequence
  mRNA product Design i-2 comprising derived and/or modified sequence from LASV(LP;Clade I)__AAF86702__NP (opt2)
ggggcgcugccuacggagguggcagccaucuccuucucggcaucaagcuuaccauguccaacuccaaggagaucaaguccuuccucuggacccagucccuccgccgcgagcucuccggcuacugcuccaacaucaagcuccaggucgucaaggacgcccaggcccuccuccacggccucgacuucuccgaggucuccaacguccagcgccucaugcgcaagcagaagcgcgacgacgccgaccucaagcgccuccgcgaccucaaccaggccgucaacaaccucgucgagcucaaguccacccagcagaagaacguccuccgcgucggcacccucuccuccgacgaccucaucacccucgccgccgaccucgagaagcucaaguccaaggucauccgcaccgagcgcccccucuccuccggcgucuacaugggcaaccucuccucccagcagcucgaccagcgccgcgcccuccucuccaugaucggcauguccggcggcccccagggcaaccgcaccggcggcgacggcgucguccgcgucugggacgucaagaacgccgagcuccucaacaaccaguucggcaccaugcccucccucacccucgccugccucaccaagcagggccaggucgaccucaacgacgccguccaggcccucaccgaccucggccucaucuacaccgccaaguaccccaacuccuccgaccucgacaugcucacccagucccaccccauccucggcauggucgacaccaagaaguccucccucaacaucuccggcuacaacuucucccucggcgccgccgucaaggccggcgccugcaugcucgacggcggcaacaugcucgagaccaucaaggucuccccccagaccauggacggcauccucaaguccauccucaaggucaagcgcucccucggcauguucaucuccgacacccccggcgagcgcaaccccuacgagaacauccucuacaagaucugccucuccggcgagggcuggcccuacaucgccucccgcaccuccaucaccggccgcgccugggagaacacccucgucgaccucgaguccgacaacaagccccccaagcucaacuccgccggcuccaacaagucccuccaggccgccggccucaacgccggccucaccuacucccagcucaugacccucaaggacugcaugcuccagcucgaccccuccuccaagaccuggaucgacaucgagggccgccccgaggaccccgucgagaucgcccucuuccagcccuccuccggcugcuacauccacuucuuccgcgagcccaccgaccucaagcaguucaagcaggacgccaaguacucccacggcaucgacgucaccgaccucuucuccacccagcccggccucaccuccgccgucaucgaggcccucccccgcaacaugguccucaccugccagggcuccgacgacaucaagaagcuccucgagucccagggccgccgcgacaucaagcucaucgacaucucccucuccaaggccgacucccgcaaguucgagaacgccgucugggaccaguacaaggaccucugccacaugcacaccggcgucgucgucgagaagaagaagcgcggcggcaaggaggagaucaccccccacugcgcccuccucgacugcaucauguucgacgccgccaccaccggcucccucaacaucaccacccuccgcgccguccucccccgcgacauggucuuccgcaccuccacccccaaggucguccucugaggacuagugcaucacauuuaaaagcaucucagccuaccaugagaauaagagaaagaaaaugaagaucaauagcuuauucaucucuuuuucuuuuucguugguguaaagccaacacccugucuaaaaaacauaaauuucuuuaaucauuuugccucuuuucucugugcuucaauuaauaaaaaauggaaagaaccuagaucuaaaaaaaaaaaaaaaaaaaaaaaaaaaaaaaaaaaaaaaaaaaaaaaaaaaaaaaaaaaaaaaaugcaucccccccccccccccccccccccccccccccaaaggcucuuuucagagccaccagaauu

SEQ ID NO: 10692 - RNA, 2092 nt, Artificial Sequence
  mRNA product Design i-2 comprising derived and/or modified sequence from LASV(803213;Clade II)__AAF86704__NP (opt2)
ggggcgcugccuacggagguggcagccaucuccuucucggcaucaagcuuaccauguccgccuccaaggaggucaaguccuuccucuggacccagucccuccgccgcgagcucuccggcuacugcuccaacaucaagcuccaggucgucaaggacgcccaggcccuccuccacggccucgacuucuccgaggucaacaacguccagcgccucaugcgcaagcagaagcgcgacgacggcgaccucaagcgccuccgcgaccucaaccaggccgucaacaaccucgucgagcucaaguccacccagcagaaguccauccuccgcgucggcacccucaccuccgacgaccuccucacccucgccgccgaccucgagaagcucaaguccaaggucauccgcaccgagcgcccccucuccuccggcgucuacaugggcaaccucuccacccagcagcucgagcagcgccgcgcccuccucaacaugaucggcauggucggcggcgcccagggcacccagcccggccgcgacggcgucguccgcgucugggacgucaagaaccccgaccuccucaacaaccaguucggcaccaugcccucccucacccucgccugccucaccaagcagggccaggucgaccucaacgacgccguccucgcccucaccgaccucggccucaucuacaccgccaaguaccccaacuccuccgaccucgaccgccucucccagucccaccccauccucaacauggucgacaccaagaaguccucccucaacaucuccggcuacaacuucucccucggcgccgccgucaaggccggcgccugcaugcucgacggcggcaacaugcucgagaccaucaaggucaccccccagaccauggacggcauccucaaguccauccucaaggucaagcgcucccucggcauguucgucuccgacacccccggcgagcgcaaccccuacgagaacauccucuacaagaucugccucuccggcgacggcuggcccuacaucgccucccgcaccuccaucgucggccgcgccugggagaacaccaccgucgaccucgaguccgacggcaagccccagaaggucggcaccgccggcuccaacaagucccuccaguccgccggcuuccccaccggccucaccuacucccagcucaugacccucaaggacuccaugaugcagcucgaccccuccgccaagaccuggaucgacaucgagggccgccccgaggaccccgucgagaucgcccucuaccagcccauguccggcugcuacauccacuucuuccgcgagcccaccgaccucaagcaguucaagcaggacgccaaguacucccacggcaucgacgucgccgaccucuuccccgcccagcccggccucaccuccgccgucaucgaggcccucccccgcaacaugguccucaccugccagggcuccgacgacaucaagaagcuccucgacucccagggccgccgcgacaucaagcucaucgacaucucccucuccaaggucgacucccgcaaguucgagaacgccgucugggaccagugcaaggaccucugccacaugcacaccggcgucgucgucgagaagaagaagcgcggcggcaaggaggagaucaccccccacugcgcccucauggacugcaucauguucgacgccgccgucuccggcggccucaacauccccguccuccgcgccguccucccccgcgacauggucuuccgcaccuccucccccaaggucguccucugaggacuagugcaucacauuuaaaagcaucucagccuaccaugagaauaagagaaagaaaaugaagaucaauagcuuauucaucucuuuuucuuuuucguugguguaaagccaacacccugucuaaaaaacauaaauuucuuuaaucauuuugccucuuuucucugugcuucaauuaauaaaaaauggaaagaaccuagaucuaaaaaaaaaaaaaaaaaaaaaaaaaaaaaaaaaaaaaaaaaaaaaaaaaaaaaaaaaaaaaaaaugcaucccccccccccccccccccccccccccccccaaaggcucuuuucagagccaccagaauu

SEQ ID NO: 10693 - RNA, 2095 nt, Artificial Sequence
  mRNA product Design i-2 comprising derived and/or modified sequence from LASV(GA391;Clade III)__CAA36646__NP (opt2)
ggggcgcugccuacggagguggcagccaucuccuucucggcaucaagcuuaccauguccgccuccaaggagguccgcuccuuccucuggacccagucccuccgccgcgagcucuccggcuacugcuccaacaucaagcuccaggucgucaaggacgcccaggcccuccuccacggccucgacuucuccgaggucuccaacguccagcgccucaugcgcaagcagaagcgcgacgacggcgaccucaagcgccuccgcgaccucaaccaggccgucaacaaccucgucgagcucaaguccacccagcagaaguccguccuccgcgucggcacccucuccuccgacgaccuccucauccucgccgccgaccucgagaagcucaaguccaaggucacccgcaccgagcgcccccucuccuccggcgucuacaugggcaaccucuccucccagcagcucgaccagcgccgcgcccuccucaacaugaucggcaugaccggcgucuccggcggcggcaagggcgccuccgacggcaucguccgcgucugggacgucaagaacgccgagcuccucaacaaccaguucggcaccaugcccucccucacccucgccugccucaccaagcagggccaggucgaccucaacgacgccguccaggcccucaccgaccucggccucaucuacaccgccaaguaccccaacuccuccgaccucgaccgccucucccagucccaccccauccucaacaugaucgacaccaagaaguccucccucaacaucuccggcuacaacuucucccucggcgccgccgucaaggccggcgccugcaugcucgacggcggcaacaugcucgagaccaucaaggucuccccccagaccauggacggcauccucaaguccauccucaaggucaagaagucccucggcauguucgucuccgacacccccggcgagcgcaaccccuacgagaacauccucuacaagaucugccucuccggcgacggcuggcccuacaucgccucccgcaccuccaucgucggccgcgccugggagaacaccgucgucgaccucgagcaggacaacaagccccagaagaucggcaacggcggcuccaacaagucccuccaguccgccggcuucgccgccggccucaccuacucccagcucaugacccucaaggacuucaagugcuucaaccucauccccaacgccaagaccuggauggacaucgagggccgccccgaggaccccgucgagaucgcccucuaccagcccuccuccggcugcuacguccacuucuuccgcgagcccaccgaccucaagcaguucaagcaggacgccaaguacucccacggcaucgacgucaccgaccucuucgccgcccagcccggccucaccuccgccgucaucgaggcccucccccgcaacauggucaucaccugccagggcuccgaggacauccgcaagcuccucgagucccagggccgccgcgacaucaagcucaucgacaucacccucuccaaggccgacucccgcaaguucgagaacgccgucugggaccaguucaaggaccucugccacaugcacaccggcgucgucgucgagaagaagaagcgcggcggcaaggaggagaucaccccccacugcgcccucauggacugcaucauguucgacgccgccgucuccggcggccucgacgccaagguccuccgcgucguccucccccgcgacauggucuuccgcaccuccacccccaaggucguccucugaggacuagugcaucacauuuaaaagcaucucagccuaccaugagaauaagagaaagaaaaugaagaucaauagcuuauucaucucuuuuucuuuuucguugguguaaagccaacacccugucuaaaaaacauaaauuucuuuaaucauuuugccucuuuucucugugcuucaauuaauaaaaaauggaaagaaccuagaucuaaaaaaaaaaaaaaaaaaaaaaaaaaaaaaaaaaaaaaaaaaaaaaaaaaaaaaaaaaaaaaaaugcaucccccccccccccccccccccccccccccccaaaggcucuuuucagagccaccagaauu

SEQ ID NO: 10694 - RNA, 2092 nt, Artificial Sequence
  mRNA product Design i-2 comprising derived and/or modified sequence from LASV(AV;Clade V)__CCA30315__NP (opt2)
ggggcgcugccuacggagguggcagccaucuccuucucggcaucaagcuuaccauguccgccuccaaggaggucaaguccuuccucuggacccagucccuccgccgcgagcucuccggcuacugcuccaacaucaagcuccaggucgucaaggacgcccaggcccuccuccacggccucgacuucuccgaggucuccaacguccagcgccucaugcgcaagcagcgccgcgacgacuccgaccucaagcgccuccgcgaccucaaccaggccgucaacaaccucgucgagcucaaguccacccagcagaaguccguccuccgcgucggcacccucuccuccgacgaccuccucacccucgccgccgaccucgagaagcucaaguccaaggucacccgcaccgagcgcccccucuccuccggcgucuacaugggcaaccucuccucccagcagcucgaccagcgccgcgcccuccucaaccucaucggcaugaccaacggcucccagggcucccaggccggccgcgacggcgucguccgcgucugggacgucaagaacgccgagcuccucaacaaccaguucggcaccaugcccucccucacccucgccugccucaccaagcagggccaggucgaccucaacgacgucguccaggcccucaccgaccucggccucaucuacaccgccaaguaccccaacaccuccgaccucgaccgccucacccagucccaccccauccucaacaugaucgacaccaagaaguccucccucaacaucuccggcuacaacuucucccucggcgccgccgucaaggccggcgccugcaugcucgacggcggcaacaugcucgagaccaucaaggucuccccccaguccauggacggcauccucaaguccauccucaaggucaagcgcgcccucggcauguucgucuccgacacccccggcgagcgcaaccccuacgagaacauccucuacaagaucugccucuccggcgacggcuggcccuacaucgccucccgcaccuccaucgucggccgcgccugggagaacaccgucgucgaccucgagaccgacggcaagccccagaagaucggcuccggcaacuccaacaagucccuccaguccgccggcuucuccgccggccucaccuacucccagcucaugacccucaaggacgccaugcuccagcucgaccccaacgccaagaccuggauggacaucgagggccgccccgaggaccccgucgaggucgcccucuaccagcccaucuccggcugcuacauccacuucuuccgcgagcccaccgaccucaagcaguucaagcaggacgccaaguacucccacggcaucgacaucgccgaccucuucgccgcccagcccggccucaccuccgccgucaucgaggcccucccccgcaacauggucaucaccugccagggcuccgaggacaucaagaagcuccucgagucccagggccgcaaggacaucaagcucaucgacaucgcccucuccaagaucgacucccgcaaguucgagaacgccgucugggaccaguacaaggaccucugccacaugcacaccggcgucgucgucgagaagaagaagcgcggcggcaaggaggagaucaccccccacugcgcccucauggacugcaucauguucgacgccgccgucuccggcggccucaacacccucguccuccgcgccguccucccccgcgacauggucuuccgcaccuccaccccccgcgucguccucugaggacuagugcaucacauuuaaaagcaucucagccuaccaugagaauaagagaaagaaaaugaagaucaauagcuuauucaucucuuuuucuuuuucguugguguaaagccaacacccugucuaaaaaacauaaauuucuuuaaucauuuugccucuuuucucugugcuucaauuaauaaaaaauggaaagaaccuagaucuaaaaaaaaaaaaaaaaaaaaaaaaaaaaaaaaaaaaaaaaaaaaaaaaaaaaaaaaaaaaaaaaugcaucccccccccccccccccccccccccccccccaaaggcucuuuucagagccaccagaauu

SEQ ID NO: 10695 - RNA, 2092 nt, Artificial Sequence
  mRNA product Design i-2 comprising derived and/or modified sequence from LASV(Togo/2016/7082;Clade VI)__AMR44578__NP (opt2)
ggggcgcugccuacggagguggcagccaucuccuucucggcaucaagcuuaccauguccaacuccaaggaggucaaguccuuccucuggacccagucccuccgccgcgagcucuccggcuacugcuccaacaucaagcuccaggucgucaaggacgcccaggcccuccuccacggccucgacuucuccgaggucuccaacguccagcgccucaugcgcaagcagaagcgcgacgacggcgaccucaagcgccuccgcgaccucaaccaggccgucaacaaccucgucgagcucaaguccguccagcagaaguccauccuccgcgucggcacccucaccuccgacgaccuccucacccucgccgccgaccucgagaagcucaaguccaaggucacccgcaccgagcgcccccucuccuccggcgucuacaugggcaaccucuccucccagcagcucgaccagcgccgcgcccuccucuccaugaucggcauguccggcggcaaccagaacucccagcccaagggcgacggcgucguccgcgucugggacgucaagaacgccgaccuccucaacaaccaguucggcaccaugcccucccucacccucgccugccucaccaagcagggccaggucgaccucaacgacgccguccaggcccucaccgaccucggccucaucuacaccgccaaguaccccaacuccuccgaccucgaccgccucucccagucccaccccauccucaacaugaucgacaccaagaaguccucccucaacaucuccggcuacaacuucucccucggcgccgccaucaagaccggcgccugcaugcucgacggcggcaacaugcucgagaccaucaaggucaccccccagaccauggacggcauccucaaguccauccucaaggucaagcgcucccucggcauguucaucuccgacacccccggcgagcgcaaccccuacgagaacauccucuacaagaucugccucuccggcgacggcuggcccuacaucgccucccgcaccgccaucaucggccgcgccugggagaacaccgucgucgaccucgaguccgacuccaagccccagaagaucggcuccaacggcuccaacaagucccuccaguccgccggcuucgcccccggccucaccuacucccagcucaugacccucaaggacuccaugcuccagcucgaccccaacgccaagaccuggaucgacaucgagggccgccccgaggaccccgucgaggucgcccucuuccagcccaucuccggcugcuacauccacuucuuccgcgagcccaccgaccucaagcaguucaagcaggacgccaaguacucccacggcaucgacgucaccgaccucuucgccgcccagcccggccucaccuccgccgucaucgaggcccucccccgcaacaugguccucaccugccagggcuccgacgacaucaagaagcuccucgacucccagggccgccgcgacaucaagcucaucgacgucucccucaacaagaucgacucccgcaaguucgagaacgccgucugggaccaguacaaggaccucugccacaugcacaccggcgucgucgucgagaagaagaagaagggcggcaaggaggagaucaccccccacugcgcccuccucgacugcaucauguucgacgccgccgucuccggcggccucaacgccaccguccuccgcgccguccucccccgcgacauggucuuccgcaccuccucccccaaggucguccucugaggacuagugcaucacauuuaaaagcaucucagccuaccaugagaauaagagaaagaaaaugaagaucaauagcuuauucaucucuuuuucuuuuucguugguguaaagccaacacccugucuaaaaaacauaaauuucuuuaaucauuuugccucuuuucucugugcuucaauuaauaaaaaauggaaagaaccuagaucuaaaaaaaaaaaaaaaaaaaaaaaaaaaaaaaaaaaaaaaaaaaaaaaaaaaaaaaaaaaaaaaaugcaucccccccccccccccccccccccccccccccaaaggcucuuuucagagccaccagaauu

SEQ ID NO: 10696 - RNA, 2092 nt, Artificial Sequence
  mRNA product Design i-2 comprising derived and/or modified sequence from LASV(KAK-428;Clade n.d. (VII))__ANH09741__NP (opt2)
ggggcgcugccuacggagguggcagccaucuccuucucggcaucaagcuuaccauguccaacuccaaggaggucaaguccuuccucuggacccagucccuccgccgcgagcucuccggcuacugcaccaacaucaagcuccaggucgucaaggacgcccaggcccuccuccacggccucgacuucuccgaggucuccaacguccagcgccucaugcgcaagcagaagcgcgacgacaacgaccucaagcgccuccgcgaccucaaccaggccgucaacaaccucgucgagcucaaguccguccagcagaaguccguccucaaggucggcacccucaacuccgacgaccuccucacccucgccgccgaccucgagaagcucaaguccaaggucguccgcaccgagcgcccccucuccuccggcgucuacaugggcaaccucuccucccagcagcucgaccagcgccgcgcccuccucaacaugaucggcauggccggcggcucccagggcaaccagcccucccgcgacggcgucguccgcgucugggacgucaagaacgccgaccuccucaacaaccaguucggcaccaugcccucccucacccucgccugccucaccaagcagggccaggucgaccucaacgacgucguccucgcccucaccgaccucggccucaucuacaccgccaaguaccccaacuccuccgaccucgaccgccucucccagaaccaccccguccucaacaugaucgacgucaacaaguccucccucaacaucuccggcuacaacuucucccucggcgccgccgucaaggccggcgccugcaugcucgacggcggcaacaugcucgagaccaucaagaucuccccccagaccgucgacggcauccucaaguccauccucaaggucaagcgcgcccucggcauguucgucuccgacacccccggcgagcgcaaccccuacgagaacauccucuacaaggucugccucuccggcaacggcuggcccuacaucgccucccgcaccuccaucgucggccgcgccugggagaacaccgucgucgaccucgaguccaacaagaaccagcccaaggucggcaacaacggcuccaacaagaugcuccaguccuccggcuucgccaccggccucaccuacucccagcucaugacccuccgcgacuccaugcuccagcucgaccccaccgccaagaccuggaucgacaucgagggccgccccgaggaccccgucgagcucgcccucuuccagcccuccuccggcugcuacauccacuucuuccgcgagcccaccgaccucaagcaguucaagcaggacgccaaguacucccacggcaucgacgucaacgaccucuucuccgcccagcccggccucaccuccgccguccucgaggcccucccccgcaacaugguccucaccugccagggcuccgacgacauccgcaagcuccucgacucccaggaccgcaaggacaucaagcucaucgacaucucccucuccaaggccgacgcccgcaaguucgagaacgacgucugggaccaguucaaggaccucugccacaugcacaccggcaucgucgucgagaagaagaagaagggcggcaagcaggagaugaccccccacugcgcccuccucgacugcaucauguucgacgccgccgucuccggcggccucaacguccccacccuccgcgccguccuccccaccgacauggucuuccgcaccaucaccaccaaggucguccucugaggacuagugcaucacauuuaaaagcaucucagccuaccaugagaauaagagaaagaaaaugaagaucaauagcuuauucaucucuuuuucuuuuucguugguguaaagccaacacccugucuaaaaaacauaaauuucuuuaaucauuuugccucuuuucucugugcuucaauuaauaaaaaauggaaagaaccuagaucuaaaaaaaaaaaaaaaaaaaaaaaaaaaaaaaaaaaaaaaaaaaaaaaaaaaaaaaaaaaaaaaaugcaucccccccccccccccccccccccccccccccaaaggcucuuuucagagccaccagaauu

SEQ ID NO: 10697 - RNA, 2092 nt, Artificial Sequence; identical to SEQ ID NO: 10691
  mRNA product Design i-2 comprising derived and/or modified sequence from LASV(Pinneo-NIG-1969;Clade I)__AIT17837__NP (opt2)

SEQ ID NO: 10698 - RNA, 2092 nt, Artificial Sequence
  mRNA product Design i-2 comprising derived and/or modified sequence from LASV(ISTH0009-NIG-2011;Clade II)__AIT17405__NP (opt2)
ggggcgcugccuacggagguggcagccaucuccuucucggcaucaagcuuaccauguccgucuccaaggaggucaaguccuuccucuggacccagucccuccgccgcgagcucuccggcuacugcuccaacaucaagcuccaggucgucaaggacgcccaggcccuccuccacggccucgacuucuccgaggucuccaacguccagcgccucaugcgcaagcagaagcgcgacgacuccgaccucaagcgccuccgcgaccucaaccaggccgucaacaaccucgucgagcucaaguccacccagcagaaguccauccuccgcgucggcacccucaccuccgacgaccuccucacccucgccgccgaccucgagaagcucaaguccaaggucauccgcaccgagcgcccccucuccuccggcgucuacaugggcaaccucuccacccagcagcucgagcagcgccgcgcccuccucaacaugaucggcauggucggcggcgcccagggcacccagcccggccgcgacggcgucguccgcgucugggacgucaagaaccccgaccuccucaacaaccaguucggcaccaugcccucccucacccucgccugccucaccaagcagggccaggucgaccucaacgacgccguccucgcccucaccgaccucggccucaucuacaccgccaaguaccccaacuccuccgaccucgaccgccucucccagucccaccccauccucaacauggucgacaucaagaaguccucccucaacaucuccggcuacaacuucucccucggcgccgccgucaaggccggcgccugcaugcucgacggcggcaacaugcucgagaccaucaaggucaccccccagaccauggacggcauccucaaguccauccucaaggucaagcgcucccucggcauguucgucuccgacacccccggcgagcgcaaccccuacgagaacauccucuacaagaucugccucuccggcgacggcuggcccuacaucgccucccgcaccuccaucgucggccgcgccugggagaacaccaccgucgaccucgaguccgacggcaagccccagaaggucggcuccgccggcuccaacaagucccuccaguccgccggcuuccccaccggccucaccuacucccagcucaugacccucaaggacuccaugaugcagcucgaccccuccgccaagaccuggaucgacaucgagggccgccccgaggaccccgucgagaucgcccucuaccagcccauguccggcugcuacauccacuucuuccgcgagcccaccgaccucaagcaguucaagcaggacgccaaguacucccacggcaucgacgucgccgaccucuuccccgcccagcccggccucaccuccgccgucaucgaggcccucccccgcaacaugguccucaccugccagggcuccgacgacaucaagcgccuccucgacucccagggccgccgcgacaucaagcucaucgacaucgcccucuccaaggccgacucccgccgcuucgagaacgccgucugggaccagugcaaggaccucugccacaugcacaccggcgucgucgucgagaagaagaagcgcggcggcaaggaggagaucaccccccacugcgcccucauggacugcaucauguacgacgccgccgucuccggcggccucaacauccccguccuccgcgccguccucccccgcgacauggucuuccgcaccuccucccccaaggucguccucugaggacuagugcaucacauuuaaaagcaucucagccuaccaugagaauaagagaaagaaaaugaagaucaauagcuuauucaucucuuuuucuuuuucguugguguaaagccaacacccugucuaaaaaacauaaauuucuuuaaucauuuugccucuuuucucugugcuucaauuaauaaaaaauggaaagaaccuagaucuaaaaaaaaaaaaaaaaaaaaaaaaaaaaaaaaaaaaaaaaaaaaaaaaaaaaaaaaaaaaaaaaugcaucccccccccccccccccccccccccccccccaaaggcucuuuucagagccaccagaauu

SEQ ID NO: 10699 - RNA, 2092 nt, Artificial Sequence
  mRNA product Design i-2 comprising derived and/or modified sequence from LASV(ISTH2010-NIG-2012;Clade II)__AIT17483__NP (opt2)
ggggcgcugccuacggagguggcagccaucuccuucucggcaucaagcuuaccauguccgccuccaaggaggucaaguccuuccucuggacccagucccuccgccgcgagcucuccggcuacugcuccaacaucaagcuccaggucgucaaggacgcccaggcccuccuccacggccucgacuucuccgaggucuccaacguccagcgccucaugcgcaagcagaagcgcgacgacuccgaccucaagcgccuccgcgaccucaaccaggccgucaacaaccucgucgagcucaaguccacccagcagaaguccauccuccgcgucggcacccucaccuccgacgaccuccucacccucgccgccgaccucgagaagcucaaguccaaggucauccgcaccgagcgcccccucuccuccggcgucuacaugggcaaccucuccacccagcagcucgagcagcgccgcgcccuccucaaccucaucggcauggucggcggcgcccagggcacccagcccggccgcgacggcgucguccgcgucugggacgucaagaaccccgaccuccucaacaaccaguucggcaccaugcccucccucacccucgccugccucaccaagcagggccaggucgaccucaacgacgccguccucgcccucaccgaccucggccucaucuacaccgccaaguaccccaacuccuccgaccucgaccgccucucccagucccaccccauccucaacauggucgacaccaagaaguccucccucaacaucuccggcuucaacuucucccucggcgccgccgucaaggccggcgccugcaugcucgacggcggcaacaugcucgagaccaucaaggucaccccccagaccauggacggcauccucaaguccauccucaaggucaagaagucccucggcauguucgucuccgacacccccggcgagcgcaaccccuacgagaacauccucuacaagaucugccucuccggcgacggcuggcccuacaucgccucccgcaccuccaucgucggccgcgccugggagaacaccaccgucgaccucgaguccgacggcaagccccacaaggucggcaccgccggcuccaacaagucccuccaguccgccggcuuccccaccggccucaccuacucccagcucaugacccucaaggacuccaugaugcagcucgaccccuccgccaagaccuggaucgacaucgagggccgccccgaggaccccgucgagaucgcccucuaccagcccauguccggcugcuacauccacuucuuccgcgagcccaccgaccucaagcaguucaagcaggacgccaaguacucccacggcaucgacgucgccgaccucuuccccgcccagcccggccucaccuccgccgucaucgaggcccucccccgcaacaugguccucaccugccagggcuccgacgacaucaagcgccuccucgacucccagggccgccgcgacaucaagcucaucgacaucgcccucuccaaggccgacucccgccgcuucgagaacgccgucugggaccagugcaaggaccucugccacaugcacaccggcgucgucgucgagaagaagaagcgcggcggcaaggaggagaucaccccccacugcgcccucauggacugcaucauguacgacgccgccgucuccggcggccucaacauccccguccuccgcgccguccucccccgcgacauggucuuccgcaccuccucccccaaggucguccucugaggacuagugcaucacauuuaaaagcaucucagccuaccaugagaauaagagaaagaaaaugaagaucaauagcuuauucaucucuuuuucuuuuucguugguguaaagccaacacccugucuaaaaaacauaaauuucuuuaaucauuuugccucuuuucucugugcuucaauuaauaaaaaauggaaagaaccuagaucuaaaaaaaaaaaaaaaaaaaaaaaaaaaaaaaaaaaaaaaaaaaaaaaaaaaaaaaaaaaaaaaaugcaucccccccccccccccccccccccccccccccaaaggcucuuuucagagccaccagaauu

SEQ ID NO: 10700 - RNA, 2092 nt, Artificial Sequence
  mRNA product Design i-2 comprising derived and/or modified sequence from LASV(Lassa virus/H.sapiens-wt/NGA/2015/ISTH_0543;Clade II)__AVO03640__NP (opt2)
ggggcgcugccuacggagguggcagccaucuccuucucggcaucaagcuuaccauguccgccuccaaggaggucaaguccuuccucuggacccagucccuccgccgcgagcucuccggcuacugcuccaacaucaagcuccaggucgucaaggacgcccaggcccuccuccacggccucgacuucuccgaggucuccaacguccagcgccucaugcgcaagcagaagcgcgacgacuccgaccucaagcgccuccgcgaccucaaccaggccgucaacaaccucgucgagcucaaguccacccagcagaaguccauccuccgcgucggcacccucaccuccgacgaccuccucacccucgccgccgaccucgagaagcucaaguccaaggucauccgcaccgagcgcccccucuccuccggcgucuacaugggcaaccucuccacccagcagcucgagcagcgccgcgcccuccucaacaugaucggcauggucggcggcgcccagggcacccagcccggccgcgacggcgucguccgcgucugggacgucaagaaccccgaccuccucaacaaccaguucggcaccaugcccucccucacccucgccugccucaccaagcagggccaggucgaccucaacgacgccguccucgcccucaccgaccucggccucaucuacaccgccaaguaccccaacuccuccgaccucgaccgccucucccagucccaccccauccucaacauggucgacaccaagaaguccucccucaacaucuccggcuacaacuucucccucggcgccgccgucaaggccggcgccugcaugcucgacggcggcaacaugcucgagaccaucaaggucaccccccagaccauggacggcauccucaaguccauccucaaggucaagaagucccucggcauguucgucuccgacacccccggcgagcgcaaccccuacgagaacauccucuacaagaucugccucuccggcgacggcuggcccuacaucgccucccgcaccuccaucgucggccgcgccugggagaacaccaccgucgaccucgaguccgacggcaagccccagaaggucggcuccgccggcuccaacaagucccuccaguccgccggcuuccccaccggccucaccuacucccagcucaugacccucaaggacuccaugaugcagcucgaccccuccgccaagaccuggaucgacaucgagggccgccccgaggaccccgucgagaucgcccucuaccagcccauguccggcugcuacauccacuucuuccgcgagcccaccgaccucaagcaguucaagcaggacgccaaguacucccacggcaucgacgucgccgaccucuuccccgcccagcccggccucaccuccgccgucaucgaggcccucccccgcaacaugguccucaccugccagggcuccgacgacaucaagcgccuccucgacucccagggccgcaaggacaucaagcucaucgacaucgcccucuccaaggccgacucccgccgcuucgagaacgccgucugggaccagugcaaggaccucugccacaugcacaccggcgucgucgucgagaagaagaagcgcggcggcaaggaggagaucaccccccacugcgcccucauggacugcaucauguacgacgccgccgucuccggcggccucaacauccccguccuccgcgccguccucccccgcgacauggucuuccgcaccuccucccccaaggucguccucugaggacuagugcaucacauuuaaaagcaucucagccuaccaugagaauaagagaaagaaaaugaagaucaauagcuuauucaucucuuuuucuuuuucguugguguaaagccaacacccugucuaaaaaacauaaauuucuuuaaucauuuugccucuuuucucugugcuucaauuaauaaaaaauggaaagaaccuagaucuaaaaaaaaaaaaaaaaaaaaaaaaaaaaaaaaaaaaaaaaaaaaaaaaaaaaaaaaaaaaaaaaugcaucccccccccccccccccccccccccccccccaaaggcucuuuucagagccaccagaauu

SEQ ID NO: 10701 - RNA, 2092 nt, Artificial Sequence
  mRNA product Design i-2 comprising derived and/or modified sequence from LASV(Lassa virus/H.sapiens-wt/NGA/2016/ISTH_0009;Clade II)__AVO03572__NP (opt2)
ggggcgcugccuacggagguggcagccaucuccuucucggcaucaagcuuaccauguccgccuccaaggaggucaaguccuuccucuggacccagucccuccgccgcgagcucuccggcuacugcuccaacaucaagcuccaggucgucaaggacgcccaggcccuccuccacggccucgacuucuccgaggucuccaacguccagcgccucaugcgcaagcagaagcgcgacgacuccgaccucaagcgccuccgcgaccucaaccaggccgucaacaaccucgucgagcucaaguccacccagcagaaguccauccuccgcgucggcacccucaccuccgacgaccuccucacccucgccgccgaccucgagaagcucaaguccaaggucauccgcaccgagcgcccccucuccuccggcgucuacaugggcaaccucuccacccagcagcucgagcagcgccgcgcccuccucaacaugaucggcauggucggcggcgcccagggcacccagcccggccgcgacggcgucguccgcgucugggacgucaagaaccccgaccuccucaacaaccaguucggcaccaugcccucccucacccucgccugccucaccaagcagggccaggucgaccucaacgacgccguccucgcccucaccgaccucggccucaucuacaccgccaaguaccccaacuccuccgaccucgaccgccucucccagucccaccccauccucaacauggucgacaccaagaaguccucccucaacaucuccggcuacaacuucucccucggcgccgccgucaaggccggcgccugcaugcucgacggcggcaacaugcucgagaccaucaaggucaccccccagaccauggacggcauccucaaguccauccucaaggucaagaagucccucggcauguucgucuccgacacccccggcgagcgcaaccccuacgagaacauccucuacaagaucugccucuccggcgacggcuggcccuacaucgccucccgcaccuccaucgucggccgcgccugggagaacaccaccgucgaccucgaguccgacggcaagccccagaaggucggcuccgccggcuccaacaagucccuccaguccgccggcuuccccaccggccucaccuacucccagcucaugacccucaaggacuccaugaugcagcucgaccccuccgccaagaccuggaucgacaucgagggccgccccgaggaccccgucgagaucgcccucuaccagcccauguccggcugcuacauccacuucuuccgcgagcccaccgaccucaagcaguucaagcaggacgccaaguacucccacggcaucgacgucgccgaccucuuccccgcccagcccggccucaccuccgccgucaucgaggcccucccccgcaacaugguccucaccugccagggcuccgacgacaucaagcgccuccucgacucccagggccgccgcgacaucaagcucaucgacaucgcccucuccaaggccgacucccgccgcuucgagaacgccgucugggaccagugcaaggaccucugccacaugcacaccggcgucgucgucgagaagaagaagcgcggcggcaaggaggagaucaccccccacugcgcccucauggacugcaucauguacgacgccgccgucuccggcggccucaacauccccguccuccgcgccguccucccccgcgacauggucuuccgcaccuccucccccaaggucguccucugaggacuagugcaucacauuuaaaagcaucucagccuaccaugagaauaagagaaagaaaaugaagaucaauagcuuauucaucucuuuuucuuuuucguugguguaaagccaacacccugucuaaaaaacauaaauuucuuuaaucauuuugccucuuuucucugugcuucaauuaauaaaaaauggaaagaaccuagaucuaaaaaaaaaaaaaaaaaaaaaaaaaaaaaaaaaaaaaaaaaaaaaaaaaaaaaaaaaaaaaaaaugcaucccccccccccccccccccccccccccccccaaaggcucuuuucagagccaccagaauu

SEQ ID NO: 10702 - RNA, 2092 nt, Artificial Sequence
  mRNA product Design i-2 comprising derived and/or modified sequence from LASV(Lassa virus/H.sapiens-wt/NGA/2016/ISTH_0017;Clade II)__AVO03568__NP (opt2)
ggggcgcugccuacggagguggcagccaucuccuucucggcaucaagcuuaccauguccgccuccaaggaggucaaguccuuccucuggacccagucccuccgccgcgagcucuccggcuacugcuccuccaucaagcuccaggucgucaaggacgcccaggcccuccuccacggccucgacuucuccgaggucuccaacguccagcgccucaugcgcaagcagaagcgcgacgacuccgaccucaagcgccuccgcgaccucaaccaggccgucaacaaccucgucgagcucaaguccacccagcagaaguccauccuccgcgucggcacccucaccuccgacgaccuccucacccucgccgccgaccucgagaagcucaaguccaaggucauccgcaccgagcgcccccucuccuccggcgucuacaugggcaaccucuccacccagcagcucgagcagcgccgcgcccuccucaacaugaucggcauggccggcggcgcccagggcacccagcccggccgcgacggcgucguccgcgucugggacgucaagaaccccgaccuccucaacaaccaguucggcaccaugcccucccucacccucgccugccucaccaagcagggccaggucgaccucaacgacgccguccucgcccucaccgaccucggccucaucuacaccgccaaguaccccaacuccuccgaccucgaccgccucucccagucccaccccauccucaacauggucgacaccaagaaguccucccucaacaucuccggcuacaacuucucccucggcgccgccgucaaggccggcgccugcaugcucgacggcggcaacaugcucgagaccaucaaggucaccccccagaccauggacggcauccucaaguccauccucaaggucaagcgcucccucggcauguucgucuccgacgcccccggcgagcgcaaccccuacgagaacauccucuacaagaucugccucuccggcgacggcuggcccuacaucgccucccgcaccuccaucgucggccgcgccugggagaacaccaccgucgaccucgaguccgacggcaagccccagaaggucggcgccaccggcuccaacaagucccuccaguccgccggcuuccccaccggccucaccuacucccagcucaugacccucaaggacuccaugaugcagcucgaccccuccgccaagaccuggaucgacaucgagggccgccccgaggaccccgucgaggucgcccucuaccagcccgucuccggcugcuacauccacuucuuccgcgagcccaccgaccucaagcaguucaagcaggacgccaaguacucccacggcaucgacgucgccgaccucuuccccgcccagcccggccucaccuccgccgucaucgaggcccucccccgcaacaugguccucaccugccagggcuccgacgacaucaagaagcuccucgacucccagggccgcaaggacaucaagcucaucgacaucgcccucuccaaggccgacucccgccgcuucgagaacgccgucugggaccagugcaaggaccucugccacaugcacaccggcgucgucgucgagaagaagaagcgcggcggcaaggaggagaucaccccccacugcgcccucauggacugcaucauguacgacgccgccgucuccggcggccucaacauccccguccuccgcgccguccucccccgcgacauggucuuccgcaccuccucccccaaggucguccucugaggacuagugcaucacauuuaaaagcaucucagccuaccaugagaauaagagaaagaaaaugaagaucaauagcuuauucaucucuuuuucuuuuucguugguguaaagccaacacccugucuaaaaaacauaaauuucuuuaaucauuuugccucuuuucucugugcuucaauuaauaaaaaauggaaagaaccuagaucuaaaaaaaaaaaaaaaaaaaaaaaaaaaaaaaaaaaaaaaaaaaaaaaaaaaaaaaaaaaaaaaaugcaucccccccccccccccccccccccccccccccaaaggcucuuuucagagccaccagaauu

SEQ ID NO: 10703 - RNA, 2092 nt, Artificial Sequence
  mRNA product Design i-2 comprising derived and/or modified sequence from LASV(Lassa virus/H.sapiens-wt/NGA/2018/ISTH_0959;Clade II)__AVV65100__NP (opt2)
ggggcgcugccuacggagguggcagccaucuccuucucggcaucaagcuuaccauguccgccuccaaggaggucaaguccuuccucuggacccagucccuccgccgcgagcucuccggcuacugcuccaacaucaagcuccaggucgucaaggacgcccaggcccuccuccacggccucgacuucuccgaggucuccaacguccagcgccucaugcgcaagcagaagcgcgacgacuccgaccucaagcgccuccgcgaccucaaccaggccgucaacaaccucgucgagcucaaguccacccagcagaaguccauccuccgcgucggcacccucaccuccgacgaccuccucacccucgccgccgaccucgagaagcucaaguccaaggucauccgcaccgagcgcccccucuccuccggcgucuacaugggcaaccucuccacccagcagcucgagcagcgccgcgcccuccucaaccucaucggcauggucggcggcgcccagggcacccagcccggccgcgacggcgucguccgcgucugggacgucaagaaccccgaccuccucaacaaccaguucggcaccaugcccucccucacccucgccugccucaccaagcagggccaggucgaccucaacgacgucguccucgcccucaccgaccucggccucaucuacaccgccaaguaccccaacuccuccgaccucgaccgccucucccagucccaccccauccucaacauggucgacaccaagaaguccucccucaacaucuccggcuucaacuucucccucggcgccgccgucaaggccggcgccugcaugcucgacggcggcaacaugcucgagaccaucaaggucaccccccagaccauggacggcauccucaaguccauccucaaggucaagaagucccucggcauguucgucuccgacacccccggcgagcgcaaccccuacgagaacauccucuacaagaucugccucuccggcgacggcuggcccuacaucgccucccgcaccuccaucgucggccgcgccugggagaacaccaccgucgaccucgaguccgacggcaagccccacaaggucggcaccgccggcuccaacaagucccuccaguccgccggcuuccccaccggccucaccuacucccagcucaugacccucaaggacuccaugaugcagcucgaccccuccgccaagaccuggaucgacaucgagggccgccccgaggaccccgucgagaucgcccucuaccagcccauguccggcugcuacauccacuucuuccgcgagcccaccgaccucaagcaguucaagcaggacgccaaguacucccacggcaucgacgucgccgaccucuuccccgcccagcccggccucaccuccgccgucaucgaggcccucccccgcaacaugguccucaccugccagggcuccgacgacaucaagcgccuccucgacucccagggccgcaaggacaucaagcucaucgacaucgcccucuccaagaccgacucccgccgcuucgagaacgccgucugggaccagugcaaggaccucugccacaugcacaccggcgucgucgucgagaagaagaagcgcggcggcaaggaggagaucaccccccacugcgcccucauggacugcaucauguacgacgccgccgucuccggcggccucaacauccccguccuccgcgccguccucccccgcgacauggucuuccgcaccuccucccccaaggucguccucugaggacuagugcaucacauuuaaaagcaucucagccuaccaugagaauaagagaaagaaaaugaagaucaauagcuuauucaucucuuuuucuuuuucguugguguaaagccaacacccugucuaaaaaacauaaauuucuuuaaucauuuugccucuuuucucugugcuucaauuaauaaaaaauggaaagaaccuagaucuaaaaaaaaaaaaaaaaaaaaaaaaaaaaaaaaaaaaaaaaaaaaaaaaaaaaaaaaaaaaaaaaugcaucccccccccccccccccccccccccccccccaaaggcucuuuucagagccaccagaauu

SEQ ID NO: 10704 - RNA, 2092 nt, Artificial Sequence
  mRNA product Design i-2 comprising derived and/or modified sequence from LASV(LASV003-NIG-2008;Clade II)__AIT17581__NP (opt2)
ggggcgcugccuacggagguggcagccaucuccuucucggcaucaagcuuaccauguccgccuccaaggaggucaaguccuuccucuggacccagucccuccgccgcgagcucuccggcuacugcuccuccaucaagcuccaggucgucaaggacgcccaggcccuccuccacggccucgacuucuccgaggucuccaacguccagcgccucaugcgcaagcagaagcgcgacgacuccgaccucaagcgccuccgcgaccucaaccaggccgucaacaaccucgucgagcucaaguccacccagcagaaguccguccuccgcgucggcacccucaccuccgacgaccuccucacccucgccgccgaccucgagaagcucaaguccaaggucauccgcaccgagcgcccccucuccuccggcgucuacaugggcaaccucuccgcccagcagcucgagcagcgccgcacccuccucaacaugaucggcauggucggcggcgcccagggcacccagcccggccgcgacggcgucguccgcgucugggacgucaagaaccccgaccuccucaacaaccaguucggcaccaugcccucccucacccucgccugccucaccaagcagggccaggucgaccucaacgacgucguccucgcccucaccgaccucggccucaucuacaccgccaaguaccccaacuccuccgaccucgaccgccucucccagucccaccccauccucuccauggucgacaccaagaaguccucccucaacaucuccggcuacaacuucucccucggcgccgccgucaaggccggcgccugcaugcucgacggcggcaacaugcucgagaccaucaaggucaccccccagaccauggacggcauccucaaguccauccucaaggucaagaagucccucggcauguucgucuccgacacccccggcgagcgcaaccccuacgagaacauccucuacaagaucugccucuccggcgacggcuggcccuacaucgccucccgcaccuccaucgucggccgcgccugggagaacaccaccgucgaccucgaguccgacggcaagccccagaaggucggcaccgccggcuccaacaagucccuccaguccgccggcuuccccaccggccucaccuacucccagcucaugacccucaaggacuccaugaugcagcucgaccccuccgccaagaccuggaucgacaucgagggccgccccgaggaccccgucgagaucgcccucuaccagcccauguccggcugcuacauccacuucuuccgcgagcccaccgaccucaagcaguucaagcaggacgccaaguacucccacggcaucgacgucaccgaccucuuccccgcccagcccggccucaccuccgccgucaucgaggcccucccccgcaacaugguccucaccugccagggcuccgacgacaucaagcgccuccucgacucccagggccgccgcgacaucaagcucaucgacaucgcccucuccaaggccgacucccgccgcuucgagaacgccgucugggaccagugcaaggaccucugccacaugcacaccggcgucgucgucgagaagaagaagcgcggcggcaaggaggagaucaccccccacugcgcccucauggacugcaucauguacgacgccgccgucuccggcggccucaacauccccguccuccgcgccguccucccccgcgacauggucuuccgcaccuccucccccaaggucguccucugaggacuagugcaucacauuuaaaagcaucucagccuaccaugagaauaagagaaagaaaaugaagaucaauagcuuauucaucucuuuuucuuuuucguugguguaaagccaacacccugucuaaaaaacauaaauuucuuuaaucauuuugccucuuuucucugugcuucaauuaauaaaaaauggaaagaaccuagaucuaaaaaaaaaaaaaaaaaaaaaaaaaaaaaaaaaaaaaaaaaaaaaaaaaaaaaaaaaaaaaaaaugcaucccccccccccccccccccccccccccccccaaaggcucuuuucagagccaccagaauu

SEQ ID NO: 10705 - RNA, 2092 nt, Artificial Sequence
  mRNA product Design i-2 comprising derived and/or modified sequence from LASV(LASV035-NIG-2009;Clade II)__AIT17589__NP (opt2)
ggggcgcugccuacggagguggcagccaucuccuucucggcaucaagcuuaccauguccgccuccaaggaggucaaguccuuccucuggacccagucccuccgccgcgagcucuccggcuacugcuccuccaucaagcuccaggucgucaaggacgcccaggcccuccuccacggccucgacuucuccgaggucuccaacguccagcgccucaugcgcaagcagaagcgcgacgacuccgaccucaagcgccuccgcgaccucaaccaggccgucaacaaccucgucgagcucaaguccacccagcagaaguccauccuccgcgucggcacccucaccuccgacgaccuccucacccucgccgccgaccucgagaagcucaaguccaaggucauccgcaccgagcgcccccucuccuccggcgucuacaugggcaaccucuccgcccagcagcucgagcagcgccgcgcccuccucaacaugaucggcauggucggcggcgcccagggcacccagcccggccgcgacggcgucguccgcgucugggacgucaagaaccccgaccuccucaacaaccaguucggcaccaugcccucccucacccucgccugccucaccaagcagggccaggucgaccucaacgacgccguccucgcccucaccgaccucggccucaucuacaccgccaaguaccccaacuccuccgaccucgaccgccucucccagucccaccccauccucaacauggucgacaccaagaaguccucccucaacaucuccggcuacaacuucucccucggcgccgccgucaaggccggcgccugcaugcucgacggcggcaacaugcucgagaccaucaaggucaccccccagaccauggacggcauccucaaguccauccucaaggucaagcgcucccucggcauguucgucuccgacacccccggcgagcgcaaccccuacgagaacauccucuacaagaucugccucuccggcgacggcuggcccuacaucgccucccgcaccuccaucgucggccgcgccugggagaacaccaccgucgaccucgaguccgacggcaagccccagaaggucggcaccaccggcuccaacaagucccuccaguccgccggcuuccccaccggccucaccuacucccagcucaugacccucaaggacuccaugaugcagcucgaccccuccgccaagaccuggaucgacaucgagggccgccccgaggaccccgucgagaucgcccucuaccagcccauguccggcugcuacauccacuucuuccgcgagcccaccgaccucaagcaguucaagcaggacgccaaguacucccacggcaucgacgucgccgaccucuuccccgcccagcccggccucaccuccgccgucaucgaggcccucccccgcaacaugguccucaccugccagggcuccgacgacaucaagaagcuccucgacucccagggccgccgcgacaucaagcucaucgacaucgcccucuccaaggccgacucccgcaaguucgagaacgccgucugggaccagugcaaggaccucugccacaugcacaccggcgucgucgucgagaagaagaagcgcggcggcaaggaggagaucaccccccacugcgcccucauggacugcaucauguacgacgccgccgucuccggcggccucaacauccccguccuccgcgccguccucccccgcgacauggucuuccgcaccuccucccccaaggucguccucugaggacuagugcaucacauuuaaaagcaucucagccuaccaugagaauaagagaaagaaaaugaagaucaauagcuuauucaucucuuuuucuuuuucguugguguaaagccaacacccugucuaaaaaacauaaauuucuuuaaucauuuugccucuuuucucugugcuucaauuaauaaaaaauggaaagaaccuagaucuaaaaaaaaaaaaaaaaaaaaaaaaaaaaaaaaaaaaaaaaaaaaaaaaaaaaaaaaaaaaaaaaugcaucccccccccccccccccccccccccccccccaaaggcucuuuucagagccaccagaauu

SEQ ID NO: 10706 - RNA, 2092 nt, Artificial Sequence
  mRNA product Design i-2 comprising derived and/or modified sequence from LASV(LASV1000-NIG-2009;Clade II)__AIT17783__NP (opt2)
ggggcgcugccuacggagguggcagccaucuccuucucggcaucaagcuuaccauguccgccuccaaggaggucaaguccuuccucuggacccagucccuccgccgcgagcucuccggcuacugcuccaacaucaagcuccaggucgucaaggacgcccaggcccuccuccacggccucgacuucuccgaggucuccaacguccagcgccucaugcgcaagcagaagcgcgacgacuccgaccucaagcgccuccgcgaccucaaccaggccgucaacaaccucgucgagcucaaguccacccagcagaaguccauccuccgcgucggcacccucaccuccgacgaccuccucacccucgccgccgaccucgagaagcucaaguccaaggucauccgcaccgagcgcccccucuccuccggcgucuacaugggcaaccucuccacccagcagcucgagcagcgccgcgcccuccucaacaugaucggcauggucggcggcgcccagggcacccagcccggccgcgacggcgucguccgcgucugggacgucaagaaccccgaccuccucaacaaccaguucggcaccaugcccucccucacccucgccugccucaccaagcagggccaggucgaccucaacgacgucguccucgcccucaccgaccucggccucaucuacaccgccaaguaccccaacuccuccgaccucgaccgccucucccagucccaccccauccucaacauggucgacaccaagaaguccucccucaacaucuccggcuacaacuucucccucggcgccgccgucaaggccggcgccugcaugcucgacggcggcaacaugcucgagaccaucaaggucaccccccagaccauggacggcauccucaaguccauccucaaggucaagaagucccucggcauguucgucuccgacacccccggcgagcgcaaccccuacgagaacauccucuacaagaucugccucuccggcgacggcuggcccuacaucgccucccgcaccuccaucgucggccgcgccugggagaacaccaccgucgaccucgaguccgacggcaagccccagaaggucggcaccgccggcuccaacaagucccuccaguccgccggcuuccccaccggccucaccuacucccagcucaugacccucaaggacuccaugaugcagcucgaccccuccgccaagaccuggaucgacaucgagggccgccccgaggaccccgucgagaucgcccucuaccagcccgucuccggcugcuacauccacuucuuccgcgagcccaccgaccucaagcaguucaagcaggacgccaaguacucccacggcaucgacgucgccgaccucuuccccgcccagcccggccucaccuccgccgucaucgaggcccucccccgcaacaugguccucaccugccagggcuccgacgacaucaagcgccuccucgacucccagggccgccgcgacaucaagcucaucgacaucgcccucuccaaggccgacucccgccgcuucgagaacgccgucugggaccagugcaaggaccucugccacaugcacaccggcgucgucgucgagaagaagaagcgcggcggcaaggaggagaucaccccccacugcgcccucauggacugcaucauguacgacgccgccgucuccggcggccucaacauccccguccuccgcgccguccucccccgcgacauggucuuccgcaccuccucccccaaggucguccucugaggacuagugcaucacauuuaaaagcaucucagccuaccaugagaauaagagaaagaaaaugaagaucaauagcuuauucaucucuuuuucuuuuucguugguguaaagccaacacccugucuaaaaaacauaaauuucuuuaaucauuuugccucuuuucucugugcuucaauuaauaaaaaauggaaagaaccuagaucuaaaaaaaaaaaaaaaaaaaaaaaaaaaaaaaaaaaaaaaaaaaaaaaaaaaaaaaaaaaaaaaaugcaucccccccccccccccccccccccccccccccaaaggcucuuuucagagccaccagaauu

SEQ ID NO: 10707 - RNA, 2092 nt, Artificial Sequence
  mRNA product Design i-2 comprising derived and/or modified sequence from LASV(LASV221-NIG-2010;Clade II)__AIT17625__NP (opt2)
ggggcgcugccuacggagguggcagccaucuccuucucggcaucaagcuuaccauguccgccuccaaggaggucaaguccuuccucuggacccagucccuccgccgcgagcucuccggcuacugcuccuccaucaagcuccaggucgucaaggacgcccaggcccuccuccacggccucgacuucuccgaggucuccaacguccagcgccucaugcgcaagcagcgccgcgacgacuccgaccucaagcgccuccgcgaccucaaccaggccgucaacaaccucgucgagcucaaguccacccagcagaaguccauccuccgcgucggcacccucaccuccgacgaccuccucacccucgccgccgaccucgagaagcucaaguccaaggucauccgcaccgagcgcccccucuccuccggcgucuacaugggcaaccucuccacccagcagcucgagcagcgccgcgcccuccucaacaugaucggcauggucggcggcgcccagggcacccagcccggccgcgacggcgucguccgcgucugggacgucaagaaccccgaccuccucaacaaccaguucggcaccaugcccucccucacccucgccugccucaccaagcagggccaggucgaccucaacgacgccguccucgcccucaccgaccucggccucaucuacaccgccaaguaccccaacuccuccgaccucgaccgccucucccagucccaccccauccucaacauggucgacaccaagaaguccucccucaacaucuccggcuacaacuucucccucggcgccgccgucaaggccggcgccugcaugcucgacggcggcaacaugcucgagaccaucaaggucaccccccagaccgucgacggcauccucaaguccauccucaaggucaagcgcucccucggcauguucgucuccgacacccccggcgagcgcaaccccuacgagaacauccucuacaagaucugccucuccggcgacggcuggcccuacaucgccucccgcaccuccaucgucggccgcgccugggagaacaccaccgucgaccucgaguccgacggcaagccccagaaggucggcaccgccggcuccaacaagucccuccaguccgccggcuuccccaccggccucaccuacucccagcucaugacccucaaggacuccaugaugcagcucgaccccuccgccaagaccuggaucgacaucgagggccgccccgaggaccccgucgagaucgcccucuaccagcccauguccggcugcuacauccacuucuuccgcgagcccaccgaccucaagcaguucaagcaggacgccaaguacucccacggcaucgacgucgccgaccucuuccccgcccagcccggccucaccuccgccgucaucgaggcccucccccgcaacaugguccucaccugccagggcuccgacgacaucaagcgccuccucgacucccagggccgccgcgacaucaagcucaucgacaucgcccucuccaaggccgacucccgcaaguucgagaacgccgucugggaccagugcaaggaccucugccacaugcacaccggcgucgucgucgagaagaagaagcgcggcggcaaggaggagaucaccccccacugcgcccucauggacugcaucauguacgacgccgccgucuccggcggccucaacauccccguccuccgcgccguccucccccgcgacauggucuuccgcaccuccucccccaaggucguccucugaggacuagugcaucacauuuaaaagcaucucagccuaccaugagaauaagagaaagaaaaugaagaucaauagcuuauucaucucuuuuucuuuuucguugguguaaagccaacacccugucuaaaaaacauaaauuucuuuaaucauuuugccucuuuucucugugcuucaauuaauaaaaaauggaaagaaccuagaucuaaaaaaaaaaaaaaaaaaaaaaaaaaaaaaaaaaaaaaaaaaaaaaaaaaaaaaaaaaaaaaaaugcaucccccccccccccccccccccccccccccccaaaggcucuuuucagagccaccagaauu

SEQ ID NO: 10708 - RNA, 2092 nt, Artificial Sequence
  mRNA product Design i-2 comprising derived and/or modified sequence from LASV(LASV237-NIG-2010;Clade II)__AIT17639__NP (opt2)
ggggcgcugccuacggagguggcagccaucuccuucucggcaucaagcuuaccauguccgccuccaaggaggucaaguccuuccucuggacccagucccuccgccgcgagcucuccggcuacugcuccaacaucaagcuccaggucgucaaggacgcccaggcccuccuccacggccucgacuucuccgaggucuccaacguccagcgccucaugcgcaagcagaagcgcgacgacuccgaccucaagcgccuccgcgaccucaaccaggccgucaacaaccucgucgagcucaaguccacccagcagaaguccauccuccgcgucggcacccucaccuccgacgaccuccucacccucgccgccgaccucgagaagcucaaguccaaggucauccgcaccgagcgcccccucuccuccggcgucuacaugggcaaccucuccacccagcagcucgagcagcgccgcgcccuccucaacaugaucggcauggucggcggcgcccagggcacccagcccggccgcgacggcgucguccgcgucugggacgucaagaaccccgaccuccucaacaaccaguucggcaccaugcccucccucacccucgccugccucaccaagcagggccaggucgaccucaacgacgccguccucgcccucaccgaccucggccucaucuacaccgccaaguaccccaacuccuccgaccucgaccgccucucccagucccaccccauccucaacauggucgacaucaagaaguccucccucaacaucuccggcuacaacuucucccucggcgccgccgucaaggccggcgccugcaugcucgacggcggcaacaugcucgagaccaucaaggucaccccccagaccauggacggcauccucaaguccauccucaaggucaagcgcucccucggcauguucgucuccgacacccccggcgagcgcaaccccuacgagaacauccucuacaagaucugccucuccggcgacggcuggcccuacaucgccucccgcaccuccaucgucggccgcgccugggagaacaccaccgucgaccucgaguccgacggcaagccccagaaggucggcuccgccggcuccaacaagucccuccaguccgccggcuuccccaccggccucaccuacucccagcucaugacccucaaggacuccaugaugcagcucgaccccuccgccaagaccuggaucgacaucgagggccgccccgaggaccccgucgagaucgcccucuaccagcccauguccggcugcuacauccacuucuuccgcgagcccaccgaccucaagcaguucaagcaggacgccaaguacucccacggcaucgacgucgccgaccucuuccccgcccagcccggccucaccuccgccgucaucgaggcccucccccgcaacaugguccucaccugccagggcuccgacgacaucaagcgccuccucgacucccagggccgccgcgacaucaagcucaucgacaucgcccucuccaaggccgacucccgccgcuucgagaacgccgucugggaccagugcaaggaccucugccacaugcacaccggcgucgucgucgagaagaagaagcgcggcggcaaggaggagaucaccccccacugcgcccucauggacugcaucauguacgacgccgccgucuccggcggccucaacauccccguccuccgcgccguccucccccgcgacauggucuuccgcaccuccucccccaaggucguccucugaggacuagugcaucacauuuaaaagcaucucagccuaccaugagaauaagagaaagaaaaugaagaucaauagcuuauucaucucuuuuucuuuuucguugguguaaagccaacacccugucuaaaaaacauaaauuucuuuaaucauuuugccucuuuucucugugcuucaauuaauaaaaaauggaaagaaccuagaucuaaaaaaaaaaaaaaaaaaaaaaaaaaaaaaaaaaaaaaaaaaaaaaaaaaaaaaaaaaaaaaaaugcaucccccccccccccccccccccccccccccccaaaggcucuuuucagagccaccagaauu

SEQ ID NO: 10709 - RNA, 2092 nt, Artificial Sequence
  mRNA product Design i-2 comprising derived and/or modified sequence from LASV(LASV253-NIG-2011;Clade II)__AIT17671__NP (opt2)
ggggcgcugccuacggagguggcagccaucuccuucucggcaucaagcuuaccauguccgccuccaaggaggucaaguccuuccucuggacccagucccuccgccgcgagcucuccggcuacugcuccuccaucaagcuccaggucgucaaggacgcccaggcccuccuccacggccucgacuucuccgaggucuccaacguccagcgccucaugcgcaagcagaagcgcgacgacuccgaccucaagcgccuccgcgaccucaaccaggccgucaacaaccucgucgagcucaaguccacccagcagaaguccguccuccgcgucggcacccucaccuccgacgaccuccucacccucgccgccgaccucgagaagcucaaguccaaggucauccgcaccgagcgcccccucuccuccggcgucuacaugggcaaccucuccacccagcagcucgagcagcgccgcgcccuccucaacaugaucggcauggucggcggcgcccagggcacccagcccggccgcgacggcgucguccgcgucugggacgucaagaaccccgaccuccucaacaaccaguucggcaccaugcccucccucacccucgccugccucaccaagcagggccaggucgaccucaacgacgucguccucgcccucaccgaccucggccucaucuacaccgccaaguaccccaacuccuccgaccucgaccgccucucccagucccaccccauccucaacauggucgacaccaagaaguccucccucaacaucuccggcuacaacuucucccucggcgccgccgucaaggccggcgccugcaugcucgacggcggcaacaugcucgagaccaucaaggucaccccccagaccauggacggcauccucaaguccauccucaaggucaagaagucccucggcauguucgucuccgacacccccggcgagcgcaaccccuacgagaacauccucuacaagaucugccucuccggcgacggcuggcccuacaucgccucccgcaccuccaucgucggccgcgccugggagaacaccaccgucgaccucgaguccgacggcaagccccagaaggucggcaccgccggcuccaacaagucccuccaguccgccggcuuccccaccggccucaccuacucccagcucaugacccucaaggacuccaugaugcagcucgaccccuccgccaagaccuggaucgacaucgagggccgccccgaggaccccgucgagaucgcccucuaccagcccauguccggcugcuacauccacuucuuccgcgagcccaccgaccucaagcaguucaagcaggacgccaaguacucccacggcaucgacgucaccgaccucuuccccgcccagcccggccucaccuccgccgucaucgaggcccucccccgcaacaugguccucaccugccagggcuccgacgacaucaagcgccuccucgacucccagggccgccgcgacaucaagcucaucgacaucgcccucuccaaggccgacucccgccgcuucgagaacgccgucugggaccagugcaaggaccucugccacaugcacaccggcgucgucgucgagaagaagaagcgcggcggcaaggaggagaucaccccccacugcgcccucauggacugcaucauguacgacgccgccgucuccggcggccucaacauccccguccuccgcgccguccucccccgcgacauggucuuccgcaccuccucccccaaggucguccucugaggacuagugcaucacauuuaaaagcaucucagccuaccaugagaauaagagaaagaaaaugaagaucaauagcuuauucaucucuuuuucuuuuucguugguguaaagccaacacccugucuaaaaaacauaaauuucuuuaaucauuuugccucuuuucucugugcuucaauuaauaaaaaauggaaagaaccuagaucuaaaaaaaaaaaaaaaaaaaaaaaaaaaaaaaaaaaaaaaaaaaaaaaaaaaaaaaaaaaaaaaaugcaucccccccccccccccccccccccccccccccaaaggcucuuuucagagccaccagaauu

SEQ ID NO: 10710 - RNA, 2092 nt, Artificial Sequence
  mRNA product Design i-2 comprising derived and/or modified sequence from LASV(LASV254-NIG-2011;Clade II)__AIT17675__NP (opt2)
ggggcgcugccuacggagguggcagccaucuccuucucggcaucaagcuuaccauguccgccuccaaggaggucaaguccuuccucuggacccagucccuccgccgcgagcucuccggcuacugcuccuccaucaagcuccaggucgucaaggacgcccaggcccuccuccacggccucgacuucuccgaggucuccaacguccagcgccucaugcgcaagcagaagcgcgacgacuccgaccucaagcgccuccgcgaccucaaccaggccgucaacaaccucgucgagcucaaguccacccagcagaaguccguccuccgcgucggcacccucaccuccgacgaccuccucacccucgccgccgaccucgagaagcucaaguccaaggucauccgcaccgagcgcccccucuccuccggcgucuacaugggcaaccucuccacccagcagcucgagcagcgccgcgcccuccucaacaugaucggcauggucggcggcgcccagggcacccagcccggccgcgacggcgucguccgcgucugggacgucaagaaccccgaccuccucaacaaccaguucggcaccaugcccucccucacccucgccugccucaccaagcagggccaggucgaccucaacgacgccguccucgcccucaccgaccucggccucaucuacaccgccaaguaccccaacuccuccgaccucgaccgccucucccagucccaccccauccucaacauggucgacaccaagaaguccucccucaacaucuccggcuacaacuucucccucggcgccgccgucaaggccggcgccugcaugcucgacggcggcaacaugcucgagaccaucaaggucaccccccagaccauggacggcauccucaaguccauccucaaggucaagaagucccucggcauguucgucuccgacacccccggcgagcgcaaccccuacgagaacauccucuacaagaucugccucuccggcgacggcuggcccuacaucgccucccgcaccuccaucgucggccgcgccugggagaacaccaucgucgaccucgaguccgacggcaagccccagaaggucggcaccgccggcuccaacaagucccuccaguccgccggcuuccccaccggccucaccuacucccagcucaugacccucaaggacuccaugaugcagcucgaccccuccgccaagaccuggaucgacaucgagggccgccccgaggaccccgucgagaucgcccucuaccagcccauguccggcugcuacauccacuucuuccgcgagcccaccgaccucaagcaguucaagcaggacgccaaguacucccacggcaucgacgucgccgaccucuuccccgcccagcccggccucaccuccgccgucaucgaggcccucccccgcaacaugguccucaccugccagggcuccgacgacaucaagcgccuccucgacucccagggccgccgcgacaucaagcucaucgacaucgcccucuccaaggccgacucccgccgcuucgagaacgccgucugggaccagugcaaggaccucugccacaugcacaccggcgucgucgucgagaagaagaagcgcggcggcaaggaggagaucaccccccacugcgcccucauggacugcaucauguacgacgccgccgucuccggcggccucaacauccccguccuccgcgccguccucccccgcgacauggucuuccgcaccuccucccccaaggucguccucugaggacuagugcaucacauuuaaaagcaucucagccuaccaugagaauaagagaaagaaaaugaagaucaauagcuuauucaucucuuuuucuuuuucguugguguaaagccaacacccugucuaaaaaacauaaauuucuuuaaucauuuugccucuuuucucugugcuucaauuaauaaaaaauggaaagaaccuagaucuaaaaaaaaaaaaaaaaaaaaaaaaaaaaaaaaaaaaaaaaaaaaaaaaaaaaaaaaaaaaaaaaugcaucccccccccccccccccccccccccccccccaaaggcucuuuucagagccaccagaauu

SEQ ID NO: 10711 - RNA, 2092 nt, Artificial Sequence
  mRNA product Design i-2 comprising derived and/or modified sequence from LASV(Nig08-04;Clade II)__ADU56611__NP (opt2)
ggggcgcugccuacggagguggcagccaucuccuucucggcaucaagcuuaccauguccgccuccaaggaggucaaguccuuccucuggacccagucccuccgccgcgagcucuccggcuacugcuccaacaucaagcuccaggucgucaaggacgcccaggcccuccuccacggccucgacuucuccgaggucuccaacguccagcgccucaugcgcaagcagaagcgcgacgacggcgaccucaagcgccuccgcgaccucaaccaggccgucaacaaccucgucgagcucaaguccacccagcagaaguccguccuccgcgucggcacccucaccuccgacgaccuccucacccucgccgccgaccucgagaagcucaaguccaaggucauccgcaccgagcgcccccucuccuccggcgucuacaugggcaaccucuccacccagcagcucgagcagcgcaaggcccuccucuccaugaucggcauggucggcggcgcccagggcacccagcccggccgcgacggcgucguccgcgucugggacgucaagaaccccgaccuccucaacaaccaguucggcaccaugcccucccucacccucgccugccucaccaagcagggccaggucgaccucaacgacgccguccucgcccucaccgaccucggccucaucuacaccgccaaguaccccaacuccuccgaccucgaccgccucucccagucccaccccauccucaacauggucgacaccaagaaguccucccucaacaucuccggcuacaacuucucccucggcgccgccgucaaggccggcgccugcaugcucgacggcggcaacaugcucgagaccaucaaggucaccccccagaccauggacggcauccucaaguccauccucaaggucaagcgcucccucggcauguucgucuccgacacccccggcgagcgcaaccccuacgagaacauccucuacaagaucugccucuccggcgacggcuggcccuacaucgccucccgcaccuccaucgucggccgcgccugggagaacaccaccgucgaccucgaguccgacggcaagccccagaaggucggcaccgccggcuccaacaagucccuccaguccgccggcuuccccaccggccucaccuacucccagcucaugacccucaaggacuccaugaugcagcucgaccccuccgccaagaccuggaucgacaucgagggccgccccgaggaccccgucgagaucgcccucuaccagcccauguccggcugcuacauccacuucuuccgcgagcccaccgaccucaagcaguucaagcaggacgccaaguacucccacggcaucgacgucaccgaccucuucuccgcccagcccggccucaccuccgccgucaucgaggcccucccccgcaacaugguccucaccugccagggcuccgacgacaucaagaagcuccucgacucccagggccgccgcgacaucaagcucaucgacaucucccucaacaaggccgacucccgccgcuucgagaacgccgucugggaccagugcaaggaccucugccacaugcacaccggcgucgucgucgagaagaagaagcgcggcggcaaggaggagaucaccccccacugcgcccucauggacugcaucauguucgacgccgccgucuccggcggccucaacauccccauccuccgcgccguccucccccgcgacauggucuuccgcaccuccucccccaaggucguccucugaggacuagugcaucacauuuaaaagcaucucagccuaccaugagaauaagagaaagaaaaugaagaucaauagcuuauucaucucuuuuucuuuuucguugguguaaagccaacacccugucuaaaaaacauaaauuucuuuaaucauuuugccucuuuucucugugcuucaauuaauaaaaaauggaaagaaccuagaucuaaaaaaaaaaaaaaaaaaaaaaaaaaaaaaaaaaaaaaaaaaaaaaaaaaaaaaaaaaaaaaaaugcaucccccccccccccccccccccccccccccccaaaggcucuuuucagagccaccagaauu

SEQ ID NO: 10712 - RNA, 2095 nt, Artificial Sequence
  mRNA product Design i-2 comprising derived and/or modified sequence from LASV(GA391;Clade III)__AAA46284__NP (opt2)
ggggcgcugccuacggagguggcagccaucuccuucucggcaucaagcuuaccauguccgccuccaaggagguccgcuccugccucuggacccagucccuccgccgcgagcucuccggcuacugcuccaacaucaagcuccaggucgucaaggacgcccaggcccuccuccacggccucgacuucuccgaggucuccaacguccagcgccucaugcgcaagcagaagcgcgacgacggcgaccucaagcgccuccgcgaccucaaccaggccgucaacaaccucgucgagcucaaguccacccagcagaaguccguccuccgcgucggcacccucuccuccgacgaccuccucauccucgccgccgaccucgagaagcucaaguccaaggucacccgcaccgagcgcccccucuccuccggcgucuacaugggcaaccucuccucccagcagcucgaccagcgccgcgcccuccucaacaugaucggcaugaccggcgucuccggcggcggcaagggcgccuccaacggcaucguccgcgucugggacgucaagaacgccgagcuccucaacaaccaguucggcaccaugcccucccucacccucgccugccucaccaagcagggccaggucgaccucaacgacgccguccaggcccucaccgaccucggccucaucuacaccgccaaguaccccaacuccuccgaccucgaccgccucucccagucccaccccauccucaacaugaucgacaccaagaaguccucccucaacaucuccggcuacaacuucucccucggcgccgccgucaaggccggcgccugcaugcucgacggcggcaacaugcucgagaccaucaaggucuccccccagaccauggacggcauccucaaguccauccucaaggucaagaagucccucggcauguucgucuccgacacccccggcgagcgcaaccccuacgagaacauccucuacaagaucugccucuccggcgacggcugguccuacaucgccucccgcaccuccaucgucggccgcgccugggagaacaccgucgucgaccucgagcaggacaacaagccccagaagaucggcaacggcggcuccaacaagucccuccaguccgccggcuucgccgccggccucaucuacucccagcucaugacccucaaggacuucaagugcuucaaccucauccccaacgccaagaccuggauggacaucgagggccgccccgaggaccccgucgagaucgcccucuaccagcccuccuccggcugcuacguccacuucuuccgcgagcccaccgaccucaagcaguucaagcaggacgccaaguacucccacggccgcgacgucaccgaccucuucgccgcccagcccggccucaccuccgccgucaucgaggcccucccccgcaacauggucaucaccugccagggcuccgaggacauccgcaagcuccucgagucccagggccgccgcgacaucaagcucaucgacaucacccucuccaaggccgacucccgcaaguucgagaacgccgucugggaccaguucaaggaccucugccacaugcacaccggcgucgucgucgagaagaagaagcgcggcggcaaggaggagaucaccccccacugcgcccucauggacugcaucauguucgacgccgccgucuccggcggccucgacgccaagguccuccgcgucguccucccccgcgacauggucuuccgcaccuccacccccaaggucguccucugaggacuagugcaucacauuuaaaagcaucucagccuaccaugagaauaagagaaagaaaaugaagaucaauagcuuauucaucucuuuuucuuuuucguugguguaaagccaacacccugucuaaaaaacauaaauuucuuuaaucauuuugccucuuuucucugugcuucaauuaauaaaaaauggaaagaaccuagaucuaaaaaaaaaaaaaaaaaaaaaaaaaaaaaaaaaaaaaaaaaaaaaaaaaaaaaaaaaaaaaaaaugcaucccccccccccccccccccccccccccccccaaaggcucuuuucagagccaccagaauu

SEQ ID NO: 10713 - RNA, 2092 nt, Artificial Sequence
  mRNA product Design i-2 comprising derived and/or modified sequence from LASV(Nig08-A19;Clade III)__ADU56619__NP (opt2)
ggggcgcugccuacggagguggcagccaucuccuucucggcaucaagcuuaccauguccgccuccaaggaggucaaguccuuccucuggacccagucccuccgccgcgagcucuccggcuacugcuccaacaucaagcuccaggucgucaaggacgcccaggcccuccuccacggccucgacuucuccgaggucuccaacguccagcgccucaugcgcaagcagaagcgcgacgacggcgaccucaagcgccuccgcgaccucaaccaggccgucaacaaccucgucgagcucaaguccacccagcagaaguccguccuccgcgucggcacccucuccuccgacgaccuccucguccucgccgccgaccucgagaagcucaaguccaaggucguccgcaccgagcgcccccucuccuccggcaucuacaugggcaaccucuccucccagcagcucgaccagcgcaaggcccuccucaacaugaucggcaugaccggcggcaacggcggccgcaacaccaccuccgacggcaucguccgcgucugggacgucaagaacgccgagcuccucaacaaccaguucggcaccaugcccucccucacccucgccugccucaccaagcagggccaggucgaccucaacgacgccguccaggcccucaccgaccucggccucaucuacaccgccaaguaccccaacuccuccgaccucgaccgccucgcccagucccaccccauccucaacaugaucgacaccaagaaguccucccucaacaucuccggcuacaacuucucccucggcgccgccgucaaggccggcgccugcaugcucgacggcggcaacaugcucgagaccaucaaggucuccccccagaccauggacggcauccucaaguccauccucaaggucaagcgcucccucggcauguucaucuccgacacccccggcgagcgcaaccccuacgagaacauccucuacaagaucugccucuccggcgacggcuggcccuacaucgccucccgcaccuccaucgucggccgcgccugggagaacaccgucgucgaccucgaguccgacaacaagccccagaagaccggcaacggcggcuccaacaagucccuccaguccgccggcuucgccgccggccucaccuacucccagcucaugacccucaaggacuccaugcuccagcucgaccccaacgccaagaccuggauggacaucgagggccgccccgaggaccccgucgagaucgcccucuaccagcccuccuccggcugcuacauccacuucuuccgcgagcccaccgaccucaagcaguucaagcaggacgccaaguacucccacggcaucgacgucaccgaccucuucgccgcccagcccggccucaccuccgccgucaucgaggcccucccccgcaacauggucaucaccugccagggcuccgaggacauccgcaagcuccucgagucccagggccgccgcgacaucaagcucaucgacaucucccucuccaaggucgacucccgcaaguucgagaacgccgucugggaccaguucaaggaccucugccacaugcacaccggcaucgucgucgagaagaagaagcgcggcggcaaggaggagaucaccccccacugcgcccucauggacugcaucauguucgacgccgccgucuccggcggcgucgacgccaagguccuccgcgccguccucccccgcgacauggucuuccgcaccuccacccccaaggucguccucugaggacuagugcaucacauuuaaaagcaucucagccuaccaugagaauaagagaaagaaaaugaagaucaauagcuuauucaucucuuuuucuuuuucguugguguaaagccaacacccugucuaaaaaacauaaauuucuuuaaucauuuugccucuuuucucugugcuucaauuaauaaaaaauggaaagaaccuagaucuaaaaaaaaaaaaaaaaaaaaaaaaaaaaaaaaaaaaaaaaaaaaaaaaaaaaaaaaaaaaaaaaugcaucccccccccccccccccccccccccccccccaaaggcucuuuucagagccaccagaauu

SEQ ID NO: 10714 - RNA, 2092 nt, Artificial Sequence
  mRNA product Design i-2 comprising derived and/or modified sequence from LASV(G1180-SLE-2010;Clade IV)__AIT17169__NP (opt2)
ggggcgcugccuacggagguggcagccaucuccuucucggcaucaagcuuaccauguccgccuccaaggagaucaaguccuuccucuggacccagucccuccgccgcgagcucuccggcuacugcuccaacaucaagcuccaggucgucaaggacgcccaggcccuccuccacggccucgacuucuccgaggucuccaacguccagcgccucaugcgcaaggagcgccgcgacgacaacgaccucaagcgccuccgcgaccucaaccaggccgucaacaaccucgucgagcucaaguccacccagcagaaguccauccuccgcgucggcacccucaccuccgacgaccuccucauccucgccgccgaccucgagaagcucaaguccaaggucauccgcaccgagcgcccccucuccgccggcgucuacaugggcaaccucuccucccagcagcucgaccagcgccgcgcccuccucuccaugaucggcauguccuccggcaaccagcgcgcccaggccggccgcgacggcgucguccgcgucugggacgucaagaacgucgagcuccucaacaaccaguucggcaccaugcccucccucacccucgccugccucaccaagcagggccaggucgaccucaacgacgccguccaggcccucaccgaccucggccucaucuacaccgccaaguaccccaacaccuccgaccucgaccgccucacccagucccaccccauccucaacaugaucgacaccaagaaguccucccucaacaucuccggcuacaacuucucccucggcgccgccgucaaggccggcgccugcaugcucgacggcggcaacaugcucgagaccaucaaggucuccccccagaccauggacggcauccucaaguccauccucaaggucaagaaggcccucggcauguucaucuccgacacccccggcgagcgcaaccccuacgagaacauccucuacaagaucugccucuccggcgacggcuggcccuacaucgccucccgcaccuccaucaccggccgcgccugggagaacaccgucgucgaccucgaguccgacggcaagccccagaaggccggcuccaacaacuccaacaagucccuccaguccgucggcuucaccgccggccucaccuacucccagcucaugacccucaaggacgccaugcuccagcucgaccccaacgccaagaccuggauggacaucgagggccgccccgaggaccccgucgagaucgcccucuaccagcccuccuccggcugcuacauccacuucuuccgcgagcccaccgaccucaagcaguucaagcaggacgccaaguacucccacggcaucgacgucaccgaccucuucgccgcccagcccggccucaccuccgccgucaucgacgcccucccccgcaacauggucaucaccugccagggcuccgacgacauccgcaagcuccucgagucccagggccgcaaggacaucaagcucaucgacaucgcccucuccaagaccgacucccgcaaguacgagaacgccgucugggaccaguacaaggaccucugccacaugcacaccggcgucgucgucgagaagaagaagcgcggcggcaaggaggagaucaccccccacugcgcccucauggacugcaucauguucgacgccgccgucuccggcggccucaacaccuccguccuccgcgccguccucccccgcgacauggucuuccgcaccuccaccccccgcgucguccucugaggacuagugcaucacauuuaaaagcaucucagccuaccaugagaauaagagaaagaaaaugaagaucaauagcuuauucaucucuuuuucuuuuucguugguguaaagccaacacccugucuaaaaaacauaaauuucuuuaaucauuuugccucuuuucucugugcuucaauuaauaaaaaauggaaagaaccuagaucuaaaaaaaaaaaaaaaaaaaaaaaaaaaaaaaaaaaaaaaaaaaaaaaaaaaaaaaaaaaaaaaaugcaucccccccccccccccccccccccccccccccaaaggcucuuuucagagccaccagaauu

SEQ ID NO: 10715 - RNA, 2092 nt, Artificial Sequence
  mRNA product Design i-2 comprising derived and/or modified sequence from LASV(G1442-SLE-2011;Clade IV)__AIT17181__NP (opt2)
ggggcgcugccuacggagguggcagccaucuccuucucggcaucaagcuuaccauguccgccuccaaggaggucaaguccuuccucuggacccagucccuccgccgcgagcucuccggcuacugcuccaacaucaagcuccaggucgucaaggacgcccaggcccuccuccacggccucgacuucuccgaggucuccaacguccagcgccucaugcgcaagcagcgccgcgacgacaacgaccucaagcgccuccgcgaccucaaccaggccgucaacaaccucgucgagcucaaguccacccagcagaaguccguccuccgcgucggcacccucaccuccgacgaccuccucguccucgccgccgaccucgagaagcucaaguccaaggucauccgcaccgagcgcccccucuccgccggcgucuacaugggcaaccucuccucccagcagcucgaccagcgccgcgcccuccucaacaugaucggcauguccggcggcauccagggcacccgcaccggccgcgacggcgucguccgcgucugggacgucaagaacgccgaccuccucaacaaccaguucggcaccaugcccucccucacccucgccugccucaccaagcagggccaggucgaccucaacgacgucguccaggcccucaccgaccucggccucaucuacaccgccaaguaccccaacgccuccgaccucgaccgccucacccagucccaccccauccucaacaugaucgacaccaagaaguccucccucaacaucuccggcuacaacuucucccucggcgccgccgucaaggccggcgccugcaugcucgacggcggcaacaugcucgagaccaucaaggucuccccccagaccauggacggcauccucaaguccauccucaaggucaagaagacccucggcauguucaucuccgacacccccggcgagcgcaaccccuacgagaacauccucuacaagaucugccucuccggcgacggcuggcccuacaucgccucccgcaccuccaucaccggccgcgccugggagaacaccgucgucgaccucgaguccgacggcaagccccagaaggccggcuccaacaacuccaacaagucccuccaguccgccggcuucgccgccggccucaccuacucccagcucaugacccucaaggacgccaugcuccagcucgaccccaacgccaagaccuggauggacaucgagggccgccccgaggaccccgucgagaucgcccucuaccagcccuccuccggcugcuacauccacuucuuccgcgagcccaccgaccucaagcaguucaagcaggacgccaaguacucccacggcaucgacgucaccgaccucuucgccgcccagcccggccucaccuccgccgucaucgaggcccucccccgcaacauggucaucaccugccagggcuccgacgacaucaagaagcuccucgagucccagggccgcaaggacaucaagcucaucgacaucgcccucuccaagaccgacucccgcaaguacgagaacgccgucugggaccaguacaaggaccucugccacaugcacaccggcgucgucgucgagaagaagaagcgcggcggcaaggaggagaucaccccccacugcgcccucauggacugcaucauguucgacgccgccgucuccggcggccucaacacccucguccuccgcgccguccucccccgcgacauggucuuccgcaccuccaccccccgcgucguccucugaggacuagugcaucacauuuaaaagcaucucagccuaccaugagaauaagagaaagaaaaugaagaucaauagcuuauucaucucuuuuucuuuuucguugguguaaagccaacacccugucuaaaaaacauaaauuucuuuaaucauuuugccucuuuucucugugcuucaauuaauaaaaaauggaaagaaccuagaucuaaaaaaaaaaaaaaaaaaaaaaaaaaaaaaaaaaaaaaaaaaaaaaaaaaaaaaaaaaaaaaaaugcaucccccccccccccccccccccccccccccccaaaggcucuuuucagagccaccagaauu

SEQ ID NO: 10716 - RNA, 2092 nt, Artificial Sequence
  mRNA product Design i-2 comprising derived and/or modified sequence from LASV(G3010-SLE-2013;Clade IV)__AIT17345__NP (opt2)
ggggcgcugccuacggagguggcagccaucuccuucucggcaucaagcuuaccauguccgccuccaaggagaucaaguccuuccucuggacccagucccuccgccgcgagcucuccggcuacugcuccaacaucaagcuccaggucgucaaggacgcccaggcccuccuccacggccucgacuucuccgaggucuccaacguccagcgccucaugcgcaaggagcgccgcgacgacaacgaccucaagcgccuccgcgaccucaaccaggccgucaacaaccucgucgagcucaaguccacccagcagaaguccauccuccgcgucggcacccucaccuccgacgaccuccucauccucgccgccgaccucgagaagcucaaguccaaggucacccgcaccgagcgcccccucuccgccggcgucuacaugggcaaccucuccucccagcagcucgaccagcgccgcgcccuccucuccaugaucggcauguccuccggcguccagggcgcccgcgccggccgcgacggcgucguccgcgucugggacgucaagaacgccgagcuccucaacaaccaguucggcaccaugcccucccucacccucgccugccucaccaagcagggccaggucgaccucaacgacgucguccaggcccucaccgaccucggccucaucuacaccgccaaguaccccaacaccuccgaccucgaccgccucacccagucccaccccauccucaacaugaucgacaccaagaaguccucccucaacaucuccggcuacaacuucucccucggcgccgccgucaaggccggcgccugcaugcucgacggcggcaacaugcucgagaccaucaaggucuccccccagaccauggacggcauccucaaguccauccucaaggucaagaaggcccucggcauguucaucuccgagacccccggcgagcgcaaccccuacgagaacauccucuacaagaucugccucuccggcgacggcuggcccuacaucgccucccgcaccuccaucaccggccgcgccugggagaacaccgucgucgaccucgaguccgacggcaagccccagaaggccggcuccaacaacuccaacaagucccuccaguccgccggcuucaccgccggccucaccuacucccagcucaugacccucaaggacgccaugcuccagcucgaccccaacgccaagaccuggauggacaucgagggccgccccgaggaccccgucgaggucgcccucuaccagcccuccuccggcugcuacauccacuucuuccgcgagcccaccgaccucaagcaguucaagcaggacgccaaguacucccacggcaucgacgucaccgaccucuucgccgcccagcccggccucaccuccgccgucaucgacgcccucccccgcaacauggucaucaccugccagggcuccgacgacaucaagaagcuccucgagucccagggccgcaaggacaucaagcucaucgacaucgcccucuccaagaccgacucccgcaaguacgagaacgccgucugggaccaguacaaggaccucugccacaugcacaccggcgucgucgucgagaagaagaagcgcggcggcaaggaggagaucaccccccacugcgcccucauggacugcaucauguucgacgccgccgucuccggcggccucaacaccuccguccuccgcgccguccucccccgcgacauggucuuccgcaccuccaccccccgcgucguccucugaggacuagugcaucacauuuaaaagcaucucagccuaccaugagaauaagagaaagaaaaugaagaucaauagcuuauucaucucuuuuucuuuuucguugguguaaagccaacacccugucuaaaaaacauaaauuucuuuaaucauuuugccucuuuucucugugcuucaauuaauaaaaaauggaaagaaccuagaucuaaaaaaaaaaaaaaaaaaaaaaaaaaaaaaaaaaaaaaaaaaaaaaaaaaaaaaaaaaaaaaaaugcaucccccccccccccccccccccccccccccccaaaggcucuuuucagagccaccagaauu

SEQ ID NO: 10717 - RNA, 2092 nt, Artificial Sequence
  mRNA product Design i-2 comprising derived and/or modified sequence from LASV(G502-SLE-2009;Clade IV)__AIT17127__NP (opt2)
ggggcgcugccuacggagguggcagccaucuccuucucggcaucaagcuuaccauguccgccuccaaggagaucaaguccuuccucuggacccagucccuccgccgcgagcucuccggcuacugcuccaacaucaagcuccaggucgucaaggacgcccaggcccuccuccacggccucgacuucuccgaggucuccaacguccagcgccucaugcgcaaggagcgccgcgacgacaacgaccucaagcgccuccgcgaccucaaccaggccgucaacaaccucgucgagcucaaguccacccagcagaaguccauccuccgcgucggcacccucaccuccgacgaccuccucauccucgccgccgaccucgagaagcucaaguccaaggucauccgcaccgagcgcccccucuccgccggcgucuacaugggcaaccucuccucccagcagcucgaccagcgccgcgcccuccucuccaugaucggcauguccggcggcaaccagggcguccgcgccggcaaggacggcgucguccgcgucugggacgucaagaacgccgagcuccucaacaaccaguucggcaccaugcccucccucacccucgccugccucaccaagcagggccaggucgaccucaacgacgccguccaggcccucaccgaccucggccucaucuacaccgccaaguaccccaacaccuccgaccucgaccgccucacccagucccaccccauccucaacaugaucgacaccaagaaguccucccucaacaucuccggcuacaacuucucccucggcgccgccgucaaggccggcgccugcaugcucgacggcggcaacaugcucgagaccaucaaggucuccccccagaccauggacggcauccucaaguccauccucaaggucaagaaggcccucggcauguucaucuccgacacccccggcgagcgcaaccccuacgagaacauccucuacaagaucugccucuccggcgacggcuggcccuacaucgccucccgcaccuccaucaccggccgcgccugggagaacaccgucgucgaccucgaguccgacggcaagccccagaaggccggcuccaacaacuccaacaagucccuccaguccgccggcuucaccgccggccucaccuacucccagcucaugacccucaaggacgccaugcuccagcucgaccccaacaccaagaccuggauggacaucgagggccgccccgaggaccccgucgagaucgcccucuaccagcccuccuccggcugcuacauccacuucuuccgcgagcccaccgaccucaagcaguucaagcaggacgccaaguacucccacggcaucgacgucaccgaccucuucgccgcccagcccggccucaccuccgccgucaucgacgcccucccccgcaacauggucaucaccugccagggcuccgacgacauccgcaagcuccucgagucccagggccgcaaggacaucaagcucaucgacaucgcccucaacaagaccgacucccgcaaguacgagaacgccgucugggaccaguacaaggaccucugccacaugcacaccggcgucgucgucgagaagaagaagcgcggcggcaaggaggagaucaccccccacugcgcccucauggacugcaucauguucgacgccgccgucuccggcggccucaacaccuccguccuccgcgccguccucccccgcgacauggucuuccgcaccuccaccccccgcgucguccucugaggacuagugcaucacauuuaaaagcaucucagccuaccaugagaauaagagaaagaaaaugaagaucaauagcuuauucaucucuuuuucuuuuucguugguguaaagccaacacccugucuaaaaaacauaaauuucuuuaaucauuuugccucuuuucucugugcuucaauuaauaaaaaauggaaagaaccuagaucuaaaaaaaaaaaaaaaaaaaaaaaaaaaaaaaaaaaaaaaaaaaaaaaaaaaaaaaaaaaaaaaaugcaucccccccccccccccccccccccccccccccaaaggcucuuuucagagccaccagaauu

SEQ ID NO: 10718 - RNA, 2092 nt, Artificial Sequence
  mRNA product Design i-2 comprising derived and/or modified sequence from LASV(G733-SLE-2010;Clade IV)__AIT17155__NP (opt2)
ggggcgcugccuacggagguggcagccaucuccuucucggcaucaagcuuaccauguccgccuccaaggagaucaaguccuuccucuggacccagucccuccgccgcgagcucuccggcuacugcuccaacaucaagcuccaggucgucaaggacgcccaggcccuccuccacggccucgacuucuccgaggucuccaacguccagcgccucaugcgcaaggagcgccgcgacgacaacgaccucaagcgccuccgcgaccucaaccaggccgucaacaaccucgucgagcucaaguccacccagcagaaguccguccuccgcgucggcacccucaccuccgacgagcuccucguccucgccgccgaccucgagaagcucaaguccaaggucauccgcaccgagcgcccccucuccgccggcgucuacaugggcaaccucuccucccagcagcucgaccagcgccgcgcccuccucuccaugaucggcauguccggcggcaaccagggcgcccgcaccggccgcgacggcgucguccgcgucugggacgucaagaacgccgagcuccucaacaaccaguucggcaccaugcccucccucacccucgccugccucaccaagcagggccaggucgaccucaacgacgccguccaggcccucaccgaccucggccucaucuacaccgccaaguaccccaacaccuccgaccucgaccgccucacccagucccaccccauccucaacaugaucgacaccaagaaguccucccucaacaucuccggcuacaacuucucccucggcgccgccgucaaggccggcgccugcaugcucgacggcggcaacaugcucgagaccaucaaggucuccccccagaccauggacggcauccucaaguccauccucaaggucaagaaggcccucggcauguucaucuccgacacccccggcgagcgcaaccccuacgagaacauccucuacaagaucugccucuccggcgacggcuggcccuacaucgccucccgcaccuccaucaccggccgcgccugggagaacaccgucgucgaccucgaguccgacggcaagccccagaaggccggcuccaacaacuccaacaagucccuccaguccgccggcuucaccgccggccucaccuacucccagcucaugacccucaaggacgccaugcuccagcucgaccccaacgccaagaccuggauggacaucgagggccgccccgaggaccccgucgagaucgcccucuaccagcccuccuccggcugcuacauccacuucuuccgcgagcccaccgaccucaagcaguucaagcaggacgccaaguacucccacggcaucgacgucaccgaccucuucgccgcccagcccggccucaccuccgccgucaucgacgcccucccccgcaacauggucaucaccugccagggcuccgacgacauccgcaagcuccucgagucccagggccgcaaggacaucaagcucaucgacaucgcccucuccaagaucgacucccgcaaguacgagaacgccgucugggaccaguacaaggaccucugccacaugcacaccggcgucgucgucgagaagaagaagcgcggcggcaaggaggagaucaccccccacugcgcccucauggacugcaucauguucgacgccgccgucuccggcggccucaacucccucguccuccgcgccguccucccccgcgacauggucuuccgcaccuccaccccccgcgucguccucugaggacuagugcaucacauuuaaaagcaucucagccuaccaugagaauaagagaaagaaaaugaagaucaauagcuuauucaucucuuuuucuuuuucguugguguaaagccaacacccugucuaaaaaacauaaauuucuuuaaucauuuugccucuuuucucugugcuucaauuaauaaaaaauggaaagaaccuagaucuaaaaaaaaaaaaaaaaaaaaaaaaaaaaaaaaaaaaaaaaaaaaaaaaaaaaaaaaaaaaaaaaugcaucccccccccccccccccccccccccccccccaaaggcucuuuucagagccaccagaauu

SEQ ID NO: 10719 - RNA, 2092 nt, Artificial Sequence
  mRNA product Design i-2 comprising derived and/or modified sequence from MOPV/LASV reassortant(IGS-1;Clade IV)__AFY05578__NP (opt2)
ggggcgcugccuacggagguggcagccaucuccuucucggcaucaagcuuaccauguccgccuccaaggagaucaaguccuuccucuggacccagucccuccgccgcgagcucuccggcuacugcuccaacaucaagcuccaggucgucaaggacgcccaggcccuccuccacggccucgacuucuccgaggucuccaacguccagcgccucaugcgcaaggagcgccgcgacgacaacgaccucaagcgccuccgcgaccucaaccaggccgucaacaaccucgucgagcucaaguccacccagcagaaguccauccuccgcgucggcacccucaccuccgacgaccuccucauccucgccgccgaccucgagaagcuccgcuccaaggucauccgcaccgagcgcccccucuccgccggcgucuacaugggcaaccucuccucccagcagcucgaccagcgccgcgcccuccucaacaugaucggcauguccggcggcaaccagggcgcccgcgccggccgcgacggcgucguccgcgucugggacgucaagaacgccgagcuccucuccaaccaguucggcaccaugcccucccucacccucgccugccucaccaagcagggccaggucgaccucaacgacgccguccaggcccucaccgaccucggccucaucuacaccgccaaguaccccaacaccuccgaccucgaccgccucacccagucccaccccauccucaacaugaucgacaccaagaaguccucccucaacaucuccggcuacaacuucucccucggcgccgccgucaaggccggcgccugcaugcucgacggcggcaacaugcucgagaccaucaaggucuccccccagaccauggacggcauccucaaguccauccucaaggucaagaaggcccucggcauguucaucuccgacacccccggcgagcgcaaccccuacgagaacauccucuacaagaucugccucuccggcgacggcuggcccuacaucgccucccgcaccuccaucaccggccgcgccugggagaacaccgucgucgaccucgaguccgacggcaagccccagaaggccgacuccaacaacuccuccaagucccuccaguccgccggcuucaccgccggccucaccuacucccagcucaugacccucaaggacgccaugcuccagcucgaccccaacgccaagaccuggauggacaucgagggccgccccgaggaccccgucgagaucgcccucuaccagcccuccuccggcugcuacauccacuucuuccgcgagcccaccgaccucaagcaguucaagcaggacgccaaguacucccacggcaucgacgucaccgaccucuucgccacccagcccggccucaccuccgccgucaucgacgcccucccccgcaacauggucaucaccugccagggcuccgacgacauccgcaagcuccucgagucccagggccgcaaggacaucaagcucaucgacaucgaccucuccaagaccgacucccgcaaguacgagaacgccgucugggaccaguacaaggaccucugccacaugcacaccggcgucgucgucgagaagaagaagcgcggcggcaaggaggagaucaccccccacugcgcccucauggacugcaucauguucgacgccgccgucuccggcggccucaacaccuccguccuccgcgccguccucccccgcgacauggucuuccgcaccuccaccccccgcgucguccucugaggacuagugcaucacauuuaaaagcaucucagccuaccaugagaauaagagaaagaaaaugaagaucaauagcuuauucaucucuuuuucuuuuucguugguguaaagccaacacccugucuaaaaaacauaaauuucuuuaaucauuuugccucuuuucucugugcuucaauuaauaaaaaauggaaagaaccuagaucuaaaaaaaaaaaaaaaaaaaaaaaaaaaaaaaaaaaaaaaaaaaaaaaaaaaaaaaaaaaaaaaaugcaucccccccccccccccccccccccccccccccaaaggcucuuuucagagccaccagaauu

SEQ ID NO: 10720 - RNA, 2092 nt, Artificial Sequence
  mRNA product Design i-2 comprising derived and/or modified sequence from LASV(LM765-SLE-2012;Clade IV)__AIT17815__NP (opt2)
ggggcgcugccuacggagguggcagccaucuccuucucggcaucaagcuuaccauguccgccuccaaggagaucaaguccuuccucuggacccagucccuccgccgcgagcucuccggcuacugcuccaacaucaagcuccaggucgucaaggacgcccaggcccuccuccacggccucgacuucuccgaggucuccaacguccagcgccucaugcgcaaggagcgccgcgacgacaacgaccucaagcgccuccgcgaccucaaccaggccgucaacaaccucgucgagcucaaguccacccagcagaaguccauccuccgcgucggcacccucaccuccgacgaccuccucauccucgccgccgaccucgagaagcucaaguccaaggucacccgcaccgagcgcccccucuccgccggcgucuacaugggcaaccucuccucccagcagcucgaccagcgccgcgcccuccucgacaugaucggcauguccggcuccaaccagggcgcccgcgccggccgcgacggcgucguccgcgucugggacgucaagaacgccgagcuccucaacaaccaguucggcaccaugcccucccucacccucgccugccucaccaagcagggccaggucgaccucaacgacgccguccaggcccucaccgaccucggccucaucuacaccgccaaguaccccaacaccuccgaccucgaccgccucacccagucccaccccauccucaacaugaucgacaccaagaaguccucccucaacaucuccggcuacaacuucucccucggcgccgccgucaaggccggcgccugcaugcucgacggcggcaacaugcucgagaccaucaaggucuccccccagaccauggacggcauccucaaguccauccucaaggucaagaaggcccucggcauguucaucuccgacgcccccggcgagcgcaaccccuacgagaacauccucuacaagaucugccucuccggcgacggcuggcccuacaucgccucccgcaccuccaucaccggccgcgccugggagaacaccgucgucgaccucgaguccgacggcaagccccagaaggccggcuccaacggcuccaacaagucccuccaguccgccggcuucaccgccggccucaccuacucccagcucaugacccucaaggacgccaugcuccagcucgaccccaacgccaagaccuggauggacaucgagggccgccccgaggaccccgucgagaucgcccucuaccagcccuccuccggcugcuacauccacuucuuccgcgagcccaccgaccucaagcaguucaagcaggacgccaaguacucccacggcaucgacgucaccgaccucuucgccgcccagcccggccucaccuccgccgucaucgacgcccucccccgcaacauggucaucaccugccagggcuccgacgacauccgcaagcucuucgagucccagggccgcaaggacaucaagcucaucgacaucgcccucuccaagaccgacucccgcaaguacgagaacgccgucugggaccaguacaaggaccucugccacaugcacaccggcaucgucgucgagaagaagaagcgcggcggcaaggaggagaucaccccccacugcgcccucauggacugcaucauguucgacgccgccgucuccggcggccucaacaccuccguccuccgcgccguccucccccgcgacauggucuuccgcaccuccaccccccgcgucguccucugaggacuagugcaucacauuuaaaagcaucucagccuaccaugagaauaagagaaagaaaaugaagaucaauagcuuauucaucucuuuuucuuuuucguugguguaaagccaacacccugucuaaaaaacauaaauuucuuuaaucauuuugccucuuuucucugugcuucaauuaauaaaaaauggaaagaaccuagaucuaaaaaaaaaaaaaaaaaaaaaaaaaaaaaaaaaaaaaaaaaaaaaaaaaaaaaaaaaaaaaaaaugcaucccccccccccccccccccccccccccccccaaaggcucuuuucagagccaccagaauu

SEQ ID NO: 10721 - RNA, 2092 nt, Artificial Sequence
  mRNA product Design i-2 comprising derived and/or modified sequence from LASV(LM776-SLE-2012;Clade IV)__AIT17825__NP (opt2)
ggggcgcugccuacggagguggcagccaucuccuucucggcaucaagcuuaccauguccgccuccaaggagaucaaguccuuccucuggacccagucccuccgccgcgagcucuccuccuacugcuccaacaucaagcuccaggucgucaaggacgcccaggcccuccuccacggccucgacuucuccgaggucuccaacguccagcgccucaugcgcaaggagcgccgcgacgacaacgaccucaagcgccuccgcgaccucaaccaggccgucaacaaccucgucgagcucaaguccacccagcagaaguccauccuccgcgucggcacccucaccuccgacgaccuccucauccucgccgccgaccucgagaagcucaaguccaaggucacccgcaccgagcgcccccucuccgccggcgucuacaugggcaaccucuccucccagcagcucgaccagcgccgcgcccuccucuccaugaucggcauguccggcuccaaccagggcgcccgcgccggccgcgacggcgucguccgcgucugggacgucaagaacgccgagcuccucaacaaccaguucggcaccaugcccucccucacccucgccugccucaccaagcagggccaggucgaccucaacgacgccguccaggcccucaccgaccucggccucaucuacaccgccaaguaccccaacaccuccgaccucgaccgccucacccagucccaccccauccucaacaugaucgacaccaagaaguccucccucaacaucuccggcuacaacuucucccucggcgccgccgucaaggccggcgccugcaugcucgacggcggcaacaugcucgagaccaucaaggucuccccccagaccauggacggcauccucaaguccauccucaaggucaagaaggcccucggcauguucaucuccgacacccccggcgagcgcaaccccuacgagaacauccucuacaagaucugccucuccggcgacggcuggcccuacaucgccucccgcaccuccaucaccggccgcgccugggagaacaccgucgucgaccucgaguccgacggcaagccccagaaggccggcuccaacaacuccaacaagucccuccaguccgccggcuucaccgccggccucaccuacucccagcucaugacccucaaggacgccaugcuccagcucgaccccaacgccaagaccuggauggacaucgagggccgccccgaggaccccgucgaggucgcccucuaccagcccuccuccggcugcuacauccacuucuuccgcgagcccaccgaccucaagcaguucaagcaggacgccaaguacucccacggcaucgacgucaccgaccucuucgccgcccagcccggccucaccuccgccgucaucgacgcccucccccgcaacauggucaucaccugccagggcuccgacgacauccgcaagcuccucgagucccagggccgcaaggacaucaagcucaucgacaucgcccucuccaagaccgacucccgcaaguacgagaacgccgucugggaccaguacaaggaccucugccacaugcacaccggcgucgucgucgagaagaagaagcgcggcggcaaggaggagaucaccccccacugcgcccucauggacugcaucauguucgacgccgccgucuccggcggccucaacaccuccguccuccgcgccguccucccccgcgacauggucuuccgcaccuccaccccccgcgucguccucugaggacuagugcaucacauuuaaaagcaucucagccuaccaugagaauaagagaaagaaaaugaagaucaauagcuuauucaucucuuuuucuuuuucguugguguaaagccaacacccugucuaaaaaacauaaauuucuuuaaucauuuugccucuuuucucugugcuucaauuaauaaaaaauggaaagaaccuagaucuaaaaaaaaaaaaaaaaaaaaaaaaaaaaaaaaaaaaaaaaaaaaaaaaaaaaaaaaaaaaaaaaugcaucccccccccccccccccccccccccccccccaaaggcucuuuucagagccaccagaauu

SEQ ID NO: 10722 - RNA, 2092 nt, Artificial Sequence
  mRNA product Design i-2 comprising derived and/or modified sequence from LASV(Mad39;Clade IV)__ANH09723__NP (opt2)
ggggcgcugccuacggagguggcagccaucuccuucucggcaucaagcuuaccauguccgccuccaaggagaucaaguccuuccucuggacccagucccuccgccgcgagcucuccggcuacugcuccaacaucaagcuccaggucgucaaggacgcccaggcccuccuccacggccucgacuucuccgaggucuccaacguccagcgccucaugcgcaagcagcgccgcgacgacaacgaccucaagcgccuccgcgaccucaaccaggccgucaacaaccucgucgagcucaaguccacccagcagaaguccguccuccgcgucggcacccucaccuccgacgaccuccucacccucgccgccgaccucgagaagcucaaguccaaggucacccgcaccgagcgcccccucaccgccggcgucuacaugggcaaccucuccucccagcagcucgaccagcgccgcgcccuccucaacaugaucggcauguccggcggcaaccagggcgcccgcaccggccgcgacggcgucguccgcgucugggacgucaagaacgccgagcuccucaacaaccaguucggcaccaugcccucccucacccucgccugccucaccaagcagggccaggucgaccucaacgacgucguccaggcccucaccgaccucggccucaucuacaccgccaaguaccccaacaccuccgaccucgaccgccucacccagucccaccccauccucaacaugaucgacaccaacaaguccucccucaacaucuccggcuacaacuucucccucggcgccgccgucaaggccggcgccugcaugcucgacggcggcaacaugcucgagaccaucaaggucuccccccagaccauggacggcauccucaaguccauccucaaggucaagaagucccucggcauguucaucuccgacacccccggcgagcgcaaccccuacgagaacauccucuacaagaucugccucuccggcgacggcuggcccuacaucgccucccgcaccuccaucaccggccgcgccugggagaacaccgucgucgaccucgaguccggcggcaagccccagaaggccggcuccaacaacuccaacaagucccuccaguccgccggcuucgccgccggccucaccuacucccagcucaugacccucaaggacgccaugcuccagcucgaccccaacgccaagaccuggauggacaucgagggccgccccgaggaccccgucgagaucgcccucuaccagcccaucuccggcugcuacauccacuucuuccgcgagcccaccgaccucaagcaguucaagcaggacgccaaguacucccacggcaucgacgucaccgaccucuucgccgcccagcccggccucaccuccgccgucaucgaggcccucccccgcaacauggucaucaccugccagggcuccgacgacauccgcaagcucuucgagucccagggccgcaaggacaucaagcucaucgacaucgcccucuccaagaccgacucccgcaaguacgagaacgccgucugggaccaguacaaggaccucugccacaugcacaccggcgucgucgucgagaagaagaagaagggcggcaaggaggagaucaccccccacugcgcccucauggacugcaucauguucgacgccgccgucuccggcggccucaacacccucguccuccgcgccguccucccccgcgacauggucuuccgcaccuccacccccaaggucguccucugaggacuagugcaucacauuuaaaagcaucucagccuaccaugagaauaagagaaagaaaaugaagaucaauagcuuauucaucucuuuuucuuuuucguugguguaaagccaacacccugucuaaaaaacauaaauuucuuuaaucauuuugccucuuuucucugugcuucaauuaauaaaaaauggaaagaaccuagaucuaaaaaaaaaaaaaaaaaaaaaaaaaaaaaaaaaaaaaaaaaaaaaaaaaaaaaaaaaaaaaaaaugcaucccccccccccccccccccccccccccccccaaaggcucuuuucagagccaccagaauu

SEQ ID NO: 10723 - RNA, 2092 nt, Artificial Sequence
  mRNA product Design i-2 comprising derived and/or modified sequence from LASV(Z0947-SLE-2011;Clade IV)__AIT17841__NP (opt2)
ggggcgcugccuacggagguggcagccaucuccuucucggcaucaagcuuaccauguccgccuccaaggagaucaaguccuuccucuggacccagucccuccgccgcgagcucuccggcuacugcuccaacaucaagcuccaggucgucaaggacgcccaggcccuccuccacggccucgacuucuccgaggucuccaacguccagcgccucaugcgcaaggagcgccgcgacgacaacgaccucaagcgccuccgcgaccucaaccaggccgucaacaaccucgucgagcucaaguccacccagcagaaguccauccuccgcgucggcacccucaccuccgacgaccuccucauccucgccgccgaccucgagaagcucaaguccaaggucacccgcaccgagcgcccccucuccgccggcgucuacaugggcaaccucuccucccagcagcucgaccagcgccgcgcccuccucaacaugaucggcauguccggcuccaaccagggcgcccgcaccggccgcgacggcgucguccgcgucugggacgucaagaacgccgagcuccucaacaaccaguucggcaccaugcccucccucacccucgccugccucaccaagcagggccaggucgaccucaacgacgccguccaggcccucaccgaccucggccucaucuacaccgccaaguaccccaacaccuccgaccucgaccgccucacccagucccaccccauccucaacaugaucgacaccaagaaguccucccucaacaucuccggcuacaacuucucccucggcgccgccgucaaggccggcgccugcaugcucgacggcggcaacaugcucgagaccaucaaggucuccccccagaccauggacggcauccucaaguccauccucaaggucaagaaggcccucggcauguucaucuccgacgcccccggcgagcgcaaccccuacgagaacauccucuacaagaucugccucuccggcgacggcuggcccuacaucgccucccgcaccuccaucaccggccgcgccugggagaacaccgucgucgaccucgaguccgacggcaagccccagaaggccggcuccaacggcuccaacaagucccuccaguccgccggcuucaccgccggccucaccuacucccagcucaugacccucaaggacgccaugcuccagcucgaccccaacgccaagaccuggauggacaucgagggccgccccgaggaccccgucgagaucgcccucuaccagcccuccuccggcugcuacauccacuucuuccgcgagcccaccgaccucaagcaguucaagcaggacgccaaguacucccacggcaucgacgucaccgaccucuucgccgcccagcccggccucaccuccgccgucaucgacgcccucccccgcaacauggucaucaccugccagggcuccgacgacauccgcaagcucuucgagucccagggccgcaaggacaucaagcucaucgacaucgcccucuccaagaccgacucccgcaaguacgagaacgccgucugggaccaguacaaggaccucugccacaugcacaccggcaucgucgucgagaagaagaagcgcggcggcaaggaggagaucaccccccacugcgcccucauggacugcaucauguucgacgccgccgucuccggcggccucaacaccuccguccuccgcgccguccucccccgcgacauggucuuccgcaccuccaccccccgcgucguccucugaggacuagugcaucacauuuaaaagcaucucagccuaccaugagaauaagagaaagaaaaugaagaucaauagcuuauucaucucuuuuucuuuuucguugguguaaagccaacacccugucuaaaaaacauaaauuucuuuaaucauuuugccucuuuucucugugcuucaauuaauaaaaaauggaaagaaccuagaucuaaaaaaaaaaaaaaaaaaaaaaaaaaaaaaaaaaaaaaaaaaaaaaaaaaaaaaaaaaaaaaaaugcaucccccccccccccccccccccccccccccccaaaggcucuuuucagagccaccagaauu

SEQ ID NO: 10724 - RNA, 2092 nt, Artificial Sequence
  mRNA product Design i-2 comprising derived and/or modified sequence from LASV(Josiah;Clade IV)__NP_694869__NP (opt3)
ggggcgcugccuacggagguggcagccaucuccuucucggcaucaagcuuaccaugagcgccuccaaggagaucaaaucuuuccuguggacccagucacucagaagggaacuuaguggcuacugcagcaacauuaagcugcaaguggucaaagacgcucaggcauuguuacacgggcuggauuuuuccgagguuucuaaugugcagcggcuaaugcgcaaggaacgacgugacgauaacgaccucaaaagacugagggaucuuaaucaggccguaaacaaucugguggaguugaagucgacacaacagaagucaauacuccgggucggaacucugacgagcgacgaucugcucaucuuagcggcugaccuggaaaaacuuaagaguaaagugauucgcaccgagagacccuuguccgccgguguuuauaugggcaaccugucuagccagcagcuagaucaaaggcgggcacuccugaauaugaucgggauguccggaggcaaccagggugcccgcgcugggcgagacggaguggucagagugugggauguaaagaaugcagagcuucugaacaaucaguucggcacaaugccuucauugacucucgccugucugaccaaacagggccaaguugacuuaaacgaugcugugcaggcccugacagaccucgggcuuauuuacaccgcgaaguauccaaauacaagugaccuggauagguugacucagagccauccgauccuaaacaugauagacaccaagaaaucuucccugaauaucucaggauacaacuuuagccucggugcagccgucaaggcuggcgccugcaugcuggaugggggaaacaugcuugaaacgauuaaagugaguccccaaacuauggacggcauccugaagucuauuuugaaagugaagaaagcacucgguauguucaucuccgauaccccuggggagcggaauccauaugaaaacauacuguacaagauuuguuuaagcggagacggcuggcccuauaucgcuucgcguacaucuauuacuggccgcgccugggagaauaccgucguugaucuggaguccgacgggaagccucagaaagcggauucaaacaauaguagcaagucccuacagucugccggauuuacagcaggucucaccuacagccagcugaugacgcuuaaagacgcuauguugcaacuggauccaaacgccaagacuuggauggacaucgaaggcagacccgaggacccuguggaaaucgcucucuaccagccaucaagugggugcuauauucacuucuuuagggagccgacagaucugaaacaguucaagcaggacgccaaguacucccauggaauagauguaaccgaccuuuuugcaacucaacccggccugacaagcgccgugaucgaugcuuugccucggaauauggucauuaccugucaggguucugacgauauccgaaaacuccuggaaucacaggggcgcaaggacauaaaauuaauugauaucgcgcugaguaagacggacagcagaaaauaugagaacgcagugugggaucaguacaaggaccuaugccacaugcauaccggcguuguggucgagaagaaaaagaggggaggcaaagaagagaucacaccacacugugcccucauggauugcauuauguucgacgcugccguguccgggggacugaauacuucuguacuucgggcaguuuugccccgcgacaugguguuuagaaccucgacaccuagggucgugcugugaggacuagugcaucacauuuaaaagcaucucagccuaccaugagaauaagagaaagaaaaugaagaucaauagcuuauucaucucuuuuucuuuuucguugguguaaagccaacacccugucuaaaaaacauaaauuucuuuaaucauuuugccucuuuucucugugcuucaauuaauaaaaaauggaaagaaccuagaucuaaaaaaaaaaaaaaaaaaaaaaaaaaaaaaaaaaaaaaaaaaaaaaaaaaaaaaaaaaaaaaaaugcaucccccccccccccccccccccccccccccccaaaggcucuuuucagagccaccagaauu

SEQ ID NO: 10725 - RNA, 2092 nt, Artificial Sequence
  mRNA product Design i-2 comprising derived and/or modified sequence from LASV(LP;Clade I)__AAF86702__NP (opt3)
ggggcgcugccuacggagguggcagccaucuccuucucggcaucaagcuuaccaugagcaacuccaaggagaucaaaucuuuccuguggacccagucacucagaagggaacuuaguggcuacugcagcaauauuaagcugcaaguggucaaagacgcccaggcuuuguuacacgggcuggauuuuuccgagguuucuaacgugcagcggcuaaugcgcaagcagaaacgagacgaugcagaccucaagcgucugagagaucuuaaucaagccguaaacaaucugguggaauugaagucgacacagcagaaaaacguccucagggugggaacucugucaagcgacgaucugauaacgcucgcggcugacuuagagaagcugaaaaguaagguuauccggaccgaacgcccccuuuccucugguguguauaugggcaauuugagcucccagcaacuggaucagagaagggcccuacucucaaugauugggaugaguggaggcccucaggguaaccggacagggggagacggcgucgugcgcguaugggauguuaaaaaugcagagcugcuuaacaaucaguucggcacuaugccaagccugaccuuggccugucucacaaagcaaggacagguggaccugaacgaugcuguccaggcauuaaccgaccuggggcucaucuacacugccaaguaucccaauucuuccgaccuugauaugcugacacaaucacauccgauuuuggguaugguggacaccaaaaagagcagucuaaacaucucuggcuacaauuuuucccugggggcugccgugaaagcgggagcaugcaugcucgauggcgguaacaugcuggagacgauaaaggucagcccucagacuauggacgggauccuuaaaucgauucugaagguuaaacgaucuuugggaauguucaucuccgauaccccaggcgaaagaaaccccuaugagaauauucucuacaagaucugucugucaggcgaaggguggccuuauauagccaguaggacaagcauuacuggacgggcuugggagaacaccuuaguggaccuggaguccgauaauaagccacccaaacuaaacucugccgguagcaauaagucacuccaggcagcuggccugaacgccgggcuuacauacagucaguugaugacccugaaagacugcaugcuccaacuggauccuuccagcaagacguggaucgacauugaaggacguccagaggauccgguagaaaucgcgcuuuuucagcccucuucaggcuguuacauccacuucuuucgcgagccuacugaccugaaacaguucaagcaggacgccaaguauagucaugguauugaugugacagacuuguuuagcacccaaccagggcucacuuccgcagucauagaagcucugcccagaaauaugguguuaacaugccagggcucugaugacaucaaaaagcugcuagagucgcagggaaggcgggauauuaaacucaucgacauaagccuguccaaggccgauucacgaaaauucgagaacgcuguuugggaccaguacaaggaucuuugucacaugcauaccggcguggucguggaaaagaaaaagcgcgggggaaaagaggaaauuacgccucacugcgccuugcuggacuguaucauguuugaugcagccaccacagguagucucaauaucacuacccugagagcuguauuaccaagggacaugguuuuccggacaucuacucccaaggugguccugugaggacuagugcaucacauuuaaaagcaucucagccuaccaugagaauaagagaaagaaaaugaagaucaauagcuuauucaucucuuuuucuuuuucguugguguaaagccaacacccugucuaaaaaacauaaauuucuuuaaucauuuugccucuuuucucugugcuucaauuaauaaaaaauggaaagaaccuagaucuaaaaaaaaaaaaaaaaaaaaaaaaaaaaaaaaaaaaaaaaaaaaaaaaaaaaaaaaaaaaaaaaugcaucccccccccccccccccccccccccccccccaaaggcucuuuucagagccaccagaauu

SEQ ID NO: 10726 - RNA, 2092 nt, Artificial Sequence
  mRNA product Design i-2 comprising derived and/or modified sequence from LASV(803213;Clade II)__AAF86704__NP (opt3)
ggggcgcugccuacggagguggcagccaucuccuucucggcaucaagcuuaccaugagcgccuccaaggaggugaaaucuuuccuguggacccagucacucagaagggaacuuaguggcuacugcagcaacaucaagcugcaagucguuaaagacgcucaggcauuguuacacgggcuggauuuuuccgaggugaauaacguacagcggcuaaugcgcaagcagaaacgagacgauggagaccucaagcgucugagagaucuuaaucaagccgugaacaaucuggucgaauugaagucuacacagcagaaaucgauucucaggguggguacucugacgucagacgaucugcucaccuuagcggcugaccuggagaaacuuaagagcaagguuauacggacagaacgccccuugaguuccggcguguauauggggaaccugucuacucagcaacuagagcagagaagggcccuccugaauaugaucggaauggucggcggugcacaggggacccagccuggacgggauggcgugguacgcguuugggacgugaaaaacccagaucuucugaauaaccaauucggcacaaugccgagcuugacccucgccugucugacuaagcaggggcaggucgacuuaaaugaugcugugcuggcacucacagaccuuggacugauuuacaccgccaaguaucccaacuccucagacuuggaucgacuaagucaaagccauccuauccugaauaugguggacacgaaaaagucuucccucaacauuucagguuacaauuuuagccugggcgcugccgucaaagcgggggcaugcaugcuugauggaggcaacaugcuggagacuaucaagguuaccccacagacaauggacgguauauugaaaaguauccucaaggugaaaagaucucuggggauguucguauccgauacucccggagaaaggaacccuuaugagaauauuuuauacaagaucugucugagcggcgacggcuggccauauauugccucgcggaccucuaucguggggcgugcuugggaaaacacaaccgucgaucuagaguccgacggaaagccccagaaaguggguacggccggcucaaauaagagucuccagagcgcaggguuuccuacuggacugacauacucccaacuuaugaccuugaaagauucuaugaugcagcuggacccaagcgcuaagacuuggauagauauugagggccgcccggaagaccccguugagaucgcccucuaccagccuaugucagguugcuauauucacuucuuuagagaaccaacagaccugaaacaguucaagcaagaugcgaaguacagucaugggaucgacguggccgaucuuuuucccgcacagccuggccugaccuccgcugucaucgaggccuugccaaggaacauggugcucacgugucagggaagcgacgauauuaaaaagcuguuagacucucagggccggcgagauauaaaacugaucgacauuucacuaaguaagguagauagccgcaaauucgaaaaugcuguuugggaccaaugcaaggaucucugucacaugcauaccgggguggucguggagaagaaaaagagaggagguaaagaggaaaucacaccccacugcgcccugauggacuguauaauguuugaugcagccgucuccggcgggcuuaacauuccgguguugagggcuguucugccucgggacaugguguuccgcacuucuucgcccaagguaguccucugaggacuagugcaucacauuuaaaagcaucucagccuaccaugagaauaagagaaagaaaaugaagaucaauagcuuauucaucucuuuuucuuuuucguugguguaaagccaacacccugucuaaaaaacauaaauuucuuuaaucauuuugccucuuuucucugugcuucaauuaauaaaaaauggaaagaaccuagaucuaaaaaaaaaaaaaaaaaaaaaaaaaaaaaaaaaaaaaaaaaaaaaaaaaaaaaaaaaaaaaaaaugcaucccccccccccccccccccccccccccccccaaaggcucuuuucagagccaccagaauu

SEQ ID NO: 10727 - RNA, 2095 nt, Artificial Sequence
  mRNA product Design i-2 comprising derived and/or modified sequence from LASV(GA391;Clade III)__CAA36646__NP (opt3)
ggggcgcugccuacggagguggcagccaucuccuucucggcaucaagcuuaccaugagcgccuccaaggaggugagaucuuuccuguggacccagucacucaggcgggaacuuaguggcuacugcagcaacaucaaacugcaagucguuaaggacgcucaggcauuguuacacgggcuggauuuuuccgaggugucuaauguacagcgccuaaugcgaaaacagaagcgugacgauggagaccucaaaagacugagggaucuuaaccaagccgugaauaaccuggucgaauugaagucgacacagcagaagucagugcuccggguugguacucugagcagugacgaucugcucauuuuagcggcugaccuggagaaacuuaaguccaaagugacgcgcaccgaaagacccuugucuagcggcgucuauauggggaaucuguccucacagcaacuagaucagaggcgggcccuccugaacaugauaggaaugacaggcgugaguggugggggaaagggcgcaagcgacggcaucguacgcguuugggaugugaaaaaugccgagcuucugaacaaucaguucgggacuaugccuucuuugacccucgcuugucugacaaagcagggacaagucgacuuaaacgaugcagugcaggcccugaccgaccucggucuuauuuacacugcuaaguauccaaauuccucagaccuggaucgauugagccagagucauccgauccuaaacaugauugacacuaaaaagucuucccugaauaucagcggcuacaacuuuucgcucggggccgcggugaaagcaggagccugcaugcuggauggcgguaauaugcuugagaccauaaaggucucuccccaaacgauggacgggauccugaaauccauuuugaagguuaaaaagucacucggaauguucgugagugauacuccuggcgaaagaaacccauaugagaacauccuguacaagauuuguuuaagcggcgacggguggcccuauaucgcuuccaggaccucuauaguaggacgggccugggaaaauacaguggucgaucuggagcaggacaacaaaccucagaagauugguaauggcgggagcaacaaaucacuacagagugcaggauuugcugccggccucacuuacucccaacugaugacccuuaaggauuucaaaugcuuuaauuugaucccaaacgcgaagacauggauggacauugagggucgucccgaagauccuguggagaucgcccuguaccagccaagcucuggguguuauguucacuucuuucgcgaaccgaccgaccucaagcaguucaaacaggacgcaaaguacucacauggcaucgaugugacggaccuguuugcugcccaacccggacuuacaagugcugucauugaggcccugccuagaaauauggugauaacaugccagggcagcgaagauaucaggaaauugcucgagucccaggggcggcgagacauuaagcugaucgauauaaccuuaucuaaagcagacucgcgcaaguucgagaacgccguaugggaucaguuuaaggaccugugucacaugcauacuggaguuguggucgagaaaaagaaaagagguggcaaggaagaaauuacaccacacugcgcucuaauggauuguaucauguucgacgcggcagugagcgggggacucgaugccaaaguccugagggugguucuuccccgggacaugguguuccgcaccuccacgccuaagguagucuugugaggacuagugcaucacauuuaaaagcaucucagccuaccaugagaauaagagaaagaaaaugaagaucaauagcuuauucaucucuuuuucuuuuucguugguguaaagccaacacccugucuaaaaaacauaaauuucuuuaaucauuuugccucuuuucucugugcuucaauuaauaaaaaauggaaagaaccuagaucuaaaaaaaaaaaaaaaaaaaaaaaaaaaaaaaaaaaaaaaaaaaaaaaaaaaaaaaaaaaaaaaaugcaucccccccccccccccccccccccccccccccaaaggcucuuuucagagccaccagaauu

SEQ ID NO: 10728 - RNA, 2092 nt, Artificial Sequence
  mRNA product Design i-2 comprising derived and/or modified sequence from LASV(AV;Clade V)__CCA30315__NP (opt3)
ggggcgcugccuacggagguggcagccaucuccuucucggcaucaagcuuaccaugagcgccuccaaggaggugaaaucuuuccuguggacccagucacucagaagggaacuuaguggcuacugcagcaacaucaagcugcaagucguuaaagacgcucaggcauuguuacacgggcuggauuuuuccgaggugucuaauguacagcggcuaaugcgcaagcagcgacgugacgauucggaccucaaaagacugagggaucuuaaccaagccgugaauaaccuggucgaauugaagucaacacagcaaaagagcgugcuccggguuggaacucugaguuccgacgaucugcucacguuagcggcugaccuggagaaacuuaagucuaaagugacccgcacagaaagacccuugagcuccggugucuauaugggcaaucugucaagucagcagcuagaucagaggcgggcccuccugaaccuuauugggaugacuaauggaagccagggcucucaggcaggucgcgacggggugguacgaguuugggaugugaagaacgccgagcuguugaauaaccaauucggaaccaugccuucccucacacuggcuuguuuaaccaaacagggccaggucgaccugaaugauguggugcaagcacucacugaccuuggccugauauacacagccaaguauccaaacaccucagacuuggauagacuaacgcagagccauccgauccugaauaugauugacacuaagaaaaguucucucaacaucuccggguacaauuuuagccugggagcugccgucaaggcgggugcaugcaugcuugauggcgggaacaugcuggagaccauuaaaguuucgccccagucuauggacggaaucuugaaguccauacucaaagugaagagggcccugggcauguucguaucagauacaccuggugaacggaacccauaugagaauaucuuauacaaaauuugucugaguggggacggauggcccuauaucgcuagccguacuuccauugugggccgcgccugggaaaacaccgucguggaucuagagacagacggcaagccucagaagaucgggucuggaaauagcaacaaaucacuccaaagugcagguuuuuccgcuggccugaccuacagccagcuuaugacguugaaggaugccaugcugcagcucgacccaaaugcgaaaacuuggauggauauagaggggagacccgaagacccuguugagguggcccuguaccagccaauuucuggaugcuauauccacuucuuuagggaaccgacagaccuuaagcaauucaaacaggaugcaaaguacucacauggcauugacaucgcugaucuguuugccgcucagcccgguuugaccagugccgucaucgaggcacucccucggaacauggugauuacuugucaggggagcgaagacauaaagaaacuguuagagucccaaggccgaaaggauaucaaacugauugacaucgcccuaucuaagauagauucgcgcaaauucgagaaugcuguaugggaccaguauaaggaucucugccacaugcauacaggaguuguggucgaaaagaaaaagagaggcgggaaagaggaaauuaccccacacugugcgcugauggacugcaucauguuugaugcagccgugagcggaggucuuaacacguugguccugagggcugugcucccccgggacaugguuuuccgcaccuccacaccuagagugguacugugaggacuagugcaucacauuuaaaagcaucucagccuaccaugagaauaagagaaagaaaaugaagaucaauagcuuauucaucucuuuuucuuuuucguugguguaaagccaacacccugucuaaaaaacauaaauuucuuuaaucauuuugccucuuuucucugugcuucaauuaauaaaaaauggaaagaaccuagaucuaaaaaaaaaaaaaaaaaaaaaaaaaaaaaaaaaaaaaaaaaaaaaaaaaaaaaaaaaaaaaaaaugcaucccccccccccccccccccccccccccccccaaaggcucuuuucagagccaccagaauu

SEQ ID NO: 10729 - RNA, 2092 nt, Artificial Sequence
  mRNA product Design i-2 comprising derived and/or modified sequence from LASV(Togo/2016/7082;Clade VI)__AMR44578__NP (opt3)
ggggcgcugccuacggagguggcagccaucuccuucucggcaucaagcuuaccaugagcaacuccaaggaggugaaaucuuuccuguggacccagucacucagaagggaacuuaguggcuacugcagcaauaucaagcugcaagucguuaaagacgcccaggcuuuguuacacgggcuggauuuuuccgaggugucuaacguacagcggcuaaugcgcaagcagaaacgagacgauggagaccucaagcgucugagagaucuuaaucaagcagugaacaaucuggucgaauugaagucggugcagcagaaaucaauucucaggguugguacacugacuagcgacgaucugcucacguuagccgcggaccuggagaaacuuaaaaguaaggugacccggacagaacgccccuuguccucuggcgucuauauggggaaccugagcucccagcaacuagaucagagaagggcucuccugucaaugauaggaaugaguggcgguaaucagaacagccagccuaaaggggacggagugguacggguuugggaugugaagaaugccgaccuucugaacaaucaauucggcacuaugccaucuuugacccucgcaugucugacaaagcagggccaggucgauuuaaacgacgccgugcaagcucugaccgaccucgggcuuaucuacacugcaaaauaucccaauuccucagaucuggaccgcuugagccagagucauccgauucuaaacaugaucgauacaaagaaaucuucccugaauauuagcggauacaacuuuucgcucggugccgcuaucaagaccggcgccugcaugcuggacgggggaaacaugcuugagacgauaaaagugacuccucagaccauggauggcauccugaagucuauuuugaaagucaagcgaucccucgguauguucaucucagacacaccaggggagagaaaucccuaugaaaacauucuguacaagaucuguuuaaguggagauggcuggccuuauauagcgagcaggacugcaauuaucggccgggccugggagaauaccguuguggaccuggaauccgauucuaaaccacagaagauugggagcaacggaucaaauaaaagucuacaauccgcugguuuugcccccggccucacauacagccagcugaugacccuuaaggacucuauguugcagcuggauccuaacgcaaaaacguggaucgacaucgaggggcguccagaggacccgguagaaguggcucucuuccagcccauuucaggaugcuacauacacuuuuuccgcgagccuacugaucugaagcaauuuaagcaggacgccaaauauagucauggcaucgaugucacagaccuuuucgcggcccagccaggucugaccagcgcagugauugaggcuuugcccagaaauaugguucucacuugucagggguccgaugacaucaagaaacuguuagauucucaaggcaggcgggacauaaagcugauugaugugucgcuaaacaaaaucgacagccgaaaguuugaaaaugccgucugggaucaguacaaggaccucugccacaugcauacaggagugguaguugaaaagaagaaaaagggcgggaaagaggagaucaccccucacugugcucugcuugauugcauuauguucgacgccgcaguguccggagguuugaacgccacgguccugcgcgcugugcucccaagagacauggucuuuaggaccucaagucccaaggugguucugugaggacuagugcaucacauuuaaaagcaucucagccuaccaugagaauaagagaaagaaaaugaagaucaauagcuuauucaucucuuuuucuuuuucguugguguaaagccaacacccugucuaaaaaacauaaauuucuuuaaucauuuugccucuuuucucugugcuucaauuaauaaaaaauggaaagaaccuagaucuaaaaaaaaaaaaaaaaaaaaaaaaaaaaaaaaaaaaaaaaaaaaaaaaaaaaaaaaaaaaaaaaugcaucccccccccccccccccccccccccccccccaaaggcucuuuucagagccaccagaauu

SEQ ID NO: 10730 - RNA, 2092 nt, Artificial Sequence
  mRNA product Design i-2 comprising derived and/or modified sequence from LASV(KAK-428;Clade n.d. (VII))__ANH09741__NP (opt3)
ggggcgcugccuacggagguggcagccaucuccuucucggcaucaagcuuaccaugagcaacuccaaggaggugaaaucuuuccuguggacccagucacucagaagggaacuuaguggcuacugcacaaauaucaagcugcaagucguuaaagacgcccaggcuuuguuacacgggcuggauuuuagcgagguguccaacguacagcggcuaaugcgcaagcagaaacgagacgauaaugaccucaagcgucugagagaucuuaaccaagcagugaauaaccuggucgaauugaagucugugcagcagaaaucgguucucaaggugggaacucucaauucagacgaucugcugacguuagccgcggaccuggagaaacuuaagagcaaagucgugaggaccgaacggcccuugaguuccgguguauauaugggcaaccugucuagccagcaacuagaucagcgcagagcucuccugaauaugauugggauggccggaggcucccaggguaaccagccuucaagggacgggguugugcgggucugggaugugaagaaugcagaccuucugaacaaucaauucggaacaaugccaaguuugacucucgccugucugaccaagcagggccagguggauuuaaacgacgucguucuggcucucacagaccuuggccugauauacaccgcaaaauauccgaauagcucugauuuggaccgccuaucccaaaaccaucccgugcugaacaugaucgauguaaauaagucaagccucaacauuaguggguacaauuuuucucugggagccgcugugaaagccggugcgugcaugcuugacggcgggaacaugcuggagacuaucaagauuuccccucagacagucgauggaaucuugaaaagcauacucaaggugaaacgagcacugggcauguucguuucggacaccccaggugagagaaaucccuaugaaaacaucuuauacaaggugugucugucugggaauggauggccuuauauugccuccaggacgucaaucgucggccgggcuugggagaacacugugguagaucuagaaaguaauaagaaccagccaaaaguuggcaauaacgggagcaauaagaugcuccaguccucuggauuugccaccggucugacauacagccaacuuaugacuuugcgugacucaaugcugcagcucgaucccaccgcaaaaacauggauugacaucgagggccgcccugaggauccaguggaacuggcucuuuuccagccgaguuccgggugcuacauacacuuuuucagagagcccaccgaccugaagcaguuuaaacaagacgccaaguauagccauggaauugaugucaacgacuuguucucugcgcagccuggccucacgucagccgugcuggaagcauuaccaaggaauaugguccugacuugucaggguagugaugacauccggaagcuacucgauagccaggaccgaaaagauauuaagcugaucgacaucucccuuucuaaagcugaugcccgcaaguuugagaacgacgugugggaucaauucaaagacuugugccacaugcauacagggauuguuguggaaaagaagaaaaagggcggaaaacaggagaugacuccccacugugcucugcucgauugcauaauguuugacgccgcaguaucgggcgggcugaacgucccuaccuuaagagccgugcugccaacagacaugguuuucaggaccaucacgaccaaggugguccuuugaggacuagugcaucacauuuaaaagcaucucagccuaccaugagaauaagagaaagaaaaugaagaucaauagcuuauucaucucuuuuucuuuuucguugguguaaagccaacacccugucuaaaaaacauaaauuucuuuaaucauuuugccucuuuucucugugcuucaauuaauaaaaaauggaaagaaccuagaucuaaaaaaaaaaaaaaaaaaaaaaaaaaaaaaaaaaaaaaaaaaaaaaaaaaaaaaaaaaaaaaaaugcaucccccccccccccccccccccccccccccccaaaggcucuuuucagagccaccagaauu

SEQ ID NO: 10731 - RNA, 2092 nt, Artificial Sequence; identical to SEQ ID NO: 10725
  mRNA product Design i-2 comprising derived and/or modified sequence from LASV(Pinneo-NIG-1969;Clade I)__AIT17837__NP (opt3)

SEQ ID NO: 10732 - RNA, 2092 nt, Artificial Sequence
  mRNA product Design i-2 comprising derived and/or modified sequence from LASV(ISTH0009-NIG-2011;Clade II)__AIT17405__NP (opt3)
ggggcgcugccuacggagguggcagccaucuccuucucggcaucaagcuuaccaugagcguguccaaggaggucaaaucuuuccuguggacccagucacucagaagggaacuuaguggcuacugcagcaacaucaagcugcaaguugugaaagacgcccaggcuuuguuacacgggcuggauuuuuccgagguaucuaaugugcagcggcuaaugcgcaagcagaaacgagacgauucggaccucaagcgucugagagaucuuaaccaagcagucaauaaccugguggaauugaagucaacacagcagaaaagcauucucaggguuggaacucugacgagugacgaucugcucaccuuagccgcggaccuggagaaacuuaaguccaaggugauacggacagaacgccccuugucuagcggugucuauaugggcaaucuguccacucagcaacuagagcagagaagggcucuccugaacaugaucgggauggugggaggcgcccaggguacccagccugggcgggauggaguaguucgcgugugggacgucaaaaauccagaucuucugaacaaucaauucggcacaaugccgucauugacccucgcaugucugacuaagcagggccagguggacuuaaacgaugccgugcuggcucucacagaccuugggcugauuuacaccgcaaaguaucccaauaguagcgacuuggaucgacuaucucaaucccauccuauccugaacauggucgacauuaaaaagucaagccucaauaucaguggauacaacuuuucucugggugccgcuguuaaagccggcgcgugcaugcuugaugggggaaauaugcuggagacgauaaaggugacuccacagaccauggacggcaucuugaaauccauucucaagguaaaaagaagccuggguauguucgugucggauacacccggggaaaggaacccuuaugagaacaucuuauacaagauuugucugucuggagacggcuggccauauaucgcaucccggacuucaauagucggccgugccugggaaaauaccacaguggaucuagagagugacgggaagccccagaaaguuggaagcgcugguuccaacaagucucuccagagcgccggcuuuccuaccgggcugacguacucacaacuuaugacuuugaaagauaguaugaugcagcuggacccauccgcaaagacauggauugauaucgagggacgcccggaagaccccguggagauugcucucuaccagccuaugagcggcugcuauauccacuucuuuagagaaccaaccgaccugaaacaguucaagcaagaugccaaguacucucaugguaucgacgucgcggaucuuuuucccgcccagccugggcugacuucagcagugauugaggcuuugccaaggaauaugguacucacaugucagggcagugacgauauaaaacggcuguuagacagccagggacgacgcgauaucaagcugauugacaucgcccuauccaaagcugauucuagaagguucgaaaacgccguuugggaccaaugcaaggaucucugucacaugcauaccggcguggucguggagaaaaagaagcgcgggggaaaagaggaaauaacgccccacugcgcacugauggacuguauuauguaugaugccgcugucucggguggccuuaauaucccgguguugcgggcgguucugccuagagacaugguguuuaggaccagcucccccaagguaguccucugaggacuagugcaucacauuuaaaagcaucucagccuaccaugagaauaagagaaagaaaaugaagaucaauagcuuauucaucucuuuuucuuuuucguugguguaaagccaacacccugucuaaaaaacauaaauuucuuuaaucauuuugccucuuuucucugugcuucaauuaauaaaaaauggaaagaaccuagaucuaaaaaaaaaaaaaaaaaaaaaaaaaaaaaaaaaaaaaaaaaaaaaaaaaaaaaaaaaaaaaaaaugcaucccccccccccccccccccccccccccccccaaaggcucuuuucagagccaccagaauu

SEQ ID NO: 10733 - RNA, 2092 nt, Artificial Sequence
  mRNA product Design i-2 comprising derived and/or modified sequence from LASV(ISTH2010-NIG-2012;Clade II)__AIT17483__NP (opt3)
ggggcgcugccuacggagguggcagccaucuccuucucggcaucaagcuuaccaugagcgccuccaaggaggugaaaucuuuccuguggacccagucacucagaagggaacuuaguggcuacugcagcaacaucaagcugcaagucguuaaagacgcucaggcauuguuacacgggcuggauuuuuccgaggugucuaauguacagcggcuaaugcgcaagcagaaacgagacgauucggaccucaagcgucugagagaucuuaaccaagccgugaauaaccuggucgaauugaagucaacacagcagaaaagcauucucagggugggaacucugacgagugacgaucugcucaccuuagcggcugaccuggagaaacuuaaguccaagguuauacggacagaacgccccuugucuagcgguguguauaugggcaaucuguccacucagcaacuagagcagagaagggcccuccugaaccuuaucgggauggucggaggcgcacaggguacccagccugggcgggauggagugguacgcguuugggacgugaaaaauccagaucuguugaacaaucaauucggcacaaugccgucacucacccuggccuguuuaacuaagcagggccaggucgaccugaacgaugcugugcucgcacuuacagaccugggguugauuuacaccgccaaguaucccaauaguagcgaccuagaucgacugucucaaucccauccuauccucaacaugguggacacgaaaaagucaagccugaauauuaguggauuuaacuucucucuuggugcugccgucaaagcgggcgcaugcaugcuggaugggggaaauauguuggagacuaucaagguuaccccacagacaauggacggcauacucaaauccauccugaaggugaaaaagagcuuagguauguuuguaucggauacucccggggaaagaaacccuuacgagaacauucuguauaagaucugucuaucuggagacggcuggccauacauugccuccaggaccucaaucgugggccgggcuugggaaaauacaaccgucgaucucgagagugacgggaaaccccacaaggugggaacggccgguagcaacaaaucccugcagucugcaggcuucccuacugggcuuacauauagccaguugaugacccugaaggauucaaugaugcaacucgacccaagugcuaaaacuuggauagauauugagggacguccggaagaccccguugagaucgcccuguaccagccuauguccggcugcuacauucacuuuuuccgcgaaccaacagaccuuaagcaguuuaagcaggaugcgaaauauagccaugguaucgacguggccgaucuguuccccgcacaaccuggguugaccucugcugucaucgaggcccucccaagaaauauggugcugacgugucagggcucagacgauauuaagagguuacuggacagucagggacggcgagauauaaaacuaaucgacauugcucucagcaaggccgauucccgcagauuugaaaacgcaguaugggaccagugcaaagaucugugucauaugcacaccggcguuguggucgagaagaagaaaaggggagggaaggaggaaaucacaccccacugcgcccuuauggacuguauaauguacgaugcugcggugucugguggcuugaauauuccgguccugcgggcagugcucccucgcgacaugguuuucagaacuucgagccccaaagugguacugugaggacuagugcaucacauuuaaaagcaucucagccuaccaugagaauaagagaaagaaaaugaagaucaauagcuuauucaucucuuuuucuuuuucguugguguaaagccaacacccugucuaaaaaacauaaauuucuuuaaucauuuugccucuuuucucugugcuucaauuaauaaaaaauggaaagaaccuagaucuaaaaaaaaaaaaaaaaaaaaaaaaaaaaaaaaaaaaaaaaaaaaaaaaaaaaaaaaaaaaaaaaugcaucccccccccccccccccccccccccccccccaaaggcucuuuucagagccaccagaauu

SEQ ID NO: 10734 - RNA, 2092 nt, Artificial Sequence
  mRNA product Design i-2 comprising derived and/or modified sequence from LASV(Lassa virus/H.sapiens-wt/NGA/2015/ISTH_0543;Clade II)__AVO03640__NP (opt3)
ggggcgcugccuacggagguggcagccaucuccuucucggcaucaagcuuaccaugagcgccuccaaggaggugaaaucuuuccuguggacccagucacucagaagggaacuuaguggcuacugcagcaacaucaagcugcaagucguuaaagacgcucaggcauuguuacacgggcuggauuuuuccgaggugucuaauguacagcggcuaaugcgcaagcagaaacgagacgauucggaccucaagcgucugagagaucuuaaccaagccgugaauaaccuggucgaauugaagucaacacagcagaaaagcauucucagggugggaacucugacgagugacgaucugcucaccuuagcggcugaccuggagaaacuuaaguccaagguuauacggacagaacgccccuugucuagcgguguguauaugggcaaucuguccacucagcaacuagagcagagaagggcccuccugaacaugaucgggauggucggaggcgcacaggguacccagccugggcgggauggagugguacgcguuugggacgugaaaaauccagaucuucugaacaaucaauucggcacaaugccgucauugacccucgccugucugacuaagcagggccaggucgacuuaaacgaugcugugcuggcacucacagaccuugggcugauuuacaccgccaaguaucccaauaguagcgacuuggaucgacuaucucaaucccauccuauccugaacaugguggacacgaaaaagucaagccucaauauuaguggauacaacuuuucucugggugcugccgucaaagcgggcgcaugcaugcuugaugggggaaauaugcuggagacuaucaagguuaccccacagacaauggacggcauauugaaauccauccucaaggugaaaaagagccuggguauguucguaucggauacucccggggaaagaaacccuuaugagaacauuuuauacaagaucugucugucuggagacggcuggccauauauugccuccaggaccucaaucgugggccgggcuugggaaaauacaaccgucgaucuagagagugacgggaaaccccagaaggugggaagcgccgguuccaacaaaucucuccagagcgcaggcuuuccuacggggcugacuuacucacaacuuaugacauugaaggauaguaugaugcagcuggacccauccgcuaaaaccuggauagauauugagggacguccggaagaccccguugagaucgcccucuaccagccuaugagcggcugcuauauucacuucuuucgcgaaccaacugaccugaagcaguucaagcaagaugcgaaauacucucaugguaucgacguggccgaucuuuuucccgcacagccugggcugacaucagcugucaucgaggccuugccaagaaauauggugcucaccugucagggcagugacgauauuaagaggcuguuagacagccagggacggaaagauauaaagcugaucgacauugcucuauccaaagccgauucucgacgcuucgaaaacgcaguaugggaccaaugcaaggaucucugucacaugcauacgggcguuguggucgagaagaaaaagagagggggaaaagaggaaaucacaccccacugcgcccugauggacuguauaauguaugaugcugcggugucggguggccuuaauauuccggucuugagggcagugcugccucgggacaugguuuuucgcaccagcucccccaaggugguacucugaggacuagugcaucacauuuaaaagcaucucagccuaccaugagaauaagagaaagaaaaugaagaucaauagcuuauucaucucuuuuucuuuuucguugguguaaagccaacacccugucuaaaaaacauaaauuucuuuaaucauuuugccucuuuucucugugcuucaauuaauaaaaaauggaaagaaccuagaucuaaaaaaaaaaaaaaaaaaaaaaaaaaaaaaaaaaaaaaaaaaaaaaaaaaaaaaaaaaaaaaaaugcaucccccccccccccccccccccccccccccccaaaggcucuuuucagagccaccagaauu

SEQ ID NO: 10735 - RNA, 2092 nt, Artificial Sequence
  mRNA product Design i-2 comprising derived and/or modified sequence from LASV(Lassa virus/H.sapiens-wt/NGA/2016/ISTH_0009;Clade II)__AVO03572__NP (opt3)
ggggcgcugccuacggagguggcagccaucuccuucucggcaucaagcuuaccaugagcgccuccaaggaggugaaaucuuuccuguggacccagucacucagaagggaacuuaguggcuacugcagcaacaucaagcugcaagucguuaaagacgcucaggcauuguuacacgggcuggauuuuuccgaggugucuaauguacagcggcuaaugcgcaagcagaaacgagacgauucggaccucaagcgucugagagaucuuaaccaagccgugaauaaccuggucgaauugaagucaacacagcagaaaagcauucucagggugggaacucugacgagugacgaucugcucaccuuagcggcugaccuggagaaacuuaaguccaagguuauacggacagaacgccccuugucuagcgguguguauaugggcaaucuguccacucagcaacuagagcagagaagggcccuccugaacaugaucgggauggucggaggcgcacaggguacccagccugggcgggauggagugguacgcguuugggacgugaaaaauccagaucuucugaacaaucaauucggcacaaugccgucauugacccucgccugucugacuaagcagggccaggucgacuuaaacgaugcugugcuggcacucacagaccuugggcugauuuacaccgccaaguaucccaauaguagcgacuuggaucgacuaucucaaucccauccuauccugaacaugguggacacgaaaaagucaagccucaauauuaguggauacaacuuuucucugggugcugccgucaaagcgggcgcaugcaugcuugaugggggaaauaugcuggagacuaucaagguuaccccacagacaauggacggcauauugaaauccauccucaaggugaaaaagagccuggguauguucguaucggauacucccggggaaagaaacccuuaugagaacauuuuauacaagaucugucugucuggagacggcuggccauauauugccuccaggaccucaaucgugggccgggcuugggaaaauacaaccgucgaucuagagagugacgggaaaccccagaaggugggaagcgccgguuccaacaaaucucuccagagcgcaggcuuuccuacggggcugacuuacucacaacuuaugacauugaaggauaguaugaugcagcuggacccauccgcuaaaaccuggauagauauugagggacguccggaagaccccguugagaucgcccucuaccagccuaugagcggcugcuauauucacuucuuucgcgaaccaacugaccugaagcaguucaagcaagaugcgaaauacucucaugguaucgacguggccgaucuuuuucccgcacagccugggcugacaucagcugucaucgaggccuugccaagaaauauggugcucaccugucagggcagugacgauauuaagaggcuguuagacagccagggacggcgagauauaaaacugaucgacauugcucuauccaaggccgauucucgcagauucgaaaacgcaguaugggaccaaugcaaagaucucugucacaugcauacgggcguuguggucgagaagaagaaaaggggagggaaggaggaaaucacaccccacugcgcccugauggacuguauaauguaugaugcugcggugucggguggccuuaauauuccggucuugcgggcagugcugccucgcgacaugguuuuuagaaccagcucccccaaagugguacucugaggacuagugcaucacauuuaaaagcaucucagccuaccaugagaauaagagaaagaaaaugaagaucaauagcuuauucaucucuuuuucuuuuucguugguguaaagccaacacccugucuaaaaaacauaaauuucuuuaaucauuuugccucuuuucucugugcuucaauuaauaaaaaauggaaagaaccuagaucuaaaaaaaaaaaaaaaaaaaaaaaaaaaaaaaaaaaaaaaaaaaaaaaaaaaaaaaaaaaaaaaaugcaucccccccccccccccccccccccccccccccaaaggcucuuuucagagccaccagaauu

SEQ ID NO: 10736 - RNA, 2092 nt, Artificial Sequence
  mRNA product Design i-2 comprising derived and/or modified sequence from LASV(Lassa virus/H.sapiens-wt/NGA/2016/ISTH_0017;Clade II)__AVO03568__NP (opt3)
ggggcgcugccuacggagguggcagccaucuccuucucggcaucaagcuuaccaugagcgccuccaaggaggugaaaucuuuccuguggacccagucacucagaagggaacuuaguggcuacugcagcuccaucaagcugcaagucguuaaagacgcucaggcauuguuacacgggcuggauuuuucugaggugucgaacguacagcggcuaaugcgcaagcagaaacgagacgauucagaccucaagcgucugagagaucuuaaucaagccgugaacaaucuggucgaacuuaagagcacacagcagaaaaguauucucagggugggaacucugacguccgacgaucugcucaccuuagcggcugaccuggagaaguugaaaucuaagguuauacggacagaacgccccuugagcuccgguguguauaugggcaaccugucaacucagcaacuagagcagagaagggcccuccugaauaugaucgggauggcaggaggcgcccaggguacccagccugggcgggauggagucgugcgcguaugggacguuaaaaacccagaucuucugaauaaccaauucggcacaaugccgaguuugacccucgcuugucugacuaagcagggccagguggacuuaaaugaugcaguccuggcccucacagaccuugggcugauuuacaccgcuaaguaucccaacagcucugacuuggaucgacuaucccaaucacauccuauccugaauaugguggacacgaaaaagagcagucucaacauuucuggauacaauuuuucccugggugccgcggugaaagcaggcgccugcaugcuugaugggggaaacaugcuggagacuaucaaggucaccccacagacaauggacggcauauugaaaagcauccucaagguuaaaagaucgcuggguauguucgugucugaugcucccggggaaaggaauccuuaugagaacauuuuauacaagaucugucuguccggagacggcuggccauauauugccucacggaccaguaucguaggccgugcaugggaaaacaccacaguggaucuagagagcgacgggaagccccagaaagucggagcuaccgguuccaauaagucucuccagagcgccggcuuuccuacggggcugacuuacucacaacuuaugacauugaaagauaguaugaugcagcuggacccauccgcgaagaccuggauagauauugagggacgcccggaagaccccguggagguugcccucuaccagccugugagcggcugcuauauccacuucuuuagagaaccaacugaccugaaacaguucaagcaagaugcaaaguacucucaugguauugacgucgcugaucuuuuucccgcccagccugggcugacaucagcugugaucgaggccuugccaaggaacaugguacucaccugucagggcagugacgauaucaaaaagcuguuagacagccagggacggaaagauauuaagcugauagacaucgcacuauccaaagccgauucucgacgcuucgaaaaugcuguuugggaccaaugcaaggaucucugucacaugcauacgggcguggucguggagaagaaaaagagagggggaaaagaggaaauuacuccccacugcgcgcugauggacuguaucauguaugaugcagccgucucggguggccuuaacauaccgguguugagggcuguucugccucgggacaugguguuucgcacaagcucccccaagguaguccucugaggacuagugcaucacauuuaaaagcaucucagccuaccaugagaauaagagaaagaaaaugaagaucaauagcuuauucaucucuuuuucuuuuucguugguguaaagccaacacccugucuaaaaaacauaaauuucuuuaaucauuuugccucuuuucucugugcuucaauuaauaaaaaauggaaagaaccuagaucuaaaaaaaaaaaaaaaaaaaaaaaaaaaaaaaaaaaaaaaaaaaaaaaaaaaaaaaaaaaaaaaaugcaucccccccccccccccccccccccccccccccaaaggcucuuuucagagccaccagaauu

SEQ ID NO: 10737 - RNA, 2092 nt, Artificial Sequence
  mRNA product Design i-2 comprising derived and/or modified sequence from LASV(Lassa virus/H.sapiens-wt/NGA/2018/ISTH_0959;Clade II)__AVV65100__NP (opt3)
ggggcgcugccuacggagguggcagccaucuccuucucggcaucaagcuuaccaugagcgccuccaaggaggugaaaucuuuccuguggacccagucacucagaagggaacuuaguggcuacugcagcaacaucaagcugcaagucguuaaagacgcucaggcauuguuacacgggcuggauuuuuccgaggugucuaauguacagcggcuaaugcgcaagcagaaacgagacgauucggaccucaagcgucugagagaucuuaaccaagccgugaauaaccuggucgaauugaagucaacacagcagaaaagcauucucagggugggaacucugacgagugacgaucugcucaccuuagcggcugaccuggagaaacuuaaguccaagguuauacggacagaacgccccuugucuagcgguguguauaugggcaaucuguccacucagcaacuagagcagagaagggcccuccugaaccuuaucgggauggucggaggcgcacaggguacccagccugggcgggauggagugguacgcguuugggacgugaaaaauccagaucuguugaacaaucaauucggcacaaugccgucacucacccuggccuguuuaacuaagcagggccaggucgaccugaacgauguggugcucgcucuuacagaccugggguugauuuacaccgcaaaguaucccaauaguagcgaccuagaucgacugucucaaucccauccuauccucaacauggucgacacgaaaaagucaagccugaauauuaguggauuuaacuucucucuuggugccgcuguuaaagccggcgcgugcaugcuggaugggggaaauauguuggagacuaucaaggugaccccacagacaauggacggcauacucaaauccauccugaaggugaaaaagagcuuagguauguuuguaucggauacucccggggaaagaaacccuuacgagaacauucuguauaagaucugucuaucuggagacggcuggccauacauugcauccaggaccucaaucgucggccgggccugggaaaauacaaccguggaucucgagagugacgggaaaccccacaagguuggaacggcugguagcaacaaaucccugcagucugccggcuucccuacugggcuuacauauagccaguugaugacccugaaggauucaaugaugcaacucgacccaagugcaaaaacuuggauagauauugagggacguccggaagaccccguggagaucgcucuguaccagccuauguccggcugcuacauucacuuuuuccgcgaaccaacagaccuuaagcaguuuaagcaggaugccaaauauagccaugguaucgacgucgcggaucuguuccccgcccaaccuggguugaccucugcagugaucgaggcucucccaagaaauaugguacugacgugucagggcucagacgauauuaagagguuacuggacagucagggacggaaagauauaaagcuaaucgacauugcccucagcaaaaccgauucccgacgcuuugaaaacgcuguuugggaccagugcaaggaucugugucauaugcacacaggcguggucguggagaagaaaaagagagggggaaaagaggaaaucacuccccacugcgcccuuauggacuguauaauguacgaugcagccgucucugguggcuugaauauuccggugcugagggcuguucucccucgggacaugguguuccgcaccucgagccccaagguaguccugugaggacuagugcaucacauuuaaaagcaucucagccuaccaugagaauaagagaaagaaaaugaagaucaauagcuuauucaucucuuuuucuuuuucguugguguaaagccaacacccugucuaaaaaacauaaauuucuuuaaucauuuugccucuuuucucugugcuucaauuaauaaaaaauggaaagaaccuagaucuaaaaaaaaaaaaaaaaaaaaaaaaaaaaaaaaaaaaaaaaaaaaaaaaaaaaaaaaaaaaaaaaugcaucccccccccccccccccccccccccccccccaaaggcucuuuucagagccaccagaauu

SEQ ID NO: 10738 - RNA, 2092 nt, Artificial Sequence
  mRNA product Design i-2 comprising derived and/or modified sequence from LASV(LASV003-NIG-2008;Clade II)__AIT17581__NP (opt3)
ggggcgcugccuacggagguggcagccaucuccuucucggcaucaagcuuaccaugagcgccuccaaggaggugaaaucuuuccuguggacccagucacucagaagggaacuuaguggcuacugcagcuccaucaagcugcaagucguuaaagacgcucaggcauuguuacacgggcuggauuuuucugaggugucgaacguacagcggcuaaugcgcaagcagaaacgagacgauucagaccucaagcgucugagagaucuuaaucaagccgugaacaaucuggucgaacuuaagagcacacagcagaaaagugugcucaggguuggaacucugacguccgacgaucugcucaccuuagcggcugaccuggagaaguugaaaucuaaggugauucggacagaacgccccuugagcuccggugucuauaugggcaaccugucagcccagcaacuagagcagagaaggacucuccugaauaugauagggauggugggaggcgcacaggguacccagccugggcgggauggaguaguucgcgugugggacgucaaaaacccagaucuucugaauaaccaauucggcacaaugccgaguuugacccucgccugucugacuaagcagggccagguggacuuaaaugaugugguccuggcucucacagaccuugggcugaucuacaccgcaaaguaucccaacagcucugacuuggaucgacuaucccaaucacauccuauucugagcaugguugacacgaaaaagaguucucucaauaucuccggauacaacuuuagccugggugccgcugugaaagccggcgcgugcaugcuugaugggggaaauaugcuggagacuauuaagguaaccccacagacaauggacggcaucuugaaaucgauacucaaggugaaaaagucucuggguauguucgucuccgauacucccggggaaagaaacccuuaugagaauaucuuauacaagauuugucugucaggagacggcuggccauauaucgcaaguaggaccagcauugugggccgggccugggaaaacacaaccguugaucuagaguccgacgggaaaccccagaaggugggaacggcugguucuaacaaaagccuccagucagccggcuuuccuacugggcugacauacagucaacuuaugaccuugaaggauuccaugaugcagcuggacccaagcgcaaaaacuuggaucgauauagagggacguccggaagaccccgucgagauugcucucuaccagccuaugucuggcugcuauauccacuucuuucgcgaaccaacagaccugaagcaguucaagcaagaugccaaauacucacaugguauugacgugaccgaucuuuuucccgcgcagccugggcugacgagugccguaaucgaggcauugccaagaaauaugguucucaccugucagggcagcgacgauaucaagaggcuguuagacucccagggacggcgagauauuaaacugauagacaucgcucuaucuaaggccgauucgcgcagauucgaaaacgcugugugggaccaaugcaaagaucucugucacaugcauacaggcgucguggucgagaagaagaaaaggggagggaaggaggaaauuacuccccacugcgcccugauggacuguaucauguaugaugcagccgugagcgguggccuuaauauaccgguuuugcgggcugugcugccucgcgacaugguauuuagaaccuccucacccaaagucgugcucugaggacuagugcaucacauuuaaaagcaucucagccuaccaugagaauaagagaaagaaaaugaagaucaauagcuuauucaucucuuuuucuuuuucguugguguaaagccaacacccugucuaaaaaacauaaauuucuuuaaucauuuugccucuuuucucugugcuucaauuaauaaaaaauggaaagaaccuagaucuaaaaaaaaaaaaaaaaaaaaaaaaaaaaaaaaaaaaaaaaaaaaaaaaaaaaaaaaaaaaaaaaugcaucccccccccccccccccccccccccccccccaaaggcucuuuucagagccaccagaauu

SEQ ID NO: 10739 - RNA, 2092 nt, Artificial Sequence
  mRNA product Design i-2 comprising derived and/or modified sequence from LASV(LASV035-NIG-2009;Clade II)__AIT17589__NP (opt3)
ggggcgcugccuacggagguggcagccaucuccuucucggcaucaagcuuaccaugagcgccuccaaggaggugaaaucuuuccuguggacccagucacucagaagggaacuuaguggcuacugcagcuccaucaagcugcaagucguuaaagacgcucaggcauuguuacacgggcuggauuuuucugaggugucgaacguacagcggcuaaugcgcaagcagaaacgagacgauucagaccucaagcgucugagagaucuuaaucaagccgugaacaaucuggucgaacuuaagagcacacagcagaaaaguauucucagggugggaacucugacguccgacgaucugcucaccuuagcggcugaccuggagaaguugaaaucuaagguuauacggacagaacgccccuugagcuccgguguguauaugggcaaccugucagcccagcaacuagagcagagaagggcacuccugaauaugaucgggauggucggaggcgcccaggguacucagccugggcgggauggagugguacgcguuugggacgugaaaaacccagaucuucugaauaaccaauucggcaccaugccgaguuugacacucgcuugucugaccaagcagggccaggucgacuuaaaugaugcagugcuggcccucacugaccuugggcugauuuacacagcuaaguaucccaacagcucugacuuggaucgacuaucccaaucacauccuauccugaauaugguggacaccaaaaagagcagucucaacauuucuggauacaauuuuucccugggugccgcggucaaagcaggcgccugcaugcuugaugggggaaacaugcuggagacgaucaagguuacuccacagaccauggacggcauauugaaaagcauccucaaggugaaaagaucgcuggguauguucguaucugauacacccggggaaaggaauccuuaugagaacauuuuauacaagaucugucuguccggagacggcuggccauauauugcuucacggaccaguaucgugggccgugccugggaaaacacuacagucgaucuagagagcgacgggaagccccagaaagugggaaccacggguuccaauaagucucuccagagcgcaggcuuuccuacugggcugacauacucacaacuuaugaccuugaaagauaguaugaugcagcuggacccauccgcuaagacuuggauagauauugagggacgcccggaagaccccguugagaucgcccucuaccagccuaugagcggcugcuauauucacuucuuuagagaaccaacagaccugaaacaguucaagcaagaugcgaaguacucucaugguaucgacguggccgaucuuuuucccgcacagccugggcugaccucagcugucaucgaggccuugccaaggaacauggugcucacgugucagggcagugacgauauuaaaaagcuguuagacagccagggacggcgagauauaaaacugaucgacauugcucuauccaaggccgauucucgcaaauucgaaaaugcaguaugggaccaaugcaaggaucucugucacaugcauaccggcguuguggucgagaagaaaaagagagggggaaaagaggaaaucacaccccacugcgcccugauggacuguauaauguaugaugcugcggugucggguggccuuaacauuccggucuugagggcagugcugccucgggacaugguuuuucgcacuagcucccccaaggugguacucugaggacuagugcaucacauuuaaaagcaucucagccuaccaugagaauaagagaaagaaaaugaagaucaauagcuuauucaucucuuuuucuuuuucguugguguaaagccaacacccugucuaaaaaacauaaauuucuuuaaucauuuugccucuuuucucugugcuucaauuaauaaaaaauggaaagaaccuagaucuaaaaaaaaaaaaaaaaaaaaaaaaaaaaaaaaaaaaaaaaaaaaaaaaaaaaaaaaaaaaaaaaugcaucccccccccccccccccccccccccccccccaaaggcucuuuucagagccaccagaauu

SEQ ID NO: 10740 - RNA, 2092 nt, Artificial Sequence
  mRNA product Design i-2 comprising derived and/or modified sequence from LASV(LASV1000-NIG-2009;Clade II)__AIT17783__NP (opt3)
ggggcgcugccuacggagguggcagccaucuccuucucggcaucaagcuuaccaugagcgccuccaaggaggugaaaucuuuccuguggacccagucacucagaagggaacuuaguggcuacugcagcaacaucaagcugcaagucguuaaagacgcucaggcauuguuacacgggcuggauuuuuccgaggugucuaauguacagcggcuaaugcgcaagcagaaacgagacgauucggaccucaagcgucugagagaucuuaaccaagccgugaauaaccuggucgaauugaagucaacacagcagaaaagcauucucagggugggaacucugacgagugacgaucugcucaccuuagcggcugaccuggagaaacuuaaguccaagguuauacggacagaacgccccuugucuagcgguguguauaugggcaaucuguccacucagcaacuagagcagagaagggcccuccugaacaugaucgggauggucggaggcgcacaggguacccagccugggcgggauggagugguacgcguuugggacgugaaaaauccagaucuucugaacaaucaauucggcacaaugccgucauugacccucgccugucugacuaagcagggccaggucgacuuaaacgauguggugcuggcucucacagaccuugggcugauuuacaccgcaaaguaucccaauaguagcgacuuggaucgacuaucucaaucccauccuauccugaacauggucgacacgaaaaagucaagccucaauauuaguggauacaacuuuucucugggugccgcuguuaaagccggcgcgugcaugcuugaugggggaaauaugcuggagacuaucaaggugaccccacagacaauggacggcauauugaaauccauccucaaggugaaaaagagccuggguauguucguaucggauacucccggggaaagaaacccuuaugagaacauuuuauacaagaucugucugucuggagacggcuggccauauauugcauccaggaccucaaucgucggccgggccugggaaaauacaaccguggaucuagagagugacgggaaaccccagaagguuggaacggcugguagcaacaaaucccuccagucugccggcuuuccuacugggcugacauacagccaacuuaugaccuugaaggauucaaugaugcagcuggacccaagugcaaaaacuuggauagauauugagggacguccggaagaccccguggagaucgcucucuaccagccugucuccggcugcuauauucacuucuuucgcgaaccaacagaccugaagcaguucaagcaagaugccaaauacagccaugguaucgacguggcggaucuuuuucccgcccagccugggcugaccucugcaguaaucgaggcuuugccaagaaauaugguucucacgugucagggcucagacgauauuaagaggcuguuagacagucagggacggcgagauauaaaacugaucgacauugcccuaagcaaggcugauucccgcagauucgaaaacgccgugugggaccaaugcaaagaucucugucacaugcauaccggcgucguggucgagaagaagaaaaggggagggaaggaggaaaucacaccccacugcgcacugauggacuguauaauguaugaugccgcugugucugguggccuuaauauuccgguuuugcgggcggugcugccucgcgacaugguauuuagaacuucgagccccaaagucgugcucugaggacuagugcaucacauuuaaaagcaucucagccuaccaugagaauaagagaaagaaaaugaagaucaauagcuuauucaucucuuuuucuuuuucguugguguaaagccaacacccugucuaaaaaacauaaauuucuuuaaucauuuugccucuuuucucugugcuucaauuaauaaaaaauggaaagaaccuagaucuaaaaaaaaaaaaaaaaaaaaaaaaaaaaaaaaaaaaaaaaaaaaaaaaaaaaaaaaaaaaaaaaugcaucccccccccccccccccccccccccccccccaaaggcucuuuucagagccaccagaauu

SEQ ID NO: 10741 - RNA, 2092 nt, Artificial Sequence
  mRNA product Design i-2 comprising derived and/or modified sequence from LASV(LASV221-NIG-2010;Clade II)__AIT17625__NP (opt3)
ggggcgcugccuacggagguggcagccaucuccuucucggcaucaagcuuaccaugagcgccuccaaggaggugaaaucuuuccuguggacccagucacucagaagggaacuuaguggcuacugcagcuccaucaagcugcaagucguuaaagacgcucaggcauuguuacacgggcuggauuuuucugaggugucgaacguacagcggcuaaugcgcaagcagcgacgugacgauucagaccucaaaagacugagggaucuuaaucaagccgugaacaaucuggucgaacucaagagcacacagcagaagaguauuuugcgggugggaacucugacguccgacgaucugcucaccuuagcggcugaccuggagaaacuuaagucuaaaguuauacgcacagaaagacccuugagcuccgguguguauaugggcaaccugucaacucagcaacuagagcagaggcgggcccuccugaauaugaucgggauggucggaggcgcacaggguacccagccugggcgcgauggagugguacgaguuugggacgugaagaacccagaucuucugaauaaccaauucggcacaaugccgaguuugacccucgccugucugacuaaacagggccaggucgacuuaaaugaugcugugcuggcacucacagaccuugggcugauuuacaccgccaaguaucccaacagcucugacuuggauagacuaucccaaucacauccuauccugaauaugguggacacgaagaaaagcagucucaacauuucuggauacaauuuuucccugggugcugccgucaaggcgggcgcaugcaugcuugaugggggaaacaugcuggagacuaucaaaguuaccccacagacaguggacggcauacucaagagcaucuugaaaguaaagaggucgcuggguauguucgugucugauacucccggggaacggaauccuuaugagaacauuuuauacaaaaucugucuguccggagacggcuggccauauauugccucacguaccaguaucgucggccgcgcuugggaaaacacaaccguggaucuagagagcgacgggaagccccagaagguuggaacggccgguuccaauaaaucucuccagagcgcaggcuuuccuacugggcugacauacucacaacuuaugaccuugaaggauaguaugaugcagcuggacccauccgcuaaaacuuggauagauauugagggaagaccggaagaccccguggagaucgcccucuaccagccuaugagcggcugcuauauucacuucuuuagggaaccaacagaccugaagcaguucaaacaagaugcgaaguacucucaugguaucgacgucgccgaucuuuuucccgcacagccugggcugaccucagcugugaucgaggccuugccacggaacaugguacucacgugucagggcagugacgauauuaagcgacuguuagacagccagggacgcagagauauaaaacugaucgacauugcucuauccaaggccgauucuaggaaauucgaaaaugcaguuugggaccaaugcaaggaucucugucacaugcauaccggcguggucguggagaaaaagaagcgcgggggaaaagaggaaaucacaccccacugcgcccugauggacuguauaauguaugaugcugcggucucggguggccuuaacauuccgguguugcgggcaguucugccuagagacaugguguuuaggacuagcucccccaagguaguccucugaggacuagugcaucacauuuaaaagcaucucagccuaccaugagaauaagagaaagaaaaugaagaucaauagcuuauucaucucuuuuucuuuuucguugguguaaagccaacacccugucuaaaaaacauaaauuucuuuaaucauuuugccucuuuucucugugcuucaauuaauaaaaaauggaaagaaccuagaucuaaaaaaaaaaaaaaaaaaaaaaaaaaaaaaaaaaaaaaaaaaaaaaaaaaaaaaaaaaaaaaaaugcaucccccccccccccccccccccccccccccccaaaggcucuuuucagagccaccagaauu

SEQ ID NO: 10742 - RNA, 2092 nt, Artificial Sequence
  mRNA product Design i-2 comprising derived and/or modified sequence from LASV(LASV237-NIG-2010;Clade II)__AIT17639__NP (opt3)
ggggcgcugccuacggagguggcagccaucuccuucucggcaucaagcuuaccaugagcgccuccaaggaggugaaaucuuuccuguggacccagucacucagaagggaacuuaguggcuacugcagcaacaucaagcugcaagucguuaaagacgcucaggcauuguuacacgggcuggauuuuuccgaggugucuaauguacagcggcuaaugcgcaagcagaaacgagacgauucggaccucaagcgucugagagaucuuaaccaagccgugaauaaccuggucgaauugaagucaacacagcagaaaagcauucucagggugggaacucugacgagugacgaucugcucaccuuagcggcugaccuggagaaacuuaaguccaagguuauacggacagaacgccccuugucuagcgguguguauaugggcaaucuguccacucagcaacuagagcagagaagggcccuccugaacaugaucgggauggucggaggcgcacaggguacccagccugggcgggauggagugguacgcguuugggacgugaaaaauccagaucuucugaacaaucaauucggcacaaugccgucauugacccucgccugucugacuaagcagggccaggucgacuuaaacgaugcugugcuggcacucacagaccuugggcugauuuacaccgccaaguaucccaauaguagcgacuuggaucgacuaucucaaucccauccuauccugaacaugguggacauuaaaaagucaagccucaauaucaguggauacaacuuuucucugggugcugccgucaaagcgggcgcaugcaugcuugaugggggaaauaugcuggagacgauaaagguuacuccacagaccauggacggcaucuugaaauccauucucaaggugaaaagaagccuggguauguucguaucggauacacccggggaaaggaacccuuaugagaacaucuuauacaagauuugucugucuggagacggcuggccauauaucgccucccggacuucaauagugggccgugcuugggaaaauaccacagucgaucuagagagugacgggaagccccagaaagugggaagcgccgguuccaacaagucucuccagagcgcaggcuuuccuaccgggcugacguacucacaacuuaugacuuugaaagauaguaugaugcagcuggacccauccgcuaagacauggauugauaucgagggacgcccggaagaccccguugagauugcccucuaccagccuaugagcggcugcuauauccacuucuuuagagaaccaaccgaccugaaacaguucaagcaagaugcgaaguacucucaugguaucgacguggccgaucuuuuucccgcacagccugggcugacuucagcugucauugaggccuugccaaggaauauggugcucacaugucagggcagugacgauauaaaacggcuguuagacagccagggacgacgcgauaucaagcugauugacaucgcucuauccaaagccgauucuagaagguucgaaaacgcaguaugggaccaaugcaaggaucucugucacaugcauaccggcguuguggucgagaaaaagaagcgcgggggaaaagaggaaauaacgccccacugcgcccugauggacuguauuauguaugaugcugcggugucggguggccuuaauaucccggucuugcgggcagugcugccuagagacaugguuuuuaggaccagcucccccaaggugguacucugaggacuagugcaucacauuuaaaagcaucucagccuaccaugagaauaagagaaagaaaaugaagaucaauagcuuauucaucucuuuuucuuuuucguugguguaaagccaacacccugucuaaaaaacauaaauuucuuuaaucauuuugccucuuuucucugugcuucaauuaauaaaaaauggaaagaaccuagaucuaaaaaaaaaaaaaaaaaaaaaaaaaaaaaaaaaaaaaaaaaaaaaaaaaaaaaaaaaaaaaaaaugcaucccccccccccccccccccccccccccccccaaaggcucuuuucagagccaccagaauu

SEQ ID NO: 10743 - RNA, 2092 nt, Artificial Sequence
  mRNA product Design i-2 comprising derived and/or modified sequence from LASV(LASV253-NIG-2011;Clade II)__AIT17671__NP (opt3)
ggggcgcugccuacggagguggcagccaucuccuucucggcaucaagcuuaccaugagcgccuccaaggaggugaaaucuuuccuguggacccagucacucagaagggaacuuaguggcuacugcagcuccaucaagcugcaagucguuaaagacgcucaggcauuguuacacgggcuggauuuuucugaggugucgaacguacagcggcuaaugcgcaagcagaaacgagacgauucagaccucaagcgucugagagaucuuaaucaagccgugaacaaucuggucgaacuuaagagcacacagcagaaaagugugcucaggguuggaacucugacguccgacgaucugcucaccuuagcggcugaccuggagaaguugaaaucuaaggugauucggacagaacgccccuugagcuccggugucuauaugggcaaccugucaacucagcaacuagagcagagaagggcccuccugaauaugauagggauggugggaggcgcacaggguacccagccugggcgggauggaguaguucgcgugugggacgucaaaaacccagaucuucugaauaaccaauucggcacaaugccgaguuugacccucgccugucugacuaagcagggccagguggacuuaaaugaugugguccuggcucucacagaccuugggcugaucuacaccgcaaaguaucccaacagcucugacuuggaucgacuaucccaaucacauccuauucugaauaugguugacacgaaaaagagcagucucaacaucucuggauacaauuuuucccugggugccgcugugaaagccggcgcgugcaugcuugaugggggaaacaugcuggagacuauuaagguaaccccacagacaauggacggcaucuugaaaagcauacucaaggugaaaaagucgcuggguauguucgucucugauacucccggggaaagaaauccuuaugagaacaucuuauacaagauuugucuguccggagacggcuggccauauaucgcaucaaggaccaguauugugggccgggccugggaaaacacaaccguugaucuagagagcgacgggaaaccccagaaggugggaacggcugguuccaauaaaucucuccagagcgccggcuuuccuacugggcugacauacucacaacuuaugaccuugaaggauaguaugaugcagcuggacccauccgcaaaaacuuggaucgauauagagggacguccggaagaccccgucgagauugcucucuaccagccuaugagcggcugcuauauccacuucuuucgcgaaccaacagaccugaagcaguucaagcaagaugccaaauacucucaugguauugacgugaccgaucuuuuucccgcgcagccugggcugacgucagccguaaucgaggcauugccaagaaacaugguucucaccugucagggcagugacgauaucaagaggcuguuagacagccagggacggcgagauauuaaacugauagacaucgcucuauccaaggccgauucucgcagauucgaaaaugcugugugggaccaaugcaaagaucucugucacaugcauacaggcgucguggucgagaagaagaaaaggggagggaaggaggaaauuacuccccacugcgcccugauggacuguaucauguaugaugcagccgugucggguggccuuaacauaccgguuuugcgggcugugcugccucgcgacaugguauuuagaaccagcucccccaaagucgugcucugaggacuagugcaucacauuuaaaagcaucucagccuaccaugagaauaagagaaagaaaaugaagaucaauagcuuauucaucucuuuuucuuuuucguugguguaaagccaacacccugucuaaaaaacauaaauuucuuuaaucauuuugccucuuuucucugugcuucaauuaauaaaaaauggaaagaaccuagaucuaaaaaaaaaaaaaaaaaaaaaaaaaaaaaaaaaaaaaaaaaaaaaaaaaaaaaaaaaaaaaaaaugcaucccccccccccccccccccccccccccccccaaaggcucuuuucagagccaccagaauu

SEQ ID NO: 10744 - RNA, 2092 nt, Artificial Sequence
  mRNA product Design i-2 comprising derived and/or modified sequence from LASV(LASV254-NIG-2011;Clade II)__AIT17675__NP (opt3)
ggggcgcugccuacggagguggcagccaucuccuucucggcaucaagcuuaccaugagcgccuccaaggaggugaaaucuuuccuguggacccagucacucagaagggaacuuaguggcuacugcagcuccaucaagcugcaagucguuaaagacgcucaggcauuguuacacgggcuggauuuuucugaggugucgaacguacagcggcuaaugcgcaagcagaaacgagacgauucagaccucaagcgucugagagaucuuaaucaagccgugaacaaucuggucgaacucaagagcacacagcagaaaaguguguugaggguuggaacucugacguccgacgaucugcucaccuuagcggcugaccuggagaaacuuaaaucuaaggugauucggacagaacgccccuugagcuccggugucuauaugggcaaccugucaacucagcaacuagagcagagaagggcccuccugaauaugauagggauggugggaggcgcacaggguacccagccugggcgggauggaguaguucgcgugugggacgucaaaaacccagaucuucugaauaaccaauucggcacaaugccgaguuugacccucgccugucugacuaagcagggccagguggacuuaaaugaugcugugcuggcacucacagaccuugggcugaucuacaccgccaaguaucccaacagcucugacuuggaucgacuaucccaaucacauccuauucugaauauggucgacacgaaaaagagcagucucaacaucucuggauacaauuuuucccugggugcugccguuaaagcgggcgcaugcaugcuugaugggggaaacaugcuggagacuauuaaggugaccccacagacaauggacggcaucuugaaaagcauacucaagguaaagaagucgcuggguauguucgugucugauacucccggggaaagaaauccuuaugagaacaucuuauacaagauuugucuguccggagacggcuggccauauaucgccucaaggaccaguauugucggccgggcuugggaaaacacaaucguggaucuagagagcgacgggaaaccccagaagguuggaaccgccgguuccaauaaaucucuccagagcgcaggcuuuccuacggggcugacuuacucacaacuuaugacauugaaggauaguaugaugcagcuggacccauccgcuaaaaccuggauagauauugagggacguccggaagaccccguggagaucgcccucuaccagccuaugagcggcugcuauauucacuucuuucgcgaaccaacugaccugaagcaguucaagcaagaugcgaaauacucucaugguaucgacgucgccgaucuuuuucccgcacagccugggcugacaucagcugugaucgaggccuugccaagaaacaugguacucaccugucagggcagugacgauauuaagaggcuguuagacagccagggacggcgagauauaaaacugaucgacauugcucuauccaaggccgauucucgcagauucgaaaaugcaguuugggaccaaugcaaagaucucugucacaugcauacgggcguggucguggagaagaagaaaaggggagggaaggaggaaaucacaccccacugcgcccugauggacuguauaauguaugaugcugcggucucggguggccuuaacauuccgguguugcgggcaguucugccucgcgacaugguguuuagaaccagcucccccaaaguaguccucugaggacuagugcaucacauuuaaaagcaucucagccuaccaugagaauaagagaaagaaaaugaagaucaauagcuuauucaucucuuuuucuuuuucguugguguaaagccaacacccugucuaaaaaacauaaauuucuuuaaucauuuugccucuuuucucugugcuucaauuaauaaaaaauggaaagaaccuagaucuaaaaaaaaaaaaaaaaaaaaaaaaaaaaaaaaaaaaaaaaaaaaaaaaaaaaaaaaaaaaaaaaugcaucccccccccccccccccccccccccccccccaaaggcucuuuucagagccaccagaauu

SEQ ID NO: 10745 - RNA, 2092 nt, Artificial Sequence
  mRNA product Design i-2 comprising derived and/or modified sequence from LASV(Nig08-04;Clade II)__ADU56611__NP (opt3)
ggggcgcugccuacggagguggcagccaucuccuucucggcaucaagcuuaccaugagcgccuccaaggaggugaaaucuuuccuguggacccagucacucagaagggaacuuaguggcuacugcagcaacaucaagcugcaagucguuaaagacgcucaggcauuguuacacgggcuggauuuuuccgaggugucuaauguacagcggcuaaugcgcaagcagaaacgagacgauggagaccucaagcgucugagagaucuuaaccaagccgugaauaaccuggucgaauugaagucgacacagcagaaaucagugcucaggguugguacucugacgagcgacgaucugcucaccuuagcggcugaccuggagaaacuuaagaguaaggugauucggacagaacgccccuuguccucuggcgucuauauggggaaucugagcacucagcaacuagagcagagaaaagcccuccuguccaugauaggaauggugggcggugcacaggggacccagccuggaagggauggcguaguucgggugugggacgucaagaacccagaucuucugaauaaccaauucggcacaaugccgucauugacccucgccugucugacuaagcagggacagguggacuuaaaugaugcugugcuggcacucacagaccuugggcugaucuacaccgccaaauaucccaacaguagcgacuuggaucgccuaucucaaucccauccuauucugaauauggucgacacgaagaaaucaagccucaacaucagugguuacaauuuuucucugggcgcugccguuaaggcgggggcaugcaugcuugauggaggcaacaugcuggagacuauuaaagugaccccacagacaauggacgguaucuugaaguccauacucaaaguaaagcgaagccuggggauguucgugucggauacucccggagaaagaaauccuuaugagaacaucuuauacaagauuugucugucuggcgacggcuggccauauaucgccuccaggaccucaauugucgggcgggcuugggaaaacacaaccguggaucuagagagugacggaaaaccccagaagguugguacggccggcagcaauaaaucccuccagucugcaggguuuccuacuggacugacauacagccaacuuaugaccuugaaggauucaaugaugcagcuggacccaagugcuaaaacuuggaucgauauagagggccguccggaagaccccguggagauugcccucuaccagccuauguccgguugcuauauccacuucuuucgcgaaccaacagaccugaagcaguucaagcaagaugcgaaauacagccaugggauugacgucaccgaucuguuuucugcccagcccggccuuacgucagcagugaucgaggcuuugccuagaaacaugguacucaccugucagggaagugacgauaucaagaaacuguuagacagccagggcaggcgggauauuaagcugauagacaucucccuaaauaaagccgauucucgacgcuucgaaaacgcuguuugggaccaaugcaaggaucucugucacaugcauacagggguggucguggagaagaaaaagagaggagguaaagaggaaauuacuccacacugcgcccugauggacuguaucauguuugaugcagccgucucgggcgggcuuaauauacccauuuugagggcugugcugccgcgggacaugguuuuccgcaccagcuccccuaaggugguacucugaggacuagugcaucacauuuaaaagcaucucagccuaccaugagaauaagagaaagaaaaugaagaucaauagcuuauucaucucuuuuucuuuuucguugguguaaagccaacacccugucuaaaaaacauaaauuucuuuaaucauuuugccucuuuucucugugcuucaauuaauaaaaaauggaaagaaccuagaucuaaaaaaaaaaaaaaaaaaaaaaaaaaaaaaaaaaaaaaaaaaaaaaaaaaaaaaaaaaaaaaaaugcaucccccccccccccccccccccccccccccccaaaggcucuuuucagagccaccagaauu

SEQ ID NO: 10746 - RNA, 2095 nt, Artificial Sequence
  mRNA product Design i-2 comprising derived and/or modified sequence from LASV(GA391;Clade III)__AAA46284__NP (opt3)
ggggcgcugccuacggagguggcagccaucuccuucucggcaucaagcuuaccaugagcgccuccaaggaggugagaucuugccuguggacccagucacucaggcgggaacuuaguggcuacuguagcaacaucaaacugcaagucguuaaggacgcucaggcauuguuacacgggcuggauuucuccgaggugucuaauguacagcgccuaaugcgaaaacagaagcgugacgauggagaccucaaaagacugagggaucuuaaccaagccgugaauaaccuggucgaauugaagucgacacagcagaagucagugcuccggguugguacucugagcagugacgaucugcucauuuuagcggcugaccuggagaaacuuaaguccaaagugacgcgcaccgaaagacccuugucuagcggcgucuauauggggaaucuguccucacagcaacuagaucagaggcgggcccuccugaacaugauaggaaugacaggcgugaguggugggggaaagggcgcaagcaauggcaucguacgcguuugggacgugaaaaacgccgagcuucugaauaaccaguuugggacuaugccuucuuugacccucgcuugccugacaaagcagggacaagucgauuuaaaugacgcagugcaggcccugaccgaucucggucuuauuuacacugcuaaguauccaaacuccucagaccuggaccgauugagccagagucauccgauccuaaauaugauugauaccaaaaagucuucccugaacaucagcggcuacaauuucucgcucggggccgcggugaaagcaggagccuguaugcuggacggcgguaacaugcuugagacaauaaaggucucuccccaaacgauggaugggauccugaaauccauuuugaagguuaaaaagucacucggaauguuugugagugacacuccuggcgaaagaaacccauaugagaauauccuguacaagauuugcuuaagcggcgaugggugguccuauaucgcuucuaggaccagcauaguaggacgggccugggaaaacacaguggucgaccuggagcaggauaauaaaccccagaagauugguaacggcgggucaaauaaaagucuacaguccgcaggauucgcugccggccucaucuacagccaacugaugacucuuaaggacuuuaaauguuucaacuugauuccuaaugcgaagaccuggauggauaucgagggucguccagaagaccccguggagaucgcccuguaccagccuucuucagggugcuauguucacuuuuuccgcgaaccaacagaucucaagcaguuuaaacaggacgcaaaguacagucauggcagagacgugaccgaucuguucgcugcccaaccgggacuuacgagcgcugucauugaggcccugcccaggaacauggugauaacuugucagggcuccgaagacauccggaaauugcucgagucucaggggcgacgcgauauuaagcugaucgacauaacauuaucgaaagcagauagcagaaaguuugagaaugccguaugggaccaguucaaggaucugugccacaugcauaccggaguuguggucgagaaaaagaaaagggguggcaaggaagaaauuacuccucacugugcucuaauggacugcaucauguuugaugcggcaguguccgggggacucgacgccaaaguccugcgggugguucuuccacgcgauaugguguucagaacaucaacccccaagguagucuugugaggacuagugcaucacauuuaaaagcaucucagccuaccaugagaauaagagaaagaaaaugaagaucaauagcuuauucaucucuuuuucuuuuucguugguguaaagccaacacccugucuaaaaaacauaaauuucuuuaaucauuuugccucuuuucucugugcuucaauuaauaaaaaauggaaagaaccuagaucuaaaaaaaaaaaaaaaaaaaaaaaaaaaaaaaaaaaaaaaaaaaaaaaaaaaaaaaaaaaaaaaaugcaucccccccccccccccccccccccccccccccaaaggcucuuuucagagccaccagaauu

SEQ ID NO: 10747 - RNA, 2092 nt, Artificial Sequence
  mRNA product Design i-2 comprising derived and/or modified sequence from LASV(Nig08-A19;Clade III)__ADU56619__NP (opt3)
ggggcgcugccuacggagguggcagccaucuccuucucggcaucaagcuuaccaugagcgccuccaaggaggugaaaucuuuccuguggacccagucacucagaagggaacuuaguggcuacugcagcaacaucaagcugcaagucguuaaagacgcucaggcauuguuacacgggcuggauuuuuccgaggugucuaauguacagcggcuaaugcgcaagcagaaacgagacgauggagaccucaagcgucugagagaucuuaaccaagccgugaauaaccuggucgaauugaagucgacacagcagaaaucagugcucaggguugguacucugagcagugacgaucugcucguguuagcggcugaccuggagaaacuuaaguccaaggucgugcggacggaacgccccuugucuagcggcauuuauauggggaaucuguccucacagcaacuagaucagagaaaagcccuccugaacaugauaggaaugaccggcgguaaugggggaaggaacacaaccagugacggcaucguacggguuugggaugugaagaaugcagagcuucugaacaaucaguucggcacuaugccuagcuugacacucgccugucugaccaagcaggggcaagucgacuuaaacgaugcugugcaggcacugacugaccucggacuuauuuacacagccaaauauccaaauucuuccgaccuggaucgcuuggcucagucacauccgauccuaaacaugauugacaccaagaaaagcagucugaauaucucugguuacaacuuuucccucggcgccgcggugaaggcaggggccugcaugcuggauggaggcaacaugcuugagacgauaaaagucagcccccaaacuauggacgguauccugaagucgauuuugaaaguuaagcgaucucucgggauguucaucuccgauaccccuggagaaagaaauccauaugagaacauucuguacaagaucuguuuaucaggcgacggcuggcccuauauagcuaguaggacaagcauuguggggcgggccugggaaaauacuguaguggaucuggaguccgacaacaaaccucagaagaccggaaaugguggcucuaacaaaagccuacagucagcaggguuugcugccggacucacauacagucagcugaugacccuuaaggauuccauguugcaacuggacccaaaugcgaaaacguggauggauaucgagggccgucccgaagacccugucgagauugcccucuaccagccaagcucugguugcuauauccacuucuuucgcgaaccgacugaccugaagcaguucaagcaggaugcaaaauacucacaugggaucgacgugacagaucuuuuugcugcccaacccggccugaccagugcuguuauugaggccuugccuagaaacauggugauaacuugucagggaagcgaagacaucaggaagcuccuggagucccagggccggcgagauauuaaauuaaucgacauaucucugucgaaggucgauagccgcaaauucgagaaugcagugugggaccaguuuaaggaucuaugccacaugcauacagggauuguaguugaaaagaaaaagagaggagguaaagaggaaaucaccccacacugugcccucauggacugcaucauguucgaugcugcgguguccggcggggucgacgcaaaggugcugagggccguccuuccccgggauaugguguuucgcacgucaaccccuaaaguuguguugugaggacuagugcaucacauuuaaaagcaucucagccuaccaugagaauaagagaaagaaaaugaagaucaauagcuuauucaucucuuuuucuuuuucguugguguaaagccaacacccugucuaaaaaacauaaauuucuuuaaucauuuugccucuuuucucugugcuucaauuaauaaaaaauggaaagaaccuagaucuaaaaaaaaaaaaaaaaaaaaaaaaaaaaaaaaaaaaaaaaaaaaaaaaaaaaaaaaaaaaaaaaugcaucccccccccccccccccccccccccccccccaaaggcucuuuucagagccaccagaauu

SEQ ID NO: 10748 - RNA, 2092 nt, Artificial Sequence
  mRNA product Design i-2 comprising derived and/or modified sequence from LASV(G1180-SLE-2010;Clade IV)__AIT17169__NP (opt3)
ggggcgcugccuacggagguggcagccaucuccuucucggcaucaagcuuaccaugagcgccuccaaggagaucaaaucuuuccuguggacccagucacucagaagggaacuuaguggcuacugcagcaacauuaagcugcaaguggucaaagacgcucaggcauuguuacacgggcuggauuuuuccgagguuucuaaugugcagcggcuaaugcgcaaggaacgacgugacgauaacgaccucaaaagacugagggaucuuaaucaggccguaaacaaucugguggaguugaagucgacacaacagaagucaauacuccgggucggaacucugacgagcgacgaucugcucaucuuagcggcugaccuggaaaaacuuaagaguaaagugauucgcaccgagagacccuuguccgccgguguuuauaugggcaaccugucuagccagcagcuagaucaaaggcgggcacuccuguccaugaucgggaugucaaguggaaaucagcgcgcccaggcuggccgagacgguguggucagagugugggauguaaagaacguugagcuucugaauaaccaguucgggacaaugccuagcuugacucucgcaugucugaccaaacaaggacagguggacuuaaaugaugccguccaggcucugacagaccucggccuuauuuacaccgccaaguauccaaacacuucugaccuggauagguugacacaaucccauccgauccuaaauaugauagacaccaagaaaucaagccugaacaucaguggcuacaauuuuucucucggggcggcagugaaggccggagcuugcaugcuggaugguggcaacaugcuugaaacgauuaaagugagcccccagacuauggacgggauccugaaguccauuuugaaagucaagaaagcccucggaauguucaucucggauaccccuggcgagcggaacccauaugaaaauauacuguacaagauuuguuuaucuggugacggguggcccuauaucgcaucccguacaucaauuacuggacgcgcuugggagaacaccguuguggaucuggagagugacggcaagccucagaaagccggcagcaauaacuccaauaagucucuacagagcguaggguuuacagcgggacucaccuacucacaacugaugacgcuuaaagaugccauguugcagcuggacccaaacgcaaagacuuggauggauaucgaagguagacccgaggacccuguggaaaucgcucucuaccagccaaguuccggcugcuauauucacuucuuuagggagccgacagaccugaaacaguucaagcaagaugccaaguacagccaugggauagacgucaccgaucuuuuugcugcccagcccggacugacuucugcagugaucgacgccuugccucggaauaugguuauuacaugucagggcucagaugacauccgaaaacuccuggaaagucagggucgcaaggauauaaaauuaauugacaucgcucugagcaagaccgauuccagaaaauaugagaacgcggugugggaccaauacaaggaucuaugccacaugcauacgggggucgugguagagaagaaaaagaggggcggaaaagaagagaucaccccacacugugcacucauggacugcauuauguucgaugccgcuguuucuggcgggcugaauacaucggugcuucgggccgucuugccccgcgacaugguguuuagaacuagcaccccuagggucgugcugugaggacuagugcaucacauuuaaaagcaucucagccuaccaugagaauaagagaaagaaaaugaagaucaauagcuuauucaucucuuuuucuuuuucguugguguaaagccaacacccugucuaaaaaacauaaauuucuuuaaucauuuugccucuuuucucugugcuucaauuaauaaaaaauggaaagaaccuagaucuaaaaaaaaaaaaaaaaaaaaaaaaaaaaaaaaaaaaaaaaaaaaaaaaaaaaaaaaaaaaaaaaugcaucccccccccccccccccccccccccccccccaaaggcucuuuucagagccaccagaauu

SEQ ID NO: 10749 - RNA, 2092 nt, Artificial Sequence
  mRNA product Design i-2 comprising derived and/or modified sequence from LASV(G1442-SLE-2011;Clade IV)__AIT17181__NP (opt3)
ggggcgcugccuacggagguggcagccaucuccuucucggcaucaagcuuaccaugagcgccuccaaggaggugaaaucuuuccuguggacccagucacucagaagggaacuuaguggcuacugcagcaacaucaagcugcaagucguuaaagacgcucaggcauuguuacacgggcuggauuuuuccgaggugucuaauguacagcggcuaaugcgcaagcagcgacgugacgauaacgaccucaaaagacugagggaucuuaaucaagccgugaacaaucuggucgaauugaagucgacacagcagaagucagugcuccggguuggaacucugacgagcgacgaucugcucguguuagcggcugaccuggagaaacuuaagaguaaagucauucgcaccgaaagacccuuguccgccgguguguauaugggcaaccugucuagccagcaacuagaucagaggcgggcacuccugaauaugauagggauguccggaggcauccaggguacacgcacugggcgagacggaguaguuagagugugggaugucaagaacgccgaccuucugaauaaccaguucggcaccaugccuucauugacacucgcuugucugaccaaacaaggccagguggauuuaaaugacgugguccaggcacugacugaccucgggcuuauuuacacagccaaguauccaaacgcuagugaucuggacagguugacccaaagccauccgauccuaaauaugauugauacgaagaaaucuucccugaacaucucaggauacaauuuuagccucggugccgcgguuaaggcaggcgccugcaugcuggacgggggaaacaugcuugagacuauaaaagugaguccccagaccauggauggcauccugaagucuauuuugaaaguaaagaaaacacucgguauguucaucuccgacacuccuggggagcggaacccauaugaaaauauucuguacaagaucuguuuaagcggagauggcuggcccuauauagcuucgcguaccucuauuacaggccgcgccugggagaacaccguggucgaccuggaauccgaugggaagccucagaaagcaggaucaaauaacaguaauaagagccuacaguccgcugguuuugccgcgggccucacguacucucaacugaugacucuuaaagacgccauguugcagcuggauccaaacgcaaagacauggauggacaucgaggggagacccgaggacccuguggaaauugcucucuaccagccaagcucaggaugcuauauccacuucuuuagggagccgaccgaucugaaacaguucaagcaagacgccaaguacagucauggcaucgauguuacugaccuuuuugcugcccagcccggucugacauccgcagugauugaagccuugccucggaauauggucauaaccugucaggggagcgaugacaucaaaaagcuccuggagucucagggccgaaaagauauuaaguuaaucgacauagcucugucaaaaacggauagucgcaaguaugaaaacgcggugugggaccaauacaaggaucuaugccacaugcauaccggaguaguuguggagaaaaagaaaagaggcgggaaggaggaaauuacaccacacugugcacucauggacugcaucauguucgaugccgcugucagcggaggucugaauacucuuguguugagggccguccugccccgggacaugguguuucgcaccuccacaccuagaguugugcucugaggacuagugcaucacauuuaaaagcaucucagccuaccaugagaauaagagaaagaaaaugaagaucaauagcuuauucaucucuuuuucuuuuucguugguguaaagccaacacccugucuaaaaaacauaaauuucuuuaaucauuuugccucuuuucucugugcuucaauuaauaaaaaauggaaagaaccuagaucuaaaaaaaaaaaaaaaaaaaaaaaaaaaaaaaaaaaaaaaaaaaaaaaaaaaaaaaaaaaaaaaaugcaucccccccccccccccccccccccccccccccaaaggcucuuuucagagccaccagaauu

SEQ ID NO: 10750 - RNA, 2092 nt, Artificial Sequence
  mRNA product Design i-2 comprising derived and/or modified sequence from LASV(G3010-SLE-2013;Clade IV)__AIT17345__NP (opt3)
ggggcgcugccuacggagguggcagccaucuccuucucggcaucaagcuuaccaugagcgccuccaaggagaucaaaucuuuccuguggacccagucacucagaagggaacuuaguggcuacugcagcaacauuaagcugcaaguggucaaagacgcucaggcauuguuacacgggcuggauuuuuccgagguuucuaaugugcagcggcuaaugcgcaaggaacgacgugacgauaacgaccucaaaagacugagggaucuuaaucaggccguaaacaaucugguggaguugaagucgacacaacagaagucaauacuccgggucggaacucugacgagcgacgaucugcucaucuuagcggcugaccuggaaaaacuuaagaguaaagugacccgcacagagagacccuuguccgccgguguuuauaugggcaaccugucuagccagcagcuagaucaaaggcgggcacuccuguccaugauugggaugucaaguggagugcagggcgcccgcgcuggucgagacggggucgugagaguaugggauguuaagaaugcagagcuucugaacaaucaguucggaacuaugccuagcuugacccucgccugucugacaaaacagggccaaguggacuuaaacgaugucgugcaggcucugaccgaccucggccuuaucuacacugccaaguauccaaauacaucugaccuggauagguugacccagucccauccgauucuaaacaugaucgacacgaagaaaucaagccugaauauaaguggguacaacuuuucucucggagcggcagugaaggccggugcuugcaugcuggauggcgggaauaugcuugaaacuaucaaagucagcccccaaaccauggacggaauuuugaaguccauccugaaaguuaagaaagcccucggcauguucauuucggagacaccuggugaacggaacccauaugagaacauccuguacaagauauguuuaucuggggauggauggcccuauauugcaucccguacuucaaucaccggccgcgcuugggagaauacagugguagaccuggaaagugauggcaagccucagaaagccgggagcaacaauuccaacaagucucuacagagcgcgggauuuaccgccggucucacguacucacagcugaugacucuuaaagacgcaauguugcaacuggauccaaaugcuaagacauggauggacauugagggcagacccgaagauccuguggaggucgcccucuaccagccaaguuccgggugcuauauccacuucuuuagggaaccgaccgaccugaaacaguucaagcaggacgcuaaguacagccauggaaucgaugugacugaccuuuuugccgcacaacccggccugacaucugccguuauugaugcuuugccucggaacauggugauaaccugucaggguucagacgauaucaaaaagcuccuggagagucaggggcgaaaagacauuaaguuaaucgauauagcgcugagcaaaacggacucccgcaaguaugagaaugcagucugggaucaguacaaggaccuaugccacaugcauaccggcgugguaguugagaaaaagaaaagaggaggcaaggaagaaauuacaccacacugugcccucauggauugcaucauguucgacgcugccgugucugggggacugaacacuucgguccuuagggcaguguugccccgggauauggucuuucgcaccagcacaccuagagugguucugugaggacuagugcaucacauuuaaaagcaucucagccuaccaugagaauaagagaaagaaaaugaagaucaauagcuuauucaucucuuuuucuuuuucguugguguaaagccaacacccugucuaaaaaacauaaauuucuuuaaucauuuugccucuuuucucugugcuucaauuaauaaaaaauggaaagaaccuagaucuaaaaaaaaaaaaaaaaaaaaaaaaaaaaaaaaaaaaaaaaaaaaaaaaaaaaaaaaaaaaaaaaugcaucccccccccccccccccccccccccccccccaaaggcucuuuucagagccaccagaauu

SEQ ID NO: 10751 - RNA, 2092 nt, Artificial Sequence
  mRNA product Design i-2 comprising derived and/or modified sequence from LASV(G502-SLE-2009;Clade IV)__AIT17127__NP (opt3)
ggggcgcugccuacggagguggcagccaucuccuucucggcaucaagcuuaccaugagcgccuccaaggagaucaaaucuuuccuguggacccagucacucagaagggaacuuaguggcuacugcagcaacauuaagcugcaaguggucaaagacgcucaggcauuguuacacgggcuggauuuuuccgagguuucuaaugugcagcggcuaaugcgcaaggaacgacgugacgauaacgaccucaaaagacugagggaucuuaaucaggccguaaacaaucugguggaguugaagucgacacaacagaagucaauacuccgggucggaacucugacgagcgacgaucugcucaucuuagcggcugaccuggaaaaacuuaagaguaaagugauucgcaccgagagacccuuguccgccgguguuuauaugggcaaccugucuagccagcagcuagaucaaaggcgggcacuccuguccaugaucgggaugucaggaggcaaucagggugugcgcgccgggaaggacggagucgugcgaguaugggauguuaaaaacgcugagcuucugaauaaccaguucggcacaaugccuaguuugacucucgcaugucugaccaagcagggccaaguggacuuaaaugaugccguccaggcucugacagaccucgggcuuauuuacaccgccaaguauccaaacacuagcgaccuggauagauugacacagucucauccgauccuaaauaugauagacaccaaaaaguccucacugaacaucagcggauacaauuuuagucucggugcggcagugaaagccggcgcuugcaugcuggaugggggaaacaugcuugaaacgauuaaggugucuccccaaacuauggacggcauccugaaauccauuuugaaggucaaaaaggcccucgguauguucaucagcgauaccccuggggagaggaacccauaugaaaauauacuguacaagauuuguuuaucgggagacggcuggcccuauaucgcaucucggacauccauuacuggccgugcuugggagaacaccguuguggaucuggagucagacgggaaaccucagaaggccggaaguaauaacagcaauaaaucccuacagucugcggguuuuacagccggccucaccuacagccagcugaugacgcuuaaggaugcaauguugcaacuggacccaaacacuaaaacauggauggauaucgaagggcgccccgaggacccuguagaaaucgcucucuaccagccaucaaguggaugcuauauucacuucuuuagagagccgaccgaccugaagcaguucaagcaggaugccaaauacucccauggcauagacgugacugaucuuuuugcugcccaacccggucugacaagcgcagucaucgacgccuugccuaggaauauggugauuaccugucaggggucugaugacauccggaagcuccuggaaucacagggccgaaaagauauaaaguuaauugacaucgcucugaacaaaacggauagucgcaaguaugagaaugcgguuugggaccaguacaaggaucuaugccacaugcauaccggaguggucguggagaaaaagaaaagaggcgggaaggaagagaucacaccacacugugcacucauggacugcauuauguucgaugccgcuguaagcggaggucugaacacuuccguucuuagggccguguugccccgggacauggucuuucgcaccucuacaccuagagugguccugugaggacuagugcaucacauuuaaaagcaucucagccuaccaugagaauaagagaaagaaaaugaagaucaauagcuuauucaucucuuuuucuuuuucguugguguaaagccaacacccugucuaaaaaacauaaauuucuuuaaucauuuugccucuuuucucugugcuucaauuaauaaaaaauggaaagaaccuagaucuaaaaaaaaaaaaaaaaaaaaaaaaaaaaaaaaaaaaaaaaaaaaaaaaaaaaaaaaaaaaaaaaugcaucccccccccccccccccccccccccccccccaaaggcucuuuucagagccaccagaauu

SEQ ID NO: 10752 - RNA, 2092 nt, Artificial Sequence
  mRNA product Design i-2 comprising derived and/or modified sequence from LASV(G733-SLE-2010;Clade IV)__AIT17155__NP (opt3)
ggggcgcugccuacggagguggcagccaucuccuucucggcaucaagcuuaccaugagcgccuccaaggagaucaaaucuuuccuguggacccagucacucagaagggaacuuaguggcuacugcagcaacauuaagcugcaaguggucaaagacgcucaggcauuguuacacgggcuggauuuuuccgagguuucuaaugugcagcggcuaaugcgcaaggaacgacgugacgauaacgaccucaaaagacugagggaucuuaaucaggccguaaacaaucugguggaguugaagucgacacaacagaagucaguccuccgggugggaacucugacgagcgacgaacugcucguuuuagcggcugaucuggagaaacuuaagaguaaagugauacgcaccgagagacccuuguccgccggugucuauaugggcaaccugucuagccagcagcuagaccaaaggcgggcacuccuguccaugaucgggaugucaggaggcaaucagggugcccgcacagggcgagauggagugguaagaguuugggacgugaagaacgcugaacuucugaauaaccaguucggcacuaugccuaguuugacccucgcaugucugacaaaacagggccaagucgauuuaaaugacgccgugcaggcucugaccgaucucgggcuuauuuacacugccaaguauccaaacacaagcgaccuggacagguugacccagucucauccgauccuaaauaugauugauacgaagaaauccucacugaacaucagcggauacaauuuuagucucggugcggcagugaaggccggcgcuugcaugcuggacgggggaaacaugcuugagacuauaaaagucucuccccaaaccauggauggcauccugaaguccauuuugaaaguuaagaaagcccucgguauguucaucagcgacacaccuggggaacggaacccauaugagaauauucuguacaagaucuguuuaucgggagauggcuggcccuauauagcaucucguacuuccauuaccggccgcgcuugggagaacacagugguagaccuggaaucagaugggaagccucagaaagccggaaguaauaacagcaauaagucccuacagucugcggguuuuaccgccggccucacguacagccagcugaugacucuuaaagacgcaauguugcaacuggauccaaacgcuaagacauggauggacaucgaggggagacccgaagauccuguggagauugcccucuaccagccaucaaguggaugcuauauccacuucuuuagggaaccgaccgaccugaaacaguucaagcaggacgcuaaguacucccauggcaucgaugucacugaccuuuuugccgcacaacccggucugacaagcgccgugauugaugcuuugccucggaauaugguuauaaccugucaggggucugacgauauccgaaaacuccuggagucacagggccgcaaggacauuaaauuaaucgauauagcgcugaguaagauugacagcagaaaauaugagaacgcagugugggaucaguacaaggaccuaugccacaugcauacgggagucgugguagaaaagaaaaagaggggcgggaaagaggaaaucaccccacacugugcccucauggauugcaucauguucgacgcugccguuuccggaggucuuaauucucugguguugcgggcaguccugccccgcgauaugguguuuagaacaucgacuccuagggucgugcucugaggacuagugcaucacauuuaaaagcaucucagccuaccaugagaauaagagaaagaaaaugaagaucaauagcuuauucaucucuuuuucuuuuucguugguguaaagccaacacccugucuaaaaaacauaaauuucuuuaaucauuuugccucuuuucucugugcuucaauuaauaaaaaauggaaagaaccuagaucuaaaaaaaaaaaaaaaaaaaaaaaaaaaaaaaaaaaaaaaaaaaaaaaaaaaaaaaaaaaaaaaaugcaucccccccccccccccccccccccccccccccaaaggcucuuuucagagccaccagaauu

SEQ ID NO: 10753 - RNA, 2092 nt, Artificial Sequence
  mRNA product Design i-2 comprising derived and/or modified sequence from MOPV/LASV reassortant(IGS-1;Clade IV)__AFY05578__NP (opt3)
ggggcgcugccuacggagguggcagccaucuccuucucggcaucaagcuuaccaugagcgccuccaaggagaucaaaucuuuccuguggacccagucacucagaagggaacuuaguggcuacugcagcaacauuaagcugcaaguggucaaagacgcucaggcauuguuacacgggcuggauuuuuccgagguuucuaaugugcagcggcuaaugcgcaaggaacgacgugacgauaacgaccucaaaagacugagggaucuuaaucaggccguaaacaaucugguggaguugaagucgacacaacagaagucaauacuccgggucggaacucugacgagcgacgaucugcucaucuuagcggcugaccuggaaaaacuucgcaguaaggugauuagaaccgagaggcccuuguccgccgguguuuauaugggcaaccugucuagccagcagcuagaucaacggcgcgcacuccugaauaugaucgggauguccggaggcaaccagggugcccgagcugggagagacggaguggucagggugugggauguuaaaaaugcagagcuucugucaaaccaguucggcacaaugccuaguuugacucucgccugucugaccaagcagggccaaguagacuuaaaugaugcugugcaggcccugacagaccucgggcuuauuuacaccgcgaaauauccaaacacuagcgaccuggaucgguugacacagucucauccgauccuaaauaugauagacaccaagaaguccucacugaacaucagcggauacaauuuuagucucggugcagccgucaaagcuggcgccugcaugcuggaugggggaaacaugcuugaaacgauuaaggugucuccccaaacuauggacggcauccugaaauccauuuugaaggugaaaaaggcacucgguauguucaucagcgauaccccuggggagcguaacccauaugaaaauauacuguacaaaauuuguuuaucgggagacggcuggcccuauaucgcuucucgcacauccauuacuggcagagccugggagaacaccgucguugaucuggagucagacgggaagccucagaaggcggauaguaauaacagcuccaaaucucuacagagcgccggauuuacagcaggucucaccuacucacagcugaugacgcuuaaggacgcuauguugcaacuggauccaaaugccaaaacuuggauggacaucgaaggcaggcccgaggacccuguggaaaucgcucucuaccagccaaguuccgggugcuauauucacuucuuucgggagccgacagaucugaagcaguucaaacaggacgccaaguacagccauggaauagauguaaccgaccuuuuugcaacucaacccggccugacaucugccgugaucgaugcuuugccucgaaacauggucauuaccugucaggguucagacgauauccgcaagcuccuggaaagucaggggagaaaagacauaaaguuaauugauaucgaccugagcaaaacggauuccaggaaguaugagaaugcggugugggaccaguacaaagaucuaugccacaugcauaccggcguuguggucgagaagaagaaacggggaggcaaggaagagaucacaccacacugugcacucauggacugcauuauguucgacgccgcugugucugggggacugaacacuucgguacuucgcgccguuuugcccagagauaugguguuuaggaccagcacaccucgugucgugcugugaggacuagugcaucacauuuaaaagcaucucagccuaccaugagaauaagagaaagaaaaugaagaucaauagcuuauucaucucuuuuucuuuuucguugguguaaagccaacacccugucuaaaaaacauaaauuucuuuaaucauuuugccucuuuucucugugcuucaauuaauaaaaaauggaaagaaccuagaucuaaaaaaaaaaaaaaaaaaaaaaaaaaaaaaaaaaaaaaaaaaaaaaaaaaaaaaaaaaaaaaaaugcaucccccccccccccccccccccccccccccccaaaggcucuuuucagagccaccagaauu

SEQ ID NO: 10754 - RNA, 2092 nt, Artificial Sequence
  mRNA product Design i-2 comprising derived and/or modified sequence from LASV(LM765-SLE-2012;Clade IV)__AIT17815__NP (opt3)
ggggcgcugccuacggagguggcagccaucuccuucucggcaucaagcuuaccaugagcgccuccaaggagaucaaaucuuuccuguggacccagucacucagaagggaacuuaguggcuacugcagcaacauuaagcugcaaguggucaaagacgcucaggcauuguuacacgggcuggauuuuuccgagguuucuaaugugcagcggcuaaugcgcaaggaacgacgugacgauaacgaccucaaaagacugagggaucuuaaucaggccguaaacaaucugguggaguugaagucgacacaacagaagucaauacuccgggucggaacucugacgagcgacgaucugcucaucuuagcggcugaccuggaaaaacuuaagaguaaagugacccgcacagagagacccuuguccgccgguguuuauaugggcaaccugucuagccagcagcuagaucaaaggcgggcacuccuggacaugauugggauguccggaucaaaucagggcgcccgcgcuggucgagaugggguggucagagugugggacguaaagaacgcagagcuucugaauaaccaguucggaacuaugccuaguuugacccucgccugucugacaaaacagggccaaguugauuuaaaugacgcugugcaggcccugaccgaccucggccuuaucuacacugcgaaguauccaaacacaagcgaucuggacagguugacccagucucauccgauucuaaauaugaucgauacgaagaaauccucacugaacauaagcggguacaauuuuagucucggagcagccgucaaggcuggugccugcaugcuggacggcgggaacaugcuugaaacuaucaaagugucuccccaaaccauggauggcauucugaaguccaucuugaaagugaagaaagcacucggaauguucauuagcgacgcuccuggugagcggaacccauaugaaaauauccuguacaagauauguuuaucgggggauggauggcccuauauugccucucguacauccaucacuggccgcgcgugggagaacaccgucguugaccuggagucagauggcaagccucagaaagccgggaguaauggaagcaacaagucccuacagucugcagguuuuacagcuggccucaccuacagccagcugaugacgcuuaaagacgccauguugcaacuggauccaaaugcuaagacuuggauggacauugaagggagacccgaggacccuguggaaaucgcccucuaccagccaucaaguggaugcuauauccacuucuuuagggagccgacagaucugaaacaguucaagcaggacgcaaaguacucccauggcauugauguaaccgaccuuuuugccgcucaacccggucugacuagcgcggugauagaugcauugccucggaacauggucaucacaugucaggggucugacgauauucgaaaacucuucgaaucacagggccgcaaggacaucaaacugauagauauugccuuaaguaagaccgacagcagaaaauaugagaaugcugugugggaucaguacaaggaccugugccacaugcauacgggaaucguuguggagaagaaaaagaggggcgggaaagaagagaucaccccacacugugcccuaauggauugcauuauguuugacgcagccgucuccggaggucucaacacaucugugcugcgggcuguacuuccccgcgacaugguuuucagaacuucgaccccuaggguggucuugugaggacuagugcaucacauuuaaaagcaucucagccuaccaugagaauaagagaaagaaaaugaagaucaauagcuuauucaucucuuuuucuuuuucguugguguaaagccaacacccugucuaaaaaacauaaauuucuuuaaucauuuugccucuuuucucugugcuucaauuaauaaaaaauggaaagaaccuagaucuaaaaaaaaaaaaaaaaaaaaaaaaaaaaaaaaaaaaaaaaaaaaaaaaaaaaaaaaaaaaaaaaugcaucccccccccccccccccccccccccccccccaaaggcucuuuucagagccaccagaauu

SEQ ID NO: 10755 - RNA, 2092 nt, Artificial Sequence
  mRNA product Design i-2 comprising derived and/or modified sequence from LASV(LM776-SLE-2012;Clade IV)__AIT17825__NP (opt3)
ggggcgcugccuacggagguggcagccaucuccuucucggcaucaagcuuaccaugagcgccuccaaggagaucaaaucuuuccuguggacccagucacucagaagggaacuuaguagcuacugcuccaacauuaagcugcaaguggucaaagacgcucaggcauuguuacacggccuggauuuuucugagguuucgaaugugcagcggcuaaugcgcaaggaacgacgugacgauaacgaccucaaaagacugagggaucuuaaucaggccguaaacaaucugguggaguugaagucaacacaacagaagaguauacuccgggucgggacucugacgagugacgaucugcucaucuuagcggcugaccuggaaaaacuuaaguccaaagugacccgcacagagagacccuugucugccggaguuuauauggguaaccugagcucccagcagcuagaucaaaggcgggcacuccugucaaugauuggcaugagugggagcaaucagggagcccgcgcuggccgagacgguguggucagagugugggauguaaagaacgcagagcuucugaauaaccaguucgggacuaugccuucuuugacccucgccugucugacaaaacagggacaaguugacuuaaaugaugcugugcaggcccugaccgaccucggccuuaucuacacugcgaaguauccaaacacauccgaccuggauagguugacccagucacauccgauucuaaauaugaucgacacgaagaaaagcagucugaacauaucuggcuacaauuuuucccucggggcagccgucaaggcuggagccugcaugcuggaugguggcaacaugcuugaaacuaucaaagugagcccccaaaccauggacgggauucugaagucgaucuugaaagugaagaaagcacucggaauguucauuucugauacaccuggcgagcggaacccauaugaaaauauccuguacaagauauguuuauccggugacggguggcccuauauugcuucacguacuagcaucaccggacgcgccugggagaacacagucguugaucuggagagcgacggcaagccucagaaagcgggcuccaauaacucuaauaagagccuacagucagccggguuuaccgcaggacucacguacagucagcugaugacucuuaaagaugcuauguugcaacuggacccaaacgccaagacauggauggauauugaagguagacccgaggacccuguggaaguagcucucuaccagccauccagcggcugcuauauccacuucuuuagggagccgaccgaccugaaacaguucaagcaggaugccaaguacucucaugggaucgacgugacugaucuuuuugcagcccaacccggacugacaucagcugucauugacgcguugccucggaauauggugauaaccugucagggcagugaugacauccgaaaacuccuggaaagccagggucgcaaggauauuaaauuaaucgacauagcacuguccaagacggauucuagaaaauaugagaacgccguuugggaccaguacaaggaucuaugccacaugcauaccgggguggucguggagaagaaaaagaggggcggaaaagaagagauuacaccacacugugcucucauggacugcaucauguucgaugccgcaguaucgggcgggcugaauacuagcguucuucgggccguguugccccgcgacauggucuuuagaaccuccacaccuagggugguccugugaggacuagugcaucacauuuaaaagcaucucagccuaccaugagaauaagagaaagaaaaugaagaucaauagcuuauucaucucuuuuucuuuuucguugguguaaagccaacacccugucuaaaaaacauaaauuucuuuaaucauuuugccucuuuucucugugcuucaauuaauaaaaaauggaaagaaccuagaucuaaaaaaaaaaaaaaaaaaaaaaaaaaaaaaaaaaaaaaaaaaaaaaaaaaaaaaaaaaaaaaaaugcaucccccccccccccccccccccccccccccccaaaggcucuuuucagagccaccagaauu

SEQ ID NO: 10756 - RNA, 2092 nt, Artificial Sequence
  mRNA product Design i-2 comprising derived and/or modified sequence from LASV(Mad39;Clade IV)__ANH09723__NP (opt3)
ggggcgcugccuacggagguggcagccaucuccuucucggcaucaagcuuaccaugagcgccuccaaggagaucaaaucuuuccuguggacccagucacucagaagggaacuuaguggcuacugcagcaacauuaagcugcaaguggucaaagacgcucaggcauuguuacacgggcuggauuuuuccgagguuucuaaugugcagcggcuaaugcgcaagcagcgacgugacgauaacgaccucaaaagacugagggaucuuaaucaagccguaaacaaucugguggaauugaagucgacacagcagaagucaguccuccgggugggaacucugacgagcgacgaucugcucaccuuagcggcugaccuggagaaacuuaagaguaaaguuacacgcacugaaagacccuugaccgccgguguguauaugggcaaccuguccucucagcaacuagaucagaggcgggcacuccugaauaugauagggaugagcggaggcaaccagggugcccgcacagggcgagacggagucgugagaguaugggauguuaagaaugcugagcuucugaacaaucaguucggcaccaugccuuccuugacucucgcaugucugacaaaacaaggccagguggacuuaaacgaugucgugcaggcccugaccgaccucgggcuuaucuacacggcuaaguauccaaauacuucagaccuggauagguugacccaaagucauccgauucuaaacaugaucgacacaaauaagagcucucugaacauuuccggauacaacuuuucacucggugccgcggugaaagcaggcgccugcaugcuggaugggggaaauaugcuugagacuaucaaggucagcccccagaccauggacggcauacugaaaaguaucuugaagguuaaaaagucucucgguauguucauuuccgauacaccuggggaacggaacccauaugagaauauccuguacaaaauuuguuuaagcggagacggcuggcccuauaucgcuucgcguaccucuauaacgggccgcgccugggaaaacacugugguagaucuggaguccgggggaaagccucagaaggcagguucaaauaacaguaauaaaagccuacaguccgcuggcuuugccgcggggcucacauacucucaacugaugacccuuaaggacgccauguugcagcuggauccaaacgcaaaaacuuggauggacauugagggaagacccgaagauccuguggagaucgcucucuaccagccaauuagcggcugcuauauccacuucuuuagggaaccgacagaccugaagcaguucaaacaagacgccaaguacucacaugguaucgaugucaccgaccuuuuugcugcccagcccgggcugacgagugcagugauugaggccuugccucggaauaugguuauaaccugucagggcuccgaugacauccgaaaacucuucgaaagccagggacgcaaggauauuaagcugaucgacauagcuuuaucuaaaacagauucaagaaaguaugagaacgcggugugggaccaauacaaagaucugugccacaugcauacuggcgucgugguagagaagaagaaaaagggagggaaagaagagauuaccccacacugugcacuaauggacugcaucauguuugaugccgcuguuagugguggccucaauacacuggugcuuagggccgucuugccccgggacaugguguuccgcacuagcaccccuaaggucgugcugugaggacuagugcaucacauuuaaaagcaucucagccuaccaugagaauaagagaaagaaaaugaagaucaauagcuuauucaucucuuuuucuuuuucguugguguaaagccaacacccugucuaaaaaacauaaauuucuuuaaucauuuugccucuuuucucugugcuucaauuaauaaaaaauggaaagaaccuagaucuaaaaaaaaaaaaaaaaaaaaaaaaaaaaaaaaaaaaaaaaaaaaaaaaaaaaaaaaaaaaaaaaugcaucccccccccccccccccccccccccccccccaaaggcucuuuucagagccaccagaauu

SEQ ID NO: 10757 - RNA, 2092 nt, Artificial Sequence
  mRNA product Design i-2 comprising derived and/or modified sequence from LASV(Z0947-SLE-2011;Clade IV)__AIT17841__NP (opt3)
ggggcgcugccuacggagguggcagccaucuccuucucggcaucaagcuuaccaugagcgccuccaaggagaucaaaucuuuccuguggacccagucacucagaagggaacuuaguggcuacugcagcaacauuaagcugcaaguggucaaagacgcucaggcauuguuacacgggcuggauuuuuccgagguuucuaaugugcagcggcuaaugcgcaaggaacgacgugacgauaacgaccucaaaagacugagggaucuuaaucaggccguaaacaaucugguggaguugaagucgacacaacagaagucaauacuccgggucggaacucugacgagcgacgaucugcucaucuuagcggcugaccuggaaaaacuuaagaguaaagugacccgcacagagagacccuuguccgccgguguuuauaugggcaaccugucuagccagcagcuagaucaaaggcgggcacuccugaauaugauugggauguccggaucaaaccagggcgcccgcacuggucgagacgggguggucagagugugggauguaaagaaugcugagcuucugaacaaucaguucggaaccaugccuaguuugacacucgcaugucugaccaaacagggccaaguugacuuaaacgaugccgugcaggcucugacugaccucggccuuaucuacacagccaaguauccaaauaccagcgaccuggauagguugacgcagucucauccgauucuaaacaugaucgacacuaagaaauccucacugaauauaagcggguacaacuuuagucucggagcggcagucaaggccggugcuugcaugcuggauggcgggaacaugcuugaaaccaucaaagugucuccccaaacaauggacggcauucugaaguccaucuugaaagugaagaaagcccucggaauguucauuagcgaugcaccuggugagcggaauccauaugaaaacauccuguacaagauauguuuaucgggggacggauggcccuauauugcuucucguacuuccaucaccggccgcgccugggagaauacagucguugaucuggagucagacggcaagccucagaaagcggggaguaacggaagcaauaagucccuacagucugccgguuuuaccgcaggccucacguacagccagcugaugacucuuaaagaugcuauguugcaacuggacccaaacgccaagacauggauggauauugaagggagacccgaggacccuguggaaaucgcucucuaccagccaucaaguggaugcuauauccacuucuuuagggagccgaccgaccugaaacaguucaagcaggaugccaaguacucccauggcauugacguaacugaucuuuuugcagcccaacccggucugacaagcgcugugauagacgcguugccucggaauauggucaucaccugucaggggucugaugacauucgaaaacucuucgaaucacagggccgcaaggauaucaaacugauagacauugcauuaaguaagacggauagcagaaaauaugagaacgccgugugggaccaguacaaggaucugugccacaugcauaccggaaucguuguggagaagaaaaagaggggcgggaaagaagagaucacaccacacugugcucuaauggacugcauuauguuugaugccgcagucuccggaggucucaauacuucugugcugcgggccguacuuccccgcgacaugguuuucagaaccucgacaccuaggguggucuugugaggacuagugcaucacauuuaaaagcaucucagccuaccaugagaauaagagaaagaaaaugaagaucaauagcuuauucaucucuuuuucuuuuucguugguguaaagccaacacccugucuaaaaaacauaaauuucuuuaaucauuuugccucuuuucucugugcuucaauuaauaaaaaauggaaagaaccuagaucuaaaaaaaaaaaaaaaaaaaaaaaaaaaaaaaaaaaaaaaaaaaaaaaaaaaaaaaaaaaaaaaaugcaucccccccccccccccccccccccccccccccaaaggcucuuuucagagccaccagaauu

SEQ ID NO: 10758 - RNA, 2092 nt, Artificial Sequence
  mRNA product Design i-2 comprising derived and/or modified sequence from LASV(Josiah;Clade IV)__NP_694869__NP (opt4)
ggggcgcugccuacggagguggcagccaucuccuucucggcaucaagcuuaccaugagcgccagcaaggagaucaagagcuuccuguggacccagagccugagaagagagcugagcggcuacugcagcaacaucaagcugcagguggugaaggacgcccaggcccugcugcacggccuggacuucagcgaggugagcaacgugcagagacugaugagaaaggagagaagagacgacaacgaccugaagagacugagagaccugaaccaggccgugaacaaccugguggagcugaagagcacccagcagaagagcauccugagagugggcacccugaccagcgacgaccugcugauccuggccgccgaccuggagaagcugaagagcaaggugaucagaaccgagagaccccugagcgccggcguguacaugggcaaccugagcagccagcagcuggaccagagaagagcccugcugaacaugaucggcaugagcggcggcaaccagggcgccagagccggcagagacggcguggugagagugugggacgugaagaacgccgagcugcugaacaaccaguucggcaccaugcccagccugacccuggccugccugaccaagcagggccagguggaccugaacgacgccgugcaggcccugaccgaccugggccugaucuacaccgccaaguaccccaacaccagcgaccuggacagacugacccagagccaccccauccugaacaugaucgacaccaagaagagcagccugaacaucagcggcuacaacuucagccugggcgccgccgugaaggccggcgccugcaugcuggacggcggcaacaugcuggagaccaucaaggugagcccccagaccauggacggcauccugaagagcauccugaaggugaagaaggcccugggcauguucaucagcgacacccccggcgagagaaaccccuacgagaacauccuguacaagaucugccugagcggcgacggcuggcccuacaucgccagcagaaccagcaucaccggcagagccugggagaacaccgugguggaccuggagagcgacggcaagccccagaaggccgacagcaacaacagcagcaagagccugcagagcgccggcuucaccgccggccugaccuacagccagcugaugacccugaaggacgccaugcugcagcuggaccccaacgccaagaccuggauggacaucgagggcagacccgaggaccccguggagaucgcccuguaccagcccagcagcggcugcuacauccacuucuucagagagcccaccgaccugaagcaguucaagcaggacgccaaguacagccacggcaucgacgugaccgaccuguucgccacccagcccggccugaccagcgccgugaucgacgcccugcccagaaacauggugaucaccugccagggcagcgacgacaucagaaagcugcuggagagccagggcagaaaggacaucaagcugaucgacaucgcccugagcaagaccgacagcagaaaguacgagaacgccgugugggaccaguacaaggaccugugccacaugcacaccggcguggugguggagaagaagaagagaggcggcaaggaggagaucaccccccacugcgcccugauggacugcaucauguucgacgccgccgugagcggcggccugaacaccagcgugcugagagccgugcugcccagagacaugguguucagaaccagcacccccagaguggugcugugaggacuagugcaucacauuuaaaagcaucucagccuaccaugagaauaagagaaagaaaaugaagaucaauagcuuauucaucucuuuuucuuuuucguugguguaaagccaacacccugucuaaaaaacauaaauuucuuuaaucauuuugccucuuuucucugugcuucaauuaauaaaaaauggaaagaaccuagaucuaaaaaaaaaaaaaaaaaaaaaaaaaaaaaaaaaaaaaaaaaaaaaaaaaaaaaaaaaaaaaaaaugcaucccccccccccccccccccccccccccccccaaaggcucuuuucagagccaccagaauu

SEQ ID NO: 10759 - RNA, 2092 nt, Artificial Sequence
  mRNA product Design i-2 comprising derived and/or modified sequence from LASV(LP;Clade I)__AAF86702__NP (opt4)
ggggcgcugccuacggagguggcagccaucuccuucucggcaucaagcuuaccaugagcaacagcaaggagaucaagagcuuccuguggacccagagccugagaagagagcugagcggcuacugcagcaacaucaagcugcagguggugaaggacgcccaggcccugcugcacggccuggacuucagcgaggugagcaacgugcagagacugaugagaaagcagaagagagacgacgccgaccugaagagacugagagaccugaaccaggccgugaacaaccugguggagcugaagagcacccagcagaagaacgugcugagagugggcacccugagcagcgacgaccugaucacccuggccgccgaccuggagaagcugaagagcaaggugaucagaaccgagagaccccugagcagcggcguguacaugggcaaccugagcagccagcagcuggaccagagaagagcccugcugagcaugaucggcaugagcggcggcccccagggcaacagaaccggcggcgacggcguggugagagugugggacgugaagaacgccgagcugcugaacaaccaguucggcaccaugcccagccugacccuggccugccugaccaagcagggccagguggaccugaacgacgccgugcaggcccugaccgaccugggccugaucuacaccgccaaguaccccaacagcagcgaccuggacaugcugacccagagccaccccauccugggcaugguggacaccaagaagagcagccugaacaucagcggcuacaacuucagccugggcgccgccgugaaggccggcgccugcaugcuggacggcggcaacaugcuggagaccaucaaggugagcccccagaccauggacggcauccugaagagcauccugaaggugaagagaagccugggcauguucaucagcgacacccccggcgagagaaaccccuacgagaacauccuguacaagaucugccugagcggcgagggcuggcccuacaucgccagcagaaccagcaucaccggcagagccugggagaacacccugguggaccuggagagcgacaacaagccccccaagcugaacagcgccggcagcaacaagagccugcaggccgccggccugaacgccggccugaccuacagccagcugaugacccugaaggacugcaugcugcagcuggaccccagcagcaagaccuggaucgacaucgagggcagacccgaggaccccguggagaucgcccuguuccagcccagcagcggcugcuacauccacuucuucagagagcccaccgaccugaagcaguucaagcaggacgccaaguacagccacggcaucgacgugaccgaccuguucagcacccagcccggccugaccagcgccgugaucgaggcccugcccagaaacauggugcugaccugccagggcagcgacgacaucaagaagcugcuggagagccagggcagaagagacaucaagcugaucgacaucagccugagcaaggccgacagcagaaaguucgagaacgccgugugggaccaguacaaggaccugugccacaugcacaccggcguggugguggagaagaagaagagaggcggcaaggaggagaucaccccccacugcgcccugcuggacugcaucauguucgacgccgccaccaccggcagccugaacaucaccacccugagagccgugcugcccagagacaugguguucagaaccagcacccccaagguggugcugugaggacuagugcaucacauuuaaaagcaucucagccuaccaugagaauaagagaaagaaaaugaagaucaauagcuuauucaucucuuuuucuuuuucguugguguaaagccaacacccugucuaaaaaacauaaauuucuuuaaucauuuugccucuuuucucugugcuucaauuaauaaaaaauggaaagaaccuagaucuaaaaaaaaaaaaaaaaaaaaaaaaaaaaaaaaaaaaaaaaaaaaaaaaaaaaaaaaaaaaaaaaugcaucccccccccccccccccccccccccccccccaaaggcucuuuucagagccaccagaauu

SEQ ID NO: 10760 - RNA, 2092 nt, Artificial Sequence
  mRNA product Design i-2 comprising derived and/or modified sequence from LASV(803213;Clade II)__AAF86704__NP (opt4)
ggggcgcugccuacggagguggcagccaucuccuucucggcaucaagcuuaccaugagcgccagcaaggaggugaagagcuuccuguggacccagagccugagaagagagcugagcggcuacugcagcaacaucaagcugcagguggugaaggacgcccaggcccugcugcacggccuggacuucagcgaggugaacaacgugcagagacugaugagaaagcagaagagagacgacggcgaccugaagagacugagagaccugaaccaggccgugaacaaccugguggagcugaagagcacccagcagaagagcauccugagagugggcacccugaccagcgacgaccugcugacccuggccgccgaccuggagaagcugaagagcaaggugaucagaaccgagagaccccugagcagcggcguguacaugggcaaccugagcacccagcagcuggagcagagaagagcccugcugaacaugaucggcauggugggcggcgcccagggcacccagcccggcagagacggcguggugagagugugggacgugaagaaccccgaccugcugaacaaccaguucggcaccaugcccagccugacccuggccugccugaccaagcagggccagguggaccugaacgacgccgugcuggcccugaccgaccugggccugaucuacaccgccaaguaccccaacagcagcgaccuggacagacugagccagagccaccccauccugaacaugguggacaccaagaagagcagccugaacaucagcggcuacaacuucagccugggcgccgccgugaaggccggcgccugcaugcuggacggcggcaacaugcuggagaccaucaaggugaccccccagaccauggacggcauccugaagagcauccugaaggugaagagaagccugggcauguucgugagcgacacccccggcgagagaaaccccuacgagaacauccuguacaagaucugccugagcggcgacggcuggcccuacaucgccagcagaaccagcaucgugggcagagccugggagaacaccaccguggaccuggagagcgacggcaagccccagaaggugggcaccgccggcagcaacaagagccugcagagcgccggcuuccccaccggccugaccuacagccagcugaugacccugaaggacagcaugaugcagcuggaccccagcgccaagaccuggaucgacaucgagggcagacccgaggaccccguggagaucgcccuguaccagcccaugagcggcugcuacauccacuucuucagagagcccaccgaccugaagcaguucaagcaggacgccaaguacagccacggcaucgacguggccgaccuguuccccgcccagcccggccugaccagcgccgugaucgaggcccugcccagaaacauggugcugaccugccagggcagcgacgacaucaagaagcugcuggacagccagggcagaagagacaucaagcugaucgacaucagccugagcaagguggacagcagaaaguucgagaacgccgugugggaccagugcaaggaccugugccacaugcacaccggcguggugguggagaagaagaagagaggcggcaaggaggagaucaccccccacugcgcccugauggacugcaucauguucgacgccgccgugagcggcggccugaacauccccgugcugagagccgugcugcccagagacaugguguucagaaccagcagccccaagguggugcugugaggacuagugcaucacauuuaaaagcaucucagccuaccaugagaauaagagaaagaaaaugaagaucaauagcuuauucaucucuuuuucuuuuucguugguguaaagccaacacccugucuaaaaaacauaaauuucuuuaaucauuuugccucuuuucucugugcuucaauuaauaaaaaauggaaagaaccuagaucuaaaaaaaaaaaaaaaaaaaaaaaaaaaaaaaaaaaaaaaaaaaaaaaaaaaaaaaaaaaaaaaaugcaucccccccccccccccccccccccccccccccaaaggcucuuuucagagccaccagaauu

SEQ ID NO: 10761 - RNA, 2095 nt, Artificial Sequence
  mRNA product Design i-2 comprising derived and/or modified sequence from LASV(GA391;Clade III)__CAA36646__NP (opt4)
ggggcgcugccuacggagguggcagccaucuccuucucggcaucaagcuuaccaugagcgccagcaaggaggugagaagcuuccuguggacccagagccugagaagagagcugagcggcuacugcagcaacaucaagcugcagguggugaaggacgcccaggcccugcugcacggccuggacuucagcgaggugagcaacgugcagagacugaugagaaagcagaagagagacgacggcgaccugaagagacugagagaccugaaccaggccgugaacaaccugguggagcugaagagcacccagcagaagagcgugcugagagugggcacccugagcagcgacgaccugcugauccuggccgccgaccuggagaagcugaagagcaaggugaccagaaccgagagaccccugagcagcggcguguacaugggcaaccugagcagccagcagcuggaccagagaagagcccugcugaacaugaucggcaugaccggcgugagcggcggcggcaagggcgccagcgacggcaucgugagagugugggacgugaagaacgccgagcugcugaacaaccaguucggcaccaugcccagccugacccuggccugccugaccaagcagggccagguggaccugaacgacgccgugcaggcccugaccgaccugggccugaucuacaccgccaaguaccccaacagcagcgaccuggacagacugagccagagccaccccauccugaacaugaucgacaccaagaagagcagccugaacaucagcggcuacaacuucagccugggcgccgccgugaaggccggcgccugcaugcuggacggcggcaacaugcuggagaccaucaaggugagcccccagaccauggacggcauccugaagagcauccugaaggugaagaagagccugggcauguucgugagcgacacccccggcgagagaaaccccuacgagaacauccuguacaagaucugccugagcggcgacggcuggcccuacaucgccagcagaaccagcaucgugggcagagccugggagaacaccgugguggaccuggagcaggacaacaagccccagaagaucggcaacggcggcagcaacaagagccugcagagcgccggcuucgccgccggccugaccuacagccagcugaugacccugaaggacuucaagugcuucaaccugauccccaacgccaagaccuggauggacaucgagggcagacccgaggaccccguggagaucgcccuguaccagcccagcagcggcugcuacgugcacuucuucagagagcccaccgaccugaagcaguucaagcaggacgccaaguacagccacggcaucgacgugaccgaccuguucgccgcccagcccggccugaccagcgccgugaucgaggcccugcccagaaacauggugaucaccugccagggcagcgaggacaucagaaagcugcuggagagccagggcagaagagacaucaagcugaucgacaucacccugagcaaggccgacagcagaaaguucgagaacgccgugugggaccaguucaaggaccugugccacaugcacaccggcguggugguggagaagaagaagagaggcggcaaggaggagaucaccccccacugcgcccugauggacugcaucauguucgacgccgccgugagcggcggccuggacgccaaggugcugagaguggugcugcccagagacaugguguucagaaccagcacccccaagguggugcugugaggacuagugcaucacauuuaaaagcaucucagccuaccaugagaauaagagaaagaaaaugaagaucaauagcuuauucaucucuuuuucuuuuucguugguguaaagccaacacccugucuaaaaaacauaaauuucuuuaaucauuuugccucuuuucucugugcuucaauuaauaaaaaauggaaagaaccuagaucuaaaaaaaaaaaaaaaaaaaaaaaaaaaaaaaaaaaaaaaaaaaaaaaaaaaaaaaaaaaaaaaaugcaucccccccccccccccccccccccccccccccaaaggcucuuuucagagccaccagaauu

SEQ ID NO: 10762 - RNA, 2092 nt, Artificial Sequence
  mRNA product Design i-2 comprising derived and/or modified sequence from LASV(AV;Clade V)__CCA30315__NP (opt4)
ggggcgcugccuacggagguggcagccaucuccuucucggcaucaagcuuaccaugagcgccagcaaggaggugaagagcuuccuguggacccagagccugagaagagagcugagcggcuacugcagcaacaucaagcugcagguggugaaggacgcccaggcccugcugcacggccuggacuucagcgaggugagcaacgugcagagacugaugagaaagcagagaagagacgacagcgaccugaagagacugagagaccugaaccaggccgugaacaaccugguggagcugaagagcacccagcagaagagcgugcugagagugggcacccugagcagcgacgaccugcugacccuggccgccgaccuggagaagcugaagagcaaggugaccagaaccgagagaccccugagcagcggcguguacaugggcaaccugagcagccagcagcuggaccagagaagagcccugcugaaccugaucggcaugaccaacggcagccagggcagccaggccggcagagacggcguggugagagugugggacgugaagaacgccgagcugcugaacaaccaguucggcaccaugcccagccugacccuggccugccugaccaagcagggccagguggaccugaacgacguggugcaggcccugaccgaccugggccugaucuacaccgccaaguaccccaacaccagcgaccuggacagacugacccagagccaccccauccugaacaugaucgacaccaagaagagcagccugaacaucagcggcuacaacuucagccugggcgccgccgugaaggccggcgccugcaugcuggacggcggcaacaugcuggagaccaucaaggugagcccccagagcauggacggcauccugaagagcauccugaaggugaagagagcccugggcauguucgugagcgacacccccggcgagagaaaccccuacgagaacauccuguacaagaucugccugagcggcgacggcuggcccuacaucgccagcagaaccagcaucgugggcagagccugggagaacaccgugguggaccuggagaccgacggcaagccccagaagaucggcagcggcaacagcaacaagagccugcagagcgccggcuucagcgccggccugaccuacagccagcugaugacccugaaggacgccaugcugcagcuggaccccaacgccaagaccuggauggacaucgagggcagacccgaggaccccguggagguggcccuguaccagcccaucagcggcugcuacauccacuucuucagagagcccaccgaccugaagcaguucaagcaggacgccaaguacagccacggcaucgacaucgccgaccuguucgccgcccagcccggccugaccagcgccgugaucgaggcccugcccagaaacauggugaucaccugccagggcagcgaggacaucaagaagcugcuggagagccagggcagaaaggacaucaagcugaucgacaucgcccugagcaagaucgacagcagaaaguucgagaacgccgugugggaccaguacaaggaccugugccacaugcacaccggcguggugguggagaagaagaagagaggcggcaaggaggagaucaccccccacugcgcccugauggacugcaucauguucgacgccgccgugagcggcggccugaacacccuggugcugagagccgugcugcccagagacaugguguucagaaccagcacccccagaguggugcugugaggacuagugcaucacauuuaaaagcaucucagccuaccaugagaauaagagaaagaaaaugaagaucaauagcuuauucaucucuuuuucuuuuucguugguguaaagccaacacccugucuaaaaaacauaaauuucuuuaaucauuuugccucuuuucucugugcuucaauuaauaaaaaauggaaagaaccuagaucuaaaaaaaaaaaaaaaaaaaaaaaaaaaaaaaaaaaaaaaaaaaaaaaaaaaaaaaaaaaaaaaaugcaucccccccccccccccccccccccccccccccaaaggcucuuuucagagccaccagaauu

SEQ ID NO: 10763 - RNA, 2092 nt, Artificial Sequence
  mRNA product Design i-2 comprising derived and/or modified sequence from LASV(Togo/2016/7082;Clade VI)__AMR44578__NP (opt4)
ggggcgcugccuacggagguggcagccaucuccuucucggcaucaagcuuaccaugagcaacagcaaggaggugaagagcuuccuguggacccagagccugagaagagagcugagcggcuacugcagcaacaucaagcugcagguggugaaggacgcccaggcccugcugcacggccuggacuucagcgaggugagcaacgugcagagacugaugagaaagcagaagagagacgacggcgaccugaagagacugagagaccugaaccaggccgugaacaaccugguggagcugaagagcgugcagcagaagagcauccugagagugggcacccugaccagcgacgaccugcugacccuggccgccgaccuggagaagcugaagagcaaggugaccagaaccgagagaccccugagcagcggcguguacaugggcaaccugagcagccagcagcuggaccagagaagagcccugcugagcaugaucggcaugagcggcggcaaccagaacagccagcccaagggcgacggcguggugagagugugggacgugaagaacgccgaccugcugaacaaccaguucggcaccaugcccagccugacccuggccugccugaccaagcagggccagguggaccugaacgacgccgugcaggcccugaccgaccugggccugaucuacaccgccaaguaccccaacagcagcgaccuggacagacugagccagagccaccccauccugaacaugaucgacaccaagaagagcagccugaacaucagcggcuacaacuucagccugggcgccgccaucaagaccggcgccugcaugcuggacggcggcaacaugcuggagaccaucaaggugaccccccagaccauggacggcauccugaagagcauccugaaggugaagagaagccugggcauguucaucagcgacacccccggcgagagaaaccccuacgagaacauccuguacaagaucugccugagcggcgacggcuggcccuacaucgccagcagaaccgccaucaucggcagagccugggagaacaccgugguggaccuggagagcgacagcaagccccagaagaucggcagcaacggcagcaacaagagccugcagagcgccggcuucgcccccggccugaccuacagccagcugaugacccugaaggacagcaugcugcagcuggaccccaacgccaagaccuggaucgacaucgagggcagacccgaggaccccguggagguggcccuguuccagcccaucagcggcugcuacauccacuucuucagagagcccaccgaccugaagcaguucaagcaggacgccaaguacagccacggcaucgacgugaccgaccuguucgccgcccagcccggccugaccagcgccgugaucgaggcccugcccagaaacauggugcugaccugccagggcagcgacgacaucaagaagcugcuggacagccagggcagaagagacaucaagcugaucgacgugagccugaacaagaucgacagcagaaaguucgagaacgccgugugggaccaguacaaggaccugugccacaugcacaccggcguggugguggagaagaagaagaagggcggcaaggaggagaucaccccccacugcgcccugcuggacugcaucauguucgacgccgccgugagcggcggccugaacgccaccgugcugagagccgugcugcccagagacaugguguucagaaccagcagccccaagguggugcugugaggacuagugcaucacauuuaaaagcaucucagccuaccaugagaauaagagaaagaaaaugaagaucaauagcuuauucaucucuuuuucuuuuucguugguguaaagccaacacccugucuaaaaaacauaaauuucuuuaaucauuuugccucuuuucucugugcuucaauuaauaaaaaauggaaagaaccuagaucuaaaaaaaaaaaaaaaaaaaaaaaaaaaaaaaaaaaaaaaaaaaaaaaaaaaaaaaaaaaaaaaaugcaucccccccccccccccccccccccccccccccaaaggcucuuuucagagccaccagaauu

SEQ ID NO: 10764 - RNA, 2092 nt, Artificial Sequence
  mRNA product Design i-2 comprising derived and/or modified sequence from LASV(KAK-428;Clade n.d. (VII))__ANH09741__NP (opt4)
ggggcgcugccuacggagguggcagccaucuccuucucggcaucaagcuuaccaugagcaacagcaaggaggugaagagcuuccuguggacccagagccugagaagagagcugagcggcuacugcaccaacaucaagcugcagguggugaaggacgcccaggcccugcugcacggccuggacuucagcgaggugagcaacgugcagagacugaugagaaagcagaagagagacgacaacgaccugaagagacugagagaccugaaccaggccgugaacaaccugguggagcugaagagcgugcagcagaagagcgugcugaaggugggcacccugaacagcgacgaccugcugacccuggccgccgaccuggagaagcugaagagcaagguggugagaaccgagagaccccugagcagcggcguguacaugggcaaccugagcagccagcagcuggaccagagaagagcccugcugaacaugaucggcauggccggcggcagccagggcaaccagcccagcagagacggcguggugagagugugggacgugaagaacgccgaccugcugaacaaccaguucggcaccaugcccagccugacccuggccugccugaccaagcagggccagguggaccugaacgacguggugcuggcccugaccgaccugggccugaucuacaccgccaaguaccccaacagcagcgaccuggacagacugagccagaaccaccccgugcugaacaugaucgacgugaacaagagcagccugaacaucagcggcuacaacuucagccugggcgccgccgugaaggccggcgccugcaugcuggacggcggcaacaugcuggagaccaucaagaucagcccccagaccguggacggcauccugaagagcauccugaaggugaagagagcccugggcauguucgugagcgacacccccggcgagagaaaccccuacgagaacauccuguacaaggugugccugagcggcaacggcuggcccuacaucgccagcagaaccagcaucgugggcagagccugggagaacaccgugguggaccuggagagcaacaagaaccagcccaaggugggcaacaacggcagcaacaagaugcugcagagcagcggcuucgccaccggccugaccuacagccagcugaugacccugagagacagcaugcugcagcuggaccccaccgccaagaccuggaucgacaucgagggcagacccgaggaccccguggagcuggcccuguuccagcccagcagcggcugcuacauccacuucuucagagagcccaccgaccugaagcaguucaagcaggacgccaaguacagccacggcaucgacgugaacgaccuguucagcgcccagcccggccugaccagcgccgugcuggaggcccugcccagaaacauggugcugaccugccagggcagcgacgacaucagaaagcugcuggacagccaggacagaaaggacaucaagcugaucgacaucagccugagcaaggccgacgccagaaaguucgagaacgacgugugggaccaguucaaggaccugugccacaugcacaccggcaucgugguggagaagaagaagaagggcggcaagcaggagaugaccccccacugcgcccugcuggacugcaucauguucgacgccgccgugagcggcggccugaacgugcccacccugagagccgugcugcccaccgacaugguguucagaaccaucaccaccaagguggugcugugaggacuagugcaucacauuuaaaagcaucucagccuaccaugagaauaagagaaagaaaaugaagaucaauagcuuauucaucucuuuuucuuuuucguugguguaaagccaacacccugucuaaaaaacauaaauuucuuuaaucauuuugccucuuuucucugugcuucaauuaauaaaaaauggaaagaaccuagaucuaaaaaaaaaaaaaaaaaaaaaaaaaaaaaaaaaaaaaaaaaaaaaaaaaaaaaaaaaaaaaaaaugcaucccccccccccccccccccccccccccccccaaaggcucuuuucagagccaccagaauu

SEQ ID NO: 10765 - RNA, 2092 nt, Artificial Sequence; identical to SEQ ID NO: 10759
  mRNA product Design i-2 comprising derived and/or modified sequence from LASV(Pinneo-NIG-1969;Clade I)__AIT17837__NP (opt4)

SEQ ID NO: 10766 - RNA, 2092 nt, Artificial Sequence
  mRNA product Design i-2 comprising derived and/or modified sequence from LASV(ISTH0009-NIG-2011;Clade II)__AIT17405__NP (opt4)
ggggcgcugccuacggagguggcagccaucuccuucucggcaucaagcuuaccaugagcgugagcaaggaggugaagagcuuccuguggacccagagccugagaagagagcugagcggcuacugcagcaacaucaagcugcagguggugaaggacgcccaggcccugcugcacggccuggacuucagcgaggugagcaacgugcagagacugaugagaaagcagaagagagacgacagcgaccugaagagacugagagaccugaaccaggccgugaacaaccugguggagcugaagagcacccagcagaagagcauccugagagugggcacccugaccagcgacgaccugcugacccuggccgccgaccuggagaagcugaagagcaaggugaucagaaccgagagaccccugagcagcggcguguacaugggcaaccugagcacccagcagcuggagcagagaagagcccugcugaacaugaucggcauggugggcggcgcccagggcacccagcccggcagagacggcguggugagagugugggacgugaagaaccccgaccugcugaacaaccaguucggcaccaugcccagccugacccuggccugccugaccaagcagggccagguggaccugaacgacgccgugcuggcccugaccgaccugggccugaucuacaccgccaaguaccccaacagcagcgaccuggacagacugagccagagccaccccauccugaacaugguggacaucaagaagagcagccugaacaucagcggcuacaacuucagccugggcgccgccgugaaggccggcgccugcaugcuggacggcggcaacaugcuggagaccaucaaggugaccccccagaccauggacggcauccugaagagcauccugaaggugaagagaagccugggcauguucgugagcgacacccccggcgagagaaaccccuacgagaacauccuguacaagaucugccugagcggcgacggcuggcccuacaucgccagcagaaccagcaucgugggcagagccugggagaacaccaccguggaccuggagagcgacggcaagccccagaaggugggcagcgccggcagcaacaagagccugcagagcgccggcuuccccaccggccugaccuacagccagcugaugacccugaaggacagcaugaugcagcuggaccccagcgccaagaccuggaucgacaucgagggcagacccgaggaccccguggagaucgcccuguaccagcccaugagcggcugcuacauccacuucuucagagagcccaccgaccugaagcaguucaagcaggacgccaaguacagccacggcaucgacguggccgaccuguuccccgcccagcccggccugaccagcgccgugaucgaggcccugcccagaaacauggugcugaccugccagggcagcgacgacaucaagagacugcuggacagccagggcagaagagacaucaagcugaucgacaucgcccugagcaaggccgacagcagaagauucgagaacgccgugugggaccagugcaaggaccugugccacaugcacaccggcguggugguggagaagaagaagagaggcggcaaggaggagaucaccccccacugcgcccugauggacugcaucauguacgacgccgccgugagcggcggccugaacauccccgugcugagagccgugcugcccagagacaugguguucagaaccagcagccccaagguggugcugugaggacuagugcaucacauuuaaaagcaucucagccuaccaugagaauaagagaaagaaaaugaagaucaauagcuuauucaucucuuuuucuuuuucguugguguaaagccaacacccugucuaaaaaacauaaauuucuuuaaucauuuugccucuuuucucugugcuucaauuaauaaaaaauggaaagaaccuagaucuaaaaaaaaaaaaaaaaaaaaaaaaaaaaaaaaaaaaaaaaaaaaaaaaaaaaaaaaaaaaaaaaugcaucccccccccccccccccccccccccccccccaaaggcucuuuucagagccaccagaauu

SEQ ID NO: 10767 - RNA, 2092 nt, Artificial Sequence
  mRNA product Design i-2 comprising derived and/or modified sequence from LASV(ISTH2010-NIG-2012;Clade II)__AIT17483__NP (opt4)
ggggcgcugccuacggagguggcagccaucuccuucucggcaucaagcuuaccaugagcgccagcaaggaggugaagagcuuccuguggacccagagccugagaagagagcugagcggcuacugcagcaacaucaagcugcagguggugaaggacgcccaggcccugcugcacggccuggacuucagcgaggugagcaacgugcagagacugaugagaaagcagaagagagacgacagcgaccugaagagacugagagaccugaaccaggccgugaacaaccugguggagcugaagagcacccagcagaagagcauccugagagugggcacccugaccagcgacgaccugcugacccuggccgccgaccuggagaagcugaagagcaaggugaucagaaccgagagaccccugagcagcggcguguacaugggcaaccugagcacccagcagcuggagcagagaagagcccugcugaaccugaucggcauggugggcggcgcccagggcacccagcccggcagagacggcguggugagagugugggacgugaagaaccccgaccugcugaacaaccaguucggcaccaugcccagccugacccuggccugccugaccaagcagggccagguggaccugaacgacgccgugcuggcccugaccgaccugggccugaucuacaccgccaaguaccccaacagcagcgaccuggacagacugagccagagccaccccauccugaacaugguggacaccaagaagagcagccugaacaucagcggcuucaacuucagccugggcgccgccgugaaggccggcgccugcaugcuggacggcggcaacaugcuggagaccaucaaggugaccccccagaccauggacggcauccugaagagcauccugaaggugaagaagagccugggcauguucgugagcgacacccccggcgagagaaaccccuacgagaacauccuguacaagaucugccugagcggcgacggcuggcccuacaucgccagcagaaccagcaucgugggcagagccugggagaacaccaccguggaccuggagagcgacggcaagccccacaaggugggcaccgccggcagcaacaagagccugcagagcgccggcuuccccaccggccugaccuacagccagcugaugacccugaaggacagcaugaugcagcuggaccccagcgccaagaccuggaucgacaucgagggcagacccgaggaccccguggagaucgcccuguaccagcccaugagcggcugcuacauccacuucuucagagagcccaccgaccugaagcaguucaagcaggacgccaaguacagccacggcaucgacguggccgaccuguuccccgcccagcccggccugaccagcgccgugaucgaggcccugcccagaaacauggugcugaccugccagggcagcgacgacaucaagagacugcuggacagccagggcagaagagacaucaagcugaucgacaucgcccugagcaaggccgacagcagaagauucgagaacgccgugugggaccagugcaaggaccugugccacaugcacaccggcguggugguggagaagaagaagagaggcggcaaggaggagaucaccccccacugcgcccugauggacugcaucauguacgacgccgccgugagcggcggccugaacauccccgugcugagagccgugcugcccagagacaugguguucagaaccagcagccccaagguggugcugugaggacuagugcaucacauuuaaaagcaucucagccuaccaugagaauaagagaaagaaaaugaagaucaauagcuuauucaucucuuuuucuuuuucguugguguaaagccaacacccugucuaaaaaacauaaauuucuuuaaucauuuugccucuuuucucugugcuucaauuaauaaaaaauggaaagaaccuagaucuaaaaaaaaaaaaaaaaaaaaaaaaaaaaaaaaaaaaaaaaaaaaaaaaaaaaaaaaaaaaaaaaugcaucccccccccccccccccccccccccccccccaaaggcucuuuucagagccaccagaauu

SEQ ID NO: 10768 - RNA, 2092 nt, Artificial Sequence
  mRNA product Design i-2 comprising derived and/or modified sequence from LASV(Lassa virus/H.sapiens-wt/NGA/2015/ISTH_0543;Clade II)__AVO03640__NP (opt4)
ggggcgcugccuacggagguggcagccaucuccuucucggcaucaagcuuaccaugagcgccagcaaggaggugaagagcuuccuguggacccagagccugagaagagagcugagcggcuacugcagcaacaucaagcugcagguggugaaggacgcccaggcccugcugcacggccuggacuucagcgaggugagcaacgugcagagacugaugagaaagcagaagagagacgacagcgaccugaagagacugagagaccugaaccaggccgugaacaaccugguggagcugaagagcacccagcagaagagcauccugagagugggcacccugaccagcgacgaccugcugacccuggccgccgaccuggagaagcugaagagcaaggugaucagaaccgagagaccccugagcagcggcguguacaugggcaaccugagcacccagcagcuggagcagagaagagcccugcugaacaugaucggcauggugggcggcgcccagggcacccagcccggcagagacggcguggugagagugugggacgugaagaaccccgaccugcugaacaaccaguucggcaccaugcccagccugacccuggccugccugaccaagcagggccagguggaccugaacgacgccgugcuggcccugaccgaccugggccugaucuacaccgccaaguaccccaacagcagcgaccuggacagacugagccagagccaccccauccugaacaugguggacaccaagaagagcagccugaacaucagcggcuacaacuucagccugggcgccgccgugaaggccggcgccugcaugcuggacggcggcaacaugcuggagaccaucaaggugaccccccagaccauggacggcauccugaagagcauccugaaggugaagaagagccugggcauguucgugagcgacacccccggcgagagaaaccccuacgagaacauccuguacaagaucugccugagcggcgacggcuggcccuacaucgccagcagaaccagcaucgugggcagagccugggagaacaccaccguggaccuggagagcgacggcaagccccagaaggugggcagcgccggcagcaacaagagccugcagagcgccggcuuccccaccggccugaccuacagccagcugaugacccugaaggacagcaugaugcagcuggaccccagcgccaagaccuggaucgacaucgagggcagacccgaggaccccguggagaucgcccuguaccagcccaugagcggcugcuacauccacuucuucagagagcccaccgaccugaagcaguucaagcaggacgccaaguacagccacggcaucgacguggccgaccuguuccccgcccagcccggccugaccagcgccgugaucgaggcccugcccagaaacauggugcugaccugccagggcagcgacgacaucaagagacugcuggacagccagggcagaaaggacaucaagcugaucgacaucgcccugagcaaggccgacagcagaagauucgagaacgccgugugggaccagugcaaggaccugugccacaugcacaccggcguggugguggagaagaagaagagaggcggcaaggaggagaucaccccccacugcgcccugauggacugcaucauguacgacgccgccgugagcggcggccugaacauccccgugcugagagccgugcugcccagagacaugguguucagaaccagcagccccaagguggugcugugaggacuagugcaucacauuuaaaagcaucucagccuaccaugagaauaagagaaagaaaaugaagaucaauagcuuauucaucucuuuuucuuuuucguugguguaaagccaacacccugucuaaaaaacauaaauuucuuuaaucauuuugccucuuuucucugugcuucaauuaauaaaaaauggaaagaaccuagaucuaaaaaaaaaaaaaaaaaaaaaaaaaaaaaaaaaaaaaaaaaaaaaaaaaaaaaaaaaaaaaaaaugcaucccccccccccccccccccccccccccccccaaaggcucuuuucagagccaccagaauu

SEQ ID NO: 10769 - RNA, 2092 nt, Artificial Sequence
  mRNA product Design i-2 comprising derived and/or modified sequence from LASV(Lassa virus/H.sapiens-wt/NGA/2016/ISTH_0009;Clade II)__AVO03572__NP (opt4)
ggggcgcugccuacggagguggcagccaucuccuucucggcaucaagcuuaccaugagcgccagcaaggaggugaagagcuuccuguggacccagagccugagaagagagcugagcggcuacugcagcaacaucaagcugcagguggugaaggacgcccaggcccugcugcacggccuggacuucagcgaggugagcaacgugcagagacugaugagaaagcagaagagagacgacagcgaccugaagagacugagagaccugaaccaggccgugaacaaccugguggagcugaagagcacccagcagaagagcauccugagagugggcacccugaccagcgacgaccugcugacccuggccgccgaccuggagaagcugaagagcaaggugaucagaaccgagagaccccugagcagcggcguguacaugggcaaccugagcacccagcagcuggagcagagaagagcccugcugaacaugaucggcauggugggcggcgcccagggcacccagcccggcagagacggcguggugagagugugggacgugaagaaccccgaccugcugaacaaccaguucggcaccaugcccagccugacccuggccugccugaccaagcagggccagguggaccugaacgacgccgugcuggcccugaccgaccugggccugaucuacaccgccaaguaccccaacagcagcgaccuggacagacugagccagagccaccccauccugaacaugguggacaccaagaagagcagccugaacaucagcggcuacaacuucagccugggcgccgccgugaaggccggcgccugcaugcuggacggcggcaacaugcuggagaccaucaaggugaccccccagaccauggacggcauccugaagagcauccugaaggugaagaagagccugggcauguucgugagcgacacccccggcgagagaaaccccuacgagaacauccuguacaagaucugccugagcggcgacggcuggcccuacaucgccagcagaaccagcaucgugggcagagccugggagaacaccaccguggaccuggagagcgacggcaagccccagaaggugggcagcgccggcagcaacaagagccugcagagcgccggcuuccccaccggccugaccuacagccagcugaugacccugaaggacagcaugaugcagcuggaccccagcgccaagaccuggaucgacaucgagggcagacccgaggaccccguggagaucgcccuguaccagcccaugagcggcugcuacauccacuucuucagagagcccaccgaccugaagcaguucaagcaggacgccaaguacagccacggcaucgacguggccgaccuguuccccgcccagcccggccugaccagcgccgugaucgaggcccugcccagaaacauggugcugaccugccagggcagcgacgacaucaagagacugcuggacagccagggcagaagagacaucaagcugaucgacaucgcccugagcaaggccgacagcagaagauucgagaacgccgugugggaccagugcaaggaccugugccacaugcacaccggcguggugguggagaagaagaagagaggcggcaaggaggagaucaccccccacugcgcccugauggacugcaucauguacgacgccgccgugagcggcggccugaacauccccgugcugagagccgugcugcccagagacaugguguucagaaccagcagccccaagguggugcugugaggacuagugcaucacauuuaaaagcaucucagccuaccaugagaauaagagaaagaaaaugaagaucaauagcuuauucaucucuuuuucuuuuucguugguguaaagccaacacccugucuaaaaaacauaaauuucuuuaaucauuuugccucuuuucucugugcuucaauuaauaaaaaauggaaagaaccuagaucuaaaaaaaaaaaaaaaaaaaaaaaaaaaaaaaaaaaaaaaaaaaaaaaaaaaaaaaaaaaaaaaaugcaucccccccccccccccccccccccccccccccaaaggcucuuuucagagccaccagaauu

SEQ ID NO: 10770 - RNA, 2092 nt, Artificial Sequence
  mRNA product Design i-2 comprising derived and/or modified sequence from LASV(Lassa virus/H.sapiens-wt/NGA/2016/ISTH_0017;Clade II)__AVO03568__NP (opt4)
ggggcgcugccuacggagguggcagccaucuccuucucggcaucaagcuuaccaugagcgccagcaaggaggugaagagcuuccuguggacccagagccugagaagagagcugagcggcuacugcagcagcaucaagcugcagguggugaaggacgcccaggcccugcugcacggccuggacuucagcgaggugagcaacgugcagagacugaugagaaagcagaagagagacgacagcgaccugaagagacugagagaccugaaccaggccgugaacaaccugguggagcugaagagcacccagcagaagagcauccugagagugggcacccugaccagcgacgaccugcugacccuggccgccgaccuggagaagcugaagagcaaggugaucagaaccgagagaccccugagcagcggcguguacaugggcaaccugagcacccagcagcuggagcagagaagagcccugcugaacaugaucggcauggccggcggcgcccagggcacccagcccggcagagacggcguggugagagugugggacgugaagaaccccgaccugcugaacaaccaguucggcaccaugcccagccugacccuggccugccugaccaagcagggccagguggaccugaacgacgccgugcuggcccugaccgaccugggccugaucuacaccgccaaguaccccaacagcagcgaccuggacagacugagccagagccaccccauccugaacaugguggacaccaagaagagcagccugaacaucagcggcuacaacuucagccugggcgccgccgugaaggccggcgccugcaugcuggacggcggcaacaugcuggagaccaucaaggugaccccccagaccauggacggcauccugaagagcauccugaaggugaagagaagccugggcauguucgugagcgacgcccccggcgagagaaaccccuacgagaacauccuguacaagaucugccugagcggcgacggcuggcccuacaucgccagcagaaccagcaucgugggcagagccugggagaacaccaccguggaccuggagagcgacggcaagccccagaaggugggcgccaccggcagcaacaagagccugcagagcgccggcuuccccaccggccugaccuacagccagcugaugacccugaaggacagcaugaugcagcuggaccccagcgccaagaccuggaucgacaucgagggcagacccgaggaccccguggagguggcccuguaccagcccgugagcggcugcuacauccacuucuucagagagcccaccgaccugaagcaguucaagcaggacgccaaguacagccacggcaucgacguggccgaccuguuccccgcccagcccggccugaccagcgccgugaucgaggcccugcccagaaacauggugcugaccugccagggcagcgacgacaucaagaagcugcuggacagccagggcagaaaggacaucaagcugaucgacaucgcccugagcaaggccgacagcagaagauucgagaacgccgugugggaccagugcaaggaccugugccacaugcacaccggcguggugguggagaagaagaagagaggcggcaaggaggagaucaccccccacugcgcccugauggacugcaucauguacgacgccgccgugagcggcggccugaacauccccgugcugagagccgugcugcccagagacaugguguucagaaccagcagccccaagguggugcugugaggacuagugcaucacauuuaaaagcaucucagccuaccaugagaauaagagaaagaaaaugaagaucaauagcuuauucaucucuuuuucuuuuucguugguguaaagccaacacccugucuaaaaaacauaaauuucuuuaaucauuuugccucuuuucucugugcuucaauuaauaaaaaauggaaagaaccuagaucuaaaaaaaaaaaaaaaaaaaaaaaaaaaaaaaaaaaaaaaaaaaaaaaaaaaaaaaaaaaaaaaaugcaucccccccccccccccccccccccccccccccaaaggcucuuuucagagccaccagaauu

SEQ ID NO: 10771 - RNA, 2092 nt, Artificial Sequence
  mRNA product Design i-2 comprising derived and/or modified sequence from LASV(Lassa virus/H.sapiens-wt/NGA/2018/ISTH_0959;Clade II)__AVV65100__NP (opt4)
ggggcgcugccuacggagguggcagccaucuccuucucggcaucaagcuuaccaugagcgccagcaaggaggugaagagcuuccuguggacccagagccugagaagagagcugagcggcuacugcagcaacaucaagcugcagguggugaaggacgcccaggcccugcugcacggccuggacuucagcgaggugagcaacgugcagagacugaugagaaagcagaagagagacgacagcgaccugaagagacugagagaccugaaccaggccgugaacaaccugguggagcugaagagcacccagcagaagagcauccugagagugggcacccugaccagcgacgaccugcugacccuggccgccgaccuggagaagcugaagagcaaggugaucagaaccgagagaccccugagcagcggcguguacaugggcaaccugagcacccagcagcuggagcagagaagagcccugcugaaccugaucggcauggugggcggcgcccagggcacccagcccggcagagacggcguggugagagugugggacgugaagaaccccgaccugcugaacaaccaguucggcaccaugcccagccugacccuggccugccugaccaagcagggccagguggaccugaacgacguggugcuggcccugaccgaccugggccugaucuacaccgccaaguaccccaacagcagcgaccuggacagacugagccagagccaccccauccugaacaugguggacaccaagaagagcagccugaacaucagcggcuucaacuucagccugggcgccgccgugaaggccggcgccugcaugcuggacggcggcaacaugcuggagaccaucaaggugaccccccagaccauggacggcauccugaagagcauccugaaggugaagaagagccugggcauguucgugagcgacacccccggcgagagaaaccccuacgagaacauccuguacaagaucugccugagcggcgacggcuggcccuacaucgccagcagaaccagcaucgugggcagagccugggagaacaccaccguggaccuggagagcgacggcaagccccacaaggugggcaccgccggcagcaacaagagccugcagagcgccggcuuccccaccggccugaccuacagccagcugaugacccugaaggacagcaugaugcagcuggaccccagcgccaagaccuggaucgacaucgagggcagacccgaggaccccguggagaucgcccuguaccagcccaugagcggcugcuacauccacuucuucagagagcccaccgaccugaagcaguucaagcaggacgccaaguacagccacggcaucgacguggccgaccuguuccccgcccagcccggccugaccagcgccgugaucgaggcccugcccagaaacauggugcugaccugccagggcagcgacgacaucaagagacugcuggacagccagggcagaaaggacaucaagcugaucgacaucgcccugagcaagaccgacagcagaagauucgagaacgccgugugggaccagugcaaggaccugugccacaugcacaccggcguggugguggagaagaagaagagaggcggcaaggaggagaucaccccccacugcgcccugauggacugcaucauguacgacgccgccgugagcggcggccugaacauccccgugcugagagccgugcugcccagagacaugguguucagaaccagcagccccaagguggugcugugaggacuagugcaucacauuuaaaagcaucucagccuaccaugagaauaagagaaagaaaaugaagaucaauagcuuauucaucucuuuuucuuuuucguugguguaaagccaacacccugucuaaaaaacauaaauuucuuuaaucauuuugccucuuuucucugugcuucaauuaauaaaaaauggaaagaaccuagaucuaaaaaaaaaaaaaaaaaaaaaaaaaaaaaaaaaaaaaaaaaaaaaaaaaaaaaaaaaaaaaaaaugcaucccccccccccccccccccccccccccccccaaaggcucuuuucagagccaccagaauu

SEQ ID NO: 10772 - RNA, 2092 nt, Artificial Sequence
  mRNA product Design i-2 comprising derived and/or modified sequence from LASV(LASV003-NIG-2008;Clade II)__AIT17581__NP (opt4)
ggggcgcugccuacggagguggcagccaucuccuucucggcaucaagcuuaccaugagcgccagcaaggaggugaagagcuuccuguggacccagagccugagaagagagcugagcggcuacugcagcagcaucaagcugcagguggugaaggacgcccaggcccugcugcacggccuggacuucagcgaggugagcaacgugcagagacugaugagaaagcagaagagagacgacagcgaccugaagagacugagagaccugaaccaggccgugaacaaccugguggagcugaagagcacccagcagaagagcgugcugagagugggcacccugaccagcgacgaccugcugacccuggccgccgaccuggagaagcugaagagcaaggugaucagaaccgagagaccccugagcagcggcguguacaugggcaaccugagcgcccagcagcuggagcagagaagaacccugcugaacaugaucggcauggugggcggcgcccagggcacccagcccggcagagacggcguggugagagugugggacgugaagaaccccgaccugcugaacaaccaguucggcaccaugcccagccugacccuggccugccugaccaagcagggccagguggaccugaacgacguggugcuggcccugaccgaccugggccugaucuacaccgccaaguaccccaacagcagcgaccuggacagacugagccagagccaccccauccugagcaugguggacaccaagaagagcagccugaacaucagcggcuacaacuucagccugggcgccgccgugaaggccggcgccugcaugcuggacggcggcaacaugcuggagaccaucaaggugaccccccagaccauggacggcauccugaagagcauccugaaggugaagaagagccugggcauguucgugagcgacacccccggcgagagaaaccccuacgagaacauccuguacaagaucugccugagcggcgacggcuggcccuacaucgccagcagaaccagcaucgugggcagagccugggagaacaccaccguggaccuggagagcgacggcaagccccagaaggugggcaccgccggcagcaacaagagccugcagagcgccggcuuccccaccggccugaccuacagccagcugaugacccugaaggacagcaugaugcagcuggaccccagcgccaagaccuggaucgacaucgagggcagacccgaggaccccguggagaucgcccuguaccagcccaugagcggcugcuacauccacuucuucagagagcccaccgaccugaagcaguucaagcaggacgccaaguacagccacggcaucgacgugaccgaccuguuccccgcccagcccggccugaccagcgccgugaucgaggcccugcccagaaacauggugcugaccugccagggcagcgacgacaucaagagacugcuggacagccagggcagaagagacaucaagcugaucgacaucgcccugagcaaggccgacagcagaagauucgagaacgccgugugggaccagugcaaggaccugugccacaugcacaccggcguggugguggagaagaagaagagaggcggcaaggaggagaucaccccccacugcgcccugauggacugcaucauguacgacgccgccgugagcggcggccugaacauccccgugcugagagccgugcugcccagagacaugguguucagaaccagcagccccaagguggugcugugaggacuagugcaucacauuuaaaagcaucucagccuaccaugagaauaagagaaagaaaaugaagaucaauagcuuauucaucucuuuuucuuuuucguugguguaaagccaacacccugucuaaaaaacauaaauuucuuuaaucauuuugccucuuuucucugugcuucaauuaauaaaaaauggaaagaaccuagaucuaaaaaaaaaaaaaaaaaaaaaaaaaaaaaaaaaaaaaaaaaaaaaaaaaaaaaaaaaaaaaaaaugcaucccccccccccccccccccccccccccccccaaaggcucuuuucagagccaccagaauu

SEQ ID NO: 10773 - RNA, 2092 nt, Artificial Sequence
  mRNA product Design i-2 comprising derived and/or modified sequence from LASV(LASV035-NIG-2009;Clade II)__AIT17589__NP (opt4)
ggggcgcugccuacggagguggcagccaucuccuucucggcaucaagcuuaccaugagcgccagcaaggaggugaagagcuuccuguggacccagagccugagaagagagcugagcggcuacugcagcagcaucaagcugcagguggugaaggacgcccaggcccugcugcacggccuggacuucagcgaggugagcaacgugcagagacugaugagaaagcagaagagagacgacagcgaccugaagagacugagagaccugaaccaggccgugaacaaccugguggagcugaagagcacccagcagaagagcauccugagagugggcacccugaccagcgacgaccugcugacccuggccgccgaccuggagaagcugaagagcaaggugaucagaaccgagagaccccugagcagcggcguguacaugggcaaccugagcgcccagcagcuggagcagagaagagcccugcugaacaugaucggcauggugggcggcgcccagggcacccagcccggcagagacggcguggugagagugugggacgugaagaaccccgaccugcugaacaaccaguucggcaccaugcccagccugacccuggccugccugaccaagcagggccagguggaccugaacgacgccgugcuggcccugaccgaccugggccugaucuacaccgccaaguaccccaacagcagcgaccuggacagacugagccagagccaccccauccugaacaugguggacaccaagaagagcagccugaacaucagcggcuacaacuucagccugggcgccgccgugaaggccggcgccugcaugcuggacggcggcaacaugcuggagaccaucaaggugaccccccagaccauggacggcauccugaagagcauccugaaggugaagagaagccugggcauguucgugagcgacacccccggcgagagaaaccccuacgagaacauccuguacaagaucugccugagcggcgacggcuggcccuacaucgccagcagaaccagcaucgugggcagagccugggagaacaccaccguggaccuggagagcgacggcaagccccagaaggugggcaccaccggcagcaacaagagccugcagagcgccggcuuccccaccggccugaccuacagccagcugaugacccugaaggacagcaugaugcagcuggaccccagcgccaagaccuggaucgacaucgagggcagacccgaggaccccguggagaucgcccuguaccagcccaugagcggcugcuacauccacuucuucagagagcccaccgaccugaagcaguucaagcaggacgccaaguacagccacggcaucgacguggccgaccuguuccccgcccagcccggccugaccagcgccgugaucgaggcccugcccagaaacauggugcugaccugccagggcagcgacgacaucaagaagcugcuggacagccagggcagaagagacaucaagcugaucgacaucgcccugagcaaggccgacagcagaaaguucgagaacgccgugugggaccagugcaaggaccugugccacaugcacaccggcguggugguggagaagaagaagagaggcggcaaggaggagaucaccccccacugcgcccugauggacugcaucauguacgacgccgccgugagcggcggccugaacauccccgugcugagagccgugcugcccagagacaugguguucagaaccagcagccccaagguggugcugugaggacuagugcaucacauuuaaaagcaucucagccuaccaugagaauaagagaaagaaaaugaagaucaauagcuuauucaucucuuuuucuuuuucguugguguaaagccaacacccugucuaaaaaacauaaauuucuuuaaucauuuugccucuuuucucugugcuucaauuaauaaaaaauggaaagaaccuagaucuaaaaaaaaaaaaaaaaaaaaaaaaaaaaaaaaaaaaaaaaaaaaaaaaaaaaaaaaaaaaaaaaugcaucccccccccccccccccccccccccccccccaaaggcucuuuucagagccaccagaauu

SEQ ID NO: 10774 - RNA, 2092 nt, Artificial Sequence
  mRNA product Design i-2 comprising derived and/or modified sequence from LASV(LASV1000-NIG-2009;Clade II)__AIT17783__NP (opt4)
ggggcgcugccuacggagguggcagccaucuccuucucggcaucaagcuuaccaugagcgccagcaaggaggugaagagcuuccuguggacccagagccugagaagagagcugagcggcuacugcagcaacaucaagcugcagguggugaaggacgcccaggcccugcugcacggccuggacuucagcgaggugagcaacgugcagagacugaugagaaagcagaagagagacgacagcgaccugaagagacugagagaccugaaccaggccgugaacaaccugguggagcugaagagcacccagcagaagagcauccugagagugggcacccugaccagcgacgaccugcugacccuggccgccgaccuggagaagcugaagagcaaggugaucagaaccgagagaccccugagcagcggcguguacaugggcaaccugagcacccagcagcuggagcagagaagagcccugcugaacaugaucggcauggugggcggcgcccagggcacccagcccggcagagacggcguggugagagugugggacgugaagaaccccgaccugcugaacaaccaguucggcaccaugcccagccugacccuggccugccugaccaagcagggccagguggaccugaacgacguggugcuggcccugaccgaccugggccugaucuacaccgccaaguaccccaacagcagcgaccuggacagacugagccagagccaccccauccugaacaugguggacaccaagaagagcagccugaacaucagcggcuacaacuucagccugggcgccgccgugaaggccggcgccugcaugcuggacggcggcaacaugcuggagaccaucaaggugaccccccagaccauggacggcauccugaagagcauccugaaggugaagaagagccugggcauguucgugagcgacacccccggcgagagaaaccccuacgagaacauccuguacaagaucugccugagcggcgacggcuggcccuacaucgccagcagaaccagcaucgugggcagagccugggagaacaccaccguggaccuggagagcgacggcaagccccagaaggugggcaccgccggcagcaacaagagccugcagagcgccggcuuccccaccggccugaccuacagccagcugaugacccugaaggacagcaugaugcagcuggaccccagcgccaagaccuggaucgacaucgagggcagacccgaggaccccguggagaucgcccuguaccagcccgugagcggcugcuacauccacuucuucagagagcccaccgaccugaagcaguucaagcaggacgccaaguacagccacggcaucgacguggccgaccuguuccccgcccagcccggccugaccagcgccgugaucgaggcccugcccagaaacauggugcugaccugccagggcagcgacgacaucaagagacugcuggacagccagggcagaagagacaucaagcugaucgacaucgcccugagcaaggccgacagcagaagauucgagaacgccgugugggaccagugcaaggaccugugccacaugcacaccggcguggugguggagaagaagaagagaggcggcaaggaggagaucaccccccacugcgcccugauggacugcaucauguacgacgccgccgugagcggcggccugaacauccccgugcugagagccgugcugcccagagacaugguguucagaaccagcagccccaagguggugcugugaggacuagugcaucacauuuaaaagcaucucagccuaccaugagaauaagagaaagaaaaugaagaucaauagcuuauucaucucuuuuucuuuuucguugguguaaagccaacacccugucuaaaaaacauaaauuucuuuaaucauuuugccucuuuucucugugcuucaauuaauaaaaaauggaaagaaccuagaucuaaaaaaaaaaaaaaaaaaaaaaaaaaaaaaaaaaaaaaaaaaaaaaaaaaaaaaaaaaaaaaaaugcaucccccccccccccccccccccccccccccccaaaggcucuuuucagagccaccagaauu

SEQ ID NO: 10775 - RNA, 2092 nt, Artificial Sequence
  mRNA product Design i-2 comprising derived and/or modified sequence from LASV(LASV221-NIG-2010;Clade II)__AIT17625__NP (opt4)
ggggcgcugccuacggagguggcagccaucuccuucucggcaucaagcuuaccaugagcgccagcaaggaggugaagagcuuccuguggacccagagccugagaagagagcugagcggcuacugcagcagcaucaagcugcagguggugaaggacgcccaggcccugcugcacggccuggacuucagcgaggugagcaacgugcagagacugaugagaaagcagagaagagacgacagcgaccugaagagacugagagaccugaaccaggccgugaacaaccugguggagcugaagagcacccagcagaagagcauccugagagugggcacccugaccagcgacgaccugcugacccuggccgccgaccuggagaagcugaagagcaaggugaucagaaccgagagaccccugagcagcggcguguacaugggcaaccugagcacccagcagcuggagcagagaagagcccugcugaacaugaucggcauggugggcggcgcccagggcacccagcccggcagagacggcguggugagagugugggacgugaagaaccccgaccugcugaacaaccaguucggcaccaugcccagccugacccuggccugccugaccaagcagggccagguggaccugaacgacgccgugcuggcccugaccgaccugggccugaucuacaccgccaaguaccccaacagcagcgaccuggacagacugagccagagccaccccauccugaacaugguggacaccaagaagagcagccugaacaucagcggcuacaacuucagccugggcgccgccgugaaggccggcgccugcaugcuggacggcggcaacaugcuggagaccaucaaggugaccccccagaccguggacggcauccugaagagcauccugaaggugaagagaagccugggcauguucgugagcgacacccccggcgagagaaaccccuacgagaacauccuguacaagaucugccugagcggcgacggcuggcccuacaucgccagcagaaccagcaucgugggcagagccugggagaacaccaccguggaccuggagagcgacggcaagccccagaaggugggcaccgccggcagcaacaagagccugcagagcgccggcuuccccaccggccugaccuacagccagcugaugacccugaaggacagcaugaugcagcuggaccccagcgccaagaccuggaucgacaucgagggcagacccgaggaccccguggagaucgcccuguaccagcccaugagcggcugcuacauccacuucuucagagagcccaccgaccugaagcaguucaagcaggacgccaaguacagccacggcaucgacguggccgaccuguuccccgcccagcccggccugaccagcgccgugaucgaggcccugcccagaaacauggugcugaccugccagggcagcgacgacaucaagagacugcuggacagccagggcagaagagacaucaagcugaucgacaucgcccugagcaaggccgacagcagaaaguucgagaacgccgugugggaccagugcaaggaccugugccacaugcacaccggcguggugguggagaagaagaagagaggcggcaaggaggagaucaccccccacugcgcccugauggacugcaucauguacgacgccgccgugagcggcggccugaacauccccgugcugagagccgugcugcccagagacaugguguucagaaccagcagccccaagguggugcugugaggacuagugcaucacauuuaaaagcaucucagccuaccaugagaauaagagaaagaaaaugaagaucaauagcuuauucaucucuuuuucuuuuucguugguguaaagccaacacccugucuaaaaaacauaaauuucuuuaaucauuuugccucuuuucucugugcuucaauuaauaaaaaauggaaagaaccuagaucuaaaaaaaaaaaaaaaaaaaaaaaaaaaaaaaaaaaaaaaaaaaaaaaaaaaaaaaaaaaaaaaaugcaucccccccccccccccccccccccccccccccaaaggcucuuuucagagccaccagaauu

SEQ ID NO: 10776 - RNA, 2092 nt, Artificial Sequence
  mRNA product Design i-2 comprising derived and/or modified sequence from LASV(LASV237-NIG-2010;Clade II)__AIT17639__NP (opt4)
ggggcgcugccuacggagguggcagccaucuccuucucggcaucaagcuuaccaugagcgccagcaaggaggugaagagcuuccuguggacccagagccugagaagagagcugagcggcuacugcagcaacaucaagcugcagguggugaaggacgcccaggcccugcugcacggccuggacuucagcgaggugagcaacgugcagagacugaugagaaagcagaagagagacgacagcgaccugaagagacugagagaccugaaccaggccgugaacaaccugguggagcugaagagcacccagcagaagagcauccugagagugggcacccugaccagcgacgaccugcugacccuggccgccgaccuggagaagcugaagagcaaggugaucagaaccgagagaccccugagcagcggcguguacaugggcaaccugagcacccagcagcuggagcagagaagagcccugcugaacaugaucggcauggugggcggcgcccagggcacccagcccggcagagacggcguggugagagugugggacgugaagaaccccgaccugcugaacaaccaguucggcaccaugcccagccugacccuggccugccugaccaagcagggccagguggaccugaacgacgccgugcuggcccugaccgaccugggccugaucuacaccgccaaguaccccaacagcagcgaccuggacagacugagccagagccaccccauccugaacaugguggacaucaagaagagcagccugaacaucagcggcuacaacuucagccugggcgccgccgugaaggccggcgccugcaugcuggacggcggcaacaugcuggagaccaucaaggugaccccccagaccauggacggcauccugaagagcauccugaaggugaagagaagccugggcauguucgugagcgacacccccggcgagagaaaccccuacgagaacauccuguacaagaucugccugagcggcgacggcuggcccuacaucgccagcagaaccagcaucgugggcagagccugggagaacaccaccguggaccuggagagcgacggcaagccccagaaggugggcagcgccggcagcaacaagagccugcagagcgccggcuuccccaccggccugaccuacagccagcugaugacccugaaggacagcaugaugcagcuggaccccagcgccaagaccuggaucgacaucgagggcagacccgaggaccccguggagaucgcccuguaccagcccaugagcggcugcuacauccacuucuucagagagcccaccgaccugaagcaguucaagcaggacgccaaguacagccacggcaucgacguggccgaccuguuccccgcccagcccggccugaccagcgccgugaucgaggcccugcccagaaacauggugcugaccugccagggcagcgacgacaucaagagacugcuggacagccagggcagaagagacaucaagcugaucgacaucgcccugagcaaggccgacagcagaagauucgagaacgccgugugggaccagugcaaggaccugugccacaugcacaccggcguggugguggagaagaagaagagaggcggcaaggaggagaucaccccccacugcgcccugauggacugcaucauguacgacgccgccgugagcggcggccugaacauccccgugcugagagccgugcugcccagagacaugguguucagaaccagcagccccaagguggugcugugaggacuagugcaucacauuuaaaagcaucucagccuaccaugagaauaagagaaagaaaaugaagaucaauagcuuauucaucucuuuuucuuuuucguugguguaaagccaacacccugucuaaaaaacauaaauuucuuuaaucauuuugccucuuuucucugugcuucaauuaauaaaaaauggaaagaaccuagaucuaaaaaaaaaaaaaaaaaaaaaaaaaaaaaaaaaaaaaaaaaaaaaaaaaaaaaaaaaaaaaaaaugcaucccccccccccccccccccccccccccccccaaaggcucuuuucagagccaccagaauu

SEQ ID NO: 10777 - RNA, 2092 nt, Artificial Sequence
  mRNA product Design i-2 comprising derived and/or modified sequence from LASV(LASV253-NIG-2011;Clade II)__AIT17671__NP (opt4)
ggggcgcugccuacggagguggcagccaucuccuucucggcaucaagcuuaccaugagcgccagcaaggaggugaagagcuuccuguggacccagagccugagaagagagcugagcggcuacugcagcagcaucaagcugcagguggugaaggacgcccaggcccugcugcacggccuggacuucagcgaggugagcaacgugcagagacugaugagaaagcagaagagagacgacagcgaccugaagagacugagagaccugaaccaggccgugaacaaccugguggagcugaagagcacccagcagaagagcgugcugagagugggcacccugaccagcgacgaccugcugacccuggccgccgaccuggagaagcugaagagcaaggugaucagaaccgagagaccccugagcagcggcguguacaugggcaaccugagcacccagcagcuggagcagagaagagcccugcugaacaugaucggcauggugggcggcgcccagggcacccagcccggcagagacggcguggugagagugugggacgugaagaaccccgaccugcugaacaaccaguucggcaccaugcccagccugacccuggccugccugaccaagcagggccagguggaccugaacgacguggugcuggcccugaccgaccugggccugaucuacaccgccaaguaccccaacagcagcgaccuggacagacugagccagagccaccccauccugaacaugguggacaccaagaagagcagccugaacaucagcggcuacaacuucagccugggcgccgccgugaaggccggcgccugcaugcuggacggcggcaacaugcuggagaccaucaaggugaccccccagaccauggacggcauccugaagagcauccugaaggugaagaagagccugggcauguucgugagcgacacccccggcgagagaaaccccuacgagaacauccuguacaagaucugccugagcggcgacggcuggcccuacaucgccagcagaaccagcaucgugggcagagccugggagaacaccaccguggaccuggagagcgacggcaagccccagaaggugggcaccgccggcagcaacaagagccugcagagcgccggcuuccccaccggccugaccuacagccagcugaugacccugaaggacagcaugaugcagcuggaccccagcgccaagaccuggaucgacaucgagggcagacccgaggaccccguggagaucgcccuguaccagcccaugagcggcugcuacauccacuucuucagagagcccaccgaccugaagcaguucaagcaggacgccaaguacagccacggcaucgacgugaccgaccuguuccccgcccagcccggccugaccagcgccgugaucgaggcccugcccagaaacauggugcugaccugccagggcagcgacgacaucaagagacugcuggacagccagggcagaagagacaucaagcugaucgacaucgcccugagcaaggccgacagcagaagauucgagaacgccgugugggaccagugcaaggaccugugccacaugcacaccggcguggugguggagaagaagaagagaggcggcaaggaggagaucaccccccacugcgcccugauggacugcaucauguacgacgccgccgugagcggcggccugaacauccccgugcugagagccgugcugcccagagacaugguguucagaaccagcagccccaagguggugcugugaggacuagugcaucacauuuaaaagcaucucagccuaccaugagaauaagagaaagaaaaugaagaucaauagcuuauucaucucuuuuucuuuuucguugguguaaagccaacacccugucuaaaaaacauaaauuucuuuaaucauuuugccucuuuucucugugcuucaauuaauaaaaaauggaaagaaccuagaucuaaaaaaaaaaaaaaaaaaaaaaaaaaaaaaaaaaaaaaaaaaaaaaaaaaaaaaaaaaaaaaaaugcaucccccccccccccccccccccccccccccccaaaggcucuuuucagagccaccagaauu

SEQ ID NO: 10778 - RNA, 2092 nt, Artificial Sequence
  mRNA product Design i-2 comprising derived and/or modified sequence from LASV(LASV254-NIG-2011;Clade II)__AIT17675__NP (opt4)
ggggcgcugccuacggagguggcagccaucuccuucucggcaucaagcuuaccaugagcgccagcaaggaggugaagagcuuccuguggacccagagccugagaagagagcugagcggcuacugcagcagcaucaagcugcagguggugaaggacgcccaggcccugcugcacggccuggacuucagcgaggugagcaacgugcagagacugaugagaaagcagaagagagacgacagcgaccugaagagacugagagaccugaaccaggccgugaacaaccugguggagcugaagagcacccagcagaagagcgugcugagagugggcacccugaccagcgacgaccugcugacccuggccgccgaccuggagaagcugaagagcaaggugaucagaaccgagagaccccugagcagcggcguguacaugggcaaccugagcacccagcagcuggagcagagaagagcccugcugaacaugaucggcauggugggcggcgcccagggcacccagcccggcagagacggcguggugagagugugggacgugaagaaccccgaccugcugaacaaccaguucggcaccaugcccagccugacccuggccugccugaccaagcagggccagguggaccugaacgacgccgugcuggcccugaccgaccugggccugaucuacaccgccaaguaccccaacagcagcgaccuggacagacugagccagagccaccccauccugaacaugguggacaccaagaagagcagccugaacaucagcggcuacaacuucagccugggcgccgccgugaaggccggcgccugcaugcuggacggcggcaacaugcuggagaccaucaaggugaccccccagaccauggacggcauccugaagagcauccugaaggugaagaagagccugggcauguucgugagcgacacccccggcgagagaaaccccuacgagaacauccuguacaagaucugccugagcggcgacggcuggcccuacaucgccagcagaaccagcaucgugggcagagccugggagaacaccaucguggaccuggagagcgacggcaagccccagaaggugggcaccgccggcagcaacaagagccugcagagcgccggcuuccccaccggccugaccuacagccagcugaugacccugaaggacagcaugaugcagcuggaccccagcgccaagaccuggaucgacaucgagggcagacccgaggaccccguggagaucgcccuguaccagcccaugagcggcugcuacauccacuucuucagagagcccaccgaccugaagcaguucaagcaggacgccaaguacagccacggcaucgacguggccgaccuguuccccgcccagcccggccugaccagcgccgugaucgaggcccugcccagaaacauggugcugaccugccagggcagcgacgacaucaagagacugcuggacagccagggcagaagagacaucaagcugaucgacaucgcccugagcaaggccgacagcagaagauucgagaacgccgugugggaccagugcaaggaccugugccacaugcacaccggcguggugguggagaagaagaagagaggcggcaaggaggagaucaccccccacugcgcccugauggacugcaucauguacgacgccgccgugagcggcggccugaacauccccgugcugagagccgugcugcccagagacaugguguucagaaccagcagccccaagguggugcugugaggacuagugcaucacauuuaaaagcaucucagccuaccaugagaauaagagaaagaaaaugaagaucaauagcuuauucaucucuuuuucuuuuucguugguguaaagccaacacccugucuaaaaaacauaaauuucuuuaaucauuuugccucuuuucucugugcuucaauuaauaaaaaauggaaagaaccuagaucuaaaaaaaaaaaaaaaaaaaaaaaaaaaaaaaaaaaaaaaaaaaaaaaaaaaaaaaaaaaaaaaaugcaucccccccccccccccccccccccccccccccaaaggcucuuuucagagccaccagaauu

SEQ ID NO: 10779 - RNA, 2092 nt, Artificial Sequence
  mRNA product Design i-2 comprising derived and/or modified sequence from LASV(Nig08-04;Clade II)__ADU56611__NP (opt4)
ggggcgcugccuacggagguggcagccaucuccuucucggcaucaagcuuaccaugagcgccagcaaggaggugaagagcuuccuguggacccagagccugagaagagagcugagcggcuacugcagcaacaucaagcugcagguggugaaggacgcccaggcccugcugcacggccuggacuucagcgaggugagcaacgugcagagacugaugagaaagcagaagagagacgacggcgaccugaagagacugagagaccugaaccaggccgugaacaaccugguggagcugaagagcacccagcagaagagcgugcugagagugggcacccugaccagcgacgaccugcugacccuggccgccgaccuggagaagcugaagagcaaggugaucagaaccgagagaccccugagcagcggcguguacaugggcaaccugagcacccagcagcuggagcagagaaaggcccugcugagcaugaucggcauggugggcggcgcccagggcacccagcccggcagagacggcguggugagagugugggacgugaagaaccccgaccugcugaacaaccaguucggcaccaugcccagccugacccuggccugccugaccaagcagggccagguggaccugaacgacgccgugcuggcccugaccgaccugggccugaucuacaccgccaaguaccccaacagcagcgaccuggacagacugagccagagccaccccauccugaacaugguggacaccaagaagagcagccugaacaucagcggcuacaacuucagccugggcgccgccgugaaggccggcgccugcaugcuggacggcggcaacaugcuggagaccaucaaggugaccccccagaccauggacggcauccugaagagcauccugaaggugaagagaagccugggcauguucgugagcgacacccccggcgagagaaaccccuacgagaacauccuguacaagaucugccugagcggcgacggcuggcccuacaucgccagcagaaccagcaucgugggcagagccugggagaacaccaccguggaccuggagagcgacggcaagccccagaaggugggcaccgccggcagcaacaagagccugcagagcgccggcuuccccaccggccugaccuacagccagcugaugacccugaaggacagcaugaugcagcuggaccccagcgccaagaccuggaucgacaucgagggcagacccgaggaccccguggagaucgcccuguaccagcccaugagcggcugcuacauccacuucuucagagagcccaccgaccugaagcaguucaagcaggacgccaaguacagccacggcaucgacgugaccgaccuguucagcgcccagcccggccugaccagcgccgugaucgaggcccugcccagaaacauggugcugaccugccagggcagcgacgacaucaagaagcugcuggacagccagggcagaagagacaucaagcugaucgacaucagccugaacaaggccgacagcagaagauucgagaacgccgugugggaccagugcaaggaccugugccacaugcacaccggcguggugguggagaagaagaagagaggcggcaaggaggagaucaccccccacugcgcccugauggacugcaucauguucgacgccgccgugagcggcggccugaacauccccauccugagagccgugcugcccagagacaugguguucagaaccagcagccccaagguggugcugugaggacuagugcaucacauuuaaaagcaucucagccuaccaugagaauaagagaaagaaaaugaagaucaauagcuuauucaucucuuuuucuuuuucguugguguaaagccaacacccugucuaaaaaacauaaauuucuuuaaucauuuugccucuuuucucugugcuucaauuaauaaaaaauggaaagaaccuagaucuaaaaaaaaaaaaaaaaaaaaaaaaaaaaaaaaaaaaaaaaaaaaaaaaaaaaaaaaaaaaaaaaugcaucccccccccccccccccccccccccccccccaaaggcucuuuucagagccaccagaauu

SEQ ID NO: 10780 - RNA, 2095 nt, Artificial Sequence
  mRNA product Design i-2 comprising derived and/or modified sequence from LASV(GA391;Clade III)__AAA46284__NP (opt4)
ggggcgcugccuacggagguggcagccaucuccuucucggcaucaagcuuaccaugagcgccagcaaggaggugagaagcugccuguggacccagagccugagaagagagcugagcggcuacugcagcaacaucaagcugcagguggugaaggacgcccaggcccugcugcacggccuggacuucagcgaggugagcaacgugcagagacugaugagaaagcagaagagagacgacggcgaccugaagagacugagagaccugaaccaggccgugaacaaccugguggagcugaagagcacccagcagaagagcgugcugagagugggcacccugagcagcgacgaccugcugauccuggccgccgaccuggagaagcugaagagcaaggugaccagaaccgagagaccccugagcagcggcguguacaugggcaaccugagcagccagcagcuggaccagagaagagcccugcugaacaugaucggcaugaccggcgugagcggcggcggcaagggcgccagcaacggcaucgugagagugugggacgugaagaacgccgagcugcugaacaaccaguucggcaccaugcccagccugacccuggccugccugaccaagcagggccagguggaccugaacgacgccgugcaggcccugaccgaccugggccugaucuacaccgccaaguaccccaacagcagcgaccuggacagacugagccagagccaccccauccugaacaugaucgacaccaagaagagcagccugaacaucagcggcuacaacuucagccugggcgccgccgugaaggccggcgccugcaugcuggacggcggcaacaugcuggagaccaucaaggugagcccccagaccauggacggcauccugaagagcauccugaaggugaagaagagccugggcauguucgugagcgacacccccggcgagagaaaccccuacgagaacauccuguacaagaucugccugagcggcgacggcuggagcuacaucgccagcagaaccagcaucgugggcagagccugggagaacaccgugguggaccuggagcaggacaacaagccccagaagaucggcaacggcggcagcaacaagagccugcagagcgccggcuucgccgccggccugaucuacagccagcugaugacccugaaggacuucaagugcuucaaccugauccccaacgccaagaccuggauggacaucgagggcagacccgaggaccccguggagaucgcccuguaccagcccagcagcggcugcuacgugcacuucuucagagagcccaccgaccugaagcaguucaagcaggacgccaaguacagccacggcagagacgugaccgaccuguucgccgcccagcccggccugaccagcgccgugaucgaggcccugcccagaaacauggugaucaccugccagggcagcgaggacaucagaaagcugcuggagagccagggcagaagagacaucaagcugaucgacaucacccugagcaaggccgacagcagaaaguucgagaacgccgugugggaccaguucaaggaccugugccacaugcacaccggcguggugguggagaagaagaagagaggcggcaaggaggagaucaccccccacugcgcccugauggacugcaucauguucgacgccgccgugagcggcggccuggacgccaaggugcugagaguggugcugcccagagacaugguguucagaaccagcacccccaagguggugcugugaggacuagugcaucacauuuaaaagcaucucagccuaccaugagaauaagagaaagaaaaugaagaucaauagcuuauucaucucuuuuucuuuuucguugguguaaagccaacacccugucuaaaaaacauaaauuucuuuaaucauuuugccucuuuucucugugcuucaauuaauaaaaaauggaaagaaccuagaucuaaaaaaaaaaaaaaaaaaaaaaaaaaaaaaaaaaaaaaaaaaaaaaaaaaaaaaaaaaaaaaaaugcaucccccccccccccccccccccccccccccccaaaggcucuuuucagagccaccagaauu

SEQ ID NO: 10781 - RNA, 2092 nt, Artificial Sequence
  mRNA product Design i-2 comprising derived and/or modified sequence from LASV(Nig08-A19;Clade III)__ADU56619__NP (opt4)
ggggcgcugccuacggagguggcagccaucuccuucucggcaucaagcuuaccaugagcgccagcaaggaggugaagagcuuccuguggacccagagccugagaagagagcugagcggcuacugcagcaacaucaagcugcagguggugaaggacgcccaggcccugcugcacggccuggacuucagcgaggugagcaacgugcagagacugaugagaaagcagaagagagacgacggcgaccugaagagacugagagaccugaaccaggccgugaacaaccugguggagcugaagagcacccagcagaagagcgugcugagagugggcacccugagcagcgacgaccugcuggugcuggccgccgaccuggagaagcugaagagcaagguggugagaaccgagagaccccugagcagcggcaucuacaugggcaaccugagcagccagcagcuggaccagagaaaggcccugcugaacaugaucggcaugaccggcggcaacggcggcagaaacaccaccagcgacggcaucgugagagugugggacgugaagaacgccgagcugcugaacaaccaguucggcaccaugcccagccugacccuggccugccugaccaagcagggccagguggaccugaacgacgccgugcaggcccugaccgaccugggccugaucuacaccgccaaguaccccaacagcagcgaccuggacagacuggcccagagccaccccauccugaacaugaucgacaccaagaagagcagccugaacaucagcggcuacaacuucagccugggcgccgccgugaaggccggcgccugcaugcuggacggcggcaacaugcuggagaccaucaaggugagcccccagaccauggacggcauccugaagagcauccugaaggugaagagaagccugggcauguucaucagcgacacccccggcgagagaaaccccuacgagaacauccuguacaagaucugccugagcggcgacggcuggcccuacaucgccagcagaaccagcaucgugggcagagccugggagaacaccgugguggaccuggagagcgacaacaagccccagaagaccggcaacggcggcagcaacaagagccugcagagcgccggcuucgccgccggccugaccuacagccagcugaugacccugaaggacagcaugcugcagcuggaccccaacgccaagaccuggauggacaucgagggcagacccgaggaccccguggagaucgcccuguaccagcccagcagcggcugcuacauccacuucuucagagagcccaccgaccugaagcaguucaagcaggacgccaaguacagccacggcaucgacgugaccgaccuguucgccgcccagcccggccugaccagcgccgugaucgaggcccugcccagaaacauggugaucaccugccagggcagcgaggacaucagaaagcugcuggagagccagggcagaagagacaucaagcugaucgacaucagccugagcaagguggacagcagaaaguucgagaacgccgugugggaccaguucaaggaccugugccacaugcacaccggcaucgugguggagaagaagaagagaggcggcaaggaggagaucaccccccacugcgcccugauggacugcaucauguucgacgccgccgugagcggcggcguggacgccaaggugcugagagccgugcugcccagagacaugguguucagaaccagcacccccaagguggugcugugaggacuagugcaucacauuuaaaagcaucucagccuaccaugagaauaagagaaagaaaaugaagaucaauagcuuauucaucucuuuuucuuuuucguugguguaaagccaacacccugucuaaaaaacauaaauuucuuuaaucauuuugccucuuuucucugugcuucaauuaauaaaaaauggaaagaaccuagaucuaaaaaaaaaaaaaaaaaaaaaaaaaaaaaaaaaaaaaaaaaaaaaaaaaaaaaaaaaaaaaaaaugcaucccccccccccccccccccccccccccccccaaaggcucuuuucagagccaccagaauu

SEQ ID NO: 10782 - RNA, 2092 nt, Artificial Sequence
  mRNA product Design i-2 comprising derived and/or modified sequence from LASV(G1180-SLE-2010;Clade IV)__AIT17169__NP (opt4)
ggggcgcugccuacggagguggcagccaucuccuucucggcaucaagcuuaccaugagcgccagcaaggagaucaagagcuuccuguggacccagagccugagaagagagcugagcggcuacugcagcaacaucaagcugcagguggugaaggacgcccaggcccugcugcacggccuggacuucagcgaggugagcaacgugcagagacugaugagaaaggagagaagagacgacaacgaccugaagagacugagagaccugaaccaggccgugaacaaccugguggagcugaagagcacccagcagaagagcauccugagagugggcacccugaccagcgacgaccugcugauccuggccgccgaccuggagaagcugaagagcaaggugaucagaaccgagagaccccugagcgccggcguguacaugggcaaccugagcagccagcagcuggaccagagaagagcccugcugagcaugaucggcaugagcagcggcaaccagagagcccaggccggcagagacggcguggugagagugugggacgugaagaacguggagcugcugaacaaccaguucggcaccaugcccagccugacccuggccugccugaccaagcagggccagguggaccugaacgacgccgugcaggcccugaccgaccugggccugaucuacaccgccaaguaccccaacaccagcgaccuggacagacugacccagagccaccccauccugaacaugaucgacaccaagaagagcagccugaacaucagcggcuacaacuucagccugggcgccgccgugaaggccggcgccugcaugcuggacggcggcaacaugcuggagaccaucaaggugagcccccagaccauggacggcauccugaagagcauccugaaggugaagaaggcccugggcauguucaucagcgacacccccggcgagagaaaccccuacgagaacauccuguacaagaucugccugagcggcgacggcuggcccuacaucgccagcagaaccagcaucaccggcagagccugggagaacaccgugguggaccuggagagcgacggcaagccccagaaggccggcagcaacaacagcaacaagagccugcagagcgugggcuucaccgccggccugaccuacagccagcugaugacccugaaggacgccaugcugcagcuggaccccaacgccaagaccuggauggacaucgagggcagacccgaggaccccguggagaucgcccuguaccagcccagcagcggcugcuacauccacuucuucagagagcccaccgaccugaagcaguucaagcaggacgccaaguacagccacggcaucgacgugaccgaccuguucgccgcccagcccggccugaccagcgccgugaucgacgcccugcccagaaacauggugaucaccugccagggcagcgacgacaucagaaagcugcuggagagccagggcagaaaggacaucaagcugaucgacaucgcccugagcaagaccgacagcagaaaguacgagaacgccgugugggaccaguacaaggaccugugccacaugcacaccggcguggugguggagaagaagaagagaggcggcaaggaggagaucaccccccacugcgcccugauggacugcaucauguucgacgccgccgugagcggcggccugaacaccagcgugcugagagccgugcugcccagagacaugguguucagaaccagcacccccagaguggugcugugaggacuagugcaucacauuuaaaagcaucucagccuaccaugagaauaagagaaagaaaaugaagaucaauagcuuauucaucucuuuuucuuuuucguugguguaaagccaacacccugucuaaaaaacauaaauuucuuuaaucauuuugccucuuuucucugugcuucaauuaauaaaaaauggaaagaaccuagaucuaaaaaaaaaaaaaaaaaaaaaaaaaaaaaaaaaaaaaaaaaaaaaaaaaaaaaaaaaaaaaaaaugcaucccccccccccccccccccccccccccccccaaaggcucuuuucagagccaccagaauu

SEQ ID NO: 10783 - RNA, 2092 nt, Artificial Sequence
  mRNA product Design i-2 comprising derived and/or modified sequence from LASV(G1442-SLE-2011;Clade IV)__AIT17181__NP (opt4)
ggggcgcugccuacggagguggcagccaucuccuucucggcaucaagcuuaccaugagcgccagcaaggaggugaagagcuuccuguggacccagagccugagaagagagcugagcggcuacugcagcaacaucaagcugcagguggugaaggacgcccaggcccugcugcacggccuggacuucagcgaggugagcaacgugcagagacugaugagaaagcagagaagagacgacaacgaccugaagagacugagagaccugaaccaggccgugaacaaccugguggagcugaagagcacccagcagaagagcgugcugagagugggcacccugaccagcgacgaccugcuggugcuggccgccgaccuggagaagcugaagagcaaggugaucagaaccgagagaccccugagcgccggcguguacaugggcaaccugagcagccagcagcuggaccagagaagagcccugcugaacaugaucggcaugagcggcggcauccagggcaccagaaccggcagagacggcguggugagagugugggacgugaagaacgccgaccugcugaacaaccaguucggcaccaugcccagccugacccuggccugccugaccaagcagggccagguggaccugaacgacguggugcaggcccugaccgaccugggccugaucuacaccgccaaguaccccaacgccagcgaccuggacagacugacccagagccaccccauccugaacaugaucgacaccaagaagagcagccugaacaucagcggcuacaacuucagccugggcgccgccgugaaggccggcgccugcaugcuggacggcggcaacaugcuggagaccaucaaggugagcccccagaccauggacggcauccugaagagcauccugaaggugaagaagacccugggcauguucaucagcgacacccccggcgagagaaaccccuacgagaacauccuguacaagaucugccugagcggcgacggcuggcccuacaucgccagcagaaccagcaucaccggcagagccugggagaacaccgugguggaccuggagagcgacggcaagccccagaaggccggcagcaacaacagcaacaagagccugcagagcgccggcuucgccgccggccugaccuacagccagcugaugacccugaaggacgccaugcugcagcuggaccccaacgccaagaccuggauggacaucgagggcagacccgaggaccccguggagaucgcccuguaccagcccagcagcggcugcuacauccacuucuucagagagcccaccgaccugaagcaguucaagcaggacgccaaguacagccacggcaucgacgugaccgaccuguucgccgcccagcccggccugaccagcgccgugaucgaggcccugcccagaaacauggugaucaccugccagggcagcgacgacaucaagaagcugcuggagagccagggcagaaaggacaucaagcugaucgacaucgcccugagcaagaccgacagcagaaaguacgagaacgccgugugggaccaguacaaggaccugugccacaugcacaccggcguggugguggagaagaagaagagaggcggcaaggaggagaucaccccccacugcgcccugauggacugcaucauguucgacgccgccgugagcggcggccugaacacccuggugcugagagccgugcugcccagagacaugguguucagaaccagcacccccagaguggugcugugaggacuagugcaucacauuuaaaagcaucucagccuaccaugagaauaagagaaagaaaaugaagaucaauagcuuauucaucucuuuuucuuuuucguugguguaaagccaacacccugucuaaaaaacauaaauuucuuuaaucauuuugccucuuuucucugugcuucaauuaauaaaaaauggaaagaaccuagaucuaaaaaaaaaaaaaaaaaaaaaaaaaaaaaaaaaaaaaaaaaaaaaaaaaaaaaaaaaaaaaaaaugcaucccccccccccccccccccccccccccccccaaaggcucuuuucagagccaccagaauu

SEQ ID NO: 10784 - RNA, 2092 nt, Artificial Sequence
  mRNA product Design i-2 comprising derived and/or modified sequence from LASV(G3010-SLE-2013;Clade IV)__AIT17345__NP (opt4)
ggggcgcugccuacggagguggcagccaucuccuucucggcaucaagcuuaccaugagcgccagcaaggagaucaagagcuuccuguggacccagagccugagaagagagcugagcggcuacugcagcaacaucaagcugcagguggugaaggacgcccaggcccugcugcacggccuggacuucagcgaggugagcaacgugcagagacugaugagaaaggagagaagagacgacaacgaccugaagagacugagagaccugaaccaggccgugaacaaccugguggagcugaagagcacccagcagaagagcauccugagagugggcacccugaccagcgacgaccugcugauccuggccgccgaccuggagaagcugaagagcaaggugaccagaaccgagagaccccugagcgccggcguguacaugggcaaccugagcagccagcagcuggaccagagaagagcccugcugagcaugaucggcaugagcagcggcgugcagggcgccagagccggcagagacggcguggugagagugugggacgugaagaacgccgagcugcugaacaaccaguucggcaccaugcccagccugacccuggccugccugaccaagcagggccagguggaccugaacgacguggugcaggcccugaccgaccugggccugaucuacaccgccaaguaccccaacaccagcgaccuggacagacugacccagagccaccccauccugaacaugaucgacaccaagaagagcagccugaacaucagcggcuacaacuucagccugggcgccgccgugaaggccggcgccugcaugcuggacggcggcaacaugcuggagaccaucaaggugagcccccagaccauggacggcauccugaagagcauccugaaggugaagaaggcccugggcauguucaucagcgagacccccggcgagagaaaccccuacgagaacauccuguacaagaucugccugagcggcgacggcuggcccuacaucgccagcagaaccagcaucaccggcagagccugggagaacaccgugguggaccuggagagcgacggcaagccccagaaggccggcagcaacaacagcaacaagagccugcagagcgccggcuucaccgccggccugaccuacagccagcugaugacccugaaggacgccaugcugcagcuggaccccaacgccaagaccuggauggacaucgagggcagacccgaggaccccguggagguggcccuguaccagcccagcagcggcugcuacauccacuucuucagagagcccaccgaccugaagcaguucaagcaggacgccaaguacagccacggcaucgacgugaccgaccuguucgccgcccagcccggccugaccagcgccgugaucgacgcccugcccagaaacauggugaucaccugccagggcagcgacgacaucaagaagcugcuggagagccagggcagaaaggacaucaagcugaucgacaucgcccugagcaagaccgacagcagaaaguacgagaacgccgugugggaccaguacaaggaccugugccacaugcacaccggcguggugguggagaagaagaagagaggcggcaaggaggagaucaccccccacugcgcccugauggacugcaucauguucgacgccgccgugagcggcggccugaacaccagcgugcugagagccgugcugcccagagacaugguguucagaaccagcacccccagaguggugcugugaggacuagugcaucacauuuaaaagcaucucagccuaccaugagaauaagagaaagaaaaugaagaucaauagcuuauucaucucuuuuucuuuuucguugguguaaagccaacacccugucuaaaaaacauaaauuucuuuaaucauuuugccucuuuucucugugcuucaauuaauaaaaaauggaaagaaccuagaucuaaaaaaaaaaaaaaaaaaaaaaaaaaaaaaaaaaaaaaaaaaaaaaaaaaaaaaaaaaaaaaaaugcaucccccccccccccccccccccccccccccccaaaggcucuuuucagagccaccagaauu

SEQ ID NO: 10785 - RNA, 2092 nt, Artificial Sequence
  mRNA product Design i-2 comprising derived and/or modified sequence from LASV(G502-SLE-2009;Clade IV)__AIT17127__NP (opt4)
ggggcgcugccuacggagguggcagccaucuccuucucggcaucaagcuuaccaugagcgccagcaaggagaucaagagcuuccuguggacccagagccugagaagagagcugagcggcuacugcagcaacaucaagcugcagguggugaaggacgcccaggcccugcugcacggccuggacuucagcgaggugagcaacgugcagagacugaugagaaaggagagaagagacgacaacgaccugaagagacugagagaccugaaccaggccgugaacaaccugguggagcugaagagcacccagcagaagagcauccugagagugggcacccugaccagcgacgaccugcugauccuggccgccgaccuggagaagcugaagagcaaggugaucagaaccgagagaccccugagcgccggcguguacaugggcaaccugagcagccagcagcuggaccagagaagagcccugcugagcaugaucggcaugagcggcggcaaccagggcgugagagccggcaaggacggcguggugagagugugggacgugaagaacgccgagcugcugaacaaccaguucggcaccaugcccagccugacccuggccugccugaccaagcagggccagguggaccugaacgacgccgugcaggcccugaccgaccugggccugaucuacaccgccaaguaccccaacaccagcgaccuggacagacugacccagagccaccccauccugaacaugaucgacaccaagaagagcagccugaacaucagcggcuacaacuucagccugggcgccgccgugaaggccggcgccugcaugcuggacggcggcaacaugcuggagaccaucaaggugagcccccagaccauggacggcauccugaagagcauccugaaggugaagaaggcccugggcauguucaucagcgacacccccggcgagagaaaccccuacgagaacauccuguacaagaucugccugagcggcgacggcuggcccuacaucgccagcagaaccagcaucaccggcagagccugggagaacaccgugguggaccuggagagcgacggcaagccccagaaggccggcagcaacaacagcaacaagagccugcagagcgccggcuucaccgccggccugaccuacagccagcugaugacccugaaggacgccaugcugcagcuggaccccaacaccaagaccuggauggacaucgagggcagacccgaggaccccguggagaucgcccuguaccagcccagcagcggcugcuacauccacuucuucagagagcccaccgaccugaagcaguucaagcaggacgccaaguacagccacggcaucgacgugaccgaccuguucgccgcccagcccggccugaccagcgccgugaucgacgcccugcccagaaacauggugaucaccugccagggcagcgacgacaucagaaagcugcuggagagccagggcagaaaggacaucaagcugaucgacaucgcccugaacaagaccgacagcagaaaguacgagaacgccgugugggaccaguacaaggaccugugccacaugcacaccggcguggugguggagaagaagaagagaggcggcaaggaggagaucaccccccacugcgcccugauggacugcaucauguucgacgccgccgugagcggcggccugaacaccagcgugcugagagccgugcugcccagagacaugguguucagaaccagcacccccagaguggugcugugaggacuagugcaucacauuuaaaagcaucucagccuaccaugagaauaagagaaagaaaaugaagaucaauagcuuauucaucucuuuuucuuuuucguugguguaaagccaacacccugucuaaaaaacauaaauuucuuuaaucauuuugccucuuuucucugugcuucaauuaauaaaaaauggaaagaaccuagaucuaaaaaaaaaaaaaaaaaaaaaaaaaaaaaaaaaaaaaaaaaaaaaaaaaaaaaaaaaaaaaaaaugcaucccccccccccccccccccccccccccccccaaaggcucuuuucagagccaccagaauu

SEQ ID NO: 10786 - RNA, 2092 nt, Artificial Sequence
  mRNA product Design i-2 comprising derived and/or modified sequence from LASV(G733-SLE-2010;Clade IV)__AIT17155__NP (opt4)
ggggcgcugccuacggagguggcagccaucuccuucucggcaucaagcuuaccaugagcgccagcaaggagaucaagagcuuccuguggacccagagccugagaagagagcugagcggcuacugcagcaacaucaagcugcagguggugaaggacgcccaggcccugcugcacggccuggacuucagcgaggugagcaacgugcagagacugaugagaaaggagagaagagacgacaacgaccugaagagacugagagaccugaaccaggccgugaacaaccugguggagcugaagagcacccagcagaagagcgugcugagagugggcacccugaccagcgacgagcugcuggugcuggccgccgaccuggagaagcugaagagcaaggugaucagaaccgagagaccccugagcgccggcguguacaugggcaaccugagcagccagcagcuggaccagagaagagcccugcugagcaugaucggcaugagcggcggcaaccagggcgccagaaccggcagagacggcguggugagagugugggacgugaagaacgccgagcugcugaacaaccaguucggcaccaugcccagccugacccuggccugccugaccaagcagggccagguggaccugaacgacgccgugcaggcccugaccgaccugggccugaucuacaccgccaaguaccccaacaccagcgaccuggacagacugacccagagccaccccauccugaacaugaucgacaccaagaagagcagccugaacaucagcggcuacaacuucagccugggcgccgccgugaaggccggcgccugcaugcuggacggcggcaacaugcuggagaccaucaaggugagcccccagaccauggacggcauccugaagagcauccugaaggugaagaaggcccugggcauguucaucagcgacacccccggcgagagaaaccccuacgagaacauccuguacaagaucugccugagcggcgacggcuggcccuacaucgccagcagaaccagcaucaccggcagagccugggagaacaccgugguggaccuggagagcgacggcaagccccagaaggccggcagcaacaacagcaacaagagccugcagagcgccggcuucaccgccggccugaccuacagccagcugaugacccugaaggacgccaugcugcagcuggaccccaacgccaagaccuggauggacaucgagggcagacccgaggaccccguggagaucgcccuguaccagcccagcagcggcugcuacauccacuucuucagagagcccaccgaccugaagcaguucaagcaggacgccaaguacagccacggcaucgacgugaccgaccuguucgccgcccagcccggccugaccagcgccgugaucgacgcccugcccagaaacauggugaucaccugccagggcagcgacgacaucagaaagcugcuggagagccagggcagaaaggacaucaagcugaucgacaucgcccugagcaagaucgacagcagaaaguacgagaacgccgugugggaccaguacaaggaccugugccacaugcacaccggcguggugguggagaagaagaagagaggcggcaaggaggagaucaccccccacugcgcccugauggacugcaucauguucgacgccgccgugagcggcggccugaacagccuggugcugagagccgugcugcccagagacaugguguucagaaccagcacccccagaguggugcugugaggacuagugcaucacauuuaaaagcaucucagccuaccaugagaauaagagaaagaaaaugaagaucaauagcuuauucaucucuuuuucuuuuucguugguguaaagccaacacccugucuaaaaaacauaaauuucuuuaaucauuuugccucuuuucucugugcuucaauuaauaaaaaauggaaagaaccuagaucuaaaaaaaaaaaaaaaaaaaaaaaaaaaaaaaaaaaaaaaaaaaaaaaaaaaaaaaaaaaaaaaaugcaucccccccccccccccccccccccccccccccaaaggcucuuuucagagccaccagaauu

SEQ ID NO: 10787 - RNA, 2092 nt, Artificial Sequence
  mRNA product Design i-2 comprising derived and/or modified sequence from MOPV/LASV reassortant(IGS-1;Clade IV)__AFY05578__NP (opt4)
ggggcgcugccuacggagguggcagccaucuccuucucggcaucaagcuuaccaugagcgccagcaaggagaucaagagcuuccuguggacccagagccugagaagagagcugagcggcuacugcagcaacaucaagcugcagguggugaaggacgcccaggcccugcugcacggccuggacuucagcgaggugagcaacgugcagagacugaugagaaaggagagaagagacgacaacgaccugaagagacugagagaccugaaccaggccgugaacaaccugguggagcugaagagcacccagcagaagagcauccugagagugggcacccugaccagcgacgaccugcugauccuggccgccgaccuggagaagcugagaagcaaggugaucagaaccgagagaccccugagcgccggcguguacaugggcaaccugagcagccagcagcuggaccagagaagagcccugcugaacaugaucggcaugagcggcggcaaccagggcgccagagccggcagagacggcguggugagagugugggacgugaagaacgccgagcugcugagcaaccaguucggcaccaugcccagccugacccuggccugccugaccaagcagggccagguggaccugaacgacgccgugcaggcccugaccgaccugggccugaucuacaccgccaaguaccccaacaccagcgaccuggacagacugacccagagccaccccauccugaacaugaucgacaccaagaagagcagccugaacaucagcggcuacaacuucagccugggcgccgccgugaaggccggcgccugcaugcuggacggcggcaacaugcuggagaccaucaaggugagcccccagaccauggacggcauccugaagagcauccugaaggugaagaaggcccugggcauguucaucagcgacacccccggcgagagaaaccccuacgagaacauccuguacaagaucugccugagcggcgacggcuggcccuacaucgccagcagaaccagcaucaccggcagagccugggagaacaccgugguggaccuggagagcgacggcaagccccagaaggccgacagcaacaacagcagcaagagccugcagagcgccggcuucaccgccggccugaccuacagccagcugaugacccugaaggacgccaugcugcagcuggaccccaacgccaagaccuggauggacaucgagggcagacccgaggaccccguggagaucgcccuguaccagcccagcagcggcugcuacauccacuucuucagagagcccaccgaccugaagcaguucaagcaggacgccaaguacagccacggcaucgacgugaccgaccuguucgccacccagcccggccugaccagcgccgugaucgacgcccugcccagaaacauggugaucaccugccagggcagcgacgacaucagaaagcugcuggagagccagggcagaaaggacaucaagcugaucgacaucgaccugagcaagaccgacagcagaaaguacgagaacgccgugugggaccaguacaaggaccugugccacaugcacaccggcguggugguggagaagaagaagagaggcggcaaggaggagaucaccccccacugcgcccugauggacugcaucauguucgacgccgccgugagcggcggccugaacaccagcgugcugagagccgugcugcccagagacaugguguucagaaccagcacccccagaguggugcugugaggacuagugcaucacauuuaaaagcaucucagccuaccaugagaauaagagaaagaaaaugaagaucaauagcuuauucaucucuuuuucuuuuucguugguguaaagccaacacccugucuaaaaaacauaaauuucuuuaaucauuuugccucuuuucucugugcuucaauuaauaaaaaauggaaagaaccuagaucuaaaaaaaaaaaaaaaaaaaaaaaaaaaaaaaaaaaaaaaaaaaaaaaaaaaaaaaaaaaaaaaaugcaucccccccccccccccccccccccccccccccaaaggcucuuuucagagccaccagaauu

SEQ ID NO: 10788 - RNA, 2092 nt, Artificial Sequence
  mRNA product Design i-2 comprising derived and/or modified sequence from LASV(LM765-SLE-2012;Clade IV)__AIT17815__NP (opt4)
ggggcgcugccuacggagguggcagccaucuccuucucggcaucaagcuuaccaugagcgccagcaaggagaucaagagcuuccuguggacccagagccugagaagagagcugagcggcuacugcagcaacaucaagcugcagguggugaaggacgcccaggcccugcugcacggccuggacuucagcgaggugagcaacgugcagagacugaugagaaaggagagaagagacgacaacgaccugaagagacugagagaccugaaccaggccgugaacaaccugguggagcugaagagcacccagcagaagagcauccugagagugggcacccugaccagcgacgaccugcugauccuggccgccgaccuggagaagcugaagagcaaggugaccagaaccgagagaccccugagcgccggcguguacaugggcaaccugagcagccagcagcuggaccagagaagagcccugcuggacaugaucggcaugagcggcagcaaccagggcgccagagccggcagagacggcguggugagagugugggacgugaagaacgccgagcugcugaacaaccaguucggcaccaugcccagccugacccuggccugccugaccaagcagggccagguggaccugaacgacgccgugcaggcccugaccgaccugggccugaucuacaccgccaaguaccccaacaccagcgaccuggacagacugacccagagccaccccauccugaacaugaucgacaccaagaagagcagccugaacaucagcggcuacaacuucagccugggcgccgccgugaaggccggcgccugcaugcuggacggcggcaacaugcuggagaccaucaaggugagcccccagaccauggacggcauccugaagagcauccugaaggugaagaaggcccugggcauguucaucagcgacgcccccggcgagagaaaccccuacgagaacauccuguacaagaucugccugagcggcgacggcuggcccuacaucgccagcagaaccagcaucaccggcagagccugggagaacaccgugguggaccuggagagcgacggcaagccccagaaggccggcagcaacggcagcaacaagagccugcagagcgccggcuucaccgccggccugaccuacagccagcugaugacccugaaggacgccaugcugcagcuggaccccaacgccaagaccuggauggacaucgagggcagacccgaggaccccguggagaucgcccuguaccagcccagcagcggcugcuacauccacuucuucagagagcccaccgaccugaagcaguucaagcaggacgccaaguacagccacggcaucgacgugaccgaccuguucgccgcccagcccggccugaccagcgccgugaucgacgcccugcccagaaacauggugaucaccugccagggcagcgacgacaucagaaagcuguucgagagccagggcagaaaggacaucaagcugaucgacaucgcccugagcaagaccgacagcagaaaguacgagaacgccgugugggaccaguacaaggaccugugccacaugcacaccggcaucgugguggagaagaagaagagaggcggcaaggaggagaucaccccccacugcgcccugauggacugcaucauguucgacgccgccgugagcggcggccugaacaccagcgugcugagagccgugcugcccagagacaugguguucagaaccagcacccccagaguggugcugugaggacuagugcaucacauuuaaaagcaucucagccuaccaugagaauaagagaaagaaaaugaagaucaauagcuuauucaucucuuuuucuuuuucguugguguaaagccaacacccugucuaaaaaacauaaauuucuuuaaucauuuugccucuuuucucugugcuucaauuaauaaaaaauggaaagaaccuagaucuaaaaaaaaaaaaaaaaaaaaaaaaaaaaaaaaaaaaaaaaaaaaaaaaaaaaaaaaaaaaaaaaugcaucccccccccccccccccccccccccccccccaaaggcucuuuucagagccaccagaauu

SEQ ID NO: 10789 - RNA, 2092 nt, Artificial Sequence
  mRNA product Design i-2 comprising derived and/or modified sequence from LASV(LM776-SLE-2012;Clade IV)__AIT17825__NP (opt4)
ggggcgcugccuacggagguggcagccaucuccuucucggcaucaagcuuaccaugagcgccagcaaggagaucaagagcuuccuguggacccagagccugagaagagagcugagcagcuacugcagcaacaucaagcugcagguggugaaggacgcccaggcccugcugcacggccuggacuucagcgaggugagcaacgugcagagacugaugagaaaggagagaagagacgacaacgaccugaagagacugagagaccugaaccaggccgugaacaaccugguggagcugaagagcacccagcagaagagcauccugagagugggcacccugaccagcgacgaccugcugauccuggccgccgaccuggagaagcugaagagcaaggugaccagaaccgagagaccccugagcgccggcguguacaugggcaaccugagcagccagcagcuggaccagagaagagcccugcugagcaugaucggcaugagcggcagcaaccagggcgccagagccggcagagacggcguggugagagugugggacgugaagaacgccgagcugcugaacaaccaguucggcaccaugcccagccugacccuggccugccugaccaagcagggccagguggaccugaacgacgccgugcaggcccugaccgaccugggccugaucuacaccgccaaguaccccaacaccagcgaccuggacagacugacccagagccaccccauccugaacaugaucgacaccaagaagagcagccugaacaucagcggcuacaacuucagccugggcgccgccgugaaggccggcgccugcaugcuggacggcggcaacaugcuggagaccaucaaggugagcccccagaccauggacggcauccugaagagcauccugaaggugaagaaggcccugggcauguucaucagcgacacccccggcgagagaaaccccuacgagaacauccuguacaagaucugccugagcggcgacggcuggcccuacaucgccagcagaaccagcaucaccggcagagccugggagaacaccgugguggaccuggagagcgacggcaagccccagaaggccggcagcaacaacagcaacaagagccugcagagcgccggcuucaccgccggccugaccuacagccagcugaugacccugaaggacgccaugcugcagcuggaccccaacgccaagaccuggauggacaucgagggcagacccgaggaccccguggagguggcccuguaccagcccagcagcggcugcuacauccacuucuucagagagcccaccgaccugaagcaguucaagcaggacgccaaguacagccacggcaucgacgugaccgaccuguucgccgcccagcccggccugaccagcgccgugaucgacgcccugcccagaaacauggugaucaccugccagggcagcgacgacaucagaaagcugcuggagagccagggcagaaaggacaucaagcugaucgacaucgcccugagcaagaccgacagcagaaaguacgagaacgccgugugggaccaguacaaggaccugugccacaugcacaccggcguggugguggagaagaagaagagaggcggcaaggaggagaucaccccccacugcgcccugauggacugcaucauguucgacgccgccgugagcggcggccugaacaccagcgugcugagagccgugcugcccagagacaugguguucagaaccagcacccccagaguggugcugugaggacuagugcaucacauuuaaaagcaucucagccuaccaugagaauaagagaaagaaaaugaagaucaauagcuuauucaucucuuuuucuuuuucguugguguaaagccaacacccugucuaaaaaacauaaauuucuuuaaucauuuugccucuuuucucugugcuucaauuaauaaaaaauggaaagaaccuagaucuaaaaaaaaaaaaaaaaaaaaaaaaaaaaaaaaaaaaaaaaaaaaaaaaaaaaaaaaaaaaaaaaugcaucccccccccccccccccccccccccccccccaaaggcucuuuucagagccaccagaauu

SEQ ID NO: 10790 - RNA, 2092 nt, Artificial Sequence
  mRNA product Design i-2 comprising derived and/or modified sequence from LASV(Mad39;Clade IV)__ANH09723__NP (opt4)
ggggcgcugccuacggagguggcagccaucuccuucucggcaucaagcuuaccaugagcgccagcaaggagaucaagagcuuccuguggacccagagccugagaagagagcugagcggcuacugcagcaacaucaagcugcagguggugaaggacgcccaggcccugcugcacggccuggacuucagcgaggugagcaacgugcagagacugaugagaaagcagagaagagacgacaacgaccugaagagacugagagaccugaaccaggccgugaacaaccugguggagcugaagagcacccagcagaagagcgugcugagagugggcacccugaccagcgacgaccugcugacccuggccgccgaccuggagaagcugaagagcaaggugaccagaaccgagagaccccugaccgccggcguguacaugggcaaccugagcagccagcagcuggaccagagaagagcccugcugaacaugaucggcaugagcggcggcaaccagggcgccagaaccggcagagacggcguggugagagugugggacgugaagaacgccgagcugcugaacaaccaguucggcaccaugcccagccugacccuggccugccugaccaagcagggccagguggaccugaacgacguggugcaggcccugaccgaccugggccugaucuacaccgccaaguaccccaacaccagcgaccuggacagacugacccagagccaccccauccugaacaugaucgacaccaacaagagcagccugaacaucagcggcuacaacuucagccugggcgccgccgugaaggccggcgccugcaugcuggacggcggcaacaugcuggagaccaucaaggugagcccccagaccauggacggcauccugaagagcauccugaaggugaagaagagccugggcauguucaucagcgacacccccggcgagagaaaccccuacgagaacauccuguacaagaucugccugagcggcgacggcuggcccuacaucgccagcagaaccagcaucaccggcagagccugggagaacaccgugguggaccuggagagcggcggcaagccccagaaggccggcagcaacaacagcaacaagagccugcagagcgccggcuucgccgccggccugaccuacagccagcugaugacccugaaggacgccaugcugcagcuggaccccaacgccaagaccuggauggacaucgagggcagacccgaggaccccguggagaucgcccuguaccagcccaucagcggcugcuacauccacuucuucagagagcccaccgaccugaagcaguucaagcaggacgccaaguacagccacggcaucgacgugaccgaccuguucgccgcccagcccggccugaccagcgccgugaucgaggcccugcccagaaacauggugaucaccugccagggcagcgacgacaucagaaagcuguucgagagccagggcagaaaggacaucaagcugaucgacaucgcccugagcaagaccgacagcagaaaguacgagaacgccgugugggaccaguacaaggaccugugccacaugcacaccggcguggugguggagaagaagaagaagggcggcaaggaggagaucaccccccacugcgcccugauggacugcaucauguucgacgccgccgugagcggcggccugaacacccuggugcugagagccgugcugcccagagacaugguguucagaaccagcacccccaagguggugcugugaggacuagugcaucacauuuaaaagcaucucagccuaccaugagaauaagagaaagaaaaugaagaucaauagcuuauucaucucuuuuucuuuuucguugguguaaagccaacacccugucuaaaaaacauaaauuucuuuaaucauuuugccucuuuucucugugcuucaauuaauaaaaaauggaaagaaccuagaucuaaaaaaaaaaaaaaaaaaaaaaaaaaaaaaaaaaaaaaaaaaaaaaaaaaaaaaaaaaaaaaaaugcaucccccccccccccccccccccccccccccccaaaggcucuuuucagagccaccagaauu

SEQ ID NO: 10791 - RNA, 2092 nt, Artificial Sequence
  mRNA product Design i-2 comprising derived and/or modified sequence from LASV(Z0947-SLE-2011;Clade IV)__AIT17841__NP (opt4)
ggggcgcugccuacggagguggcagccaucuccuucucggcaucaagcuuaccaugagcgccagcaaggagaucaagagcuuccuguggacccagagccugagaagagagcugagcggcuacugcagcaacaucaagcugcagguggugaaggacgcccaggcccugcugcacggccuggacuucagcgaggugagcaacgugcagagacugaugagaaaggagagaagagacgacaacgaccugaagagacugagagaccugaaccaggccgugaacaaccugguggagcugaagagcacccagcagaagagcauccugagagugggcacccugaccagcgacgaccugcugauccuggccgccgaccuggagaagcugaagagcaaggugaccagaaccgagagaccccugagcgccggcguguacaugggcaaccugagcagccagcagcuggaccagagaagagcccugcugaacaugaucggcaugagcggcagcaaccagggcgccagaaccggcagagacggcguggugagagugugggacgugaagaacgccgagcugcugaacaaccaguucggcaccaugcccagccugacccuggccugccugaccaagcagggccagguggaccugaacgacgccgugcaggcccugaccgaccugggccugaucuacaccgccaaguaccccaacaccagcgaccuggacagacugacccagagccaccccauccugaacaugaucgacaccaagaagagcagccugaacaucagcggcuacaacuucagccugggcgccgccgugaaggccggcgccugcaugcuggacggcggcaacaugcuggagaccaucaaggugagcccccagaccauggacggcauccugaagagcauccugaaggugaagaaggcccugggcauguucaucagcgacgcccccggcgagagaaaccccuacgagaacauccuguacaagaucugccugagcggcgacggcuggcccuacaucgccagcagaaccagcaucaccggcagagccugggagaacaccgugguggaccuggagagcgacggcaagccccagaaggccggcagcaacggcagcaacaagagccugcagagcgccggcuucaccgccggccugaccuacagccagcugaugacccugaaggacgccaugcugcagcuggaccccaacgccaagaccuggauggacaucgagggcagacccgaggaccccguggagaucgcccuguaccagcccagcagcggcugcuacauccacuucuucagagagcccaccgaccugaagcaguucaagcaggacgccaaguacagccacggcaucgacgugaccgaccuguucgccgcccagcccggccugaccagcgccgugaucgacgcccugcccagaaacauggugaucaccugccagggcagcgacgacaucagaaagcuguucgagagccagggcagaaaggacaucaagcugaucgacaucgcccugagcaagaccgacagcagaaaguacgagaacgccgugugggaccaguacaaggaccugugccacaugcacaccggcaucgugguggagaagaagaagagaggcggcaaggaggagaucaccccccacugcgcccugauggacugcaucauguucgacgccgccgugagcggcggccugaacaccagcgugcugagagccgugcugcccagagacaugguguucagaaccagcacccccagaguggugcugugaggacuagugcaucacauuuaaaagcaucucagccuaccaugagaauaagagaaagaaaaugaagaucaauagcuuauucaucucuuuuucuuuuucguugguguaaagccaacacccugucuaaaaaacauaaauuucuuuaaucauuuugccucuuuucucugugcuucaauuaauaaaaaauggaaagaaccuagaucuaaaaaaaaaaaaaaaaaaaaaaaaaaaaaaaaaaaaaaaaaaaaaaaaaaaaaaaaaaaaaaaaugcaucccccccccccccccccccccccccccccccaaaggcucuuuucagagccaccagaauu

SEQ ID NO: 10792 - RNA, 2092 nt, Artificial Sequence
  mRNA product Design i-2 comprising derived and/or modified sequence from LASV(Josiah;Clade IV)__NP_694869__NP (opt5)
ggggcgcugccuacggagguggcagccaucuccuucucggcaucaagcuuaccaugagcgccuccaaggagaucaaaucuuuccuguggacccagagccucagacgggaacuguccggcuacugcucuaacauuaagcugcaaguggucaaagacgcucaggcccugcuccacgggcuggauuuuagcgagguuuccaaugugcagcgccuuaugagaaaggaacggcgcgacgauaacgaccugaaaagacuccgggaucugaaucaggcggugaacaaucuggucgagcucaagucuacacaacaaaagagcauccugcgcgugggaacgcuuaccuccgacgaucugcucauucuggcugccgaccuugaaaaacuuaagagcaaaguuaucagaacagagcggccccucucugccggcguguauauggggaaccuguccagccagcagcuggaucagcgcagagcucuccugaauaugauuggaaugucuggcgggaaccagggagcccgggcuggccgcgacggcgucgugagaguuugggaugugaagaaugccgagcuucugaacaaucaguucgggaccaugccuucccucacacuggcgugucuuaccaaacagggacaagucgaccugaacgaugccgugcaggcucucacagaccugggccugaucuacaccgccaaguauccgaauacgagcgaccucgaucggcugacccagucucaucccauccuuaacaugauugacacaaagaaauccagccugaauaucuccggguacaacuuuucucucggagcugccgugaaggcgggcgccugcaugcuggaugggggaaacaugcuugaaaccauuaaagucagcccucaaacaauggacggcauccugaaguccauucucaaaguuaagaaagcucugggcauguucaucagcgauacccccggggagcgcaauccuuaugaaaacauucuguacaagaucugucucucuggagacggcuggcccuauaucgccuccagaacgagcauuacagggcgggcuugggagaauaccgugguggaucuggagucugacggaaagccucagaaagccgauagcaacaauuccucuaagagccuucaguccgccggcuuuacagcugggcugaccuacagccagcucaugacccugaaagacgcgaugcugcaacuugauccgaacgccaagacauggauggacaucgaaggaagacccgaggacccugucgaaauugcucucuaccagcccucuuccggcugcuauauccacuucuuucgcgagccuacggaucugaaacaguucaagcaggacgccaaguacagccauggcauugaugugaccgaccuguuugccacacaacccgggcucaccucugcuguuaucgaugcccugccgcggaauauggugaucacaugucagggauccgacgauauuagaaaacuucuggaaagccagggccgcaaggacaucaaacucauugauaucgcgcuguccaagaccgacucucggaaauaugagaacgcugucugggaucaguacaaggaccugugccacaugcauacgggggugguuguggagaagaaaaagagaggaggcaaagaagagauuacaccucacugugcccuuauggauugcaucauguucgacgccgcugucagcgggggccucaauaccuccgugcugcgcgccguccugccccgggacaugguguuuagaaccucuacaccucgcguugugcucugaggacuagugcaucacauuuaaaagcaucucagccuaccaugagaauaagagaaagaaaaugaagaucaauagcuuauucaucucuuuuucuuuuucguugguguaaagccaacacccugucuaaaaaacauaaauuucuuuaaucauuuugccucuuuucucugugcuucaauuaauaaaaaauggaaagaaccuagaucuaaaaaaaaaaaaaaaaaaaaaaaaaaaaaaaaaaaaaaaaaaaaaaaaaaaaaaaaaaaaaaaaugcaucccccccccccccccccccccccccccccccaaaggcucuuuucagagccaccagaauu

SEQ ID NO: 10793 - RNA, 2092 nt, Artificial Sequence
  mRNA product Design i-2 comprising derived and/or modified sequence from LASV(LP;Clade I)__AAF86702__NP (opt5)
ggggcgcugccuacggagguggcagccaucuccuucucggcaucaagcuuaccaugagcaacuccaaggagaucaaaucuuuccuguggacccagagccucagacgggaacuguccggcuacugcucuaauauuaagcuccaaguggucaaagacgcccaggcucugcuccacgggcuggauuuuagcgagguuuccaacgugcagcgccuuaugagaaagcagaaacgggacgaugccgaccugaagcgccucagagaucugaaucaagcggugaacaaucuggucgaacucaagucuacacagcagaaaaacgugcugcggguuggaacgcuuagcuccgacgaucugaucacccucgcugccgaccuggagaaacuuaaaagcaaggugauucgcacagaaagaccccugucuuccggcgucuauauggggaaucucagcucucagcaacuggaucagcggcgcgcccugcucuccaugaucggaaugagcggcgggccucagggaaacagaaccggcggcgacggggugguucgggugugggaugucaaaaaugcugagcugcuuaacaaucaguucggaacaaugccgucucugacccucgccugucugacaaagcaaggccagguggaccuuaacgaugcugugcaggcccugaccgaccucgggcugauuuacacggcgaaguaucccaauuccagcgaccuggauaugcucacccaaucccauccuauccugggaauggucgacacaaagaagucuagccuuaacaucuccggcuacaauuuuagccugggggccgcuguuaaagccggagcuugcaugcucgauggcggcaacaugcuggagaccauuaaggugucuccccagacaauggacgggauccuuaaauccauucugaaggugaaacgcagccucggaauguucaucucugauaccccuggcgaaagaaaccccuaugagaauauucuguacaagaucugucugagcggggaaggauggccuuauauugccucccggacgucuaucacaggccgcgcgugggagaacacccucgucgaccuggagagcgauaauaagccgcccaaacuuaacuccgccgggagcaauaagucucugcaggcugccggacucaacgcuggccugacauacucccagcugaugacccuuaaagacugcaugcuccaacuggauccuagcucuaagaccuggaucgacauugaaggcagacccgaggauccuguggaaaucgcccuguuucagcccuccagcggguguuacauucacuucuuucgggagccgacagaccucaaacaguucaagcaggacgccaaguauucccauggaaucgauguuacggaccuguuuucuacccaaccuggccuuacaagcgcugugauugaagcgcugcccagaaauaugguccuuaccugccagggguccgaugacaucaaaaagcugcuggagucucagggacgccgggauaucaaacuuauugacaucagccucuccaaggccgauagcagaaaauucgagaacgcugugugggaccaguacaaggaucugugucacaugcauacaggcguuguggucgaaaagaaaaagcgcgggggcaaagaggaaauuaccccucacugcgcccugcucgacuguaucauguuugaugccgcuacgacaggaucucugaauauuaccacccuucgggccgugcugcccagagacauggucuuccgcacauccacccccaaggugguucucugaggacuagugcaucacauuuaaaagcaucucagccuaccaugagaauaagagaaagaaaaugaagaucaauagcuuauucaucucuuuuucuuuuucguugguguaaagccaacacccugucuaaaaaacauaaauuucuuuaaucauuuugccucuuuucucugugcuucaauuaauaaaaaauggaaagaaccuagaucuaaaaaaaaaaaaaaaaaaaaaaaaaaaaaaaaaaaaaaaaaaaaaaaaaaaaaaaaaaaaaaaaugcaucccccccccccccccccccccccccccccccaaaggcucuuuucagagccaccagaauu

SEQ ID NO: 10794 - RNA, 2092 nt, Artificial Sequence
  mRNA product Design i-2 comprising derived and/or modified sequence from LASV(803213;Clade II)__AAF86704__NP (opt5)
ggggcgcugccuacggagguggcagccaucuccuucucggcaucaagcuuaccaugagcgccuccaaggaggugaaaucuuuccuguggacccagagccucagacgggaacuguccggcuacugcucuaacaucaaacuucaagucguuaaggacgcucaggcccugcuccacgggcuggauuuuagcgaggugaauaacgugcagcgccuuaugagaaagcagaaacgggacgauggagaccugaagcgccucagagaucugaaucaagcggucaacaaucugguggaacucaaguccacacagcagaaaucuauucugcggguuggcacgcuuaccagcgacgaucugcucacacuggcugccgaccuugagaagcugaaauccaaggugauccgcaccgaaagaccccucagcucuggggucuauaugggaaaccuguccacacagcaacuggagcagcggcgcgcccuccugaauaugauuggcauggugggaggagcucagggcacccagccuggcagagaugggguugugcgggucugggacgugaaaaacccggaucuucugaauaaccaauucggaacaaugcccagccucacccuggccugucuuacgaagcagggccagguggaccugaaugaugcuguccucgcccugaccgaccuggggcucaucuacacagcgaaguauccuaacucuuccgaccuggaucgccuuagccaaucucaucccauucugaauaugguugacaccaaaaaguccagccucaacaucuccggauacaauuuuucucugggcgccgcugugaaagccggggcuugcaugcuugauggaggcaacaugcuggagacaaucaaggugaccccucagacgauggacggcauucucaaaagcauccugaaggucaaaagaucccuggggauguucgugagcgauacacccggagaacggaacccuuaugagaauauucucuacaagaucugucugucuggcgacggguggccguauauugccucccgcaccagcaucguugggagagcgugggaaaacacaaccguggaucuugagucugacggcaagccccagaaagucgggaccgccggaagcaauaagucccugcagucugcuggcuuuccuacaggccucacguacagccaacugaugacccugaaagauuccaugaugcagcuugaccccagcgccaagacauggauugauaucgaggggcggccugaagaccccguggagaucgcucucuaccagccgaugucuggaugcuauauucacuucuuuagagaaccuaccgaccugaaacaguucaagcaagaugccaaguacucccauggcaucgacguugccgaucuguuucccgcucagccugggcucacaagcgcggugauugaggcccugccccgcaacaugguccuuaccugucagggaucugacgauaucaaaaagcugcucgacucccagggccggagagauauuaaacugaucgacaucagccuguccaagguggauucucgcaaauucgaaaaugcugucugggaccaaugcaaggaucuuugucacaugcauacgggggugguuguggagaagaaaaagcggggcggaaaagaggaaauuacaccccacugcgcccucauggacuguaucauguuugaugccgcugucagcggcgggcugaacauuccugugcugagagccguucucccgcgcgacaugguguuccggaccuccucucccaaggucgugcugugaggacuagugcaucacauuuaaaagcaucucagccuaccaugagaauaagagaaagaaaaugaagaucaauagcuuauucaucucuuuuucuuuuucguugguguaaagccaacacccugucuaaaaaacauaaauuucuuuaaucauuuugccucuuuucucugugcuucaauuaauaaaaaauggaaagaaccuagaucuaaaaaaaaaaaaaaaaaaaaaaaaaaaaaaaaaaaaaaaaaaaaaaaaaaaaaaaaaaaaaaaaugcaucccccccccccccccccccccccccccccccaaaggcucuuuucagagccaccagaauu

SEQ ID NO: 10795 - RNA, 2095 nt, Artificial Sequence
  mRNA product Design i-2 comprising derived and/or modified sequence from LASV(GA391;Clade III)__CAA36646__NP (opt5)
ggggcgcugccuacggagguggcagccaucuccuucucggcaucaagcuuaccaugagcgccuccaaggaggugagaucuuuccuguggacccagagccuccggcgcgaacuguccggcuacugcucuaacaucaaacuucaagucguuaaggacgcucaggcccugcuccacgggcuggauuuuagcgagguguccaaugugcagagacuuaugcggaaacagaagcgcgacgauggagaccugaaaagacuccgggaucugaaccaagcggucaauaaccugguggaacucaagucuacacagcagaaaagcguucugcgcgugggcacgcuuuccagcgacgaucugcucauucuggcugccgaccuugagaaacugaagucuaaagucaccagaacagaacggccccucuccagcgggguguauaugggaaaucugucuucccagcaacuggaucagcgcagagcccuccugaacaugaucggcaugaccgggguuagcggaggcggcaagggggcuucugacggaauugugcgggucugggaugugaaaaaugccgagcuucugaacaaucaguucggcacaaugccuucccucacccuggcuugucuuacaaagcaggggcaaguggaccugaacgaugccguccaggcgcucaccgaccugggacugaucuacacggccaaguauccgaauagcuccgaccucgaucgccugucucagagccaucccauucuuaacaugaucgacaccaaaaaguccagccugaauaucucuggcuacaacuuuucccucggggcugccguuaaagcuggagccugcaugcuggauggcggcaauaugcuugagacaauuaaggugagcccucaaaccauggacgggauccugaaaucuauucucaaggugaaaaagagccugggaauguucgucuccgauacacccggcgaaagaaacccuuaugagaacauccuguacaagauuugucucucuggggacggauggcccuauaucgcgagccggaccuccauugugggccgcgccugggaaaauacgguuguggaucuggagcaggacaacaaaccucagaagaucgggaauggaggcagcaacaaaucucuucaguccgcuggcuuugccgcugggcugacauacagccaacucaugacccugaaggauuucaaaugcuuuaaucugaucccgaacgccaagacauggauggacauugagggaagacccgaagauccugucgagaucgcccuuuaccagcccucuuccggcuguuaugugcacuucuuucgggaaccuaccgaccucaagcaguucaaacaggacgcuaaguacagccaugggauugauguuaccgaccuguuugcggcccaacccggacugacauccgcugugaucgaggcccucccgagaaauauggucauuacgugccagggcucugaagauauccgcaaacugcuugagagccaggggcggagagacaucaagcugauugauaucacccucuccaaagccgacucucgcaaguucgagaacgcugugugggaucaguuuaaggaccugugucacaugcauacaggcgucgugguugaaaagaagaaacggggaggcaaggaggaaauuaccccucacugcgcccugauggauuguaucauguucgacgcggcugugagcgggggacuugaugccaaaguccucagagugguucugccccgcgacaugguguuccggacauccaccccuaaggucgugcugugaggacuagugcaucacauuuaaaagcaucucagccuaccaugagaauaagagaaagaaaaugaagaucaauagcuuauucaucucuuuuucuuuuucguugguguaaagccaacacccugucuaaaaaacauaaauuucuuuaaucauuuugccucuuuucucugugcuucaauuaauaaaaaauggaaagaaccuagaucuaaaaaaaaaaaaaaaaaaaaaaaaaaaaaaaaaaaaaaaaaaaaaaaaaaaaaaaaaaaaaaaaugcaucccccccccccccccccccccccccccccccaaaggcucuuuucagagccaccagaauu

SEQ ID NO: 10796 - RNA, 2092 nt, Artificial Sequence
  mRNA product Design i-2 comprising derived and/or modified sequence from LASV(AV;Clade V)__CCA30315__NP (opt5)
ggggcgcugccuacggagguggcagccaucuccuucucggcaucaagcuuaccaugagcgccuccaaggaggugaaaucuuuccuguggacccagagccucagacgggaacuguccggcuacugcucuaacaucaaacuucaagucguuaaggacgcucaggcccugcuccacgggcuggauuuuagcgagguguccaaugugcagcgccuuaugagaaagcagcggcgcgacgauucugaccugaaaagacuccgggaucugaaccaagcggucaauaaccugguggaacucaagagcacacagcagaaguccguucugcgcgugggaacgcuuagcucugacgaucugcucacccuggcugccgaccuugagaaacugaaguccaaagucacaagaaccgaacggccccucagcucuggcguguauauggggaaucuguccagccagcaacuggaucagcgcagagcccuccugaaccuuauuggaaugacaaauggcucucaggggucccaggcuggacgggacggcguugugcgcgucugggaugugaagaacgccgagcugcucaauaaccaauucggcaccaugccuagccugacacuugcuugucugaccaaacagggacagguggaccucaaugaugucguucaagcccugacggaccuggggcucaucuacaccgcgaaguauccgaacacauccgaccuggauagacuuacccagucucaucccauucugaauaugaucgacacaaagaaaagcucccucaacauuagcggcuacaauuuuucucugggggccgcugugaaggccggagcuugcaugcuugauggcgggaacaugcuggagaccaucaaaguguccccucagagcauggacggaauccucaagucuauucugaaagucaagcgggcccugggcauguucgugagcgauacgcccggcgaacgcaacccuuaugagaauauccucuacaaaauuugucuguccggggacggauggcccuauaucgcgucuagaacaagcauuguuggccgggccugggaaaacaccguggucgaucuugagacagacgggaagccucagaagaucggauccggcaauagcaacaaaucucugcaauccgcuggguuuagcgccggacucaccuacucucagcugaugacccugaaggaugcuaugcuucagcucgacccgaaugccaaaacauggauggauauugagggcagacccgaagacccuguggagguugcccuguaccagcccaucuccggcugcuauauccacuucuuucgcgaaccuacggaccugaagcaauucaaacaggaugcuaaguacagccaugggauugacaucgcggaucucuuugccgcucagcccggacugaccuccgccgugauugaggcccuuccgcggaacauggucaucacaugucagggcucugaagacauuaagaaacugcucgagagccaagggagaaaggauaucaaacugaucgacauugcucuguccaagaucgauucucgcaaauucgagaaugccgugugggaccaguauaaggaucuuugccacaugcauaccggagucgugguugaaaagaaaaagcggggcgggaaagaggaaauuacaccucacugugcgcucauggacugcaucauguuugaugcugccgugagcggcggacugaacacccugguccucagagccgugcugccccgcgacaugguuuuccggacguccacaccuagagugguccuuugaggacuagugcaucacauuuaaaagcaucucagccuaccaugagaauaagagaaagaaaaugaagaucaauagcuuauucaucucuuuuucuuuuucguugguguaaagccaacacccugucuaaaaaacauaaauuucuuuaaucauuuugccucuuuucucugugcuucaauuaauaaaaaauggaaagaaccuagaucuaaaaaaaaaaaaaaaaaaaaaaaaaaaaaaaaaaaaaaaaaaaaaaaaaaaaaaaaaaaaaaaaugcaucccccccccccccccccccccccccccccccaaaggcucuuuucagagccaccagaauu

SEQ ID NO: 10797 - RNA, 2092 nt, Artificial Sequence
  mRNA product Design i-2 comprising derived and/or modified sequence from LASV(Togo/2016/7082;Clade VI)__AMR44578__NP (opt5)
ggggcgcugccuacggagguggcagccaucuccuucucggcaucaagcuuaccaugagcaacuccaaggaggugaaaucuuuccuguggacccagagccucagacgggaacuguccggcuacugcucuaauaucaaacuucaagucguuaaagacgcccaggcucugcuccacgggcuggauuuuagcgagguguccaacgugcagcgccuuaugagaaagcagaaacgggacgauggagaccugaagcgccucagagaucugaaucaagccgucaacaaucugguggaacucaagucuguucagcagaaaagcauucugcgggugggcacacuuacguccgacgaucugcucacccuggcggcugaccuugagaagcugaaaagcaaggucacacgcaccgaaagaccccucucuuccgggguguauaugggaaaccugagcucucagcaacuggaucagcggcgcgcccuccuguccaugaucggcaugagcgggggaaaucagaacucucagccuaaaggcgacggcguugugagagucugggaugugaagaaugccgaccuucugaacaaucaauucgggacaaugccgucccucacccuggcuugucuuacaaagcagggacagguggaucugaacgacgccguccaagcucucaccgaccugggccugauuuacacggccaaauaucccaauagcuccgaucucgaccggcugucucagagccauccuauccuuaacaugauugauaccaagaaauccagccugaauaucucuggguacaacuuuucccucggagcggccaucaagacaggcgcuugcaugcuggacgggggaaacaugcuugagaccauuaaaguuacaccccagaccauggauggcauccucaagagcauucugaaagugaagcgcucucugggcauguucaucagcgacacgccuggggagagaaaucccuaugaaaacauucuguacaagaucugucucuccggagauggcuggccuuauauugccucucggacagcuaucaucgggcgcgccugggagaauaccguggucgaccuggaaagcgauuccaaaccgcagaagauuggaagcaacggcucuaauaaaucccuucaaagcgcgggguuugcccccggacugacauacucucagcucaugacccugaaggacuccaugcugcagcuugauccuaacgcuaaaaccuggaucgacauugagggcagacccgaggacccuguggaaguugcccucuuccagcccaucagcggcugcuacauucacuuuuuccgggagccgacagaucugaagcaauuuaagcaggacgcuaaauauucccaugggaucgaugugacggaccuguucgccgcccagccuggacucaccucugcugucaucgaagcgcugcccagaaauauggugcuuacaugucagggcagcgaugacauuaagaaacugcucgauucccaagggcgccgggacaucaagcugauugauguuucucugaacaaaaucgacagcagaaaguuugagaaugccgugugggaucaguacaaggaccuuugccacaugcauaccggagucguggucgaaaagaagaaaaagggcgggaaagaggagauuacaccucacugugcucuccuggauugcaucauguucgacgccgccguguccggcggacugaacgcuaccguucuccgcgccgugcugccccgggacauggucuuuagaacgagcucucccaaggugguucuuugaggacuagugcaucacauuuaaaagcaucucagccuaccaugagaauaagagaaagaaaaugaagaucaauagcuuauucaucucuuuuucuuuuucguugguguaaagccaacacccugucuaaaaaacauaaauuucuuuaaucauuuugccucuuuucucugugcuucaauuaauaaaaaauggaaagaaccuagaucuaaaaaaaaaaaaaaaaaaaaaaaaaaaaaaaaaaaaaaaaaaaaaaaaaaaaaaaaaaaaaaaaugcaucccccccccccccccccccccccccccccccaaaggcucuuuucagagccaccagaauu

SEQ ID NO: 10798 - RNA, 2092 nt, Artificial Sequence
  mRNA product Design i-2 comprising derived and/or modified sequence from LASV(KAK-428;Clade n.d. (VII))__ANH09741__NP (opt5)
ggggcgcugccuacggagguggcagccaucuccuucucggcaucaagcuuaccaugagcaacuccaaggaggugaaaucuuuccuguggacccagagccucagacgggaacuguccggcuacugcacaaauaucaaacuucaagucguuaaggacgcccaggcucugcuccacgggcuggauuuuucugaggugagcaacgugcagcgccuuaugagaaagcagaaacgggacgauaaugaccugaagcgccucagagaucugaaccaagccgucaauaaccugguggaacucaaguccguucagcagaaaucugugcugaaggucggaacgcuuaauagcgacgaucugcucacccuggcggcugaccuugagaaacugaaguccaaagugguucggacagaacgcccccucagcucuggcguguauauggggaaccuguccagccagcaacuggaucagagacgggcccuccugaauaugauuggaauggccggcgggucucagggaaaccagccuucccgcgacggcgucgugagagugugggaugucaagaaugcugaccuucugaacaaucaauucggcaccaugccgagccucacacuggccugucuuaccaagcaggggcagguugaucugaacgacguggugcucgcucugacagaccugggacucaucuacaccgccaaauaucccaauucuuccgaucuggaccggcuuagccaaaaccauccuguccugaacaugauugaugugaauaaguccucucucaacaucagcggcuacaauuuuucccugggggcggccguuaaagcuggagccugcaugcuugacggcgggaacaugcuggagacgauuaagaucagcccccagaccguggauggaauccucaaaucuauucugaaggucaaacgcgcucugggcauguucguguccgacacaccuggcgagagaaaucccuaugaaaacauccucuacaagguuugucugagcgggaauggauggccuuauauugccucucggaccagcaucgugggccgcgcgugggagaacacagucguggaucuugaauccaauaagaaccagccgaaagucgggaauaacggaucuaauaagaugcugcagagcuccggcuuugccaccgggcucacguacagccaacugaugacacugagagacucuaugcuucagcucgaucccaccgcuaaaacauggauugacaucgagggacggccugaggaucccguggaacuggcccuguuccagccuuccagcggcugcuacauucacuuuuucagagagcccaccgaccucaagcaguuuaaacaagacgcuaaguauucucauggcaucgauguuaacgaccuguucuccgcccagccggggcuuaccagcgccgugcuggaagcucucccucgcaauaugguccugacaugucagggauccgaugacauccggaagcugcuugauucucaggacagaaaagauauuaagcucaucgacauuagccuguccaaagcggaugcccgcaaguuugagaacgacgugugggaucaauucaaagaccugugccacaugcauacgggcaucguuguggaaaagaagaaaaagggagggaaacaggagaugacaccccacugugcucuccuggauugcauuauguuugacgccgccgucucuggcgggcuuaacgugccuacccugcgggcugugcuccccaccgacaugguuuucagaacaaucaccacgaaggucgugcugugaggacuagugcaucacauuuaaaagcaucucagccuaccaugagaauaagagaaagaaaaugaagaucaauagcuuauucaucucuuuuucuuuuucguugguguaaagccaacacccugucuaaaaaacauaaauuucuuuaaucauuuugccucuuuucucugugcuucaauuaauaaaaaauggaaagaaccuagaucuaaaaaaaaaaaaaaaaaaaaaaaaaaaaaaaaaaaaaaaaaaaaaaaaaaaaaaaaaaaaaaaaugcaucccccccccccccccccccccccccccccccaaaggcucuuuucagagccaccagaauu

SEQ ID NO: 10799 - RNA, 2092 nt, Artificial Sequence; identical to SEQ ID NO: 10793
  mRNA product Design i-2 comprising derived and/or modified sequence from LASV(Pinneo-NIG-1969;Clade I)__AIT17837__NP (opt5)

SEQ ID NO: 10800 - RNA, 2092 nt, Artificial Sequence
  mRNA product Design i-2 comprising derived and/or modified sequence from LASV(ISTH0009-NIG-2011;Clade II)__AIT17405__NP (opt5)
ggggcgcugccuacggagguggcagccaucuccuucucggcaucaagcuuaccaugagcguguccaaggaggucaaaucuuuccuguggacccagagccucagacgggaacuguccggcuacugcucuaacaucaaacuucaaguugugaaggacgcccaggcucugcuccacgggcuggauuuuagcgagguguccaauguccagcgccuuaugagaaagcagaaacgggacgauucugaccugaagcgccucagagaucugaaccaagccgugaauaaccugguugaacucaagagcacacagcagaaauccauucugcgggugggaacgcuuaccagcgacgaucugcucacacuggcggcugaccuugagaagcugaaaucuaaggucauccgcaccgaaagaccccucuccagcggcguguauauggggaaucugucuacacagcaacuggagcagcggcgcgcccuccugaacaugauuggaaugguuggcggggcccagggaacccagccuggcagagauggcgugguccgggugugggacgugaaaaauccggaucuucugaacaaucaauucgggacaaugcccucccucacccuggcuugucuuacgaagcagggacaggucgaccugaacgaugccguucucgcucugaccgaccugggccucaucuacacagccaaguauccuaauagcucugaccuggaucgccuuucccaaagccaucccauucugaacaugguggacaucaaaaaguccucucucaauaucagcggguacaacuuuucccugggagcggccgugaaagcuggcgccugcaugcuugaugggggaaauaugcuggagaccauuaaggucacaccucagaccauggacggcauccucaaaagcauucugaaggugaaaagaucucugggcauguucguuuccgauacgcccggggaacggaacccuuaugagaacauccucuacaagauuugucugagcggagacggcuggccguauaucgcuucucgcacaagcauuguggggagagccugggaaaauaccacagucgaucuugaguccgacggaaagccccagaaagugggcucugcggggagcaacaagucccugcagagcgccggauuuccuaccggccucaccuacucucaacugaugacacugaaagauuccaugaugcagcuugaccccagcgcuaagacguggaucgauaucgagggccggccugaagaccccguugagauugcccucuaccagccgaugucugggugcuauauccacuucuuuagagaaccuaccgaccugaaacaguucaagcaagaugcuaaguacucccauggaauugacguggccgaucuguuucccgcccagccuggccucacaagcgcugucaucgaggcgcugccccgcaauauggugcuuaccugucagggguccgacgauauuaaacggcugcucgacucucagggaagacgcgauaucaagcugaucgacauugcccugagcaaagcugauucccggagauucgaaaacgccgucugggaccaaugcaaggaucuuugucacaugcauacaggcgugguuguggagaaaaagaagcgcgggggcaaagaggaaaucacgccccacugcgcccucauggacuguauuauguaugaugcugccgucucuggaggccugaauaucccugugcugcgggcgguucucccgagagacaugguguuucgcaccagcucccccaaggucgugcugugaggacuagugcaucacauuuaaaagcaucucagccuaccaugagaauaagagaaagaaaaugaagaucaauagcuuauucaucucuuuuucuuuuucguugguguaaagccaacacccugucuaaaaaacauaaauuucuuuaaucauuuugccucuuuucucugugcuucaauuaauaaaaaauggaaagaaccuagaucuaaaaaaaaaaaaaaaaaaaaaaaaaaaaaaaaaaaaaaaaaaaaaaaaaaaaaaaaaaaaaaaaugcaucccccccccccccccccccccccccccccccaaaggcucuuuucagagccaccagaauu

SEQ ID NO: 10801 - RNA, 2092 nt, Artificial Sequence
  mRNA product Design i-2 comprising derived and/or modified sequence from LASV(ISTH2010-NIG-2012;Clade II)__AIT17483__NP (opt5)
ggggcgcugccuacggagguggcagccaucuccuucucggcaucaagcuuaccaugagcgccuccaaggaggugaaaucuuuccuguggacccagagccucagacgggaacuguccggcuacugcucuaacaucaaacuucaagucguuaaggacgcucaggcccugcuccacgggcuggauuuuagcgagguguccaaugugcagcgccuuaugagaaagcagaaacgggacgauucugaccugaagcgccucagagaucugaaccaagcggucaauaaccugguggaacucaagagcacacagcagaaauccauucugcggguuggaacgcuuaccagcgacgaucugcucacacuggcugccgaccuugagaagcugaaaucuaaggugauccgcaccgaaagaccccucuccagcggcgucuauauggggaaucugucuacacagcaacuggagcagcggcgcgcccuccugaaccuuauuggaauggugggcggggcucagggaacccagccuggcagagauggcguugugcgggucugggacgugaaaaauccggaucugcucaacaaucaauucgggacaaugcccucccugacccuugccugucugacgaagcagggacagguggaccucaacgaugcuguccuggcccugaccgaccucggccugaucuacacagcgaaguauccuaauagcucugaccuugaucgccugucccaaagccaucccauucucaacaugguugacaccaaaaaguccucucugaauaucagcggguuuaacuucucccuuggagccgcugugaaagccggcgcuugcaugcuggaugggggaaauaugcucgagacaaucaaggugaccccucagacgauggacggcauucugaaaagcauccugaaggucaaaaagucucucggcauguuuguguccgauacacccggggaaagaaacccuuacgagaacauucuguauaagaucugucuuagcggagacggcuggccguacauugccucucggaccagcaucguugggcgcgcgugggaaaauacaaccguggaucuggaguccgacggaaaaccccacaaggucggcaccgccgggucuaacaaaagccuccaguccgcuggauucccuacaggccugacguauagccagcugaugacccuuaaggauucuaugaugcaacucgaccccuccgccaaaacauggauugauaucgagggcagaccugaagaccccguggagaucgcucuguaccagccgaugagcgggugcuacauucacuuuuuccgggaaccuaccgaccugaagcaguuuaagcaggaugccaaauauucucauggaaucgacguugccgaucucuuccccgcucaaccuggccugacauccgcggugauugaggcccuucccagaaauaugguccugaccugucaggggagcgacgauaucaagcgccuccuggacucccagggacggagagauauuaaacugaucgacaucgcucuuucuaaggccgauagccgccgguuugaaaacgccgugugggaccagugcaaagaucucugucauaugcacacgggcgucgugguugagaagaagaaaagagggggcaaggaggaaauuacaccccacugcgcucugauggacuguaucauguacgaugccgcgguguccggaggccugaauauuccuguccuccgcgcugugcugccgcgggacaugguuuucagaaccucuagccccaaagugguccuuugaggacuagugcaucacauuuaaaagcaucucagccuaccaugagaauaagagaaagaaaaugaagaucaauagcuuauucaucucuuuuucuuuuucguugguguaaagccaacacccugucuaaaaaacauaaauuucuuuaaucauuuugccucuuuucucugugcuucaauuaauaaaaaauggaaagaaccuagaucuaaaaaaaaaaaaaaaaaaaaaaaaaaaaaaaaaaaaaaaaaaaaaaaaaaaaaaaaaaaaaaaaugcaucccccccccccccccccccccccccccccccaaaggcucuuuucagagccaccagaauu

SEQ ID NO: 10802 - RNA, 2092 nt, Artificial Sequence
  mRNA product Design i-2 comprising derived and/or modified sequence from LASV(Lassa virus/H.sapiens-wt/NGA/2015/ISTH_0543;Clade II)__AVO03640__NP (opt5)
ggggcgcugccuacggagguggcagccaucuccuucucggcaucaagcuuaccaugagcgccuccaaggaggugaaaucuuuccuguggacccagagccucagacgggaacuguccggcuacugcucuaacaucaaacuucaagucguuaaggacgcucaggcccugcuccacgggcuggauuuuagcgagguguccaaugugcagcgccuuaugagaaagcagaaacgggacgauucugaccugaagcgccucagagaucugaaccaagcggucaauaaccugguggaacucaagagcacacagcagaaauccauucugcggguuggaacgcuuaccagcgacgaucugcucacacuggcugccgaccuugagaagcugaaaucuaaggugauccgcaccgaaagaccccucuccagcggcgucuauauggggaaucugucuacacagcaacuggagcagcggcgcgcccuccugaacaugauuggaauggugggcggggcucagggaacccagccuggcagagauggcguugugcgggucugggacgugaaaaauccggaucuucugaacaaucaauucgggacaaugcccucccucacccuggccugucuuacgaagcagggacagguggaccugaacgaugcuguccucgcccugaccgaccugggccucaucuacacagcgaaguauccuaauagcucugaccuggaucgccuuucccaaagccaucccauucugaacaugguugacaccaaaaaguccucucucaauaucagcggguacaacuuuucccugggagccgcugugaaagccggcgcuugcaugcuugaugggggaaauaugcuggagacaaucaaggugaccccucagacgauggacggcauucucaaaagcauccugaaggucaaaaagucucugggcauguucguguccgauacacccggggaaagaaacccuuaugagaacauucucuacaagaucugucugagcggagacggcuggccguauauugccucucggaccagcaucguugggcgcgcgugggaaaauacaaccguggaucuugaguccgacggaaaaccccagaaggucggcucugccgggagcaacaaaucccugcagagcgcuggauuuccuaccggccucacauacucucaacugaugacgcugaaggauuccaugaugcagcuugaccccagcgccaaaaccuggauugauaucgagggcagaccugaagaccccguggagaucgcucucuaccagccgaugucugggugcuauauucacuucuuucgggaaccuacagaccugaagcaguucaagcaagaugccaaauacucccauggaaucgacguugccgaucuguuucccgcucagccuggccucaccagcgcggugauugaggcccugcccagaaauaugguccuuacaugucagggguccgacgauaucaagcgccugcucgacucucagggacggaaagauauuaagcugaucgacaucgcucugagcaaagccgauuccagacgcuucgaaaacgccgugugggaccaaugcaaggaucuuugucacaugcauaccggcgucgugguugagaagaaaaagagagggggcaaagaggaaauuacgccccacugcgcucucauggacuguaucauguaugaugccgcggugucuggaggccugaauauuccuguccugcgggcugugcucccgcgcgacaugguuuuucggacaagcucccccaaggugguccugugaggacuagugcaucacauuuaaaagcaucucagccuaccaugagaauaagagaaagaaaaugaagaucaauagcuuauucaucucuuuuucuuuuucguugguguaaagccaacacccugucuaaaaaacauaaauuucuuuaaucauuuugccucuuuucucugugcuucaauuaauaaaaaauggaaagaaccuagaucuaaaaaaaaaaaaaaaaaaaaaaaaaaaaaaaaaaaaaaaaaaaaaaaaaaaaaaaaaaaaaaaaugcaucccccccccccccccccccccccccccccccaaaggcucuuuucagagccaccagaauu

SEQ ID NO: 10803 - RNA, 2092 nt, Artificial Sequence
  mRNA product Design i-2 comprising derived and/or modified sequence from LASV(Lassa virus/H.sapiens-wt/NGA/2016/ISTH_0009;Clade II)__AVO03572__NP (opt5)
ggggcgcugccuacggagguggcagccaucuccuucucggcaucaagcuuaccaugagcgccuccaaggaggugaaaucuuuccuguggacccagagccucagacgggaacuguccggcuacugcucuaacaucaaacuucaagucguuaaggacgcucaggcccugcuccacgggcuggauuuuagcgagguguccaaugugcagcgccuuaugagaaagcagaaacgggacgauucugaccugaagcgccucagagaucugaaccaagcggucaauaaccugguggaacucaagagcacacagcagaaauccauucugcggguuggaacgcuuaccagcgacgaucugcucacacuggcugccgaccuugagaagcugaaaucuaaggugauccgcaccgaaagaccccucuccagcggcgucuauauggggaaucugucuacacagcaacuggagcagcggcgcgcccuccugaacaugauuggaauggugggcggggcucagggaacccagccuggcagagauggcguugugcgggucugggacgugaaaaauccggaucuucugaacaaucaauucgggacaaugcccucccucacccuggccugucuuacgaagcagggacagguggaccugaacgaugcuguccucgcccugaccgaccugggccucaucuacacagcgaaguauccuaauagcucugaccuggaucgccuuucccaaagccaucccauucugaacaugguugacaccaaaaaguccucucucaauaucagcggguacaacuuuucccugggagccgcugugaaagccggcgcuugcaugcuugaugggggaaauaugcuggagacaaucaaggugaccccucagacgauggacggcauucucaaaagcauccugaaggucaaaaagucucugggcauguucguguccgauacacccggggaaagaaacccuuaugagaacauucucuacaagaucugucugagcggagacggcuggccguauauugccucucggaccagcaucguugggcgcgcgugggaaaauacaaccguggaucuugaguccgacggaaaaccccagaaggucggcucugccgggagcaacaaaucccugcagagcgcuggauuuccuaccggccucacauacucucaacugaugacgcugaaggauuccaugaugcagcuugaccccagcgccaaaaccuggauugauaucgagggcagaccugaagaccccguggagaucgcucucuaccagccgaugucugggugcuauauucacuucuuucgggaaccuacagaccugaagcaguucaagcaagaugccaaauacucccauggaaucgacguugccgaucuguuucccgcucagccuggccucaccagcgcggugauugaggcccugcccagaaauaugguccuuacaugucagggguccgacgauaucaagcgccugcucgacucucagggacggagagauauuaaacugaucgacaucgcucugagcaaggccgauucccgccgguucgaaaacgccgugugggaccaaugcaaagaucuuugucacaugcauaccggcgucgugguugagaagaagaaaagagggggcaaggaggaaauuacgccccacugcgcucucauggacuguaucauguaugaugccgcggugucuggaggccugaauauuccuguccugcgcgcugugcucccgcgggacaugguuuuuagaacaagcucccccaaagugguccugugaggacuagugcaucacauuuaaaagcaucucagccuaccaugagaauaagagaaagaaaaugaagaucaauagcuuauucaucucuuuuucuuuuucguugguguaaagccaacacccugucuaaaaaacauaaauuucuuuaaucauuuugccucuuuucucugugcuucaauuaauaaaaaauggaaagaaccuagaucuaaaaaaaaaaaaaaaaaaaaaaaaaaaaaaaaaaaaaaaaaaaaaaaaaaaaaaaaaaaaaaaaugcaucccccccccccccccccccccccccccccccaaaggcucuuuucagagccaccagaauu

SEQ ID NO: 10804 - RNA, 2092 nt, Artificial Sequence
  mRNA product Design i-2 comprising derived and/or modified sequence from LASV(Lassa virus/H.sapiens-wt/NGA/2016/ISTH_0017;Clade II)__AVO03568__NP (opt5)
ggggcgcugccuacggagguggcagccaucuccuucucggcaucaagcuuaccaugagcgccuccaaggaggugaaaucuuuccuguggacccagagccucagacgggaacuguccggcuacugcucuagcaucaaacuucaagucguuaaggacgcucaggcccugcuccacgggcuggauuuuuccgaggugucuaacgugcagcgccuuaugagaaagcagaaacgggacgauagcgaccugaagcgccucagagaucugaaucaagcggucaacaaucugguggaacucaaguccacacagcagaaaagcauucugcggguuggaacgcuuaccucugacgaucugcucacacuggcugccgaccuugagaagcugaaauccaaggugauccgcaccgaaagaccccucagcucuggcgucuauauggggaaccuguccacacagcaacuggagcagcggcgcgcccuccugaauaugauuggaauggcuggcggggcccagggaacccagccuggcagagauggcgugguucgggugugggacgucaaaaacccggaucuucugaauaaccaauucgggacaaugcccagccucacccuggcuugucuuacgaagcagggacagguggaccugaaugaugccgugcucgcgcugaccgaccugggccucaucuacacagccaaguauccuaacucuuccgaccuggaucgccuuagccaaucccaucccauucugaauauggucgacaccaaaaagucuagccucaacaucuccggguacaauuuuagccugggagcugccguuaaagcuggcgccugcaugcuugaugggggaaacaugcuggagacaaucaaggugaccccucagacgauggacggcauucucaaaucuauccugaaggugaaaagaucccugggcauguucgucagcgaugcgcccggggaacggaauccuuaugagaacauucucuacaagaucugucugucuggagacggcuggccguauauugccagccgcacauccaucguggggagagcuugggaaaacaccacaguugaucuugagucugacggaaagccccagaaagugggcgccaccgggagcaauaagucccugcagagcgcuggauuuccuaccggccucacauacucucaacugaugacgcugaaagauuccaugaugcagcuugaccccagcgccaagaccuggauugauaucgagggccggccugaagaccccgucgagguggcccucuaccagccgguuucugggugcuauauccacuucuuuagagaaccuacagaccugaaacaguucaagcaagaugcuaaguacucccauggaauugacguggcggaucuguuucccgcccagccuggccucaccagcgcugucaucgaggcccugccccgcaacauggugcuuacaugucagggguccgacgauauuaaaaagcugcucgacucucagggacggaaagauaucaagcugauugacaucgcccugagcaaagcugauuccagacgcuucgaaaaugccgucugggaccaaugcaaggaucuuugucacaugcauaccggcgugguuguggagaagaaaaagagagggggcaaagaggaaaucacgccccacugcgcgcucauggacuguauuauguaugaugcugccgucucuggaggccugaacaucccugugcugcgggccguucucccgcgcgacaugguguuucggacaagcucccccaaggucgugcugugaggacuagugcaucacauuuaaaagcaucucagccuaccaugagaauaagagaaagaaaaugaagaucaauagcuuauucaucucuuuuucuuuuucguugguguaaagccaacacccugucuaaaaaacauaaauuucuuuaaucauuuugccucuuuucucugugcuucaauuaauaaaaaauggaaagaaccuagaucuaaaaaaaaaaaaaaaaaaaaaaaaaaaaaaaaaaaaaaaaaaaaaaaaaaaaaaaaaaaaaaaaugcaucccccccccccccccccccccccccccccccaaaggcucuuuucagagccaccagaauu

SEQ ID NO: 10805 - RNA, 2092 nt, Artificial Sequence
  mRNA product Design i-2 comprising derived and/or modified sequence from LASV(Lassa virus/H.sapiens-wt/NGA/2018/ISTH_0959;Clade II)__AVV65100__NP (opt5)
ggggcgcugccuacggagguggcagccaucuccuucucggcaucaagcuuaccaugagcgccuccaaggaggugaaaucuuuccuguggacccagagccucagacgggaacuguccggcuacugcucuaacaucaaacuucaagucguuaaggacgcucaggcccugcuccacgggcuggauuuuagcgagguguccaaugugcagcgccuuaugagaaagcagaaacgggacgauucugaccugaagcgccucagagaucugaaccaagcggucaauaaccugguggaacucaagagcacccagcagaaauccauucugcggguuggaacgcuuaccagcgacgaucugcucacacuggcugccgaccuugagaagcugaaaucuaaggugauccgcaccgaaagaccccucuccagcggcgucuauauggggaaucugucuacacagcaacuggagcagcggcgcgcccuccugaaccuuauuggaauggugggcggggcucagggaacccagccuggcagagauggcguugugcgggucugggacgugaaaaauccggaucugcucaacaaucaauucgggacaaugcccucccugacccuugccugucugacgaagcagggacagguggaccucaacgaugucguucuggcucugaccgaccucggccugaucuacacagccaaguauccuaauagcucugaccuugaucgccugucccaaagccaucccauucucaacaugguggacaccaaaaaguccucucugaauaucagcggguuuaacuucucccuuggagcggccgugaaagcuggcgccugcaugcuggaugggggaaauaugcucgagacaaucaaggucaccccucagacgauggacggcauucugaaaagcauccugaaggugaaaaagucucucggcauguuuguuuccgauacacccggggaaagaaacccuuacgagaacauucuguauaagaucugucuuagcggagacggcuggccguacauugcuucucggaccagcaucguggggcgcgccugggaaaauacaaccgucgaucuggaguccgacggaaaaccccacaaggugggcaccgcggggucuaacaaaagccuccaguccgccggauucccuacaggccugacguauagccagcugaugacccuuaaggauucuaugaugcaacucgaccccuccgcuaaaacauggauugauaucgagggcagaccugaagaccccguugagaucgcccuguaccagccgaugagcgggugcuacauucacuuuuuccgggaaccuaccgaccugaagcaguuuaagcaggaugcuaaauauucucauggaaucgacguggccgaucucuuccccgcccaaccuggccugacauccgcugucauugaggcgcuucccagaaauauggugcugaccugucaggggagcgacgauaucaagcgccuccuggacucccagggacggaaagauauuaagcugaucgacaucgcccuuucuaaaacggauagcagacgcuuugaaaacgcugucugggaccagugcaaggaucucugucauaugcacacaggcgugguuguggagaagaaaaagagagggggcaaagaggaaauuacaccccacugcgcccugauggacuguaucauguacgaugccgcugucuccggaggccugaauauuccugugcuccgggccguucugccgcgcgacaugguguuccggaccucuagccccaaggucgugcuuugaggacuagugcaucacauuuaaaagcaucucagccuaccaugagaauaagagaaagaaaaugaagaucaauagcuuauucaucucuuuuucuuuuucguugguguaaagccaacacccugucuaaaaaacauaaauuucuuuaaucauuuugccucuuuucucugugcuucaauuaauaaaaaauggaaagaaccuagaucuaaaaaaaaaaaaaaaaaaaaaaaaaaaaaaaaaaaaaaaaaaaaaaaaaaaaaaaaaaaaaaaaugcaucccccccccccccccccccccccccccccccaaaggcucuuuucagagccaccagaauu

SEQ ID NO: 10806 - RNA, 2092 nt, Artificial Sequence
  mRNA product Design i-2 comprising derived and/or modified sequence from LASV(LASV003-NIG-2008;Clade II)__AIT17581__NP (opt5)
ggggcgcugccuacggagguggcagccaucuccuucucggcaucaagcuuaccaugagcgccuccaaggaggugaaaucuuuccuguggacccagagccucagacgggaacuguccggcuacugcucuagcaucaaacuucaagucguuaaggacgcucaggcccugcuccacgggcuggauuuuuccgaggugucuaacgugcagcgccuuaugagaaagcagaaacgggacgauagcgaccugaagcgccucagagaucugaaucaagcggucaacaaucugguggaacucaaguccacccagcagaaaagcguucugcgggugggaacgcuuaccucugacgaucugcucacacuggcugccgaccuugagaagcugaaauccaaggucauucgcaccgaaagaccccucagcucuggcguguauauggggaaccuguccgcccagcaacuggagcagcggcgcacacuccugaauaugaucggaaugguuggcggggcucagggaacccagccuggcagagauggcgugguccgggugugggacgugaaaaacccggaucuucugaauaaccaauucgggacaaugcccagccucacccuggccugucuuacgaagcagggacaggucgaccugaaugauguugugcucgcucugaccgaccugggccucauuuacacagccaaguauccuaacucuuccgaccuggaucgccuuagccaaucccaucccauccugucuaugguggacaccaaaaagagcucccucaauauuagcggguacaacuuuucucugggagcggccgucaaagcuggcgccugcaugcuugaugggggaaauaugcuggagacaaucaaggugaccccucagacgauggacggcauccucaaauccauucugaagguuaaaaagagccugggcauguucgugucugauacacccggggaaagaaacccuuaugagaauauccucuacaagauuugucugagcggagacggcuggccguauaucgcuucccggaccucuauugucgggcgcgccugggaaaacacaaccguggaucuugagagcgacggaaaaccccagaagguuggcaccgcgggguccaacaaaagccugcagucugccggauuuccuacaggccucacguacucccaacugaugacccugaaggauagcaugaugcagcuugaccccucugcuaaaacauggaucgauauugagggcagaccugaagaccccguggagaucgcccucuaccagccgauguccgggugcuauauccacuucuuucgggaaccuaccgaccugaagcaguucaagcaagaugcuaaauacagccauggaauugacgucacagaucuguuucccgcccagccuggccucaccuccgccgugaucgaggcucugcccagaaauaugguccuuacgugucaggggucugacgauauuaagcgccugcucgacagccagggacggagagauaucaaacugauugacaucgcgcuguccaaggccgauucucgccgguucgaaaacgcugugugggaccaaugcaaagaucuuugucacaugcauacaggcguuguggucgagaagaagaaaagagggggcaaggaggaaaucacaccccacugcgcccucauggacuguauuauguaugaugccgcugugagcggaggccugaauaucccuguucugcgcgccgugcucccgcgggacauggucuuuagaaccuccagccccaaaguggugcugugaggacuagugcaucacauuuaaaagcaucucagccuaccaugagaauaagagaaagaaaaugaagaucaauagcuuauucaucucuuuuucuuuuucguugguguaaagccaacacccugucuaaaaaacauaaauuucuuuaaucauuuugccucuuuucucugugcuucaauuaauaaaaaauggaaagaaccuagaucuaaaaaaaaaaaaaaaaaaaaaaaaaaaaaaaaaaaaaaaaaaaaaaaaaaaaaaaaaaaaaaaaugcaucccccccccccccccccccccccccccccccaaaggcucuuuucagagccaccagaauu

SEQ ID NO: 10807 - RNA, 2092 nt, Artificial Sequence
  mRNA product Design i-2 comprising derived and/or modified sequence from LASV(LASV035-NIG-2009;Clade II)__AIT17589__NP (opt5)
ggggcgcugccuacggagguggcagccaucuccuucucggcaucaagcuuaccaugagcgccuccaaggaggugaaaucuuuccuguggacccagagccucagacgggaacuguccggcuacugcucuagcaucaaacuucaagucguuaaagacgcucaggcccugcuccacgggcuggauuuuuccgaggugucuaacgugcagcgccuuaugagaaagcagaaacgggacgauagcgaccugaagcgccucagagaucugaaucaagcggucaacaaucugguggaacucaaguccacacagcagaaaagcauucugcggguuggaacgcuuaccucugacgaucugcucacacuggcugccgaccuugagaagcugaaauccaaggugauccgcaccgaaagaccccucagcucuggcgucuauauggggaaccuguccgcccagcaacuggagcagcggcgcgcucuccugaauaugauuggaauggugggcggggcccagggaacacagccuggcagagauggcguugugcgggucugggacgugaaaaacccggaucuucugaauaaccaauucgggaccaugcccagccucacacuggcuugucuuaccaagcagggacagguggaccugaaugaugccguccucgcgcugacggaccugggccucaucuacaccgccaaguauccuaacucuuccgaccuggaucgccuuagccaaucccaucccauucugaauaugguugacacaaagaagucuagccucaacaucuccggguacaauuuuagccugggagcugccgugaaagcuggcgccugcaugcuugaugggggaaacaugcuggagaccaucaaggugacaccucagaccauggacggcauucucaaaucuauccugaaggucaaaagaucccugggcauguucgugagcgauacgcccggggaacggaauccuuaugagaacauucucuacaagaucugucugucuggagacggcuggccguauauugcgagccgcacauccaucguugggagagccugggaaaacaccacaguggaucuugagucugacggaaagccccagaaagucggcaccaccgggagcaauaagucccugcagagcgcuggauuuccuacaggccucacguacucucaacugaugacccugaaagauuccaugaugcagcuugaccccagcgccaagacauggauugauaucgagggccggccugaagaccccguggagaucgcucucuaccagccgaugucugggugcuauauucacuucuuuagagaaccuaccgaccugaaacaguucaagcaagaugccaaguacucccauggaaucgacguugccgaucuguuucccgcucagccuggccucacaagcgcggugauugaggcccugccccgcaacaugguccuuaccugucagggguccgacgauaucaaaaagcugcucgacucucagggacggagagauauuaaacugaucgacaucgcucugagcaaggccgauucccgcaaauucgaaaaugccgugugggaccaaugcaaggaucuuugucacaugcauacgggcgucgugguugagaagaaaaagagagggggcaaagaggaaauuacaccccacugcgcucucauggacuguaucauguaugaugccgcggugucuggaggccugaacauuccuguccugcgggcugugcucccgcgcgacaugguuuuucggaccagcucccccaaggugguccugugaggacuagugcaucacauuuaaaagcaucucagccuaccaugagaauaagagaaagaaaaugaagaucaauagcuuauucaucucuuuuucuuuuucguugguguaaagccaacacccugucuaaaaaacauaaauuucuuuaaucauuuugccucuuuucucugugcuucaauuaauaaaaaauggaaagaaccuagaucuaaaaaaaaaaaaaaaaaaaaaaaaaaaaaaaaaaaaaaaaaaaaaaaaaaaaaaaaaaaaaaaaugcaucccccccccccccccccccccccccccccccaaaggcucuuuucagagccaccagaauu

SEQ ID NO: 10808 - RNA, 2092 nt, Artificial Sequence
  mRNA product Design i-2 comprising derived and/or modified sequence from LASV(LASV1000-NIG-2009;Clade II)__AIT17783__NP (opt5)
ggggcgcugccuacggagguggcagccaucuccuucucggcaucaagcuuaccaugagcgccuccaaggaggugaaaucuuuccuguggacccagagccucagacgggaacuguccggcuacugcucuaacaucaaacuucaagucguuaaggacgcucaggcccugcuccacgggcuggauuuuagcgagguguccaaugugcagcgccuuaugagaaagcagaaacgggacgauucugaccugaagcgccucagagaucugaaccaagcggucaauaaccugguggaacucaagagcacacagcagaaauccauucugcggguuggaacgcuuaccagcgacgaucugcucacacuggcugccgaccuugagaagcugaaaucuaaggugauccgcaccgaaagaccccucuccagcggcgucuauauggggaaucugucuacacagcaacuggagcagcggcgcgcccuccugaacaugauuggaauggugggcggggcucagggaacccagccuggcagagauggcguugugcgggucugggacgugaaaaauccggaucuucugaacaaucaauucgggacaaugcccucccucacccuggccugucuuacgaagcagggacagguggaccugaacgaugucguucucgcucugaccgaccugggccucaucuacacagccaaguauccuaauagcucugaccuggaucgccuuucccaaagccaucccauucugaacaugguggacaccaaaaaguccucucucaauaucagcggguacaacuuuucccugggagcggccgugaaagcuggcgccugcaugcuugaugggggaaauaugcuggagacaaucaaggucaccccucagacgauggacggcauucucaaaagcauccugaaggugaaaaagucucugggcauguucguuuccgauacacccggggaaagaaacccuuaugagaacauucucuacaagaucugucugagcggagacggcuggccguauauugcuucucggaccagcaucguggggcgcgccugggaaaauacaaccgucgaucuugaguccgacggaaaaccccagaaggugggcaccgcggggucuaacaaaagccugcaguccgccggauuuccuacaggccucacguacagccaacugaugacccugaaggauucuaugaugcagcuugaccccuccgcuaaaacauggauugauaucgagggcagaccugaagaccccguugagaucgcccucuaccagccggugagcgggugcuauauucacuucuuucgggaaccuaccgaccugaagcaguucaagcaagaugcuaaauacucucauggaaucgacgucgccgaucuguuucccgcccagccuggccucacauccgcugugauugaggcgcugcccagaaauaugguccuuaccugucaggggagcgacgauaucaagcgccugcucgacucccagggacggagagauauuaaacugaucgacaucgcccugucuaaggcugauagccgccgguucgaaaacgccgugugggaccaaugcaaagaucuuugucacaugcauacgggcguuguggucgagaagaagaaaagagggggcaaggaggaaauuacaccccacugcgcccucauggacuguaucauguaugaugcugccguguccggaggccugaauauuccuguucugcgcgcggugcucccgcgggacauggucuuuagaaccucuagccccaaaguggugcugugaggacuagugcaucacauuuaaaagcaucucagccuaccaugagaauaagagaaagaaaaugaagaucaauagcuuauucaucucuuuuucuuuuucguugguguaaagccaacacccugucuaaaaaacauaaauuucuuuaaucauuuugccucuuuucucugugcuucaauuaauaaaaaauggaaagaaccuagaucuaaaaaaaaaaaaaaaaaaaaaaaaaaaaaaaaaaaaaaaaaaaaaaaaaaaaaaaaaaaaaaaaugcaucccccccccccccccccccccccccccccccaaaggcucuuuucagagccaccagaauu

SEQ ID NO: 10809 - RNA, 2092 nt, Artificial Sequence
  mRNA product Design i-2 comprising derived and/or modified sequence from LASV(LASV221-NIG-2010;Clade II)__AIT17625__NP (opt5)
ggggcgcugccuacggagguggcagccaucuccuucucggcaucaagcuuaccaugagcgccuccaaggaggugaaaucuuuccuguggacccagagccucagacgggaacuguccggcuacugcucuagcaucaaacuucaagucguuaaggacgcucaggcccugcuccacgggcuggauuuuuccgaggugucuaacgugcagcgccuuaugagaaagcagcggcgcgacgauagcgaccugaaaagacuccgggaucugaaucaagcggucaacaaucugguggaacucaaguccacacagcaaaagagcauucugcgcguuggaacgcuuaccucugacgaucugcucacacuggcugccgaccuugagaaacugaaguccaaagugaucagaaccgaacggccccucagcucuggcgucuauauggggaaccuguccacacagcagcuggagcagcgcagagcccuccugaauaugauuggaauggugggcggggcucagggaacccagccuggccgggauggcguugugcgcgucugggacgugaagaacccggaucuucugaauaaccaauucgggacaaugcccagccucacccuggccugucuuacgaaacagggacagguggaccugaaugaugcuguccucgcccugaccgaccugggccucaucuacacagcgaaguauccuaacucuuccgaccuggauagacuuagccaaucccaucccauucugaauaugguugacaccaagaaaucuagccucaacaucuccggguacaauuuuagccugggagccgcugugaaggccggcgcuugcaugcuugaugggggaaacaugcuggagacaaucaaagugaccccucagacggucgacggcauucucaagucuauccugaaagugaagcggucccugggcauguucguuagcgauacacccggggaacgcaauccuuaugagaacauucucuacaaaaucugucugucuggagacggcuggccguauauugccagcagaaccuccaucguggggcgggcgugggaaaacacaaccgucgaucuugagucugacggaaagccccagaaggugggcaccgccgggagcaauaaaucccugcagagcgcuggauuuccuacaggccucacguacucucaacugaugacccugaaggauuccaugaugcagcuugaccccagcgccaaaacauggauugauaucgagggcagaccugaagaccccguugagaucgcucucuaccagccgaugucugggugcuauauucacuucuuucgcgaaccuaccgaccugaagcaguucaaacaagaugccaaguacucccauggaaucgacguggccgaucuguuucccgcucagccuggccucacaagcgcggucauugaggcccugccccggaacauggugcuuaccugucagggguccgacgauaucaagagacugcucgacucucagggacgccgggauauuaaacugaucgacaucgcucugagcaaggccgauuccagaaaauucgaaaaugccgucugggaccaaugcaaggaucuuugucacaugcauacgggcgugguuguggagaaaaagaagcgcgggggcaaagaggaaauuacaccccacugcgcucucauggacuguaucauguaugaugccgcggucucuggaggccugaacauuccugugcugcgggcuguucucccgagagacaugguguuucgcaccagcucccccaaggucgugcugugaggacuagugcaucacauuuaaaagcaucucagccuaccaugagaauaagagaaagaaaaugaagaucaauagcuuauucaucucuuuuucuuuuucguugguguaaagccaacacccugucuaaaaaacauaaauuucuuuaaucauuuugccucuuuucucugugcuucaauuaauaaaaaauggaaagaaccuagaucuaaaaaaaaaaaaaaaaaaaaaaaaaaaaaaaaaaaaaaaaaaaaaaaaaaaaaaaaaaaaaaaaugcaucccccccccccccccccccccccccccccccaaaggcucuuuucagagccaccagaauu

SEQ ID NO: 10810 - RNA, 2092 nt, Artificial Sequence
  mRNA product Design i-2 comprising derived and/or modified sequence from LASV(LASV237-NIG-2010;Clade II)__AIT17639__NP (opt5)
ggggcgcugccuacggagguggcagccaucuccuucucggcaucaagcuuaccaugagcgccuccaaggaggugaaaucuuuccuguggacccagagccucagacgggaacuguccggcuacugcucuaacaucaaacuucaagucguuaaggacgcucaggcccugcuccacgggcuggauuuuagcgagguguccaaugugcagcgccuuaugagaaagcagaaacgggacgauucugaccugaagcgccucagagaucugaaccaagcggucaauaaccugguggaacucaagagcacacagcagaaauccauucugcggguuggaacgcuuaccagcgacgaucugcucacacuggcugccgaccuugagaagcugaaaucuaaggugauccgcaccgaaagaccccucuccagcggcgucuauauggggaaucugucuacacagcaacuggagcagcggcgcgcccuccugaacaugauuggaauggugggcggggcucagggaacccagccuggcagagauggcguugugcgggucugggacgugaaaaauccggaucuucugaacaaucaauucgggacaaugcccucccucacccuggccugucuuacgaagcagggacagguggaccugaacgaugcuguccucgcccugaccgaccugggccucaucuacacagcgaaguauccuaauagcucugaccuggaucgccuuucccaaagccaucccauucugaacaugguugacaucaaaaaguccucucucaauaucagcggguacaacuuuucccugggagccgcugugaaagccggcgcuugcaugcuugaugggggaaauaugcuggagaccauuaaggugacaccucagaccauggacggcauccucaaaagcauucugaaggucaaaagaucucugggcauguucguguccgauacgcccggggaacggaacccuuaugagaacauccucuacaagauuugucugagcggagacggcuggccguauaucgccucucgcacaagcauuguugggagagcgugggaaaauaccacaguggaucuugaguccgacggaaagccccagaaagucggcucugccgggagcaacaagucccugcagagcgcuggauuuccuaccggccucaccuacucucaacugaugacacugaaagauuccaugaugcagcuugaccccagcgccaagacguggaucgauaucgagggccggccugaagaccccguggagauugcucucuaccagccgaugucugggugcuauauccacuucuuuagagaaccuaccgaccugaaacaguucaagcaagaugccaaguacucccauggaauugacguugccgaucuguuucccgcucagccuggccucacaagcgcggugaucgaggcccugccccgcaauaugguccuuaccugucagggguccgacgauauuaaacggcugcucgacucucagggaagacgcgauaucaagcugaucgacauugcucugagcaaagccgauucccggagauucgaaaacgccgugugggaccaaugcaaggaucuuugucacaugcauacaggcgucgugguugagaaaaagaagcgcgggggcaaagaggaaaucacgccccacugcgcucucauggacuguauuauguaugaugccgcggugucuggaggccugaauaucccuguccugcgggcugugcucccgagagacaugguuuuucgcaccagcucccccaaggugguccugugaggacuagugcaucacauuuaaaagcaucucagccuaccaugagaauaagagaaagaaaaugaagaucaauagcuuauucaucucuuuuucuuuuucguugguguaaagccaacacccugucuaaaaaacauaaauuucuuuaaucauuuugccucuuuucucugugcuucaauuaauaaaaaauggaaagaaccuagaucuaaaaaaaaaaaaaaaaaaaaaaaaaaaaaaaaaaaaaaaaaaaaaaaaaaaaaaaaaaaaaaaaugcaucccccccccccccccccccccccccccccccaaaggcucuuuucagagccaccagaauu

SEQ ID NO: 10811 - RNA, 2092 nt, Artificial Sequence
  mRNA product Design i-2 comprising derived and/or modified sequence from LASV(LASV253-NIG-2011;Clade II)__AIT17671__NP (opt5)
ggggcgcugccuacggagguggcagccaucuccuucucggcaucaagcuuaccaugagcgccuccaaggaggugaaaucuuuccuguggacccagagccucagacgggaacuguccggcuacugcucuagcaucaaacuucaagucguuaaggacgcucaggcccugcuccacgggcuggauuuuuccgaggugucuaacgugcagcgccuuaugagaaagcagaaacgggacgauagcgaccugaagcgccucagagaucugaaucaagcggucaacaaucugguggaacucaaguccacccagcagaaaagcguucugcgggugggaacgcuuaccucugacgaucugcucacacuggcugccgaccuugagaagcugaaauccaaggucauucgcaccgaaagaccccucagcucuggcguguauauggggaaccuguccacacagcaacuggagcagcggcgcgcccuccugaauaugaucggaaugguuggcggggcucagggaacccagccuggcagagauggcgugguccgggugugggacgugaaaaacccggaucuucugaauaaccaauucgggacaaugcccagccucacccuggccugucuuacgaagcagggacaggucgaccugaaugauguugugcucgcucugaccgaccugggccucauuuacacagccaaguauccuaacucuuccgaccuggaucgccuuagccaaucccaucccauccugaauaugguggacaccaaaaagucuagccucaacauuuccggguacaauuuuagccugggagcggccgucaaagcuggcgccugcaugcuugaugggggaaacaugcuggagacaaucaaggugaccccucagacgauggacggcauccucaaaucuauucugaagguuaaaaagucccugggcauguucgugagcgauacacccggggaaagaaauccuuaugagaacauccucuacaagauuugucugucuggagacggcuggccguauaucgcuagccggaccuccauugucgggcgcgccugggaaaacacaaccguggaucuugagucugacggaaaaccccagaagguuggcaccgcggggagcaauaaaucccugcagagcgccggauuuccuacaggccucacguacucucaacugaugacccugaaggauuccaugaugcagcuugaccccagcgcuaaaacauggaucgauauugagggcagaccugaagaccccguggagaucgcccucuaccagccgaugucugggugcuauauccacuucuuucgggaaccuaccgaccugaagcaguucaagcaagaugcuaaauacucccauggaauugacgucacagaucuguuucccgcccagccuggccucaccagcgccgugaucgaggcucugcccagaaacaugguccuuacgugucagggguccgacgauauuaagcgccugcucgacucucagggacggagagauaucaaacugauugacaucgcgcugagcaaggccgauucccgccgguucgaaaaugcugugugggaccaaugcaaagaucuuugucacaugcauacaggcguuguggucgagaagaagaaaagagggggcaaggaggaaaucacaccccacugcgcccucauggacuguauuauguaugaugccgcugugucuggaggccugaacaucccuguucugcgcgccgugcucccgcgggacauggucuuuagaaccagcucccccaaaguggugcugugaggacuagugcaucacauuuaaaagcaucucagccuaccaugagaauaagagaaagaaaaugaagaucaauagcuuauucaucucuuuuucuuuuucguugguguaaagccaacacccugucuaaaaaacauaaauuucuuuaaucauuuugccucuuuucucugugcuucaauuaauaaaaaauggaaagaaccuagaucuaaaaaaaaaaaaaaaaaaaaaaaaaaaaaaaaaaaaaaaaaaaaaaaaaaaaaaaaaaaaaaaaugcaucccccccccccccccccccccccccccccccaaaggcucuuuucagagccaccagaauu

SEQ ID NO: 10812 - RNA, 2092 nt, Artificial Sequence
  mRNA product Design i-2 comprising derived and/or modified sequence from LASV(LASV254-NIG-2011;Clade II)__AIT17675__NP (opt5)
ggggcgcugccuacggagguggcagccaucuccuucucggcaucaagcuuaccaugagcgccuccaaggaggugaaaucuuuccuguggacccagagccucagacgggaacuguccggcuacugcucuagcaucaaacuucaagucguuaaggacgcucaggcccugcuccacgggcuggauuuuuccgaggugucuaacgugcagcgccuuaugagaaagcagaaacgggacgauagcgaccugaagcgccucagagaucugaaucaagcggucaacaaucugguggaacucaaguccacacagcagaaaagcguucugcgggugggaacgcuuaccucugacgaucugcucacacuggcugccgaccuugagaagcugaaauccaaggucauucgcaccgaaagaccccucagcucuggcguguauauggggaaccuguccacacagcaacuggagcagcggcgcgcccuccugaauaugaucggaaugguuggcggggcucagggaacccagccuggcagagauggcgugguccgggugugggacgugaaaaacccggaucuucugaauaaccaauucgggacaaugcccagccucacccuggccugucuuacgaagcagggacaggucgaccugaaugaugcuguucucgcccugaccgaccugggccucauuuacacagcgaaguauccuaacucuuccgaccuggaucgccuuagccaaucccaucccauccugaauaugguggacaccaaaaagucuagccucaacauuuccggguacaauuuuagccugggagccgcugugaaagccggcgcuugcaugcuugaugggggaaacaugcuggagacaaucaaggucaccccucagacgauggacggcauccucaaaucuauucugaaggugaaaaagucccugggcauguucguuagcgauacacccggggaaagaaauccuuaugagaacauccucuacaagauuugucugucuggagacggcuggccguauaucgccagccggaccuccauuguggggcgcgcgugggaaaacacaaucgucgaucuugagucugacggaaaaccccagaaggugggcaccgccgggagcaauaaaucccugcagagcgcuggauuuccuaccggccucacauacucucaacugaugacgcugaaggauuccaugaugcagcuugaccccagcgccaaaaccuggauugauaucgagggcagaccugaagaccccguugagaucgcucucuaccagccgaugucugggugcuauauucacuucuuucgggaaccuacagaccugaagcaguucaagcaagaugccaaauacucccauggaaucgacguggccgaucuguuucccgcucagccuggccucaccagcgcggucauugaggcccugcccagaaacauggugcuuacaugucagggguccgacgauaucaagcgccugcucgacucucagggacggagagauauuaaacugaucgacaucgcucugagcaaggccgauucccgccgguucgaaaaugccgucugggaccaaugcaaagaucuuugucacaugcauaccggcgugguuguggagaagaagaaaagagggggcaaggaggaaauuacgccccacugcgcucucauggacuguaucauguaugaugccgcggucucuggaggccugaacauuccugugcugcgcgcuguucucccgcgggacaugguguuuagaacaagcucccccaaagucgugcugugaggacuagugcaucacauuuaaaagcaucucagccuaccaugagaauaagagaaagaaaaugaagaucaauagcuuauucaucucuuuuucuuuuucguugguguaaagccaacacccugucuaaaaaacauaaauuucuuuaaucauuuugccucuuuucucugugcuucaauuaauaaaaaauggaaagaaccuagaucuaaaaaaaaaaaaaaaaaaaaaaaaaaaaaaaaaaaaaaaaaaaaaaaaaaaaaaaaaaaaaaaaugcaucccccccccccccccccccccccccccccccaaaggcucuuuucagagccaccagaauu

SEQ ID NO: 10813 - RNA, 2092 nt, Artificial Sequence
  mRNA product Design i-2 comprising derived and/or modified sequence from LASV(Nig08-04;Clade II)__ADU56611__NP (opt5)
ggggcgcugccuacggagguggcagccaucuccuucucggcaucaagcuuaccaugagcgccuccaaggaggugaaaucuuuccuguggacccagagccucagacgggaacuguccggcuacugcucuaacaucaaacuucaagucguuaaggacgcucaggcccugcuccacgggcuggauuuuagcgagguguccaaugugcagcgccuuaugagaaagcagaaacgggacgauggagaccugaagcgccucagagaucugaaccaagcggucaauaaccugguggaacucaagucuacccagcagaaaagcguucugcgggugggcacgcuuaccuccgacgaucugcucacacuggcugccgaccuugagaagcugaaaagcaaggucauucgcaccgaaagaccccucucuuccgggguguauaugggaaaucugagcacacagcaacuggagcagcggaaagcccuccugucuaugaucggcaugguugggggagcucagggcacccagccuggccgcgaugggguggucagagugugggacgugaagaacccggaucuucugaauaaccaauucggaacaaugcccucccucacccuggccugucuuacgaagcagggccaggucgaccugaaugaugcuguucucgcccugaccgaccuggggcucauuuacacagcgaaauauccuaacagcucugaccuggaucggcuuucccaaagccaucccauccugaauaugguggacaccaagaaauccucucucaacauuagcggauacaauuuuucccugggcgccgcugugaaggccggggcuugcaugcuugauggaggcaacaugcuggagacaaucaaagucaccccucagacgauggacggcauccucaagagcauucugaaagugaagcgcucucuggggauguucguuuccgauacacccggagaaagaaauccuuaugagaacauccucuacaagauuugucugagcggcgacggguggccguauaucgccucucggaccagcauugugggacgcgcgugggaaaacacaaccgucgaucuugaguccgacggcaaaccccagaagguggggaccgccggaucuaauaaaagccugcaguccgcuggcuuuccuacaggccucacguacagccaacugaugacccugaaggauucuaugaugcagcuugaccccuccgccaaaacauggaucgauauugaggggagaccugaagaccccguugagaucgcucucuaccagccgaugagcggaugcuauauccacuucuuucgggaaccuaccgaccugaagcaguucaagcaagaugccaaauacucucauggcauugacgugacagaucuguuuuccgcccagcccgggcucaccagcgcugucaucgaggcgcugccuagaaacauggugcuuacgugucagggauccgacgauauuaagaaacugcucgacucucagggccgccgggauaucaagcugauugacaucagccugaauaaagccgauuccagacgcuucgaaaacgcugucugggaccaaugcaaggaucuuugucacaugcauacaggggugguuguggagaagaaaaagcggggcggaaaagaggaaaucacaccccacugcgcccucauggacuguauuauguuugaugccgcugucucuggcgggcugaauauccccauucugagagccgugcucccucgcgacaugguuuuccggaccagcuccccgaaggugguccugugaggacuagugcaucacauuuaaaagcaucucagccuaccaugagaauaagagaaagaaaaugaagaucaauagcuuauucaucucuuuuucuuuuucguugguguaaagccaacacccugucuaaaaaacauaaauuucuuuaaucauuuugccucuuuucucugugcuucaauuaauaaaaaauggaaagaaccuagaucuaaaaaaaaaaaaaaaaaaaaaaaaaaaaaaaaaaaaaaaaaaaaaaaaaaaaaaaaaaaaaaaaugcaucccccccccccccccccccccccccccccccaaaggcucuuuucagagccaccagaauu

SEQ ID NO: 10814 - RNA, 2095 nt, Artificial Sequence
  mRNA product Design i-2 comprising derived and/or modified sequence from LASV(GA391;Clade III)__AAA46284__NP (opt5)
ggggcgcugccuacggagguggcagccaucuccuucucggcaucaagcuuaccaugagcgccuccaaggaggugagaucuugccuguggacccagagccuccggcgcgaacuguccggcuacuguucuaacaucaaacuucaagucguuaaggacgcucaggcccugcuccacgggcuggauuucagcgagguguccaaugugcagagacuuaugcggaaacagaagcgcgacgauggagaccugaaaagacuccgggaucugaaccaagcggucaauaaccugguggaacucaagucuacacagcagaaaagcguucugcgcgugggcacgcuuuccagcgacgaucugcucauucuggcugccgaccuugagaaacugaagucuaaagucaccagaacagaacggccccucuccagcgggguguauaugggaaaucugucuucccagcaacuggaucagcgcagagcccuccugaacaugaucggcaugaccgggguuagcggaggcggcaagggggcuucuaauggaauugugcgggucugggacgugaaaaacgccgagcuucugaauaaccaguuuggcacaaugccuucccucacccuggcuugccuuacaaagcaggggcaaguggaucugaaugacgccguccaggcgcucaccgaucugggacugaucuacacggccaaguauccgaacagcuccgaccucgaccgccugucucagagccaucccauucuuaauaugaucgauaccaaaaaguccagccugaacaucucuggcuacaauuucucccucggggcugccguuaaagcuggagccuguaugcuggacggcggcaacaugcuugagacaauuaaggugagcccucaaaccauggaugggauccugaaaucuauucucaaggugaaaaagagccugggaauguuugucuccgacacacccggcgaaagaaacccuuaugagaauauccuguacaagauuugccucucuggggauggauggagcuauaucgcgucccggaccagcauugugggccgcgccugggaaaacacgguuguggaccuggagcaggauaauaaaccccagaagaucgggaacggaggcucuaauaaaucccuucagagcgcuggcuucgccgcugggcugaucuacucucaacucaugacacugaaggacuuuaaauguuucaaccugauuccuaaugccaagaccuggauggauaucgagggaagaccggaagaccccgucgagauugcccuuuaccagccuuccagcggcugcuaugugcacuuuuuccgggaacccacagaucucaagcaguuuaaacaggacgcuaaguacucccaugggagagacguuaccgaucuguucgcggcccaaccuggacugaccucugcugugaucgaggcccucccccgcaacauggucauuacaugucagggcagcgaagacauccggaaacugcuugagucccaggggagacgcgauaucaagcugauugacaucacgcucucuaaagccgauagccggaaguuugagaaugcugugugggaccaguucaaggaucugugccacaugcauaccggcgucgugguugaaaagaagaaaagaggaggcaaggaggaaauuacaccgcacugugcccugauggacugcaucauguuugaugcggcuguguccgggggacuugacgccaaaguccuccgcgugguucugccucgggauaugguguucagaaccagcacacccaaggucgugcugugaggacuagugcaucacauuuaaaagcaucucagccuaccaugagaauaagagaaagaaaaugaagaucaauagcuuauucaucucuuuuucuuuuucguugguguaaagccaacacccugucuaaaaaacauaaauuucuuuaaucauuuugccucuuuucucugugcuucaauuaauaaaaaauggaaagaaccuagaucuaaaaaaaaaaaaaaaaaaaaaaaaaaaaaaaaaaaaaaaaaaaaaaaaaaaaaaaaaaaaaaaaugcaucccccccccccccccccccccccccccccccaaaggcucuuuucagagccaccagaauu

SEQ ID NO: 10815 - RNA, 2092 nt, Artificial Sequence
  mRNA product Design i-2 comprising derived and/or modified sequence from LASV(Nig08-A19;Clade III)__ADU56619__NP (opt5)
ggggcgcugccuacggagguggcagccaucuccuucucggcaucaagcuuaccaugagcgccuccaaggaggugaaaucuuuccuguggacccagagccucagacgggaacuguccggcuacugcucuaacaucaaacuucaagucguuaaggacgcucaggcccugcuccacgggcuggauuuuagcgagguguccaaugugcagcgccuuaugagaaagcagaaacgggacgauggagaccugaagcgccucagagaucugaaccaagcggucaauaaccugguggaacucaagucuacacagcagaaaagcguucugcgggugggcacgcuuuccagcgacgaucugcucguccuggcugccgaccuugagaagcugaaaucuaaggugguucgcaccgaaagaccccucuccagcgggauuuauaugggaaaucugucuucccagcaacuggaucagcggaaagcccuccugaacaugaucggcaugacagggggaaauggcggccgcaacaccacaagcgacgggauugugagagucugggaugugaagaaugcugagcuucugaacaaucaguucggaaccaugccuucucucacacuggccugucuuaccaagcagggccaaguggaccugaacgaugcuguccaggcccucacggaccuggggcugaucuacaccgcgaaauaucccaauuccagcgaccucgaucggcuggcccagucccauccgauucuuaacaugaucgacacaaagaaaucuagccugaauaucuccggauacaacuuuagccucggcgcugccguuaaggcuggggccugcaugcuggauggaggcaacaugcuugagaccauuaaagugucuccucaaacaauggacggcauccugaaguccauucucaaagugaagcgcagccuggggauguucaucucugauacccccggagaaagaaauccuuaugagaacauucuguacaagaucugucucagcggcgacggguggcccuauauugcgucccggacgucuaucgucggacgcgccugggaaaauacagugguugaucuggagagcgacaacaaaccucagaagaccggcaaugggggauccaacaaaagccuucagucugcuggcuuugccgcuggccugacauacucccagcucaugacccugaaggauagcaugcugcaacuugacccgaaugccaaaaccuggauggauaucgaggggagacccgaagacccuguggagauugcccucuaccagcccucuuccggaugcuauauccacuucuuucgggaaccuacagaccugaagcaguucaagcaggaugcuaaauacagccauggcauugacgucacggaucuguuugcggcccaacccgggcucaccuccgcugugaucgaggcccugccgagaaacaugguuauuacaugucagggaucugaagacauccgcaaacuucuggagagccagggccggagagauaucaagcucauugacaucucccugucuaagguggauagccgcaaauucgagaaugccgucugggaccaguuuaaggaucugugccacaugcauaccgggauuguggucgaaaagaaaaagcggggcggaaaagaggaaaucacaccucacugugcucuuauggacugcauuauguucgaugccgcgguguccggcgggguugacgcuaaggugcucagagccguccugccccgcgauaugguguuucggaccagcacgccuaaaguugugcugugaggacuagugcaucacauuuaaaagcaucucagccuaccaugagaauaagagaaagaaaaugaagaucaauagcuuauucaucucuuuuucuuuuucguugguguaaagccaacacccugucuaaaaaacauaaauuucuuuaaucauuuugccucuuuucucugugcuucaauuaauaaaaaauggaaagaaccuagaucuaaaaaaaaaaaaaaaaaaaaaaaaaaaaaaaaaaaaaaaaaaaaaaaaaaaaaaaaaaaaaaaaugcaucccccccccccccccccccccccccccccccaaaggcucuuuucagagccaccagaauu

SEQ ID NO: 10816 - RNA, 2092 nt, Artificial Sequence
  mRNA product Design i-2 comprising derived and/or modified sequence from LASV(G1180-SLE-2010;Clade IV)__AIT17169__NP (opt5)
ggggcgcugccuacggagguggcagccaucuccuucucggcaucaagcuuaccaugagcgccuccaaggagaucaaaucuuuccuguggacccagagccucagacgggaacuguccggcuacugcucuaacauuaagcugcaaguggucaaagacgcucaggcccugcuccacgggcuggauuuuagcgagguuuccaaugugcagcgccuuaugagaaaggaacggcgcgacgauaacgaccugaaaagacuccgggaucugaaucaggcggugaacaaucuggucgagcucaagucuacacaacaaaagagcauccugcgcgugggaacgcuuaccuccgacgaucugcucauucuggcugccgaccuugaaaaacuuaagagcaaaguuaucagaacagagcggccccucucugccggcguguauauggggaaccuguccagccagcagcuggaucagcgcagagcucuccugucuaugauuggaauguccagcggcaaucagcgggcccaggcugggcgcgacggagucgugagaguuugggaugugaagaacgucgagcuucugaauaaccaguucggcaccaugccuucucucacacuggccugucuuaccaaacaaggccagguggaccugaaugaugcggugcaggcccucacagaccuggggcugaucuacaccgcuaaguauccgaacacguccgaccucgaucggcugacccaaagccaucccauccuuaauaugauugacacaaagaaauccucucugaacaucagcggauacaauuuuucccucggcgccgcugucaaggccggggcgugcaugcuggauggaggcaacaugcuugaaaccauuaaaguuagcccucagacaauggacgggauccugaagucuauucucaaagugaagaaagcccugggaauguucaucuccgauacccccggcgagcgcaacccuuaugaaaauauucuguacaagaucugucucagcggcgacggguggcccuauaucgcuucuagaacgagcauuacaggacgggccugggagaacaccguggucgaucuggaguccgacggcaagccucagaaagcugggucuaauaacagcaauaagucccuucagagcgugggauuuacagccggccugaccuacucucaacucaugacccugaaagaugccaugcugcagcuugacccgaacgcuaagacauggauggauaucgaagggagacccgaggacccuguugaaauugcgcucuaccagcccuccagcggaugcuauauccacuucuuucgcgagccuacggaccugaaacaguucaagcaagaugccaaguacucucauggcauugacgugaccgaucuguuugcugcccagcccggccucacauccgccgucaucgacgcucugccgcggaauauggugaucaccugucaggggagcgaugacauuagaaaacuucuggaaucccagggacgcaaggauaucaaacucauugacaucgcccugucuaagacagauagccggaaauaugagaacgcgguuugggaccaauacaaggaucugugccacaugcauaccggcguggucguggagaagaaaaagagagggggaaaagaagagauuacgccucacugugcucuuauggacugcaucauguucgaugccgccgucuccggcgggcucaauacaucugugcugcgcgcuguucugccccgggacaugguguuuagaaccagcaccccucgcgucgugcucugaggacuagugcaucacauuuaaaagcaucucagccuaccaugagaauaagagaaagaaaaugaagaucaauagcuuauucaucucuuuuucuuuuucguugguguaaagccaacacccugucuaaaaaacauaaauuucuuuaaucauuuugccucuuuucucugugcuucaauuaauaaaaaauggaaagaaccuagaucuaaaaaaaaaaaaaaaaaaaaaaaaaaaaaaaaaaaaaaaaaaaaaaaaaaaaaaaaaaaaaaaaugcaucccccccccccccccccccccccccccccccaaaggcucuuuucagagccaccagaauu

SEQ ID NO: 10817 - RNA, 2092 nt, Artificial Sequence
  mRNA product Design i-2 comprising derived and/or modified sequence from LASV(G1442-SLE-2011;Clade IV)__AIT17181__NP (opt5)
ggggcgcugccuacggagguggcagccaucuccuucucggcaucaagcuuaccaugagcgccuccaaggaggugaaaucuuuccuguggacccagagccucagacgggaacuguccggcuacugcucuaacaucaaacuucaagucguuaaggacgcucaggcccugcuccacgggcuggauuuuagcgagguguccaaugugcagcgccuuaugagaaagcagcggcgcgacgauaacgaccugaaaagacuccgggaucugaaucaagcggucaacaaucugguggaacucaagucuacacagcaaaagagcguucugcgcgugggaacgcuuaccuccgacgaucugcucguccuggcugccgaccuugagaaacuuaagagcaaagugauuagaacagaacggccccucucugccggcguuuauauggggaaccuguccagccagcagcuggaucagcgcagagcucuccugaauaugaucggaaugucuggcgggauucagggaacccggacaggccgcgacggcguggucagagugugggaugugaagaacgccgaccuucugaauaaccaguucgggaccaugccuucccucacacuggcuugucuuaccaaacaaggacaggucgaucugaaugacguugugcaggcccucacggaccugggccugaucuacaccgcgaaguauccgaacgccagcgaucucgaccggcugacacaaucucaucccauucuuaauaugaucgauaccaagaaauccagccugaacaucuccggguacaauuuuucucucggagcugccgugaaggcuggcgccugcaugcuggacgggggaaacaugcuugagacaauuaaagucagcccucagaccauggauggcauccugaaguccauucucaaagugaagaaaacgcugggcauguucaucagcgacacacccggggagcgcaacccuuaugaaaauauucuguacaagaucugucucucuggagauggcuggcccuauauugcguccagaaccagcaucacagggcgggccugggagaacaccguuguggaccuggaaucugauggaaagccucagaaagcuggcagcaauaacuccaauaagucucuucagagcgccggguuugcugccggacugaccuacucccaacucaugacacugaaagacgccaugcugcagcuugauccgaacgcuaagacguggauggacaucgagggcagacccgaggacccugucgaaauugcgcucuaccagcccagcucuggcugcuauauccacuucuuucgcgagccuaccgaucugaaacaguucaagcaagacgccaaguacucccaugggauugaugugacagaccuguuugcugcccagcccggacucaccagcgccguuaucgaagcucugccgcggaauauggugauuacaugucagggcucugaugacaucaaaaagcugcuggagucccaggggagaaaagauaucaagcucauugacaucgcccugagcaaaaccgauucccgcaaguaugaaaacgcggucugggaccaauacaaggaucugugccacaugcauacgggaguggucguggagaaaaagaaacggggcgggaaggaggaaauuacaccucacugugcucuuauggacugcaucauguucgaugccgccguuucuggcggacucaauacccuggugcugagagcuguccucccccgcgacaugguguuucggaccagcacaccuagaguugugcugugaggacuagugcaucacauuuaaaagcaucucagccuaccaugagaauaagagaaagaaaaugaagaucaauagcuuauucaucucuuuuucuuuuucguugguguaaagccaacacccugucuaaaaaacauaaauuucuuuaaucauuuugccucuuuucucugugcuucaauuaauaaaaaauggaaagaaccuagaucuaaaaaaaaaaaaaaaaaaaaaaaaaaaaaaaaaaaaaaaaaaaaaaaaaaaaaaaaaaaaaaaaugcaucccccccccccccccccccccccccccccccaaaggcucuuuucagagccaccagaauu

SEQ ID NO: 10818 - RNA, 2092 nt, Artificial Sequence
  mRNA product Design i-2 comprising derived and/or modified sequence from LASV(G3010-SLE-2013;Clade IV)__AIT17345__NP (opt5)
ggggcgcugccuacggagguggcagccaucuccuucucggcaucaagcuuaccaugagcgccuccaaggagaucaaaucuuuccuguggacccagagccucagacgggaacuguccggcuacugcucuaacauuaaacuucaaguggucaaagacgcucaggcccugcuccacgggcuggauuuuagcgagguuuccaaugugcagcgccuuaugagaaaggaacggcgcgacgauaacgaccugaaaagacuccgggaucugaaucaggcggugaacaaucuggucgagcucaagucuacacaacaaaagagcauccugcgcgugggaacgcuuaccuccgacgaucugcucauucuggcugccgaccuugaaaaacuuaagagcaaaguuacaagaaccgagcggccccucucugccggcguguauauggggaaccuguccagccagcagcuggaucagcgcagagcucuccugucuaugaucggaauguccagcggcguccagggggcccgggcuggacgcgacggcgugguuagagugugggaugucaagaaugccgagcuucugaacaaucaguucggcacaaugccuucucucacccuggcgugucuuacaaaacaggggcaaguggaccugaacgaugugguccaggcccucaccgaccugggacugauuuacacggcuaaguauccgaauaccuccgaccucgaucggcugacacagagccaucccauccuuaacaugaucgacaccaagaaauccucucugaauauuagcggcuacaacuuuucccucggggccgcuguuaaggccggagcgugcaugcuggauggcgggaauaugcuugaaacaaucaaagugagcccucaaaccauggacggcauucugaagucuauccucaaagugaagaaagcccugggaauguucauuuccgagacgcccggcgaacgcaacccuuaugagaacauccuguacaagauuugucucagcggggauggauggcccuauaucgcuucuagaacaagcaucaccggccgggccugggagaauacagucguggaccuggaauccgaugggaagccucagaaagcuggaucuaacaauagcaacaagucccuucagagcgccggcuuuaccgccgggcugaccuacucucagcucaugacacugaaagacgcuaugcugcaacuugauccgaaugcgaagacguggauggacauugagggaagacccgaagauccuguugagguggcccucuaccagcccuccagcggcugcuauauccacuucuuucgcgaaccuaccgaccugaaacaguucaagcaggacgcuaaguacucucauggcauugaugucacagaccuguuugccgcccaacccgggcucaccuccgcugugaucgaugcccugccgcggaacaugguuauuacaugucagggaagcgacgauaucaaaaagcugcuggagucccagggcagaaaagacaucaagcucauugauaucgcgcugucuaaaaccgacagccgcaaguaugagaaugcugugugggaucaguacaaggaccugugccacaugcauacgggggucguggucgaaaagaagaaacggggaggcaaggaggaaauuacaccucacugugcccuuauggauugcaucauguucgacgccgcuguguccgggggccucaacaccucuguucugagagccgugcugccccgcgauauggucuuucggaccagcacaccuagagugguucucugaggacuagugcaucacauuuaaaagcaucucagccuaccaugagaauaagagaaagaaaaugaagaucaauagcuuauucaucucuuuuucuuuuucguugguguaaagccaacacccugucuaaaaaacauaaauuucuuuaaucauuuugccucuuuucucugugcuucaauuaauaaaaaauggaaagaaccuagaucuaaaaaaaaaaaaaaaaaaaaaaaaaaaaaaaaaaaaaaaaaaaaaaaaaaaaaaaaaaaaaaaaugcaucccccccccccccccccccccccccccccccaaaggcucuuuucagagccaccagaauu

SEQ ID NO: 10819 - RNA, 2092 nt, Artificial Sequence
  mRNA product Design i-2 comprising derived and/or modified sequence from LASV(G502-SLE-2009;Clade IV)__AIT17127__NP (opt5)
ggggcgcugccuacggagguggcagccaucuccuucucggcaucaagcuuaccaugagcgccuccaaggagaucaaaucuuuccuguggacccagagccucagacgggaacuguccggcuacugcucuaacauuaagcugcaaguggucaaagacgcucaggcccugcuccacgggcuggauuuuagcgagguuuccaaugugcagcgccuuaugagaaaggaacggcgcgacgauaacgaccugaaaagacuccgggaucugaaucaggcggugaacaaucuggucgagcucaagucuacacaacaaaagagcauccugcgcgugggaacgcuuaccuccgacgaucugcucauucuggcugccgaccuugaaaaacuuaagagcaaaguuaucagaacagagcggccccucucugccggcguguauauggggaaccuguccagccagcagcuggaucagcgcagagcucuccugucuaugauuggaauguccggcgggaaucagggaguccgggccggcaaggacggcgugguucgcgugugggaugucaaaaacgcugagcuucugaauaaccaguucgggaccaugccuagccucacacuggccugucuuaccaagcagggacaaguggaccugaaugaugcggugcaggcccucacagaccugggccugaucuacaccgcuaaguauccgaacacgucugaccucgauagacugacccagucccaucccauccuuaauaugauugacaccaaaaagagcucccugaacaucucuggguacaauuuuagccucggagccgcugucaaagccggcgcgugcaugcuggaugggggaaacaugcuugaaacaauuaagguuuccccucaaacaauggacggcauccugaaaagcauucucaaggugaaaaaggcccugggcauguucaucucugauacccccggggagcggaacccuuaugaaaauauucuguacaagaucugucucuccggagacggcuggcccuauaucgcuagccgcacgucuauuacagggagagccugggagaacaccguggucgaucuggagagcgacggaaaaccucagaaggcuggcuccaauaacucuaauaaaagccuucaguccgccggguuuacagccggacugaccuacagccagcucaugacccugaaggaugcuaugcugcaacuugacccgaacacaaaaacguggauggauaucgaaggccggcccgaggacccuguggaaauugcgcucuaccagcccucuuccggcugcuauauccacuucuuuagagagccuaccgaccugaagcaguucaagcaggaugccaaauacagccaugggauugacguuacagaucuguuugcugcccaacccggacucaccucugccgugaucgacgcucugccgcgcaauauggucaucacaugucagggcuccgaugacauucggaaacuucuggaaagccaggggagaaaggauaucaagcucauugacaucgcccugaacaaaaccgauucccgcaaguaugagaaugcggugugggaccaguacaaggaucugugccacaugcauacgggaguuguggucgagaaaaagaaacggggcgggaaggaagagauuacaccucacugugcucuuauggacugcaucauguucgaugccgccgugucuggcggacucaacaccagcguccugagagcugugcugccccgcgacaugguuuuucggaccuccacaccuagagugguccucugaggacuagugcaucacauuuaaaagcaucucagccuaccaugagaauaagagaaagaaaaugaagaucaauagcuuauucaucucuuuuucuuuuucguugguguaaagccaacacccugucuaaaaaacauaaauuucuuuaaucauuuugccucuuuucucugugcuucaauuaauaaaaaauggaaagaaccuagaucuaaaaaaaaaaaaaaaaaaaaaaaaaaaaaaaaaaaaaaaaaaaaaaaaaaaaaaaaaaaaaaaaugcaucccccccccccccccccccccccccccccccaaaggcucuuuucagagccaccagaauu

SEQ ID NO: 10820 - RNA, 2092 nt, Artificial Sequence
  mRNA product Design i-2 comprising derived and/or modified sequence from LASV(G733-SLE-2010;Clade IV)__AIT17155__NP (opt5)
ggggcgcugccuacggagguggcagccaucuccuucucggcaucaagcuuaccaugagcgccuccaaggagaucaaaucuuuccuguggacccagagccucagacgggaacuguccggcuacugcucuaacauuaagcugcaaguggucaaagacgcucaggcccugcuccacgggcuggauuuuagcgagguuuccaaugugcagcgccuuaugagaaaggaacggcgcgacgauaacgaccugaaaagacuccgggaucugaaucaggcggugaacaaucuggucgagcucaagucuacacaacaaaagagcgugcugcgcguuggaacgcuuaccuccgacgaacugcucgugcuggcugccgaucuugagaaacuuaagagcaaagucaucagaacagagcggccccucucugccggcguguauauggggaaccuguccagccagcagcuggaccagcgcagagcucuccugucuaugauuggaauguccggcgggaaucagggagcccggaccggccgcgauggcguugugagagucugggacgugaagaacgcugaacuucugaauaaccaguucgggacaaugccuagccucacccuggccugucuuacaaaacagggacaaguggaucugaaugacgcgguccaggcccucaccgaucugggccugaucuacacggcuaaguauccgaacaccucugaccucgaccggcugacacagucccaucccauucuuaauaugaucgauaccaagaaaagcucccugaacaucucuggguacaauuuuagccucggagccgcuguuaaggccggcgcgugcaugcuggacgggggaaacaugcuugagacaauuaaaguguccccucaaaccauggauggcauccucaagagcauucugaaagugaagaaagcccugggcauguucaucucugacacgcccggggaacgcaacccuuaugagaauauucuguacaagaucugucucuccggagauggcuggcccuauauugcuagcagaacaucuaucaccgggcgggccugggagaacacagucguggaccuggaaagcgauggaaagccucagaaagcuggcuccaauaacucuaauaagagccuucaguccgccggguuuaccgccggacugaccuacagccagcucaugacacugaaagacgcuaugcugcaacuugauccgaacgcgaagacguggauggacaucgagggcagacccgaagauccuguugagauugcccucuaccagcccucuuccggcugcuauauccacuucuuucgcgaaccuaccgaccugaaacaguucaagcaggacgcuaaguacagccaugggauugaugugacagaccuguuugccgcccaacccggacucaccucugcugucaucgaugcccugccgcggaauauggugauuacaugucagggcuccgacgauaucagaaaacuucuggagagccaggggcgcaaggacaucaaacucauugauaucgcgcuguccaagauugacucucggaaauaugagaacgcuguuugggaucaguacaaggaccugugccacaugcauaccggaguggucguggaaaagaaaaagagaggcgggaaagaggaaaucacgccucacugugcccuuauggauugcauuauguucgacgccgcugucagcggcggacucaauucccuggugcugcgcgccguucucccccgggauaugguguuuagaacaucuaccccucgcgucgugcugugaggacuagugcaucacauuuaaaagcaucucagccuaccaugagaauaagagaaagaaaaugaagaucaauagcuuauucaucucuuuuucuuuuucguugguguaaagccaacacccugucuaaaaaacauaaauuucuuuaaucauuuugccucuuuucucugugcuucaauuaauaaaaaauggaaagaaccuagaucuaaaaaaaaaaaaaaaaaaaaaaaaaaaaaaaaaaaaaaaaaaaaaaaaaaaaaaaaaaaaaaaaugcaucccccccccccccccccccccccccccccccaaaggcucuuuucagagccaccagaauu

SEQ ID NO: 10821 - RNA, 2092 nt, Artificial Sequence
  mRNA product Design i-2 comprising derived and/or modified sequence from MOPV/LASV reassortant(IGS-1;Clade IV)__AFY05578__NP (opt5)
ggggcgcugccuacggagguggcagccaucuccuucucggcaucaagcuuaccaugagcgccuccaaggagaucaaaucuuuccuguggacccagagccucagacgggaacuguccggcuacugcucuaacauuaaacuucaaguggucaaggacgcucaggcccugcuccacgggcuggauuuuagcgagguuuccaaugugcagcgccuuaugagaaaggaacggcgcgacgauaacgaccugaaaagacuccgggaucugaaucaggcggugaacaaucuggucgagcucaagucuacacaacaaaagagcauccugcgcgugggaacgcuuaccuccgacgaucugcucauucuggcugccgaccuugaaaaacugagaagcaagguuauccggacagagcgcccccucucugccggcguguauauggggaaccuguccagccagcagcuggaucagagacgggcucuccugaauaugauuggaaugucuggcgggaaccagggagcccgcgcuggcagagacggcgucgugcggguuugggaugugaaaaaugccgagcuucuguccaaccaguucgggaccaugccuagccucacacuggcgugucuuaccaagcagggacaagucgaccugaaugaugccgugcaggcucucacagaccugggccugaucuacaccgccaaauauccgaacacgucugaccucgaucgccugacccagucccaucccauccuuaauaugauugacacaaagaaaagcucccugaacaucucuggguacaauuuuagccucggagcugccgugaaggcgggcgccugcaugcuggaugggggaaacaugcuugaaaccauuaaggucuccccucaaacaauggacggcauccugaaaagcauucucaagguuaaaaaggcucugggcauguucaucucugauacccccggggagagaaacccuuaugaaaauauucuguacaaaaucugucucuccggagacggcuggcccuauaucgccagccggacgucuauuacagggagagcuugggagaacaccgugguggaucuggagagcgacggaaagccucagaaggccgauuccaauaacucuagcaaaucccuucagagcgccggcuuuacagcugggcugaccuacucucagcucaugacccugaaggacgcgaugcugcaacuugauccgaaugccaaaacauggauggacaucgaaggacgccccgaggacccugucgaaauugcucucuaccagcccuccagcggcugcuauauccacuucuuucgggagccuacggaucugaagcaguucaaacaggacgccaaguacucucauggcauugaugugaccgaccuguuugccacacaacccgggcucaccuccgcuguuaucgaugcccugccgagaaacauggugaucacaugucagggaagcgacgauauucgcaaacuucuggaaucccagggccggaaggacaucaagcucauugauaucgaccugucuaaaaccgauagcagaaaguaugagaaugcggucugggaccaguacaaagaucugugccacaugcauacgggggugguuguggagaagaagaaacgcggaggcaaggaagagauuacaccucacugugcucuuauggacugcaucauguucgacgccgccgucuccgggggccucaacaccucugugcugcgggcuguccugcccagagauaugguguuucgcaccagcacaccucggguugugcucugaggacuagugcaucacauuuaaaagcaucucagccuaccaugagaauaagagaaagaaaaugaagaucaauagcuuauucaucucuuuuucuuuuucguugguguaaagccaacacccugucuaaaaaacauaaauuucuuuaaucauuuugccucuuuucucugugcuucaauuaauaaaaaauggaaagaaccuagaucuaaaaaaaaaaaaaaaaaaaaaaaaaaaaaaaaaaaaaaaaaaaaaaaaaaaaaaaaaaaaaaaaugcaucccccccccccccccccccccccccccccccaaaggcucuuuucagagccaccagaauu

SEQ ID NO: 10822 - RNA, 2092 nt, Artificial Sequence
  mRNA product Design i-2 comprising derived and/or modified sequence from LASV(LM765-SLE-2012;Clade IV)__AIT17815__NP (opt5)
ggggcgcugccuacggagguggcagccaucuccuucucggcaucaagcuuaccaugagcgccuccaaggagaucaaaucuuuccuguggacccagagccucagacgggaacuguccggcuacugcucuaacauuaagcugcaaguggucaaagacgcucaggcccugcuccacgggcuggauuuuagcgagguuuccaaugugcagcgccuuaugagaaaggaacggcgcgacgauaacgaccugaaaagacuccgggaucugaaucaggcggugaacaaucuggucgagcucaagucuacacaacaaaagagcauccugcgcgugggaacgcuuaccuccgacgaucugcucauucuggcugccgaccuugaaaaacuuaagagcaaaguuacaagaaccgagcggccccucucugccggcguguauauggggaaccuguccagccagcagcuggaucagcgcagagcucuccuggacaugaucggaaugucuggcuccaaucagggggcccgggcuggacgcgauggcgucgugagaguuugggacgugaagaacgccgagcuucugaauaaccaguucggcacaaugccuagccucacccuggcgugucuuacaaaacaggggcaagucgaucugaaugacgccgugcaggcucucaccgaccugggacugauuuacacggccaaguauccgaacaccucugaucucgaccggcugacacagucccaucccauccuuaauaugaucgauaccaagaaaagcucccugaacauuucuggcuacaauuuuagccucggggcugccgugaaggcgggagccugcaugcuggacggcgggaacaugcuugaaacaaucaaagucuccccucaaaccauggauggcauucucaagagcauccugaaaguuaagaaagcucugggaauguucauuucugacgcccccggcgagcgcaacccuuaugaaaauauccuguacaagauuugucucuccggggauggauggcccuauaucgcuagcagaacgucuaucacaggccgggccugggagaacaccgugguggaccuggagagcgaugggaagccucagaaagccggauccaauggcucuaacaagagccuucaguccgcuggguuuacagcgggacugaccuacagccagcucaugacccugaaagacgccaugcugcaacuugauccgaaugcuaagacauggauggacauugaaggcagacccgaggacccugucgaaaucgcccucuaccagcccucuuccggcugcuauauucacuucuuucgcgagccuacggaucugaaacaguucaagcaggacgccaaguacagccaugggaucgaugugaccgaccuguuugcugcccaacccggacucacaucugcgguuauugaugcucugccgcggaacauggugaucaccugucagggcuccgacgauaucagaaaacuuuucgaaagccaggggcgcaaggacauuaaacugaucgauauugcccucuccaagacagacucucggaaauaugagaaugccgucugggaucaguacaaggaccugugccacaugcauaccggaaucgugguugagaagaaaaagagaggcgggaaagaagagauuacgccucacugugcucugauggauugcaucauguuugacgccgcugugagcggcggacuuaacacauccguccuccgcgccgugcugccccgggacauggucuucagaaccucuaccccucgcgugguucugugaggacuagugcaucacauuuaaaagcaucucagccuaccaugagaauaagagaaagaaaaugaagaucaauagcuuauucaucucuuuuucuuuuucguugguguaaagccaacacccugucuaaaaaacauaaauuucuuuaaucauuuugccucuuuucucugugcuucaauuaauaaaaaauggaaagaaccuagaucuaaaaaaaaaaaaaaaaaaaaaaaaaaaaaaaaaaaaaaaaaaaaaaaaaaaaaaaaaaaaaaaaugcaucccccccccccccccccccccccccccccccaaaggcucuuuucagagccaccagaauu

SEQ ID NO: 10823 - RNA, 2092 nt, Artificial Sequence
  mRNA product Design i-2 comprising derived and/or modified sequence from LASV(LM776-SLE-2012;Clade IV)__AIT17825__NP (opt5)
ggggcgcugccuacggagguggcagccaucuccuucucggcaucaagcuuaccaugagcgccuccaaggagaucaaaucuuuccuguggacccagagccucagacgggaacuguccucuuacugcagcaacauuaaacuucaaguggucaaggacgcucaggcccugcuccacggccuggauuuuuccgagguuucuaaugugcagcgccuuaugagaaaggaacggcgcgacgauaacgaccugaaaagacuccgggaucugaaucaggcggugaacaaucuggucgagcucaagagcacacaacagaaguccauccugcgcguggggacgcuuaccagcgacgaucugcucauucuggcugccgaccuugaaaaacugaagucuaaaguuacaagaaccgagcggccccucuccgccggaguguauaugggcaaccugagcucucagcagcuggaucaacgcagagcucuccuguccaugaucgggaugagcggaucuaaucagggcgcccgggcugggcgcgacggagucgugagaguuugggaugugaagaacgccgagcuucugaauaaccaguucggcacaaugccuucccucacccuggcgugucuuacaaaacagggccaagucgaccugaaugaugccgugcaggcucucaccgaccuggggcugauuuacacggccaaguauccgaacaccagcgaccucgaucggcugacacagucccaucccauccuuaauaugaucgacaccaagaaaucuagccugaacauuuccggauacaauuuuagccucggcgcugccgugaaggcgggggccugcaugcuggauggaggcaacaugcuugaaacaaucaaagucucuccucaaaccauggacgggauucugaaguccauccucaaaguuaagaaagcucugggaauguucauuagcgauacgcccggcgagcgcaacccuuaugaaaauauccuguacaagauuugucucucuggcgacggguggcccuauaucgccagcagaacauccaucaccggacgggcuugggagaacacagugguggaucuggagucugacggcaagccucagaaagccgggagcaauaacuccaauaagagccuucagucugccggauuuaccgcuggccugaccuacucccagcucaugacacugaaagaugcgaugcugcaacuugacccgaacgccaagacguggauggauauugaagggagacccgaggacccugucgaaguggcucucuaccagcccagcucuggaugcuauauccacuucuuucgcgagccuaccgaccugaaacaguucaagcaggaugccaaguacucccauggcauugacguuacagaucuguuugccgcucaacccggccucaccagcgccgugaucgacgcgcugccgcggaauauggucauuacaugucagggguccgaugacaucagaaaacuucuggaaucucagggacgcaaggauaucaaacucauugacaucgcucugagcaagaccgauucccggaaauaugagaacgccgugugggaccaguacaaggaucugugccacaugcauacgggcguuguggucgagaagaaaaagagagggggaaaagaagagauuacaccucacugugcccuuauggacugcaucauguucgaugcugccgugucuggcgggcucaauaccagcguccugcgcgcugugcugccccgggacaugguuuuuagaaccuccacaccucgcgugguccucugaggacuagugcaucacauuuaaaagcaucucagccuaccaugagaauaagagaaagaaaaugaagaucaauagcuuauucaucucuuuuucuuuuucguugguguaaagccaacacccugucuaaaaaacauaaauuucuuuaaucauuuugccucuuuucucugugcuucaauuaauaaaaaauggaaagaaccuagaucuaaaaaaaaaaaaaaaaaaaaaaaaaaaaaaaaaaaaaaaaaaaaaaaaaaaaaaaaaaaaaaaaugcaucccccccccccccccccccccccccccccccaaaggcucuuuucagagccaccagaauu

SEQ ID NO: 10824 - RNA, 2092 nt, Artificial Sequence
  mRNA product Design i-2 comprising derived and/or modified sequence from LASV(Mad39;Clade IV)__ANH09723__NP (opt5)
ggggcgcugccuacggagguggcagccaucuccuucucggcaucaagcuuaccaugagcgccuccaaggagaucaaaucuuuccuguggacccagagccucagacgggaacuguccggcuacugcucuaacauuaagcugcaaguggucaaagacgcucaggcccugcuccacgggcuggauuuuagcgagguuuccaaugugcagcgccuuaugagaaagcagcggcgcgacgauaacgaccugaaaagacuccgggaucugaaucaagcggugaacaaucuggucgaacucaagucuacacagcaaaagagcgugcugcgcguuggaacgcuuaccuccgacgaucugcucacacuggcugccgaccuugagaaacuuaagagcaaagugaccagaacagaacggccccucaccgccggcgucuauauggggaaccugucuucccagcagcuggaucagcgcagagcucuccugaauaugaucggaaugagcggcgggaaccagggagcccggacaggccgcgacggcgugguuagagugugggaugucaagaaugcugagcuucugaacaaucaguucgggaccaugccuucucucacgcuggccugucuuaccaaacaaggacagguggaccugaacgaugugguccaggcgcucacagaccugggccugauuuacaccgccaaguauccgaauacauccgaccucgaucggcugacccaaagccaucccauccuuaacaugauugacacgaauaagucuucccugaacaucagcggguacaacuuuucccucggagcugccguuaaagcuggcgccugcaugcuggaugggggaaauaugcuugagacaaucaaggugucuccucagaccauggacggcauucugaaaagcauccucaaggugaaaaagucccugggcauguucauuagcgauacacccggggaacgcaacccuuaugagaauauccuguacaaaauuugucucucuggagacggcuggcccuauaucgcguccagaaccagcauuaccgggcgggccugggaaaacacagucguggaucuggagucuggaggcaagccucagaaggcugggagcaauaacuccaauaaaucucuucagagcgccggauuugcugccggccugacguacucccaacucaugacccugaaggacgccaugcugcagcuugauccgaacgcuaaaacauggauggacaucgagggcagacccgaagauccuguugagaucgcgcucuaccagcccauuagcgggugcuauauccacuucuuucgcgaaccuaccgaccugaagcaguucaaacaagacgccaaguacucucauggaauugaugugacagaccuguuugcugcccagcccggccucaccuccgccgucaucgaggcucugccgcggaauauggugauuacgugucaggggagcgaugacaucagaaaacuuuucgaaucucagggacgcaaggauaucaagcugauugacaucgcccucuccaaaacagauagccggaaguaugagaacgcgguuugggaccaauacaaagaucugugccacaugcauaccggcguggucguggagaagaagaaaaagggcgggaaagaagagauuaccccucacugugcucugauggacugcaucauguuugaugccgccgucuccggaggccuuaauacacucgugcugagagcuguucugccccgcgacaugguguuccggaccucuacaccuaaggucgugcucugaggacuagugcaucacauuuaaaagcaucucagccuaccaugagaauaagagaaagaaaaugaagaucaauagcuuauucaucucuuuuucuuuuucguugguguaaagccaacacccugucuaaaaaacauaaauuucuuuaaucauuuugccucuuuucucugugcuucaauuaauaaaaaauggaaagaaccuagaucuaaaaaaaaaaaaaaaaaaaaaaaaaaaaaaaaaaaaaaaaaaaaaaaaaaaaaaaaaaaaaaaaugcaucccccccccccccccccccccccccccccccaaaggcucuuuucagagccaccagaauu

SEQ ID NO: 10825 - RNA, 2092 nt, Artificial Sequence
  mRNA product Design i-2 comprising derived and/or modified sequence from LASV(Z0947-SLE-2011;Clade IV)__AIT17841__NP (opt5)
ggggcgcugccuacggagguggcagccaucuccuucucggcaucaagcuuaccaugagcgccuccaaggagaucaaaucuuuccuguggacccagagccucagacgggaacuguccggcuacugcucuaacauuaagcugcaaguggucaaagacgcucaggcccugcuccacgggcuggauuuuagcgagguuuccaaugugcagcgccuuaugagaaaggaacggcgcgacgauaacgaccugaaaagacuccgggaucugaaucaggcggugaacaaucuggucgagcucaagucuacacaacaaaagagcauccugcgcgugggaacgcuuaccuccgacgaucugcucauucuggcugccgaccuugaaaaacuuaagagcaaaguuacaagaaccgagcggccccucucugccggcguguauauggggaaccuguccagccagcagcuggaucagcgcagagcucuccugaauaugaucggaaugucuggcuccaaccagggggcccggacaggacgcgacggcgucgugagaguuugggaugugaagaaugcugagcuucugaacaaucaguucggcaccaugccuagccucacacuggccugucuuaccaaacaggggcaagucgaccugaacgaugcggugcaggcccucacggaccugggacugauuuacaccgcuaaguauccgaauacaucugaccucgaucggcugacccagucccaucccauccuuaacaugaucgacacaaagaaaagcucccugaauauuucuggcuacaacuuuagccucggggccgcugugaaggccggagcgugcaugcuggauggcgggaacaugcuugaaaccaucaaagucuccccucaaacgauggacggcauucucaagagcauccugaaaguuaagaaagcccugggaauguucauuucugaugcucccggcgagcgcaauccuuaugaaaacauccuguacaagauuugucucuccggggacggauggcccuauaucgccagcagaacaucuaucaccggccgggcuugggagaauacagugguggaucuggagagcgacgggaagccucagaaagccggauccaacggcucuaauaagagccuucaguccgccggguuuaccgcuggacugaccuacagccagcucaugacacugaaagaugcgaugcugcaacuugacccgaacgccaagacguggauggauauugaaggcagacccgaggacccugucgaaaucgcucucuaccagcccucuuccggcugcuauauucacuucuuucgcgagccuaccgaccugaaacaguucaagcaggaugccaaguacagccaugggaucgacgugacagaucuguuugccgcucaacccggacucaccucugccguuauugacgcgcugccgcggaauauggugaucacaugucagggcuccgaugacaucagaaaacuuuucgaaagccaggggcgcaaggauauuaaacugaucgacauugcucucuccaagaccgauucucggaaauaugagaacgccgucugggaccaguacaaggaucugugccacaugcauacgggaaucgugguugagaagaaaaagagaggcgggaaagaagagauuacaccucacugugcccugauggacugcaucauguuugaugcugccgugagcggcggacuuaauaccuccguccuccgcgcugugcugccccgggacauggucuucagaaccucuacaccucgcgugguucugugaggacuagugcaucacauuuaaaagcaucucagccuaccaugagaauaagagaaagaaaaugaagaucaauagcuuauucaucucuuuuucuuuuucguugguguaaagccaacacccugucuaaaaaacauaaauuucuuuaaucauuuugccucuuuucucugugcuucaauuaauaaaaaauggaaagaaccuagaucuaaaaaaaaaaaaaaaaaaaaaaaaaaaaaaaaaaaaaaaaaaaaaaaaaaaaaaaaaaaaaaaaugcaucccccccccccccccccccccccccccccccaaaggcucuuuucagagccaccagaauu

SEQ ID NO: 10826 - RNA, 2092 nt, Artificial Sequence
  mRNA product Design i-2 comprising derived and/or modified sequence from LASV(Josiah;Clade IV)__NP_694869__NP (opt6)
ggggcgcugccuacggagguggcagccaucuccuucucggcaucaagcuuaccaugagugcaucaaaagaaauaaaaucauuccuauggacacaaagccuaagaagggaacuaucaggcuauugcucaaacauaaaauuacaaguagucaaagacgcacaagcucucuuacacggucuagauuuuagugaaguaucaaacguucaaagauuaaugagaaaagagagacgagaugauaacgaccuaaaaagacuaagagaucuaaaucaagcaguaaacaaccuuguagaacuaaaaagcacacaacaaaaauccauccuacguguaggaacauuaacaagugaugacuuauuaauccuagcagcagaucuagaaaaacuuaaaagcaaagucauaagaacugaacgaccgcucagugcagguguauauaugggaaaucucucgucgcaacaauuagaucaaagaagagcacuacuuaauaugauaggaaugucaggaggaaaucaaggugcacgcgcaggaagagacggaguagugagaguaugggacguaaaaaacgcagaauuauuaaauaaccaauuuggaacaaugccauccuuaacuuuagccugucuaaccaaacaaggacaaguagaccuaaaugacgcaguacaagcacuaacugacuuaggacuuauauauacagccaaauauccaaauacaucagauuuagacagacucacacaaucacaccccauacuaaacaugauagacacaaaaaaaagcaguuuaaauauaucagguuacaauuuuucacuuggagcagcgguaaaagcaggcgccuguauguuagacggcgguaacauguuagaaacaauaaagguaagcccucaaacaauggauggaauacuaaaaaguauauuaaaaguaaaaaaagcacuaggaauguuuauaagugauaccccaggagaaagaaacccauacgaaaauauauuauacaaaauauguuuaaguggagauggauggccauauauagcauccagaaccagcauaacaggaagagcaugggaaaauaccguaguagaucuagaaucagauggaaaaccacaaaaagcagauucaaacaauaguaguaaaagccuccaaucagcagguuuuacagcaggacuaacauauagucaacuaaugacacuuaaagaugcaaugcuacaacuagauccaaaugcaaaaacauggauggauauagaaggacgaccagaagacccgguagaaauagcacuauaucaacccaguagcggaugcuacauucauuuuuuuagagaaccaacagaucuaaaacaauucaaacaagaugcaaaauauagucacggcauugacguaacagauuuauuugcaacacaaccaggauuaacaagugccgucauagaugcauuaccaagaaacaugguaauaacaugccaaggaagcgaugacauuagaaaacuacuagaaagucaaggaagaaaagacaucaaacugauagauaucgcguuaucaaaaacggacucacgaaaauaugaaaaugcaguuugggaccaauauaaagauuuaugccacaugcauacaggaguaguuguagaaaaaaaaaagagaggaggaaaagaagaaauaacaccacauugcgcauuaauggauugcauaauguuugaugccgcaguaagcggcggacuaaauacuucaguacuacgagcaguacuaccaagagauaugguauuucgaaccucuaccccaaggguaguauuauaaggacuagugcaucacauuuaaaagcaucucagccuaccaugagaauaagagaaagaaaaugaagaucaauagcuuauucaucucuuuuucuuuuucguugguguaaagccaacacccugucuaaaaaacauaaauuucuuuaaucauuuugccucuuuucucugugcuucaauuaauaaaaaauggaaagaaccuagaucuaaaaaaaaaaaaaaaaaaaaaaaaaaaaaaaaaaaaaaaaaaaaaaaaaaaaaaaaaaaaaaaaugcaucccccccccccccccccccccccccccccccaaaggcucuuuucagagccaccagaauu

SEQ ID NO: 10827 - RNA, 2092 nt, Artificial Sequence
  mRNA product Design i-2 comprising derived and/or modified sequence from LASV(LP;Clade I)__AAF86702__NP (opt6)
ggggcgcugccuacggagguggcagccaucuccuucucggcaucaagcuuaccaugucaaauagcaaagaaaucaaaucauuucuuuggacacaaucauuaagaagagaauuaucaggauauugcucaaacauaaaacuacaaguuguaaaagacgcucaagcacuacuucacggacuagacuucucugaaguaucaaauguacaaagauuaaugcgaaaacaaaaacgagaugaugcagaccuaaaaagacuaagagaccuaaaucaagcaguaaauaauuuaguagaacuaaaaucaacccaacagaaaaaugucuuaagagugggaaccuuaagcucagaugauuuaauaacacuagcagcagaccuagaaaaacuuaaaucaaaagucauaagaacagaacggccacuguccucaggaguauauauggguaauuuaucaucacaacaacuugaucagaggagagcccuacuaucaaugauuggaaugaguggagguccacaaggaaacagaacaggcggugacggcguaguuagaguaugggauguuaaaaacgcagaauuauuaaauaaucaauucggcaccaugccaagucuaacucuagcaugccuuacaaaacaaggacaaguagacuuaaacgaugcaguacaagcucuaacugaccugggcuuaauauauacagcaaaauauccuaauucaagcgacuuagacauguuaacacaaagccacccuauacuaggaaugguagacaccaagaaaaguaguuuaaacauaaguggauacaauuuuucacuuggggcggcagugaaagcaggggcauguaugcuugacggaggcaacaugcuagaaacgauaaaaguaucaccacaaacuauggauggcauucuaaaaagcauacuaaaaguaaaaagaagucuaggaauguuuauaucagacacgccaggagaaagaaauccauacgaaaauauacuauauaaaauaugcuuaucaggagaagguuggccauauaucgcuucaagaacaucaauaacagguagagcaugggaaaacacucuaguagaucuugaaagugacaauaaaccaccaaaacuuaauucagcaggaagcaauaaaucacuacaagcagcuggcuuaaaugccggacuaacauauucacaauuaaugacauuaaaagauugcauguuacaacuagauccuaguucaaaaaccuggaucgacaucgaaggaagaccagaagacccagucgaaaucgcacuauuucaaccaucaaguggaugcuacauucacuucuuuagagaaccaacagauuuaaaacaauucaaacaagacgcuaaauacagucacggaauagauguaacagaccuuuucagcacacaacccggauuaacaagugcaguuauagaagcacuacccagaaacaugguauuaacaugucaagguucagaugauaucaagaaacuauuagagucacaaggaagaagagauaucaaauuaauagauauaaguuuaaguaaagcagacucuagaaaauucgaaaacgcaguaugggaucaauacaaagaccuaugccacaugcauacaggaguuguaguagagaaaaagaaaagaggaggaaaagaagaaauaacaccacauugugcucuacuagacugcauaauguucgacgcagcaacuacuggaucacuaaacaucacaacacuaagagcaguccuacccagagauaugguauucagaacaagcacaccuaaaguaguacuauaaggacuagugcaucacauuuaaaagcaucucagccuaccaugagaauaagagaaagaaaaugaagaucaauagcuuauucaucucuuuuucuuuuucguugguguaaagccaacacccugucuaaaaaacauaaauuucuuuaaucauuuugccucuuuucucugugcuucaauuaauaaaaaauggaaagaaccuagaucuaaaaaaaaaaaaaaaaaaaaaaaaaaaaaaaaaaaaaaaaaaaaaaaaaaaaaaaaaaaaaaaaugcaucccccccccccccccccccccccccccccccaaaggcucuuuucagagccaccagaauu

SEQ ID NO: 10828 - RNA, 2092 nt, Artificial Sequence
  mRNA product Design i-2 comprising derived and/or modified sequence from LASV(803213;Clade II)__AAF86704__NP (opt6)
ggggcgcugccuacggagguggcagccaucuccuucucggcaucaagcuuaccauguccgcaucaaaagaagucaaaaguuuccuauggacacaaagccucagaagagaacuaucaggauacugcucaaacauuaaacuacagguaguaaaagaugcucaagcccuucuacacggacuagauuucucagaaguaaauaacguacaaagacuaaugagaaaacaaaaacgagacgauggggauuuaaaaagauuaagagaucuaaaccaagccguaaacaaucuaguagaauuaaaaucaacacaacaaaaaucuauauuaagaguaggaacacuaacuucagaugaccuauuaacacucgcagcagaucucgaaaaacucaaaucaaaaguaauaagaacugaaaggccacuaucuuccggcguuuacaugggaaaucuaucaacucaacaauuagaacaaagacgagcauuacuaaauaugaucggaauggucggcggagcacaaggaacucaaccuggaagggacgguguuguccgaguaugggacguaaaaaacccagauuuacucaauaaccaauuuggaacaaugccaagccucacacuagcuugccuaacgaagcaaggucaaguggacuuaaaugaugcaguauuagcacuaacugacuuaggauuaauauacacugccaaauauccuaacucaucagacuuagacagauuaucacaaagccacccgauauuaaacaugguagauacaaaaaaaucaaguuuaaacauuagcggcuacaacuucucacuaggugccgccguaaaagcaggugcaugcaugcuugauggaggaaauaugcuagaaacaauaaaagucacaccccaaacaauggacggaauacuaaaaaguauauuaaaaguaaaaagaucgcuaggaauguucguaagcgauacaccuggagaaagaaauccauaugaaaauauuuuauauaaaauaugccucaguggagauggauggccauauauagcaucgagaacaucuauaguaggacgagcuugggaaaauacaacaguagaucuagaaucagacggaaaaccacaaaaaguaggaacagcaggcucaaauaagucccuacaaucagcaggauucccaacaggauuaacauauagccaacuaaugacccuaaaagauucaaugaugcaauuggauccaucugcaaaaacuuggauagacauagaaggaagaccagaagaucccguagaaauugcauuauaucaaccaaugucaggauguuauauacacuucuuuagagaaccaacugaccuaaaacaauuuaaacaagaugcuaaauacucacauggaauagacguugcagauuuauuuccagcacaacccggcuuaacaucugcaguaauagaggccuuaccacgaaauaugguauuaacaugucaaggaucggaugauauaaaaaaacuucuagacucucaaggaagaagagacauaaaacuaauagauauauccuuaaguaaagucgauagccgaaaauuugaaaaugcuguaugggaccaaugcaaagacuuaugucacaugcauacaggaguuguuguagaaaaaaaaaaaagagguggaaaagaagaaauaacaccacauugugcacuuauggauuguauaauguuugacgcugccguaagcggaggauuaaauauuccuguauuacgagcuguguuaccaagagacaugguuuucagaacaucaucaccaaaaguaguauuauaaggacuagugcaucacauuuaaaagcaucucagccuaccaugagaauaagagaaagaaaaugaagaucaauagcuuauucaucucuuuuucuuuuucguugguguaaagccaacacccugucuaaaaaacauaaauuucuuuaaucauuuugccucuuuucucugugcuucaauuaauaaaaaauggaaagaaccuagaucuaaaaaaaaaaaaaaaaaaaaaaaaaaaaaaaaaaaaaaaaaaaaaaaaaaaaaaaaaaaaaaaaugcaucccccccccccccccccccccccccccccccaaaggcucuuuucagagccaccagaauu

SEQ ID NO: 10829 - RNA, 2095 nt, Artificial Sequence
  mRNA product Design i-2 comprising derived and/or modified sequence from LASV(GA391;Clade III)__CAA36646__NP (opt6)
ggggcgcugccuacggagguggcagccaucuccuucucggcaucaagcuuaccaugucagcauccaaagaaguaagaucauucuuauggacacaaucacuaagacgcgaacuaaguggauauugcaguaacauaaaacuacaaguuguaaaagaugcacaagcucuacuacacggccucgauuucucagaaguaucaaauguccaacguuuaaugagaaaacaaaaacgagaugacggagauuuaaaaagauuaagagaucuaaaccaagcaguuaauaaccuuguagaacucaaauccacacaacaaaaaucaguauuaagaguaggaacacuaucaucagaugacuuguuaauucuagcagcagaccuagaaaaacuaaaaucaaaaguaaccagaacagaaagaccacuaaguagcggaguauauaugggaaaccuaucaucucaacaacuagaucaaagacgagcauuacuaaacaugauugguaugacaggaguaagcggcggaggaaaaggugcuucagacggaauuguaagaguaugggacgucaaaaacgcagaauuauuaaauaaucaauuuggaacuaugcccucacuuacacuagcuuguuugacaaaacaaggacaaguagacuuaaaugaugcaguacaagcacuaacggaucuagguuuaauauauacagcgaaauauccaaacucuucagaccuagaccgauuaucucaaucacacccuauacuaaauaugauagauaccaagaaaagcucauuaaauaucagcggcuauaauuucucacuaggugcagcaguaaaagcaggggcuugcaugcuagauggaggcaauaugcucgaaacgauaaaaguaucaccacaaacaauggacggaauauuaaaaucuaucuuaaaaguaaagaaaucacuaggaauguucguaagcgauacaccuggagaaagaaauccauaugaaaacauucuauauaaaaucuguuuaucuggagacggauggcccuauauagcaucucgaacuucuauaguaggcagagccugggaaaauaccguuguagaucuagaacaagauaacaaaccacagaaaauaggaaacggaggaucaaauaaaucauuacaaucugcaggauuugccgcaggauuaacauauagucaacuaaugacauuaaaagauuucaaaugcuuuaacuuaauacccaacgcgaaaacauggauggacauagaaggaagaccagaagauccaguagaaauugcucuauaccaaccaucaucaggauguuauguacauuucuuuagagaaccgacagacuuaaaacaauuuaaacaagaugcaaaauauucacacggaaucgacguaaccgacuuauuugcagcacaaccuggacuaacuucagcaguaauagaagcccucccacgaaauaugguaauaacaugucaagguucagaagauauacgaaaauuauuagaaagccaaggaaggagagacaucaaacuaauagauauaacucuaaguaaagcagacucuagaaaauuugagaaugcaguaugggaucaauuuaaagaucuaugucacaugcacacaggcguaguuguugagaaaaagaaaagaggaggaaaagaagaaauaacuccacauugcgcgcuaauggacuguauaauguuugaugcagcaguaucaggaggacuagaugcaaaaguucucagaguaguauuaccacgagacaugguuuucagaaccaguacaccaaaaguaguauuauaaggacuagugcaucacauuuaaaagcaucucagccuaccaugagaauaagagaaagaaaaugaagaucaauagcuuauucaucucuuuuucuuuuucguugguguaaagccaacacccugucuaaaaaacauaaauuucuuuaaucauuuugccucuuuucucugugcuucaauuaauaaaaaauggaaagaaccuagaucuaaaaaaaaaaaaaaaaaaaaaaaaaaaaaaaaaaaaaaaaaaaaaaaaaaaaaaaaaaaaaaaaugcaucccccccccccccccccccccccccccccccaaaggcucuuuucagagccaccagaauu

SEQ ID NO: 10830 - RNA, 2092 nt, Artificial Sequence
  mRNA product Design i-2 comprising derived and/or modified sequence from LASV(AV;Clade V)__CCA30315__NP (opt6)
ggggcgcugccuacggagguggcagccaucuccuucucggcaucaagcuuaccaugagcgcauccaaagaaguaaaaucuuucuuauggacacaaucacuaagacgcgaacuaagcggauauuguucaaauaucaaauuacaagucguaaaagacgcacaagcucuacuacacggacuagacuucucagaaguaucaaauguacaaagauuaaugagaaaacaacgaagagaugauucagacuuaaaacgauuacgcgacuuaaaccaagccguaaauaauuuaguagaauuaaagaguacucaacaaaaaucaguauuaagaguaggaacacugucaagcgaugaccuuuuaacacuagcugcagaccuugaaaaauuaaaaaguaaaguaacaagaacugaaaggccacuaucgaguggaguauauaugggaaauuuaucaucccaacaauuagaucaaagaagagcauuacugaaucuaauagguaugacaaacggaucacaaggaagccaagcaggaagagacggaguagugagaguaugggaugucaaaaaugcugaauuauuaaauaaccaauucggaacaaugccaucauuaacauuagcaugccuaacaaaacaaggucaagucgauuuaaacgauguaguacaagcacuaacagaccuuggauuaauauauaccgcaaaauacccaaauacaagcgacuuagaucgacucacucaaucacacccaauacuaaacaugauagauacaaaaaaauccagcuuaaacauaucaggauacaauuuuucguuaggcgcagcuguaaaagcaggggcauguaugcuagacggaggaaauaugcucgagacaauuaaaguaucaccacaaucuauggauggaauacuuaaaaguauacuaaaaguaaaaagggcauuaggaauguucguaagugauacaccaggagaaagaaauccauacgaaaauauauuauacaaaauaugucuaagcggugaugguuggccguauauagcuagcagaacaucuauagucggaagagcaugggaaaauacaguagucgauuuagaaacagauggaaaaccacaaaaaauaggcucuggaaacucaaacaaaucacuacaaucagccggcuuuucagcaggacuuacauacucccaauugaugacauuaaaagaugcaaugcuacaacuagacccaaaugcaaaaacauggauggauauagaaggucggcccgaagacccaguagaaguagcucuauaucaaccuauaaguggauguuacauacacuucuuucgagaaccaacugacuuaaaacaauucaaacaagacgcuaaguacagucauggaauugauauagcagaucucuucgcagcacaaccaggacuaacuucagcaguaauagaagcucuaccuagaaauaugguaauaacaugccaagguucagaagacauaaaaaaacuacuagaaucucaaggaagaaaagacauuaaacuaauugauauagcacuaaguaaaauagacucaagaaaauucgaaaaugcuguuugggaccaauauaaagaccuaugucacaugcauaccggagucguuguugaaaaaaaaaaaagaggaggaaaagaagaaauaacaccacauugugcucuaauggauugcauaauguuugaugcugcagucagcggaggauuaaacacacuuguccuaagagcaguauuaccacgugauaugguauuuagaacaucaaccccccgaguaguauuauaaggacuagugcaucacauuuaaaagcaucucagccuaccaugagaauaagagaaagaaaaugaagaucaauagcuuauucaucucuuuuucuuuuucguugguguaaagccaacacccugucuaaaaaacauaaauuucuuuaaucauuuugccucuuuucucugugcuucaauuaauaaaaaauggaaagaaccuagaucuaaaaaaaaaaaaaaaaaaaaaaaaaaaaaaaaaaaaaaaaaaaaaaaaaaaaaaaaaaaaaaaaugcaucccccccccccccccccccccccccccccccaaaggcucuuuucagagccaccagaauu

SEQ ID NO: 10831 - RNA, 2092 nt, Artificial Sequence
  mRNA product Design i-2 comprising derived and/or modified sequence from LASV(Togo/2016/7082;Clade VI)__AMR44578__NP (opt6)
ggggcgcugccuacggagguggcagccaucuccuucucggcaucaagcuuaccaugucuaauucaaaagaaguaaaaucauuuuuauggacucaaagucuacgaagagaacuaagcggauacugcucaaauauaaaacuacaaguaguuaaagacgcucaagccuuauuacacggucucgauuucagugaaguaucaaauguacaaagauugaugagaaaacaaaaaagagacgacggagaucuaaaacggcuaagagaucuuaaucaagcuguaaacaauuugguagaacucaaaucaguacaacaaaaaucaauacuuagaguaggaacacuaacaucagacgaccuauuaacauuagcugccgaucuagaaaaacuaaaaagcaaaguaaccagaacagaacgaccacuaucgaguggaguauacaugggaaacuuaaguagccaacaacuagaucaaagaagagcacuacuaagcaugauuggaaugucaggaggaaaccaaaauagucaaccuaaaggggauggaguaguacgagucugggacguuaaaaacgccgaccucuuaaauaaccaauucggaacaaugccaagucuaacauuagcuuguuuaaccaaacaaggacaaguagaccuaaacgaugcaguacaagcccuaacagaccuaggacuaauauauacagcaaaauauccaaauagcucagauuuagacagauuaucacaaucacacccaaucuuaaacaugauugauacaaaaaaauccagccucaacauuucaggauacaauuucucacucggcgcagcaauuaaaaccggugcaugcaugcuugauggaggaaauaugcuugaaacaauaaaaguaacaccacagacaauggacggaauccuaaaaucaauacugaaagucaaaagaucacuuggcauguucaucagugauacacccggagaaagaaauccauaugaaaacauauuauacaaaauauguuuaaguggagauggauggccauauauagcuucacgaacugcaaucauagguagagccugggaaaauacaguaguagacuuagaaucagacagcaaaccccaaaaaauaggauccaacgguucaaauaaaucacuacaaucagcaggauucgcacccggcuuaacauauucacaacuaaugacucuaaaagacucaaugcuacaacuagauccaaacgccaaaacauggaucgacauugaaggacgacccgaagacccaguugaaguagcacuauuccaaccaauaaguggcugcuauauccacuuuuuuagagaacccacagaucuaaaacaauucaaacaagacgccaaauauucccacggcauagacguaacugacuuauucgcagcacaaccaggacuaacaucagcaguaaucgaagcccuuccaagaaauaugguacuaacaugccaaggcucagaugauauaaaaaaacuacucgacucacaaggccguagagauaucaaauuaauagacguaucacuaaacaaaauagacucaaggaaauuugaaaacgcaguaugggaucaauauaaagacuuaugccacaugcauacaggaguaguagucgaaaaaaaaaaaaaagguggaaaagaagaaauaaccccacacugugcuuuacuugauuguauaauguucgaugcugcaguaaguggaggacuaaacgcaaccguacucagagcaguacugccuagagauaugguauucagaacaucaaguccaaaaguaguacuuuaaggacuagugcaucacauuuaaaagcaucucagccuaccaugagaauaagagaaagaaaaugaagaucaauagcuuauucaucucuuuuucuuuuucguugguguaaagccaacacccugucuaaaaaacauaaauuucuuuaaucauuuugccucuuuucucugugcuucaauuaauaaaaaauggaaagaaccuagaucuaaaaaaaaaaaaaaaaaaaaaaaaaaaaaaaaaaaaaaaaaaaaaaaaaaaaaaaaaaaaaaaaugcaucccccccccccccccccccccccccccccccaaaggcucuuuucagagccaccagaauu

SEQ ID NO: 10832 - RNA, 2092 nt, Artificial Sequence
  mRNA product Design i-2 comprising derived and/or modified sequence from LASV(KAK-428;Clade n.d. (VII))__ANH09741__NP (opt6)
ggggcgcugccuacggagguggcagccaucuccuucucggcaucaagcuuaccaugucaaauucaaaagaaguuaaaucauuuuuauggacacaaucuuuaaggagagaauuaagcggcuauuguacaaacauuaaauuacaaguaguaaaagaugcacaagcauuauuacauggauuagauuucucagaaguaucgaacguacaacgauuaaugaggaaacagaaaagggacgauaacgaccuaaaaagacuuagagaucuaaaccaagcuguaaacaacuuagucgaacuaaaaucaguacaacaaaaaucaguacuaaaaguaggaacauuaaauagugaugauuuacucacacuagcagcugaucuagaaaaauuaaaaucaaaaguagucagaacagaaagaccauuaaguucagguguauacauggguaaucuaagcagccaacaacuagaucaaagacgagcauuauuaaacaugauaggaauggcaggaggaagccaagguaaucaaccuagcagagacgguguuguuagagucugggacgucaaaaaugcagauuuacuaaauaaucaauuuggaacaaugccaucauuaacauuagcuugucuuaccaaacaaggacaaguagacuuaaaugacguaguuuuagcauuaacggaccuaggauuaauauacacagcaaaauauccaaauuccucagaccuagacagauuaagucaaaaucauccuguauuaaacaugauagacgucaauaaaucaucacuaaauauaucaggauacaauuucucucuaggagccgcaguaaaagccggagcaugcaugcuggacggaggaaauauguuagaaacaaucaaaaucucaccgcaaacaguagaugguauauuaaaaaguauauuaaaaguaaaaagagcccuaggaauguuuguaucagacacuccaggagaaagaaauccauaugaaaacaucuuauauaaaguauguuuaucgggaaauggauggccauacauagcaucaaggacaucaaucguagguagagcaugggaaaauaccguuguugaucuagaaucaaauaaaaaucaacccaaaguagguaacaacggauccaauaaaaugcuacaaucaucaggauuugcuacaggauuaacauauagucaacuaaugacauuaagagacagcaugcuacaauuagaucccacagcaaaaacuuggauugauauagaagguagaccagaagauccaguugaacuugcacucuuccaaccaucaagcggauguuauauacacuuuuucagagagccaacagaucuaaaacaauucaaacaagacgccaaauacagccauggaauagauguaaacgacuuauucagugcacaaccugguuuaacaucagccguauuagaagcauuaccaagaaacaugguacuaacaugucaaggaagcgaugacauaagaaaacuauuagacagucaagauagaaaagacauaaaacuaauagauaucucacuaagcaaagcagacgccagaaaauucgaaaaugauguaugggaccaauucaaagacuugugccauaugcauacaggaauaguaguagaaaagaaaaagaaaggaggaaaacaagaaaugacaccacacugugcucuacuugacuguauaauguucgaugcagcuguaagcggaggauuaaauguaccaacucuacgagccguacuaccgacugacaugguauuccgaacaauaacgacaaaaguaguauuauaaggacuagugcaucacauuuaaaagcaucucagccuaccaugagaauaagagaaagaaaaugaagaucaauagcuuauucaucucuuuuucuuuuucguugguguaaagccaacacccugucuaaaaaacauaaauuucuuuaaucauuuugccucuuuucucugugcuucaauuaauaaaaaauggaaagaaccuagaucuaaaaaaaaaaaaaaaaaaaaaaaaaaaaaaaaaaaaaaaaaaaaaaaaaaaaaaaaaaaaaaaaugcaucccccccccccccccccccccccccccccccaaaggcucuuuucagagccaccagaauu

SEQ ID NO: 10833 - RNA, 2092 nt, Artificial Sequence
  mRNA product Design i-2 comprising derived and/or modified sequence from LASV(Pinneo-NIG-1969;Clade I)__AIT17837__NP (opt6)
ggggcgcugccuacggagguggcagccaucuccuucucggcaucaagcuuaccauguccaacucaaaagaaauuaaaaguuuuuuauggacacaaucacuaaggagagaacuuucaggcuauugcagcaacauaaaacuucaaguaguaaaagacgcccaagcauuacuccacggacuagacuuuagugaaguaucaaauguacaacgauuaaugagaaaacaaaaacgagacgaugccgauuuaaaaagauuaagagaucuaaaucaggcaguaaauaaccucgucgaacuaaaaucaacacaacagaagaacguauuaagaguaggaacacuaucaagcgaugaucucauaacauuagcugcagaucuagaaaaacucaaaucaaaagucauaagaacagaaagaccacuauccaguggaguauauaugggaaacuuaagcucacaacaacuagaucaaagacgagcucuauuaucaaugaucggaaugucaggaggcccacaaggaaauagaacagggggagacggaguaguaaggguaugggacguaaaaaacgcugaacuacuaaauaaucaauucggcacaaugccaaguuuaacucuagcaugccuaacaaaacaagggcaaguagacuuaaacgacgcaguacaagcuuuaacagaucuagguuuaauauauacagcaaaauaucccaacucaagcgacuuagacauguuaacacaaagucacccaauacugggaaugguagacacaaaaaaaaguucacuaaacauaaguggauauaauuuuucauuaggagcagcaguaaaagcaggugcauguaugcuagauggaggaaacauguuagaaacuauaaaaguauccccacaaacaauggauggaauauuaaaaucuauccuaaaaguaaaaagaagucuaggaauguucauaucagacacaccaggcgaaagaaaucccuacgaaaauauacuauacaaaauaugccucucaggagaaggauggccauauauagcaaguagaacuucaauaacaggaagagcaugggaaaauacauuagucgauuuagaaagcgauaacaaaccaccaaaauuaaauucggcagggucuaauaaaagucuacaagcagcaggauugaaugcagguuuaacguauagucaauuaaugacauuaaaagacugcaugcuccaauuagauccaucaucaaaaacauggauagauauagaaggcagaccagaagacccaguagaaaucgcccuguuucaacccaguucuggaugcuauauacacuuuuucagagaaccaacagaccuaaaacaauucaaacaagacgccaaauauucacacggcauagauguaacagacuuauuuucuacacaaccaggccuaacuagcgcaguuauugaagcacucccaagaaacaugguucuaacaugccaagguagugaugacauuaaaaaacuuuuagaaucacaaggaagaagagacauaaaacuaauagauaucagcuuaucaaaagcagacucacgaaaauucgaaaacgcuguaugggaccaauauaaagacuuaugccauaugcacacaggaguaguaguagaaaaaaaaaaaagaggaggaaaagaagaaauaacaccccauugugcauuacuagacugcauaauguucgaugcagcaacaacaggaucacuaaacauuacaacacuacgagcaguacuaccaagagauaugguauuccgaacaucaacuccaaaaguaguacuaugaggacuagugcaucacauuuaaaagcaucucagccuaccaugagaauaagagaaagaaaaugaagaucaauagcuuauucaucucuuuuucuuuuucguugguguaaagccaacacccugucuaaaaaacauaaauuucuuuaaucauuuugccucuuuucucugugcuucaauuaauaaaaaauggaaagaaccuagaucuaaaaaaaaaaaaaaaaaaaaaaaaaaaaaaaaaaaaaaaaaaaaaaaaaaaaaaaaaaaaaaaaugcaucccccccccccccccccccccccccccccccaaaggcucuuuucagagccaccagaauu

SEQ ID NO: 10834 - RNA, 2092 nt, Artificial Sequence
  mRNA product Design i-2 comprising derived and/or modified sequence from LASV(ISTH0009-NIG-2011;Clade II)__AIT17405__NP (opt6)
ggggcgcugccuacggagguggcagccaucuccuucucggcaucaagcuuaccaugucaguaucgaaagaaguuaaaucauucuuauggacucaaucacucagaagagaacuaucagguuauuguucaaacaucaaauuacaaguagucaaagacgcacaagcacuguuacacgggcucgacuuuucagaaguaucaaacguacaaagacuaaugcgcaaacagaaaagagacgauucagauuuaaaaagauuaagagaccuaaaucaagcaguuaauaacuuggucgaacuuaaaagcacucaacaaaaaucaauacuucgaguaggcacauuaacaucagaugaccuuuuaacacuagcagcagaucuagaaaaauuaaaaucaaaaguaauuaggacagaaagaccacuaucuucuggaguauacaugggaaacuuaucaacccaacaauuagaacaaagacgagcauuauuaaacaugauaggaaugguagguggagcacaaggaacacaacccggaagagacgguguagucagaguaugggaugucaaaaaccccgaccuacugaacaaucaauuuggaacaaugccuaguuuaaccuuagcaugccuaacaaaacaaggacaaguagaucuuaacgacgcaguauuagcacuaacagauuuaggauuaauauauacagcuaaauauccaaauaguagcgaccuagaccgauuaagccaaagccacccaauauuaaacaugguagauauaaagaaaucaucacuaaacauuucuggauacaauuucucuuuaggagccgcaguaaaagcaggagcauguauguuagacggaggaaacauguuagaaacuauaaaaguaacaccacaaaccauggacggaauauuaaaaucuauauuaaaaguaaaacgcucacuaggaauguuuguaagcgauacaccaggagaaagaaauccauaugaaaacauucuauacaaaauaugucuaaguggugacggauggccuuacauagcaaguagaacaucaauaguuggacgagcaugggaaaauacaacaguagauuuagaaucagauggaaaaccacaaaaaguaggauccgccggcucaaauaaaucuuuacaaagcgcaggcuuuccuacaggccuaacguauucucaacuaaugacauuaaaagacucaaugaugcaacuagacccaagugcuaaaacauggaucgacauugaagguagaccagaagacccaguagaaauagcauuauaccaaccuaugucuggauguuauauccacuucuuuagagaaccaacagauuuaaaacaauuuaaacaagacgcaaaauacucacacggaauagauguagcagacuuauuuccagcucaaccaggauuaacaagcgccguuauugaagcacuaccaagaaacaugguauuaacuugccaagguagcgacgacauaaaaagacuucuagacucacaaggacguagagacauuaaacuaaucgauauagcauuaaguaaagcagacagucgaagauuugaaaaugcuguaugggaccaauguaaggaucuaugucauaugcauacgggaguuguaguagaaaagaagaaaaggggaggaaaagaagaaauaacaccacacugugcauuaauggauuguauaauguacgacgcagccguaucaggaggccuaaacauaccaguauuaagagcaguacugccgagggauaugguauuuagaacaagcucacccaaagucguauuauaaggacuagugcaucacauuuaaaagcaucucagccuaccaugagaauaagagaaagaaaaugaagaucaauagcuuauucaucucuuuuucuuuuucguugguguaaagccaacacccugucuaaaaaacauaaauuucuuuaaucauuuugccucuuuucucugugcuucaauuaauaaaaaauggaaagaaccuagaucuaaaaaaaaaaaaaaaaaaaaaaaaaaaaaaaaaaaaaaaaaaaaaaaaaaaaaaaaaaaaaaaaugcaucccccccccccccccccccccccccccccccaaaggcucuuuucagagccaccagaauu

SEQ ID NO: 10835 - RNA, 2092 nt, Artificial Sequence
  mRNA product Design i-2 comprising derived and/or modified sequence from LASV(ISTH2010-NIG-2012;Clade II)__AIT17483__NP (opt6)
ggggcgcugccuacggagguggcagccaucuccuucucggcaucaagcuuaccaugucagcuaguaaagaaguaaagagcuucuuauggacucaaagucuucgacgagaacuaucagguuauugcagcaacauaaaacuucaaguaguaaaagacgcacaagcacuauuacacggauuagacuucucagaaguaucaaauguacaaagacuaaugagaaaacagaaaagagacgacagcgaucuaaaaagauuaagagauuuaaaucaagcuguuaauaauuuaguugaacuaaaaagcacacaacaaaaaucaauauuaagaguaggaacacuaacaucagaugacuuacuaacauuagcagccgacuuagaaaaacuaaaaucaaaaguaauaagaacagaaagaccucuaucaagcggcguuuacaugggaaacuuaucaacccaacaacuagaacaaagacgagcauuauuaaaccuaauaggaaugguagguggugcacaaggaacacaaccaggaagagacggcguaguuagaguaugggacgucaaaaacccagaucuacuuaacaaccaauucggaacaaugccauccuuaacucuagcaugcuuaacaaaacaaggacaaguagaccuaaacgaugcaguauuagcucuuacagacuuaggacuaauauacacugcuaaauauccaaauucaucagauuuggacagacuaucacaaucacauccaauacuaaacauggucgauacuaagaaaaguucacuaaauauuucuggauucaauuuuucauuaggagcagccguaaaagccggagcauguaugcuagaugguggaaauaugcuagaaacaauaaaaguaacaccacaaaccauggauggaauauuaaaauccauacuaaaaguaaagaaauccuuaggaauguuuguaucagacacuccaggagaaagaaaucccuacgaaaacauucuuuacaaaauaugucuuucaggagacggcuggcccuauauagcuucaagaacaucaauaguagguagagcuugggaaaacacaacuguagaccuugaaucugacgguaaaccacauaaaguagguacagcaggaucaaacaaaaguuuacaaagugcaggauuuccaacuggacucacauacagucaacuaaugacccuaaaagacucaaugaugcaauuagauccaucagcaaaaacauggauagauaucgaaggucgaccugaagacccaguagaaaucgcguuauaucaaccaaugaguggauguuacauacacuucuucagggaaccaacggauuuaaaacaauuuaaacaagacgcuaaauacagccacggaauugacguugcagaccuuuuuccagcacaaccaggccuaacaucagcaguuauagaagcacuaccaagaaauaugguauuaacuugucaaggaucggaugacaucaaaagacuacuagacucucaggguagaagggauauaaaauuaauagauauagcacuaucuaaagcagacucaagaagauuugaaaaugcuguuugggaccaaugcaaagaccuaugccauaugcauacaggagucguaguagagaaaaagaaaagaggaggaaaagaagaaauaacaccacauugugcauuaauggauuguaucauguaugaugccgcgguaagcggaggacuaaacauaccaguauuaagagcuguauuaccuagagauaugguauucagaacaucaucgccaaaaguaguacuauaaggacuagugcaucacauuuaaaagcaucucagccuaccaugagaauaagagaaagaaaaugaagaucaauagcuuauucaucucuuuuucuuuuucguugguguaaagccaacacccugucuaaaaaacauaaauuucuuuaaucauuuugccucuuuucucugugcuucaauuaauaaaaaauggaaagaaccuagaucuaaaaaaaaaaaaaaaaaaaaaaaaaaaaaaaaaaaaaaaaaaaaaaaaaaaaaaaaaaaaaaaaugcaucccccccccccccccccccccccccccccccaaaggcucuuuucagagccaccagaauu

SEQ ID NO: 10836 - RNA, 2092 nt, Artificial Sequence
  mRNA product Design i-2 comprising derived and/or modified sequence from LASV(Lassa virus/H.sapiens-wt/NGA/2015/ISTH_0543;Clade II)__AVO03640__NP (opt6)
ggggcgcugccuacggagguggcagccaucuccuucucggcaucaagcuuaccaugagugcaucaaaagaaguaaaaagcuuucuauggacacaaucauuaagaagagaauuaaguggauauugcucaaauauaaaauuacaagucguaaaagaugcacaagcacuacuacacggauuagauuucucagaaguaagcaauguacagcgacucaugagaaaacaaaaaagagacgacucagacuuaaaaagacuaagagaucucaaccaagccguaaauaauuuagucgaacuaaaaagcacucaacaaaaaucaauauuaagaguaggcacacuaacaagcgacgacuuacuaacacucgcagcagaucuugaaaaacuaaaaagcaaaguaauaagaacagaaagaccauuauccucagguguauacauggguaaccuuucaacacaacaacuagaacaaagaagagcacuacucaacaugauaggaaugguaggcggagcacaaggaacacaaccaggaagagacggaguaguaagaguaugggauguaaagaacccagauuuacuuaauaaccaauuuggaacaaugccaucauuaacauuagcaugcuuaacuaaacaaggccaaguagacuuaaaugaugcaguacuggcauuaacagacuuagguuuaaucuauacagcaaaauauccaaauucaucagauuuagacagacucucacaaucacacccaauuuuaaacauggucgacacaaaaaaaucaucucuaaauauuucaggauauaacuucucauuaggagcagcgguaaaagcaggagcauguaugcuagacgguggaaauauguuagaaacaauaaaaguaacaccacaaacaauggauggaauacugaaaucaauacuuaaaguaaaaaagagccuaggcauguucguaucagauacaccaggagaaaggaacccauaugaaaacauacuuuacaaaauaugcuuaucuggugacggauggccauauauagcuucaagaacaucuauaguagggagagcaugggaaaauaccacaguagaucucgaaucugacggaaaaccccaaaaaguagguucagcagguucaaauaaaaguuuacaaucagcuggauuuccaacaggacuaacuuauucacaacuaaugacauuaaaagauucaaugaugcaauuagauccaucagcaaaaacauggauagauaucgagggaagaccugaggauccuguagaaauagcauuauaucaacccaugucagguugcuauauacauuuuuucagagaaccaacagaucuaaaacaguucaaacaagacgcaaaauacagccacggaauagacguagcagaccuauuuccagcacaaccaggacuaacaagcgcuguaauagaggcacuaccuagaaacauggucuuaacaugccaaggaagugacgacauuaaaagacuacuagauagccaagguagaaaagacauuaaacuuauagacaucgcauuaucaaaagcagacucgagaagauuugagaacgcaguaugggaccaaugcaaagauuuaugccauaugcauaccgguguaguaguugagaaaaaaaaaagaggagguaaagaagaaauaacgccacacugugcacuaauggauugcauaauguaugacgcagcaguaucaggaggauuaaacauacccguauuaagagccguacuaccacgcgauaugguuuucagaacaagcucgcccaaaguaguauuauaaggacuagugcaucacauuuaaaagcaucucagccuaccaugagaauaagagaaagaaaaugaagaucaauagcuuauucaucucuuuuucuuuuucguugguguaaagccaacacccugucuaaaaaacauaaauuucuuuaaucauuuugccucuuuucucugugcuucaauuaauaaaaaauggaaagaaccuagaucuaaaaaaaaaaaaaaaaaaaaaaaaaaaaaaaaaaaaaaaaaaaaaaaaaaaaaaaaaaaaaaaaugcaucccccccccccccccccccccccccccccccaaaggcucuuuucagagccaccagaauu

SEQ ID NO: 10837 - RNA, 2092 nt, Artificial Sequence
  mRNA product Design i-2 comprising derived and/or modified sequence from LASV(Lassa virus/H.sapiens-wt/NGA/2016/ISTH_0009;Clade II)__AVO03572__NP (opt6)
ggggcgcugccuacggagguggcagccaucuccuucucggcaucaagcuuaccaugucugcaagcaaagaaguuaaaucuuuuuuauggacacaaucauuaagaagagaauuaagcggauacuguagcaacauaaaauuacaaguaguaaaagaugcacaagcacuguuacauggauuagauuucagcgaaguuucaaacguacaaagacuaaugaggaaacaaaaaagagaugauagcgaucuaaaacgguuaagagaucuaaaucaagcaguaaauaauuuaguagaauuaaaaagcacacaacaaaaaaguauauuaagaguaggaacccuaacaucagaugauuuauuaacguuagcagcagaccuugaaaaacuuaaaucuaaaguaauaagaacagaaagaccauuaagcaguggagucuauaugggaaaucuaagcacacaacaauuagaacaacgucgagcacuauuaaauaugaucggaaugguaggaggagcacaaggcacacaaccaggaagagacgggguaguaagagucugggacguaaaaaauccagauuugcuaaacaaccaauucggaacaaugccgagucucacauuggcuugcuuaacaaaacaaggucaaguagaccuaaacgacgcaguucuagcacuaacagaccuaggacuuauuuauacagcuaaauauccaaauucuucagacuuagauagacuaucccaaucccaccccauacugaauaugguagauacaaaaaaaucaucauugaauauuucaggcuauaauuucagucuaggagcagcaguaaaagcuggagccuguaugcuagacggugguaauaugcuagaaacaauaaaaguaacaccccaaacaauggacggaauacuaaaaucaaucuuaaaaguuaaaaaaagccuuggaauguucguaagugauaccccaggcgaaagaaacccuuacgaaaauauacuauauaaaauaugucuaucaggagacggauggccuuauauagccuccagaaccucuauaguuggaagggcaugggaaaauacaacaguagaucucgaaucagacggaaaaccacaaaaaguagggagcgccgguaguaacaagagucuacaaagcgcuggauucccaacaggcuuaacauauagucaauuaaugacuuuaaaagauaguaugaugcaacuagauccauccgccaaaaccuggauagauauagaaggaagaccagaagacccaguagaaauagcacuauaucaaccuaugucaggaugcuacauacacuuuuucagagaaccaacagauuuaaaacaauucaaacaggacgcaaaauauucacacggcauugauguagcagauuuauuuccagcacaaccaggauuaacaucagcaguaauagaagcucuaccaagaaacaugguacuaacaugucaaggaucagaugacauaaaaagacuauuagacagccaaggacgaagagauauaaaauuaauagauauagcuuuaagcaaagcugacucaagaagauucgaaaacgcgguaugggaccaaugcaaagaccugugccauaugcacaccggaguaguaguagaaaaaaaaaaaagaggaggaaaagaagaaauaacaccacauugugcuuuaauggauuguauaauguaugacgcagcaguaucaggaggacuaaauauuccuguacuacgagcuguacuaccacgagacaugguauuuagaacaagcucuccgaaaguaguacuauaaggacuagugcaucacauuuaaaagcaucucagccuaccaugagaauaagagaaagaaaaugaagaucaauagcuuauucaucucuuuuucuuuuucguugguguaaagccaacacccugucuaaaaaacauaaauuucuuuaaucauuuugccucuuuucucugugcuucaauuaauaaaaaauggaaagaaccuagaucuaaaaaaaaaaaaaaaaaaaaaaaaaaaaaaaaaaaaaaaaaaaaaaaaaaaaaaaaaaaaaaaaugcaucccccccccccccccccccccccccccccccaaaggcucuuuucagagccaccagaauu

SEQ ID NO: 10838 - RNA, 2092 nt, Artificial Sequence
  mRNA product Design i-2 comprising derived and/or modified sequence from LASV(Lassa virus/H.sapiens-wt/NGA/2016/ISTH_0017;Clade II)__AVO03568__NP (opt6)
ggggcgcugccuacggagguggcagccaucuccuucucggcaucaagcuuaccaugucagccaguaaagaaguaaaaagcuuucuauggacacaaaguuuacgaagagaauuaucuggauacugcaguucaauuaaacuucaaguaguaaaagaugcucaagcauuacuacacggacuggauuucucagaaguaagcaauguacaaagacuaaugcgcaaacaaaaacgagacgauucagaucuaaaaagauuaagagaccuaaaccaagcaguaaauaacuuaguagagcuaaaaucaacacaacaaaaaucaauauugagaguaggaacauuaacuucagaugaccuacuuacuuuagcagcugaucuagaaaaauuaaaaucaaaaguaauaagaacagaaagaccucuuucaucaggaguauauaugggaaacuuaucuacacaacaacuagaacaaagaagagcauuauuaaacaugauagguauggccggcggagcacaagguacucaaccaggaagagauggagucgugcgaguaugggauguaaagaauccugauuuacuuaauaaucaauucggaaccaugcccagucucacacuagcgugcuuaacaaaacaaggucaaguagaccuaaaugaugcaguacuugcacuaaccgaucuaggauuaauauauacagcaaaauacccaaauucaucagacuuagacagauuaagccaaucacaccccauuuuaaauaugguugacacaaaaaaaucaagcuuaaacaucucaggauacaacuuuagccuaggagcagcuguuaaagcaggagcaugcaugcuagacggaggaaauauguuagaaacaauaaaaguaaccccccaaacaauggacgguauauuaaaaaguauccuaaaaguaaaaagaagcuuaggaauguucguaucagaugcaccaggagaaagaaacccauacgaaaauauacuuuauaaaauaugccucaguggcgauggauggccauauauagcaagcagaacuucgauaguaggaagagcaugggaaaauaccacaguagaucuagaaagcgaugggaaaccacaaaaaguaggagcaacaggaucaaacaaaaguuuacaaucagcagguuuuccaaccggacuaaccuauucacaauuaaugacauuaaaagauagcaugaugcaacuagaccccucagcaaaaacauggauagauauagaaggcagacccgaagacccaguagaaguagcucuauaucaaccaguaagcggaugcuauauacacuuuuucagagaaccgacagauuuaaaacaauucaaacaagacgcaaaauauucacaugguauugauguagcagaucuuuucccagcacaaccaggcuuaacaucagcaguaauagaagcacuaccaagaaacaugguauuaacaugccagggaucagacgacauuaaaaaacuauuagauucucaaggccgaaaagacauaaaacuaaucgauauagcucuaaguaaagccgauuccagaagauucgaaaaugcagucugggaccaaugcaaagauuuaugccacaugcauacaggaguaguugucgaaaaaaaaaaaagaggaggaaaagaagagauaacaccccacugugccuuaauggacuguauaauguacgacgcagcagucucaggaggauuaaauauaccaguacuaagagccguuuuaccuagagauaugguauucagaacaagcagcccuaaaguagucuuauaaggacuagugcaucacauuuaaaagcaucucagccuaccaugagaauaagagaaagaaaaugaagaucaauagcuuauucaucucuuuuucuuuuucguugguguaaagccaacacccugucuaaaaaacauaaauuucuuuaaucauuuugccucuuuucucugugcuucaauuaauaaaaaauggaaagaaccuagaucuaaaaaaaaaaaaaaaaaaaaaaaaaaaaaaaaaaaaaaaaaaaaaaaaaaaaaaaaaaaaaaaaugcaucccccccccccccccccccccccccccccccaaaggcucuuuucagagccaccagaauu

SEQ ID NO: 10839 - RNA, 2092 nt, Artificial Sequence
  mRNA product Design i-2 comprising derived and/or modified sequence from LASV(Lassa virus/H.sapiens-wt/NGA/2018/ISTH_0959;Clade II)__AVV65100__NP (opt6)
ggggcgcugccuacggagguggcagccaucuccuucucggcaucaagcuuaccaugagcgcaagcaaagaaguaaaauccuuucuuuggacacaguccuuaagaagagaacuaucagguuacuguucgaacauaaaauuacaaguuguaaaagacgcacaagcucuacuacauggucucgauuuuuccgaagucagcaauguacaaagauuaaugagaaaacaaaaaagggaugacucagacuugaaaagacuaagagauuuaaaccaagcaguaaauaacuuaguagaauuaaaaucaacacaacaaaaaucaauauuaagaguagguacucuaaccucagaugauuuauuaacacuagcggcagaccuagaaaaacuaaaaucaaaaguuauucgaacagaacgaccucuaucaucaggcguauacauggguaacuuaaguacucaacaacuagaacaaagaagagcauuacuaaauuuaauagguaugguaggaggugcacagggaacacaaccaggcagggacggaguuguaagaguaugggauguaaagaauccugauuuacuaaauaaucaauucggaacuaugccaucacuaacacuagccugccuaacaaaacaaggucaaguagacuuaaaugacgucguacuggcccuaacagaccuaggauuaaucuauacagcuaaauauccaaauucaucagacuuagacagacuaucacaaucucacccaauauuaaacaugguagauacaaaaaaauccagccuuaacauaucagguuucaauuuuaguuuaggagcagcuguaaaagcaggcgcaugcaugcuagacggagguaauauguuggaaacaauaaaaguaacuccccaaaccauggacggaauacuaaaaucaauauuaaaagugaaaaaaagccuagggauguuugucagcgauacuccaggagaaagaaauccauaugaaaauauucuauacaaaauauguuuaucaggcgacggcuggccauauauagcaucaagaacaucaauaguaggaagagcaugggaaaauacaaccguagaucuagaaagcgauggaaaaccacauaaaguagguacagccggaucaaacaaaucucuacaaucagcuggauuuccaacgggacuuacauacagccaacuaaugacacuuaaagacaguaugaugcaacuggaucccucugccaaaacauggauugacaucgaaggacguccagaagacccagucgaaaucgcacuauaucaaccgaugucuggauguuacauucauuuuuuuagggaaccaacggauuuaaaacaauuuaaacaagacgccaaauauucacauggaauagacgucgccgaccuauucccugcucaacccggauuaacaucggcuguaauugaagcguuaccacguaacaugguauuaacaugccaaggaagcgaugacauuaaaagguuauuagauagucaaggaagaaaagauauaaaauuaauagauauagcacuaucaaaaacggacucacgaagauucgaaaacgcuguaugggaccagugcaaagaucuaugucauaugcauacaggaguaguuguagaaaaaaaaaaaagaggaggaaaagaagaaauaacaccacacugugcuuuaauggauugcauuauguaugaugcagcaguauccgguggccuaaacauaccaguauuacgagcaguucuaccaagagauaugguauucagaacuucaucaccaaaaguaguacuauaaggacuagugcaucacauuuaaaagcaucucagccuaccaugagaauaagagaaagaaaaugaagaucaauagcuuauucaucucuuuuucuuuuucguugguguaaagccaacacccugucuaaaaaacauaaauuucuuuaaucauuuugccucuuuucucugugcuucaauuaauaaaaaauggaaagaaccuagaucuaaaaaaaaaaaaaaaaaaaaaaaaaaaaaaaaaaaaaaaaaaaaaaaaaaaaaaaaaaaaaaaaugcaucccccccccccccccccccccccccccccccaaaggcucuuuucagagccaccagaauu

SEQ ID NO: 10840 - RNA, 2092 nt, Artificial Sequence
  mRNA product Design i-2 comprising derived and/or modified sequence from LASV(LASV003-NIG-2008;Clade II)__AIT17581__NP (opt6)
ggggcgcugccuacggagguggcagccaucuccuucucggcaucaagcuuaccaugucagcaucaaaagaaguaaaaucuuuccucuggacacaaucacuaagaagagaauuaucaggcuauuguucuagcauaaaacuacaaguaguuaaagacgcacaagcacuauuacauggacuagauuucagugaaguaagcaauguccaaagauuaaugagaaaacaaaaaagagacgauucagacuuaaaaagauuacgagaucuaaaucaagcagucaauaaucuaguugagcuaaaaagcacacagcaaaaaucaguacuaagaguaggaacacugacgucagacgaccuacuaacacuagcagcagaucuugaaaaacuaaaaucaaaaguaauaagaacagaaagaccauuaaguucaggaguauauauggguaaccuaagcgcacaacaacuagaacaaagaagaacucuacucaacaugaucggaauggucgguggcgcacaaggaacacaaccaggaagagaugguguaguucgaguaugggacgucaaaaauccagacuuauuaaacaaccaauuuggaacaaugccuucacuaaccuuagcaugucuuacaaaacaaggacaaguagaucuaaacgauguuguacuagcacuaacagacuuagggcuaauauauacagcaaaauauccaaacucaucugauuuagaccgucucucucaaucacacccaauauuaaguaugguagacaccaaaaaauccucacuaaauauaucaggauauaacuucagucuaggagcagcaguaaaagccggagcauguaugcuagacggaggaaacauguuagaaacaauaaaaguaacaccucaaacaauggauggaauccuaaaaucaauauuaaaaguaaaaaaaaguuuaggaauguucguaucagauacacccggcgaacgaaacccauaugaaaauauacuauacaaaaucugucucaguggagaugguuggccauacauagcaucacgaacuucuauaguaggacgugcaugggaaaauaccacagucgaccuagaaagcgauggaaaaccacaaaaaguagguacugcuggaucaaauaaaaguuuacaaucagcaggcuuuccuacuggacuaacuuauagccaauuaaugacccuaaaagauucuaugaugcaauuagauccgagcgcaaaaaccuggauagauauagagggaagaccagaagacccaguagaaauagcucuauaccaaccaaugagcggauguuacauccauuuuuuuagagaaccaacagaccuaaaacaauuuaaacaagaugcaaaauauagccauggaauagauguaaccgaucuuuuuccagcccaaccaggcuuaacaucugcuguuaucgaagcuuuaccaagaaacaugguauuaaccugccaaggaucagacgacauaaaaagauuacuagauucacaaggacgcagagauauaaaacugauagacauagcacuuagcaaagccgauucucguagauucgaaaaugcaguaugggaccaauguaaagacuuaugccacaugcacacaggcguuguaguagaaaaaaaaaagcgaggagguaaagaagaaauaacaccccauugugcauuaauggacugcauuauguaugacgcggccguuagcggagguuuaaauauaccaguauuacgugcaguacuaccaagagacaugguuuucagaacaucaucaccaaaaguaguacuauaaggacuagugcaucacauuuaaaagcaucucagccuaccaugagaauaagagaaagaaaaugaagaucaauagcuuauucaucucuuuuucuuuuucguugguguaaagccaacacccugucuaaaaaacauaaauuucuuuaaucauuuugccucuuuucucugugcuucaauuaauaaaaaauggaaagaaccuagaucuaaaaaaaaaaaaaaaaaaaaaaaaaaaaaaaaaaaaaaaaaaaaaaaaaaaaaaaaaaaaaaaaugcaucccccccccccccccccccccccccccccccaaaggcucuuuucagagccaccagaauu

SEQ ID NO: 10841 - RNA, 2092 nt, Artificial Sequence
  mRNA product Design i-2 comprising derived and/or modified sequence from LASV(LASV035-NIG-2009;Clade II)__AIT17589__NP (opt6)
ggggcgcugccuacggagguggcagccaucuccuucucggcaucaagcuuaccaugagugccaguaaagaaguaaaaucauucuuguggacacaaaguuuaagaagagaacuuucaggauacugcucaagcauaaaacuacaaguaguaaaagaugcacaagcacuacuacauggacuagacuucagugaaguaucaaacguacaaagauuaaugagaaaacagaaaagagaugacucagaucuaaaaagauuacgagauuugaaucaagcaguuaauaacuuaguugaauuaaaaaguacacaacaaaaaucgauacuacgaguaggaacucuaacaucagaugaccuuuuaacacuagcagcugauuuagaaaaauuaaaaucaaaaguaauaagaacagaaagaccauuaagcucaggaguauauaugggaaauuugagugcacaacaacuagaacaaagacgagcucuccuaaauaugauaggaaugguuggaggagcacaagguacacaaccaggaagagacggaguaguuaggguaugggaugucaaaaacccugaucuauuaaacaaccaauuuggcacaaugccaagucuaacucuagcaugccugacuaaacagggacaaguagacuuaaacgaugcaguauuagcucuaacagacuuagguuuaauauauacagcaaaauauccaaauaguucugauuuagacagacuaucccaaucacacccaauucucaacaugguagauacaaagaaauccagucugaauauuucaggauacaauuucaguuuaggagcagccguaaaagcaggagccuguauguuagacggugguaauaugcuagaaacaauaaaaguaacaccccaaacaauggacggaauacuuaaaucaauauugaaaguaaaaagaucauuaggaauguuuguaagcgauaccccaggagaaagaaauccguaugaaaauauacuuuauaaaauaugucuaucaggagacggauggcccuauauagcaucaagaaccucaauagucggcagagcaugggaaaacacuacaguugauuuagaaucagauggaaaaccacaaaaaguaggaacaacaggaucaaacaaaucacuacaaucagcaggauucccuacaggucugacauacucccaacuuaugacauuaaaagacucaaugaugcaacuggauccaucagcuaaaacauggauagauauagaaggcagaccagaggacccgguagaaauagcucuauaucaaccaaugucagguuguuacauucacuucuucagagaaccaacagaucuaaaacaauucaaacaagacgccaaauauucacauggaauagauguagcagauuuauuuccagcacaacccggauuaacaagcgcugucauagaagcucucccaagaaacaugguauuaacaugucaaggcagcgaugauauuaagaaauuacuagacucacaaggacgaagagacauaaaacuaauagauauagcauugaguaaagccgauucaagaaaauuugaaaaugcaguaugggaucaauguaaagaucuaugucauaugcacacuggaguugugguugaaaagaagaaaagagguggaaaagaagaaauaacaccacauugugcauuaauggauugcauuauguaugacgcugcaguaucaggaggacuaaacauaccaguccuuagagcaguacucccaagagauaugguauuuagaacuucaucaccaaaaguaguauuauaaggacuagugcaucacauuuaaaagcaucucagccuaccaugagaauaagagaaagaaaaugaagaucaauagcuuauucaucucuuuuucuuuuucguugguguaaagccaacacccugucuaaaaaacauaaauuucuuuaaucauuuugccucuuuucucugugcuucaauuaauaaaaaauggaaagaaccuagaucuaaaaaaaaaaaaaaaaaaaaaaaaaaaaaaaaaaaaaaaaaaaaaaaaaaaaaaaaaaaaaaaaugcaucccccccccccccccccccccccccccccccaaaggcucuuuucagagccaccagaauu

SEQ ID NO: 10842 - RNA, 2092 nt, Artificial Sequence
  mRNA product Design i-2 comprising derived and/or modified sequence from LASV(LASV1000-NIG-2009;Clade II)__AIT17783__NP (opt6)
ggggcgcugccuacggagguggcagccaucuccuucucggcaucaagcuuaccaugagcgcaucaaaagaaguaaaauccuuccuauggacccaaagccuaagaagagaauuaucaggguacuguucaaauaucaaauuacaaguaguaaaagacgcacaagcauuauuacauggccuagauuucucagaaguauccaauguucaaagacuaaugcguaaacaaaaaagagacgacucagaccuaaaaagauuaagagaucuuaaccaagcaguaaauaauuuaguggaauuaaaaagcacucaacaaaaaaguauccuaagaguaggaacucuaacuagcgacgaucuucuaacauuagcagccgaucucgaaaaacuaaaaucgaaaguaauaagaacugaaagaccauuaaguagcgguguauauaugggcaaccuaagcacacaacaacuagaacaaagaagagcauuacuaaacaugauaggaaugguaggaggagcacaaggaacacaaccuggaagagacggaguaguaagagucugggacguaaaaaacccagacuuacuaaauaaucaauucggaacgaugccaagucuuacacuagcaugucuuacaaaacaaggucaaguugaccuaaacgauguaguucuagcacuaacagaucugggauuaauuuauacagccaaauaccccaacagcagugaccuugaccggcuaagucaaucacacccaauauuaaacauggucgauacaaaaaaaucaucucuaaacauaaguggauacaacuucaguuuaggagcugccguaaaagcaggugcauguaugcuagacggaggaaacauguuagaaacaauaaaagucacaccacaaacaauggaugggauauuaaaaagcaucuuaaaaguaaaaaaaucccuuggaauguucguaucagacacuccuggagaaagaaaucccuacgaaaauauacuauacaaaauaugucuaagcggcgauggauggccauauaucgcuucaagaacuucuauaguaggaagagcuugggaaaauacaacuguagaucucgaaagugacggaaaaccacaaaaaguuggaacagcaggaagcaauaaaucauuacaauccgcaggauuuccaacaggacugacauauagucaacuaaugacucuaaaagauaguaugaugcaauuagauccaucagcaaaaacauggauagacaucgaagguagaccagaagacccaguagaaauagcucuauaucaaccaguaaguggaugcuacauacacuucuucagggaaccaacagauuuaaaacaauuuaaacaagacgcuaaauauagucacggaauagacguagcagaccuauuuccagcacaaccaggccuaacaucugccguuauagaagcacuaccuagaaauaugguacucacuugccaaggaucagaugauaucaaaagacuauuagacucacaaggacgaagagacauaaaacuaauugacauagcauuaagcaaagcagauucaagaagauuugaaaacgcuguaugggaucaaugcaaagaccucugucacaugcauacaggaguagucguagaaaaaaaaaaaagaggagguaaagaggaaauaacaccgcacugugcauuaauggauugcauaauguaugacgcggcaguaucagguggauuaaauauaccuguauuaagagcagucuuaccacgagauaugguauucagaacuucgaguccuaaaguaguacuuuaaggacuagugcaucacauuuaaaagcaucucagccuaccaugagaauaagagaaagaaaaugaagaucaauagcuuauucaucucuuuuucuuuuucguugguguaaagccaacacccugucuaaaaaacauaaauuucuuuaaucauuuugccucuuuucucugugcuucaauuaauaaaaaauggaaagaaccuagaucuaaaaaaaaaaaaaaaaaaaaaaaaaaaaaaaaaaaaaaaaaaaaaaaaaaaaaaaaaaaaaaaaugcaucccccccccccccccccccccccccccccccaaaggcucuuuucagagccaccagaauu

SEQ ID NO: 10843 - RNA, 2092 nt, Artificial Sequence
  mRNA product Design i-2 comprising derived and/or modified sequence from LASV(LASV221-NIG-2010;Clade II)__AIT17625__NP (opt6)
ggggcgcugccuacggagguggcagccaucuccuucucggcaucaagcuuaccaugucagcaucaaaagaaguaaaaagcuuccuuuggacacaaucccuaagacgagaauuaucaggauacuguucaucaauaaaacuacaaguaguuaaagacgcucaagcauuauuacauggguuagacuuuuccgaagucuccaauguacagagacuaaugagaaaacaaagaagagaugauuccgauuuaaaacgacuaagagauuuaaaccaagcagucaauaaccucguugaacuaaaaaguacacaacaaaaaaguauauuaagaguaggcacacuaacaagcgaugaccuacucacucuagcagcagaccuagaaaaauuaaaaucaaaaguaauaagaacagaaagaccacuaaguucagguguauauaugggaaauuuaucaacacaacaacuagaacaacgaagagcuuuguuaaauaugauagguaugguaggaggagcacagggaacacaaccgggaagagacgguguagugagaguaugggacguaaaaaacccggauuuacuaaacaaccaauucggaacaaugccaagccuaacucuagcaugcuuaacaaaacaaggacaagucgacuuaaacgaugcuguacuagcacuaacagaccuaggauuaauauacacagcaaaauacccaaauagcagugauuuagacagacuaagccaaagucacccuauccuuaauaugguagauacaaaaaaaagcucuuuaaacauauccgguuacaacuucagucucggagcagcagucaaagccggagcauguauguuagauggcggaaacaugcuugaaacaauaaaaguuacaccacaaaccgucgacggcauccuaaaaucaauauuaaagguuaaaagaagucuaggaauguucguaucagacacaccaggugaaagaaauccauacgaaaauauacuguauaaaauaugucuaaguggagauggauggccuuauauagcaucacgaacaucaauagucggacgagcgugggaaaacacuacaguugaucuagaaagugauggaaaaccacaaaaaguuggaacugcgggaucaaauaaaucauuacaaucagcuggauuuccgacaggacuaacauauagccaauuaaugacacuaaaagauagcaugaugcaauuagaucccucagcaaaaacauggauagacaucgaaggaagaccagaagaccccguugaaauagcauuauaucaaccaaugucaggcuguuauauacauuucuuucgcgaaccaacagaccuaaaacaauuuaaacaagaugcaaaauauagucacggaauagacguagcagaucuauucccagcacaaccuggauuaacaucagcaguaaucgaagcccuuccaagaaauauggucuuaacuugucaaggaagcgaugacauaaaaagacuccuugacucacaaggaagaagagacauaaagcucaucgauauugcucuaucuaaagccgauucaagaaaauucgaaaaugccguaugggaccaauguaaagacuuaugccauaugcauacaggaguaguuguagaaaaaaaaaaaagagguggaaaagaagaaauaacaccacacugcgcucucauggauugcauaauguaugacgcagcaguaucaggaggccuaaacaucccaguauuaagagcuguucuaccaagagauaugguauucagaacaaguaguccaaaaguaguacuuuaaggacuagugcaucacauuuaaaagcaucucagccuaccaugagaauaagagaaagaaaaugaagaucaauagcuuauucaucucuuuuucuuuuucguugguguaaagccaacacccugucuaaaaaacauaaauuucuuuaaucauuuugccucuuuucucugugcuucaauuaauaaaaaauggaaagaaccuagaucuaaaaaaaaaaaaaaaaaaaaaaaaaaaaaaaaaaaaaaaaaaaaaaaaaaaaaaaaaaaaaaaaugcaucccccccccccccccccccccccccccccccaaaggcucuuuucagagccaccagaauu

SEQ ID NO: 10844 - RNA, 2092 nt, Artificial Sequence
  mRNA product Design i-2 comprising derived and/or modified sequence from LASV(LASV237-NIG-2010;Clade II)__AIT17639__NP (opt6)
ggggcgcugccuacggagguggcagccaucuccuucucggcaucaagcuuaccaugucggcuagcaaagaagugaaauccuuucucuggacacaaagucuacgaagagaauuaucuggauauuguaguaauauaaaacuacaaguagucaaagacgcacaagcauuauuacauggauuagacuucagugaagucucuaacguacaaagauuaaugagaaaacagaaaagagacgacucagaccucaaaagacuuagagaccucaaccaagcaguaaauaacuuaguagaacuaaaaucaacgcaacaaaaaucaauauuaagagucggcacacuaacauccgacgauuugcuuaccuuagcagcagaccuagaaaaauuaaaaucuaaaguuauaagaacagaacgaccacuaagcucaggaguuuauaugggaaauuuaaguacgcaacaacuagaacaacguagagcauuacuuaacaugaucgguaugguaggaggagcacaaggaacucaaccaggaagagacgguguuguaagagucugggaugucaaaaacccugaucuucuaaacaaccaguuuggaacaaugccuucuuuaacauuagcauguuuaacuaaacaaggacaaguagacuuaaaugaugcaguacuagcacucacagaccuaggcuuaaucuacacagcuaaauauccuaacucaucagauuuagacagacuaagucaaucacacccuauauuaaacaugguagacauaaagaaaagcucauuaaacauaaguggauauaacuucagccucggagcugcaguuaaagcaggagcauguauguuagauggagguaauaugcuagaaacaauaaaaguaacaccacaaacaauggacggaauacuuaaaaguauauuaaaagucaaaaggagccuaggaauguucguuagugacacaccaggagaaagaaaucccuacgaaaauauacuauacaaaauaugucucucuggagauggauggccauauauagcaaguagaacaucaauaguaggucgagcaugggaaaauacaacugucgaucuugaaucagacggcaaaccccaaaaaguaggaucagcaggaaguaauaaaaguuuacaaucagcaggauuuccaacaggacucacauauagucaacuuaugacauuaaaagauucaaugaugcaacuugauccaucagcaaaaacauggauagauauugaaggacgaccggaagacccaguagaaauagcacuauaucaacccaugucugguuguuauauacacuuuuucagagaaccuacagaucuaaaacaauuuaagcaagacgcgaaauacucacauggcaucgacguugcagauuuauuuccagcacaaccuggauuaacaucagcaguaauagaagcauuaccaagaaacaugguauuaaccugucaaggcucagaugacauaaaaagacuauuagauucccaaggaagaagagacauaaaauuaauagacauagcacucucaaaagcggauucccgaagauucgaaaacgcagucugggaccaauguaaagauuuaugucacaugcacacaggaguaguaguagaaaagaagaaaagaggaggaaaagaagaaauaaccccucacugugcauuaauggacuguauaauguacgaugcagcaguaucagguggacuaaauauaccuguccuccgagccguauuaccaagagauaugguauucagaacaagcucuccaaaaguaguacuauaaggacuagugcaucacauuuaaaagcaucucagccuaccaugagaauaagagaaagaaaaugaagaucaauagcuuauucaucucuuuuucuuuuucguugguguaaagccaacacccugucuaaaaaacauaaauuucuuuaaucauuuugccucuuuucucugugcuucaauuaauaaaaaauggaaagaaccuagaucuaaaaaaaaaaaaaaaaaaaaaaaaaaaaaaaaaaaaaaaaaaaaaaaaaaaaaaaaaaaaaaaaugcaucccccccccccccccccccccccccccccccaaaggcucuuuucagagccaccagaauu

SEQ ID NO: 10845 - RNA, 2092 nt, Artificial Sequence
  mRNA product Design i-2 comprising derived and/or modified sequence from LASV(LASV253-NIG-2011;Clade II)__AIT17671__NP (opt6)
ggggcgcugccuacggagguggcagccaucuccuucucggcaucaagcuuaccaugagcgcaucuaaagaaguaaaaucuuucuuauggacacaaucacuaagaagagaacucucuggauauugcuccaguauuaaacuacaaguaguaaaagaugcgcaagcccucuuacauggacuugacuuuagugaaguaucaaauguucaaagacuuaugcguaaacaaaaaagagaugauucagauuuaaaaagauuacgagaccuaaaucaagcuguaaacaauuuaguagaauuaaaaagcacacaacaaaaaucaguauuaagaguaggaacauuaacaucagacgaccuacuaacacuagcugcagaccuagaaaaacuaaaaucaaaaguaauaagaacugaaagaccgcuaagcucaggaguauauaugggaaauuuaaguacacagcaauuagaacaaagacgagcacuuuuaaacaugauaggaaugguuggaggagcacaaggaacacaaccuggccgagacggaguaguuagaguaugggauguaaaaaauccagauuuauuaaauaaucaauucggaacuaugccaagucuaacacuagcaugucuaacaaaacaaggacaaguagaccuaaacgacgucguucuagcuuuaacagaccucggauuaaucuauacagccaaauauccaaauaguagcgaucuagauagacucucacaaucacaccccauacuaaauauggucgacaccaaaaaaucaucauuaaacauuucaggauacaauuuuucacuaggagcagcaguaaaagcaggagcgugcaugcuugaugggggaaauauguuagaaacaauaaaaguaacaccccaaacaauggacggcauacuaaaaucaauacuaaaaguaaaaaaaucuuuagguauguucguaucagauacaccuggagaacgaaauccguaugaaaauauacuauacaaaauaugucuaucaggagauggauggccauauaucgcaagucgaaccucaauaguuggaagagcaugggaaaauacaacaguagaucuagaaagcgacggaaaaccacaaaaagucggaacagcgggaucaaauaaaaguuuacaaucagcaggcuuuccaacaggacuuacauauucacaacuaaugacauugaaagauagcaugaugcaacuagauccaagugcaaaaacguggauagauauagaaggaaggcccgaagauccaguugaaaucgcacucuaccaaccaaugucaggaugcuacauccauuuuuucagagaaccaacagaucuaaagcaauucaaacaagacgcaaaauacucacacggaauagacgucacagaucuauucccagcacaaccaggucuuacuucugcaguaauagaagcauuaccgcgaaacaugguacuaacuugucaaggaagugacgacauaaaaagauuacuagacagccaaggaagaagagauauaaaauuaauagacauagcguuaucaaaagcagacuccagacgauuugaaaacgcaguaugggaucaaugcaaggauuuaugccauaugcauacaggagucguaguagaaaaaaaaaagcguggcggaaaagaagaaauaacaccccauugugcauuaauggauugcauaauguaugaugcagcaguauccggaggacucaacauaccaguccuaagagcaguccucccaagggauauggucuuuagaacauccucacccaaaguaguauuauaaggacuagugcaucacauuuaaaagcaucucagccuaccaugagaauaagagaaagaaaaugaagaucaauagcuuauucaucucuuuuucuuuuucguugguguaaagccaacacccugucuaaaaaacauaaauuucuuuaaucauuuugccucuuuucucugugcuucaauuaauaaaaaauggaaagaaccuagaucuaaaaaaaaaaaaaaaaaaaaaaaaaaaaaaaaaaaaaaaaaaaaaaaaaaaaaaaaaaaaaaaaugcaucccccccccccccccccccccccccccccccaaaggcucuuuucagagccaccagaauu

SEQ ID NO: 10846 - RNA, 2092 nt, Artificial Sequence
  mRNA product Design i-2 comprising derived and/or modified sequence from LASV(LASV254-NIG-2011;Clade II)__AIT17675__NP (opt6)
ggggcgcugccuacggagguggcagccaucuccuucucggcaucaagcuuaccaugagugcaucuaaagaaguaaaaucauuuuuauggacccaaucgcucagaagagaauugaguggauauugcaguucaauuaaauugcaaguuguaaaagacgcacaagcacuauuacauggucuagauuuuagcgaaguaucaaauguucaacgcuuaaugcgaaaacaaaaacgagaugacagugacuuaaaaagacuaagagacuuaaaucaagcaguaaacaauuuaguagaacuaaaaaguacacaacaaaaaucuguauuaagaguaggaacauuaacaagcgaugauuuacucacauuagcagcugaucuagaaaaauuaaaaucaaaaguaauaagaacagaaagaccauuauccagcggaguauauaugggaaauuuaucaacacaacaauuagagcaacgacgugcauuauuaaacaugauaggaaugguagguggagcacaaggcacgcaaccaggaagagacggaguaguaagaguaugggaugucaaaaacccugaccuacuaaauaaucaauuuggaacaaugccaucauugacauuagcaugucuuacaaaacaaggacaaguagacuuaaaugacgcgguacuagcacuaacagauuuaggauuaauauauacagcaaaauauccaaauucaucagaccuugauagauuaagucaaagccacccaauacuuaauaugguagauacaaagaaauccagucuaaacauuagcggcuacaauuucagccuaggagcagcaguaaaagcaggagcgugcauguuggacggaggaaauaugcuagaaacaauaaaagugacuccccaaacaauggacggaauauuaaaaucuauacuaaaaguaaagaaaagccuaggaauguucguaagugauacaccaggagaaagaaauccauaugaaaauauauuauauaaaauaugucuaagcggugauggauggcccuauauagcaaguagaacaucgauaguggguagagcaugggaaaauacuaucguagaucuagagagugauggaaaaccucaaaaaguaggaacggcaggaucaaacaaaucauuacaaucagccggauuuccaacaggacuaacauauucacaauuaaugacacuaaaagauaguaugaugcaacuagacccaagugcaaaaaccuggauagauauagaaggaagaccagaagaccccguagaaauagcauuauaucaaccaaugucaggauguuacauacacuuuuucagagaaccaacugauuuaaaacaauuuaaacaagaugcuaaauacagucauggaauagaugucgcagacuuauucccagcacaaccagguuuaacaagugcaguaauagaagcauuaccgagaaauaugguucucacuugucaaggaagugacgauauaaaacgacuacuugauucacaaggaagaagagacauaaaauuaauugauauagcauuaucaaaagcagauaguagaagauucgaaaaugcaguaugggaucaauguaaagaccucugucacaugcauacaggaguaguagucgagaaaaagaaacgaggaggaaaagaagaaauuacaccgcauugugcauuaauggauugcauaauguaugacgcugccguaucaggaggacuuaauauucccguguuaagggcaguauuaccaagagacaugguauucagaacuucaucacccaaaguaguacuauaaggacuagugcaucacauuuaaaagcaucucagccuaccaugagaauaagagaaagaaaaugaagaucaauagcuuauucaucucuuuuucuuuuucguugguguaaagccaacacccugucuaaaaaacauaaauuucuuuaaucauuuugccucuuuucucugugcuucaauuaauaaaaaauggaaagaaccuagaucuaaaaaaaaaaaaaaaaaaaaaaaaaaaaaaaaaaaaaaaaaaaaaaaaaaaaaaaaaaaaaaaaugcaucccccccccccccccccccccccccccccccaaaggcucuuuucagagccaccagaauu

SEQ ID NO: 10847 - RNA, 2092 nt, Artificial Sequence
  mRNA product Design i-2 comprising derived and/or modified sequence from LASV(Nig08-04;Clade II)__ADU56611__NP (opt6)
ggggcgcugccuacggagguggcagccaucuccuucucggcaucaagcuuaccaugagugcaucaaaagaagucaaaucauuccuuuggacacaaagccuaagacgagaacuaucaggauacugcucuaacauaaaauuacaaguuguaaaagacgcacaagcacuuuuacauggauuggauuucucagaaguaucaaacguucaacgacuaaugcgaaaacagaaaagagacgauggagaucuaaaaagacuaagagauuuaaaccaagccguaaauaaccuaguagaacuaaaaucgacacaacaaaaaucuguuuugagaguaggaaccuuaaccucugacgaccuacuaacacuugcagcagacuuagaaaaauuaaaaucaaaaguaaucagaacagaaagaccucucagcucaggaguauacaugggaaaucuaaguacacaacaacuagaacaaagaaaagcacuacuaagcaugaucgguaugguaggaggagcacaaggcacacaaccaggaagagacggaguaguuagaguaugggauguuaaaaauccagaccuacuuaacaaccaauucggaacaaugcccucauuaacuuuagcaugcuuaacaaaacaaggacaaguagaucuaaaugaugcaguucuagcccuaacagaucucggacuaauauauacagcaaaauacccaaauucaucagaucuagacagauuaucucaaucccauccaauacuaaacaugguagauaccaagaaaucaucacuaaacauuucaggauacaauuuuucacuaggagcagcaguaaaagccggagcaugcaugcuagauggaggcaacaugcucgaaacaauaaaaguaacaccccaaacaauggacgggauauuaaaaaguauacugaaaguuaaaagaucacuaggaauguucguaucagauacaccaggagaaagaaaucccuaugaaaauauucuauacaaaauaugccuaucaggugauggguggccuuacaucgcaaguagaacaaguauaguagggagagcaugggaaaauacaacuguagaucuagaaucugauggaaaaccacaaaaaguaggaacugcaggaaguaauaaaaguuuacaaagcgcaggauuuccuacaggauuaacuuauagucaacuaaugaccuuaaaagauagcaugaugcaauuagauccaagugcaaaaacauggauagacauagaaggucgaccagaagacccagucgaaauagcauuauaucaaccaaugucaggcuguuauauacacuucuuucgagaaccuaccgaucuaaaacaauuuaaacaggaugcaaaauauucacacgguauagacguuacagauuuauuuucagcacaaccagguuuaacuucagcaguaauagaagcguuaccaagaaacaugguccucacaugucaaggaucagaugauauuaagaaauuacuugacagucaaggaagacgagacauaaaacuuauagacaucucauuaaacaaagcagacucaagaagauuugaaaacgcaguaugggaccaauguaaagauuuaugccacaugcauacaggagucguaguagagaaaaagaaacgagguggaaaagaagaaauaacuccacauugcgcauuaauggauugcauaauguuugacgcagcugugaguggaggauuaaauauaccaauauuaagagccguacuaccaagagauaugguauuuagaacaaguucgccaaaagugguacuauaaggacuagugcaucacauuuaaaagcaucucagccuaccaugagaauaagagaaagaaaaugaagaucaauagcuuauucaucucuuuuucuuuuucguugguguaaagccaacacccugucuaaaaaacauaaauuucuuuaaucauuuugccucuuuucucugugcuucaauuaauaaaaaauggaaagaaccuagaucuaaaaaaaaaaaaaaaaaaaaaaaaaaaaaaaaaaaaaaaaaaaaaaaaaaaaaaaaaaaaaaaaugcaucccccccccccccccccccccccccccccccaaaggcucuuuucagagccaccagaauu

SEQ ID NO: 10848 - RNA, 2095 nt, Artificial Sequence
  mRNA product Design i-2 comprising derived and/or modified sequence from LASV(GA391;Clade III)__AAA46284__NP (opt6)
ggggcgcugccuacggagguggcagccaucuccuucucggcaucaagcuuaccauguccgcuagcaaagaaguaagauccugcuuauggacacaaucacuaagaagagaacuaucaggauauugcucaaacauaaaauuacaaguaguaaaagacgcccaagcacuauuacacggacuagauuucucagaaguuucaaauguacaaagauuaaugagaaaacaaaaacgagacgacggcgaucuaaaaaggcuaagagaucuuaaucaagcaguaaauaaccuaguagaacuaaaaaguacacaacaaaaaucaguacuacgaguuggcacauuaucuagugaugauuuacuaauacuagcagccgauuuagaaaaacuaaaaucaaaagucacaagaacagaaagaccguuaucaucaggaguauauaugggaaacuuaucaucucaacaauuagaccaaagacgagcucuccuaaacaugauaggaaugacaggaguaagcggaggaggaaaaggagcaucaaacggaaucguaagaguaugggauguuaaaaaugcagaacuacuaaauaaccaauucggaacaaugccuaguuuaacccuagcuugcuuaacaaaacaaggacaaguagaucuaaacgaugccguacaagcacucacagaucuaggauuaauuuacacagcuaaauaccccaauagcucagauuuagaucgauuaagucaaucacacccuauccuaaacaugauagauaccaagaaaaguagccuaaacauuagcggauacaauuuuucauuaggagcagcaguaaaagcaggagcaugcaugcuagaugguggaaacauguuagaaacaaucaaaguaaguccacaaacaauggauggaauacuaaaaucaauacucaaagugaaaaagagcuuaggaauguucguaagugacacaccuggugaaagaaaucccuaugaaaauauauuauauaaaaucugucucucaggagauggcuggagcuauauagcaucaagaacaucaauaguaggcagagcaugggaaaauacaguaguagauuuagaacaagacaacaaaccacagaaaauaggaaacggaggaaguaacaaaucuuuacaaagcgcaggauuugcagcaggccugauauacagucaacuuaugacauuaaaagauuucaaauguuuuaaccuaauaccaaaugccaaaacauggauggauauagaaggcagaccagaagauccagucgaaauagcucuuuaccaaccaaguuccggcugcuauguacauuucuucagagaaccaacagaccuuaaacaauucaaacaagacgcaaaauauucacauggacgagauguaacugaccuauucgcagcacaaccaggauuaacaagugcaguuauagaagcccuaccacgaaauaugguuauaacaugccaaggaagugaagauauacgaaaauuauuagaaagucaaggaaggagagauaucaaacuuauugacauuacacuaucaaaagcugacucaagaaaauuugaaaaugcuguaugggaccaauuuaaagauuuaugccacaugcacacugguguaguaguugagaaaaagaaacgaggaggcaaagaagaaauaacaccacacugugcgcucauggacugcauaauguucgaugcugcaguaucaggaggacucgacgccaaagucuuacgaguagucuuaccaagagacaugguauuccguacaucaacacccaaagucguacuauaaggacuagugcaucacauuuaaaagcaucucagccuaccaugagaauaagagaaagaaaaugaagaucaauagcuuauucaucucuuuuucuuuuucguugguguaaagccaacacccugucuaaaaaacauaaauuucuuuaaucauuuugccucuuuucucugugcuucaauuaauaaaaaauggaaagaaccuagaucuaaaaaaaaaaaaaaaaaaaaaaaaaaaaaaaaaaaaaaaaaaaaaaaaaaaaaaaaaaaaaaaaugcaucccccccccccccccccccccccccccccccaaaggcucuuuucagagccaccagaauu

SEQ ID NO: 10849 - RNA, 2092 nt, Artificial Sequence
  mRNA product Design i-2 comprising derived and/or modified sequence from LASV(Nig08-A19;Clade III)__ADU56619__NP (opt6)
ggggcgcugccuacggagguggcagccaucuccuucucggcaucaagcuuaccaugagcgcaucaaaagaaguaaaaucauucuuauggacacaaucauuaagacgagaacuaucuggauacuguaguaauauaaaauuacaaguaguuaaagaugcacaagcccuauuacauggacuagauuuuucagaagucucuaauguccaaagauuaaugagaaaacaaaaaagagacgacggagaucuaaaaagacuuagagacuuaaaucaggcaguaaacaaucuuguagaacuaaaaagcacucaacaaaaaucugugcuaagaguuggaacauuaaguagcgaugaucuucuuguacucgcagccgacuuagaaaaauuaaaaucuaaaguaguacgaacagaacggccacuaucaucagguauauauaugggaaaccuuucaucucaacaacuggaucaaaggaaagcauuacuaaacaugauaggaaugacaggaggaaauggaggacgaaacacaacaagcgacggaaucguuagaguuugggacguaaaaaacgcagaacuauuaaacaaucaauuugguacaaugccaaguuuaacucucgcuugccuuaccaaacaaggacaaguagaucuaaaugaugcaguacaagcacuaacagaccuagguuuaauauauacagcgaaauauccaaauuccucagacuuagaucgacuagcacaaucacauccaauauuaaauaugauagauacgaaaaaaucaucauuaaacauaagcggauacaauuucucauuaggcgcagcaguuaaagcuggagcauguauguuagacggaggaaauaugcucgaaacaaucaaaguaagcccacaaacaauggacggaauauuaaaaucaauacuaaaaguaaaaaggucacuaggaauguucauuagugauacaccaggcgaaagaaacccauaugaaaauauauuauacaaaauaugcuuaagcggagacggauggcccuauauugccucaagaaccagcauaguaggaagagcaugggaaaacacaguagucgaucuagaaucggauaauaaaccacaaaaaacaggaaacgguggaaguaauaaaucacuacaaucagcagguuuugccgcaggcuuaacauacucacaacucaugacauuaaaagauucaaugcuccaacucgacccaaaugcuaaaacauggauggauauagaaggaagaccagaagacccaguagaaauagcucuauaccaaccguccucaggauguuacauacacuucuuuagagaaccaacagaucuaaaacaguuuaaacaagacgcaaaauacagccauggaauagacguuacagauuuauuugcagcacaaccaggacuaacaagugcaguuauagaagcauuaccaaggaacaugguaauaacaugucaaggcagugaagacauaagaaaacuacucgaaucacaaggaaggcgugacauuaaacuuauagauauuagucuaagcaaaguagacucacgaaaguuugaaaacgcaguaugggaucaauucaaagaucuaugccacaugcauacaggaauaguagucgaaaaaaaaaaaagaggggggaaagaagaaauuacaccacacugcgcuuuaauggacugcauaauguuugaugcagcuguaucaggaggaguugacgcaaaaguucuuagagcaguauuaccaagagauaugguauucagaacuucaacacccaaaguuguccucuaaggacuagugcaucacauuuaaaagcaucucagccuaccaugagaauaagagaaagaaaaugaagaucaauagcuuauucaucucuuuuucuuuuucguugguguaaagccaacacccugucuaaaaaacauaaauuucuuuaaucauuuugccucuuuucucugugcuucaauuaauaaaaaauggaaagaaccuagaucuaaaaaaaaaaaaaaaaaaaaaaaaaaaaaaaaaaaaaaaaaaaaaaaaaaaaaaaaaaaaaaaaugcaucccccccccccccccccccccccccccccccaaaggcucuuuucagagccaccagaauu

SEQ ID NO: 10850 - RNA, 2092 nt, Artificial Sequence
  mRNA product Design i-2 comprising derived and/or modified sequence from LASV(G1180-SLE-2010;Clade IV)__AIT17169__NP (opt6)
ggggcgcugccuacggagguggcagccaucuccuucucggcaucaagcuuaccauguccgcaagcaaagaaauaaaauccuuccuauggacccaaucucucagaagagaauuaaguggauacuguucuaacauuaaacuacaaguagucaaagacgcucaagcacuauuacaugguuuagauuucucagaaguaaguaauguccaaagacuaaugagaaaagaaagaagagacgauaacgacuuaaaaagacuaagagaccuaaaucaggcugucaauaauuuaguagaacuaaaaaguacucaacaaaaaucuauacuaagaguaggaacguuaacuagcgacgaucuacuaauauuagcagccgaucuugaaaaauuaaaaucaaaaguaauuagaacagagagaccauuaagcgcuggaguauauaugggaaacuuaaguucacaacaauuagaccaaagaagagcacucuuaucgaugauaggaaugucaucaggaaaucaaagagcacaagcaggcagagauggugucguacgugucugggacguaaaaaauguagaacuacuaaacaaucaauuuggaaccaugccuucauuaacucucgcuuguuuaacuaaacaaggacaaguagaccuaaacgaugcaguacaagcauuaacugacuuaggacuaauauauacagcaaaauacccuaauacuuccgauuuagacagacuaacacaaucacacccaauacuuaauaugauagauacaaaaaaauccucauuaaacaucucaggauacaauuucucauuaggagcagcagucaaagcaggagccuguauguuagacggaggaaauauguuagaaacuauaaaaguaucuccacaaaccauggacggaauacugaaaaguauucuaaaaguaaaaaaagcauuaggaauguucauuucagauacaccaggcgaaagaaaucccuaugaaaauauauuauacaaaauaugucuaucaggugauggauggccauauaucgcaagccgaacaaguaucacaggaagagcaugggaaaauacaguaguagacuuagaaucagauggaaaaccacaaaaagcaggauccaacaauucaaacaaaucauuacaaagcguaggauuuaccgcaggacuaacauauucacaacuaaugacguuaaaagaugcaaugcuacaguuagauccaaaugcaaaaaccuggauggacauagaaggaagacccgaagacccaguagaaauugcauuauaucaaccaagcaguggaugcuauauucacuuuuuccgugaaccuaccgaccuaaaacaauuuaaacaagacgcaaaauauucacauggaauagacguuacagaucuauuugcagcacaaccuggacuaacaucagcaguaauagacgcccuuccucgaaauaugguuauaaccugucaaggaucagaugauauacgaaaacuucuagaaagccaaggacgaaaagacaucaaauuaauagauauagcauuaucuaaaacggacucaagaaaauaugaaaacgcugucugggaccaauauaaagauuuaugccauaugcauaccggaguaguaguugaaaaaaaaaaacgaggaggaaaagaagaaauaaccccacacugcgcacuaauggauugcauaauguucgacgcagcaguaucagggggucuaaauacauccgucuuaagagcaguacuaccaagagauaugguauucagaacaucaacaccacgaguuguacuauaaggacuagugcaucacauuuaaaagcaucucagccuaccaugagaauaagagaaagaaaaugaagaucaauagcuuauucaucucuuuuucuuuuucguugguguaaagccaacacccugucuaaaaaacauaaauuucuuuaaucauuuugccucuuuucucugugcuucaauuaauaaaaaauggaaagaaccuagaucuaaaaaaaaaaaaaaaaaaaaaaaaaaaaaaaaaaaaaaaaaaaaaaaaaaaaaaaaaaaaaaaaugcaucccccccccccccccccccccccccccccccaaaggcucuuuucagagccaccagaauu

SEQ ID NO: 10851 - RNA, 2092 nt, Artificial Sequence
  mRNA product Design i-2 comprising derived and/or modified sequence from LASV(G1442-SLE-2011;Clade IV)__AIT17181__NP (opt6)
ggggcgcugccuacggagguggcagccaucuccuucucggcaucaagcuuaccaugucugcuaguaaagaaguaaaaagcuuuuuauggacacaaucauuacgaagagaauuauccggcuauuguagcaauauaaaacuacaaguagucaaagacgcacaagccuuacuacacggacuagauuucucagaaguaucaaauguacaaagacuaaugagaaaacaaagaagagacgacaacgaccugaaaagacuaagagaucuaaaucaagcaguuaacaaucucguagaacucaaaagcacacaacaaaaaucaguauuaagagucggcacucuaacgagcgaugacuuauuagugcucgccgcagacuuagaaaaacuaaaaagcaaaguaauaagaacagaaagaccccucucagccggaguauauaugggaaaucuaucaucacaacaauuagaccaaagacgagcauuauuaaacaugaucggaaugagcggcggcauacaaggaacacgaacaggaagagaugguguagucagaguaugggacgucaaaaacgcagauuuauuaaacaaccaauuuggcacaaugccaucauuaacauuagcaugcuuaacaaaacaaggacaaguagacuuaaaugaugugguacaagcacucacagaccucggcuuaauauacacagccaaauaccccaacgcaucagaccuagacagacuaacucaaucacacccaauacuaaacaugauagauaccaaaaagaguucacuaaacaucucaggauauaacuuuucacuaggcgcugcuguaaaagccggagcauguauguuagacggugguaacaugcuagaaacuauaaaaguaucaccacaaacaauggacggaauauuaaaaucaauccuaaaaguaaaaaaaacauuaggaauguuuauaagugacacaccaggagaaagaaauccguaugaaaauauauuauacaaaaucugccuuucgggagacggcuggcccuacauagccagccgaacuagcauuacaggaagagcaugggaaaacacaguaguagaccucgaaagcgacggaaaaccgcaaaaagcugggucaaauaacuccaauaaaucauuacaaagugcuggauuugcagcaggauuaacauauucacaauuaaugacauuaaaagacgcaaugcuacaauuagauccuaaugcaaaaacauggauggauaucgaaggaagaccagaagaccccguagaaauagcccuauaccaaccguccucaggauguuacauccacuuuuucagagaaccaacagaccuaaaacaauuuaaacaagacgccaaauauucacauggaaucgacgucacugauuuauucgccgcacaaccaggacuaacaagcgcaguaaucgaagccuuaccaagaaacauggugauaacaugccaaggaagugaugacauaaaaaaacuauuagaaucacaaggaagaaaagacauaaaauuaauagacauagcauuaagcaaaacagacucacgcaaauaugaaaacgcaguaugggaucaauacaaagacuuaugccauaugcacacaggaguaguuguagaaaaaaagaaaagaggaggcaaagaagaaauaacaccacauugugcacuuauggacuguauaauguuugacgcagccguaucaggaggauuaaauacacuaguacuaagagcaguccuaccaagagacaugguauucagaacuagcaccccaagaguaguacuauaaggacuagugcaucacauuuaaaagcaucucagccuaccaugagaauaagagaaagaaaaugaagaucaauagcuuauucaucucuuuuucuuuuucguugguguaaagccaacacccugucuaaaaaacauaaauuucuuuaaucauuuugccucuuuucucugugcuucaauuaauaaaaaauggaaagaaccuagaucuaaaaaaaaaaaaaaaaaaaaaaaaaaaaaaaaaaaaaaaaaaaaaaaaaaaaaaaaaaaaaaaaugcaucccccccccccccccccccccccccccccccaaaggcucuuuucagagccaccagaauu

SEQ ID NO: 10852 - RNA, 2092 nt, Artificial Sequence
  mRNA product Design i-2 comprising derived and/or modified sequence from LASV(G3010-SLE-2013;Clade IV)__AIT17345__NP (opt6)
ggggcgcugccuacggagguggcagccaucuccuucucggcaucaagcuuaccaugagcgcuaguaaggaaauaaaauccuuccucuggacacaaucacuaagaagagaauuaagugguuauugcaguaacaucaaauuacaaguaguuaaagaugcacaagcauuacuacauggauuagauuucucagaaguaagcaauguacaaagacuuaugaggaaagaacgaagggaugauaacgaccuaaaacgacuaagagaucugaaucaagcaguaaauaacuuaguagaauuaaaaucaacacaacaaaaaucaauucuaagaguaggcacccugacaagcgaugauuuacuaauucuagcagcagauuuagaaaaauuaaaaucaaaaguuacaagaacagaaagaccgcuaagcgcuggaguauauaugggaaaccugucuucccaacaauuagaucaaagaagagcuuuacuaagcaugauaggaaugucaucugggguccaaggagcaagagccgguagagacggaguaguucgaguaugggacguaaaaaacgcagaacucuuaaacaaccaauucggaacuaugccaaguuuaacuuuagcuuguuuaacaaaacaaggacaaguagauuuaaaugauguaguucaagcacuaacagacuuaggucuaauauauacagcuaaauaccccaauacaucagaucucgacagacuaacacaaucccaucccauauuaaacaugauagauaccaaaaaaucuucucuaaacauaucaggauacaauuuuaguuuaggugcagcuguaaaagcuggagccugcauguuagaugguggaaauauguuagaaacaauaaaagugaguccccaaacaauggaugggauccuaaaaagcauauuaaaaguaaaaaaagcauuaggaauguucauaucagagacacccggugaaagaaauccauaugaaaauauacuauacaaaaucugucuaaguggugacggcuggccuuacaucgcaaguagaacaucaauuacgggacgugcaugggaaaacacaguaguugaucuggaaucagauggaaaaccacaaaaagcaggaucaaacaacucaaauaaaagucuacaaucagcaggauucacugcaggauuaacauauucacaacuaaugacacuaaaagaugcuaugcuucaacuagacccaaacgcaaaaacauggauggacauagaaggccgaccagaagauccagucgaagucgcacuauaccaaccuaguucaggauguuauauacacuucuuucgugaaccaacagaccuaaaacaauucaaacaagacgcaaaauauucacauggaauagacguuacagaccuauucgcagcacaaccaggucuaaccagugccguaauagacgcauuaccaaggaauauggucauaacaugucaaggaucagaugauauaaaaaaacuauuagaaagucaaggaagaaaagacaucaaauuaauagauauagcacuaucaaagacagauucaagaaaauaugaaaaugcaguaugggaccaauauaaagaccuaugucacaugcauaccggaguugugguagaaaaaaaaaaaagaggagggaaagaagaaauaacgccacauugcgcauuaauggauuguauaauguuugaugccgcaguauccgguggacuuaauacaaguguacuuagagcaguacugccacgagacaugguauuuagaacaucaacaccccguguaguuuuauaaggacuagugcaucacauuuaaaagcaucucagccuaccaugagaauaagagaaagaaaaugaagaucaauagcuuauucaucucuuuuucuuuuucguugguguaaagccaacacccugucuaaaaaacauaaauuucuuuaaucauuuugccucuuuucucugugcuucaauuaauaaaaaauggaaagaaccuagaucuaaaaaaaaaaaaaaaaaaaaaaaaaaaaaaaaaaaaaaaaaaaaaaaaaaaaaaaaaaaaaaaaugcaucccccccccccccccccccccccccccccccaaaggcucuuuucagagccaccagaauu

SEQ ID NO: 10853 - RNA, 2092 nt, Artificial Sequence
  mRNA product Design i-2 comprising derived and/or modified sequence from LASV(G502-SLE-2009;Clade IV)__AIT17127__NP (opt6)
ggggcgcugccuacggagguggcagccaucuccuucucggcaucaagcuuaccaugagcgcaucuaaagaaauaaaaucauuucuauggacacaaucucuaagaagagaacuaucaggauacugcucaaauauaaaauuacaaguaguaaaagacgcucaagcacucuuacacggauuagauuucucugaaguuucuaauguacaaagauuaaugagaaaagaacgcagagacgacaacgaucuuaaaagauuaagagauuuaaaucaagcgguaaacaacuuagucgaauuaaaaagcacucaacaaaaaaguaucuuacgaguaggcacacucacaucagaugaccuacuuauacuagccgcagacuuagaaaaauuaaaauccaaaguaauaagaacugaacgcccucuaucagccggaguauauauggguaacuuaucaucacaacaacuagaucaaagacgagcacuauuaucaaugaucggaaugucagggggcaaucaaggcgucagagcaggaaaagacggaguaguaagaguaugggacguaaaaaacgcagaauuauugaauaaccaauuuggaacaaugccaucacugacacuagcauguuuaacaaaacaaggacaaguagauuuaaaugacgccguucaagcacuaacagaucuuggccuaaucuauaccgcaaaauauccaaacacuagugacuuagacaggcuaacacaaagccacccaauauuaaauaugauagacacaaaaaaaucuucacucaacauaagcggguacaauuuuuccuuaggugccgcagucaaagcaggagccuguauguuagacggaggaaacauguuagaaacaauaaaaguaucgccacaaacaauggaugguauauuaaaaucuauacuaaaagucaaaaaagcauuagguauguucauauccgacacaccaggagaaagaaacccauacgaaaauauccuauauaaaauauguuuaucuggagauggauggccauacauagcaucuagaacaagcaucaccggcagggcaugggaaaauaccguaguugaccucgaaucagauggaaaaccccaaaaagcagguucaaacaauucaaauaaaucauuacaauccgcaggcuuuaccgccggacuuacuuauucacaacuaaugacuuuaaaagaugcaaugcuccaacuagauccaaauaccaaaacauggauggauauagaaggacgaccagaagauccaguagaaaucgcccucuaccaaccaucaucaggcuguuacauacacuucuuuagggaaccaacugaucucaaacaauucaaacaagacgcuaaauauucacauggaaucgacguaacagaucuauuugcugcacaaccuggucucacaucagcaguuauagaugcacuaccaagaaauaugguaauuacaugccaaggaagcgacgacauacgaaaacuccuagaaucacaaggucgaaaagauauaaaacucauugauauagcauuaaacaaaacagauucuagaaaauaugaaaacgcuguaugggaccaguacaaagacuuaugucacaugcacaccggaguaguuguagaaaagaaaaaacgaggcggaaaagaagaaauaacaccucacugugcccucauggauugcauaauguuugacgcugcaguaucaggaggacuaaacacuucaguauuaagagcaguauuaccaagagauaugguauucagaacauccaccccaagaguaguguuauaaggacuagugcaucacauuuaaaagcaucucagccuaccaugagaauaagagaaagaaaaugaagaucaauagcuuauucaucucuuuuucuuuuucguugguguaaagccaacacccugucuaaaaaacauaaauuucuuuaaucauuuugccucuuuucucugugcuucaauuaauaaaaaauggaaagaaccuagaucuaaaaaaaaaaaaaaaaaaaaaaaaaaaaaaaaaaaaaaaaaaaaaaaaaaaaaaaaaaaaaaaaugcaucccccccccccccccccccccccccccccccaaaggcucuuuucagagccaccagaauu

SEQ ID NO: 10854 - RNA, 2092 nt, Artificial Sequence
  mRNA product Design i-2 comprising derived and/or modified sequence from LASV(G733-SLE-2010;Clade IV)__AIT17155__NP (opt6)
ggggcgcugccuacggagguggcagccaucuccuucucggcaucaagcuuaccaugucugcuaguaaagaaauuaaaucauuuuuauggacacaaucacuacgcagagaacuaucaggcuacuguucaaauauuaaacuacaaguaguuaaagacgcacaagcucuauuacacggguuagacuucucugaaguaagcaacguacaaagacucaugagaaaagaacgaagggacgacaacgauuuaaaaagacuacgagacuuaaaucaagcugucaauaaucuaguagaacuaaaaucaacacaacagaaaucaguauuaagaguaggaacguuaacauccgaugaacuucuaguuuuagcagccgaucuggaaaaacuaaaaucaaaaguaauacgaacagaaagaccccuaucggcaggaguauacaugggaaauuuaucaucacaacagcuagaucaacgaagagcucuccuaucaaugauaggcaugagcggaggaaaccaaggcgcacguacaggcagagacggagucguaagaguaugggacguaaaaaacgcugaacuacucaauaaccaauuuggcacaaugccaaguuuaacuuuagcuuguuuaacaaaacaaggacaaguagaccuaaaugaugccguacaagcacuaacugauuuaggauuaauauauacagcaaaauauccaaacacaucagaucuugauagacuaacacaaucccauccaauccuaaacaugauagacacaaaaaaaucuucauuaaauauaucagguuacaacuucagccuaggagcagcuguaaaagcuggcgccuguauguuagauggaggaaacaugcuugaaacaauaaaaguaucaccacaaacaauggacggaauauuaaaaucaauacuaaaaguaaaaaaagcacuagguauguuuauaagcgauacaccaggagaaagaaauccauacgaaaauauauuauacaaaauaugccuaaguggagauggauggccuuacauugcuucaagaacaucaauaaccggacgagcaugggaaaauacgguuguagaccuggaaucggauggaaaaccacaaaaagcaggcucaaacaauucaaauaaaagucuccaaucagcaggauuuacugcaggacuuacguauucucaacuuaugacauuaaaagaugcaaugcuacaauuagauccaaacgccaaaacguggauggacauagaaggaagaccagaagacccaguagaaauagcauuauaucaaccaaguagcggauguuacauacacuucuuuagagaaccaaccgauuuaaaacaauuuaaacaagacgcaaaauacagccacgguauagacguaaccgaccuauuugcagcacaaccaggauuaaccagugcaguuauagaugcauuaccaagaaauaugguaauaaccugucaaggaucagaugauaucagaaaacuauuagaaagucaaggaagaaaagacauuaaacuaauagauauugcgcucucuaaaauagacagucgaaaauacgaaaacgcagucugggaucaauauaaagauuuaugccacaugcauacaggaguaguaguagaaaaaaaaaaaagagguggaaaagaagaaauaacaccccacugugcacuuauggacuguaucauguuugacgcagccguaaguggaggauuaaauucauuaguacuaagagcaguauuaccaagagacaugguauuccguacaagcaccccacgaguaguauuauaaggacuagugcaucacauuuaaaagcaucucagccuaccaugagaauaagagaaagaaaaugaagaucaauagcuuauucaucucuuuuucuuuuucguugguguaaagccaacacccugucuaaaaaacauaaauuucuuuaaucauuuugccucuuuucucugugcuucaauuaauaaaaaauggaaagaaccuagaucuaaaaaaaaaaaaaaaaaaaaaaaaaaaaaaaaaaaaaaaaaaaaaaaaaaaaaaaaaaaaaaaaugcaucccccccccccccccccccccccccccccccaaaggcucuuuucagagccaccagaauu

SEQ ID NO: 10855 - RNA, 2092 nt, Artificial Sequence
  mRNA product Design i-2 comprising derived and/or modified sequence from MOPV/LASV reassortant(IGS-1;Clade IV)__AFY05578__NP (opt6)
ggggcgcugccuacggagguggcagccaucuccuucucggcaucaagcuuaccauguccgcaucgaaagaaauuaaaucauuucuauggacucaaagccuuagaagagaauuaucaggauauuguucaaauauaaaacuacaagucgugaaagaugcacaagcauuacuccacggauuagauuucagcgaaguaucaaauguccaaagacuaaugagaaaagaaagaagagacgauaacgaucuaaaaagacuaagagaucuaaaucaagcaguaaacaacuuaguggaauuaaaaagcacacaacaaaaaagcauacuuagaguagguacacucacauccgacgacuuacuaauuuuggcagcagaucuagaaaaauuaagaaguaagguuaucagaaccgaaagaccucuuagcgcaggaguauauaugggaaaucuauccucucaacaacuagaucaaagaagagcauuauuaaacaugaucggaaugagcggaggaaaucaaggagcacgugcaggaagagacggagucguuagagugugggacguaaaaaacgccgaauuauuaucaaaucaguuuggaacaaugcccucauuaaccuuagcauguuuaacaaaacaaggacaaguagacuuaaacgacgcaguucaagcacucacagauuuaggauuaauauauacggcaaaauauccaaauacuuccgaccucgacagacuaacacaaucacacccaauccuaaacaugauagacacaaaaaaaucaucacuaaacauuagcggauauaacuuuucacuaggagcagcaguaaaagcaggugcauguauguuagauggagggaauauguuggaaacaaucaaaguaucaccacaaacaauggacggaauacuaaaaagcauauuaaagguaaaaaaagcacuaggcauguucaucucagacacgccaggagaacgaaacccauaugaaaacauuuuauauaaaauaugcuuaagcggagauggauggccauacauagcaucaagaacaaguauuaccggaagagccugggaaaauacuguaguagaucuagaaagcgacggaaaaccacaaaaagccgauucaaauaauaguagcaaaagucuacaaagugcaggauucacagcuggguuaaccuauucacaauugaugacacuaaaagacgcgaugcuucaacuagacccaaaugcaaaaaccuggauggauauagaaggaagaccagaagaccccguugaaauagcauuauaucaacccaguucaggauguuacauacacuuuuuucgagaaccaacagauuuaaaacaauucaaacaagacgcuaaauacucacauggaauugaugugacagauuuauucgcaacacaaccagggcuaacaagcgcagucauagaugcauuaccaagaaacaugguaauaacaugccaaggaagugaugacauaagaaaauuauuagaaucgcaaggaagaaaagacauaaaauuaauagacauagaccuuagcaaaacagacaguagaaaauacgaaaacgcaguaugggaccaauauaaagaccuaugccauaugcauaccggaguaguugucgaaaaaaaaaaacgaggugggaaagaagaaauaacaccacauugugcauuaauggacugcauuauguuugaugcagcaguaucaggaggauuaaacacaagcguauuaagagcaguauuacccagagauauggucuuccgcacaucaaccccaagaguaguauuauaaggacuagugcaucacauuuaaaagcaucucagccuaccaugagaauaagagaaagaaaaugaagaucaauagcuuauucaucucuuuuucuuuuucguugguguaaagccaacacccugucuaaaaaacauaaauuucuuuaaucauuuugccucuuuucucugugcuucaauuaauaaaaaauggaaagaaccuagaucuaaaaaaaaaaaaaaaaaaaaaaaaaaaaaaaaaaaaaaaaaaaaaaaaaaaaaaaaaaaaaaaaugcaucccccccccccccccccccccccccccccccaaaggcucuuuucagagccaccagaauu

SEQ ID NO: 10856 - RNA, 2092 nt, Artificial Sequence
  mRNA product Design i-2 comprising derived and/or modified sequence from LASV(LM765-SLE-2012;Clade IV)__AIT17815__NP (opt6)
ggggcgcugccuacggagguggcagccaucuccuucucggcaucaagcuuaccaugagcgccuccaaagaaauaaaaucauucuuauggacucagucauuaagacgagaacuaaguggauacugcaguaauauaaaacuacaaguaguuaaagaugcacaagcuuuacuacacgggcuagauuuuucagaaguuucaaacguacaaagauuaaugagaaaagaaagacgagacgauaaugauuuaaaaagacuaagggaucucaaucaagcuguaaauaacuuaguggaauuaaaauccacacagcaaaaaucaauauuaagaguaggaacauuaaccagugaugacuuacuuauauuagcugcagaucucgaaaaauuaaaaucaaaaguaacaagaacugaaagaccacuaucagcaggaguauacaugggcaauuuaaguagucaacaauuagaucaaagaagagcauuauuagacaugauagguaugucaggaaguaaccaaggagcacgagcaggacgagacggaguaguaaggguaugggauguaaaaaacgcagaauuacuaaauaaccaauucgguaccaugccaucauugacacuagcauguuuaacuaaacaaggacaaguagaucuaaaugaugccguacaagcuuuaacagaucuaggccucauauacacagcaaaauauccaaauacaagcgaucuagauagacucacacagucacacccaauauuaaacaugauagauacaaaaaaaaguagcuuaaauauaagugguuauaacuuuaguuuaggagcagcaguaaaagcuggagccuguaugcuagacgguggaaauauguuagaaacuauaaaagucucaccgcaaacaauggaugguauacucaaaaguauacuaaaaguaaaaaaagcauuaggcauguucauaagcgaugcgccuggagaaagaaauccauacgaaaauauauuauauaaaauaugcuuaucaggagacggauggccguacauagcaaguagaacgucaauaacaggacgugcaugggaaaauacaguaguagauuuagaaagcgacgguaaaccgcaaaaagcaggaaguaacggaaguaauaaaaguuuacaaagugcaggauucacagcaggauuaacauauucacaauuaaugaccuuaaaagacgcaauguuacaauuagauccaaaugccaaaacauggauggauauagaaggacgacccgaagacccaguagaaauagcguuauaucaaccauccucaggauguuauauucacuuuuucagagaaccuacagauuuaaaacaauuuaaacaagacgcaaaauauagccauggaauagacguaacggaucuauuugcagcacaaccuggauuaaccagcgcaguuauagaugcauuaccuagaaauaugguaauuacaugucaagguagugaugacauacgaaaauuauuugaaucacaaggacgaaaagacauaaaacuaauagacauugcccucaguaaaacggacagcagaaaauaugaaaacgcaguaugggaccaauauaaagauuuaugccacaugcauacaggaauaguugucgaaaaaaaaaaacgagguggaaaagaagagauuaccccccacugugcacugauggauuguauaauguucgacgcagcggucucaggaggacuaaacacuucagucuuaagggccgucuuaccaagagauaugguauucagaacaucaacaccaagaguaguauuaugaggacuagugcaucacauuuaaaagcaucucagccuaccaugagaauaagagaaagaaaaugaagaucaauagcuuauucaucucuuuuucuuuuucguugguguaaagccaacacccugucuaaaaaacauaaauuucuuuaaucauuuugccucuuuucucugugcuucaauuaauaaaaaauggaaagaaccuagaucuaaaaaaaaaaaaaaaaaaaaaaaaaaaaaaaaaaaaaaaaaaaaaaaaaaaaaaaaaaaaaaaaugcaucccccccccccccccccccccccccccccccaaaggcucuuuucagagccaccagaauu

SEQ ID NO: 10857 - RNA, 2092 nt, Artificial Sequence
  mRNA product Design i-2 comprising derived and/or modified sequence from LASV(LM776-SLE-2012;Clade IV)__AIT17825__NP (opt6)
ggggcgcugccuacggagguggcagccaucuccuucucggcaucaagcuuaccaugucagcaaguaaagaaauaaaaaguuuuuuauggacccaaucacuacgacgagaacuaucaucauauugcucgaacauaaaauuacaaguaguaaaagaugcacaagcucuacuacaugguuuagacuuuucugaaguuucaaauguacaaagauuaaugagaaaagaaagaagagaugauaacgauuuaaaaagacuaagagaucucaaucaagcagucaauaaccucguugaacucaaauccacacaacaaaaaucaauucuaagaguaggcacuuuaaccucagaugacuuacugauacucgcagcagauuuagaaaaacuaaaaaguaaaguaacacgcaccgaaagaccacuaagugcuggaguauauauggguaaucuaaguucgcaacaauuagaccaaagaagagcucuucuauccaugauagguaugucaggaucaaaucaaggagcaagagcagguagagauggaguaguaagaguaugggacguaaaaaaugcagaacuucuaaauaaccaauucggaacaaugccaucacuuacauuagcuugccucacaaagcaaggacaaguagaccuaaaugaugcaguacaagcucuaacagacuuaggcuugauauauacagcaaaauauccaaauacuucagauuuagaucgauuaacacaaagucacccaauauuaaauaugauagauacuaaaaaaucaucauugaauauaucaggauacaauuuuagccuaggagcagcugucaaagccggagcauguauguuagacggaggcaauaugcuagaaacaauaaaaguuaguccucaaacaauggauggaauauuaaaaaguauacuaaaaguuaaaaaagcauuaggcauguuuauaagcgauacucccggagaaagaaauccauaugaaaauauauuauacaaaauaugucuaucuggagauggauggccauauauagcaagcagaacuagcauaacuggaagagcaugggaaaacaccguaguagaucuagaaucagauggaaaaccccaaaaagcaggaucgaacaauucaaauaaaagucuacaaagugcaggauuuacagcaggacuuacauauucacaacuaaugacccuaaaagaugcaaugcuacaauuagaccccaaugccaaaacauggauggacauagaaggaagaccagaggacccaguugaagucgcccuauaucaaccaucaucagguuguuauauacacuucuucagagaaccaacagaucuaaaacaauuuaaacaagacgcuaaauacagucaugguauagacguaacagaucuauuugcagcacaaccaggcuuaaccagugcaguuaucgaugcuuuaccaagaaacaugguuauaaccugucaaggaucagaugauauucgaaaacuucuagaaucucaaggaagaaaagauauuaaacuuauagauauagcacuaucgaaaacagauucccgaaaauaugaaaacgccguaugggaucaauauaaagaccucugucacaugcacacagguguagucguagaaaaaaaaaaaagaggaggaaaagaggaaauaaccccacacugugcacuaauggauugcauaauguuugacgcagcaguaucaggaggauuaaauacaucaguacuaagagcaguauuaccaagagacaugguuuuuagaacaucaaccccucgaguaguauuauaaggacuagugcaucacauuuaaaagcaucucagccuaccaugagaauaagagaaagaaaaugaagaucaauagcuuauucaucucuuuuucuuuuucguugguguaaagccaacacccugucuaaaaaacauaaauuucuuuaaucauuuugccucuuuucucugugcuucaauuaauaaaaaauggaaagaaccuagaucuaaaaaaaaaaaaaaaaaaaaaaaaaaaaaaaaaaaaaaaaaaaaaaaaaaaaaaaaaaaaaaaaugcaucccccccccccccccccccccccccccccccaaaggcucuuuucagagccaccagaauu

SEQ ID NO: 10858 - RNA, 2092 nt, Artificial Sequence
  mRNA product Design i-2 comprising derived and/or modified sequence from LASV(Mad39;Clade IV)__ANH09723__NP (opt6)
ggggcgcugccuacggagguggcagccaucuccuucucggcaucaagcuuaccaugagcgcaucaaaagaaauaaaaucauuccuauggacccaaagccuaagacgagaacuaucagguuauugcucaaacauaaaauuacaaguuguaaaagacgcacaagcacuauugcacggacuagacuucucagaaguaucaaacguacaaagacuaaugagaaaacaacgaagagacgauaaugaucuaaaaagauuaagagaccuaaaucaagcaguaaacaaucucguagaacuaaaaucaacacaacaaaaaucaguauuaagaguaggaacacuaacaagugaugacuuauuaacccuagcugcagacuuagaaaaauuaaaaaguaaagucacaagaacagagaggcccuuaacugcaggaguguauaugggaaaucuaaguagucaacaauuagaucaacggagagcauuacuaaacaugauaggaaugucaggaggcaaucaaggagcacgaacuggaagagacggaguaguaagaguaugggacgucaaaaacgcagaguuauuaaauaaucaauucggaacaaugccaucauuaacguuagcauguuuaacaaaacaaggccaaguagacuuaaacgauguaguacaagcccuaaccgaucuagggcuaauauacacagcaaaauacccaaauacaagugaucuagacagacucacucagucucacccaauauuaaacaugauagauacaaauaaaaguucauuaaacauuucaggauacaauuucagccucggagcagcaguaaaagcaggcgcauguaugcuagacggcggaaauaugcucgaaacgauaaaagucucaccucaaacaauggauggaauacuaaaauccauacucaaaguaaagaaaaguuuaggcauguuuaucuccgauacaccaggagaaagaaacccauaugaaaacauacuauauaaaauauguuuaagcggagauggauggccauacauagcaaguagaacaucuauaacaggcagagcaugggaaaacacaguuguagacuuagaaucaggaggaaaaccacaaaaagccggaucaaacaauagcaauaaaagccuucaaucagcaggauucgccgcaggccuaacauauagccaacuaaugacauuaaaagaugcaauguuacaacuagacccaaaugcaaaaacauggauggacauagaagggagaccagaagacccaguagaaauugcucuauaucaaccaauaaguggauguuacauacacuucuuuagagaaccaacagauuuaaaacaauucaaacaagacgcaaaauacagucaugguauagacguaacagauuuauucgcagcgcaaccagggcuuacaucugcaguaauagaagcauuaccaagaaacaugguaauaaccugucaaggaagugaugacaucagaaaacuauuugaaucacaagggagaaaagauaucaaauuaauagauaucgcguuaucaaaaacagauucaagaaaauacgaaaacgcaguaugggaccaauacaaagaccuaugccauaugcauacaggcguaguaguagaaaagaaaaagaaaggcggaaaagaggaaauaacaccgcacugcgcauuaauggacuguauaauguuugaugcagcagucucaggaggauuaaacacccuaguauuaagagcaguauuaccaagagacaugguauucaggacaucgacaccaaaaguuguacuauaaggacuagugcaucacauuuaaaagcaucucagccuaccaugagaauaagagaaagaaaaugaagaucaauagcuuauucaucucuuuuucuuuuucguugguguaaagccaacacccugucuaaaaaacauaaauuucuuuaaucauuuugccucuuuucucugugcuucaauuaauaaaaaauggaaagaaccuagaucuaaaaaaaaaaaaaaaaaaaaaaaaaaaaaaaaaaaaaaaaaaaaaaaaaaaaaaaaaaaaaaaaugcaucccccccccccccccccccccccccccccccaaaggcucuuuucagagccaccagaauu

SEQ ID NO: 10859 - RNA, 2092 nt, Artificial Sequence
  mRNA product Design i-2 comprising derived and/or modified sequence from LASV(Z0947-SLE-2011;Clade IV)__AIT17841__NP (opt6)
ggggcgcugccuacggagguggcagccaucuccuucucggcaucaagcuuaccaugucagccucaaaagaaauaaaaucauuucuauggacacaaucauuacgucgagaauuaucaggauacugcucaaacauaaaacuacaaguugucaaagacgcacaagcccuacuacacggacuagauuuuagugaaguaagcaacguccaacgauuaaugagaaaagaacgcagagacgacaacgaccuaaaaagacucagagaucuaaaucaagcaguaaacaaccuaguggaacuuaaaagcacccaacaaaaauccauauuaagaguaggaacacuaacaucugaugauuuauuaauacuagcugcagaucuggaaaaguuaaaaucaaaaguaacaagaaccgaaagaccacuaucagccggaguauauaugggaaaucuaucaagucaacaauuagaucaacgaagagcacuacuaaacaugauaggaaugucuggaucaaaucaaggagcaagaaccggaagagacggugucguaagaguaugggacguaaaaaaugcagaacuacuaaauaaccaauuuggaaccaugccaucauuaaccuuagcaugucuaaccaaacaaggacagguugauuuaaaugaugcuguacaagcacuaaccgaccuuggauuaaucuauacagcaaaauauccaaauacuucggacuuagauagacuaacacaaucucacccaauacuaaacaugaucgacacaaaaaaaucaucacuaaacauaucaggauauaauuucucacuaggagcggcaguaaaagccggagcaugcauguuagacggaggaaacaugcuagaaacaaucaaaguaaguccacagacaauggacggaauucuaaaaucaauacucaaaguaaaaaaagcacuaggaauguuuauaucugacgcaccaggagaaagaaauccauacgaaaauauacuauacaaaaucugccuaucaggugacggauggccauacaucgcaucaagaacaucaauaacaggacgagccugggaaaauaccguaguagauuuagaaucagauggaaaaccacaaaaagcuggaucaaacggaucaaauaaaucauuacaaucagcagguuucacagcaggacuuacauacucacaguuaaugacacucaaagaugcuaugcuucaacuagaucccaaugcaaaaacauggauggacauugaaggaagacccgaagaucccguagaaauagcucuauaucaaccaagcucaggauguuacauccacuuuuuuagagaaccaacagacuuaaaacaauucaaacaagacgccaaauacucccacggcaucgauguaacagaucuauuugcagcucaaccaggacuuacaucagcaguaauagaugcauuaccaagaaacaugguaauaacuugccaaggaucagacgacauaagaaaacuauucgaaucucaaggacgaaaagacaucaaguuaauagauauagcacuaucuaagacagauucucgaaaauaugaaaaugcaguaugggaucaauacaaagauuuaugccacaugcauacaggcaucgucguagaaaaaaaaaaaagagguggaaaagaagaaauaacaccucauugcgccuuaauggacugcauaauguuugacgcugccguaucaggaggauuaaauacaaguguauuaagagcaguucuaccacgugacaugguauucagaacaucaacaccaagaguuguuuuauaaggacuagugcaucacauuuaaaagcaucucagccuaccaugagaauaagagaaagaaaaugaagaucaauagcuuauucaucucuuuuucuuuuucguugguguaaagccaacacccugucuaaaaaacauaaauuucuuuaaucauuuugccucuuuucucugugcuucaauuaauaaaaaauggaaagaaccuagaucuaaaaaaaaaaaaaaaaaaaaaaaaaaaaaaaaaaaaaaaaaaaaaaaaaaaaaaaaaaaaaaaaugcaucccccccccccccccccccccccccccccccaaaggcucuuuucagagccaccagaauu

SEQ ID NO: 10860 - RNA, 2092 nt, Artificial Sequence
  mRNA product Design i-2 comprising derived and/or modified sequence from LASV(Josiah;Clade IV)__NP_694869__NP (opt11)
ggggcgcugccuacggagguggcagccaucuccuucucggcaucaagcuuaccaugucagccagcaaagaaauaaaaucauuccucuggacacaaucacuccgccgcgaacucucaggguauugcucaaacauaaaacuccaaguagucaaagacgcccaagcccuccuacacggacuagacuucucagaaguaagcaacguccaacgccuaaugagaaaagaacgcagagacgacaacgaccucaagaggcucagagaccuuaaccaagcggucaacaaccuugucgaacucaaaagcacacaacagaaauccauacuacgagucggcacacuaaccagcgacgaccuccugauccucgcagccgaccucgagaaacuaaaaagcaaagucauccgaacagaaaggccccucuccgccggagucuacaugggaaaccuaagcucccaacaacucgaccaacggcgagcccuccucaacaugaucgggaugucgggcggcaaucagggcgcccgcgccggccgggacggcgucguacgagucugggacgucaaaaacgcagaacuccuuaacaaccaguucggcaccaugcccagccuaacacucgccugccugaccaaacaaggccaaguggaccucaacgacgcagugcaagcccucaccgaccuaggccugaucuacaccgcgaaauacccaaacaccuccgaccuagaccgccugacacaaucgcaccccauacucaacaugaucgacaccaaaaaaucuucgcuaaacaucucaggauacaacuucucccucggagccgcggucaaagcaggagccugcaugcuggacggcggaaauaugcuggaaaccauaaaaguaagcccccagaccauggacggcauccugaaaucaauccugaaagucaaaaaagcccuuggcauguucaucagcgauaccccgggcgaacgcaauccauacgaaaacauccuguacaaaauaugcuuaucaggcgacggcuggcccuacaucgcauccagaacuucgaucacaggccgagcaugggaaaacaccgucgucgaccuagaauccgacggcaaaccucaaaaagcggacagcaacaacucauccaaaagccuacaaucggcaggcuucaccgccggccucacguacucccaacucaugacccucaaagacgccaugcuacagcuagacccaaacgcaaaaaccuggauggacaucgaaggccggcccgaagaccccgucgaaaucgcucucuaccaaccaagcagcgguugcuacauacacuucuucagggaacccaccgaccucaagcaauucaaacaagacgcuaaauacucccacggaaucgacgugaccgaccucuucgcgacacagcccggccucaccagcgcaguaauugacgcacugccaagaaacaugguaauaacaugccaaggaagcgacgacauacgaaaacuccucgaaucacaaggacgcaaagacaucaaacucaucgacaucgcgcucuccaaaacggacagccgcaaauaugagaaugccguaugggaccaauacaaagaccucugccacaugcacaccggaguaguaguagaaaaaaaaaaaagaggagggaaagaagagauaaccccccacugcgccuuaauggauugcaucauguucgaugcagcagugagcggcggccucaacaccuccguccuccgagcaguccuuccgcgcgacaugguauucagaaccuccacaccaagagucguacucuaaggacuagugcaucacauuuaaaagcaucucagccuaccaugagaauaagagaaagaaaaugaagaucaauagcuuauucaucucuuuuucuuuuucguugguguaaagccaacacccugucuaaaaaacauaaauuucuuuaaucauuuugccucuuuucucugugcuucaauuaauaaaaaauggaaagaaccuagaucuaaaaaaaaaaaaaaaaaaaaaaaaaaaaaaaaaaaaaaaaaaaaaaaaaaaaaaaaaaaaaaaaugcaucccccccccccccccccccccccccccccccaaaggcucuuuucagagccaccagaauu

SEQ ID NO: 10861 - RNA, 2092 nt, Artificial Sequence
  mRNA product Design i-2 comprising derived and/or modified sequence from LASV(LP;Clade I)__AAF86702__NP (opt11)
ggggcgcugccuacggagguggcagccaucuccuucucggcaucaagcuuaccaugucaaacuccaaagaaaucaaauccuuccucuggacccaaucacuccgccgcgaacuauccggauacugcucaaacaucaaacuucaaguaguaaaagaugcacaagcccuccuacacggccucgacuuuucagagguaucaaacguccaacgacucaugcguaaacaaaaacgagacgacgcugaccuuaaacgauuacgcgaccuaaaccaagccgugaacaaccuugucgaacucaaauccacccaacagaaaaacguccuccgcguaggcacccucagcuccgacgaccucaucacucucgcugccgaccucgaaaaacuaaaauccaaaguaauccgaaccgaacggccccucuccagcggcguauacaugggcaaccugucaagucaacagcucgaccaacgcagagcccucuugucgaugaucggaauguccggaggaccccaaggcaacagaaccggcggcgacggcguaguacgugucugggacgugaaaaacgccgaacuacuuaacaaccaguuugggacgaugcccagccucacccucgccugccucaccaaacaaggccaagucgaccucaacgacgccguccaagcacucacagaccuuggacucaucuacaccgcaaaguaccccaacuccucggaccuugacaugcugacacaaucacacccaauacugggcaugguugauaccaagaaaagcagccuaaauaucucagguuacaacuucucgcucggagccgcagucaaagccggagccugcaugcucgacggaggcaauaugcuagaaaccauaaaagucucaccccaaacuauggacggcauccucaaaucaauccucaaagucaaaagaucccuuggcauguucaucuccgacacccccggugaacgaaacccuuacgaaaacauacucuacaaaaucugccuauccggcgaaggauggccuuacaucgccagucgcaccuccaucaccggccgcgccugggaaaacacccuagucgaucuugaauccgacaacaaacccccuaaacuaaacucggccggcagcaacaaaucccuccaagccgccggacuaaacgccggacucaccuacagccaacucaugacccuaaaagauugcaugcuccaacucgacccaucaucuaagacauggauagacaucgaaggacgccccgaagacccagucgagaucgcccucuuccaacccuccucaggcugcuacauccacuucuuccgcgaacccaccgaccuaaagcaauucaaacaagacgcaaaauauucacacgguauagacgucacagaccuauucucgacccaaccaggccugaccucugcggucauagaagcacuccccagaaacaugguccuaaccugccaaggcucagacgacauuaagaaacuacucgaaagccaaggccgccgcgauaucaaacuaaucgacaucucccuauccaaagccgacucacgaaaauucgaaaacgcagucugggaccaguacaaagaccugugccauaugcacacaggcgucguagucgaaaagaagaaacgcggaggaaaagaagaaauuacaccccacugcgcccuacucgacugcaucauguucgacgccgccaccacuggcucccuaaacaucaccacccuccgagccguacuaccccgcgacaugguauuccgaaccuccacccccaaagucguacuuuaaggacuagugcaucacauuuaaaagcaucucagccuaccaugagaauaagagaaagaaaaugaagaucaauagcuuauucaucucuuuuucuuuuucguugguguaaagccaacacccugucuaaaaaacauaaauuucuuuaaucauuuugccucuuuucucugugcuucaauuaauaaaaaauggaaagaaccuagaucuaaaaaaaaaaaaaaaaaaaaaaaaaaaaaaaaaaaaaaaaaaaaaaaaaaaaaaaaaaaaaaaaugcaucccccccccccccccccccccccccccccccaaaggcucuuuucagagccaccagaauu

SEQ ID NO: 10862 - RNA, 2092 nt, Artificial Sequence
  mRNA product Design i-2 comprising derived and/or modified sequence from LASV(803213;Clade II)__AAF86704__NP (opt11)
ggggcgcugccuacggagguggcagccaucuccuucucggcaucaagcuuaccauguccgcaagcaaagaagucaaaucauuccucuggacccaaucacuccgccgagaacucucgggcuacugcucaaacaucaaacuacaagucguaaaagacgcccaagcccuccuccacggucucgacuucuccgaagucaacaacguacagcgccucaugcgaaaacaaaaacgcgacgacggcgaccuuaaacgacuacgagaccuaaaccaagccguaaacaaccucgucgaacugaaauccacccaacaaaaaucaauccugcgaguugguacccucacauccgacgaccuccuaacacuagcagccgaccucgaaaaacucaaguccaaagucauacgcaccgaacgcccacucaguuccggcguauacaugggcaaccucucuacccaacaacucgaacaacgccgcgcgcuccuaaauaugaucgguaugguagguggagcccaaggcacccaaccaggccgcgacggcgugguacgcgucugggacgugaaaaaccccgaucucuuaaacaaucaauucggcacaaugcccucccucacacuagcaugccugaccaaacaaggacaagucgaccuaaaugacgccguccuagcucuuacagaccuaggacucaucuauaccgccaaauacccuaacuccuccgaccucgaccgacucucacaaucucacccaauccuaaacauggucgacaccaagaaauccucccucaacaucucgggauacaacuucagccucggcgccgccgucaaagcaggcgccugcaugcuagacggcggcaacaugcucgaaaccaucaaaguaacgccccaaaccauggacggcauccucaaauccauccucaaggucaaaagaagccucggcauguucguuucggacacucccggcgaacgcaaccccuacgaaaacauccuauacaaaaucugccuaucaggcgacggcuggcccuacauagcaucacgaaccaguaucguaggccgagcaugggaaaauaccacaguagaccucgaguccgacggaaaaccucaaaaagucggcacugccggaucaaacaaaucccuccaaagcgccggcuucccaaccggccuuaccuauucccaacuaaugacccucaaagauuccaugaugcaauuagaccccuccgccaagacauggaucgacaucgaaggccgucccgaagacccaguagaaaucgcccucuaccaacccaugagcggaugcuacauucacuuuuucagagaacccaccgaccucaaacaauucaaacaagacgccaaguacucccaugggauagacgucgccgaccucuuccccgcccaacccggccucaccucggccguaauagaggcccuaccaagaaacaugguccuaaccugccaagguuccgacgacaucaagaaacuccucgacucacaaggcagacgcgacaucaaacuaaucgacaucucccucuccaaagucgacucacgaaaauucgaaaacgccgucugggaucagugcaaagaccucugccacaugcacacaggcgucgucgucgaaaagaagaaacgaggcggaaaagaagaaauaacaccacacugcgcccucauggauugcaucauguucgacgccgccguaucuggcgggcuaaacauuccaguccugcgagccguccucccccgcgacaugguauuccgcaccuccuccccaaaagucguccucugaggacuagugcaucacauuuaaaagcaucucagccuaccaugagaauaagagaaagaaaaugaagaucaauagcuuauucaucucuuuuucuuuuucguugguguaaagccaacacccugucuaaaaaacauaaauuucuuuaaucauuuugccucuuuucucugugcuucaauuaauaaaaaauggaaagaaccuagaucuaaaaaaaaaaaaaaaaaaaaaaaaaaaaaaaaaaaaaaaaaaaaaaaaaaaaaaaaaaaaaaaaugcaucccccccccccccccccccccccccccccccaaaggcucuuuucagagccaccagaauu

SEQ ID NO: 10863 - RNA, 2095 nt, Artificial Sequence
  mRNA product Design i-2 comprising derived and/or modified sequence from LASV(GA391;Clade III)__CAA36646__NP (opt11)
ggggcgcugccuacggagguggcagccaucuccuucucggcaucaagcuuaccauguccgcaagcaaagaagugagauccuuccucuggacccaaucgcuccgccgcgagcucucaggcuacugcucgaacaucaaauuacaagucgucaaagacgcacaagcccuccuacacggacucgacuucucagaaguguccaacguccaacgacugaugaggaaacaaaagagagacgacggcgaccuaaaacgacuacgcgaccuaaaccaagccgucaacaaccuagucgaacuaaaauccacacaacaaaaaucaguccuucgcguaggaacccuaucaucagacgaccuccucauccucgcagccgaccuagaaaaacugaaaucaaaaguaacacgaaccgaacggccacucuccagcgggguauacauggggaaccucuccucccaacaacuugaccaaagacgcgcucuccuuaacaugaucggcaugacaggcgugagcggagguggcaaaggcgcaucggacgggaucguccgcguaugggacgucaaaaacgccgaacuacucaacaaccaauucggaaccaugccaucccucacacucgccugccucaccaagcaaggacaaguggaccuaaacgacgccguccaagcccucaccgaccucggccucaucuacaccgcgaaauacccaaacagcucggauuuggaccgacuaucccaaucccacccaauacuaaacaugaucgacaccaagaaauccagucuaaacaucuccggcuacaacuucucccucggagccgcggucaaagccggcgccuguaugcuggacggcggcaacaugcuagaaaccaucaaagucucuccccaaaccauggacgguauccucaaauccauccugaaagucaagaaaagccucggcauguucgucucagacacaccgggagaacgcaaccccuacgaaaacauccuguacaaaaucugucucucaggcgacggcuggcccuacaucgccagccggaccagcaucguaggcagagccugggaaaacaccguaguagaccucgaacaagacaacaaaccccagaaaauaggaaacggcggcucaaacaaaucacuccaaagcgccggauucgccgccggacugaccuacagccaacuaaugacccuaaaagacuucaaaugcuucaaccucauacccaaugccaaaacauggauggacauagaaggacgacccgaagacccaguagagaucgcccucuaucaaccuuccucaggauguuacguccacuucuucagagagcccaccgaccugaaacaguucaaacaagacgccaaauacucacacggcaucgacgucacagaccuauucgccgcccaacccggccugaccuccgccgucaucgaagcccucccacgcaacauggucauaacaugccaaggcuccgaagacaucagaaaacuacucgaaucccaaggccgccgcgacauuaagcuaauagacauaacccuauccaaagccgauagccguaaauucgaaaacgcagucugggaccaauuuaaagaccuaugccacaugcacaccggcgucgucguggaaaagaagaaacgaggcggcaaagaagaaaucacaccccacugcgcccucauggacugcaucauguucgacgccgccguuucgggcggccucgacgccaaaguccuacgcgucguccuaccccgagacauggucuuccgcaccagcacgcccaaaguaguccucuaaggacuagugcaucacauuuaaaagcaucucagccuaccaugagaauaagagaaagaaaaugaagaucaauagcuuauucaucucuuuuucuuuuucguugguguaaagccaacacccugucuaaaaaacauaaauuucuuuaaucauuuugccucuuuucucugugcuucaauuaauaaaaaauggaaagaaccuagaucuaaaaaaaaaaaaaaaaaaaaaaaaaaaaaaaaaaaaaaaaaaaaaaaaaaaaaaaaaaaaaaaaugcaucccccccccccccccccccccccccccccccaaaggcucuuuucagagccaccagaauu

SEQ ID NO: 10864 - RNA, 2092 nt, Artificial Sequence
  mRNA product Design i-2 comprising derived and/or modified sequence from LASV(AV;Clade V)__CCA30315__NP (opt11)
ggggcgcugccuacggagguggcagccaucuccuucucggcaucaagcuuaccaugagcgcauccaaagaagucaaaagcuuccucuggacacaaucccuacggcgcgaacuauccggcuacugcucuaacaucaaacuccaagucguuaaagacgcccaagcccuccuccacggacucgacuucuccgaaguuuccaacguacaaagacuuaugcgaaaacagcgccgcgacgacucagaccuaaaacgacugcgcgaccuaaaccaagcaguaaacaaucucgucgaacucaaaagcacccaacaaaaaucaguucuccgcgucggcacucucuccuccgacgaccuccucacccuagccgcugaccuagaaaaacugaaauccaaagucaccagaaccgaacgaccccucuccucaggcgucuacaugggaaaccucaguucacaacaacucgaccaacgccgagcccuccuaaaccugaucggaaugacaaacggaagccaaggcucacaagcaggcagagacggcgucgugcgcgucugggacgucaaaaacgcggaacuccuaaacaaccaauucggcaccaugcccucacugacccucgcuugccuuaccaaacaaggccaaguagaccucaacgacguuguccaagcacuuaccgaccuaggacugauauacacugccaaauaccccaacaccuccgaccucgaccgccuaacccaaagccaccccauucuaaacaugaucgacacgaaaaaauccucauuaaacaucuccggauacaacuucucacugggagcagcaguaaaagcaggggcauguaugcucgacggcggaaacaugcucgaaaccaucaaggucagcccccaaagcauggacggcauucuaaaaucaauccuaaaaguaaaacgcgcccuaggaauguucguauccgacacccccggcgaacgcaaccccuacgaaaacauacucuauaaaaucugccuaucaggcgacggcuggcccuacauagccucccgcaccucgaucgucggcagagccugggaaaacaccguagucgaccucgaaaccgacggaaaaccacaaaaaauaggcuccggaaacagcaacaaaucucuccaaagcgcaggauucuccgccggccugaccuacagccaacucaugacccucaaagacgccaugcuccaacucgacccuaacgcaaaaaccuggauggacaucgaaggacgccccgaagaccccguagaagucgcccuauaccagccuaucuccggcuguuacauccacuucuuccgcgaacccacagaccuaaagcaauucaaacaagacgccaaauacagccacggcaucgacauagccgaccucuucgccgcucaaccuggccuaaccucugccgucaucgaagcccucccacgcaacauggucaucacaugccaaggcagcgaggacaucaaaaaacuccuagaaucccaaggccguaaagacaucaaacugauagacaucgcacuauccaaaaucgacucccggaaauucgaaaacgcggucugggaccaguauaaagaccucugccauaugcacacuggagucgucguagaaaaaaaaaaaagaggcggaaaagaagaaaucacgccacacugcgcccuuauggacugcauaauguucgacgcagcugucagcggcggccucaacacucucguccucagagccguccucccccgagauauggucuuccgcaccucaacaccccgcguaguccucuaaggacuagugcaucacauuuaaaagcaucucagccuaccaugagaauaagagaaagaaaaugaagaucaauagcuuauucaucucuuuuucuuuuucguugguguaaagccaacacccugucuaaaaaacauaaauuucuuuaaucauuuugccucuuuucucugugcuucaauuaauaaaaaauggaaagaaccuagaucuaaaaaaaaaaaaaaaaaaaaaaaaaaaaaaaaaaaaaaaaaaaaaaaaaaaaaaaaaaaaaaaaugcaucccccccccccccccccccccccccccccccaaaggcucuuuucagagccaccagaauu

SEQ ID NO: 10865 - RNA, 2092 nt, Artificial Sequence
  mRNA product Design i-2 comprising derived and/or modified sequence from LASV(Togo/2016/7082;Clade VI)__AMR44578__NP (opt11)
ggggcgcugccuacggagguggcagccaucuccuucucggcaucaagcuuaccauguccaacucuaaagaagucaaaucauuccucuggacccaaucacuccgccgcgaacucuccgguuacugcuccaauauaaaacugcaaguagucaaagacgcacaagcucuccuccacggccucgauuuuuccgaaguguccaacguccaacgacucaugagaaaacaaaaacgagacgacggcgaccucaaacgacugcgcgaccuaaaccaagccgucaacaaccuugucgaacuaaaaucaguccagcagaaaucaauucugcgcgucggcacacucacuuccgacgaccuacucacccuagcagccgaucucgaaaaacuuaaaucaaaagucacucguaccgaacgcccacuauccagcggcgucuacauggggaaccucagcucacaacaacucgaccaaagacgagcauuacucuccaugauaggaaugucaggcggcaaccaaaacucacaacccaaaggcgacggggucguccgcgucugggacgucaaaaacgccgaccuucucaauaaccaauucggcacaaugcccucacucacccucgcaugccuaaccaagcagggucaagucgaucucaacgacgccguccaggcacuaacagaccuaggacucaucuacaccgccaaauaccccaacuccucugaccucgaccgccucucacaaucacaccccauccugaacaugaucgacaccaagaaaucaagccucaacauuuccggcuacaacuuuucucuaggugcggccaucaaaacaggcgccuguaugcucgacggcggcaacaugcucgaaaccaucaaaguaacaccccaaaccauggacggcauacucaaauccauccucaaaguaaaacgaucccuagggauguuuaucuccgacacacccggcgaacgcaaccccuacgaaaauauccuauacaaaaucugccuaucuggcgacggauggccauacaucgccucacgaaccgccaucauaggccgggccugggaaaacaccguagucgaccucgaauccgacagcaaaccccagaaaauaggcucuaacggauccaacaaaucacuacaauccgcaggcuucgccccaggccucaccuauagccaacuaaugacccucaaagacagcaugcuccaacuugacccaaacgccaaaacauggaucgacaucgaaggacgcccagaagacccaguagaagucgcccucuuccaacccauaucgggcugcuacauccacuucuuccgcgagccaacagaccucaaacaauucaagcaagacgccaaauacucccacggaauagacgucaccgaccuauucgcagcacaacccggucucacauccgccguuaucgaggcccucccccggaacaugguccugaccugccaaggauccgacgacaucaagaaacuccucgacagucaaggacguagagacauaaaacuuauagacgucucccuaaacaaaaucgacagccgcaaauucgaaaacgcagucugggaccaauacaaggaccuaugccauaugcacaccggcgucgucgucgaaaagaaaaagaaaggcggcaaagaagaaaucacgccccacugcgcccuacuagacugcaucauguucgacgcugccgucucgggaggccucaacgcaaccguacuccgugccguacucccccgcgacaugguauuccggaccucuuccccaaaagucgucuuauaaggacuagugcaucacauuuaaaagcaucucagccuaccaugagaauaagagaaagaaaaugaagaucaauagcuuauucaucucuuuuucuuuuucguugguguaaagccaacacccugucuaaaaaacauaaauuucuuuaaucauuuugccucuuuucucugugcuucaauuaauaaaaaauggaaagaaccuagaucuaaaaaaaaaaaaaaaaaaaaaaaaaaaaaaaaaaaaaaaaaaaaaaaaaaaaaaaaaaaaaaaaugcaucccccccccccccccccccccccccccccccaaaggcucuuuucagagccaccagaauu

SEQ ID NO: 10866 - RNA, 2092 nt, Artificial Sequence
  mRNA product Design i-2 comprising derived and/or modified sequence from LASV(KAK-428;Clade n.d. (VII))__ANH09741__NP (opt11)
ggggcgcugccuacggagguggcagccaucuccuucucggcaucaagcuuaccaugagcaacucaaaagaagucaaaucauuccucuggacccaaucacuccgcagagaauuauccggcuacugcaccaacaucaaacuccaaguagucaaagacgcccaagcccuacuacacggucucgacuucuccgaagucagcaauguccaacgacucaugcgaaaacaaaaacgugacgacaacgacuuaaaaagacucagagaccugaaccaagccguaaacaaccuagucgaacucaaaucgguccaacaaaaauccgugcuaaaagugggcacccucaacucagacgaccuuuuaacacucgccgccgaccucgaaaaacugaaaucgaaagucguccgaaccgaacgcccccucuccuccggcguauacaugggcaaccuauccucacaacaacucgaccaacgccgugcgcuccuaaacaugaucgguauggccggaggcagccaaggcaaccaacccucccgagauggagucgugcgagucugggacgucaaaaacgccgaccuucucaacaaccaauucgguacaaugccaucacucacgcuagccugccuaaccaaacagggacaaguagaccucaacgacgucguccuagcccuuacagaccuaggccugauauacaccgccaaauacccaaacuccuccgaccucgaccgcuuaagccaaaaccacccaguacuaaacaugaucgacgucaacaaaucaucccucaacauauccggcuacaacuucagccucggcgcagccgucaaggccggugcaugcaugcucgacggcggaaacaugcuagaaacuaucaaaaucagcccccaaaccguagacggcauacuaaaauccauacucaaagugaaacgugcacuaggcauguucguauccgacaccccaggagaacgaaaccccuacgaaaacauccuuuacaaagucugccuaucaggaaacggcuggcccuacaucgcaagccgcacaucaaucgucggcagagccugggaaaacaccguagucgaucuagagucgaacaaaaaccaaccuaaagucgguaauaacggauccaacaagaugcuucaauccuccggcuucgccaccggccucaccuacucccaacucaugacacuacgggacuccaugcuccaacucgaccccaccgcaaaaaccuggauugacaucgaaggccgccccgaagacccuguugagcucgcacuauuccaaccauccuccggcugcuacauacacuucuuccgcgaaccuacagaccucaagcaauucaaacaggaugccaaauacagccacggcaucgacgugaacgaccuauucucggcccaacccggccuaaccagugccguccuagaagcccucccacgcaacaugguccuaaccugccaagggagcgacgacauccgcaaacuccucgacucacaagaccgcaaagacauaaaacucaucgacaucucccucagcaaggccgacgcccgcaaauucgaaaacgacguaugggaccaauucaaagaccucugccacaugcacaccggcaucguaguagaaaagaagaagaaaggcggaaaacaagaaaugaccccucauugcgcccuccuagacugcaucauguucgacgcagcugugagcggcggccucaacguccccacccucagagcaguccuaccaacagacauggucuuccgcaccauaaccacaaaaguaguacuauaaggacuagugcaucacauuuaaaagcaucucagccuaccaugagaauaagagaaagaaaaugaagaucaauagcuuauucaucucuuuuucuuuuucguugguguaaagccaacacccugucuaaaaaacauaaauuucuuuaaucauuuugccucuuuucucugugcuucaauuaauaaaaaauggaaagaaccuagaucuaaaaaaaaaaaaaaaaaaaaaaaaaaaaaaaaaaaaaaaaaaaaaaaaaaaaaaaaaaaaaaaaugcaucccccccccccccccccccccccccccccccaaaggcucuuuucagagccaccagaauu

SEQ ID NO: 10867 - RNA, 2092 nt, Artificial Sequence
  mRNA product Design i-2 comprising derived and/or modified sequence from LASV(Pinneo-NIG-1969;Clade I)__AIT17837__NP (opt11)
ggggcgcugccuacggagguggcagccaucuccuucucggcaucaagcuuaccauguccaauuccaaagaaaucaaauccuuccucuggacacaaucacuccgccgagaacucucaggauacugcucaaacaucaaacuacaaguagugaaagacgcacaagcccuucugcacggucucgauuucucagaagucuccaacguacaacgccucaugagaaaacaaaaacgcgacgacgcagaccucaaacgacuccgagaccuaaaccaagccgucaacaaccucgucgagcucaaauccacccaacagaaaaacguacuccgagucggaacccucagcucagacgaccucaucacgcuagcggcagaccucgaaaaacuuaaaagcaaagucauccgcacagagcgcccacuauccuccggagucuacauggggaaccucuccucccaacaacucgaccaacgccgcgcccuccucucuaugaucgguauguccggcggcccacaaggaaaucgcaccggcggagacggaguaguacgcguaugggacgucaaaaacgcagaacuccuuaacaaccaauucggaacaaugccaucccugacccuggcaugccuaacaaaacaaggccaaguagaccuaaacgacgcaguacaagcucucacagaccuaggccucaucuacaccgcaaaauaccccaacucguccgaccucgacaugcuuacccaaucccacccaauccucggaaugguagacacgaaaaagagcucccuaaacaucagcggauauaacuucucgcugggcgccgcggucaaagcgggcgccugcaugcuggacggcggaaacauguuagaaaccaucaaggucucgccccagacaauggacgggauacuaaaauccauucuuaaagucaaacgcucucuaggcauguucaucuccgacacccccggcgaacgcaacccauacgaaaauauacuauacaaaaucugucucagcggugaaggcuggcccuacauagccagcagaaccagcaucaccggacgcgcgugggaaaacacacucgucgaccucgaaucagacaacaagccacccaagcucaacucagcaggguccaacaaaucacuacaagcagccggccucaacgccggccuaaccuacucccaacuaaugacccucaaagacugcaugcuccaacuugaccccagcuccaaaaccuggaucgacaucgaaggacgccccgaggacccagucgaaauagcccuauuccaacccuccagcggaugcuacauacacuucuucagagaaccaacagaccucaaacaauucaagcaagacgccaaauauucucacggcaucgacgugaccgaccucuucuccacacagcccgggcucaccagugcagucauagaagcccucccacgaaacaugguacucacaugccagggaagcgacgacauaaagaaacuccucgaaagccaagguagacgggacaucaaacucauagacaucucccucuccaaagcagauucacgcaaauucgaaaacgccgucugggaccaauacaaagaccuuugccacaugcacaccggagucguagucgaaaagaagaaacgagguggaaaagaagaaaucacaccccacugcgcccuacuagacugcauaauguucgacgccgcaaccacaggaagccuaaacaucaccacacucagggccguccuaccccgcgacaugguguucagaacuagcacacccaaagucguauuauagggacuagugcaucacauuuaaaagcaucucagccuaccaugagaauaagagaaagaaaaugaagaucaauagcuuauucaucucuuuuucuuuuucguugguguaaagccaacacccugucuaaaaaacauaaauuucuuuaaucauuuugccucuuuucucugugcuucaauuaauaaaaaauggaaagaaccuagaucuaaaaaaaaaaaaaaaaaaaaaaaaaaaaaaaaaaaaaaaaaaaaaaaaaaaaaaaaaaaaaaaaugcaucccccccccccccccccccccccccccccccaaaggcucuuuucagagccaccagaauu

SEQ ID NO: 10868 - RNA, 2092 nt, Artificial Sequence
  mRNA product Design i-2 comprising derived and/or modified sequence from LASV(ISTH0009-NIG-2011;Clade II)__AIT17405__NP (opt11)
ggggcgcugccuacggagguggcagccaucuccuucucggcaucaagcuuaccaugucagucuccaaagaagucaaaucauuccucuggacccaaucccugcgacgggaacucagcggcuacugcuccaacaucaaacugcaagucgucaaagacgcccaagcacuacuccacggccuagauuucucagaaguaagcaacguccaacgacucaugcguaaacaaaaacgcgaugacucagaccuaaagcgacuacgagaccugaaccaagcaguaaacaaccucgucgaacucaagucuacccaacagaaaagcauacuccgagucggcacccucacuuccgaugaccuucucacccuagccgccgaccucgagaaacucaaauccaaagucauccgaacagaacgcccccuaucaagcggcguauacaugggcaaccuauccacacaacagcuagagcaacgccgcgcccuacuaaacaugauaggcaugguagguggagcgcaaggcacucagccaggccgcgacggcgucguacgcguaugggacgucaaaaacccugaccuccucaacaaccaauucggcaccaugcccagccuaacacucgccugccuuaccaagcaaggccaaguagaccucaaugacgcggucuuagcccucaccgaccucggccucaucuacacagccaaauaccccaacuccucagaccucgaccgccugagccaaucccacccaauucucaacauggucgacauuaaaaagagcagccuuaacauauccggcuacaacuucagccuaggcgccgcaguaaaagccggcgccugcaugcucgacggcggcaacaugcuagaaacgaucaaagucacgccccaaaccauggacggcauacucaaauccauacucaaaguuaaacgcucccucggcauguucgucuccgauacccccggcgaacgcaaccccuacgaaaacauccuuuacaaaaucugccucagcggagacggauggccauacaucgcuucccgcaccagcauagucggccgcgcaugggaaaacaccaccguagaccucgaauccgacggcaaaccccaaaaagucggcucagcaggaucaaacaaaucacuccagagugccggcuuccccacgggccuuacauacucccaacuaaugacccucaaagacagcaugaugcaacuggacccauccgccaaaaccuggauagacauagaaggccgacccgaagacccaguagagauagcccucuaccaacccaugagcggaugcuacauacacuucuuccgagaaccuaccgaccucaagcaauucaaacaagacgccaaguacucccacggcaucgacguggccgaccucuucccagcccagcccggccucaccagcgccgucaucgaagcucuaccccguaacaugguacucacaugccaaggaagcgacgacauuaaacgccuccucgauucccaaggacgacgcgacaucaaacucauagacauagcccucuccaaagccgacucccgccgcuucgaaaacgcaguaugggaccaaugcaaagaccucugccacaugcacacuggcgucgucguggaaaagaaaaagcgaggcggcaaagaagaaaucacgccacacugcgcccuaauggacugcaucauguacgacgccgcuguaucgggcggacuuaacauccccguccuaagagcgguccuaccccgagauauggucuuccgcacgucaucccccaaaguaguccucuaaggacuagugcaucacauuuaaaagcaucucagccuaccaugagaauaagagaaagaaaaugaagaucaauagcuuauucaucucuuuuucuuuuucguugguguaaagccaacacccugucuaaaaaacauaaauuucuuuaaucauuuugccucuuuucucugugcuucaauuaauaaaaaauggaaagaaccuagaucuaaaaaaaaaaaaaaaaaaaaaaaaaaaaaaaaaaaaaaaaaaaaaaaaaaaaaaaaaaaaaaaaugcaucccccccccccccccccccccccccccccccaaaggcucuuuucagagccaccagaauu

SEQ ID NO: 10869 - RNA, 2092 nt, Artificial Sequence
  mRNA product Design i-2 comprising derived and/or modified sequence from LASV(ISTH2010-NIG-2012;Clade II)__AIT17483__NP (opt11)
ggggcgcugccuacggagguggcagccaucuccuucucggcaucaagcuuaccauguccgcuucaaaagaagucaaaucauuccuuuggacccaaucccuacgacgugagcucagcgguuacugcagcaacauaaaacuacaggucgugaaagacgcccaagcgcuacuucacggacucgacuucagcgaggucuccaacguccaacgacucaugagaaaacaaaaacgcgacgacucagaccuuaaaagacuucgagaccucaaucaagccguaaacaaccucgucgaacuaaaauccacccaacagaaaagcauccuucgcgucggcacacucaccuccgacgaccugcuaacccuagccgccgaucucgaaaaacucaaaucaaaagucaucaggaccgagcgcccccuauccucaggcgucuacauggguaaccuauccacccaacaacucgaacaaaggcgagcccugcuaaacuuaaucggcauggucggcggcgcccaaggcacccaaccaggacgagacggcgucguccgaguaugggacgucaaaaaccccgaccuacucaacaaccaauucggcacgaugccaagccucacccucgccugccucacuaaacaaggacaagucgaucuaaaugacgccguccuggcgcucacagaccuaggacucauauacacagccaaauaccccaacuccuccgaccucgaccgccuaucacaaagccaccccauucucaacaugguagacaccaagaaaagcagccucaacaucagcgguuucaacuucucacuaggcgcggccgugaaagcgggagccugcaugcuagacggcggcaauaugcucgaaacaaucaaaguaacaccacaaaccauggacggcauacucaaaagcauccucaaagugaagaaaucacucggcauguucguauccgacacuccaggcgaacguaacccauacgaaaacauccucuacaaaaucugccuuuccggcgacggcuggcccuacaucgccuccagaaccucaaucgucggcagagcuugggaaaacacgaccguagaccuagaaucugacggcaaaccacacaaagucggcaccgccggcuccaacaaaagccugcaauccgccggauucccaaccggccuaacauauucacaacucaugacccucaaagacuccaugaugcaacuggaccccagcgccaaaacauggauagacauagagggccgcccggaagaccccguggaaaucgcccucuaccaacccaugagcggcugcuacauacacuucuuccgugaaccaacggaccuaaaacaauucaaacaagacgcuaaauacucacacggcaucgacguagccgaccucuuccccgcccaacccggccucaccagcgccguaauugaagcacuaccccgcaacaugguccuuaccugccaaggauccgacgacauaaaacgccuacucgacucacaaggacgccgcgacauaaaacucauagacauagcccuauccaaagccgauucccggcguuucgaaaacgcaguuugggaccaaugcaaagaccuaugccacaugcacacaggcgucgucguagagaaaaagaaacgcggcggaaaagaagaaauaacaccucacugcgcccucauggacugcauaauguaugacgcagcaguauccggaggccucaacauaccaguacuacgggcgguccuuccacgcgacaugguauuccgaacaagcucaccaaaagucguccucugaggacuagugcaucacauuuaaaagcaucucagccuaccaugagaauaagagaaagaaaaugaagaucaauagcuuauucaucucuuuuucuuuuucguugguguaaagccaacacccugucuaaaaaacauaaauuucuuuaaucauuuugccucuuuucucugugcuucaauuaauaaaaaauggaaagaaccuagaucuaaaaaaaaaaaaaaaaaaaaaaaaaaaaaaaaaaaaaaaaaaaaaaaaaaaaaaaaaaaaaaaaugcaucccccccccccccccccccccccccccccccaaaggcucuuuucagagccaccagaauu

SEQ ID NO: 10870 - RNA, 2092 nt, Artificial Sequence
  mRNA product Design i-2 comprising derived and/or modified sequence from LASV(Lassa virus/H.sapiens-wt/NGA/2015/ISTH_0543;Clade II)__AVO03640__NP (opt11)
ggggcgcugccuacggagguggcagccaucuccuucucggcaucaagcuuaccaugagcgcaagcaaagaaguaaaauccuuccuguggacacaaucccuccggcgcgagcucuccggcuauugcuccaacaucaaacugcaaguggucaaagacgcacaagcacuacuacacgggcuagacuucucggaagucuccaacguccaacgacucaugcgcaaacaaaaacgagacgacagcgaccuaaagcgcuuacgagaccucaaccaggccgucaacaaccuggucgagcuaaaguccacgcaacaaaagagcauccugcgaguaggaacgcucacauccgaugaccuccucacccuagcagcugaccucgaaaaacucaaauccaaagucauccgaacugaaagaccccucuccagcggaguauacaugggcaaucuauccacccagcaacuugaacaaagacgcgcacuccuaaacaugauaggaauggucggcggagcccaaggaacacaacccggccgcgacgguguagucagagugugggacgucaaaaacccagaccuucuaaacaaccaguuuggaaccaugcccucacucacccuugcaugccucaccaagcaaggccaaguagaccucaacgacgccguacuagcacuaaccgaccugggacucaucuacaccgccaaauaccccaacagcucagaccucgaccgacuaagccaaagccacccaauacugaauauggucgacacaaagaaauccagccuaaacauaagcggcuacaacuucucccuaggagccgcggucaaagccggagccugcaugcuagacggcggaaacaugcuggaaacuauaaaagucacaccccaaacaauggacggcauacucaaaucaauacucaaaguaaagaaaagccucggcauguucgucucagacacacccggcgaacgcaaccccuacgaaaacauacuauacaaaaucugccuuucaggcgauggauggccauacauagcauccagaaccucaaucguaggcagagcaugggaaaacaccaccguugaccucgagucagacggaaaaccccaaaaagucgggucagcaggcaguaacaaaucccuccaaagugcaggauuccccaccggccugaccuacucacaacucaugacucucaaagacaguaugaugcaacucgaccccucggccaaaacauggaucgacaucgagggaagacccgaagaccccgucgaaauagcccuauaccaaccaauguccggaugcuacauacacuucuuccgagagccaaccgaccucaaacaauucaaacaagacgccaaauacucacacggcauagacguagcugaccucuuccccgcccaacccggccucaccuccgcugucaucgaagcccucccccgcaacaugguacuaacaugucaagguucugacgacaucaaacgccuccucgacucccaaggacgcaaagacaucaaacuaauagacaucgcccucagcaaagcugacucccgaagauucgaaaacgcagucugggaccaaugcaaagaccucugccacaugcacaccggagucgucgucgaaaagaagaaaagaggcgggaaagaagaaaucacaccccacugcgcccugauggacugcauuauguacgacgccgccguuuccgguggucucaacauccccguacuccgagccguccuaccacgcgacauggucuuccgcaccuccagccccaaaguaguccuauaaggacuagugcaucacauuuaaaagcaucucagccuaccaugagaauaagagaaagaaaaugaagaucaauagcuuauucaucucuuuuucuuuuucguugguguaaagccaacacccugucuaaaaaacauaaauuucuuuaaucauuuugccucuuuucucugugcuucaauuaauaaaaaauggaaagaaccuagaucuaaaaaaaaaaaaaaaaaaaaaaaaaaaaaaaaaaaaaaaaaaaaaaaaaaaaaaaaaaaaaaaaugcaucccccccccccccccccccccccccccccccaaaggcucuuuucagagccaccagaauu

SEQ ID NO: 10871 - RNA, 2092 nt, Artificial Sequence
  mRNA product Design i-2 comprising derived and/or modified sequence from LASV(Lassa virus/H.sapiens-wt/NGA/2016/ISTH_0009;Clade II)__AVO03572__NP (opt11)
ggggcgcugccuacggagguggcagccaucuccuucucggcaucaagcuuaccauguccgccuccaaagaagucaaauccuuccuguggacccaaucccuccgccgcgaacucuccggauacugcucuaacaucaaacuccaaguuguaaaagacgcacaagcgcuacuacacggccuagacuucuccgaaguauccaacguacaacgccucaugcgcaaacaaaaacgagacgacucagaccucaaacgucuccgcgaucucaaccaagccguaaacaaccuagucgaacucaaaaguacgcaacaaaaaucuauccuucgagucggcacacugacaagcgacgaccugcucacccucgccgccgaccucgaaaaacucaaauccaaaguaauccgaaccgaacgcccccucucuuccgggguauacaugggcaaccuuuccacccaacaacuagagcaacgccgcgcccuccucaacaugaucgggaugguagguggagcccaaggaacacaaccuggacgagacggggucguccgagucugggacgucaaaaaccccgaccuccucaacaaccaauucggcacaaugcccucccuaacucucgccugccucacaaaacaaggacaaguagaucucaacgacgccguccuagcucuaacagaccuaggacuuauauacaccgccaaguacccaaacuccucggaccucgacagacucucgcaaucacacccgauacuaaacauggucgacaccaaaaagucaucccugaacaucucgggcuacaacuucucucucggcgccgcagucaaggccggagccugcaugcucgacggcggaaacaugcucgagacgaucaagguaacaccacaaaccauggacggcauacucaaauccauccuaaaagucaagaaaagccucggaauguucgugagcgacacccccggcgaaagaaaccccuacgaaaacauacucuauaaaaucugccuaucuggcgacgguuggcccuacaucgcuagccgcaccuccaucgucggacgcgcaugggagaauacaacagucgaucucgaaagcgacggcaaaccccaaaaagucggcagcgccggaaguaacaaaucacuccaauccgccggcuucccaaccggccuaaccuacucccaacucaugacccucaaggacuccaugaugcaacuugaccccagcgccaaaaccuggaucgacaucgaaggaagaccugaagaccccgucgagaucgcacucuaccaacccauguccggcugcuacauccacuucuuccgcgaaccgaccgaccucaagcaauucaaacaagacgccaaauacagccacggcauugacgucgccgaccuauuccccgcacagcccggccuuaccucggccguaauugaagcccuuccacgcaacaugguccuaaccugccaagguuccgacgacaucaaacgccuccuugacucacaaggccgccgcgacauaaaacucauagacauagcccuaucgaaagcagauucacgacgauucgaaaacgccgucugggaccaaugcaaggaccuuugccacaugcacaccggcguagucguagagaaaaagaaaagaggcgggaaagaagaaaucacuccccacugcgcacucauggacugcauaauguacgacgcagccguuagcggcggccuuaacauaccaguucuacgagccguacucccccgagacaugguauuccgaaccucaagccccaaagucguccuuuaaggacuagugcaucacauuuaaaagcaucucagccuaccaugagaauaagagaaagaaaaugaagaucaauagcuuauucaucucuuuuucuuuuucguugguguaaagccaacacccugucuaaaaaacauaaauuucuuuaaucauuuugccucuuuucucugugcuucaauuaauaaaaaauggaaagaaccuagaucuaaaaaaaaaaaaaaaaaaaaaaaaaaaaaaaaaaaaaaaaaaaaaaaaaaaaaaaaaaaaaaaaugcaucccccccccccccccccccccccccccccccaaaggcucuuuucagagccaccagaauu

SEQ ID NO: 10872 - RNA, 2092 nt, Artificial Sequence
  mRNA product Design i-2 comprising derived and/or modified sequence from LASV(Lassa virus/H.sapiens-wt/NGA/2016/ISTH_0017;Clade II)__AVO03568__NP (opt11)
ggggcgcugccuacggagguggcagccaucuccuucucggcaucaagcuuaccaugucagcaucaaaagaagucaaaucauuccucuggacccaaucacuacggcgcgaacucagcggcuacugcuccaguaucaaacuacaggucguaaaagacgcccaagcccuacuccacggacuagacuucucagagguuucaaacguacaacguuuaaugcguaaacagaaaagagacgacuccgaccucaaacggcuccgagaccucaaccaagccguuaacaaccuagucgaacucaagucgacacaacaaaaaucaauccuccggguaggcacacucaccucagacgaccuccucacccucgcugccgaccuagagaaacuaaaaucaaaagucauacgcaccgaacgaccucugucaucaggcgucuacaugggaaaccucagcacccaacaguuagaacaacgacgcgcccuauuaaacaugaucgguauggccggcggcgcccagggcacacaacccggucgagacggagucguacgagucugggacgucaagaaccccgaccuccucaacaaccaauucggaaccaugcccucgcucacccucgccugccugacaaaacaaggccaagucgaccucaacgacgccguccuagcacuaaccgaccuaggccuaaucuacaccgccaaguaccccaacuccuccgaccuagaccgcuuaagccaaucgcaccccauccucaacauggucgacaccaagaaaagcucccuaaacaucagcggcuacaacuucucacuaggcgcggccgucaaagcuggagccugcaugcuugacggcggcaacauguuagaaaccaucaaagucacaccccaaaccauggacggcauccucaaauccauacucaaagucaaacgcucccucggcauguucguaagcgacgcgccaggugaacgaaaucccuacgaaaacauccucuauaaaaucugccuaucaggcgacggcuggcccuacaucgccucccgcaccuccaucgucggccgagccugggaaaacacuaccgucgaccuugagagcgacggcaagccccaaaaagugggagccaccggaucgaacaaaucccuccaaagcgccggauucccgaccggccucaccuacagccaacucaugacacucaaagacagcaugaugcaacucgaccccuccgcaaaaaccuggaucgacauagagggacgcccggaagacccaguagaagucgcccucuaccaacccguauccggaugcuacauccacuucuuccgagaacccacggaucucaaacaguucaaacaagacgccaaauacagccacggcauagacguagccgaccucuucccugcccaacccggccucaccucggccgucaucgaagcgcucccccgaaacaugguccuuaccugccaaggcagcgaugacaucaaaaagcuccucgacagccaaggccgcaaagacaucaaacucaucgacaucgcccucucaaaagcagacuccaggcgauucgaaaacgcagucugggaccaaugcaaagaucuuugccacaugcacacgggcgucgucgucgaaaagaagaaacguggcggcaaagaagaaauuaccccacacugcgcccucauggacugcaucauguacgacgccgccgucucaggaggccucaacaucccaguccuacgcgcaguacucccaagagacaugguauuccgcaccuccucaccaaaaguaguccucuaaggacuagugcaucacauuuaaaagcaucucagccuaccaugagaauaagagaaagaaaaugaagaucaauagcuuauucaucucuuuuucuuuuucguugguguaaagccaacacccugucuaaaaaacauaaauuucuuuaaucauuuugccucuuuucucugugcuucaauuaauaaaaaauggaaagaaccuagaucuaaaaaaaaaaaaaaaaaaaaaaaaaaaaaaaaaaaaaaaaaaaaaaaaaaaaaaaaaaaaaaaaugcaucccccccccccccccccccccccccccccccaaaggcucuuuucagagccaccagaauu

SEQ ID NO: 10873 - RNA, 2092 nt, Artificial Sequence
  mRNA product Design i-2 comprising derived and/or modified sequence from LASV(Lassa virus/H.sapiens-wt/NGA/2018/ISTH_0959;Clade II)__AVV65100__NP (opt11)
ggggcgcugccuacggagguggcagccaucuccuucucggcaucaagcuuaccaugucagccucaaaagaaguaaaauccuuccucuggacacaaucgcuucgccgcgaauuauccggguauuguucaaacauaaaacuacagguagucaaagacgcacaagcacuccuccacggccucgacuucuccgaagucuccaauguacaacgacucaugcgcaaacaaaaacgugacgacuccgaccucaaacgacuccgagaccucaaccaagcagucaacaaccuaguagaacucaagucaacccaacaaaaauccauccuacgaguaggaacccuaaccagcgacgaccuccuaacacucgcagccgaccucgaaaaacucaaaagcaaagugauacgcaccgaacgaccccucagcagcgguguauacauggguaaucucucaacccagcaacucgagcaacgccgcgcccuacuaaaccugauaggaaugguaggcggggcccaagggacccaaccaggacgcgacggcguaguccguguaugggacgucaaaaaccccgaccuccucaauaaccaauucggcaccaugccaagccuaacccucgcgugccuaacaaagcagggccaagucgaccuaaacgacguaguacucgcccuaaccgaccucggccucauauacaccgccaaauaccccaacagcucagaccuugacagacuaagccagucacaccccauacucaacaugguagacaccaagaaaagcagucucaacauaucaggcuucaacuucucgcuaggagcagccguuaaagcaggagccugcaugcucgacggcggcaacaugcuagaaaccaucaaggugacaccccaaaccauggacggcauccucaaaagcauccuaaaggucaagaaaucccuaggcauguucguuagcgacaccccaggcgagcgcaacccauacgaaaacauccucuacaaaaucugccucagcggagacggcuggcccuacauagcaucaagaaccuccauaguugggcgugccugggagaacaccacuguagaccucgaaagcgauggcaaaccacacaaagucggcaccgcaggcucuaacaaaucacuacaauccgcgggcuucccaacaggccugaccuacucccaacucaugacacucaaagacuccaugaugcagcucgaccccuccgccaagacauggaucgauauagaaggacgaccagaagacccagucgaaauagcacucuaccagccaaugucagggugcuacauccacuucuuccgcgaaccaaccgaucuaaaacaguuuaaacaagacgccaaauacagccacggcaucgacgucgccgaccucuuccccgcgcaacccgggcuaacguccgccgucauagaagcccucccgcgcaacaugguacucacaugccaaggaucggacgacauaaaacgacuccucgacagccaaggcagaaaagacaucaaacucaucgacaucgcccugagcaagacggacucccgacgcuucgaaaacgcgguaugggaccaaugcaaggaccucugccacaugcacacaggugucgucgucgaaaagaagaaacgaggagguaaagaagaaauaacaccccacugcgcccuaauggacugcaucauguacgacgcagcagucagcggaggccucaacauccccguucuccgggccguccuaccacgcgacaugguauuucgaacauccagccccaaaguaguccuguagggacuagugcaucacauuuaaaagcaucucagccuaccaugagaauaagagaaagaaaaugaagaucaauagcuuauucaucucuuuuucuuuuucguugguguaaagccaacacccugucuaaaaaacauaaauuucuuuaaucauuuugccucuuuucucugugcuucaauuaauaaaaaauggaaagaaccuagaucuaaaaaaaaaaaaaaaaaaaaaaaaaaaaaaaaaaaaaaaaaaaaaaaaaaaaaaaaaaaaaaaaugcaucccccccccccccccccccccccccccccccaaaggcucuuuucagagccaccagaauu

SEQ ID NO: 10874 - RNA, 2092 nt, Artificial Sequence
  mRNA product Design i-2 comprising derived and/or modified sequence from LASV(LASV003-NIG-2008;Clade II)__AIT17581__NP (opt11)
ggggcgcugccuacggagguggcagccaucuccuucucggcaucaagcuuaccaugucagccuccaaagaaguaaaauccuuccucuggacccaaucccugcgcagagaacugucaggauacugcuccucaaucaaacuacaagucgucaaagacgcccaagcacuacuacacggacucgacuucagcgaagucucaaacguccaacgacuaaugcgcaaacaaaaacgagacgauucugaccuuaaacgccuccgcgaucucaaccaggccgucaacaaccucgucgaacuaaaauccacccaacaaaaauccguccugcgagucggaacccucaccuccgacgaucugcucacccucgccgccgaucucgaaaaacuaaaauccaaagucauccgaaccgaaagaccacucucauccggcgucuacauggguaaccucuccgcacaacaacucgaacaacgccgaacccuccuaaauaugaucggcauggucgguggggcucagggcacccaacccggccgugacggcgucgucagaguaugggaugucaaaaaccccgaccuucuaaacaaccaauucggaacgaugcccucucucacacuagccugccuaacaaaacaaggccaaguagaccucaacgacgucguacucgcccucacagaucuagggcucauauacacagcaaaauaccccaacuccagcgaccucgacagacucagccaaucacaccccauccucuccaugguggacacgaagaaaagcagccugaacaucuccggcuacaacuucucccuaggcgcagcagucaaagcuggugcaugcaugcucgacggaggcaacauguuagaaaccaucaaagucacaccccaaaccauggacggcauccucaaauccauccucaaaguaaagaaaucccucggcauguucgucucagacacucccggcgaacgcaaccccuacgaaaacauacuauacaaaauaugccucuccggcgacggauggcccuacaucgccucgcguaccuccauagucggccgagccugggaaaacaccaccgucgaccuugaauccgacgguaaaccccaaaaagucggcacagccgguaguaacaaaucacuccaauccgccggcuuccccaccggccucaccuacucacagcucaugacacuaaaagacagcaugaugcaacucgaccccucagccaaaaccuggauagacauagagggccgaccagaagaccccgucgaaauagcccucuaucaaccgaugagcggaugcuacauccacuucuuccgggaaccaaccgacuuaaaacaguuuaaacaagacgccaaauacagccacggaaucgauguuacugaccucuucccagcccaaccgggccuaaccuccgcugucaucgaagcacuaccccgaaacaugguccuaaccugccaaggcuccgacgacaucaagagauuacuagacucccagggccgucgcgacaucaaacucaucgacaucgcccuguccaaagccgacucccgccgcuucgaaaacgcagucugggaccagugcaaagaccuaugucacaugcacaccggcgucguagucgaaaagaagaaacgcggaggcaaagaagaaaucacgccccacugcgcccuuauggacugcaucauguacgacgcagccgucucaggcggccucaacauacccguccuacgugccguacucccccgugacaugguauuccgcaccucgucacccaaaguaguacuuuaaggacuagugcaucacauuuaaaagcaucucagccuaccaugagaauaagagaaagaaaaugaagaucaauagcuuauucaucucuuuuucuuuuucguugguguaaagccaacacccugucuaaaaaacauaaauuucuuuaaucauuuugccucuuuucucugugcuucaauuaauaaaaaauggaaagaaccuagaucuaaaaaaaaaaaaaaaaaaaaaaaaaaaaaaaaaaaaaaaaaaaaaaaaaaaaaaaaaaaaaaaaugcaucccccccccccccccccccccccccccccccaaaggcucuuuucagagccaccagaauu

SEQ ID NO: 10875 - RNA, 2092 nt, Artificial Sequence
  mRNA product Design i-2 comprising derived and/or modified sequence from LASV(LASV035-NIG-2009;Clade II)__AIT17589__NP (opt11)
ggggcgcugccuacggagguggcagccaucuccuucucggcaucaagcuuaccaugagcgcaucaaaagagguuaagagcuuccucuggacccagucacuccgacgugaacucuccggauacuguuccuccaucaaacuccaaguagucaaagacgcacaagcccuucuccacggccucgacuucucagagguaagcaacguccaacgccuuaugcgcaaacagaaacgagacgacucagaccucaaacgacuacgcgaccuaaaccaagccgucaacaaccucguggaacucaaaucaacccaacaaaaaucuauccuaagagucggcacccucaccagcgacgaccuccucacacucgcagcagaccuagaaaaauuaaaaucuaaagucauccgaacagaaagaccccucucaucagguguauacauggguaaccuguccgcgcaacaacucgaacaacgccgcgcccuacucaacaugaucggcauggugggcggcgcacaaggaacacaacccggccgcgacggcguaguacgagucugggacguuaagaaccccgaccuccucaacaaucaauucggcaccaugcccagccucacccucgccugcuuaacaaaacaaggacaaguagaccuaaacgacgcgguccuagcccucacagaccuaggacucauuuacacagcaaaauacccaaacuccucugaucuagaccgacuuucacaaucacacccaauccuaaacauggucgacaccaaaaagagcucccucaacauaucgggcuacaacuucagccugggcgcggcagucaaagcaggcgcaugcaugcucgacggcggcaacaugcucgaaaccaucaaagucacuccccaaaccauggacggcauccucaaaucgauacuaaaagucaaacggagccucggcauguucguauccgacacuccaggcgaacgcaauccauacgaaaacauacuuuacaaaaucugccucuccggagacggauggcccuacaucgccuccagaaccucaauagucggccgagccugggaaaacaccaccguagaccuagaaagcgacgggaagccccaaaaggucgguacaacaggcuccaacaaaucacuccaauccgcuggcuuccccaccggccugaccuacucacaacuaaugacccucaaagacucaaugaugcaacuagacccauccgcaaaaaccuggauagacauagaaggccgccccgaagaucccgucgaaauagcccuguaccaaccaauguccggaugcuacauucacuucuuccgcgagccuaccgaccucaaacaauucaaacaagacgcgaaauacucccauggaaucgacguagccgaccucuucccagcacagccuggucucacaucagccgucaucgaggcucuaccccgcaacaugguccuaaccugccaaggcucagacgacaucaagaaacuccucgacagccaaggacgccgcgacaucaaacuaaucgacauugcccuauccaaagcugacagccgaaaauucgagaacgcagucugggaccaaugcaaagaucuaugccacaugcacaccggagucgucgucgaaaagaagaaacgcggaggcaaagaagaaaucacaccccacugcgcccuaauggacugcaucauguacgacgccgcugucagcggcggccuaaacaucccuguccuccgagccguacucccccgcgacauggucuuccggaccagcagccccaaaguaguccuuuaaggacuagugcaucacauuuaaaagcaucucagccuaccaugagaauaagagaaagaaaaugaagaucaauagcuuauucaucucuuuuucuuuuucguugguguaaagccaacacccugucuaaaaaacauaaauuucuuuaaucauuuugccucuuuucucugugcuucaauuaauaaaaaauggaaagaaccuagaucuaaaaaaaaaaaaaaaaaaaaaaaaaaaaaaaaaaaaaaaaaaaaaaaaaaaaaaaaaaaaaaaaugcaucccccccccccccccccccccccccccccccaaaggcucuuuucagagccaccagaauu

SEQ ID NO: 10876 - RNA, 2092 nt, Artificial Sequence
  mRNA product Design i-2 comprising derived and/or modified sequence from LASV(LASV1000-NIG-2009;Clade II)__AIT17783__NP (opt11)
ggggcgcugccuacggagguggcagccaucuccuucucggcaucaagcuuaccaugagcgccucaaaagaaguaaaauccuuccucuggacgcaaucgcucagacgagaacucucaggcuacugcagcaacauaaaacuccaaguagucaaagacgcacaagcccuccuacacggacucgacuucuccgaaguauccaacguacagcgacucaugcgcaaacaaaaacgagacgacagcgaccucaaacgccuccgcgaccuuaaccaagccgucaacaaccuagucgagcucaaaagcacccaacagaaaagcauacuccgcgucggaacccuaacaucagacgaccuccucacacuagcagcagaccucgagaagcuaaaaucaaaagugauccgcaccgaacgcccacuguccuccggaguauacaugggaaaccucuccacccaacaacuagaacaaaggcgcgcccuccucaacaugaucggcauggucggcggcgcccaaggcacccaacccggacgcgacggaguuguacgaguaugggacgucaaaaacccagaccuccucaacaaccaauucggcaccaugccaucacuaacauuggccugccuuaccaaacaaggucaaguagaccuaaacgacguggugcucgcacucaccgaccucggccucaucuacacggcaaaguaccccaacuccagcgaccucgaccgacuaucacaaucccaccccauccucaacauggucgacaccaagaaaucaucgcucaacaucucaggcuacaacuucucacuaggcgccgccgucaaagccggcgccugcaugcucgacggcggaaacaugcucgaaacuauaaaaguaacaccccaaaccauggacggcauccucaaaucaauacucaaaguuaagaaaagccuaggcauguucgucuccgacaccccaggagaacgcaaccccuacgaaaacauacuauacaaaaucugucuaagcggcgacggcuggcccuacaucgccucacgaaccuccaucgucggacgagcaugggagaacaccaccgucgaccuagaaucagacggaaaaccccaaaaagucggcaccgccggcuccaacaaaucacuucagucagcaggauuucccacaggucuaaccuacucccaacucaugacacuaaaagacucaaugaugcaacucgaccccucagccaaaacuuggaucgacaucgaaggccgccccgaagaucccguagaaaucgcgcucuaccaacccgucagcggcugcuauauccacuucuuccgugaaccuacagaccucaaacaauucaaacaagaugcgaaguacagccacggcauagacguagccgaccuauuccccgcccaaccaggacugacuuccgccgugauugaagcccucccccgcaacaugguacucacaugccaaggcuccgacgacaucaaaaggcuacucgacucacaaggccgacgggacaucaaacugaucgacaucgcacucucaaaagcagacucccgaagauucgaaaacgccgucugggaccaaugcaaagaccucugccacaugcacacaggcgucguagucgaaaagaagaaacgaggcggaaaagaagagauaaccccacacugcgcucugauggacugcaucauguacgacgccgcaguauccggcggccucaacauaccaguccucagagcaguccuacccagagauauggucuuccgcaccucaagccccaaaguaguccucuaaggacuagugcaucacauuuaaaagcaucucagccuaccaugagaauaagagaaagaaaaugaagaucaauagcuuauucaucucuuuuucuuuuucguugguguaaagccaacacccugucuaaaaaacauaaauuucuuuaaucauuuugccucuuuucucugugcuucaauuaauaaaaaauggaaagaaccuagaucuaaaaaaaaaaaaaaaaaaaaaaaaaaaaaaaaaaaaaaaaaaaaaaaaaaaaaaaaaaaaaaaaugcaucccccccccccccccccccccccccccccccaaaggcucuuuucagagccaccagaauu

SEQ ID NO: 10877 - RNA, 2092 nt, Artificial Sequence
  mRNA product Design i-2 comprising derived and/or modified sequence from LASV(LASV221-NIG-2010;Clade II)__AIT17625__NP (opt11)
ggggcgcugccuacggagguggcagccaucuccuucucggcaucaagcuuaccauguccgcuuccaaagaaguaaaauccuuccucuggacccaaucucuacgccgagaacucucaggcuacugcucaucaaucaaacuccaagucgucaaagacgcacaagcccuacugcacggacucgacuucuccgaaguaucaaacguccagcggcucaugcggaaacagcgccgcgacgacuccgaccuuaagcgccuacgagaccugaaccaagcaguaaacaaccucguggaacuaaaauccacccaacaaaaaucaauccuccgagugggcacgcuaacuagcgacgaucuccuaacucuagccgccgaccuagaaaaacuaaaauccaaagucauacgcacagaacgcccgcucuccagcggcgucuacaugggaaaccuauccacacaacaacuagaacaacguagagcccuccuaaacaugauaggcauggucggcggagcccaaggaacacaacccggccgcgauggcgucguccgagucugggacgugaaaaacccagaccuacucaacaaccaauucggcaccaugcccucccucacacuagcgugccugacaaagcaaggacaaguagaccucaacgacgccguacucgcccuuaccgaccucggauuaaucuacacagccaaauacccaaacagcagcgacuuggacagacucucccagucccaccccauacucaacaugguggacaccaagaaauccucccucaacaucagcggguacaauuucucacucggggccgcagucaaagccggcgcaugcaugcuagacggcggcaacaugcucgaaaccaucaaagucaccccacaaacagucgacggcauccucaaaucaauccucaaggugaaacgcagucucggcauguucguuucagacacacccggcgaacgcaauccauacgaaaacauccucuacaaaaucugccucagcggugacggguggccauauaucgccucccgaaccuccaucgucggccgcgcaugggaaaacaccaccguagaccuagagagcgacggaaaaccccagaaggucggcacagcuggcuccaacaaaucccuccaauccgccggcuuccccaccggccucaccuacucacaacugaugacccuaaaagacucuaugaugcaacucgaccccuccgcuaaaaccuggauugacauagagggccgcccugaagaccccgucgaaaucgcccuauaccaacccaugucagggugcuacauccacuucuucagagaacccaccgaccucaagcaauucaaacaggacgcaaaauacucccacggcaucgacguagccgaccucuuccccgcacaacccggauuaaccagcgcaguaaucgaggcacucccacguaacaugguacugaccugucaaggcuccgacgacaucaaacgccugcuagacucccaaggucgaagagauauuaaacucaucgacaucgcccucagcaaagcggacucacgcaaauucgaaaacgcagucugggaucaaugcaaagaccuaugccacaugcacaccggcgucgucgucgagaaaaagaaacgcggcggaaaagaagaaaucaccccacacugcgcccuaauggauugcaucauguacgacgcagccgucucaggcggacucaacauccccguacuacgcgccguacuaccucgcgacauggucuuccggaccucaagccccaagguuguccuauaaggacuagugcaucacauuuaaaagcaucucagccuaccaugagaauaagagaaagaaaaugaagaucaauagcuuauucaucucuuuuucuuuuucguugguguaaagccaacacccugucuaaaaaacauaaauuucuuuaaucauuuugccucuuuucucugugcuucaauuaauaaaaaauggaaagaaccuagaucuaaaaaaaaaaaaaaaaaaaaaaaaaaaaaaaaaaaaaaaaaaaaaaaaaaaaaaaaaaaaaaaaugcaucccccccccccccccccccccccccccccccaaaggcucuuuucagagccaccagaauu

SEQ ID NO: 10878 - RNA, 2092 nt, Artificial Sequence
  mRNA product Design i-2 comprising derived and/or modified sequence from LASV(LASV237-NIG-2010;Clade II)__AIT17639__NP (opt11)
ggggcgcugccuacggagguggcagccaucuccuucucggcaucaagcuuaccaugucggcaagcaaagaagucaaauccuuccuauggacccaaucacuccgccgagagcucucaggcuauugcucaaacaucaaacuucaaguagugaaagacgcacaagcacuccuccacggccucgacuuuucagaagucagcaacguacaacgccucaugcguaaacaaaaacgagacgacuccgaccucaaacgccuacgcgaccuaaaccaagcagucaacaaccucgucgagcucaaauccacccagcaaaaaucaauacuacgugucgggacccuaacuuccgacgaccuccuaacacuugccgccgaccucgaaaaacugaaaagcaaaguaauccguaccgaacgcccccucucaaguggcgucuacaugggaaaccuuagcacccaacaacuagaacaacgccgugcccuccucaacaugaucgguauggucggaggcgcccaaggcacacaacccggccgcgacggcguagucagaguaugggacguuaaaaaccccgaccuccucaauaaccaauuuggcacuaugcccucccuaacacucgcaugccucaccaaacaaggccaaguagaccuaaacgacgcaguccucgcccuaacagaccucggacucaucuacaccgccaaauacccuaacucauccgaccucgaccgccuaucacagagccaccccauccucaacauggucgacaucaagaaauccagccuaaacaucucagguuacaacuucucacuaggggccgccgucaaagcaggcgcaugcaugcucgacggcggcaacaugcuagaaaccaucaaagucacaccccaaaccauggacggaauccucaagagcauccucaaagucaaacgaucacuuggaauguucguauccgacacccccggcgaacgcaaccccuacgagaacauacuauacaaaaucugccuauccggcgacggcuggcccuacauagcuucacgcaccagcauaguaggccgcgccugggaaaauaccacaguagaccucgaaucagacggaaaaccccaaaaagugggaucagccgguucaaacaaaagccuccaauccgcaggauucccaaccggccuuacguacucccaacuaaugacccucaaagacucaaugaugcagcucgacccauccgcaaaaacauggauugacaucgaaggcagacccgaagacccagucgaaauugcccuuuaucaacccauguccggaugcuacauccacuucuuccgcgaaccaacagaccucaaacaauucaaacaagacgcuaaauacagccacgggauagacgucgccgaucucuucccagcccaacccggucuaaccagcgccguaaucgaagcccugccccgcaacaugguacuuacaugccagggcagcgacgacauaaaacgccuccucgacucccaaggccgacgcgacaucaaacuaaucgacaucgcacucuccaaagcugacucccgccgcuucgaaaacgcagucugggaucaaugcaaagaccuaugccacaugcacaccggaguagucgucgaaaagaagaaaagaggcggcaaagaagaaaucacaccccacugcgcacuaauggacugcauaauguacgacgcagcagugucaggaggacugaacauccccguacugcgagccguacucccccgagacauggucuuccgaaccagcucacccaaagucguccuuuaaggacuagugcaucacauuuaaaagcaucucagccuaccaugagaauaagagaaagaaaaugaagaucaauagcuuauucaucucuuuuucuuuuucguugguguaaagccaacacccugucuaaaaaacauaaauuucuuuaaucauuuugccucuuuucucugugcuucaauuaauaaaaaauggaaagaaccuagaucuaaaaaaaaaaaaaaaaaaaaaaaaaaaaaaaaaaaaaaaaaaaaaaaaaaaaaaaaaaaaaaaaugcaucccccccccccccccccccccccccccccccaaaggcucuuuucagagccaccagaauu

SEQ ID NO: 10879 - RNA, 2092 nt, Artificial Sequence
  mRNA product Design i-2 comprising derived and/or modified sequence from LASV(LASV253-NIG-2011;Clade II)__AIT17671__NP (opt11)
ggggcgcugccuacggagguggcagccaucuccuucucggcaucaagcuuaccauguccgccuccaaagaagucaaauccuuccuauggacccaaucucugcgacgcgaacucucagguuacugcucaagcauaaaacuccaagucgucaaagacgcacaagcccuccuacacggacuagacuucuccgaaguaucaaacguccaacgccuaaugcgcaaacaaaaacgcgacgacagcgaccucaaacgccuccgagaucucaaccaggcugugaacaaccucguagagcucaaaucaacccaacaaaaaucuguccugcgcgucggaacccuaacgucagaugaucuccucacccuagccgccgaccuagaaaaacucaaauccaaagucauacgcacggaacgaccccucucaucaggcgucuacauggggaaccuauccacccagcaacucgagcaaagacgagcacuccucaacaugaucggcauggucggaggcgcccaaggaacccagcccggacgcgacggcguaguccgagucugggacgucaagaaccccgaccuacugaacaaccaauucggcacaaugccaagccucacccuagcaugccucaccaaacagggacaaguagaccucaacgacgugguccuagcccuaaccgaccucggccuaauauacaccgcaaaguaccccaacuccagcgaccucgaccgacuaucccaaagccauccaauacucaacauggucgacacaaagaaaagcucacuaaacaucagcggcuacaacuucagccucggugccgccgucaaagcaggcgccugcaugcucgacggcggaaacaugcucgaaaccauaaaagucacaccccaaaccauggacggcauccuaaaaagcauacucaaaguaaagaaaucacuaggcauguucgucuccgacacacccggcgaacgcaaccccuacgaaaacauacuauacaaaauaugccuaucgggcgauggcuggccauacauagcuucacgaaccucaauagucggcagagccugggaaaacaccaccgucgaucucgaaucggacggaaaaccacaaaaaguaggcaccgccggaagcaacaaaucccuacaaucagcaggcuucccaaccggccucaccuacagccaacucaugaccuuaaaagauuccaugaugcaacuggacccaagcgccaagacauggaucgacauugaaggacgacccgaagaccccgucgaaauagcccucuaccagcccaugagcggcugcuacauccacuucuuccgagaacccaccgaccuaaaacaauucaaacaagacgccaaguacucccacggcaucgacgucacagaccucuucccagcccaacccggccucaccagcgccgucaucgaagcgcuaccaagaaacaugguccuaacgugucaaggcucggacgacaucaaacgacuccucgacucgcaaggucgcagagacaucaaacuaaucgacaucgcacucaguaaagcugacucacgccgauucgaaaacgcagucugggaccagugcaaagaccucugccacaugcacacaggcgucguaguagaaaagaaaaagcgaggaggcaaagaagaaaucaccccacacugcgcacucauggacugcaucauguacgacgccgcggucucgggcggccuaaacauacccguacuccgcgcaguccuaccacgcgacauggucuucagaaccagcagcccaaaagucgugcucuaaggacuagugcaucacauuuaaaagcaucucagccuaccaugagaauaagagaaagaaaaugaagaucaauagcuuauucaucucuuuuucuuuuucguugguguaaagccaacacccugucuaaaaaacauaaauuucuuuaaucauuuugccucuuuucucugugcuucaauuaauaaaaaauggaaagaaccuagaucuaaaaaaaaaaaaaaaaaaaaaaaaaaaaaaaaaaaaaaaaaaaaaaaaaaaaaaaaaaaaaaaaugcaucccccccccccccccccccccccccccccccaaaggcucuuuucagagccaccagaauu

SEQ ID NO: 10880 - RNA, 2092 nt, Artificial Sequence
  mRNA product Design i-2 comprising derived and/or modified sequence from LASV(LASV254-NIG-2011;Clade II)__AIT17675__NP (opt11)
ggggcgcugccuacggagguggcagccaucuccuucucggcaucaagcuuaccauguccgccuccaaagaagucaaaucauuccucuggacccaaucccuacgucgagaacucucaggauacugcuccuccaucaaacuacaagucguaaaagacgcccaagcacuccuccacggacuagacuucagcgaaguaucgaacguacaacgccucaugcgaaaacagaaaagggacgacuccgaccucaaacgccuacgcgaccucaaccaagcagucaacaaccuaguagaacucaaguccacucaacagaaaucaguauuacgugugggaacccuaacuagcgacgacuuacucacacucgccgccgaccucgagaaacucaaaucaaaaguaauccgaacagaacgcccccucucuagcggaguauacaugggcaaccugagcacccaacaacuagaacagcgacgagcccuccucaacaugaucggaaugguuggcggcgcacaaggcacgcaacccggacgcgacggcguaguacgaguaugggacgucaaaaaccccgaccuccuaaacaaccaauucggcacaaugcccucacucacacucgccugccuaaccaaacaaggccaagucgaccucaacgaugcaguccucgcccucaccgaccucggccuaauauacaccgcaaaauacccaaacaguuccgaccucgaccgacuaagccaaucccacccaauacucaacaugguagauaccaaaaaguccucccucaauaucuccggcuacaacuucucccucggcgccgcgguaaaagccggcgcgugcaugcucgacgggggaaacaugcucgaaaccaucaaagucacaccccaaaccauggacggaauccugaaaagcauccucaaaguuaagaaaucccuaggaauguucgucuccgacacccccggcgagcgcaacccauacgagaacauccuuuacaaaauaugccucuccggagacggcuggccguacaucgccucccgaaccucaaucguaggcagagccugggaaaacaccauagucgaccucgaaucagacggcaaaccacagaaagucggcaccgcaggaucaaacaaaucccuacaaucagcaggauuccccacaggucuuaccuacucccagcuaaugacacucaaagacuccaugaugcaacucgacccaucagcaaaaaccuggaucgacauagaaggucgcccagaagaccccgucgaaaucgcccuauaccaaccgauguccggcugcuacauccacuucuuccgggaacccaccgaccucaaacaauucaagcaagacgccaaauacucacacggcaucgacguagccgaccuauucccagcucaacccggccucaccuccgcagucaucgaagcccucccccgaaacaugguccucacaugccaaggcagcgacgacaucaaacgccuucucgacucacaaggccgacgugacaucaaacucaucgacaucgcccucuccaaagcagauucccgacgauucgaaaacgcagucugggaccaaugcaaagacuuaugucauaugcacaccggagucgucgucgagaaaaagaaacgcggaggcaaagaagaaaucacaccgcacugcgcccugauggacugcauaauguacgacgcagcaguaagcggcggccucaauauacccguccuccgcgcaguacucccucgagacaugguauuccgaaccuccagcccaaaaguaguccucuaaggacuagugcaucacauuuaaaagcaucucagccuaccaugagaauaagagaaagaaaaugaagaucaauagcuuauucaucucuuuuucuuuuucguugguguaaagccaacacccugucuaaaaaacauaaauuucuuuaaucauuuugccucuuuucucugugcuucaauuaauaaaaaauggaaagaaccuagaucuaaaaaaaaaaaaaaaaaaaaaaaaaaaaaaaaaaaaaaaaaaaaaaaaaaaaaaaaaaaaaaaaugcaucccccccccccccccccccccccccccccccaaaggcucuuuucagagccaccagaauu

SEQ ID NO: 10881 - RNA, 2092 nt, Artificial Sequence
  mRNA product Design i-2 comprising derived and/or modified sequence from LASV(Nig08-04;Clade II)__ADU56611__NP (opt11)
ggggcgcugccuacggagguggcagccaucuccuucucggcaucaagcuuaccaugagcgcgucgaaagaagucaagagcuuccucuggacccaaucucugcgaagagaacucucuggcuacugcuccaacauaaaacuccaagucgucaaggacgcccaagcccuauuacacggccuagacuucuccgaaguaucaaacgugcaaagacucaugcgcaaacagaaacgagacgacggcgaccucaagagacuacgagaccuaaaccaagccguaaacaaccucgucgaacuaaaaagcacccagcaaaaaucaguccuacgggucggcacgcugaccagcgacgaccugcuaacacucgccgcagaccuagaaaaacuaaaaucaaaagucauacgcaccgaacgcccacuauccagcggagucuacauggggaaccucucaacccagcaauuagaacaaagaaaagcccugcuaucaaugauaggcauggucggcggcgcccaaggaacgcaacccggccgcgacggcgucguccgagucugggacgucaaaaacccagaccuacucaacaaccaauucggcaccaugccgucacuaacacuagcaugccucaccaaacagggccaagucgaccucaacgaugcaguccuagcccuaaccgaccucggccuaaucuacaccgcaaaauacccaaacuccucagaccuagaccgacuaucccaaucacacccaauccucaacauggucgacacaaagaaaucaucccucaacaucuccggcuacaacuucagccucggcgccgccgucaaagcaggcgccugcaugcucgacggcggcaacaugcucgaaaccaucaaaguaaccccacaaacaauggacgggauauuaaaauccauacucaaagucaagagaucccucggcauguucgucucggacaccccaggagaacgcaacccauacgaaaacauacucuacaagauaugccuauccggcgacggcuggccauacauagccuccagaaccuccauagucggccgggcgugggaaaacaccaccguagaccuagaaagcgacggcaaaccccagaaggucggcacugcgggcucaaacaaaucccuacaaucagccggauucccgacaggacucacauacucacaacugaugacccucaaagauucaaugaugcaacucgacccaagcgccaaaacguggaucgauaucgaagggagaccagaagacccggucgaaaucgcccuauaccaaccaaugagcggcugcuacauacacuucuucagggaacccacagaccuaaaacaauucaagcaagacgcaaaguacucacacggcauagaugucacagaccuauucagcgcccaaccaggacuuaccuccgcaguaaucgaagcacuacccaggaacaugguccugaccugccaaggaucagacgacauaaagaaacugcuagacagucagggacgacgagacaucaaacuaaucgacaucagccucaacaaagccgauagccgacguuucgaaaacgccgucugggaccaaugcaaagaccucugccacaugcacaccggcguagucguagaaaagaagaaacgcggcggaaaagaagaaauuacaccccacugcgcccucauggacugcaucauguucgacgcggcaguaagcggaggccucaacauaccgauccuccgagcaguccuccccagagacaugguauuccgcaccuccagcccaaaagucguccucuaaggacuagugcaucacauuuaaaagcaucucagccuaccaugagaauaagagaaagaaaaugaagaucaauagcuuauucaucucuuuuucuuuuucguugguguaaagccaacacccugucuaaaaaacauaaauuucuuuaaucauuuugccucuuuucucugugcuucaauuaauaaaaaauggaaagaaccuagaucuaaaaaaaaaaaaaaaaaaaaaaaaaaaaaaaaaaaaaaaaaaaaaaaaaaaaaaaaaaaaaaaaugcaucccccccccccccccccccccccccccccccaaaggcucuuuucagagccaccagaauu

SEQ ID NO: 10882 - RNA, 2095 nt, Artificial Sequence
  mRNA product Design i-2 comprising derived and/or modified sequence from LASV(GA391;Clade III)__AAA46284__NP (opt11)
ggggcgcugccuacggagguggcagccaucuccuucucggcaucaagcuuaccauguccgcgaguaaagaaguacguucaugccuauggacgcaaucccuccggcgcgaacuuuccggcuacugcucaaacauaaaacugcaagugguaaaggacgcccaagcacuacuucacggacuagacuucucagaagugucaaacguccagagacuaaugcgaaaacagaaacgggacgauggagaccuaaaacgacugcgcgaccuaaaccaagcggucaacaaccuagucgagcucaaaagcacacaacagaaaucgguccuacgcguuggaacgcucuccagcgacgaccugcucauccucgcggccgaccucgaaaaacucaaaucaaaaguaacccgaaccgaacgcccgcuuucgagcggaguauauaugggaaaccuaaguucccaacagcucgaccaacgccgcgcacuccugaacaugauaggcaugacaggagugagcggcggagggaaaggcgcaucaaacggcaucgugcgcgucugggacgugaaaaacgccgaacuccuuaacaaccaguucgggaccaugcccucacuaacacucgcaugccuaaccaagcaaggacaaguagaccuaaacgacgccguacaagcacuaaccgaccuaggccuuaucuacacagcgaaauaccccaauagcucggaccuggacagacucucacaaucgcaccccauccugaacaugaucgacaccaagaaaucgagccuaaacauuuccggcuacaacuucucucucggggccgccgucaaagcaggggcaugcaugcuagacggaggcaacaugcucgaaacgaucaaagucucaccccaaaccauggacggcauacugaaauccauccuaaaagucaagaaaagccuaggaauguucgucagcgacaccccaggcgaacgcaaccccuacgaaaauauccuguacaaaaucugccucucgggagacggcuggagcuauaucgcgagcagaacaucaaucguaggccgcgcgugggagaacaccguaguugaccucgaacaagacaacaaaccacagaaaauaggcaacggcggauccaauaaaucacuccagagcgcaggcuucgcagcuggccuaaucuacagccaacucaugacacugaaagacuucaaaugcuucaaccucaucccaaacgccaaaacauggauggauaucgaagggcgccccgaagaccccguagaaauagcacucuaccaacccucgagcggcugcuacguucacuucuuccgcgagcccacagauuuaaaacaguucaaacaggacgccaaauacucacacggucgcgacgucacagaccucuucgcagcccaaccaggccugacaagcgcuguaauagaagcccucccacgaaacauggucauaaccugccaaggaucagaagauaucagaaaacuacucgaaagccaaggccgacgggacaucaaacucauagacauaacccuaagcaaagcagauagcagaaaauucgaaaacgccguaugggaccaauucaaagaccucugccacaugcacacaggcguagucguggaaaagaagaaacgcggaggcaaagaagaaaucacaccucacugcgcacucauggacugcauaauguuugaugcugcggucuccggcggacucgaugcaaaaguacuccgaguuguccuacccagagacaugguauuccgcaccucaacacccaaaguaguacucuaaggacuagugcaucacauuuaaaagcaucucagccuaccaugagaauaagagaaagaaaaugaagaucaauagcuuauucaucucuuuuucuuuuucguugguguaaagccaacacccugucuaaaaaacauaaauuucuuuaaucauuuugccucuuuucucugugcuucaauuaauaaaaaauggaaagaaccuagaucuaaaaaaaaaaaaaaaaaaaaaaaaaaaaaaaaaaaaaaaaaaaaaaaaaaaaaaaaaaaaaaaaugcaucccccccccccccccccccccccccccccccaaaggcucuuuucagagccaccagaauu

SEQ ID NO: 10883 - RNA, 2092 nt, Artificial Sequence
  mRNA product Design i-2 comprising derived and/or modified sequence from LASV(Nig08-A19;Clade III)__ADU56619__NP (opt11)
ggggcgcugccuacggagguggcagccaucuccuucucggcaucaagcuuaccauguccgccucaaaagaggucaagagcuuccuauggacccaaucacuucgccgcgaacuuagcggcuacugcuccaacaucaaacuacaagucgucaaagacgcgcaggcccuccuccacggacucgacuucucagaaguauccaacguacaacgccugaugcgcaaacaaaaacgagacgacggcgaccucaaacgacuacgcgaccucaaccaagcaguuaacaaccuagucgaacucaaaagcacccaacagaaaagcguacuacgugucggcacgcuaagcagcgacgaccuacucguguuagccgcugaccucgaaaaacuaaaaucaaaaguaguccggaccgaacgcccacugagcagcggcaucuacaugggcaaccucucaucacaacaacuagaccaacgcaaagcacuacucaacaugaucggcaugacaggaggcaacggcggacgaaacacgaccuccgacggaauuguacgggucugggacgucaaaaacgcagagcuccuaaacaaucaauucggcacaaugccaucccuuacacuagcuugccucaccaaacaaggccagguagaccuaaaugaugccguacaagcccuuacagaccucggacucauauacaccgcaaaauacccuaacucaucagaccucgaccgacuagcacaaucacacccaauccugaacaugauagauaccaaaaaguccucccuuaacaucuccggauauaacuuuucccucggagcagccgucaaagcuggcgccugcaugcuggacggcggcaacaugcucgaaacaaucaaaguaagcccacaaacaauggacggaauccucaaauccauacuaaaaguaaaacgcucccuaggcauguucauauccgacacacccggcgaacgaaaccccuaugaaaacauacuuuacaagaucugccucucaggcgacggauggcccuacaucgcaucccggacauccaucguaggacgagccugggaaaacaccguagucgaccuggaaagcgacaacaagccccagaaaacaggcaacggcggcagcaacaagucccuccaaagcgccggcuucgcagcaggccuaaccuacucccaacucaugacacucaaagacagcaugcuccaacuagacccaaacgcaaaaaccuggauggauaucgaaggccggccagaagaccccguagaaauagcccuauaccaaccuagcucaggaugcuacauccauuucuuccgagaacccaccgaccuuaagcaauucaaacaggacgccaaauacagccacggcaucgacgucaccgaccucuucgccgcccaacccggccuaacaucagccgucauagaagcccuaccccgcaacauggucauaaccugccaaggauccgaagacauaagaaaacuccucgagucgcaaggccgccgagacaucaaacuaauagacaucucccuauccaaagucgacagccgcaaauucgaaaacgcagucugggaccaauuuaaagaccucugccacaugcauaccggcaucgucguagaaaagaagaaacgcggaggcaaagaagaaaucaccccacacugcgcucucauggacugcauaauguucgacgcggccguaucaggcggcgucgacgccaaaguccugagagccguccuucccagagacaugguauucagaaccuccacccccaaagucguccuauaaggacuagugcaucacauuuaaaagcaucucagccuaccaugagaauaagagaaagaaaaugaagaucaauagcuuauucaucucuuuuucuuuuucguugguguaaagccaacacccugucuaaaaaacauaaauuucuuuaaucauuuugccucuuuucucugugcuucaauuaauaaaaaauggaaagaaccuagaucuaaaaaaaaaaaaaaaaaaaaaaaaaaaaaaaaaaaaaaaaaaaaaaaaaaaaaaaaaaaaaaaaugcaucccccccccccccccccccccccccccccccaaaggcucuuuucagagccaccagaauu

SEQ ID NO: 10884 - RNA, 2092 nt, Artificial Sequence
  mRNA product Design i-2 comprising derived and/or modified sequence from LASV(G1180-SLE-2010;Clade IV)__AIT17169__NP (opt11)
ggggcgcugccuacggagguggcagccaucuccuucucggcaucaagcuuaccaugucagccagcaaagagaucaaauccuuccucuggacccaaucccuccggcgcgaacucagcgguuacugcagcaacauaaaacuacaagucgucaaagacgcccaagcccuccuccacggccuagacuucuccgaagucuccaacguccagcgccuaaugcgcaaagaacgacgagacgacaacgaccucaaacgacugcgagaucuaaaccaagcaguuaacaaccucguagaacuaaaaucaacucaacaaaaaucaauccugagggucggcacccuaaccagcgacgaccuccuaauccuugccgcugaccucgagaaacucaaaagcaaagucauccgaacggaacgaccacuaagcgccggcgucuacaugggcaaccuaucaagccagcaacucgaccaaagacgcgcauuacucucgaugaucggaaugagcuccggcaaccaacgagcacaagccggccgagacggcgucguacgagucugggacgucaaaaacguugagcuacuaaacaaccaauucggaaccaugccaucacuaacccucgccugccucacaaaacaaggccaaguagaccucaacgacgccguccaagcccucaccgaccucggacuaauauacacagcaaaguaccccaacaccagcgaccuggaccgucuaacccagucacaccccauacucaacaugauagacaccaaaaaguccucacucaacauauccggauacaacuucucccucggcgccgccgucaaagccggagcaugcaugcuagacggcggcaauaugcucgaaacaaucaaagucucaccccaaaccauggacggcauacucaaaagcauacucaaagucaagaaagcccucggaauguuuaucucugacacacccggcgaacgcaaccccuacgaaaacauacuauacaaaauuugccugucaggagauggauggcccuacauagccagucgaaccuccaucaccggccgcgcaugggaaaacaccgucguugaccuagaauccgacggaaaaccccagaaagcaggcuccaauaacuccaacaaaagccuucaaagcgucggauucacagcgggccucaccuacucacaacuaaugacacuaaaagacgccaugcuccaacucgacccaaacgcuaaaaccuggauggacaucgaaggccgccccgaagacccaguagaaaucgcccucuaccagccuuccuccggcugcuacauccacuucuuccgagaacccaccgaccuaaaacaguucaaacaagacgccaaauacucccacggcaucgacgucacagaccuguucgccgcccaaccaggccucacgucugcaguaaucgacgcacugccccguaacaugguaauaaccugccaaggcucagacgacaucagaaaacuucuagaaucacaaggccgaaaagacaucaaacucaucgacaucgcccucuccaaaaccgacuccagaaaauacgaaaacgccguaugggaccaauacaaagacuuaugccacaugcacaccggaguagucgucgaaaagaagaaacgcggcggcaaagaagaaaucaccccacacugcgcacucauggacugcauuauguucgacgccgccgucucuggaggacuaaacaccucaguccucagagccguccucccuagagacaugguauuucgaaccagcacaccccgagucguccuauaaggacuagugcaucacauuuaaaagcaucucagccuaccaugagaauaagagaaagaaaaugaagaucaauagcuuauucaucucuuuuucuuuuucguugguguaaagccaacacccugucuaaaaaacauaaauuucuuuaaucauuuugccucuuuucucugugcuucaauuaauaaaaaauggaaagaaccuagaucuaaaaaaaaaaaaaaaaaaaaaaaaaaaaaaaaaaaaaaaaaaaaaaaaaaaaaaaaaaaaaaaaugcaucccccccccccccccccccccccccccccccaaaggcucuuuucagagccaccagaauu

SEQ ID NO: 10885 - RNA, 2092 nt, Artificial Sequence
  mRNA product Design i-2 comprising derived and/or modified sequence from LASV(G1442-SLE-2011;Clade IV)__AIT17181__NP (opt11)
ggggcgcugccuacggagguggcagccaucuccuucucggcaucaagcuuaccauguccgccagcaaagaagucaaauccuuccuauggacccaaucacuccgccgcgaacuuagcggcuacugcucaaauauaaaacugcaagucgucaaagacgcucaagcccuccugcacgggcucgauuucucagagguauccaacguccaacggcuaaugcgcaagcaacgacgggacgacaaugaucucaaaagacuccgcgaccugaaccaagccgucaacaaccuugucgagcucaaauccacucaacagaaaaguguacuccgcgucgguacacucaccucggacgaccuucuaguacuagcagcugaccuagaaaaacuaaaauccaaagucauccgcaccgaacgcccccucagcgcaggcgucuauaugggcaaccucuccucccaacaacucgaccaaagacgagcacuccucaacaugaucgguaugagcggaggcauccaaggcacacgaaccggccgagacggcgucguccgaguaugggacgucaaaaacgccgaccuacucaacaaccaauucggaaccaugcccucccuaacacuagccugccucaccaagcaaggacaaguagaccucaaugacgucguccaagcccucacagaccucggccuaauauacaccgcaaaauaccccaacgccagcgaccucgacagacuaacccaaucccaccccauccuaaacaugaucgacacaaagaaaagcagccucaacaucuccggcuacaacuucucacuaggcgccgccgucaaagcaggagcaugcaugcuggauggcggcaacaugcucgaaacaaucaaagucucaccacaaacaauggacgguauccucaaauccauacuaaaagucaagaaaacucugggaauguucauauccgacacucccggagaacgcaaccccuaugaaaacauccuauacaaaaucugccugucaggagacggcuggcccuacaucgcuucccgaacaagcaucacaggacgcgccugggaaaacacaguuguagaccucgaaagcgacggcaaaccacaaaaagccggaucaaacaacucaaacaaaucccugcagagcgcgggcuucgccgccggucuaaccuauagccaacuaaugacccucaaagacgccaugcuccaacuggauccaaacgccaaaaccuggauggacauagagggccgccccgaagacccagucgagaucgcccuauaucaacccagcucaggcugcuacauccacuucuuccgcgaaccaacagaccucaaacaauucaaacaagacgccaaauacucucacggcauagacgucacagaucuauucgccgcacaaccaggacuuaccucagccguaauugaagcccucccccgcaacauggucauaaccugccaaggauccgacgacaucaagaaacuccuagaaucacaaggccggaaagauaucaaacuuaucgacauagcgcuaucaaaaacagacuccagaaaguacgaaaacgcagucugggaccaguacaaagaccucugccacaugcauaccggcgucgucgucgaaaagaagaaaagaggcggaaaagaggaaaucacgccccacugcgcccucauggacugcauaauguucgacgcagccgucagcggcggacucaacacccuaguccuccgcgccguacucccccgcgacaugguauuccguacauccacuccacgcguaguccuaugaggacuagugcaucacauuuaaaagcaucucagccuaccaugagaauaagagaaagaaaaugaagaucaauagcuuauucaucucuuuuucuuuuucguugguguaaagccaacacccugucuaaaaaacauaaauuucuuuaaucauuuugccucuuuucucugugcuucaauuaauaaaaaauggaaagaaccuagaucuaaaaaaaaaaaaaaaaaaaaaaaaaaaaaaaaaaaaaaaaaaaaaaaaaaaaaaaaaaaaaaaaugcaucccccccccccccccccccccccccccccccaaaggcucuuuucagagccaccagaauu

SEQ ID NO: 10886 - RNA, 2092 nt, Artificial Sequence
  mRNA product Design i-2 comprising derived and/or modified sequence from LASV(G3010-SLE-2013;Clade IV)__AIT17345__NP (opt11)
ggggcgcugccuacggagguggcagccaucuccuucucggcaucaagcuuaccauguccgccucaaaagaaaucaaauccuuccucuggacacaaagccuccgccgcgaacucuccggauacugcucaaacaucaaacuucaaguagucaaagacgcccaggccuuacuacacggucuggacuucagugaaguuuccaacguccaacgccucaugcgaaaagaaagacgcgacgacaacgaccuaaaacgccuccgagaccucaaccaagcugucaacaaccuggucgaacuaaaauccacacaacaaaaaucaauccuacgaguaggcacccucaccucagacgaccuccucauccucgcagccgaucucgaaaaacuaaaaucaaaagucacccgcaccgaacgaccacucuccgccggcgucuauaugggaaaccugucaagccaacaacucgaccaacgccgcgcacuacucagcaugauuggcaugucaucaggcguccaaggcgcccgcgccggccgugacggcguaguacggguaugggacguuaagaacgcagaacuccucaacaaucaguucggcaccaugcccucccuaacacucgcuugccucaccaaacaaggacaaguagaucuaaacgacgucguacaagcgcuaacugaccucggacuuauauacaccgcaaaauacccaaauacaucagaccucgacagacuaacccaaagccacccaauccucaacaugaucgacacuaagaaauccucccuaaacauaucaggauacaacuucucccucggcgcagcagucaaagccggggcaugcaugcucgacggcgggaacaugcuagaaaccaucaaagucucgccccagaccauggacggcauccuaaaaagcauacucaaagucaagaaagcacucggcauguucaucuccgaaaccccaggcgagcgcaaccccuacgaaaacauucuauacaaaaucugccucucgggggacggcuggccauacaucgccucacgaaccucaaucacugguagagccugggaaaauaccgucguagaucucgaaagcgauggcaaaccucaaaaagcaggaucaaacaacaguaacaaaagccuucaauccgcaggcuuuacggccggccuuacuuacucccaacuaaugacccucaaagacgcaaugcuacaacuagaccccaacgccaaaaccuggauggacaucgaaggccgacccgaggacccugucgaggucgcucuuuaccaacccagcucaggaugcuacauccacuuuuuccgcgagcccaccgaccucaaacaauucaaacaagacgccaaauacucccauggcaucgacgucacagaccuauucgccgcccaaccaggccuuaccucagcagucaucgacgcccuacccagaaacauggucauaaccugccaaggcucagacgacauaaagaaacuacucgaaucccaaggacgcaaagacaucaaacucaucgacauagcacucuccaaaaccgacucacgcaaauacgaaaacgccgucugggaccaauacaaagaccuaugccauaugcacacaggcguugucgucgagaaaaagaaacgcggaggaaaagaagaaaucacaccccacugcgcccuaauggacugcaucauguucgacgcugcagucagcgguggccuaaacacgagcguccuccgcgcaguccucccccgcgacaugguuuucagaaccuccacuccccgagucguucucuaaggacuagugcaucacauuuaaaagcaucucagccuaccaugagaauaagagaaagaaaaugaagaucaauagcuuauucaucucuuuuucuuuuucguugguguaaagccaacacccugucuaaaaaacauaaauuucuuuaaucauuuugccucuuuucucugugcuucaauuaauaaaaaauggaaagaaccuagaucuaaaaaaaaaaaaaaaaaaaaaaaaaaaaaaaaaaaaaaaaaaaaaaaaaaaaaaaaaaaaaaaaugcaucccccccccccccccccccccccccccccccaaaggcucuuuucagagccaccagaauu

SEQ ID NO: 10887 - RNA, 2092 nt, Artificial Sequence
  mRNA product Design i-2 comprising derived and/or modified sequence from LASV(G502-SLE-2009;Clade IV)__AIT17127__NP (opt11)
ggggcgcugccuacggagguggcagccaucuccuucucggcaucaagcuuaccauguccgccuccaaagaaauaaaauccuuucuauggacccaaucccuucgccgcgaacucuccggcuacugcuccaauaucaaacuccaagucgucaaagacgcccaagcacuacuacacggccuagacuucucagaagucucaaacguccaacgacucaugcgaaaagagagacgcgacgacaacgaccuaaaacgccuaagagaccucaaccaagccguaaacaaccucgucgaacuuaaaagcacgcaacaaaaauccauccuccgaguaggcacccuaaccucagacgaccuacuuauacuagcagcggaccucgaaaaacucaagagcaaggucauccgcacugaacgcccacuauccgcaggcgucuacaugggaaaccucucaucccaacaacucgaccaacgccgggcccuacucuccaugaucggcauguccgguggaaaccaaggagugcgagcaggcaaagacggcgucguacgcguaugggacgucaaaaacgcugaacuccucaacaaccaauuuggaacaaugcccagccucacccuugccugccucaccaaacaaggccaaguagaccuaaacgacgccguacaagcccuaaccgaccuaggacucauuuacacagccaaauacccuaacaccuccgaccuagaccgccucacacaaucccacccgauccuaaacaugauagacaccaaaaaguccucccucaacauauccggcuacaacuucagccucggagcugcagucaaagcaggcgccugcaugcucgacggcggcaacaugcucgaaaccaucaaagucagcccccaaaccauggacggcauacuaaaguccaucuugaaaguaaagaaagcgcuaggcauguucaucuccgacacaccaggagaaagaaaccccuacgaaaacauccuauacaaaauaugccucuccggagacggcuggccauacaucgccucacgcaccuccaucacaggccgugcaugggaaaacaccgucgucgaccuagaauccgacggcaaaccacaaaaagcaggcuccaacaacuccaacaaaucacuccaaucagcuggcuucaccgcuggucuaacauacucccagcucaugacccugaaagaugccaugcugcaacuagacccaaacaccaaaaccuggauggacaucgaaggacgacccgaagauccagucgaaauagcccucuaccaaccaucguccggcugcuacauccacuucuuccgcgaaccaacugaccucaaacaauucaaacaggacgcaaaauacucccacggaaucgacgucaccgaccuauucgcagcacaaccaggcuuaacauccgcugucaucgaugcccucccccgcaacaugguaauuacaugccaaggcuccgacgacauccgaaaacuacucgaaucccaaggacgcaaagacaucaaacucauagacauagcccucaacaaaaccgacucccgcaaauacgaaaacgcagucugggaccaauauaaagaccucugccauaugcacaccggugucgucgucgaaaagaagaaacgaggcgguaaagaagaaauaaccccgcacugcgcccuuauggacugcaucauguucgacgccgccgucucaggcggccucaauaccagcguacuccgggcaguccucccccgggacaugguauuccggacaagcacaccccgcguaguccucuagggacuagugcaucacauuuaaaagcaucucagccuaccaugagaauaagagaaagaaaaugaagaucaauagcuuauucaucucuuuuucuuuuucguugguguaaagccaacacccugucuaaaaaacauaaauuucuuuaaucauuuugccucuuuucucugugcuucaauuaauaaaaaauggaaagaaccuagaucuaaaaaaaaaaaaaaaaaaaaaaaaaaaaaaaaaaaaaaaaaaaaaaaaaaaaaaaaaaaaaaaaugcaucccccccccccccccccccccccccccccccaaaggcucuuuucagagccaccagaauu

SEQ ID NO: 10888 - RNA, 2092 nt, Artificial Sequence
  mRNA product Design i-2 comprising derived and/or modified sequence from LASV(G733-SLE-2010;Clade IV)__AIT17155__NP (opt11)
ggggcgcugccuacggagguggcagccaucuccuucucggcaucaagcuuaccaugucugccagcaaagaaaucaaauccuuccucuggacucaaucacuccgccgcgaacuaagcggauacugcucgaacauuaaacuucaagugguaaaagacgcccaagcccuccuccacggacucgacuucucagaaguaucaaacguccaacgccuaaugcgcaaagagcggcgcgacgacaacgaccucaaacgccuccgcgaccucaaccaagcagucaacaaccucgucgaacucaaaucaacacaacaaaaaucaguacuacgcgucggcacauuaacaagcgacgaacuucucguacucgcagccgaccucgagaaacugaaauccaaaguuaucagaacagagcgaccccucuccgccggagucuacaugggaaaccucuccucccagcaacucgaccaacgacgcgcccuccucagcaugaucggcauguccggcggcaaccaaggcgcccgcacaggccgcgacggcguaguccgaguaugggacguuaaaaacgccgaacuccucaacaaccaauucggaacaaugccaucucuuacacucgcuugccuaaccaaacaaggacaaguagaccuaaacgacgccgugcaagcacuaaccgacuugggccucauauacaccgccaaauaccccaacaccuccgaccuagaccgccucacacaaucacacccaauacucaacaugaucgacaccaaaaagucaagucucaacauaagcggcuacaacuucucacucggcgccgccgucaaagccggcgcaugcaugcuggacggaggaaacaugcucgaaacaaucaaagucucaccccaaaccauggacggaauccucaaauccauacucaaagucaagaaagcccuaggcauguucauaagcgauacacccggcgaacgcaaccccuacgaaaacauccuauacaaaauaugccucuccggagauggauggcccuacaucgccucacgcaccagcaucacgggccgcgcuugggaaaacacaguagucgaccuagaaagcgacggcaaaccacaaaaagcaggcuccaacaauuccaacaaaucgcuucaguccgcuggcuucaccgccggccuaaccuacucacaacucaugacccugaaagacgcuaugcuccaacucgaccccaacgcaaaaacauggauggacaucgagggcagacccgaggaccccgucgaaauagcccucuaccaaccuuccuccggcugcuacauacacuucuucagagaacccaccgaccucaaacaauucaaacaagacgccaaauacucccacggcaucgacgucaccgaccucuucgccgcccagccaggacucaccuccgccgucaucgacgcccuccccaggaacaugguaauuaccugccaaggauccgacgacauccgcaaacuccucgaaucacaaggacgcaaagacaucaaacuaauagacaucgcccuaucaaaaauagacucccgcaaauacgaaaaugccguaugggaccaauacaaagaucugugccacaugcacaccggagucgucgucgaaaagaagaaacgcggcggaaaagaagaaauaacuccccacugcgcacuaauggacugcauaauguucgacgcagccgucuccggaggacuaaacucacucguccuaagagcagugcucccccgcgacaugguauuccgcacguccacaccccgcguaguccuauaaggacuagugcaucacauuuaaaagcaucucagccuaccaugagaauaagagaaagaaaaugaagaucaauagcuuauucaucucuuuuucuuuuucguugguguaaagccaacacccugucuaaaaaacauaaauuucuuuaaucauuuugccucuuuucucugugcuucaauuaauaaaaaauggaaagaaccuagaucuaaaaaaaaaaaaaaaaaaaaaaaaaaaaaaaaaaaaaaaaaaaaaaaaaaaaaaaaaaaaaaaaugcaucccccccccccccccccccccccccccccccaaaggcucuuuucagagccaccagaauu

SEQ ID NO: 10889 - RNA, 2092 nt, Artificial Sequence
  mRNA product Design i-2 comprising derived and/or modified sequence from MOPV/LASV reassortant(IGS-1;Clade IV)__AFY05578__NP (opt11)
ggggcgcugccuacggagguggcagccaucuccuucucggcaucaagcuuaccaugagcgccagcaaagaaaucaagagcuuccuuuggacgcagucguuacgacgcgaacucuccggcuacugcucaaacaucaaacuacaaguagucaaagaugcccaagcccuacuccacggacucgacuucuccgaagucagcaacgugcaacgccuaaugcgcaaagaacgacgcgacgacaacgaccucaaacgacuccgagaccuaaaccaagccgucaacaaccucguagaacuaaaauccacacaacaaaaauccauauuacgagucggcacccucaccagcgaugaucuucuaauacuggccgcagaccucgaaaaacuucgcucaaaagugauucgcaccgaacgcccacucagcgccggaguuuacaugggcaaucucuccagccaacaacucgaccaacgaagggcccuccucaacaugauugggauguccggaggcaaccaaggagcccgagccggacgcgacggcguaguccgcguaugggacgucaaaaacgcagaacuacucagcaaccaauucggcaccaugcccucacucacgcuugccuguuugaccaaacaaggacagguagaucuuaacgacgcaguccaagcacuaacagaccucggccuaaucuacaccgcaaaauaccccaacaccuccgaccuagaccgacucacucaaucgcaccccauccuaaacaugaucgacaccaagaaaucgagccucaacauuagcgguuacaacuucucccuaggcgccgccgucaaagccggugcaugcaugcuugacggcggaaauaugcuagaaaccaucaaaguauccccacaaacaauggacggaauccucaaaucgauucucaaagucaagaaagcccucggcauguucaucucagacaccccaggagaaaggaacccguacgaaaauauccucuacaaaauaugucucucaggcgacggcuggccauacaucgccucccgcacaaguauaaccggacgagccugggaaaacaccguaguagaccuagaaagcgacgguaaaccccaaaaagcagacucuaacaacagcucgaaaucccuccaaagcgcaggcuucacagcgggccuaaccuacagccagcucaugacccucaaagacgcaaugcuccagcucgaccccaacgcgaaaaccuggauggacaucgagggcagaccagaagacccagucgaaaucgcacucuaccaacccuccuccggcugcuacauccacuuuuuccgcgaacccaccgaccuaaaacaauuuaaacaagacgcaaaauacucccacggcauagacguaacagaccucuucgcaacccagccaggccuaaccuccgccgucaucgacgcacucccccgcaacaugguaauaaccugccaaggcucagacgacauccgcaaacuccucgaaucccaaggcagaaaagacaucaaacuuaucgacauagaucucucuaaaaccgacucccguaaauacgagaacgccgucugggaccaauacaaagaccuaugccauaugcacaccggaguuguagucgaaaagaagaaacggggagguaaagaagaaauaacaccccacugcgcccuaauggacugcauuauguucgacgccgcaguaagcggcggccuaaacaccuccguccuccgcgcaguccucccacgcgacauggucuucagaaccuccacacccagagucguccucuaaggacuagugcaucacauuuaaaagcaucucagccuaccaugagaauaagagaaagaaaaugaagaucaauagcuuauucaucucuuuuucuuuuucguugguguaaagccaacacccugucuaaaaaacauaaauuucuuuaaucauuuugccucuuuucucugugcuucaauuaauaaaaaauggaaagaaccuagaucuaaaaaaaaaaaaaaaaaaaaaaaaaaaaaaaaaaaaaaaaaaaaaaaaaaaaaaaaaaaaaaaaugcaucccccccccccccccccccccccccccccccaaaggcucuuuucagagccaccagaauu

SEQ ID NO: 10890 - RNA, 2092 nt, Artificial Sequence
  mRNA product Design i-2 comprising derived and/or modified sequence from LASV(LM765-SLE-2012;Clade IV)__AIT17815__NP (opt11)
ggggcgcugccuacggagguggcagccaucuccuucucggcaucaagcuuaccaugucagcauccaaagagaucaaauccuuccuguggacccaaucccuucgacgcgaacuaagcggauacugcagcaacaucaaacuacaagucguaaaagacgcccaagcacuccuacacggccuagacuucuccgagguauccaauguccaacgccucaugaggaaagaacgccgcgaugauaacgaucuuaaaagauuacgcgaccucaaccaggccguaaacaaccuagucgaacucaaaucaacccaacaaaaaucaauacuccgcgucggaacccuuacaucagacgaccuacucauacuggccgcagaccuugaaaaacucaaaucgaaagucacccgcaccgaaagaccccucuccgccggcgucuacaugggcaaccucagcucacaacagcucgaccaacgacgagcgcuccucgacaugauaggcauguccggaagcaaccaaggcgccagagccggcagagacggcgucguacgcgucugggacgucaaaaacgccgaacuccucaacaaccaauucggcaccaugcccucucucacgcucgccugccucaccaagcaaggccaagucgaccucaacgacgcaguacaagcacuaacggaccuaggccugaucuacacagccaaguaccccaacaccucggaccucgaccggcucacccaaagccaccccauccugaacaugaucgacaccaagaaauccucccuuaacauaucaggcuacaacuucucccugggcgccgcaguaaaagccggcgcaugcaugcuagacggaggaaacaugcucgaaacaaucaaagucucgccccaaacaauggauggcauacuaaaauccauccucaaagucaagaaagcccuaggaauguucauaucagaugcccccggcgaacgaaaccccuacgagaacauccuauacaaaauuugccucagcggcgacgguuggccguauaucgccaguagaaccuccaucaccggccgcgccugggaaaacaccguagucgaccuagaaagcgauggcaaaccccaaaaagcaggaaguaacggauccaacaaaagucuacaauccgccggcuucaccgccggucuaaccuacucccaacucaugacccucaaagacgccaugcuacaacuagacccaaacgccaaaaccuggauggacaucgaaggcagacccgaagacccagucgaaaucgcacuguaccaacccagcuccggcugcuacauccacuucuuccgcgaacccacagaccucaaacaauucaaacaagacgccaaauacagccacggcauagacguaaccgaccuauucgccgcacagcccggcuuaaccagcgcagucaucgacgcccuacccagaaacauggucauaaccugccaaggcucagacgacauccgcaaacucuucgagagccaaggcagaaaagacaucaaacucauagacaucgcccucagcaagacugacucccgcaaauacgaaaacgccgucugggaccaauacaaggaccuaugccauaugcacaccgggaucguaguagaaaagaagaaacgaggcggaaaagaggaaauaaccccacauugcgcccucauggacugcaucauguucgacgccgccguaagcggcggccuaaacaccucaguccuuagagccguccucccacgcgacauggucuuccgcaccucuacgccccgaguaguccuauaaggacuagugcaucacauuuaaaagcaucucagccuaccaugagaauaagagaaagaaaaugaagaucaauagcuuauucaucucuuuuucuuuuucguugguguaaagccaacacccugucuaaaaaacauaaauuucuuuaaucauuuugccucuuuucucugugcuucaauuaauaaaaaauggaaagaaccuagaucuaaaaaaaaaaaaaaaaaaaaaaaaaaaaaaaaaaaaaaaaaaaaaaaaaaaaaaaaaaaaaaaaugcaucccccccccccccccccccccccccccccccaaaggcucuuuucagagccaccagaauu

SEQ ID NO: 10891 - RNA, 2092 nt, Artificial Sequence
  mRNA product Design i-2 comprising derived and/or modified sequence from LASV(LM776-SLE-2012;Clade IV)__AIT17825__NP (opt11)
ggggcgcugccuacggagguggcagccaucuccuucucggcaucaagcuuaccaugucagccuccaaagaaaucaaauccuuccucuggacccaaucccuccgccgcgaacuauccuccuacugcuccaacaucaaacuacaagucgucaaagacgcccaagcccuccugcacggacucgacuucucagaagucagcaacguacaacgacucaugcgaaaagaacgaagagacgacaacgaccucaaacgacuuagagaccucaaccaagcagucaacaaccucguagaacuaaaaucuacccaacaaaaaucaauacuccgcgucggcaccuuaacaagcgacgacuuacucauccucgcugccgaccucgaaaaacuaaaauccaaaguaacccgcaccgaacgcccccucucagccggcgucuacaugggcaaccucucaucccaacagcuagaccaacgcagagcccuccucuccaugauuggaauguccggaagcaaccaaggugccagagcaggccgagacggagucguccgcguuugggacgucaagaacgcagaacuccuaaacaaccaguucggcacaaugcccucccucacacuagcgugucucaccaaacaaggucaagucgaccuaaacgacgcaguacaagcccucacagaccucggccuaauauacacagccaaauacccaaacaccagcgaccucgaccgccucacccaaagccaccccauauuaaacaugauagacaccaagaaauccucucucaacaucuccggcuacaacuucucacuaggcgcagcaguaaaagccggcgcaugcaugcuggacgguggcaacaugcucgaaacaaucaaagucucaccccaaaccauggacggcauccuaaaauccauacucaaagucaagaaagcacucggaauguucaucucagacacccccggcgaacgcaaccccuacgaaaacauacucuacaaaauuugccucuccggcgacggcuggcccuauaucgccuccagaacauccaucaccggccgcgccugggaaaacaccguaguagaccuugaauccgacggaaaaccucagaaagccggaagcaacaacucaaacaaaucccuacaaucagccggauucaccgccggucuaacauacagccaacucaugacccuaaaggacgccaugcuacaacucgacccgaacgccaaaaccuggauggacaucgaaggccgacccgaagaccccgucgaggucgcccucuaccaacccagcagcggcugcuacauccacuucuucagagaaccaaccgaucucaagcaauuuaaacaagacgcgaaauacucccacggcauagaugucaccgaccucuucgcugcccaacccggccucaccucagccgucaucgacgcccuucccagaaacauggucaucacgugccaaggcuccgacgauauacgaaagcuacucgaaucgcaaggccgcaaggacaucaaguuaaucgacaucgcgcucuccaaaaccgacuccagaaaauacgaaaacgccgucugggaccaauacaaagaccucugccacaugcacaccggagucgucgucgaaaagaagaaaagaggcggcaaagaagaaauuaccccgcacugcgcacuaauggacugcaucauguucgacgccgcagucuccggaggccucaacaccucgguccuccgcgcgguacucccccgcgacauggucuuccguacaucaacaccccgcguaguccucuaaggacuagugcaucacauuuaaaagcaucucagccuaccaugagaauaagagaaagaaaaugaagaucaauagcuuauucaucucuuuuucuuuuucguugguguaaagccaacacccugucuaaaaaacauaaauuucuuuaaucauuuugccucuuuucucugugcuucaauuaauaaaaaauggaaagaaccuagaucuaaaaaaaaaaaaaaaaaaaaaaaaaaaaaaaaaaaaaaaaaaaaaaaaaaaaaaaaaaaaaaaaugcaucccccccccccccccccccccccccccccccaaaggcucuuuucagagccaccagaauu

SEQ ID NO: 10892 - RNA, 2092 nt, Artificial Sequence
  mRNA product Design i-2 comprising derived and/or modified sequence from LASV(Mad39;Clade IV)__ANH09723__NP (opt11)
ggggcgcugccuacggagguggcagccaucuccuucucggcaucaagcuuaccaugucagcauccaaagaaaucaaguccuuuuuauggacgcaaucacuccgacgcgaacuauccggcuacuguuccaacaucaaacuccaaguagucaaggacgcacaagcacuucuccacggccuagacuucucagaagucagcaacguacaacgacuaaugcgcaaacaacggcgcgacgacaaugaccuaaagcgccucagagaccuaaaccaagccgucaacaaccuuguagagcuaaaguccacccaacaaaaauccguccugcgcguuggaacccuaacaagcgacgaccuccucacacucgcagcggaccuagaaaagcucaaauccaaggucacacgaacagagagaccccuaaccgcaggagucuauaugggcaaccuaagcucccaacaacuagaccaaagacgggcacuccucaacaugauaggaaugagcggcggaaaccaaggugcaagaaccggacgggacgggguaguccgagucugggacgucaagaacgcagaacuacuaaacaaccaguucgguaccaugcccucccucacccucgccugccugacaaaacaaggccaagucgaccucaacgacguuguccaagcacuaacagaccucggccuaauauacaccgcaaaguaccccaacacaucagaccuggaccgacuaacccaaucccaccccauccucaacaugaucgacaccaacaaguccucccuuaacauuagcggcuacaacuucagccucggagccgcagucaaggccggcgccugcaugcuagacggcggcaacaugcuagaaaccaucaaagucucaccccaaaccauggacggcauccucaaaagcauuuuaaaagucaaaaagucacuaggcauguucaucagcgacacccccggagagagaaaccccuacgaaaauauccucuacaaaauaugccucucaggcgacggcuggcccuacauagcaagccgaaccagcaucacaggcagagcaugggaaaacaccgucgucgaucuagaaucaggcggcaaaccccaaaaagccggaucaaacaacuccaacaaaucucuacaaagcgccggcuucgccgcaggacucacauacucccaacucaugacccuaaaagacgccaugcuucagcucgacccgaacgcaaaaaccuggauggacauagaaggcagacccgaagacccaguagaaauagcacuauaccagcccaucucaggguguuacauccacuucuuccgcgaaccgaccgaucuaaaacaauucaaacaagacgccaaauacucccacggcaucgacguaaccgaccuguuugcagcucaaccaggccucaccuccgccgucauagaagcccucccccgaaacauggucauaaccugccaaggcagcgacgacauccgcaaacuauucgaaucacagggcagaaaagacaucaaacucaucgacaucgcacucagcaaaaccgacucacguaaguacgagaacgcggucugggaccaauacaaagaccucugccacaugcacaccggugucgucgucgaaaagaaaaagaaaggcggaaaagaagaaauaaccccucacugcgcccucauggacugcaucauguuugacgccgccgucagcggaggccuaaacacgcuaguccuacgagcaguacucccacgcgacaugguauuccgcacaucaacccccaaaguagucuuauaaggacuagugcaucacauuuaaaagcaucucagccuaccaugagaauaagagaaagaaaaugaagaucaauagcuuauucaucucuuuuucuuuuucguugguguaaagccaacacccugucuaaaaaacauaaauuucuuuaaucauuuugccucuuuucucugugcuucaauuaauaaaaaauggaaagaaccuagaucuaaaaaaaaaaaaaaaaaaaaaaaaaaaaaaaaaaaaaaaaaaaaaaaaaaaaaaaaaaaaaaaaugcaucccccccccccccccccccccccccccccccaaaggcucuuuucagagccaccagaauu

SEQ ID NO: 10893 - RNA, 2092 nt, Artificial Sequence
  mRNA product Design i-2 comprising derived and/or modified sequence from LASV(Z0947-SLE-2011;Clade IV)__AIT17841__NP (opt11)
ggggcgcugccuacggagguggcagccaucuccuucucggcaucaagcuuaccaugagcgccucaaaggaaaucaaaucguuccucuggacacaaucccuaagacgcgaacucucaggcuacugcuccaacaucaaacuacaagucguaaaagacgcgcaagcacuacuccacggacuagacuucagcgagguuuccaacguacaacgccugaugcgaaaagaacgccgagacgacaacgaccucaagcgacugcgcgaccucaaucaagccguaaacaaccucgucgaacuaaaauccacccaacaaaagucaauccuacgcguaggcacacugaccagcgaugaccuccucauccuugccgcagaccucgaaaagcuaaaaagcaaagucacccgcaccgaacgcccgcuauccgccggagucuacaugggaaaccuaaguagccaacaacucgaccaacggcgcgcacuacuaaacaugauaggcaugagcggcuccaaccaaggugcacguacaggcagggacggggucguacgcgucugggacgucaaaaacgccgaacuccucaacaaccaauucgguacaaugcccucacucacacuagcgugccucaccaagcagggacaaguagaccucaacgacgcaguacaagcgcuaacagaccucggccucauauacaccgcaaaauacccaaacaccucugaccuagaccgacucacucagucacacccaauccucaacaugauagacacaaagaaauccucgcuaaacauauccggcuacaauuucucccucggagccgccgucaaagccggcgcgugcaugcucgacggaggcaacaugcucgaaaccauaaaagucucaccacaaacaauggacggaauccucaaauccauccuaaaggucaagaaagcccuaggaauguucauauccgacgcccccggagaacgcaaccccuaugaaaacauccucuacaaaaucugccucuccggcgacggcuggcccuacaucgccagccgaacaagcaucaccggccgugccugggaaaacaccgucguagaucucgaaagcgacggaaaaccccaaaaagcaggcucgaacggcuccaacaaaucccuccagagcgccggcuucaccgcaggccuaaccuacucacaacugaugacacucaaagacgccaugcuacaacucgaccccaacgcaaaaaccuggauggacaucgaaggccgccccgaagaccccgucgagauagcucucuaccaacccuccucaggaugcuacauccacuucuuccgcgaaccaaccgaccugaaacaauucaaacaggacgcaaaauacucccacggcauagacguaaccgaccuauucgccgcgcaaccaggacucaccuccgccgucaucgacgcccucccaagaaacaugguuauaaccugccaaggcuccgacgacauccgcaaacuauucgaaucccaaggccgcaaagacaucaaguuaaucgacaucgcccugucaaagacagacucccgcaaauacgaaaacgcggucugggaccaauacaaagaccuuugccacaugcacaccgguaucgucguagagaaaaagaaacgaggaggcaaagaagagauaaccccacacugcgcuuuaauggacugcauaauguucgacgccgccgucucaggcggccuaaacaccagcguccuccgagcaguccucccccgcgacauggucuuucggaccuccacccccagagucguccuaugaggacuagugcaucacauuuaaaagcaucucagccuaccaugagaauaagagaaagaaaaugaagaucaauagcuuauucaucucuuuuucuuuuucguugguguaaagccaacacccugucuaaaaaacauaaauuucuuuaaucauuuugccucuuuucucugugcuucaauuaauaaaaaauggaaagaaccuagaucuaaaaaaaaaaaaaaaaaaaaaaaaaaaaaaaaaaaaaaaaaaaaaaaaaaaaaaaaaaaaaaaaugcaucccccccccccccccccccccccccccccccaaaggcucuuuucagagccaccagaauu

SEQ ID NO: 10894 - RNA, 1927 nt, Artificial Sequence
  mRNA product Design i-3 comprising derived and/or modified sequence from LASV(Josiah;Clade IV)__NP_694869__NP (wt)
gggagaaagcuuaccaugagugccucaaaggaaauaaaauccuuuuuguggacacaaucuuugaggagggaauuaucugguuacugcuccaacaucaaacuacagguggugaaagaugcccaggcucuuuuacauggacuugacuucuccgaagucaguaauguucaacgguugaugcgcaaggagagaagggaugacaaugauuugaaacgguugagggaccuaaaucaagcggucaacaaucuuguugaauuaaaaucaacucaacaaaagaguauacugagaguugggacucuaaccucagaugacuuauuaaucuuagccgcugaucuagagaaguuaaagucaaaggugaucagaacagaaaggccauuaagugcaggugucuauaugggcaaccuaagcucacagcaacuugaccaaagaagagcucuccugaauaugauaggaaugaguggugguaaucaaggggcucgggcugggagagauggaguggugagaguuugggaugugaaaaaugcagaguugcucaauaaucaguucgggaccaugccaagucugacacuggcaugucugacaaaacaggggcagguugacuugaaugaugcaguacaagcauugacagauuuggguuugaucuacacagcaaaguaucccaacacuucagacuuagacaggcugacucaaagucaucccauccuaaauaugauugacaccaagaaaagcucuuugaauaucucagguuauaauuuuagcuugggugcagcugugaaggcaggagcuugcaugcuggaugguggcaauauguuggagacaaucaaggugucaccucagacaauggaugguauccucaaauccauuuuaaaggucaagaaggcucuuggaauguucauuucagacaccccuggugaaaggaauccuuaugaaaacauacucuacaagauuuguuugucaggagauggauggccauauauugcaucaagaaccucaauaacaggaagggccugggaaaacacugucguugaucuggaaucagaugggaagccacagaaagcugacagcaacaauuccaguaaaucccugcagucggcaggguuuaccgcugggcuuaccuauucucagcugaugacccucaaggaugcaaugcugcaacuugacccaaaugcuaagaccuggauggacauugaaggaagaccugaagauccaguggaaauugcccucuaucaaccaaguucaggcugcuacauacacuucuuccgugaaccuacugauuuaaagcaguucaagcaggaugcuaaguacucacaugggauugaugucacagaccucuucgcuacacaaccgggcuugaccagugcugucauugaugcacucccccggaauauggucauuaccugucagggguccgaugacauaaggaaacuccuugaaucacaaggaagaaaagacauuaaacuaauugauauugcccucagcaaaacugauuccaggaaguaugaaaaugcagucugggaccaguauaaagacuuaugccacaugcacacaggugucguuguugaaaagaagaaaagaggcgguaaagaggaaauaaccccucacugugcacuaauggacugcaucauguuugaugcagcagugucaggaggacugaacacaucgguuuugagagcagugcugcccagagauaugguguucagaacaucgacaccuagagucguucuguaaggacuaguuauaagacugacuagcccgaugggccucccaacgggcccuccuccccuccuugcaccgagauuaauaaaaaaaaaaaaaaaaaaaaaaaaaaaaaaaaaaaaaaaaaaaaaaaaaaaaaaaaaaaaaaaaugcaucccccccccccccccccccccccccccccccaaaggcucuuuucagagccaccagaauu

SEQ ID NO: 10895 - RNA, 1927 nt, Artificial Sequence
  mRNA product Design i-3 comprising derived and/or modified sequence from LASV(LP;Clade I)__AAF86702__NP (wt)
gggagaaagcuuaccaugagcaacuccaaggaaaucaaaucauuccuuuggacucaguccuuacgaagggaacuaucugguuacuguucuaacauaaaguugcaaguugucaaagaugcucaggcucuccugcauggccuugacuuuucugaggucagcaaugugcagaggcugaugcgcaagcagaagagagaugaugcagaccuaaagcgacugagggaucugaaucaagcugucaacaaucuuguugaacugaagucaacucaacagaagaaugucuuaagggucggcaccuugaguucagaugaucuaauaacuuuggcagcggaccuggaaaaacucaaguccaaagucauaaggacagaaaggccuuugagcucagguguuuacauggggaauuuaagcucacaacagcuugaucaaaggagggcucucuugagcaugauugggaugucagguggaccucaaggaaauaggacagguggggauggugucgucaggguuugggacguaaaaaaugcagaauuacucaauaaccaauuuggaaccaugccaagccucaccuuggcgugccucaccaaacaagggcaaguggaccucaaugaugcugugcaagcuuuaacagauuuagguuugauuuacacagcaaaguacccgaacucuucagaucuagacaugcucacucagagucacccuauacuaggaaugguugacacaaaaaagaguucccugaacaucucagguuacaacuucagucugggggcugcaguuaaagcuggugcuugcaugcuugaugggggcaacauguuggaaacaauaaaagugucaccacaaacaauggacgguauuuugaaaucuauucugaaggucaaaagaucacugggaauguucauuucugacacuccuggugaaagaaacccauaugagaacauccucuauaagaucugccuuucaggugaagguuggccguauauugcaucaagaacaucaauuacugggagagcuugggaaaacacucuuguugauuuggaaucugacaacaaaccaccgaaacuaaauagcgcugguuccaauaaaagcuugcaggcugcaggucuaaaugcuggguugaccuauucucaacugaugacacuaaaagauuguauguuacaguuggacccaaguagcaaaacauggauagauauugagggcaggccugaagacccaguggagauugcuuuguuucaaccaagcucugguuguuacauacacuuuuuuagagaaccuacugaccuuaagcaauucaaacaggaugcuaaguacucacaugggauagauguuacagaucuuuuuuccacacaacccgggcugacaagugcugucauagaggcacuuccccgcaauaugguguugaccugccaggggucagaugacaucaaaaagcuguuggagucucaagggagaagagacaucaaauugauugauauuucuuugagcaaagcagauucaaggaaguuugaaaaugcugugugggaccaauacaaagacuugugucacaugcacacgggaguagucguugagaagaaaaagagggguggaaaagaggaaaucaccccacauugcgcuuuacuggacugcaucauguuugaugcagcuacuacugguaguuugaacaucacaacacugagggcaguacuucccagagacauggucuucaggaccagcaccccuaaagucguucuguaaggacuaguuauaagacugacuagcccgaugggccucccaacgggcccuccuccccuccuugcaccgagauuaauaaaaaaaaaaaaaaaaaaaaaaaaaaaaaaaaaaaaaaaaaaaaaaaaaaaaaaaaaaaaaaaaugcaucccccccccccccccccccccccccccccccaaaggcucuuuucagagccaccagaauu

SEQ ID NO: 10896 - RNA, 1927 nt, Artificial Sequence
  mRNA product Design i-3 comprising derived and/or modified sequence from LASV(803213;Clade II)__AAF86704__NP (wt)
gggagaaagcuuaccaugagugcuuccaaggaggugaaaucauuccuuuggacacagucauugaggagagagcuuucagguuauuguucuaacauaaagcuucaaguuguuaaggaugcccaggcccuccuucacggccuugacuucucugaggucaacaaugugcaacgucuaaugcgcaaacagaaaagagaugauggugauuuaaaacgucuuagagaccugaaucaggcagucaacaaccuuguugaacucaaaucaacacaacaaaagagcauuuugagaguuggaacacugaccucagaugacuugcugacauuggcagcugacuuagagaaacugaagucaaaagucaucagaacagaaagaccacuaagcucggguguguacauggggaauuuaaguacacagcagcuugagcagagaagggcauugcugaacaugauuggcaugguugguggagcacagggcacccaaccuggaagagacggaguuguuagggugugggaugucaaaaauccagaucucuuaaacaaccaguucggcaccaugccuaguuugacauuagcaugucuuacuaaacagggucaaguugaccuaaaugaugcuguccuagcacugacggacuugggacugauauacacagcuaaguacccuaacaguuccgaccuggacaggcuuucccaaagucauccgauacugaacaugguggacacuaagaagagcuccuugaacauuucugguuacaauuuuagcuugggagcugcaguaaaggcuggggccuguaugcucgaugggggcaacauguuggaaaccauuaagguuacgccucagacaauggaugguaucuugaaguccauuuuaaaggugaaaagaucuuugggaauguuugucucagauacaccuggugagaggaacccuuaugagaacauacuuuauaaaaucugucucucuggugauggcuggcccuacauagccucaagaaccuccauugugggcagggcuugggagaauacuacuguggaucucgagucagaugggaagccacaaaaagugggaacugcuggguccaauaagucuuugcaguccgcaggguuuccaacaggguugacuuauucacagcugaugacucuuaaagacucaaugaugcagcuugacccaagugccaaaacuuggauagacauugaaggucguccagaagacccuguggagauagcucuuuaucaaccuaugucaggcuguuacauacauuucuuuagagaaccaacagaucugaaacaguucaagcaagacgccaaguauucucaugggauugauguggcagaucuuuucccugcucaaccugguuugacuagugcaguuauugaagcucuuccucgcaauaugguguugacuugccaagguucagaugauaucaagaaacucuuagacucucaaggaaggagggacauaaagcuuauugauauuucauuaagcaagguugacucuaggaaguuugaaaaugcuguuugggaccagugcaaagacuugugccacaugcacacuggagugguuguugagaagaagaaaagaggaggcaaagaagaaaucaccccacauugugcccugauggauugcauaauguuugaugcagcugugucaggagggcucaacauaccaguuuuaagagcuguucuucccagagacaugguauuuagaaccucaagccccaaggucguccuguaaggacuaguuauaagacugacuagcccgaugggccucccaacgggcccuccuccccuccuugcaccgagauuaauaaaaaaaaaaaaaaaaaaaaaaaaaaaaaaaaaaaaaaaaaaaaaaaaaaaaaaaaaaaaaaaaugcaucccccccccccccccccccccccccccccccaaaggcucuuuucagagccaccagaauu

SEQ ID NO: 10897 - RNA, 1930 nt, Artificial Sequence
  mRNA product Design i-3 comprising derived and/or modified sequence from LASV(GA391;Clade III)__CAA36646__NP (wt)
gggagaaagcuuaccaugagugcuuccaaggaagugaggucauucuuguggacucaaucccuaagaagggaacuaucuggcuacuguuccaacauaaaguugcagguaguuaaagacgcucaagcucuccuucauggucuugacuucuccgaggucaguaauguucagagauugaugcgcaagcagaaaagagaugauggcgaccuaaaacgacugagagaucucaaucaagcagucaacaaucuuguugagcucaaauccacacagcagaaaagugucuuaagaguuggaaccuuaaguucagacgaucuacuaauccuggccgcugauuuagaaaaacugaaaucaaaagucaccagaacagaaaggccuuugaguucaggaguuuauauggggaauuugaguucacaacagcuugaucaaaggagagcccuuuugaacaugauuggcaugacuggaguaaguggagggggaaagggugccagugauggcauugugagaguuugggaugucaaaaaugcagaguuacucaacaaucaguucggaacaaugccaagccuaacuuuagcaugccugaccaaacaggggcaaguggaccugaaugaugccguucaagcuuugacagauuuagggcugauuuacacagccaaauaccccaacucaucugaucucgacagauugucucagagucauccaauucugaauaugauugacacuaagaaaaguucacucaacaucucugguuacaauuucaguuugggugcugcugucaaagcaggggccugcaugcuugauggugguaacauguuagagacuauuaagguuucaccucagaccauggaugguaucuugaagucaaucuugaaaguuaagaagagucugggaauguuuguaucagacacaccgggugaaaggaacccuuaugagaacauccuauacaagaucugucucucaggagacggauggcccuauauugcaucaaggaccucgauugugggaagagcaugggaaaauacugugguggaccuugagcaagacaacaagccccagaaaauuggaaaugggggguccaacaagucauuacagucugcaggcuuugcugcaggauuaacuuacucucaguugaugacucucaaagauuucaagugcuucaacuugauucccaacgcaaaaaccuggauggauauugaaggaagaccagaagacccaguugagauagcccuuuaucaaccgagcucggguugcuauguacauuucuuuagggagccaacagauuugaagcaauucaaacaagaugcaaaguauucacaugguauugaugugacugauuuguuugcugcccaaccuggguuaaccagugcagugauagaagcccuuccucggaacauggucaucacuugccaaggaucagaggauaucagaaaacuccuugagucacaagggaggagagacauaaaacugauugacaucacucuuaguaaagcagauucaagaaaguuugagaaugcuguuugggaucaauucaaggaucuaugucacaugcacacugggguaguuguggagaaaaagaagagaggugguaaagaggaaauaacuccucauugugcacugauggauugcauuauguuugaugcagcaguuucaggaggacuugaugcaaaaguccugagaguugugcucccuagagacaugguguucagaacuucaacaccuaaagucguccuguagggacuaguuauaagacugacuagcccgaugggccucccaacgggcccuccuccccuccuugcaccgagauuaauaaaaaaaaaaaaaaaaaaaaaaaaaaaaaaaaaaaaaaaaaaaaaaaaaaaaaaaaaaaaaaaaugcaucccccccccccccccccccccccccccccccaaaggcucuuuucagagccaccagaauu

SEQ ID NO: 10898 - RNA, 1927 nt, Artificial Sequence
  mRNA product Design i-3 comprising derived and/or modified sequence from LASV(AV;Clade V)__CCA30315__NP (wt)
gggagaaagcuuaccaugagugccuccaaagaagugaaaucuuucuuauggacacaaucucugaggagggaguugucggguuacuguuccaauaucaaacuucaaguggugaaggacgcucaagcucucuugcaugggcuugacuucucugaggucagcaauguccagcggcugaugcgcaaacaaaggagagaugauagugaccuaaagcgucuuagggaucugaaucaagcugucaacaaucuuguugagcugaaaucgacacaacagaaaagugugcugagaguugggacccuaaguucggacgauuuacugacucuggcggcugauuuagaaaagcugaaaucaaaaguuacaagaacagaaaggcccuugaguucaggugucuacaugggaaaccuaaguucacagcagcucgaucagaggagggcacuucuaaauuugauugggaugacaaacggcagucaggggucacaggcugggagagauggagugguaagagucugggaugugaagaaugcagaauuguugaacaaucaauuugggacaaugccgagccugacauuagcaugucugacaaagcagggacaaguugacuuaaaugaugugguacaagcacucacagaucugggcuugauuuauacagcuaaauauccuaacacaucagauuuagauagguuaacucaaagucaucccauuuuaaacaugauugacaccaagaagagcucccugaacaucucaggcuacaauuuuagucugggugccgcagugaaagcaggugccugcaugcuggaugguggcaacauguuagaaacaaucaagguuucgccucaaucaauggauggcauuuuaaaauccaucuugaaggucaagagggcucuugggauguucgucucagauacuccgggugagagaaaccccuaugaaaacauacucuacaaaaucugcuuaucaggugacggguggccauacauugcaucuaggacaucaauaguaggaagggcuugggaaaacacuguaguggaccuugaaacagaugggaaaccacagaaaauuggcagugguaacuccaacaaaucucuccaaucugcaggcuucucggcuggacuaacuuacucccaacuuaugacccuuaaagaugcaauguugcagcuugacccaaaugccaagacguggauggacauagaagggaggccagaggacccgguggaaguugcucucuaucagccuaucucuggguguuauauacacuuuuucagagagcccacugaucucaaacaauuuaaacaagaugcaaaauauucucauggaauugacaucgcagaucuguuugcugcacaaccaggucugaccagugcuguuauugaggcgcucccccggaauaugguuaucacuugccaaggguccgaagacauaaagaagcuucuugaaucacaagggagaaaggauauaaaacugauugacauugcucuuaguaagauugauucaagaaaguuugaaaaugcuguuugggaucaauauaaagauuugugucacaugcacacagguguuguuguugagaagaagaagagagguggcaaagaagagaucaccccucacugugcauugauggauugcaucauguuugaugcugcugucucaggaggguugaacacacuggugcucagagcugugcuacccagagacaugguguuuagaacaucaacaccaagagucguccuguaaggacuaguuauaagacugacuagcccgaugggccucccaacgggcccuccuccccuccuugcaccgagauuaauaaaaaaaaaaaaaaaaaaaaaaaaaaaaaaaaaaaaaaaaaaaaaaaaaaaaaaaaaaaaaaaaugcaucccccccccccccccccccccccccccccccaaaggcucuuuucagagccaccagaauu

SEQ ID NO: 10899 - RNA, 1927 nt, Artificial Sequence
  mRNA product Design i-3 comprising derived and/or modified sequence from LASV(Togo/2016/7082;Clade VI)__AMR44578__NP (wt)
gggagaaagcuuaccaugaguaacucuaaagaggugaagucuuuucucuggacucagucucugaggagagagcugucagguuacugcucuaacaucaaacuccagguggucaaggaugcucaggccuuauuacaugggcuugauuucucugaagugagcaauguucagaggcugaugcgaaaacagaagagggaugauggugaccucaagaggcucagagaccugaaucaagcgguaaauaaucuuguugaacuaaaaucaguucaacaaaaaaguauauugagaguuggcacccugaccucugaugacuuacuaacacuugcugcugaccuagaaaaacuaaagucuaaaguaacuaggacugaaagaccuuugaguucaggaguuuauaugggaaaccucagcucucagcaacuugaccagaggagagcccuccugagcaugauagggaugaguggugggaaccagaacagccaacccaaaggagaugguguugugaggguuugggaugugaaaaaugcugaccugcugaacaaccaguuuggaacgaugcccagucuuacauuagcaugcuuaacaaagcagggacaaguggauuugaaugaugcuguucaggcacugacugaucuaggguugauuuacacagcuaaauacccgaacucaucugaccuagacagacuuucacaaagccauccaauccugaacaugaucgauaccaagaagagcucauugaacaucucuggcuacaauuuuaguuuaggggccgcaaucaagacuggggcaugcaugcuugaugggggcaacaugcuggagacaaucaaggucacuccccaaaccauggaugggauuuugaaauccauuuuaaaggugaagaggagucuugggauguuuauuucugauacaccuggagaaaggaauccuuaugaaaacauucuuuauaaaaucugucuuucaggagacggguggccuuacauagccucacgaacugccaucauugguagagcaugggaaaacacugugguugauuuggagucugauagcaagccacaaaagauugggagcaauggaucuaacaaaucauugcaaucugcaggcuuugccccuggacugacauacucucagcucaugacccucaaagacucaauguugcaauuagauccuaaugcaaagacuuggauagacauugaagguaggccggaagacccuguugaggucgccuuguuucagccuaucucagguugcuacauacacuucuuuagagaaccaacagaccugaagcaauuuaaacaagaugcaaaguacucacaugggauagaugucaccgauuuguuugcugcucagccagguuugaccagugcugucauugaggcacuucccaggaauauggugcugaccugucagggaucagacgacaucaaaaaauuguuggauucacaggggagaagggacauuaaacucauugauguuucucucaauaaaauugacucaagaaaguuugagaaugcuguaugggaucaauacaaagaucugugucacaugcauacagggguagucguggagaagaaaaagaagggagggaaagaagaaauaaccccucauugugccuugcuagacugcaucauguuugaugcagccguguccggaggccuaaaugccacaguuuugagagcuguucuaccuagagacaugguguuuagaacgucaucaccuaaagucguucuguaaggacuaguuauaagacugacuagcccgaugggccucccaacgggcccuccuccccuccuugcaccgagauuaauaaaaaaaaaaaaaaaaaaaaaaaaaaaaaaaaaaaaaaaaaaaaaaaaaaaaaaaaaaaaaaaaugcaucccccccccccccccccccccccccccccccaaaggcucuuuucagagccaccagaauu

SEQ ID NO: 10900 - RNA, 1927 nt, Artificial Sequence
  mRNA product Design i-3 comprising derived and/or modified sequence from LASV(KAK-428;Clade n.d. (VII))__ANH09741__NP (wt)
gggagaaagcuuaccaugagcaacucaaaggaggugaaaucuuuccuuuggacucagucucucagaagagaacugucugguuauugcaccaacauaaagcuucaaguugucaaagaugcucaggcacuauugcauggccuugacuucucugaaguuagcaauguccaacgucucaugcguaaacagaaaagagaugauaaugauuuaaagaggcuuagagacuugaaucaggccgucaacaaucuaguggaacuaaaaucagugcaacaaaagagcguccuuaaaguugggacacugaauucagaugaucuccugacauuagcugcagaucuggagaagcucaaaucuaaggugguuagaacugaaaggccucugagcucugguguuuacaugggcaaucuuaguucacaacagcuugaccaaaggagagcacuucuaaacaugauuggaauggcuggcgguagucagggaaaccaaccuagccgagaugguguagucagaguaugggaugucaaaaaugcagaccuacucaacaaccaauuuggcacaaugccaagucuuacauuagcaugucugacaaagcagggccaaguugacuuaaaugauguuguguuggcucugacugauuugggccuuauauacacagccaaauacccuaauucaucagauuuagauaggcugucucagaaccacccaguucugaacaugauugaugucaacaagaguucccuaaacauuucgggcuacaauuucagccugggggcagcagugaaagcuggagcuugcaugcuugauggcgggaacaugcuugagacaaucaagaucuccccucaaacaguggacggcauccugaaaucgaucuugaagguuaaaagggcuuuagggauguuugugucagacaccccuggugaaaggaacccuuaugagaacauacuguauaagguaugucuuucagggaauggguggccauacauagcuucaagaacaucaauuguugggagagcaugggaaaauacugugguagaucuugagucaaacaaaaaucagccuaagguugggaacaauggauccaacaagaugcugcagucuucgggauuugcuacugguuugacuuauucucaguugaugacuuugagggauucaauguuacaguuggacccaacugcaaagaccuggauugacauugaggguagaccugaagacccuguugaguuggcccucuuucagcccaguucaggguguuacauacauuucuuuagagagccuacugaccuaaagcaauucaaacaggaugcaaaauacucucaugggauugaugugaaugauuuguucucggcacaaccugguuuaaccagugcuguuuuggaagcacuaccacguaauauggugcugacuugucaaggcucugaugacauuagaaagcuuuuggacucacaggacaggaaagauauaaagcuaauugacaucucauugagcaaggcugaugcaaggaaguucgagaacgaugugugggaucaauuuaaggauuuaugccauaugcacaccgggauaguugucgagaagaagaagaaaggagggaaacaggaaaugacaccacacugugcauugcuagauuguaucauguuugaugcagcugucucuggggggcuuaauguccccacuuugagagcagugcuucccaccgacauggucuucagaacaauaacaaccaaagucguccuguaaggacuaguuauaagacugacuagcccgaugggccucccaacgggcccuccuccccuccuugcaccgagauuaauaaaaaaaaaaaaaaaaaaaaaaaaaaaaaaaaaaaaaaaaaaaaaaaaaaaaaaaaaaaaaaaaugcaucccccccccccccccccccccccccccccccaaaggcucuuuucagagccaccagaauu

SEQ ID NO: 10901 - RNA, 1927 nt, Artificial Sequence; identical to SEQ ID NO: 10895
  mRNA product Design i-3 comprising derived and/or modified sequence from LASV(Pinneo-NIG-1969;Clade I)__AIT17837__NP (wt)

SEQ ID NO: 10902 - RNA, 1927 nt, Artificial Sequence
  mRNA product Design i-3 comprising derived and/or modified sequence from LASV(ISTH0009-NIG-2011;Clade II)__AIT17405__NP (wt)
gggagaaagcuuaccaugaguguuucuaaggaagugaagucauuucucuggacacagucauugaggagggagcuuucaggcuauugcuccaacauaaaacuucaaguuguuaaggaugcucaggcucuucuucauggucuugacuuuucugaagucagcaaugugcaacgcuuaaugcgcaagcaaaaaagggaugauagugaucugaaacgccucagagauuugaaucaggcugucaacaaucuuguagaacucaaaucgacacaacaaaagaguaucuugagaguugggaccuugaccucagaugaccugcugacauuggcagcugacuuagagaaacuaaagucgaaggucauuagaacagaaaggccucuaagcucagguguuuauauggggaauuugagcacacagcagcuugagcagagaagggcauugcugaacaugauaggcaugguugguggggcucagggcacccaaccuggaagagacggaguuguuagagugugggauguuaagaauccggaucuuuugaacaaccaguucggcaccaugccuagucugacauuagcaugucucaccaaacaaggucaaguugauuugaaugaugccgucuuagcacuaacagaccugggucuaauauacacagcuaaguacccaaauagcuccgaccuagauagacuuucccaaagccauccuauacugaauaugguggacauuaagaaaagcucccugaacauuucugguuacaacuucagcuuaggagcugcagugaaggcuggggccugcaugcucgauggggggaacauguuggagaccaucaagguuacaccucagacaauggauggcaucuugaagucuauuuuaaaaguaaaaagaucuuugggaauguuuguuucagauacaccuggugagagaaacccuuaugagaacauacuuuacaagaucugucuuuccggugacggcuggcccuacauagcuucaaggacuucuauuguggguagggcuugggagaauaccacuguggaucucgagucagauggaaaaccgcaaaaagugggcucugcuggguccaacaaguccuuacagucagcgggauucccaacagggcugaccuauucucaguugaugacacuuaaagacucaaugaugcagcuugacccaagugccaaaaccuggauagacauugaaggucguccagaagacccuguggaaauagcucuuuaccaaccuaugucgggcuguuacauacacuucuucagagagccaacagacuuaaaacaguucaaacaggaugccaaauauucucaugggauugauguggcagaucuuuucccugcucaaccugguuugaccagcgcaguuauugaggcccucccucgcaauauggugcugaccugucaagguucagaugacauuaagagacucuuagacucccaaggaagaagggacauaaagcuuauugacauugcacugagcaaggcugacucuaggagauuugaaaaugcuguuugggaucaguguaaagaccuaugccauaugcauacuggagugguugucgaaaagaagaaaagaggaggcaaagaagaaauaacuccgcacugugcuuuaauggacugcauaauguaugaugcagcugugucaggagggcucaauauaccaguuuuaagagcaguucuucccagagacaugguguuuagaaccucaagccccaaggucguccuguaaggacuaguuauaagacugacuagcccgaugggccucccaacgggcccuccuccccuccuugcaccgagauuaauaaaaaaaaaaaaaaaaaaaaaaaaaaaaaaaaaaaaaaaaaaaaaaaaaaaaaaaaaaaaaaaaugcaucccccccccccccccccccccccccccccccaaaggcucuuuucagagccaccagaauu

SEQ ID NO: 10903 - RNA, 1927 nt, Artificial Sequence
  mRNA product Design i-3 comprising derived and/or modified sequence from LASV(ISTH2010-NIG-2012;Clade II)__AIT17483__NP (wt)
gggagaaagcuuaccaugagugcuucuaaggaagugaagucauuucucuggacacagucuuugaggagggagcuuucagguuauugcuccaauauaaaacuucaaguuguuaaggaugcucaggcucuccuucauggucuugacuuuucugaagucagcaaugugcagcgcuuaaugcgcaaacaaaagagggaugauagugaucugaaacgucucagagauuugaaucaagcugucaacaaucuuguagaacuuaaaucgacacaacaaaagaguaucuugagaguuggaaccuugaccucagaugacuugcugacacuggcagcugacuuagagaaacugaagucgaaggucauuagaacagaaaggccacuaagcucagguguuuauauggggaauuugaguacacagcagcuugagcagagaagagcauugcugaacuugauaggcaugguugguggggcucagggcacccaaccuggaagagacggaguuguuaggguuugggauguuaaaaauccggaccuuuugaacaaccaguucggcaccaugccuagucugacauuggcaugucucaccaaacaaggucaaguugauuugaaugaugccgucuuagcacugacagaccugggccuaauauacacagccaaguacccaaauagcuccgaccuggacagacuuucucaaagccauccuauauugaauaugguggauacuaagaagagcuccuugaacauuucugguuucaacuucagcuuaggagcugcagugaaagcuggagccuguaugcuugauggggggaacauguuggagaccaucaagguuacaccucagacaauggaugguaucuugaagucuauuuuaaagguaaaaaaaucuuugggaauguuuguuucggacacaccuggugagaggaacccuuaugagaauauacuuuacaagaucugucuuuccggugacggauggccuuacauagcuucaaggacuucuauugugggaagggcuugggagaauaccacuguggaucucgagucagauggaaaaccgcauaaagugggcacugcuggguccaacaagucucugcagucagcgggguucccaacagggcugacuuauucucaguugaugacacuuaaagacucaaugaugcagcuugacccaagugccaaaaccuggauagacauugaaggucguccagaagacccuguggagauagcucuuuaccaaccuaugucagguuguuacauacacuucuucagagaaccaacagacuugaaacaguucaagcaagaugccaaauauucucaugggauugauguggcagaucuuuucccugcucaaccugguuugaccagcgcagucauugaagcccucccccgcaauauggugcuaaccugucaagguucagaugauauuaagagacuccuagacucccaaggaagaagggauauaaagcuuauugacauugcacugagcaaggcugacucuaggagauuugaaaaugcuguuugggaucagugcaaagaucuaugccauaugcacacuggagugguugucgaaaagaagaaaagaggaggcaaagaagaaaucaccccgcacugugcuuuaauggacugcauaauguaugaugcagcugugucaggaggacucaacauaccaguguugagggcaguucuccccagggacaugguguuuagaaccucaagucccaaggucguccuguaaggacuaguuauaagacugacuagcccgaugggccucccaacgggcccuccuccccuccuugcaccgagauuaauaaaaaaaaaaaaaaaaaaaaaaaaaaaaaaaaaaaaaaaaaaaaaaaaaaaaaaaaaaaaaaaaugcaucccccccccccccccccccccccccccccccaaaggcucuuuucagagccaccagaauu

SEQ ID NO: 10904 - RNA, 1927 nt, Artificial Sequence
  mRNA product Design i-3 comprising derived and/or modified sequence from LASV(Lassa virus/H.sapiens-wt/NGA/2015/ISTH_0543;Clade II)__AVO03640__NP (wt)
gggagaaagcuuaccaugagugcuucuaaggaagugaagucauuucucuggacacagucauugaggagggagcuuucaggcuauugcuccaacauaaaacuucaaguuguuaaggaugcucaggcucuccuucauggucuugacuuuucugaagucagcaaugugcagcgcuuaaugcgcaagcaaaaaagggaugauagugaucugaaacgucucagagauuugaaucaggcugucaacaaccuuguagaacucaaaucgacacaacagaagaguaucuugagaguugggaccuugaccucagacgaccugcugacauuggcagcugacuuagagaaacuaaagucgaaggucauuagaacagaaaggccucuaagcucagguguuuauauggggaauuugaguacacagcagcuugagcagagaagagcauugcugaacaugauaggcaugguugguggggcucaaggcacccaaccuggaagagauggaguuguuagggugugggauguuaagaauccggaucuuuugaacaaccaguucggcaccaugccuagucugacauuagcaugucucaccaaacaaggucaaguugauuugaaugaugccgucuuagcacuaacagaccugggucuaauauacacagcuaaguacccaaauaguuccgaccuagauagacuuucccaaagccauccuauacugaauaugguggacacuaagaaaagcucccugaacauuucuggcuauaacuucagcuuaggagcugcagugaaggcuggggccuguaugcucgauggggggaacauguuggagaccaucaagguuacaccucagacaauggauggcaucuugaagucuauuuuaaaaguaaaaaaaucuuugggaauguuuguuucagauacaccuggugagagaaacccuuaugagaacauacuuuacaagaucugucuuuccggugacggcuggcccuacauagcuucaaggacuucuauuguggguagggcuugggagaacacuacuguggaucucgagucagauggaaaaccgcaaaaagugggcucugcugggucuaacaaguccuuacagucagcgggauucccaacagggcugaccuauucucaguugaugacacuuaaagacucaaugaugcagcuugacccaagugccaaaaccuggauagacauugaaggucguccagaagacccuguggaaauagcucuuuaccaaccuaugucgggcuguuacauacacuucuucagagaaccaacagacuuaaaacaguucaagcaagaugccaaauauucucaugggauugauguggcagaucuuuucccugcucaaccugguuugaccagcgcaguuauugaagcccucccucgcaauauggugcugaccugucaagguucagaugauauuaagagacucuuagauucccaaggaagaaaggacauaaagcuuaucgacauugcacugagcaaggcugacucuaggagauuugaaaaugcuguuugggaucaguguaaagaccuaugccauaugcauacuggagugguugucgaaaagaagaaaagaggaggcaaagaagaaauaacuccgcauugugcuuuaauggauugcauaauguaugaugcagcugugucaggaggacucaauauaccgguuuuaagggcaguucuucccagagacaugguguuuagaaccucaagccccaaggucguccuguaaggacuaguuauaagacugacuagcccgaugggccucccaacgggcccuccuccccuccuugcaccgagauuaauaaaaaaaaaaaaaaaaaaaaaaaaaaaaaaaaaaaaaaaaaaaaaaaaaaaaaaaaaaaaaaaaugcaucccccccccccccccccccccccccccccccaaaggcucuuuucagagccaccagaauu

SEQ ID NO: 10905 - RNA, 1927 nt, Artificial Sequence
  mRNA product Design i-3 comprising derived and/or modified sequence from LASV(Lassa virus/H.sapiens-wt/NGA/2016/ISTH_0009;Clade II)__AVO03572__NP (wt)
gggagaaagcuuaccaugagugcuucuaaggaaguaaagucauuucucuggacacagucauugaggagggagcuuucaggcuauugcuccaauauaaaacuucaaguuguuaaggaugcucaggcucuccuucauggucuugacuuuucugaagucagcaaugugcagcgcuuaaugcgcaagcaaaaaagggaugauagugaucugaaacgucucagagauuugaaucaggcugucaacaaucuuguagaacucaaaucgacacaacaaaagagcaucuugagaguugggaccuugaccucagaugaccugcugacauuggcagcugacuuagagaaacuaaagucgaaagucauuagaacagaaaggccucuaagcucggguguuuauauggggaauuugaguacacagcagcuugagcagagaagagcauugcugaacaugauaggcaugguugguggggcucagggcacccaaccuggaagagacggaguuguuagggugugggauguuaagaauccggaucucuugaacaaccaguucggcaccaugccuagucugacauuagcaugucucaccaaacaaggucaaguugauuugaaugaugcugucuuagcacuaacagaccugggucuaauauacacagcuaaguacccaaauagcuccgaccuagauagacuuucccaaagccauccuauacugaauaugguggauacuaagaaaagcucccugaacauuucugguuacaacuucagcuuaggagcugcagugaaggcuggggccugcaugcucgauggggggaacauguuggagaccaucaagguuacaccucagacaauggauggcaucuugaagucuauuuugaaagugaaaaaaucucugggaauguuuguuucagacacaccuggugagagaaacccuuaugagaacauacuuuacaagaucugucuuuccggugacggcuggcccuacauagcuucaaggacuucuauuguggguagggcuugggagaauacuacuguggaucucgagucagaugggaaaccgcaaaaagugggcucugcuggguccaacaaguccuuacagucagcgggauucccaacagggcugaccuauucucaguugaugacacuuaaagacucaaugaugcagcuugacccaagugccaaaaccuggauagacauugaaggucguccagaggacccuguggaaauagcucuuuaccaacccaugucgggcuguuacauacacuucuucagagaaccaacagacuuaaaacaguucaagcaagaugccaaauauucucaugggauugauguggcagaccuuuucccugcucaaccugguuugaccagcgcgguuauugaagcccucccucgcaauauggugcuaaccugucaagguucagaugauauuaagagacucuuagacucccaaggaagaagggacauaaagcuuauugacauugcacugagcaaggcugacucuaggagauuugagaaugcuguuugggaucaguguaaagaccuaugccauaugcauacuggagugguugucgaaaagaagaaaagaggaggcaaagaagaaauaacuccgcauugugcuuuaauggacugcauaauguaugaugcagcugugucaggaggacuuaauauaccaguuuuaagagcaguucuucccagagacaugguguuuagaaccucaagccccaaggucguccuguaaggacuaguuauaagacugacuagcccgaugggccucccaacgggcccuccuccccuccuugcaccgagauuaauaaaaaaaaaaaaaaaaaaaaaaaaaaaaaaaaaaaaaaaaaaaaaaaaaaaaaaaaaaaaaaaaugcaucccccccccccccccccccccccccccccccaaaggcucuuuucagagccaccagaauu

SEQ ID NO: 10906 - RNA, 1927 nt, Artificial Sequence
  mRNA product Design i-3 comprising derived and/or modified sequence from LASV(Lassa virus/H.sapiens-wt/NGA/2016/ISTH_0017;Clade II)__AVO03568__NP (wt)
gggagaaagcuuaccaugagugcuucuaaggaagugaagucauuccucuggacacagucauugaggagggagcuuucagguuauugcuccagcauaaaacuucaaguugucaaggaugcucaagcucuccuucauggucuugacuuuucugaagucagcaaugugcagcgcuuaaugcgcaaacaaaagagggaugauagcgaucugaaacgucucagagauuugaaucaggcugucaacaaucuuguagaacucaaaucgacacaacaaaagagcaucuugagaguugggacccugaccucagaugaccugcugacauuggcagcugacuuagagaaacugaagucaaaggucauuagaacagaaaggccacuaagcucagguguuuauauggggaauuugaguacacagcaacuugagcaaagaagagcauugcugaacaugauaggcauggcugguggggcucagggcacccaaccuggaagagacggaguuguuagggugugggauguuaagaauccggaucuuuugaacaaucaguucggcaccaugccuagucugacauuagcaugucucaccaaacagggucaaguugauuuaaaugaugcugucuuagcauuaacagaccugggucugauauacacagcuaaguauccaaauagcuccgaccuggacagacuuucucaaagccauccuauacugaauaugguggacacuaagaagagcuccuugaacauuucugguuacaacuucagcuugggagcugcagugaaagcuggagcuuguaugcuugauggggggaacauguuggagaccaucaagguuacaccucagacaauggauggcaucuugaagucuauuuuaaagguaaaaagaucuuugggaauguuuguuucagaugcaccuggugagaggaacccuuacgagaacauacuuuacaagaucugucuuucaggugacggcuggcccuacauagcuucaaggacuucuauuguggguagagcuugggagaauacuacuguggaucucgagucagaugggaaaccacaaaaagugggugcuacuggguccaacaaaucuuuacagucagcaggguuuccaacagggcugacuuauucucaguugaugacacuuaaagacucaaugaugcagcuugacccaagugccaaaaccuggauagacauugaaggucguccagaagacccuguggaaguggcucuuuaccaaccugugucgggcuguuacauacacuuuuuuagagaaccaacagauuuaaaacaguucaagcaagaugccaaauauucucaugggauugauguggcggaucuuuucccugcucaaccugguuugaccagcgcagucauugaggcccucccucgcaacaugguacugaccugucaagguucagaugauauuaagaaacucuuggacucccaaggaagaaaggacauaaagcuuauugacauugcgcugagcaaggccgauucuaggagauuugaaaaugcuguuugggaucagugcaaagaucuaugccauaugcauacuggagugguuguugaaaagaagaaaagaggaggcaaagaagaaauuaccccgcacugugcuuuaauggacugcauaauguaugaugcagcugugucuggaggacucaauaucccagucuuaagagcaguucuccccagagacaugguguuuagaaccucaagccccaaggucguccuguaaggacuaguuauaagacugacuagcccgaugggccucccaacgggcccuccuccccuccuugcaccgagauuaauaaaaaaaaaaaaaaaaaaaaaaaaaaaaaaaaaaaaaaaaaaaaaaaaaaaaaaaaaaaaaaaaugcaucccccccccccccccccccccccccccccccaaaggcucuuuucagagccaccagaauu

SEQ ID NO: 10907 - RNA, 1927 nt, Artificial Sequence
  mRNA product Design i-3 comprising derived and/or modified sequence from LASV(Lassa virus/H.sapiens-wt/NGA/2018/ISTH_0959;Clade II)__AVV65100__NP (wt)
gggagaaagcuuaccaugagugcuucuaaggaagugaagucauuucucuggacacagucuuugaggagggagcuuucagguuauugcuccaauauaaaacuucaaguuguuaaggaugcucaggcucuccuucauggucuugacuuuucugaagucagcaaugugcagcgcuuaaugcgcaaacaaaagagggaugauagugaucugaagcgucucagagauuugaaucaggcugucaacaaucuuguagaacuuaaaucgacacaacaaaagagcaucuugagaguugggacccugaccucagaugaccugcugacacuggcagcugacuuagagaaacuaaagucgaaggucauuagaacagaaaggccacuaagcucagguguuuauauggggaauuugaguacacagcagcuugagcagagaagggcauugcugaacuugauaggcaugguugguggggcucagggcacccagccuggaagagacggaguuguuaggguuugggauguuaagaauccggaccuucugaacaaccaguucggcaccaugccuagucugacauuggcaugucucaccaaacaaggucaaguugauuugaaugaugucgucuuagcacugacagaccugggccuaauauacacagccaaguacccaaauagcuccgaccuggacagacuuucccagagccauccuauacugaauaugguggacacaaagaagagcucuuugaacauuucugguuucaacuucagcuuaggagcugcaguaaaagcuggagcuuguaugcuugauggggggaacauguuagagaccaucaagguuacaccucagacaauggauggcaucuugaagucuauuuuaaagguaaaaaaaucuuugggaauguuuguuucggacacaccuggugagaggaacccuuaugagaauauacuuuacaagaucugucuuuccggugacggauggcccuauauagcuucaaggacuuccauuguggguagggcuugggagaauaccacuguggaucucgagucagauggaaaaccgcauaaaguaggcacugcuggguccaacaagucuuuacagucagcgggguucccaacagggcugacuuauucucaguugaugacacuuaaagacucaaugaugcagcuugacccaagugccaagaccuggauagacauugaaggucguccagaagacccuguggagauagcccucuaccaaccuaugucaggcuguuacauacacuucuucagagaaccaacagacuugaaacaauucaagcaagaugccaaauauucucaugggauugauguggcagaucuuuucccugcucaaccugguuugaccagcgcagucauugaagcccucccucgcaauauggugcuaaccugucaagguucagaugauauuaagagacucuuagacucccaaggaagaaaggauauaaagcuuauugacauugcacugagcaagacugacucuaggagauuugaaaaugcuguuugggaucaguguaaggaucuaugccauaugcacacuggagugguugucgaaaagaagaagagaggaggcaaagaagagaucaccccgcacugugcuuuaauggacugcauaauguaugaugcagcugugucaggaggacucaauauaccaguuuuaagggcaguucuccccagggacaugguguuuagaaccucaagucccaaggucguccuguaaggacuaguuauaagacugacuagcccgaugggccucccaacgggcccuccuccccuccuugcaccgagauuaauaaaaaaaaaaaaaaaaaaaaaaaaaaaaaaaaaaaaaaaaaaaaaaaaaaaaaaaaaaaaaaaaugcaucccccccccccccccccccccccccccccccaaaggcucuuuucagagccaccagaauu

SEQ ID NO: 10908 - RNA, 1927 nt, Artificial Sequence
  mRNA product Design i-3 comprising derived and/or modified sequence from LASV(LASV003-NIG-2008;Clade II)__AIT17581__NP (wt)
gggagaaagcuuaccaugagugcuuccaaggaagugaagucauuucucuggacacagucauugaggagggagcuuucagguuauugcuccagcauaaagcuucaaguugucaaggaugcucaggcucuucuucauggucuugacuuuucugaaguuagcaaugugcagcgcuuaaugcgcaaacaaaaaagggaugauagugaucugaaacgucucagagaucugaaucaggcugucaacaaucuuguggaacucaaaucaacacaacaaaagagugucuugagaguuggaaccuugaccucagaugaccugcugacauuggcagcugacuuagagaaacuaaagucgaaggucaucagaacagaaaggccacuaagcucagguguuuauauggggaauuugagugcacagcaacuugagcaaagaagaacauugcugaacaugauaggcaugguugguggggcucagggcacucaaccuggaagagacggaguuguuagggugugggauguuaagaauccagaucuuuugaacaaucaguucggcaccaugcccagucugacauuagcaugucucacuaaacaaggccagguugauuugaaugaugucgucuuagcacuaacagaccugggucuaauauacacagcuaaguacccuaauagcuccgaccuggacagacuuucccaaagucauccuauauugaguaugguggacaccaagaagagcuccuugaacauuucugguuacaacuucagcuuaggagcugcagugaaagcuggagcuuguaugcuugauggggggaacauguuggaaaccaucaagguuacaccucagacaauggauggcaucuugaagucuauuuuaaagguaaaaaaauccuugggaauguuuguuucagacacaccuggugagaggaacccuuaugagaacauacuuuacaagaucugucuuucuggugacgguuggcccuauauagcuucaaggacuucuauuguggguagagcuugggagaauacuacuguggaucucgagucagauggaaaaccacaaaaagugggaacugcuggguccaauaagucuuuacagucagcgggguuuccaacagggcugacuuacucucaguugaugacacuuaaagacucaaugaugcagcuugacccaagugccaaaaccuggauagacauugaaggucguccagaagacccuguggaaauagcucuauaccagcccaugucgggcugcuacauacacuucuucagagaaccaacagacuuaaaacaguucaagcaagaugccaaauauucucauggaauugauguaacagaucuuuucccugcucaaccuggauuaaccagugcagucauugaagcccucccucgcaauaugguacugaccugucaagguucagaugacaucaagcgacucuuggauucccaaggaaggagggacauaaagcuuauugacauugcauugagcaaggcugacucuagaagauuugaaaaugcuguuugggaucagugcaaagaucuaugccauaugcacacuggagugguugucgaaaagaagaaaagaggaggcaaagaagaaauuaccccacauugugcucuaauggacugcauaauguaugaugcagcugugucaggaggacucaauauaccaguuuugagagcaguccuccccagagacaugguguuuagaaccucaagccccaaggucguccuguaaggacuaguuauaagacugacuagcccgaugggccucccaacgggcccuccuccccuccuugcaccgagauuaauaaaaaaaaaaaaaaaaaaaaaaaaaaaaaaaaaaaaaaaaaaaaaaaaaaaaaaaaaaaaaaaaugcaucccccccccccccccccccccccccccccccaaaggcucuuuucagagccaccagaauu

SEQ ID NO: 10909 - RNA, 1927 nt, Artificial Sequence
  mRNA product Design i-3 comprising derived and/or modified sequence from LASV(LASV035-NIG-2009;Clade II)__AIT17589__NP (wt)
gggagaaagcuuaccaugagugcuuccaaggaaguaaagucauuccucuggacacagucauugaggagggaacucucagguuacugcucuaguauaaagcuucaaguuguuaaggaugcucaggcucuccuucauggucuugacuuuucugaggucagcaauguucagcgcuugaugcgcaaacaaaaaagggacgacagugaucugaaacgucucagagaucugaaccaggcugucaacaaucuuguagaacucaaaucaacacaacaaaagaguauccugagaguugggaccuugaccucagaugaccugcugacauuggcagcugacuuagagaaacuuaagucgaaggucaucagaacagaaaggccacuaagcucagguguuuacauggggaauuugagugcacagcaacuugagcaaagaagagcauugcugaacaugauaggcaugguugguggagcucaggguacccaaccuggaagagacggaguuguuagggugugggaugucaagaauccggaucuuuugaacaaccaauucggcaccaugccuagccugacauuagcaugucucaccaaacaaggucaaguugauuugaaugaugcugucuuggcacuaacagaccugggucuaauauacacagcuaaguacccaaacagcuccgaccuggacagacuuucccaaagccauccuauacugaauaugguggacacuaagaagagcuccuugaacauuucugguuacaacuucaguuuaggagcugcagugaaagcuggagcuuguaugcuugauggggggaauauguuggagacuaucaagguuacaccucagacaauggauggcaucuugaaaucuaucuuaaagguaaaaagaucuuugggaauguuuguuucagacacaccuggugagaggaacccuuaugagaacauacuuuacaagaucugucuuucuggggacgguuggcccuacauagcuucaagaacuuccauuguggguagagcuugggagaacaccacuguggaucucgagucagauggaaaaccacaaaaggugggcacuacuggguccaacaagucuuuacagucagcgggguucccaacaggguugaccuauucucaguugaugacacuuaaagacucaaugaugcaacuugacccaagugcuaaaaccuggauagacauugaaggucgaccagaagacccuguggaaauagcucuuuaccaaccuaugucgggcuguuacauacacuucuucagagaaccaacagacuuaaaacaguucaagcaagaugccaaauauucucaugggauugauguagcagaucuuuucccugcucaaccuggcuugaccagugcagucauugaagcccuuccucgcaauauggugcugaccugucaggguucagacgauauuaagaaacucuuagauucccaaggaagaagggacauaaagcuuauugacauugcacugaguaaggcugacucuaggaaguuugaaaaugcuguuugggaccaaugcaaggaucuaugccauaugcauacuggggugguuguugaaaagaagaaaagaggaggcaaagaagaaauuaccccgcacugugcucuaauggauugcauaauguaugaugcagcugugucaggaggacucaauauaccaguuuugagagcaguucuccccagagacaugguguuuagaaccucaagccccaaggucguccuguaaggacuaguuauaagacugacuagcccgaugggccucccaacgggcccuccuccccuccuugcaccgagauuaauaaaaaaaaaaaaaaaaaaaaaaaaaaaaaaaaaaaaaaaaaaaaaaaaaaaaaaaaaaaaaaaaugcaucccccccccccccccccccccccccccccccaaaggcucuuuucagagccaccagaauu

SEQ ID NO: 10910 - RNA, 1927 nt, Artificial Sequence
  mRNA product Design i-3 comprising derived and/or modified sequence from LASV(LASV1000-NIG-2009;Clade II)__AIT17783__NP (wt)
gggagaaagcuuaccaugagugcuucuaaggaagugaagucauuucucuggacacagucauugaggagggagcuuucagguuacugcuccaacauaaaacuucaagucguuaaggaugcucaggcucuccuucauggucuugacuucucugaagucagcaaugugcagcgcuuaaugcgcaaacaaaaaagggaugauagugauuugaaacgucucagagauuugaaucaggcugucaacaaucuuguagaacucaaaucgacacaacaaaaaaguaucuugagaguugggaccuugaccucagaugaccugcugacauuagcagcugacuuagagaaauuaaagucgaaggucauuagaacagaaaggccacuaagcucagguguuuauauggggaauuugaguacacagcagcuugagcagagaagagcacugcugaacaugauaggcaugguugguggggcucagggcacccaaccuggaagagacggaguuguuagggugugggauguuaagaauccggaucuuuugaacaaccaguucggcaccaugccuagucugacauuagcaugucucaccaaacaaggucaaguugauuugaaugauguugucuuagcacuaacagaccugggucuaauauacacagcuaaguacccaaauagcuccgaccuggacagacuuucccaaagccauccuauacugaauaugguggacacuaagaagagcuccuugaacauuucugguuacaacuucagcuuaggagcugcaguaaaagcuggagcuuguaugcuugauggggggaacauguuggagaccaucaagguuacaccccagacaauggauggcaucuuaaagucuauuuuaaagguaaaaaaaucuuugggaauguuugucucagacacaccuggugagaggaacccuuaugagaauauacuuuacaagaucugucuuuccggugacggcuggcccuacauagcuucaaggacuucuauuguggguagagcuugggagaacaccacuguggaucucgagucagauggaaagccgcaaaaagugggcacugcuggguccaacaagucuuuacagucagcgggguucccaacagggcugaccuauucucaguuaaugacacuuaaagacucaaugaugcagcuugauccaagugccaaaaccuggauagacauugaaggucguccagaagacccuguggaaauagcucuuuaccaaccugugucgggcuguuacauacacuucuucagagaaccaacagacuuaaaacaguucaagcaagaugccaaauauucucaugggauugauguggcagaucuuuucccugcccaaccugguuugaccagcgcagucauugaagcccucccucgcaauaugguacugaccugucaagguucagaugauauuaagagacucuuggacucccaaggaagaagggacauaaagcuuauugacauugcacugagcaaggcugacuccaggagauuugaaaaugcuguuugggaucagugcaaggaucuaugccauaugcauacuggagugguugucgaaaagaagaaaagaggaggcaaagaagaaaucaccccgcacugugcuuugauggacugcauaauguaugaugcagcugugucaggaggacucaauauaccaguuuuaagagcaguucuccccagggacaugguguuuagaaccucaagccccaaggucguccuguaaggacuaguuauaagacugacuagcccgaugggccucccaacgggcccuccuccccuccuugcaccgagauuaauaaaaaaaaaaaaaaaaaaaaaaaaaaaaaaaaaaaaaaaaaaaaaaaaaaaaaaaaaaaaaaaaugcaucccccccccccccccccccccccccccccccaaaggcucuuuucagagccaccagaauu

SEQ ID NO: 10911 - RNA, 1927 nt, Artificial Sequence
  mRNA product Design i-3 comprising derived and/or modified sequence from LASV(LASV221-NIG-2010;Clade II)__AIT17625__NP (wt)
gggagaaagcuuaccaugagugcuucuaaggaaguaaagucauuucucuggacacagucauugaggagggagcuuucagguuauugcuccagcauaaaacuucaaguuguuaaggaugcucaggcucuccuucauggucuugacuuuucugaagucagcaaugugcagcgcuuaaugcgcaaacaaaggagggaugauagugaucugaaacgucucagagauuugaaucaggcugucaacaaucuuguagaacucaaaucgacacaacaaaagagcaucuugagaguugggaccuugaccucggaugaccugcugacauuggcagccgaccuagaaaaacuaaagucgaaggucauuagaacagaaaggccacuaagcucagguguuuauauggggaauuugagcacacagcagcuugagcaaagaagagcauugcugaacaugauaggcaugguugguggggcccagggcacccaaccuggaagggacggaguuguuagagugugggauguuaagaauccggaucuuuugaacaaucaguucggcaccaugccuagucugacauuagcaugucucaccaaacaaggccaaguugauuugaaugaugcugucuuggcacuaacagaucugggucuaauauacacagcuaaguauccaaauagcuccgaccuggacagacuuucccaaagccauccuauacugaacaugguggacaccaagaagagcuccuugaacauuucuggcuacaacuucagcuuaggagcugcagugaaagcuggagcuuguaugcuugaugggggaaacauguuggagaccauuaaggucacaccucagacaguggauggcaucuugaagucuauuuuaaagguaaaaagaucuuugggaauguuuguuucagauacaccuggugagaggaacccuuacgagaacauacuuuacaagaucugucuuucuggcgacggcuggcccuacauagcuucaaggacuucuauuguggguagagcuugggagaauacuacuguggaucucgagucagauggaaaaccacagaaaguggguacugcuggguccaacaagucuuuacagucagcgggguuuccaacagggcugaccuauucucaguugaugacacuuaaagacucgaugaugcagcuugacccaagugccaaaaccuggauagacauugagggucguccagaagacccuguggaaauugcucuuuaccaaccuaugucuggcuguuacauacacuucuucagagaaccaacagauuuaaaacaguucaagcaagaugccaaauauucucaugggauugauguggcagaucuuuucccugcucaaccugguuugaccagugcagucauugaagcucucccucgcaacaugguacugaccugucaagguucagaugauauuaagagacucuuggacucccaaggaagaagggacauaaagcuuauugacauugcacugagcaaggcugauucuaggaaauuugaaaaugcuguuugggaucagugcaaagaucuaugccauaugcauacuggagugguugucgaaaagaagaaaagaggagguaaagaagaaaucaccccgcacugugcuuuaauggacugcauaauguaugaugcagcugugucaggaggacucaacauaccaguucuaagagcaguucuccccagagacaugguguuuagaaccucgagccccaaagucguccuguaaggacuaguuauaagacugacuagcccgaugggccucccaacgggcccuccuccccuccuugcaccgagauuaauaaaaaaaaaaaaaaaaaaaaaaaaaaaaaaaaaaaaaaaaaaaaaaaaaaaaaaaaaaaaaaaaugcaucccccccccccccccccccccccccccccccaaaggcucuuuucagagccaccagaauu

SEQ ID NO: 10912 - RNA, 1927 nt, Artificial Sequence
  mRNA product Design i-3 comprising derived and/or modified sequence from LASV(LASV237-NIG-2010;Clade II)__AIT17639__NP (wt)
gggagaaagcuuaccaugagugcuucuaaggaagugaagucauuucucuggacacagucauugaggagggagcuuucaggcuauugcuccaacauaaaacuucaaguuguuaaggaugcucaggcucuucuucauggucuugacuuuucugaagucagcaaugugcagcgcuuaaugcgcaagcaaaaaagggaugauagugaucugaaacgucucagagauuugaaucaggcugucaacaaucuuguagaacucaaaucgacacaacaaaagaguaucuugagaguugggaccuugacuucagaugaucugcugacauuggcagcugacuuagagaaacuaaagucgaaagucauuagaacagaaaggccucuaagcucagguguuuacauggggaauuugagcacacagcagcuugagcagagaagggcauugcugaacaugauaggcaugguugguggggcucaaggcacccaaccuggaagagacggaguuguuagggugugggauguuaagaauccggaucuuuugaacaaccaguucggcaccaugccuagucugacauuagcaugucucaccaaacaaggucaaguugauuugaaugaugccgucuuagcacuaacagaccugggucuaauauacacagcuaaguacccaaauagcuccgaccuagauagacuuucccaaagccauccuauacugaauaugguggacauuaagaaaagcucccugaacauuucugguuacaacuucagcuuaggagcugcagugaaggcuggggccugcaugcucgauggggggaacauguuggagaccaucaagguuacaccucagacaauggauggcaucuugaagucuauuuuaaaaguaaaaagaucuuugggaauguuuguuucagauacaccuggugagagaaacccuuaugagaacauacuuuacaagaucugucuuuccggugacggcuggcccuacauagcuucaaggacuucuauuguggguagggcuugggagaauacuacuguggaucucgagucagauggaaaaccgcaaaaagugggcucugcuggguccaacaaguccuuacagucagcgggauucccaacagggcugaccuauucucaguugaugacacuuaaagacucaaugaugcagcuugacccaagugccaaaaccuggauagacauugaaggucguccagaagacccuguggaaauagcucuuuaccaaccuaugucgggcuguuacauacacuucuucagagagccaacagacuuaaaacaguucaagcaggaugccaaauauucucaugggauugauguggcagaucuuuucccugcucaaccugguuugaccagcgcaguuauugaagcccucccucgcaauauggugcugaccugucaagguucagaugauauuaagagacucuuagacucccaaggaagaagggacauaaagcuuauugacauugcacugagcaaggcugacucuaggagauuugaaaaugcuguuugggaucaguguaaagaccuaugccauaugcauacuggagugguugucgaaaagaagaaaagaggaggcaaagaagaaauaacuccgcacugugcuuuaauggacugcauaauguaugaugcagcugugucaggagggcucaauauaccaguuuuaagagcaguucuucccagagacaugguguuuagaaccucaagccccaaggucguccuguaaggacuaguuauaagacugacuagcccgaugggccucccaacgggcccuccuccccuccuugcaccgagauuaauaaaaaaaaaaaaaaaaaaaaaaaaaaaaaaaaaaaaaaaaaaaaaaaaaaaaaaaaaaaaaaaaugcaucccccccccccccccccccccccccccccccaaaggcucuuuucagagccaccagaauu

SEQ ID NO: 10913 - RNA, 1927 nt, Artificial Sequence
  mRNA product Design i-3 comprising derived and/or modified sequence from LASV(LASV253-NIG-2011;Clade II)__AIT17671__NP (wt)
gggagaaagcuuaccaugagugcuuccaaggaagugaagucauuccucuggacacagucauugaggagggagcuuucagguuauugcuccagcauaaagcuucaaguugucaaggaugcucaggcucuccuucauggucucgacuuuucugaaguuagcaaugugcagcgcuuaaugcgcaaacaaaaaagggaugauagugaucugaaacgucucagagaucugaaucaggcugucaacaaucuuguggaacuuaaaucaacacaacaaaagagugucuugagaguugggaccuugaccucagaugaccugcugacauuggcagcugacuuagagaaacuaaagucgaaggucaucagaacagaaaggccacuaagcucagguguuuauauggggaauuugaguacacagcaacuugagcagaggagagcauuacugaacaugauaggcaugguugguggggcucagggcacccaaccuggaagagacggaguuguuagggugugggauguuaaaaauccagaucuuuugaacaaucaguucggcaccaugcccagucugacauuagcaugucucacuaaacaaggccagguugauuugaaugaugucgucuuagcacuaacagaccugggucuaauauacacagcuaaguacccuaauagcuccgaccuggacagacuuucccaaagucauccuauauugaacaugguggacaccaagaagagcuccuugaacauuucugguuacaacuucagcuuaggagcugcagugaaagcuggagcuuguaugcuugaugggggaaacauguuggaaaccaucaagguuacaccucagacaauggauggcaucuugaagucuauuuuaaaggugaaaaaauccuugggaauguuuguuucagacacaccuggugagaggaauccuuaugagaacauacuuuacaagaucugucucucuggugacgguuggcccuacauagcuucaaggacuucaauuguggguagagcuugggagaauacuacuguggaucucgagucagauggaaaaccacaaaaagugggaacugcuggguccaauaagucuuuacagucagcgggguucccaacagggcugacuuacucucaguugaugacacuuaaagacucaaugaugcaacuugacccaagugccaaaaccuggauagacauugaaggucguccagaagacccuguggaaauagcucuuuaccagcccaugucgggcugcuacauacacuucuucagagaaccaacagacuugaaacaguucaagcaagaugccaaauauucucaugggauugauguaacagaucuuuucccugcucaaccuggauuaaccagugcagucauugaagcccucccucgcaauaugguacugaccugucaaggcucagaugacaucaagagacucuuggauucccaaggaagaagggacauaaaacuuauugacauugcauugagcaaggcugacucuaggagauuugaaaaugcuguuugggaucagugcaaagaucuaugccauaugcacacuggagugguugucgaaaagaagaaaagaggaggcaaagaagaaauuaccccacauugugcucuaauggacugcauaauguaugaugcagcugugucaggaggacucaauauaccaguuuuaagagcgguccuccccagagacaugguguuuagaaccucaagccccaaggucguccuguaaggacuaguuauaagacugacuagcccgaugggccucccaacgggcccuccuccccuccuugcaccgagauuaauaaaaaaaaaaaaaaaaaaaaaaaaaaaaaaaaaaaaaaaaaaaaaaaaaaaaaaaaaaaaaaaaugcaucccccccccccccccccccccccccccccccaaaggcucuuuucagagccaccagaauu

SEQ ID NO: 10914 - RNA, 1927 nt, Artificial Sequence
  mRNA product Design i-3 comprising derived and/or modified sequence from LASV(LASV254-NIG-2011;Clade II)__AIT17675__NP (wt)
gggagaaagcuuaccaugagugcuucuaaggaagugaagucauuucucuggacacagucauugagaagggaacuuucagguuauugcuccagcauaaagcuucaaguuguuaaagaugcucaggcucuccuucauggucuugacuuuucugaagucagcaaugugcagcgcuuaaugcgcaaacaaaaaagggaugauagugaucugaaacgucucagagaucugaaucaggcugucaacaaucuuguggaacucaaaucaacacaacaaaagagugucuugagaguugggaccuuaaccucagaugaccugcugacauuggcagcugacuuagagaaacuaaagucaaaggucauuagaacagaaagaccacugagcucagguguuuauauggggaauuugaguacacagcagcuugagcaaaggagagcauuguugaacaugauaggcaugguugguggggcucagggcacccaaccuggaagagacggagugguuagggugugggauguuaaaaauccggaucuuuugaacaaccaguuuggcaccaugccuagucugacauuagcaugucucacuaaacaaggucaaguugauuugaaugaugccgucuuagcacuaacagaccugggucuaauauauacagcuaaguacccaaauagcuccgaccuggacagacuuucucaaagucauccuauacugaacaugguggacacuaagaaaagcuccuugaacauuucugguuacaacuucagcuuaggagcugcagugaaagcuggagcuuguaugcuugauggggggaacauguuggagaccaucaagguuacaccucagacaauggauggcauccugaagucuauuuuaaagguaaaaaaauccuugggaauguuuguuucagauacaccuggugagaggaacccuuaugagaacauacuuuacaagaucugucuuuccggugacggcuggcccuacauagcuucuaggacuuccauugugggcagagcuugggagaauaccaucguggaucucgagucagaugggaaaccacaaaaggugggcacugcugggucuaacaagucuuuacagucagcgggguuuccaacagggcugaccuauucucaguugaugacacuuaaagacucaaugaugcagcuugacccaagugccaaaaccuggauagacauugaaggucguccagaggacccuguagaaauagcucuuuaccaaccuaugucgggcuguuauauacauuucuucagagagccaacagacuuaaaacaguucaaacaagaugccaaauauucucaugggauugauguagcagaucuuuucccugcucaaccuggcuugaccagugcagucauugaagcccucccccgcaauaugguccugaccugucaagguucagaugacauuaagagacucuuggauucucaagggagaagggacauaaagcuuauugacauugcacugagcaaggcugacucuaggagauuugaaaaugcuguuugggaucagugcaaagaucuaugccauaugcacacuggaguggucgucgaaaagaagaaaagagggggcaaagaagaaauuaccccgcauugugcuuuaauggacugcauaauguaugaugcagcugugucaggaggacucaauauaccaguuuuaagagcaguucuccccagagauaugguguuuagaaccucaagccccaaagucguccuguaaggacuaguuauaagacugacuagcccgaugggccucccaacgggcccuccuccccuccuugcaccgagauuaauaaaaaaaaaaaaaaaaaaaaaaaaaaaaaaaaaaaaaaaaaaaaaaaaaaaaaaaaaaaaaaaaugcaucccccccccccccccccccccccccccccccaaaggcucuuuucagagccaccagaauu

SEQ ID NO: 10915 - RNA, 1927 nt, Artificial Sequence
  mRNA product Design i-3 comprising derived and/or modified sequence from LASV(Nig08-04;Clade II)__ADU56611__NP (wt)
gggagaaagcuuaccaugagugcuuccaaggaagugaaaucauuccuuuggacacagucauugaggagagagcuuucaggcuauugcucuaauauaaaacuccaaguggucaaggaugcucaggcccuucugcauggucucgacuucucugaggucagcaauguccagcgcuugaugcgcaaacagaaaagagaugacggugaccuaaaacgucuuagagaccuaaaucaggcaguuaacaaccuugucgagcucaagucaacacaacaaaagaguguucugaggguuggaacauugaccucagacgacuugcugacuuuagcagcugaucuagagaaauugaagucaaagguuauuaggacggagagaccauuaaguucagguguguauauggggaacuugagcacacaacaacuugagcagaggaaggcguuguugaguaugauaggcauggucgguggugcucagggaacccaaccuggaagagacggaguugucagagugugggaugucaaaaacccggaccuccucaacaaccaauuuggcaccaugccuaguuuaacgcuagcaugucucacuaaacagggucagguugacuuaaaugacgccguucuggcgcuaacagacuugggauuaauauacacagcuaaauaccccaauaguuccgaccuagacagacuuucccagagccauccuauacugaauaugguagauaccaagaagagcucccuaaauauuucugguuauaauuuuaguuugggagcugcagugaaggccggagcuugcaugcucgauggggguaacauguuggaaacuaucaaggugacgccucagacaauggauggcauucugaagucuauucuaaagguaaaaaggucccugggaauguuuguuucagacacaccuggugaaagaaacccuuaugaaaacauacuuuacaaaauuugucucucuggggacggcuggcccuacauagcuucaagaaccuccauuguggguagagcuugggagaauaccacuguagaccuugagucagaugggaaaccacagaaaguggguacugcuggauccaacaaaucucugcaaucugcuggguucccaacagggcugaccuauucucaacugaugacacucaaagauucaaugaugcaacuugacccaagcgccaaaaccuggauagacauugaaggucguccagaagacccuguugagauagcucuuuaccaaccuaugucaggcuguuauauacauuucuucagagaaccaacggauuuaaaacaguucaaacaagaugccaaauauucucaugggauugaugugacagaucucuuuucugcucagccuggucuaaccagugcagucauugaggcucucccccgcaacaugguguugacgugccaagguucagacgacauuaaaaaacucuuggauucucaggggagaagggacaucaagcucauugacaucucauuaaauaaggcugauucuaggagauuugaaaaugcugucugggaucaguguaaagauuugugucacaugcacacuggagugguuguugagaaaaagaagagaggaggcaaagaggagaucacuccacauugugcuuuaauggauugcauaauguuugacgcagcugugucaggaggacucaauauaccaaucuugagagcuguucucccaagagauaugguguucagaacuucaagucccaaagucguccuguaaggacuaguuauaagacugacuagcccgaugggccucccaacgggcccuccuccccuccuugcaccgagauuaauaaaaaaaaaaaaaaaaaaaaaaaaaaaaaaaaaaaaaaaaaaaaaaaaaaaaaaaaaaaaaaaaugcaucccccccccccccccccccccccccccccccaaaggcucuuuucagagccaccagaauu

SEQ ID NO: 10916 - RNA, 1930 nt, Artificial Sequence
  mRNA product Design i-3 comprising derived and/or modified sequence from LASV(GA391;Clade III)__AAA46284__NP (wt)
gggagaaagcuuaccaugagugcuuccaaggaagugaggucaugcuuguggacucaaucccuaagaagggaacuaucuggcuacuguuccaacauaaaguugcagguaguuaaagacgcucaagcucuccuucauggucuugacuucuccgaggucaguaauguucagagauugaugcgcaagcagaaaagagaugauggcgaccuaaaacgacugagagaucucaaucaagcagucaacaaucuuguugagcucaaauccacacagcagaaaagugucuuaagaguuggaaccuuaaguucagacgaucuacuaauccuggccgcugauuuagaaaaacugaaaucaaaagucaccagaacagaaaggccuuugaguucaggaguuuauauggggaauuugaguucacaacagcuugaucaaaggagagcccuuuugaacaugauuggcaugacuggaguaaguggagggggaaagggugccaguaauggcauugugagaguuugggaugucaaaaaugcagaguuacucaacaaucaguucggaacaaugccaagccuaacuuuagcaugccugaccaaacaggggcaaguggaccugaaugaugccguucaagcuuugacagauuuagggcugauuuacacagccaaauaccccaacucaucugaucucgacagauugucucagagucauccaauucugaauaugauugacacuaagaaaaguucacucaacaucucugguuacaauuucaguuugggugcugcugucaaagcaggggccugcaugcuugauggugguaacauguuagagacuauuaagguuucaccucagaccauggaugguaucuugaagucaaucuugaaaguuaagaagagucugggaauguuuguaucagacacaccgggugaaaggaacccuuaugagaacauccuauacaagaucugucucucaggagacggaugguccuauauugcaucaaggaccucgauugugggaagagcaugggaaaauacugugguggaccuugagcaagacaacaagccccagaaaauuggaaaugggggguccaacaagucauuacagucugcaggcuuugcugcaggauuaaucuacucucaguugaugacucucaaagauuucaagugcuucaacuugauucccaacgcaaaaaccuggauggauauugaaggaagaccagaagacccaguugagauagcccuuuaucaaccgagcucggguugcuauguacauuucuuuagggagccaacagauuugaagcaauucaaacaagaugcaaaguauucacaugguagggaugugacugauuuguuugcugcccaaccuggguuaaccagugcagugauagaagcccuuccucggaacauggucaucacuugccaaggaucagaggauaucagaaaacuccuugagucacaagggaggagagacauaaaacugauugacaucacucuuaguaaagcagauucaagaaaguuugagaaugcuguuugggaucaauucaaggaucuaugucacaugcacacugggguaguuguggagaaaaagaagagaggugguaaagaggaaauaacuccucauugugcacugauggauugcauuauguuugaugcagcaguuucaggaggacuugaugcaaaaguccugagaguugugcucccuagagacaugguguucagaacuucaacaccuaaagucguccuguagggacuaguuauaagacugacuagcccgaugggccucccaacgggcccuccuccccuccuugcaccgagauuaauaaaaaaaaaaaaaaaaaaaaaaaaaaaaaaaaaaaaaaaaaaaaaaaaaaaaaaaaaaaaaaaaugcaucccccccccccccccccccccccccccccccaaaggcucuuuucagagccaccagaauu

SEQ ID NO: 10917 - RNA, 1927 nt, Artificial Sequence
  mRNA product Design i-3 comprising derived and/or modified sequence from LASV(Nig08-A19;Clade III)__ADU56619__NP (wt)
gggagaaagcuuaccaugagugcuuccaaagaagugaaaucauuccuguggacucagucucugagaagagaguuaucuggcuauugcuccaauauaaaacuccaggugguaaaggaugcucaagcucuccuucaugguuuggacuucucugaggucaguaauguucaacgcuugaugcgcaaacaaaaaagggacgauggugaucuuaaacggcuaagagaccucaaucaagcagucaacaaccuuguugaacuaaagucaacucaacaaaagagugugcugaggguuggaacccuaaguucagacgaucuauugguuuuggcugcugaccuggaaaaacugaagucaaagguuguuaggacagaaagaccccugagcucaggaauuuauauggggaaucuaaguucacagcagcuugaucagaggaaggcccuccucaacaugauuggcaugacuggugggaaugggggaaggaauaccacuagugaugguauugugagaguuugggacgucaagaaugcagagcugcuuaacaaucaguuugggacaaugccaagucuaacucuagcauguuugaccaaacaagggcaaguggauuugaaugaugcuguucaggcuuugacagauuugggauugauuuacaccgcaaaauacccuaauucaucugauuuggacaggcuggcccagagccauccgauauugaacaugauugauacuaagaagagcucccuuaacaucucugguuacaauuuuaguuuaggagccgccgucaaggcuggggccugcaugcuugauggaggcaauaugcuagagacuauaaaggucucaccucaaaccauggauggcaucuugaagucaaucuugaaagucaagagaagccugggaauguucaucucagauacgccaggugaaaggaacccuuaugaaaacauacuguacaaaaucugccucucaggagauggguggccuuacauugcaucaaggacuucaauugugggaagagcuugggagaacaccgugguugacuuagagucagacaacaaaccgcaaaagaccggcaauggggguucaaauaagucauugcaaucugcaggguuugcugcaggacugacuuauucucaacugaugaccuuaaaggauucaaugcuucagcuugacccaaaugcaaagacuuggauggauauugagggaagaccagaagauccaguugaaauagcucuguaucaaccaaguucaggcugcuauauacacuucuucagggaaccgacagacuuaaagcaguuuaaacaggaugcaaaauauucacaugguauugaugugacagauuuguuugcugcacagccaggguuaacaagugcagugauagaggcucuuccuagaaacauggucaucaccugucaagggucagaagacaucagaaaacuucuggagucacaggggaggagggauauaaaacugauugacauuucccuuaguaagguggacucaagaaaauuugagaaugcugugugggaucaauucaaggauuuaugucacaugcacaccgggauuguuguggagaagaaaaagaggggaggcaaggaggaaauaacaccucauugugcauuaauggacugcaucauguuugaugcugcagucucaggaggaguugaugcaaagguccugagggcugugcuccccagagauaugguguucagaacuucgacacccaaagucguccuguaaggacuaguuauaagacugacuagcccgaugggccucccaacgggcccuccuccccuccuugcaccgagauuaauaaaaaaaaaaaaaaaaaaaaaaaaaaaaaaaaaaaaaaaaaaaaaaaaaaaaaaaaaaaaaaaaugcaucccccccccccccccccccccccccccccccaaaggcucuuuucagagccaccagaauu

SEQ ID NO: 10918 - RNA, 1927 nt, Artificial Sequence
  mRNA product Design i-3 comprising derived and/or modified sequence from LASV(G1180-SLE-2010;Clade IV)__AIT17169__NP (wt)
gggagaaagcuuaccaugagugccucaaaggaaauaaaguccuuucuauggacacaaucauugaggagggaauuaucugguuacugcuccaacaucaaacuacagguggugaaagaugcccaggcucuauuacauggacuugacuucucagaagucaguaauguucaacgguugaugcgcaaggagagaagggaugacaaugauuugaaacgguugagggaccuaaaucaagcggucaacaaccucguugaguuaaaaucaacucaacaaaagagcauauugagaguugggacccuaaccucagaugacuuauuaaucuuagccgcugaucuagagaaguuaaaaucaaaggugaucaggacagaaaggccauugagugcaggugucuauaugggcaacuugagcucacagcagcuugaccaaagacgagcucuucugaguaugauaggaaugaguagugguaaucaaagggcucaggcugggagggauggaguggugagaguuugggauguaaaaaauguagaguugcuuaauaaucaguucggaaccaugccaagucuaacacuggcaugucugacaaaacaggggcagguugauuugaaugaugcagugcaagcacugacagauuugggucugaucuacacagcaaaguauccuaauacuucagaccuagauaggcugacucaaagucaccccaucuuaaacaugauugacaccaagaaaagcucuuugaauaucucugguuacaauuucagcuugggugcagcugugaaggcaggagcuugcaugcuggaugguggcaauauguuggagacaaucaaggugucaccucagacaauggaugguauccucaaauccaucuuaaaggucaagaaggcucuugggauguucaucucagacaccccuggugaaaggaaucccuaugaaaacauacucuacaagaucuguuugucaggagauggauggccauauauugcaucaagaaccucgauaacaggaagagccugggaaaacacugucguugacuuggaaucagaugggaagccacagaaagcuggcagcaacaauucuaauaaauccuugcagucaguaggguuuacugcugggcuuaccuauucucagcugaugacccucaaggaugcgaugcugcaacuugacccaaacgcuaagacuuggauggacaucgaaggaagaccugaagauccaguggaaauugcccucuaucagccaaguucaggcugcuacauacacuuuuuccgugaaccuacugauuuaaagcaguucaagcaggaugcuaaguacucacaugggauugaugucacagaccucuucgcugcacaaccgggcuugaccagugcuguuauagaugcacucccccggaacauggucauuaccugucagggguccgaugacauaaggaagcuccuugagucacaagguagaaaagacaucaaauuaauugauauugcccucagcaaaacugauuccaggaaguaugaaaaugcagucugggaucaguauaaagaccuaugccacaugcacacagguguuguuguugaaaagaagaaaagaggcgguaaagaggaaauaaccccucacugugcacuaauggacugcaucauguuugaugcagcagugucaggaggacugaacacaucuguuuugagagcagugcugccuagagauaugguauucagaacaucgacaccuagagucguccuguaaggacuaguuauaagacugacuagcccgaugggccucccaacgggcccuccuccccuccuugcaccgagauuaauaaaaaaaaaaaaaaaaaaaaaaaaaaaaaaaaaaaaaaaaaaaaaaaaaaaaaaaaaaaaaaaaugcaucccccccccccccccccccccccccccccccaaaggcucuuuucagagccaccagaauu

SEQ ID NO: 10919 - RNA, 1927 nt, Artificial Sequence
  mRNA product Design i-3 comprising derived and/or modified sequence from LASV(G1442-SLE-2011;Clade IV)__AIT17181__NP (wt)
gggagaaagcuuaccaugagugcuucaaaggagguaaaguccuucuuguggacacaaucccugaggagggagcuguccgguuauuguuccaauaucaaacuacagguagugaaagaugcccaagcccuuuugcauggacuugauuucucugaggucagcaauguccaacgguugaugcgcaaacagagaagggaugacaaugaccugaaacggcugagggaucuaaaucaagcagucaacaaccuuguugagcugaaaucuacccaacagaaaagugugcugagaguaggaacucuaaccucagaugaucuguugguuuuggcugcugaccuggagaagcugaaaucaaaagugaucaggacagaaaggccauugagcgcaggugucuauaugggcaacuugagcucacagcaacuagaccaaagacgggcucuccugaauaugauaggaaugagugguggcauucaagggacucguacugggagagauggagugguaagagucugggauguaaaaaaugcagaccuacuuaacaaucaguucggcacuaugccaagucugacauuggcauguuuaacaaaacaaggacagguugaccugaaugauguggugcaggcacugacagaucugggccugauuuauacagcaaaguacccuaaugccucagacuuagauagguugacucagagucaccccaucuuaaacaugauugauaccaaaaaaaguucccuaaauaucucagguuacaacuucagucugggugcagcugugaaggcaggagcuugcaugcuggauggugguaacauguuggagacaaucaaggugucaccucagacaauggauggcauccucaagucuauccuaaagguaaaaaagacucuugggauguucaucucagacaccccuggugaaaggaauccuuaugagaacauacuuuacaagauuugucugucaggagauggauggccauauauugcaucaagaacuucaauuacaggaagggccugggaaaacacugucguugaucuggaaucagaugggaagccacagaaggcugggagcaacaauucuaacaaaucccugcagucagcaggcuuugccgcugggcucacuuauucucagcuuaugacccucaaagaugcaaugcugcagcuugaucccaaugcuaaaaccuggauggacauugagggaagaccugaagacccaguggagauugcucucuaucagccaaguucagguugcuacauucacuucuuccgugaaccuacugauuuaaagcaguucaagcaagaugcuaaauauucacauggaauugaugucacagaccucuucgccgcacaaccaggcuugaccagugcugucauagaggcacuuccccggaacauggucaucaccugucagggaucugaugacauaaagaaacuccuugaaucacagggaagaaaggauaucaaacuaauugacaucgcccucaguaaaacugauuccaggaaguaugaaaacgcagucugggaucaauauaaggacuuaugccauaugcacacagguguuguuguugaaaagaagaaaagaggcggcaaggaggagauaacaccucacugugcuuugauggacugcauuauguuugacgcagcagugucaggaggauugaacacauuggucuugagagcgguucuaccuagagacaugguguuuagaacaucgacacccagagucguccuguaaggacuaguuauaagacugacuagcccgaugggccucccaacgggcccuccuccccuccuugcaccgagauuaauaaaaaaaaaaaaaaaaaaaaaaaaaaaaaaaaaaaaaaaaaaaaaaaaaaaaaaaaaaaaaaaaugcaucccccccccccccccccccccccccccccccaaaggcucuuuucagagccaccagaauu

SEQ ID NO: 10920 - RNA, 1927 nt, Artificial Sequence
  mRNA product Design i-3 comprising derived and/or modified sequence from LASV(G3010-SLE-2013;Clade IV)__AIT17345__NP (wt)
gggagaaagcuuaccaugagugccucaaaggaaauaaaguccuuucuguggacacagucauugaggagggaauugucugguuauuguucuaacaucaaacuacagguggugaaagaugcgcaagcucuuuuacauggacuugacuucuccgaagucaguaauguucaacgguugaugcgcaaggagagaagggaugacaaugauuugaaacgguugagggaccuaaaucaagcugucaacaaccuuguugaguuaaaaucaacucaacaaaaaaguauacugagaguugggacccuaaccucagaugacuuguuaaucuuggcugcugaucuagagaaguugaaaucaaaggugaccaggacagaaaggccauugagugcaggugucuauaugggcaaccugagcucacagcaacuugaccaaagacgagcucuucugaguaugauaggaaugaguagugguguucaaggggcucgggcugggagagauggaguggugagaguuugggauguaaaaaaugcagaguugcuuaauaaucaguucggaaccaugccaagucugacacuagcauguuugacaaaacaggggcagguugacuugaaugauguagugcaagcauugacagauuuggguuugaucuacacagcaaaguacccaaauacuucagauuuagauaggcugacucaaagucaccccauccugaacaugauugacaccaagaaaagcucuuugaauaucucagguuauaauuucagcuugggugcagcuguaaaggcaggagcuugcaugcuggaugguggcaacauguuggagacaaucaaggugucaccucagacaauggauggcauccucaaguccaucuuaaaggucaagaaagcucuugggauguucaucucagagaccccuggugaaaggaauccuuaugagaacauacucuacaagaucugucuaucaggagauggauggccauauauugcaucaagaaccucaauaacaggaagggccugggaaaacacugucguugaucuggaaucagaugggaagccacaaaaagcuggcagcaacaauuccaauaaaucccugcagucggcaggguuuaccgcugggcuuaccuauucucagcugaugacccucaaagacgcaaugcugcaacuugacccaaaugcuaagaccuggauggacauugaaggaaggccugaagauccaguggagguugcccucuaucaaccaaguucaggcugcuacauacacuucuuccgugaacccacugauuugaagcaguucaagcaggaugcuaaguacucacaugggauugauguuacagaccucuucgcugcgcaaccaggcuugaccagugcugucauagaugcacuuccccggaauauggucauuaccugucaggggucugaugacauaaagaaacuccuugaaucacaagguaggaaagacaucaagcuaauugauauugcccucaguaaaacugauuccaggaaguaugaaaaugcagucugggaccaguauaaagacuuaugccacaugcacacagguguugucguugaaaagaagaaaagaggcgguaaagaggaaauaaccccucacugugcacuaauggacugcaucauguuugaugcagcaguaucaggaggacugaacacaucggucuuaagagcagugcugcccagagauaugguguucagaacaucgacaccuagagucguucuguaaggacuaguuauaagacugacuagcccgaugggccucccaacgggcccuccuccccuccuugcaccgagauuaauaaaaaaaaaaaaaaaaaaaaaaaaaaaaaaaaaaaaaaaaaaaaaaaaaaaaaaaaaaaaaaaaugcaucccccccccccccccccccccccccccccccaaaggcucuuuucagagccaccagaauu

SEQ ID NO: 10921 - RNA, 1927 nt, Artificial Sequence
  mRNA product Design i-3 comprising derived and/or modified sequence from LASV(G502-SLE-2009;Clade IV)__AIT17127__NP (wt)
gggagaaagcuuaccaugagugccucaaaggaaauaaaguccuuucuguggacacaaucauugaggagggaauugucugguuacugcuccaacaucaaacuacaggugguaaaagaugcccaggcucuucugcauggucuugacuucuccgaagucaguaauguucaacgguuaaugcgcaaggagagaagggaugacaaugacuugaaacgguugagggaccuaaaucaagcggucaacaaccuuguugaguuaaaaucaacucaacaaaagaguauacugagaguugggacucuaaccucagaugacuuauuaaucuuagcugcugaucuagagaaguugaaaucaaaggugaucaggacagaaaggccauugagugcaggugucuauaugggcaacuugagcucacagcaacuugaccaaagacgggcucuucugaguaugauaggaaugaguggugguaaucaagggguucgggcugggaaggauggaguggugagaguuugggaugugaaaaaugcagaguugcuuaauaaucaguuugggacuaugccaagucuaacacuggcaugucugacaaaacaggggcagguugacuugaaugaugcagugcaagcacugacagauuugggucugaucuacacagcaaaguaucccaauacuucagacuuagauaggcugacucaaagucaccccaucuuaaacaugauugacaccaagaagaguuccuugaauaucucugguuauaauuuuagcuugggugcagcugugaaagcaggagcuugcaugcuggaugguggcaauauguuggagacaaucaaagugucaccucagacaauggaugguauccucaaauccaucuuaaaggucaagaaggcucuugggauguucaucucagacaccccuggugaaaggaauccuuaugaaaacauacucuacaagauuuguuugucaggagauggauggccauauauugcaucaagaacuucaauaacaggaagagccugggaaaacacugucguugaccuagaaucagaugggaagccacagaaagcuggcagcaacaauuccaauaaaucccugcagucggcaggguuuaccgcugggcuuaccuauucucagcugaugacccucaaggaugcgaugcugcagcuugacccaaacacuaagacuuggauggacaucgaaggaagaccugaagacccaguggaaauugcccucuaucagccaaguucaggcugcuacauacacuuuuuccgugaaccuacugauuuaaagcaguucaagcaggaugcuaaguacucacaugggauugauguuacagaccucuucgcugcacaaccgggcuugaccagugcugucauagaugcacucccccggaauauggucauuaccugucagggguccgaugacauaaggaaacuccuugaaucacaagguagaaaagacaucaaacuaauugauauugcccucaacaaaacugauuccaggaaguaugaaaaugcagucugggaucaguauaaggacuugugccacaugcacacaggugucguuguugaaaagaagaaaagaggcgguaaagaggaaauaaccccucacugugcacuaauggacugcaucauguuugaugcagcagugucaggaggacugaacacaucuguuuugagagcagugcugccuagagauaugguauucagaacaucaacacccagagucguccuguaaggacuaguuauaagacugacuagcccgaugggccucccaacgggcccuccuccccuccuugcaccgagauuaauaaaaaaaaaaaaaaaaaaaaaaaaaaaaaaaaaaaaaaaaaaaaaaaaaaaaaaaaaaaaaaaaugcaucccccccccccccccccccccccccccccccaaaggcucuuuucagagccaccagaauu

SEQ ID NO: 10922 - RNA, 1927 nt, Artificial Sequence
  mRNA product Design i-3 comprising derived and/or modified sequence from LASV(G733-SLE-2010;Clade IV)__AIT17155__NP (wt)
gggagaaagcuuaccaugagugccucaaaggaaauaaagucuuuucuguggacacaaucccugaggagggaacugucugguuacugcuccaacaucaaacuucaggugguaaaagaugcccaagcucuuuugcacggacuugacuucuccgaagucaguaauguucaacgguugaugcgcaaagagagaagggaugacaaugauuugaaacggcugagggaccuaaaucaagcggucaacaaccuuguugaguuaaaaucaacucaacagaagaguguacugagaguugggacccuaaccucagaugaguuauuagucuuggcugcugaucuagagaaauuaaaaucaaaagugaucaggacagaaaggccauugagugcaggugucuauaugggcaaccugagcucacagcaacuugaccaaaggcgagcucuucugaguaugauagggaugagugguggcaaucaaggggcucggacugggagagaugggguggugagaguuugggauguaaaaaaugcagaauugcucaauaaucaguucgggaccaugccaagucugacacuggcaugucugacaaaacaagggcagguugacuuaaaugaugcagugcaagcauugacagauuuggguuugaucuacacagcaaaguauccuaacacuucagacuuggauaggcugacucaaagucaccccauccuaaauaugauugacaccaagaaaagcucuuugaacaucucagguuauaauuuuagcuugggugcagcugugaaggcaggagcuuguaugcuggaugguggcaauauguuggagacaaucaaagugucaccucagacaauggauggcauccucaaauccauuuuaaaggucaagaaggcucuugggauguucauuucagacaccccuggugaaaggaaucccuacgaaaacauacucuacaagauuuguuugucaggggauggauggccauauauugcaucaagaaccucaauaacaggaagggccugggaaaacacugucguugaucuagagucagaugggaagccacagaaagcuggcagcaacaauuccaacaaaucccugcagucggcaggguuuacugcugggcuuacuuauucucagcuuaugacccucaaggaugcaaugcugcaacuugauccaaaugcuaagacuuggauggacauugaaggaagaccugaagauccaguggaaauugcccucuaucaaccaaguucaggcugcuacauacacuucuuccgugagccuacugauuuaaagcaguucaagcaagaugcuaaauacucacaugggauugaugucacagaccucuucgcugcacaaccgggcuuaacuagugcugucauagaugcacucccccggaauaugguuaucaccugucagggguccgaugauauaaggaaacuccuugaaucacaaggaagaaaggacaucaaauuaauugacauugcccucagcaaaauugauuccaggaaguaugaaaaugcagucugggaucaguauaaagacuuaugccacaugcacacaggugucguuguugaaaagaagaaaagaggcgguaaagaggaaauaaccccucacugugcacuaauggacugcaucauguuugaugcagcagugucaggaggacugaacucauuaguuuugagagcagugcugcccagagacaugguauucagaacaucgacaccaagagucguccuguaaggacuaguuauaagacugacuagcccgaugggccucccaacgggcccuccuccccuccuugcaccgagauuaauaaaaaaaaaaaaaaaaaaaaaaaaaaaaaaaaaaaaaaaaaaaaaaaaaaaaaaaaaaaaaaaaugcaucccccccccccccccccccccccccccccccaaaggcucuuuucagagccaccagaauu

SEQ ID NO: 10923 - RNA, 1927 nt, Artificial Sequence
  mRNA product Design i-3 comprising derived and/or modified sequence from MOPV/LASV reassortant(IGS-1;Clade IV)__AFY05578__NP (wt)
gggagaaagcuuaccaugagugccucaaaggaaauaaaauccuuuuuguggacacaaucuuugaggagggaauuaucugguuacugcuccaacaucaaacuacagguggugaaagaugcccaggcucuuuuacauggacuugacuucuccgaagucaguaauguucaacgguugaugcgcaaggagagaagggaugacaaugauuugaaacgguugagggaccuaaaucaagcggucaacaaucuuguugaauuaaaaucaacucaacaaaagaguauacugagaguugggacucuaaccucagaugacuuauuaaucuuagccgcugaucuagagaaguuaaggucaaaggugaucagaacagaaaggccauuaagugcaggugucuauaugggcaaccuaagcucacagcaacuugaccaaagaagagcucuccugaauaugauaggaaugaguggugguaaucaaggggcucgggcugggagagauggaguggugagaguuugggaugugaaaaaugcagaguugcucaguaaucaguucgggaccaugccaagucugacacuggcaugucugacaaaacaggggcagguugacuugaaugaugcaguacaagcauugacagauuuggguuugaucuacacagcaaaguaucccaacacuucagacuuagacaggcugacucaaagucaucccauccuaaauaugauugacaccaagaaaagcucuuugaauaucucagguuauaauuuuagcuugggugcagcugugaaggcaggagcuugcaugcuggaugguggcaauauguuggagacaaucaaggugucaccucagacaauggaugguauccucaaauccauuuuaaaggucaagaaggcucuuggaauguucauuucagacaccccuggugaaaggaauccuuaugaaaacauacucuacaagauuuguuugucaggagauggauggccauauauugcaucaagaaccucaauaacaggaagggccugggaaaacacugucguugaucuggaaucagaugggaagccacagaaagcugacagcaacaauuccaguaaaucccugcagucggcaggguuuaccgcugggcuuaccuauucucagcugaugacccucaaggaugcaaugcugcaacuugacccaaaugcuaagaccuggauggacauugaaggaagaccugaagauccaguggaaauugcccucuaucaaccaaguucaggcugcuacauacacuucuuccgugaaccuacugauuuaaagcaguucaagcaggaugcuaaguacucacaugggauugaugucacagaccucuucgcuacacaaccgggcuugaccagugcugucauugaugcacucccccggaauauggucauuaccugucagggguccgaugacauaaggaaacuccuugaaucacaaggaagaaaagacauuaaacuaauugauauugaccucaguaaaacugauuccaggaaguaugaaaaugcagucugggaccaguauaaagacuuaugccacaugcacacaggugucguuguugaaaagaagaaaagaggcgguaaagaggaaauaaccccucacugugcacuaauggacugcaucauguuugaugcagcagugucaggaggacugaacacaucgguuuugagagcagugcugcccagagauaugguguucagaacaucgacaccuagagucguucuguaaggacuaguuauaagacugacuagcccgaugggccucccaacgggcccuccuccccuccuugcaccgagauuaauaaaaaaaaaaaaaaaaaaaaaaaaaaaaaaaaaaaaaaaaaaaaaaaaaaaaaaaaaaaaaaaaugcaucccccccccccccccccccccccccccccccaaaggcucuuuucagagccaccagaauu

SEQ ID NO: 10924 - RNA, 1927 nt, Artificial Sequence
  mRNA product Design i-3 comprising derived and/or modified sequence from LASV(LM765-SLE-2012;Clade IV)__AIT17815__NP (wt)
gggagaaagcuuaccaugagugccucaaaggaaauaaaauccuuuuuguggacacaauccuugaggagggaauuaucugguuacugcuccaacaucaaacugcagguggugaaggaugcccaggcucuuuuacaugggcuugacuucucugaagucaguaauguucaacgguugaugcgcaaggagagaagggaugacaaugauuugaaacgguugagggaccuaaaucaagcagucaacaaucuuguugaauuaaaaucaacucaacaaaagaguauacugagaguugggacucuaaccucagaugacuuauuaaucuuggccgcugaucuagagaaguugaagucgaaggugaccagaacagaaaggccauugagugcaggugucuauaugggcaaccuaagcucucagcaacuugaccaaagaagagcucuucuggacaugauaggaaugagugguaguaaucaaggggcucgggcugggagagauggaguggucagaguuugggaugugaaaaaugcagaguugcucaauaaucaguucgggaccaugccaagucugacacuggcaugucugacaaaacaggggcagguugacuugaaugaugcagugcaagcauugacagauuuagguuugaucuacacagcgaaguaccccaauacuucagacuuggacaggcugacucaaagucaucccauccuaaauaugauugacaccaagaaaagcucuuugaacaucucagguuauaauuuuagcuugggugcagcugugaaggcaggagcuuguaugcuggaugguggcaauauguuggagacaaucaaggugucaccucagacaauggauggcauucucaaauccauuuuaaaggucaagaaggcucuugggauguuuauuucagaugccccuggugaaaggaauccuuaugaaaacauacucuacaagauuuguuuaucaggagacggauggccauacauugcaucaagaaccucaauaacaggaagggccugggaaaacacuguuguugaccuggaaucagaugggaagccacagaaagcuggcaguaacgguuccaauaaaucucugcagucggcaggauuuaccgcugggcucaccuauucucagcugaugacccucaaggaugcaaugcugcaacuugacccaaaugcuaagaccuggauggacauugaaggaagaccugaagauccaguggaaaucgcccucuaucaaccaaguucagggugcuacauacacuucuuccgugaaccuacugauuuaaagcaguucaagcaggaugcuaaguacucacaugggauugaugucacggaccucuucgcugcacagccgggcuugaccagugcugucauugaugcacucccccggaauauggucaucaccugccagggaucugaugacauaaggaaacucuuugaaucacaaggaagaaaagacauuaaacuaauugacauugcccucagcaagacugauuccaggaaguaugaaaaugcagucugggaucaguauaaagauuuaugccacaugcauacagguauuguuguugagaagaagaaaagaggugguaaagaggaaauaaccccucacugugcauuaauggacugcaucauguuugaugcagcaguaucaggaggacugaacacaucaguuuugagagcagugcugcccagagacaugguguucagaacaucgacaccuagggucguccuguaaggacuaguuauaagacugacuagcccgaugggccucccaacgggcccuccuccccuccuugcaccgagauuaauaaaaaaaaaaaaaaaaaaaaaaaaaaaaaaaaaaaaaaaaaaaaaaaaaaaaaaaaaaaaaaaaugcaucccccccccccccccccccccccccccccccaaaggcucuuuucagagccaccagaauu

SEQ ID NO: 10925 - RNA, 1927 nt, Artificial Sequence
  mRNA product Design i-3 comprising derived and/or modified sequence from LASV(LM776-SLE-2012;Clade IV)__AIT17825__NP (wt)
gggagaaagcuuaccaugagugcuucaaaggaaauaaaguccuuucuguggacacaaucauuaaggagggaauuaucuaguuacuguuccaacaucaaacuacagguggugaaagaugcccaggcucuuuugcaugggcuugacuucuccgaagucagcaauguucaacgguugaugcgcaaggagagaagggaugacaaugauuuaaagcgguugagggaccuuaaucaagcagucaacaaccuuguugaguuaaaaucaacucaacaaaagaguauauugagaguugggaccuuaaccucagaugacuuacuaaucuuagcugcugaucuagagaagcugaaaucaaaggugacuaggacagaaaggccauugagugcaggugucuacauggguaaccugagcucacagcaacuugaccagagacgagcucuucugagcaugauagggaugagugguaguaaucaaggggcucgggcugggagagauggaguggugagaguuugggaugugaaaaaugcagaguugcucaauaaucaguucgggaccaugccaagucuuacacuggcauguuugacaaaacaggggcagguugacuugaaugaugcagugcaagcauugacagauuugggucugaucuacacggcaaaguaucccaauacuucagaccuggauaggcugacucaaagucaccccauccuaaacaugauugacaccaagaagagcucuuuaaacaucucagguuauaauuuuagcuugggugcagcugugaaggcaggagcuugcaugcuggaugguggcaacauguuggagacaaucaaggugucaccucagacaauggaugguauccucaaauccaucuugaaggucaagaaggcucuugggauguucaucucagacaccccuggugaaaggaauccuuaugagaacauacucuauaagaucugucugucaggagauggguggccauacauugcaucaaggaccucaauaacaggaagggcuugggaaaacacugucguugaucuggaaucagaugggaagccacagaaagcuggcagcaacaauucuaacaaaucccugcagucggcaggguuuaccgcugggcuuaccuauucucagcuaaugacucucaaggaugcaaugcugcaacuugauccaaaugcuaagaccuggauggauauugaaggaagaccugaagauccaguggaaguugcccucuaucaaccaaguucaggcuguuacauucacuucuuccgugaaccuacugauuuaaagcaguucaaacaggaugcuaaguacucacaugggauugaugucacagaccucuucgcugcacaaccgggccugaccagugcugucauagaugcacucccucggaauauggucauuaccugucagggguccgaugacauaaggaaacuccuugaaucacaagguaggaaagacaucaaacuaauugauauugcccucagcaaaacugauuccaggaaguaugaaaaugcagucugggaucaguauaaagacuuaugccacaugcacacaggugucguuguugagaagaagaaaagaggugguaaagaggaaauaaccccucacugugcacuaauggacugcaucauguuugacgcagcagugucaggaggacugaacacaucgguuuugagagcagugcugcccagggauaugguguucagaacaucaacaccuagagucguucuguaaggacuaguuauaagacugacuagcccgaugggccucccaacgggcccuccuccccuccuugcaccgagauuaauaaaaaaaaaaaaaaaaaaaaaaaaaaaaaaaaaaaaaaaaaaaaaaaaaaaaaaaaaaaaaaaaugcaucccccccccccccccccccccccccccccccaaaggcucuuuucagagccaccagaauu

SEQ ID NO: 10926 - RNA, 1927 nt, Artificial Sequence
  mRNA product Design i-3 comprising derived and/or modified sequence from LASV(Mad39;Clade IV)__ANH09723__NP (wt)
gggagaaagcuuaccaugagugccucaaaagagauaaagucuuuuuuguggacacagucucugaggagggaauugucggguuacugcuccaacaucaaacuacagguggugaaagaugcccaggcucuuuuacauggacuugacuuuucugaggucagcaacguccaacggcugaugcgcaaacagagaagggaugacaaugaucuaaagcggcugagggauuuaaaucaagcaguuaacaaucuuguugaacuaaaaucaacucagcaaaagaguguguugagaguuggaacucuaaccucagaugacuuguugacauuagcugcugaccuagagaagcugaaaucaaagguaaccaggacagaaagaccauugaccgcaggcguuuacaugggcaacuuaaguucacaacagcuugaccaaagacgggcucuccugaauaugauaggaaugaguggugguaaccaaggggcucgaacugggagagaugggguagugagggucugggauguuaaaaaugcagaauugcucaacaaucaguuuggaacuaugccaagcuugacacuagcaugccugacaaagcaagggcagguugaccuaaaugauguggugcaagcacuaacagaucuaggccugaucuauacagcaaaguaucccaacacuucagaccuggacagacuaacucagagccaucccauccuaaacaugauugauacuaauaaaagcucccuaaauaucucagguuauaauuuuagcuugggugcagcugugaaggcaggagcuugcaugcuggaugguggaaacaugcuagagacaaucaaagugucaccccaaacaauggauggcauccucaaguccauuuuaaagguaaaaaagagucuugggauguucauuucagacacccccggcgagagaaaucccuaugaaaauauacucuacaagauuugucugucgggggauggguggccauauauugcaucaaggaccucaauaacaggaagggccugggaaaauacuguuguugaucuagaaucaggugggaagccacagaaagcugguagcaacaacuccaacaagucccuacaaucggcaggauuugcugcugggcucacuuauucucaguuaaugacccucaaggaugcaauguugcaacuugauccaaaugcuaagaccuggauggauauugagggaaggccugaagacccaguggagauugcucucuaucagccaauuucggguugcuacauucacuucuuccgugaaccuacugaucugaaacaguucaagcaagaugcuaaguauucacauggaauugauguuacagaccuuuuugcugcacaaccaggauuaacuagugcugugauagaagcacucccccggaacauggucaucaccugucaaggaucugacgacauaaggaaacuuuuugagucacaaggaaggaaagacaucaagcugauugauauugcucucagcaaaacugauucuagaaaauaugaaaacgcagucugggaccaguacaaagauuuaugucauaugcacacagguguuguuguugagaagaaaaagaagggcggcaaagaagaaauaaccccucauugugcucuaauggacugcaucauguuugaugcagcaguaucaggagggcugaacacgcugguuuugagagcagugcuaccuagagauaugguguucagaacaucaacaccuaaagucguccuguaaggacuaguuauaagacugacuagcccgaugggccucccaacgggcccuccuccccuccuugcaccgagauuaauaaaaaaaaaaaaaaaaaaaaaaaaaaaaaaaaaaaaaaaaaaaaaaaaaaaaaaaaaaaaaaaaugcaucccccccccccccccccccccccccccccccaaaggcucuuuucagagccaccagaauu

SEQ ID NO: 10927 - RNA, 1927 nt, Artificial Sequence
  mRNA product Design i-3 comprising derived and/or modified sequence from LASV(Z0947-SLE-2011;Clade IV)__AIT17841__NP (wt)
gggagaaagcuuaccaugagugccucaaaggaaauaaaguccuuuuuguggacacaauccuugaggagggaauuaucugguuacugcuccaacaucaaacugcagguggugaaggaugcccaggcucuuuuacaugggcuugacuucucugaagucaguaauguucaacgguugaugcgcaaggagagaagggaugacaaugauuugaaacgguugagggaccuaaaucaagcagucaacaaucuuguugaauuaaaaucaacucaacaaaagaguauacugagaguugggacucuaaccucagaugacuuauuaaucuuggccgcugaucuagagaaguugaagucgaaggugaccagaacagaaagaccauugagugcaggugucuauaugggcaaccuaagcucacagcaacuugaccaaagaagagcucuucugaacaugauaggaaugagugguaguaaucaaggggcucggacugggagagauggaguggucagaguuugggaugugaaaaaugcagaguugcucaauaaucaguucggaaccaugccaagucugacacuggcaugucugacaaaacaggggcagguugacuugaaugaugcaguacaagcauugacagauuuagguuugaucuacacagcgaaguaccccaauacuucagacuuggacaggcugacucaaagucaccccauccuaaauaugauugacaccaagaaaagcucuuugaacaucucagguuauaauuuuagcuugggugcagcugugaaggcaggagcuuguaugcuggaugguggcaauauguuggagacaaucaaggugucaccucagacaauggaugguauucucaaauccauuuuaaaggucaagaaggcucuugggauguucauuucagaugccccuggugaaaggaauccuuaugaaaacauacucuacaagauuuguuugucaggagacggauggccauacauugcaucaagaaccucaauaacaggaagggccugggaaaacacuguuguugaucuggaaucagaugggaagccacagaaagcuggcaguaacgguuccaauaaaucucugcagucggcaggauuuaccgcugggcucaccuauucucagcugaugacccucaaggaugcaaugcugcaacuugacccaaaugcuaagaccuggauggacauugaaggaagaccugaagauccaguggaaaucgcccucuaucaaccaaguucagggugcuacauacacuucuuccgugaaccuacugauuuaaagcaguucaagcaggaugcuaaguacucacaugggauugaugucacggaccucuucgcugcacaaccgggcuugaccagugcugucauugaugcacucccccggaauauggucaucaccugccaggggucugaugacauaaggaaacucuuugaaucacaaggaagaaaagacauuaaacuaauugacauugcccucagcaagacugauuccaggaaguaugaaaaugcagucugggaucaguauaaagacuuaugccacaugcauacaggcauuguuguugagaagaagaaaagaggcggcaaagaggaaauaaccccucacugugcacuaauggacugcaucauguuugaugcagcaguaucaggaggacugaacacaucaguuuugagagcagugcugcccagagacaugguguucagaacaucgacaccuagggucguccuguaaggacuaguuauaagacugacuagcccgaugggccucccaacgggcccuccuccccuccuugcaccgagauuaauaaaaaaaaaaaaaaaaaaaaaaaaaaaaaaaaaaaaaaaaaaaaaaaaaaaaaaaaaaaaaaaaugcaucccccccccccccccccccccccccccccccaaaggcucuuuucagagccaccagaauu

SEQ ID NO: 10928 - RNA, 1927 nt, Artificial Sequence
  mRNA product Design i-3 comprising derived and/or modified sequence from LASV(Josiah;Clade IV)__NP_694869__NP (opt1)
gggagaaagcuuaccaugagcgccuccaaggagaucaagagcuuccuguggacccagucccuccgccgggagcugagcggcuacugcuccaacaucaagcuccagguggucaaggacgcccaggcgcugcugcacgggcuggacuucagcgagguguccaacgugcagcgccucaugcggaaggagcgccgggacgacaacgaccugaagcgccugcgggaccucaaccaggccgucaacaaccugguggagcucaagagcacccagcagaaguccauccugcgcgugggcacccugaccagcgacgaccugcucauccuggccgccgaccuggagaagcucaaguccaaggucauccggaccgagcgcccccugagcgccgggguguacaugggcaaccuguccagccagcagcucgaccagcggcgcgcgcugcugaacaugaucgggauguccggcggcaaccagggggcccgggccggccgcgacggggugguccgggugugggacgugaagaacgccgagcuccugaacaaccaguucggcaccaugccgagccugacgcucgcgugccugaccaagcaggggcaggucgaccugaacgacgccgugcaggcccucaccgaccugggccugaucuacaccgccaaguaccccaacacguccgaccucgaccgccugacccagagccaccccauccugaacaugaucgacaccaagaaguccagccucaacaucagcggcuacaacuucucccugggggccgcggugaaggccggcgccugcaugcuggacgggggcaacaugcucgagaccaucaaggucagcccccagacgauggacggcauccugaaguccauccugaaggugaagaaggcccucgggauguucaucagcgacaccccgggcgagcggaaccccuacgagaacauccuguacaagaucugccuguccggggacggcuggcccuacaucgccagccgcaccuccaucaccgggcgggcgugggagaacacgguggucgaccucgagagcgacggcaagccccagaaggccgacuccaacaacagcuccaagagccugcaguccgccggcuucaccgccgggcugaccuacagccagcucaugacccugaaggacgccaugcugcagcuggacccgaacgcgaagacguggauggacaucgagggccgccccgaggaccccguggagaucgcccucuaccagcccuccagcgggugcuacauccacuucuuccgggagccgaccgaccugaagcaguucaagcaggacgccaaguacucccacggcaucgacgugaccgaccuguucgccacccagcccgggcucacgagcgccgucaucgacgcgcugccccgcaacauggugaucacgugccagggcuccgacgacauccgcaagcugcucgagagccagggccggaaggacaucaagcugaucgacaucgcccugagcaagaccgacucccgcaaguacgagaacgccgugugggaccaguacaaggaccucugccacaugcacaccggggucguggucgagaagaagaagcggggcgggaaggaggagaucaccccgcacugcgcccugauggacugcaucauguucgacgcggccgugagcggcgggcugaacaccuccgugcuccgcgccguccugccccgggacaugguguuccgcaccagcacgccccgggugguccugugaggacuaguuauaagacugacuagcccgaugggccucccaacgggcccuccuccccuccuugcaccgagauuaauaaaaaaaaaaaaaaaaaaaaaaaaaaaaaaaaaaaaaaaaaaaaaaaaaaaaaaaaaaaaaaaaugcaucccccccccccccccccccccccccccccccaaaggcucuuuucagagccaccagaauu

SEQ ID NO: 10929 - RNA, 1927 nt, Artificial Sequence
  mRNA product Design i-3 comprising derived and/or modified sequence from LASV(LP;Clade I)__AAF86702__NP (opt1)
gggagaaagcuuaccaugagcaacuccaaggagaucaagagcuuccuguggacccagucccuccgccgggagcugagcggcuacugcuccaacaucaagcuccagguggucaaggacgcccaggcccugcugcacgggcuggacuucagcgagguguccaacgugcagcgccucaugcggaagcagaagcgcgacgacgcggaccugaagcggcugcgcgaccucaaccaggccgucaacaaccugguggagcucaagagcacccagcagaagaacgugcugcgggucggcacgcuguccagcgacgaccugaucacccucgccgccgaccuggagaagcugaaguccaaggugauccgcaccgagcggccccucagcuccgggguguacaugggcaaccugagcucccagcagcuggaccagcgccgggcccuccugagcaugaucgggauguccggcggcccgcaggggaaccgcaccggcggggacggcgucgugcgggugugggacgucaagaacgcggagcugcucaacaaccaguucgggacgaugcccagccugacccuggccugccucaccaagcagggccagguggaccugaacgacgccgugcaggcccugaccgaccucggccugaucuacacggcgaaguaccccaacuccagcgaccuggacaugcucacccagagccaccccauccuggggauggucgacaccaagaaguccagccugaacaucuccggcuacaacuucagccucggggccgccgugaaggccggcgccugcaugcuggacggcgggaacaugcuggagaccaucaagguguccccgcagacgauggacggcauccucaagagcauccugaaggucaagcgcucccuggggauguucaucagcgacacccccggcgagcggaaccccuacgagaacauccucuacaagaucugccuguccggggagggcuggcccuacaucgcgagccgcaccuccaucaccggccgggccugggagaacacgcugguggaccucgagagcgacaacaagccgcccaagcugaacuccgccgggagcaacaagucccugcaggccgccggccucaacgcggggcugaccuacagccagcugaugacccugaaggacugcaugcuccagcuggaccccuccagcaagaccuggaucgacaucgagggccgccccgaggacccgguggagaucgcccuguuccagcccuccagcgggugcuacauccacuucuuccgggagcccacggaccucaagcaguucaagcaggacgccaaguacagccacggcaucgacgucaccgaccuguucuccacccagcccggccugaccagcgccgugaucgaggcccucccgcgcaacauggugcugacgugccagggguccgacgacaucaagaagcugcucgagagccagggccggcgcgacaucaagcugaucgacaucucccugagcaaggcggacucccgcaaguucgagaacgccgucugggaccaguacaaggaccucugccacaugcacaccgggguggucguggagaagaagaagcggggcgggaaggaggagaucacgccccacugcgcccugcuggacugcaucauguucgacgccgccaccaccggcagccucaacaucaccacccugcgcgcggugcugccccgggacauggucuuccgcaccuccacgcccaagguggugcucugaggacuaguuauaagacugacuagcccgaugggccucccaacgggcccuccuccccuccuugcaccgagauuaauaaaaaaaaaaaaaaaaaaaaaaaaaaaaaaaaaaaaaaaaaaaaaaaaaaaaaaaaaaaaaaaaugcaucccccccccccccccccccccccccccccccaaaggcucuuuucagagccaccagaauu

SEQ ID NO: 10930 - RNA, 1927 nt, Artificial Sequence
  mRNA product Design i-3 comprising derived and/or modified sequence from LASV(803213;Clade II)__AAF86704__NP (opt1)
gggagaaagcuuaccaugagcgccuccaaggaggugaaguccuuccuguggacccagagccuccgccgggagcugagcggcuacugcuccaacaucaagcugcaggucgugaaggacgcccaggcgcuccugcacgggcuggacuucagcgaggugaacaacguccagcgccucaugcggaagcagaagcgcgacgacggcgaccugaagcggcugcgcgaccucaaccaggccgugaacaaccugguggagcugaaguccacccagcagaaguccauccuccgggucgggacgcugaccagcgacgaccugcucacccuggccgccgaccuggagaagcucaagagcaaggugauccgcaccgagcggccccuguccagcggcguguacauggggaaccuguccacgcagcagcucgagcagcgccgggcccugcugaacaugaucggcauggucggcggggcgcagggcacccagccggggcgcgacggcguggugcgggucugggacgugaagaaccccgaccuccugaacaaccaguucgggaccaugcccagccugacccucgccugccugacgaagcagggccagguggaccugaacgacgccguccucgcccugaccgaccugggccucaucuacaccgcgaaguaccccaacuccagcgaccuggaccgccugucccagagccacccgauccucaacaugguggacaccaagaaguccagccugaacaucagcggguacaacuucucccugggcgccgccgugaaggccggggccugcaugcucgacggcggcaacaugcuggagacgaucaaggucacgccccagaccauggacgggauccucaagagcauccugaaggugaagcggucccugggcauguucgugagcgacacccccggggagcgcaaccccuacgagaacauccuguacaagaucugccucuccggcgacggguggccguacaucgcgagccggaccuccaucgucggccgcgccugggagaacaccaccguggaccuggagagcgacggcaagccccagaagguggggaccgccggcuccaacaagagccugcaguccgccggguuccccacgggccucaccuacagccagcugaugacccugaaggacuccaugaugcagcuggaccccagcgccaagaccuggaucgacaucgaggggcggccggaggaccccgucgagaucgcgcucuaccagcccauguccggcugcuacauccacuucuuccgcgagcccacggaccugaagcaguucaagcaggacgccaaguacagccacggcaucgacguggccgaccuguucccggcccagcccgggcucaccuccgccgucaucgaggcgcugccccggaacauggugcugaccugccagggcagcgacgacaucaagaagcuccuggacucccaggggcgccgcgacaucaagcugaucgacaucagccucagcaagguggacucccggaaguucgagaacgccgucugggaccagugcaaggaccugugccacaugcacaccggcgugguggucgagaagaagaagcgcgggggcaaggaggagaucacgccccacugcgcccugauggacugcaucauguucgacgccgccgugagcggcgggcucaacaucccggugcugcgggcgguccugccccgcgacaugguguuccggaccuccagccccaaggugguccucugaggacuaguuauaagacugacuagcccgaugggccucccaacgggcccuccuccccuccuugcaccgagauuaauaaaaaaaaaaaaaaaaaaaaaaaaaaaaaaaaaaaaaaaaaaaaaaaaaaaaaaaaaaaaaaaaugcaucccccccccccccccccccccccccccccccaaaggcucuuuucagagccaccagaauu

SEQ ID NO: 10931 - RNA, 1930 nt, Artificial Sequence
  mRNA product Design i-3 comprising derived and/or modified sequence from LASV(GA391;Clade III)__CAA36646__NP (opt1)
gggagaaagcuuaccaugagcgccuccaaggaggugcgcagcuuccuguggacccagucccuccggcgcgagcugagcggcuacugcuccaacaucaagcugcaggucgugaaggacgcccaggcgcuccugcacgggcuggacuucagcgagguguccaacguccagcggcucaugcgcaagcagaagcgggacgacggcgaccugaagcgccugcgggaccucaaccaggccgugaacaaccugguggagcucaagagcacccagcagaaguccguccugcgcguggggacccugagcuccgacgaccugcucauccuggccgccgaccuggagaagcucaagagcaaggugacccggaccgagcgcccccuguccagcggcgucuacauggggaaccuguccagccagcagcucgaccagcggcgcgcccugcugaacaugaucggcaugaccggcguguccgggggcgggaagggcgcgagcgacgggaucgugcgggucugggacgugaagaacgccgagcuccugaacaaccaguucggcacgaugccgucccugacccucgccugccugaccaagcagggccagguggaccugaacgacgccguccaggcgcucaccgaccuggggcugaucuacacggccaaguaccccaacagcagcgaccucgaccgccugucccagagccaccccauccugaacaugaucgacaccaagaaguccagccucaacaucuccggcuacaacuucagccugggggccgccgugaaggccggcgcgugcaugcuggacggcgggaacaugcucgagaccaucaaggugagcccccagaccauggacggcauccucaaguccauccugaaggucaagaagucccuggggauguucgugagcgacacgccgggcgagcggaaccccuacgagaacauccuguacaagaucugccuguccggggacggcuggcccuacaucgccagccgcaccuccaucgugggccgggccugggagaacaccgucguggaccucgagcaggacaacaagccccagaagaucgggaacggcgggagcaacaagucccugcagagcgccggcuucgccgcggggcugaccuacucccagcucaugacgcugaaggacuucaagugcuucaaccugaucccgaacgccaagaccuggauggacaucgagggccgccccgaggaccccguggagaucgcccuguaccagcccagcuccggcugcuacguccacuucuuccgggagccgaccgaccucaagcaguucaagcaggacgccaaguacagccacgggaucgacgugaccgaccuguucgccgcgcagcccggccugacgagcgccgucaucgaggcccucccccgcaacauggugaucacgugccagggguccgaggacauccggaagcugcuggagagccagggccgccgcgacaucaagcucaucgacaucacccuguccaaggccgacagccggaaguucgagaacgccgugugggaccaguucaaggaccugugccacaugcacaccggggucgugguggagaagaagaagcgcggcggcaaggaggagaucacgccccacugcgcgcucauggacugcaucauguucgacgccgccgucuccgggggccuggacgccaaggugcugcgggugguccucccgcgcgacaugguguuccggaccagcacccccaaggugguccugugaggacuaguuauaagacugacuagcccgaugggccucccaacgggcccuccuccccuccuugcaccgagauuaauaaaaaaaaaaaaaaaaaaaaaaaaaaaaaaaaaaaaaaaaaaaaaaaaaaaaaaaaaaaaaaaaugcaucccccccccccccccccccccccccccccccaaaggcucuuuucagagccaccagaauu

SEQ ID NO: 10932 - RNA, 1927 nt, Artificial Sequence
  mRNA product Design i-3 comprising derived and/or modified sequence from LASV(AV;Clade V)__CCA30315__NP (opt1)
gggagaaagcuuaccaugagcgccuccaaggaggugaaguccuuccuguggacccagagccuccgccgggagcugagcggcuacugcuccaacaucaagcugcaggucgugaaggacgcccaggcgcuccugcacgggcuggacuucagcgagguguccaacguccagcgccucaugcggaagcagcgccgggacgacagcgaccugaagcgccugcgggaccucaaccaggccgugaacaaccugguggagcugaaguccacccagcagaaguccguccuccgcgugggcacgcugagcagcgacgaccugcucacccuggccgccgaccuggagaagcucaaguccaaggugacccggaccgagcgcccccugagcuccggggucuacaugggcaaccugagcucccagcagcucgaccagcggcgcgcccugcugaaccucaucgggaugacgaacggcagccagggcucccaggcggggcgggacggcguggugcgcgucugggacgugaagaacgccgagcugcugaacaaccaguucgggaccaugccgagccucacccuggccugccugaccaagcagggccagguggaccucaacgacgucgugcaggcccugacggaccuggggcucaucuacaccgcgaaguaccccaacaccagcgaccuggaccggcugacccagucccaccccauccucaacaugaucgacacgaagaaguccagccugaacaucagcggcuacaacuucucccugggcgccgccgugaaggccggggccugcaugcucgacggcgggaacaugcuggagaccaucaaggucagcccccaguccauggacggcauccucaagagcauccugaaggugaagcgcgcgcugggcauguucguguccgacaccccgggggagcggaaccccuacgagaacauccuguacaagaucugccucagcggcgacggguggcccuacaucgccucccgcaccagcaucgucggccgggccugggagaacacggugguggaccuggagaccgacgggaagccccagaagaucggcuccggcaacagcaacaagucccugcagagcgccggguucuccgccggccucaccuacagccagcugaugacccugaaggacgcgaugcugcagcucgacccgaacgccaagacguggauggacaucgaggggcgccccgaggaccccgucgagguggcccuguaccagcccaucuccggcugcuacauccacuucuuccgggagccgaccgaccugaagcaguucaagcaggacgccaaguacagccacgggaucgacaucgccgaccucuucgcggcccagcccggccugaccagcgccgucaucgaggcccugccccgcaacauggugaucacgugccagggcuccgaggacaucaagaagcuccuggagagccaggggcgcaaggacaucaagcugaucgacaucgcccucuccaagaucgacagccggaaguucgagaacgcggugugggaccaguacaaggaccugugccacaugcacaccggcgucgugguggagaagaagaagcgcgggggcaaggaggagaucaccccgcacugcgcccugauggacugcaucauguucgacgccgccgucuccgggggccucaacacccuggugcugcgggcggugcucccccgcgacauggucuuccggaccagcacgccccgcguggugcugugaggacuaguuauaagacugacuagcccgaugggccucccaacgggcccuccuccccuccuugcaccgagauuaauaaaaaaaaaaaaaaaaaaaaaaaaaaaaaaaaaaaaaaaaaaaaaaaaaaaaaaaaaaaaaaaaugcaucccccccccccccccccccccccccccccccaaaggcucuuuucagagccaccagaauu

SEQ ID NO: 10933 - RNA, 1927 nt, Artificial Sequence
  mRNA product Design i-3 comprising derived and/or modified sequence from LASV(Togo/2016/7082;Clade VI)__AMR44578__NP (opt1)
gggagaaagcuuaccaugagcaacuccaaggaggugaaguccuuccuguggacccagagccuccgccgggagcugagcggcuacugcuccaacaucaagcugcaggucgugaaggacgcccaggcccuccugcacgggcuggacuucagcgagguguccaacguccagcgccucaugcggaagcagaagcgcgacgacggcgaccugaagcggcugcgcgaccucaaccaggcggugaacaaccugguggagcucaagagcguccagcagaaguccauccugcggguggggacccugaccagcgacgaccugcucacccuggccgccgaccuggagaagcucaaguccaaggugacccgcaccgagcggccccugagcuccggcgucuacauggggaaccugagcucccagcagcucgaccagcgccgggcccugcugagcaugaucggcauguccggcgggaaccagaacagccagccgaagggcgacgggguggugcgcgucugggacgugaagaacgccgaccuccugaacaaccaguucggcacgaugcccucccugacccucgcgugccugaccaagcagggccagguggaccugaacgacgccguccaggcccucaccgaccuggggcugaucuacacggccaaguaccccaacagcagcgaccucgaccggcugucccagagccaccccauccugaacaugaucgacaccaagaaguccagccucaacaucuccggcuacaacuucagccugggggcggccaucaagaccggcgccugcaugcuggacgggggcaacaugcucgagaccaucaaggugacgccgcagaccauggacggcauccugaaguccauccugaaggugaagcgcagccucgggauguucaucuccgacacccccggcgagcggaaccccuacgagaacauccuguacaagaucugccugagcggggacggcuggcccuacaucgccucccgcaccgccaucaucgggcgggcgugggagaacacggucguggaccucgagagcgacuccaagccgcagaagaucggcagcaacggcuccaacaagagccugcaguccgccggguucgcccccggccugaccuacagccagcucaugacccugaaggacuccaugcugcagcuggaccccaacgccaagaccuggaucgacaucgaggggcgccccgaggacccgguggaggucgcccucuuccagcccaucagcggcugcuacauccacuucuuccgggagcccacggaccugaagcaguucaagcaggacgcgaaguacagccacgggaucgacgugaccgaccuguucgccgcccagcccggccucaccuccgccgugaucgaggcccugccgcgcaacaugguccugaccugccagggcagcgacgacaucaagaagcuccuggacucccaggggcggcgcgacaucaagcugaucgacgugagccucaacaagaucgacucccgcaaguucgagaacgcggucugggaccaguacaaggaccugugccacaugcacacgggcgugguggucgagaagaagaagaagggcgggaaggaggagaucacgccccacugcgcccugcucgacugcaucauguucgacgccgccgugagcgggggccugaacgccaccgugcugcgggcgguccucccccgcgacaugguguuccggaccuccagccccaaggugguccugugaggacuaguuauaagacugacuagcccgaugggccucccaacgggcccuccuccccuccuugcaccgagauuaauaaaaaaaaaaaaaaaaaaaaaaaaaaaaaaaaaaaaaaaaaaaaaaaaaaaaaaaaaaaaaaaaugcaucccccccccccccccccccccccccccccccaaaggcucuuuucagagccaccagaauu

SEQ ID NO: 10934 - RNA, 1927 nt, Artificial Sequence
  mRNA product Design i-3 comprising derived and/or modified sequence from LASV(KAK-428;Clade n.d. (VII))__ANH09741__NP (opt1)
gggagaaagcuuaccaugagcaacuccaaggaggugaaguccuuccuguggacccagagccuccgccgggagcugagcggcuacugcaccaacaucaagcugcaggucgugaaggacgcccaggcccuccugcacgggcuggacuucuccgaggugagcaacguccagcgccucaugcggaagcagaagcgcgacgacaacgaccugaagcggcugcgcgaccucaaccaggcggugaacaaccugguggagcugaaguccguccagcagaaguccgugcucaaggugggcacgcugaacagcgacgaccugcucacccuggccgccgaccuggagaagcucaagagcaaggucgugcggaccgagcgcccccuguccagcgggguguacaugggcaaccuguccagccagcagcucgaccagcggcgcgcccugcugaacaugaucgggauggccggcggcucccaggggaaccagccgagccgggacggcgucgugcgcgugugggacgucaagaacgcggaccuccugaacaaccaguucgggaccaugcccucccugacgcucgccugccugaccaagcagggccagguggaccugaacgacgugguccucgcccugaccgaccuggggcucaucuacaccgccaaguaccccaacagcuccgaccuggaccggcugagccagaaccaccccgugcucaacaugaucgacgugaacaagagcucccugaacaucagcggcuacaacuucucccugggcgcggccgucaaggccggggccugcaugcucgacggcgggaacaugcuggagacgaucaagaucagcccgcagaccguggacggcauccugaaguccauccucaaggugaagcgcgcccugggcauguucgucagcgacacccccggggagcggaaccccuacgagaacauccuguacaaggugugccucuccggcaacggguggcccuacaucgcgagccgcaccuccaucgucggccgggccugggagaacacggugguggaccuggagagcaacaagaaccagccgaaggucgggaacaacggcuccaacaagaugcugcagagcuccggcuucgccaccgggcucaccuacagccagcugaugacccugcgcgacuccaugcugcagcucgaccccacggccaagaccuggaucgacaucgagggccggcccgaggaccccguggagcuggcccuguuccagccgagcuccgggugcuacauccacuucuuccgcgagcccaccgaccucaagcaguucaagcaggacgcgaaguacagccacggcaucgacgugaacgaccuguucuccgcccagcccgggcugaccagcgccguccucgaggcccugccccggaacauggugcugacgugccagggcagcgacgacauccgcaagcuccuggacucccaggaccgcaaggacaucaagcugaucgacaucagccucuccaaggccgacgcgcggaaguucgagaacgacgugugggaccaguucaaggaccugugccacaugcacaccggcaucgucguggagaagaagaagaagggcgggaagcaggagaugaccccgcacugcgcccugcucgacugcaucauguucgacgccgccgugagcgggggccugaacguccccacccugcgcgccgugcuccccacggacaugguguuccggaccaucaccaccaaggucgugcugugaggacuaguuauaagacugacuagcccgaugggccucccaacgggcccuccuccccuccuugcaccgagauuaauaaaaaaaaaaaaaaaaaaaaaaaaaaaaaaaaaaaaaaaaaaaaaaaaaaaaaaaaaaaaaaaaugcaucccccccccccccccccccccccccccccccaaaggcucuuuucagagccaccagaauu

SEQ ID NO: 10935 - RNA, 1927 nt, Artificial Sequence; identical to SEQ ID NO: 10929
  mRNA product Design i-3 comprising derived and/or modified sequence from LASV(Pinneo-NIG-1969;Clade I)__AIT17837__NP (opt1)

SEQ ID NO: 10936 - RNA, 1927 nt, Artificial Sequence
  mRNA product Design i-3 comprising derived and/or modified sequence from LASV(ISTH0009-NIG-2011;Clade II)__AIT17405__NP (opt1)
gggagaaagcuuaccaugagcguguccaaggaggucaagagcuuccuguggacccagucccuccgccgggagcugagcggcuacugcuccaacaucaagcuccagguggugaaggacgcccaggcccugcugcacgggcuggacuucagcgaggucuccaacgugcagcgccucaugcggaagcagaagcgcgacgacagcgaccugaagcggcugcgcgaccucaaccaggcggugaacaaccuggucgagcugaaguccacccagcagaaguccauccuccgggugggcacccugaccagcgacgaccugcucacccuggccgccgaccuggagaagcucaagagcaaggugauccgcaccgagcggccccuguccagcggggucuacaugggcaaccuguccacgcagcagcucgagcagcgccgggcccugcugaacaugaucgggauggugggcggcgcccaggggacccagccgggccgcgacggggugguccgggugugggacgugaagaaccccgaccuccugaacaaccaguucggcaccaugcccagccugacccucgcgugccugacgaagcaggggcaggucgaccugaacgacgccgugcucgcccugaccgaccugggccucaucuacaccgccaaguaccccaacuccagcgaccuggaccgccugucccagagccacccgauccucaacaugguggacaucaagaaguccagccugaacaucagcggcuacaacuucucccugggggcggccgucaaggccggcgccugcaugcucgacgggggcaacaugcuggagaccaucaaggugacgccccagaccauggacggcauccucaagagcauccugaaggugaagcggucccuggggauguucgucagcgacacccccggcgagcgcaaccccuacgagaacauccuguacaagaucugccucuccggggacggcuggccguacaucgccagccggaccuccaucguggggcgcgcgugggagaacacgaccguggaccuggagagcgacggcaagccccagaaggucggcuccgccgggagcaacaagucccugcagagcgccggcuuccccaccgggcucaccuacucccagcugaugacgcugaaggacagcaugaugcagcuggaccccuccgccaagaccuggaucgacaucgagggccggccggaggaccccguggagaucgcccucuaccagcccaugagcgggugcuacauccacuucuuccgcgagcccaccgaccugaagcaguucaagcaggacgcgaaguacucccacggcaucgacgucgccgaccuguucccggcccagcccggccucaccagcgccgugaucgaggcccugccccggaacauggugcugacgugccaggggagcgacgacaucaagcgccuccuggacucccagggccgccgggacaucaagcugaucgacaucgcgcucagcaaggccgacucccgccgguucgagaacgccgucugggaccagugcaaggaccugugccacaugcacaccggggugguggucgagaagaagaagcgcggcgggaaggaggagaucacgccccacugcgcccugauggacugcaucauguacgacgccgcggugagcggcggccucaacaucccggugcugcgggccguccugccccgcgacaugguguuccggaccuccagccccaaggugguccucugaggacuaguuauaagacugacuagcccgaugggccucccaacgggcccuccuccccuccuugcaccgagauuaauaaaaaaaaaaaaaaaaaaaaaaaaaaaaaaaaaaaaaaaaaaaaaaaaaaaaaaaaaaaaaaaaugcaucccccccccccccccccccccccccccccccaaaggcucuuuucagagccaccagaauu

SEQ ID NO: 10937 - RNA, 1927 nt, Artificial Sequence
  mRNA product Design i-3 comprising derived and/or modified sequence from LASV(ISTH2010-NIG-2012;Clade II)__AIT17483__NP (opt1)
gggagaaagcuuaccaugagcgccuccaaggaggugaaguccuuccuguggacccagagccuccgccgggagcugagcggcuacugcuccaacaucaagcugcaggucgugaaggacgcccaggcgcuccugcacgggcuggacuucagcgagguguccaacguccagcgccucaugcggaagcagaagcgcgacgacagcgaccugaagcggcugcgcgaccucaaccaggccgugaacaaccugguggagcugaaguccacccagcagaaguccauccuccgggucggcacgcugaccagcgacgaccugcucacccuggccgccgaccuggagaagcucaagagcaaggugauccgcaccgagcggccccuguccagcgggguguacaugggcaaccuguccacgcagcagcucgagcagcgccgggcccugcugaaccucaucgggauggucggcggcgcgcaggggacccagccgggccgcgacgggguggugcgggucugggacgugaagaaccccgaccugcugaacaaccaguucggcaccaugcccagccucacccuggccugccugacgaagcagggccagguggaccucaacgacgccguccuggcccugaccgaccucgggcugaucuacaccgcgaaguaccccaacuccagcgaccuggaccgccucucccagagccacccgauccugaacaugguggacaccaagaaguccagccugaacaucagcggcuucaacuucucccucggggccgccgugaaggccggcgccugcaugcuggacgggggcaacaugcuggagacgaucaaggucacgccccagaccauggacggcauccucaagagcauccugaaggugaagaagucccuggggauguucgugagcgacacccccggcgagcggaaccccuacgagaacauccucuacaagaucugccuguccggggacggcuggccguacaucgcgagccgcaccuccaucgucgggcgggccugggagaacaccaccguggaccuggagagcgacggcaagccccacaaggugggcaccgccggguccaacaagagccuccaguccgccggcuuccccacggggcugaccuacagccagcugaugacccugaaggacuccaugaugcagcucgaccccagcgccaagaccuggaucgacaucgagggccgcccggaggaccccgucgagaucgcgcuguaccagcccauguccgggugcuacauccacuucuuccgggagcccacggaccugaagcaguucaagcaggacgccaaguacagccacggcaucgacguggccgaccucuucccggcccagcccggccugaccuccgccgucaucgaggcgcugccccgcaacauggugcugaccugccaggggagcgacgacaucaagcggcuccuggacagccagggccgccgcgacaucaagcucaucgacaucgcccuguccaaggccgacagccggcgcuucgagaacgccgugugggaccagugcaaggaccugugccacaugcacaccggggucgugguggagaagaagaagcggggcgggaaggaggagaucacgccccacugcgcccucauggacugcaucauguacgacgcggccgucuccggcggccugaacaucccggugcugcgcgccgugcucccccgggacauggucuuccgcaccagcucccccaagguggugcugugaggacuaguuauaagacugacuagcccgaugggccucccaacgggcccuccuccccuccuugcaccgagauuaauaaaaaaaaaaaaaaaaaaaaaaaaaaaaaaaaaaaaaaaaaaaaaaaaaaaaaaaaaaaaaaaaugcaucccccccccccccccccccccccccccccccaaaggcucuuuucagagccaccagaauu

SEQ ID NO: 10938 - RNA, 1927 nt, Artificial Sequence
  mRNA product Design i-3 comprising derived and/or modified sequence from LASV(Lassa virus/H.sapiens-wt/NGA/2015/ISTH_0543;Clade II)__AVO03640__NP (opt1)
gggagaaagcuuaccaugagcgccuccaaggaggugaaguccuuccuguggacccagagccuccgccgggagcugagcggcuacugcuccaacaucaagcugcaggucgugaaggacgcccaggcgcuccugcacgggcuggacuucagcgagguguccaacguccagcgccucaugcggaagcagaagcgcgacgacagcgaccugaagcggcugcgcgaccucaaccaggccgugaacaaccugguggagcugaaguccacccagcagaaguccauccuccgggucggcacgcugaccagcgacgaccugcucacccuggccgccgaccuggagaagcucaagagcaaggugauccgcaccgagcggccccuguccagcgggguguacaugggcaaccuguccacgcagcagcucgagcagcgccgggcccugcugaacaugaucgggauggucggcggcgcgcaggggacccagccgggccgcgacgggguggugcgggucugggacgugaagaaccccgaccuccugaacaaccaguucggcaccaugcccagccugacccucgccugccugacgaagcagggccagguggaccugaacgacgccguccucgcccugaccgaccuggggcucaucuacaccgcgaaguaccccaacuccagcgaccuggaccgccugucccagagccacccgauccucaacaugguggacaccaagaaguccagccugaacaucagcggcuacaacuucucccugggggccgccgugaaggccggcgccugcaugcucgacgggggcaacaugcuggagacgaucaaggucacgccccagaccauggacggcauccucaagagcauccugaaggugaagaagucccuggggauguucgugagcgacacccccggcgagcggaaccccuacgagaacauccuguacaagaucugccucuccggggacggcuggccguacaucgcgagccgcaccuccaucgucgggcgggccugggagaacaccaccguggaccuggagagcgacggcaagccccagaaggugggcuccgccgggagcaacaagucccugcagagcgccggcuuccccaccgggcucacguacucccagcugaugacccugaaggacagcaugaugcagcuggaccccuccgccaagaccuggaucgacaucgagggccgcccggaggaccccgucgagaucgcgcucuaccagcccaugagcgggugcuacauccacuucuuccgggagcccaccgaccugaagcaguucaagcaggacgccaaguacucccacggcaucgacguggccgaccuguucccggcccagcccggccucacgagcgccgucaucgaggcgcugccccgcaacauggugcugaccugccaggggagcgacgacaucaagcggcuccuggacucccagggccgcaaggacaucaagcugaucgacaucgcccucagcaaggccgacucccgccgguucgagaacgccgugugggaccagugcaaggaccugugccacaugcacaccggggucgugguggagaagaagaagcgcggcgggaaggaggagaucacgccccacugcgcccugauggacugcaucauguacgacgcggccgucagcggcggccucaacaucccggugcugcgggccgugcugccccgcgacauggucuuccggaccuccagccccaagguggugcucugaggacuaguuauaagacugacuagcccgaugggccucccaacgggcccuccuccccuccuugcaccgagauuaauaaaaaaaaaaaaaaaaaaaaaaaaaaaaaaaaaaaaaaaaaaaaaaaaaaaaaaaaaaaaaaaaugcaucccccccccccccccccccccccccccccccaaaggcucuuuucagagccaccagaauu

SEQ ID NO: 10939 - RNA, 1927 nt, Artificial Sequence
  mRNA product Design i-3 comprising derived and/or modified sequence from LASV(Lassa virus/H.sapiens-wt/NGA/2016/ISTH_0009;Clade II)__AVO03572__NP (opt1)
gggagaaagcuuaccaugagcgccuccaaggaggugaaguccuuccuguggacccagagccuccgccgggagcugagcggcuacugcuccaacaucaagcugcaggucgugaaggacgcccaggcgcuccugcacgggcuggacuucagcgagguguccaacguccagcgccucaugcggaagcagaagcgcgacgacagcgaccugaagcggcugcgcgaccucaaccaggccgugaacaaccugguggagcugaaguccacccagcagaaguccauccuccgggucggcacgcugaccagcgacgaccugcucacccuggccgccgaccuggagaagcucaagagcaaggugauccgcaccgagcggccccuguccagcgggguguacaugggcaaccuguccacgcagcagcucgagcagcgccgggcccugcugaacaugaucgggauggucggcggcgcgcaggggacccagccgggccgcgacgggguggugcgggucugggacgugaagaaccccgaccuccugaacaaccaguucggcaccaugcccagccugacccucgccugccugacgaagcagggccagguggaccugaacgacgccguccucgcccugaccgaccuggggcucaucuacaccgcgaaguaccccaacuccagcgaccuggaccgccugucccagagccacccgauccucaacaugguggacaccaagaaguccagccugaacaucagcggcuacaacuucucccugggggccgccgugaaggccggcgccugcaugcucgacgggggcaacaugcuggagacgaucaaggucacgccccagaccauggacggcauccucaagagcauccugaaggugaagaagucccuggggauguucgugagcgacacccccggcgagcggaaccccuacgagaacauccuguacaagaucugccucuccggggacggcuggccguacaucgcgagccgcaccuccaucgucgggcgggccugggagaacaccaccguggaccuggagagcgacggcaagccccagaaggugggcuccgccgggagcaacaagucccugcagagcgccggcuuccccaccgggcucacguacucccagcugaugacccugaaggacagcaugaugcagcuggaccccuccgccaagaccuggaucgacaucgagggccgcccggaggaccccgucgagaucgcgcucuaccagcccaugagcgggugcuacauccacuucuuccgggagcccaccgaccugaagcaguucaagcaggacgccaaguacucccacggcaucgacguggccgaccuguucccggcccagcccggccucacgagcgccgucaucgaggcgcugccccgcaacauggugcugaccugccaggggagcgacgacaucaagcggcuccuggacucccagggccgccgcgacaucaagcugaucgacaucgcccucagcaaggccgacucccggcgcuucgagaacgccgugugggaccagugcaaggaccugugccacaugcacaccggggucgugguggagaagaagaagcggggcgggaaggaggagaucacgccccacugcgcccugauggacugcaucauguacgacgcggccgucagcggcggccucaacaucccggugcugcgcgccgugcugccccgggacauggucuuccgcaccuccagccccaagguggugcucugaggacuaguuauaagacugacuagcccgaugggccucccaacgggcccuccuccccuccuugcaccgagauuaauaaaaaaaaaaaaaaaaaaaaaaaaaaaaaaaaaaaaaaaaaaaaaaaaaaaaaaaaaaaaaaaaugcaucccccccccccccccccccccccccccccccaaaggcucuuuucagagccaccagaauu

SEQ ID NO: 10940 - RNA, 1927 nt, Artificial Sequence
  mRNA product Design i-3 comprising derived and/or modified sequence from LASV(Lassa virus/H.sapiens-wt/NGA/2016/ISTH_0017;Clade II)__AVO03568__NP (opt1)
gggagaaagcuuaccaugagcgccuccaaggaggugaaguccuuccuguggacccagagccuccgccgggagcugagcggcuacugcuccagcaucaagcugcaggucgugaaggacgcccaggcgcuccugcacgggcuggacuucuccgaggugagcaacguccagcgccucaugcggaagcagaagcgcgacgacuccgaccugaagcggcugcgcgaccucaaccaggccgugaacaaccugguggagcucaagagcacccagcagaaguccauccugcgggucggcacgcugaccagcgacgaccugcucacccuggccgccgaccuggagaagcucaaguccaaggugauccgcaccgagcggccccugagcuccgggguguacaugggcaaccugagcacgcagcagcucgagcagcgccgggcccugcugaacaugaucgggauggcgggcggcgcccaggggacccagccgggccgcgacggggucgugcgggugugggacgucaagaaccccgaccuccugaacaaccaguucggcaccaugcccucccugacccucgccugccugacgaagcagggccagguggaccugaacgacgccgugcucgcgcugaccgaccuggggcucaucuacaccgccaaguaccccaacagcuccgaccuggaccgccugagccagagccacccgauccucaacauggucgacaccaagaaguccagccugaacaucuccggcuacaacuucagccugggggccgccgugaaggccggcgcgugcaugcucgacgggggcaacaugcuggagacgaucaaggugacgccccagaccauggacggcauccugaaguccauccucaaggucaagcggagccuggggauguucguguccgacgcccccggcgagcgcaaccccuacgagaacauccuguacaagaucugccucagcggggacggcuggccguacaucgccucccggaccagcaucguggggcgcgccugggagaacaccaccgucgaccuggaguccgacggcaagccccagaaggugggcgccaccgggagcaacaagucccugcagagcgcgggcuuccccaccgggcucacguacucccagcugaugacccugaaggacagcaugaugcagcuggaccccuccgccaagaccuggaucgacaucgagggccggccggaggaccccguggaggucgcccucuaccagcccgugagcgggugcuacauccacuucuuccgcgagcccaccgaccugaagcaguucaagcaggacgccaaguacucccacggcaucgacgucgccgaccuguucccggcgcagcccggccucacgagcgccgugaucgaggcccugccccggaacauggugcugaccugccaggggagcgacgacaucaagaagcuccuggacucccagggccgcaaggacaucaagcugaucgacaucgcccucagcaaggccgacucccgccgguucgagaacgcggucugggaccagugcaaggaccugugccacaugcacaccggggugguggucgagaagaagaagcgcggcgggaaggaggagaucacgccccacugcgcccugauggacugcaucauguacgacgccgccgugagcggcggccucaacaucccggugcugcgggcgguccugccccgcgacaugguguuccggaccuccagccccaaggugguccucugaggacuaguuauaagacugacuagcccgaugggccucccaacgggcccuccuccccuccuugcaccgagauuaauaaaaaaaaaaaaaaaaaaaaaaaaaaaaaaaaaaaaaaaaaaaaaaaaaaaaaaaaaaaaaaaaugcaucccccccccccccccccccccccccccccccaaaggcucuuuucagagccaccagaauu

SEQ ID NO: 10941 - RNA, 1927 nt, Artificial Sequence
  mRNA product Design i-3 comprising derived and/or modified sequence from LASV(Lassa virus/H.sapiens-wt/NGA/2018/ISTH_0959;Clade II)__AVV65100__NP (opt1)
gggagaaagcuuaccaugagcgccuccaaggaggugaaguccuuccuguggacccagagccuccgccgggagcugagcggcuacugcuccaacaucaagcugcaggucgugaaggacgcccaggcgcuccugcacgggcuggacuucagcgagguguccaacguccagcgccucaugcggaagcagaagcgcgacgacagcgaccugaagcggcugcgcgaccucaaccaggccgugaacaaccugguggagcugaaguccacccagcagaaguccauccuccgggucggcacccugaccagcgacgaccugcucacccuggccgccgaccuggagaagcucaagagcaaggugauccgcaccgagcggccccuguccagcgggguguacaugggcaaccuguccacgcagcagcucgagcagcgccgggcccugcugaaccucaucgggauggucggcggcgcgcaggggacccagccgggccgcgacgggguggugcgggucugggacgugaagaaccccgaccugcugaacaaccaguucggcaccaugcccagccucacccuggccugccugacgaagcagggccagguggaccucaacgacgucgugcuggcccugaccgaccucgggcugaucuacaccgccaaguaccccaacuccagcgaccuggaccgccucucccagagccacccgauccugaacaugguggacaccaagaaguccagccugaacaucagcggcuucaacuucucccucggggcggccgucaaggccggcgccugcaugcuggacgggggcaacaugcuggagacgaucaaggugacgccccagaccauggacggcauccucaagagcauccugaaggugaagaagucccuggggauguucgucagcgacacccccggcgagcggaaccccuacgagaacauccucuacaagaucugccuguccggggacggcuggccguacaucgccagccgcaccuccaucguggggcgggcgugggagaacaccaccguggaccuggagagcgacggcaagccccacaaggucggcaccgccggguccaacaagagccuccaguccgccggcuuccccacggggcugaccuacagccagcugaugacccugaaggacuccaugaugcagcucgaccccagcgccaagaccuggaucgacaucgagggccgcccggaggaccccguggagaucgcccuguaccagcccauguccgggugcuacauccacuucuuccgggagcccacggaccugaagcaguucaagcaggacgcgaaguacagccacggcaucgacgucgccgaccucuucccggcccagcccggccugaccuccgccgugaucgaggcccugccccgcaacauggugcugaccugccaggggagcgacgacaucaagcggcuccuggacagccagggccgcaaggacaucaagcucaucgacaucgcgcuguccaagaccgacagccgccgguucgagaacgccgucugggaccagugcaaggaccugugccacaugcacacgggggugguggucgagaagaagaagcgcggcgggaaggaggagaucacgccccacugcgcccucauggacugcaucauguacgacgccgccguguccggcggccugaacaucccggugcugcgggcgguccucccccgcgacaugguguuccggaccagcucccccaaggugguccugugaggacuaguuauaagacugacuagcccgaugggccucccaacgggcccuccuccccuccuugcaccgagauuaauaaaaaaaaaaaaaaaaaaaaaaaaaaaaaaaaaaaaaaaaaaaaaaaaaaaaaaaaaaaaaaaaugcaucccccccccccccccccccccccccccccccaaaggcucuuuucagagccaccagaauu

SEQ ID NO: 10942 - RNA, 1927 nt, Artificial Sequence
  mRNA product Design i-3 comprising derived and/or modified sequence from LASV(LASV003-NIG-2008;Clade II)__AIT17581__NP (opt1)
gggagaaagcuuaccaugagcgccuccaaggaggugaaguccuuccuguggacccagagccuccgccgggagcugagcggcuacugcuccagcaucaagcugcaggucgugaaggacgcccaggcgcuccugcacgggcuggacuucuccgaggugagcaacguccagcgccucaugcggaagcagaagcgcgacgacuccgaccugaagcggcugcgcgaccucaaccaggccgugaacaaccugguggagcucaagagcacccagcagaaguccguccugcgggugggcacccugaccagcgacgaccugcucacccuggccgccgaccuggagaagcucaaguccaaggugauccgcaccgagcggccccugagcuccggggucuacaugggcaaccugagcgcccagcagcucgagcagcgccggacgcugcugaacaugaucgggauggugggcggcgcgcaggggacccagccgggccgcgacggggugguccgggugugggacgugaagaaccccgaccuccugaacaaccaguucggcaccaugcccucccugacccucgccugccugacgaagcaggggcaggucgaccugaacgacguggugcucgcccugaccgaccugggccucaucuacaccgccaaguaccccaacagcuccgaccuggaccgccugagccagagccacccgauccucuccauggucgacaccaagaaguccagccugaacaucagcggcuacaacuucucccugggggcggccgugaaggccggcgccugcaugcucgacgggggcaacaugcuggagacgaucaaggugacgccccagaccauggacggcauccucaagagcauccugaaggucaagaagucccuggggauguucgugagcgacacccccggcgagcggaaccccuacgagaacauccuguacaagaucugccucuccggggacggcuggccguacaucgccagccgcaccuccaucguggggcgggcgugggagaacaccaccgucgaccuggagagcgacggcaagccccagaaggugggcaccgccggguccaacaagagccugcaguccgccggcuuccccacggggcucaccuacagccagcugaugacccugaaggacuccaugaugcagcuggaccccagcgccaagaccuggaucgacaucgagggccgcccggaggaccccgucgagaucgcccucuaccagcccauguccgggugcuacauccacuucuuccgggagcccacggaccugaagcaguucaagcaggacgcgaaguacagccacggcaucgacgugaccgaccuguucccggcccagcccggccucaccagcgccgugaucgaggcccugccccgcaacaugguccugaccugccagggguccgacgacaucaagcggcuccuggacagccagggccgccgcgacaucaagcugaucgacaucgcccucuccaaggcggacagccggcgcuucgagaacgccgugugggaccagugcaaggaccugugccacaugcacacggggguggucguggagaagaagaagcggggcgggaaggaggagaucacgccccacugcgcccugauggacugcaucauguacgacgccgccguguccggcggccucaacaucccgguccugcgcgcggugcugccccgggacaugguguuccgcaccagcucccccaaggucgugcucugaggacuaguuauaagacugacuagcccgaugggccucccaacgggcccuccuccccuccuugcaccgagauuaauaaaaaaaaaaaaaaaaaaaaaaaaaaaaaaaaaaaaaaaaaaaaaaaaaaaaaaaaaaaaaaaaugcaucccccccccccccccccccccccccccccccaaaggcucuuuucagagccaccagaauu

SEQ ID NO: 10943 - RNA, 1927 nt, Artificial Sequence
  mRNA product Design i-3 comprising derived and/or modified sequence from LASV(LASV035-NIG-2009;Clade II)__AIT17589__NP (opt1)
gggagaaagcuuaccaugagcgccuccaaggaggugaaguccuuccuguggacccagagccuccgccgggagcugagcggcuacugcuccagcaucaagcugcaggucgugaaggacgcccaggcgcuccugcacgggcuggacuucuccgaggugagcaacguccagcgccucaugcggaagcagaagcgcgacgacuccgaccugaagcggcugcgcgaccucaaccaggccgugaacaaccugguggagcucaagagcacccagcagaaguccauccugcgggucggcacgcugaccagcgacgaccugcucacccuggccgccgaccuggagaagcucaaguccaaggugauccgcaccgagcggccccugagcuccgggguguacaugggcaaccugagcgcccagcagcucgagcagcgccgggcgcugcugaacaugaucgggauggucggcggcgcccaggggacgcagccgggccgcgacgggguggugcgggucugggacgugaagaaccccgaccuccugaacaaccaguucggcaccaugcccucccugacccucgccugccugaccaagcagggccagguggaccugaacgacgccguccucgcgcugacggaccuggggcucaucuacaccgccaaguaccccaacagcuccgaccuggaccgccugagccagagccacccgauccucaacaugguggacaccaagaaguccagccugaacaucuccggcuacaacuucagccugggggccgccgugaaggccggcgcgugcaugcucgacgggggcaacaugcuggagaccaucaaggucacgccccagaccauggacggcauccugaaguccauccucaaggugaagcggagccuggggauguucguguccgacacccccggcgagcgcaaccccuacgagaacauccuguacaagaucugccucagcggggacggcuggccguacaucgccucccggaccagcaucgucgggcgcgccugggagaacacgaccguggaccuggaguccgacggcaagccccagaaggugggcaccaccgggagcaacaagucccugcagagcgccggcuuccccacggggcucaccuacucccagcugaugacccugaaggacagcaugaugcagcuggaccccuccgccaagaccuggaucgacaucgagggccggccggaggaccccgucgagaucgcgcucuaccagcccaugagcgggugcuacauccacuucuuccgcgagcccacggaccugaagcaguucaagcaggacgccaaguacucccacggcaucgacguggccgaccuguucccggcccagcccggccucaccagcgccgucaucgaggcgcugccccggaacauggugcugaccugccaggggagcgacgacaucaagaagcuccuggacucccagggccgccgcgacaucaagcugaucgacaucgcccucagcaaggccgacucccggaaguucgagaacgccgugugggaccagugcaaggaccugugccacaugcacaccggggucgugguggagaagaagaagcgcggcgggaaggaggagaucacgccccacugcgcccugauggacugcaucauguacgacgcggccgucagcggcggccucaacaucccggugcugcgggccgugcugccccgcgacauggucuuccggaccuccagccccaagguggugcucugaggacuaguuauaagacugacuagcccgaugggccucccaacgggcccuccuccccuccuugcaccgagauuaauaaaaaaaaaaaaaaaaaaaaaaaaaaaaaaaaaaaaaaaaaaaaaaaaaaaaaaaaaaaaaaaaugcaucccccccccccccccccccccccccccccccaaaggcucuuuucagagccaccagaauu

SEQ ID NO: 10944 - RNA, 1927 nt, Artificial Sequence
  mRNA product Design i-3 comprising derived and/or modified sequence from LASV(LASV1000-NIG-2009;Clade II)__AIT17783__NP (opt1)
gggagaaagcuuaccaugagcgccuccaaggaggugaaguccuuccuguggacccagagccuccgccgggagcugagcggcuacugcuccaacaucaagcugcaggucgugaaggacgcccaggcgcuccugcacgggcuggacuucagcgagguguccaacguccagcgccucaugcggaagcagaagcgcgacgacagcgaccugaagcggcugcgcgaccucaaccaggccgugaacaaccugguggagcugaaguccacccagcagaaguccauccuccgggucggcacgcugaccagcgacgaccugcucacccuggccgccgaccuggagaagcucaagagcaaggugauccgcaccgagcggccccuguccagcgggguguacaugggcaaccuguccacgcagcagcucgagcagcgccgggcccugcugaacaugaucgggauggucggcggcgcgcaggggacccagccgggccgcgacgggguggugcgggucugggacgugaagaaccccgaccuccugaacaaccaguucggcaccaugcccagccugacccucgccugccugacgaagcagggccagguggaccugaacgacgucgugcucgcccugaccgaccuggggcucaucuacaccgccaaguaccccaacuccagcgaccuggaccgccugucccagagccacccgauccucaacaugguggacaccaagaaguccagccugaacaucagcggcuacaacuucucccugggggcggccgucaaggccggcgccugcaugcucgacgggggcaacaugcuggagacgaucaaggugacgccccagaccauggacggcauccucaagagcauccugaaggugaagaagucccuggggauguucgucagcgacacccccggcgagcggaaccccuacgagaacauccuguacaagaucugccucuccggggacggcuggccguacaucgccagccgcaccuccaucguggggcgggcgugggagaacaccaccguggaccuggagagcgacggcaagccccagaaggucggcaccgccggguccaacaagagccugcaguccgccggcuuccccacggggcucaccuacagccagcugaugacccugaaggacuccaugaugcagcuggaccccagcgccaagaccuggaucgacaucgagggccgcccggaggaccccguggagaucgcccucuaccagcccgucuccgggugcuacauccacuucuuccgggagcccacggaccugaagcaguucaagcaggacgcgaaguacagccacggcaucgacguggccgaccuguucccggcccagcccggccucaccuccgccgugaucgaggcccugccccgcaacaugguccugaccugccaggggagcgacgacaucaagcggcuccuggacagccagggccgccgcgacaucaagcugaucgacaucgcgcucuccaaggccgacagccggcgcuucgagaacgccgugugggaccagugcaaggaccugugccacaugcacaccgggguggucguggagaagaagaagcggggcgggaaggaggagaucacgccccacugcgcccugauggacugcaucauguacgacgccgcgguguccggcggccucaacaucccgguccugcgcgccgugcugccccgggacaugguguuccgcaccagcucccccaaggucgugcucugaggacuaguuauaagacugacuagcccgaugggccucccaacgggcccuccuccccuccuugcaccgagauuaauaaaaaaaaaaaaaaaaaaaaaaaaaaaaaaaaaaaaaaaaaaaaaaaaaaaaaaaaaaaaaaaaugcaucccccccccccccccccccccccccccccccaaaggcucuuuucagagccaccagaauu

SEQ ID NO: 10945 - RNA, 1927 nt, Artificial Sequence
  mRNA product Design i-3 comprising derived and/or modified sequence from LASV(LASV221-NIG-2010;Clade II)__AIT17625__NP (opt1)
gggagaaagcuuaccaugagcgccuccaaggaggugaaguccuuccuguggacccagagccuccgccgggagcugagcggcuacugcuccagcaucaagcugcaggucgugaaggacgcccaggcgcuccugcacgggcuggacuucuccgaggugagcaacguccagcgccucaugcggaagcagcgccgggacgacuccgaccugaagcgccugcgggaccucaaccaggccgugaacaaccugguggagcucaagagcacccagcagaaguccauccugcgcgucggcacgcugaccagcgacgaccugcucacccuggccgccgaccuggagaagcucaaguccaaggugauccggaccgagcgcccccugagcuccgggguguacaugggcaaccugagcacgcagcagcucgagcagcggcgcgcccugcugaacaugaucgggauggucggcggcgcgcaggggacccagccgggccgggacgggguggugcgcgucugggacgugaagaaccccgaccuccugaacaaccaguucggcaccaugcccucccugacccucgccugccugacgaagcagggccagguggaccugaacgacgccguccucgcccugaccgaccuggggcucaucuacaccgcgaaguaccccaacagcuccgaccuggaccggcugagccagagccacccgauccucaacaugguggacaccaagaaguccagccugaacaucuccggcuacaacuucagccugggggccgccgugaaggccggcgccugcaugcucgacgggggcaacaugcuggagacgaucaaggucacgccccagaccguggacggcauccugaaguccauccucaaggugaagcgcagccuggggauguucgucuccgacacccccggcgagcggaaccccuacgagaacauccuguacaagaucugccucagcggggacggcuggccguacaucgcgucccgcaccagcaucguggggcgggccugggagaacaccaccguggaccuggaguccgacggcaagccccagaaggucggcaccgccgggagcaacaagucccugcagagcgccggcuuccccacggggcucaccuacucccagcugaugacccugaaggacagcaugaugcagcuggaccccuccgccaagaccuggaucgacaucgagggccgcccggaggaccccguggagaucgcgcucuaccagcccaugagcgggugcuacauccacuucuuccgggagcccacggaccugaagcaguucaagcaggacgccaaguacucccacggcaucgacgucgccgaccuguucccggcccagcccggccucaccagcgccgugaucgaggcgcugccccgcaacauggugcugaccugccaggggagcgacgacaucaagcgccuccuggacucccagggccggcgcgacaucaagcugaucgacaucgcccucagcaaggccgacucccggaaguucgagaacgccgucugggaccagugcaaggaccugugccacaugcacaccggggugguggucgagaagaagaagcgcggcgggaaggaggagaucacgccccacugcgcccugauggacugcaucauguacgacgcggccgugagcggcggccucaacaucccggugcugcgggccguccugccccgcgacaugguguuccggaccuccagccccaaggugguccucugaggacuaguuauaagacugacuagcccgaugggccucccaacgggcccuccuccccuccuugcaccgagauuaauaaaaaaaaaaaaaaaaaaaaaaaaaaaaaaaaaaaaaaaaaaaaaaaaaaaaaaaaaaaaaaaaugcaucccccccccccccccccccccccccccccccaaaggcucuuuucagagccaccagaauu

SEQ ID NO: 10946 - RNA, 1927 nt, Artificial Sequence
  mRNA product Design i-3 comprising derived and/or modified sequence from LASV(LASV237-NIG-2010;Clade II)__AIT17639__NP (opt1)
gggagaaagcuuaccaugagcgccuccaaggaggugaaguccuuccuguggacccagagccuccgccgggagcugagcggcuacugcuccaacaucaagcugcaggucgugaaggacgcccaggcgcuccugcacgggcuggacuucagcgagguguccaacguccagcgccucaugcggaagcagaagcgcgacgacagcgaccugaagcggcugcgcgaccucaaccaggccgugaacaaccugguggagcugaaguccacccagcagaaguccauccuccgggucggcacccugaccagcgacgaccugcucacccuggccgccgaccuggagaagcucaagagcaaggugauccgcaccgagcggccccuguccagcgggguguacaugggcaaccuguccacgcagcagcucgagcagcgccgggcccugcugaacaugaucgggauggucggcggcgcgcaggggacccagccgggccgcgacgggguggugcgggucugggacgugaagaaccccgaccuccugaacaaccaguucggcaccaugcccagccugacccucgccugccugacgaagcagggccagguggaccugaacgacgccguccucgcccugaccgaccuggggcucaucuacaccgcgaaguaccccaacuccagcgaccuggaccgccugucccagagccacccgauccucaacaugguggacaucaagaaguccagccugaacaucagcggcuacaacuucucccugggggccgccgugaaggccggcgccugcaugcucgacgggggcaacaugcuggagaccaucaaggucacgccccagaccauggacggcauccucaagagcauccugaaggugaagcggucccuggggauguucgugagcgacacccccggcgagcgcaaccccuacgagaacauccuguacaagaucugccucuccggggacggcuggccguacaucgcgagccggaccuccaucgucgggcgcgccugggagaacacgaccguggaccuggagagcgacggcaagccccagaaggugggcuccgccgggagcaacaagucccugcagagcgccggcuuccccaccgggcucaccuacucccagcugaugacgcugaaggacagcaugaugcagcuggaccccuccgccaagaccuggaucgacaucgagggccggccggaggaccccgucgagaucgcgcucuaccagcccaugagcgggugcuacauccacuucuuccgcgagcccaccgaccugaagcaguucaagcaggacgccaaguacucccacggcaucgacguggccgaccuguucccggcccagcccggccucaccagcgccgucaucgaggcgcugccccggaacauggugcugacgugccaggggagcgacgacaucaagcgccuccuggacucccagggccgccgggacaucaagcugaucgacaucgcccucagcaaggccgacucccgccgguucgagaacgccgugugggaccagugcaaggaccugugccacaugcacaccggggucgugguggagaagaagaagcgcggcgggaaggaggagaucacgccccacugcgcccugauggacugcaucauguacgacgcggccgucagcggcggccucaacaucccggugcugcgggccgugcugccccgcgacauggucuuccggaccuccagccccaagguggugcucugaggacuaguuauaagacugacuagcccgaugggccucccaacgggcccuccuccccuccuugcaccgagauuaauaaaaaaaaaaaaaaaaaaaaaaaaaaaaaaaaaaaaaaaaaaaaaaaaaaaaaaaaaaaaaaaaugcaucccccccccccccccccccccccccccccccaaaggcucuuuucagagccaccagaauu

SEQ ID NO: 10947 - RNA, 1927 nt, Artificial Sequence
  mRNA product Design i-3 comprising derived and/or modified sequence from LASV(LASV253-NIG-2011;Clade II)__AIT17671__NP (opt1)
gggagaaagcuuaccaugagcgccuccaaggaggugaaguccuuccuguggacccagagccuccgccgggagcugagcggcuacugcuccagcaucaagcugcaggucgugaaggacgcccaggcgcuccugcacgggcuggacuucuccgaggugagcaacguccagcgccucaugcggaagcagaagcgcgacgacuccgaccugaagcggcugcgcgaccucaaccaggccgugaacaaccugguggagcucaagagcacccagcagaaguccguccugcgggugggcacccugaccagcgacgaccugcucacccuggccgccgaccuggagaagcucaaguccaaggugauccgcaccgagcggccccugagcuccggggucuacaugggcaaccugagcacgcagcagcucgagcagcgccgggcccugcugaacaugaucgggauggugggcggcgcgcaggggacccagccgggccgcgacggggugguccgggugugggacgugaagaaccccgaccuccugaacaaccaguucggcaccaugcccucccugacccucgccugccugacgaagcaggggcaggucgaccugaacgacguggugcucgcccugaccgaccugggccucaucuacaccgccaaguaccccaacagcuccgaccuggaccgccugagccagagccacccgauccucaacauggucgacaccaagaaguccagccugaacaucuccggcuacaacuucagccugggggcggccgugaaggccggcgccugcaugcucgacgggggcaacaugcuggagacgaucaaggugacgccccagaccauggacggcauccugaaguccauccucaaggucaagaagucccuggggauguucgugagcgacacccccggcgagcggaaccccuacgagaacauccuguacaagaucugccucagcggggacggcuggccguacaucgccucccgcaccagcaucguggggcgggcgugggagaacaccaccgucgaccuggaguccgacggcaagccccagaaggugggcaccgccgggagcaacaagucccugcagagcgccggcuuccccacggggcucaccuacucccagcugaugacccugaaggacagcaugaugcagcuggaccccuccgccaagaccuggaucgacaucgagggccgcccggaggaccccgucgagaucgcccucuaccagcccaugagcgggugcuacauccacuucuuccgggagcccacggaccugaagcaguucaagcaggacgcgaaguacucccacggcaucgacgugaccgaccuguucccggcccagcccggccucaccagcgccgugaucgaggcccugccccgcaacaugguccugaccugccaggggagcgacgacaucaagcggcuccuggacucccagggccgccgcgacaucaagcugaucgacaucgcccucagcaaggcggacucccggcgcuucgagaacgccgugugggaccagugcaaggaccugugccacaugcacacggggguggucguggagaagaagaagcggggcgggaaggaggagaucacgccccacugcgcccugauggacugcaucauguacgacgccgccgugagcggcggccucaacaucccgguccugcgcgcggugcugccccgggacaugguguuccgcaccuccagccccaaggucgugcucugaggacuaguuauaagacugacuagcccgaugggccucccaacgggcccuccuccccuccuugcaccgagauuaauaaaaaaaaaaaaaaaaaaaaaaaaaaaaaaaaaaaaaaaaaaaaaaaaaaaaaaaaaaaaaaaaugcaucccccccccccccccccccccccccccccccaaaggcucuuuucagagccaccagaauu

SEQ ID NO: 10948 - RNA, 1927 nt, Artificial Sequence
  mRNA product Design i-3 comprising derived and/or modified sequence from LASV(LASV254-NIG-2011;Clade II)__AIT17675__NP (opt1)
gggagaaagcuuaccaugagcgccuccaaggaggugaaguccuuccuguggacccagagccuccgccgggagcugagcggcuacugcuccagcaucaagcugcaggucgugaaggacgcccaggcgcuccugcacgggcuggacuucuccgaggugagcaacguccagcgccucaugcggaagcagaagcgcgacgacuccgaccugaagcggcugcgcgaccucaaccaggccgugaacaaccugguggagcucaagagcacccagcagaaguccguccugcgggugggcacgcugaccagcgacgaccugcucacccuggccgccgaccuggagaagcucaaguccaaggugauccgcaccgagcggccccugagcuccggggucuacaugggcaaccugagcacgcagcagcucgagcagcgccgggcccugcugaacaugaucgggauggugggcggcgcgcaggggacccagccgggccgcgacggggugguccgggugugggacgugaagaaccccgaccuccugaacaaccaguucggcaccaugcccucccugacccucgccugccugacgaagcaggggcaggucgaccugaacgacgccgugcucgcccugaccgaccugggccucaucuacaccgcgaaguaccccaacagcuccgaccuggaccgccugagccagagccacccgauccucaacaugguggacaccaagaaguccagccugaacaucuccggcuacaacuucagccugggggccgccgucaaggccggcgccugcaugcucgacgggggcaacaugcuggagacgaucaaggugacgccccagaccauggacggcauccugaaguccauccucaaggugaagaagucccuggggauguucgucagcgacacccccggcgagcggaaccccuacgagaacauccuguacaagaucugccucagcggggacggcuggccguacaucgcgucccgcaccagcaucguggggcgggccugggagaacaccaucguggaccuggaguccgacggcaagccccagaaggucggcaccgccgggagcaacaagucccugcagagcgccggcuuccccaccgggcucacguacucccagcugaugacccugaaggacagcaugaugcagcuggaccccuccgccaagaccuggaucgacaucgagggccgcccggaggaccccguggagaucgcgcucuaccagcccaugagcgggugcuacauccacuucuuccgggagcccaccgaccugaagcaguucaagcaggacgccaaguacucccacggcaucgacgucgccgaccuguucccggcccagcccggccucacgagcgccgugaucgaggcgcugccccgcaacauggugcugaccugccaggggagcgacgacaucaagcggcuccuggacucccagggccgccgcgacaucaagcugaucgacaucgcccucagcaaggccgacucccggcgcuucgagaacgccgucugggaccagugcaaggaccugugccacaugcacaccggggugguggucgagaagaagaagcggggcgggaaggaggagaucacgccccacugcgcccugauggacugcaucauguacgacgcggccgugagcggcggccucaacaucccggugcugcgcgccguccugccccgggacaugguguuccgcaccuccagccccaaggugguccucugaggacuaguuauaagacugacuagcccgaugggccucccaacgggcccuccuccccuccuugcaccgagauuaauaaaaaaaaaaaaaaaaaaaaaaaaaaaaaaaaaaaaaaaaaaaaaaaaaaaaaaaaaaaaaaaaugcaucccccccccccccccccccccccccccccccaaaggcucuuuucagagccaccagaauu

SEQ ID NO: 10949 - RNA, 1927 nt, Artificial Sequence
  mRNA product Design i-3 comprising derived and/or modified sequence from LASV(Nig08-04;Clade II)__ADU56611__NP (opt1)
gggagaaagcuuaccaugagcgccuccaaggaggugaaguccuuccuguggacccagagccuccgccgggagcugagcggcuacugcuccaacaucaagcugcaggucgugaaggacgcccaggcgcuccugcacgggcuggacuucagcgagguguccaacguccagcgccucaugcggaagcagaagcgcgacgacggcgaccugaagcggcugcgcgaccucaaccaggccgugaacaaccugguggagcucaagagcacccagcagaaguccguccugcggguggggacccugaccagcgacgaccugcucacccuggccgccgaccuggagaagcucaaguccaaggugauccgcaccgagcggccccugagcuccggcgucuacauggggaaccugagcacgcagcagcucgagcagcgcaaggcccugcuguccaugaucggcauggugggcggggcgcagggcacccagccggggcgggacggcgugguccgcgugugggacgugaagaaccccgaccuccugaacaaccaguucgggaccaugcccagccugacccucgccugccugacgaagcagggccaggucgaccugaacgacgccgugcucgcccugaccgaccugggccucaucuacaccgcgaaguaccccaacuccagcgaccuggaccggcugucccagagccacccgauccucaacaugguggacaccaagaaguccagccugaacaucagcggguacaacuucucccugggcgccgccgucaaggccggggccugcaugcucgacggcggcaacaugcuggagacgaucaaggugacgccccagaccauggacgggauccucaagagcauccugaaggugaagcgcucccugggcauguucgucagcgacacccccggggagcggaaccccuacgagaacauccuguacaagaucugccucuccggcgacggguggccguacaucgcgagccgcaccuccaucgugggccgggccugggagaacaccaccguggaccuggagagcgacggcaagccccagaaggucgggaccgccggcuccaacaagagccugcaguccgccggguuccccacgggccucaccuacagccagcugaugacccugaaggacuccaugaugcagcuggaccccagcgccaagaccuggaucgacaucgaggggcgcccggaggaccccguggagaucgcgcucuaccagcccauguccggcugcuacauccacuucuuccgggagcccacggaccugaagcaguucaagcaggacgccaaguacagccacggcaucgacgucaccgaccuguucuccgcccagccggggcucaccagcgccgugaucgaggcccugccccgcaacauggugcugaccugccagggcagcgacgacaucaagaagcuccuggacucccaggggcggcgcgacaucaagcugaucgacaucagccucaacaaggcggacucccgccgguucgagaacgccgucugggaccagugcaaggaccugugccacaugcacacgggcgugguggucgagaagaagaagcgcgggggcaaggaggagaucacgccccacugcgcccugauggacugcaucauguucgacgccgccgugagcggcgggcucaacauccccauccugcgggcggugcugccgcgcgacauggucuuccggaccuccagccccaagguggugcucugaggacuaguuauaagacugacuagcccgaugggccucccaacgggcccuccuccccuccuugcaccgagauuaauaaaaaaaaaaaaaaaaaaaaaaaaaaaaaaaaaaaaaaaaaaaaaaaaaaaaaaaaaaaaaaaaugcaucccccccccccccccccccccccccccccccaaaggcucuuuucagagccaccagaauu

SEQ ID NO: 10950 - RNA, 1930 nt, Artificial Sequence
  mRNA product Design i-3 comprising derived and/or modified sequence from LASV(GA391;Clade III)__AAA46284__NP (opt1)
gggagaaagcuuaccaugagcgccuccaaggaggugcgcagcugccuguggacccagucccuccggcgcgagcugagcggcuacugcuccaacaucaagcugcaggucgugaaggacgcccaggcgcuccugcacgggcuggacuucagcgagguguccaacguccagcggcucaugcgcaagcagaagcgggacgacggcgaccugaagcgccugcgggaccucaaccaggccgugaacaaccugguggagcugaaguccacccagcagaaguccguccuccgcguggggacgcugagcuccgacgaccugcucauccuggccgccgaccuggagaagcucaagagcaaggugacccggaccgagcgcccccuguccagcggcgucuacauggggaaccuguccagccagcagcucgaccagcggcgcgcccugcugaacaugaucggcaugaccggcguguccgggggcgggaagggcgcgagcaacgggaucgugcgggucugggacgugaagaacgccgagcuccugaacaaccaguucggcacgaugccgucccugacccucgccugccugaccaagcagggccagguggaccugaacgacgccguccaggcgcucaccgaccuggggcugaucuacacggccaaguaccccaacagcagcgaccucgaccgccugucccagagccaccccauccugaacaugaucgacaccaagaaguccagccucaacaucuccggcuacaacuucagccugggggccgccgugaaggccggcgcgugcaugcuggacggcgggaacaugcucgagaccaucaaggugagcccccagaccauggacggcauccucaagagcauccugaaggucaagaagucccuggggauguucgugagcgacacgccgggcgagcggaaccccuacgagaacauccuguacaagaucugccuguccggggacggcuggagcuacaucgccucccgcaccagcaucgugggccgggccugggagaacaccgucguggaccucgagcaggacaacaagccccagaagaucgggaacggcggguccaacaagagccugcaguccgccggcuucgccgcggggcugaucuacagccagcucaugacccugaaggacuucaagugcuucaaccugauccccaacgccaagacguggauggacaucgagggccgcccggaggaccccguggagaucgcccuguaccagcccuccagcggcugcuacguccacuucuuccgggagcccaccgaccucaagcaguucaagcaggacgccaaguacagccacgggcgcgacgugaccgaccuguucgccgcgcagccgggccugaccuccgccgucaucgaggcccucccccggaacauggugaucacgugccaggggagcgaggacauccgcaagcugcuggagucccagggccgccgggacaucaagcucaucgacaucacccugagcaaggccgacucccgcaaguucgagaacgccgugugggaccaguucaaggaccugugccacaugcacaccggggucgugguggagaagaagaagcggggcggcaaggaggagaucacgccccacugcgcgcucauggacugcaucauguucgacgccgccgucagcgggggccuggacgccaaggugcugcgcgugguccucccccgggacaugguguuccgcaccuccaccccgaaggugguccugugaggacuaguuauaagacugacuagcccgaugggccucccaacgggcccuccuccccuccuugcaccgagauuaauaaaaaaaaaaaaaaaaaaaaaaaaaaaaaaaaaaaaaaaaaaaaaaaaaaaaaaaaaaaaaaaaugcaucccccccccccccccccccccccccccccccaaaggcucuuuucagagccaccagaauu

SEQ ID NO: 10951 - RNA, 1927 nt, Artificial Sequence
  mRNA product Design i-3 comprising derived and/or modified sequence from LASV(Nig08-A19;Clade III)__ADU56619__NP (opt1)
gggagaaagcuuaccaugagcgccuccaaggaggugaaguccuuccuguggacccagucccuccgccgggagcugagcggcuacugcuccaacaucaagcugcaggucgugaaggacgcccaggcgcuccugcacgggcuggacuucagcgagguguccaacguccagcgccucaugcggaagcagaagcgcgacgacggcgaccugaagcggcugcgcgaccucaaccaggccgugaacaaccugguggagcucaagagcacccagcagaaguccguccugcggguggggacccugagcuccgacgaccugcucgugcuggccgccgaccuggagaagcucaagagcaaggucgugcgcaccgagcggccccuguccagcggcaucuacauggggaaccuguccagccagcagcucgaccagcgcaaggcccugcugaacaugaucggcaugaccggcgggaacggcgggcggaacaccacguccgacggcaucgugcgcgucugggacgugaagaacgcggagcuccugaacaaccaguucgggaccaugccgagccugacccucgccugccugaccaagcagggccagguggaccugaacgacgccguccaggcccucacggaccugggccugaucuacaccgcgaaguaccccaacuccagcgaccucgaccggcuggcccagagccaccccauccugaacaugaucgacaccaagaaguccagccucaacaucuccggguacaacuucagccugggcgccgccgugaaggccggggcgugcaugcuggacggcggcaacaugcucgagaccaucaaggugagcccccagacgauggacgggauccucaagagcauccugaaggucaagcgcucccugggcauguucaucagcgacaccccgggggagcggaaccccuacgagaacauccuguacaagaucugccuguccggcgacggguggcccuacaucgccagccgcaccuccaucgugggccgggccugggagaacaccguggucgaccucgagagcgacaacaagccccagaagacgggcaacgggggcuccaacaagagccugcaguccgccggguucgccgcgggccugaccuacagccagcucaugacccugaaggacuccaugcugcagcuggacccgaacgccaagaccuggauggacaucgaggggcgccccgaggaccccguggagaucgcccucuaccagcccagcuccggcugcuacauccacuucuuccgggagccgacggaccugaagcaguucaagcaggacgccaaguacagccacggcaucgacgugaccgaccuguucgccgcgcagcccgggcucaccagcgccgucaucgaggcccugccccgcaacauggugaucacgugccagggcuccgaggacauccggaagcugcucgagagccaggggcgccgcgacaucaagcugaucgacaucucccugagcaaggucgacucccggaaguucgagaacgccgugugggaccaguucaaggaccucugccacaugcacaccggcaucguggucgagaagaagaagcgcgggggcaaggaggagaucacgccccacugcgcccugauggacugcaucauguucgacgcggccgugagcggcgggguggacgccaagguccugcgggccgugcucccgcgcgacaugguguuccggaccuccacccccaaggucgugcugugaggacuaguuauaagacugacuagcccgaugggccucccaacgggcccuccuccccuccuugcaccgagauuaauaaaaaaaaaaaaaaaaaaaaaaaaaaaaaaaaaaaaaaaaaaaaaaaaaaaaaaaaaaaaaaaaugcaucccccccccccccccccccccccccccccccaaaggcucuuuucagagccaccagaauu

SEQ ID NO: 10952 - RNA, 1927 nt, Artificial Sequence
  mRNA product Design i-3 comprising derived and/or modified sequence from LASV(G1180-SLE-2010;Clade IV)__AIT17169__NP (opt1)
gggagaaagcuuaccaugagcgccuccaaggagaucaagagcuuccuguggacccagucccuccgccgggagcugagcggcuacugcuccaacaucaagcuccagguggucaaggacgcccaggcgcugcugcacgggcuggacuucagcgagguguccaacgugcagcgccucaugcggaaggagcgccgggacgacaacgaccugaagcgccugcgggaccucaaccaggccgucaacaaccugguggagcucaagagcacccagcagaaguccauccugcgcgugggcacccugaccagcgacgaccugcucauccuggccgccgaccuggagaagcucaaguccaaggucauccggaccgagcgcccccugagcgccgggguguacaugggcaaccuguccagccagcagcucgaccagcggcgcgcgcugcuguccaugaucgggaugagcuccggcaaccagcgggcccaggccggccgcgacggggugguccgggugugggacgugaagaacgucgagcuccugaacaaccaguucggcaccaugccgagccugacgcucgccugccugaccaagcagggccagguggaccugaacgacgcggugcaggcccucaccgaccuggggcugaucuacaccgccaaguaccccaacacguccgaccucgaccgccugacccagagccaccccauccugaacaugaucgacaccaagaaguccagccucaacaucagcggguacaacuucucccugggcgccgccgucaaggcgggcgccugcaugcuggacgggggcaacaugcucgagaccaucaaggugagcccccagacgauggacgggauccugaaguccauccugaaggugaagaaggcccucggcauguucaucagcgacaccccgggcgagcggaaccccuacgagaacauccuguacaagaucugccuguccggggacggcuggcccuacaucgccagccgcaccuccaucaccgggcgggccugggagaacacggucguggaccucgagagcgacggcaagccccagaaggcgggguccaacaacagcaacaagucccugcagagcgugggcuucaccgccggccugaccuacucccagcucaugacccugaaggacgccaugcugcagcuggacccgaacgccaagacguggauggacaucgaggggcgccccgaggaccccgucgagaucgcccucuaccagcccagcuccggcugcuacauccacuucuuccgggagccgaccgaccugaagcaguucaagcaggacgcgaaguacagccacgggaucgacgugaccgaccuguucgccgcccagcccggccucaccuccgccgugaucgacgcccugccccgcaacauggucaucacgugccaggggagcgacgacauccgcaagcugcucgagagccagggccggaaggacaucaagcugaucgacaucgcgcuguccaagaccgacagccgcaaguacgagaacgccgugugggaccaguacaaggaccucugccacaugcacaccggcgucgugguggagaagaagaagcgcgggggcaaggaggagaucacgccccacugcgcccugauggacugcaucauguucgacgccgcggucuccgggggccugaacaccagcgugcuccgggccgugcugccgcgggacauggucuuccgcaccuccacgccccggguggugcugugaggacuaguuauaagacugacuagcccgaugggccucccaacgggcccuccuccccuccuugcaccgagauuaauaaaaaaaaaaaaaaaaaaaaaaaaaaaaaaaaaaaaaaaaaaaaaaaaaaaaaaaaaaaaaaaaugcaucccccccccccccccccccccccccccccccaaaggcucuuuucagagccaccagaauu

SEQ ID NO: 10953 - RNA, 1927 nt, Artificial Sequence
  mRNA product Design i-3 comprising derived and/or modified sequence from LASV(G1442-SLE-2011;Clade IV)__AIT17181__NP (opt1)
gggagaaagcuuaccaugagcgccuccaaggaggugaaguccuuccuguggacccagagccuccgccgggagcugagcggcuacugcuccaacaucaagcugcaggucgugaaggacgcccaggcgcuccugcacgggcuggacuucagcgagguguccaacguccagcgccucaugcggaagcagcgccgggacgacaacgaccugaagcgccugcgggaccucaaccaggccgugaacaaccugguggagcucaagagcacccagcagaaguccguccugcgcgugggcacccugaccagcgacgaccugcucgugcuggccgccgaccuggagaagcucaaguccaaggucauccggaccgagcgcccccugagcgccgggguguacaugggcaaccuguccagccagcagcucgaccagcggcgcgcgcugcugaacaugaucgggauguccggcggcauccaggggacccggacgggccgcgacggggugguccgggugugggacgugaagaacgccgaccuccugaacaaccaguucggcaccaugccgagccugacccucgccugccugaccaagcaggggcaggucgaccugaacgacguggugcaggcccucacggaccugggccugaucuacaccgcgaaguaccccaacgccuccgaccucgaccgccugacccagagccaccccauccugaacaugaucgacaccaagaaguccagccucaacaucagcggcuacaacuucucccugggggccgccgucaaggccggcgcgugcaugcuggacgggggcaacaugcucgagacgaucaaggugagcccccagaccauggacggcauccugaaguccauccugaaggugaagaagacccucgggauguucaucagcgacaccccgggcgagcggaaccccuacgagaacauccuguacaagaucugccuguccggggacggcuggcccuacaucgccagccgcacguccaucaccgggcgggccugggagaacaccgucguggaccucgagagcgacggcaagccccagaaggccggcuccaacaacagcaacaagucccugcagagcgccggguucgcggccggccugaccuacucccagcucaugacgcugaaggacgccaugcugcagcuggacccgaacgccaagaccuggauggacaucgaggggcgccccgaggaccccguggagaucgcccucuaccagcccagcuccggcugcuacauccacuucuuccgggagccgaccgaccugaagcaguucaagcaggacgcgaaguacagccacgggaucgacgucaccgaccuguucgccgcccagcccggccucacguccgccgugaucgaggcccugccccgcaacauggucaucacgugccagggcagcgacgacaucaagaagcugcucgagucccaggggcgcaaggacaucaagcugaucgacaucgcgcugagcaagaccgacagccggaaguacgagaacgccgugugggaccaguacaaggaccucugccacaugcacaccggcguggucguggagaagaagaagcgcgggggcaaggaggagaucaccccgcacugcgcccugauggacugcaucauguucgacgccgcgguguccgggggccugaacacccucguccugcgggccgugcugccccgcgacaugguguuccggaccagcacgccccgcgucgugcucugaggacuaguuauaagacugacuagcccgaugggccucccaacgggcccuccuccccuccuugcaccgagauuaauaaaaaaaaaaaaaaaaaaaaaaaaaaaaaaaaaaaaaaaaaaaaaaaaaaaaaaaaaaaaaaaaugcaucccccccccccccccccccccccccccccccaaaggcucuuuucagagccaccagaauu

SEQ ID NO: 10954 - RNA, 1927 nt, Artificial Sequence
  mRNA product Design i-3 comprising derived and/or modified sequence from LASV(G3010-SLE-2013;Clade IV)__AIT17345__NP (opt1)
gggagaaagcuuaccaugagcgccuccaaggagaucaagagcuuccuguggacccagucccuccgccgggagcugagcggcuacugcuccaacaucaagcuccagguggucaaggacgcccaggcgcugcugcacgggcuggacuucagcgagguguccaacgugcagcgccucaugcggaaggagcgccgggacgacaacgaccugaagcgccugcgggaccucaaccaggccgucaacaaccugguggagcucaagagcacccagcagaaguccauccugcgcgugggcacccugaccagcgacgaccugcucauccuggccgccgaccuggagaagcucaaguccaaggucacccggaccgagcgcccccugagcgccgggguguacaugggcaaccuguccagccagcagcucgaccagcggcgcgcgcugcuguccaugaucgggaugagcuccggcgugcagggcgcccgggccgggcgcgacggcgucgugcgggugugggacgucaagaacgccgagcuccugaacaaccaguucgggacgaugccgagccugacccucgcgugccugaccaagcagggccagguggaccugaacgacgugguccaggcccucaccgaccuggggcugaucuacacggccaaguaccccaacaccuccgaccucgaccgccugacccagagccaccccauccugaacaugaucgacaccaagaaguccagccucaacaucagcggcuacaacuucucccugggcgccgccgugaaggcgggggccugcaugcuggacggcgggaacaugcucgagacgaucaaggugagcccccagaccauggacggcauccugaaguccauccugaaggucaagaaggcccucggcauguucaucagcgagaccccgggggagcggaaccccuacgagaacauccuguacaagaucugccuguccggcgacggguggcccuacaucgccagccgcaccuccaucacgggccgggccugggagaacaccgugguggaccucgagagcgacgggaagccccagaaggcgggcuccaacaacagcaacaagucccugcagagcgccggcuucaccgccgggcugaccuacucccagcucaugacgcugaaggacgccaugcugcagcuggacccgaacgccaagaccuggauggacaucgagggccgccccgaggaccccgucgagguggcgcucuaccagcccagcuccgggugcuacauccacuucuuccgggagccgaccgaccugaagcaguucaagcaggacgccaaguacagccacggcaucgacgugaccgaccuguucgccgcccagcccgggcucacguccgccgucaucgacgcgcugccccgcaacauggugaucacgugccagggcagcgacgacaucaagaagcugcucgagagccagggccgcaaggacaucaagcugaucgacaucgcccuguccaagaccgacagccggaaguacgagaacgccgucugggaccaguacaaggaccucugccacaugcacaccggggugguggucgagaagaagaagcgcggcgggaaggaggagaucaccccgcacugcgcccugauggacugcaucauguucgacgcggccguguccggcgggcugaacaccagcgugcuccgggccguccugccccgcgacaugguguuccggaccuccacgccccgcgugguccugugaggacuaguuauaagacugacuagcccgaugggccucccaacgggcccuccuccccuccuugcaccgagauuaauaaaaaaaaaaaaaaaaaaaaaaaaaaaaaaaaaaaaaaaaaaaaaaaaaaaaaaaaaaaaaaaaugcaucccccccccccccccccccccccccccccccaaaggcucuuuucagagccaccagaauu

SEQ ID NO: 10955 - RNA, 1927 nt, Artificial Sequence
  mRNA product Design i-3 comprising derived and/or modified sequence from LASV(G502-SLE-2009;Clade IV)__AIT17127__NP (opt1)
gggagaaagcuuaccaugagcgccuccaaggagaucaagagcuuccuguggacccagucccuccgccgggagcugagcggcuacugcuccaacaucaagcuccagguggucaaggacgcccaggcgcugcugcacgggcuggacuucagcgagguguccaacgugcagcgccucaugcggaaggagcgccgggacgacaacgaccugaagcgccugcgggaccucaaccaggccgucaacaaccugguggagcucaagagcacccagcagaaguccauccugcgcgugggcacccugaccagcgacgaccugcucauccuggccgccgaccuggagaagcucaaguccaaggucauccggaccgagcgcccccugagcgccgggguguacaugggcaaccuguccagccagcagcucgaccagcggcgcgcgcugcuguccaugaucgggaugagcggcggcaaccagggggugcgggccggcaaggacggggucgugcgcgugugggacgucaagaacgccgagcuccugaacaaccaguucggcaccaugccgucccugacgcucgccugccugaccaagcagggccagguggaccugaacgacgcggugcaggcccucaccgaccuggggcugaucuacaccgccaaguaccccaacacgagcgaccucgaccggcugacccagucccaccccauccugaacaugaucgacaccaagaaguccagccucaacaucuccggcuacaacuucagccugggggccgccgucaaggcgggcgccugcaugcuggacgggggcaacaugcucgagaccaucaaggugagcccccagacgauggacggcauccucaagagcauccugaaggugaagaaggcccuggggauguucaucuccgacaccccgggcgagcgcaaccccuacgagaacauccuguacaagaucugccugagcggggacggcuggcccuacaucgccucccggaccagcaucaccgggcgcgccugggagaacacggucguggaccucgaguccgacggcaagccccagaaggcgggcagcaacaacuccaacaagagccugcaguccgccggguucaccgccggccugaccuacagccagcucaugacccugaaggacgccaugcugcagcuggacccgaacacgaagaccuggauggacaucgaggggcggcccgaggaccccguggagaucgcccucuaccagcccuccagcggcugcuacauccacuucuuccgcgagccgaccgaccugaagcaguucaagcaggacgcgaaguacucccacgggaucgacgucaccgaccuguucgccgcccagcccggccucacgagcgccgugaucgacgcccugccccggaacauggugaucacgugccagggcuccgacgacauccgcaagcugcucgagagccaggggcgcaaggacaucaagcugaucgacaucgcgcugaacaagaccgacagccggaaguacgagaacgccgucugggaccaguacaaggaccucugccacaugcacaccggcguggucguggagaagaagaagcgcgggggcaaggaggagaucaccccgcacugcgcccugauggacugcaucauguucgacgccgcgguguccgggggccugaacaccagcguccuccgggccgugcugccccgcgacaugguguuccggaccuccacgccccgcgucgugcugugaggacuaguuauaagacugacuagcccgaugggccucccaacgggcccuccuccccuccuugcaccgagauuaauaaaaaaaaaaaaaaaaaaaaaaaaaaaaaaaaaaaaaaaaaaaaaaaaaaaaaaaaaaaaaaaaugcaucccccccccccccccccccccccccccccccaaaggcucuuuucagagccaccagaauu

SEQ ID NO: 10956 - RNA, 1927 nt, Artificial Sequence
  mRNA product Design i-3 comprising derived and/or modified sequence from LASV(G733-SLE-2010;Clade IV)__AIT17155__NP (opt1)
gggagaaagcuuaccaugagcgccuccaaggagaucaagagcuuccuguggacccagucccuccgccgggagcugagcggcuacugcuccaacaucaagcuccagguggucaaggacgcccaggcgcugcugcacgggcuggacuucagcgagguguccaacgugcagcgccucaugcggaaggagcgccgggacgacaacgaccugaagcgccugcgggaccucaaccaggccgucaacaaccugguggagcucaagagcacccagcagaaguccgugcugcgcgucggcacccugaccagcgacgagcugcucgugcuggccgccgaccuggagaagcucaaguccaaggugauccggaccgagcgcccccugagcgccggggucuacaugggcaaccuguccagccagcagcucgaccagcggcgcgcgcugcuguccaugaucgggaugagcggcggcaaccagggggcccggaccggccgcgacgggguggugcgggucugggacgugaagaacgccgagcuccugaacaaccaguucggcaccaugccgucccugacccucgccugccugaccaagcagggccagguggaccugaacgacgcgguccaggcccucaccgaccuggggcugaucuacacggccaaguaccccaacaccagcgaccucgaccgccugacccagucccaccccauccugaacaugaucgacaccaagaaguccagccucaacaucuccggcuacaacuucagccugggggccgccgugaaggcgggcgccugcaugcuggacgggggcaacaugcucgagacgaucaaggugagcccccagaccauggacggcauccucaagagcauccugaaggucaagaaggcccuggggauguucaucuccgacaccccgggcgagcggaaccccuacgagaacauccuguacaagaucugccugagcggggacggcuggcccuacaucgccucccgcaccagcaucacggggcgggccugggagaacaccgugguggaccucgaguccgacggcaagccccagaaggcgggcagcaacaacuccaacaagagccugcaguccgccggguucaccgccggccugaccuacagccagcucaugacgcugaaggacgccaugcugcagcuggacccgaacgccaagaccuggauggacaucgaggggcgccccgaggaccccgucgagaucgcgcucuaccagcccuccagcggcugcuacauccacuucuuccgggagccgaccgaccugaagcaguucaagcaggacgccaaguacucccacgggaucgacgugaccgaccuguucgccgcccagcccggccucacgagcgccgugaucgacgcgcugccccgcaacauggucaucacgugccagggcuccgacgacauccgcaagcugcucgagagccaggggcggaaggacaucaagcugaucgacaucgcccugagcaagaucgacucccgcaaguacgagaacgccgugugggaccaguacaaggaccucugccacaugcacaccggcgucgugguggagaagaagaagcgcgggggcaaggaggagaucacgccccacugcgcccugauggacugcaucauguucgacgcggccgucagcgggggccugaacucccucgugcugcgggccgugcugccgcgggacauggucuuccgcaccagcacgccccggguggugcucugaggacuaguuauaagacugacuagcccgaugggccucccaacgggcccuccuccccuccuugcaccgagauuaauaaaaaaaaaaaaaaaaaaaaaaaaaaaaaaaaaaaaaaaaaaaaaaaaaaaaaaaaaaaaaaaaugcaucccccccccccccccccccccccccccccccaaaggcucuuuucagagccaccagaauu

SEQ ID NO: 10957 - RNA, 1927 nt, Artificial Sequence
  mRNA product Design i-3 comprising derived and/or modified sequence from MOPV/LASV reassortant(IGS-1;Clade IV)__AFY05578__NP (opt1)
gggagaaagcuuaccaugagcgccuccaaggagaucaagagcuuccuguggacccagucccuccgccgggagcugagcggcuacugcuccaacaucaagcuccagguggucaaggacgcccaggcgcugcugcacgggcuggacuucagcgagguguccaacgugcagcgccucaugcggaaggagcgccgggacgacaacgaccugaagcgccugcgggaccucaaccaggccgucaacaaccugguggagcucaagagcacccagcagaaguccauccugcgcgugggcacccugaccagcgacgaccugcucauccuggccgccgaccuggagaagcuccgguccaaggucauccgcaccgagcggccccugagcgccgggguguacaugggcaaccuguccagccagcagcucgaccagcgccgggcgcugcugaacaugaucgggauguccggcggcaaccagggggcccgcgccggccgggacggggugguccgcgugugggacgugaagaacgccgagcuccugagcaaccaguucggcaccaugccgucccugacgcucgcgugccugaccaagcaggggcaggucgaccugaacgacgccgugcaggcccucaccgaccugggccugaucuacaccgccaaguaccccaacacgagcgaccucgaccggcugacccagucccaccccauccugaacaugaucgacaccaagaaguccagccucaacaucuccggcuacaacuucagccugggggccgcggugaaggccggcgccugcaugcuggacgggggcaacaugcucgagaccaucaaggucagcccccagacgauggacggcauccucaagagcauccugaaggugaagaaggcccuggggauguucaucuccgacaccccgggcgagcgcaaccccuacgagaacauccuguacaagaucugccugagcggggacggcuggcccuacaucgccucccggaccagcaucaccgggcgcgcgugggagaacacgguggucgaccucgaguccgacggcaagccccagaaggccgacagcaacaacuccagcaagucccugcagagcgccggcuucaccgccgggcugaccuacucccagcucaugacccugaaggacgccaugcugcagcuggacccgaacgcgaagacguggauggacaucgagggccggcccgaggaccccguggagaucgcccucuaccagcccagcuccgggugcuacauccacuucuuccgcgagccgaccgaccugaagcaguucaagcaggacgccaaguacagccacggcaucgacgugaccgaccuguucgccacccagcccgggcucacguccgccgucaucgacgcgcugccccgcaacauggugaucacgugccagggcagcgacgacauccggaagcugcucgagagccagggccgcaaggacaucaagcugaucgacaucgaccuguccaagaccgacagccggaaguacgagaacgccgugugggaccaguacaaggaccucugccacaugcacaccggggucguggucgagaagaagaagcgcggcgggaaggaggagaucaccccgcacugcgcccugauggacugcaucauguucgacgccgcgguguccggcgggcugaacaccagcgugcuccgggccguccugccccgcgacaugguguuccggaccuccacgccccgcgugguccugugaggacuaguuauaagacugacuagcccgaugggccucccaacgggcccuccuccccuccuugcaccgagauuaauaaaaaaaaaaaaaaaaaaaaaaaaaaaaaaaaaaaaaaaaaaaaaaaaaaaaaaaaaaaaaaaaugcaucccccccccccccccccccccccccccccccaaaggcucuuuucagagccaccagaauu

SEQ ID NO: 10958 - RNA, 1927 nt, Artificial Sequence
  mRNA product Design i-3 comprising derived and/or modified sequence from LASV(LM765-SLE-2012;Clade IV)__AIT17815__NP (opt1)
gggagaaagcuuaccaugagcgccuccaaggagaucaagagcuuccuguggacccagucccuccgccgggagcugagcggcuacugcuccaacaucaagcuccagguggucaaggacgcccaggcgcugcugcacgggcuggacuucagcgagguguccaacgugcagcgccucaugcggaaggagcgccgggacgacaacgaccugaagcgccugcgggaccucaaccaggccgucaacaaccugguggagcucaagagcacccagcagaaguccauccugcgcgugggcacccugaccagcgacgaccugcucauccuggccgccgaccuggagaagcucaaguccaaggucacccggaccgagcgcccccugagcgccgggguguacaugggcaaccuguccagccagcagcucgaccagcggcgcgcgcugcuggacaugaucgggauguccggcagcaaccagggcgcccgggccgggcgcgacggcgugguccgggugugggacgugaagaacgccgagcuccugaacaaccaguucgggacgaugccgucccugacccucgcgugccugaccaagcagggccaggucgaccugaacgacgccgugcaggcccucaccgaccuggggcugaucuacacggccaaguaccccaacaccagcgaccucgaccgccugacccagucccaccccauccugaacaugaucgacaccaagaaguccagccucaacaucuccggcuacaacuucagccugggcgccgcggugaaggccggggccugcaugcuggacggcgggaacaugcucgagacgaucaaggucagcccccagaccauggacggcauccucaagagcauccugaaggugaagaaggcccugggcauguucaucuccgacgccccgggggagcggaaccccuacgagaacauccuguacaagaucugccugagcggcgacggguggcccuacaucgcgucccgcaccagcaucaccggccgggccugggagaacacgguggucgaccucgaguccgacgggaagccccagaaggccggcagcaacggcuccaacaagagccugcaguccgccggguucaccgccggccugaccuacagccagcucaugacccugaaggacgcgaugcugcagcuggacccgaacgccaagacguggauggacaucgaggggcgccccgaggaccccguggagaucgcccucuaccagcccuccagcggcugcuacauccacuucuuccgggagccgaccgaccugaagcaguucaagcaggacgccaaguacucccacgggaucgacgugaccgaccuguucgccgcgcagcccggccucaccagcgccgucaucgacgcccugccccgcaacauggugaucacgugccagggcuccgacgacauccgcaagcuguucgagagccaggggcggaaggacaucaagcucaucgacaucgcccugagcaagaccgacucccgcaaguacgagaacgcggugugggaccaguacaaggaccugugccacaugcacaccggcaucgucguggagaagaagaagcgcgggggcaaggaggagaucacgccccacugcgcccucauggacugcaucauguucgacgccgccgucagcgggggccugaacaccuccgugcugcgggccgugcucccgcgggacauggucuuccgcaccagcacgccccggguggugcugugaggacuaguuauaagacugacuagcccgaugggccucccaacgggcccuccuccccuccuugcaccgagauuaauaaaaaaaaaaaaaaaaaaaaaaaaaaaaaaaaaaaaaaaaaaaaaaaaaaaaaaaaaaaaaaaaugcaucccccccccccccccccccccccccccccccaaaggcucuuuucagagccaccagaauu

SEQ ID NO: 10959 - RNA, 1927 nt, Artificial Sequence
  mRNA product Design i-3 comprising derived and/or modified sequence from LASV(LM776-SLE-2012;Clade IV)__AIT17825__NP (opt1)
gggagaaagcuuaccaugagcgccuccaaggagaucaagagcuuccuguggacccagucccuccgccgggagcugagcuccuacugcagcaacaucaagcuccagguggucaaggacgcccaggcgcugcugcacggccuggacuucuccgaggugagcaacgugcagcgccucaugcggaaggagcgccgggacgacaacgaccugaagcgccugcgggaccucaaccaggccgucaacaaccugguggagcugaaguccacccagcagaaguccauccuccgcguggggacccugaccuccgacgaccugcucauccuggccgccgaccuggagaagcucaagagcaaggucacccggaccgagcgcccccuguccgccggcguguacauggggaaccugagcucccagcagcucgaccagcggcgcgcgcugcugagcaugaucggcauguccgggagcaaccagggcgcccgggccggccgcgacggggugguccgggugugggacgugaagaacgccgagcuccugaacaaccaguucggcacgaugccgucccugacccucgcgugccugaccaagcaggggcaggucgaccugaacgacgccgugcaggcccucaccgaccugggccugaucuacacggccaaguaccccaacaccagcgaccucgaccgccugacccagagccaccccauccugaacaugaucgacaccaagaaguccagccucaacaucuccggguacaacuucagccugggcgccgcggugaaggccggcgccugcaugcuggacgggggcaacaugcucgagacgaucaaggucagcccccagaccauggacgggauccucaagagcauccugaaggugaagaaggcccugggcauguucaucuccgacaccccgggcgagcggaaccccuacgagaacauccuguacaagaucugccugagcggggacggcuggcccuacaucgccucccgcaccagcaucacggggcgggcgugggagaacaccguggucgaccucgaguccgacggcaagccccagaaggccgggagcaacaacuccaacaagagccugcaguccgccggcuucaccgccggccugaccuacagccagcucaugacgcugaaggacgccaugcugcagcuggacccgaacgcgaagaccuggauggacaucgaggggcgccccgaggaccccguggagguggcccucuaccagcccuccagcggcugcuacauccacuucuuccgggagccgaccgaccugaagcaguucaagcaggacgccaaguacucccacgggaucgacgucaccgaccuguucgccgcccagcccggccucacgagcgcggugaucgacgcccugccccgcaacauggugaucacgugccaggggagcgacgacauccgcaagcugcucgagucccagggccggaaggacaucaagcugaucgacaucgcccugagcaagaccgacucccgcaaguacgagaacgccgucugggaccaguacaaggaccucugccacaugcacaccggcguggucguggagaagaagaagcgcgggggcaaggaggagaucaccccgcacugcgcgcugauggacugcaucauguucgacgccgccgugagcgggggccugaacaccuccguccuccgggccgugcugccccgggacaugguguuccgcaccagcacgccccgggucgugcugugaggacuaguuauaagacugacuagcccgaugggccucccaacgggcccuccuccccuccuugcaccgagauuaauaaaaaaaaaaaaaaaaaaaaaaaaaaaaaaaaaaaaaaaaaaaaaaaaaaaaaaaaaaaaaaaaugcaucccccccccccccccccccccccccccccccaaaggcucuuuucagagccaccagaauu

SEQ ID NO: 10960 - RNA, 1927 nt, Artificial Sequence
  mRNA product Design i-3 comprising derived and/or modified sequence from LASV(Mad39;Clade IV)__ANH09723__NP (opt1)
gggagaaagcuuaccaugagcgccuccaaggagaucaagagcuuccuguggacccagucccuccgccgggagcugagcggcuacugcuccaacaucaagcuccagguggucaaggacgcccaggcgcugcugcacgggcuggacuucagcgagguguccaacgugcagcgccucaugcggaagcagcgccgggacgacaacgaccugaagcgccugcgggaccucaaccaggccgucaacaaccugguggagcugaaguccacccagcagaaguccgugcuccgcgucggcacgcugaccagcgacgaccugcucacccuggccgccgaccuggagaagcucaaguccaaggugacccggacggagcgcccccugaccgccgggguguacaugggcaaccugagcucccagcagcucgaccagcggcgcgcgcugcugaacaugaucgggaugagcggcggcaaccagggggcccggaccggccgcgacggggucgugcgggugugggacgucaagaacgccgagcuccugaacaaccaguucggcaccaugccgucccugacgcucgccugccugaccaagcagggccagguggaccugaacgacgugguccaggcgcucaccgaccuggggcugaucuacaccgccaaguaccccaacacgagcgaccucgaccgccugacccagucccaccccauccugaacaugaucgacaccaacaagagcucccucaacaucagcggcuacaacuucagccugggggccgccgugaaggccggcgcgugcaugcuggacgggggcaacaugcucgagaccaucaaggugagcccccagacgauggacggcauccucaagagcauccugaaggucaagaagucccuggggauguucaucagcgacaccccgggcgagcggaaccccuacgagaacauccuguacaagaucugccuguccggggacggcuggcccuacaucgccagccgcaccuccaucaccgggcgggccugggagaacacggugguggaccucgagagcggcggcaagccccagaaggccggguccaacaacagcaacaagucccugcagagcgccggcuucgcggccgggcugaccuacucccagcucaugacccugaaggacgccaugcugcagcuggacccgaacgccaagaccuggauggacaucgagggccgccccgaggaccccgucgagaucgcccucuaccagcccaucagcgggugcuacauccacuucuuccgggagccgacggaccugaagcaguucaagcaggacgcgaaguacucccacggcaucgacgugaccgaccuguucgccgcccagcccggccucaccagcgccgugaucgaggcccugccccgcaacauggucaucacgugccagggguccgacgacauccgcaagcuguucgagagccagggccggaaggacaucaagcucaucgacaucgcgcuguccaagaccgacagccgcaaguacgagaacgccgugugggaccaguacaaggaccugugccacaugcacaccggggucgugguggagaagaagaagaagggcgggaaggaggagaucacgccccacugcgcccucauggacugcaucauguucgacgccgcggucagcggcggccugaacacccuggugcuccgggccgugcugccgcgcgacauggucuuccggaccuccacccccaagguggugcugugaggacuaguuauaagacugacuagcccgaugggccucccaacgggcccuccuccccuccuugcaccgagauuaauaaaaaaaaaaaaaaaaaaaaaaaaaaaaaaaaaaaaaaaaaaaaaaaaaaaaaaaaaaaaaaaaugcaucccccccccccccccccccccccccccccccaaaggcucuuuucagagccaccagaauu

SEQ ID NO: 10961 - RNA, 1927 nt, Artificial Sequence
  mRNA product Design i-3 comprising derived and/or modified sequence from LASV(Z0947-SLE-2011;Clade IV)__AIT17841__NP (opt1)
gggagaaagcuuaccaugagcgccuccaaggagaucaagagcuuccuguggacccagucccuccgccgggagcugagcggcuacugcuccaacaucaagcuccagguggucaaggacgcccaggcgcugcugcacgggcuggacuucagcgagguguccaacgugcagcgccucaugcggaaggagcgccgggacgacaacgaccugaagcgccugcgggaccucaaccaggccgucaacaaccugguggagcucaagagcacccagcagaaguccauccugcgcgugggcacccugaccagcgacgaccugcucauccuggccgccgaccuggagaagcucaaguccaaggucacccggaccgagcgcccccugagcgccgggguguacaugggcaaccuguccagccagcagcucgaccagcggcgcgcgcugcugaacaugaucgggauguccggcagcaaccagggcgcccggacggggcgcgacggcgugguccgggugugggacgugaagaacgccgagcuccugaacaaccaguucgggaccaugccgucccugacccucgccugccugaccaagcagggccaggucgaccugaacgacgcggugcaggcccucacggaccuggggcugaucuacaccgccaaguaccccaacaccagcgaccucgaccgccugacccagucccaccccauccugaacaugaucgacacgaagaaguccagccucaacaucuccggcuacaacuucagccugggcgccgccgugaaggcgggggccugcaugcuggacggcgggaacaugcucgagaccaucaaggucagcccccagaccauggacggcauccucaagagcauccugaaggugaagaaggcccugggcauguucaucuccgacgccccgggggagcggaaccccuacgagaacauccuguacaagaucugccugagcggcgacggguggcccuacaucgccucccgcaccagcaucacgggccgggcgugggagaacaccguggucgaccucgaguccgacgggaagccccagaaggccggcagcaacggcuccaacaagagccugcaguccgccggguucaccgccggccugaccuacagccagcucaugacgcugaaggacgccaugcugcagcuggacccgaacgcgaagaccuggauggacaucgaggggcgccccgaggaccccguggagaucgcccucuaccagcccuccagcggcugcuacauccacuucuuccgggagccgaccgaccugaagcaguucaagcaggacgccaaguacucccacgggaucgacgugaccgaccuguucgccgcccagcccggccucacgagcgcggucaucgacgcccugccccgcaacauggugaucacgugccagggcuccgacgacauccgcaagcuguucgagagccaggggcggaaggacaucaagcucaucgacaucgcccugagcaagaccgacucccgcaaguacgagaacgccgugugggaccaguacaaggaccugugccacaugcacaccggcaucgucguggagaagaagaagcgcgggggcaaggaggagaucaccccgcacugcgcgcucauggacugcaucauguucgacgccgccgucagcgggggccugaacaccuccgugcugcgggccgugcucccccgggacauggucuuccgcaccagcacgccccggguggugcugugaggacuaguuauaagacugacuagcccgaugggccucccaacgggcccuccuccccuccuugcaccgagauuaauaaaaaaaaaaaaaaaaaaaaaaaaaaaaaaaaaaaaaaaaaaaaaaaaaaaaaaaaaaaaaaaaugcaucccccccccccccccccccccccccccccccaaaggcucuuuucagagccaccagaauu

SEQ ID NO: 10962 - RNA, 1927 nt, Artificial Sequence
  mRNA product Design i-3 comprising derived and/or modified sequence from LASV(Josiah;Clade IV)__NP_694869__NP (opt2)
gggagaaagcuuaccauguccgccuccaaggagaucaaguccuuccucuggacccagucccuccgccgcgagcucuccggcuacugcuccaacaucaagcuccaggucgucaaggacgcccaggcccuccuccacggccucgacuucuccgaggucuccaacguccagcgccucaugcgcaaggagcgccgcgacgacaacgaccucaagcgccuccgcgaccucaaccaggccgucaacaaccucgucgagcucaaguccacccagcagaaguccauccuccgcgucggcacccucaccuccgacgaccuccucauccucgccgccgaccucgagaagcucaaguccaaggucauccgcaccgagcgcccccucuccgccggcgucuacaugggcaaccucuccucccagcagcucgaccagcgccgcgcccuccucaacaugaucggcauguccggcggcaaccagggcgcccgcgccggccgcgacggcgucguccgcgucugggacgucaagaacgccgagcuccucaacaaccaguucggcaccaugcccucccucacccucgccugccucaccaagcagggccaggucgaccucaacgacgccguccaggcccucaccgaccucggccucaucuacaccgccaaguaccccaacaccuccgaccucgaccgccucacccagucccaccccauccucaacaugaucgacaccaagaaguccucccucaacaucuccggcuacaacuucucccucggcgccgccgucaaggccggcgccugcaugcucgacggcggcaacaugcucgagaccaucaaggucuccccccagaccauggacggcauccucaaguccauccucaaggucaagaaggcccucggcauguucaucuccgacacccccggcgagcgcaaccccuacgagaacauccucuacaagaucugccucuccggcgacggcuggcccuacaucgccucccgcaccuccaucaccggccgcgccugggagaacaccgucgucgaccucgaguccgacggcaagccccagaaggccgacuccaacaacuccuccaagucccuccaguccgccggcuucaccgccggccucaccuacucccagcucaugacccucaaggacgccaugcuccagcucgaccccaacgccaagaccuggauggacaucgagggccgccccgaggaccccgucgagaucgcccucuaccagcccuccuccggcugcuacauccacuucuuccgcgagcccaccgaccucaagcaguucaagcaggacgccaaguacucccacggcaucgacgucaccgaccucuucgccacccagcccggccucaccuccgccgucaucgacgcccucccccgcaacauggucaucaccugccagggcuccgacgacauccgcaagcuccucgagucccagggccgcaaggacaucaagcucaucgacaucgcccucuccaagaccgacucccgcaaguacgagaacgccgucugggaccaguacaaggaccucugccacaugcacaccggcgucgucgucgagaagaagaagcgcggcggcaaggaggagaucaccccccacugcgcccucauggacugcaucauguucgacgccgccgucuccggcggccucaacaccuccguccuccgcgccguccucccccgcgacauggucuuccgcaccuccaccccccgcgucguccucugaggacuaguuauaagacugacuagcccgaugggccucccaacgggcccuccuccccuccuugcaccgagauuaauaaaaaaaaaaaaaaaaaaaaaaaaaaaaaaaaaaaaaaaaaaaaaaaaaaaaaaaaaaaaaaaaugcaucccccccccccccccccccccccccccccccaaaggcucuuuucagagccaccagaauu

SEQ ID NO: 10963 - RNA, 1927 nt, Artificial Sequence
  mRNA product Design i-3 comprising derived and/or modified sequence from LASV(LP;Clade I)__AAF86702__NP (opt2)
gggagaaagcuuaccauguccaacuccaaggagaucaaguccuuccucuggacccagucccuccgccgcgagcucuccggcuacugcuccaacaucaagcuccaggucgucaaggacgcccaggcccuccuccacggccucgacuucuccgaggucuccaacguccagcgccucaugcgcaagcagaagcgcgacgacgccgaccucaagcgccuccgcgaccucaaccaggccgucaacaaccucgucgagcucaaguccacccagcagaagaacguccuccgcgucggcacccucuccuccgacgaccucaucacccucgccgccgaccucgagaagcucaaguccaaggucauccgcaccgagcgcccccucuccuccggcgucuacaugggcaaccucuccucccagcagcucgaccagcgccgcgcccuccucuccaugaucggcauguccggcggcccccagggcaaccgcaccggcggcgacggcgucguccgcgucugggacgucaagaacgccgagcuccucaacaaccaguucggcaccaugcccucccucacccucgccugccucaccaagcagggccaggucgaccucaacgacgccguccaggcccucaccgaccucggccucaucuacaccgccaaguaccccaacuccuccgaccucgacaugcucacccagucccaccccauccucggcauggucgacaccaagaaguccucccucaacaucuccggcuacaacuucucccucggcgccgccgucaaggccggcgccugcaugcucgacggcggcaacaugcucgagaccaucaaggucuccccccagaccauggacggcauccucaaguccauccucaaggucaagcgcucccucggcauguucaucuccgacacccccggcgagcgcaaccccuacgagaacauccucuacaagaucugccucuccggcgagggcuggcccuacaucgccucccgcaccuccaucaccggccgcgccugggagaacacccucgucgaccucgaguccgacaacaagccccccaagcucaacuccgccggcuccaacaagucccuccaggccgccggccucaacgccggccucaccuacucccagcucaugacccucaaggacugcaugcuccagcucgaccccuccuccaagaccuggaucgacaucgagggccgccccgaggaccccgucgagaucgcccucuuccagcccuccuccggcugcuacauccacuucuuccgcgagcccaccgaccucaagcaguucaagcaggacgccaaguacucccacggcaucgacgucaccgaccucuucuccacccagcccggccucaccuccgccgucaucgaggcccucccccgcaacaugguccucaccugccagggcuccgacgacaucaagaagcuccucgagucccagggccgccgcgacaucaagcucaucgacaucucccucuccaaggccgacucccgcaaguucgagaacgccgucugggaccaguacaaggaccucugccacaugcacaccggcgucgucgucgagaagaagaagcgcggcggcaaggaggagaucaccccccacugcgcccuccucgacugcaucauguucgacgccgccaccaccggcucccucaacaucaccacccuccgcgccguccucccccgcgacauggucuuccgcaccuccacccccaaggucguccucugaggacuaguuauaagacugacuagcccgaugggccucccaacgggcccuccuccccuccuugcaccgagauuaauaaaaaaaaaaaaaaaaaaaaaaaaaaaaaaaaaaaaaaaaaaaaaaaaaaaaaaaaaaaaaaaaugcaucccccccccccccccccccccccccccccccaaaggcucuuuucagagccaccagaauu

SEQ ID NO: 10964 - RNA, 1927 nt, Artificial Sequence
  mRNA product Design i-3 comprising derived and/or modified sequence from LASV(803213;Clade II)__AAF86704__NP (opt2)
gggagaaagcuuaccauguccgccuccaaggaggucaaguccuuccucuggacccagucccuccgccgcgagcucuccggcuacugcuccaacaucaagcuccaggucgucaaggacgcccaggcccuccuccacggccucgacuucuccgaggucaacaacguccagcgccucaugcgcaagcagaagcgcgacgacggcgaccucaagcgccuccgcgaccucaaccaggccgucaacaaccucgucgagcucaaguccacccagcagaaguccauccuccgcgucggcacccucaccuccgacgaccuccucacccucgccgccgaccucgagaagcucaaguccaaggucauccgcaccgagcgcccccucuccuccggcgucuacaugggcaaccucuccacccagcagcucgagcagcgccgcgcccuccucaacaugaucggcauggucggcggcgcccagggcacccagcccggccgcgacggcgucguccgcgucugggacgucaagaaccccgaccuccucaacaaccaguucggcaccaugcccucccucacccucgccugccucaccaagcagggccaggucgaccucaacgacgccguccucgcccucaccgaccucggccucaucuacaccgccaaguaccccaacuccuccgaccucgaccgccucucccagucccaccccauccucaacauggucgacaccaagaaguccucccucaacaucuccggcuacaacuucucccucggcgccgccgucaaggccggcgccugcaugcucgacggcggcaacaugcucgagaccaucaaggucaccccccagaccauggacggcauccucaaguccauccucaaggucaagcgcucccucggcauguucgucuccgacacccccggcgagcgcaaccccuacgagaacauccucuacaagaucugccucuccggcgacggcuggcccuacaucgccucccgcaccuccaucgucggccgcgccugggagaacaccaccgucgaccucgaguccgacggcaagccccagaaggucggcaccgccggcuccaacaagucccuccaguccgccggcuuccccaccggccucaccuacucccagcucaugacccucaaggacuccaugaugcagcucgaccccuccgccaagaccuggaucgacaucgagggccgccccgaggaccccgucgagaucgcccucuaccagcccauguccggcugcuacauccacuucuuccgcgagcccaccgaccucaagcaguucaagcaggacgccaaguacucccacggcaucgacgucgccgaccucuuccccgcccagcccggccucaccuccgccgucaucgaggcccucccccgcaacaugguccucaccugccagggcuccgacgacaucaagaagcuccucgacucccagggccgccgcgacaucaagcucaucgacaucucccucuccaaggucgacucccgcaaguucgagaacgccgucugggaccagugcaaggaccucugccacaugcacaccggcgucgucgucgagaagaagaagcgcggcggcaaggaggagaucaccccccacugcgcccucauggacugcaucauguucgacgccgccgucuccggcggccucaacauccccguccuccgcgccguccucccccgcgacauggucuuccgcaccuccucccccaaggucguccucugaggacuaguuauaagacugacuagcccgaugggccucccaacgggcccuccuccccuccuugcaccgagauuaauaaaaaaaaaaaaaaaaaaaaaaaaaaaaaaaaaaaaaaaaaaaaaaaaaaaaaaaaaaaaaaaaugcaucccccccccccccccccccccccccccccccaaaggcucuuuucagagccaccagaauu

SEQ ID NO: 10965 - RNA, 1930 nt, Artificial Sequence
  mRNA product Design i-3 comprising derived and/or modified sequence from LASV(GA391;Clade III)__CAA36646__NP (opt2)
gggagaaagcuuaccauguccgccuccaaggagguccgcuccuuccucuggacccagucccuccgccgcgagcucuccggcuacugcuccaacaucaagcuccaggucgucaaggacgcccaggcccuccuccacggccucgacuucuccgaggucuccaacguccagcgccucaugcgcaagcagaagcgcgacgacggcgaccucaagcgccuccgcgaccucaaccaggccgucaacaaccucgucgagcucaaguccacccagcagaaguccguccuccgcgucggcacccucuccuccgacgaccuccucauccucgccgccgaccucgagaagcucaaguccaaggucacccgcaccgagcgcccccucuccuccggcgucuacaugggcaaccucuccucccagcagcucgaccagcgccgcgcccuccucaacaugaucggcaugaccggcgucuccggcggcggcaagggcgccuccgacggcaucguccgcgucugggacgucaagaacgccgagcuccucaacaaccaguucggcaccaugcccucccucacccucgccugccucaccaagcagggccaggucgaccucaacgacgccguccaggcccucaccgaccucggccucaucuacaccgccaaguaccccaacuccuccgaccucgaccgccucucccagucccaccccauccucaacaugaucgacaccaagaaguccucccucaacaucuccggcuacaacuucucccucggcgccgccgucaaggccggcgccugcaugcucgacggcggcaacaugcucgagaccaucaaggucuccccccagaccauggacggcauccucaaguccauccucaaggucaagaagucccucggcauguucgucuccgacacccccggcgagcgcaaccccuacgagaacauccucuacaagaucugccucuccggcgacggcuggcccuacaucgccucccgcaccuccaucgucggccgcgccugggagaacaccgucgucgaccucgagcaggacaacaagccccagaagaucggcaacggcggcuccaacaagucccuccaguccgccggcuucgccgccggccucaccuacucccagcucaugacccucaaggacuucaagugcuucaaccucauccccaacgccaagaccuggauggacaucgagggccgccccgaggaccccgucgagaucgcccucuaccagcccuccuccggcugcuacguccacuucuuccgcgagcccaccgaccucaagcaguucaagcaggacgccaaguacucccacggcaucgacgucaccgaccucuucgccgcccagcccggccucaccuccgccgucaucgaggcccucccccgcaacauggucaucaccugccagggcuccgaggacauccgcaagcuccucgagucccagggccgccgcgacaucaagcucaucgacaucacccucuccaaggccgacucccgcaaguucgagaacgccgucugggaccaguucaaggaccucugccacaugcacaccggcgucgucgucgagaagaagaagcgcggcggcaaggaggagaucaccccccacugcgcccucauggacugcaucauguucgacgccgccgucuccggcggccucgacgccaagguccuccgcgucguccucccccgcgacauggucuuccgcaccuccacccccaaggucguccucugaggacuaguuauaagacugacuagcccgaugggccucccaacgggcccuccuccccuccuugcaccgagauuaauaaaaaaaaaaaaaaaaaaaaaaaaaaaaaaaaaaaaaaaaaaaaaaaaaaaaaaaaaaaaaaaaugcaucccccccccccccccccccccccccccccccaaaggcucuuuucagagccaccagaauu

SEQ ID NO: 10966 - RNA, 1927 nt, Artificial Sequence
  mRNA product Design i-3 comprising derived and/or modified sequence from LASV(AV;Clade V)__CCA30315__NP (opt2)
gggagaaagcuuaccauguccgccuccaaggaggucaaguccuuccucuggacccagucccuccgccgcgagcucuccggcuacugcuccaacaucaagcuccaggucgucaaggacgcccaggcccuccuccacggccucgacuucuccgaggucuccaacguccagcgccucaugcgcaagcagcgccgcgacgacuccgaccucaagcgccuccgcgaccucaaccaggccgucaacaaccucgucgagcucaaguccacccagcagaaguccguccuccgcgucggcacccucuccuccgacgaccuccucacccucgccgccgaccucgagaagcucaaguccaaggucacccgcaccgagcgcccccucuccuccggcgucuacaugggcaaccucuccucccagcagcucgaccagcgccgcgcccuccucaaccucaucggcaugaccaacggcucccagggcucccaggccggccgcgacggcgucguccgcgucugggacgucaagaacgccgagcuccucaacaaccaguucggcaccaugcccucccucacccucgccugccucaccaagcagggccaggucgaccucaacgacgucguccaggcccucaccgaccucggccucaucuacaccgccaaguaccccaacaccuccgaccucgaccgccucacccagucccaccccauccucaacaugaucgacaccaagaaguccucccucaacaucuccggcuacaacuucucccucggcgccgccgucaaggccggcgccugcaugcucgacggcggcaacaugcucgagaccaucaaggucuccccccaguccauggacggcauccucaaguccauccucaaggucaagcgcgcccucggcauguucgucuccgacacccccggcgagcgcaaccccuacgagaacauccucuacaagaucugccucuccggcgacggcuggcccuacaucgccucccgcaccuccaucgucggccgcgccugggagaacaccgucgucgaccucgagaccgacggcaagccccagaagaucggcuccggcaacuccaacaagucccuccaguccgccggcuucuccgccggccucaccuacucccagcucaugacccucaaggacgccaugcuccagcucgaccccaacgccaagaccuggauggacaucgagggccgccccgaggaccccgucgaggucgcccucuaccagcccaucuccggcugcuacauccacuucuuccgcgagcccaccgaccucaagcaguucaagcaggacgccaaguacucccacggcaucgacaucgccgaccucuucgccgcccagcccggccucaccuccgccgucaucgaggcccucccccgcaacauggucaucaccugccagggcuccgaggacaucaagaagcuccucgagucccagggccgcaaggacaucaagcucaucgacaucgcccucuccaagaucgacucccgcaaguucgagaacgccgucugggaccaguacaaggaccucugccacaugcacaccggcgucgucgucgagaagaagaagcgcggcggcaaggaggagaucaccccccacugcgcccucauggacugcaucauguucgacgccgccgucuccggcggccucaacacccucguccuccgcgccguccucccccgcgacauggucuuccgcaccuccaccccccgcgucguccucugaggacuaguuauaagacugacuagcccgaugggccucccaacgggcccuccuccccuccuugcaccgagauuaauaaaaaaaaaaaaaaaaaaaaaaaaaaaaaaaaaaaaaaaaaaaaaaaaaaaaaaaaaaaaaaaaugcaucccccccccccccccccccccccccccccccaaaggcucuuuucagagccaccagaauu

SEQ ID NO: 10967 - RNA, 1927 nt, Artificial Sequence
  mRNA product Design i-3 comprising derived and/or modified sequence from LASV(Togo/2016/7082;Clade VI)__AMR44578__NP (opt2)
gggagaaagcuuaccauguccaacuccaaggaggucaaguccuuccucuggacccagucccuccgccgcgagcucuccggcuacugcuccaacaucaagcuccaggucgucaaggacgcccaggcccuccuccacggccucgacuucuccgaggucuccaacguccagcgccucaugcgcaagcagaagcgcgacgacggcgaccucaagcgccuccgcgaccucaaccaggccgucaacaaccucgucgagcucaaguccguccagcagaaguccauccuccgcgucggcacccucaccuccgacgaccuccucacccucgccgccgaccucgagaagcucaaguccaaggucacccgcaccgagcgcccccucuccuccggcgucuacaugggcaaccucuccucccagcagcucgaccagcgccgcgcccuccucuccaugaucggcauguccggcggcaaccagaacucccagcccaagggcgacggcgucguccgcgucugggacgucaagaacgccgaccuccucaacaaccaguucggcaccaugcccucccucacccucgccugccucaccaagcagggccaggucgaccucaacgacgccguccaggcccucaccgaccucggccucaucuacaccgccaaguaccccaacuccuccgaccucgaccgccucucccagucccaccccauccucaacaugaucgacaccaagaaguccucccucaacaucuccggcuacaacuucucccucggcgccgccaucaagaccggcgccugcaugcucgacggcggcaacaugcucgagaccaucaaggucaccccccagaccauggacggcauccucaaguccauccucaaggucaagcgcucccucggcauguucaucuccgacacccccggcgagcgcaaccccuacgagaacauccucuacaagaucugccucuccggcgacggcuggcccuacaucgccucccgcaccgccaucaucggccgcgccugggagaacaccgucgucgaccucgaguccgacuccaagccccagaagaucggcuccaacggcuccaacaagucccuccaguccgccggcuucgcccccggccucaccuacucccagcucaugacccucaaggacuccaugcuccagcucgaccccaacgccaagaccuggaucgacaucgagggccgccccgaggaccccgucgaggucgcccucuuccagcccaucuccggcugcuacauccacuucuuccgcgagcccaccgaccucaagcaguucaagcaggacgccaaguacucccacggcaucgacgucaccgaccucuucgccgcccagcccggccucaccuccgccgucaucgaggcccucccccgcaacaugguccucaccugccagggcuccgacgacaucaagaagcuccucgacucccagggccgccgcgacaucaagcucaucgacgucucccucaacaagaucgacucccgcaaguucgagaacgccgucugggaccaguacaaggaccucugccacaugcacaccggcgucgucgucgagaagaagaagaagggcggcaaggaggagaucaccccccacugcgcccuccucgacugcaucauguucgacgccgccgucuccggcggccucaacgccaccguccuccgcgccguccucccccgcgacauggucuuccgcaccuccucccccaaggucguccucugaggacuaguuauaagacugacuagcccgaugggccucccaacgggcccuccuccccuccuugcaccgagauuaauaaaaaaaaaaaaaaaaaaaaaaaaaaaaaaaaaaaaaaaaaaaaaaaaaaaaaaaaaaaaaaaaugcaucccccccccccccccccccccccccccccccaaaggcucuuuucagagccaccagaauu

SEQ ID NO: 10968 - RNA, 1927 nt, Artificial Sequence
  mRNA product Design i-3 comprising derived and/or modified sequence from LASV(KAK-428;Clade n.d. (VII))__ANH09741__NP (opt2)
gggagaaagcuuaccauguccaacuccaaggaggucaaguccuuccucuggacccagucccuccgccgcgagcucuccggcuacugcaccaacaucaagcuccaggucgucaaggacgcccaggcccuccuccacggccucgacuucuccgaggucuccaacguccagcgccucaugcgcaagcagaagcgcgacgacaacgaccucaagcgccuccgcgaccucaaccaggccgucaacaaccucgucgagcucaaguccguccagcagaaguccguccucaaggucggcacccucaacuccgacgaccuccucacccucgccgccgaccucgagaagcucaaguccaaggucguccgcaccgagcgcccccucuccuccggcgucuacaugggcaaccucuccucccagcagcucgaccagcgccgcgcccuccucaacaugaucggcauggccggcggcucccagggcaaccagcccucccgcgacggcgucguccgcgucugggacgucaagaacgccgaccuccucaacaaccaguucggcaccaugcccucccucacccucgccugccucaccaagcagggccaggucgaccucaacgacgucguccucgcccucaccgaccucggccucaucuacaccgccaaguaccccaacuccuccgaccucgaccgccucucccagaaccaccccguccucaacaugaucgacgucaacaaguccucccucaacaucuccggcuacaacuucucccucggcgccgccgucaaggccggcgccugcaugcucgacggcggcaacaugcucgagaccaucaagaucuccccccagaccgucgacggcauccucaaguccauccucaaggucaagcgcgcccucggcauguucgucuccgacacccccggcgagcgcaaccccuacgagaacauccucuacaaggucugccucuccggcaacggcuggcccuacaucgccucccgcaccuccaucgucggccgcgccugggagaacaccgucgucgaccucgaguccaacaagaaccagcccaaggucggcaacaacggcuccaacaagaugcuccaguccuccggcuucgccaccggccucaccuacucccagcucaugacccuccgcgacuccaugcuccagcucgaccccaccgccaagaccuggaucgacaucgagggccgccccgaggaccccgucgagcucgcccucuuccagcccuccuccggcugcuacauccacuucuuccgcgagcccaccgaccucaagcaguucaagcaggacgccaaguacucccacggcaucgacgucaacgaccucuucuccgcccagcccggccucaccuccgccguccucgaggcccucccccgcaacaugguccucaccugccagggcuccgacgacauccgcaagcuccucgacucccaggaccgcaaggacaucaagcucaucgacaucucccucuccaaggccgacgcccgcaaguucgagaacgacgucugggaccaguucaaggaccucugccacaugcacaccggcaucgucgucgagaagaagaagaagggcggcaagcaggagaugaccccccacugcgcccuccucgacugcaucauguucgacgccgccgucuccggcggccucaacguccccacccuccgcgccguccuccccaccgacauggucuuccgcaccaucaccaccaaggucguccucugaggacuaguuauaagacugacuagcccgaugggccucccaacgggcccuccuccccuccuugcaccgagauuaauaaaaaaaaaaaaaaaaaaaaaaaaaaaaaaaaaaaaaaaaaaaaaaaaaaaaaaaaaaaaaaaaugcaucccccccccccccccccccccccccccccccaaaggcucuuuucagagccaccagaauu

SEQ ID NO: 10969 - RNA, 1927 nt, Artificial Sequence; identical to SEQ ID NO: 10963
  mRNA product Design i-3 comprising derived and/or modified sequence from LASV(Pinneo-NIG-1969;Clade I)__AIT17837__NP (opt2)

SEQ ID NO: 10970 - RNA, 1927 nt, Artificial Sequence
  mRNA product Design i-3 comprising derived and/or modified sequence from LASV(ISTH0009-NIG-2011;Clade II)__AIT17405__NP (opt2)
gggagaaagcuuaccauguccgucuccaaggaggucaaguccuuccucuggacccagucccuccgccgcgagcucuccggcuacugcuccaacaucaagcuccaggucgucaaggacgcccaggcccuccuccacggccucgacuucuccgaggucuccaacguccagcgccucaugcgcaagcagaagcgcgacgacuccgaccucaagcgccuccgcgaccucaaccaggccgucaacaaccucgucgagcucaaguccacccagcagaaguccauccuccgcgucggcacccucaccuccgacgaccuccucacccucgccgccgaccucgagaagcucaaguccaaggucauccgcaccgagcgcccccucuccuccggcgucuacaugggcaaccucuccacccagcagcucgagcagcgccgcgcccuccucaacaugaucggcauggucggcggcgcccagggcacccagcccggccgcgacggcgucguccgcgucugggacgucaagaaccccgaccuccucaacaaccaguucggcaccaugcccucccucacccucgccugccucaccaagcagggccaggucgaccucaacgacgccguccucgcccucaccgaccucggccucaucuacaccgccaaguaccccaacuccuccgaccucgaccgccucucccagucccaccccauccucaacauggucgacaucaagaaguccucccucaacaucuccggcuacaacuucucccucggcgccgccgucaaggccggcgccugcaugcucgacggcggcaacaugcucgagaccaucaaggucaccccccagaccauggacggcauccucaaguccauccucaaggucaagcgcucccucggcauguucgucuccgacacccccggcgagcgcaaccccuacgagaacauccucuacaagaucugccucuccggcgacggcuggcccuacaucgccucccgcaccuccaucgucggccgcgccugggagaacaccaccgucgaccucgaguccgacggcaagccccagaaggucggcuccgccggcuccaacaagucccuccaguccgccggcuuccccaccggccucaccuacucccagcucaugacccucaaggacuccaugaugcagcucgaccccuccgccaagaccuggaucgacaucgagggccgccccgaggaccccgucgagaucgcccucuaccagcccauguccggcugcuacauccacuucuuccgcgagcccaccgaccucaagcaguucaagcaggacgccaaguacucccacggcaucgacgucgccgaccucuuccccgcccagcccggccucaccuccgccgucaucgaggcccucccccgcaacaugguccucaccugccagggcuccgacgacaucaagcgccuccucgacucccagggccgccgcgacaucaagcucaucgacaucgcccucuccaaggccgacucccgccgcuucgagaacgccgucugggaccagugcaaggaccucugccacaugcacaccggcgucgucgucgagaagaagaagcgcggcggcaaggaggagaucaccccccacugcgcccucauggacugcaucauguacgacgccgccgucuccggcggccucaacauccccguccuccgcgccguccucccccgcgacauggucuuccgcaccuccucccccaaggucguccucugaggacuaguuauaagacugacuagcccgaugggccucccaacgggcccuccuccccuccuugcaccgagauuaauaaaaaaaaaaaaaaaaaaaaaaaaaaaaaaaaaaaaaaaaaaaaaaaaaaaaaaaaaaaaaaaaugcaucccccccccccccccccccccccccccccccaaaggcucuuuucagagccaccagaauu

SEQ ID NO: 10971 - RNA, 1927 nt, Artificial Sequence
  mRNA product Design i-3 comprising derived and/or modified sequence from LASV(ISTH2010-NIG-2012;Clade II)__AIT17483__NP (opt2)
gggagaaagcuuaccauguccgccuccaaggaggucaaguccuuccucuggacccagucccuccgccgcgagcucuccggcuacugcuccaacaucaagcuccaggucgucaaggacgcccaggcccuccuccacggccucgacuucuccgaggucuccaacguccagcgccucaugcgcaagcagaagcgcgacgacuccgaccucaagcgccuccgcgaccucaaccaggccgucaacaaccucgucgagcucaaguccacccagcagaaguccauccuccgcgucggcacccucaccuccgacgaccuccucacccucgccgccgaccucgagaagcucaaguccaaggucauccgcaccgagcgcccccucuccuccggcgucuacaugggcaaccucuccacccagcagcucgagcagcgccgcgcccuccucaaccucaucggcauggucggcggcgcccagggcacccagcccggccgcgacggcgucguccgcgucugggacgucaagaaccccgaccuccucaacaaccaguucggcaccaugcccucccucacccucgccugccucaccaagcagggccaggucgaccucaacgacgccguccucgcccucaccgaccucggccucaucuacaccgccaaguaccccaacuccuccgaccucgaccgccucucccagucccaccccauccucaacauggucgacaccaagaaguccucccucaacaucuccggcuucaacuucucccucggcgccgccgucaaggccggcgccugcaugcucgacggcggcaacaugcucgagaccaucaaggucaccccccagaccauggacggcauccucaaguccauccucaaggucaagaagucccucggcauguucgucuccgacacccccggcgagcgcaaccccuacgagaacauccucuacaagaucugccucuccggcgacggcuggcccuacaucgccucccgcaccuccaucgucggccgcgccugggagaacaccaccgucgaccucgaguccgacggcaagccccacaaggucggcaccgccggcuccaacaagucccuccaguccgccggcuuccccaccggccucaccuacucccagcucaugacccucaaggacuccaugaugcagcucgaccccuccgccaagaccuggaucgacaucgagggccgccccgaggaccccgucgagaucgcccucuaccagcccauguccggcugcuacauccacuucuuccgcgagcccaccgaccucaagcaguucaagcaggacgccaaguacucccacggcaucgacgucgccgaccucuuccccgcccagcccggccucaccuccgccgucaucgaggcccucccccgcaacaugguccucaccugccagggcuccgacgacaucaagcgccuccucgacucccagggccgccgcgacaucaagcucaucgacaucgcccucuccaaggccgacucccgccgcuucgagaacgccgucugggaccagugcaaggaccucugccacaugcacaccggcgucgucgucgagaagaagaagcgcggcggcaaggaggagaucaccccccacugcgcccucauggacugcaucauguacgacgccgccgucuccggcggccucaacauccccguccuccgcgccguccucccccgcgacauggucuuccgcaccuccucccccaaggucguccucugaggacuaguuauaagacugacuagcccgaugggccucccaacgggcccuccuccccuccuugcaccgagauuaauaaaaaaaaaaaaaaaaaaaaaaaaaaaaaaaaaaaaaaaaaaaaaaaaaaaaaaaaaaaaaaaaugcaucccccccccccccccccccccccccccccccaaaggcucuuuucagagccaccagaauu

SEQ ID NO: 10972 - RNA, 1927 nt, Artificial Sequence
  mRNA product Design i-3 comprising derived and/or modified sequence from LASV(Lassa virus/H.sapiens-wt/NGA/2015/ISTH_0543;Clade II)__AVO03640__NP (opt2)
gggagaaagcuuaccauguccgccuccaaggaggucaaguccuuccucuggacccagucccuccgccgcgagcucuccggcuacugcuccaacaucaagcuccaggucgucaaggacgcccaggcccuccuccacggccucgacuucuccgaggucuccaacguccagcgccucaugcgcaagcagaagcgcgacgacuccgaccucaagcgccuccgcgaccucaaccaggccgucaacaaccucgucgagcucaaguccacccagcagaaguccauccuccgcgucggcacccucaccuccgacgaccuccucacccucgccgccgaccucgagaagcucaaguccaaggucauccgcaccgagcgcccccucuccuccggcgucuacaugggcaaccucuccacccagcagcucgagcagcgccgcgcccuccucaacaugaucggcauggucggcggcgcccagggcacccagcccggccgcgacggcgucguccgcgucugggacgucaagaaccccgaccuccucaacaaccaguucggcaccaugcccucccucacccucgccugccucaccaagcagggccaggucgaccucaacgacgccguccucgcccucaccgaccucggccucaucuacaccgccaaguaccccaacuccuccgaccucgaccgccucucccagucccaccccauccucaacauggucgacaccaagaaguccucccucaacaucuccggcuacaacuucucccucggcgccgccgucaaggccggcgccugcaugcucgacggcggcaacaugcucgagaccaucaaggucaccccccagaccauggacggcauccucaaguccauccucaaggucaagaagucccucggcauguucgucuccgacacccccggcgagcgcaaccccuacgagaacauccucuacaagaucugccucuccggcgacggcuggcccuacaucgccucccgcaccuccaucgucggccgcgccugggagaacaccaccgucgaccucgaguccgacggcaagccccagaaggucggcuccgccggcuccaacaagucccuccaguccgccggcuuccccaccggccucaccuacucccagcucaugacccucaaggacuccaugaugcagcucgaccccuccgccaagaccuggaucgacaucgagggccgccccgaggaccccgucgagaucgcccucuaccagcccauguccggcugcuacauccacuucuuccgcgagcccaccgaccucaagcaguucaagcaggacgccaaguacucccacggcaucgacgucgccgaccucuuccccgcccagcccggccucaccuccgccgucaucgaggcccucccccgcaacaugguccucaccugccagggcuccgacgacaucaagcgccuccucgacucccagggccgcaaggacaucaagcucaucgacaucgcccucuccaaggccgacucccgccgcuucgagaacgccgucugggaccagugcaaggaccucugccacaugcacaccggcgucgucgucgagaagaagaagcgcggcggcaaggaggagaucaccccccacugcgcccucauggacugcaucauguacgacgccgccgucuccggcggccucaacauccccguccuccgcgccguccucccccgcgacauggucuuccgcaccuccucccccaaggucguccucugaggacuaguuauaagacugacuagcccgaugggccucccaacgggcccuccuccccuccuugcaccgagauuaauaaaaaaaaaaaaaaaaaaaaaaaaaaaaaaaaaaaaaaaaaaaaaaaaaaaaaaaaaaaaaaaaugcaucccccccccccccccccccccccccccccccaaaggcucuuuucagagccaccagaauu

SEQ ID NO: 10973 - RNA, 1927 nt, Artificial Sequence
  mRNA product Design i-3 comprising derived and/or modified sequence from LASV(Lassa virus/H.sapiens-wt/NGA/2016/ISTH_0009;Clade II)__AVO03572__NP (opt2)
gggagaaagcuuaccauguccgccuccaaggaggucaaguccuuccucuggacccagucccuccgccgcgagcucuccggcuacugcuccaacaucaagcuccaggucgucaaggacgcccaggcccuccuccacggccucgacuucuccgaggucuccaacguccagcgccucaugcgcaagcagaagcgcgacgacuccgaccucaagcgccuccgcgaccucaaccaggccgucaacaaccucgucgagcucaaguccacccagcagaaguccauccuccgcgucggcacccucaccuccgacgaccuccucacccucgccgccgaccucgagaagcucaaguccaaggucauccgcaccgagcgcccccucuccuccggcgucuacaugggcaaccucuccacccagcagcucgagcagcgccgcgcccuccucaacaugaucggcauggucggcggcgcccagggcacccagcccggccgcgacggcgucguccgcgucugggacgucaagaaccccgaccuccucaacaaccaguucggcaccaugcccucccucacccucgccugccucaccaagcagggccaggucgaccucaacgacgccguccucgcccucaccgaccucggccucaucuacaccgccaaguaccccaacuccuccgaccucgaccgccucucccagucccaccccauccucaacauggucgacaccaagaaguccucccucaacaucuccggcuacaacuucucccucggcgccgccgucaaggccggcgccugcaugcucgacggcggcaacaugcucgagaccaucaaggucaccccccagaccauggacggcauccucaaguccauccucaaggucaagaagucccucggcauguucgucuccgacacccccggcgagcgcaaccccuacgagaacauccucuacaagaucugccucuccggcgacggcuggcccuacaucgccucccgcaccuccaucgucggccgcgccugggagaacaccaccgucgaccucgaguccgacggcaagccccagaaggucggcuccgccggcuccaacaagucccuccaguccgccggcuuccccaccggccucaccuacucccagcucaugacccucaaggacuccaugaugcagcucgaccccuccgccaagaccuggaucgacaucgagggccgccccgaggaccccgucgagaucgcccucuaccagcccauguccggcugcuacauccacuucuuccgcgagcccaccgaccucaagcaguucaagcaggacgccaaguacucccacggcaucgacgucgccgaccucuuccccgcccagcccggccucaccuccgccgucaucgaggcccucccccgcaacaugguccucaccugccagggcuccgacgacaucaagcgccuccucgacucccagggccgccgcgacaucaagcucaucgacaucgcccucuccaaggccgacucccgccgcuucgagaacgccgucugggaccagugcaaggaccucugccacaugcacaccggcgucgucgucgagaagaagaagcgcggcggcaaggaggagaucaccccccacugcgcccucauggacugcaucauguacgacgccgccgucuccggcggccucaacauccccguccuccgcgccguccucccccgcgacauggucuuccgcaccuccucccccaaggucguccucugaggacuaguuauaagacugacuagcccgaugggccucccaacgggcccuccuccccuccuugcaccgagauuaauaaaaaaaaaaaaaaaaaaaaaaaaaaaaaaaaaaaaaaaaaaaaaaaaaaaaaaaaaaaaaaaaugcaucccccccccccccccccccccccccccccccaaaggcucuuuucagagccaccagaauu

SEQ ID NO: 10974 - RNA, 1927 nt, Artificial Sequence
  mRNA product Design i-3 comprising derived and/or modified sequence from LASV(Lassa virus/H.sapiens-wt/NGA/2016/ISTH_0017;Clade II)__AVO03568__NP (opt2)
gggagaaagcuuaccauguccgccuccaaggaggucaaguccuuccucuggacccagucccuccgccgcgagcucuccggcuacugcuccuccaucaagcuccaggucgucaaggacgcccaggcccuccuccacggccucgacuucuccgaggucuccaacguccagcgccucaugcgcaagcagaagcgcgacgacuccgaccucaagcgccuccgcgaccucaaccaggccgucaacaaccucgucgagcucaaguccacccagcagaaguccauccuccgcgucggcacccucaccuccgacgaccuccucacccucgccgccgaccucgagaagcucaaguccaaggucauccgcaccgagcgcccccucuccuccggcgucuacaugggcaaccucuccacccagcagcucgagcagcgccgcgcccuccucaacaugaucggcauggccggcggcgcccagggcacccagcccggccgcgacggcgucguccgcgucugggacgucaagaaccccgaccuccucaacaaccaguucggcaccaugcccucccucacccucgccugccucaccaagcagggccaggucgaccucaacgacgccguccucgcccucaccgaccucggccucaucuacaccgccaaguaccccaacuccuccgaccucgaccgccucucccagucccaccccauccucaacauggucgacaccaagaaguccucccucaacaucuccggcuacaacuucucccucggcgccgccgucaaggccggcgccugcaugcucgacggcggcaacaugcucgagaccaucaaggucaccccccagaccauggacggcauccucaaguccauccucaaggucaagcgcucccucggcauguucgucuccgacgcccccggcgagcgcaaccccuacgagaacauccucuacaagaucugccucuccggcgacggcuggcccuacaucgccucccgcaccuccaucgucggccgcgccugggagaacaccaccgucgaccucgaguccgacggcaagccccagaaggucggcgccaccggcuccaacaagucccuccaguccgccggcuuccccaccggccucaccuacucccagcucaugacccucaaggacuccaugaugcagcucgaccccuccgccaagaccuggaucgacaucgagggccgccccgaggaccccgucgaggucgcccucuaccagcccgucuccggcugcuacauccacuucuuccgcgagcccaccgaccucaagcaguucaagcaggacgccaaguacucccacggcaucgacgucgccgaccucuuccccgcccagcccggccucaccuccgccgucaucgaggcccucccccgcaacaugguccucaccugccagggcuccgacgacaucaagaagcuccucgacucccagggccgcaaggacaucaagcucaucgacaucgcccucuccaaggccgacucccgccgcuucgagaacgccgucugggaccagugcaaggaccucugccacaugcacaccggcgucgucgucgagaagaagaagcgcggcggcaaggaggagaucaccccccacugcgcccucauggacugcaucauguacgacgccgccgucuccggcggccucaacauccccguccuccgcgccguccucccccgcgacauggucuuccgcaccuccucccccaaggucguccucugaggacuaguuauaagacugacuagcccgaugggccucccaacgggcccuccuccccuccuugcaccgagauuaauaaaaaaaaaaaaaaaaaaaaaaaaaaaaaaaaaaaaaaaaaaaaaaaaaaaaaaaaaaaaaaaaugcaucccccccccccccccccccccccccccccccaaaggcucuuuucagagccaccagaauu

SEQ ID NO: 10975 - RNA, 1927 nt, Artificial Sequence
  mRNA product Design i-3 comprising derived and/or modified sequence from LASV(Lassa virus/H.sapiens-wt/NGA/2018/ISTH_0959;Clade II)__AVV65100__NP (opt2)
gggagaaagcuuaccauguccgccuccaaggaggucaaguccuuccucuggacccagucccuccgccgcgagcucuccggcuacugcuccaacaucaagcuccaggucgucaaggacgcccaggcccuccuccacggccucgacuucuccgaggucuccaacguccagcgccucaugcgcaagcagaagcgcgacgacuccgaccucaagcgccuccgcgaccucaaccaggccgucaacaaccucgucgagcucaaguccacccagcagaaguccauccuccgcgucggcacccucaccuccgacgaccuccucacccucgccgccgaccucgagaagcucaaguccaaggucauccgcaccgagcgcccccucuccuccggcgucuacaugggcaaccucuccacccagcagcucgagcagcgccgcgcccuccucaaccucaucggcauggucggcggcgcccagggcacccagcccggccgcgacggcgucguccgcgucugggacgucaagaaccccgaccuccucaacaaccaguucggcaccaugcccucccucacccucgccugccucaccaagcagggccaggucgaccucaacgacgucguccucgcccucaccgaccucggccucaucuacaccgccaaguaccccaacuccuccgaccucgaccgccucucccagucccaccccauccucaacauggucgacaccaagaaguccucccucaacaucuccggcuucaacuucucccucggcgccgccgucaaggccggcgccugcaugcucgacggcggcaacaugcucgagaccaucaaggucaccccccagaccauggacggcauccucaaguccauccucaaggucaagaagucccucggcauguucgucuccgacacccccggcgagcgcaaccccuacgagaacauccucuacaagaucugccucuccggcgacggcuggcccuacaucgccucccgcaccuccaucgucggccgcgccugggagaacaccaccgucgaccucgaguccgacggcaagccccacaaggucggcaccgccggcuccaacaagucccuccaguccgccggcuuccccaccggccucaccuacucccagcucaugacccucaaggacuccaugaugcagcucgaccccuccgccaagaccuggaucgacaucgagggccgccccgaggaccccgucgagaucgcccucuaccagcccauguccggcugcuacauccacuucuuccgcgagcccaccgaccucaagcaguucaagcaggacgccaaguacucccacggcaucgacgucgccgaccucuuccccgcccagcccggccucaccuccgccgucaucgaggcccucccccgcaacaugguccucaccugccagggcuccgacgacaucaagcgccuccucgacucccagggccgcaaggacaucaagcucaucgacaucgcccucuccaagaccgacucccgccgcuucgagaacgccgucugggaccagugcaaggaccucugccacaugcacaccggcgucgucgucgagaagaagaagcgcggcggcaaggaggagaucaccccccacugcgcccucauggacugcaucauguacgacgccgccgucuccggcggccucaacauccccguccuccgcgccguccucccccgcgacauggucuuccgcaccuccucccccaaggucguccucugaggacuaguuauaagacugacuagcccgaugggccucccaacgggcccuccuccccuccuugcaccgagauuaauaaaaaaaaaaaaaaaaaaaaaaaaaaaaaaaaaaaaaaaaaaaaaaaaaaaaaaaaaaaaaaaaugcaucccccccccccccccccccccccccccccccaaaggcucuuuucagagccaccagaauu

SEQ ID NO: 10976 - RNA, 1927 nt, Artificial Sequence
  mRNA product Design i-3 comprising derived and/or modified sequence from LASV(LASV003-NIG-2008;Clade II)__AIT17581__NP (opt2)
gggagaaagcuuaccauguccgccuccaaggaggucaaguccuuccucuggacccagucccuccgccgcgagcucuccggcuacugcuccuccaucaagcuccaggucgucaaggacgcccaggcccuccuccacggccucgacuucuccgaggucuccaacguccagcgccucaugcgcaagcagaagcgcgacgacuccgaccucaagcgccuccgcgaccucaaccaggccgucaacaaccucgucgagcucaaguccacccagcagaaguccguccuccgcgucggcacccucaccuccgacgaccuccucacccucgccgccgaccucgagaagcucaaguccaaggucauccgcaccgagcgcccccucuccuccggcgucuacaugggcaaccucuccgcccagcagcucgagcagcgccgcacccuccucaacaugaucggcauggucggcggcgcccagggcacccagcccggccgcgacggcgucguccgcgucugggacgucaagaaccccgaccuccucaacaaccaguucggcaccaugcccucccucacccucgccugccucaccaagcagggccaggucgaccucaacgacgucguccucgcccucaccgaccucggccucaucuacaccgccaaguaccccaacuccuccgaccucgaccgccucucccagucccaccccauccucuccauggucgacaccaagaaguccucccucaacaucuccggcuacaacuucucccucggcgccgccgucaaggccggcgccugcaugcucgacggcggcaacaugcucgagaccaucaaggucaccccccagaccauggacggcauccucaaguccauccucaaggucaagaagucccucggcauguucgucuccgacacccccggcgagcgcaaccccuacgagaacauccucuacaagaucugccucuccggcgacggcuggcccuacaucgccucccgcaccuccaucgucggccgcgccugggagaacaccaccgucgaccucgaguccgacggcaagccccagaaggucggcaccgccggcuccaacaagucccuccaguccgccggcuuccccaccggccucaccuacucccagcucaugacccucaaggacuccaugaugcagcucgaccccuccgccaagaccuggaucgacaucgagggccgccccgaggaccccgucgagaucgcccucuaccagcccauguccggcugcuacauccacuucuuccgcgagcccaccgaccucaagcaguucaagcaggacgccaaguacucccacggcaucgacgucaccgaccucuuccccgcccagcccggccucaccuccgccgucaucgaggcccucccccgcaacaugguccucaccugccagggcuccgacgacaucaagcgccuccucgacucccagggccgccgcgacaucaagcucaucgacaucgcccucuccaaggccgacucccgccgcuucgagaacgccgucugggaccagugcaaggaccucugccacaugcacaccggcgucgucgucgagaagaagaagcgcggcggcaaggaggagaucaccccccacugcgcccucauggacugcaucauguacgacgccgccgucuccggcggccucaacauccccguccuccgcgccguccucccccgcgacauggucuuccgcaccuccucccccaaggucguccucugaggacuaguuauaagacugacuagcccgaugggccucccaacgggcccuccuccccuccuugcaccgagauuaauaaaaaaaaaaaaaaaaaaaaaaaaaaaaaaaaaaaaaaaaaaaaaaaaaaaaaaaaaaaaaaaaugcaucccccccccccccccccccccccccccccccaaaggcucuuuucagagccaccagaauu

SEQ ID NO: 10977 - RNA, 1927 nt, Artificial Sequence
  mRNA product Design i-3 comprising derived and/or modified sequence from LASV(LASV035-NIG-2009;Clade II)__AIT17589__NP (opt2)
gggagaaagcuuaccauguccgccuccaaggaggucaaguccuuccucuggacccagucccuccgccgcgagcucuccggcuacugcuccuccaucaagcuccaggucgucaaggacgcccaggcccuccuccacggccucgacuucuccgaggucuccaacguccagcgccucaugcgcaagcagaagcgcgacgacuccgaccucaagcgccuccgcgaccucaaccaggccgucaacaaccucgucgagcucaaguccacccagcagaaguccauccuccgcgucggcacccucaccuccgacgaccuccucacccucgccgccgaccucgagaagcucaaguccaaggucauccgcaccgagcgcccccucuccuccggcgucuacaugggcaaccucuccgcccagcagcucgagcagcgccgcgcccuccucaacaugaucggcauggucggcggcgcccagggcacccagcccggccgcgacggcgucguccgcgucugggacgucaagaaccccgaccuccucaacaaccaguucggcaccaugcccucccucacccucgccugccucaccaagcagggccaggucgaccucaacgacgccguccucgcccucaccgaccucggccucaucuacaccgccaaguaccccaacuccuccgaccucgaccgccucucccagucccaccccauccucaacauggucgacaccaagaaguccucccucaacaucuccggcuacaacuucucccucggcgccgccgucaaggccggcgccugcaugcucgacggcggcaacaugcucgagaccaucaaggucaccccccagaccauggacggcauccucaaguccauccucaaggucaagcgcucccucggcauguucgucuccgacacccccggcgagcgcaaccccuacgagaacauccucuacaagaucugccucuccggcgacggcuggcccuacaucgccucccgcaccuccaucgucggccgcgccugggagaacaccaccgucgaccucgaguccgacggcaagccccagaaggucggcaccaccggcuccaacaagucccuccaguccgccggcuuccccaccggccucaccuacucccagcucaugacccucaaggacuccaugaugcagcucgaccccuccgccaagaccuggaucgacaucgagggccgccccgaggaccccgucgagaucgcccucuaccagcccauguccggcugcuacauccacuucuuccgcgagcccaccgaccucaagcaguucaagcaggacgccaaguacucccacggcaucgacgucgccgaccucuuccccgcccagcccggccucaccuccgccgucaucgaggcccucccccgcaacaugguccucaccugccagggcuccgacgacaucaagaagcuccucgacucccagggccgccgcgacaucaagcucaucgacaucgcccucuccaaggccgacucccgcaaguucgagaacgccgucugggaccagugcaaggaccucugccacaugcacaccggcgucgucgucgagaagaagaagcgcggcggcaaggaggagaucaccccccacugcgcccucauggacugcaucauguacgacgccgccgucuccggcggccucaacauccccguccuccgcgccguccucccccgcgacauggucuuccgcaccuccucccccaaggucguccucugaggacuaguuauaagacugacuagcccgaugggccucccaacgggcccuccuccccuccuugcaccgagauuaauaaaaaaaaaaaaaaaaaaaaaaaaaaaaaaaaaaaaaaaaaaaaaaaaaaaaaaaaaaaaaaaaugcaucccccccccccccccccccccccccccccccaaaggcucuuuucagagccaccagaauu

SEQ ID NO: 10978 - RNA, 1927 nt, Artificial Sequence
  mRNA product Design i-3 comprising derived and/or modified sequence from LASV(LASV1000-NIG-2009;Clade II)__AIT17783__NP (opt2)
gggagaaagcuuaccauguccgccuccaaggaggucaaguccuuccucuggacccagucccuccgccgcgagcucuccggcuacugcuccaacaucaagcuccaggucgucaaggacgcccaggcccuccuccacggccucgacuucuccgaggucuccaacguccagcgccucaugcgcaagcagaagcgcgacgacuccgaccucaagcgccuccgcgaccucaaccaggccgucaacaaccucgucgagcucaaguccacccagcagaaguccauccuccgcgucggcacccucaccuccgacgaccuccucacccucgccgccgaccucgagaagcucaaguccaaggucauccgcaccgagcgcccccucuccuccggcgucuacaugggcaaccucuccacccagcagcucgagcagcgccgcgcccuccucaacaugaucggcauggucggcggcgcccagggcacccagcccggccgcgacggcgucguccgcgucugggacgucaagaaccccgaccuccucaacaaccaguucggcaccaugcccucccucacccucgccugccucaccaagcagggccaggucgaccucaacgacgucguccucgcccucaccgaccucggccucaucuacaccgccaaguaccccaacuccuccgaccucgaccgccucucccagucccaccccauccucaacauggucgacaccaagaaguccucccucaacaucuccggcuacaacuucucccucggcgccgccgucaaggccggcgccugcaugcucgacggcggcaacaugcucgagaccaucaaggucaccccccagaccauggacggcauccucaaguccauccucaaggucaagaagucccucggcauguucgucuccgacacccccggcgagcgcaaccccuacgagaacauccucuacaagaucugccucuccggcgacggcuggcccuacaucgccucccgcaccuccaucgucggccgcgccugggagaacaccaccgucgaccucgaguccgacggcaagccccagaaggucggcaccgccggcuccaacaagucccuccaguccgccggcuuccccaccggccucaccuacucccagcucaugacccucaaggacuccaugaugcagcucgaccccuccgccaagaccuggaucgacaucgagggccgccccgaggaccccgucgagaucgcccucuaccagcccgucuccggcugcuacauccacuucuuccgcgagcccaccgaccucaagcaguucaagcaggacgccaaguacucccacggcaucgacgucgccgaccucuuccccgcccagcccggccucaccuccgccgucaucgaggcccucccccgcaacaugguccucaccugccagggcuccgacgacaucaagcgccuccucgacucccagggccgccgcgacaucaagcucaucgacaucgcccucuccaaggccgacucccgccgcuucgagaacgccgucugggaccagugcaaggaccucugccacaugcacaccggcgucgucgucgagaagaagaagcgcggcggcaaggaggagaucaccccccacugcgcccucauggacugcaucauguacgacgccgccgucuccggcggccucaacauccccguccuccgcgccguccucccccgcgacauggucuuccgcaccuccucccccaaggucguccucugaggacuaguuauaagacugacuagcccgaugggccucccaacgggcccuccuccccuccuugcaccgagauuaauaaaaaaaaaaaaaaaaaaaaaaaaaaaaaaaaaaaaaaaaaaaaaaaaaaaaaaaaaaaaaaaaugcaucccccccccccccccccccccccccccccccaaaggcucuuuucagagccaccagaauu

SEQ ID NO: 10979 - RNA, 1927 nt, Artificial Sequence
  mRNA product Design i-3 comprising derived and/or modified sequence from LASV(LASV221-NIG-2010;Clade II)__AIT17625__NP (opt2)
gggagaaagcuuaccauguccgccuccaaggaggucaaguccuuccucuggacccagucccuccgccgcgagcucuccggcuacugcuccuccaucaagcuccaggucgucaaggacgcccaggcccuccuccacggccucgacuucuccgaggucuccaacguccagcgccucaugcgcaagcagcgccgcgacgacuccgaccucaagcgccuccgcgaccucaaccaggccgucaacaaccucgucgagcucaaguccacccagcagaaguccauccuccgcgucggcacccucaccuccgacgaccuccucacccucgccgccgaccucgagaagcucaaguccaaggucauccgcaccgagcgcccccucuccuccggcgucuacaugggcaaccucuccacccagcagcucgagcagcgccgcgcccuccucaacaugaucggcauggucggcggcgcccagggcacccagcccggccgcgacggcgucguccgcgucugggacgucaagaaccccgaccuccucaacaaccaguucggcaccaugcccucccucacccucgccugccucaccaagcagggccaggucgaccucaacgacgccguccucgcccucaccgaccucggccucaucuacaccgccaaguaccccaacuccuccgaccucgaccgccucucccagucccaccccauccucaacauggucgacaccaagaaguccucccucaacaucuccggcuacaacuucucccucggcgccgccgucaaggccggcgccugcaugcucgacggcggcaacaugcucgagaccaucaaggucaccccccagaccgucgacggcauccucaaguccauccucaaggucaagcgcucccucggcauguucgucuccgacacccccggcgagcgcaaccccuacgagaacauccucuacaagaucugccucuccggcgacggcuggcccuacaucgccucccgcaccuccaucgucggccgcgccugggagaacaccaccgucgaccucgaguccgacggcaagccccagaaggucggcaccgccggcuccaacaagucccuccaguccgccggcuuccccaccggccucaccuacucccagcucaugacccucaaggacuccaugaugcagcucgaccccuccgccaagaccuggaucgacaucgagggccgccccgaggaccccgucgagaucgcccucuaccagcccauguccggcugcuacauccacuucuuccgcgagcccaccgaccucaagcaguucaagcaggacgccaaguacucccacggcaucgacgucgccgaccucuuccccgcccagcccggccucaccuccgccgucaucgaggcccucccccgcaacaugguccucaccugccagggcuccgacgacaucaagcgccuccucgacucccagggccgccgcgacaucaagcucaucgacaucgcccucuccaaggccgacucccgcaaguucgagaacgccgucugggaccagugcaaggaccucugccacaugcacaccggcgucgucgucgagaagaagaagcgcggcggcaaggaggagaucaccccccacugcgcccucauggacugcaucauguacgacgccgccgucuccggcggccucaacauccccguccuccgcgccguccucccccgcgacauggucuuccgcaccuccucccccaaggucguccucugaggacuaguuauaagacugacuagcccgaugggccucccaacgggcccuccuccccuccuugcaccgagauuaauaaaaaaaaaaaaaaaaaaaaaaaaaaaaaaaaaaaaaaaaaaaaaaaaaaaaaaaaaaaaaaaaugcaucccccccccccccccccccccccccccccccaaaggcucuuuucagagccaccagaauu

SEQ ID NO: 10980 - RNA, 1927 nt, Artificial Sequence
  mRNA product Design i-3 comprising derived and/or modified sequence from LASV(LASV237-NIG-2010;Clade II)__AIT17639__NP (opt2)
gggagaaagcuuaccauguccgccuccaaggaggucaaguccuuccucuggacccagucccuccgccgcgagcucuccggcuacugcuccaacaucaagcuccaggucgucaaggacgcccaggcccuccuccacggccucgacuucuccgaggucuccaacguccagcgccucaugcgcaagcagaagcgcgacgacuccgaccucaagcgccuccgcgaccucaaccaggccgucaacaaccucgucgagcucaaguccacccagcagaaguccauccuccgcgucggcacccucaccuccgacgaccuccucacccucgccgccgaccucgagaagcucaaguccaaggucauccgcaccgagcgcccccucuccuccggcgucuacaugggcaaccucuccacccagcagcucgagcagcgccgcgcccuccucaacaugaucggcauggucggcggcgcccagggcacccagcccggccgcgacggcgucguccgcgucugggacgucaagaaccccgaccuccucaacaaccaguucggcaccaugcccucccucacccucgccugccucaccaagcagggccaggucgaccucaacgacgccguccucgcccucaccgaccucggccucaucuacaccgccaaguaccccaacuccuccgaccucgaccgccucucccagucccaccccauccucaacauggucgacaucaagaaguccucccucaacaucuccggcuacaacuucucccucggcgccgccgucaaggccggcgccugcaugcucgacggcggcaacaugcucgagaccaucaaggucaccccccagaccauggacggcauccucaaguccauccucaaggucaagcgcucccucggcauguucgucuccgacacccccggcgagcgcaaccccuacgagaacauccucuacaagaucugccucuccggcgacggcuggcccuacaucgccucccgcaccuccaucgucggccgcgccugggagaacaccaccgucgaccucgaguccgacggcaagccccagaaggucggcuccgccggcuccaacaagucccuccaguccgccggcuuccccaccggccucaccuacucccagcucaugacccucaaggacuccaugaugcagcucgaccccuccgccaagaccuggaucgacaucgagggccgccccgaggaccccgucgagaucgcccucuaccagcccauguccggcugcuacauccacuucuuccgcgagcccaccgaccucaagcaguucaagcaggacgccaaguacucccacggcaucgacgucgccgaccucuuccccgcccagcccggccucaccuccgccgucaucgaggcccucccccgcaacaugguccucaccugccagggcuccgacgacaucaagcgccuccucgacucccagggccgccgcgacaucaagcucaucgacaucgcccucuccaaggccgacucccgccgcuucgagaacgccgucugggaccagugcaaggaccucugccacaugcacaccggcgucgucgucgagaagaagaagcgcggcggcaaggaggagaucaccccccacugcgcccucauggacugcaucauguacgacgccgccgucuccggcggccucaacauccccguccuccgcgccguccucccccgcgacauggucuuccgcaccuccucccccaaggucguccucugaggacuaguuauaagacugacuagcccgaugggccucccaacgggcccuccuccccuccuugcaccgagauuaauaaaaaaaaaaaaaaaaaaaaaaaaaaaaaaaaaaaaaaaaaaaaaaaaaaaaaaaaaaaaaaaaugcaucccccccccccccccccccccccccccccccaaaggcucuuuucagagccaccagaauu

SEQ ID NO: 10981 - RNA, 1927 nt, Artificial Sequence
  mRNA product Design i-3 comprising derived and/or modified sequence from LASV(LASV253-NIG-2011;Clade II)__AIT17671__NP (opt2)
gggagaaagcuuaccauguccgccuccaaggaggucaaguccuuccucuggacccagucccuccgccgcgagcucuccggcuacugcuccuccaucaagcuccaggucgucaaggacgcccaggcccuccuccacggccucgacuucuccgaggucuccaacguccagcgccucaugcgcaagcagaagcgcgacgacuccgaccucaagcgccuccgcgaccucaaccaggccgucaacaaccucgucgagcucaaguccacccagcagaaguccguccuccgcgucggcacccucaccuccgacgaccuccucacccucgccgccgaccucgagaagcucaaguccaaggucauccgcaccgagcgcccccucuccuccggcgucuacaugggcaaccucuccacccagcagcucgagcagcgccgcgcccuccucaacaugaucggcauggucggcggcgcccagggcacccagcccggccgcgacggcgucguccgcgucugggacgucaagaaccccgaccuccucaacaaccaguucggcaccaugcccucccucacccucgccugccucaccaagcagggccaggucgaccucaacgacgucguccucgcccucaccgaccucggccucaucuacaccgccaaguaccccaacuccuccgaccucgaccgccucucccagucccaccccauccucaacauggucgacaccaagaaguccucccucaacaucuccggcuacaacuucucccucggcgccgccgucaaggccggcgccugcaugcucgacggcggcaacaugcucgagaccaucaaggucaccccccagaccauggacggcauccucaaguccauccucaaggucaagaagucccucggcauguucgucuccgacacccccggcgagcgcaaccccuacgagaacauccucuacaagaucugccucuccggcgacggcuggcccuacaucgccucccgcaccuccaucgucggccgcgccugggagaacaccaccgucgaccucgaguccgacggcaagccccagaaggucggcaccgccggcuccaacaagucccuccaguccgccggcuuccccaccggccucaccuacucccagcucaugacccucaaggacuccaugaugcagcucgaccccuccgccaagaccuggaucgacaucgagggccgccccgaggaccccgucgagaucgcccucuaccagcccauguccggcugcuacauccacuucuuccgcgagcccaccgaccucaagcaguucaagcaggacgccaaguacucccacggcaucgacgucaccgaccucuuccccgcccagcccggccucaccuccgccgucaucgaggcccucccccgcaacaugguccucaccugccagggcuccgacgacaucaagcgccuccucgacucccagggccgccgcgacaucaagcucaucgacaucgcccucuccaaggccgacucccgccgcuucgagaacgccgucugggaccagugcaaggaccucugccacaugcacaccggcgucgucgucgagaagaagaagcgcggcggcaaggaggagaucaccccccacugcgcccucauggacugcaucauguacgacgccgccgucuccggcggccucaacauccccguccuccgcgccguccucccccgcgacauggucuuccgcaccuccucccccaaggucguccucugaggacuaguuauaagacugacuagcccgaugggccucccaacgggcccuccuccccuccuugcaccgagauuaauaaaaaaaaaaaaaaaaaaaaaaaaaaaaaaaaaaaaaaaaaaaaaaaaaaaaaaaaaaaaaaaaugcaucccccccccccccccccccccccccccccccaaaggcucuuuucagagccaccagaauu

SEQ ID NO: 10982 - RNA, 1927 nt, Artificial Sequence
  mRNA product Design i-3 comprising derived and/or modified sequence from LASV(LASV254-NIG-2011;Clade II)__AIT17675__NP (opt2)
gggagaaagcuuaccauguccgccuccaaggaggucaaguccuuccucuggacccagucccuccgccgcgagcucuccggcuacugcuccuccaucaagcuccaggucgucaaggacgcccaggcccuccuccacggccucgacuucuccgaggucuccaacguccagcgccucaugcgcaagcagaagcgcgacgacuccgaccucaagcgccuccgcgaccucaaccaggccgucaacaaccucgucgagcucaaguccacccagcagaaguccguccuccgcgucggcacccucaccuccgacgaccuccucacccucgccgccgaccucgagaagcucaaguccaaggucauccgcaccgagcgcccccucuccuccggcgucuacaugggcaaccucuccacccagcagcucgagcagcgccgcgcccuccucaacaugaucggcauggucggcggcgcccagggcacccagcccggccgcgacggcgucguccgcgucugggacgucaagaaccccgaccuccucaacaaccaguucggcaccaugcccucccucacccucgccugccucaccaagcagggccaggucgaccucaacgacgccguccucgcccucaccgaccucggccucaucuacaccgccaaguaccccaacuccuccgaccucgaccgccucucccagucccaccccauccucaacauggucgacaccaagaaguccucccucaacaucuccggcuacaacuucucccucggcgccgccgucaaggccggcgccugcaugcucgacggcggcaacaugcucgagaccaucaaggucaccccccagaccauggacggcauccucaaguccauccucaaggucaagaagucccucggcauguucgucuccgacacccccggcgagcgcaaccccuacgagaacauccucuacaagaucugccucuccggcgacggcuggcccuacaucgccucccgcaccuccaucgucggccgcgccugggagaacaccaucgucgaccucgaguccgacggcaagccccagaaggucggcaccgccggcuccaacaagucccuccaguccgccggcuuccccaccggccucaccuacucccagcucaugacccucaaggacuccaugaugcagcucgaccccuccgccaagaccuggaucgacaucgagggccgccccgaggaccccgucgagaucgcccucuaccagcccauguccggcugcuacauccacuucuuccgcgagcccaccgaccucaagcaguucaagcaggacgccaaguacucccacggcaucgacgucgccgaccucuuccccgcccagcccggccucaccuccgccgucaucgaggcccucccccgcaacaugguccucaccugccagggcuccgacgacaucaagcgccuccucgacucccagggccgccgcgacaucaagcucaucgacaucgcccucuccaaggccgacucccgccgcuucgagaacgccgucugggaccagugcaaggaccucugccacaugcacaccggcgucgucgucgagaagaagaagcgcggcggcaaggaggagaucaccccccacugcgcccucauggacugcaucauguacgacgccgccgucuccggcggccucaacauccccguccuccgcgccguccucccccgcgacauggucuuccgcaccuccucccccaaggucguccucugaggacuaguuauaagacugacuagcccgaugggccucccaacgggcccuccuccccuccuugcaccgagauuaauaaaaaaaaaaaaaaaaaaaaaaaaaaaaaaaaaaaaaaaaaaaaaaaaaaaaaaaaaaaaaaaaugcaucccccccccccccccccccccccccccccccaaaggcucuuuucagagccaccagaauu

SEQ ID NO: 10983 - RNA, 1927 nt, Artificial Sequence
  mRNA product Design i-3 comprising derived and/or modified sequence from LASV(Nig08-04;Clade II)__ADU56611__NP (opt2)
gggagaaagcuuaccauguccgccuccaaggaggucaaguccuuccucuggacccagucccuccgccgcgagcucuccggcuacugcuccaacaucaagcuccaggucgucaaggacgcccaggcccuccuccacggccucgacuucuccgaggucuccaacguccagcgccucaugcgcaagcagaagcgcgacgacggcgaccucaagcgccuccgcgaccucaaccaggccgucaacaaccucgucgagcucaaguccacccagcagaaguccguccuccgcgucggcacccucaccuccgacgaccuccucacccucgccgccgaccucgagaagcucaaguccaaggucauccgcaccgagcgcccccucuccuccggcgucuacaugggcaaccucuccacccagcagcucgagcagcgcaaggcccuccucuccaugaucggcauggucggcggcgcccagggcacccagcccggccgcgacggcgucguccgcgucugggacgucaagaaccccgaccuccucaacaaccaguucggcaccaugcccucccucacccucgccugccucaccaagcagggccaggucgaccucaacgacgccguccucgcccucaccgaccucggccucaucuacaccgccaaguaccccaacuccuccgaccucgaccgccucucccagucccaccccauccucaacauggucgacaccaagaaguccucccucaacaucuccggcuacaacuucucccucggcgccgccgucaaggccggcgccugcaugcucgacggcggcaacaugcucgagaccaucaaggucaccccccagaccauggacggcauccucaaguccauccucaaggucaagcgcucccucggcauguucgucuccgacacccccggcgagcgcaaccccuacgagaacauccucuacaagaucugccucuccggcgacggcuggcccuacaucgccucccgcaccuccaucgucggccgcgccugggagaacaccaccgucgaccucgaguccgacggcaagccccagaaggucggcaccgccggcuccaacaagucccuccaguccgccggcuuccccaccggccucaccuacucccagcucaugacccucaaggacuccaugaugcagcucgaccccuccgccaagaccuggaucgacaucgagggccgccccgaggaccccgucgagaucgcccucuaccagcccauguccggcugcuacauccacuucuuccgcgagcccaccgaccucaagcaguucaagcaggacgccaaguacucccacggcaucgacgucaccgaccucuucuccgcccagcccggccucaccuccgccgucaucgaggcccucccccgcaacaugguccucaccugccagggcuccgacgacaucaagaagcuccucgacucccagggccgccgcgacaucaagcucaucgacaucucccucaacaaggccgacucccgccgcuucgagaacgccgucugggaccagugcaaggaccucugccacaugcacaccggcgucgucgucgagaagaagaagcgcggcggcaaggaggagaucaccccccacugcgcccucauggacugcaucauguucgacgccgccgucuccggcggccucaacauccccauccuccgcgccguccucccccgcgacauggucuuccgcaccuccucccccaaggucguccucugaggacuaguuauaagacugacuagcccgaugggccucccaacgggcccuccuccccuccuugcaccgagauuaauaaaaaaaaaaaaaaaaaaaaaaaaaaaaaaaaaaaaaaaaaaaaaaaaaaaaaaaaaaaaaaaaugcaucccccccccccccccccccccccccccccccaaaggcucuuuucagagccaccagaauu

SEQ ID NO: 10984 - RNA, 1930 nt, Artificial Sequence
  mRNA product Design i-3 comprising derived and/or modified sequence from LASV(GA391;Clade III)__AAA46284__NP (opt2)
gggagaaagcuuaccauguccgccuccaaggagguccgcuccugccucuggacccagucccuccgccgcgagcucuccggcuacugcuccaacaucaagcuccaggucgucaaggacgcccaggcccuccuccacggccucgacuucuccgaggucuccaacguccagcgccucaugcgcaagcagaagcgcgacgacggcgaccucaagcgccuccgcgaccucaaccaggccgucaacaaccucgucgagcucaaguccacccagcagaaguccguccuccgcgucggcacccucuccuccgacgaccuccucauccucgccgccgaccucgagaagcucaaguccaaggucacccgcaccgagcgcccccucuccuccggcgucuacaugggcaaccucuccucccagcagcucgaccagcgccgcgcccuccucaacaugaucggcaugaccggcgucuccggcggcggcaagggcgccuccaacggcaucguccgcgucugggacgucaagaacgccgagcuccucaacaaccaguucggcaccaugcccucccucacccucgccugccucaccaagcagggccaggucgaccucaacgacgccguccaggcccucaccgaccucggccucaucuacaccgccaaguaccccaacuccuccgaccucgaccgccucucccagucccaccccauccucaacaugaucgacaccaagaaguccucccucaacaucuccggcuacaacuucucccucggcgccgccgucaaggccggcgccugcaugcucgacggcggcaacaugcucgagaccaucaaggucuccccccagaccauggacggcauccucaaguccauccucaaggucaagaagucccucggcauguucgucuccgacacccccggcgagcgcaaccccuacgagaacauccucuacaagaucugccucuccggcgacggcugguccuacaucgccucccgcaccuccaucgucggccgcgccugggagaacaccgucgucgaccucgagcaggacaacaagccccagaagaucggcaacggcggcuccaacaagucccuccaguccgccggcuucgccgccggccucaucuacucccagcucaugacccucaaggacuucaagugcuucaaccucauccccaacgccaagaccuggauggacaucgagggccgccccgaggaccccgucgagaucgcccucuaccagcccuccuccggcugcuacguccacuucuuccgcgagcccaccgaccucaagcaguucaagcaggacgccaaguacucccacggccgcgacgucaccgaccucuucgccgcccagcccggccucaccuccgccgucaucgaggcccucccccgcaacauggucaucaccugccagggcuccgaggacauccgcaagcuccucgagucccagggccgccgcgacaucaagcucaucgacaucacccucuccaaggccgacucccgcaaguucgagaacgccgucugggaccaguucaaggaccucugccacaugcacaccggcgucgucgucgagaagaagaagcgcggcggcaaggaggagaucaccccccacugcgcccucauggacugcaucauguucgacgccgccgucuccggcggccucgacgccaagguccuccgcgucguccucccccgcgacauggucuuccgcaccuccacccccaaggucguccucugaggacuaguuauaagacugacuagcccgaugggccucccaacgggcccuccuccccuccuugcaccgagauuaauaaaaaaaaaaaaaaaaaaaaaaaaaaaaaaaaaaaaaaaaaaaaaaaaaaaaaaaaaaaaaaaaugcaucccccccccccccccccccccccccccccccaaaggcucuuuucagagccaccagaauu

SEQ ID NO: 10985 - RNA, 1927 nt, Artificial Sequence
  mRNA product Design i-3 comprising derived and/or modified sequence from LASV(Nig08-A19;Clade III)__ADU56619__NP (opt2)
gggagaaagcuuaccauguccgccuccaaggaggucaaguccuuccucuggacccagucccuccgccgcgagcucuccggcuacugcuccaacaucaagcuccaggucgucaaggacgcccaggcccuccuccacggccucgacuucuccgaggucuccaacguccagcgccucaugcgcaagcagaagcgcgacgacggcgaccucaagcgccuccgcgaccucaaccaggccgucaacaaccucgucgagcucaaguccacccagcagaaguccguccuccgcgucggcacccucuccuccgacgaccuccucguccucgccgccgaccucgagaagcucaaguccaaggucguccgcaccgagcgcccccucuccuccggcaucuacaugggcaaccucuccucccagcagcucgaccagcgcaaggcccuccucaacaugaucggcaugaccggcggcaacggcggccgcaacaccaccuccgacggcaucguccgcgucugggacgucaagaacgccgagcuccucaacaaccaguucggcaccaugcccucccucacccucgccugccucaccaagcagggccaggucgaccucaacgacgccguccaggcccucaccgaccucggccucaucuacaccgccaaguaccccaacuccuccgaccucgaccgccucgcccagucccaccccauccucaacaugaucgacaccaagaaguccucccucaacaucuccggcuacaacuucucccucggcgccgccgucaaggccggcgccugcaugcucgacggcggcaacaugcucgagaccaucaaggucuccccccagaccauggacggcauccucaaguccauccucaaggucaagcgcucccucggcauguucaucuccgacacccccggcgagcgcaaccccuacgagaacauccucuacaagaucugccucuccggcgacggcuggcccuacaucgccucccgcaccuccaucgucggccgcgccugggagaacaccgucgucgaccucgaguccgacaacaagccccagaagaccggcaacggcggcuccaacaagucccuccaguccgccggcuucgccgccggccucaccuacucccagcucaugacccucaaggacuccaugcuccagcucgaccccaacgccaagaccuggauggacaucgagggccgccccgaggaccccgucgagaucgcccucuaccagcccuccuccggcugcuacauccacuucuuccgcgagcccaccgaccucaagcaguucaagcaggacgccaaguacucccacggcaucgacgucaccgaccucuucgccgcccagcccggccucaccuccgccgucaucgaggcccucccccgcaacauggucaucaccugccagggcuccgaggacauccgcaagcuccucgagucccagggccgccgcgacaucaagcucaucgacaucucccucuccaaggucgacucccgcaaguucgagaacgccgucugggaccaguucaaggaccucugccacaugcacaccggcaucgucgucgagaagaagaagcgcggcggcaaggaggagaucaccccccacugcgcccucauggacugcaucauguucgacgccgccgucuccggcggcgucgacgccaagguccuccgcgccguccucccccgcgacauggucuuccgcaccuccacccccaaggucguccucugaggacuaguuauaagacugacuagcccgaugggccucccaacgggcccuccuccccuccuugcaccgagauuaauaaaaaaaaaaaaaaaaaaaaaaaaaaaaaaaaaaaaaaaaaaaaaaaaaaaaaaaaaaaaaaaaugcaucccccccccccccccccccccccccccccccaaaggcucuuuucagagccaccagaauu

SEQ ID NO: 10986 - RNA, 1927 nt, Artificial Sequence
  mRNA product Design i-3 comprising derived and/or modified sequence from LASV(G1180-SLE-2010;Clade IV)__AIT17169__NP (opt2)
gggagaaagcuuaccauguccgccuccaaggagaucaaguccuuccucuggacccagucccuccgccgcgagcucuccggcuacugcuccaacaucaagcuccaggucgucaaggacgcccaggcccuccuccacggccucgacuucuccgaggucuccaacguccagcgccucaugcgcaaggagcgccgcgacgacaacgaccucaagcgccuccgcgaccucaaccaggccgucaacaaccucgucgagcucaaguccacccagcagaaguccauccuccgcgucggcacccucaccuccgacgaccuccucauccucgccgccgaccucgagaagcucaaguccaaggucauccgcaccgagcgcccccucuccgccggcgucuacaugggcaaccucuccucccagcagcucgaccagcgccgcgcccuccucuccaugaucggcauguccuccggcaaccagcgcgcccaggccggccgcgacggcgucguccgcgucugggacgucaagaacgucgagcuccucaacaaccaguucggcaccaugcccucccucacccucgccugccucaccaagcagggccaggucgaccucaacgacgccguccaggcccucaccgaccucggccucaucuacaccgccaaguaccccaacaccuccgaccucgaccgccucacccagucccaccccauccucaacaugaucgacaccaagaaguccucccucaacaucuccggcuacaacuucucccucggcgccgccgucaaggccggcgccugcaugcucgacggcggcaacaugcucgagaccaucaaggucuccccccagaccauggacggcauccucaaguccauccucaaggucaagaaggcccucggcauguucaucuccgacacccccggcgagcgcaaccccuacgagaacauccucuacaagaucugccucuccggcgacggcuggcccuacaucgccucccgcaccuccaucaccggccgcgccugggagaacaccgucgucgaccucgaguccgacggcaagccccagaaggccggcuccaacaacuccaacaagucccuccaguccgucggcuucaccgccggccucaccuacucccagcucaugacccucaaggacgccaugcuccagcucgaccccaacgccaagaccuggauggacaucgagggccgccccgaggaccccgucgagaucgcccucuaccagcccuccuccggcugcuacauccacuucuuccgcgagcccaccgaccucaagcaguucaagcaggacgccaaguacucccacggcaucgacgucaccgaccucuucgccgcccagcccggccucaccuccgccgucaucgacgcccucccccgcaacauggucaucaccugccagggcuccgacgacauccgcaagcuccucgagucccagggccgcaaggacaucaagcucaucgacaucgcccucuccaagaccgacucccgcaaguacgagaacgccgucugggaccaguacaaggaccucugccacaugcacaccggcgucgucgucgagaagaagaagcgcggcggcaaggaggagaucaccccccacugcgcccucauggacugcaucauguucgacgccgccgucuccggcggccucaacaccuccguccuccgcgccguccucccccgcgacauggucuuccgcaccuccaccccccgcgucguccucugaggacuaguuauaagacugacuagcccgaugggccucccaacgggcccuccuccccuccuugcaccgagauuaauaaaaaaaaaaaaaaaaaaaaaaaaaaaaaaaaaaaaaaaaaaaaaaaaaaaaaaaaaaaaaaaaugcaucccccccccccccccccccccccccccccccaaaggcucuuuucagagccaccagaauu

SEQ ID NO: 10987 - RNA, 1927 nt, Artificial Sequence
  mRNA product Design i-3 comprising derived and/or modified sequence from LASV(G1442-SLE-2011;Clade IV)__AIT17181__NP (opt2)
gggagaaagcuuaccauguccgccuccaaggaggucaaguccuuccucuggacccagucccuccgccgcgagcucuccggcuacugcuccaacaucaagcuccaggucgucaaggacgcccaggcccuccuccacggccucgacuucuccgaggucuccaacguccagcgccucaugcgcaagcagcgccgcgacgacaacgaccucaagcgccuccgcgaccucaaccaggccgucaacaaccucgucgagcucaaguccacccagcagaaguccguccuccgcgucggcacccucaccuccgacgaccuccucguccucgccgccgaccucgagaagcucaaguccaaggucauccgcaccgagcgcccccucuccgccggcgucuacaugggcaaccucuccucccagcagcucgaccagcgccgcgcccuccucaacaugaucggcauguccggcggcauccagggcacccgcaccggccgcgacggcgucguccgcgucugggacgucaagaacgccgaccuccucaacaaccaguucggcaccaugcccucccucacccucgccugccucaccaagcagggccaggucgaccucaacgacgucguccaggcccucaccgaccucggccucaucuacaccgccaaguaccccaacgccuccgaccucgaccgccucacccagucccaccccauccucaacaugaucgacaccaagaaguccucccucaacaucuccggcuacaacuucucccucggcgccgccgucaaggccggcgccugcaugcucgacggcggcaacaugcucgagaccaucaaggucuccccccagaccauggacggcauccucaaguccauccucaaggucaagaagacccucggcauguucaucuccgacacccccggcgagcgcaaccccuacgagaacauccucuacaagaucugccucuccggcgacggcuggcccuacaucgccucccgcaccuccaucaccggccgcgccugggagaacaccgucgucgaccucgaguccgacggcaagccccagaaggccggcuccaacaacuccaacaagucccuccaguccgccggcuucgccgccggccucaccuacucccagcucaugacccucaaggacgccaugcuccagcucgaccccaacgccaagaccuggauggacaucgagggccgccccgaggaccccgucgagaucgcccucuaccagcccuccuccggcugcuacauccacuucuuccgcgagcccaccgaccucaagcaguucaagcaggacgccaaguacucccacggcaucgacgucaccgaccucuucgccgcccagcccggccucaccuccgccgucaucgaggcccucccccgcaacauggucaucaccugccagggcuccgacgacaucaagaagcuccucgagucccagggccgcaaggacaucaagcucaucgacaucgcccucuccaagaccgacucccgcaaguacgagaacgccgucugggaccaguacaaggaccucugccacaugcacaccggcgucgucgucgagaagaagaagcgcggcggcaaggaggagaucaccccccacugcgcccucauggacugcaucauguucgacgccgccgucuccggcggccucaacacccucguccuccgcgccguccucccccgcgacauggucuuccgcaccuccaccccccgcgucguccucugaggacuaguuauaagacugacuagcccgaugggccucccaacgggcccuccuccccuccuugcaccgagauuaauaaaaaaaaaaaaaaaaaaaaaaaaaaaaaaaaaaaaaaaaaaaaaaaaaaaaaaaaaaaaaaaaugcaucccccccccccccccccccccccccccccccaaaggcucuuuucagagccaccagaauu

SEQ ID NO: 10988 - RNA, 1927 nt, Artificial Sequence
  mRNA product Design i-3 comprising derived and/or modified sequence from LASV(G3010-SLE-2013;Clade IV)__AIT17345__NP (opt2)
gggagaaagcuuaccauguccgccuccaaggagaucaaguccuuccucuggacccagucccuccgccgcgagcucuccggcuacugcuccaacaucaagcuccaggucgucaaggacgcccaggcccuccuccacggccucgacuucuccgaggucuccaacguccagcgccucaugcgcaaggagcgccgcgacgacaacgaccucaagcgccuccgcgaccucaaccaggccgucaacaaccucgucgagcucaaguccacccagcagaaguccauccuccgcgucggcacccucaccuccgacgaccuccucauccucgccgccgaccucgagaagcucaaguccaaggucacccgcaccgagcgcccccucuccgccggcgucuacaugggcaaccucuccucccagcagcucgaccagcgccgcgcccuccucuccaugaucggcauguccuccggcguccagggcgcccgcgccggccgcgacggcgucguccgcgucugggacgucaagaacgccgagcuccucaacaaccaguucggcaccaugcccucccucacccucgccugccucaccaagcagggccaggucgaccucaacgacgucguccaggcccucaccgaccucggccucaucuacaccgccaaguaccccaacaccuccgaccucgaccgccucacccagucccaccccauccucaacaugaucgacaccaagaaguccucccucaacaucuccggcuacaacuucucccucggcgccgccgucaaggccggcgccugcaugcucgacggcggcaacaugcucgagaccaucaaggucuccccccagaccauggacggcauccucaaguccauccucaaggucaagaaggcccucggcauguucaucuccgagacccccggcgagcgcaaccccuacgagaacauccucuacaagaucugccucuccggcgacggcuggcccuacaucgccucccgcaccuccaucaccggccgcgccugggagaacaccgucgucgaccucgaguccgacggcaagccccagaaggccggcuccaacaacuccaacaagucccuccaguccgccggcuucaccgccggccucaccuacucccagcucaugacccucaaggacgccaugcuccagcucgaccccaacgccaagaccuggauggacaucgagggccgccccgaggaccccgucgaggucgcccucuaccagcccuccuccggcugcuacauccacuucuuccgcgagcccaccgaccucaagcaguucaagcaggacgccaaguacucccacggcaucgacgucaccgaccucuucgccgcccagcccggccucaccuccgccgucaucgacgcccucccccgcaacauggucaucaccugccagggcuccgacgacaucaagaagcuccucgagucccagggccgcaaggacaucaagcucaucgacaucgcccucuccaagaccgacucccgcaaguacgagaacgccgucugggaccaguacaaggaccucugccacaugcacaccggcgucgucgucgagaagaagaagcgcggcggcaaggaggagaucaccccccacugcgcccucauggacugcaucauguucgacgccgccgucuccggcggccucaacaccuccguccuccgcgccguccucccccgcgacauggucuuccgcaccuccaccccccgcgucguccucugaggacuaguuauaagacugacuagcccgaugggccucccaacgggcccuccuccccuccuugcaccgagauuaauaaaaaaaaaaaaaaaaaaaaaaaaaaaaaaaaaaaaaaaaaaaaaaaaaaaaaaaaaaaaaaaaugcaucccccccccccccccccccccccccccccccaaaggcucuuuucagagccaccagaauu

SEQ ID NO: 10989 - RNA, 1927 nt, Artificial Sequence
  mRNA product Design i-3 comprising derived and/or modified sequence from LASV(G502-SLE-2009;Clade IV)__AIT17127__NP (opt2)
gggagaaagcuuaccauguccgccuccaaggagaucaaguccuuccucuggacccagucccuccgccgcgagcucuccggcuacugcuccaacaucaagcuccaggucgucaaggacgcccaggcccuccuccacggccucgacuucuccgaggucuccaacguccagcgccucaugcgcaaggagcgccgcgacgacaacgaccucaagcgccuccgcgaccucaaccaggccgucaacaaccucgucgagcucaaguccacccagcagaaguccauccuccgcgucggcacccucaccuccgacgaccuccucauccucgccgccgaccucgagaagcucaaguccaaggucauccgcaccgagcgcccccucuccgccggcgucuacaugggcaaccucuccucccagcagcucgaccagcgccgcgcccuccucuccaugaucggcauguccggcggcaaccagggcguccgcgccggcaaggacggcgucguccgcgucugggacgucaagaacgccgagcuccucaacaaccaguucggcaccaugcccucccucacccucgccugccucaccaagcagggccaggucgaccucaacgacgccguccaggcccucaccgaccucggccucaucuacaccgccaaguaccccaacaccuccgaccucgaccgccucacccagucccaccccauccucaacaugaucgacaccaagaaguccucccucaacaucuccggcuacaacuucucccucggcgccgccgucaaggccggcgccugcaugcucgacggcggcaacaugcucgagaccaucaaggucuccccccagaccauggacggcauccucaaguccauccucaaggucaagaaggcccucggcauguucaucuccgacacccccggcgagcgcaaccccuacgagaacauccucuacaagaucugccucuccggcgacggcuggcccuacaucgccucccgcaccuccaucaccggccgcgccugggagaacaccgucgucgaccucgaguccgacggcaagccccagaaggccggcuccaacaacuccaacaagucccuccaguccgccggcuucaccgccggccucaccuacucccagcucaugacccucaaggacgccaugcuccagcucgaccccaacaccaagaccuggauggacaucgagggccgccccgaggaccccgucgagaucgcccucuaccagcccuccuccggcugcuacauccacuucuuccgcgagcccaccgaccucaagcaguucaagcaggacgccaaguacucccacggcaucgacgucaccgaccucuucgccgcccagcccggccucaccuccgccgucaucgacgcccucccccgcaacauggucaucaccugccagggcuccgacgacauccgcaagcuccucgagucccagggccgcaaggacaucaagcucaucgacaucgcccucaacaagaccgacucccgcaaguacgagaacgccgucugggaccaguacaaggaccucugccacaugcacaccggcgucgucgucgagaagaagaagcgcggcggcaaggaggagaucaccccccacugcgcccucauggacugcaucauguucgacgccgccgucuccggcggccucaacaccuccguccuccgcgccguccucccccgcgacauggucuuccgcaccuccaccccccgcgucguccucugaggacuaguuauaagacugacuagcccgaugggccucccaacgggcccuccuccccuccuugcaccgagauuaauaaaaaaaaaaaaaaaaaaaaaaaaaaaaaaaaaaaaaaaaaaaaaaaaaaaaaaaaaaaaaaaaugcaucccccccccccccccccccccccccccccccaaaggcucuuuucagagccaccagaauu

SEQ ID NO: 10990 - RNA, 1927 nt, Artificial Sequence
  mRNA product Design i-3 comprising derived and/or modified sequence from LASV(G733-SLE-2010;Clade IV)__AIT17155__NP (opt2)
gggagaaagcuuaccauguccgccuccaaggagaucaaguccuuccucuggacccagucccuccgccgcgagcucuccggcuacugcuccaacaucaagcuccaggucgucaaggacgcccaggcccuccuccacggccucgacuucuccgaggucuccaacguccagcgccucaugcgcaaggagcgccgcgacgacaacgaccucaagcgccuccgcgaccucaaccaggccgucaacaaccucgucgagcucaaguccacccagcagaaguccguccuccgcgucggcacccucaccuccgacgagcuccucguccucgccgccgaccucgagaagcucaaguccaaggucauccgcaccgagcgcccccucuccgccggcgucuacaugggcaaccucuccucccagcagcucgaccagcgccgcgcccuccucuccaugaucggcauguccggcggcaaccagggcgcccgcaccggccgcgacggcgucguccgcgucugggacgucaagaacgccgagcuccucaacaaccaguucggcaccaugcccucccucacccucgccugccucaccaagcagggccaggucgaccucaacgacgccguccaggcccucaccgaccucggccucaucuacaccgccaaguaccccaacaccuccgaccucgaccgccucacccagucccaccccauccucaacaugaucgacaccaagaaguccucccucaacaucuccggcuacaacuucucccucggcgccgccgucaaggccggcgccugcaugcucgacggcggcaacaugcucgagaccaucaaggucuccccccagaccauggacggcauccucaaguccauccucaaggucaagaaggcccucggcauguucaucuccgacacccccggcgagcgcaaccccuacgagaacauccucuacaagaucugccucuccggcgacggcuggcccuacaucgccucccgcaccuccaucaccggccgcgccugggagaacaccgucgucgaccucgaguccgacggcaagccccagaaggccggcuccaacaacuccaacaagucccuccaguccgccggcuucaccgccggccucaccuacucccagcucaugacccucaaggacgccaugcuccagcucgaccccaacgccaagaccuggauggacaucgagggccgccccgaggaccccgucgagaucgcccucuaccagcccuccuccggcugcuacauccacuucuuccgcgagcccaccgaccucaagcaguucaagcaggacgccaaguacucccacggcaucgacgucaccgaccucuucgccgcccagcccggccucaccuccgccgucaucgacgcccucccccgcaacauggucaucaccugccagggcuccgacgacauccgcaagcuccucgagucccagggccgcaaggacaucaagcucaucgacaucgcccucuccaagaucgacucccgcaaguacgagaacgccgucugggaccaguacaaggaccucugccacaugcacaccggcgucgucgucgagaagaagaagcgcggcggcaaggaggagaucaccccccacugcgcccucauggacugcaucauguucgacgccgccgucuccggcggccucaacucccucguccuccgcgccguccucccccgcgacauggucuuccgcaccuccaccccccgcgucguccucugaggacuaguuauaagacugacuagcccgaugggccucccaacgggcccuccuccccuccuugcaccgagauuaauaaaaaaaaaaaaaaaaaaaaaaaaaaaaaaaaaaaaaaaaaaaaaaaaaaaaaaaaaaaaaaaaugcaucccccccccccccccccccccccccccccccaaaggcucuuuucagagccaccagaauu

SEQ ID NO: 10991 - RNA, 1927 nt, Artificial Sequence
  mRNA product Design i-3 comprising derived and/or modified sequence from MOPV/LASV reassortant(IGS-1;Clade IV)__AFY05578__NP (opt2)
gggagaaagcuuaccauguccgccuccaaggagaucaaguccuuccucuggacccagucccuccgccgcgagcucuccggcuacugcuccaacaucaagcuccaggucgucaaggacgcccaggcccuccuccacggccucgacuucuccgaggucuccaacguccagcgccucaugcgcaaggagcgccgcgacgacaacgaccucaagcgccuccgcgaccucaaccaggccgucaacaaccucgucgagcucaaguccacccagcagaaguccauccuccgcgucggcacccucaccuccgacgaccuccucauccucgccgccgaccucgagaagcuccgcuccaaggucauccgcaccgagcgcccccucuccgccggcgucuacaugggcaaccucuccucccagcagcucgaccagcgccgcgcccuccucaacaugaucggcauguccggcggcaaccagggcgcccgcgccggccgcgacggcgucguccgcgucugggacgucaagaacgccgagcuccucuccaaccaguucggcaccaugcccucccucacccucgccugccucaccaagcagggccaggucgaccucaacgacgccguccaggcccucaccgaccucggccucaucuacaccgccaaguaccccaacaccuccgaccucgaccgccucacccagucccaccccauccucaacaugaucgacaccaagaaguccucccucaacaucuccggcuacaacuucucccucggcgccgccgucaaggccggcgccugcaugcucgacggcggcaacaugcucgagaccaucaaggucuccccccagaccauggacggcauccucaaguccauccucaaggucaagaaggcccucggcauguucaucuccgacacccccggcgagcgcaaccccuacgagaacauccucuacaagaucugccucuccggcgacggcuggcccuacaucgccucccgcaccuccaucaccggccgcgccugggagaacaccgucgucgaccucgaguccgacggcaagccccagaaggccgacuccaacaacuccuccaagucccuccaguccgccggcuucaccgccggccucaccuacucccagcucaugacccucaaggacgccaugcuccagcucgaccccaacgccaagaccuggauggacaucgagggccgccccgaggaccccgucgagaucgcccucuaccagcccuccuccggcugcuacauccacuucuuccgcgagcccaccgaccucaagcaguucaagcaggacgccaaguacucccacggcaucgacgucaccgaccucuucgccacccagcccggccucaccuccgccgucaucgacgcccucccccgcaacauggucaucaccugccagggcuccgacgacauccgcaagcuccucgagucccagggccgcaaggacaucaagcucaucgacaucgaccucuccaagaccgacucccgcaaguacgagaacgccgucugggaccaguacaaggaccucugccacaugcacaccggcgucgucgucgagaagaagaagcgcggcggcaaggaggagaucaccccccacugcgcccucauggacugcaucauguucgacgccgccgucuccggcggccucaacaccuccguccuccgcgccguccucccccgcgacauggucuuccgcaccuccaccccccgcgucguccucugaggacuaguuauaagacugacuagcccgaugggccucccaacgggcccuccuccccuccuugcaccgagauuaauaaaaaaaaaaaaaaaaaaaaaaaaaaaaaaaaaaaaaaaaaaaaaaaaaaaaaaaaaaaaaaaaugcaucccccccccccccccccccccccccccccccaaaggcucuuuucagagccaccagaauu

SEQ ID NO: 10992 - RNA, 1927 nt, Artificial Sequence
  mRNA product Design i-3 comprising derived and/or modified sequence from LASV(LM765-SLE-2012;Clade IV)__AIT17815__NP (opt2)
gggagaaagcuuaccauguccgccuccaaggagaucaaguccuuccucuggacccagucccuccgccgcgagcucuccggcuacugcuccaacaucaagcuccaggucgucaaggacgcccaggcccuccuccacggccucgacuucuccgaggucuccaacguccagcgccucaugcgcaaggagcgccgcgacgacaacgaccucaagcgccuccgcgaccucaaccaggccgucaacaaccucgucgagcucaaguccacccagcagaaguccauccuccgcgucggcacccucaccuccgacgaccuccucauccucgccgccgaccucgagaagcucaaguccaaggucacccgcaccgagcgcccccucuccgccggcgucuacaugggcaaccucuccucccagcagcucgaccagcgccgcgcccuccucgacaugaucggcauguccggcuccaaccagggcgcccgcgccggccgcgacggcgucguccgcgucugggacgucaagaacgccgagcuccucaacaaccaguucggcaccaugcccucccucacccucgccugccucaccaagcagggccaggucgaccucaacgacgccguccaggcccucaccgaccucggccucaucuacaccgccaaguaccccaacaccuccgaccucgaccgccucacccagucccaccccauccucaacaugaucgacaccaagaaguccucccucaacaucuccggcuacaacuucucccucggcgccgccgucaaggccggcgccugcaugcucgacggcggcaacaugcucgagaccaucaaggucuccccccagaccauggacggcauccucaaguccauccucaaggucaagaaggcccucggcauguucaucuccgacgcccccggcgagcgcaaccccuacgagaacauccucuacaagaucugccucuccggcgacggcuggcccuacaucgccucccgcaccuccaucaccggccgcgccugggagaacaccgucgucgaccucgaguccgacggcaagccccagaaggccggcuccaacggcuccaacaagucccuccaguccgccggcuucaccgccggccucaccuacucccagcucaugacccucaaggacgccaugcuccagcucgaccccaacgccaagaccuggauggacaucgagggccgccccgaggaccccgucgagaucgcccucuaccagcccuccuccggcugcuacauccacuucuuccgcgagcccaccgaccucaagcaguucaagcaggacgccaaguacucccacggcaucgacgucaccgaccucuucgccgcccagcccggccucaccuccgccgucaucgacgcccucccccgcaacauggucaucaccugccagggcuccgacgacauccgcaagcucuucgagucccagggccgcaaggacaucaagcucaucgacaucgcccucuccaagaccgacucccgcaaguacgagaacgccgucugggaccaguacaaggaccucugccacaugcacaccggcaucgucgucgagaagaagaagcgcggcggcaaggaggagaucaccccccacugcgcccucauggacugcaucauguucgacgccgccgucuccggcggccucaacaccuccguccuccgcgccguccucccccgcgacauggucuuccgcaccuccaccccccgcgucguccucugaggacuaguuauaagacugacuagcccgaugggccucccaacgggcccuccuccccuccuugcaccgagauuaauaaaaaaaaaaaaaaaaaaaaaaaaaaaaaaaaaaaaaaaaaaaaaaaaaaaaaaaaaaaaaaaaugcaucccccccccccccccccccccccccccccccaaaggcucuuuucagagccaccagaauu

SEQ ID NO: 10993 - RNA, 1927 nt, Artificial Sequence
  mRNA product Design i-3 comprising derived and/or modified sequence from LASV(LM776-SLE-2012;Clade IV)__AIT17825__NP (opt2)
gggagaaagcuuaccauguccgccuccaaggagaucaaguccuuccucuggacccagucccuccgccgcgagcucuccuccuacugcuccaacaucaagcuccaggucgucaaggacgcccaggcccuccuccacggccucgacuucuccgaggucuccaacguccagcgccucaugcgcaaggagcgccgcgacgacaacgaccucaagcgccuccgcgaccucaaccaggccgucaacaaccucgucgagcucaaguccacccagcagaaguccauccuccgcgucggcacccucaccuccgacgaccuccucauccucgccgccgaccucgagaagcucaaguccaaggucacccgcaccgagcgcccccucuccgccggcgucuacaugggcaaccucuccucccagcagcucgaccagcgccgcgcccuccucuccaugaucggcauguccggcuccaaccagggcgcccgcgccggccgcgacggcgucguccgcgucugggacgucaagaacgccgagcuccucaacaaccaguucggcaccaugcccucccucacccucgccugccucaccaagcagggccaggucgaccucaacgacgccguccaggcccucaccgaccucggccucaucuacaccgccaaguaccccaacaccuccgaccucgaccgccucacccagucccaccccauccucaacaugaucgacaccaagaaguccucccucaacaucuccggcuacaacuucucccucggcgccgccgucaaggccggcgccugcaugcucgacggcggcaacaugcucgagaccaucaaggucuccccccagaccauggacggcauccucaaguccauccucaaggucaagaaggcccucggcauguucaucuccgacacccccggcgagcgcaaccccuacgagaacauccucuacaagaucugccucuccggcgacggcuggcccuacaucgccucccgcaccuccaucaccggccgcgccugggagaacaccgucgucgaccucgaguccgacggcaagccccagaaggccggcuccaacaacuccaacaagucccuccaguccgccggcuucaccgccggccucaccuacucccagcucaugacccucaaggacgccaugcuccagcucgaccccaacgccaagaccuggauggacaucgagggccgccccgaggaccccgucgaggucgcccucuaccagcccuccuccggcugcuacauccacuucuuccgcgagcccaccgaccucaagcaguucaagcaggacgccaaguacucccacggcaucgacgucaccgaccucuucgccgcccagcccggccucaccuccgccgucaucgacgcccucccccgcaacauggucaucaccugccagggcuccgacgacauccgcaagcuccucgagucccagggccgcaaggacaucaagcucaucgacaucgcccucuccaagaccgacucccgcaaguacgagaacgccgucugggaccaguacaaggaccucugccacaugcacaccggcgucgucgucgagaagaagaagcgcggcggcaaggaggagaucaccccccacugcgcccucauggacugcaucauguucgacgccgccgucuccggcggccucaacaccuccguccuccgcgccguccucccccgcgacauggucuuccgcaccuccaccccccgcgucguccucugaggacuaguuauaagacugacuagcccgaugggccucccaacgggcccuccuccccuccuugcaccgagauuaauaaaaaaaaaaaaaaaaaaaaaaaaaaaaaaaaaaaaaaaaaaaaaaaaaaaaaaaaaaaaaaaaugcaucccccccccccccccccccccccccccccccaaaggcucuuuucagagccaccagaauu

SEQ ID NO: 10994 - RNA, 1927 nt, Artificial Sequence
  mRNA product Design i-3 comprising derived and/or modified sequence from LASV(Mad39;Clade IV)__ANH09723__NP (opt2)
gggagaaagcuuaccauguccgccuccaaggagaucaaguccuuccucuggacccagucccuccgccgcgagcucuccggcuacugcuccaacaucaagcuccaggucgucaaggacgcccaggcccuccuccacggccucgacuucuccgaggucuccaacguccagcgccucaugcgcaagcagcgccgcgacgacaacgaccucaagcgccuccgcgaccucaaccaggccgucaacaaccucgucgagcucaaguccacccagcagaaguccguccuccgcgucggcacccucaccuccgacgaccuccucacccucgccgccgaccucgagaagcucaaguccaaggucacccgcaccgagcgcccccucaccgccggcgucuacaugggcaaccucuccucccagcagcucgaccagcgccgcgcccuccucaacaugaucggcauguccggcggcaaccagggcgcccgcaccggccgcgacggcgucguccgcgucugggacgucaagaacgccgagcuccucaacaaccaguucggcaccaugcccucccucacccucgccugccucaccaagcagggccaggucgaccucaacgacgucguccaggcccucaccgaccucggccucaucuacaccgccaaguaccccaacaccuccgaccucgaccgccucacccagucccaccccauccucaacaugaucgacaccaacaaguccucccucaacaucuccggcuacaacuucucccucggcgccgccgucaaggccggcgccugcaugcucgacggcggcaacaugcucgagaccaucaaggucuccccccagaccauggacggcauccucaaguccauccucaaggucaagaagucccucggcauguucaucuccgacacccccggcgagcgcaaccccuacgagaacauccucuacaagaucugccucuccggcgacggcuggcccuacaucgccucccgcaccuccaucaccggccgcgccugggagaacaccgucgucgaccucgaguccggcggcaagccccagaaggccggcuccaacaacuccaacaagucccuccaguccgccggcuucgccgccggccucaccuacucccagcucaugacccucaaggacgccaugcuccagcucgaccccaacgccaagaccuggauggacaucgagggccgccccgaggaccccgucgagaucgcccucuaccagcccaucuccggcugcuacauccacuucuuccgcgagcccaccgaccucaagcaguucaagcaggacgccaaguacucccacggcaucgacgucaccgaccucuucgccgcccagcccggccucaccuccgccgucaucgaggcccucccccgcaacauggucaucaccugccagggcuccgacgacauccgcaagcucuucgagucccagggccgcaaggacaucaagcucaucgacaucgcccucuccaagaccgacucccgcaaguacgagaacgccgucugggaccaguacaaggaccucugccacaugcacaccggcgucgucgucgagaagaagaagaagggcggcaaggaggagaucaccccccacugcgcccucauggacugcaucauguucgacgccgccgucuccggcggccucaacacccucguccuccgcgccguccucccccgcgacauggucuuccgcaccuccacccccaaggucguccucugaggacuaguuauaagacugacuagcccgaugggccucccaacgggcccuccuccccuccuugcaccgagauuaauaaaaaaaaaaaaaaaaaaaaaaaaaaaaaaaaaaaaaaaaaaaaaaaaaaaaaaaaaaaaaaaaugcaucccccccccccccccccccccccccccccccaaaggcucuuuucagagccaccagaauu

SEQ ID NO: 10995 - RNA, 1927 nt, Artificial Sequence
  mRNA product Design i-3 comprising derived and/or modified sequence from LASV(Z0947-SLE-2011;Clade IV)__AIT17841__NP (opt2)
gggagaaagcuuaccauguccgccuccaaggagaucaaguccuuccucuggacccagucccuccgccgcgagcucuccggcuacugcuccaacaucaagcuccaggucgucaaggacgcccaggcccuccuccacggccucgacuucuccgaggucuccaacguccagcgccucaugcgcaaggagcgccgcgacgacaacgaccucaagcgccuccgcgaccucaaccaggccgucaacaaccucgucgagcucaaguccacccagcagaaguccauccuccgcgucggcacccucaccuccgacgaccuccucauccucgccgccgaccucgagaagcucaaguccaaggucacccgcaccgagcgcccccucuccgccggcgucuacaugggcaaccucuccucccagcagcucgaccagcgccgcgcccuccucaacaugaucggcauguccggcuccaaccagggcgcccgcaccggccgcgacggcgucguccgcgucugggacgucaagaacgccgagcuccucaacaaccaguucggcaccaugcccucccucacccucgccugccucaccaagcagggccaggucgaccucaacgacgccguccaggcccucaccgaccucggccucaucuacaccgccaaguaccccaacaccuccgaccucgaccgccucacccagucccaccccauccucaacaugaucgacaccaagaaguccucccucaacaucuccggcuacaacuucucccucggcgccgccgucaaggccggcgccugcaugcucgacggcggcaacaugcucgagaccaucaaggucuccccccagaccauggacggcauccucaaguccauccucaaggucaagaaggcccucggcauguucaucuccgacgcccccggcgagcgcaaccccuacgagaacauccucuacaagaucugccucuccggcgacggcuggcccuacaucgccucccgcaccuccaucaccggccgcgccugggagaacaccgucgucgaccucgaguccgacggcaagccccagaaggccggcuccaacggcuccaacaagucccuccaguccgccggcuucaccgccggccucaccuacucccagcucaugacccucaaggacgccaugcuccagcucgaccccaacgccaagaccuggauggacaucgagggccgccccgaggaccccgucgagaucgcccucuaccagcccuccuccggcugcuacauccacuucuuccgcgagcccaccgaccucaagcaguucaagcaggacgccaaguacucccacggcaucgacgucaccgaccucuucgccgcccagcccggccucaccuccgccgucaucgacgcccucccccgcaacauggucaucaccugccagggcuccgacgacauccgcaagcucuucgagucccagggccgcaaggacaucaagcucaucgacaucgcccucuccaagaccgacucccgcaaguacgagaacgccgucugggaccaguacaaggaccucugccacaugcacaccggcaucgucgucgagaagaagaagcgcggcggcaaggaggagaucaccccccacugcgcccucauggacugcaucauguucgacgccgccgucuccggcggccucaacaccuccguccuccgcgccguccucccccgcgacauggucuuccgcaccuccaccccccgcgucguccucugaggacuaguuauaagacugacuagcccgaugggccucccaacgggcccuccuccccuccuugcaccgagauuaauaaaaaaaaaaaaaaaaaaaaaaaaaaaaaaaaaaaaaaaaaaaaaaaaaaaaaaaaaaaaaaaaugcaucccccccccccccccccccccccccccccccaaaggcucuuuucagagccaccagaauu

SEQ ID NO: 10996 - RNA, 1927 nt, Artificial Sequence
  mRNA product Design i-3 comprising derived and/or modified sequence from LASV(Josiah;Clade IV)__NP_694869__NP (opt3)
gggagaaagcuuaccaugagcgccuccaaggagaucaaaucuuuccuguggacccagucacucagaagggaacuuaguggcuacugcagcaacauuaagcugcaaguggucaaagacgcucaggcauuguuacacgggcuggauuuuuccgagguuucuaaugugcagcggcuaaugcgcaaggaacgacgugacgauaacgaccucaaaagacugagggaucuuaaucaggccguaaacaaucugguggaguugaagucgacacaacagaagucaauacuccgggucggaacucugacgagcgacgaucugcucaucuuagcggcugaccuggaaaaacuuaagaguaaagugauucgcaccgagagacccuuguccgccgguguuuauaugggcaaccugucuagccagcagcuagaucaaaggcgggcacuccugaauaugaucgggauguccggaggcaaccagggugcccgcgcugggcgagacggaguggucagagugugggauguaaagaaugcagagcuucugaacaaucaguucggcacaaugccuucauugacucucgccugucugaccaaacagggccaaguugacuuaaacgaugcugugcaggcccugacagaccucgggcuuauuuacaccgcgaaguauccaaauacaagugaccuggauagguugacucagagccauccgauccuaaacaugauagacaccaagaaaucuucccugaauaucucaggauacaacuuuagccucggugcagccgucaaggcuggcgccugcaugcuggaugggggaaacaugcuugaaacgauuaaagugaguccccaaacuauggacggcauccugaagucuauuuugaaagugaagaaagcacucgguauguucaucuccgauaccccuggggagcggaauccauaugaaaacauacuguacaagauuuguuuaagcggagacggcuggcccuauaucgcuucgcguacaucuauuacuggccgcgccugggagaauaccgucguugaucuggaguccgacgggaagccucagaaagcggauucaaacaauaguagcaagucccuacagucugccggauuuacagcaggucucaccuacagccagcugaugacgcuuaaagacgcuauguugcaacuggauccaaacgccaagacuuggauggacaucgaaggcagacccgaggacccuguggaaaucgcucucuaccagccaucaagugggugcuauauucacuucuuuagggagccgacagaucugaaacaguucaagcaggacgccaaguacucccauggaauagauguaaccgaccuuuuugcaacucaacccggccugacaagcgccgugaucgaugcuuugccucggaauauggucauuaccugucaggguucugacgauauccgaaaacuccuggaaucacaggggcgcaaggacauaaaauuaauugauaucgcgcugaguaagacggacagcagaaaauaugagaacgcagugugggaucaguacaaggaccuaugccacaugcauaccggcguuguggucgagaagaaaaagaggggaggcaaagaagagaucacaccacacugugcccucauggauugcauuauguucgacgcugccguguccgggggacugaauacuucuguacuucgggcaguuuugccccgcgacaugguguuuagaaccucgacaccuagggucgugcugugaggacuaguuauaagacugacuagcccgaugggccucccaacgggcccuccuccccuccuugcaccgagauuaauaaaaaaaaaaaaaaaaaaaaaaaaaaaaaaaaaaaaaaaaaaaaaaaaaaaaaaaaaaaaaaaaugcaucccccccccccccccccccccccccccccccaaaggcucuuuucagagccaccagaauu

SEQ ID NO: 10997 - RNA, 1927 nt, Artificial Sequence
  mRNA product Design i-3 comprising derived and/or modified sequence from LASV(LP;Clade I)__AAF86702__NP (opt3)
gggagaaagcuuaccaugagcaacuccaaggagaucaaaucuuuccuguggacccagucacucagaagggaacuuaguggcuacugcagcaauauuaagcugcaaguggucaaagacgcccaggcuuuguuacacgggcuggauuuuuccgagguuucuaacgugcagcggcuaaugcgcaagcagaaacgagacgaugcagaccucaagcgucugagagaucuuaaucaagccguaaacaaucugguggaauugaagucgacacagcagaaaaacguccucagggugggaacucugucaagcgacgaucugauaacgcucgcggcugacuuagagaagcugaaaaguaagguuauccggaccgaacgcccccuuuccucugguguguauaugggcaauuugagcucccagcaacuggaucagagaagggcccuacucucaaugauugggaugaguggaggcccucaggguaaccggacagggggagacggcgucgugcgcguaugggauguuaaaaaugcagagcugcuuaacaaucaguucggcacuaugccaagccugaccuuggccugucucacaaagcaaggacagguggaccugaacgaugcuguccaggcauuaaccgaccuggggcucaucuacacugccaaguaucccaauucuuccgaccuugauaugcugacacaaucacauccgauuuuggguaugguggacaccaaaaagagcagucuaaacaucucuggcuacaauuuuucccugggggcugccgugaaagcgggagcaugcaugcucgauggcgguaacaugcuggagacgauaaaggucagcccucagacuauggacgggauccuuaaaucgauucugaagguuaaacgaucuuugggaauguucaucuccgauaccccaggcgaaagaaaccccuaugagaauauucucuacaagaucugucugucaggcgaaggguggccuuauauagccaguaggacaagcauuacuggacgggcuugggagaacaccuuaguggaccuggaguccgauaauaagccacccaaacuaaacucugccgguagcaauaagucacuccaggcagcuggccugaacgccgggcuuacauacagucaguugaugacccugaaagacugcaugcuccaacuggauccuuccagcaagacguggaucgacauugaaggacguccagaggauccgguagaaaucgcgcuuuuucagcccucuucaggcuguuacauccacuucuuucgcgagccuacugaccugaaacaguucaagcaggacgccaaguauagucaugguauugaugugacagacuuguuuagcacccaaccagggcucacuuccgcagucauagaagcucugcccagaaauaugguguuaacaugccagggcucugaugacaucaaaaagcugcuagagucgcagggaaggcgggauauuaaacucaucgacauaagccuguccaaggccgauucacgaaaauucgagaacgcuguuugggaccaguacaaggaucuuugucacaugcauaccggcguggucguggaaaagaaaaagcgcgggggaaaagaggaaauuacgccucacugcgccuugcuggacuguaucauguuugaugcagccaccacagguagucucaauaucacuacccugagagcuguauuaccaagggacaugguuuuccggacaucuacucccaaggugguccugugaggacuaguuauaagacugacuagcccgaugggccucccaacgggcccuccuccccuccuugcaccgagauuaauaaaaaaaaaaaaaaaaaaaaaaaaaaaaaaaaaaaaaaaaaaaaaaaaaaaaaaaaaaaaaaaaugcaucccccccccccccccccccccccccccccccaaaggcucuuuucagagccaccagaauu

SEQ ID NO: 10998 - RNA, 1927 nt, Artificial Sequence
  mRNA product Design i-3 comprising derived and/or modified sequence from LASV(803213;Clade II)__AAF86704__NP (opt3)
gggagaaagcuuaccaugagcgccuccaaggaggugaaaucuuuccuguggacccagucacucagaagggaacuuaguggcuacugcagcaacaucaagcugcaagucguuaaagacgcucaggcauuguuacacgggcuggauuuuuccgaggugaauaacguacagcggcuaaugcgcaagcagaaacgagacgauggagaccucaagcgucugagagaucuuaaucaagccgugaacaaucuggucgaauugaagucuacacagcagaaaucgauucucaggguggguacucugacgucagacgaucugcucaccuuagcggcugaccuggagaaacuuaagagcaagguuauacggacagaacgccccuugaguuccggcguguauauggggaaccugucuacucagcaacuagagcagagaagggcccuccugaauaugaucggaauggucggcggugcacaggggacccagccuggacgggauggcgugguacgcguuugggacgugaaaaacccagaucuucugaauaaccaauucggcacaaugccgagcuugacccucgccugucugacuaagcaggggcaggucgacuuaaaugaugcugugcuggcacucacagaccuuggacugauuuacaccgccaaguaucccaacuccucagacuuggaucgacuaagucaaagccauccuauccugaauaugguggacacgaaaaagucuucccucaacauuucagguuacaauuuuagccugggcgcugccgucaaagcgggggcaugcaugcuugauggaggcaacaugcuggagacuaucaagguuaccccacagacaauggacgguauauugaaaaguauccucaaggugaaaagaucucuggggauguucguauccgauacucccggagaaaggaacccuuaugagaauauuuuauacaagaucugucugagcggcgacggcuggccauauauugccucgcggaccucuaucguggggcgugcuugggaaaacacaaccgucgaucuagaguccgacggaaagccccagaaaguggguacggccggcucaaauaagagucuccagagcgcaggguuuccuacuggacugacauacucccaacuuaugaccuugaaagauucuaugaugcagcuggacccaagcgcuaagacuuggauagauauugagggccgcccggaagaccccguugagaucgcccucuaccagccuaugucagguugcuauauucacuucuuuagagaaccaacagaccugaaacaguucaagcaagaugcgaaguacagucaugggaucgacguggccgaucuuuuucccgcacagccuggccugaccuccgcugucaucgaggccuugccaaggaacauggugcucacgugucagggaagcgacgauauuaaaaagcuguuagacucucagggccggcgagauauaaaacugaucgacauuucacuaaguaagguagauagccgcaaauucgaaaaugcuguuugggaccaaugcaaggaucucugucacaugcauaccgggguggucguggagaagaaaaagagaggagguaaagaggaaaucacaccccacugcgcccugauggacuguauaauguuugaugcagccgucuccggcgggcuuaacauuccgguguugagggcuguucugccucgggacaugguguuccgcacuucuucgcccaagguaguccucugaggacuaguuauaagacugacuagcccgaugggccucccaacgggcccuccuccccuccuugcaccgagauuaauaaaaaaaaaaaaaaaaaaaaaaaaaaaaaaaaaaaaaaaaaaaaaaaaaaaaaaaaaaaaaaaaugcaucccccccccccccccccccccccccccccccaaaggcucuuuucagagccaccagaauu

SEQ ID NO: 10999 - RNA, 1930 nt, Artificial Sequence
  mRNA product Design i-3 comprising derived and/or modified sequence from LASV(GA391;Clade III)__CAA36646__NP (opt3)
gggagaaagcuuaccaugagcgccuccaaggaggugagaucuuuccuguggacccagucacucaggcgggaacuuaguggcuacugcagcaacaucaaacugcaagucguuaaggacgcucaggcauuguuacacgggcuggauuuuuccgaggugucuaauguacagcgccuaaugcgaaaacagaagcgugacgauggagaccucaaaagacugagggaucuuaaccaagccgugaauaaccuggucgaauugaagucgacacagcagaagucagugcuccggguugguacucugagcagugacgaucugcucauuuuagcggcugaccuggagaaacuuaaguccaaagugacgcgcaccgaaagacccuugucuagcggcgucuauauggggaaucuguccucacagcaacuagaucagaggcgggcccuccugaacaugauaggaaugacaggcgugaguggugggggaaagggcgcaagcgacggcaucguacgcguuugggaugugaaaaaugccgagcuucugaacaaucaguucgggacuaugccuucuuugacccucgcuugucugacaaagcagggacaagucgacuuaaacgaugcagugcaggcccugaccgaccucggucuuauuuacacugcuaaguauccaaauuccucagaccuggaucgauugagccagagucauccgauccuaaacaugauugacacuaaaaagucuucccugaauaucagcggcuacaacuuuucgcucggggccgcggugaaagcaggagccugcaugcuggauggcgguaauaugcuugagaccauaaaggucucuccccaaacgauggacgggauccugaaauccauuuugaagguuaaaaagucacucggaauguucgugagugauacuccuggcgaaagaaacccauaugagaacauccuguacaagauuuguuuaagcggcgacggguggcccuauaucgcuuccaggaccucuauaguaggacgggccugggaaaauacaguggucgaucuggagcaggacaacaaaccucagaagauugguaauggcgggagcaacaaaucacuacagagugcaggauuugcugccggccucacuuacucccaacugaugacccuuaaggauuucaaaugcuuuaauuugaucccaaacgcgaagacauggauggacauugagggucgucccgaagauccuguggagaucgcccuguaccagccaagcucuggguguuauguucacuucuuucgcgaaccgaccgaccucaagcaguucaaacaggacgcaaaguacucacauggcaucgaugugacggaccuguuugcugcccaacccggacuuacaagugcugucauugaggcccugccuagaaauauggugauaacaugccagggcagcgaagauaucaggaaauugcucgagucccaggggcggcgagacauuaagcugaucgauauaaccuuaucuaaagcagacucgcgcaaguucgagaacgccguaugggaucaguuuaaggaccugugucacaugcauacuggaguuguggucgagaaaaagaaaagagguggcaaggaagaaauuacaccacacugcgcucuaauggauuguaucauguucgacgcggcagugagcgggggacucgaugccaaaguccugagggugguucuuccccgggacaugguguuccgcaccuccacgccuaagguagucuugugaggacuaguuauaagacugacuagcccgaugggccucccaacgggcccuccuccccuccuugcaccgagauuaauaaaaaaaaaaaaaaaaaaaaaaaaaaaaaaaaaaaaaaaaaaaaaaaaaaaaaaaaaaaaaaaaugcaucccccccccccccccccccccccccccccccaaaggcucuuuucagagccaccagaauu

SEQ ID NO: 11000 - RNA, 1927 nt, Artificial Sequence
  mRNA product Design i-3 comprising derived and/or modified sequence from LASV(AV;Clade V)__CCA30315__NP (opt3)
gggagaaagcuuaccaugagcgccuccaaggaggugaaaucuuuccuguggacccagucacucagaagggaacuuaguggcuacugcagcaacaucaagcugcaagucguuaaagacgcucaggcauuguuacacgggcuggauuuuuccgaggugucuaauguacagcggcuaaugcgcaagcagcgacgugacgauucggaccucaaaagacugagggaucuuaaccaagccgugaauaaccuggucgaauugaagucaacacagcaaaagagcgugcuccggguuggaacucugaguuccgacgaucugcucacguuagcggcugaccuggagaaacuuaagucuaaagugacccgcacagaaagacccuugagcuccggugucuauaugggcaaucugucaagucagcagcuagaucagaggcgggcccuccugaaccuuauugggaugacuaauggaagccagggcucucaggcaggucgcgacggggugguacgaguuugggaugugaagaacgccgagcuguugaauaaccaauucggaaccaugccuucccucacacuggcuuguuuaaccaaacagggccaggucgaccugaaugauguggugcaagcacucacugaccuuggccugauauacacagccaaguauccaaacaccucagacuuggauagacuaacgcagagccauccgauccugaauaugauugacacuaagaaaaguucucucaacaucuccggguacaauuuuagccugggagcugccgucaaggcgggugcaugcaugcuugauggcgggaacaugcuggagaccauuaaaguuucgccccagucuauggacggaaucuugaaguccauacucaaagugaagagggcccugggcauguucguaucagauacaccuggugaacggaacccauaugagaauaucuuauacaaaauuugucugaguggggacggauggcccuauaucgcuagccguacuuccauugugggccgcgccugggaaaacaccgucguggaucuagagacagacggcaagccucagaagaucgggucuggaaauagcaacaaaucacuccaaagugcagguuuuuccgcuggccugaccuacagccagcuuaugacguugaaggaugccaugcugcagcucgacccaaaugcgaaaacuuggauggauauagaggggagacccgaagacccuguugagguggcccuguaccagccaauuucuggaugcuauauccacuucuuuagggaaccgacagaccuuaagcaauucaaacaggaugcaaaguacucacauggcauugacaucgcugaucuguuugccgcucagcccgguuugaccagugccgucaucgaggcacucccucggaacauggugauuacuugucaggggagcgaagacauaaagaaacuguuagagucccaaggccgaaaggauaucaaacugauugacaucgcccuaucuaagauagauucgcgcaaauucgagaaugcuguaugggaccaguauaaggaucucugccacaugcauacaggaguuguggucgaaaagaaaaagagaggcgggaaagaggaaauuaccccacacugugcgcugauggacugcaucauguuugaugcagccgugagcggaggucuuaacacguugguccugagggcugugcucccccgggacaugguuuuccgcaccuccacaccuagagugguacugugaggacuaguuauaagacugacuagcccgaugggccucccaacgggcccuccuccccuccuugcaccgagauuaauaaaaaaaaaaaaaaaaaaaaaaaaaaaaaaaaaaaaaaaaaaaaaaaaaaaaaaaaaaaaaaaaugcaucccccccccccccccccccccccccccccccaaaggcucuuuucagagccaccagaauu

SEQ ID NO: 11001 - RNA, 1927 nt, Artificial Sequence
  mRNA product Design i-3 comprising derived and/or modified sequence from LASV(Togo/2016/7082;Clade VI)__AMR44578__NP (opt3)
gggagaaagcuuaccaugagcaacuccaaggaggugaaaucuuuccuguggacccagucacucagaagggaacuuaguggcuacugcagcaauaucaagcugcaagucguuaaagacgcccaggcuuuguuacacgggcuggauuuuuccgaggugucuaacguacagcggcuaaugcgcaagcagaaacgagacgauggagaccucaagcgucugagagaucuuaaucaagcagugaacaaucuggucgaauugaagucggugcagcagaaaucaauucucaggguugguacacugacuagcgacgaucugcucacguuagccgcggaccuggagaaacuuaaaaguaaggugacccggacagaacgccccuuguccucuggcgucuauauggggaaccugagcucccagcaacuagaucagagaagggcucuccugucaaugauaggaaugaguggcgguaaucagaacagccagccuaaaggggacggagugguacggguuugggaugugaagaaugccgaccuucugaacaaucaauucggcacuaugccaucuuugacccucgcaugucugacaaagcagggccaggucgauuuaaacgacgccgugcaagcucugaccgaccucgggcuuaucuacacugcaaaauaucccaauuccucagaucuggaccgcuugagccagagucauccgauucuaaacaugaucgauacaaagaaaucuucccugaauauuagcggauacaacuuuucgcucggugccgcuaucaagaccggcgccugcaugcuggacgggggaaacaugcuugagacgauaaaagugacuccucagaccauggauggcauccugaagucuauuuugaaagucaagcgaucccucgguauguucaucucagacacaccaggggagagaaaucccuaugaaaacauucuguacaagaucuguuuaaguggagauggcuggccuuauauagcgagcaggacugcaauuaucggccgggccugggagaauaccguuguggaccuggaauccgauucuaaaccacagaagauugggagcaacggaucaaauaaaagucuacaauccgcugguuuugcccccggccucacauacagccagcugaugacccuuaaggacucuauguugcagcuggauccuaacgcaaaaacguggaucgacaucgaggggcguccagaggacccgguagaaguggcucucuuccagcccauuucaggaugcuacauacacuuuuuccgcgagccuacugaucugaagcaauuuaagcaggacgccaaauauagucauggcaucgaugucacagaccuuuucgcggcccagccaggucugaccagcgcagugauugaggcuuugcccagaaauaugguucucacuugucagggguccgaugacaucaagaaacuguuagauucucaaggcaggcgggacauaaagcugauugaugugucgcuaaacaaaaucgacagccgaaaguuugaaaaugccgucugggaucaguacaaggaccucugccacaugcauacaggagugguaguugaaaagaagaaaaagggcgggaaagaggagaucaccccucacugugcucugcuugauugcauuauguucgacgccgcaguguccggagguuugaacgccacgguccugcgcgcugugcucccaagagacauggucuuuaggaccucaagucccaaggugguucugugaggacuaguuauaagacugacuagcccgaugggccucccaacgggcccuccuccccuccuugcaccgagauuaauaaaaaaaaaaaaaaaaaaaaaaaaaaaaaaaaaaaaaaaaaaaaaaaaaaaaaaaaaaaaaaaaugcaucccccccccccccccccccccccccccccccaaaggcucuuuucagagccaccagaauu

SEQ ID NO: 11002 - RNA, 1927 nt, Artificial Sequence
  mRNA product Design i-3 comprising derived and/or modified sequence from LASV(KAK-428;Clade n.d. (VII))__ANH09741__NP (opt3)
gggagaaagcuuaccaugagcaacuccaaggaggugaaaucuuuccuguggacccagucacucagaagggaacuuaguggcuacugcacaaauaucaagcugcaagucguuaaagacgcccaggcuuuguuacacgggcuggauuuuagcgagguguccaacguacagcggcuaaugcgcaagcagaaacgagacgauaaugaccucaagcgucugagagaucuuaaccaagcagugaauaaccuggucgaauugaagucugugcagcagaaaucgguucucaaggugggaacucucaauucagacgaucugcugacguuagccgcggaccuggagaaacuuaagagcaaagucgugaggaccgaacggcccuugaguuccgguguauauaugggcaaccugucuagccagcaacuagaucagcgcagagcucuccugaauaugauugggauggccggaggcucccaggguaaccagccuucaagggacgggguugugcgggucugggaugugaagaaugcagaccuucugaacaaucaauucggaacaaugccaaguuugacucucgccugucugaccaagcagggccagguggauuuaaacgacgucguucuggcucucacagaccuuggccugauauacaccgcaaaauauccgaauagcucugauuuggaccgccuaucccaaaaccaucccgugcugaacaugaucgauguaaauaagucaagccucaacauuaguggguacaauuuuucucugggagccgcugugaaagccggugcgugcaugcuugacggcgggaacaugcuggagacuaucaagauuuccccucagacagucgauggaaucuugaaaagcauacucaaggugaaacgagcacugggcauguucguuucggacaccccaggugagagaaaucccuaugaaaacaucuuauacaaggugugucugucugggaauggauggccuuauauugccuccaggacgucaaucgucggccgggcuugggagaacacugugguagaucuagaaaguaauaagaaccagccaaaaguuggcaauaacgggagcaauaagaugcuccaguccucuggauuugccaccggucugacauacagccaacuuaugacuuugcgugacucaaugcugcagcucgaucccaccgcaaaaacauggauugacaucgagggccgcccugaggauccaguggaacuggcucuuuuccagccgaguuccgggugcuacauacacuuuuucagagagcccaccgaccugaagcaguuuaaacaagacgccaaguauagccauggaauugaugucaacgacuuguucucugcgcagccuggccucacgucagccgugcuggaagcauuaccaaggaauaugguccugacuugucaggguagugaugacauccggaagcuacucgauagccaggaccgaaaagauauuaagcugaucgacaucucccuuucuaaagcugaugcccgcaaguuugagaacgacgugugggaucaauucaaagacuugugccacaugcauacagggauuguuguggaaaagaagaaaaagggcggaaaacaggagaugacuccccacugugcucugcucgauugcauaauguuugacgccgcaguaucgggcgggcugaacgucccuaccuuaagagccgugcugccaacagacaugguuuucaggaccaucacgaccaaggugguccuuugaggacuaguuauaagacugacuagcccgaugggccucccaacgggcccuccuccccuccuugcaccgagauuaauaaaaaaaaaaaaaaaaaaaaaaaaaaaaaaaaaaaaaaaaaaaaaaaaaaaaaaaaaaaaaaaaugcaucccccccccccccccccccccccccccccccaaaggcucuuuucagagccaccagaauu

SEQ ID NO: 11003 - RNA, 1927 nt, Artificial Sequence; identical to SEQ ID NO: 10997
  mRNA product Design i-3 comprising derived and/or modified sequence from LASV(Pinneo-NIG-1969;Clade I)__AIT17837__NP (opt3)

SEQ ID NO: 11004 - RNA, 1927 nt, Artificial Sequence
  mRNA product Design i-3 comprising derived and/or modified sequence from LASV(ISTH0009-NIG-2011;Clade II)__AIT17405__NP (opt3)
gggagaaagcuuaccaugagcguguccaaggaggucaaaucuuuccuguggacccagucacucagaagggaacuuaguggcuacugcagcaacaucaagcugcaaguugugaaagacgcccaggcuuuguuacacgggcuggauuuuuccgagguaucuaaugugcagcggcuaaugcgcaagcagaaacgagacgauucggaccucaagcgucugagagaucuuaaccaagcagucaauaaccugguggaauugaagucaacacagcagaaaagcauucucaggguuggaacucugacgagugacgaucugcucaccuuagccgcggaccuggagaaacuuaaguccaaggugauacggacagaacgccccuugucuagcggugucuauaugggcaaucuguccacucagcaacuagagcagagaagggcucuccugaacaugaucgggauggugggaggcgcccaggguacccagccugggcgggauggaguaguucgcgugugggacgucaaaaauccagaucuucugaacaaucaauucggcacaaugccgucauugacccucgcaugucugacuaagcagggccagguggacuuaaacgaugccgugcuggcucucacagaccuugggcugauuuacaccgcaaaguaucccaauaguagcgacuuggaucgacuaucucaaucccauccuauccugaacauggucgacauuaaaaagucaagccucaauaucaguggauacaacuuuucucugggugccgcuguuaaagccggcgcgugcaugcuugaugggggaaauaugcuggagacgauaaaggugacuccacagaccauggacggcaucuugaaauccauucucaagguaaaaagaagccuggguauguucgugucggauacacccggggaaaggaacccuuaugagaacaucuuauacaagauuugucugucuggagacggcuggccauauaucgcaucccggacuucaauagucggccgugccugggaaaauaccacaguggaucuagagagugacgggaagccccagaaaguuggaagcgcugguuccaacaagucucuccagagcgccggcuuuccuaccgggcugacguacucacaacuuaugacuuugaaagauaguaugaugcagcuggacccauccgcaaagacauggauugauaucgagggacgcccggaagaccccguggagauugcucucuaccagccuaugagcggcugcuauauccacuucuuuagagaaccaaccgaccugaaacaguucaagcaagaugccaaguacucucaugguaucgacgucgcggaucuuuuucccgcccagccugggcugacuucagcagugauugaggcuuugccaaggaauaugguacucacaugucagggcagugacgauauaaaacggcuguuagacagccagggacgacgcgauaucaagcugauugacaucgcccuauccaaagcugauucuagaagguucgaaaacgccguuugggaccaaugcaaggaucucugucacaugcauaccggcguggucguggagaaaaagaagcgcgggggaaaagaggaaauaacgccccacugcgcacugauggacuguauuauguaugaugccgcugucucggguggccuuaauaucccgguguugcgggcgguucugccuagagacaugguguuuaggaccagcucccccaagguaguccucugaggacuaguuauaagacugacuagcccgaugggccucccaacgggcccuccuccccuccuugcaccgagauuaauaaaaaaaaaaaaaaaaaaaaaaaaaaaaaaaaaaaaaaaaaaaaaaaaaaaaaaaaaaaaaaaaugcaucccccccccccccccccccccccccccccccaaaggcucuuuucagagccaccagaauu

SEQ ID NO: 11005 - RNA, 1927 nt, Artificial Sequence
  mRNA product Design i-3 comprising derived and/or modified sequence from LASV(ISTH2010-NIG-2012;Clade II)__AIT17483__NP (opt3)
gggagaaagcuuaccaugagcgccuccaaggaggugaaaucuuuccuguggacccagucacucagaagggaacuuaguggcuacugcagcaacaucaagcugcaagucguuaaagacgcucaggcauuguuacacgggcuggauuuuuccgaggugucuaauguacagcggcuaaugcgcaagcagaaacgagacgauucggaccucaagcgucugagagaucuuaaccaagccgugaauaaccuggucgaauugaagucaacacagcagaaaagcauucucagggugggaacucugacgagugacgaucugcucaccuuagcggcugaccuggagaaacuuaaguccaagguuauacggacagaacgccccuugucuagcgguguguauaugggcaaucuguccacucagcaacuagagcagagaagggcccuccugaaccuuaucgggauggucggaggcgcacaggguacccagccugggcgggauggagugguacgcguuugggacgugaaaaauccagaucuguugaacaaucaauucggcacaaugccgucacucacccuggccuguuuaacuaagcagggccaggucgaccugaacgaugcugugcucgcacuuacagaccugggguugauuuacaccgccaaguaucccaauaguagcgaccuagaucgacugucucaaucccauccuauccucaacaugguggacacgaaaaagucaagccugaauauuaguggauuuaacuucucucuuggugcugccgucaaagcgggcgcaugcaugcuggaugggggaaauauguuggagacuaucaagguuaccccacagacaauggacggcauacucaaauccauccugaaggugaaaaagagcuuagguauguuuguaucggauacucccggggaaagaaacccuuacgagaacauucuguauaagaucugucuaucuggagacggcuggccauacauugccuccaggaccucaaucgugggccgggcuugggaaaauacaaccgucgaucucgagagugacgggaaaccccacaaggugggaacggccgguagcaacaaaucccugcagucugcaggcuucccuacugggcuuacauauagccaguugaugacccugaaggauucaaugaugcaacucgacccaagugcuaaaacuuggauagauauugagggacguccggaagaccccguugagaucgcccuguaccagccuauguccggcugcuacauucacuuuuuccgcgaaccaacagaccuuaagcaguuuaagcaggaugcgaaauauagccaugguaucgacguggccgaucuguuccccgcacaaccuggguugaccucugcugucaucgaggcccucccaagaaauauggugcugacgugucagggcucagacgauauuaagagguuacuggacagucagggacggcgagauauaaaacuaaucgacauugcucucagcaaggccgauucccgcagauuugaaaacgcaguaugggaccagugcaaagaucugugucauaugcacaccggcguuguggucgagaagaagaaaaggggagggaaggaggaaaucacaccccacugcgcccuuauggacuguauaauguacgaugcugcggugucugguggcuugaauauuccgguccugcgggcagugcucccucgcgacaugguuuucagaacuucgagccccaaagugguacugugaggacuaguuauaagacugacuagcccgaugggccucccaacgggcccuccuccccuccuugcaccgagauuaauaaaaaaaaaaaaaaaaaaaaaaaaaaaaaaaaaaaaaaaaaaaaaaaaaaaaaaaaaaaaaaaaugcaucccccccccccccccccccccccccccccccaaaggcucuuuucagagccaccagaauu

SEQ ID NO: 11006 - RNA, 1927 nt, Artificial Sequence
  mRNA product Design i-3 comprising derived and/or modified sequence from LASV(Lassa virus/H.sapiens-wt/NGA/2015/ISTH_0543;Clade II)__AVO03640__NP (opt3)
gggagaaagcuuaccaugagcgccuccaaggaggugaaaucuuuccuguggacccagucacucagaagggaacuuaguggcuacugcagcaacaucaagcugcaagucguuaaagacgcucaggcauuguuacacgggcuggauuuuuccgaggugucuaauguacagcggcuaaugcgcaagcagaaacgagacgauucggaccucaagcgucugagagaucuuaaccaagccgugaauaaccuggucgaauugaagucaacacagcagaaaagcauucucagggugggaacucugacgagugacgaucugcucaccuuagcggcugaccuggagaaacuuaaguccaagguuauacggacagaacgccccuugucuagcgguguguauaugggcaaucuguccacucagcaacuagagcagagaagggcccuccugaacaugaucgggauggucggaggcgcacaggguacccagccugggcgggauggagugguacgcguuugggacgugaaaaauccagaucuucugaacaaucaauucggcacaaugccgucauugacccucgccugucugacuaagcagggccaggucgacuuaaacgaugcugugcuggcacucacagaccuugggcugauuuacaccgccaaguaucccaauaguagcgacuuggaucgacuaucucaaucccauccuauccugaacaugguggacacgaaaaagucaagccucaauauuaguggauacaacuuuucucugggugcugccgucaaagcgggcgcaugcaugcuugaugggggaaauaugcuggagacuaucaagguuaccccacagacaauggacggcauauugaaauccauccucaaggugaaaaagagccuggguauguucguaucggauacucccggggaaagaaacccuuaugagaacauuuuauacaagaucugucugucuggagacggcuggccauauauugccuccaggaccucaaucgugggccgggcuugggaaaauacaaccgucgaucuagagagugacgggaaaccccagaaggugggaagcgccgguuccaacaaaucucuccagagcgcaggcuuuccuacggggcugacuuacucacaacuuaugacauugaaggauaguaugaugcagcuggacccauccgcuaaaaccuggauagauauugagggacguccggaagaccccguugagaucgcccucuaccagccuaugagcggcugcuauauucacuucuuucgcgaaccaacugaccugaagcaguucaagcaagaugcgaaauacucucaugguaucgacguggccgaucuuuuucccgcacagccugggcugacaucagcugucaucgaggccuugccaagaaauauggugcucaccugucagggcagugacgauauuaagaggcuguuagacagccagggacggaaagauauaaagcugaucgacauugcucuauccaaagccgauucucgacgcuucgaaaacgcaguaugggaccaaugcaaggaucucugucacaugcauacgggcguuguggucgagaagaaaaagagagggggaaaagaggaaaucacaccccacugcgcccugauggacuguauaauguaugaugcugcggugucggguggccuuaauauuccggucuugagggcagugcugccucgggacaugguuuuucgcaccagcucccccaaggugguacucugaggacuaguuauaagacugacuagcccgaugggccucccaacgggcccuccuccccuccuugcaccgagauuaauaaaaaaaaaaaaaaaaaaaaaaaaaaaaaaaaaaaaaaaaaaaaaaaaaaaaaaaaaaaaaaaaugcaucccccccccccccccccccccccccccccccaaaggcucuuuucagagccaccagaauu

SEQ ID NO: 11007 - RNA, 1927 nt, Artificial Sequence
  mRNA product Design i-3 comprising derived and/or modified sequence from LASV(Lassa virus/H.sapiens-wt/NGA/2016/ISTH_0009;Clade II)__AVO03572__NP (opt3)
gggagaaagcuuaccaugagcgccuccaaggaggugaaaucuuuccuguggacccagucacucagaagggaacuuaguggcuacugcagcaacaucaagcugcaagucguuaaagacgcucaggcauuguuacacgggcuggauuuuuccgaggugucuaauguacagcggcuaaugcgcaagcagaaacgagacgauucggaccucaagcgucugagagaucuuaaccaagccgugaauaaccuggucgaauugaagucaacacagcagaaaagcauucucagggugggaacucugacgagugacgaucugcucaccuuagcggcugaccuggagaaacuuaaguccaagguuauacggacagaacgccccuugucuagcgguguguauaugggcaaucuguccacucagcaacuagagcagagaagggcccuccugaacaugaucgggauggucggaggcgcacaggguacccagccugggcgggauggagugguacgcguuugggacgugaaaaauccagaucuucugaacaaucaauucggcacaaugccgucauugacccucgccugucugacuaagcagggccaggucgacuuaaacgaugcugugcuggcacucacagaccuugggcugauuuacaccgccaaguaucccaauaguagcgacuuggaucgacuaucucaaucccauccuauccugaacaugguggacacgaaaaagucaagccucaauauuaguggauacaacuuuucucugggugcugccgucaaagcgggcgcaugcaugcuugaugggggaaauaugcuggagacuaucaagguuaccccacagacaauggacggcauauugaaauccauccucaaggugaaaaagagccuggguauguucguaucggauacucccggggaaagaaacccuuaugagaacauuuuauacaagaucugucugucuggagacggcuggccauauauugccuccaggaccucaaucgugggccgggcuugggaaaauacaaccgucgaucuagagagugacgggaaaccccagaaggugggaagcgccgguuccaacaaaucucuccagagcgcaggcuuuccuacggggcugacuuacucacaacuuaugacauugaaggauaguaugaugcagcuggacccauccgcuaaaaccuggauagauauugagggacguccggaagaccccguugagaucgcccucuaccagccuaugagcggcugcuauauucacuucuuucgcgaaccaacugaccugaagcaguucaagcaagaugcgaaauacucucaugguaucgacguggccgaucuuuuucccgcacagccugggcugacaucagcugucaucgaggccuugccaagaaauauggugcucaccugucagggcagugacgauauuaagaggcuguuagacagccagggacggcgagauauaaaacugaucgacauugcucuauccaaggccgauucucgcagauucgaaaacgcaguaugggaccaaugcaaagaucucugucacaugcauacgggcguuguggucgagaagaagaaaaggggagggaaggaggaaaucacaccccacugcgcccugauggacuguauaauguaugaugcugcggugucggguggccuuaauauuccggucuugcgggcagugcugccucgcgacaugguuuuuagaaccagcucccccaaagugguacucugaggacuaguuauaagacugacuagcccgaugggccucccaacgggcccuccuccccuccuugcaccgagauuaauaaaaaaaaaaaaaaaaaaaaaaaaaaaaaaaaaaaaaaaaaaaaaaaaaaaaaaaaaaaaaaaaugcaucccccccccccccccccccccccccccccccaaaggcucuuuucagagccaccagaauu

SEQ ID NO: 11008 - RNA, 1927 nt, Artificial Sequence
  mRNA product Design i-3 comprising derived and/or modified sequence from LASV(Lassa virus/H.sapiens-wt/NGA/2016/ISTH_0017;Clade II)__AVO03568__NP (opt3)
gggagaaagcuuaccaugagcgccuccaaggaggugaaaucuuuccuguggacccagucacucagaagggaacuuaguggcuacugcagcuccaucaagcugcaagucguuaaagacgcucaggcauuguuacacgggcuggauuuuucugaggugucgaacguacagcggcuaaugcgcaagcagaaacgagacgauucagaccucaagcgucugagagaucuuaaucaagccgugaacaaucuggucgaacuuaagagcacacagcagaaaaguauucucagggugggaacucugacguccgacgaucugcucaccuuagcggcugaccuggagaaguugaaaucuaagguuauacggacagaacgccccuugagcuccgguguguauaugggcaaccugucaacucagcaacuagagcagagaagggcccuccugaauaugaucgggauggcaggaggcgcccaggguacccagccugggcgggauggagucgugcgcguaugggacguuaaaaacccagaucuucugaauaaccaauucggcacaaugccgaguuugacccucgcuugucugacuaagcagggccagguggacuuaaaugaugcaguccuggcccucacagaccuugggcugauuuacaccgcuaaguaucccaacagcucugacuuggaucgacuaucccaaucacauccuauccugaauaugguggacacgaaaaagagcagucucaacauuucuggauacaauuuuucccugggugccgcggugaaagcaggcgccugcaugcuugaugggggaaacaugcuggagacuaucaaggucaccccacagacaauggacggcauauugaaaagcauccucaagguuaaaagaucgcuggguauguucgugucugaugcucccggggaaaggaauccuuaugagaacauuuuauacaagaucugucuguccggagacggcuggccauauauugccucacggaccaguaucguaggccgugcaugggaaaacaccacaguggaucuagagagcgacgggaagccccagaaagucggagcuaccgguuccaauaagucucuccagagcgccggcuuuccuacggggcugacuuacucacaacuuaugacauugaaagauaguaugaugcagcuggacccauccgcgaagaccuggauagauauugagggacgcccggaagaccccguggagguugcccucuaccagccugugagcggcugcuauauccacuucuuuagagaaccaacugaccugaaacaguucaagcaagaugcaaaguacucucaugguauugacgucgcugaucuuuuucccgcccagccugggcugacaucagcugugaucgaggccuugccaaggaacaugguacucaccugucagggcagugacgauaucaaaaagcuguuagacagccagggacggaaagauauuaagcugauagacaucgcacuauccaaagccgauucucgacgcuucgaaaaugcuguuugggaccaaugcaaggaucucugucacaugcauacgggcguggucguggagaagaaaaagagagggggaaaagaggaaauuacuccccacugcgcgcugauggacuguaucauguaugaugcagccgucucggguggccuuaacauaccgguguugagggcuguucugccucgggacaugguguuucgcacaagcucccccaagguaguccucugaggacuaguuauaagacugacuagcccgaugggccucccaacgggcccuccuccccuccuugcaccgagauuaauaaaaaaaaaaaaaaaaaaaaaaaaaaaaaaaaaaaaaaaaaaaaaaaaaaaaaaaaaaaaaaaaugcaucccccccccccccccccccccccccccccccaaaggcucuuuucagagccaccagaauu

SEQ ID NO: 11009 - RNA, 1927 nt, Artificial Sequence
  mRNA product Design i-3 comprising derived and/or modified sequence from LASV(Lassa virus/H.sapiens-wt/NGA/2018/ISTH_0959;Clade II)__AVV65100__NP (opt3)
gggagaaagcuuaccaugagcgccuccaaggaggugaaaucuuuccuguggacccagucacucagaagggaacuuaguggcuacugcagcaacaucaagcugcaagucguuaaagacgcucaggcauuguuacacgggcuggauuuuuccgaggugucuaauguacagcggcuaaugcgcaagcagaaacgagacgauucggaccucaagcgucugagagaucuuaaccaagccgugaauaaccuggucgaauugaagucaacacagcagaaaagcauucucagggugggaacucugacgagugacgaucugcucaccuuagcggcugaccuggagaaacuuaaguccaagguuauacggacagaacgccccuugucuagcgguguguauaugggcaaucuguccacucagcaacuagagcagagaagggcccuccugaaccuuaucgggauggucggaggcgcacaggguacccagccugggcgggauggagugguacgcguuugggacgugaaaaauccagaucuguugaacaaucaauucggcacaaugccgucacucacccuggccuguuuaacuaagcagggccaggucgaccugaacgauguggugcucgcucuuacagaccugggguugauuuacaccgcaaaguaucccaauaguagcgaccuagaucgacugucucaaucccauccuauccucaacauggucgacacgaaaaagucaagccugaauauuaguggauuuaacuucucucuuggugccgcuguuaaagccggcgcgugcaugcuggaugggggaaauauguuggagacuaucaaggugaccccacagacaauggacggcauacucaaauccauccugaaggugaaaaagagcuuagguauguuuguaucggauacucccggggaaagaaacccuuacgagaacauucuguauaagaucugucuaucuggagacggcuggccauacauugcauccaggaccucaaucgucggccgggccugggaaaauacaaccguggaucucgagagugacgggaaaccccacaagguuggaacggcugguagcaacaaaucccugcagucugccggcuucccuacugggcuuacauauagccaguugaugacccugaaggauucaaugaugcaacucgacccaagugcaaaaacuuggauagauauugagggacguccggaagaccccguggagaucgcucuguaccagccuauguccggcugcuacauucacuuuuuccgcgaaccaacagaccuuaagcaguuuaagcaggaugccaaauauagccaugguaucgacgucgcggaucuguuccccgcccaaccuggguugaccucugcagugaucgaggcucucccaagaaauaugguacugacgugucagggcucagacgauauuaagagguuacuggacagucagggacggaaagauauaaagcuaaucgacauugcccucagcaaaaccgauucccgacgcuuugaaaacgcuguuugggaccagugcaaggaucugugucauaugcacacaggcguggucguggagaagaaaaagagagggggaaaagaggaaaucacuccccacugcgcccuuauggacuguauaauguacgaugcagccgucucugguggcuugaauauuccggugcugagggcuguucucccucgggacaugguguuccgcaccucgagccccaagguaguccugugaggacuaguuauaagacugacuagcccgaugggccucccaacgggcccuccuccccuccuugcaccgagauuaauaaaaaaaaaaaaaaaaaaaaaaaaaaaaaaaaaaaaaaaaaaaaaaaaaaaaaaaaaaaaaaaaugcaucccccccccccccccccccccccccccccccaaaggcucuuuucagagccaccagaauu

SEQ ID NO: 11010 - RNA, 1927 nt, Artificial Sequence
  mRNA product Design i-3 comprising derived and/or modified sequence from LASV(LASV003-NIG-2008;Clade II)__AIT17581__NP (opt3)
gggagaaagcuuaccaugagcgccuccaaggaggugaaaucuuuccuguggacccagucacucagaagggaacuuaguggcuacugcagcuccaucaagcugcaagucguuaaagacgcucaggcauuguuacacgggcuggauuuuucugaggugucgaacguacagcggcuaaugcgcaagcagaaacgagacgauucagaccucaagcgucugagagaucuuaaucaagccgugaacaaucuggucgaacuuaagagcacacagcagaaaagugugcucaggguuggaacucugacguccgacgaucugcucaccuuagcggcugaccuggagaaguugaaaucuaaggugauucggacagaacgccccuugagcuccggugucuauaugggcaaccugucagcccagcaacuagagcagagaaggacucuccugaauaugauagggauggugggaggcgcacaggguacccagccugggcgggauggaguaguucgcgugugggacgucaaaaacccagaucuucugaauaaccaauucggcacaaugccgaguuugacccucgccugucugacuaagcagggccagguggacuuaaaugaugugguccuggcucucacagaccuugggcugaucuacaccgcaaaguaucccaacagcucugacuuggaucgacuaucccaaucacauccuauucugagcaugguugacacgaaaaagaguucucucaauaucuccggauacaacuuuagccugggugccgcugugaaagccggcgcgugcaugcuugaugggggaaauaugcuggagacuauuaagguaaccccacagacaauggacggcaucuugaaaucgauacucaaggugaaaaagucucuggguauguucgucuccgauacucccggggaaagaaacccuuaugagaauaucuuauacaagauuugucugucaggagacggcuggccauauaucgcaaguaggaccagcauugugggccgggccugggaaaacacaaccguugaucuagaguccgacgggaaaccccagaaggugggaacggcugguucuaacaaaagccuccagucagccggcuuuccuacugggcugacauacagucaacuuaugaccuugaaggauuccaugaugcagcuggacccaagcgcaaaaacuuggaucgauauagagggacguccggaagaccccgucgagauugcucucuaccagccuaugucuggcugcuauauccacuucuuucgcgaaccaacagaccugaagcaguucaagcaagaugccaaauacucacaugguauugacgugaccgaucuuuuucccgcgcagccugggcugacgagugccguaaucgaggcauugccaagaaauaugguucucaccugucagggcagcgacgauaucaagaggcuguuagacucccagggacggcgagauauuaaacugauagacaucgcucuaucuaaggccgauucgcgcagauucgaaaacgcugugugggaccaaugcaaagaucucugucacaugcauacaggcgucguggucgagaagaagaaaaggggagggaaggaggaaauuacuccccacugcgcccugauggacuguaucauguaugaugcagccgugagcgguggccuuaauauaccgguuuugcgggcugugcugccucgcgacaugguauuuagaaccuccucacccaaagucgugcucugaggacuaguuauaagacugacuagcccgaugggccucccaacgggcccuccuccccuccuugcaccgagauuaauaaaaaaaaaaaaaaaaaaaaaaaaaaaaaaaaaaaaaaaaaaaaaaaaaaaaaaaaaaaaaaaaugcaucccccccccccccccccccccccccccccccaaaggcucuuuucagagccaccagaauu

SEQ ID NO: 11011 - RNA, 1927 nt, Artificial Sequence
  mRNA product Design i-3 comprising derived and/or modified sequence from LASV(LASV035-NIG-2009;Clade II)__AIT17589__NP (opt3)
gggagaaagcuuaccaugagcgccuccaaggaggugaaaucuuuccuguggacccagucacucagaagggaacuuaguggcuacugcagcuccaucaagcugcaagucguuaaagacgcucaggcauuguuacacgggcuggauuuuucugaggugucgaacguacagcggcuaaugcgcaagcagaaacgagacgauucagaccucaagcgucugagagaucuuaaucaagccgugaacaaucuggucgaacuuaagagcacacagcagaaaaguauucucagggugggaacucugacguccgacgaucugcucaccuuagcggcugaccuggagaaguugaaaucuaagguuauacggacagaacgccccuugagcuccgguguguauaugggcaaccugucagcccagcaacuagagcagagaagggcacuccugaauaugaucgggauggucggaggcgcccaggguacucagccugggcgggauggagugguacgcguuugggacgugaaaaacccagaucuucugaauaaccaauucggcaccaugccgaguuugacacucgcuugucugaccaagcagggccaggucgacuuaaaugaugcagugcuggcccucacugaccuugggcugauuuacacagcuaaguaucccaacagcucugacuuggaucgacuaucccaaucacauccuauccugaauaugguggacaccaaaaagagcagucucaacauuucuggauacaauuuuucccugggugccgcggucaaagcaggcgccugcaugcuugaugggggaaacaugcuggagacgaucaagguuacuccacagaccauggacggcauauugaaaagcauccucaaggugaaaagaucgcuggguauguucguaucugauacacccggggaaaggaauccuuaugagaacauuuuauacaagaucugucuguccggagacggcuggccauauauugcuucacggaccaguaucgugggccgugccugggaaaacacuacagucgaucuagagagcgacgggaagccccagaaagugggaaccacggguuccaauaagucucuccagagcgcaggcuuuccuacugggcugacauacucacaacuuaugaccuugaaagauaguaugaugcagcuggacccauccgcuaagacuuggauagauauugagggacgcccggaagaccccguugagaucgcccucuaccagccuaugagcggcugcuauauucacuucuuuagagaaccaacagaccugaaacaguucaagcaagaugcgaaguacucucaugguaucgacguggccgaucuuuuucccgcacagccugggcugaccucagcugucaucgaggccuugccaaggaacauggugcucacgugucagggcagugacgauauuaaaaagcuguuagacagccagggacggcgagauauaaaacugaucgacauugcucuauccaaggccgauucucgcaaauucgaaaaugcaguaugggaccaaugcaaggaucucugucacaugcauaccggcguuguggucgagaagaaaaagagagggggaaaagaggaaaucacaccccacugcgcccugauggacuguauaauguaugaugcugcggugucggguggccuuaacauuccggucuugagggcagugcugccucgggacaugguuuuucgcacuagcucccccaaggugguacucugaggacuaguuauaagacugacuagcccgaugggccucccaacgggcccuccuccccuccuugcaccgagauuaauaaaaaaaaaaaaaaaaaaaaaaaaaaaaaaaaaaaaaaaaaaaaaaaaaaaaaaaaaaaaaaaaugcaucccccccccccccccccccccccccccccccaaaggcucuuuucagagccaccagaauu

SEQ ID NO: 11012 - RNA, 1927 nt, Artificial Sequence
  mRNA product Design i-3 comprising derived and/or modified sequence from LASV(LASV1000-NIG-2009;Clade II)__AIT17783__NP (opt3)
gggagaaagcuuaccaugagcgccuccaaggaggugaaaucuuuccuguggacccagucacucagaagggaacuuaguggcuacugcagcaacaucaagcugcaagucguuaaagacgcucaggcauuguuacacgggcuggauuuuuccgaggugucuaauguacagcggcuaaugcgcaagcagaaacgagacgauucggaccucaagcgucugagagaucuuaaccaagccgugaauaaccuggucgaauugaagucaacacagcagaaaagcauucucagggugggaacucugacgagugacgaucugcucaccuuagcggcugaccuggagaaacuuaaguccaagguuauacggacagaacgccccuugucuagcgguguguauaugggcaaucuguccacucagcaacuagagcagagaagggcccuccugaacaugaucgggauggucggaggcgcacaggguacccagccugggcgggauggagugguacgcguuugggacgugaaaaauccagaucuucugaacaaucaauucggcacaaugccgucauugacccucgccugucugacuaagcagggccaggucgacuuaaacgauguggugcuggcucucacagaccuugggcugauuuacaccgcaaaguaucccaauaguagcgacuuggaucgacuaucucaaucccauccuauccugaacauggucgacacgaaaaagucaagccucaauauuaguggauacaacuuuucucugggugccgcuguuaaagccggcgcgugcaugcuugaugggggaaauaugcuggagacuaucaaggugaccccacagacaauggacggcauauugaaauccauccucaaggugaaaaagagccuggguauguucguaucggauacucccggggaaagaaacccuuaugagaacauuuuauacaagaucugucugucuggagacggcuggccauauauugcauccaggaccucaaucgucggccgggccugggaaaauacaaccguggaucuagagagugacgggaaaccccagaagguuggaacggcugguagcaacaaaucccuccagucugccggcuuuccuacugggcugacauacagccaacuuaugaccuugaaggauucaaugaugcagcuggacccaagugcaaaaacuuggauagauauugagggacguccggaagaccccguggagaucgcucucuaccagccugucuccggcugcuauauucacuucuuucgcgaaccaacagaccugaagcaguucaagcaagaugccaaauacagccaugguaucgacguggcggaucuuuuucccgcccagccugggcugaccucugcaguaaucgaggcuuugccaagaaauaugguucucacgugucagggcucagacgauauuaagaggcuguuagacagucagggacggcgagauauaaaacugaucgacauugcccuaagcaaggcugauucccgcagauucgaaaacgccgugugggaccaaugcaaagaucucugucacaugcauaccggcgucguggucgagaagaagaaaaggggagggaaggaggaaaucacaccccacugcgcacugauggacuguauaauguaugaugccgcugugucugguggccuuaauauuccgguuuugcgggcggugcugccucgcgacaugguauuuagaacuucgagccccaaagucgugcucugaggacuaguuauaagacugacuagcccgaugggccucccaacgggcccuccuccccuccuugcaccgagauuaauaaaaaaaaaaaaaaaaaaaaaaaaaaaaaaaaaaaaaaaaaaaaaaaaaaaaaaaaaaaaaaaaugcaucccccccccccccccccccccccccccccccaaaggcucuuuucagagccaccagaauu

SEQ ID NO: 11013 - RNA, 1927 nt, Artificial Sequence
  mRNA product Design i-3 comprising derived and/or modified sequence from LASV(LASV221-NIG-2010;Clade II)__AIT17625__NP (opt3)
gggagaaagcuuaccaugagcgccuccaaggaggugaaaucuuuccuguggacccagucacucagaagggaacuuaguggcuacugcagcuccaucaagcugcaagucguuaaagacgcucaggcauuguuacacgggcuggauuuuucugaggugucgaacguacagcggcuaaugcgcaagcagcgacgugacgauucagaccucaaaagacugagggaucuuaaucaagccgugaacaaucuggucgaacucaagagcacacagcagaagaguauuuugcgggugggaacucugacguccgacgaucugcucaccuuagcggcugaccuggagaaacuuaagucuaaaguuauacgcacagaaagacccuugagcuccgguguguauaugggcaaccugucaacucagcaacuagagcagaggcgggcccuccugaauaugaucgggauggucggaggcgcacaggguacccagccugggcgcgauggagugguacgaguuugggacgugaagaacccagaucuucugaauaaccaauucggcacaaugccgaguuugacccucgccugucugacuaaacagggccaggucgacuuaaaugaugcugugcuggcacucacagaccuugggcugauuuacaccgccaaguaucccaacagcucugacuuggauagacuaucccaaucacauccuauccugaauaugguggacacgaagaaaagcagucucaacauuucuggauacaauuuuucccugggugcugccgucaaggcgggcgcaugcaugcuugaugggggaaacaugcuggagacuaucaaaguuaccccacagacaguggacggcauacucaagagcaucuugaaaguaaagaggucgcuggguauguucgugucugauacucccggggaacggaauccuuaugagaacauuuuauacaaaaucugucuguccggagacggcuggccauauauugccucacguaccaguaucgucggccgcgcuugggaaaacacaaccguggaucuagagagcgacgggaagccccagaagguuggaacggccgguuccaauaaaucucuccagagcgcaggcuuuccuacugggcugacauacucacaacuuaugaccuugaaggauaguaugaugcagcuggacccauccgcuaaaacuuggauagauauugagggaagaccggaagaccccguggagaucgcccucuaccagccuaugagcggcugcuauauucacuucuuuagggaaccaacagaccugaagcaguucaaacaagaugcgaaguacucucaugguaucgacgucgccgaucuuuuucccgcacagccugggcugaccucagcugugaucgaggccuugccacggaacaugguacucacgugucagggcagugacgauauuaagcgacuguuagacagccagggacgcagagauauaaaacugaucgacauugcucuauccaaggccgauucuaggaaauucgaaaaugcaguuugggaccaaugcaaggaucucugucacaugcauaccggcguggucguggagaaaaagaagcgcgggggaaaagaggaaaucacaccccacugcgcccugauggacuguauaauguaugaugcugcggucucggguggccuuaacauuccgguguugcgggcaguucugccuagagacaugguguuuaggacuagcucccccaagguaguccucugaggacuaguuauaagacugacuagcccgaugggccucccaacgggcccuccuccccuccuugcaccgagauuaauaaaaaaaaaaaaaaaaaaaaaaaaaaaaaaaaaaaaaaaaaaaaaaaaaaaaaaaaaaaaaaaaugcaucccccccccccccccccccccccccccccccaaaggcucuuuucagagccaccagaauu

SEQ ID NO: 11014 - RNA, 1927 nt, Artificial Sequence
  mRNA product Design i-3 comprising derived and/or modified sequence from LASV(LASV237-NIG-2010;Clade II)__AIT17639__NP (opt3)
gggagaaagcuuaccaugagcgccuccaaggaggugaaaucuuuccuguggacccagucacucagaagggaacuuaguggcuacugcagcaacaucaagcugcaagucguuaaagacgcucaggcauuguuacacgggcuggauuuuuccgaggugucuaauguacagcggcuaaugcgcaagcagaaacgagacgauucggaccucaagcgucugagagaucuuaaccaagccgugaauaaccuggucgaauugaagucaacacagcagaaaagcauucucagggugggaacucugacgagugacgaucugcucaccuuagcggcugaccuggagaaacuuaaguccaagguuauacggacagaacgccccuugucuagcgguguguauaugggcaaucuguccacucagcaacuagagcagagaagggcccuccugaacaugaucgggauggucggaggcgcacaggguacccagccugggcgggauggagugguacgcguuugggacgugaaaaauccagaucuucugaacaaucaauucggcacaaugccgucauugacccucgccugucugacuaagcagggccaggucgacuuaaacgaugcugugcuggcacucacagaccuugggcugauuuacaccgccaaguaucccaauaguagcgacuuggaucgacuaucucaaucccauccuauccugaacaugguggacauuaaaaagucaagccucaauaucaguggauacaacuuuucucugggugcugccgucaaagcgggcgcaugcaugcuugaugggggaaauaugcuggagacgauaaagguuacuccacagaccauggacggcaucuugaaauccauucucaaggugaaaagaagccuggguauguucguaucggauacacccggggaaaggaacccuuaugagaacaucuuauacaagauuugucugucuggagacggcuggccauauaucgccucccggacuucaauagugggccgugcuugggaaaauaccacagucgaucuagagagugacgggaagccccagaaagugggaagcgccgguuccaacaagucucuccagagcgcaggcuuuccuaccgggcugacguacucacaacuuaugacuuugaaagauaguaugaugcagcuggacccauccgcuaagacauggauugauaucgagggacgcccggaagaccccguugagauugcccucuaccagccuaugagcggcugcuauauccacuucuuuagagaaccaaccgaccugaaacaguucaagcaagaugcgaaguacucucaugguaucgacguggccgaucuuuuucccgcacagccugggcugacuucagcugucauugaggccuugccaaggaauauggugcucacaugucagggcagugacgauauaaaacggcuguuagacagccagggacgacgcgauaucaagcugauugacaucgcucuauccaaagccgauucuagaagguucgaaaacgcaguaugggaccaaugcaaggaucucugucacaugcauaccggcguuguggucgagaaaaagaagcgcgggggaaaagaggaaauaacgccccacugcgcccugauggacuguauuauguaugaugcugcggugucggguggccuuaauaucccggucuugcgggcagugcugccuagagacaugguuuuuaggaccagcucccccaaggugguacucugaggacuaguuauaagacugacuagcccgaugggccucccaacgggcccuccuccccuccuugcaccgagauuaauaaaaaaaaaaaaaaaaaaaaaaaaaaaaaaaaaaaaaaaaaaaaaaaaaaaaaaaaaaaaaaaaugcaucccccccccccccccccccccccccccccccaaaggcucuuuucagagccaccagaauu

SEQ ID NO: 11015 - RNA, 1927 nt, Artificial Sequence
  mRNA product Design i-3 comprising derived and/or modified sequence from LASV(LASV253-NIG-2011;Clade II)__AIT17671__NP (opt3)
gggagaaagcuuaccaugagcgccuccaaggaggugaaaucuuuccuguggacccagucacucagaagggaacuuaguggcuacugcagcuccaucaagcugcaagucguuaaagacgcucaggcauuguuacacgggcuggauuuuucugaggugucgaacguacagcggcuaaugcgcaagcagaaacgagacgauucagaccucaagcgucugagagaucuuaaucaagccgugaacaaucuggucgaacuuaagagcacacagcagaaaagugugcucaggguuggaacucugacguccgacgaucugcucaccuuagcggcugaccuggagaaguugaaaucuaaggugauucggacagaacgccccuugagcuccggugucuauaugggcaaccugucaacucagcaacuagagcagagaagggcccuccugaauaugauagggauggugggaggcgcacaggguacccagccugggcgggauggaguaguucgcgugugggacgucaaaaacccagaucuucugaauaaccaauucggcacaaugccgaguuugacccucgccugucugacuaagcagggccagguggacuuaaaugaugugguccuggcucucacagaccuugggcugaucuacaccgcaaaguaucccaacagcucugacuuggaucgacuaucccaaucacauccuauucugaauaugguugacacgaaaaagagcagucucaacaucucuggauacaauuuuucccugggugccgcugugaaagccggcgcgugcaugcuugaugggggaaacaugcuggagacuauuaagguaaccccacagacaauggacggcaucuugaaaagcauacucaaggugaaaaagucgcuggguauguucgucucugauacucccggggaaagaaauccuuaugagaacaucuuauacaagauuugucuguccggagacggcuggccauauaucgcaucaaggaccaguauugugggccgggccugggaaaacacaaccguugaucuagagagcgacgggaaaccccagaaggugggaacggcugguuccaauaaaucucuccagagcgccggcuuuccuacugggcugacauacucacaacuuaugaccuugaaggauaguaugaugcagcuggacccauccgcaaaaacuuggaucgauauagagggacguccggaagaccccgucgagauugcucucuaccagccuaugagcggcugcuauauccacuucuuucgcgaaccaacagaccugaagcaguucaagcaagaugccaaauacucucaugguauugacgugaccgaucuuuuucccgcgcagccugggcugacgucagccguaaucgaggcauugccaagaaacaugguucucaccugucagggcagugacgauaucaagaggcuguuagacagccagggacggcgagauauuaaacugauagacaucgcucuauccaaggccgauucucgcagauucgaaaaugcugugugggaccaaugcaaagaucucugucacaugcauacaggcgucguggucgagaagaagaaaaggggagggaaggaggaaauuacuccccacugcgcccugauggacuguaucauguaugaugcagccgugucggguggccuuaacauaccgguuuugcgggcugugcugccucgcgacaugguauuuagaaccagcucccccaaagucgugcucugaggacuaguuauaagacugacuagcccgaugggccucccaacgggcccuccuccccuccuugcaccgagauuaauaaaaaaaaaaaaaaaaaaaaaaaaaaaaaaaaaaaaaaaaaaaaaaaaaaaaaaaaaaaaaaaaugcaucccccccccccccccccccccccccccccccaaaggcucuuuucagagccaccagaauu

SEQ ID NO: 11016 - RNA, 1927 nt, Artificial Sequence
  mRNA product Design i-3 comprising derived and/or modified sequence from LASV(LASV254-NIG-2011;Clade II)__AIT17675__NP (opt3)
gggagaaagcuuaccaugagcgccuccaaggaggugaaaucuuuccuguggacccagucacucagaagggaacuuaguggcuacugcagcuccaucaagcugcaagucguuaaagacgcucaggcauuguuacacgggcuggauuuuucugaggugucgaacguacagcggcuaaugcgcaagcagaaacgagacgauucagaccucaagcgucugagagaucuuaaucaagccgugaacaaucuggucgaacucaagagcacacagcagaaaaguguguugaggguuggaacucugacguccgacgaucugcucaccuuagcggcugaccuggagaaacuuaaaucuaaggugauucggacagaacgccccuugagcuccggugucuauaugggcaaccugucaacucagcaacuagagcagagaagggcccuccugaauaugauagggauggugggaggcgcacaggguacccagccugggcgggauggaguaguucgcgugugggacgucaaaaacccagaucuucugaauaaccaauucggcacaaugccgaguuugacccucgccugucugacuaagcagggccagguggacuuaaaugaugcugugcuggcacucacagaccuugggcugaucuacaccgccaaguaucccaacagcucugacuuggaucgacuaucccaaucacauccuauucugaauauggucgacacgaaaaagagcagucucaacaucucuggauacaauuuuucccugggugcugccguuaaagcgggcgcaugcaugcuugaugggggaaacaugcuggagacuauuaaggugaccccacagacaauggacggcaucuugaaaagcauacucaagguaaagaagucgcuggguauguucgugucugauacucccggggaaagaaauccuuaugagaacaucuuauacaagauuugucuguccggagacggcuggccauauaucgccucaaggaccaguauugucggccgggcuugggaaaacacaaucguggaucuagagagcgacgggaaaccccagaagguuggaaccgccgguuccaauaaaucucuccagagcgcaggcuuuccuacggggcugacuuacucacaacuuaugacauugaaggauaguaugaugcagcuggacccauccgcuaaaaccuggauagauauugagggacguccggaagaccccguggagaucgcccucuaccagccuaugagcggcugcuauauucacuucuuucgcgaaccaacugaccugaagcaguucaagcaagaugcgaaauacucucaugguaucgacgucgccgaucuuuuucccgcacagccugggcugacaucagcugugaucgaggccuugccaagaaacaugguacucaccugucagggcagugacgauauuaagaggcuguuagacagccagggacggcgagauauaaaacugaucgacauugcucuauccaaggccgauucucgcagauucgaaaaugcaguuugggaccaaugcaaagaucucugucacaugcauacgggcguggucguggagaagaagaaaaggggagggaaggaggaaaucacaccccacugcgcccugauggacuguauaauguaugaugcugcggucucggguggccuuaacauuccgguguugcgggcaguucugccucgcgacaugguguuuagaaccagcucccccaaaguaguccucugaggacuaguuauaagacugacuagcccgaugggccucccaacgggcccuccuccccuccuugcaccgagauuaauaaaaaaaaaaaaaaaaaaaaaaaaaaaaaaaaaaaaaaaaaaaaaaaaaaaaaaaaaaaaaaaaugcaucccccccccccccccccccccccccccccccaaaggcucuuuucagagccaccagaauu

SEQ ID NO: 11017 - RNA, 1927 nt, Artificial Sequence
  mRNA product Design i-3 comprising derived and/or modified sequence from LASV(Nig08-04;Clade II)__ADU56611__NP (opt3)
gggagaaagcuuaccaugagcgccuccaaggaggugaaaucuuuccuguggacccagucacucagaagggaacuuaguggcuacugcagcaacaucaagcugcaagucguuaaagacgcucaggcauuguuacacgggcuggauuuuuccgaggugucuaauguacagcggcuaaugcgcaagcagaaacgagacgauggagaccucaagcgucugagagaucuuaaccaagccgugaauaaccuggucgaauugaagucgacacagcagaaaucagugcucaggguugguacucugacgagcgacgaucugcucaccuuagcggcugaccuggagaaacuuaagaguaaggugauucggacagaacgccccuuguccucuggcgucuauauggggaaucugagcacucagcaacuagagcagagaaaagcccuccuguccaugauaggaauggugggcggugcacaggggacccagccuggaagggauggcguaguucgggugugggacgucaagaacccagaucuucugaauaaccaauucggcacaaugccgucauugacccucgccugucugacuaagcagggacagguggacuuaaaugaugcugugcuggcacucacagaccuugggcugaucuacaccgccaaauaucccaacaguagcgacuuggaucgccuaucucaaucccauccuauucugaauauggucgacacgaagaaaucaagccucaacaucagugguuacaauuuuucucugggcgcugccguuaaggcgggggcaugcaugcuugauggaggcaacaugcuggagacuauuaaagugaccccacagacaauggacgguaucuugaaguccauacucaaaguaaagcgaagccuggggauguucgugucggauacucccggagaaagaaauccuuaugagaacaucuuauacaagauuugucugucuggcgacggcuggccauauaucgccuccaggaccucaauugucgggcgggcuugggaaaacacaaccguggaucuagagagugacggaaaaccccagaagguugguacggccggcagcaauaaaucccuccagucugcaggguuuccuacuggacugacauacagccaacuuaugaccuugaaggauucaaugaugcagcuggacccaagugcuaaaacuuggaucgauauagagggccguccggaagaccccguggagauugcccucuaccagccuauguccgguugcuauauccacuucuuucgcgaaccaacagaccugaagcaguucaagcaagaugcgaaauacagccaugggauugacgucaccgaucuguuuucugcccagcccggccuuacgucagcagugaucgaggcuuugccuagaaacaugguacucaccugucagggaagugacgauaucaagaaacuguuagacagccagggcaggcgggauauuaagcugauagacaucucccuaaauaaagccgauucucgacgcuucgaaaacgcuguuugggaccaaugcaaggaucucugucacaugcauacagggguggucguggagaagaaaaagagaggagguaaagaggaaauuacuccacacugcgcccugauggacuguaucauguuugaugcagccgucucgggcgggcuuaauauacccauuuugagggcugugcugccgcgggacaugguuuuccgcaccagcuccccuaaggugguacucugaggacuaguuauaagacugacuagcccgaugggccucccaacgggcccuccuccccuccuugcaccgagauuaauaaaaaaaaaaaaaaaaaaaaaaaaaaaaaaaaaaaaaaaaaaaaaaaaaaaaaaaaaaaaaaaaugcaucccccccccccccccccccccccccccccccaaaggcucuuuucagagccaccagaauu

SEQ ID NO: 11018 - RNA, 1930 nt, Artificial Sequence
  mRNA product Design i-3 comprising derived and/or modified sequence from LASV(GA391;Clade III)__AAA46284__NP (opt3)
gggagaaagcuuaccaugagcgccuccaaggaggugagaucuugccuguggacccagucacucaggcgggaacuuaguggcuacuguagcaacaucaaacugcaagucguuaaggacgcucaggcauuguuacacgggcuggauuucuccgaggugucuaauguacagcgccuaaugcgaaaacagaagcgugacgauggagaccucaaaagacugagggaucuuaaccaagccgugaauaaccuggucgaauugaagucgacacagcagaagucagugcuccggguugguacucugagcagugacgaucugcucauuuuagcggcugaccuggagaaacuuaaguccaaagugacgcgcaccgaaagacccuugucuagcggcgucuauauggggaaucuguccucacagcaacuagaucagaggcgggcccuccugaacaugauaggaaugacaggcgugaguggugggggaaagggcgcaagcaauggcaucguacgcguuugggacgugaaaaacgccgagcuucugaauaaccaguuugggacuaugccuucuuugacccucgcuugccugacaaagcagggacaagucgauuuaaaugacgcagugcaggcccugaccgaucucggucuuauuuacacugcuaaguauccaaacuccucagaccuggaccgauugagccagagucauccgauccuaaauaugauugauaccaaaaagucuucccugaacaucagcggcuacaauuucucgcucggggccgcggugaaagcaggagccuguaugcuggacggcgguaacaugcuugagacaauaaaggucucuccccaaacgauggaugggauccugaaauccauuuugaagguuaaaaagucacucggaauguuugugagugacacuccuggcgaaagaaacccauaugagaauauccuguacaagauuugcuuaagcggcgaugggugguccuauaucgcuucuaggaccagcauaguaggacgggccugggaaaacacaguggucgaccuggagcaggauaauaaaccccagaagauugguaacggcgggucaaauaaaagucuacaguccgcaggauucgcugccggccucaucuacagccaacugaugacucuuaaggacuuuaaauguuucaacuugauuccuaaugcgaagaccuggauggauaucgagggucguccagaagaccccguggagaucgcccuguaccagccuucuucagggugcuauguucacuuuuuccgcgaaccaacagaucucaagcaguuuaaacaggacgcaaaguacagucauggcagagacgugaccgaucuguucgcugcccaaccgggacuuacgagcgcugucauugaggcccugcccaggaacauggugauaacuugucagggcuccgaagacauccggaaauugcucgagucucaggggcgacgcgauauuaagcugaucgacauaacauuaucgaaagcagauagcagaaaguuugagaaugccguaugggaccaguucaaggaucugugccacaugcauaccggaguuguggucgagaaaaagaaaagggguggcaaggaagaaauuacuccucacugugcucuaauggacugcaucauguuugaugcggcaguguccgggggacucgacgccaaaguccugcgggugguucuuccacgcgauaugguguucagaacaucaacccccaagguagucuugugaggacuaguuauaagacugacuagcccgaugggccucccaacgggcccuccuccccuccuugcaccgagauuaauaaaaaaaaaaaaaaaaaaaaaaaaaaaaaaaaaaaaaaaaaaaaaaaaaaaaaaaaaaaaaaaaugcaucccccccccccccccccccccccccccccccaaaggcucuuuucagagccaccagaauu

SEQ ID NO: 11019 - RNA, 1927 nt, Artificial Sequence
  mRNA product Design i-3 comprising derived and/or modified sequence from LASV(Nig08-A19;Clade III)__ADU56619__NP (opt3)
gggagaaagcuuaccaugagcgccuccaaggaggugaaaucuuuccuguggacccagucacucagaagggaacuuaguggcuacugcagcaacaucaagcugcaagucguuaaagacgcucaggcauuguuacacgggcuggauuuuuccgaggugucuaauguacagcggcuaaugcgcaagcagaaacgagacgauggagaccucaagcgucugagagaucuuaaccaagccgugaauaaccuggucgaauugaagucgacacagcagaaaucagugcucaggguugguacucugagcagugacgaucugcucguguuagcggcugaccuggagaaacuuaaguccaaggucgugcggacggaacgccccuugucuagcggcauuuauauggggaaucuguccucacagcaacuagaucagagaaaagcccuccugaacaugauaggaaugaccggcgguaaugggggaaggaacacaaccagugacggcaucguacggguuugggaugugaagaaugcagagcuucugaacaaucaguucggcacuaugccuagcuugacacucgccugucugaccaagcaggggcaagucgacuuaaacgaugcugugcaggcacugacugaccucggacuuauuuacacagccaaauauccaaauucuuccgaccuggaucgcuuggcucagucacauccgauccuaaacaugauugacaccaagaaaagcagucugaauaucucugguuacaacuuuucccucggcgccgcggugaaggcaggggccugcaugcuggauggaggcaacaugcuugagacgauaaaagucagcccccaaacuauggacgguauccugaagucgauuuugaaaguuaagcgaucucucgggauguucaucuccgauaccccuggagaaagaaauccauaugagaacauucuguacaagaucuguuuaucaggcgacggcuggcccuauauagcuaguaggacaagcauuguggggcgggccugggaaaauacuguaguggaucuggaguccgacaacaaaccucagaagaccggaaaugguggcucuaacaaaagccuacagucagcaggguuugcugccggacucacauacagucagcugaugacccuuaaggauuccauguugcaacuggacccaaaugcgaaaacguggauggauaucgagggccgucccgaagacccugucgagauugcccucuaccagccaagcucugguugcuauauccacuucuuucgcgaaccgacugaccugaagcaguucaagcaggaugcaaaauacucacaugggaucgacgugacagaucuuuuugcugcccaacccggccugaccagugcuguuauugaggccuugccuagaaacauggugauaacuugucagggaagcgaagacaucaggaagcuccuggagucccagggccggcgagauauuaaauuaaucgacauaucucugucgaaggucgauagccgcaaauucgagaaugcagugugggaccaguuuaaggaucuaugccacaugcauacagggauuguaguugaaaagaaaaagagaggagguaaagaggaaaucaccccacacugugcccucauggacugcaucauguucgaugcugcgguguccggcggggucgacgcaaaggugcugagggccguccuuccccgggauaugguguuucgcacgucaaccccuaaaguuguguugugaggacuaguuauaagacugacuagcccgaugggccucccaacgggcccuccuccccuccuugcaccgagauuaauaaaaaaaaaaaaaaaaaaaaaaaaaaaaaaaaaaaaaaaaaaaaaaaaaaaaaaaaaaaaaaaaugcaucccccccccccccccccccccccccccccccaaaggcucuuuucagagccaccagaauu

SEQ ID NO: 11020 - RNA, 1927 nt, Artificial Sequence
  mRNA product Design i-3 comprising derived and/or modified sequence from LASV(G1180-SLE-2010;Clade IV)__AIT17169__NP (opt3)
gggagaaagcuuaccaugagcgccuccaaggagaucaaaucuuuccuguggacccagucacucagaagggaacuuaguggcuacugcagcaacauuaagcugcaaguggucaaagacgcucaggcauuguuacacgggcuggauuuuuccgagguuucuaaugugcagcggcuaaugcgcaaggaacgacgugacgauaacgaccucaaaagacugagggaucuuaaucaggccguaaacaaucugguggaguugaagucgacacaacagaagucaauacuccgggucggaacucugacgagcgacgaucugcucaucuuagcggcugaccuggaaaaacuuaagaguaaagugauucgcaccgagagacccuuguccgccgguguuuauaugggcaaccugucuagccagcagcuagaucaaaggcgggcacuccuguccaugaucgggaugucaaguggaaaucagcgcgcccaggcuggccgagacgguguggucagagugugggauguaaagaacguugagcuucugaauaaccaguucgggacaaugccuagcuugacucucgcaugucugaccaaacaaggacagguggacuuaaaugaugccguccaggcucugacagaccucggccuuauuuacaccgccaaguauccaaacacuucugaccuggauagguugacacaaucccauccgauccuaaauaugauagacaccaagaaaucaagccugaacaucaguggcuacaauuuuucucucggggcggcagugaaggccggagcuugcaugcuggaugguggcaacaugcuugaaacgauuaaagugagcccccagacuauggacgggauccugaaguccauuuugaaagucaagaaagcccucggaauguucaucucggauaccccuggcgagcggaacccauaugaaaauauacuguacaagauuuguuuaucuggugacggguggcccuauaucgcaucccguacaucaauuacuggacgcgcuugggagaacaccguuguggaucuggagagugacggcaagccucagaaagccggcagcaauaacuccaauaagucucuacagagcguaggguuuacagcgggacucaccuacucacaacugaugacgcuuaaagaugccauguugcagcuggacccaaacgcaaagacuuggauggauaucgaagguagacccgaggacccuguggaaaucgcucucuaccagccaaguuccggcugcuauauucacuucuuuagggagccgacagaccugaaacaguucaagcaagaugccaaguacagccaugggauagacgucaccgaucuuuuugcugcccagcccggacugacuucugcagugaucgacgccuugccucggaauaugguuauuacaugucagggcucagaugacauccgaaaacuccuggaaagucagggucgcaaggauauaaaauuaauugacaucgcucugagcaagaccgauuccagaaaauaugagaacgcggugugggaccaauacaaggaucuaugccacaugcauacgggggucgugguagagaagaaaaagaggggcggaaaagaagagaucaccccacacugugcacucauggacugcauuauguucgaugccgcuguuucuggcgggcugaauacaucggugcuucgggccgucuugccccgcgacaugguguuuagaacuagcaccccuagggucgugcugugaggacuaguuauaagacugacuagcccgaugggccucccaacgggcccuccuccccuccuugcaccgagauuaauaaaaaaaaaaaaaaaaaaaaaaaaaaaaaaaaaaaaaaaaaaaaaaaaaaaaaaaaaaaaaaaaugcaucccccccccccccccccccccccccccccccaaaggcucuuuucagagccaccagaauu

SEQ ID NO: 11021 - RNA, 1927 nt, Artificial Sequence
  mRNA product Design i-3 comprising derived and/or modified sequence from LASV(G1442-SLE-2011;Clade IV)__AIT17181__NP (opt3)
gggagaaagcuuaccaugagcgccuccaaggaggugaaaucuuuccuguggacccagucacucagaagggaacuuaguggcuacugcagcaacaucaagcugcaagucguuaaagacgcucaggcauuguuacacgggcuggauuuuuccgaggugucuaauguacagcggcuaaugcgcaagcagcgacgugacgauaacgaccucaaaagacugagggaucuuaaucaagccgugaacaaucuggucgaauugaagucgacacagcagaagucagugcuccggguuggaacucugacgagcgacgaucugcucguguuagcggcugaccuggagaaacuuaagaguaaagucauucgcaccgaaagacccuuguccgccgguguguauaugggcaaccugucuagccagcaacuagaucagaggcgggcacuccugaauaugauagggauguccggaggcauccaggguacacgcacugggcgagacggaguaguuagagugugggaugucaagaacgccgaccuucugaauaaccaguucggcaccaugccuucauugacacucgcuugucugaccaaacaaggccagguggauuuaaaugacgugguccaggcacugacugaccucgggcuuauuuacacagccaaguauccaaacgcuagugaucuggacagguugacccaaagccauccgauccuaaauaugauugauacgaagaaaucuucccugaacaucucaggauacaauuuuagccucggugccgcgguuaaggcaggcgccugcaugcuggacgggggaaacaugcuugagacuauaaaagugaguccccagaccauggauggcauccugaagucuauuuugaaaguaaagaaaacacucgguauguucaucuccgacacuccuggggagcggaacccauaugaaaauauucuguacaagaucuguuuaagcggagauggcuggcccuauauagcuucgcguaccucuauuacaggccgcgccugggagaacaccguggucgaccuggaauccgaugggaagccucagaaagcaggaucaaauaacaguaauaagagccuacaguccgcugguuuugccgcgggccucacguacucucaacugaugacucuuaaagacgccauguugcagcuggauccaaacgcaaagacauggauggacaucgaggggagacccgaggacccuguggaaauugcucucuaccagccaagcucaggaugcuauauccacuucuuuagggagccgaccgaucugaaacaguucaagcaagacgccaaguacagucauggcaucgauguuacugaccuuuuugcugcccagcccggucugacauccgcagugauugaagccuugccucggaauauggucauaaccugucaggggagcgaugacaucaaaaagcuccuggagucucagggccgaaaagauauuaaguuaaucgacauagcucugucaaaaacggauagucgcaaguaugaaaacgcggugugggaccaauacaaggaucuaugccacaugcauaccggaguaguuguggagaaaaagaaaagaggcgggaaggaggaaauuacaccacacugugcacucauggacugcaucauguucgaugccgcugucagcggaggucugaauacucuuguguugagggccguccugccccgggacaugguguuucgcaccuccacaccuagaguugugcucugaggacuaguuauaagacugacuagcccgaugggccucccaacgggcccuccuccccuccuugcaccgagauuaauaaaaaaaaaaaaaaaaaaaaaaaaaaaaaaaaaaaaaaaaaaaaaaaaaaaaaaaaaaaaaaaaugcaucccccccccccccccccccccccccccccccaaaggcucuuuucagagccaccagaauu

SEQ ID NO: 11022 - RNA, 1927 nt, Artificial Sequence
  mRNA product Design i-3 comprising derived and/or modified sequence from LASV(G3010-SLE-2013;Clade IV)__AIT17345__NP (opt3)
gggagaaagcuuaccaugagcgccuccaaggagaucaaaucuuuccuguggacccagucacucagaagggaacuuaguggcuacugcagcaacauuaagcugcaaguggucaaagacgcucaggcauuguuacacgggcuggauuuuuccgagguuucuaaugugcagcggcuaaugcgcaaggaacgacgugacgauaacgaccucaaaagacugagggaucuuaaucaggccguaaacaaucugguggaguugaagucgacacaacagaagucaauacuccgggucggaacucugacgagcgacgaucugcucaucuuagcggcugaccuggaaaaacuuaagaguaaagugacccgcacagagagacccuuguccgccgguguuuauaugggcaaccugucuagccagcagcuagaucaaaggcgggcacuccuguccaugauugggaugucaaguggagugcagggcgcccgcgcuggucgagacggggucgugagaguaugggauguuaagaaugcagagcuucugaacaaucaguucggaacuaugccuagcuugacccucgccugucugacaaaacagggccaaguggacuuaaacgaugucgugcaggcucugaccgaccucggccuuaucuacacugccaaguauccaaauacaucugaccuggauagguugacccagucccauccgauucuaaacaugaucgacacgaagaaaucaagccugaauauaaguggguacaacuuuucucucggagcggcagugaaggccggugcuugcaugcuggauggcgggaauaugcuugaaacuaucaaagucagcccccaaaccauggacggaauuuugaaguccauccugaaaguuaagaaagcccucggcauguucauuucggagacaccuggugaacggaacccauaugagaacauccuguacaagauauguuuaucuggggauggauggcccuauauugcaucccguacuucaaucaccggccgcgcuugggagaauacagugguagaccuggaaagugauggcaagccucagaaagccgggagcaacaauuccaacaagucucuacagagcgcgggauuuaccgccggucucacguacucacagcugaugacucuuaaagacgcaauguugcaacuggauccaaaugcuaagacauggauggacauugagggcagacccgaagauccuguggaggucgcccucuaccagccaaguuccgggugcuauauccacuucuuuagggaaccgaccgaccugaaacaguucaagcaggacgcuaaguacagccauggaaucgaugugacugaccuuuuugccgcacaacccggccugacaucugccguuauugaugcuuugccucggaacauggugauaaccugucaggguucagacgauaucaaaaagcuccuggagagucaggggcgaaaagacauuaaguuaaucgauauagcgcugagcaaaacggacucccgcaaguaugagaaugcagucugggaucaguacaaggaccuaugccacaugcauaccggcgugguaguugagaaaaagaaaagaggaggcaaggaagaaauuacaccacacugugcccucauggauugcaucauguucgacgcugccgugucugggggacugaacacuucgguccuuagggcaguguugccccgggauauggucuuucgcaccagcacaccuagagugguucugugaggacuaguuauaagacugacuagcccgaugggccucccaacgggcccuccuccccuccuugcaccgagauuaauaaaaaaaaaaaaaaaaaaaaaaaaaaaaaaaaaaaaaaaaaaaaaaaaaaaaaaaaaaaaaaaaugcaucccccccccccccccccccccccccccccccaaaggcucuuuucagagccaccagaauu

SEQ ID NO: 11023 - RNA, 1927 nt, Artificial Sequence
  mRNA product Design i-3 comprising derived and/or modified sequence from LASV(G502-SLE-2009;Clade IV)__AIT17127__NP (opt3)
gggagaaagcuuaccaugagcgccuccaaggagaucaaaucuuuccuguggacccagucacucagaagggaacuuaguggcuacugcagcaacauuaagcugcaaguggucaaagacgcucaggcauuguuacacgggcuggauuuuuccgagguuucuaaugugcagcggcuaaugcgcaaggaacgacgugacgauaacgaccucaaaagacugagggaucuuaaucaggccguaaacaaucugguggaguugaagucgacacaacagaagucaauacuccgggucggaacucugacgagcgacgaucugcucaucuuagcggcugaccuggaaaaacuuaagaguaaagugauucgcaccgagagacccuuguccgccgguguuuauaugggcaaccugucuagccagcagcuagaucaaaggcgggcacuccuguccaugaucgggaugucaggaggcaaucagggugugcgcgccgggaaggacggagucgugcgaguaugggauguuaaaaacgcugagcuucugaauaaccaguucggcacaaugccuaguuugacucucgcaugucugaccaagcagggccaaguggacuuaaaugaugccguccaggcucugacagaccucgggcuuauuuacaccgccaaguauccaaacacuagcgaccuggauagauugacacagucucauccgauccuaaauaugauagacaccaaaaaguccucacugaacaucagcggauacaauuuuagucucggugcggcagugaaagccggcgcuugcaugcuggaugggggaaacaugcuugaaacgauuaaggugucuccccaaacuauggacggcauccugaaauccauuuugaaggucaaaaaggcccucgguauguucaucagcgauaccccuggggagaggaacccauaugaaaauauacuguacaagauuuguuuaucgggagacggcuggcccuauaucgcaucucggacauccauuacuggccgugcuugggagaacaccguuguggaucuggagucagacgggaaaccucagaaggccggaaguaauaacagcaauaaaucccuacagucugcggguuuuacagccggccucaccuacagccagcugaugacgcuuaaggaugcaauguugcaacuggacccaaacacuaaaacauggauggauaucgaagggcgccccgaggacccuguagaaaucgcucucuaccagccaucaaguggaugcuauauucacuucuuuagagagccgaccgaccugaagcaguucaagcaggaugccaaauacucccauggcauagacgugacugaucuuuuugcugcccaacccggucugacaagcgcagucaucgacgccuugccuaggaauauggugauuaccugucaggggucugaugacauccggaagcuccuggaaucacagggccgaaaagauauaaaguuaauugacaucgcucugaacaaaacggauagucgcaaguaugagaaugcgguuugggaccaguacaaggaucuaugccacaugcauaccggaguggucguggagaaaaagaaaagaggcgggaaggaagagaucacaccacacugugcacucauggacugcauuauguucgaugccgcuguaagcggaggucugaacacuuccguucuuagggccguguugccccgggacauggucuuucgcaccucuacaccuagagugguccugugaggacuaguuauaagacugacuagcccgaugggccucccaacgggcccuccuccccuccuugcaccgagauuaauaaaaaaaaaaaaaaaaaaaaaaaaaaaaaaaaaaaaaaaaaaaaaaaaaaaaaaaaaaaaaaaaugcaucccccccccccccccccccccccccccccccaaaggcucuuuucagagccaccagaauu

SEQ ID NO: 11024 - RNA, 1927 nt, Artificial Sequence
  mRNA product Design i-3 comprising derived and/or modified sequence from LASV(G733-SLE-2010;Clade IV)__AIT17155__NP (opt3)
gggagaaagcuuaccaugagcgccuccaaggagaucaaaucuuuccuguggacccagucacucagaagggaacuuaguggcuacugcagcaacauuaagcugcaaguggucaaagacgcucaggcauuguuacacgggcuggauuuuuccgagguuucuaaugugcagcggcuaaugcgcaaggaacgacgugacgauaacgaccucaaaagacugagggaucuuaaucaggccguaaacaaucugguggaguugaagucgacacaacagaagucaguccuccgggugggaacucugacgagcgacgaacugcucguuuuagcggcugaucuggagaaacuuaagaguaaagugauacgcaccgagagacccuuguccgccggugucuauaugggcaaccugucuagccagcagcuagaccaaaggcgggcacuccuguccaugaucgggaugucaggaggcaaucagggugcccgcacagggcgagauggagugguaagaguuugggacgugaagaacgcugaacuucugaauaaccaguucggcacuaugccuaguuugacccucgcaugucugacaaaacagggccaagucgauuuaaaugacgccgugcaggcucugaccgaucucgggcuuauuuacacugccaaguauccaaacacaagcgaccuggacagguugacccagucucauccgauccuaaauaugauugauacgaagaaauccucacugaacaucagcggauacaauuuuagucucggugcggcagugaaggccggcgcuugcaugcuggacgggggaaacaugcuugagacuauaaaagucucuccccaaaccauggauggcauccugaaguccauuuugaaaguuaagaaagcccucgguauguucaucagcgacacaccuggggaacggaacccauaugagaauauucuguacaagaucuguuuaucgggagauggcuggcccuauauagcaucucguacuuccauuaccggccgcgcuugggagaacacagugguagaccuggaaucagaugggaagccucagaaagccggaaguaauaacagcaauaagucccuacagucugcggguuuuaccgccggccucacguacagccagcugaugacucuuaaagacgcaauguugcaacuggauccaaacgcuaagacauggauggacaucgaggggagacccgaagauccuguggagauugcccucuaccagccaucaaguggaugcuauauccacuucuuuagggaaccgaccgaccugaaacaguucaagcaggacgcuaaguacucccauggcaucgaugucacugaccuuuuugccgcacaacccggucugacaagcgccgugauugaugcuuugccucggaauaugguuauaaccugucaggggucugacgauauccgaaaacuccuggagucacagggccgcaaggacauuaaauuaaucgauauagcgcugaguaagauugacagcagaaaauaugagaacgcagugugggaucaguacaaggaccuaugccacaugcauacgggagucgugguagaaaagaaaaagaggggcgggaaagaggaaaucaccccacacugugcccucauggauugcaucauguucgacgcugccguuuccggaggucuuaauucucugguguugcgggcaguccugccccgcgauaugguguuuagaacaucgacuccuagggucgugcucugaggacuaguuauaagacugacuagcccgaugggccucccaacgggcccuccuccccuccuugcaccgagauuaauaaaaaaaaaaaaaaaaaaaaaaaaaaaaaaaaaaaaaaaaaaaaaaaaaaaaaaaaaaaaaaaaugcaucccccccccccccccccccccccccccccccaaaggcucuuuucagagccaccagaauu

SEQ ID NO: 11025 - RNA, 1927 nt, Artificial Sequence
  mRNA product Design i-3 comprising derived and/or modified sequence from MOPV/LASV reassortant(IGS-1;Clade IV)__AFY05578__NP (opt3)
gggagaaagcuuaccaugagcgccuccaaggagaucaaaucuuuccuguggacccagucacucagaagggaacuuaguggcuacugcagcaacauuaagcugcaaguggucaaagacgcucaggcauuguuacacgggcuggauuuuuccgagguuucuaaugugcagcggcuaaugcgcaaggaacgacgugacgauaacgaccucaaaagacugagggaucuuaaucaggccguaaacaaucugguggaguugaagucgacacaacagaagucaauacuccgggucggaacucugacgagcgacgaucugcucaucuuagcggcugaccuggaaaaacuucgcaguaaggugauuagaaccgagaggcccuuguccgccgguguuuauaugggcaaccugucuagccagcagcuagaucaacggcgcgcacuccugaauaugaucgggauguccggaggcaaccagggugcccgagcugggagagacggaguggucagggugugggauguuaaaaaugcagagcuucugucaaaccaguucggcacaaugccuaguuugacucucgccugucugaccaagcagggccaaguagacuuaaaugaugcugugcaggcccugacagaccucgggcuuauuuacaccgcgaaauauccaaacacuagcgaccuggaucgguugacacagucucauccgauccuaaauaugauagacaccaagaaguccucacugaacaucagcggauacaauuuuagucucggugcagccgucaaagcuggcgccugcaugcuggaugggggaaacaugcuugaaacgauuaaggugucuccccaaacuauggacggcauccugaaauccauuuugaaggugaaaaaggcacucgguauguucaucagcgauaccccuggggagcguaacccauaugaaaauauacuguacaaaauuuguuuaucgggagacggcuggcccuauaucgcuucucgcacauccauuacuggcagagccugggagaacaccgucguugaucuggagucagacgggaagccucagaaggcggauaguaauaacagcuccaaaucucuacagagcgccggauuuacagcaggucucaccuacucacagcugaugacgcuuaaggacgcuauguugcaacuggauccaaaugccaaaacuuggauggacaucgaaggcaggcccgaggacccuguggaaaucgcucucuaccagccaaguuccgggugcuauauucacuucuuucgggagccgacagaucugaagcaguucaaacaggacgccaaguacagccauggaauagauguaaccgaccuuuuugcaacucaacccggccugacaucugccgugaucgaugcuuugccucgaaacauggucauuaccugucaggguucagacgauauccgcaagcuccuggaaagucaggggagaaaagacauaaaguuaauugauaucgaccugagcaaaacggauuccaggaaguaugagaaugcggugugggaccaguacaaagaucuaugccacaugcauaccggcguuguggucgagaagaagaaacggggaggcaaggaagagaucacaccacacugugcacucauggacugcauuauguucgacgccgcugugucugggggacugaacacuucgguacuucgcgccguuuugcccagagauaugguguuuaggaccagcacaccucgugucgugcugugaggacuaguuauaagacugacuagcccgaugggccucccaacgggcccuccuccccuccuugcaccgagauuaauaaaaaaaaaaaaaaaaaaaaaaaaaaaaaaaaaaaaaaaaaaaaaaaaaaaaaaaaaaaaaaaaugcaucccccccccccccccccccccccccccccccaaaggcucuuuucagagccaccagaauu

SEQ ID NO: 11026 - RNA, 1927 nt, Artificial Sequence
  mRNA product Design i-3 comprising derived and/or modified sequence from LASV(LM765-SLE-2012;Clade IV)__AIT17815__NP (opt3)
gggagaaagcuuaccaugagcgccuccaaggagaucaaaucuuuccuguggacccagucacucagaagggaacuuaguggcuacugcagcaacauuaagcugcaaguggucaaagacgcucaggcauuguuacacgggcuggauuuuuccgagguuucuaaugugcagcggcuaaugcgcaaggaacgacgugacgauaacgaccucaaaagacugagggaucuuaaucaggccguaaacaaucugguggaguugaagucgacacaacagaagucaauacuccgggucggaacucugacgagcgacgaucugcucaucuuagcggcugaccuggaaaaacuuaagaguaaagugacccgcacagagagacccuuguccgccgguguuuauaugggcaaccugucuagccagcagcuagaucaaaggcgggcacuccuggacaugauugggauguccggaucaaaucagggcgcccgcgcuggucgagaugggguggucagagugugggacguaaagaacgcagagcuucugaauaaccaguucggaacuaugccuaguuugacccucgccugucugacaaaacagggccaaguugauuuaaaugacgcugugcaggcccugaccgaccucggccuuaucuacacugcgaaguauccaaacacaagcgaucuggacagguugacccagucucauccgauucuaaauaugaucgauacgaagaaauccucacugaacauaagcggguacaauuuuagucucggagcagccgucaaggcuggugccugcaugcuggacggcgggaacaugcuugaaacuaucaaagugucuccccaaaccauggauggcauucugaaguccaucuugaaagugaagaaagcacucggaauguucauuagcgacgcuccuggugagcggaacccauaugaaaauauccuguacaagauauguuuaucgggggauggauggcccuauauugccucucguacauccaucacuggccgcgcgugggagaacaccgucguugaccuggagucagauggcaagccucagaaagccgggaguaauggaagcaacaagucccuacagucugcagguuuuacagcuggccucaccuacagccagcugaugacgcuuaaagacgccauguugcaacuggauccaaaugcuaagacuuggauggacauugaagggagacccgaggacccuguggaaaucgcccucuaccagccaucaaguggaugcuauauccacuucuuuagggagccgacagaucugaaacaguucaagcaggacgcaaaguacucccauggcauugauguaaccgaccuuuuugccgcucaacccggucugacuagcgcggugauagaugcauugccucggaacauggucaucacaugucaggggucugacgauauucgaaaacucuucgaaucacagggccgcaaggacaucaaacugauagauauugccuuaaguaagaccgacagcagaaaauaugagaaugcugugugggaucaguacaaggaccugugccacaugcauacgggaaucguuguggagaagaaaaagaggggcgggaaagaagagaucaccccacacugugcccuaauggauugcauuauguuugacgcagccgucuccggaggucucaacacaucugugcugcgggcuguacuuccccgcgacaugguuuucagaacuucgaccccuaggguggucuugugaggacuaguuauaagacugacuagcccgaugggccucccaacgggcccuccuccccuccuugcaccgagauuaauaaaaaaaaaaaaaaaaaaaaaaaaaaaaaaaaaaaaaaaaaaaaaaaaaaaaaaaaaaaaaaaaugcaucccccccccccccccccccccccccccccccaaaggcucuuuucagagccaccagaauu

SEQ ID NO: 11027 - RNA, 1927 nt, Artificial Sequence
  mRNA product Design i-3 comprising derived and/or modified sequence from LASV(LM776-SLE-2012;Clade IV)__AIT17825__NP (opt3)
gggagaaagcuuaccaugagcgccuccaaggagaucaaaucuuuccuguggacccagucacucagaagggaacuuaguagcuacugcuccaacauuaagcugcaaguggucaaagacgcucaggcauuguuacacggccuggauuuuucugagguuucgaaugugcagcggcuaaugcgcaaggaacgacgugacgauaacgaccucaaaagacugagggaucuuaaucaggccguaaacaaucugguggaguugaagucaacacaacagaagaguauacuccgggucgggacucugacgagugacgaucugcucaucuuagcggcugaccuggaaaaacuuaaguccaaagugacccgcacagagagacccuugucugccggaguuuauauggguaaccugagcucccagcagcuagaucaaaggcgggcacuccugucaaugauuggcaugagugggagcaaucagggagcccgcgcuggccgagacgguguggucagagugugggauguaaagaacgcagagcuucugaauaaccaguucgggacuaugccuucuuugacccucgccugucugacaaaacagggacaaguugacuuaaaugaugcugugcaggcccugaccgaccucggccuuaucuacacugcgaaguauccaaacacauccgaccuggauagguugacccagucacauccgauucuaaauaugaucgacacgaagaaaagcagucugaacauaucuggcuacaauuuuucccucggggcagccgucaaggcuggagccugcaugcuggaugguggcaacaugcuugaaacuaucaaagugagcccccaaaccauggacgggauucugaagucgaucuugaaagugaagaaagcacucggaauguucauuucugauacaccuggcgagcggaacccauaugaaaauauccuguacaagauauguuuauccggugacggguggcccuauauugcuucacguacuagcaucaccggacgcgccugggagaacacagucguugaucuggagagcgacggcaagccucagaaagcgggcuccaauaacucuaauaagagccuacagucagccggguuuaccgcaggacucacguacagucagcugaugacucuuaaagaugcuauguugcaacuggacccaaacgccaagacauggauggauauugaagguagacccgaggacccuguggaaguagcucucuaccagccauccagcggcugcuauauccacuucuuuagggagccgaccgaccugaaacaguucaagcaggaugccaaguacucucaugggaucgacgugacugaucuuuuugcagcccaacccggacugacaucagcugucauugacgcguugccucggaauauggugauaaccugucagggcagugaugacauccgaaaacuccuggaaagccagggucgcaaggauauuaaauuaaucgacauagcacuguccaagacggauucuagaaaauaugagaacgccguuugggaccaguacaaggaucuaugccacaugcauaccgggguggucguggagaagaaaaagaggggcggaaaagaagagauuacaccacacugugcucucauggacugcaucauguucgaugccgcaguaucgggcgggcugaauacuagcguucuucgggccguguugccccgcgacauggucuuuagaaccuccacaccuagggugguccugugaggacuaguuauaagacugacuagcccgaugggccucccaacgggcccuccuccccuccuugcaccgagauuaauaaaaaaaaaaaaaaaaaaaaaaaaaaaaaaaaaaaaaaaaaaaaaaaaaaaaaaaaaaaaaaaaugcaucccccccccccccccccccccccccccccccaaaggcucuuuucagagccaccagaauu

SEQ ID NO: 11028 - RNA, 1927 nt, Artificial Sequence
  mRNA product Design i-3 comprising derived and/or modified sequence from LASV(Mad39;Clade IV)__ANH09723__NP (opt3)
gggagaaagcuuaccaugagcgccuccaaggagaucaaaucuuuccuguggacccagucacucagaagggaacuuaguggcuacugcagcaacauuaagcugcaaguggucaaagacgcucaggcauuguuacacgggcuggauuuuuccgagguuucuaaugugcagcggcuaaugcgcaagcagcgacgugacgauaacgaccucaaaagacugagggaucuuaaucaagccguaaacaaucugguggaauugaagucgacacagcagaagucaguccuccgggugggaacucugacgagcgacgaucugcucaccuuagcggcugaccuggagaaacuuaagaguaaaguuacacgcacugaaagacccuugaccgccgguguguauaugggcaaccuguccucucagcaacuagaucagaggcgggcacuccugaauaugauagggaugagcggaggcaaccagggugcccgcacagggcgagacggagucgugagaguaugggauguuaagaaugcugagcuucugaacaaucaguucggcaccaugccuuccuugacucucgcaugucugacaaaacaaggccagguggacuuaaacgaugucgugcaggcccugaccgaccucgggcuuaucuacacggcuaaguauccaaauacuucagaccuggauagguugacccaaagucauccgauucuaaacaugaucgacacaaauaagagcucucugaacauuuccggauacaacuuuucacucggugccgcggugaaagcaggcgccugcaugcuggaugggggaaauaugcuugagacuaucaaggucagcccccagaccauggacggcauacugaaaaguaucuugaagguuaaaaagucucucgguauguucauuuccgauacaccuggggaacggaacccauaugagaauauccuguacaaaauuuguuuaagcggagacggcuggcccuauaucgcuucgcguaccucuauaacgggccgcgccugggaaaacacugugguagaucuggaguccgggggaaagccucagaaggcagguucaaauaacaguaauaaaagccuacaguccgcuggcuuugccgcggggcucacauacucucaacugaugacccuuaaggacgccauguugcagcuggauccaaacgcaaaaacuuggauggacauugagggaagacccgaagauccuguggagaucgcucucuaccagccaauuagcggcugcuauauccacuucuuuagggaaccgacagaccugaagcaguucaaacaagacgccaaguacucacaugguaucgaugucaccgaccuuuuugcugcccagcccgggcugacgagugcagugauugaggccuugccucggaauaugguuauaaccugucagggcuccgaugacauccgaaaacucuucgaaagccagggacgcaaggauauuaagcugaucgacauagcuuuaucuaaaacagauucaagaaaguaugagaacgcggugugggaccaauacaaagaucugugccacaugcauacuggcgucgugguagagaagaagaaaaagggagggaaagaagagauuaccccacacugugcacuaauggacugcaucauguuugaugccgcuguuagugguggccucaauacacuggugcuuagggccgucuugccccgggacaugguguuccgcacuagcaccccuaaggucgugcugugaggacuaguuauaagacugacuagcccgaugggccucccaacgggcccuccuccccuccuugcaccgagauuaauaaaaaaaaaaaaaaaaaaaaaaaaaaaaaaaaaaaaaaaaaaaaaaaaaaaaaaaaaaaaaaaaugcaucccccccccccccccccccccccccccccccaaaggcucuuuucagagccaccagaauu

SEQ ID NO: 11029 - RNA, 1927 nt, Artificial Sequence
  mRNA product Design i-3 comprising derived and/or modified sequence from LASV(Z0947-SLE-2011;Clade IV)__AIT17841__NP (opt3)
gggagaaagcuuaccaugagcgccuccaaggagaucaaaucuuuccuguggacccagucacucagaagggaacuuaguggcuacugcagcaacauuaagcugcaaguggucaaagacgcucaggcauuguuacacgggcuggauuuuuccgagguuucuaaugugcagcggcuaaugcgcaaggaacgacgugacgauaacgaccucaaaagacugagggaucuuaaucaggccguaaacaaucugguggaguugaagucgacacaacagaagucaauacuccgggucggaacucugacgagcgacgaucugcucaucuuagcggcugaccuggaaaaacuuaagaguaaagugacccgcacagagagacccuuguccgccgguguuuauaugggcaaccugucuagccagcagcuagaucaaaggcgggcacuccugaauaugauugggauguccggaucaaaccagggcgcccgcacuggucgagacgggguggucagagugugggauguaaagaaugcugagcuucugaacaaucaguucggaaccaugccuaguuugacacucgcaugucugaccaaacagggccaaguugacuuaaacgaugccgugcaggcucugacugaccucggccuuaucuacacagccaaguauccaaauaccagcgaccuggauagguugacgcagucucauccgauucuaaacaugaucgacacuaagaaauccucacugaauauaagcggguacaacuuuagucucggagcggcagucaaggccggugcuugcaugcuggauggcgggaacaugcuugaaaccaucaaagugucuccccaaacaauggacggcauucugaaguccaucuugaaagugaagaaagcccucggaauguucauuagcgaugcaccuggugagcggaauccauaugaaaacauccuguacaagauauguuuaucgggggacggauggcccuauauugcuucucguacuuccaucaccggccgcgccugggagaauacagucguugaucuggagucagacggcaagccucagaaagcggggaguaacggaagcaauaagucccuacagucugccgguuuuaccgcaggccucacguacagccagcugaugacucuuaaagaugcuauguugcaacuggacccaaacgccaagacauggauggauauugaagggagacccgaggacccuguggaaaucgcucucuaccagccaucaaguggaugcuauauccacuucuuuagggagccgaccgaccugaaacaguucaagcaggaugccaaguacucccauggcauugacguaacugaucuuuuugcagcccaacccggucugacaagcgcugugauagacgcguugccucggaauauggucaucaccugucaggggucugaugacauucgaaaacucuucgaaucacagggccgcaaggauaucaaacugauagacauugcauuaaguaagacggauagcagaaaauaugagaacgccgugugggaccaguacaaggaucugugccacaugcauaccggaaucguuguggagaagaaaaagaggggcgggaaagaagagaucacaccacacugugcucuaauggacugcauuauguuugaugccgcagucuccggaggucucaauacuucugugcugcgggccguacuuccccgcgacaugguuuucagaaccucgacaccuaggguggucuugugaggacuaguuauaagacugacuagcccgaugggccucccaacgggcccuccuccccuccuugcaccgagauuaauaaaaaaaaaaaaaaaaaaaaaaaaaaaaaaaaaaaaaaaaaaaaaaaaaaaaaaaaaaaaaaaaugcaucccccccccccccccccccccccccccccccaaaggcucuuuucagagccaccagaauu

SEQ ID NO: 11030 - RNA, 1927 nt, Artificial Sequence
  mRNA product Design i-3 comprising derived and/or modified sequence from LASV(Josiah;Clade IV)__NP_694869__NP (opt4)
gggagaaagcuuaccaugagcgccagcaaggagaucaagagcuuccuguggacccagagccugagaagagagcugagcggcuacugcagcaacaucaagcugcagguggugaaggacgcccaggcccugcugcacggccuggacuucagcgaggugagcaacgugcagagacugaugagaaaggagagaagagacgacaacgaccugaagagacugagagaccugaaccaggccgugaacaaccugguggagcugaagagcacccagcagaagagcauccugagagugggcacccugaccagcgacgaccugcugauccuggccgccgaccuggagaagcugaagagcaaggugaucagaaccgagagaccccugagcgccggcguguacaugggcaaccugagcagccagcagcuggaccagagaagagcccugcugaacaugaucggcaugagcggcggcaaccagggcgccagagccggcagagacggcguggugagagugugggacgugaagaacgccgagcugcugaacaaccaguucggcaccaugcccagccugacccuggccugccugaccaagcagggccagguggaccugaacgacgccgugcaggcccugaccgaccugggccugaucuacaccgccaaguaccccaacaccagcgaccuggacagacugacccagagccaccccauccugaacaugaucgacaccaagaagagcagccugaacaucagcggcuacaacuucagccugggcgccgccgugaaggccggcgccugcaugcuggacggcggcaacaugcuggagaccaucaaggugagcccccagaccauggacggcauccugaagagcauccugaaggugaagaaggcccugggcauguucaucagcgacacccccggcgagagaaaccccuacgagaacauccuguacaagaucugccugagcggcgacggcuggcccuacaucgccagcagaaccagcaucaccggcagagccugggagaacaccgugguggaccuggagagcgacggcaagccccagaaggccgacagcaacaacagcagcaagagccugcagagcgccggcuucaccgccggccugaccuacagccagcugaugacccugaaggacgccaugcugcagcuggaccccaacgccaagaccuggauggacaucgagggcagacccgaggaccccguggagaucgcccuguaccagcccagcagcggcugcuacauccacuucuucagagagcccaccgaccugaagcaguucaagcaggacgccaaguacagccacggcaucgacgugaccgaccuguucgccacccagcccggccugaccagcgccgugaucgacgcccugcccagaaacauggugaucaccugccagggcagcgacgacaucagaaagcugcuggagagccagggcagaaaggacaucaagcugaucgacaucgcccugagcaagaccgacagcagaaaguacgagaacgccgugugggaccaguacaaggaccugugccacaugcacaccggcguggugguggagaagaagaagagaggcggcaaggaggagaucaccccccacugcgcccugauggacugcaucauguucgacgccgccgugagcggcggccugaacaccagcgugcugagagccgugcugcccagagacaugguguucagaaccagcacccccagaguggugcugugaggacuaguuauaagacugacuagcccgaugggccucccaacgggcccuccuccccuccuugcaccgagauuaauaaaaaaaaaaaaaaaaaaaaaaaaaaaaaaaaaaaaaaaaaaaaaaaaaaaaaaaaaaaaaaaaugcaucccccccccccccccccccccccccccccccaaaggcucuuuucagagccaccagaauu

SEQ ID NO: 11031 - RNA, 1927 nt, Artificial Sequence
  mRNA product Design i-3 comprising derived and/or modified sequence from LASV(LP;Clade I)__AAF86702__NP (opt4)
gggagaaagcuuaccaugagcaacagcaaggagaucaagagcuuccuguggacccagagccugagaagagagcugagcggcuacugcagcaacaucaagcugcagguggugaaggacgcccaggcccugcugcacggccuggacuucagcgaggugagcaacgugcagagacugaugagaaagcagaagagagacgacgccgaccugaagagacugagagaccugaaccaggccgugaacaaccugguggagcugaagagcacccagcagaagaacgugcugagagugggcacccugagcagcgacgaccugaucacccuggccgccgaccuggagaagcugaagagcaaggugaucagaaccgagagaccccugagcagcggcguguacaugggcaaccugagcagccagcagcuggaccagagaagagcccugcugagcaugaucggcaugagcggcggcccccagggcaacagaaccggcggcgacggcguggugagagugugggacgugaagaacgccgagcugcugaacaaccaguucggcaccaugcccagccugacccuggccugccugaccaagcagggccagguggaccugaacgacgccgugcaggcccugaccgaccugggccugaucuacaccgccaaguaccccaacagcagcgaccuggacaugcugacccagagccaccccauccugggcaugguggacaccaagaagagcagccugaacaucagcggcuacaacuucagccugggcgccgccgugaaggccggcgccugcaugcuggacggcggcaacaugcuggagaccaucaaggugagcccccagaccauggacggcauccugaagagcauccugaaggugaagagaagccugggcauguucaucagcgacacccccggcgagagaaaccccuacgagaacauccuguacaagaucugccugagcggcgagggcuggcccuacaucgccagcagaaccagcaucaccggcagagccugggagaacacccugguggaccuggagagcgacaacaagccccccaagcugaacagcgccggcagcaacaagagccugcaggccgccggccugaacgccggccugaccuacagccagcugaugacccugaaggacugcaugcugcagcuggaccccagcagcaagaccuggaucgacaucgagggcagacccgaggaccccguggagaucgcccuguuccagcccagcagcggcugcuacauccacuucuucagagagcccaccgaccugaagcaguucaagcaggacgccaaguacagccacggcaucgacgugaccgaccuguucagcacccagcccggccugaccagcgccgugaucgaggcccugcccagaaacauggugcugaccugccagggcagcgacgacaucaagaagcugcuggagagccagggcagaagagacaucaagcugaucgacaucagccugagcaaggccgacagcagaaaguucgagaacgccgugugggaccaguacaaggaccugugccacaugcacaccggcguggugguggagaagaagaagagaggcggcaaggaggagaucaccccccacugcgcccugcuggacugcaucauguucgacgccgccaccaccggcagccugaacaucaccacccugagagccgugcugcccagagacaugguguucagaaccagcacccccaagguggugcugugaggacuaguuauaagacugacuagcccgaugggccucccaacgggcccuccuccccuccuugcaccgagauuaauaaaaaaaaaaaaaaaaaaaaaaaaaaaaaaaaaaaaaaaaaaaaaaaaaaaaaaaaaaaaaaaaugcaucccccccccccccccccccccccccccccccaaaggcucuuuucagagccaccagaauu

SEQ ID NO: 11032 - RNA, 1927 nt, Artificial Sequence
  mRNA product Design i-3 comprising derived and/or modified sequence from LASV(803213;Clade II)__AAF86704__NP (opt4)
gggagaaagcuuaccaugagcgccagcaaggaggugaagagcuuccuguggacccagagccugagaagagagcugagcggcuacugcagcaacaucaagcugcagguggugaaggacgcccaggcccugcugcacggccuggacuucagcgaggugaacaacgugcagagacugaugagaaagcagaagagagacgacggcgaccugaagagacugagagaccugaaccaggccgugaacaaccugguggagcugaagagcacccagcagaagagcauccugagagugggcacccugaccagcgacgaccugcugacccuggccgccgaccuggagaagcugaagagcaaggugaucagaaccgagagaccccugagcagcggcguguacaugggcaaccugagcacccagcagcuggagcagagaagagcccugcugaacaugaucggcauggugggcggcgcccagggcacccagcccggcagagacggcguggugagagugugggacgugaagaaccccgaccugcugaacaaccaguucggcaccaugcccagccugacccuggccugccugaccaagcagggccagguggaccugaacgacgccgugcuggcccugaccgaccugggccugaucuacaccgccaaguaccccaacagcagcgaccuggacagacugagccagagccaccccauccugaacaugguggacaccaagaagagcagccugaacaucagcggcuacaacuucagccugggcgccgccgugaaggccggcgccugcaugcuggacggcggcaacaugcuggagaccaucaaggugaccccccagaccauggacggcauccugaagagcauccugaaggugaagagaagccugggcauguucgugagcgacacccccggcgagagaaaccccuacgagaacauccuguacaagaucugccugagcggcgacggcuggcccuacaucgccagcagaaccagcaucgugggcagagccugggagaacaccaccguggaccuggagagcgacggcaagccccagaaggugggcaccgccggcagcaacaagagccugcagagcgccggcuuccccaccggccugaccuacagccagcugaugacccugaaggacagcaugaugcagcuggaccccagcgccaagaccuggaucgacaucgagggcagacccgaggaccccguggagaucgcccuguaccagcccaugagcggcugcuacauccacuucuucagagagcccaccgaccugaagcaguucaagcaggacgccaaguacagccacggcaucgacguggccgaccuguuccccgcccagcccggccugaccagcgccgugaucgaggcccugcccagaaacauggugcugaccugccagggcagcgacgacaucaagaagcugcuggacagccagggcagaagagacaucaagcugaucgacaucagccugagcaagguggacagcagaaaguucgagaacgccgugugggaccagugcaaggaccugugccacaugcacaccggcguggugguggagaagaagaagagaggcggcaaggaggagaucaccccccacugcgcccugauggacugcaucauguucgacgccgccgugagcggcggccugaacauccccgugcugagagccgugcugcccagagacaugguguucagaaccagcagccccaagguggugcugugaggacuaguuauaagacugacuagcccgaugggccucccaacgggcccuccuccccuccuugcaccgagauuaauaaaaaaaaaaaaaaaaaaaaaaaaaaaaaaaaaaaaaaaaaaaaaaaaaaaaaaaaaaaaaaaaugcaucccccccccccccccccccccccccccccccaaaggcucuuuucagagccaccagaauu

SEQ ID NO: 11033 - RNA, 1930 nt, Artificial Sequence
  mRNA product Design i-3 comprising derived and/or modified sequence from LASV(GA391;Clade III)__CAA36646__NP (opt4)
gggagaaagcuuaccaugagcgccagcaaggaggugagaagcuuccuguggacccagagccugagaagagagcugagcggcuacugcagcaacaucaagcugcagguggugaaggacgcccaggcccugcugcacggccuggacuucagcgaggugagcaacgugcagagacugaugagaaagcagaagagagacgacggcgaccugaagagacugagagaccugaaccaggccgugaacaaccugguggagcugaagagcacccagcagaagagcgugcugagagugggcacccugagcagcgacgaccugcugauccuggccgccgaccuggagaagcugaagagcaaggugaccagaaccgagagaccccugagcagcggcguguacaugggcaaccugagcagccagcagcuggaccagagaagagcccugcugaacaugaucggcaugaccggcgugagcggcggcggcaagggcgccagcgacggcaucgugagagugugggacgugaagaacgccgagcugcugaacaaccaguucggcaccaugcccagccugacccuggccugccugaccaagcagggccagguggaccugaacgacgccgugcaggcccugaccgaccugggccugaucuacaccgccaaguaccccaacagcagcgaccuggacagacugagccagagccaccccauccugaacaugaucgacaccaagaagagcagccugaacaucagcggcuacaacuucagccugggcgccgccgugaaggccggcgccugcaugcuggacggcggcaacaugcuggagaccaucaaggugagcccccagaccauggacggcauccugaagagcauccugaaggugaagaagagccugggcauguucgugagcgacacccccggcgagagaaaccccuacgagaacauccuguacaagaucugccugagcggcgacggcuggcccuacaucgccagcagaaccagcaucgugggcagagccugggagaacaccgugguggaccuggagcaggacaacaagccccagaagaucggcaacggcggcagcaacaagagccugcagagcgccggcuucgccgccggccugaccuacagccagcugaugacccugaaggacuucaagugcuucaaccugauccccaacgccaagaccuggauggacaucgagggcagacccgaggaccccguggagaucgcccuguaccagcccagcagcggcugcuacgugcacuucuucagagagcccaccgaccugaagcaguucaagcaggacgccaaguacagccacggcaucgacgugaccgaccuguucgccgcccagcccggccugaccagcgccgugaucgaggcccugcccagaaacauggugaucaccugccagggcagcgaggacaucagaaagcugcuggagagccagggcagaagagacaucaagcugaucgacaucacccugagcaaggccgacagcagaaaguucgagaacgccgugugggaccaguucaaggaccugugccacaugcacaccggcguggugguggagaagaagaagagaggcggcaaggaggagaucaccccccacugcgcccugauggacugcaucauguucgacgccgccgugagcggcggccuggacgccaaggugcugagaguggugcugcccagagacaugguguucagaaccagcacccccaagguggugcugugaggacuaguuauaagacugacuagcccgaugggccucccaacgggcccuccuccccuccuugcaccgagauuaauaaaaaaaaaaaaaaaaaaaaaaaaaaaaaaaaaaaaaaaaaaaaaaaaaaaaaaaaaaaaaaaaugcaucccccccccccccccccccccccccccccccaaaggcucuuuucagagccaccagaauu

SEQ ID NO: 11034 - RNA, 1927 nt, Artificial Sequence
  mRNA product Design i-3 comprising derived and/or modified sequence from LASV(AV;Clade V)__CCA30315__NP (opt4)
gggagaaagcuuaccaugagcgccagcaaggaggugaagagcuuccuguggacccagagccugagaagagagcugagcggcuacugcagcaacaucaagcugcagguggugaaggacgcccaggcccugcugcacggccuggacuucagcgaggugagcaacgugcagagacugaugagaaagcagagaagagacgacagcgaccugaagagacugagagaccugaaccaggccgugaacaaccugguggagcugaagagcacccagcagaagagcgugcugagagugggcacccugagcagcgacgaccugcugacccuggccgccgaccuggagaagcugaagagcaaggugaccagaaccgagagaccccugagcagcggcguguacaugggcaaccugagcagccagcagcuggaccagagaagagcccugcugaaccugaucggcaugaccaacggcagccagggcagccaggccggcagagacggcguggugagagugugggacgugaagaacgccgagcugcugaacaaccaguucggcaccaugcccagccugacccuggccugccugaccaagcagggccagguggaccugaacgacguggugcaggcccugaccgaccugggccugaucuacaccgccaaguaccccaacaccagcgaccuggacagacugacccagagccaccccauccugaacaugaucgacaccaagaagagcagccugaacaucagcggcuacaacuucagccugggcgccgccgugaaggccggcgccugcaugcuggacggcggcaacaugcuggagaccaucaaggugagcccccagagcauggacggcauccugaagagcauccugaaggugaagagagcccugggcauguucgugagcgacacccccggcgagagaaaccccuacgagaacauccuguacaagaucugccugagcggcgacggcuggcccuacaucgccagcagaaccagcaucgugggcagagccugggagaacaccgugguggaccuggagaccgacggcaagccccagaagaucggcagcggcaacagcaacaagagccugcagagcgccggcuucagcgccggccugaccuacagccagcugaugacccugaaggacgccaugcugcagcuggaccccaacgccaagaccuggauggacaucgagggcagacccgaggaccccguggagguggcccuguaccagcccaucagcggcugcuacauccacuucuucagagagcccaccgaccugaagcaguucaagcaggacgccaaguacagccacggcaucgacaucgccgaccuguucgccgcccagcccggccugaccagcgccgugaucgaggcccugcccagaaacauggugaucaccugccagggcagcgaggacaucaagaagcugcuggagagccagggcagaaaggacaucaagcugaucgacaucgcccugagcaagaucgacagcagaaaguucgagaacgccgugugggaccaguacaaggaccugugccacaugcacaccggcguggugguggagaagaagaagagaggcggcaaggaggagaucaccccccacugcgcccugauggacugcaucauguucgacgccgccgugagcggcggccugaacacccuggugcugagagccgugcugcccagagacaugguguucagaaccagcacccccagaguggugcugugaggacuaguuauaagacugacuagcccgaugggccucccaacgggcccuccuccccuccuugcaccgagauuaauaaaaaaaaaaaaaaaaaaaaaaaaaaaaaaaaaaaaaaaaaaaaaaaaaaaaaaaaaaaaaaaaugcaucccccccccccccccccccccccccccccccaaaggcucuuuucagagccaccagaauu

SEQ ID NO: 11035 - RNA, 1927 nt, Artificial Sequence
  mRNA product Design i-3 comprising derived and/or modified sequence from LASV(Togo/2016/7082;Clade VI)__AMR44578__NP (opt4)
gggagaaagcuuaccaugagcaacagcaaggaggugaagagcuuccuguggacccagagccugagaagagagcugagcggcuacugcagcaacaucaagcugcagguggugaaggacgcccaggcccugcugcacggccuggacuucagcgaggugagcaacgugcagagacugaugagaaagcagaagagagacgacggcgaccugaagagacugagagaccugaaccaggccgugaacaaccugguggagcugaagagcgugcagcagaagagcauccugagagugggcacccugaccagcgacgaccugcugacccuggccgccgaccuggagaagcugaagagcaaggugaccagaaccgagagaccccugagcagcggcguguacaugggcaaccugagcagccagcagcuggaccagagaagagcccugcugagcaugaucggcaugagcggcggcaaccagaacagccagcccaagggcgacggcguggugagagugugggacgugaagaacgccgaccugcugaacaaccaguucggcaccaugcccagccugacccuggccugccugaccaagcagggccagguggaccugaacgacgccgugcaggcccugaccgaccugggccugaucuacaccgccaaguaccccaacagcagcgaccuggacagacugagccagagccaccccauccugaacaugaucgacaccaagaagagcagccugaacaucagcggcuacaacuucagccugggcgccgccaucaagaccggcgccugcaugcuggacggcggcaacaugcuggagaccaucaaggugaccccccagaccauggacggcauccugaagagcauccugaaggugaagagaagccugggcauguucaucagcgacacccccggcgagagaaaccccuacgagaacauccuguacaagaucugccugagcggcgacggcuggcccuacaucgccagcagaaccgccaucaucggcagagccugggagaacaccgugguggaccuggagagcgacagcaagccccagaagaucggcagcaacggcagcaacaagagccugcagagcgccggcuucgcccccggccugaccuacagccagcugaugacccugaaggacagcaugcugcagcuggaccccaacgccaagaccuggaucgacaucgagggcagacccgaggaccccguggagguggcccuguuccagcccaucagcggcugcuacauccacuucuucagagagcccaccgaccugaagcaguucaagcaggacgccaaguacagccacggcaucgacgugaccgaccuguucgccgcccagcccggccugaccagcgccgugaucgaggcccugcccagaaacauggugcugaccugccagggcagcgacgacaucaagaagcugcuggacagccagggcagaagagacaucaagcugaucgacgugagccugaacaagaucgacagcagaaaguucgagaacgccgugugggaccaguacaaggaccugugccacaugcacaccggcguggugguggagaagaagaagaagggcggcaaggaggagaucaccccccacugcgcccugcuggacugcaucauguucgacgccgccgugagcggcggccugaacgccaccgugcugagagccgugcugcccagagacaugguguucagaaccagcagccccaagguggugcugugaggacuaguuauaagacugacuagcccgaugggccucccaacgggcccuccuccccuccuugcaccgagauuaauaaaaaaaaaaaaaaaaaaaaaaaaaaaaaaaaaaaaaaaaaaaaaaaaaaaaaaaaaaaaaaaaugcaucccccccccccccccccccccccccccccccaaaggcucuuuucagagccaccagaauu

SEQ ID NO: 11036 - RNA, 1927 nt, Artificial Sequence
  mRNA product Design i-3 comprising derived and/or modified sequence from LASV(KAK-428;Clade n.d. (VII))__ANH09741__NP (opt4)
gggagaaagcuuaccaugagcaacagcaaggaggugaagagcuuccuguggacccagagccugagaagagagcugagcggcuacugcaccaacaucaagcugcagguggugaaggacgcccaggcccugcugcacggccuggacuucagcgaggugagcaacgugcagagacugaugagaaagcagaagagagacgacaacgaccugaagagacugagagaccugaaccaggccgugaacaaccugguggagcugaagagcgugcagcagaagagcgugcugaaggugggcacccugaacagcgacgaccugcugacccuggccgccgaccuggagaagcugaagagcaagguggugagaaccgagagaccccugagcagcggcguguacaugggcaaccugagcagccagcagcuggaccagagaagagcccugcugaacaugaucggcauggccggcggcagccagggcaaccagcccagcagagacggcguggugagagugugggacgugaagaacgccgaccugcugaacaaccaguucggcaccaugcccagccugacccuggccugccugaccaagcagggccagguggaccugaacgacguggugcuggcccugaccgaccugggccugaucuacaccgccaaguaccccaacagcagcgaccuggacagacugagccagaaccaccccgugcugaacaugaucgacgugaacaagagcagccugaacaucagcggcuacaacuucagccugggcgccgccgugaaggccggcgccugcaugcuggacggcggcaacaugcuggagaccaucaagaucagcccccagaccguggacggcauccugaagagcauccugaaggugaagagagcccugggcauguucgugagcgacacccccggcgagagaaaccccuacgagaacauccuguacaaggugugccugagcggcaacggcuggcccuacaucgccagcagaaccagcaucgugggcagagccugggagaacaccgugguggaccuggagagcaacaagaaccagcccaaggugggcaacaacggcagcaacaagaugcugcagagcagcggcuucgccaccggccugaccuacagccagcugaugacccugagagacagcaugcugcagcuggaccccaccgccaagaccuggaucgacaucgagggcagacccgaggaccccguggagcuggcccuguuccagcccagcagcggcugcuacauccacuucuucagagagcccaccgaccugaagcaguucaagcaggacgccaaguacagccacggcaucgacgugaacgaccuguucagcgcccagcccggccugaccagcgccgugcuggaggcccugcccagaaacauggugcugaccugccagggcagcgacgacaucagaaagcugcuggacagccaggacagaaaggacaucaagcugaucgacaucagccugagcaaggccgacgccagaaaguucgagaacgacgugugggaccaguucaaggaccugugccacaugcacaccggcaucgugguggagaagaagaagaagggcggcaagcaggagaugaccccccacugcgcccugcuggacugcaucauguucgacgccgccgugagcggcggccugaacgugcccacccugagagccgugcugcccaccgacaugguguucagaaccaucaccaccaagguggugcugugaggacuaguuauaagacugacuagcccgaugggccucccaacgggcccuccuccccuccuugcaccgagauuaauaaaaaaaaaaaaaaaaaaaaaaaaaaaaaaaaaaaaaaaaaaaaaaaaaaaaaaaaaaaaaaaaugcaucccccccccccccccccccccccccccccccaaaggcucuuuucagagccaccagaauu

SEQ ID NO: 11037 - RNA, 1927 nt, Artificial Sequence; identical to SEQ ID NO: 11031
  mRNA product Design i-3 comprising derived and/or modified sequence from LASV(Pinneo-NIG-1969;Clade I)__AIT17837__NP (opt4)

SEQ ID NO: 11038 - RNA, 1927 nt, Artificial Sequence
  mRNA product Design i-3 comprising derived and/or modified sequence from LASV(ISTH0009-NIG-2011;Clade II)__AIT17405__NP (opt4)
gggagaaagcuuaccaugagcgugagcaaggaggugaagagcuuccuguggacccagagccugagaagagagcugagcggcuacugcagcaacaucaagcugcagguggugaaggacgcccaggcccugcugcacggccuggacuucagcgaggugagcaacgugcagagacugaugagaaagcagaagagagacgacagcgaccugaagagacugagagaccugaaccaggccgugaacaaccugguggagcugaagagcacccagcagaagagcauccugagagugggcacccugaccagcgacgaccugcugacccuggccgccgaccuggagaagcugaagagcaaggugaucagaaccgagagaccccugagcagcggcguguacaugggcaaccugagcacccagcagcuggagcagagaagagcccugcugaacaugaucggcauggugggcggcgcccagggcacccagcccggcagagacggcguggugagagugugggacgugaagaaccccgaccugcugaacaaccaguucggcaccaugcccagccugacccuggccugccugaccaagcagggccagguggaccugaacgacgccgugcuggcccugaccgaccugggccugaucuacaccgccaaguaccccaacagcagcgaccuggacagacugagccagagccaccccauccugaacaugguggacaucaagaagagcagccugaacaucagcggcuacaacuucagccugggcgccgccgugaaggccggcgccugcaugcuggacggcggcaacaugcuggagaccaucaaggugaccccccagaccauggacggcauccugaagagcauccugaaggugaagagaagccugggcauguucgugagcgacacccccggcgagagaaaccccuacgagaacauccuguacaagaucugccugagcggcgacggcuggcccuacaucgccagcagaaccagcaucgugggcagagccugggagaacaccaccguggaccuggagagcgacggcaagccccagaaggugggcagcgccggcagcaacaagagccugcagagcgccggcuuccccaccggccugaccuacagccagcugaugacccugaaggacagcaugaugcagcuggaccccagcgccaagaccuggaucgacaucgagggcagacccgaggaccccguggagaucgcccuguaccagcccaugagcggcugcuacauccacuucuucagagagcccaccgaccugaagcaguucaagcaggacgccaaguacagccacggcaucgacguggccgaccuguuccccgcccagcccggccugaccagcgccgugaucgaggcccugcccagaaacauggugcugaccugccagggcagcgacgacaucaagagacugcuggacagccagggcagaagagacaucaagcugaucgacaucgcccugagcaaggccgacagcagaagauucgagaacgccgugugggaccagugcaaggaccugugccacaugcacaccggcguggugguggagaagaagaagagaggcggcaaggaggagaucaccccccacugcgcccugauggacugcaucauguacgacgccgccgugagcggcggccugaacauccccgugcugagagccgugcugcccagagacaugguguucagaaccagcagccccaagguggugcugugaggacuaguuauaagacugacuagcccgaugggccucccaacgggcccuccuccccuccuugcaccgagauuaauaaaaaaaaaaaaaaaaaaaaaaaaaaaaaaaaaaaaaaaaaaaaaaaaaaaaaaaaaaaaaaaaugcaucccccccccccccccccccccccccccccccaaaggcucuuuucagagccaccagaauu

SEQ ID NO: 11039 - RNA, 1927 nt, Artificial Sequence
  mRNA product Design i-3 comprising derived and/or modified sequence from LASV(ISTH2010-NIG-2012;Clade II)__AIT17483__NP (opt4)
gggagaaagcuuaccaugagcgccagcaaggaggugaagagcuuccuguggacccagagccugagaagagagcugagcggcuacugcagcaacaucaagcugcagguggugaaggacgcccaggcccugcugcacggccuggacuucagcgaggugagcaacgugcagagacugaugagaaagcagaagagagacgacagcgaccugaagagacugagagaccugaaccaggccgugaacaaccugguggagcugaagagcacccagcagaagagcauccugagagugggcacccugaccagcgacgaccugcugacccuggccgccgaccuggagaagcugaagagcaaggugaucagaaccgagagaccccugagcagcggcguguacaugggcaaccugagcacccagcagcuggagcagagaagagcccugcugaaccugaucggcauggugggcggcgcccagggcacccagcccggcagagacggcguggugagagugugggacgugaagaaccccgaccugcugaacaaccaguucggcaccaugcccagccugacccuggccugccugaccaagcagggccagguggaccugaacgacgccgugcuggcccugaccgaccugggccugaucuacaccgccaaguaccccaacagcagcgaccuggacagacugagccagagccaccccauccugaacaugguggacaccaagaagagcagccugaacaucagcggcuucaacuucagccugggcgccgccgugaaggccggcgccugcaugcuggacggcggcaacaugcuggagaccaucaaggugaccccccagaccauggacggcauccugaagagcauccugaaggugaagaagagccugggcauguucgugagcgacacccccggcgagagaaaccccuacgagaacauccuguacaagaucugccugagcggcgacggcuggcccuacaucgccagcagaaccagcaucgugggcagagccugggagaacaccaccguggaccuggagagcgacggcaagccccacaaggugggcaccgccggcagcaacaagagccugcagagcgccggcuuccccaccggccugaccuacagccagcugaugacccugaaggacagcaugaugcagcuggaccccagcgccaagaccuggaucgacaucgagggcagacccgaggaccccguggagaucgcccuguaccagcccaugagcggcugcuacauccacuucuucagagagcccaccgaccugaagcaguucaagcaggacgccaaguacagccacggcaucgacguggccgaccuguuccccgcccagcccggccugaccagcgccgugaucgaggcccugcccagaaacauggugcugaccugccagggcagcgacgacaucaagagacugcuggacagccagggcagaagagacaucaagcugaucgacaucgcccugagcaaggccgacagcagaagauucgagaacgccgugugggaccagugcaaggaccugugccacaugcacaccggcguggugguggagaagaagaagagaggcggcaaggaggagaucaccccccacugcgcccugauggacugcaucauguacgacgccgccgugagcggcggccugaacauccccgugcugagagccgugcugcccagagacaugguguucagaaccagcagccccaagguggugcugugaggacuaguuauaagacugacuagcccgaugggccucccaacgggcccuccuccccuccuugcaccgagauuaauaaaaaaaaaaaaaaaaaaaaaaaaaaaaaaaaaaaaaaaaaaaaaaaaaaaaaaaaaaaaaaaaugcaucccccccccccccccccccccccccccccccaaaggcucuuuucagagccaccagaauu

SEQ ID NO: 11040 - RNA, 1927 nt, Artificial Sequence
  mRNA product Design i-3 comprising derived and/or modified sequence from LASV(Lassa virus/H.sapiens-wt/NGA/2015/ISTH_0543;Clade II)__AVO03640__NP (opt4)
gggagaaagcuuaccaugagcgccagcaaggaggugaagagcuuccuguggacccagagccugagaagagagcugagcggcuacugcagcaacaucaagcugcagguggugaaggacgcccaggcccugcugcacggccuggacuucagcgaggugagcaacgugcagagacugaugagaaagcagaagagagacgacagcgaccugaagagacugagagaccugaaccaggccgugaacaaccugguggagcugaagagcacccagcagaagagcauccugagagugggcacccugaccagcgacgaccugcugacccuggccgccgaccuggagaagcugaagagcaaggugaucagaaccgagagaccccugagcagcggcguguacaugggcaaccugagcacccagcagcuggagcagagaagagcccugcugaacaugaucggcauggugggcggcgcccagggcacccagcccggcagagacggcguggugagagugugggacgugaagaaccccgaccugcugaacaaccaguucggcaccaugcccagccugacccuggccugccugaccaagcagggccagguggaccugaacgacgccgugcuggcccugaccgaccugggccugaucuacaccgccaaguaccccaacagcagcgaccuggacagacugagccagagccaccccauccugaacaugguggacaccaagaagagcagccugaacaucagcggcuacaacuucagccugggcgccgccgugaaggccggcgccugcaugcuggacggcggcaacaugcuggagaccaucaaggugaccccccagaccauggacggcauccugaagagcauccugaaggugaagaagagccugggcauguucgugagcgacacccccggcgagagaaaccccuacgagaacauccuguacaagaucugccugagcggcgacggcuggcccuacaucgccagcagaaccagcaucgugggcagagccugggagaacaccaccguggaccuggagagcgacggcaagccccagaaggugggcagcgccggcagcaacaagagccugcagagcgccggcuuccccaccggccugaccuacagccagcugaugacccugaaggacagcaugaugcagcuggaccccagcgccaagaccuggaucgacaucgagggcagacccgaggaccccguggagaucgcccuguaccagcccaugagcggcugcuacauccacuucuucagagagcccaccgaccugaagcaguucaagcaggacgccaaguacagccacggcaucgacguggccgaccuguuccccgcccagcccggccugaccagcgccgugaucgaggcccugcccagaaacauggugcugaccugccagggcagcgacgacaucaagagacugcuggacagccagggcagaaaggacaucaagcugaucgacaucgcccugagcaaggccgacagcagaagauucgagaacgccgugugggaccagugcaaggaccugugccacaugcacaccggcguggugguggagaagaagaagagaggcggcaaggaggagaucaccccccacugcgcccugauggacugcaucauguacgacgccgccgugagcggcggccugaacauccccgugcugagagccgugcugcccagagacaugguguucagaaccagcagccccaagguggugcugugaggacuaguuauaagacugacuagcccgaugggccucccaacgggcccuccuccccuccuugcaccgagauuaauaaaaaaaaaaaaaaaaaaaaaaaaaaaaaaaaaaaaaaaaaaaaaaaaaaaaaaaaaaaaaaaaugcaucccccccccccccccccccccccccccccccaaaggcucuuuucagagccaccagaauu

SEQ ID NO: 11041 - RNA, 1927 nt, Artificial Sequence
  mRNA product Design i-3 comprising derived and/or modified sequence from LASV(Lassa virus/H.sapiens-wt/NGA/2016/ISTH_0009;Clade II)__AVO03572__NP (opt4)
gggagaaagcuuaccaugagcgccagcaaggaggugaagagcuuccuguggacccagagccugagaagagagcugagcggcuacugcagcaacaucaagcugcagguggugaaggacgcccaggcccugcugcacggccuggacuucagcgaggugagcaacgugcagagacugaugagaaagcagaagagagacgacagcgaccugaagagacugagagaccugaaccaggccgugaacaaccugguggagcugaagagcacccagcagaagagcauccugagagugggcacccugaccagcgacgaccugcugacccuggccgccgaccuggagaagcugaagagcaaggugaucagaaccgagagaccccugagcagcggcguguacaugggcaaccugagcacccagcagcuggagcagagaagagcccugcugaacaugaucggcauggugggcggcgcccagggcacccagcccggcagagacggcguggugagagugugggacgugaagaaccccgaccugcugaacaaccaguucggcaccaugcccagccugacccuggccugccugaccaagcagggccagguggaccugaacgacgccgugcuggcccugaccgaccugggccugaucuacaccgccaaguaccccaacagcagcgaccuggacagacugagccagagccaccccauccugaacaugguggacaccaagaagagcagccugaacaucagcggcuacaacuucagccugggcgccgccgugaaggccggcgccugcaugcuggacggcggcaacaugcuggagaccaucaaggugaccccccagaccauggacggcauccugaagagcauccugaaggugaagaagagccugggcauguucgugagcgacacccccggcgagagaaaccccuacgagaacauccuguacaagaucugccugagcggcgacggcuggcccuacaucgccagcagaaccagcaucgugggcagagccugggagaacaccaccguggaccuggagagcgacggcaagccccagaaggugggcagcgccggcagcaacaagagccugcagagcgccggcuuccccaccggccugaccuacagccagcugaugacccugaaggacagcaugaugcagcuggaccccagcgccaagaccuggaucgacaucgagggcagacccgaggaccccguggagaucgcccuguaccagcccaugagcggcugcuacauccacuucuucagagagcccaccgaccugaagcaguucaagcaggacgccaaguacagccacggcaucgacguggccgaccuguuccccgcccagcccggccugaccagcgccgugaucgaggcccugcccagaaacauggugcugaccugccagggcagcgacgacaucaagagacugcuggacagccagggcagaagagacaucaagcugaucgacaucgcccugagcaaggccgacagcagaagauucgagaacgccgugugggaccagugcaaggaccugugccacaugcacaccggcguggugguggagaagaagaagagaggcggcaaggaggagaucaccccccacugcgcccugauggacugcaucauguacgacgccgccgugagcggcggccugaacauccccgugcugagagccgugcugcccagagacaugguguucagaaccagcagccccaagguggugcugugaggacuaguuauaagacugacuagcccgaugggccucccaacgggcccuccuccccuccuugcaccgagauuaauaaaaaaaaaaaaaaaaaaaaaaaaaaaaaaaaaaaaaaaaaaaaaaaaaaaaaaaaaaaaaaaaugcaucccccccccccccccccccccccccccccccaaaggcucuuuucagagccaccagaauu

SEQ ID NO: 11042 - RNA, 1927 nt, Artificial Sequence
  mRNA product Design i-3 comprising derived and/or modified sequence from LASV(Lassa virus/H.sapiens-wt/NGA/2016/ISTH_0017;Clade II)__AVO03568__NP (opt4)
gggagaaagcuuaccaugagcgccagcaaggaggugaagagcuuccuguggacccagagccugagaagagagcugagcggcuacugcagcagcaucaagcugcagguggugaaggacgcccaggcccugcugcacggccuggacuucagcgaggugagcaacgugcagagacugaugagaaagcagaagagagacgacagcgaccugaagagacugagagaccugaaccaggccgugaacaaccugguggagcugaagagcacccagcagaagagcauccugagagugggcacccugaccagcgacgaccugcugacccuggccgccgaccuggagaagcugaagagcaaggugaucagaaccgagagaccccugagcagcggcguguacaugggcaaccugagcacccagcagcuggagcagagaagagcccugcugaacaugaucggcauggccggcggcgcccagggcacccagcccggcagagacggcguggugagagugugggacgugaagaaccccgaccugcugaacaaccaguucggcaccaugcccagccugacccuggccugccugaccaagcagggccagguggaccugaacgacgccgugcuggcccugaccgaccugggccugaucuacaccgccaaguaccccaacagcagcgaccuggacagacugagccagagccaccccauccugaacaugguggacaccaagaagagcagccugaacaucagcggcuacaacuucagccugggcgccgccgugaaggccggcgccugcaugcuggacggcggcaacaugcuggagaccaucaaggugaccccccagaccauggacggcauccugaagagcauccugaaggugaagagaagccugggcauguucgugagcgacgcccccggcgagagaaaccccuacgagaacauccuguacaagaucugccugagcggcgacggcuggcccuacaucgccagcagaaccagcaucgugggcagagccugggagaacaccaccguggaccuggagagcgacggcaagccccagaaggugggcgccaccggcagcaacaagagccugcagagcgccggcuuccccaccggccugaccuacagccagcugaugacccugaaggacagcaugaugcagcuggaccccagcgccaagaccuggaucgacaucgagggcagacccgaggaccccguggagguggcccuguaccagcccgugagcggcugcuacauccacuucuucagagagcccaccgaccugaagcaguucaagcaggacgccaaguacagccacggcaucgacguggccgaccuguuccccgcccagcccggccugaccagcgccgugaucgaggcccugcccagaaacauggugcugaccugccagggcagcgacgacaucaagaagcugcuggacagccagggcagaaaggacaucaagcugaucgacaucgcccugagcaaggccgacagcagaagauucgagaacgccgugugggaccagugcaaggaccugugccacaugcacaccggcguggugguggagaagaagaagagaggcggcaaggaggagaucaccccccacugcgcccugauggacugcaucauguacgacgccgccgugagcggcggccugaacauccccgugcugagagccgugcugcccagagacaugguguucagaaccagcagccccaagguggugcugugaggacuaguuauaagacugacuagcccgaugggccucccaacgggcccuccuccccuccuugcaccgagauuaauaaaaaaaaaaaaaaaaaaaaaaaaaaaaaaaaaaaaaaaaaaaaaaaaaaaaaaaaaaaaaaaaugcaucccccccccccccccccccccccccccccccaaaggcucuuuucagagccaccagaauu

SEQ ID NO: 11043 - RNA, 1927 nt, Artificial Sequence
  mRNA product Design i-3 comprising derived and/or modified sequence from LASV(Lassa virus/H.sapiens-wt/NGA/2018/ISTH_0959;Clade II)__AVV65100__NP (opt4)
gggagaaagcuuaccaugagcgccagcaaggaggugaagagcuuccuguggacccagagccugagaagagagcugagcggcuacugcagcaacaucaagcugcagguggugaaggacgcccaggcccugcugcacggccuggacuucagcgaggugagcaacgugcagagacugaugagaaagcagaagagagacgacagcgaccugaagagacugagagaccugaaccaggccgugaacaaccugguggagcugaagagcacccagcagaagagcauccugagagugggcacccugaccagcgacgaccugcugacccuggccgccgaccuggagaagcugaagagcaaggugaucagaaccgagagaccccugagcagcggcguguacaugggcaaccugagcacccagcagcuggagcagagaagagcccugcugaaccugaucggcauggugggcggcgcccagggcacccagcccggcagagacggcguggugagagugugggacgugaagaaccccgaccugcugaacaaccaguucggcaccaugcccagccugacccuggccugccugaccaagcagggccagguggaccugaacgacguggugcuggcccugaccgaccugggccugaucuacaccgccaaguaccccaacagcagcgaccuggacagacugagccagagccaccccauccugaacaugguggacaccaagaagagcagccugaacaucagcggcuucaacuucagccugggcgccgccgugaaggccggcgccugcaugcuggacggcggcaacaugcuggagaccaucaaggugaccccccagaccauggacggcauccugaagagcauccugaaggugaagaagagccugggcauguucgugagcgacacccccggcgagagaaaccccuacgagaacauccuguacaagaucugccugagcggcgacggcuggcccuacaucgccagcagaaccagcaucgugggcagagccugggagaacaccaccguggaccuggagagcgacggcaagccccacaaggugggcaccgccggcagcaacaagagccugcagagcgccggcuuccccaccggccugaccuacagccagcugaugacccugaaggacagcaugaugcagcuggaccccagcgccaagaccuggaucgacaucgagggcagacccgaggaccccguggagaucgcccuguaccagcccaugagcggcugcuacauccacuucuucagagagcccaccgaccugaagcaguucaagcaggacgccaaguacagccacggcaucgacguggccgaccuguuccccgcccagcccggccugaccagcgccgugaucgaggcccugcccagaaacauggugcugaccugccagggcagcgacgacaucaagagacugcuggacagccagggcagaaaggacaucaagcugaucgacaucgcccugagcaagaccgacagcagaagauucgagaacgccgugugggaccagugcaaggaccugugccacaugcacaccggcguggugguggagaagaagaagagaggcggcaaggaggagaucaccccccacugcgcccugauggacugcaucauguacgacgccgccgugagcggcggccugaacauccccgugcugagagccgugcugcccagagacaugguguucagaaccagcagccccaagguggugcugugaggacuaguuauaagacugacuagcccgaugggccucccaacgggcccuccuccccuccuugcaccgagauuaauaaaaaaaaaaaaaaaaaaaaaaaaaaaaaaaaaaaaaaaaaaaaaaaaaaaaaaaaaaaaaaaaugcaucccccccccccccccccccccccccccccccaaaggcucuuuucagagccaccagaauu

SEQ ID NO: 11044 - RNA, 1927 nt, Artificial Sequence
  mRNA product Design i-3 comprising derived and/or modified sequence from LASV(LASV003-NIG-2008;Clade II)__AIT17581__NP (opt4)
gggagaaagcuuaccaugagcgccagcaaggaggugaagagcuuccuguggacccagagccugagaagagagcugagcggcuacugcagcagcaucaagcugcagguggugaaggacgcccaggcccugcugcacggccuggacuucagcgaggugagcaacgugcagagacugaugagaaagcagaagagagacgacagcgaccugaagagacugagagaccugaaccaggccgugaacaaccugguggagcugaagagcacccagcagaagagcgugcugagagugggcacccugaccagcgacgaccugcugacccuggccgccgaccuggagaagcugaagagcaaggugaucagaaccgagagaccccugagcagcggcguguacaugggcaaccugagcgcccagcagcuggagcagagaagaacccugcugaacaugaucggcauggugggcggcgcccagggcacccagcccggcagagacggcguggugagagugugggacgugaagaaccccgaccugcugaacaaccaguucggcaccaugcccagccugacccuggccugccugaccaagcagggccagguggaccugaacgacguggugcuggcccugaccgaccugggccugaucuacaccgccaaguaccccaacagcagcgaccuggacagacugagccagagccaccccauccugagcaugguggacaccaagaagagcagccugaacaucagcggcuacaacuucagccugggcgccgccgugaaggccggcgccugcaugcuggacggcggcaacaugcuggagaccaucaaggugaccccccagaccauggacggcauccugaagagcauccugaaggugaagaagagccugggcauguucgugagcgacacccccggcgagagaaaccccuacgagaacauccuguacaagaucugccugagcggcgacggcuggcccuacaucgccagcagaaccagcaucgugggcagagccugggagaacaccaccguggaccuggagagcgacggcaagccccagaaggugggcaccgccggcagcaacaagagccugcagagcgccggcuuccccaccggccugaccuacagccagcugaugacccugaaggacagcaugaugcagcuggaccccagcgccaagaccuggaucgacaucgagggcagacccgaggaccccguggagaucgcccuguaccagcccaugagcggcugcuacauccacuucuucagagagcccaccgaccugaagcaguucaagcaggacgccaaguacagccacggcaucgacgugaccgaccuguuccccgcccagcccggccugaccagcgccgugaucgaggcccugcccagaaacauggugcugaccugccagggcagcgacgacaucaagagacugcuggacagccagggcagaagagacaucaagcugaucgacaucgcccugagcaaggccgacagcagaagauucgagaacgccgugugggaccagugcaaggaccugugccacaugcacaccggcguggugguggagaagaagaagagaggcggcaaggaggagaucaccccccacugcgcccugauggacugcaucauguacgacgccgccgugagcggcggccugaacauccccgugcugagagccgugcugcccagagacaugguguucagaaccagcagccccaagguggugcugugaggacuaguuauaagacugacuagcccgaugggccucccaacgggcccuccuccccuccuugcaccgagauuaauaaaaaaaaaaaaaaaaaaaaaaaaaaaaaaaaaaaaaaaaaaaaaaaaaaaaaaaaaaaaaaaaugcaucccccccccccccccccccccccccccccccaaaggcucuuuucagagccaccagaauu

SEQ ID NO: 11045 - RNA, 1927 nt, Artificial Sequence
  mRNA product Design i-3 comprising derived and/or modified sequence from LASV(LASV035-NIG-2009;Clade II)__AIT17589__NP (opt4)
gggagaaagcuuaccaugagcgccagcaaggaggugaagagcuuccuguggacccagagccugagaagagagcugagcggcuacugcagcagcaucaagcugcagguggugaaggacgcccaggcccugcugcacggccuggacuucagcgaggugagcaacgugcagagacugaugagaaagcagaagagagacgacagcgaccugaagagacugagagaccugaaccaggccgugaacaaccugguggagcugaagagcacccagcagaagagcauccugagagugggcacccugaccagcgacgaccugcugacccuggccgccgaccuggagaagcugaagagcaaggugaucagaaccgagagaccccugagcagcggcguguacaugggcaaccugagcgcccagcagcuggagcagagaagagcccugcugaacaugaucggcauggugggcggcgcccagggcacccagcccggcagagacggcguggugagagugugggacgugaagaaccccgaccugcugaacaaccaguucggcaccaugcccagccugacccuggccugccugaccaagcagggccagguggaccugaacgacgccgugcuggcccugaccgaccugggccugaucuacaccgccaaguaccccaacagcagcgaccuggacagacugagccagagccaccccauccugaacaugguggacaccaagaagagcagccugaacaucagcggcuacaacuucagccugggcgccgccgugaaggccggcgccugcaugcuggacggcggcaacaugcuggagaccaucaaggugaccccccagaccauggacggcauccugaagagcauccugaaggugaagagaagccugggcauguucgugagcgacacccccggcgagagaaaccccuacgagaacauccuguacaagaucugccugagcggcgacggcuggcccuacaucgccagcagaaccagcaucgugggcagagccugggagaacaccaccguggaccuggagagcgacggcaagccccagaaggugggcaccaccggcagcaacaagagccugcagagcgccggcuuccccaccggccugaccuacagccagcugaugacccugaaggacagcaugaugcagcuggaccccagcgccaagaccuggaucgacaucgagggcagacccgaggaccccguggagaucgcccuguaccagcccaugagcggcugcuacauccacuucuucagagagcccaccgaccugaagcaguucaagcaggacgccaaguacagccacggcaucgacguggccgaccuguuccccgcccagcccggccugaccagcgccgugaucgaggcccugcccagaaacauggugcugaccugccagggcagcgacgacaucaagaagcugcuggacagccagggcagaagagacaucaagcugaucgacaucgcccugagcaaggccgacagcagaaaguucgagaacgccgugugggaccagugcaaggaccugugccacaugcacaccggcguggugguggagaagaagaagagaggcggcaaggaggagaucaccccccacugcgcccugauggacugcaucauguacgacgccgccgugagcggcggccugaacauccccgugcugagagccgugcugcccagagacaugguguucagaaccagcagccccaagguggugcugugaggacuaguuauaagacugacuagcccgaugggccucccaacgggcccuccuccccuccuugcaccgagauuaauaaaaaaaaaaaaaaaaaaaaaaaaaaaaaaaaaaaaaaaaaaaaaaaaaaaaaaaaaaaaaaaaugcaucccccccccccccccccccccccccccccccaaaggcucuuuucagagccaccagaauu

SEQ ID NO: 11046 - RNA, 1927 nt, Artificial Sequence
  mRNA product Design i-3 comprising derived and/or modified sequence from LASV(LASV1000-NIG-2009;Clade II)__AIT17783__NP (opt4)
gggagaaagcuuaccaugagcgccagcaaggaggugaagagcuuccuguggacccagagccugagaagagagcugagcggcuacugcagcaacaucaagcugcagguggugaaggacgcccaggcccugcugcacggccuggacuucagcgaggugagcaacgugcagagacugaugagaaagcagaagagagacgacagcgaccugaagagacugagagaccugaaccaggccgugaacaaccugguggagcugaagagcacccagcagaagagcauccugagagugggcacccugaccagcgacgaccugcugacccuggccgccgaccuggagaagcugaagagcaaggugaucagaaccgagagaccccugagcagcggcguguacaugggcaaccugagcacccagcagcuggagcagagaagagcccugcugaacaugaucggcauggugggcggcgcccagggcacccagcccggcagagacggcguggugagagugugggacgugaagaaccccgaccugcugaacaaccaguucggcaccaugcccagccugacccuggccugccugaccaagcagggccagguggaccugaacgacguggugcuggcccugaccgaccugggccugaucuacaccgccaaguaccccaacagcagcgaccuggacagacugagccagagccaccccauccugaacaugguggacaccaagaagagcagccugaacaucagcggcuacaacuucagccugggcgccgccgugaaggccggcgccugcaugcuggacggcggcaacaugcuggagaccaucaaggugaccccccagaccauggacggcauccugaagagcauccugaaggugaagaagagccugggcauguucgugagcgacacccccggcgagagaaaccccuacgagaacauccuguacaagaucugccugagcggcgacggcuggcccuacaucgccagcagaaccagcaucgugggcagagccugggagaacaccaccguggaccuggagagcgacggcaagccccagaaggugggcaccgccggcagcaacaagagccugcagagcgccggcuuccccaccggccugaccuacagccagcugaugacccugaaggacagcaugaugcagcuggaccccagcgccaagaccuggaucgacaucgagggcagacccgaggaccccguggagaucgcccuguaccagcccgugagcggcugcuacauccacuucuucagagagcccaccgaccugaagcaguucaagcaggacgccaaguacagccacggcaucgacguggccgaccuguuccccgcccagcccggccugaccagcgccgugaucgaggcccugcccagaaacauggugcugaccugccagggcagcgacgacaucaagagacugcuggacagccagggcagaagagacaucaagcugaucgacaucgcccugagcaaggccgacagcagaagauucgagaacgccgugugggaccagugcaaggaccugugccacaugcacaccggcguggugguggagaagaagaagagaggcggcaaggaggagaucaccccccacugcgcccugauggacugcaucauguacgacgccgccgugagcggcggccugaacauccccgugcugagagccgugcugcccagagacaugguguucagaaccagcagccccaagguggugcugugaggacuaguuauaagacugacuagcccgaugggccucccaacgggcccuccuccccuccuugcaccgagauuaauaaaaaaaaaaaaaaaaaaaaaaaaaaaaaaaaaaaaaaaaaaaaaaaaaaaaaaaaaaaaaaaaugcaucccccccccccccccccccccccccccccccaaaggcucuuuucagagccaccagaauu

SEQ ID NO: 11047 - RNA, 1927 nt, Artificial Sequence
  mRNA product Design i-3 comprising derived and/or modified sequence from LASV(LASV221-NIG-2010;Clade II)__AIT17625__NP (opt4)
gggagaaagcuuaccaugagcgccagcaaggaggugaagagcuuccuguggacccagagccugagaagagagcugagcggcuacugcagcagcaucaagcugcagguggugaaggacgcccaggcccugcugcacggccuggacuucagcgaggugagcaacgugcagagacugaugagaaagcagagaagagacgacagcgaccugaagagacugagagaccugaaccaggccgugaacaaccugguggagcugaagagcacccagcagaagagcauccugagagugggcacccugaccagcgacgaccugcugacccuggccgccgaccuggagaagcugaagagcaaggugaucagaaccgagagaccccugagcagcggcguguacaugggcaaccugagcacccagcagcuggagcagagaagagcccugcugaacaugaucggcauggugggcggcgcccagggcacccagcccggcagagacggcguggugagagugugggacgugaagaaccccgaccugcugaacaaccaguucggcaccaugcccagccugacccuggccugccugaccaagcagggccagguggaccugaacgacgccgugcuggcccugaccgaccugggccugaucuacaccgccaaguaccccaacagcagcgaccuggacagacugagccagagccaccccauccugaacaugguggacaccaagaagagcagccugaacaucagcggcuacaacuucagccugggcgccgccgugaaggccggcgccugcaugcuggacggcggcaacaugcuggagaccaucaaggugaccccccagaccguggacggcauccugaagagcauccugaaggugaagagaagccugggcauguucgugagcgacacccccggcgagagaaaccccuacgagaacauccuguacaagaucugccugagcggcgacggcuggcccuacaucgccagcagaaccagcaucgugggcagagccugggagaacaccaccguggaccuggagagcgacggcaagccccagaaggugggcaccgccggcagcaacaagagccugcagagcgccggcuuccccaccggccugaccuacagccagcugaugacccugaaggacagcaugaugcagcuggaccccagcgccaagaccuggaucgacaucgagggcagacccgaggaccccguggagaucgcccuguaccagcccaugagcggcugcuacauccacuucuucagagagcccaccgaccugaagcaguucaagcaggacgccaaguacagccacggcaucgacguggccgaccuguuccccgcccagcccggccugaccagcgccgugaucgaggcccugcccagaaacauggugcugaccugccagggcagcgacgacaucaagagacugcuggacagccagggcagaagagacaucaagcugaucgacaucgcccugagcaaggccgacagcagaaaguucgagaacgccgugugggaccagugcaaggaccugugccacaugcacaccggcguggugguggagaagaagaagagaggcggcaaggaggagaucaccccccacugcgcccugauggacugcaucauguacgacgccgccgugagcggcggccugaacauccccgugcugagagccgugcugcccagagacaugguguucagaaccagcagccccaagguggugcugugaggacuaguuauaagacugacuagcccgaugggccucccaacgggcccuccuccccuccuugcaccgagauuaauaaaaaaaaaaaaaaaaaaaaaaaaaaaaaaaaaaaaaaaaaaaaaaaaaaaaaaaaaaaaaaaaugcaucccccccccccccccccccccccccccccccaaaggcucuuuucagagccaccagaauu

SEQ ID NO: 11048 - RNA, 1927 nt, Artificial Sequence
  mRNA product Design i-3 comprising derived and/or modified sequence from LASV(LASV237-NIG-2010;Clade II)__AIT17639__NP (opt4)
gggagaaagcuuaccaugagcgccagcaaggaggugaagagcuuccuguggacccagagccugagaagagagcugagcggcuacugcagcaacaucaagcugcagguggugaaggacgcccaggcccugcugcacggccuggacuucagcgaggugagcaacgugcagagacugaugagaaagcagaagagagacgacagcgaccugaagagacugagagaccugaaccaggccgugaacaaccugguggagcugaagagcacccagcagaagagcauccugagagugggcacccugaccagcgacgaccugcugacccuggccgccgaccuggagaagcugaagagcaaggugaucagaaccgagagaccccugagcagcggcguguacaugggcaaccugagcacccagcagcuggagcagagaagagcccugcugaacaugaucggcauggugggcggcgcccagggcacccagcccggcagagacggcguggugagagugugggacgugaagaaccccgaccugcugaacaaccaguucggcaccaugcccagccugacccuggccugccugaccaagcagggccagguggaccugaacgacgccgugcuggcccugaccgaccugggccugaucuacaccgccaaguaccccaacagcagcgaccuggacagacugagccagagccaccccauccugaacaugguggacaucaagaagagcagccugaacaucagcggcuacaacuucagccugggcgccgccgugaaggccggcgccugcaugcuggacggcggcaacaugcuggagaccaucaaggugaccccccagaccauggacggcauccugaagagcauccugaaggugaagagaagccugggcauguucgugagcgacacccccggcgagagaaaccccuacgagaacauccuguacaagaucugccugagcggcgacggcuggcccuacaucgccagcagaaccagcaucgugggcagagccugggagaacaccaccguggaccuggagagcgacggcaagccccagaaggugggcagcgccggcagcaacaagagccugcagagcgccggcuuccccaccggccugaccuacagccagcugaugacccugaaggacagcaugaugcagcuggaccccagcgccaagaccuggaucgacaucgagggcagacccgaggaccccguggagaucgcccuguaccagcccaugagcggcugcuacauccacuucuucagagagcccaccgaccugaagcaguucaagcaggacgccaaguacagccacggcaucgacguggccgaccuguuccccgcccagcccggccugaccagcgccgugaucgaggcccugcccagaaacauggugcugaccugccagggcagcgacgacaucaagagacugcuggacagccagggcagaagagacaucaagcugaucgacaucgcccugagcaaggccgacagcagaagauucgagaacgccgugugggaccagugcaaggaccugugccacaugcacaccggcguggugguggagaagaagaagagaggcggcaaggaggagaucaccccccacugcgcccugauggacugcaucauguacgacgccgccgugagcggcggccugaacauccccgugcugagagccgugcugcccagagacaugguguucagaaccagcagccccaagguggugcugugaggacuaguuauaagacugacuagcccgaugggccucccaacgggcccuccuccccuccuugcaccgagauuaauaaaaaaaaaaaaaaaaaaaaaaaaaaaaaaaaaaaaaaaaaaaaaaaaaaaaaaaaaaaaaaaaugcaucccccccccccccccccccccccccccccccaaaggcucuuuucagagccaccagaauu

SEQ ID NO: 11049 - RNA, 1927 nt, Artificial Sequence
  mRNA product Design i-3 comprising derived and/or modified sequence from LASV(LASV253-NIG-2011;Clade II)__AIT17671__NP (opt4)
gggagaaagcuuaccaugagcgccagcaaggaggugaagagcuuccuguggacccagagccugagaagagagcugagcggcuacugcagcagcaucaagcugcagguggugaaggacgcccaggcccugcugcacggccuggacuucagcgaggugagcaacgugcagagacugaugagaaagcagaagagagacgacagcgaccugaagagacugagagaccugaaccaggccgugaacaaccugguggagcugaagagcacccagcagaagagcgugcugagagugggcacccugaccagcgacgaccugcugacccuggccgccgaccuggagaagcugaagagcaaggugaucagaaccgagagaccccugagcagcggcguguacaugggcaaccugagcacccagcagcuggagcagagaagagcccugcugaacaugaucggcauggugggcggcgcccagggcacccagcccggcagagacggcguggugagagugugggacgugaagaaccccgaccugcugaacaaccaguucggcaccaugcccagccugacccuggccugccugaccaagcagggccagguggaccugaacgacguggugcuggcccugaccgaccugggccugaucuacaccgccaaguaccccaacagcagcgaccuggacagacugagccagagccaccccauccugaacaugguggacaccaagaagagcagccugaacaucagcggcuacaacuucagccugggcgccgccgugaaggccggcgccugcaugcuggacggcggcaacaugcuggagaccaucaaggugaccccccagaccauggacggcauccugaagagcauccugaaggugaagaagagccugggcauguucgugagcgacacccccggcgagagaaaccccuacgagaacauccuguacaagaucugccugagcggcgacggcuggcccuacaucgccagcagaaccagcaucgugggcagagccugggagaacaccaccguggaccuggagagcgacggcaagccccagaaggugggcaccgccggcagcaacaagagccugcagagcgccggcuuccccaccggccugaccuacagccagcugaugacccugaaggacagcaugaugcagcuggaccccagcgccaagaccuggaucgacaucgagggcagacccgaggaccccguggagaucgcccuguaccagcccaugagcggcugcuacauccacuucuucagagagcccaccgaccugaagcaguucaagcaggacgccaaguacagccacggcaucgacgugaccgaccuguuccccgcccagcccggccugaccagcgccgugaucgaggcccugcccagaaacauggugcugaccugccagggcagcgacgacaucaagagacugcuggacagccagggcagaagagacaucaagcugaucgacaucgcccugagcaaggccgacagcagaagauucgagaacgccgugugggaccagugcaaggaccugugccacaugcacaccggcguggugguggagaagaagaagagaggcggcaaggaggagaucaccccccacugcgcccugauggacugcaucauguacgacgccgccgugagcggcggccugaacauccccgugcugagagccgugcugcccagagacaugguguucagaaccagcagccccaagguggugcugugaggacuaguuauaagacugacuagcccgaugggccucccaacgggcccuccuccccuccuugcaccgagauuaauaaaaaaaaaaaaaaaaaaaaaaaaaaaaaaaaaaaaaaaaaaaaaaaaaaaaaaaaaaaaaaaaugcaucccccccccccccccccccccccccccccccaaaggcucuuuucagagccaccagaauu

SEQ ID NO: 11050 - RNA, 1927 nt, Artificial Sequence
  mRNA product Design i-3 comprising derived and/or modified sequence from LASV(LASV254-NIG-2011;Clade II)__AIT17675__NP (opt4)
gggagaaagcuuaccaugagcgccagcaaggaggugaagagcuuccuguggacccagagccugagaagagagcugagcggcuacugcagcagcaucaagcugcagguggugaaggacgcccaggcccugcugcacggccuggacuucagcgaggugagcaacgugcagagacugaugagaaagcagaagagagacgacagcgaccugaagagacugagagaccugaaccaggccgugaacaaccugguggagcugaagagcacccagcagaagagcgugcugagagugggcacccugaccagcgacgaccugcugacccuggccgccgaccuggagaagcugaagagcaaggugaucagaaccgagagaccccugagcagcggcguguacaugggcaaccugagcacccagcagcuggagcagagaagagcccugcugaacaugaucggcauggugggcggcgcccagggcacccagcccggcagagacggcguggugagagugugggacgugaagaaccccgaccugcugaacaaccaguucggcaccaugcccagccugacccuggccugccugaccaagcagggccagguggaccugaacgacgccgugcuggcccugaccgaccugggccugaucuacaccgccaaguaccccaacagcagcgaccuggacagacugagccagagccaccccauccugaacaugguggacaccaagaagagcagccugaacaucagcggcuacaacuucagccugggcgccgccgugaaggccggcgccugcaugcuggacggcggcaacaugcuggagaccaucaaggugaccccccagaccauggacggcauccugaagagcauccugaaggugaagaagagccugggcauguucgugagcgacacccccggcgagagaaaccccuacgagaacauccuguacaagaucugccugagcggcgacggcuggcccuacaucgccagcagaaccagcaucgugggcagagccugggagaacaccaucguggaccuggagagcgacggcaagccccagaaggugggcaccgccggcagcaacaagagccugcagagcgccggcuuccccaccggccugaccuacagccagcugaugacccugaaggacagcaugaugcagcuggaccccagcgccaagaccuggaucgacaucgagggcagacccgaggaccccguggagaucgcccuguaccagcccaugagcggcugcuacauccacuucuucagagagcccaccgaccugaagcaguucaagcaggacgccaaguacagccacggcaucgacguggccgaccuguuccccgcccagcccggccugaccagcgccgugaucgaggcccugcccagaaacauggugcugaccugccagggcagcgacgacaucaagagacugcuggacagccagggcagaagagacaucaagcugaucgacaucgcccugagcaaggccgacagcagaagauucgagaacgccgugugggaccagugcaaggaccugugccacaugcacaccggcguggugguggagaagaagaagagaggcggcaaggaggagaucaccccccacugcgcccugauggacugcaucauguacgacgccgccgugagcggcggccugaacauccccgugcugagagccgugcugcccagagacaugguguucagaaccagcagccccaagguggugcugugaggacuaguuauaagacugacuagcccgaugggccucccaacgggcccuccuccccuccuugcaccgagauuaauaaaaaaaaaaaaaaaaaaaaaaaaaaaaaaaaaaaaaaaaaaaaaaaaaaaaaaaaaaaaaaaaugcaucccccccccccccccccccccccccccccccaaaggcucuuuucagagccaccagaauu

SEQ ID NO: 11051 - RNA, 1927 nt, Artificial Sequence
  mRNA product Design i-3 comprising derived and/or modified sequence from LASV(Nig08-04;Clade II)__ADU56611__NP (opt4)
gggagaaagcuuaccaugagcgccagcaaggaggugaagagcuuccuguggacccagagccugagaagagagcugagcggcuacugcagcaacaucaagcugcagguggugaaggacgcccaggcccugcugcacggccuggacuucagcgaggugagcaacgugcagagacugaugagaaagcagaagagagacgacggcgaccugaagagacugagagaccugaaccaggccgugaacaaccugguggagcugaagagcacccagcagaagagcgugcugagagugggcacccugaccagcgacgaccugcugacccuggccgccgaccuggagaagcugaagagcaaggugaucagaaccgagagaccccugagcagcggcguguacaugggcaaccugagcacccagcagcuggagcagagaaaggcccugcugagcaugaucggcauggugggcggcgcccagggcacccagcccggcagagacggcguggugagagugugggacgugaagaaccccgaccugcugaacaaccaguucggcaccaugcccagccugacccuggccugccugaccaagcagggccagguggaccugaacgacgccgugcuggcccugaccgaccugggccugaucuacaccgccaaguaccccaacagcagcgaccuggacagacugagccagagccaccccauccugaacaugguggacaccaagaagagcagccugaacaucagcggcuacaacuucagccugggcgccgccgugaaggccggcgccugcaugcuggacggcggcaacaugcuggagaccaucaaggugaccccccagaccauggacggcauccugaagagcauccugaaggugaagagaagccugggcauguucgugagcgacacccccggcgagagaaaccccuacgagaacauccuguacaagaucugccugagcggcgacggcuggcccuacaucgccagcagaaccagcaucgugggcagagccugggagaacaccaccguggaccuggagagcgacggcaagccccagaaggugggcaccgccggcagcaacaagagccugcagagcgccggcuuccccaccggccugaccuacagccagcugaugacccugaaggacagcaugaugcagcuggaccccagcgccaagaccuggaucgacaucgagggcagacccgaggaccccguggagaucgcccuguaccagcccaugagcggcugcuacauccacuucuucagagagcccaccgaccugaagcaguucaagcaggacgccaaguacagccacggcaucgacgugaccgaccuguucagcgcccagcccggccugaccagcgccgugaucgaggcccugcccagaaacauggugcugaccugccagggcagcgacgacaucaagaagcugcuggacagccagggcagaagagacaucaagcugaucgacaucagccugaacaaggccgacagcagaagauucgagaacgccgugugggaccagugcaaggaccugugccacaugcacaccggcguggugguggagaagaagaagagaggcggcaaggaggagaucaccccccacugcgcccugauggacugcaucauguucgacgccgccgugagcggcggccugaacauccccauccugagagccgugcugcccagagacaugguguucagaaccagcagccccaagguggugcugugaggacuaguuauaagacugacuagcccgaugggccucccaacgggcccuccuccccuccuugcaccgagauuaauaaaaaaaaaaaaaaaaaaaaaaaaaaaaaaaaaaaaaaaaaaaaaaaaaaaaaaaaaaaaaaaaugcaucccccccccccccccccccccccccccccccaaaggcucuuuucagagccaccagaauu

SEQ ID NO: 11052 - RNA, 1930 nt, Artificial Sequence
  mRNA product Design i-3 comprising derived and/or modified sequence from LASV(GA391;Clade III)__AAA46284__NP (opt4)
gggagaaagcuuaccaugagcgccagcaaggaggugagaagcugccuguggacccagagccugagaagagagcugagcggcuacugcagcaacaucaagcugcagguggugaaggacgcccaggcccugcugcacggccuggacuucagcgaggugagcaacgugcagagacugaugagaaagcagaagagagacgacggcgaccugaagagacugagagaccugaaccaggccgugaacaaccugguggagcugaagagcacccagcagaagagcgugcugagagugggcacccugagcagcgacgaccugcugauccuggccgccgaccuggagaagcugaagagcaaggugaccagaaccgagagaccccugagcagcggcguguacaugggcaaccugagcagccagcagcuggaccagagaagagcccugcugaacaugaucggcaugaccggcgugagcggcggcggcaagggcgccagcaacggcaucgugagagugugggacgugaagaacgccgagcugcugaacaaccaguucggcaccaugcccagccugacccuggccugccugaccaagcagggccagguggaccugaacgacgccgugcaggcccugaccgaccugggccugaucuacaccgccaaguaccccaacagcagcgaccuggacagacugagccagagccaccccauccugaacaugaucgacaccaagaagagcagccugaacaucagcggcuacaacuucagccugggcgccgccgugaaggccggcgccugcaugcuggacggcggcaacaugcuggagaccaucaaggugagcccccagaccauggacggcauccugaagagcauccugaaggugaagaagagccugggcauguucgugagcgacacccccggcgagagaaaccccuacgagaacauccuguacaagaucugccugagcggcgacggcuggagcuacaucgccagcagaaccagcaucgugggcagagccugggagaacaccgugguggaccuggagcaggacaacaagccccagaagaucggcaacggcggcagcaacaagagccugcagagcgccggcuucgccgccggccugaucuacagccagcugaugacccugaaggacuucaagugcuucaaccugauccccaacgccaagaccuggauggacaucgagggcagacccgaggaccccguggagaucgcccuguaccagcccagcagcggcugcuacgugcacuucuucagagagcccaccgaccugaagcaguucaagcaggacgccaaguacagccacggcagagacgugaccgaccuguucgccgcccagcccggccugaccagcgccgugaucgaggcccugcccagaaacauggugaucaccugccagggcagcgaggacaucagaaagcugcuggagagccagggcagaagagacaucaagcugaucgacaucacccugagcaaggccgacagcagaaaguucgagaacgccgugugggaccaguucaaggaccugugccacaugcacaccggcguggugguggagaagaagaagagaggcggcaaggaggagaucaccccccacugcgcccugauggacugcaucauguucgacgccgccgugagcggcggccuggacgccaaggugcugagaguggugcugcccagagacaugguguucagaaccagcacccccaagguggugcugugaggacuaguuauaagacugacuagcccgaugggccucccaacgggcccuccuccccuccuugcaccgagauuaauaaaaaaaaaaaaaaaaaaaaaaaaaaaaaaaaaaaaaaaaaaaaaaaaaaaaaaaaaaaaaaaaugcaucccccccccccccccccccccccccccccccaaaggcucuuuucagagccaccagaauu

SEQ ID NO: 11053 - RNA, 1927 nt, Artificial Sequence
  mRNA product Design i-3 comprising derived and/or modified sequence from LASV(Nig08-A19;Clade III)__ADU56619__NP (opt4)
gggagaaagcuuaccaugagcgccagcaaggaggugaagagcuuccuguggacccagagccugagaagagagcugagcggcuacugcagcaacaucaagcugcagguggugaaggacgcccaggcccugcugcacggccuggacuucagcgaggugagcaacgugcagagacugaugagaaagcagaagagagacgacggcgaccugaagagacugagagaccugaaccaggccgugaacaaccugguggagcugaagagcacccagcagaagagcgugcugagagugggcacccugagcagcgacgaccugcuggugcuggccgccgaccuggagaagcugaagagcaagguggugagaaccgagagaccccugagcagcggcaucuacaugggcaaccugagcagccagcagcuggaccagagaaaggcccugcugaacaugaucggcaugaccggcggcaacggcggcagaaacaccaccagcgacggcaucgugagagugugggacgugaagaacgccgagcugcugaacaaccaguucggcaccaugcccagccugacccuggccugccugaccaagcagggccagguggaccugaacgacgccgugcaggcccugaccgaccugggccugaucuacaccgccaaguaccccaacagcagcgaccuggacagacuggcccagagccaccccauccugaacaugaucgacaccaagaagagcagccugaacaucagcggcuacaacuucagccugggcgccgccgugaaggccggcgccugcaugcuggacggcggcaacaugcuggagaccaucaaggugagcccccagaccauggacggcauccugaagagcauccugaaggugaagagaagccugggcauguucaucagcgacacccccggcgagagaaaccccuacgagaacauccuguacaagaucugccugagcggcgacggcuggcccuacaucgccagcagaaccagcaucgugggcagagccugggagaacaccgugguggaccuggagagcgacaacaagccccagaagaccggcaacggcggcagcaacaagagccugcagagcgccggcuucgccgccggccugaccuacagccagcugaugacccugaaggacagcaugcugcagcuggaccccaacgccaagaccuggauggacaucgagggcagacccgaggaccccguggagaucgcccuguaccagcccagcagcggcugcuacauccacuucuucagagagcccaccgaccugaagcaguucaagcaggacgccaaguacagccacggcaucgacgugaccgaccuguucgccgcccagcccggccugaccagcgccgugaucgaggcccugcccagaaacauggugaucaccugccagggcagcgaggacaucagaaagcugcuggagagccagggcagaagagacaucaagcugaucgacaucagccugagcaagguggacagcagaaaguucgagaacgccgugugggaccaguucaaggaccugugccacaugcacaccggcaucgugguggagaagaagaagagaggcggcaaggaggagaucaccccccacugcgcccugauggacugcaucauguucgacgccgccgugagcggcggcguggacgccaaggugcugagagccgugcugcccagagacaugguguucagaaccagcacccccaagguggugcugugaggacuaguuauaagacugacuagcccgaugggccucccaacgggcccuccuccccuccuugcaccgagauuaauaaaaaaaaaaaaaaaaaaaaaaaaaaaaaaaaaaaaaaaaaaaaaaaaaaaaaaaaaaaaaaaaugcaucccccccccccccccccccccccccccccccaaaggcucuuuucagagccaccagaauu

SEQ ID NO: 11054 - RNA, 1927 nt, Artificial Sequence
  mRNA product Design i-3 comprising derived and/or modified sequence from LASV(G1180-SLE-2010;Clade IV)__AIT17169__NP (opt4)
gggagaaagcuuaccaugagcgccagcaaggagaucaagagcuuccuguggacccagagccugagaagagagcugagcggcuacugcagcaacaucaagcugcagguggugaaggacgcccaggcccugcugcacggccuggacuucagcgaggugagcaacgugcagagacugaugagaaaggagagaagagacgacaacgaccugaagagacugagagaccugaaccaggccgugaacaaccugguggagcugaagagcacccagcagaagagcauccugagagugggcacccugaccagcgacgaccugcugauccuggccgccgaccuggagaagcugaagagcaaggugaucagaaccgagagaccccugagcgccggcguguacaugggcaaccugagcagccagcagcuggaccagagaagagcccugcugagcaugaucggcaugagcagcggcaaccagagagcccaggccggcagagacggcguggugagagugugggacgugaagaacguggagcugcugaacaaccaguucggcaccaugcccagccugacccuggccugccugaccaagcagggccagguggaccugaacgacgccgugcaggcccugaccgaccugggccugaucuacaccgccaaguaccccaacaccagcgaccuggacagacugacccagagccaccccauccugaacaugaucgacaccaagaagagcagccugaacaucagcggcuacaacuucagccugggcgccgccgugaaggccggcgccugcaugcuggacggcggcaacaugcuggagaccaucaaggugagcccccagaccauggacggcauccugaagagcauccugaaggugaagaaggcccugggcauguucaucagcgacacccccggcgagagaaaccccuacgagaacauccuguacaagaucugccugagcggcgacggcuggcccuacaucgccagcagaaccagcaucaccggcagagccugggagaacaccgugguggaccuggagagcgacggcaagccccagaaggccggcagcaacaacagcaacaagagccugcagagcgugggcuucaccgccggccugaccuacagccagcugaugacccugaaggacgccaugcugcagcuggaccccaacgccaagaccuggauggacaucgagggcagacccgaggaccccguggagaucgcccuguaccagcccagcagcggcugcuacauccacuucuucagagagcccaccgaccugaagcaguucaagcaggacgccaaguacagccacggcaucgacgugaccgaccuguucgccgcccagcccggccugaccagcgccgugaucgacgcccugcccagaaacauggugaucaccugccagggcagcgacgacaucagaaagcugcuggagagccagggcagaaaggacaucaagcugaucgacaucgcccugagcaagaccgacagcagaaaguacgagaacgccgugugggaccaguacaaggaccugugccacaugcacaccggcguggugguggagaagaagaagagaggcggcaaggaggagaucaccccccacugcgcccugauggacugcaucauguucgacgccgccgugagcggcggccugaacaccagcgugcugagagccgugcugcccagagacaugguguucagaaccagcacccccagaguggugcugugaggacuaguuauaagacugacuagcccgaugggccucccaacgggcccuccuccccuccuugcaccgagauuaauaaaaaaaaaaaaaaaaaaaaaaaaaaaaaaaaaaaaaaaaaaaaaaaaaaaaaaaaaaaaaaaaugcaucccccccccccccccccccccccccccccccaaaggcucuuuucagagccaccagaauu

SEQ ID NO: 11055 - RNA, 1927 nt, Artificial Sequence
  mRNA product Design i-3 comprising derived and/or modified sequence from LASV(G1442-SLE-2011;Clade IV)__AIT17181__NP (opt4)
gggagaaagcuuaccaugagcgccagcaaggaggugaagagcuuccuguggacccagagccugagaagagagcugagcggcuacugcagcaacaucaagcugcagguggugaaggacgcccaggcccugcugcacggccuggacuucagcgaggugagcaacgugcagagacugaugagaaagcagagaagagacgacaacgaccugaagagacugagagaccugaaccaggccgugaacaaccugguggagcugaagagcacccagcagaagagcgugcugagagugggcacccugaccagcgacgaccugcuggugcuggccgccgaccuggagaagcugaagagcaaggugaucagaaccgagagaccccugagcgccggcguguacaugggcaaccugagcagccagcagcuggaccagagaagagcccugcugaacaugaucggcaugagcggcggcauccagggcaccagaaccggcagagacggcguggugagagugugggacgugaagaacgccgaccugcugaacaaccaguucggcaccaugcccagccugacccuggccugccugaccaagcagggccagguggaccugaacgacguggugcaggcccugaccgaccugggccugaucuacaccgccaaguaccccaacgccagcgaccuggacagacugacccagagccaccccauccugaacaugaucgacaccaagaagagcagccugaacaucagcggcuacaacuucagccugggcgccgccgugaaggccggcgccugcaugcuggacggcggcaacaugcuggagaccaucaaggugagcccccagaccauggacggcauccugaagagcauccugaaggugaagaagacccugggcauguucaucagcgacacccccggcgagagaaaccccuacgagaacauccuguacaagaucugccugagcggcgacggcuggcccuacaucgccagcagaaccagcaucaccggcagagccugggagaacaccgugguggaccuggagagcgacggcaagccccagaaggccggcagcaacaacagcaacaagagccugcagagcgccggcuucgccgccggccugaccuacagccagcugaugacccugaaggacgccaugcugcagcuggaccccaacgccaagaccuggauggacaucgagggcagacccgaggaccccguggagaucgcccuguaccagcccagcagcggcugcuacauccacuucuucagagagcccaccgaccugaagcaguucaagcaggacgccaaguacagccacggcaucgacgugaccgaccuguucgccgcccagcccggccugaccagcgccgugaucgaggcccugcccagaaacauggugaucaccugccagggcagcgacgacaucaagaagcugcuggagagccagggcagaaaggacaucaagcugaucgacaucgcccugagcaagaccgacagcagaaaguacgagaacgccgugugggaccaguacaaggaccugugccacaugcacaccggcguggugguggagaagaagaagagaggcggcaaggaggagaucaccccccacugcgcccugauggacugcaucauguucgacgccgccgugagcggcggccugaacacccuggugcugagagccgugcugcccagagacaugguguucagaaccagcacccccagaguggugcugugaggacuaguuauaagacugacuagcccgaugggccucccaacgggcccuccuccccuccuugcaccgagauuaauaaaaaaaaaaaaaaaaaaaaaaaaaaaaaaaaaaaaaaaaaaaaaaaaaaaaaaaaaaaaaaaaugcaucccccccccccccccccccccccccccccccaaaggcucuuuucagagccaccagaauu

SEQ ID NO: 11056 - RNA, 1927 nt, Artificial Sequence
  mRNA product Design i-3 comprising derived and/or modified sequence from LASV(G3010-SLE-2013;Clade IV)__AIT17345__NP (opt4)
gggagaaagcuuaccaugagcgccagcaaggagaucaagagcuuccuguggacccagagccugagaagagagcugagcggcuacugcagcaacaucaagcugcagguggugaaggacgcccaggcccugcugcacggccuggacuucagcgaggugagcaacgugcagagacugaugagaaaggagagaagagacgacaacgaccugaagagacugagagaccugaaccaggccgugaacaaccugguggagcugaagagcacccagcagaagagcauccugagagugggcacccugaccagcgacgaccugcugauccuggccgccgaccuggagaagcugaagagcaaggugaccagaaccgagagaccccugagcgccggcguguacaugggcaaccugagcagccagcagcuggaccagagaagagcccugcugagcaugaucggcaugagcagcggcgugcagggcgccagagccggcagagacggcguggugagagugugggacgugaagaacgccgagcugcugaacaaccaguucggcaccaugcccagccugacccuggccugccugaccaagcagggccagguggaccugaacgacguggugcaggcccugaccgaccugggccugaucuacaccgccaaguaccccaacaccagcgaccuggacagacugacccagagccaccccauccugaacaugaucgacaccaagaagagcagccugaacaucagcggcuacaacuucagccugggcgccgccgugaaggccggcgccugcaugcuggacggcggcaacaugcuggagaccaucaaggugagcccccagaccauggacggcauccugaagagcauccugaaggugaagaaggcccugggcauguucaucagcgagacccccggcgagagaaaccccuacgagaacauccuguacaagaucugccugagcggcgacggcuggcccuacaucgccagcagaaccagcaucaccggcagagccugggagaacaccgugguggaccuggagagcgacggcaagccccagaaggccggcagcaacaacagcaacaagagccugcagagcgccggcuucaccgccggccugaccuacagccagcugaugacccugaaggacgccaugcugcagcuggaccccaacgccaagaccuggauggacaucgagggcagacccgaggaccccguggagguggcccuguaccagcccagcagcggcugcuacauccacuucuucagagagcccaccgaccugaagcaguucaagcaggacgccaaguacagccacggcaucgacgugaccgaccuguucgccgcccagcccggccugaccagcgccgugaucgacgcccugcccagaaacauggugaucaccugccagggcagcgacgacaucaagaagcugcuggagagccagggcagaaaggacaucaagcugaucgacaucgcccugagcaagaccgacagcagaaaguacgagaacgccgugugggaccaguacaaggaccugugccacaugcacaccggcguggugguggagaagaagaagagaggcggcaaggaggagaucaccccccacugcgcccugauggacugcaucauguucgacgccgccgugagcggcggccugaacaccagcgugcugagagccgugcugcccagagacaugguguucagaaccagcacccccagaguggugcugugaggacuaguuauaagacugacuagcccgaugggccucccaacgggcccuccuccccuccuugcaccgagauuaauaaaaaaaaaaaaaaaaaaaaaaaaaaaaaaaaaaaaaaaaaaaaaaaaaaaaaaaaaaaaaaaaugcaucccccccccccccccccccccccccccccccaaaggcucuuuucagagccaccagaauu

SEQ ID NO: 11057 - RNA, 1927 nt, Artificial Sequence
  mRNA product Design i-3 comprising derived and/or modified sequence from LASV(G502-SLE-2009;Clade IV)__AIT17127__NP (opt4)
gggagaaagcuuaccaugagcgccagcaaggagaucaagagcuuccuguggacccagagccugagaagagagcugagcggcuacugcagcaacaucaagcugcagguggugaaggacgcccaggcccugcugcacggccuggacuucagcgaggugagcaacgugcagagacugaugagaaaggagagaagagacgacaacgaccugaagagacugagagaccugaaccaggccgugaacaaccugguggagcugaagagcacccagcagaagagcauccugagagugggcacccugaccagcgacgaccugcugauccuggccgccgaccuggagaagcugaagagcaaggugaucagaaccgagagaccccugagcgccggcguguacaugggcaaccugagcagccagcagcuggaccagagaagagcccugcugagcaugaucggcaugagcggcggcaaccagggcgugagagccggcaaggacggcguggugagagugugggacgugaagaacgccgagcugcugaacaaccaguucggcaccaugcccagccugacccuggccugccugaccaagcagggccagguggaccugaacgacgccgugcaggcccugaccgaccugggccugaucuacaccgccaaguaccccaacaccagcgaccuggacagacugacccagagccaccccauccugaacaugaucgacaccaagaagagcagccugaacaucagcggcuacaacuucagccugggcgccgccgugaaggccggcgccugcaugcuggacggcggcaacaugcuggagaccaucaaggugagcccccagaccauggacggcauccugaagagcauccugaaggugaagaaggcccugggcauguucaucagcgacacccccggcgagagaaaccccuacgagaacauccuguacaagaucugccugagcggcgacggcuggcccuacaucgccagcagaaccagcaucaccggcagagccugggagaacaccgugguggaccuggagagcgacggcaagccccagaaggccggcagcaacaacagcaacaagagccugcagagcgccggcuucaccgccggccugaccuacagccagcugaugacccugaaggacgccaugcugcagcuggaccccaacaccaagaccuggauggacaucgagggcagacccgaggaccccguggagaucgcccuguaccagcccagcagcggcugcuacauccacuucuucagagagcccaccgaccugaagcaguucaagcaggacgccaaguacagccacggcaucgacgugaccgaccuguucgccgcccagcccggccugaccagcgccgugaucgacgcccugcccagaaacauggugaucaccugccagggcagcgacgacaucagaaagcugcuggagagccagggcagaaaggacaucaagcugaucgacaucgcccugaacaagaccgacagcagaaaguacgagaacgccgugugggaccaguacaaggaccugugccacaugcacaccggcguggugguggagaagaagaagagaggcggcaaggaggagaucaccccccacugcgcccugauggacugcaucauguucgacgccgccgugagcggcggccugaacaccagcgugcugagagccgugcugcccagagacaugguguucagaaccagcacccccagaguggugcugugaggacuaguuauaagacugacuagcccgaugggccucccaacgggcccuccuccccuccuugcaccgagauuaauaaaaaaaaaaaaaaaaaaaaaaaaaaaaaaaaaaaaaaaaaaaaaaaaaaaaaaaaaaaaaaaaugcaucccccccccccccccccccccccccccccccaaaggcucuuuucagagccaccagaauu

SEQ ID NO: 11058 - RNA, 1927 nt, Artificial Sequence
  mRNA product Design i-3 comprising derived and/or modified sequence from LASV(G733-SLE-2010;Clade IV)__AIT17155__NP (opt4)
gggagaaagcuuaccaugagcgccagcaaggagaucaagagcuuccuguggacccagagccugagaagagagcugagcggcuacugcagcaacaucaagcugcagguggugaaggacgcccaggcccugcugcacggccuggacuucagcgaggugagcaacgugcagagacugaugagaaaggagagaagagacgacaacgaccugaagagacugagagaccugaaccaggccgugaacaaccugguggagcugaagagcacccagcagaagagcgugcugagagugggcacccugaccagcgacgagcugcuggugcuggccgccgaccuggagaagcugaagagcaaggugaucagaaccgagagaccccugagcgccggcguguacaugggcaaccugagcagccagcagcuggaccagagaagagcccugcugagcaugaucggcaugagcggcggcaaccagggcgccagaaccggcagagacggcguggugagagugugggacgugaagaacgccgagcugcugaacaaccaguucggcaccaugcccagccugacccuggccugccugaccaagcagggccagguggaccugaacgacgccgugcaggcccugaccgaccugggccugaucuacaccgccaaguaccccaacaccagcgaccuggacagacugacccagagccaccccauccugaacaugaucgacaccaagaagagcagccugaacaucagcggcuacaacuucagccugggcgccgccgugaaggccggcgccugcaugcuggacggcggcaacaugcuggagaccaucaaggugagcccccagaccauggacggcauccugaagagcauccugaaggugaagaaggcccugggcauguucaucagcgacacccccggcgagagaaaccccuacgagaacauccuguacaagaucugccugagcggcgacggcuggcccuacaucgccagcagaaccagcaucaccggcagagccugggagaacaccgugguggaccuggagagcgacggcaagccccagaaggccggcagcaacaacagcaacaagagccugcagagcgccggcuucaccgccggccugaccuacagccagcugaugacccugaaggacgccaugcugcagcuggaccccaacgccaagaccuggauggacaucgagggcagacccgaggaccccguggagaucgcccuguaccagcccagcagcggcugcuacauccacuucuucagagagcccaccgaccugaagcaguucaagcaggacgccaaguacagccacggcaucgacgugaccgaccuguucgccgcccagcccggccugaccagcgccgugaucgacgcccugcccagaaacauggugaucaccugccagggcagcgacgacaucagaaagcugcuggagagccagggcagaaaggacaucaagcugaucgacaucgcccugagcaagaucgacagcagaaaguacgagaacgccgugugggaccaguacaaggaccugugccacaugcacaccggcguggugguggagaagaagaagagaggcggcaaggaggagaucaccccccacugcgcccugauggacugcaucauguucgacgccgccgugagcggcggccugaacagccuggugcugagagccgugcugcccagagacaugguguucagaaccagcacccccagaguggugcugugaggacuaguuauaagacugacuagcccgaugggccucccaacgggcccuccuccccuccuugcaccgagauuaauaaaaaaaaaaaaaaaaaaaaaaaaaaaaaaaaaaaaaaaaaaaaaaaaaaaaaaaaaaaaaaaaugcaucccccccccccccccccccccccccccccccaaaggcucuuuucagagccaccagaauu

SEQ ID NO: 11059 - RNA, 1927 nt, Artificial Sequence
  mRNA product Design i-3 comprising derived and/or modified sequence from MOPV/LASV reassortant(IGS-1;Clade IV)__AFY05578__NP (opt4)
gggagaaagcuuaccaugagcgccagcaaggagaucaagagcuuccuguggacccagagccugagaagagagcugagcggcuacugcagcaacaucaagcugcagguggugaaggacgcccaggcccugcugcacggccuggacuucagcgaggugagcaacgugcagagacugaugagaaaggagagaagagacgacaacgaccugaagagacugagagaccugaaccaggccgugaacaaccugguggagcugaagagcacccagcagaagagcauccugagagugggcacccugaccagcgacgaccugcugauccuggccgccgaccuggagaagcugagaagcaaggugaucagaaccgagagaccccugagcgccggcguguacaugggcaaccugagcagccagcagcuggaccagagaagagcccugcugaacaugaucggcaugagcggcggcaaccagggcgccagagccggcagagacggcguggugagagugugggacgugaagaacgccgagcugcugagcaaccaguucggcaccaugcccagccugacccuggccugccugaccaagcagggccagguggaccugaacgacgccgugcaggcccugaccgaccugggccugaucuacaccgccaaguaccccaacaccagcgaccuggacagacugacccagagccaccccauccugaacaugaucgacaccaagaagagcagccugaacaucagcggcuacaacuucagccugggcgccgccgugaaggccggcgccugcaugcuggacggcggcaacaugcuggagaccaucaaggugagcccccagaccauggacggcauccugaagagcauccugaaggugaagaaggcccugggcauguucaucagcgacacccccggcgagagaaaccccuacgagaacauccuguacaagaucugccugagcggcgacggcuggcccuacaucgccagcagaaccagcaucaccggcagagccugggagaacaccgugguggaccuggagagcgacggcaagccccagaaggccgacagcaacaacagcagcaagagccugcagagcgccggcuucaccgccggccugaccuacagccagcugaugacccugaaggacgccaugcugcagcuggaccccaacgccaagaccuggauggacaucgagggcagacccgaggaccccguggagaucgcccuguaccagcccagcagcggcugcuacauccacuucuucagagagcccaccgaccugaagcaguucaagcaggacgccaaguacagccacggcaucgacgugaccgaccuguucgccacccagcccggccugaccagcgccgugaucgacgcccugcccagaaacauggugaucaccugccagggcagcgacgacaucagaaagcugcuggagagccagggcagaaaggacaucaagcugaucgacaucgaccugagcaagaccgacagcagaaaguacgagaacgccgugugggaccaguacaaggaccugugccacaugcacaccggcguggugguggagaagaagaagagaggcggcaaggaggagaucaccccccacugcgcccugauggacugcaucauguucgacgccgccgugagcggcggccugaacaccagcgugcugagagccgugcugcccagagacaugguguucagaaccagcacccccagaguggugcugugaggacuaguuauaagacugacuagcccgaugggccucccaacgggcccuccuccccuccuugcaccgagauuaauaaaaaaaaaaaaaaaaaaaaaaaaaaaaaaaaaaaaaaaaaaaaaaaaaaaaaaaaaaaaaaaaugcaucccccccccccccccccccccccccccccccaaaggcucuuuucagagccaccagaauu

SEQ ID NO: 11060 - RNA, 1927 nt, Artificial Sequence
  mRNA product Design i-3 comprising derived and/or modified sequence from LASV(LM765-SLE-2012;Clade IV)__AIT17815__NP (opt4)
gggagaaagcuuaccaugagcgccagcaaggagaucaagagcuuccuguggacccagagccugagaagagagcugagcggcuacugcagcaacaucaagcugcagguggugaaggacgcccaggcccugcugcacggccuggacuucagcgaggugagcaacgugcagagacugaugagaaaggagagaagagacgacaacgaccugaagagacugagagaccugaaccaggccgugaacaaccugguggagcugaagagcacccagcagaagagcauccugagagugggcacccugaccagcgacgaccugcugauccuggccgccgaccuggagaagcugaagagcaaggugaccagaaccgagagaccccugagcgccggcguguacaugggcaaccugagcagccagcagcuggaccagagaagagcccugcuggacaugaucggcaugagcggcagcaaccagggcgccagagccggcagagacggcguggugagagugugggacgugaagaacgccgagcugcugaacaaccaguucggcaccaugcccagccugacccuggccugccugaccaagcagggccagguggaccugaacgacgccgugcaggcccugaccgaccugggccugaucuacaccgccaaguaccccaacaccagcgaccuggacagacugacccagagccaccccauccugaacaugaucgacaccaagaagagcagccugaacaucagcggcuacaacuucagccugggcgccgccgugaaggccggcgccugcaugcuggacggcggcaacaugcuggagaccaucaaggugagcccccagaccauggacggcauccugaagagcauccugaaggugaagaaggcccugggcauguucaucagcgacgcccccggcgagagaaaccccuacgagaacauccuguacaagaucugccugagcggcgacggcuggcccuacaucgccagcagaaccagcaucaccggcagagccugggagaacaccgugguggaccuggagagcgacggcaagccccagaaggccggcagcaacggcagcaacaagagccugcagagcgccggcuucaccgccggccugaccuacagccagcugaugacccugaaggacgccaugcugcagcuggaccccaacgccaagaccuggauggacaucgagggcagacccgaggaccccguggagaucgcccuguaccagcccagcagcggcugcuacauccacuucuucagagagcccaccgaccugaagcaguucaagcaggacgccaaguacagccacggcaucgacgugaccgaccuguucgccgcccagcccggccugaccagcgccgugaucgacgcccugcccagaaacauggugaucaccugccagggcagcgacgacaucagaaagcuguucgagagccagggcagaaaggacaucaagcugaucgacaucgcccugagcaagaccgacagcagaaaguacgagaacgccgugugggaccaguacaaggaccugugccacaugcacaccggcaucgugguggagaagaagaagagaggcggcaaggaggagaucaccccccacugcgcccugauggacugcaucauguucgacgccgccgugagcggcggccugaacaccagcgugcugagagccgugcugcccagagacaugguguucagaaccagcacccccagaguggugcugugaggacuaguuauaagacugacuagcccgaugggccucccaacgggcccuccuccccuccuugcaccgagauuaauaaaaaaaaaaaaaaaaaaaaaaaaaaaaaaaaaaaaaaaaaaaaaaaaaaaaaaaaaaaaaaaaugcaucccccccccccccccccccccccccccccccaaaggcucuuuucagagccaccagaauu

SEQ ID NO: 11061 - RNA, 1927 nt, Artificial Sequence
  mRNA product Design i-3 comprising derived and/or modified sequence from LASV(LM776-SLE-2012;Clade IV)__AIT17825__NP (opt4)
gggagaaagcuuaccaugagcgccagcaaggagaucaagagcuuccuguggacccagagccugagaagagagcugagcagcuacugcagcaacaucaagcugcagguggugaaggacgcccaggcccugcugcacggccuggacuucagcgaggugagcaacgugcagagacugaugagaaaggagagaagagacgacaacgaccugaagagacugagagaccugaaccaggccgugaacaaccugguggagcugaagagcacccagcagaagagcauccugagagugggcacccugaccagcgacgaccugcugauccuggccgccgaccuggagaagcugaagagcaaggugaccagaaccgagagaccccugagcgccggcguguacaugggcaaccugagcagccagcagcuggaccagagaagagcccugcugagcaugaucggcaugagcggcagcaaccagggcgccagagccggcagagacggcguggugagagugugggacgugaagaacgccgagcugcugaacaaccaguucggcaccaugcccagccugacccuggccugccugaccaagcagggccagguggaccugaacgacgccgugcaggcccugaccgaccugggccugaucuacaccgccaaguaccccaacaccagcgaccuggacagacugacccagagccaccccauccugaacaugaucgacaccaagaagagcagccugaacaucagcggcuacaacuucagccugggcgccgccgugaaggccggcgccugcaugcuggacggcggcaacaugcuggagaccaucaaggugagcccccagaccauggacggcauccugaagagcauccugaaggugaagaaggcccugggcauguucaucagcgacacccccggcgagagaaaccccuacgagaacauccuguacaagaucugccugagcggcgacggcuggcccuacaucgccagcagaaccagcaucaccggcagagccugggagaacaccgugguggaccuggagagcgacggcaagccccagaaggccggcagcaacaacagcaacaagagccugcagagcgccggcuucaccgccggccugaccuacagccagcugaugacccugaaggacgccaugcugcagcuggaccccaacgccaagaccuggauggacaucgagggcagacccgaggaccccguggagguggcccuguaccagcccagcagcggcugcuacauccacuucuucagagagcccaccgaccugaagcaguucaagcaggacgccaaguacagccacggcaucgacgugaccgaccuguucgccgcccagcccggccugaccagcgccgugaucgacgcccugcccagaaacauggugaucaccugccagggcagcgacgacaucagaaagcugcuggagagccagggcagaaaggacaucaagcugaucgacaucgcccugagcaagaccgacagcagaaaguacgagaacgccgugugggaccaguacaaggaccugugccacaugcacaccggcguggugguggagaagaagaagagaggcggcaaggaggagaucaccccccacugcgcccugauggacugcaucauguucgacgccgccgugagcggcggccugaacaccagcgugcugagagccgugcugcccagagacaugguguucagaaccagcacccccagaguggugcugugaggacuaguuauaagacugacuagcccgaugggccucccaacgggcccuccuccccuccuugcaccgagauuaauaaaaaaaaaaaaaaaaaaaaaaaaaaaaaaaaaaaaaaaaaaaaaaaaaaaaaaaaaaaaaaaaugcaucccccccccccccccccccccccccccccccaaaggcucuuuucagagccaccagaauu

SEQ ID NO: 11062 - RNA, 1927 nt, Artificial Sequence
  mRNA product Design i-3 comprising derived and/or modified sequence from LASV(Mad39;Clade IV)__ANH09723__NP (opt4)
gggagaaagcuuaccaugagcgccagcaaggagaucaagagcuuccuguggacccagagccugagaagagagcugagcggcuacugcagcaacaucaagcugcagguggugaaggacgcccaggcccugcugcacggccuggacuucagcgaggugagcaacgugcagagacugaugagaaagcagagaagagacgacaacgaccugaagagacugagagaccugaaccaggccgugaacaaccugguggagcugaagagcacccagcagaagagcgugcugagagugggcacccugaccagcgacgaccugcugacccuggccgccgaccuggagaagcugaagagcaaggugaccagaaccgagagaccccugaccgccggcguguacaugggcaaccugagcagccagcagcuggaccagagaagagcccugcugaacaugaucggcaugagcggcggcaaccagggcgccagaaccggcagagacggcguggugagagugugggacgugaagaacgccgagcugcugaacaaccaguucggcaccaugcccagccugacccuggccugccugaccaagcagggccagguggaccugaacgacguggugcaggcccugaccgaccugggccugaucuacaccgccaaguaccccaacaccagcgaccuggacagacugacccagagccaccccauccugaacaugaucgacaccaacaagagcagccugaacaucagcggcuacaacuucagccugggcgccgccgugaaggccggcgccugcaugcuggacggcggcaacaugcuggagaccaucaaggugagcccccagaccauggacggcauccugaagagcauccugaaggugaagaagagccugggcauguucaucagcgacacccccggcgagagaaaccccuacgagaacauccuguacaagaucugccugagcggcgacggcuggcccuacaucgccagcagaaccagcaucaccggcagagccugggagaacaccgugguggaccuggagagcggcggcaagccccagaaggccggcagcaacaacagcaacaagagccugcagagcgccggcuucgccgccggccugaccuacagccagcugaugacccugaaggacgccaugcugcagcuggaccccaacgccaagaccuggauggacaucgagggcagacccgaggaccccguggagaucgcccuguaccagcccaucagcggcugcuacauccacuucuucagagagcccaccgaccugaagcaguucaagcaggacgccaaguacagccacggcaucgacgugaccgaccuguucgccgcccagcccggccugaccagcgccgugaucgaggcccugcccagaaacauggugaucaccugccagggcagcgacgacaucagaaagcuguucgagagccagggcagaaaggacaucaagcugaucgacaucgcccugagcaagaccgacagcagaaaguacgagaacgccgugugggaccaguacaaggaccugugccacaugcacaccggcguggugguggagaagaagaagaagggcggcaaggaggagaucaccccccacugcgcccugauggacugcaucauguucgacgccgccgugagcggcggccugaacacccuggugcugagagccgugcugcccagagacaugguguucagaaccagcacccccaagguggugcugugaggacuaguuauaagacugacuagcccgaugggccucccaacgggcccuccuccccuccuugcaccgagauuaauaaaaaaaaaaaaaaaaaaaaaaaaaaaaaaaaaaaaaaaaaaaaaaaaaaaaaaaaaaaaaaaaugcaucccccccccccccccccccccccccccccccaaaggcucuuuucagagccaccagaauu

SEQ ID NO: 11063 - RNA, 1927 nt, Artificial Sequence
  mRNA product Design i-3 comprising derived and/or modified sequence from LASV(Z0947-SLE-2011;Clade IV)__AIT17841__NP (opt4)
gggagaaagcuuaccaugagcgccagcaaggagaucaagagcuuccuguggacccagagccugagaagagagcugagcggcuacugcagcaacaucaagcugcagguggugaaggacgcccaggcccugcugcacggccuggacuucagcgaggugagcaacgugcagagacugaugagaaaggagagaagagacgacaacgaccugaagagacugagagaccugaaccaggccgugaacaaccugguggagcugaagagcacccagcagaagagcauccugagagugggcacccugaccagcgacgaccugcugauccuggccgccgaccuggagaagcugaagagcaaggugaccagaaccgagagaccccugagcgccggcguguacaugggcaaccugagcagccagcagcuggaccagagaagagcccugcugaacaugaucggcaugagcggcagcaaccagggcgccagaaccggcagagacggcguggugagagugugggacgugaagaacgccgagcugcugaacaaccaguucggcaccaugcccagccugacccuggccugccugaccaagcagggccagguggaccugaacgacgccgugcaggcccugaccgaccugggccugaucuacaccgccaaguaccccaacaccagcgaccuggacagacugacccagagccaccccauccugaacaugaucgacaccaagaagagcagccugaacaucagcggcuacaacuucagccugggcgccgccgugaaggccggcgccugcaugcuggacggcggcaacaugcuggagaccaucaaggugagcccccagaccauggacggcauccugaagagcauccugaaggugaagaaggcccugggcauguucaucagcgacgcccccggcgagagaaaccccuacgagaacauccuguacaagaucugccugagcggcgacggcuggcccuacaucgccagcagaaccagcaucaccggcagagccugggagaacaccgugguggaccuggagagcgacggcaagccccagaaggccggcagcaacggcagcaacaagagccugcagagcgccggcuucaccgccggccugaccuacagccagcugaugacccugaaggacgccaugcugcagcuggaccccaacgccaagaccuggauggacaucgagggcagacccgaggaccccguggagaucgcccuguaccagcccagcagcggcugcuacauccacuucuucagagagcccaccgaccugaagcaguucaagcaggacgccaaguacagccacggcaucgacgugaccgaccuguucgccgcccagcccggccugaccagcgccgugaucgacgcccugcccagaaacauggugaucaccugccagggcagcgacgacaucagaaagcuguucgagagccagggcagaaaggacaucaagcugaucgacaucgcccugagcaagaccgacagcagaaaguacgagaacgccgugugggaccaguacaaggaccugugccacaugcacaccggcaucgugguggagaagaagaagagaggcggcaaggaggagaucaccccccacugcgcccugauggacugcaucauguucgacgccgccgugagcggcggccugaacaccagcgugcugagagccgugcugcccagagacaugguguucagaaccagcacccccagaguggugcugugaggacuaguuauaagacugacuagcccgaugggccucccaacgggcccuccuccccuccuugcaccgagauuaauaaaaaaaaaaaaaaaaaaaaaaaaaaaaaaaaaaaaaaaaaaaaaaaaaaaaaaaaaaaaaaaaugcaucccccccccccccccccccccccccccccccaaaggcucuuuucagagccaccagaauu

SEQ ID NO: 11064 - RNA, 1927 nt, Artificial Sequence
  mRNA product Design i-3 comprising derived and/or modified sequence from LASV(Josiah;Clade IV)__NP_694869__NP (opt5)
gggagaaagcuuaccaugagcgccuccaaggagaucaaaucuuuccuguggacccagagccucagacgggaacuguccggcuacugcucuaacauuaagcugcaaguggucaaagacgcucaggcccugcuccacgggcuggauuuuagcgagguuuccaaugugcagcgccuuaugagaaaggaacggcgcgacgauaacgaccugaaaagacuccgggaucugaaucaggcggugaacaaucuggucgagcucaagucuacacaacaaaagagcauccugcgcgugggaacgcuuaccuccgacgaucugcucauucuggcugccgaccuugaaaaacuuaagagcaaaguuaucagaacagagcggccccucucugccggcguguauauggggaaccuguccagccagcagcuggaucagcgcagagcucuccugaauaugauuggaaugucuggcgggaaccagggagcccgggcuggccgcgacggcgucgugagaguuugggaugugaagaaugccgagcuucugaacaaucaguucgggaccaugccuucccucacacuggcgugucuuaccaaacagggacaagucgaccugaacgaugccgugcaggcucucacagaccugggccugaucuacaccgccaaguauccgaauacgagcgaccucgaucggcugacccagucucaucccauccuuaacaugauugacacaaagaaauccagccugaauaucuccggguacaacuuuucucucggagcugccgugaaggcgggcgccugcaugcuggaugggggaaacaugcuugaaaccauuaaagucagcccucaaacaauggacggcauccugaaguccauucucaaaguuaagaaagcucugggcauguucaucagcgauacccccggggagcgcaauccuuaugaaaacauucuguacaagaucugucucucuggagacggcuggcccuauaucgccuccagaacgagcauuacagggcgggcuugggagaauaccgugguggaucuggagucugacggaaagccucagaaagccgauagcaacaauuccucuaagagccuucaguccgccggcuuuacagcugggcugaccuacagccagcucaugacccugaaagacgcgaugcugcaacuugauccgaacgccaagacauggauggacaucgaaggaagacccgaggacccugucgaaauugcucucuaccagcccucuuccggcugcuauauccacuucuuucgcgagccuacggaucugaaacaguucaagcaggacgccaaguacagccauggcauugaugugaccgaccuguuugccacacaacccgggcucaccucugcuguuaucgaugcccugccgcggaauauggugaucacaugucagggauccgacgauauuagaaaacuucuggaaagccagggccgcaaggacaucaaacucauugauaucgcgcuguccaagaccgacucucggaaauaugagaacgcugucugggaucaguacaaggaccugugccacaugcauacgggggugguuguggagaagaaaaagagaggaggcaaagaagagauuacaccucacugugcccuuauggauugcaucauguucgacgccgcugucagcgggggccucaauaccuccgugcugcgcgccguccugccccgggacaugguguuuagaaccucuacaccucgcguugugcucugaggacuaguuauaagacugacuagcccgaugggccucccaacgggcccuccuccccuccuugcaccgagauuaauaaaaaaaaaaaaaaaaaaaaaaaaaaaaaaaaaaaaaaaaaaaaaaaaaaaaaaaaaaaaaaaaugcaucccccccccccccccccccccccccccccccaaaggcucuuuucagagccaccagaauu

SEQ ID NO: 11065 - RNA, 1927 nt, Artificial Sequence
  mRNA product Design i-3 comprising derived and/or modified sequence from LASV(LP;Clade I)__AAF86702__NP (opt5)
gggagaaagcuuaccaugagcaacuccaaggagaucaaaucuuuccuguggacccagagccucagacgggaacuguccggcuacugcucuaauauuaagcuccaaguggucaaagacgcccaggcucugcuccacgggcuggauuuuagcgagguuuccaacgugcagcgccuuaugagaaagcagaaacgggacgaugccgaccugaagcgccucagagaucugaaucaagcggugaacaaucuggucgaacucaagucuacacagcagaaaaacgugcugcggguuggaacgcuuagcuccgacgaucugaucacccucgcugccgaccuggagaaacuuaaaagcaaggugauucgcacagaaagaccccugucuuccggcgucuauauggggaaucucagcucucagcaacuggaucagcggcgcgcccugcucuccaugaucggaaugagcggcgggccucagggaaacagaaccggcggcgacggggugguucgggugugggaugucaaaaaugcugagcugcuuaacaaucaguucggaacaaugccgucucugacccucgccugucugacaaagcaaggccagguggaccuuaacgaugcugugcaggcccugaccgaccucgggcugauuuacacggcgaaguaucccaauuccagcgaccuggauaugcucacccaaucccauccuauccugggaauggucgacacaaagaagucuagccuuaacaucuccggcuacaauuuuagccugggggccgcuguuaaagccggagcuugcaugcucgauggcggcaacaugcuggagaccauuaaggugucuccccagacaauggacgggauccuuaaauccauucugaaggugaaacgcagccucggaauguucaucucugauaccccuggcgaaagaaaccccuaugagaauauucuguacaagaucugucugagcggggaaggauggccuuauauugccucccggacgucuaucacaggccgcgcgugggagaacacccucgucgaccuggagagcgauaauaagccgcccaaacuuaacuccgccgggagcaauaagucucugcaggcugccggacucaacgcuggccugacauacucccagcugaugacccuuaaagacugcaugcuccaacuggauccuagcucuaagaccuggaucgacauugaaggcagacccgaggauccuguggaaaucgcccuguuucagcccuccagcggguguuacauucacuucuuucgggagccgacagaccucaaacaguucaagcaggacgccaaguauucccauggaaucgauguuacggaccuguuuucuacccaaccuggccuuacaagcgcugugauugaagcgcugcccagaaauaugguccuuaccugccagggguccgaugacaucaaaaagcugcuggagucucagggacgccgggauaucaaacuuauugacaucagccucuccaaggccgauagcagaaaauucgagaacgcugugugggaccaguacaaggaucugugucacaugcauacaggcguuguggucgaaaagaaaaagcgcgggggcaaagaggaaauuaccccucacugcgcccugcucgacuguaucauguuugaugccgcuacgacaggaucucugaauauuaccacccuucgggccgugcugcccagagacauggucuuccgcacauccacccccaaggugguucucugaggacuaguuauaagacugacuagcccgaugggccucccaacgggcccuccuccccuccuugcaccgagauuaauaaaaaaaaaaaaaaaaaaaaaaaaaaaaaaaaaaaaaaaaaaaaaaaaaaaaaaaaaaaaaaaaugcaucccccccccccccccccccccccccccccccaaaggcucuuuucagagccaccagaauu

SEQ ID NO: 11066 - RNA, 1927 nt, Artificial Sequence
  mRNA product Design i-3 comprising derived and/or modified sequence from LASV(803213;Clade II)__AAF86704__NP (opt5)
gggagaaagcuuaccaugagcgccuccaaggaggugaaaucuuuccuguggacccagagccucagacgggaacuguccggcuacugcucuaacaucaaacuucaagucguuaaggacgcucaggcccugcuccacgggcuggauuuuagcgaggugaauaacgugcagcgccuuaugagaaagcagaaacgggacgauggagaccugaagcgccucagagaucugaaucaagcggucaacaaucugguggaacucaaguccacacagcagaaaucuauucugcggguuggcacgcuuaccagcgacgaucugcucacacuggcugccgaccuugagaagcugaaauccaaggugauccgcaccgaaagaccccucagcucuggggucuauaugggaaaccuguccacacagcaacuggagcagcggcgcgcccuccugaauaugauuggcauggugggaggagcucagggcacccagccuggcagagaugggguugugcgggucugggacgugaaaaacccggaucuucugaauaaccaauucggaacaaugcccagccucacccuggccugucuuacgaagcagggccagguggaccugaaugaugcuguccucgcccugaccgaccuggggcucaucuacacagcgaaguauccuaacucuuccgaccuggaucgccuuagccaaucucaucccauucugaauaugguugacaccaaaaaguccagccucaacaucuccggauacaauuuuucucugggcgccgcugugaaagccggggcuugcaugcuugauggaggcaacaugcuggagacaaucaaggugaccccucagacgauggacggcauucucaaaagcauccugaaggucaaaagaucccuggggauguucgugagcgauacacccggagaacggaacccuuaugagaauauucucuacaagaucugucugucuggcgacggguggccguauauugccucccgcaccagcaucguugggagagcgugggaaaacacaaccguggaucuugagucugacggcaagccccagaaagucgggaccgccggaagcaauaagucccugcagucugcuggcuuuccuacaggccucacguacagccaacugaugacccugaaagauuccaugaugcagcuugaccccagcgccaagacauggauugauaucgaggggcggccugaagaccccguggagaucgcucucuaccagccgaugucuggaugcuauauucacuucuuuagagaaccuaccgaccugaaacaguucaagcaagaugccaaguacucccauggcaucgacguugccgaucuguuucccgcucagccugggcucacaagcgcggugauugaggcccugccccgcaacaugguccuuaccugucagggaucugacgauaucaaaaagcugcucgacucccagggccggagagauauuaaacugaucgacaucagccuguccaagguggauucucgcaaauucgaaaaugcugucugggaccaaugcaaggaucuuugucacaugcauacgggggugguuguggagaagaaaaagcggggcggaaaagaggaaauuacaccccacugcgcccucauggacuguaucauguuugaugccgcugucagcggcgggcugaacauuccugugcugagagccguucucccgcgcgacaugguguuccggaccuccucucccaaggucgugcugugaggacuaguuauaagacugacuagcccgaugggccucccaacgggcccuccuccccuccuugcaccgagauuaauaaaaaaaaaaaaaaaaaaaaaaaaaaaaaaaaaaaaaaaaaaaaaaaaaaaaaaaaaaaaaaaaugcaucccccccccccccccccccccccccccccccaaaggcucuuuucagagccaccagaauu

SEQ ID NO: 11067 - RNA, 1930 nt, Artificial Sequence
  mRNA product Design i-3 comprising derived and/or modified sequence from LASV(GA391;Clade III)__CAA36646__NP (opt5)
gggagaaagcuuaccaugagcgccuccaaggaggugagaucuuuccuguggacccagagccuccggcgcgaacuguccggcuacugcucuaacaucaaacuucaagucguuaaggacgcucaggcccugcuccacgggcuggauuuuagcgagguguccaaugugcagagacuuaugcggaaacagaagcgcgacgauggagaccugaaaagacuccgggaucugaaccaagcggucaauaaccugguggaacucaagucuacacagcagaaaagcguucugcgcgugggcacgcuuuccagcgacgaucugcucauucuggcugccgaccuugagaaacugaagucuaaagucaccagaacagaacggccccucuccagcgggguguauaugggaaaucugucuucccagcaacuggaucagcgcagagcccuccugaacaugaucggcaugaccgggguuagcggaggcggcaagggggcuucugacggaauugugcgggucugggaugugaaaaaugccgagcuucugaacaaucaguucggcacaaugccuucccucacccuggcuugucuuacaaagcaggggcaaguggaccugaacgaugccguccaggcgcucaccgaccugggacugaucuacacggccaaguauccgaauagcuccgaccucgaucgccugucucagagccaucccauucuuaacaugaucgacaccaaaaaguccagccugaauaucucuggcuacaacuuuucccucggggcugccguuaaagcuggagccugcaugcuggauggcggcaauaugcuugagacaauuaaggugagcccucaaaccauggacgggauccugaaaucuauucucaaggugaaaaagagccugggaauguucgucuccgauacacccggcgaaagaaacccuuaugagaacauccuguacaagauuugucucucuggggacggauggcccuauaucgcgagccggaccuccauugugggccgcgccugggaaaauacgguuguggaucuggagcaggacaacaaaccucagaagaucgggaauggaggcagcaacaaaucucuucaguccgcuggcuuugccgcugggcugacauacagccaacucaugacccugaaggauuucaaaugcuuuaaucugaucccgaacgccaagacauggauggacauugagggaagacccgaagauccugucgagaucgcccuuuaccagcccucuuccggcuguuaugugcacuucuuucgggaaccuaccgaccucaagcaguucaaacaggacgcuaaguacagccaugggauugauguuaccgaccuguuugcggcccaacccggacugacauccgcugugaucgaggcccucccgagaaauauggucauuacgugccagggcucugaagauauccgcaaacugcuugagagccaggggcggagagacaucaagcugauugauaucacccucuccaaagccgacucucgcaaguucgagaacgcugugugggaucaguuuaaggaccugugucacaugcauacaggcgucgugguugaaaagaagaaacggggaggcaaggaggaaauuaccccucacugcgcccugauggauuguaucauguucgacgcggcugugagcgggggacuugaugccaaaguccucagagugguucugccccgcgacaugguguuccggacauccaccccuaaggucgugcugugaggacuaguuauaagacugacuagcccgaugggccucccaacgggcccuccuccccuccuugcaccgagauuaauaaaaaaaaaaaaaaaaaaaaaaaaaaaaaaaaaaaaaaaaaaaaaaaaaaaaaaaaaaaaaaaaugcaucccccccccccccccccccccccccccccccaaaggcucuuuucagagccaccagaauu

SEQ ID NO: 11068 - RNA, 1927 nt, Artificial Sequence
  mRNA product Design i-3 comprising derived and/or modified sequence from LASV(AV;Clade V)__CCA30315__NP (opt5)
gggagaaagcuuaccaugagcgccuccaaggaggugaaaucuuuccuguggacccagagccucagacgggaacuguccggcuacugcucuaacaucaaacuucaagucguuaaggacgcucaggcccugcuccacgggcuggauuuuagcgagguguccaaugugcagcgccuuaugagaaagcagcggcgcgacgauucugaccugaaaagacuccgggaucugaaccaagcggucaauaaccugguggaacucaagagcacacagcagaaguccguucugcgcgugggaacgcuuagcucugacgaucugcucacccuggcugccgaccuugagaaacugaaguccaaagucacaagaaccgaacggccccucagcucuggcguguauauggggaaucuguccagccagcaacuggaucagcgcagagcccuccugaaccuuauuggaaugacaaauggcucucaggggucccaggcuggacgggacggcguugugcgcgucugggaugugaagaacgccgagcugcucaauaaccaauucggcaccaugccuagccugacacuugcuugucugaccaaacagggacagguggaccucaaugaugucguucaagcccugacggaccuggggcucaucuacaccgcgaaguauccgaacacauccgaccuggauagacuuacccagucucaucccauucugaauaugaucgacacaaagaaaagcucccucaacauuagcggcuacaauuuuucucugggggccgcugugaaggccggagcuugcaugcuugauggcgggaacaugcuggagaccaucaaaguguccccucagagcauggacggaauccucaagucuauucugaaagucaagcgggcccugggcauguucgugagcgauacgcccggcgaacgcaacccuuaugagaauauccucuacaaaauuugucuguccggggacggauggcccuauaucgcgucuagaacaagcauuguuggccgggccugggaaaacaccguggucgaucuugagacagacgggaagccucagaagaucggauccggcaauagcaacaaaucucugcaauccgcuggguuuagcgccggacucaccuacucucagcugaugacccugaaggaugcuaugcuucagcucgacccgaaugccaaaacauggauggauauugagggcagacccgaagacccuguggagguugcccuguaccagcccaucuccggcugcuauauccacuucuuucgcgaaccuacggaccugaagcaauucaaacaggaugcuaaguacagccaugggauugacaucgcggaucucuuugccgcucagcccggacugaccuccgccgugauugaggcccuuccgcggaacauggucaucacaugucagggcucugaagacauuaagaaacugcucgagagccaagggagaaaggauaucaaacugaucgacauugcucuguccaagaucgauucucgcaaauucgagaaugccgugugggaccaguauaaggaucuuugccacaugcauaccggagucgugguugaaaagaaaaagcggggcgggaaagaggaaauuacaccucacugugcgcucauggacugcaucauguuugaugcugccgugagcggcggacugaacacccugguccucagagccgugcugccccgcgacaugguuuuccggacguccacaccuagagugguccuuugaggacuaguuauaagacugacuagcccgaugggccucccaacgggcccuccuccccuccuugcaccgagauuaauaaaaaaaaaaaaaaaaaaaaaaaaaaaaaaaaaaaaaaaaaaaaaaaaaaaaaaaaaaaaaaaaugcaucccccccccccccccccccccccccccccccaaaggcucuuuucagagccaccagaauu

SEQ ID NO: 11069 - RNA, 1927 nt, Artificial Sequence
  mRNA product Design i-3 comprising derived and/or modified sequence from LASV(Togo/2016/7082;Clade VI)__AMR44578__NP (opt5)
gggagaaagcuuaccaugagcaacuccaaggaggugaaaucuuuccuguggacccagagccucagacgggaacuguccggcuacugcucuaauaucaaacuucaagucguuaaagacgcccaggcucugcuccacgggcuggauuuuagcgagguguccaacgugcagcgccuuaugagaaagcagaaacgggacgauggagaccugaagcgccucagagaucugaaucaagccgucaacaaucugguggaacucaagucuguucagcagaaaagcauucugcgggugggcacacuuacguccgacgaucugcucacccuggcggcugaccuugagaagcugaaaagcaaggucacacgcaccgaaagaccccucucuuccgggguguauaugggaaaccugagcucucagcaacuggaucagcggcgcgcccuccuguccaugaucggcaugagcgggggaaaucagaacucucagccuaaaggcgacggcguugugagagucugggaugugaagaaugccgaccuucugaacaaucaauucgggacaaugccgucccucacccuggcuugucuuacaaagcagggacagguggaucugaacgacgccguccaagcucucaccgaccugggccugauuuacacggccaaauaucccaauagcuccgaucucgaccggcugucucagagccauccuauccuuaacaugauugauaccaagaaauccagccugaauaucucuggguacaacuuuucccucggagcggccaucaagacaggcgcuugcaugcuggacgggggaaacaugcuugagaccauuaaaguuacaccccagaccauggauggcauccucaagagcauucugaaagugaagcgcucucugggcauguucaucagcgacacgccuggggagagaaaucccuaugaaaacauucuguacaagaucugucucuccggagauggcuggccuuauauugccucucggacagcuaucaucgggcgcgccugggagaauaccguggucgaccuggaaagcgauuccaaaccgcagaagauuggaagcaacggcucuaauaaaucccuucaaagcgcgggguuugcccccggacugacauacucucagcucaugacccugaaggacuccaugcugcagcuugauccuaacgcuaaaaccuggaucgacauugagggcagacccgaggacccuguggaaguugcccucuuccagcccaucagcggcugcuacauucacuuuuuccgggagccgacagaucugaagcaauuuaagcaggacgcuaaauauucccaugggaucgaugugacggaccuguucgccgcccagccuggacucaccucugcugucaucgaagcgcugcccagaaauauggugcuuacaugucagggcagcgaugacauuaagaaacugcucgauucccaagggcgccgggacaucaagcugauugauguuucucugaacaaaaucgacagcagaaaguuugagaaugccgugugggaucaguacaaggaccuuugccacaugcauaccggagucguggucgaaaagaagaaaaagggcgggaaagaggagauuacaccucacugugcucuccuggauugcaucauguucgacgccgccguguccggcggacugaacgcuaccguucuccgcgccgugcugccccgggacauggucuuuagaacgagcucucccaaggugguucuuugaggacuaguuauaagacugacuagcccgaugggccucccaacgggcccuccuccccuccuugcaccgagauuaauaaaaaaaaaaaaaaaaaaaaaaaaaaaaaaaaaaaaaaaaaaaaaaaaaaaaaaaaaaaaaaaaugcaucccccccccccccccccccccccccccccccaaaggcucuuuucagagccaccagaauu

SEQ ID NO: 11070 - RNA, 1927 nt, Artificial Sequence
  mRNA product Design i-3 comprising derived and/or modified sequence from LASV(KAK-428;Clade n.d. (VII))__ANH09741__NP (opt5)
gggagaaagcuuaccaugagcaacuccaaggaggugaaaucuuuccuguggacccagagccucagacgggaacuguccggcuacugcacaaauaucaaacuucaagucguuaaggacgcccaggcucugcuccacgggcuggauuuuucugaggugagcaacgugcagcgccuuaugagaaagcagaaacgggacgauaaugaccugaagcgccucagagaucugaaccaagccgucaauaaccugguggaacucaaguccguucagcagaaaucugugcugaaggucggaacgcuuaauagcgacgaucugcucacccuggcggcugaccuugagaaacugaaguccaaagugguucggacagaacgcccccucagcucuggcguguauauggggaaccuguccagccagcaacuggaucagagacgggcccuccugaauaugauuggaauggccggcgggucucagggaaaccagccuucccgcgacggcgucgugagagugugggaugucaagaaugcugaccuucugaacaaucaauucggcaccaugccgagccucacacuggccugucuuaccaagcaggggcagguugaucugaacgacguggugcucgcucugacagaccugggacucaucuacaccgccaaauaucccaauucuuccgaucuggaccggcuuagccaaaaccauccuguccugaacaugauugaugugaauaaguccucucucaacaucagcggcuacaauuuuucccugggggcggccguuaaagcuggagccugcaugcuugacggcgggaacaugcuggagacgauuaagaucagcccccagaccguggauggaauccucaaaucuauucugaaggucaaacgcgcucugggcauguucguguccgacacaccuggcgagagaaaucccuaugaaaacauccucuacaagguuugucugagcgggaauggauggccuuauauugccucucggaccagcaucgugggccgcgcgugggagaacacagucguggaucuugaauccaauaagaaccagccgaaagucgggaauaacggaucuaauaagaugcugcagagcuccggcuuugccaccgggcucacguacagccaacugaugacacugagagacucuaugcuucagcucgaucccaccgcuaaaacauggauugacaucgagggacggccugaggaucccguggaacuggcccuguuccagccuuccagcggcugcuacauucacuuuuucagagagcccaccgaccucaagcaguuuaaacaagacgcuaaguauucucauggcaucgauguuaacgaccuguucuccgcccagccggggcuuaccagcgccgugcuggaagcucucccucgcaauaugguccugacaugucagggauccgaugacauccggaagcugcuugauucucaggacagaaaagauauuaagcucaucgacauuagccuguccaaagcggaugcccgcaaguuugagaacgacgugugggaucaauucaaagaccugugccacaugcauacgggcaucguuguggaaaagaagaaaaagggagggaaacaggagaugacaccccacugugcucuccuggauugcauuauguuugacgccgccgucucuggcgggcuuaacgugccuacccugcgggcugugcuccccaccgacaugguuuucagaacaaucaccacgaaggucgugcugugaggacuaguuauaagacugacuagcccgaugggccucccaacgggcccuccuccccuccuugcaccgagauuaauaaaaaaaaaaaaaaaaaaaaaaaaaaaaaaaaaaaaaaaaaaaaaaaaaaaaaaaaaaaaaaaaugcaucccccccccccccccccccccccccccccccaaaggcucuuuucagagccaccagaauu

SEQ ID NO: 11071 - RNA, 1927 nt, Artificial Sequence; identical to SEQ ID NO: 11065
  mRNA product Design i-3 comprising derived and/or modified sequence from LASV(Pinneo-NIG-1969;Clade I)__AIT17837__NP (opt5)

SEQ ID NO: 11072 - RNA, 1927 nt, Artificial Sequence
  mRNA product Design i-3 comprising derived and/or modified sequence from LASV(ISTH0009-NIG-2011;Clade II)__AIT17405__NP (opt5)
gggagaaagcuuaccaugagcguguccaaggaggucaaaucuuuccuguggacccagagccucagacgggaacuguccggcuacugcucuaacaucaaacuucaaguugugaaggacgcccaggcucugcuccacgggcuggauuuuagcgagguguccaauguccagcgccuuaugagaaagcagaaacgggacgauucugaccugaagcgccucagagaucugaaccaagccgugaauaaccugguugaacucaagagcacacagcagaaauccauucugcgggugggaacgcuuaccagcgacgaucugcucacacuggcggcugaccuugagaagcugaaaucuaaggucauccgcaccgaaagaccccucuccagcggcguguauauggggaaucugucuacacagcaacuggagcagcggcgcgcccuccugaacaugauuggaaugguuggcggggcccagggaacccagccuggcagagauggcgugguccgggugugggacgugaaaaauccggaucuucugaacaaucaauucgggacaaugcccucccucacccuggcuugucuuacgaagcagggacaggucgaccugaacgaugccguucucgcucugaccgaccugggccucaucuacacagccaaguauccuaauagcucugaccuggaucgccuuucccaaagccaucccauucugaacaugguggacaucaaaaaguccucucucaauaucagcggguacaacuuuucccugggagcggccgugaaagcuggcgccugcaugcuugaugggggaaauaugcuggagaccauuaaggucacaccucagaccauggacggcauccucaaaagcauucugaaggugaaaagaucucugggcauguucguuuccgauacgcccggggaacggaacccuuaugagaacauccucuacaagauuugucugagcggagacggcuggccguauaucgcuucucgcacaagcauuguggggagagccugggaaaauaccacagucgaucuugaguccgacggaaagccccagaaagugggcucugcggggagcaacaagucccugcagagcgccggauuuccuaccggccucaccuacucucaacugaugacacugaaagauuccaugaugcagcuugaccccagcgcuaagacguggaucgauaucgagggccggccugaagaccccguugagauugcccucuaccagccgaugucugggugcuauauccacuucuuuagagaaccuaccgaccugaaacaguucaagcaagaugcuaaguacucccauggaauugacguggccgaucuguuucccgcccagccuggccucacaagcgcugucaucgaggcgcugccccgcaauauggugcuuaccugucagggguccgacgauauuaaacggcugcucgacucucagggaagacgcgauaucaagcugaucgacauugcccugagcaaagcugauucccggagauucgaaaacgccgucugggaccaaugcaaggaucuuugucacaugcauacaggcgugguuguggagaaaaagaagcgcgggggcaaagaggaaaucacgccccacugcgcccucauggacuguauuauguaugaugcugccgucucuggaggccugaauaucccugugcugcgggcgguucucccgagagacaugguguuucgcaccagcucccccaaggucgugcugugaggacuaguuauaagacugacuagcccgaugggccucccaacgggcccuccuccccuccuugcaccgagauuaauaaaaaaaaaaaaaaaaaaaaaaaaaaaaaaaaaaaaaaaaaaaaaaaaaaaaaaaaaaaaaaaaugcaucccccccccccccccccccccccccccccccaaaggcucuuuucagagccaccagaauu

SEQ ID NO: 11073 - RNA, 1927 nt, Artificial Sequence
  mRNA product Design i-3 comprising derived and/or modified sequence from LASV(ISTH2010-NIG-2012;Clade II)__AIT17483__NP (opt5)
gggagaaagcuuaccaugagcgccuccaaggaggugaaaucuuuccuguggacccagagccucagacgggaacuguccggcuacugcucuaacaucaaacuucaagucguuaaggacgcucaggcccugcuccacgggcuggauuuuagcgagguguccaaugugcagcgccuuaugagaaagcagaaacgggacgauucugaccugaagcgccucagagaucugaaccaagcggucaauaaccugguggaacucaagagcacacagcagaaauccauucugcggguuggaacgcuuaccagcgacgaucugcucacacuggcugccgaccuugagaagcugaaaucuaaggugauccgcaccgaaagaccccucuccagcggcgucuauauggggaaucugucuacacagcaacuggagcagcggcgcgcccuccugaaccuuauuggaauggugggcggggcucagggaacccagccuggcagagauggcguugugcgggucugggacgugaaaaauccggaucugcucaacaaucaauucgggacaaugcccucccugacccuugccugucugacgaagcagggacagguggaccucaacgaugcuguccuggcccugaccgaccucggccugaucuacacagcgaaguauccuaauagcucugaccuugaucgccugucccaaagccaucccauucucaacaugguugacaccaaaaaguccucucugaauaucagcggguuuaacuucucccuuggagccgcugugaaagccggcgcuugcaugcuggaugggggaaauaugcucgagacaaucaaggugaccccucagacgauggacggcauucugaaaagcauccugaaggucaaaaagucucucggcauguuuguguccgauacacccggggaaagaaacccuuacgagaacauucuguauaagaucugucuuagcggagacggcuggccguacauugccucucggaccagcaucguugggcgcgcgugggaaaauacaaccguggaucuggaguccgacggaaaaccccacaaggucggcaccgccgggucuaacaaaagccuccaguccgcuggauucccuacaggccugacguauagccagcugaugacccuuaaggauucuaugaugcaacucgaccccuccgccaaaacauggauugauaucgagggcagaccugaagaccccguggagaucgcucuguaccagccgaugagcgggugcuacauucacuuuuuccgggaaccuaccgaccugaagcaguuuaagcaggaugccaaauauucucauggaaucgacguugccgaucucuuccccgcucaaccuggccugacauccgcggugauugaggcccuucccagaaauaugguccugaccugucaggggagcgacgauaucaagcgccuccuggacucccagggacggagagauauuaaacugaucgacaucgcucuuucuaaggccgauagccgccgguuugaaaacgccgugugggaccagugcaaagaucucugucauaugcacacgggcgucgugguugagaagaagaaaagagggggcaaggaggaaauuacaccccacugcgcucugauggacuguaucauguacgaugccgcgguguccggaggccugaauauuccuguccuccgcgcugugcugccgcgggacaugguuuucagaaccucuagccccaaagugguccuuugaggacuaguuauaagacugacuagcccgaugggccucccaacgggcccuccuccccuccuugcaccgagauuaauaaaaaaaaaaaaaaaaaaaaaaaaaaaaaaaaaaaaaaaaaaaaaaaaaaaaaaaaaaaaaaaaugcaucccccccccccccccccccccccccccccccaaaggcucuuuucagagccaccagaauu

SEQ ID NO: 11074 - RNA, 1927 nt, Artificial Sequence
  mRNA product Design i-3 comprising derived and/or modified sequence from LASV(Lassa virus/H.sapiens-wt/NGA/2015/ISTH_0543;Clade II)__AVO03640__NP (opt5)
gggagaaagcuuaccaugagcgccuccaaggaggugaaaucuuuccuguggacccagagccucagacgggaacuguccggcuacugcucuaacaucaaacuucaagucguuaaggacgcucaggcccugcuccacgggcuggauuuuagcgagguguccaaugugcagcgccuuaugagaaagcagaaacgggacgauucugaccugaagcgccucagagaucugaaccaagcggucaauaaccugguggaacucaagagcacacagcagaaauccauucugcggguuggaacgcuuaccagcgacgaucugcucacacuggcugccgaccuugagaagcugaaaucuaaggugauccgcaccgaaagaccccucuccagcggcgucuauauggggaaucugucuacacagcaacuggagcagcggcgcgcccuccugaacaugauuggaauggugggcggggcucagggaacccagccuggcagagauggcguugugcgggucugggacgugaaaaauccggaucuucugaacaaucaauucgggacaaugcccucccucacccuggccugucuuacgaagcagggacagguggaccugaacgaugcuguccucgcccugaccgaccugggccucaucuacacagcgaaguauccuaauagcucugaccuggaucgccuuucccaaagccaucccauucugaacaugguugacaccaaaaaguccucucucaauaucagcggguacaacuuuucccugggagccgcugugaaagccggcgcuugcaugcuugaugggggaaauaugcuggagacaaucaaggugaccccucagacgauggacggcauucucaaaagcauccugaaggucaaaaagucucugggcauguucguguccgauacacccggggaaagaaacccuuaugagaacauucucuacaagaucugucugagcggagacggcuggccguauauugccucucggaccagcaucguugggcgcgcgugggaaaauacaaccguggaucuugaguccgacggaaaaccccagaaggucggcucugccgggagcaacaaaucccugcagagcgcuggauuuccuaccggccucacauacucucaacugaugacgcugaaggauuccaugaugcagcuugaccccagcgccaaaaccuggauugauaucgagggcagaccugaagaccccguggagaucgcucucuaccagccgaugucugggugcuauauucacuucuuucgggaaccuacagaccugaagcaguucaagcaagaugccaaauacucccauggaaucgacguugccgaucuguuucccgcucagccuggccucaccagcgcggugauugaggcccugcccagaaauaugguccuuacaugucagggguccgacgauaucaagcgccugcucgacucucagggacggaaagauauuaagcugaucgacaucgcucugagcaaagccgauuccagacgcuucgaaaacgccgugugggaccaaugcaaggaucuuugucacaugcauaccggcgucgugguugagaagaaaaagagagggggcaaagaggaaauuacgccccacugcgcucucauggacuguaucauguaugaugccgcggugucuggaggccugaauauuccuguccugcgggcugugcucccgcgcgacaugguuuuucggacaagcucccccaaggugguccugugaggacuaguuauaagacugacuagcccgaugggccucccaacgggcccuccuccccuccuugcaccgagauuaauaaaaaaaaaaaaaaaaaaaaaaaaaaaaaaaaaaaaaaaaaaaaaaaaaaaaaaaaaaaaaaaaugcaucccccccccccccccccccccccccccccccaaaggcucuuuucagagccaccagaauu

SEQ ID NO: 11075 - RNA, 1927 nt, Artificial Sequence
  mRNA product Design i-3 comprising derived and/or modified sequence from LASV(Lassa virus/H.sapiens-wt/NGA/2016/ISTH_0009;Clade II)__AVO03572__NP (opt5)
gggagaaagcuuaccaugagcgccuccaaggaggugaaaucuuuccuguggacccagagccucagacgggaacuguccggcuacugcucuaacaucaaacuucaagucguuaaggacgcucaggcccugcuccacgggcuggauuuuagcgagguguccaaugugcagcgccuuaugagaaagcagaaacgggacgauucugaccugaagcgccucagagaucugaaccaagcggucaauaaccugguggaacucaagagcacacagcagaaauccauucugcggguuggaacgcuuaccagcgacgaucugcucacacuggcugccgaccuugagaagcugaaaucuaaggugauccgcaccgaaagaccccucuccagcggcgucuauauggggaaucugucuacacagcaacuggagcagcggcgcgcccuccugaacaugauuggaauggugggcggggcucagggaacccagccuggcagagauggcguugugcgggucugggacgugaaaaauccggaucuucugaacaaucaauucgggacaaugcccucccucacccuggccugucuuacgaagcagggacagguggaccugaacgaugcuguccucgcccugaccgaccugggccucaucuacacagcgaaguauccuaauagcucugaccuggaucgccuuucccaaagccaucccauucugaacaugguugacaccaaaaaguccucucucaauaucagcggguacaacuuuucccugggagccgcugugaaagccggcgcuugcaugcuugaugggggaaauaugcuggagacaaucaaggugaccccucagacgauggacggcauucucaaaagcauccugaaggucaaaaagucucugggcauguucguguccgauacacccggggaaagaaacccuuaugagaacauucucuacaagaucugucugagcggagacggcuggccguauauugccucucggaccagcaucguugggcgcgcgugggaaaauacaaccguggaucuugaguccgacggaaaaccccagaaggucggcucugccgggagcaacaaaucccugcagagcgcuggauuuccuaccggccucacauacucucaacugaugacgcugaaggauuccaugaugcagcuugaccccagcgccaaaaccuggauugauaucgagggcagaccugaagaccccguggagaucgcucucuaccagccgaugucugggugcuauauucacuucuuucgggaaccuacagaccugaagcaguucaagcaagaugccaaauacucccauggaaucgacguugccgaucuguuucccgcucagccuggccucaccagcgcggugauugaggcccugcccagaaauaugguccuuacaugucagggguccgacgauaucaagcgccugcucgacucucagggacggagagauauuaaacugaucgacaucgcucugagcaaggccgauucccgccgguucgaaaacgccgugugggaccaaugcaaagaucuuugucacaugcauaccggcgucgugguugagaagaagaaaagagggggcaaggaggaaauuacgccccacugcgcucucauggacuguaucauguaugaugccgcggugucuggaggccugaauauuccuguccugcgcgcugugcucccgcgggacaugguuuuuagaacaagcucccccaaagugguccugugaggacuaguuauaagacugacuagcccgaugggccucccaacgggcccuccuccccuccuugcaccgagauuaauaaaaaaaaaaaaaaaaaaaaaaaaaaaaaaaaaaaaaaaaaaaaaaaaaaaaaaaaaaaaaaaaugcaucccccccccccccccccccccccccccccccaaaggcucuuuucagagccaccagaauu

SEQ ID NO: 11076 - RNA, 1927 nt, Artificial Sequence
  mRNA product Design i-3 comprising derived and/or modified sequence from LASV(Lassa virus/H.sapiens-wt/NGA/2016/ISTH_0017;Clade II)__AVO03568__NP (opt5)
gggagaaagcuuaccaugagcgccuccaaggaggugaaaucuuuccuguggacccagagccucagacgggaacuguccggcuacugcucuagcaucaaacuucaagucguuaaggacgcucaggcccugcuccacgggcuggauuuuuccgaggugucuaacgugcagcgccuuaugagaaagcagaaacgggacgauagcgaccugaagcgccucagagaucugaaucaagcggucaacaaucugguggaacucaaguccacacagcagaaaagcauucugcggguuggaacgcuuaccucugacgaucugcucacacuggcugccgaccuugagaagcugaaauccaaggugauccgcaccgaaagaccccucagcucuggcgucuauauggggaaccuguccacacagcaacuggagcagcggcgcgcccuccugaauaugauuggaauggcuggcggggcccagggaacccagccuggcagagauggcgugguucgggugugggacgucaaaaacccggaucuucugaauaaccaauucgggacaaugcccagccucacccuggcuugucuuacgaagcagggacagguggaccugaaugaugccgugcucgcgcugaccgaccugggccucaucuacacagccaaguauccuaacucuuccgaccuggaucgccuuagccaaucccaucccauucugaauauggucgacaccaaaaagucuagccucaacaucuccggguacaauuuuagccugggagcugccguuaaagcuggcgccugcaugcuugaugggggaaacaugcuggagacaaucaaggugaccccucagacgauggacggcauucucaaaucuauccugaaggugaaaagaucccugggcauguucgucagcgaugcgcccggggaacggaauccuuaugagaacauucucuacaagaucugucugucuggagacggcuggccguauauugccagccgcacauccaucguggggagagcuugggaaaacaccacaguugaucuugagucugacggaaagccccagaaagugggcgccaccgggagcaauaagucccugcagagcgcuggauuuccuaccggccucacauacucucaacugaugacgcugaaagauuccaugaugcagcuugaccccagcgccaagaccuggauugauaucgagggccggccugaagaccccgucgagguggcccucuaccagccgguuucugggugcuauauccacuucuuuagagaaccuacagaccugaaacaguucaagcaagaugcuaaguacucccauggaauugacguggcggaucuguuucccgcccagccuggccucaccagcgcugucaucgaggcccugccccgcaacauggugcuuacaugucagggguccgacgauauuaaaaagcugcucgacucucagggacggaaagauaucaagcugauugacaucgcccugagcaaagcugauuccagacgcuucgaaaaugccgucugggaccaaugcaaggaucuuugucacaugcauaccggcgugguuguggagaagaaaaagagagggggcaaagaggaaaucacgccccacugcgcgcucauggacuguauuauguaugaugcugccgucucuggaggccugaacaucccugugcugcgggccguucucccgcgcgacaugguguuucggacaagcucccccaaggucgugcugugaggacuaguuauaagacugacuagcccgaugggccucccaacgggcccuccuccccuccuugcaccgagauuaauaaaaaaaaaaaaaaaaaaaaaaaaaaaaaaaaaaaaaaaaaaaaaaaaaaaaaaaaaaaaaaaaugcaucccccccccccccccccccccccccccccccaaaggcucuuuucagagccaccagaauu

SEQ ID NO: 11077 - RNA, 1927 nt, Artificial Sequence
  mRNA product Design i-3 comprising derived and/or modified sequence from LASV(Lassa virus/H.sapiens-wt/NGA/2018/ISTH_0959;Clade II)__AVV65100__NP (opt5)
gggagaaagcuuaccaugagcgccuccaaggaggugaaaucuuuccuguggacccagagccucagacgggaacuguccggcuacugcucuaacaucaaacuucaagucguuaaggacgcucaggcccugcuccacgggcuggauuuuagcgagguguccaaugugcagcgccuuaugagaaagcagaaacgggacgauucugaccugaagcgccucagagaucugaaccaagcggucaauaaccugguggaacucaagagcacccagcagaaauccauucugcggguuggaacgcuuaccagcgacgaucugcucacacuggcugccgaccuugagaagcugaaaucuaaggugauccgcaccgaaagaccccucuccagcggcgucuauauggggaaucugucuacacagcaacuggagcagcggcgcgcccuccugaaccuuauuggaauggugggcggggcucagggaacccagccuggcagagauggcguugugcgggucugggacgugaaaaauccggaucugcucaacaaucaauucgggacaaugcccucccugacccuugccugucugacgaagcagggacagguggaccucaacgaugucguucuggcucugaccgaccucggccugaucuacacagccaaguauccuaauagcucugaccuugaucgccugucccaaagccaucccauucucaacaugguggacaccaaaaaguccucucugaauaucagcggguuuaacuucucccuuggagcggccgugaaagcuggcgccugcaugcuggaugggggaaauaugcucgagacaaucaaggucaccccucagacgauggacggcauucugaaaagcauccugaaggugaaaaagucucucggcauguuuguuuccgauacacccggggaaagaaacccuuacgagaacauucuguauaagaucugucuuagcggagacggcuggccguacauugcuucucggaccagcaucguggggcgcgccugggaaaauacaaccgucgaucuggaguccgacggaaaaccccacaaggugggcaccgcggggucuaacaaaagccuccaguccgccggauucccuacaggccugacguauagccagcugaugacccuuaaggauucuaugaugcaacucgaccccuccgcuaaaacauggauugauaucgagggcagaccugaagaccccguugagaucgcccuguaccagccgaugagcgggugcuacauucacuuuuuccgggaaccuaccgaccugaagcaguuuaagcaggaugcuaaauauucucauggaaucgacguggccgaucucuuccccgcccaaccuggccugacauccgcugucauugaggcgcuucccagaaauauggugcugaccugucaggggagcgacgauaucaagcgccuccuggacucccagggacggaaagauauuaagcugaucgacaucgcccuuucuaaaacggauagcagacgcuuugaaaacgcugucugggaccagugcaaggaucucugucauaugcacacaggcgugguuguggagaagaaaaagagagggggcaaagaggaaauuacaccccacugcgcccugauggacuguaucauguacgaugccgcugucuccggaggccugaauauuccugugcuccgggccguucugccgcgcgacaugguguuccggaccucuagccccaaggucgugcuuugaggacuaguuauaagacugacuagcccgaugggccucccaacgggcccuccuccccuccuugcaccgagauuaauaaaaaaaaaaaaaaaaaaaaaaaaaaaaaaaaaaaaaaaaaaaaaaaaaaaaaaaaaaaaaaaaugcaucccccccccccccccccccccccccccccccaaaggcucuuuucagagccaccagaauu

SEQ ID NO: 11078 - RNA, 1927 nt, Artificial Sequence
  mRNA product Design i-3 comprising derived and/or modified sequence from LASV(LASV003-NIG-2008;Clade II)__AIT17581__NP (opt5)
gggagaaagcuuaccaugagcgccuccaaggaggugaaaucuuuccuguggacccagagccucagacgggaacuguccggcuacugcucuagcaucaaacuucaagucguuaaggacgcucaggcccugcuccacgggcuggauuuuuccgaggugucuaacgugcagcgccuuaugagaaagcagaaacgggacgauagcgaccugaagcgccucagagaucugaaucaagcggucaacaaucugguggaacucaaguccacccagcagaaaagcguucugcgggugggaacgcuuaccucugacgaucugcucacacuggcugccgaccuugagaagcugaaauccaaggucauucgcaccgaaagaccccucagcucuggcguguauauggggaaccuguccgcccagcaacuggagcagcggcgcacacuccugaauaugaucggaaugguuggcggggcucagggaacccagccuggcagagauggcgugguccgggugugggacgugaaaaacccggaucuucugaauaaccaauucgggacaaugcccagccucacccuggccugucuuacgaagcagggacaggucgaccugaaugauguugugcucgcucugaccgaccugggccucauuuacacagccaaguauccuaacucuuccgaccuggaucgccuuagccaaucccaucccauccugucuaugguggacaccaaaaagagcucccucaauauuagcggguacaacuuuucucugggagcggccgucaaagcuggcgccugcaugcuugaugggggaaauaugcuggagacaaucaaggugaccccucagacgauggacggcauccucaaauccauucugaagguuaaaaagagccugggcauguucgugucugauacacccggggaaagaaacccuuaugagaauauccucuacaagauuugucugagcggagacggcuggccguauaucgcuucccggaccucuauugucgggcgcgccugggaaaacacaaccguggaucuugagagcgacggaaaaccccagaagguuggcaccgcgggguccaacaaaagccugcagucugccggauuuccuacaggccucacguacucccaacugaugacccugaaggauagcaugaugcagcuugaccccucugcuaaaacauggaucgauauugagggcagaccugaagaccccguggagaucgcccucuaccagccgauguccgggugcuauauccacuucuuucgggaaccuaccgaccugaagcaguucaagcaagaugcuaaauacagccauggaauugacgucacagaucuguuucccgcccagccuggccucaccuccgccgugaucgaggcucugcccagaaauaugguccuuacgugucaggggucugacgauauuaagcgccugcucgacagccagggacggagagauaucaaacugauugacaucgcgcuguccaaggccgauucucgccgguucgaaaacgcugugugggaccaaugcaaagaucuuugucacaugcauacaggcguuguggucgagaagaagaaaagagggggcaaggaggaaaucacaccccacugcgcccucauggacuguauuauguaugaugccgcugugagcggaggccugaauaucccuguucugcgcgccgugcucccgcgggacauggucuuuagaaccuccagccccaaaguggugcugugaggacuaguuauaagacugacuagcccgaugggccucccaacgggcccuccuccccuccuugcaccgagauuaauaaaaaaaaaaaaaaaaaaaaaaaaaaaaaaaaaaaaaaaaaaaaaaaaaaaaaaaaaaaaaaaaugcaucccccccccccccccccccccccccccccccaaaggcucuuuucagagccaccagaauu

SEQ ID NO: 11079 - RNA, 1927 nt, Artificial Sequence
  mRNA product Design i-3 comprising derived and/or modified sequence from LASV(LASV035-NIG-2009;Clade II)__AIT17589__NP (opt5)
gggagaaagcuuaccaugagcgccuccaaggaggugaaaucuuuccuguggacccagagccucagacgggaacuguccggcuacugcucuagcaucaaacuucaagucguuaaagacgcucaggcccugcuccacgggcuggauuuuuccgaggugucuaacgugcagcgccuuaugagaaagcagaaacgggacgauagcgaccugaagcgccucagagaucugaaucaagcggucaacaaucugguggaacucaaguccacacagcagaaaagcauucugcggguuggaacgcuuaccucugacgaucugcucacacuggcugccgaccuugagaagcugaaauccaaggugauccgcaccgaaagaccccucagcucuggcgucuauauggggaaccuguccgcccagcaacuggagcagcggcgcgcucuccugaauaugauuggaauggugggcggggcccagggaacacagccuggcagagauggcguugugcgggucugggacgugaaaaacccggaucuucugaauaaccaauucgggaccaugcccagccucacacuggcuugucuuaccaagcagggacagguggaccugaaugaugccguccucgcgcugacggaccugggccucaucuacaccgccaaguauccuaacucuuccgaccuggaucgccuuagccaaucccaucccauucugaauaugguugacacaaagaagucuagccucaacaucuccggguacaauuuuagccugggagcugccgugaaagcuggcgccugcaugcuugaugggggaaacaugcuggagaccaucaaggugacaccucagaccauggacggcauucucaaaucuauccugaaggucaaaagaucccugggcauguucgugagcgauacgcccggggaacggaauccuuaugagaacauucucuacaagaucugucugucuggagacggcuggccguauauugcgagccgcacauccaucguugggagagccugggaaaacaccacaguggaucuugagucugacggaaagccccagaaagucggcaccaccgggagcaauaagucccugcagagcgcuggauuuccuacaggccucacguacucucaacugaugacccugaaagauuccaugaugcagcuugaccccagcgccaagacauggauugauaucgagggccggccugaagaccccguggagaucgcucucuaccagccgaugucugggugcuauauucacuucuuuagagaaccuaccgaccugaaacaguucaagcaagaugccaaguacucccauggaaucgacguugccgaucuguuucccgcucagccuggccucacaagcgcggugauugaggcccugccccgcaacaugguccuuaccugucagggguccgacgauaucaaaaagcugcucgacucucagggacggagagauauuaaacugaucgacaucgcucugagcaaggccgauucccgcaaauucgaaaaugccgugugggaccaaugcaaggaucuuugucacaugcauacgggcgucgugguugagaagaaaaagagagggggcaaagaggaaauuacaccccacugcgcucucauggacuguaucauguaugaugccgcggugucuggaggccugaacauuccuguccugcgggcugugcucccgcgcgacaugguuuuucggaccagcucccccaaggugguccugugaggacuaguuauaagacugacuagcccgaugggccucccaacgggcccuccuccccuccuugcaccgagauuaauaaaaaaaaaaaaaaaaaaaaaaaaaaaaaaaaaaaaaaaaaaaaaaaaaaaaaaaaaaaaaaaaugcaucccccccccccccccccccccccccccccccaaaggcucuuuucagagccaccagaauu

SEQ ID NO: 11080 - RNA, 1927 nt, Artificial Sequence
  mRNA product Design i-3 comprising derived and/or modified sequence from LASV(LASV1000-NIG-2009;Clade II)__AIT17783__NP (opt5)
gggagaaagcuuaccaugagcgccuccaaggaggugaaaucuuuccuguggacccagagccucagacgggaacuguccggcuacugcucuaacaucaaacuucaagucguuaaggacgcucaggcccugcuccacgggcuggauuuuagcgagguguccaaugugcagcgccuuaugagaaagcagaaacgggacgauucugaccugaagcgccucagagaucugaaccaagcggucaauaaccugguggaacucaagagcacacagcagaaauccauucugcggguuggaacgcuuaccagcgacgaucugcucacacuggcugccgaccuugagaagcugaaaucuaaggugauccgcaccgaaagaccccucuccagcggcgucuauauggggaaucugucuacacagcaacuggagcagcggcgcgcccuccugaacaugauuggaauggugggcggggcucagggaacccagccuggcagagauggcguugugcgggucugggacgugaaaaauccggaucuucugaacaaucaauucgggacaaugcccucccucacccuggccugucuuacgaagcagggacagguggaccugaacgaugucguucucgcucugaccgaccugggccucaucuacacagccaaguauccuaauagcucugaccuggaucgccuuucccaaagccaucccauucugaacaugguggacaccaaaaaguccucucucaauaucagcggguacaacuuuucccugggagcggccgugaaagcuggcgccugcaugcuugaugggggaaauaugcuggagacaaucaaggucaccccucagacgauggacggcauucucaaaagcauccugaaggugaaaaagucucugggcauguucguuuccgauacacccggggaaagaaacccuuaugagaacauucucuacaagaucugucugagcggagacggcuggccguauauugcuucucggaccagcaucguggggcgcgccugggaaaauacaaccgucgaucuugaguccgacggaaaaccccagaaggugggcaccgcggggucuaacaaaagccugcaguccgccggauuuccuacaggccucacguacagccaacugaugacccugaaggauucuaugaugcagcuugaccccuccgcuaaaacauggauugauaucgagggcagaccugaagaccccguugagaucgcccucuaccagccggugagcgggugcuauauucacuucuuucgggaaccuaccgaccugaagcaguucaagcaagaugcuaaauacucucauggaaucgacgucgccgaucuguuucccgcccagccuggccucacauccgcugugauugaggcgcugcccagaaauaugguccuuaccugucaggggagcgacgauaucaagcgccugcucgacucccagggacggagagauauuaaacugaucgacaucgcccugucuaaggcugauagccgccgguucgaaaacgccgugugggaccaaugcaaagaucuuugucacaugcauacgggcguuguggucgagaagaagaaaagagggggcaaggaggaaauuacaccccacugcgcccucauggacuguaucauguaugaugcugccguguccggaggccugaauauuccuguucugcgcgcggugcucccgcgggacauggucuuuagaaccucuagccccaaaguggugcugugaggacuaguuauaagacugacuagcccgaugggccucccaacgggcccuccuccccuccuugcaccgagauuaauaaaaaaaaaaaaaaaaaaaaaaaaaaaaaaaaaaaaaaaaaaaaaaaaaaaaaaaaaaaaaaaaugcaucccccccccccccccccccccccccccccccaaaggcucuuuucagagccaccagaauu

SEQ ID NO: 11081 - RNA, 1927 nt, Artificial Sequence
  mRNA product Design i-3 comprising derived and/or modified sequence from LASV(LASV221-NIG-2010;Clade II)__AIT17625__NP (opt5)
gggagaaagcuuaccaugagcgccuccaaggaggugaaaucuuuccuguggacccagagccucagacgggaacuguccggcuacugcucuagcaucaaacuucaagucguuaaggacgcucaggcccugcuccacgggcuggauuuuuccgaggugucuaacgugcagcgccuuaugagaaagcagcggcgcgacgauagcgaccugaaaagacuccgggaucugaaucaagcggucaacaaucugguggaacucaaguccacacagcaaaagagcauucugcgcguuggaacgcuuaccucugacgaucugcucacacuggcugccgaccuugagaaacugaaguccaaagugaucagaaccgaacggccccucagcucuggcgucuauauggggaaccuguccacacagcagcuggagcagcgcagagcccuccugaauaugauuggaauggugggcggggcucagggaacccagccuggccgggauggcguugugcgcgucugggacgugaagaacccggaucuucugaauaaccaauucgggacaaugcccagccucacccuggccugucuuacgaaacagggacagguggaccugaaugaugcuguccucgcccugaccgaccugggccucaucuacacagcgaaguauccuaacucuuccgaccuggauagacuuagccaaucccaucccauucugaauaugguugacaccaagaaaucuagccucaacaucuccggguacaauuuuagccugggagccgcugugaaggccggcgcuugcaugcuugaugggggaaacaugcuggagacaaucaaagugaccccucagacggucgacggcauucucaagucuauccugaaagugaagcggucccugggcauguucguuagcgauacacccggggaacgcaauccuuaugagaacauucucuacaaaaucugucugucuggagacggcuggccguauauugccagcagaaccuccaucguggggcgggcgugggaaaacacaaccgucgaucuugagucugacggaaagccccagaaggugggcaccgccgggagcaauaaaucccugcagagcgcuggauuuccuacaggccucacguacucucaacugaugacccugaaggauuccaugaugcagcuugaccccagcgccaaaacauggauugauaucgagggcagaccugaagaccccguugagaucgcucucuaccagccgaugucugggugcuauauucacuucuuucgcgaaccuaccgaccugaagcaguucaaacaagaugccaaguacucccauggaaucgacguggccgaucuguuucccgcucagccuggccucacaagcgcggucauugaggcccugccccggaacauggugcuuaccugucagggguccgacgauaucaagagacugcucgacucucagggacgccgggauauuaaacugaucgacaucgcucugagcaaggccgauuccagaaaauucgaaaaugccgucugggaccaaugcaaggaucuuugucacaugcauacgggcgugguuguggagaaaaagaagcgcgggggcaaagaggaaauuacaccccacugcgcucucauggacuguaucauguaugaugccgcggucucuggaggccugaacauuccugugcugcgggcuguucucccgagagacaugguguuucgcaccagcucccccaaggucgugcugugaggacuaguuauaagacugacuagcccgaugggccucccaacgggcccuccuccccuccuugcaccgagauuaauaaaaaaaaaaaaaaaaaaaaaaaaaaaaaaaaaaaaaaaaaaaaaaaaaaaaaaaaaaaaaaaaugcaucccccccccccccccccccccccccccccccaaaggcucuuuucagagccaccagaauu

SEQ ID NO: 11082 - RNA, 1927 nt, Artificial Sequence
  mRNA product Design i-3 comprising derived and/or modified sequence from LASV(LASV237-NIG-2010;Clade II)__AIT17639__NP (opt5)
gggagaaagcuuaccaugagcgccuccaaggaggugaaaucuuuccuguggacccagagccucagacgggaacuguccggcuacugcucuaacaucaaacuucaagucguuaaggacgcucaggcccugcuccacgggcuggauuuuagcgagguguccaaugugcagcgccuuaugagaaagcagaaacgggacgauucugaccugaagcgccucagagaucugaaccaagcggucaauaaccugguggaacucaagagcacacagcagaaauccauucugcggguuggaacgcuuaccagcgacgaucugcucacacuggcugccgaccuugagaagcugaaaucuaaggugauccgcaccgaaagaccccucuccagcggcgucuauauggggaaucugucuacacagcaacuggagcagcggcgcgcccuccugaacaugauuggaauggugggcggggcucagggaacccagccuggcagagauggcguugugcgggucugggacgugaaaaauccggaucuucugaacaaucaauucgggacaaugcccucccucacccuggccugucuuacgaagcagggacagguggaccugaacgaugcuguccucgcccugaccgaccugggccucaucuacacagcgaaguauccuaauagcucugaccuggaucgccuuucccaaagccaucccauucugaacaugguugacaucaaaaaguccucucucaauaucagcggguacaacuuuucccugggagccgcugugaaagccggcgcuugcaugcuugaugggggaaauaugcuggagaccauuaaggugacaccucagaccauggacggcauccucaaaagcauucugaaggucaaaagaucucugggcauguucguguccgauacgcccggggaacggaacccuuaugagaacauccucuacaagauuugucugagcggagacggcuggccguauaucgccucucgcacaagcauuguugggagagcgugggaaaauaccacaguggaucuugaguccgacggaaagccccagaaagucggcucugccgggagcaacaagucccugcagagcgcuggauuuccuaccggccucaccuacucucaacugaugacacugaaagauuccaugaugcagcuugaccccagcgccaagacguggaucgauaucgagggccggccugaagaccccguggagauugcucucuaccagccgaugucugggugcuauauccacuucuuuagagaaccuaccgaccugaaacaguucaagcaagaugccaaguacucccauggaauugacguugccgaucuguuucccgcucagccuggccucacaagcgcggugaucgaggcccugccccgcaauaugguccuuaccugucagggguccgacgauauuaaacggcugcucgacucucagggaagacgcgauaucaagcugaucgacauugcucugagcaaagccgauucccggagauucgaaaacgccgugugggaccaaugcaaggaucuuugucacaugcauacaggcgucgugguugagaaaaagaagcgcgggggcaaagaggaaaucacgccccacugcgcucucauggacuguauuauguaugaugccgcggugucuggaggccugaauaucccuguccugcgggcugugcucccgagagacaugguuuuucgcaccagcucccccaaggugguccugugaggacuaguuauaagacugacuagcccgaugggccucccaacgggcccuccuccccuccuugcaccgagauuaauaaaaaaaaaaaaaaaaaaaaaaaaaaaaaaaaaaaaaaaaaaaaaaaaaaaaaaaaaaaaaaaaugcaucccccccccccccccccccccccccccccccaaaggcucuuuucagagccaccagaauu

SEQ ID NO: 11083 - RNA, 1927 nt, Artificial Sequence
  mRNA product Design i-3 comprising derived and/or modified sequence from LASV(LASV253-NIG-2011;Clade II)__AIT17671__NP (opt5)
gggagaaagcuuaccaugagcgccuccaaggaggugaaaucuuuccuguggacccagagccucagacgggaacuguccggcuacugcucuagcaucaaacuucaagucguuaaggacgcucaggcccugcuccacgggcuggauuuuuccgaggugucuaacgugcagcgccuuaugagaaagcagaaacgggacgauagcgaccugaagcgccucagagaucugaaucaagcggucaacaaucugguggaacucaaguccacccagcagaaaagcguucugcgggugggaacgcuuaccucugacgaucugcucacacuggcugccgaccuugagaagcugaaauccaaggucauucgcaccgaaagaccccucagcucuggcguguauauggggaaccuguccacacagcaacuggagcagcggcgcgcccuccugaauaugaucggaaugguuggcggggcucagggaacccagccuggcagagauggcgugguccgggugugggacgugaaaaacccggaucuucugaauaaccaauucgggacaaugcccagccucacccuggccugucuuacgaagcagggacaggucgaccugaaugauguugugcucgcucugaccgaccugggccucauuuacacagccaaguauccuaacucuuccgaccuggaucgccuuagccaaucccaucccauccugaauaugguggacaccaaaaagucuagccucaacauuuccggguacaauuuuagccugggagcggccgucaaagcuggcgccugcaugcuugaugggggaaacaugcuggagacaaucaaggugaccccucagacgauggacggcauccucaaaucuauucugaagguuaaaaagucccugggcauguucgugagcgauacacccggggaaagaaauccuuaugagaacauccucuacaagauuugucugucuggagacggcuggccguauaucgcuagccggaccuccauugucgggcgcgccugggaaaacacaaccguggaucuugagucugacggaaaaccccagaagguuggcaccgcggggagcaauaaaucccugcagagcgccggauuuccuacaggccucacguacucucaacugaugacccugaaggauuccaugaugcagcuugaccccagcgcuaaaacauggaucgauauugagggcagaccugaagaccccguggagaucgcccucuaccagccgaugucugggugcuauauccacuucuuucgggaaccuaccgaccugaagcaguucaagcaagaugcuaaauacucccauggaauugacgucacagaucuguuucccgcccagccuggccucaccagcgccgugaucgaggcucugcccagaaacaugguccuuacgugucagggguccgacgauauuaagcgccugcucgacucucagggacggagagauaucaaacugauugacaucgcgcugagcaaggccgauucccgccgguucgaaaaugcugugugggaccaaugcaaagaucuuugucacaugcauacaggcguuguggucgagaagaagaaaagagggggcaaggaggaaaucacaccccacugcgcccucauggacuguauuauguaugaugccgcugugucuggaggccugaacaucccuguucugcgcgccgugcucccgcgggacauggucuuuagaaccagcucccccaaaguggugcugugaggacuaguuauaagacugacuagcccgaugggccucccaacgggcccuccuccccuccuugcaccgagauuaauaaaaaaaaaaaaaaaaaaaaaaaaaaaaaaaaaaaaaaaaaaaaaaaaaaaaaaaaaaaaaaaaugcaucccccccccccccccccccccccccccccccaaaggcucuuuucagagccaccagaauu

SEQ ID NO: 11084 - RNA, 1927 nt, Artificial Sequence
  mRNA product Design i-3 comprising derived and/or modified sequence from LASV(LASV254-NIG-2011;Clade II)__AIT17675__NP (opt5)
gggagaaagcuuaccaugagcgccuccaaggaggugaaaucuuuccuguggacccagagccucagacgggaacuguccggcuacugcucuagcaucaaacuucaagucguuaaggacgcucaggcccugcuccacgggcuggauuuuuccgaggugucuaacgugcagcgccuuaugagaaagcagaaacgggacgauagcgaccugaagcgccucagagaucugaaucaagcggucaacaaucugguggaacucaaguccacacagcagaaaagcguucugcgggugggaacgcuuaccucugacgaucugcucacacuggcugccgaccuugagaagcugaaauccaaggucauucgcaccgaaagaccccucagcucuggcguguauauggggaaccuguccacacagcaacuggagcagcggcgcgcccuccugaauaugaucggaaugguuggcggggcucagggaacccagccuggcagagauggcgugguccgggugugggacgugaaaaacccggaucuucugaauaaccaauucgggacaaugcccagccucacccuggccugucuuacgaagcagggacaggucgaccugaaugaugcuguucucgcccugaccgaccugggccucauuuacacagcgaaguauccuaacucuuccgaccuggaucgccuuagccaaucccaucccauccugaauaugguggacaccaaaaagucuagccucaacauuuccggguacaauuuuagccugggagccgcugugaaagccggcgcuugcaugcuugaugggggaaacaugcuggagacaaucaaggucaccccucagacgauggacggcauccucaaaucuauucugaaggugaaaaagucccugggcauguucguuagcgauacacccggggaaagaaauccuuaugagaacauccucuacaagauuugucugucuggagacggcuggccguauaucgccagccggaccuccauuguggggcgcgcgugggaaaacacaaucgucgaucuugagucugacggaaaaccccagaaggugggcaccgccgggagcaauaaaucccugcagagcgcuggauuuccuaccggccucacauacucucaacugaugacgcugaaggauuccaugaugcagcuugaccccagcgccaaaaccuggauugauaucgagggcagaccugaagaccccguugagaucgcucucuaccagccgaugucugggugcuauauucacuucuuucgggaaccuacagaccugaagcaguucaagcaagaugccaaauacucccauggaaucgacguggccgaucuguuucccgcucagccuggccucaccagcgcggucauugaggcccugcccagaaacauggugcuuacaugucagggguccgacgauaucaagcgccugcucgacucucagggacggagagauauuaaacugaucgacaucgcucugagcaaggccgauucccgccgguucgaaaaugccgucugggaccaaugcaaagaucuuugucacaugcauaccggcgugguuguggagaagaagaaaagagggggcaaggaggaaauuacgccccacugcgcucucauggacuguaucauguaugaugccgcggucucuggaggccugaacauuccugugcugcgcgcuguucucccgcgggacaugguguuuagaacaagcucccccaaagucgugcugugaggacuaguuauaagacugacuagcccgaugggccucccaacgggcccuccuccccuccuugcaccgagauuaauaaaaaaaaaaaaaaaaaaaaaaaaaaaaaaaaaaaaaaaaaaaaaaaaaaaaaaaaaaaaaaaaugcaucccccccccccccccccccccccccccccccaaaggcucuuuucagagccaccagaauu

SEQ ID NO: 11085 - RNA, 1927 nt, Artificial Sequence
  mRNA product Design i-3 comprising derived and/or modified sequence from LASV(Nig08-04;Clade II)__ADU56611__NP (opt5)
gggagaaagcuuaccaugagcgccuccaaggaggugaaaucuuuccuguggacccagagccucagacgggaacuguccggcuacugcucuaacaucaaacuucaagucguuaaggacgcucaggcccugcuccacgggcuggauuuuagcgagguguccaaugugcagcgccuuaugagaaagcagaaacgggacgauggagaccugaagcgccucagagaucugaaccaagcggucaauaaccugguggaacucaagucuacccagcagaaaagcguucugcgggugggcacgcuuaccuccgacgaucugcucacacuggcugccgaccuugagaagcugaaaagcaaggucauucgcaccgaaagaccccucucuuccgggguguauaugggaaaucugagcacacagcaacuggagcagcggaaagcccuccugucuaugaucggcaugguugggggagcucagggcacccagccuggccgcgaugggguggucagagugugggacgugaagaacccggaucuucugaauaaccaauucggaacaaugcccucccucacccuggccugucuuacgaagcagggccaggucgaccugaaugaugcuguucucgcccugaccgaccuggggcucauuuacacagcgaaauauccuaacagcucugaccuggaucggcuuucccaaagccaucccauccugaauaugguggacaccaagaaauccucucucaacauuagcggauacaauuuuucccugggcgccgcugugaaggccggggcuugcaugcuugauggaggcaacaugcuggagacaaucaaagucaccccucagacgauggacggcauccucaagagcauucugaaagugaagcgcucucuggggauguucguuuccgauacacccggagaaagaaauccuuaugagaacauccucuacaagauuugucugagcggcgacggguggccguauaucgccucucggaccagcauugugggacgcgcgugggaaaacacaaccgucgaucuugaguccgacggcaaaccccagaagguggggaccgccggaucuaauaaaagccugcaguccgcuggcuuuccuacaggccucacguacagccaacugaugacccugaaggauucuaugaugcagcuugaccccuccgccaaaacauggaucgauauugaggggagaccugaagaccccguugagaucgcucucuaccagccgaugagcggaugcuauauccacuucuuucgggaaccuaccgaccugaagcaguucaagcaagaugccaaauacucucauggcauugacgugacagaucuguuuuccgcccagcccgggcucaccagcgcugucaucgaggcgcugccuagaaacauggugcuuacgugucagggauccgacgauauuaagaaacugcucgacucucagggccgccgggauaucaagcugauugacaucagccugaauaaagccgauuccagacgcuucgaaaacgcugucugggaccaaugcaaggaucuuugucacaugcauacaggggugguuguggagaagaaaaagcggggcggaaaagaggaaaucacaccccacugcgcccucauggacuguauuauguuugaugccgcugucucuggcgggcugaauauccccauucugagagccgugcucccucgcgacaugguuuuccggaccagcuccccgaaggugguccugugaggacuaguuauaagacugacuagcccgaugggccucccaacgggcccuccuccccuccuugcaccgagauuaauaaaaaaaaaaaaaaaaaaaaaaaaaaaaaaaaaaaaaaaaaaaaaaaaaaaaaaaaaaaaaaaaugcaucccccccccccccccccccccccccccccccaaaggcucuuuucagagccaccagaauu

SEQ ID NO: 11086 - RNA, 1930 nt, Artificial Sequence
  mRNA product Design i-3 comprising derived and/or modified sequence from LASV(GA391;Clade III)__AAA46284__NP (opt5)
gggagaaagcuuaccaugagcgccuccaaggaggugagaucuugccuguggacccagagccuccggcgcgaacuguccggcuacuguucuaacaucaaacuucaagucguuaaggacgcucaggcccugcuccacgggcuggauuucagcgagguguccaaugugcagagacuuaugcggaaacagaagcgcgacgauggagaccugaaaagacuccgggaucugaaccaagcggucaauaaccugguggaacucaagucuacacagcagaaaagcguucugcgcgugggcacgcuuuccagcgacgaucugcucauucuggcugccgaccuugagaaacugaagucuaaagucaccagaacagaacggccccucuccagcgggguguauaugggaaaucugucuucccagcaacuggaucagcgcagagcccuccugaacaugaucggcaugaccgggguuagcggaggcggcaagggggcuucuaauggaauugugcgggucugggacgugaaaaacgccgagcuucugaauaaccaguuuggcacaaugccuucccucacccuggcuugccuuacaaagcaggggcaaguggaucugaaugacgccguccaggcgcucaccgaucugggacugaucuacacggccaaguauccgaacagcuccgaccucgaccgccugucucagagccaucccauucuuaauaugaucgauaccaaaaaguccagccugaacaucucuggcuacaauuucucccucggggcugccguuaaagcuggagccuguaugcuggacggcggcaacaugcuugagacaauuaaggugagcccucaaaccauggaugggauccugaaaucuauucucaaggugaaaaagagccugggaauguuugucuccgacacacccggcgaaagaaacccuuaugagaauauccuguacaagauuugccucucuggggauggauggagcuauaucgcgucccggaccagcauugugggccgcgccugggaaaacacgguuguggaccuggagcaggauaauaaaccccagaagaucgggaacggaggcucuaauaaaucccuucagagcgcuggcuucgccgcugggcugaucuacucucaacucaugacacugaaggacuuuaaauguuucaaccugauuccuaaugccaagaccuggauggauaucgagggaagaccggaagaccccgucgagauugcccuuuaccagccuuccagcggcugcuaugugcacuuuuuccgggaacccacagaucucaagcaguuuaaacaggacgcuaaguacucccaugggagagacguuaccgaucuguucgcggcccaaccuggacugaccucugcugugaucgaggcccucccccgcaacauggucauuacaugucagggcagcgaagacauccggaaacugcuugagucccaggggagacgcgauaucaagcugauugacaucacgcucucuaaagccgauagccggaaguuugagaaugcugugugggaccaguucaaggaucugugccacaugcauaccggcgucgugguugaaaagaagaaaagaggaggcaaggaggaaauuacaccgcacugugcccugauggacugcaucauguuugaugcggcuguguccgggggacuugacgccaaaguccuccgcgugguucugccucgggauaugguguucagaaccagcacacccaaggucgugcugugaggacuaguuauaagacugacuagcccgaugggccucccaacgggcccuccuccccuccuugcaccgagauuaauaaaaaaaaaaaaaaaaaaaaaaaaaaaaaaaaaaaaaaaaaaaaaaaaaaaaaaaaaaaaaaaaugcaucccccccccccccccccccccccccccccccaaaggcucuuuucagagccaccagaauu

SEQ ID NO: 11087 - RNA, 1927 nt, Artificial Sequence
  mRNA product Design i-3 comprising derived and/or modified sequence from LASV(Nig08-A19;Clade III)__ADU56619__NP (opt5)
gggagaaagcuuaccaugagcgccuccaaggaggugaaaucuuuccuguggacccagagccucagacgggaacuguccggcuacugcucuaacaucaaacuucaagucguuaaggacgcucaggcccugcuccacgggcuggauuuuagcgagguguccaaugugcagcgccuuaugagaaagcagaaacgggacgauggagaccugaagcgccucagagaucugaaccaagcggucaauaaccugguggaacucaagucuacacagcagaaaagcguucugcgggugggcacgcuuuccagcgacgaucugcucguccuggcugccgaccuugagaagcugaaaucuaaggugguucgcaccgaaagaccccucuccagcgggauuuauaugggaaaucugucuucccagcaacuggaucagcggaaagcccuccugaacaugaucggcaugacagggggaaauggcggccgcaacaccacaagcgacgggauugugagagucugggaugugaagaaugcugagcuucugaacaaucaguucggaaccaugccuucucucacacuggccugucuuaccaagcagggccaaguggaccugaacgaugcuguccaggcccucacggaccuggggcugaucuacaccgcgaaauaucccaauuccagcgaccucgaucggcuggcccagucccauccgauucuuaacaugaucgacacaaagaaaucuagccugaauaucuccggauacaacuuuagccucggcgcugccguuaaggcuggggccugcaugcuggauggaggcaacaugcuugagaccauuaaagugucuccucaaacaauggacggcauccugaaguccauucucaaagugaagcgcagccuggggauguucaucucugauacccccggagaaagaaauccuuaugagaacauucuguacaagaucugucucagcggcgacggguggcccuauauugcgucccggacgucuaucgucggacgcgccugggaaaauacagugguugaucuggagagcgacaacaaaccucagaagaccggcaaugggggauccaacaaaagccuucagucugcuggcuuugccgcuggccugacauacucccagcucaugacccugaaggauagcaugcugcaacuugacccgaaugccaaaaccuggauggauaucgaggggagacccgaagacccuguggagauugcccucuaccagcccucuuccggaugcuauauccacuucuuucgggaaccuacagaccugaagcaguucaagcaggaugcuaaauacagccauggcauugacgucacggaucuguuugcggcccaacccgggcucaccuccgcugugaucgaggcccugccgagaaacaugguuauuacaugucagggaucugaagacauccgcaaacuucuggagagccagggccggagagauaucaagcucauugacaucucccugucuaagguggauagccgcaaauucgagaaugccgucugggaccaguuuaaggaucugugccacaugcauaccgggauuguggucgaaaagaaaaagcggggcggaaaagaggaaaucacaccucacugugcucuuauggacugcauuauguucgaugccgcgguguccggcgggguugacgcuaaggugcucagagccguccugccccgcgauaugguguuucggaccagcacgccuaaaguugugcugugaggacuaguuauaagacugacuagcccgaugggccucccaacgggcccuccuccccuccuugcaccgagauuaauaaaaaaaaaaaaaaaaaaaaaaaaaaaaaaaaaaaaaaaaaaaaaaaaaaaaaaaaaaaaaaaaugcaucccccccccccccccccccccccccccccccaaaggcucuuuucagagccaccagaauu

SEQ ID NO: 11088 - RNA, 1927 nt, Artificial Sequence
  mRNA product Design i-3 comprising derived and/or modified sequence from LASV(G1180-SLE-2010;Clade IV)__AIT17169__NP (opt5)
gggagaaagcuuaccaugagcgccuccaaggagaucaaaucuuuccuguggacccagagccucagacgggaacuguccggcuacugcucuaacauuaagcugcaaguggucaaagacgcucaggcccugcuccacgggcuggauuuuagcgagguuuccaaugugcagcgccuuaugagaaaggaacggcgcgacgauaacgaccugaaaagacuccgggaucugaaucaggcggugaacaaucuggucgagcucaagucuacacaacaaaagagcauccugcgcgugggaacgcuuaccuccgacgaucugcucauucuggcugccgaccuugaaaaacuuaagagcaaaguuaucagaacagagcggccccucucugccggcguguauauggggaaccuguccagccagcagcuggaucagcgcagagcucuccugucuaugauuggaauguccagcggcaaucagcgggcccaggcugggcgcgacggagucgugagaguuugggaugugaagaacgucgagcuucugaauaaccaguucggcaccaugccuucucucacacuggccugucuuaccaaacaaggccagguggaccugaaugaugcggugcaggcccucacagaccuggggcugaucuacaccgcuaaguauccgaacacguccgaccucgaucggcugacccaaagccaucccauccuuaauaugauugacacaaagaaauccucucugaacaucagcggauacaauuuuucccucggcgccgcugucaaggccggggcgugcaugcuggauggaggcaacaugcuugaaaccauuaaaguuagcccucagacaauggacgggauccugaagucuauucucaaagugaagaaagcccugggaauguucaucuccgauacccccggcgagcgcaacccuuaugaaaauauucuguacaagaucugucucagcggcgacggguggcccuauaucgcuucuagaacgagcauuacaggacgggccugggagaacaccguggucgaucuggaguccgacggcaagccucagaaagcugggucuaauaacagcaauaagucccuucagagcgugggauuuacagccggccugaccuacucucaacucaugacccugaaagaugccaugcugcagcuugacccgaacgcuaagacauggauggauaucgaagggagacccgaggacccuguugaaauugcgcucuaccagcccuccagcggaugcuauauccacuucuuucgcgagccuacggaccugaaacaguucaagcaagaugccaaguacucucauggcauugacgugaccgaucuguuugcugcccagcccggccucacauccgccgucaucgacgcucugccgcggaauauggugaucaccugucaggggagcgaugacauuagaaaacuucuggaaucccagggacgcaaggauaucaaacucauugacaucgcccugucuaagacagauagccggaaauaugagaacgcgguuugggaccaauacaaggaucugugccacaugcauaccggcguggucguggagaagaaaaagagagggggaaaagaagagauuacgccucacugugcucuuauggacugcaucauguucgaugccgccgucuccggcgggcucaauacaucugugcugcgcgcuguucugccccgggacaugguguuuagaaccagcaccccucgcgucgugcucugaggacuaguuauaagacugacuagcccgaugggccucccaacgggcccuccuccccuccuugcaccgagauuaauaaaaaaaaaaaaaaaaaaaaaaaaaaaaaaaaaaaaaaaaaaaaaaaaaaaaaaaaaaaaaaaaugcaucccccccccccccccccccccccccccccccaaaggcucuuuucagagccaccagaauu

SEQ ID NO: 11089 - RNA, 1927 nt, Artificial Sequence
  mRNA product Design i-3 comprising derived and/or modified sequence from LASV(G1442-SLE-2011;Clade IV)__AIT17181__NP (opt5)
gggagaaagcuuaccaugagcgccuccaaggaggugaaaucuuuccuguggacccagagccucagacgggaacuguccggcuacugcucuaacaucaaacuucaagucguuaaggacgcucaggcccugcuccacgggcuggauuuuagcgagguguccaaugugcagcgccuuaugagaaagcagcggcgcgacgauaacgaccugaaaagacuccgggaucugaaucaagcggucaacaaucugguggaacucaagucuacacagcaaaagagcguucugcgcgugggaacgcuuaccuccgacgaucugcucguccuggcugccgaccuugagaaacuuaagagcaaagugauuagaacagaacggccccucucugccggcguuuauauggggaaccuguccagccagcagcuggaucagcgcagagcucuccugaauaugaucggaaugucuggcgggauucagggaacccggacaggccgcgacggcguggucagagugugggaugugaagaacgccgaccuucugaauaaccaguucgggaccaugccuucccucacacuggcuugucuuaccaaacaaggacaggucgaucugaaugacguugugcaggcccucacggaccugggccugaucuacaccgcgaaguauccgaacgccagcgaucucgaccggcugacacaaucucaucccauucuuaauaugaucgauaccaagaaauccagccugaacaucuccggguacaauuuuucucucggagcugccgugaaggcuggcgccugcaugcuggacgggggaaacaugcuugagacaauuaaagucagcccucagaccauggauggcauccugaaguccauucucaaagugaagaaaacgcugggcauguucaucagcgacacacccggggagcgcaacccuuaugaaaauauucuguacaagaucugucucucuggagauggcuggcccuauauugcguccagaaccagcaucacagggcgggccugggagaacaccguuguggaccuggaaucugauggaaagccucagaaagcuggcagcaauaacuccaauaagucucuucagagcgccggguuugcugccggacugaccuacucccaacucaugacacugaaagacgccaugcugcagcuugauccgaacgcuaagacguggauggacaucgagggcagacccgaggacccugucgaaauugcgcucuaccagcccagcucuggcugcuauauccacuucuuucgcgagccuaccgaucugaaacaguucaagcaagacgccaaguacucccaugggauugaugugacagaccuguuugcugcccagcccggacucaccagcgccguuaucgaagcucugccgcggaauauggugauuacaugucagggcucugaugacaucaaaaagcugcuggagucccaggggagaaaagauaucaagcucauugacaucgcccugagcaaaaccgauucccgcaaguaugaaaacgcggucugggaccaauacaaggaucugugccacaugcauacgggaguggucguggagaaaaagaaacggggcgggaaggaggaaauuacaccucacugugcucuuauggacugcaucauguucgaugccgccguuucuggcggacucaauacccuggugcugagagcuguccucccccgcgacaugguguuucggaccagcacaccuagaguugugcugugaggacuaguuauaagacugacuagcccgaugggccucccaacgggcccuccuccccuccuugcaccgagauuaauaaaaaaaaaaaaaaaaaaaaaaaaaaaaaaaaaaaaaaaaaaaaaaaaaaaaaaaaaaaaaaaaugcaucccccccccccccccccccccccccccccccaaaggcucuuuucagagccaccagaauu

SEQ ID NO: 11090 - RNA, 1927 nt, Artificial Sequence
  mRNA product Design i-3 comprising derived and/or modified sequence from LASV(G3010-SLE-2013;Clade IV)__AIT17345__NP (opt5)
gggagaaagcuuaccaugagcgccuccaaggagaucaaaucuuuccuguggacccagagccucagacgggaacuguccggcuacugcucuaacauuaaacuucaaguggucaaagacgcucaggcccugcuccacgggcuggauuuuagcgagguuuccaaugugcagcgccuuaugagaaaggaacggcgcgacgauaacgaccugaaaagacuccgggaucugaaucaggcggugaacaaucuggucgagcucaagucuacacaacaaaagagcauccugcgcgugggaacgcuuaccuccgacgaucugcucauucuggcugccgaccuugaaaaacuuaagagcaaaguuacaagaaccgagcggccccucucugccggcguguauauggggaaccuguccagccagcagcuggaucagcgcagagcucuccugucuaugaucggaauguccagcggcguccagggggcccgggcuggacgcgacggcgugguuagagugugggaugucaagaaugccgagcuucugaacaaucaguucggcacaaugccuucucucacccuggcgugucuuacaaaacaggggcaaguggaccugaacgaugugguccaggcccucaccgaccugggacugauuuacacggcuaaguauccgaauaccuccgaccucgaucggcugacacagagccaucccauccuuaacaugaucgacaccaagaaauccucucugaauauuagcggcuacaacuuuucccucggggccgcuguuaaggccggagcgugcaugcuggauggcgggaauaugcuugaaacaaucaaagugagcccucaaaccauggacggcauucugaagucuauccucaaagugaagaaagcccugggaauguucauuuccgagacgcccggcgaacgcaacccuuaugagaacauccuguacaagauuugucucagcggggauggauggcccuauaucgcuucuagaacaagcaucaccggccgggccugggagaauacagucguggaccuggaauccgaugggaagccucagaaagcuggaucuaacaauagcaacaagucccuucagagcgccggcuuuaccgccgggcugaccuacucucagcucaugacacugaaagacgcuaugcugcaacuugauccgaaugcgaagacguggauggacauugagggaagacccgaagauccuguugagguggcccucuaccagcccuccagcggcugcuauauccacuucuuucgcgaaccuaccgaccugaaacaguucaagcaggacgcuaaguacucucauggcauugaugucacagaccuguuugccgcccaacccgggcucaccuccgcugugaucgaugcccugccgcggaacaugguuauuacaugucagggaagcgacgauaucaaaaagcugcuggagucccagggcagaaaagacaucaagcucauugauaucgcgcugucuaaaaccgacagccgcaaguaugagaaugcugugugggaucaguacaaggaccugugccacaugcauacgggggucguggucgaaaagaagaaacggggaggcaaggaggaaauuacaccucacugugcccuuauggauugcaucauguucgacgccgcuguguccgggggccucaacaccucuguucugagagccgugcugccccgcgauauggucuuucggaccagcacaccuagagugguucucugaggacuaguuauaagacugacuagcccgaugggccucccaacgggcccuccuccccuccuugcaccgagauuaauaaaaaaaaaaaaaaaaaaaaaaaaaaaaaaaaaaaaaaaaaaaaaaaaaaaaaaaaaaaaaaaaugcaucccccccccccccccccccccccccccccccaaaggcucuuuucagagccaccagaauu

SEQ ID NO: 11091 - RNA, 1927 nt, Artificial Sequence
  mRNA product Design i-3 comprising derived and/or modified sequence from LASV(G502-SLE-2009;Clade IV)__AIT17127__NP (opt5)
gggagaaagcuuaccaugagcgccuccaaggagaucaaaucuuuccuguggacccagagccucagacgggaacuguccggcuacugcucuaacauuaagcugcaaguggucaaagacgcucaggcccugcuccacgggcuggauuuuagcgagguuuccaaugugcagcgccuuaugagaaaggaacggcgcgacgauaacgaccugaaaagacuccgggaucugaaucaggcggugaacaaucuggucgagcucaagucuacacaacaaaagagcauccugcgcgugggaacgcuuaccuccgacgaucugcucauucuggcugccgaccuugaaaaacuuaagagcaaaguuaucagaacagagcggccccucucugccggcguguauauggggaaccuguccagccagcagcuggaucagcgcagagcucuccugucuaugauuggaauguccggcgggaaucagggaguccgggccggcaaggacggcgugguucgcgugugggaugucaaaaacgcugagcuucugaauaaccaguucgggaccaugccuagccucacacuggccugucuuaccaagcagggacaaguggaccugaaugaugcggugcaggcccucacagaccugggccugaucuacaccgcuaaguauccgaacacgucugaccucgauagacugacccagucccaucccauccuuaauaugauugacaccaaaaagagcucccugaacaucucuggguacaauuuuagccucggagccgcugucaaagccggcgcgugcaugcuggaugggggaaacaugcuugaaacaauuaagguuuccccucaaacaauggacggcauccugaaaagcauucucaaggugaaaaaggcccugggcauguucaucucugauacccccggggagcggaacccuuaugaaaauauucuguacaagaucugucucuccggagacggcuggcccuauaucgcuagccgcacgucuauuacagggagagccugggagaacaccguggucgaucuggagagcgacggaaaaccucagaaggcuggcuccaauaacucuaauaaaagccuucaguccgccggguuuacagccggacugaccuacagccagcucaugacccugaaggaugcuaugcugcaacuugacccgaacacaaaaacguggauggauaucgaaggccggcccgaggacccuguggaaauugcgcucuaccagcccucuuccggcugcuauauccacuucuuuagagagccuaccgaccugaagcaguucaagcaggaugccaaauacagccaugggauugacguuacagaucuguuugcugcccaacccggacucaccucugccgugaucgacgcucugccgcgcaauauggucaucacaugucagggcuccgaugacauucggaaacuucuggaaagccaggggagaaaggauaucaagcucauugacaucgcccugaacaaaaccgauucccgcaaguaugagaaugcggugugggaccaguacaaggaucugugccacaugcauacgggaguuguggucgagaaaaagaaacggggcgggaaggaagagauuacaccucacugugcucuuauggacugcaucauguucgaugccgccgugucuggcggacucaacaccagcguccugagagcugugcugccccgcgacaugguuuuucggaccuccacaccuagagugguccucugaggacuaguuauaagacugacuagcccgaugggccucccaacgggcccuccuccccuccuugcaccgagauuaauaaaaaaaaaaaaaaaaaaaaaaaaaaaaaaaaaaaaaaaaaaaaaaaaaaaaaaaaaaaaaaaaugcaucccccccccccccccccccccccccccccccaaaggcucuuuucagagccaccagaauu

SEQ ID NO: 11092 - RNA, 1927 nt, Artificial Sequence
  mRNA product Design i-3 comprising derived and/or modified sequence from LASV(G733-SLE-2010;Clade IV)__AIT17155__NP (opt5)
gggagaaagcuuaccaugagcgccuccaaggagaucaaaucuuuccuguggacccagagccucagacgggaacuguccggcuacugcucuaacauuaagcugcaaguggucaaagacgcucaggcccugcuccacgggcuggauuuuagcgagguuuccaaugugcagcgccuuaugagaaaggaacggcgcgacgauaacgaccugaaaagacuccgggaucugaaucaggcggugaacaaucuggucgagcucaagucuacacaacaaaagagcgugcugcgcguuggaacgcuuaccuccgacgaacugcucgugcuggcugccgaucuugagaaacuuaagagcaaagucaucagaacagagcggccccucucugccggcguguauauggggaaccuguccagccagcagcuggaccagcgcagagcucuccugucuaugauuggaauguccggcgggaaucagggagcccggaccggccgcgauggcguugugagagucugggacgugaagaacgcugaacuucugaauaaccaguucgggacaaugccuagccucacccuggccugucuuacaaaacagggacaaguggaucugaaugacgcgguccaggcccucaccgaucugggccugaucuacacggcuaaguauccgaacaccucugaccucgaccggcugacacagucccaucccauucuuaauaugaucgauaccaagaaaagcucccugaacaucucuggguacaauuuuagccucggagccgcuguuaaggccggcgcgugcaugcuggacgggggaaacaugcuugagacaauuaaaguguccccucaaaccauggauggcauccucaagagcauucugaaagugaagaaagcccugggcauguucaucucugacacgcccggggaacgcaacccuuaugagaauauucuguacaagaucugucucuccggagauggcuggcccuauauugcuagcagaacaucuaucaccgggcgggccugggagaacacagucguggaccuggaaagcgauggaaagccucagaaagcuggcuccaauaacucuaauaagagccuucaguccgccggguuuaccgccggacugaccuacagccagcucaugacacugaaagacgcuaugcugcaacuugauccgaacgcgaagacguggauggacaucgagggcagacccgaagauccuguugagauugcccucuaccagcccucuuccggcugcuauauccacuucuuucgcgaaccuaccgaccugaaacaguucaagcaggacgcuaaguacagccaugggauugaugugacagaccuguuugccgcccaacccggacucaccucugcugucaucgaugcccugccgcggaauauggugauuacaugucagggcuccgacgauaucagaaaacuucuggagagccaggggcgcaaggacaucaaacucauugauaucgcgcuguccaagauugacucucggaaauaugagaacgcuguuugggaucaguacaaggaccugugccacaugcauaccggaguggucguggaaaagaaaaagagaggcgggaaagaggaaaucacgccucacugugcccuuauggauugcauuauguucgacgccgcugucagcggcggacucaauucccuggugcugcgcgccguucucccccgggauaugguguuuagaacaucuaccccucgcgucgugcugugaggacuaguuauaagacugacuagcccgaugggccucccaacgggcccuccuccccuccuugcaccgagauuaauaaaaaaaaaaaaaaaaaaaaaaaaaaaaaaaaaaaaaaaaaaaaaaaaaaaaaaaaaaaaaaaaugcaucccccccccccccccccccccccccccccccaaaggcucuuuucagagccaccagaauu

SEQ ID NO: 11093 - RNA, 1927 nt, Artificial Sequence
  mRNA product Design i-3 comprising derived and/or modified sequence from MOPV/LASV reassortant(IGS-1;Clade IV)__AFY05578__NP (opt5)
gggagaaagcuuaccaugagcgccuccaaggagaucaaaucuuuccuguggacccagagccucagacgggaacuguccggcuacugcucuaacauuaaacuucaaguggucaaggacgcucaggcccugcuccacgggcuggauuuuagcgagguuuccaaugugcagcgccuuaugagaaaggaacggcgcgacgauaacgaccugaaaagacuccgggaucugaaucaggcggugaacaaucuggucgagcucaagucuacacaacaaaagagcauccugcgcgugggaacgcuuaccuccgacgaucugcucauucuggcugccgaccuugaaaaacugagaagcaagguuauccggacagagcgcccccucucugccggcguguauauggggaaccuguccagccagcagcuggaucagagacgggcucuccugaauaugauuggaaugucuggcgggaaccagggagcccgcgcuggcagagacggcgucgugcggguuugggaugugaaaaaugccgagcuucuguccaaccaguucgggaccaugccuagccucacacuggcgugucuuaccaagcagggacaagucgaccugaaugaugccgugcaggcucucacagaccugggccugaucuacaccgccaaauauccgaacacgucugaccucgaucgccugacccagucccaucccauccuuaauaugauugacacaaagaaaagcucccugaacaucucuggguacaauuuuagccucggagcugccgugaaggcgggcgccugcaugcuggaugggggaaacaugcuugaaaccauuaaggucuccccucaaacaauggacggcauccugaaaagcauucucaagguuaaaaaggcucugggcauguucaucucugauacccccggggagagaaacccuuaugaaaauauucuguacaaaaucugucucuccggagacggcuggcccuauaucgccagccggacgucuauuacagggagagcuugggagaacaccgugguggaucuggagagcgacggaaagccucagaaggccgauuccaauaacucuagcaaaucccuucagagcgccggcuuuacagcugggcugaccuacucucagcucaugacccugaaggacgcgaugcugcaacuugauccgaaugccaaaacauggauggacaucgaaggacgccccgaggacccugucgaaauugcucucuaccagcccuccagcggcugcuauauccacuucuuucgggagccuacggaucugaagcaguucaaacaggacgccaaguacucucauggcauugaugugaccgaccuguuugccacacaacccgggcucaccuccgcuguuaucgaugcccugccgagaaacauggugaucacaugucagggaagcgacgauauucgcaaacuucuggaaucccagggccggaaggacaucaagcucauugauaucgaccugucuaaaaccgauagcagaaaguaugagaaugcggucugggaccaguacaaagaucugugccacaugcauacgggggugguuguggagaagaagaaacgcggaggcaaggaagagauuacaccucacugugcucuuauggacugcaucauguucgacgccgccgucuccgggggccucaacaccucugugcugcgggcuguccugcccagagauaugguguuucgcaccagcacaccucggguugugcucugaggacuaguuauaagacugacuagcccgaugggccucccaacgggcccuccuccccuccuugcaccgagauuaauaaaaaaaaaaaaaaaaaaaaaaaaaaaaaaaaaaaaaaaaaaaaaaaaaaaaaaaaaaaaaaaaugcaucccccccccccccccccccccccccccccccaaaggcucuuuucagagccaccagaauu

SEQ ID NO: 11094 - RNA, 1927 nt, Artificial Sequence
  mRNA product Design i-3 comprising derived and/or modified sequence from LASV(LM765-SLE-2012;Clade IV)__AIT17815__NP (opt5)
gggagaaagcuuaccaugagcgccuccaaggagaucaaaucuuuccuguggacccagagccucagacgggaacuguccggcuacugcucuaacauuaagcugcaaguggucaaagacgcucaggcccugcuccacgggcuggauuuuagcgagguuuccaaugugcagcgccuuaugagaaaggaacggcgcgacgauaacgaccugaaaagacuccgggaucugaaucaggcggugaacaaucuggucgagcucaagucuacacaacaaaagagcauccugcgcgugggaacgcuuaccuccgacgaucugcucauucuggcugccgaccuugaaaaacuuaagagcaaaguuacaagaaccgagcggccccucucugccggcguguauauggggaaccuguccagccagcagcuggaucagcgcagagcucuccuggacaugaucggaaugucuggcuccaaucagggggcccgggcuggacgcgauggcgucgugagaguuugggacgugaagaacgccgagcuucugaauaaccaguucggcacaaugccuagccucacccuggcgugucuuacaaaacaggggcaagucgaucugaaugacgccgugcaggcucucaccgaccugggacugauuuacacggccaaguauccgaacaccucugaucucgaccggcugacacagucccaucccauccuuaauaugaucgauaccaagaaaagcucccugaacauuucuggcuacaauuuuagccucggggcugccgugaaggcgggagccugcaugcuggacggcgggaacaugcuugaaacaaucaaagucuccccucaaaccauggauggcauucucaagagcauccugaaaguuaagaaagcucugggaauguucauuucugacgcccccggcgagcgcaacccuuaugaaaauauccuguacaagauuugucucuccggggauggauggcccuauaucgcuagcagaacgucuaucacaggccgggccugggagaacaccgugguggaccuggagagcgaugggaagccucagaaagccggauccaauggcucuaacaagagccuucaguccgcuggguuuacagcgggacugaccuacagccagcucaugacccugaaagacgccaugcugcaacuugauccgaaugcuaagacauggauggacauugaaggcagacccgaggacccugucgaaaucgcccucuaccagcccucuuccggcugcuauauucacuucuuucgcgagccuacggaucugaaacaguucaagcaggacgccaaguacagccaugggaucgaugugaccgaccuguuugcugcccaacccggacucacaucugcgguuauugaugcucugccgcggaacauggugaucaccugucagggcuccgacgauaucagaaaacuuuucgaaagccaggggcgcaaggacauuaaacugaucgauauugcccucuccaagacagacucucggaaauaugagaaugccgucugggaucaguacaaggaccugugccacaugcauaccggaaucgugguugagaagaaaaagagaggcgggaaagaagagauuacgccucacugugcucugauggauugcaucauguuugacgccgcugugagcggcggacuuaacacauccguccuccgcgccgugcugccccgggacauggucuucagaaccucuaccccucgcgugguucugugaggacuaguuauaagacugacuagcccgaugggccucccaacgggcccuccuccccuccuugcaccgagauuaauaaaaaaaaaaaaaaaaaaaaaaaaaaaaaaaaaaaaaaaaaaaaaaaaaaaaaaaaaaaaaaaaugcaucccccccccccccccccccccccccccccccaaaggcucuuuucagagccaccagaauu

SEQ ID NO: 11095 - RNA, 1927 nt, Artificial Sequence
  mRNA product Design i-3 comprising derived and/or modified sequence from LASV(LM776-SLE-2012;Clade IV)__AIT17825__NP (opt5)
gggagaaagcuuaccaugagcgccuccaaggagaucaaaucuuuccuguggacccagagccucagacgggaacuguccucuuacugcagcaacauuaaacuucaaguggucaaggacgcucaggcccugcuccacggccuggauuuuuccgagguuucuaaugugcagcgccuuaugagaaaggaacggcgcgacgauaacgaccugaaaagacuccgggaucugaaucaggcggugaacaaucuggucgagcucaagagcacacaacagaaguccauccugcgcguggggacgcuuaccagcgacgaucugcucauucuggcugccgaccuugaaaaacugaagucuaaaguuacaagaaccgagcggccccucuccgccggaguguauaugggcaaccugagcucucagcagcuggaucaacgcagagcucuccuguccaugaucgggaugagcggaucuaaucagggcgcccgggcugggcgcgacggagucgugagaguuugggaugugaagaacgccgagcuucugaauaaccaguucggcacaaugccuucccucacccuggcgugucuuacaaaacagggccaagucgaccugaaugaugccgugcaggcucucaccgaccuggggcugauuuacacggccaaguauccgaacaccagcgaccucgaucggcugacacagucccaucccauccuuaauaugaucgacaccaagaaaucuagccugaacauuuccggauacaauuuuagccucggcgcugccgugaaggcgggggccugcaugcuggauggaggcaacaugcuugaaacaaucaaagucucuccucaaaccauggacgggauucugaaguccauccucaaaguuaagaaagcucugggaauguucauuagcgauacgcccggcgagcgcaacccuuaugaaaauauccuguacaagauuugucucucuggcgacggguggcccuauaucgccagcagaacauccaucaccggacgggcuugggagaacacagugguggaucuggagucugacggcaagccucagaaagccgggagcaauaacuccaauaagagccuucagucugccggauuuaccgcuggccugaccuacucccagcucaugacacugaaagaugcgaugcugcaacuugacccgaacgccaagacguggauggauauugaagggagacccgaggacccugucgaaguggcucucuaccagcccagcucuggaugcuauauccacuucuuucgcgagccuaccgaccugaaacaguucaagcaggaugccaaguacucccauggcauugacguuacagaucuguuugccgcucaacccggccucaccagcgccgugaucgacgcgcugccgcggaauauggucauuacaugucagggguccgaugacaucagaaaacuucuggaaucucagggacgcaaggauaucaaacucauugacaucgcucugagcaagaccgauucccggaaauaugagaacgccgugugggaccaguacaaggaucugugccacaugcauacgggcguuguggucgagaagaaaaagagagggggaaaagaagagauuacaccucacugugcccuuauggacugcaucauguucgaugcugccgugucuggcgggcucaauaccagcguccugcgcgcugugcugccccgggacaugguuuuuagaaccuccacaccucgcgugguccucugaggacuaguuauaagacugacuagcccgaugggccucccaacgggcccuccuccccuccuugcaccgagauuaauaaaaaaaaaaaaaaaaaaaaaaaaaaaaaaaaaaaaaaaaaaaaaaaaaaaaaaaaaaaaaaaaugcaucccccccccccccccccccccccccccccccaaaggcucuuuucagagccaccagaauu

SEQ ID NO: 11096 - RNA, 1927 nt, Artificial Sequence
  mRNA product Design i-3 comprising derived and/or modified sequence from LASV(Mad39;Clade IV)__ANH09723__NP (opt5)
gggagaaagcuuaccaugagcgccuccaaggagaucaaaucuuuccuguggacccagagccucagacgggaacuguccggcuacugcucuaacauuaagcugcaaguggucaaagacgcucaggcccugcuccacgggcuggauuuuagcgagguuuccaaugugcagcgccuuaugagaaagcagcggcgcgacgauaacgaccugaaaagacuccgggaucugaaucaagcggugaacaaucuggucgaacucaagucuacacagcaaaagagcgugcugcgcguuggaacgcuuaccuccgacgaucugcucacacuggcugccgaccuugagaaacuuaagagcaaagugaccagaacagaacggccccucaccgccggcgucuauauggggaaccugucuucccagcagcuggaucagcgcagagcucuccugaauaugaucggaaugagcggcgggaaccagggagcccggacaggccgcgacggcgugguuagagugugggaugucaagaaugcugagcuucugaacaaucaguucgggaccaugccuucucucacgcuggccugucuuaccaaacaaggacagguggaccugaacgaugugguccaggcgcucacagaccugggccugauuuacaccgccaaguauccgaauacauccgaccucgaucggcugacccaaagccaucccauccuuaacaugauugacacgaauaagucuucccugaacaucagcggguacaacuuuucccucggagcugccguuaaagcuggcgccugcaugcuggaugggggaaauaugcuugagacaaucaaggugucuccucagaccauggacggcauucugaaaagcauccucaaggugaaaaagucccugggcauguucauuagcgauacacccggggaacgcaacccuuaugagaauauccuguacaaaauuugucucucuggagacggcuggcccuauaucgcguccagaaccagcauuaccgggcgggccugggaaaacacagucguggaucuggagucuggaggcaagccucagaaggcugggagcaauaacuccaauaaaucucuucagagcgccggauuugcugccggccugacguacucccaacucaugacccugaaggacgccaugcugcagcuugauccgaacgcuaaaacauggauggacaucgagggcagacccgaagauccuguugagaucgcgcucuaccagcccauuagcgggugcuauauccacuucuuucgcgaaccuaccgaccugaagcaguucaaacaagacgccaaguacucucauggaauugaugugacagaccuguuugcugcccagcccggccucaccuccgccgucaucgaggcucugccgcggaauauggugauuacgugucaggggagcgaugacaucagaaaacuuuucgaaucucagggacgcaaggauaucaagcugauugacaucgcccucuccaaaacagauagccggaaguaugagaacgcgguuugggaccaauacaaagaucugugccacaugcauaccggcguggucguggagaagaagaaaaagggcgggaaagaagagauuaccccucacugugcucugauggacugcaucauguuugaugccgccgucuccggaggccuuaauacacucgugcugagagcuguucugccccgcgacaugguguuccggaccucuacaccuaaggucgugcucugaggacuaguuauaagacugacuagcccgaugggccucccaacgggcccuccuccccuccuugcaccgagauuaauaaaaaaaaaaaaaaaaaaaaaaaaaaaaaaaaaaaaaaaaaaaaaaaaaaaaaaaaaaaaaaaaugcaucccccccccccccccccccccccccccccccaaaggcucuuuucagagccaccagaauu

SEQ ID NO: 11097 - RNA, 1927 nt, Artificial Sequence
  mRNA product Design i-3 comprising derived and/or modified sequence from LASV(Z0947-SLE-2011;Clade IV)__AIT17841__NP (opt5)
gggagaaagcuuaccaugagcgccuccaaggagaucaaaucuuuccuguggacccagagccucagacgggaacuguccggcuacugcucuaacauuaagcugcaaguggucaaagacgcucaggcccugcuccacgggcuggauuuuagcgagguuuccaaugugcagcgccuuaugagaaaggaacggcgcgacgauaacgaccugaaaagacuccgggaucugaaucaggcggugaacaaucuggucgagcucaagucuacacaacaaaagagcauccugcgcgugggaacgcuuaccuccgacgaucugcucauucuggcugccgaccuugaaaaacuuaagagcaaaguuacaagaaccgagcggccccucucugccggcguguauauggggaaccuguccagccagcagcuggaucagcgcagagcucuccugaauaugaucggaaugucuggcuccaaccagggggcccggacaggacgcgacggcgucgugagaguuugggaugugaagaaugcugagcuucugaacaaucaguucggcaccaugccuagccucacacuggccugucuuaccaaacaggggcaagucgaccugaacgaugcggugcaggcccucacggaccugggacugauuuacaccgcuaaguauccgaauacaucugaccucgaucggcugacccagucccaucccauccuuaacaugaucgacacaaagaaaagcucccugaauauuucuggcuacaacuuuagccucggggccgcugugaaggccggagcgugcaugcuggauggcgggaacaugcuugaaaccaucaaagucuccccucaaacgauggacggcauucucaagagcauccugaaaguuaagaaagcccugggaauguucauuucugaugcucccggcgagcgcaauccuuaugaaaacauccuguacaagauuugucucuccggggacggauggcccuauaucgccagcagaacaucuaucaccggccgggcuugggagaauacagugguggaucuggagagcgacgggaagccucagaaagccggauccaacggcucuaauaagagccuucaguccgccggguuuaccgcuggacugaccuacagccagcucaugacacugaaagaugcgaugcugcaacuugacccgaacgccaagacguggauggauauugaaggcagacccgaggacccugucgaaaucgcucucuaccagcccucuuccggcugcuauauucacuucuuucgcgagccuaccgaccugaaacaguucaagcaggaugccaaguacagccaugggaucgacgugacagaucuguuugccgcucaacccggacucaccucugccguuauugacgcgcugccgcggaauauggugaucacaugucagggcuccgaugacaucagaaaacuuuucgaaagccaggggcgcaaggauauuaaacugaucgacauugcucucuccaagaccgauucucggaaauaugagaacgccgucugggaccaguacaaggaucugugccacaugcauacgggaaucgugguugagaagaaaaagagaggcgggaaagaagagauuacaccucacugugcccugauggacugcaucauguuugaugcugccgugagcggcggacuuaauaccuccguccuccgcgcugugcugccccgggacauggucuucagaaccucuacaccucgcgugguucugugaggacuaguuauaagacugacuagcccgaugggccucccaacgggcccuccuccccuccuugcaccgagauuaauaaaaaaaaaaaaaaaaaaaaaaaaaaaaaaaaaaaaaaaaaaaaaaaaaaaaaaaaaaaaaaaaugcaucccccccccccccccccccccccccccccccaaaggcucuuuucagagccaccagaauu

SEQ ID NO: 11098 - RNA, 1927 nt, Artificial Sequence
  mRNA product Design i-3 comprising derived and/or modified sequence from LASV(Josiah;Clade IV)__NP_694869__NP (opt6)
gggagaaagcuuaccaugagugcaucaaaagaaauaaaaucauuccuauggacacaaagccuaagaagggaacuaucaggcuauugcucaaacauaaaauuacaaguagucaaagacgcacaagcucucuuacacggucuagauuuuagugaaguaucaaacguucaaagauuaaugagaaaagagagacgagaugauaacgaccuaaaaagacuaagagaucuaaaucaagcaguaaacaaccuuguagaacuaaaaagcacacaacaaaaauccauccuacguguaggaacauuaacaagugaugacuuauuaauccuagcagcagaucuagaaaaacuuaaaagcaaagucauaagaacugaacgaccgcucagugcagguguauauaugggaaaucucucgucgcaacaauuagaucaaagaagagcacuacuuaauaugauaggaaugucaggaggaaaucaaggugcacgcgcaggaagagacggaguagugagaguaugggacguaaaaaacgcagaauuauuaaauaaccaauuuggaacaaugccauccuuaacuuuagccugucuaaccaaacaaggacaaguagaccuaaaugacgcaguacaagcacuaacugacuuaggacuuauauauacagccaaauauccaaauacaucagauuuagacagacucacacaaucacaccccauacuaaacaugauagacacaaaaaaaagcaguuuaaauauaucagguuacaauuuuucacuuggagcagcgguaaaagcaggcgccuguauguuagacggcgguaacauguuagaaacaauaaagguaagcccucaaacaauggauggaauacuaaaaaguauauuaaaaguaaaaaaagcacuaggaauguuuauaagugauaccccaggagaaagaaacccauacgaaaauauauuauacaaaauauguuuaaguggagauggauggccauauauagcauccagaaccagcauaacaggaagagcaugggaaaauaccguaguagaucuagaaucagauggaaaaccacaaaaagcagauucaaacaauaguaguaaaagccuccaaucagcagguuuuacagcaggacuaacauauagucaacuaaugacacuuaaagaugcaaugcuacaacuagauccaaaugcaaaaacauggauggauauagaaggacgaccagaagacccgguagaaauagcacuauaucaacccaguagcggaugcuacauucauuuuuuuagagaaccaacagaucuaaaacaauucaaacaagaugcaaaauauagucacggcauugacguaacagauuuauuugcaacacaaccaggauuaacaagugccgucauagaugcauuaccaagaaacaugguaauaacaugccaaggaagcgaugacauuagaaaacuacuagaaagucaaggaagaaaagacaucaaacugauagauaucgcguuaucaaaaacggacucacgaaaauaugaaaaugcaguuugggaccaauauaaagauuuaugccacaugcauacaggaguaguuguagaaaaaaaaaagagaggaggaaaagaagaaauaacaccacauugcgcauuaauggauugcauaauguuugaugccgcaguaagcggcggacuaaauacuucaguacuacgagcaguacuaccaagagauaugguauuucgaaccucuaccccaaggguaguauuauaaggacuaguuauaagacugacuagcccgaugggccucccaacgggcccuccuccccuccuugcaccgagauuaauaaaaaaaaaaaaaaaaaaaaaaaaaaaaaaaaaaaaaaaaaaaaaaaaaaaaaaaaaaaaaaaaugcaucccccccccccccccccccccccccccccccaaaggcucuuuucagagccaccagaauu

SEQ ID NO: 11099 - RNA, 1927 nt, Artificial Sequence
  mRNA product Design i-3 comprising derived and/or modified sequence from LASV(LP;Clade I)__AAF86702__NP (opt6)
gggagaaagcuuaccaugucaaauagcaaagaaaucaaaucauuucuuuggacacaaucauuaagaagagaauuaucaggauauugcucaaacauaaaacuacaaguuguaaaagacgcucaagcacuacuucacggacuagacuucucugaaguaucaaauguacaaagauuaaugcgaaaacaaaaacgagaugaugcagaccuaaaaagacuaagagaccuaaaucaagcaguaaauaauuuaguagaacuaaaaucaacccaacagaaaaaugucuuaagagugggaaccuuaagcucagaugauuuaauaacacuagcagcagaccuagaaaaacuuaaaucaaaagucauaagaacagaacggccacuguccucaggaguauauauggguaauuuaucaucacaacaacuugaucagaggagagcccuacuaucaaugauuggaaugaguggagguccacaaggaaacagaacaggcggugacggcguaguuagaguaugggauguuaaaaacgcagaauuauuaaauaaucaauucggcaccaugccaagucuaacucuagcaugccuuacaaaacaaggacaaguagacuuaaacgaugcaguacaagcucuaacugaccugggcuuaauauauacagcaaaauauccuaauucaagcgacuuagacauguuaacacaaagccacccuauacuaggaaugguagacaccaagaaaaguaguuuaaacauaaguggauacaauuuuucacuuggggcggcagugaaagcaggggcauguaugcuugacggaggcaacaugcuagaaacgauaaaaguaucaccacaaacuauggauggcauucuaaaaagcauacuaaaaguaaaaagaagucuaggaauguuuauaucagacacgccaggagaaagaaauccauacgaaaauauacuauauaaaauaugcuuaucaggagaagguuggccauauaucgcuucaagaacaucaauaacagguagagcaugggaaaacacucuaguagaucuugaaagugacaauaaaccaccaaaacuuaauucagcaggaagcaauaaaucacuacaagcagcuggcuuaaaugccggacuaacauauucacaauuaaugacauuaaaagauugcauguuacaacuagauccuaguucaaaaaccuggaucgacaucgaaggaagaccagaagacccagucgaaaucgcacuauuucaaccaucaaguggaugcuacauucacuucuuuagagaaccaacagauuuaaaacaauucaaacaagacgcuaaauacagucacggaauagauguaacagaccuuuucagcacacaacccggauuaacaagugcaguuauagaagcacuacccagaaacaugguauuaacaugucaagguucagaugauaucaagaaacuauuagagucacaaggaagaagagauaucaaauuaauagauauaaguuuaaguaaagcagacucuagaaaauucgaaaacgcaguaugggaucaauacaaagaccuaugccacaugcauacaggaguuguaguagagaaaaagaaaagaggaggaaaagaagaaauaacaccacauugugcucuacuagacugcauaauguucgacgcagcaacuacuggaucacuaaacaucacaacacuaagagcaguccuacccagagauaugguauucagaacaagcacaccuaaaguaguacuauaaggacuaguuauaagacugacuagcccgaugggccucccaacgggcccuccuccccuccuugcaccgagauuaauaaaaaaaaaaaaaaaaaaaaaaaaaaaaaaaaaaaaaaaaaaaaaaaaaaaaaaaaaaaaaaaaugcaucccccccccccccccccccccccccccccccaaaggcucuuuucagagccaccagaauu

SEQ ID NO: 11100 - RNA, 1927 nt, Artificial Sequence
  mRNA product Design i-3 comprising derived and/or modified sequence from LASV(803213;Clade II)__AAF86704__NP (opt6)
gggagaaagcuuaccauguccgcaucaaaagaagucaaaaguuuccuauggacacaaagccucagaagagaacuaucaggauacugcucaaacauuaaacuacagguaguaaaagaugcucaagcccuucuacacggacuagauuucucagaaguaaauaacguacaaagacuaaugagaaaacaaaaacgagacgauggggauuuaaaaagauuaagagaucuaaaccaagccguaaacaaucuaguagaauuaaaaucaacacaacaaaaaucuauauuaagaguaggaacacuaacuucagaugaccuauuaacacucgcagcagaucucgaaaaacucaaaucaaaaguaauaagaacugaaaggccacuaucuuccggcguuuacaugggaaaucuaucaacucaacaauuagaacaaagacgagcauuacuaaauaugaucggaauggucggcggagcacaaggaacucaaccuggaagggacgguguuguccgaguaugggacguaaaaaacccagauuuacucaauaaccaauuuggaacaaugccaagccucacacuagcuugccuaacgaagcaaggucaaguggacuuaaaugaugcaguauuagcacuaacugacuuaggauuaauauacacugccaaauauccuaacucaucagacuuagacagauuaucacaaagccacccgauauuaaacaugguagauacaaaaaaaucaaguuuaaacauuagcggcuacaacuucucacuaggugccgccguaaaagcaggugcaugcaugcuugauggaggaaauaugcuagaaacaauaaaagucacaccccaaacaauggacggaauacuaaaaaguauauuaaaaguaaaaagaucgcuaggaauguucguaagcgauacaccuggagaaagaaauccauaugaaaauauuuuauauaaaauaugccucaguggagauggauggccauauauagcaucgagaacaucuauaguaggacgagcuugggaaaauacaacaguagaucuagaaucagacggaaaaccacaaaaaguaggaacagcaggcucaaauaagucccuacaaucagcaggauucccaacaggauuaacauauagccaacuaaugacccuaaaagauucaaugaugcaauuggauccaucugcaaaaacuuggauagacauagaaggaagaccagaagaucccguagaaauugcauuauaucaaccaaugucaggauguuauauacacuucuuuagagaaccaacugaccuaaaacaauuuaaacaagaugcuaaauacucacauggaauagacguugcagauuuauuuccagcacaacccggcuuaacaucugcaguaauagaggccuuaccacgaaauaugguauuaacaugucaaggaucggaugauauaaaaaaacuucuagacucucaaggaagaagagacauaaaacuaauagauauauccuuaaguaaagucgauagccgaaaauuugaaaaugcuguaugggaccaaugcaaagacuuaugucacaugcauacaggaguuguuguagaaaaaaaaaaaagagguggaaaagaagaaauaacaccacauugugcacuuauggauuguauaauguuugacgcugccguaagcggaggauuaaauauuccuguauuacgagcuguguuaccaagagacaugguuuucagaacaucaucaccaaaaguaguauuauaaggacuaguuauaagacugacuagcccgaugggccucccaacgggcccuccuccccuccuugcaccgagauuaauaaaaaaaaaaaaaaaaaaaaaaaaaaaaaaaaaaaaaaaaaaaaaaaaaaaaaaaaaaaaaaaaugcaucccccccccccccccccccccccccccccccaaaggcucuuuucagagccaccagaauu

SEQ ID NO: 11101 - RNA, 1930 nt, Artificial Sequence
  mRNA product Design i-3 comprising derived and/or modified sequence from LASV(GA391;Clade III)__CAA36646__NP (opt6)
gggagaaagcuuaccaugucagcauccaaagaaguaagaucauucuuauggacacaaucacuaagacgcgaacuaaguggauauugcaguaacauaaaacuacaaguuguaaaagaugcacaagcucuacuacacggccucgauuucucagaaguaucaaauguccaacguuuaaugagaaaacaaaaacgagaugacggagauuuaaaaagauuaagagaucuaaaccaagcaguuaauaaccuuguagaacucaaauccacacaacaaaaaucaguauuaagaguaggaacacuaucaucagaugacuuguuaauucuagcagcagaccuagaaaaacuaaaaucaaaaguaaccagaacagaaagaccacuaaguagcggaguauauaugggaaaccuaucaucucaacaacuagaucaaagacgagcauuacuaaacaugauugguaugacaggaguaagcggcggaggaaaaggugcuucagacggaauuguaagaguaugggacgucaaaaacgcagaauuauuaaauaaucaauuuggaacuaugcccucacuuacacuagcuuguuugacaaaacaaggacaaguagacuuaaaugaugcaguacaagcacuaacggaucuagguuuaauauauacagcgaaauauccaaacucuucagaccuagaccgauuaucucaaucacacccuauacuaaauaugauagauaccaagaaaagcucauuaaauaucagcggcuauaauuucucacuaggugcagcaguaaaagcaggggcuugcaugcuagauggaggcaauaugcucgaaacgauaaaaguaucaccacaaacaauggacggaauauuaaaaucuaucuuaaaaguaaagaaaucacuaggaauguucguaagcgauacaccuggagaaagaaauccauaugaaaacauucuauauaaaaucuguuuaucuggagacggauggcccuauauagcaucucgaacuucuauaguaggcagagccugggaaaauaccguuguagaucuagaacaagauaacaaaccacagaaaauaggaaacggaggaucaaauaaaucauuacaaucugcaggauuugccgcaggauuaacauauagucaacuaaugacauuaaaagauuucaaaugcuuuaacuuaauacccaacgcgaaaacauggauggacauagaaggaagaccagaagauccaguagaaauugcucuauaccaaccaucaucaggauguuauguacauuucuuuagagaaccgacagacuuaaaacaauuuaaacaagaugcaaaauauucacacggaaucgacguaaccgacuuauuugcagcacaaccuggacuaacuucagcaguaauagaagcccucccacgaaauaugguaauaacaugucaagguucagaagauauacgaaaauuauuagaaagccaaggaaggagagacaucaaacuaauagauauaacucuaaguaaagcagacucuagaaaauuugagaaugcaguaugggaucaauuuaaagaucuaugucacaugcacacaggcguaguuguugagaaaaagaaaagaggaggaaaagaagaaauaacuccacauugcgcgcuaauggacuguauaauguuugaugcagcaguaucaggaggacuagaugcaaaaguucucagaguaguauuaccacgagacaugguuuucagaaccaguacaccaaaaguaguauuauaaggacuaguuauaagacugacuagcccgaugggccucccaacgggcccuccuccccuccuugcaccgagauuaauaaaaaaaaaaaaaaaaaaaaaaaaaaaaaaaaaaaaaaaaaaaaaaaaaaaaaaaaaaaaaaaaugcaucccccccccccccccccccccccccccccccaaaggcucuuuucagagccaccagaauu

SEQ ID NO: 11102 - RNA, 1927 nt, Artificial Sequence
  mRNA product Design i-3 comprising derived and/or modified sequence from LASV(AV;Clade V)__CCA30315__NP (opt6)
gggagaaagcuuaccaugagcgcauccaaagaaguaaaaucuuucuuauggacacaaucacuaagacgcgaacuaagcggauauuguucaaauaucaaauuacaagucguaaaagacgcacaagcucuacuacacggacuagacuucucagaaguaucaaauguacaaagauuaaugagaaaacaacgaagagaugauucagacuuaaaacgauuacgcgacuuaaaccaagccguaaauaauuuaguagaauuaaagaguacucaacaaaaaucaguauuaagaguaggaacacugucaagcgaugaccuuuuaacacuagcugcagaccuugaaaaauuaaaaaguaaaguaacaagaacugaaaggccacuaucgaguggaguauauaugggaaauuuaucaucccaacaauuagaucaaagaagagcauuacugaaucuaauagguaugacaaacggaucacaaggaagccaagcaggaagagacggaguagugagaguaugggaugucaaaaaugcugaauuauuaaauaaccaauucggaacaaugccaucauuaacauuagcaugccuaacaaaacaaggucaagucgauuuaaacgauguaguacaagcacuaacagaccuuggauuaauauauaccgcaaaauacccaaauacaagcgacuuagaucgacucacucaaucacacccaauacuaaacaugauagauacaaaaaaauccagcuuaaacauaucaggauacaauuuuucguuaggcgcagcuguaaaagcaggggcauguaugcuagacggaggaaauaugcucgagacaauuaaaguaucaccacaaucuauggauggaauacuuaaaaguauacuaaaaguaaaaagggcauuaggaauguucguaagugauacaccaggagaaagaaauccauacgaaaauauauuauacaaaauaugucuaagcggugaugguuggccguauauagcuagcagaacaucuauagucggaagagcaugggaaaauacaguagucgauuuagaaacagauggaaaaccacaaaaaauaggcucuggaaacucaaacaaaucacuacaaucagccggcuuuucagcaggacuuacauacucccaauugaugacauuaaaagaugcaaugcuacaacuagacccaaaugcaaaaacauggauggauauagaaggucggcccgaagacccaguagaaguagcucuauaucaaccuauaaguggauguuacauacacuucuuucgagaaccaacugacuuaaaacaauucaaacaagacgcuaaguacagucauggaauugauauagcagaucucuucgcagcacaaccaggacuaacuucagcaguaauagaagcucuaccuagaaauaugguaauaacaugccaagguucagaagacauaaaaaaacuacuagaaucucaaggaagaaaagacauuaaacuaauugauauagcacuaaguaaaauagacucaagaaaauucgaaaaugcuguuugggaccaauauaaagaccuaugucacaugcauaccggagucguuguugaaaaaaaaaaaagaggaggaaaagaagaaauaacaccacauugugcucuaauggauugcauaauguuugaugcugcagucagcggaggauuaaacacacuuguccuaagagcaguauuaccacgugauaugguauuuagaacaucaaccccccgaguaguauuauaaggacuaguuauaagacugacuagcccgaugggccucccaacgggcccuccuccccuccuugcaccgagauuaauaaaaaaaaaaaaaaaaaaaaaaaaaaaaaaaaaaaaaaaaaaaaaaaaaaaaaaaaaaaaaaaaugcaucccccccccccccccccccccccccccccccaaaggcucuuuucagagccaccagaauu

SEQ ID NO: 11103 - RNA, 1927 nt, Artificial Sequence
  mRNA product Design i-3 comprising derived and/or modified sequence from LASV(Togo/2016/7082;Clade VI)__AMR44578__NP (opt6)
gggagaaagcuuaccaugucuaauucaaaagaaguaaaaucauuuuuauggacucaaagucuacgaagagaacuaagcggauacugcucaaauauaaaacuacaaguaguuaaagacgcucaagccuuauuacacggucucgauuucagugaaguaucaaauguacaaagauugaugagaaaacaaaaaagagacgacggagaucuaaaacggcuaagagaucuuaaucaagcuguaaacaauuugguagaacucaaaucaguacaacaaaaaucaauacuuagaguaggaacacuaacaucagacgaccuauuaacauuagcugccgaucuagaaaaacuaaaaagcaaaguaaccagaacagaacgaccacuaucgaguggaguauacaugggaaacuuaaguagccaacaacuagaucaaagaagagcacuacuaagcaugauuggaaugucaggaggaaaccaaaauagucaaccuaaaggggauggaguaguacgagucugggacguuaaaaacgccgaccucuuaaauaaccaauucggaacaaugccaagucuaacauuagcuuguuuaaccaaacaaggacaaguagaccuaaacgaugcaguacaagcccuaacagaccuaggacuaauauauacagcaaaauauccaaauagcucagauuuagacagauuaucacaaucacacccaaucuuaaacaugauugauacaaaaaaauccagccucaacauuucaggauacaauuucucacucggcgcagcaauuaaaaccggugcaugcaugcuugauggaggaaauaugcuugaaacaauaaaaguaacaccacagacaauggacggaauccuaaaaucaauacugaaagucaaaagaucacuuggcauguucaucagugauacacccggagaaagaaauccauaugaaaacauauuauacaaaauauguuuaaguggagauggauggccauauauagcuucacgaacugcaaucauagguagagccugggaaaauacaguaguagacuuagaaucagacagcaaaccccaaaaaauaggauccaacgguucaaauaaaucacuacaaucagcaggauucgcacccggcuuaacauauucacaacuaaugacucuaaaagacucaaugcuacaacuagauccaaacgccaaaacauggaucgacauugaaggacgacccgaagacccaguugaaguagcacuauuccaaccaauaaguggcugcuauauccacuuuuuuagagaacccacagaucuaaaacaauucaaacaagacgccaaauauucccacggcauagacguaacugacuuauucgcagcacaaccaggacuaacaucagcaguaaucgaagcccuuccaagaaauaugguacuaacaugccaaggcucagaugauauaaaaaaacuacucgacucacaaggccguagagauaucaaauuaauagacguaucacuaaacaaaauagacucaaggaaauuugaaaacgcaguaugggaucaauauaaagacuuaugccacaugcauacaggaguaguagucgaaaaaaaaaaaaaagguggaaaagaagaaauaaccccacacugugcuuuacuugauuguauaauguucgaugcugcaguaaguggaggacuaaacgcaaccguacucagagcaguacugccuagagauaugguauucagaacaucaaguccaaaaguaguacuuuaaggacuaguuauaagacugacuagcccgaugggccucccaacgggcccuccuccccuccuugcaccgagauuaauaaaaaaaaaaaaaaaaaaaaaaaaaaaaaaaaaaaaaaaaaaaaaaaaaaaaaaaaaaaaaaaaugcaucccccccccccccccccccccccccccccccaaaggcucuuuucagagccaccagaauu

SEQ ID NO: 11104 - RNA, 1927 nt, Artificial Sequence
  mRNA product Design i-3 comprising derived and/or modified sequence from LASV(KAK-428;Clade n.d. (VII))__ANH09741__NP (opt6)
gggagaaagcuuaccaugucaaauucaaaagaaguuaaaucauuuuuauggacacaaucuuuaaggagagaauuaagcggcuauuguacaaacauuaaauuacaaguaguaaaagaugcacaagcauuauuacauggauuagauuucucagaaguaucgaacguacaacgauuaaugaggaaacagaaaagggacgauaacgaccuaaaaagacuuagagaucuaaaccaagcuguaaacaacuuagucgaacuaaaaucaguacaacaaaaaucaguacuaaaaguaggaacauuaaauagugaugauuuacucacacuagcagcugaucuagaaaaauuaaaaucaaaaguagucagaacagaaagaccauuaaguucagguguauacauggguaaucuaagcagccaacaacuagaucaaagacgagcauuauuaaacaugauaggaauggcaggaggaagccaagguaaucaaccuagcagagacgguguuguuagagucugggacgucaaaaaugcagauuuacuaaauaaucaauuuggaacaaugccaucauuaacauuagcuugucuuaccaaacaaggacaaguagacuuaaaugacguaguuuuagcauuaacggaccuaggauuaauauacacagcaaaauauccaaauuccucagaccuagacagauuaagucaaaaucauccuguauuaaacaugauagacgucaauaaaucaucacuaaauauaucaggauacaauuucucucuaggagccgcaguaaaagccggagcaugcaugcuggacggaggaaauauguuagaaacaaucaaaaucucaccgcaaacaguagaugguauauuaaaaaguauauuaaaaguaaaaagagcccuaggaauguuuguaucagacacuccaggagaaagaaauccauaugaaaacaucuuauauaaaguauguuuaucgggaaauggauggccauacauagcaucaaggacaucaaucguagguagagcaugggaaaauaccguuguugaucuagaaucaaauaaaaaucaacccaaaguagguaacaacggauccaauaaaaugcuacaaucaucaggauuugcuacaggauuaacauauagucaacuaaugacauuaagagacagcaugcuacaauuagaucccacagcaaaaacuuggauugauauagaagguagaccagaagauccaguugaacuugcacucuuccaaccaucaagcggauguuauauacacuuuuucagagagccaacagaucuaaaacaauucaaacaagacgccaaauacagccauggaauagauguaaacgacuuauucagugcacaaccugguuuaacaucagccguauuagaagcauuaccaagaaacaugguacuaacaugucaaggaagcgaugacauaagaaaacuauuagacagucaagauagaaaagacauaaaacuaauagauaucucacuaagcaaagcagacgccagaaaauucgaaaaugauguaugggaccaauucaaagacuugugccauaugcauacaggaauaguaguagaaaagaaaaagaaaggaggaaaacaagaaaugacaccacacugugcucuacuugacuguauaauguucgaugcagcuguaagcggaggauuaaauguaccaacucuacgagccguacuaccgacugacaugguauuccgaacaauaacgacaaaaguaguauuauaaggacuaguuauaagacugacuagcccgaugggccucccaacgggcccuccuccccuccuugcaccgagauuaauaaaaaaaaaaaaaaaaaaaaaaaaaaaaaaaaaaaaaaaaaaaaaaaaaaaaaaaaaaaaaaaaugcaucccccccccccccccccccccccccccccccaaaggcucuuuucagagccaccagaauu

SEQ ID NO: 11105 - RNA, 1927 nt, Artificial Sequence
  mRNA product Design i-3 comprising derived and/or modified sequence from LASV(Pinneo-NIG-1969;Clade I)__AIT17837__NP (opt6)
gggagaaagcuuaccauguccaacucaaaagaaauuaaaaguuuuuuauggacacaaucacuaaggagagaacuuucaggcuauugcagcaacauaaaacuucaaguaguaaaagacgcccaagcauuacuccacggacuagacuuuagugaaguaucaaauguacaacgauuaaugagaaaacaaaaacgagacgaugccgauuuaaaaagauuaagagaucuaaaucaggcaguaaauaaccucgucgaacuaaaaucaacacaacagaagaacguauuaagaguaggaacacuaucaagcgaugaucucauaacauuagcugcagaucuagaaaaacucaaaucaaaagucauaagaacagaaagaccacuauccaguggaguauauaugggaaacuuaagcucacaacaacuagaucaaagacgagcucuauuaucaaugaucggaaugucaggaggcccacaaggaaauagaacagggggagacggaguaguaaggguaugggacguaaaaaacgcugaacuacuaaauaaucaauucggcacaaugccaaguuuaacucuagcaugccuaacaaaacaagggcaaguagacuuaaacgacgcaguacaagcuuuaacagaucuagguuuaauauauacagcaaaauaucccaacucaagcgacuuagacauguuaacacaaagucacccaauacugggaaugguagacacaaaaaaaaguucacuaaacauaaguggauauaauuuuucauuaggagcagcaguaaaagcaggugcauguaugcuagauggaggaaacauguuagaaacuauaaaaguauccccacaaacaauggauggaauauuaaaaucuauccuaaaaguaaaaagaagucuaggaauguucauaucagacacaccaggcgaaagaaaucccuacgaaaauauacuauacaaaauaugccucucaggagaaggauggccauauauagcaaguagaacuucaauaacaggaagagcaugggaaaauacauuagucgauuuagaaagcgauaacaaaccaccaaaauuaaauucggcagggucuaauaaaagucuacaagcagcaggauugaaugcagguuuaacguauagucaauuaaugacauuaaaagacugcaugcuccaauuagauccaucaucaaaaacauggauagauauagaaggcagaccagaagacccaguagaaaucgcccuguuucaacccaguucuggaugcuauauacacuuuuucagagaaccaacagaccuaaaacaauucaaacaagacgccaaauauucacacggcauagauguaacagacuuauuuucuacacaaccaggccuaacuagcgcaguuauugaagcacucccaagaaacaugguucuaacaugccaagguagugaugacauuaaaaaacuuuuagaaucacaaggaagaagagacauaaaacuaauagauaucagcuuaucaaaagcagacucacgaaaauucgaaaacgcuguaugggaccaauauaaagacuuaugccauaugcacacaggaguaguaguagaaaaaaaaaaaagaggaggaaaagaagaaauaacaccccauugugcauuacuagacugcauaauguucgaugcagcaacaacaggaucacuaaacauuacaacacuacgagcaguacuaccaagagauaugguauuccgaacaucaacuccaaaaguaguacuaugaggacuaguuauaagacugacuagcccgaugggccucccaacgggcccuccuccccuccuugcaccgagauuaauaaaaaaaaaaaaaaaaaaaaaaaaaaaaaaaaaaaaaaaaaaaaaaaaaaaaaaaaaaaaaaaaugcaucccccccccccccccccccccccccccccccaaaggcucuuuucagagccaccagaauu

SEQ ID NO: 11106 - RNA, 1927 nt, Artificial Sequence
  mRNA product Design i-3 comprising derived and/or modified sequence from LASV(ISTH0009-NIG-2011;Clade II)__AIT17405__NP (opt6)
gggagaaagcuuaccaugucaguaucgaaagaaguuaaaucauucuuauggacucaaucacucagaagagaacuaucagguuauuguucaaacaucaaauuacaaguagucaaagacgcacaagcacuguuacacgggcucgacuuuucagaaguaucaaacguacaaagacuaaugcgcaaacagaaaagagacgauucagauuuaaaaagauuaagagaccuaaaucaagcaguuaauaacuuggucgaacuuaaaagcacucaacaaaaaucaauacuucgaguaggcacauuaacaucagaugaccuuuuaacacuagcagcagaucuagaaaaauuaaaaucaaaaguaauuaggacagaaagaccacuaucuucuggaguauacaugggaaacuuaucaacccaacaauuagaacaaagacgagcauuauuaaacaugauaggaaugguagguggagcacaaggaacacaacccggaagagacgguguagucagaguaugggaugucaaaaaccccgaccuacugaacaaucaauuuggaacaaugccuaguuuaaccuuagcaugccuaacaaaacaaggacaaguagaucuuaacgacgcaguauuagcacuaacagauuuaggauuaauauauacagcuaaauauccaaauaguagcgaccuagaccgauuaagccaaagccacccaauauuaaacaugguagauauaaagaaaucaucacuaaacauuucuggauacaauuucucuuuaggagccgcaguaaaagcaggagcauguauguuagacggaggaaacauguuagaaacuauaaaaguaacaccacaaaccauggacggaauauuaaaaucuauauuaaaaguaaaacgcucacuaggaauguuuguaagcgauacaccaggagaaagaaauccauaugaaaacauucuauacaaaauaugucuaaguggugacggauggccuuacauagcaaguagaacaucaauaguuggacgagcaugggaaaauacaacaguagauuuagaaucagauggaaaaccacaaaaaguaggauccgccggcucaaauaaaucuuuacaaagcgcaggcuuuccuacaggccuaacguauucucaacuaaugacauuaaaagacucaaugaugcaacuagacccaagugcuaaaacauggaucgacauugaagguagaccagaagacccaguagaaauagcauuauaccaaccuaugucuggauguuauauccacuucuuuagagaaccaacagauuuaaaacaauuuaaacaagacgcaaaauacucacacggaauagauguagcagacuuauuuccagcucaaccaggauuaacaagcgccguuauugaagcacuaccaagaaacaugguauuaacuugccaagguagcgacgacauaaaaagacuucuagacucacaaggacguagagacauuaaacuaaucgauauagcauuaaguaaagcagacagucgaagauuugaaaaugcuguaugggaccaauguaaggaucuaugucauaugcauacgggaguuguaguagaaaagaagaaaaggggaggaaaagaagaaauaacaccacacugugcauuaauggauuguauaauguacgacgcagccguaucaggaggccuaaacauaccaguauuaagagcaguacugccgagggauaugguauuuagaacaagcucacccaaagucguauuauaaggacuaguuauaagacugacuagcccgaugggccucccaacgggcccuccuccccuccuugcaccgagauuaauaaaaaaaaaaaaaaaaaaaaaaaaaaaaaaaaaaaaaaaaaaaaaaaaaaaaaaaaaaaaaaaaugcaucccccccccccccccccccccccccccccccaaaggcucuuuucagagccaccagaauu

SEQ ID NO: 11107 - RNA, 1927 nt, Artificial Sequence
  mRNA product Design i-3 comprising derived and/or modified sequence from LASV(ISTH2010-NIG-2012;Clade II)__AIT17483__NP (opt6)
gggagaaagcuuaccaugucagcuaguaaagaaguaaagagcuucuuauggacucaaagucuucgacgagaacuaucagguuauugcagcaacauaaaacuucaaguaguaaaagacgcacaagcacuauuacacggauuagacuucucagaaguaucaaauguacaaagacuaaugagaaaacagaaaagagacgacagcgaucuaaaaagauuaagagauuuaaaucaagcuguuaauaauuuaguugaacuaaaaagcacacaacaaaaaucaauauuaagaguaggaacacuaacaucagaugacuuacuaacauuagcagccgacuuagaaaaacuaaaaucaaaaguaauaagaacagaaagaccucuaucaagcggcguuuacaugggaaacuuaucaacccaacaacuagaacaaagacgagcauuauuaaaccuaauaggaaugguagguggugcacaaggaacacaaccaggaagagacggcguaguuagaguaugggacgucaaaaacccagaucuacuuaacaaccaauucggaacaaugccauccuuaacucuagcaugcuuaacaaaacaaggacaaguagaccuaaacgaugcaguauuagcucuuacagacuuaggacuaauauacacugcuaaauauccaaauucaucagauuuggacagacuaucacaaucacauccaauacuaaacauggucgauacuaagaaaaguucacuaaauauuucuggauucaauuuuucauuaggagcagccguaaaagccggagcauguaugcuagaugguggaaauaugcuagaaacaauaaaaguaacaccacaaaccauggauggaauauuaaaauccauacuaaaaguaaagaaauccuuaggaauguuuguaucagacacuccaggagaaagaaaucccuacgaaaacauucuuuacaaaauaugucuuucaggagacggcuggcccuauauagcuucaagaacaucaauaguagguagagcuugggaaaacacaacuguagaccuugaaucugacgguaaaccacauaaaguagguacagcaggaucaaacaaaaguuuacaaagugcaggauuuccaacuggacucacauacagucaacuaaugacccuaaaagacucaaugaugcaauuagauccaucagcaaaaacauggauagauaucgaaggucgaccugaagacccaguagaaaucgcguuauaucaaccaaugaguggauguuacauacacuucuucagggaaccaacggauuuaaaacaauuuaaacaagacgcuaaauacagccacggaauugacguugcagaccuuuuuccagcacaaccaggccuaacaucagcaguuauagaagcacuaccaagaaauaugguauuaacuugucaaggaucggaugacaucaaaagacuacuagacucucaggguagaagggauauaaaauuaauagauauagcacuaucuaaagcagacucaagaagauuugaaaaugcuguuugggaccaaugcaaagaccuaugccauaugcauacaggagucguaguagagaaaaagaaaagaggaggaaaagaagaaauaacaccacauugugcauuaauggauuguaucauguaugaugccgcgguaagcggaggacuaaacauaccaguauuaagagcuguauuaccuagagauaugguauucagaacaucaucgccaaaaguaguacuauaaggacuaguuauaagacugacuagcccgaugggccucccaacgggcccuccuccccuccuugcaccgagauuaauaaaaaaaaaaaaaaaaaaaaaaaaaaaaaaaaaaaaaaaaaaaaaaaaaaaaaaaaaaaaaaaaugcaucccccccccccccccccccccccccccccccaaaggcucuuuucagagccaccagaauu

SEQ ID NO: 11108 - RNA, 1927 nt, Artificial Sequence
  mRNA product Design i-3 comprising derived and/or modified sequence from LASV(Lassa virus/H.sapiens-wt/NGA/2015/ISTH_0543;Clade II)__AVO03640__NP (opt6)
gggagaaagcuuaccaugagugcaucaaaagaaguaaaaagcuuucuauggacacaaucauuaagaagagaauuaaguggauauugcucaaauauaaaauuacaagucguaaaagaugcacaagcacuacuacacggauuagauuucucagaaguaagcaauguacagcgacucaugagaaaacaaaaaagagacgacucagacuuaaaaagacuaagagaucucaaccaagccguaaauaauuuagucgaacuaaaaagcacucaacaaaaaucaauauuaagaguaggcacacuaacaagcgacgacuuacuaacacucgcagcagaucuugaaaaacuaaaaagcaaaguaauaagaacagaaagaccauuauccucagguguauacauggguaaccuuucaacacaacaacuagaacaaagaagagcacuacucaacaugauaggaaugguaggcggagcacaaggaacacaaccaggaagagacggaguaguaagaguaugggauguaaagaacccagauuuacuuaauaaccaauuuggaacaaugccaucauuaacauuagcaugcuuaacuaaacaaggccaaguagacuuaaaugaugcaguacuggcauuaacagacuuagguuuaaucuauacagcaaaauauccaaauucaucagauuuagacagacucucacaaucacacccaauuuuaaacauggucgacacaaaaaaaucaucucuaaauauuucaggauauaacuucucauuaggagcagcgguaaaagcaggagcauguaugcuagacgguggaaauauguuagaaacaauaaaaguaacaccacaaacaauggauggaauacugaaaucaauacuuaaaguaaaaaagagccuaggcauguucguaucagauacaccaggagaaaggaacccauaugaaaacauacuuuacaaaauaugcuuaucuggugacggauggccauauauagcuucaagaacaucuauaguagggagagcaugggaaaauaccacaguagaucucgaaucugacggaaaaccccaaaaaguagguucagcagguucaaauaaaaguuuacaaucagcuggauuuccaacaggacuaacuuauucacaacuaaugacauuaaaagauucaaugaugcaauuagauccaucagcaaaaacauggauagauaucgagggaagaccugaggauccuguagaaauagcauuauaucaacccaugucagguugcuauauacauuuuuucagagaaccaacagaucuaaaacaguucaaacaagacgcaaaauacagccacggaauagacguagcagaccuauuuccagcacaaccaggacuaacaagcgcuguaauagaggcacuaccuagaaacauggucuuaacaugccaaggaagugacgacauuaaaagacuacuagauagccaagguagaaaagacauuaaacuuauagacaucgcauuaucaaaagcagacucgagaagauuugagaacgcaguaugggaccaaugcaaagauuuaugccauaugcauaccgguguaguaguugagaaaaaaaaaagaggagguaaagaagaaauaacgccacacugugcacuaauggauugcauaauguaugacgcagcaguaucaggaggauuaaacauacccguauuaagagccguacuaccacgcgauaugguuuucagaacaagcucgcccaaaguaguauuauaaggacuaguuauaagacugacuagcccgaugggccucccaacgggcccuccuccccuccuugcaccgagauuaauaaaaaaaaaaaaaaaaaaaaaaaaaaaaaaaaaaaaaaaaaaaaaaaaaaaaaaaaaaaaaaaaugcaucccccccccccccccccccccccccccccccaaaggcucuuuucagagccaccagaauu

SEQ ID NO: 11109 - RNA, 1927 nt, Artificial Sequence
  mRNA product Design i-3 comprising derived and/or modified sequence from LASV(Lassa virus/H.sapiens-wt/NGA/2016/ISTH_0009;Clade II)__AVO03572__NP (opt6)
gggagaaagcuuaccaugucugcaagcaaagaaguuaaaucuuuuuuauggacacaaucauuaagaagagaauuaagcggauacuguagcaacauaaaauuacaaguaguaaaagaugcacaagcacuguuacauggauuagauuucagcgaaguuucaaacguacaaagacuaaugaggaaacaaaaaagagaugauagcgaucuaaaacgguuaagagaucuaaaucaagcaguaaauaauuuaguagaauuaaaaagcacacaacaaaaaaguauauuaagaguaggaacccuaacaucagaugauuuauuaacguuagcagcagaccuugaaaaacuuaaaucuaaaguaauaagaacagaaagaccauuaagcaguggagucuauaugggaaaucuaagcacacaacaauuagaacaacgucgagcacuauuaaauaugaucggaaugguaggaggagcacaaggcacacaaccaggaagagacgggguaguaagagucugggacguaaaaaauccagauuugcuaaacaaccaauucggaacaaugccgagucucacauuggcuugcuuaacaaaacaaggucaaguagaccuaaacgacgcaguucuagcacuaacagaccuaggacuuauuuauacagcuaaauauccaaauucuucagacuuagauagacuaucccaaucccaccccauacugaauaugguagauacaaaaaaaucaucauugaauauuucaggcuauaauuucagucuaggagcagcaguaaaagcuggagccuguaugcuagacggugguaauaugcuagaaacaauaaaaguaacaccccaaacaauggacggaauacuaaaaucaaucuuaaaaguuaaaaaaagccuuggaauguucguaagugauaccccaggcgaaagaaacccuuacgaaaauauacuauauaaaauaugucuaucaggagacggauggccuuauauagccuccagaaccucuauaguuggaagggcaugggaaaauacaacaguagaucucgaaucagacggaaaaccacaaaaaguagggagcgccgguaguaacaagagucuacaaagcgcuggauucccaacaggcuuaacauauagucaauuaaugacuuuaaaagauaguaugaugcaacuagauccauccgccaaaaccuggauagauauagaaggaagaccagaagacccaguagaaauagcacuauaucaaccuaugucaggaugcuacauacacuuuuucagagaaccaacagauuuaaaacaauucaaacaggacgcaaaauauucacacggcauugauguagcagauuuauuuccagcacaaccaggauuaacaucagcaguaauagaagcucuaccaagaaacaugguacuaacaugucaaggaucagaugacauaaaaagacuauuagacagccaaggacgaagagauauaaaauuaauagauauagcuuuaagcaaagcugacucaagaagauucgaaaacgcgguaugggaccaaugcaaagaccugugccauaugcacaccggaguaguaguagaaaaaaaaaaaagaggaggaaaagaagaaauaacaccacauugugcuuuaauggauuguauaauguaugacgcagcaguaucaggaggacuaaauauuccuguacuacgagcuguacuaccacgagacaugguauuuagaacaagcucuccgaaaguaguacuauaaggacuaguuauaagacugacuagcccgaugggccucccaacgggcccuccuccccuccuugcaccgagauuaauaaaaaaaaaaaaaaaaaaaaaaaaaaaaaaaaaaaaaaaaaaaaaaaaaaaaaaaaaaaaaaaaugcaucccccccccccccccccccccccccccccccaaaggcucuuuucagagccaccagaauu

SEQ ID NO: 11110 - RNA, 1927 nt, Artificial Sequence
  mRNA product Design i-3 comprising derived and/or modified sequence from LASV(Lassa virus/H.sapiens-wt/NGA/2016/ISTH_0017;Clade II)__AVO03568__NP (opt6)
gggagaaagcuuaccaugucagccaguaaagaaguaaaaagcuuucuauggacacaaaguuuacgaagagaauuaucuggauacugcaguucaauuaaacuucaaguaguaaaagaugcucaagcauuacuacacggacuggauuucucagaaguaagcaauguacaaagacuaaugcgcaaacaaaaacgagacgauucagaucuaaaaagauuaagagaccuaaaccaagcaguaaauaacuuaguagagcuaaaaucaacacaacaaaaaucaauauugagaguaggaacauuaacuucagaugaccuacuuacuuuagcagcugaucuagaaaaauuaaaaucaaaaguaauaagaacagaaagaccucuuucaucaggaguauauaugggaaacuuaucuacacaacaacuagaacaaagaagagcauuauuaaacaugauagguauggccggcggagcacaagguacucaaccaggaagagauggagucgugcgaguaugggauguaaagaauccugauuuacuuaauaaucaauucggaaccaugcccagucucacacuagcgugcuuaacaaaacaaggucaaguagaccuaaaugaugcaguacuugcacuaaccgaucuaggauuaauauauacagcaaaauacccaaauucaucagacuuagacagauuaagccaaucacaccccauuuuaaauaugguugacacaaaaaaaucaagcuuaaacaucucaggauacaacuuuagccuaggagcagcuguuaaagcaggagcaugcaugcuagacggaggaaauauguuagaaacaauaaaaguaaccccccaaacaauggacgguauauuaaaaaguauccuaaaaguaaaaagaagcuuaggaauguucguaucagaugcaccaggagaaagaaacccauacgaaaauauacuuuauaaaauaugccucaguggcgauggauggccauauauagcaagcagaacuucgauaguaggaagagcaugggaaaauaccacaguagaucuagaaagcgaugggaaaccacaaaaaguaggagcaacaggaucaaacaaaaguuuacaaucagcagguuuuccaaccggacuaaccuauucacaauuaaugacauuaaaagauagcaugaugcaacuagaccccucagcaaaaacauggauagauauagaaggcagacccgaagacccaguagaaguagcucuauaucaaccaguaagcggaugcuauauacacuuuuucagagaaccgacagauuuaaaacaauucaaacaagacgcaaaauauucacaugguauugauguagcagaucuuuucccagcacaaccaggcuuaacaucagcaguaauagaagcacuaccaagaaacaugguauuaacaugccagggaucagacgacauuaaaaaacuauuagauucucaaggccgaaaagacauaaaacuaaucgauauagcucuaaguaaagccgauuccagaagauucgaaaaugcagucugggaccaaugcaaagauuuaugccacaugcauacaggaguaguugucgaaaaaaaaaaaagaggaggaaaagaagagauaacaccccacugugccuuaauggacuguauaauguacgacgcagcagucucaggaggauuaaauauaccaguacuaagagccguuuuaccuagagauaugguauucagaacaagcagcccuaaaguagucuuauaaggacuaguuauaagacugacuagcccgaugggccucccaacgggcccuccuccccuccuugcaccgagauuaauaaaaaaaaaaaaaaaaaaaaaaaaaaaaaaaaaaaaaaaaaaaaaaaaaaaaaaaaaaaaaaaaugcaucccccccccccccccccccccccccccccccaaaggcucuuuucagagccaccagaauu

SEQ ID NO: 11111 - RNA, 1927 nt, Artificial Sequence
  mRNA product Design i-3 comprising derived and/or modified sequence from LASV(Lassa virus/H.sapiens-wt/NGA/2018/ISTH_0959;Clade II)__AVV65100__NP (opt6)
gggagaaagcuuaccaugagcgcaagcaaagaaguaaaauccuuucuuuggacacaguccuuaagaagagaacuaucagguuacuguucgaacauaaaauuacaaguuguaaaagacgcacaagcucuacuacauggucucgauuuuuccgaagucagcaauguacaaagauuaaugagaaaacaaaaaagggaugacucagacuugaaaagacuaagagauuuaaaccaagcaguaaauaacuuaguagaauuaaaaucaacacaacaaaaaucaauauuaagaguagguacucuaaccucagaugauuuauuaacacuagcggcagaccuagaaaaacuaaaaucaaaaguuauucgaacagaacgaccucuaucaucaggcguauacauggguaacuuaaguacucaacaacuagaacaaagaagagcauuacuaaauuuaauagguaugguaggaggugcacagggaacacaaccaggcagggacggaguuguaagaguaugggauguaaagaauccugauuuacuaaauaaucaauucggaacuaugccaucacuaacacuagccugccuaacaaaacaaggucaaguagacuuaaaugacgucguacuggcccuaacagaccuaggauuaaucuauacagcuaaauauccaaauucaucagacuuagacagacuaucacaaucucacccaauauuaaacaugguagauacaaaaaaauccagccuuaacauaucagguuucaauuuuaguuuaggagcagcuguaaaagcaggcgcaugcaugcuagacggagguaauauguuggaaacaauaaaaguaacuccccaaaccauggacggaauacuaaaaucaauauuaaaagugaaaaaaagccuagggauguuugucagcgauacuccaggagaaagaaauccauaugaaaauauucuauacaaaauauguuuaucaggcgacggcuggccauauauagcaucaagaacaucaauaguaggaagagcaugggaaaauacaaccguagaucuagaaagcgauggaaaaccacauaaaguagguacagccggaucaaacaaaucucuacaaucagcuggauuuccaacgggacuuacauacagccaacuaaugacacuuaaagacaguaugaugcaacuggaucccucugccaaaacauggauugacaucgaaggacguccagaagacccagucgaaaucgcacuauaucaaccgaugucuggauguuacauucauuuuuuuagggaaccaacggauuuaaaacaauuuaaacaagacgccaaauauucacauggaauagacgucgccgaccuauucccugcucaacccggauuaacaucggcuguaauugaagcguuaccacguaacaugguauuaacaugccaaggaagcgaugacauuaaaagguuauuagauagucaaggaagaaaagauauaaaauuaauagauauagcacuaucaaaaacggacucacgaagauucgaaaacgcuguaugggaccagugcaaagaucuaugucauaugcauacaggaguaguuguagaaaaaaaaaaaagaggaggaaaagaagaaauaacaccacacugugcuuuaauggauugcauuauguaugaugcagcaguauccgguggccuaaacauaccaguauuacgagcaguucuaccaagagauaugguauucagaacuucaucaccaaaaguaguacuauaaggacuaguuauaagacugacuagcccgaugggccucccaacgggcccuccuccccuccuugcaccgagauuaauaaaaaaaaaaaaaaaaaaaaaaaaaaaaaaaaaaaaaaaaaaaaaaaaaaaaaaaaaaaaaaaaugcaucccccccccccccccccccccccccccccccaaaggcucuuuucagagccaccagaauu

SEQ ID NO: 11112 - RNA, 1927 nt, Artificial Sequence
  mRNA product Design i-3 comprising derived and/or modified sequence from LASV(LASV003-NIG-2008;Clade II)__AIT17581__NP (opt6)
gggagaaagcuuaccaugucagcaucaaaagaaguaaaaucuuuccucuggacacaaucacuaagaagagaauuaucaggcuauuguucuagcauaaaacuacaaguaguuaaagacgcacaagcacuauuacauggacuagauuucagugaaguaagcaauguccaaagauuaaugagaaaacaaaaaagagacgauucagacuuaaaaagauuacgagaucuaaaucaagcagucaauaaucuaguugagcuaaaaagcacacagcaaaaaucaguacuaagaguaggaacacugacgucagacgaccuacuaacacuagcagcagaucuugaaaaacuaaaaucaaaaguaauaagaacagaaagaccauuaaguucaggaguauauauggguaaccuaagcgcacaacaacuagaacaaagaagaacucuacucaacaugaucggaauggucgguggcgcacaaggaacacaaccaggaagagaugguguaguucgaguaugggacgucaaaaauccagacuuauuaaacaaccaauuuggaacaaugccuucacuaaccuuagcaugucuuacaaaacaaggacaaguagaucuaaacgauguuguacuagcacuaacagacuuagggcuaauauauacagcaaaauauccaaacucaucugauuuagaccgucucucucaaucacacccaauauuaaguaugguagacaccaaaaaauccucacuaaauauaucaggauauaacuucagucuaggagcagcaguaaaagccggagcauguaugcuagacggaggaaacauguuagaaacaauaaaaguaacaccucaaacaauggauggaauccuaaaaucaauauuaaaaguaaaaaaaaguuuaggaauguucguaucagauacacccggcgaacgaaacccauaugaaaauauacuauacaaaaucugucucaguggagaugguuggccauacauagcaucacgaacuucuauaguaggacgugcaugggaaaauaccacagucgaccuagaaagcgauggaaaaccacaaaaaguagguacugcuggaucaaauaaaaguuuacaaucagcaggcuuuccuacuggacuaacuuauagccaauuaaugacccuaaaagauucuaugaugcaauuagauccgagcgcaaaaaccuggauagauauagagggaagaccagaagacccaguagaaauagcucuauaccaaccaaugagcggauguuacauccauuuuuuuagagaaccaacagaccuaaaacaauuuaaacaagaugcaaaauauagccauggaauagauguaaccgaucuuuuuccagcccaaccaggcuuaacaucugcuguuaucgaagcuuuaccaagaaacaugguauuaaccugccaaggaucagacgacauaaaaagauuacuagauucacaaggacgcagagauauaaaacugauagacauagcacuuagcaaagccgauucucguagauucgaaaaugcaguaugggaccaauguaaagacuuaugccacaugcacacaggcguuguaguagaaaaaaaaaagcgaggagguaaagaagaaauaacaccccauugugcauuaauggacugcauuauguaugacgcggccguuagcggagguuuaaauauaccaguauuacgugcaguacuaccaagagacaugguuuucagaacaucaucaccaaaaguaguacuauaaggacuaguuauaagacugacuagcccgaugggccucccaacgggcccuccuccccuccuugcaccgagauuaauaaaaaaaaaaaaaaaaaaaaaaaaaaaaaaaaaaaaaaaaaaaaaaaaaaaaaaaaaaaaaaaaugcaucccccccccccccccccccccccccccccccaaaggcucuuuucagagccaccagaauu

SEQ ID NO: 11113 - RNA, 1927 nt, Artificial Sequence
  mRNA product Design i-3 comprising derived and/or modified sequence from LASV(LASV035-NIG-2009;Clade II)__AIT17589__NP (opt6)
gggagaaagcuuaccaugagugccaguaaagaaguaaaaucauucuuguggacacaaaguuuaagaagagaacuuucaggauacugcucaagcauaaaacuacaaguaguaaaagaugcacaagcacuacuacauggacuagacuucagugaaguaucaaacguacaaagauuaaugagaaaacagaaaagagaugacucagaucuaaaaagauuacgagauuugaaucaagcaguuaauaacuuaguugaauuaaaaaguacacaacaaaaaucgauacuacgaguaggaacucuaacaucagaugaccuuuuaacacuagcagcugauuuagaaaaauuaaaaucaaaaguaauaagaacagaaagaccauuaagcucaggaguauauaugggaaauuugagugcacaacaacuagaacaaagacgagcucuccuaaauaugauaggaaugguuggaggagcacaagguacacaaccaggaagagacggaguaguuaggguaugggaugucaaaaacccugaucuauuaaacaaccaauuuggcacaaugccaagucuaacucuagcaugccugacuaaacagggacaaguagacuuaaacgaugcaguauuagcucuaacagacuuagguuuaauauauacagcaaaauauccaaauaguucugauuuagacagacuaucccaaucacacccaauucucaacaugguagauacaaagaaauccagucugaauauuucaggauacaauuucaguuuaggagcagccguaaaagcaggagccuguauguuagacggugguaauaugcuagaaacaauaaaaguaacaccccaaacaauggacggaauacuuaaaucaauauugaaaguaaaaagaucauuaggaauguuuguaagcgauaccccaggagaaagaaauccguaugaaaauauacuuuauaaaauaugucuaucaggagacggauggcccuauauagcaucaagaaccucaauagucggcagagcaugggaaaacacuacaguugauuuagaaucagauggaaaaccacaaaaaguaggaacaacaggaucaaacaaaucacuacaaucagcaggauucccuacaggucugacauacucccaacuuaugacauuaaaagacucaaugaugcaacuggauccaucagcuaaaacauggauagauauagaaggcagaccagaggacccgguagaaauagcucuauaucaaccaaugucagguuguuacauucacuucuucagagaaccaacagaucuaaaacaauucaaacaagacgccaaauauucacauggaauagauguagcagauuuauuuccagcacaacccggauuaacaagcgcugucauagaagcucucccaagaaacaugguauuaacaugucaaggcagcgaugauauuaagaaauuacuagacucacaaggacgaagagacauaaaacuaauagauauagcauugaguaaagccgauucaagaaaauuugaaaaugcaguaugggaucaauguaaagaucuaugucauaugcacacuggaguugugguugaaaagaagaaaagagguggaaaagaagaaauaacaccacauugugcauuaauggauugcauuauguaugacgcugcaguaucaggaggacuaaacauaccaguccuuagagcaguacucccaagagauaugguauuuagaacuucaucaccaaaaguaguauuauaaggacuaguuauaagacugacuagcccgaugggccucccaacgggcccuccuccccuccuugcaccgagauuaauaaaaaaaaaaaaaaaaaaaaaaaaaaaaaaaaaaaaaaaaaaaaaaaaaaaaaaaaaaaaaaaaugcaucccccccccccccccccccccccccccccccaaaggcucuuuucagagccaccagaauu

SEQ ID NO: 11114 - RNA, 1927 nt, Artificial Sequence
  mRNA product Design i-3 comprising derived and/or modified sequence from LASV(LASV1000-NIG-2009;Clade II)__AIT17783__NP (opt6)
gggagaaagcuuaccaugagcgcaucaaaagaaguaaaauccuuccuauggacccaaagccuaagaagagaauuaucaggguacuguucaaauaucaaauuacaaguaguaaaagacgcacaagcauuauuacauggccuagauuucucagaaguauccaauguucaaagacuaaugcguaaacaaaaaagagacgacucagaccuaaaaagauuaagagaucuuaaccaagcaguaaauaauuuaguggaauuaaaaagcacucaacaaaaaaguauccuaagaguaggaacucuaacuagcgacgaucuucuaacauuagcagccgaucucgaaaaacuaaaaucgaaaguaauaagaacugaaagaccauuaaguagcgguguauauaugggcaaccuaagcacacaacaacuagaacaaagaagagcauuacuaaacaugauaggaaugguaggaggagcacaaggaacacaaccuggaagagacggaguaguaagagucugggacguaaaaaacccagacuuacuaaauaaucaauucggaacgaugccaagucuuacacuagcaugucuuacaaaacaaggucaaguugaccuaaacgauguaguucuagcacuaacagaucugggauuaauuuauacagccaaauaccccaacagcagugaccuugaccggcuaagucaaucacacccaauauuaaacauggucgauacaaaaaaaucaucucuaaacauaaguggauacaacuucaguuuaggagcugccguaaaagcaggugcauguaugcuagacggaggaaacauguuagaaacaauaaaagucacaccacaaacaauggaugggauauuaaaaagcaucuuaaaaguaaaaaaaucccuuggaauguucguaucagacacuccuggagaaagaaaucccuacgaaaauauacuauacaaaauaugucuaagcggcgauggauggccauauaucgcuucaagaacuucuauaguaggaagagcuugggaaaauacaacuguagaucucgaaagugacggaaaaccacaaaaaguuggaacagcaggaagcaauaaaucauuacaauccgcaggauuuccaacaggacugacauauagucaacuaaugacucuaaaagauaguaugaugcaauuagauccaucagcaaaaacauggauagacaucgaagguagaccagaagacccaguagaaauagcucuauaucaaccaguaaguggaugcuacauacacuucuucagggaaccaacagauuuaaaacaauuuaaacaagacgcuaaauauagucacggaauagacguagcagaccuauuuccagcacaaccaggccuaacaucugccguuauagaagcacuaccuagaaauaugguacucacuugccaaggaucagaugauaucaaaagacuauuagacucacaaggacgaagagacauaaaacuaauugacauagcauuaagcaaagcagauucaagaagauuugaaaacgcuguaugggaucaaugcaaagaccucugucacaugcauacaggaguagucguagaaaaaaaaaaaagaggagguaaagaggaaauaacaccgcacugugcauuaauggauugcauaauguaugacgcggcaguaucagguggauuaaauauaccuguauuaagagcagucuuaccacgagauaugguauucagaacuucgaguccuaaaguaguacuuuaaggacuaguuauaagacugacuagcccgaugggccucccaacgggcccuccuccccuccuugcaccgagauuaauaaaaaaaaaaaaaaaaaaaaaaaaaaaaaaaaaaaaaaaaaaaaaaaaaaaaaaaaaaaaaaaaugcaucccccccccccccccccccccccccccccccaaaggcucuuuucagagccaccagaauu

SEQ ID NO: 11115 - RNA, 1927 nt, Artificial Sequence
  mRNA product Design i-3 comprising derived and/or modified sequence from LASV(LASV221-NIG-2010;Clade II)__AIT17625__NP (opt6)
gggagaaagcuuaccaugucagcaucaaaagaaguaaaaagcuuccuuuggacacaaucccuaagacgagaauuaucaggauacuguucaucaauaaaacuacaaguaguuaaagacgcucaagcauuauuacauggguuagacuuuuccgaagucuccaauguacagagacuaaugagaaaacaaagaagagaugauuccgauuuaaaacgacuaagagauuuaaaccaagcagucaauaaccucguugaacuaaaaaguacacaacaaaaaaguauauuaagaguaggcacacuaacaagcgaugaccuacucacucuagcagcagaccuagaaaaauuaaaaucaaaaguaauaagaacagaaagaccacuaaguucagguguauauaugggaaauuuaucaacacaacaacuagaacaacgaagagcuuuguuaaauaugauagguaugguaggaggagcacagggaacacaaccgggaagagacgguguagugagaguaugggacguaaaaaacccggauuuacuaaacaaccaauucggaacaaugccaagccuaacucuagcaugcuuaacaaaacaaggacaagucgacuuaaacgaugcuguacuagcacuaacagaccuaggauuaauauacacagcaaaauacccaaauagcagugauuuagacagacuaagccaaagucacccuauccuuaauaugguagauacaaaaaaaagcucuuuaaacauauccgguuacaacuucagucucggagcagcagucaaagccggagcauguauguuagauggcggaaacaugcuugaaacaauaaaaguuacaccacaaaccgucgacggcauccuaaaaucaauauuaaagguuaaaagaagucuaggaauguucguaucagacacaccaggugaaagaaauccauacgaaaauauacuguauaaaauaugucuaaguggagauggauggccuuauauagcaucacgaacaucaauagucggacgagcgugggaaaacacuacaguugaucuagaaagugauggaaaaccacaaaaaguuggaacugcgggaucaaauaaaucauuacaaucagcuggauuuccgacaggacuaacauauagccaauuaaugacacuaaaagauagcaugaugcaauuagaucccucagcaaaaacauggauagacaucgaaggaagaccagaagaccccguugaaauagcauuauaucaaccaaugucaggcuguuauauacauuucuuucgcgaaccaacagaccuaaaacaauuuaaacaagaugcaaaauauagucacggaauagacguagcagaucuauucccagcacaaccuggauuaacaucagcaguaaucgaagcccuuccaagaaauauggucuuaacuugucaaggaagcgaugacauaaaaagacuccuugacucacaaggaagaagagacauaaagcucaucgauauugcucuaucuaaagccgauucaagaaaauucgaaaaugccguaugggaccaauguaaagacuuaugccauaugcauacaggaguaguuguagaaaaaaaaaaaagagguggaaaagaagaaauaacaccacacugcgcucucauggauugcauaauguaugacgcagcaguaucaggaggccuaaacaucccaguauuaagagcuguucuaccaagagauaugguauucagaacaaguaguccaaaaguaguacuuuaaggacuaguuauaagacugacuagcccgaugggccucccaacgggcccuccuccccuccuugcaccgagauuaauaaaaaaaaaaaaaaaaaaaaaaaaaaaaaaaaaaaaaaaaaaaaaaaaaaaaaaaaaaaaaaaaugcaucccccccccccccccccccccccccccccccaaaggcucuuuucagagccaccagaauu

SEQ ID NO: 11116 - RNA, 1927 nt, Artificial Sequence
  mRNA product Design i-3 comprising derived and/or modified sequence from LASV(LASV237-NIG-2010;Clade II)__AIT17639__NP (opt6)
gggagaaagcuuaccaugucggcuagcaaagaagugaaauccuuucucuggacacaaagucuacgaagagaauuaucuggauauuguaguaauauaaaacuacaaguagucaaagacgcacaagcauuauuacauggauuagacuucagugaagucucuaacguacaaagauuaaugagaaaacagaaaagagacgacucagaccucaaaagacuuagagaccucaaccaagcaguaaauaacuuaguagaacuaaaaucaacgcaacaaaaaucaauauuaagagucggcacacuaacauccgacgauuugcuuaccuuagcagcagaccuagaaaaauuaaaaucuaaaguuauaagaacagaacgaccacuaagcucaggaguuuauaugggaaauuuaaguacgcaacaacuagaacaacguagagcauuacuuaacaugaucgguaugguaggaggagcacaaggaacucaaccaggaagagacgguguuguaagagucugggaugucaaaaacccugaucuucuaaacaaccaguuuggaacaaugccuucuuuaacauuagcauguuuaacuaaacaaggacaaguagacuuaaaugaugcaguacuagcacucacagaccuaggcuuaaucuacacagcuaaauauccuaacucaucagauuuagacagacuaagucaaucacacccuauauuaaacaugguagacauaaagaaaagcucauuaaacauaaguggauauaacuucagccucggagcugcaguuaaagcaggagcauguauguuagauggagguaauaugcuagaaacaauaaaaguaacaccacaaacaauggacggaauacuuaaaaguauauuaaaagucaaaaggagccuaggaauguucguuagugacacaccaggagaaagaaaucccuacgaaaauauacuauacaaaauaugucucucuggagauggauggccauauauagcaaguagaacaucaauaguaggucgagcaugggaaaauacaacugucgaucuugaaucagacggcaaaccccaaaaaguaggaucagcaggaaguaauaaaaguuuacaaucagcaggauuuccaacaggacucacauauagucaacuuaugacauuaaaagauucaaugaugcaacuugauccaucagcaaaaacauggauagauauugaaggacgaccggaagacccaguagaaauagcacuauaucaacccaugucugguuguuauauacacuuuuucagagaaccuacagaucuaaaacaauuuaagcaagacgcgaaauacucacauggcaucgacguugcagauuuauuuccagcacaaccuggauuaacaucagcaguaauagaagcauuaccaagaaacaugguauuaaccugucaaggcucagaugacauaaaaagacuauuagauucccaaggaagaagagacauaaaauuaauagacauagcacucucaaaagcggauucccgaagauucgaaaacgcagucugggaccaauguaaagauuuaugucacaugcacacaggaguaguaguagaaaagaagaaaagaggaggaaaagaagaaauaaccccucacugugcauuaauggacuguauaauguacgaugcagcaguaucagguggacuaaauauaccuguccuccgagccguauuaccaagagauaugguauucagaacaagcucuccaaaaguaguacuauaaggacuaguuauaagacugacuagcccgaugggccucccaacgggcccuccuccccuccuugcaccgagauuaauaaaaaaaaaaaaaaaaaaaaaaaaaaaaaaaaaaaaaaaaaaaaaaaaaaaaaaaaaaaaaaaaugcaucccccccccccccccccccccccccccccccaaaggcucuuuucagagccaccagaauu

SEQ ID NO: 11117 - RNA, 1927 nt, Artificial Sequence
  mRNA product Design i-3 comprising derived and/or modified sequence from LASV(LASV253-NIG-2011;Clade II)__AIT17671__NP (opt6)
gggagaaagcuuaccaugagcgcaucuaaagaaguaaaaucuuucuuauggacacaaucacuaagaagagaacucucuggauauugcuccaguauuaaacuacaaguaguaaaagaugcgcaagcccucuuacauggacuugacuuuagugaaguaucaaauguucaaagacuuaugcguaaacaaaaaagagaugauucagauuuaaaaagauuacgagaccuaaaucaagcuguaaacaauuuaguagaauuaaaaagcacacaacaaaaaucaguauuaagaguaggaacauuaacaucagacgaccuacuaacacuagcugcagaccuagaaaaacuaaaaucaaaaguaauaagaacugaaagaccgcuaagcucaggaguauauaugggaaauuuaaguacacagcaauuagaacaaagacgagcacuuuuaaacaugauaggaaugguuggaggagcacaaggaacacaaccuggccgagacggaguaguuagaguaugggauguaaaaaauccagauuuauuaaauaaucaauucggaacuaugccaagucuaacacuagcaugucuaacaaaacaaggacaaguagaccuaaacgacgucguucuagcuuuaacagaccucggauuaaucuauacagccaaauauccaaauaguagcgaucuagauagacucucacaaucacaccccauacuaaauauggucgacaccaaaaaaucaucauuaaacauuucaggauacaauuuuucacuaggagcagcaguaaaagcaggagcgugcaugcuugaugggggaaauauguuagaaacaauaaaaguaacaccccaaacaauggacggcauacuaaaaucaauacuaaaaguaaaaaaaucuuuagguauguucguaucagauacaccuggagaacgaaauccguaugaaaauauacuauacaaaauaugucuaucaggagauggauggccauauaucgcaagucgaaccucaauaguuggaagagcaugggaaaauacaacaguagaucuagaaagcgacggaaaaccacaaaaagucggaacagcgggaucaaauaaaaguuuacaaucagcaggcuuuccaacaggacuuacauauucacaacuaaugacauugaaagauagcaugaugcaacuagauccaagugcaaaaacguggauagauauagaaggaaggcccgaagauccaguugaaaucgcacucuaccaaccaaugucaggaugcuacauccauuuuuucagagaaccaacagaucuaaagcaauucaaacaagacgcaaaauacucacacggaauagacgucacagaucuauucccagcacaaccaggucuuacuucugcaguaauagaagcauuaccgcgaaacaugguacuaacuugucaaggaagugacgacauaaaaagauuacuagacagccaaggaagaagagauauaaaauuaauagacauagcguuaucaaaagcagacuccagacgauuugaaaacgcaguaugggaucaaugcaaggauuuaugccauaugcauacaggagucguaguagaaaaaaaaaagcguggcggaaaagaagaaauaacaccccauugugcauuaauggauugcauaauguaugaugcagcaguauccggaggacucaacauaccaguccuaagagcaguccucccaagggauauggucuuuagaacauccucacccaaaguaguauuauaaggacuaguuauaagacugacuagcccgaugggccucccaacgggcccuccuccccuccuugcaccgagauuaauaaaaaaaaaaaaaaaaaaaaaaaaaaaaaaaaaaaaaaaaaaaaaaaaaaaaaaaaaaaaaaaaugcaucccccccccccccccccccccccccccccccaaaggcucuuuucagagccaccagaauu

SEQ ID NO: 11118 - RNA, 1927 nt, Artificial Sequence
  mRNA product Design i-3 comprising derived and/or modified sequence from LASV(LASV254-NIG-2011;Clade II)__AIT17675__NP (opt6)
gggagaaagcuuaccaugagugcaucuaaagaaguaaaaucauuuuuauggacccaaucgcucagaagagaauugaguggauauugcaguucaauuaaauugcaaguuguaaaagacgcacaagcacuauuacauggucuagauuuuagcgaaguaucaaauguucaacgcuuaaugcgaaaacaaaaacgagaugacagugacuuaaaaagacuaagagacuuaaaucaagcaguaaacaauuuaguagaacuaaaaaguacacaacaaaaaucuguauuaagaguaggaacauuaacaagcgaugauuuacucacauuagcagcugaucuagaaaaauuaaaaucaaaaguaauaagaacagaaagaccauuauccagcggaguauauaugggaaauuuaucaacacaacaauuagagcaacgacgugcauuauuaaacaugauaggaaugguagguggagcacaaggcacgcaaccaggaagagacggaguaguaagaguaugggaugucaaaaacccugaccuacuaaauaaucaauuuggaacaaugccaucauugacauuagcaugucuuacaaaacaaggacaaguagacuuaaaugacgcgguacuagcacuaacagauuuaggauuaauauauacagcaaaauauccaaauucaucagaccuugauagauuaagucaaagccacccaauacuuaauaugguagauacaaagaaauccagucuaaacauuagcggcuacaauuucagccuaggagcagcaguaaaagcaggagcgugcauguuggacggaggaaauaugcuagaaacaauaaaagugacuccccaaacaauggacggaauauuaaaaucuauacuaaaaguaaagaaaagccuaggaauguucguaagugauacaccaggagaaagaaauccauaugaaaauauauuauauaaaauaugucuaagcggugauggauggcccuauauagcaaguagaacaucgauaguggguagagcaugggaaaauacuaucguagaucuagagagugauggaaaaccucaaaaaguaggaacggcaggaucaaacaaaucauuacaaucagccggauuuccaacaggacuaacauauucacaauuaaugacacuaaaagauaguaugaugcaacuagacccaagugcaaaaaccuggauagauauagaaggaagaccagaagaccccguagaaauagcauuauaucaaccaaugucaggauguuacauacacuuuuucagagaaccaacugauuuaaaacaauuuaaacaagaugcuaaauacagucauggaauagaugucgcagacuuauucccagcacaaccagguuuaacaagugcaguaauagaagcauuaccgagaaauaugguucucacuugucaaggaagugacgauauaaaacgacuacuugauucacaaggaagaagagacauaaaauuaauugauauagcauuaucaaaagcagauaguagaagauucgaaaaugcaguaugggaucaauguaaagaccucugucacaugcauacaggaguaguagucgagaaaaagaaacgaggaggaaaagaagaaauuacaccgcauugugcauuaauggauugcauaauguaugacgcugccguaucaggaggacuuaauauucccguguuaagggcaguauuaccaagagacaugguauucagaacuucaucacccaaaguaguacuauaaggacuaguuauaagacugacuagcccgaugggccucccaacgggcccuccuccccuccuugcaccgagauuaauaaaaaaaaaaaaaaaaaaaaaaaaaaaaaaaaaaaaaaaaaaaaaaaaaaaaaaaaaaaaaaaaugcaucccccccccccccccccccccccccccccccaaaggcucuuuucagagccaccagaauu

SEQ ID NO: 11119 - RNA, 1927 nt, Artificial Sequence
  mRNA product Design i-3 comprising derived and/or modified sequence from LASV(Nig08-04;Clade II)__ADU56611__NP (opt6)
gggagaaagcuuaccaugagugcaucaaaagaagucaaaucauuccuuuggacacaaagccuaagacgagaacuaucaggauacugcucuaacauaaaauuacaaguuguaaaagacgcacaagcacuuuuacauggauuggauuucucagaaguaucaaacguucaacgacuaaugcgaaaacagaaaagagacgauggagaucuaaaaagacuaagagauuuaaaccaagccguaaauaaccuaguagaacuaaaaucgacacaacaaaaaucuguuuugagaguaggaaccuuaaccucugacgaccuacuaacacuugcagcagacuuagaaaaauuaaaaucaaaaguaaucagaacagaaagaccucucagcucaggaguauacaugggaaaucuaaguacacaacaacuagaacaaagaaaagcacuacuaagcaugaucgguaugguaggaggagcacaaggcacacaaccaggaagagacggaguaguuagaguaugggauguuaaaaauccagaccuacuuaacaaccaauucggaacaaugcccucauuaacuuuagcaugcuuaacaaaacaaggacaaguagaucuaaaugaugcaguucuagcccuaacagaucucggacuaauauauacagcaaaauacccaaauucaucagaucuagacagauuaucucaaucccauccaauacuaaacaugguagauaccaagaaaucaucacuaaacauuucaggauacaauuuuucacuaggagcagcaguaaaagccggagcaugcaugcuagauggaggcaacaugcucgaaacaauaaaaguaacaccccaaacaauggacgggauauuaaaaaguauacugaaaguuaaaagaucacuaggaauguucguaucagauacaccaggagaaagaaaucccuaugaaaauauucuauacaaaauaugccuaucaggugauggguggccuuacaucgcaaguagaacaaguauaguagggagagcaugggaaaauacaacuguagaucuagaaucugauggaaaaccacaaaaaguaggaacugcaggaaguaauaaaaguuuacaaagcgcaggauuuccuacaggauuaacuuauagucaacuaaugaccuuaaaagauagcaugaugcaauuagauccaagugcaaaaacauggauagacauagaaggucgaccagaagacccagucgaaauagcauuauaucaaccaaugucaggcuguuauauacacuucuuucgagaaccuaccgaucuaaaacaauuuaaacaggaugcaaaauauucacacgguauagacguuacagauuuauuuucagcacaaccagguuuaacuucagcaguaauagaagcguuaccaagaaacaugguccucacaugucaaggaucagaugauauuaagaaauuacuugacagucaaggaagacgagacauaaaacuuauagacaucucauuaaacaaagcagacucaagaagauuugaaaacgcaguaugggaccaauguaaagauuuaugccacaugcauacaggagucguaguagagaaaaagaaacgagguggaaaagaagaaauaacuccacauugcgcauuaauggauugcauaauguuugacgcagcugugaguggaggauuaaauauaccaauauuaagagccguacuaccaagagauaugguauuuagaacaaguucgccaaaagugguacuauaaggacuaguuauaagacugacuagcccgaugggccucccaacgggcccuccuccccuccuugcaccgagauuaauaaaaaaaaaaaaaaaaaaaaaaaaaaaaaaaaaaaaaaaaaaaaaaaaaaaaaaaaaaaaaaaaugcaucccccccccccccccccccccccccccccccaaaggcucuuuucagagccaccagaauu

SEQ ID NO: 11120 - RNA, 1930 nt, Artificial Sequence
  mRNA product Design i-3 comprising derived and/or modified sequence from LASV(GA391;Clade III)__AAA46284__NP (opt6)
gggagaaagcuuaccauguccgcuagcaaagaaguaagauccugcuuauggacacaaucacuaagaagagaacuaucaggauauugcucaaacauaaaauuacaaguaguaaaagacgcccaagcacuauuacacggacuagauuucucagaaguuucaaauguacaaagauuaaugagaaaacaaaaacgagacgacggcgaucuaaaaaggcuaagagaucuuaaucaagcaguaaauaaccuaguagaacuaaaaaguacacaacaaaaaucaguacuacgaguuggcacauuaucuagugaugauuuacuaauacuagcagccgauuuagaaaaacuaaaaucaaaagucacaagaacagaaagaccguuaucaucaggaguauauaugggaaacuuaucaucucaacaauuagaccaaagacgagcucuccuaaacaugauaggaaugacaggaguaagcggaggaggaaaaggagcaucaaacggaaucguaagaguaugggauguuaaaaaugcagaacuacuaaauaaccaauucggaacaaugccuaguuuaacccuagcuugcuuaacaaaacaaggacaaguagaucuaaacgaugccguacaagcacucacagaucuaggauuaauuuacacagcuaaauaccccaauagcucagauuuagaucgauuaagucaaucacacccuauccuaaacaugauagauaccaagaaaaguagccuaaacauuagcggauacaauuuuucauuaggagcagcaguaaaagcaggagcaugcaugcuagaugguggaaacauguuagaaacaaucaaaguaaguccacaaacaauggauggaauacuaaaaucaauacucaaagugaaaaagagcuuaggaauguucguaagugacacaccuggugaaagaaaucccuaugaaaauauauuauauaaaaucugucucucaggagauggcuggagcuauauagcaucaagaacaucaauaguaggcagagcaugggaaaauacaguaguagauuuagaacaagacaacaaaccacagaaaauaggaaacggaggaaguaacaaaucuuuacaaagcgcaggauuugcagcaggccugauauacagucaacuuaugacauuaaaagauuucaaauguuuuaaccuaauaccaaaugccaaaacauggauggauauagaaggcagaccagaagauccagucgaaauagcucuuuaccaaccaaguuccggcugcuauguacauuucuucagagaaccaacagaccuuaaacaauucaaacaagacgcaaaauauucacauggacgagauguaacugaccuauucgcagcacaaccaggauuaacaagugcaguuauagaagcccuaccacgaaauaugguuauaacaugccaaggaagugaagauauacgaaaauuauuagaaagucaaggaaggagagauaucaaacuuauugacauuacacuaucaaaagcugacucaagaaaauuugaaaaugcuguaugggaccaauuuaaagauuuaugccacaugcacacugguguaguaguugagaaaaagaaacgaggaggcaaagaagaaauaacaccacacugugcgcucauggacugcauaauguucgaugcugcaguaucaggaggacucgacgccaaagucuuacgaguagucuuaccaagagacaugguauuccguacaucaacacccaaagucguacuauaaggacuaguuauaagacugacuagcccgaugggccucccaacgggcccuccuccccuccuugcaccgagauuaauaaaaaaaaaaaaaaaaaaaaaaaaaaaaaaaaaaaaaaaaaaaaaaaaaaaaaaaaaaaaaaaaugcaucccccccccccccccccccccccccccccccaaaggcucuuuucagagccaccagaauu

SEQ ID NO: 11121 - RNA, 1927 nt, Artificial Sequence
  mRNA product Design i-3 comprising derived and/or modified sequence from LASV(Nig08-A19;Clade III)__ADU56619__NP (opt6)
gggagaaagcuuaccaugagcgcaucaaaagaaguaaaaucauucuuauggacacaaucauuaagacgagaacuaucuggauacuguaguaauauaaaauuacaaguaguuaaagaugcacaagcccuauuacauggacuagauuuuucagaagucucuaauguccaaagauuaaugagaaaacaaaaaagagacgacggagaucuaaaaagacuuagagacuuaaaucaggcaguaaacaaucuuguagaacuaaaaagcacucaacaaaaaucugugcuaagaguuggaacauuaaguagcgaugaucuucuuguacucgcagccgacuuagaaaaauuaaaaucuaaaguaguacgaacagaacggccacuaucaucagguauauauaugggaaaccuuucaucucaacaacuggaucaaaggaaagcauuacuaaacaugauaggaaugacaggaggaaauggaggacgaaacacaacaagcgacggaaucguuagaguuugggacguaaaaaacgcagaacuauuaaacaaucaauuugguacaaugccaaguuuaacucucgcuugccuuaccaaacaaggacaaguagaucuaaaugaugcaguacaagcacuaacagaccuagguuuaauauauacagcgaaauauccaaauuccucagacuuagaucgacuagcacaaucacauccaauauuaaauaugauagauacgaaaaaaucaucauuaaacauaagcggauacaauuucucauuaggcgcagcaguuaaagcuggagcauguauguuagacggaggaaauaugcucgaaacaaucaaaguaagcccacaaacaauggacggaauauuaaaaucaauacuaaaaguaaaaaggucacuaggaauguucauuagugauacaccaggcgaaagaaacccauaugaaaauauauuauacaaaauaugcuuaagcggagacggauggcccuauauugccucaagaaccagcauaguaggaagagcaugggaaaacacaguagucgaucuagaaucggauaauaaaccacaaaaaacaggaaacgguggaaguaauaaaucacuacaaucagcagguuuugccgcaggcuuaacauacucacaacucaugacauuaaaagauucaaugcuccaacucgacccaaaugcuaaaacauggauggauauagaaggaagaccagaagacccaguagaaauagcucuauaccaaccguccucaggauguuacauacacuucuuuagagaaccaacagaucuaaaacaguuuaaacaagacgcaaaauacagccauggaauagacguuacagauuuauuugcagcacaaccaggacuaacaagugcaguuauagaagcauuaccaaggaacaugguaauaacaugucaaggcagugaagacauaagaaaacuacucgaaucacaaggaaggcgugacauuaaacuuauagauauuagucuaagcaaaguagacucacgaaaguuugaaaacgcaguaugggaucaauucaaagaucuaugccacaugcauacaggaauaguagucgaaaaaaaaaaaagaggggggaaagaagaaauuacaccacacugcgcuuuaauggacugcauaauguuugaugcagcuguaucaggaggaguugacgcaaaaguucuuagagcaguauuaccaagagauaugguauucagaacuucaacacccaaaguuguccucuaaggacuaguuauaagacugacuagcccgaugggccucccaacgggcccuccuccccuccuugcaccgagauuaauaaaaaaaaaaaaaaaaaaaaaaaaaaaaaaaaaaaaaaaaaaaaaaaaaaaaaaaaaaaaaaaaugcaucccccccccccccccccccccccccccccccaaaggcucuuuucagagccaccagaauu

SEQ ID NO: 11122 - RNA, 1927 nt, Artificial Sequence
  mRNA product Design i-3 comprising derived and/or modified sequence from LASV(G1180-SLE-2010;Clade IV)__AIT17169__NP (opt6)
gggagaaagcuuaccauguccgcaagcaaagaaauaaaauccuuccuauggacccaaucucucagaagagaauuaaguggauacuguucuaacauuaaacuacaaguagucaaagacgcucaagcacuauuacaugguuuagauuucucagaaguaaguaauguccaaagacuaaugagaaaagaaagaagagacgauaacgacuuaaaaagacuaagagaccuaaaucaggcugucaauaauuuaguagaacuaaaaaguacucaacaaaaaucuauacuaagaguaggaacguuaacuagcgacgaucuacuaauauuagcagccgaucuugaaaaauuaaaaucaaaaguaauuagaacagagagaccauuaagcgcuggaguauauaugggaaacuuaaguucacaacaauuagaccaaagaagagcacucuuaucgaugauaggaaugucaucaggaaaucaaagagcacaagcaggcagagauggugucguacgugucugggacguaaaaaauguagaacuacuaaacaaucaauuuggaaccaugccuucauuaacucucgcuuguuuaacuaaacaaggacaaguagaccuaaacgaugcaguacaagcauuaacugacuuaggacuaauauauacagcaaaauacccuaauacuuccgauuuagacagacuaacacaaucacacccaauacuuaauaugauagauacaaaaaaauccucauuaaacaucucaggauacaauuucucauuaggagcagcagucaaagcaggagccuguauguuagacggaggaaauauguuagaaacuauaaaaguaucuccacaaaccauggacggaauacugaaaaguauucuaaaaguaaaaaaagcauuaggaauguucauuucagauacaccaggcgaaagaaaucccuaugaaaauauauuauacaaaauaugucuaucaggugauggauggccauauaucgcaagccgaacaaguaucacaggaagagcaugggaaaauacaguaguagacuuagaaucagauggaaaaccacaaaaagcaggauccaacaauucaaacaaaucauuacaaagcguaggauuuaccgcaggacuaacauauucacaacuaaugacguuaaaagaugcaaugcuacaguuagauccaaaugcaaaaaccuggauggacauagaaggaagacccgaagacccaguagaaauugcauuauaucaaccaagcaguggaugcuauauucacuuuuuccgugaaccuaccgaccuaaaacaauuuaaacaagacgcaaaauauucacauggaauagacguuacagaucuauuugcagcacaaccuggacuaacaucagcaguaauagacgcccuuccucgaaauaugguuauaaccugucaaggaucagaugauauacgaaaacuucuagaaagccaaggacgaaaagacaucaaauuaauagauauagcauuaucuaaaacggacucaagaaaauaugaaaacgcugucugggaccaauauaaagauuuaugccauaugcauaccggaguaguaguugaaaaaaaaaaacgaggaggaaaagaagaaauaaccccacacugcgcacuaauggauugcauaauguucgacgcagcaguaucagggggucuaaauacauccgucuuaagagcaguacuaccaagagauaugguauucagaacaucaacaccacgaguuguacuauaaggacuaguuauaagacugacuagcccgaugggccucccaacgggcccuccuccccuccuugcaccgagauuaauaaaaaaaaaaaaaaaaaaaaaaaaaaaaaaaaaaaaaaaaaaaaaaaaaaaaaaaaaaaaaaaaugcaucccccccccccccccccccccccccccccccaaaggcucuuuucagagccaccagaauu

SEQ ID NO: 11123 - RNA, 1927 nt, Artificial Sequence
  mRNA product Design i-3 comprising derived and/or modified sequence from LASV(G1442-SLE-2011;Clade IV)__AIT17181__NP (opt6)
gggagaaagcuuaccaugucugcuaguaaagaaguaaaaagcuuuuuauggacacaaucauuacgaagagaauuauccggcuauuguagcaauauaaaacuacaaguagucaaagacgcacaagccuuacuacacggacuagauuucucagaaguaucaaauguacaaagacuaaugagaaaacaaagaagagacgacaacgaccugaaaagacuaagagaucuaaaucaagcaguuaacaaucucguagaacucaaaagcacacaacaaaaaucaguauuaagagucggcacucuaacgagcgaugacuuauuagugcucgccgcagacuuagaaaaacuaaaaagcaaaguaauaagaacagaaagaccccucucagccggaguauauaugggaaaucuaucaucacaacaauuagaccaaagacgagcauuauuaaacaugaucggaaugagcggcggcauacaaggaacacgaacaggaagagaugguguagucagaguaugggacgucaaaaacgcagauuuauuaaacaaccaauuuggcacaaugccaucauuaacauuagcaugcuuaacaaaacaaggacaaguagacuuaaaugaugugguacaagcacucacagaccucggcuuaauauacacagccaaauaccccaacgcaucagaccuagacagacuaacucaaucacacccaauacuaaacaugauagauaccaaaaagaguucacuaaacaucucaggauauaacuuuucacuaggcgcugcuguaaaagccggagcauguauguuagacggugguaacaugcuagaaacuauaaaaguaucaccacaaacaauggacggaauauuaaaaucaauccuaaaaguaaaaaaaacauuaggaauguuuauaagugacacaccaggagaaagaaauccguaugaaaauauauuauacaaaaucugccuuucgggagacggcuggcccuacauagccagccgaacuagcauuacaggaagagcaugggaaaacacaguaguagaccucgaaagcgacggaaaaccgcaaaaagcugggucaaauaacuccaauaaaucauuacaaagugcuggauuugcagcaggauuaacauauucacaauuaaugacauuaaaagacgcaaugcuacaauuagauccuaaugcaaaaacauggauggauaucgaaggaagaccagaagaccccguagaaauagcccuauaccaaccguccucaggauguuacauccacuuuuucagagaaccaacagaccuaaaacaauuuaaacaagacgccaaauauucacauggaaucgacgucacugauuuauucgccgcacaaccaggacuaacaagcgcaguaaucgaagccuuaccaagaaacauggugauaacaugccaaggaagugaugacauaaaaaaacuauuagaaucacaaggaagaaaagacauaaaauuaauagacauagcauuaagcaaaacagacucacgcaaauaugaaaacgcaguaugggaucaauacaaagacuuaugccauaugcacacaggaguaguuguagaaaaaaagaaaagaggaggcaaagaagaaauaacaccacauugugcacuuauggacuguauaauguuugacgcagccguaucaggaggauuaaauacacuaguacuaagagcaguccuaccaagagacaugguauucagaacuagcaccccaagaguaguacuauaaggacuaguuauaagacugacuagcccgaugggccucccaacgggcccuccuccccuccuugcaccgagauuaauaaaaaaaaaaaaaaaaaaaaaaaaaaaaaaaaaaaaaaaaaaaaaaaaaaaaaaaaaaaaaaaaugcaucccccccccccccccccccccccccccccccaaaggcucuuuucagagccaccagaauu

SEQ ID NO: 11124 - RNA, 1927 nt, Artificial Sequence
  mRNA product Design i-3 comprising derived and/or modified sequence from LASV(G3010-SLE-2013;Clade IV)__AIT17345__NP (opt6)
gggagaaagcuuaccaugagcgcuaguaaggaaauaaaauccuuccucuggacacaaucacuaagaagagaauuaagugguuauugcaguaacaucaaauuacaaguaguuaaagaugcacaagcauuacuacauggauuagauuucucagaaguaagcaauguacaaagacuuaugaggaaagaacgaagggaugauaacgaccuaaaacgacuaagagaucugaaucaagcaguaaauaacuuaguagaauuaaaaucaacacaacaaaaaucaauucuaagaguaggcacccugacaagcgaugauuuacuaauucuagcagcagauuuagaaaaauuaaaaucaaaaguuacaagaacagaaagaccgcuaagcgcuggaguauauaugggaaaccugucuucccaacaauuagaucaaagaagagcuuuacuaagcaugauaggaaugucaucugggguccaaggagcaagagccgguagagacggaguaguucgaguaugggacguaaaaaacgcagaacucuuaaacaaccaauucggaacuaugccaaguuuaacuuuagcuuguuuaacaaaacaaggacaaguagauuuaaaugauguaguucaagcacuaacagacuuaggucuaauauauacagcuaaauaccccaauacaucagaucucgacagacuaacacaaucccaucccauauuaaacaugauagauaccaaaaaaucuucucuaaacauaucaggauacaauuuuaguuuaggugcagcuguaaaagcuggagccugcauguuagaugguggaaauauguuagaaacaauaaaagugaguccccaaacaauggaugggauccuaaaaagcauauuaaaaguaaaaaaagcauuaggaauguucauaucagagacacccggugaaagaaauccauaugaaaauauacuauacaaaaucugucuaaguggugacggcuggccuuacaucgcaaguagaacaucaauuacgggacgugcaugggaaaacacaguaguugaucuggaaucagauggaaaaccacaaaaagcaggaucaaacaacucaaauaaaagucuacaaucagcaggauucacugcaggauuaacauauucacaacuaaugacacuaaaagaugcuaugcuucaacuagacccaaacgcaaaaacauggauggacauagaaggccgaccagaagauccagucgaagucgcacuauaccaaccuaguucaggauguuauauacacuucuuucgugaaccaacagaccuaaaacaauucaaacaagacgcaaaauauucacauggaauagacguuacagaccuauucgcagcacaaccaggucuaaccagugccguaauagacgcauuaccaaggaauauggucauaacaugucaaggaucagaugauauaaaaaaacuauuagaaagucaaggaagaaaagacaucaaauuaauagauauagcacuaucaaagacagauucaagaaaauaugaaaaugcaguaugggaccaauauaaagaccuaugucacaugcauaccggaguugugguagaaaaaaaaaaaagaggagggaaagaagaaauaacgccacauugcgcauuaauggauuguauaauguuugaugccgcaguauccgguggacuuaauacaaguguacuuagagcaguacugccacgagacaugguauuuagaacaucaacaccccguguaguuuuauaaggacuaguuauaagacugacuagcccgaugggccucccaacgggcccuccuccccuccuugcaccgagauuaauaaaaaaaaaaaaaaaaaaaaaaaaaaaaaaaaaaaaaaaaaaaaaaaaaaaaaaaaaaaaaaaaugcaucccccccccccccccccccccccccccccccaaaggcucuuuucagagccaccagaauu

SEQ ID NO: 11125 - RNA, 1927 nt, Artificial Sequence
  mRNA product Design i-3 comprising derived and/or modified sequence from LASV(G502-SLE-2009;Clade IV)__AIT17127__NP (opt6)
gggagaaagcuuaccaugagcgcaucuaaagaaauaaaaucauuucuauggacacaaucucuaagaagagaacuaucaggauacugcucaaauauaaaauuacaaguaguaaaagacgcucaagcacucuuacacggauuagauuucucugaaguuucuaauguacaaagauuaaugagaaaagaacgcagagacgacaacgaucuuaaaagauuaagagauuuaaaucaagcgguaaacaacuuagucgaauuaaaaagcacucaacaaaaaaguaucuuacgaguaggcacacucacaucagaugaccuacuuauacuagccgcagacuuagaaaaauuaaaauccaaaguaauaagaacugaacgcccucuaucagccggaguauauauggguaacuuaucaucacaacaacuagaucaaagacgagcacuauuaucaaugaucggaaugucagggggcaaucaaggcgucagagcaggaaaagacggaguaguaagaguaugggacguaaaaaacgcagaauuauugaauaaccaauuuggaacaaugccaucacugacacuagcauguuuaacaaaacaaggacaaguagauuuaaaugacgccguucaagcacuaacagaucuuggccuaaucuauaccgcaaaauauccaaacacuagugacuuagacaggcuaacacaaagccacccaauauuaaauaugauagacacaaaaaaaucuucacucaacauaagcggguacaauuuuuccuuaggugccgcagucaaagcaggagccuguauguuagacggaggaaacauguuagaaacaauaaaaguaucgccacaaacaauggaugguauauuaaaaucuauacuaaaagucaaaaaagcauuagguauguucauauccgacacaccaggagaaagaaacccauacgaaaauauccuauauaaaauauguuuaucuggagauggauggccauacauagcaucuagaacaagcaucaccggcagggcaugggaaaauaccguaguugaccucgaaucagauggaaaaccccaaaaagcagguucaaacaauucaaauaaaucauuacaauccgcaggcuuuaccgccggacuuacuuauucacaacuaaugacuuuaaaagaugcaaugcuccaacuagauccaaauaccaaaacauggauggauauagaaggacgaccagaagauccaguagaaaucgcccucuaccaaccaucaucaggcuguuacauacacuucuuuagggaaccaacugaucucaaacaauucaaacaagacgcuaaauauucacauggaaucgacguaacagaucuauuugcugcacaaccuggucucacaucagcaguuauagaugcacuaccaagaaauaugguaauuacaugccaaggaagcgacgacauacgaaaacuccuagaaucacaaggucgaaaagauauaaaacucauugauauagcauuaaacaaaacagauucuagaaaauaugaaaacgcuguaugggaccaguacaaagacuuaugucacaugcacaccggaguaguuguagaaaagaaaaaacgaggcggaaaagaagaaauaacaccucacugugcccucauggauugcauaauguuugacgcugcaguaucaggaggacuaaacacuucaguauuaagagcaguauuaccaagagauaugguauucagaacauccaccccaagaguaguguuauaaggacuaguuauaagacugacuagcccgaugggccucccaacgggcccuccuccccuccuugcaccgagauuaauaaaaaaaaaaaaaaaaaaaaaaaaaaaaaaaaaaaaaaaaaaaaaaaaaaaaaaaaaaaaaaaaugcaucccccccccccccccccccccccccccccccaaaggcucuuuucagagccaccagaauu

SEQ ID NO: 11126 - RNA, 1927 nt, Artificial Sequence
  mRNA product Design i-3 comprising derived and/or modified sequence from LASV(G733-SLE-2010;Clade IV)__AIT17155__NP (opt6)
gggagaaagcuuaccaugucugcuaguaaagaaauuaaaucauuuuuauggacacaaucacuacgcagagaacuaucaggcuacuguucaaauauuaaacuacaaguaguuaaagacgcacaagcucuauuacacggguuagacuucucugaaguaagcaacguacaaagacucaugagaaaagaacgaagggacgacaacgauuuaaaaagacuacgagacuuaaaucaagcugucaauaaucuaguagaacuaaaaucaacacaacagaaaucaguauuaagaguaggaacguuaacauccgaugaacuucuaguuuuagcagccgaucuggaaaaacuaaaaucaaaaguaauacgaacagaaagaccccuaucggcaggaguauacaugggaaauuuaucaucacaacagcuagaucaacgaagagcucuccuaucaaugauaggcaugagcggaggaaaccaaggcgcacguacaggcagagacggagucguaagaguaugggacguaaaaaacgcugaacuacucaauaaccaauuuggcacaaugccaaguuuaacuuuagcuuguuuaacaaaacaaggacaaguagaccuaaaugaugccguacaagcacuaacugauuuaggauuaauauauacagcaaaauauccaaacacaucagaucuugauagacuaacacaaucccauccaauccuaaacaugauagacacaaaaaaaucuucauuaaauauaucagguuacaacuucagccuaggagcagcuguaaaagcuggcgccuguauguuagauggaggaaacaugcuugaaacaauaaaaguaucaccacaaacaauggacggaauauuaaaaucaauacuaaaaguaaaaaaagcacuagguauguuuauaagcgauacaccaggagaaagaaauccauacgaaaauauauuauacaaaauaugccuaaguggagauggauggccuuacauugcuucaagaacaucaauaaccggacgagcaugggaaaauacgguuguagaccuggaaucggauggaaaaccacaaaaagcaggcucaaacaauucaaauaaaagucuccaaucagcaggauuuacugcaggacuuacguauucucaacuuaugacauuaaaagaugcaaugcuacaauuagauccaaacgccaaaacguggauggacauagaaggaagaccagaagacccaguagaaauagcauuauaucaaccaaguagcggauguuacauacacuucuuuagagaaccaaccgauuuaaaacaauuuaaacaagacgcaaaauacagccacgguauagacguaaccgaccuauuugcagcacaaccaggauuaaccagugcaguuauagaugcauuaccaagaaauaugguaauaaccugucaaggaucagaugauaucagaaaacuauuagaaagucaaggaagaaaagacauuaaacuaauagauauugcgcucucuaaaauagacagucgaaaauacgaaaacgcagucugggaucaauauaaagauuuaugccacaugcauacaggaguaguaguagaaaaaaaaaaaagagguggaaaagaagaaauaacaccccacugugcacuuauggacuguaucauguuugacgcagccguaaguggaggauuaaauucauuaguacuaagagcaguauuaccaagagacaugguauuccguacaagcaccccacgaguaguauuauaaggacuaguuauaagacugacuagcccgaugggccucccaacgggcccuccuccccuccuugcaccgagauuaauaaaaaaaaaaaaaaaaaaaaaaaaaaaaaaaaaaaaaaaaaaaaaaaaaaaaaaaaaaaaaaaaugcaucccccccccccccccccccccccccccccccaaaggcucuuuucagagccaccagaauu

SEQ ID NO: 11127 - RNA, 1927 nt, Artificial Sequence
  mRNA product Design i-3 comprising derived and/or modified sequence from MOPV/LASV reassortant(IGS-1;Clade IV)__AFY05578__NP (opt6)
gggagaaagcuuaccauguccgcaucgaaagaaauuaaaucauuucuauggacucaaagccuuagaagagaauuaucaggauauuguucaaauauaaaacuacaagucgugaaagaugcacaagcauuacuccacggauuagauuucagcgaaguaucaaauguccaaagacuaaugagaaaagaaagaagagacgauaacgaucuaaaaagacuaagagaucuaaaucaagcaguaaacaacuuaguggaauuaaaaagcacacaacaaaaaagcauacuuagaguagguacacucacauccgacgacuuacuaauuuuggcagcagaucuagaaaaauuaagaaguaagguuaucagaaccgaaagaccucuuagcgcaggaguauauaugggaaaucuauccucucaacaacuagaucaaagaagagcauuauuaaacaugaucggaaugagcggaggaaaucaaggagcacgugcaggaagagacggagucguuagagugugggacguaaaaaacgccgaauuauuaucaaaucaguuuggaacaaugcccucauuaaccuuagcauguuuaacaaaacaaggacaaguagacuuaaacgacgcaguucaagcacucacagauuuaggauuaauauauacggcaaaauauccaaauacuuccgaccucgacagacuaacacaaucacacccaauccuaaacaugauagacacaaaaaaaucaucacuaaacauuagcggauauaacuuuucacuaggagcagcaguaaaagcaggugcauguauguuagauggagggaauauguuggaaacaaucaaaguaucaccacaaacaauggacggaauacuaaaaagcauauuaaagguaaaaaaagcacuaggcauguucaucucagacacgccaggagaacgaaacccauaugaaaacauuuuauauaaaauaugcuuaagcggagauggauggccauacauagcaucaagaacaaguauuaccggaagagccugggaaaauacuguaguagaucuagaaagcgacggaaaaccacaaaaagccgauucaaauaauaguagcaaaagucuacaaagugcaggauucacagcuggguuaaccuauucacaauugaugacacuaaaagacgcgaugcuucaacuagacccaaaugcaaaaaccuggauggauauagaaggaagaccagaagaccccguugaaauagcauuauaucaacccaguucaggauguuacauacacuuuuuucgagaaccaacagauuuaaaacaauucaaacaagacgcuaaauacucacauggaauugaugugacagauuuauucgcaacacaaccagggcuaacaagcgcagucauagaugcauuaccaagaaacaugguaauaacaugccaaggaagugaugacauaagaaaauuauuagaaucgcaaggaagaaaagacauaaaauuaauagacauagaccuuagcaaaacagacaguagaaaauacgaaaacgcaguaugggaccaauauaaagaccuaugccauaugcauaccggaguaguugucgaaaaaaaaaaacgaggugggaaagaagaaauaacaccacauugugcauuaauggacugcauuauguuugaugcagcaguaucaggaggauuaaacacaagcguauuaagagcaguauuacccagagauauggucuuccgcacaucaaccccaagaguaguauuauaaggacuaguuauaagacugacuagcccgaugggccucccaacgggcccuccuccccuccuugcaccgagauuaauaaaaaaaaaaaaaaaaaaaaaaaaaaaaaaaaaaaaaaaaaaaaaaaaaaaaaaaaaaaaaaaaugcaucccccccccccccccccccccccccccccccaaaggcucuuuucagagccaccagaauu

SEQ ID NO: 11128 - RNA, 1927 nt, Artificial Sequence
  mRNA product Design i-3 comprising derived and/or modified sequence from LASV(LM765-SLE-2012;Clade IV)__AIT17815__NP (opt6)
gggagaaagcuuaccaugagcgccuccaaagaaauaaaaucauucuuauggacucagucauuaagacgagaacuaaguggauacugcaguaauauaaaacuacaaguaguuaaagaugcacaagcuuuacuacacgggcuagauuuuucagaaguuucaaacguacaaagauuaaugagaaaagaaagacgagacgauaaugauuuaaaaagacuaagggaucucaaucaagcuguaaauaacuuaguggaauuaaaauccacacagcaaaaaucaauauuaagaguaggaacauuaaccagugaugacuuacuuauauuagcugcagaucucgaaaaauuaaaaucaaaaguaacaagaacugaaagaccacuaucagcaggaguauacaugggcaauuuaaguagucaacaauuagaucaaagaagagcauuauuagacaugauagguaugucaggaaguaaccaaggagcacgagcaggacgagacggaguaguaaggguaugggauguaaaaaacgcagaauuacuaaauaaccaauucgguaccaugccaucauugacacuagcauguuuaacuaaacaaggacaaguagaucuaaaugaugccguacaagcuuuaacagaucuaggccucauauacacagcaaaauauccaaauacaagcgaucuagauagacucacacagucacacccaauauuaaacaugauagauacaaaaaaaaguagcuuaaauauaagugguuauaacuuuaguuuaggagcagcaguaaaagcuggagccuguaugcuagacgguggaaauauguuagaaacuauaaaagucucaccgcaaacaauggaugguauacucaaaaguauacuaaaaguaaaaaaagcauuaggcauguucauaagcgaugcgccuggagaaagaaauccauacgaaaauauauuauauaaaauaugcuuaucaggagacggauggccguacauagcaaguagaacgucaauaacaggacgugcaugggaaaauacaguaguagauuuagaaagcgacgguaaaccgcaaaaagcaggaaguaacggaaguaauaaaaguuuacaaagugcaggauucacagcaggauuaacauauucacaauuaaugaccuuaaaagacgcaauguuacaauuagauccaaaugccaaaacauggauggauauagaaggacgacccgaagacccaguagaaauagcguuauaucaaccauccucaggauguuauauucacuuuuucagagaaccuacagauuuaaaacaauuuaaacaagacgcaaaauauagccauggaauagacguaacggaucuauuugcagcacaaccuggauuaaccagcgcaguuauagaugcauuaccuagaaauaugguaauuacaugucaagguagugaugacauacgaaaauuauuugaaucacaaggacgaaaagacauaaaacuaauagacauugcccucaguaaaacggacagcagaaaauaugaaaacgcaguaugggaccaauauaaagauuuaugccacaugcauacaggaauaguugucgaaaaaaaaaaacgagguggaaaagaagagauuaccccccacugugcacugauggauuguauaauguucgacgcagcggucucaggaggacuaaacacuucagucuuaagggccgucuuaccaagagauaugguauucagaacaucaacaccaagaguaguauuaugaggacuaguuauaagacugacuagcccgaugggccucccaacgggcccuccuccccuccuugcaccgagauuaauaaaaaaaaaaaaaaaaaaaaaaaaaaaaaaaaaaaaaaaaaaaaaaaaaaaaaaaaaaaaaaaaugcaucccccccccccccccccccccccccccccccaaaggcucuuuucagagccaccagaauu

SEQ ID NO: 11129 - RNA, 1927 nt, Artificial Sequence
  mRNA product Design i-3 comprising derived and/or modified sequence from LASV(LM776-SLE-2012;Clade IV)__AIT17825__NP (opt6)
gggagaaagcuuaccaugucagcaaguaaagaaauaaaaaguuuuuuauggacccaaucacuacgacgagaacuaucaucauauugcucgaacauaaaauuacaaguaguaaaagaugcacaagcucuacuacaugguuuagacuuuucugaaguuucaaauguacaaagauuaaugagaaaagaaagaagagaugauaacgauuuaaaaagacuaagagaucucaaucaagcagucaauaaccucguugaacucaaauccacacaacaaaaaucaauucuaagaguaggcacuuuaaccucagaugacuuacugauacucgcagcagauuuagaaaaacuaaaaaguaaaguaacacgcaccgaaagaccacuaagugcuggaguauauauggguaaucuaaguucgcaacaauuagaccaaagaagagcucuucuauccaugauagguaugucaggaucaaaucaaggagcaagagcagguagagauggaguaguaagaguaugggacguaaaaaaugcagaacuucuaaauaaccaauucggaacaaugccaucacuuacauuagcuugccucacaaagcaaggacaaguagaccuaaaugaugcaguacaagcucuaacagacuuaggcuugauauauacagcaaaauauccaaauacuucagauuuagaucgauuaacacaaagucacccaauauuaaauaugauagauacuaaaaaaucaucauugaauauaucaggauacaauuuuagccuaggagcagcugucaaagccggagcauguauguuagacggaggcaauaugcuagaaacaauaaaaguuaguccucaaacaauggauggaauauuaaaaaguauacuaaaaguuaaaaaagcauuaggcauguuuauaagcgauacucccggagaaagaaauccauaugaaaauauauuauacaaaauaugucuaucuggagauggauggccauauauagcaagcagaacuagcauaacuggaagagcaugggaaaacaccguaguagaucuagaaucagauggaaaaccccaaaaagcaggaucgaacaauucaaauaaaagucuacaaagugcaggauuuacagcaggacuuacauauucacaacuaaugacccuaaaagaugcaaugcuacaauuagaccccaaugccaaaacauggauggacauagaaggaagaccagaggacccaguugaagucgcccuauaucaaccaucaucagguuguuauauacacuucuucagagaaccaacagaucuaaaacaauuuaaacaagacgcuaaauacagucaugguauagacguaacagaucuauuugcagcacaaccaggcuuaaccagugcaguuaucgaugcuuuaccaagaaacaugguuauaaccugucaaggaucagaugauauucgaaaacuucuagaaucucaaggaagaaaagauauuaaacuuauagauauagcacuaucgaaaacagauucccgaaaauaugaaaacgccguaugggaucaauauaaagaccucugucacaugcacacagguguagucguagaaaaaaaaaaaagaggaggaaaagaggaaauaaccccacacugugcacuaauggauugcauaauguuugacgcagcaguaucaggaggauuaaauacaucaguacuaagagcaguauuaccaagagacaugguuuuuagaacaucaaccccucgaguaguauuauaaggacuaguuauaagacugacuagcccgaugggccucccaacgggcccuccuccccuccuugcaccgagauuaauaaaaaaaaaaaaaaaaaaaaaaaaaaaaaaaaaaaaaaaaaaaaaaaaaaaaaaaaaaaaaaaaugcaucccccccccccccccccccccccccccccccaaaggcucuuuucagagccaccagaauu

SEQ ID NO: 11130 - RNA, 1927 nt, Artificial Sequence
  mRNA product Design i-3 comprising derived and/or modified sequence from LASV(Mad39;Clade IV)__ANH09723__NP (opt6)
gggagaaagcuuaccaugagcgcaucaaaagaaauaaaaucauuccuauggacccaaagccuaagacgagaacuaucagguuauugcucaaacauaaaauuacaaguuguaaaagacgcacaagcacuauugcacggacuagacuucucagaaguaucaaacguacaaagacuaaugagaaaacaacgaagagacgauaaugaucuaaaaagauuaagagaccuaaaucaagcaguaaacaaucucguagaacuaaaaucaacacaacaaaaaucaguauuaagaguaggaacacuaacaagugaugacuuauuaacccuagcugcagacuuagaaaaauuaaaaaguaaagucacaagaacagagaggcccuuaacugcaggaguguauaugggaaaucuaaguagucaacaauuagaucaacggagagcauuacuaaacaugauaggaaugucaggaggcaaucaaggagcacgaacuggaagagacggaguaguaagaguaugggacgucaaaaacgcagaguuauuaaauaaucaauucggaacaaugccaucauuaacguuagcauguuuaacaaaacaaggccaaguagacuuaaacgauguaguacaagcccuaaccgaucuagggcuaauauacacagcaaaauacccaaauacaagugaucuagacagacucacucagucucacccaauauuaaacaugauagauacaaauaaaaguucauuaaacauuucaggauacaauuucagccucggagcagcaguaaaagcaggcgcauguaugcuagacggcggaaauaugcucgaaacgauaaaagucucaccucaaacaauggauggaauacuaaaauccauacucaaaguaaagaaaaguuuaggcauguuuaucuccgauacaccaggagaaagaaacccauaugaaaacauacuauauaaaauauguuuaagcggagauggauggccauacauagcaaguagaacaucuauaacaggcagagcaugggaaaacacaguuguagacuuagaaucaggaggaaaaccacaaaaagccggaucaaacaauagcaauaaaagccuucaaucagcaggauucgccgcaggccuaacauauagccaacuaaugacauuaaaagaugcaauguuacaacuagacccaaaugcaaaaacauggauggacauagaagggagaccagaagacccaguagaaauugcucuauaucaaccaauaaguggauguuacauacacuucuuuagagaaccaacagauuuaaaacaauucaaacaagacgcaaaauacagucaugguauagacguaacagauuuauucgcagcgcaaccagggcuuacaucugcaguaauagaagcauuaccaagaaacaugguaauaaccugucaaggaagugaugacaucagaaaacuauuugaaucacaagggagaaaagauaucaaauuaauagauaucgcguuaucaaaaacagauucaagaaaauacgaaaacgcaguaugggaccaauacaaagaccuaugccauaugcauacaggcguaguaguagaaaagaaaaagaaaggcggaaaagaggaaauaacaccgcacugcgcauuaauggacuguauaauguuugaugcagcagucucaggaggauuaaacacccuaguauuaagagcaguauuaccaagagacaugguauucaggacaucgacaccaaaaguuguacuauaaggacuaguuauaagacugacuagcccgaugggccucccaacgggcccuccuccccuccuugcaccgagauuaauaaaaaaaaaaaaaaaaaaaaaaaaaaaaaaaaaaaaaaaaaaaaaaaaaaaaaaaaaaaaaaaaugcaucccccccccccccccccccccccccccccccaaaggcucuuuucagagccaccagaauu

SEQ ID NO: 11131 - RNA, 1927 nt, Artificial Sequence
  mRNA product Design i-3 comprising derived and/or modified sequence from LASV(Z0947-SLE-2011;Clade IV)__AIT17841__NP (opt6)
gggagaaagcuuaccaugucagccucaaaagaaauaaaaucauuucuauggacacaaucauuacgucgagaauuaucaggauacugcucaaacauaaaacuacaaguugucaaagacgcacaagcccuacuacacggacuagauuuuagugaaguaagcaacguccaacgauuaaugagaaaagaacgcagagacgacaacgaccuaaaaagacucagagaucuaaaucaagcaguaaacaaccuaguggaacuuaaaagcacccaacaaaaauccauauuaagaguaggaacacuaacaucugaugauuuauuaauacuagcugcagaucuggaaaaguuaaaaucaaaaguaacaagaaccgaaagaccacuaucagccggaguauauaugggaaaucuaucaagucaacaauuagaucaacgaagagcacuacuaaacaugauaggaaugucuggaucaaaucaaggagcaagaaccggaagagacggugucguaagaguaugggacguaaaaaaugcagaacuacuaaauaaccaauuuggaaccaugccaucauuaaccuuagcaugucuaaccaaacaaggacagguugauuuaaaugaugcuguacaagcacuaaccgaccuuggauuaaucuauacagcaaaauauccaaauacuucggacuuagauagacuaacacaaucucacccaauacuaaacaugaucgacacaaaaaaaucaucacuaaacauaucaggauauaauuucucacuaggagcggcaguaaaagccggagcaugcauguuagacggaggaaacaugcuagaaacaaucaaaguaaguccacagacaauggacggaauucuaaaaucaauacucaaaguaaaaaaagcacuaggaauguuuauaucugacgcaccaggagaaagaaauccauacgaaaauauacuauacaaaaucugccuaucaggugacggauggccauacaucgcaucaagaacaucaauaacaggacgagccugggaaaauaccguaguagauuuagaaucagauggaaaaccacaaaaagcuggaucaaacggaucaaauaaaucauuacaaucagcagguuucacagcaggacuuacauacucacaguuaaugacacucaaagaugcuaugcuucaacuagaucccaaugcaaaaacauggauggacauugaaggaagacccgaagaucccguagaaauagcucuauaucaaccaagcucaggauguuacauccacuuuuuuagagaaccaacagacuuaaaacaauucaaacaagacgccaaauacucccacggcaucgauguaacagaucuauuugcagcucaaccaggacuuacaucagcaguaauagaugcauuaccaagaaacaugguaauaacuugccaaggaucagacgacauaagaaaacuauucgaaucucaaggacgaaaagacaucaaguuaauagauauagcacuaucuaagacagauucucgaaaauaugaaaaugcaguaugggaucaauacaaagauuuaugccacaugcauacaggcaucgucguagaaaaaaaaaaaagagguggaaaagaagaaauaacaccucauugcgccuuaauggacugcauaauguuugacgcugccguaucaggaggauuaaauacaaguguauuaagagcaguucuaccacgugacaugguauucagaacaucaacaccaagaguuguuuuauaaggacuaguuauaagacugacuagcccgaugggccucccaacgggcccuccuccccuccuugcaccgagauuaauaaaaaaaaaaaaaaaaaaaaaaaaaaaaaaaaaaaaaaaaaaaaaaaaaaaaaaaaaaaaaaaaugcaucccccccccccccccccccccccccccccccaaaggcucuuuucagagccaccagaauu

SEQ ID NO: 11132 - RNA, 1927 nt, Artificial Sequence
  mRNA product Design i-3 comprising derived and/or modified sequence from LASV(Josiah;Clade IV)__NP_694869__NP (opt11)
gggagaaagcuuaccaugucagccagcaaagaaauaaaaucauuccucuggacacaaucacuccgccgcgaacucucaggguauugcucaaacauaaaacuccaaguagucaaagacgcccaagcccuccuacacggacuagacuucucagaaguaagcaacguccaacgccuaaugagaaaagaacgcagagacgacaacgaccucaagaggcucagagaccuuaaccaagcggucaacaaccuugucgaacucaaaagcacacaacagaaauccauacuacgagucggcacacuaaccagcgacgaccuccugauccucgcagccgaccucgagaaacuaaaaagcaaagucauccgaacagaaaggccccucuccgccggagucuacaugggaaaccuaagcucccaacaacucgaccaacggcgagcccuccucaacaugaucgggaugucgggcggcaaucagggcgcccgcgccggccgggacggcgucguacgagucugggacgucaaaaacgcagaacuccuuaacaaccaguucggcaccaugcccagccuaacacucgccugccugaccaaacaaggccaaguggaccucaacgacgcagugcaagcccucaccgaccuaggccugaucuacaccgcgaaauacccaaacaccuccgaccuagaccgccugacacaaucgcaccccauacucaacaugaucgacaccaaaaaaucuucgcuaaacaucucaggauacaacuucucccucggagccgcggucaaagcaggagccugcaugcuggacggcggaaauaugcuggaaaccauaaaaguaagcccccagaccauggacggcauccugaaaucaauccugaaagucaaaaaagcccuuggcauguucaucagcgauaccccgggcgaacgcaauccauacgaaaacauccuguacaaaauaugcuuaucaggcgacggcuggcccuacaucgcauccagaacuucgaucacaggccgagcaugggaaaacaccgucgucgaccuagaauccgacggcaaaccucaaaaagcggacagcaacaacucauccaaaagccuacaaucggcaggcuucaccgccggccucacguacucccaacucaugacccucaaagacgccaugcuacagcuagacccaaacgcaaaaaccuggauggacaucgaaggccggcccgaagaccccgucgaaaucgcucucuaccaaccaagcagcgguugcuacauacacuucuucagggaacccaccgaccucaagcaauucaaacaagacgcuaaauacucccacggaaucgacgugaccgaccucuucgcgacacagcccggccucaccagcgcaguaauugacgcacugccaagaaacaugguaauaacaugccaaggaagcgacgacauacgaaaacuccucgaaucacaaggacgcaaagacaucaaacucaucgacaucgcgcucuccaaaacggacagccgcaaauaugagaaugccguaugggaccaauacaaagaccucugccacaugcacaccggaguaguaguagaaaaaaaaaaaagaggagggaaagaagagauaaccccccacugcgccuuaauggauugcaucauguucgaugcagcagugagcggcggccucaacaccuccguccuccgagcaguccuuccgcgcgacaugguauucagaaccuccacaccaagagucguacucuaaggacuaguuauaagacugacuagcccgaugggccucccaacgggcccuccuccccuccuugcaccgagauuaauaaaaaaaaaaaaaaaaaaaaaaaaaaaaaaaaaaaaaaaaaaaaaaaaaaaaaaaaaaaaaaaaugcaucccccccccccccccccccccccccccccccaaaggcucuuuucagagccaccagaauu

SEQ ID NO: 11133 - RNA, 1927 nt, Artificial Sequence
  mRNA product Design i-3 comprising derived and/or modified sequence from LASV(LP;Clade I)__AAF86702__NP (opt11)
gggagaaagcuuaccaugucaaacuccaaagaaaucaaauccuuccucuggacccaaucacuccgccgcgaacuauccggauacugcucaaacaucaaacuucaaguaguaaaagaugcacaagcccuccuacacggccucgacuuuucagagguaucaaacguccaacgacucaugcguaaacaaaaacgagacgacgcugaccuuaaacgauuacgcgaccuaaaccaagccgugaacaaccuugucgaacucaaauccacccaacagaaaaacguccuccgcguaggcacccucagcuccgacgaccucaucacucucgcugccgaccucgaaaaacuaaaauccaaaguaauccgaaccgaacggccccucuccagcggcguauacaugggcaaccugucaagucaacagcucgaccaacgcagagcccucuugucgaugaucggaauguccggaggaccccaaggcaacagaaccggcggcgacggcguaguacgugucugggacgugaaaaacgccgaacuacuuaacaaccaguuugggacgaugcccagccucacccucgccugccucaccaaacaaggccaagucgaccucaacgacgccguccaagcacucacagaccuuggacucaucuacaccgcaaaguaccccaacuccucggaccuugacaugcugacacaaucacacccaauacugggcaugguugauaccaagaaaagcagccuaaauaucucagguuacaacuucucgcucggagccgcagucaaagccggagccugcaugcucgacggaggcaauaugcuagaaaccauaaaagucucaccccaaacuauggacggcauccucaaaucaauccucaaagucaaaagaucccuuggcauguucaucuccgacacccccggugaacgaaacccuuacgaaaacauacucuacaaaaucugccuauccggcgaaggauggccuuacaucgccagucgcaccuccaucaccggccgcgccugggaaaacacccuagucgaucuugaauccgacaacaaacccccuaaacuaaacucggccggcagcaacaaaucccuccaagccgccggacuaaacgccggacucaccuacagccaacucaugacccuaaaagauugcaugcuccaacucgacccaucaucuaagacauggauagacaucgaaggacgccccgaagacccagucgagaucgcccucuuccaacccuccucaggcugcuacauccacuucuuccgcgaacccaccgaccuaaagcaauucaaacaagacgcaaaauauucacacgguauagacgucacagaccuauucucgacccaaccaggccugaccucugcggucauagaagcacuccccagaaacaugguccuaaccugccaaggcucagacgacauuaagaaacuacucgaaagccaaggccgccgcgauaucaaacuaaucgacaucucccuauccaaagccgacucacgaaaauucgaaaacgcagucugggaccaguacaaagaccugugccauaugcacacaggcgucguagucgaaaagaagaaacgcggaggaaaagaagaaauuacaccccacugcgcccuacucgacugcaucauguucgacgccgccaccacuggcucccuaaacaucaccacccuccgagccguacuaccccgcgacaugguauuccgaaccuccacccccaaagucguacuuuaaggacuaguuauaagacugacuagcccgaugggccucccaacgggcccuccuccccuccuugcaccgagauuaauaaaaaaaaaaaaaaaaaaaaaaaaaaaaaaaaaaaaaaaaaaaaaaaaaaaaaaaaaaaaaaaaugcaucccccccccccccccccccccccccccccccaaaggcucuuuucagagccaccagaauu

SEQ ID NO: 11134 - RNA, 1927 nt, Artificial Sequence
  mRNA product Design i-3 comprising derived and/or modified sequence from LASV(803213;Clade II)__AAF86704__NP (opt11)
gggagaaagcuuaccauguccgcaagcaaagaagucaaaucauuccucuggacccaaucacuccgccgagaacucucgggcuacugcucaaacaucaaacuacaagucguaaaagacgcccaagcccuccuccacggucucgacuucuccgaagucaacaacguacagcgccucaugcgaaaacaaaaacgcgacgacggcgaccuuaaacgacuacgagaccuaaaccaagccguaaacaaccucgucgaacugaaauccacccaacaaaaaucaauccugcgaguugguacccucacauccgacgaccuccuaacacuagcagccgaccucgaaaaacucaaguccaaagucauacgcaccgaacgcccacucaguuccggcguauacaugggcaaccucucuacccaacaacucgaacaacgccgcgcgcuccuaaauaugaucgguaugguagguggagcccaaggcacccaaccaggccgcgacggcgugguacgcgucugggacgugaaaaaccccgaucucuuaaacaaucaauucggcacaaugcccucccucacacuagcaugccugaccaaacaaggacaagucgaccuaaaugacgccguccuagcucuuacagaccuaggacucaucuauaccgccaaauacccuaacuccuccgaccucgaccgacucucacaaucucacccaauccuaaacauggucgacaccaagaaauccucccucaacaucucgggauacaacuucagccucggcgccgccgucaaagcaggcgccugcaugcuagacggcggcaacaugcucgaaaccaucaaaguaacgccccaaaccauggacggcauccucaaauccauccucaaggucaaaagaagccucggcauguucguuucggacacucccggcgaacgcaaccccuacgaaaacauccuauacaaaaucugccuaucaggcgacggcuggcccuacauagcaucacgaaccaguaucguaggccgagcaugggaaaauaccacaguagaccucgaguccgacggaaaaccucaaaaagucggcacugccggaucaaacaaaucccuccaaagcgccggcuucccaaccggccuuaccuauucccaacuaaugacccucaaagauuccaugaugcaauuagaccccuccgccaagacauggaucgacaucgaaggccgucccgaagacccaguagaaaucgcccucuaccaacccaugagcggaugcuacauucacuuuuucagagaacccaccgaccucaaacaauucaaacaagacgccaaguacucccaugggauagacgucgccgaccucuuccccgcccaacccggccucaccucggccguaauagaggcccuaccaagaaacaugguccuaaccugccaagguuccgacgacaucaagaaacuccucgacucacaaggcagacgcgacaucaaacuaaucgacaucucccucuccaaagucgacucacgaaaauucgaaaacgccgucugggaucagugcaaagaccucugccacaugcacacaggcgucgucgucgaaaagaagaaacgaggcggaaaagaagaaauaacaccacacugcgcccucauggauugcaucauguucgacgccgccguaucuggcgggcuaaacauuccaguccugcgagccguccucccccgcgacaugguauuccgcaccuccuccccaaaagucguccucugaggacuaguuauaagacugacuagcccgaugggccucccaacgggcccuccuccccuccuugcaccgagauuaauaaaaaaaaaaaaaaaaaaaaaaaaaaaaaaaaaaaaaaaaaaaaaaaaaaaaaaaaaaaaaaaaugcaucccccccccccccccccccccccccccccccaaaggcucuuuucagagccaccagaauu

SEQ ID NO: 11135 - RNA, 1930 nt, Artificial Sequence
  mRNA product Design i-3 comprising derived and/or modified sequence from LASV(GA391;Clade III)__CAA36646__NP (opt11)
gggagaaagcuuaccauguccgcaagcaaagaagugagauccuuccucuggacccaaucgcuccgccgcgagcucucaggcuacugcucgaacaucaaauuacaagucgucaaagacgcacaagcccuccuacacggacucgacuucucagaaguguccaacguccaacgacugaugaggaaacaaaagagagacgacggcgaccuaaaacgacuacgcgaccuaaaccaagccgucaacaaccuagucgaacuaaaauccacacaacaaaaaucaguccuucgcguaggaacccuaucaucagacgaccuccucauccucgcagccgaccuagaaaaacugaaaucaaaaguaacacgaaccgaacggccacucuccagcgggguauacauggggaaccucuccucccaacaacuugaccaaagacgcgcucuccuuaacaugaucggcaugacaggcgugagcggagguggcaaaggcgcaucggacgggaucguccgcguaugggacgucaaaaacgccgaacuacucaacaaccaauucggaaccaugccaucccucacacucgccugccucaccaagcaaggacaaguggaccuaaacgacgccguccaagcccucaccgaccucggccucaucuacaccgcgaaauacccaaacagcucggauuuggaccgacuaucccaaucccacccaauacuaaacaugaucgacaccaagaaauccagucuaaacaucuccggcuacaacuucucccucggagccgcggucaaagccggcgccuguaugcuggacggcggcaacaugcuagaaaccaucaaagucucuccccaaaccauggacgguauccucaaauccauccugaaagucaagaaaagccucggcauguucgucucagacacaccgggagaacgcaaccccuacgaaaacauccuguacaaaaucugucucucaggcgacggcuggcccuacaucgccagccggaccagcaucguaggcagagccugggaaaacaccguaguagaccucgaacaagacaacaaaccccagaaaauaggaaacggcggcucaaacaaaucacuccaaagcgccggauucgccgccggacugaccuacagccaacuaaugacccuaaaagacuucaaaugcuucaaccucauacccaaugccaaaacauggauggacauagaaggacgacccgaagacccaguagagaucgcccucuaucaaccuuccucaggauguuacguccacuucuucagagagcccaccgaccugaaacaguucaaacaagacgccaaauacucacacggcaucgacgucacagaccuauucgccgcccaacccggccugaccuccgccgucaucgaagcccucccacgcaacauggucauaacaugccaaggcuccgaagacaucagaaaacuacucgaaucccaaggccgccgcgacauuaagcuaauagacauaacccuauccaaagccgauagccguaaauucgaaaacgcagucugggaccaauuuaaagaccuaugccacaugcacaccggcgucgucguggaaaagaagaaacgaggcggcaaagaagaaaucacaccccacugcgcccucauggacugcaucauguucgacgccgccguuucgggcggccucgacgccaaaguccuacgcgucguccuaccccgagacauggucuuccgcaccagcacgcccaaaguaguccucuaaggacuaguuauaagacugacuagcccgaugggccucccaacgggcccuccuccccuccuugcaccgagauuaauaaaaaaaaaaaaaaaaaaaaaaaaaaaaaaaaaaaaaaaaaaaaaaaaaaaaaaaaaaaaaaaaugcaucccccccccccccccccccccccccccccccaaaggcucuuuucagagccaccagaauu

SEQ ID NO: 11136 - RNA, 1927 nt, Artificial Sequence
  mRNA product Design i-3 comprising derived and/or modified sequence from LASV(AV;Clade V)__CCA30315__NP (opt11)
gggagaaagcuuaccaugagcgcauccaaagaagucaaaagcuuccucuggacacaaucccuacggcgcgaacuauccggcuacugcucuaacaucaaacuccaagucguuaaagacgcccaagcccuccuccacggacucgacuucuccgaaguuuccaacguacaaagacuuaugcgaaaacagcgccgcgacgacucagaccuaaaacgacugcgcgaccuaaaccaagcaguaaacaaucucgucgaacucaaaagcacccaacaaaaaucaguucuccgcgucggcacucucuccuccgacgaccuccucacccuagccgcugaccuagaaaaacugaaauccaaagucaccagaaccgaacgaccccucuccucaggcgucuacaugggaaaccucaguucacaacaacucgaccaacgccgagcccuccuaaaccugaucggaaugacaaacggaagccaaggcucacaagcaggcagagacggcgucgugcgcgucugggacgucaaaaacgcggaacuccuaaacaaccaauucggcaccaugcccucacugacccucgcuugccuuaccaaacaaggccaaguagaccucaacgacguuguccaagcacuuaccgaccuaggacugauauacacugccaaauaccccaacaccuccgaccucgaccgccuaacccaaagccaccccauucuaaacaugaucgacacgaaaaaauccucauuaaacaucuccggauacaacuucucacugggagcagcaguaaaagcaggggcauguaugcucgacggcggaaacaugcucgaaaccaucaaggucagcccccaaagcauggacggcauucuaaaaucaauccuaaaaguaaaacgcgcccuaggaauguucguauccgacacccccggcgaacgcaaccccuacgaaaacauacucuauaaaaucugccuaucaggcgacggcuggcccuacauagccucccgcaccucgaucgucggcagagccugggaaaacaccguagucgaccucgaaaccgacggaaaaccacaaaaaauaggcuccggaaacagcaacaaaucucuccaaagcgcaggauucuccgccggccugaccuacagccaacucaugacccucaaagacgccaugcuccaacucgacccuaacgcaaaaaccuggauggacaucgaaggacgccccgaagaccccguagaagucgcccuauaccagccuaucuccggcuguuacauccacuucuuccgcgaacccacagaccuaaagcaauucaaacaagacgccaaauacagccacggcaucgacauagccgaccucuucgccgcucaaccuggccuaaccucugccgucaucgaagcccucccacgcaacauggucaucacaugccaaggcagcgaggacaucaaaaaacuccuagaaucccaaggccguaaagacaucaaacugauagacaucgcacuauccaaaaucgacucccggaaauucgaaaacgcggucugggaccaguauaaagaccucugccauaugcacacuggagucgucguagaaaaaaaaaaaagaggcggaaaagaagaaaucacgccacacugcgcccuuauggacugcauaauguucgacgcagcugucagcggcggccucaacacucucguccucagagccguccucccccgagauauggucuuccgcaccucaacaccccgcguaguccucuaaggacuaguuauaagacugacuagcccgaugggccucccaacgggcccuccuccccuccuugcaccgagauuaauaaaaaaaaaaaaaaaaaaaaaaaaaaaaaaaaaaaaaaaaaaaaaaaaaaaaaaaaaaaaaaaaugcaucccccccccccccccccccccccccccccccaaaggcucuuuucagagccaccagaauu

SEQ ID NO: 11137 - RNA, 1927 nt, Artificial Sequence
  mRNA product Design i-3 comprising derived and/or modified sequence from LASV(Togo/2016/7082;Clade VI)__AMR44578__NP (opt11)
gggagaaagcuuaccauguccaacucuaaagaagucaaaucauuccucuggacccaaucacuccgccgcgaacucuccgguuacugcuccaauauaaaacugcaaguagucaaagacgcacaagcucuccuccacggccucgauuuuuccgaaguguccaacguccaacgacucaugagaaaacaaaaacgagacgacggcgaccucaaacgacugcgcgaccuaaaccaagccgucaacaaccuugucgaacuaaaaucaguccagcagaaaucaauucugcgcgucggcacacucacuuccgacgaccuacucacccuagcagccgaucucgaaaaacuuaaaucaaaagucacucguaccgaacgcccacuauccagcggcgucuacauggggaaccucagcucacaacaacucgaccaaagacgagcauuacucuccaugauaggaaugucaggcggcaaccaaaacucacaacccaaaggcgacggggucguccgcgucugggacgucaaaaacgccgaccuucucaauaaccaauucggcacaaugcccucacucacccucgcaugccuaaccaagcagggucaagucgaucucaacgacgccguccaggcacuaacagaccuaggacucaucuacaccgccaaauaccccaacuccucugaccucgaccgccucucacaaucacaccccauccugaacaugaucgacaccaagaaaucaagccucaacauuuccggcuacaacuuuucucuaggugcggccaucaaaacaggcgccuguaugcucgacggcggcaacaugcucgaaaccaucaaaguaacaccccaaaccauggacggcauacucaaauccauccucaaaguaaaacgaucccuagggauguuuaucuccgacacacccggcgaacgcaaccccuacgaaaauauccuauacaaaaucugccuaucuggcgacggauggccauacaucgccucacgaaccgccaucauaggccgggccugggaaaacaccguagucgaccucgaauccgacagcaaaccccagaaaauaggcucuaacggauccaacaaaucacuacaauccgcaggcuucgccccaggccucaccuauagccaacuaaugacccucaaagacagcaugcuccaacuugacccaaacgccaaaacauggaucgacaucgaaggacgcccagaagacccaguagaagucgcccucuuccaacccauaucgggcugcuacauccacuucuuccgcgagccaacagaccucaaacaauucaagcaagacgccaaauacucccacggaauagacgucaccgaccuauucgcagcacaacccggucucacauccgccguuaucgaggcccucccccggaacaugguccugaccugccaaggauccgacgacaucaagaaacuccucgacagucaaggacguagagacauaaaacuuauagacgucucccuaaacaaaaucgacagccgcaaauucgaaaacgcagucugggaccaauacaaggaccuaugccauaugcacaccggcgucgucgucgaaaagaaaaagaaaggcggcaaagaagaaaucacgccccacugcgcccuacuagacugcaucauguucgacgcugccgucucgggaggccucaacgcaaccguacuccgugccguacucccccgcgacaugguauuccggaccucuuccccaaaagucgucuuauaaggacuaguuauaagacugacuagcccgaugggccucccaacgggcccuccuccccuccuugcaccgagauuaauaaaaaaaaaaaaaaaaaaaaaaaaaaaaaaaaaaaaaaaaaaaaaaaaaaaaaaaaaaaaaaaaugcaucccccccccccccccccccccccccccccccaaaggcucuuuucagagccaccagaauu

SEQ ID NO: 11138 - RNA, 1927 nt, Artificial Sequence
  mRNA product Design i-3 comprising derived and/or modified sequence from LASV(KAK-428;Clade n.d. (VII))__ANH09741__NP (opt11)
gggagaaagcuuaccaugagcaacucaaaagaagucaaaucauuccucuggacccaaucacuccgcagagaauuauccggcuacugcaccaacaucaaacuccaaguagucaaagacgcccaagcccuacuacacggucucgacuucuccgaagucagcaauguccaacgacucaugcgaaaacaaaaacgugacgacaacgacuuaaaaagacucagagaccugaaccaagccguaaacaaccuagucgaacucaaaucgguccaacaaaaauccgugcuaaaagugggcacccucaacucagacgaccuuuuaacacucgccgccgaccucgaaaaacugaaaucgaaagucguccgaaccgaacgcccccucuccuccggcguauacaugggcaaccuauccucacaacaacucgaccaacgccgugcgcuccuaaacaugaucgguauggccggaggcagccaaggcaaccaacccucccgagauggagucgugcgagucugggacgucaaaaacgccgaccuucucaacaaccaauucgguacaaugccaucacucacgcuagccugccuaaccaaacagggacaaguagaccucaacgacgucguccuagcccuuacagaccuaggccugauauacaccgccaaauacccaaacuccuccgaccucgaccgcuuaagccaaaaccacccaguacuaaacaugaucgacgucaacaaaucaucccucaacauauccggcuacaacuucagccucggcgcagccgucaaggccggugcaugcaugcucgacggcggaaacaugcuagaaacuaucaaaaucagcccccaaaccguagacggcauacuaaaauccauacucaaagugaaacgugcacuaggcauguucguauccgacaccccaggagaacgaaaccccuacgaaaacauccuuuacaaagucugccuaucaggaaacggcuggcccuacaucgcaagccgcacaucaaucgucggcagagccugggaaaacaccguagucgaucuagagucgaacaaaaaccaaccuaaagucgguaauaacggauccaacaagaugcuucaauccuccggcuucgccaccggccucaccuacucccaacucaugacacuacgggacuccaugcuccaacucgaccccaccgcaaaaaccuggauugacaucgaaggccgccccgaagacccuguugagcucgcacuauuccaaccauccuccggcugcuacauacacuucuuccgcgaaccuacagaccucaagcaauucaaacaggaugccaaauacagccacggcaucgacgugaacgaccuauucucggcccaacccggccuaaccagugccguccuagaagcccucccacgcaacaugguccuaaccugccaagggagcgacgacauccgcaaacuccucgacucacaagaccgcaaagacauaaaacucaucgacaucucccucagcaaggccgacgcccgcaaauucgaaaacgacguaugggaccaauucaaagaccucugccacaugcacaccggcaucguaguagaaaagaagaagaaaggcggaaaacaagaaaugaccccucauugcgcccuccuagacugcaucauguucgacgcagcugugagcggcggccucaacguccccacccucagagcaguccuaccaacagacauggucuuccgcaccauaaccacaaaaguaguacuauaaggacuaguuauaagacugacuagcccgaugggccucccaacgggcccuccuccccuccuugcaccgagauuaauaaaaaaaaaaaaaaaaaaaaaaaaaaaaaaaaaaaaaaaaaaaaaaaaaaaaaaaaaaaaaaaaugcaucccccccccccccccccccccccccccccccaaaggcucuuuucagagccaccagaauu

SEQ ID NO: 11139 - RNA, 1927 nt, Artificial Sequence
  mRNA product Design i-3 comprising derived and/or modified sequence from LASV(Pinneo-NIG-1969;Clade I)__AIT17837__NP (opt11)
gggagaaagcuuaccauguccaauuccaaagaaaucaaauccuuccucuggacacaaucacuccgccgagaacucucaggauacugcucaaacaucaaacuacaaguagugaaagacgcacaagcccuucugcacggucucgauuucucagaagucuccaacguacaacgccucaugagaaaacaaaaacgcgacgacgcagaccucaaacgacuccgagaccuaaaccaagccgucaacaaccucgucgagcucaaauccacccaacagaaaaacguacuccgagucggaacccucagcucagacgaccucaucacgcuagcggcagaccucgaaaaacuuaaaagcaaagucauccgcacagagcgcccacuauccuccggagucuacauggggaaccucuccucccaacaacucgaccaacgccgcgcccuccucucuaugaucgguauguccggcggcccacaaggaaaucgcaccggcggagacggaguaguacgcguaugggacgucaaaaacgcagaacuccuuaacaaccaauucggaacaaugccaucccugacccuggcaugccuaacaaaacaaggccaaguagaccuaaacgacgcaguacaagcucucacagaccuaggccucaucuacaccgcaaaauaccccaacucguccgaccucgacaugcuuacccaaucccacccaauccucggaaugguagacacgaaaaagagcucccuaaacaucagcggauauaacuucucgcugggcgccgcggucaaagcgggcgccugcaugcuggacggcggaaacauguuagaaaccaucaaggucucgccccagacaauggacgggauacuaaaauccauucuuaaagucaaacgcucucuaggcauguucaucuccgacacccccggcgaacgcaacccauacgaaaauauacuauacaaaaucugucucagcggugaaggcuggcccuacauagccagcagaaccagcaucaccggacgcgcgugggaaaacacacucgucgaccucgaaucagacaacaagccacccaagcucaacucagcaggguccaacaaaucacuacaagcagccggccucaacgccggccuaaccuacucccaacuaaugacccucaaagacugcaugcuccaacuugaccccagcuccaaaaccuggaucgacaucgaaggacgccccgaggacccagucgaaauagcccuauuccaacccuccagcggaugcuacauacacuucuucagagaaccaacagaccucaaacaauucaagcaagacgccaaauauucucacggcaucgacgugaccgaccucuucuccacacagcccgggcucaccagugcagucauagaagcccucccacgaaacaugguacucacaugccagggaagcgacgacauaaagaaacuccucgaaagccaagguagacgggacaucaaacucauagacaucucccucuccaaagcagauucacgcaaauucgaaaacgccgucugggaccaauacaaagaccuuugccacaugcacaccggagucguagucgaaaagaagaaacgagguggaaaagaagaaaucacaccccacugcgcccuacuagacugcauaauguucgacgccgcaaccacaggaagccuaaacaucaccacacucagggccguccuaccccgcgacaugguguucagaacuagcacacccaaagucguauuauagggacuaguuauaagacugacuagcccgaugggccucccaacgggcccuccuccccuccuugcaccgagauuaauaaaaaaaaaaaaaaaaaaaaaaaaaaaaaaaaaaaaaaaaaaaaaaaaaaaaaaaaaaaaaaaaugcaucccccccccccccccccccccccccccccccaaaggcucuuuucagagccaccagaauu

SEQ ID NO: 11140 - RNA, 1927 nt, Artificial Sequence
  mRNA product Design i-3 comprising derived and/or modified sequence from LASV(ISTH0009-NIG-2011;Clade II)__AIT17405__NP (opt11)
gggagaaagcuuaccaugucagucuccaaagaagucaaaucauuccucuggacccaaucccugcgacgggaacucagcggcuacugcuccaacaucaaacugcaagucgucaaagacgcccaagcacuacuccacggccuagauuucucagaaguaagcaacguccaacgacucaugcguaaacaaaaacgcgaugacucagaccuaaagcgacuacgagaccugaaccaagcaguaaacaaccucgucgaacucaagucuacccaacagaaaagcauacuccgagucggcacccucacuuccgaugaccuucucacccuagccgccgaccucgagaaacucaaauccaaagucauccgaacagaacgcccccuaucaagcggcguauacaugggcaaccuauccacacaacagcuagagcaacgccgcgcccuacuaaacaugauaggcaugguagguggagcgcaaggcacucagccaggccgcgacggcgucguacgcguaugggacgucaaaaacccugaccuccucaacaaccaauucggcaccaugcccagccuaacacucgccugccuuaccaagcaaggccaaguagaccucaaugacgcggucuuagcccucaccgaccucggccucaucuacacagccaaauaccccaacuccucagaccucgaccgccugagccaaucccacccaauucucaacauggucgacauuaaaaagagcagccuuaacauauccggcuacaacuucagccuaggcgccgcaguaaaagccggcgccugcaugcucgacggcggcaacaugcuagaaacgaucaaagucacgccccaaaccauggacggcauacucaaauccauacucaaaguuaaacgcucccucggcauguucgucuccgauacccccggcgaacgcaaccccuacgaaaacauccuuuacaaaaucugccucagcggagacggauggccauacaucgcuucccgcaccagcauagucggccgcgcaugggaaaacaccaccguagaccucgaauccgacggcaaaccccaaaaagucggcucagcaggaucaaacaaaucacuccagagugccggcuuccccacgggccuuacauacucccaacuaaugacccucaaagacagcaugaugcaacuggacccauccgccaaaaccuggauagacauagaaggccgacccgaagacccaguagagauagcccucuaccaacccaugagcggaugcuacauacacuucuuccgagaaccuaccgaccucaagcaauucaaacaagacgccaaguacucccacggcaucgacguggccgaccucuucccagcccagcccggccucaccagcgccgucaucgaagcucuaccccguaacaugguacucacaugccaaggaagcgacgacauuaaacgccuccucgauucccaaggacgacgcgacaucaaacucauagacauagcccucuccaaagccgacucccgccgcuucgaaaacgcaguaugggaccaaugcaaagaccucugccacaugcacacuggcgucgucguggaaaagaaaaagcgaggcggcaaagaagaaaucacgccacacugcgcccuaauggacugcaucauguacgacgccgcuguaucgggcggacuuaacauccccguccuaagagcgguccuaccccgagauauggucuuccgcacgucaucccccaaaguaguccucuaaggacuaguuauaagacugacuagcccgaugggccucccaacgggcccuccuccccuccuugcaccgagauuaauaaaaaaaaaaaaaaaaaaaaaaaaaaaaaaaaaaaaaaaaaaaaaaaaaaaaaaaaaaaaaaaaugcaucccccccccccccccccccccccccccccccaaaggcucuuuucagagccaccagaauu

SEQ ID NO: 11141 - RNA, 1927 nt, Artificial Sequence
  mRNA product Design i-3 comprising derived and/or modified sequence from LASV(ISTH2010-NIG-2012;Clade II)__AIT17483__NP (opt11)
gggagaaagcuuaccauguccgcuucaaaagaagucaaaucauuccuuuggacccaaucccuacgacgugagcucagcgguuacugcagcaacauaaaacuacaggucgugaaagacgcccaagcgcuacuucacggacucgacuucagcgaggucuccaacguccaacgacucaugagaaaacaaaaacgcgacgacucagaccuuaaaagacuucgagaccucaaucaagccguaaacaaccucgucgaacuaaaauccacccaacagaaaagcauccuucgcgucggcacacucaccuccgacgaccugcuaacccuagccgccgaucucgaaaaacucaaaucaaaagucaucaggaccgagcgcccccuauccucaggcgucuacauggguaaccuauccacccaacaacucgaacaaaggcgagcccugcuaaacuuaaucggcauggucggcggcgcccaaggcacccaaccaggacgagacggcgucguccgaguaugggacgucaaaaaccccgaccuacucaacaaccaauucggcacgaugccaagccucacccucgccugccucacuaaacaaggacaagucgaucuaaaugacgccguccuggcgcucacagaccuaggacucauauacacagccaaauaccccaacuccuccgaccucgaccgccuaucacaaagccaccccauucucaacaugguagacaccaagaaaagcagccucaacaucagcgguuucaacuucucacuaggcgcggccgugaaagcgggagccugcaugcuagacggcggcaauaugcucgaaacaaucaaaguaacaccacaaaccauggacggcauacucaaaagcauccucaaagugaagaaaucacucggcauguucguauccgacacuccaggcgaacguaacccauacgaaaacauccucuacaaaaucugccuuuccggcgacggcuggcccuacaucgccuccagaaccucaaucgucggcagagcuugggaaaacacgaccguagaccuagaaucugacggcaaaccacacaaagucggcaccgccggcuccaacaaaagccugcaauccgccggauucccaaccggccuaacauauucacaacucaugacccucaaagacuccaugaugcaacuggaccccagcgccaaaacauggauagacauagagggccgcccggaagaccccguggaaaucgcccucuaccaacccaugagcggcugcuacauacacuucuuccgugaaccaacggaccuaaaacaauucaaacaagacgcuaaauacucacacggcaucgacguagccgaccucuuccccgcccaacccggccucaccagcgccguaauugaagcacuaccccgcaacaugguccuuaccugccaaggauccgacgacauaaaacgccuacucgacucacaaggacgccgcgacauaaaacucauagacauagcccuauccaaagccgauucccggcguuucgaaaacgcaguuugggaccaaugcaaagaccuaugccacaugcacacaggcgucgucguagagaaaaagaaacgcggcggaaaagaagaaauaacaccucacugcgcccucauggacugcauaauguaugacgcagcaguauccggaggccucaacauaccaguacuacgggcgguccuuccacgcgacaugguauuccgaacaagcucaccaaaagucguccucugaggacuaguuauaagacugacuagcccgaugggccucccaacgggcccuccuccccuccuugcaccgagauuaauaaaaaaaaaaaaaaaaaaaaaaaaaaaaaaaaaaaaaaaaaaaaaaaaaaaaaaaaaaaaaaaaugcaucccccccccccccccccccccccccccccccaaaggcucuuuucagagccaccagaauu

SEQ ID NO: 11142 - RNA, 1927 nt, Artificial Sequence
  mRNA product Design i-3 comprising derived and/or modified sequence from LASV(Lassa virus/H.sapiens-wt/NGA/2015/ISTH_0543;Clade II)__AVO03640__NP (opt11)
gggagaaagcuuaccaugagcgcaagcaaagaaguaaaauccuuccuguggacacaaucccuccggcgcgagcucuccggcuauugcuccaacaucaaacugcaaguggucaaagacgcacaagcacuacuacacgggcuagacuucucggaagucuccaacguccaacgacucaugcgcaaacaaaaacgagacgacagcgaccuaaagcgcuuacgagaccucaaccaggccgucaacaaccuggucgagcuaaaguccacgcaacaaaagagcauccugcgaguaggaacgcucacauccgaugaccuccucacccuagcagcugaccucgaaaaacucaaauccaaagucauccgaacugaaagaccccucuccagcggaguauacaugggcaaucuauccacccagcaacuugaacaaagacgcgcacuccuaaacaugauaggaauggucggcggagcccaaggaacacaacccggccgcgacgguguagucagagugugggacgucaaaaacccagaccuucuaaacaaccaguuuggaaccaugcccucacucacccuugcaugccucaccaagcaaggccaaguagaccucaacgacgccguacuagcacuaaccgaccugggacucaucuacaccgccaaauaccccaacagcucagaccucgaccgacuaagccaaagccacccaauacugaauauggucgacacaaagaaauccagccuaaacauaagcggcuacaacuucucccuaggagccgcggucaaagccggagccugcaugcuagacggcggaaacaugcuggaaacuauaaaagucacaccccaaacaauggacggcauacucaaaucaauacucaaaguaaagaaaagccucggcauguucgucucagacacacccggcgaacgcaaccccuacgaaaacauacuauacaaaaucugccuuucaggcgauggauggccauacauagcauccagaaccucaaucguaggcagagcaugggaaaacaccaccguugaccucgagucagacggaaaaccccaaaaagucgggucagcaggcaguaacaaaucccuccaaagugcaggauuccccaccggccugaccuacucacaacucaugacucucaaagacaguaugaugcaacucgaccccucggccaaaacauggaucgacaucgagggaagacccgaagaccccgucgaaauagcccuauaccaaccaauguccggaugcuacauacacuucuuccgagagccaaccgaccucaaacaauucaaacaagacgccaaauacucacacggcauagacguagcugaccucuuccccgcccaacccggccucaccuccgcugucaucgaagcccucccccgcaacaugguacuaacaugucaagguucugacgacaucaaacgccuccucgacucccaaggacgcaaagacaucaaacuaauagacaucgcccucagcaaagcugacucccgaagauucgaaaacgcagucugggaccaaugcaaagaccucugccacaugcacaccggagucgucgucgaaaagaagaaaagaggcgggaaagaagaaaucacaccccacugcgcccugauggacugcauuauguacgacgccgccguuuccgguggucucaacauccccguacuccgagccguccuaccacgcgacauggucuuccgcaccuccagccccaaaguaguccuauaaggacuaguuauaagacugacuagcccgaugggccucccaacgggcccuccuccccuccuugcaccgagauuaauaaaaaaaaaaaaaaaaaaaaaaaaaaaaaaaaaaaaaaaaaaaaaaaaaaaaaaaaaaaaaaaaugcaucccccccccccccccccccccccccccccccaaaggcucuuuucagagccaccagaauu

SEQ ID NO: 11143 - RNA, 1927 nt, Artificial Sequence
  mRNA product Design i-3 comprising derived and/or modified sequence from LASV(Lassa virus/H.sapiens-wt/NGA/2016/ISTH_0009;Clade II)__AVO03572__NP (opt11)
gggagaaagcuuaccauguccgccuccaaagaagucaaauccuuccuguggacccaaucccuccgccgcgaacucuccggauacugcucuaacaucaaacuccaaguuguaaaagacgcacaagcgcuacuacacggccuagacuucuccgaaguauccaacguacaacgccucaugcgcaaacaaaaacgagacgacucagaccucaaacgucuccgcgaucucaaccaagccguaaacaaccuagucgaacucaaaaguacgcaacaaaaaucuauccuucgagucggcacacugacaagcgacgaccugcucacccucgccgccgaccucgaaaaacucaaauccaaaguaauccgaaccgaacgcccccucucuuccgggguauacaugggcaaccuuuccacccaacaacuagagcaacgccgcgcccuccucaacaugaucgggaugguagguggagcccaaggaacacaaccuggacgagacggggucguccgagucugggacgucaaaaaccccgaccuccucaacaaccaauucggcacaaugcccucccuaacucucgccugccucacaaaacaaggacaaguagaucucaacgacgccguccuagcucuaacagaccuaggacuuauauacaccgccaaguacccaaacuccucggaccucgacagacucucgcaaucacacccgauacuaaacauggucgacaccaaaaagucaucccugaacaucucgggcuacaacuucucucucggcgccgcagucaaggccggagccugcaugcucgacggcggaaacaugcucgagacgaucaagguaacaccacaaaccauggacggcauacucaaauccauccuaaaagucaagaaaagccucggaauguucgugagcgacacccccggcgaaagaaaccccuacgaaaacauacucuauaaaaucugccuaucuggcgacgguuggcccuacaucgcuagccgcaccuccaucgucggacgcgcaugggagaauacaacagucgaucucgaaagcgacggcaaaccccaaaaagucggcagcgccggaaguaacaaaucacuccaauccgccggcuucccaaccggccuaaccuacucccaacucaugacccucaaggacuccaugaugcaacuugaccccagcgccaaaaccuggaucgacaucgaaggaagaccugaagaccccgucgagaucgcacucuaccaacccauguccggcugcuacauccacuucuuccgcgaaccgaccgaccucaagcaauucaaacaagacgccaaauacagccacggcauugacgucgccgaccuauuccccgcacagcccggccuuaccucggccguaauugaagcccuuccacgcaacaugguccuaaccugccaagguuccgacgacaucaaacgccuccuugacucacaaggccgccgcgacauaaaacucauagacauagcccuaucgaaagcagauucacgacgauucgaaaacgccgucugggaccaaugcaaggaccuuugccacaugcacaccggcguagucguagagaaaaagaaaagaggcgggaaagaagaaaucacuccccacugcgcacucauggacugcauaauguacgacgcagccguuagcggcggccuuaacauaccaguucuacgagccguacucccccgagacaugguauuccgaaccucaagccccaaagucguccuuuaaggacuaguuauaagacugacuagcccgaugggccucccaacgggcccuccuccccuccuugcaccgagauuaauaaaaaaaaaaaaaaaaaaaaaaaaaaaaaaaaaaaaaaaaaaaaaaaaaaaaaaaaaaaaaaaaugcaucccccccccccccccccccccccccccccccaaaggcucuuuucagagccaccagaauu

SEQ ID NO: 11144 - RNA, 1927 nt, Artificial Sequence
  mRNA product Design i-3 comprising derived and/or modified sequence from LASV(Lassa virus/H.sapiens-wt/NGA/2016/ISTH_0017;Clade II)__AVO03568__NP (opt11)
gggagaaagcuuaccaugucagcaucaaaagaagucaaaucauuccucuggacccaaucacuacggcgcgaacucagcggcuacugcuccaguaucaaacuacaggucguaaaagacgcccaagcccuacuccacggacuagacuucucagagguuucaaacguacaacguuuaaugcguaaacagaaaagagacgacuccgaccucaaacggcuccgagaccucaaccaagccguuaacaaccuagucgaacucaagucgacacaacaaaaaucaauccuccggguaggcacacucaccucagacgaccuccucacccucgcugccgaccuagagaaacuaaaaucaaaagucauacgcaccgaacgaccucugucaucaggcgucuacaugggaaaccucagcacccaacaguuagaacaacgacgcgcccuauuaaacaugaucgguauggccggcggcgcccagggcacacaacccggucgagacggagucguacgagucugggacgucaagaaccccgaccuccucaacaaccaauucggaaccaugcccucgcucacccucgccugccugacaaaacaaggccaagucgaccucaacgacgccguccuagcacuaaccgaccuaggccuaaucuacaccgccaaguaccccaacuccuccgaccuagaccgcuuaagccaaucgcaccccauccucaacauggucgacaccaagaaaagcucccuaaacaucagcggcuacaacuucucacuaggcgcggccgucaaagcuggagccugcaugcuugacggcggcaacauguuagaaaccaucaaagucacaccccaaaccauggacggcauccucaaauccauacucaaagucaaacgcucccucggcauguucguaagcgacgcgccaggugaacgaaaucccuacgaaaacauccucuauaaaaucugccuaucaggcgacggcuggcccuacaucgccucccgcaccuccaucgucggccgagccugggaaaacacuaccgucgaccuugagagcgacggcaagccccaaaaagugggagccaccggaucgaacaaaucccuccaaagcgccggauucccgaccggccucaccuacagccaacucaugacacucaaagacagcaugaugcaacucgaccccuccgcaaaaaccuggaucgacauagagggacgcccggaagacccaguagaagucgcccucuaccaacccguauccggaugcuacauccacuucuuccgagaacccacggaucucaaacaguucaaacaagacgccaaauacagccacggcauagacguagccgaccucuucccugcccaacccggccucaccucggccgucaucgaagcgcucccccgaaacaugguccuuaccugccaaggcagcgaugacaucaaaaagcuccucgacagccaaggccgcaaagacaucaaacucaucgacaucgcccucucaaaagcagacuccaggcgauucgaaaacgcagucugggaccaaugcaaagaucuuugccacaugcacacgggcgucgucgucgaaaagaagaaacguggcggcaaagaagaaauuaccccacacugcgcccucauggacugcaucauguacgacgccgccgucucaggaggccucaacaucccaguccuacgcgcaguacucccaagagacaugguauuccgcaccuccucaccaaaaguaguccucuaaggacuaguuauaagacugacuagcccgaugggccucccaacgggcccuccuccccuccuugcaccgagauuaauaaaaaaaaaaaaaaaaaaaaaaaaaaaaaaaaaaaaaaaaaaaaaaaaaaaaaaaaaaaaaaaaugcaucccccccccccccccccccccccccccccccaaaggcucuuuucagagccaccagaauu

SEQ ID NO: 11145 - RNA, 1927 nt, Artificial Sequence
  mRNA product Design i-3 comprising derived and/or modified sequence from LASV(Lassa virus/H.sapiens-wt/NGA/2018/ISTH_0959;Clade II)__AVV65100__NP (opt11)
gggagaaagcuuaccaugucagccucaaaagaaguaaaauccuuccucuggacacaaucgcuucgccgcgaauuauccggguauuguucaaacauaaaacuacagguagucaaagacgcacaagcacuccuccacggccucgacuucuccgaagucuccaauguacaacgacucaugcgcaaacaaaaacgugacgacuccgaccucaaacgacuccgagaccucaaccaagcagucaacaaccuaguagaacucaagucaacccaacaaaaauccauccuacgaguaggaacccuaaccagcgacgaccuccuaacacucgcagccgaccucgaaaaacucaaaagcaaagugauacgcaccgaacgaccccucagcagcgguguauacauggguaaucucucaacccagcaacucgagcaacgccgcgcccuacuaaaccugauaggaaugguaggcggggcccaagggacccaaccaggacgcgacggcguaguccguguaugggacgucaaaaaccccgaccuccucaauaaccaauucggcaccaugccaagccuaacccucgcgugccuaacaaagcagggccaagucgaccuaaacgacguaguacucgcccuaaccgaccucggccucauauacaccgccaaauaccccaacagcucagaccuugacagacuaagccagucacaccccauacucaacaugguagacaccaagaaaagcagucucaacauaucaggcuucaacuucucgcuaggagcagccguuaaagcaggagccugcaugcucgacggcggcaacaugcuagaaaccaucaaggugacaccccaaaccauggacggcauccucaaaagcauccuaaaggucaagaaaucccuaggcauguucguuagcgacaccccaggcgagcgcaacccauacgaaaacauccucuacaaaaucugccucagcggagacggcuggcccuacauagcaucaagaaccuccauaguugggcgugccugggagaacaccacuguagaccucgaaagcgauggcaaaccacacaaagucggcaccgcaggcucuaacaaaucacuacaauccgcgggcuucccaacaggccugaccuacucccaacucaugacacucaaagacuccaugaugcagcucgaccccuccgccaagacauggaucgauauagaaggacgaccagaagacccagucgaaauagcacucuaccagccaaugucagggugcuacauccacuucuuccgcgaaccaaccgaucuaaaacaguuuaaacaagacgccaaauacagccacggcaucgacgucgccgaccucuuccccgcgcaacccgggcuaacguccgccgucauagaagcccucccgcgcaacaugguacucacaugccaaggaucggacgacauaaaacgacuccucgacagccaaggcagaaaagacaucaaacucaucgacaucgcccugagcaagacggacucccgacgcuucgaaaacgcgguaugggaccaaugcaaggaccucugccacaugcacacaggugucgucgucgaaaagaagaaacgaggagguaaagaagaaauaacaccccacugcgcccuaauggacugcaucauguacgacgcagcagucagcggaggccucaacauccccguucuccgggccguccuaccacgcgacaugguauuucgaacauccagccccaaaguaguccuguagggacuaguuauaagacugacuagcccgaugggccucccaacgggcccuccuccccuccuugcaccgagauuaauaaaaaaaaaaaaaaaaaaaaaaaaaaaaaaaaaaaaaaaaaaaaaaaaaaaaaaaaaaaaaaaaugcaucccccccccccccccccccccccccccccccaaaggcucuuuucagagccaccagaauu

SEQ ID NO: 11146 - RNA, 1927 nt, Artificial Sequence
  mRNA product Design i-3 comprising derived and/or modified sequence from LASV(LASV003-NIG-2008;Clade II)__AIT17581__NP (opt11)
gggagaaagcuuaccaugucagccuccaaagaaguaaaauccuuccucuggacccaaucccugcgcagagaacugucaggauacugcuccucaaucaaacuacaagucgucaaagacgcccaagcacuacuacacggacucgacuucagcgaagucucaaacguccaacgacuaaugcgcaaacaaaaacgagacgauucugaccuuaaacgccuccgcgaucucaaccaggccgucaacaaccucgucgaacuaaaauccacccaacaaaaauccguccugcgagucggaacccucaccuccgacgaucugcucacccucgccgccgaucucgaaaaacuaaaauccaaagucauccgaaccgaaagaccacucucauccggcgucuacauggguaaccucuccgcacaacaacucgaacaacgccgaacccuccuaaauaugaucggcauggucgguggggcucagggcacccaacccggccgugacggcgucgucagaguaugggaugucaaaaaccccgaccuucuaaacaaccaauucggaacgaugcccucucucacacuagccugccuaacaaaacaaggccaaguagaccucaacgacgucguacucgcccucacagaucuagggcucauauacacagcaaaauaccccaacuccagcgaccucgacagacucagccaaucacaccccauccucuccaugguggacacgaagaaaagcagccugaacaucuccggcuacaacuucucccuaggcgcagcagucaaagcuggugcaugcaugcucgacggaggcaacauguuagaaaccaucaaagucacaccccaaaccauggacggcauccucaaauccauccucaaaguaaagaaaucccucggcauguucgucucagacacucccggcgaacgcaaccccuacgaaaacauacuauacaaaauaugccucuccggcgacggauggcccuacaucgccucgcguaccuccauagucggccgagccugggaaaacaccaccgucgaccuugaauccgacgguaaaccccaaaaagucggcacagccgguaguaacaaaucacuccaauccgccggcuuccccaccggccucaccuacucacagcucaugacacuaaaagacagcaugaugcaacucgaccccucagccaaaaccuggauagacauagagggccgaccagaagaccccgucgaaauagcccucuaucaaccgaugagcggaugcuacauccacuucuuccgggaaccaaccgacuuaaaacaguuuaaacaagacgccaaauacagccacggaaucgauguuacugaccucuucccagcccaaccgggccuaaccuccgcugucaucgaagcacuaccccgaaacaugguccuaaccugccaaggcuccgacgacaucaagagauuacuagacucccagggccgucgcgacaucaaacucaucgacaucgcccuguccaaagccgacucccgccgcuucgaaaacgcagucugggaccagugcaaagaccuaugucacaugcacaccggcgucguagucgaaaagaagaaacgcggaggcaaagaagaaaucacgccccacugcgcccuuauggacugcaucauguacgacgcagccgucucaggcggccucaacauacccguccuacgugccguacucccccgugacaugguauuccgcaccucgucacccaaaguaguacuuuaaggacuaguuauaagacugacuagcccgaugggccucccaacgggcccuccuccccuccuugcaccgagauuaauaaaaaaaaaaaaaaaaaaaaaaaaaaaaaaaaaaaaaaaaaaaaaaaaaaaaaaaaaaaaaaaaugcaucccccccccccccccccccccccccccccccaaaggcucuuuucagagccaccagaauu

SEQ ID NO: 11147 - RNA, 1927 nt, Artificial Sequence
  mRNA product Design i-3 comprising derived and/or modified sequence from LASV(LASV035-NIG-2009;Clade II)__AIT17589__NP (opt11)
gggagaaagcuuaccaugagcgcaucaaaagagguuaagagcuuccucuggacccagucacuccgacgugaacucuccggauacuguuccuccaucaaacuccaaguagucaaagacgcacaagcccuucuccacggccucgacuucucagagguaagcaacguccaacgccuuaugcgcaaacagaaacgagacgacucagaccucaaacgacuacgcgaccuaaaccaagccgucaacaaccucguggaacucaaaucaacccaacaaaaaucuauccuaagagucggcacccucaccagcgacgaccuccucacacucgcagcagaccuagaaaaauuaaaaucuaaagucauccgaacagaaagaccccucucaucagguguauacauggguaaccuguccgcgcaacaacucgaacaacgccgcgcccuacucaacaugaucggcauggugggcggcgcacaaggaacacaacccggccgcgacggcguaguacgagucugggacguuaagaaccccgaccuccucaacaaucaauucggcaccaugcccagccucacccucgccugcuuaacaaaacaaggacaaguagaccuaaacgacgcgguccuagcccucacagaccuaggacucauuuacacagcaaaauacccaaacuccucugaucuagaccgacuuucacaaucacacccaauccuaaacauggucgacaccaaaaagagcucccucaacauaucgggcuacaacuucagccugggcgcggcagucaaagcaggcgcaugcaugcucgacggcggcaacaugcucgaaaccaucaaagucacuccccaaaccauggacggcauccucaaaucgauacuaaaagucaaacggagccucggcauguucguauccgacacuccaggcgaacgcaauccauacgaaaacauacuuuacaaaaucugccucuccggagacggauggcccuacaucgccuccagaaccucaauagucggccgagccugggaaaacaccaccguagaccuagaaagcgacgggaagccccaaaaggucgguacaacaggcuccaacaaaucacuccaauccgcuggcuuccccaccggccugaccuacucacaacuaaugacccucaaagacucaaugaugcaacuagacccauccgcaaaaaccuggauagacauagaaggccgccccgaagaucccgucgaaauagcccuguaccaaccaauguccggaugcuacauucacuucuuccgcgagccuaccgaccucaaacaauucaaacaagacgcgaaauacucccauggaaucgacguagccgaccucuucccagcacagccuggucucacaucagccgucaucgaggcucuaccccgcaacaugguccuaaccugccaaggcucagacgacaucaagaaacuccucgacagccaaggacgccgcgacaucaaacuaaucgacauugcccuauccaaagcugacagccgaaaauucgagaacgcagucugggaccaaugcaaagaucuaugccacaugcacaccggagucgucgucgaaaagaagaaacgcggaggcaaagaagaaaucacaccccacugcgcccuaauggacugcaucauguacgacgccgcugucagcggcggccuaaacaucccuguccuccgagccguacucccccgcgacauggucuuccggaccagcagccccaaaguaguccuuuaaggacuaguuauaagacugacuagcccgaugggccucccaacgggcccuccuccccuccuugcaccgagauuaauaaaaaaaaaaaaaaaaaaaaaaaaaaaaaaaaaaaaaaaaaaaaaaaaaaaaaaaaaaaaaaaaugcaucccccccccccccccccccccccccccccccaaaggcucuuuucagagccaccagaauu

SEQ ID NO: 11148 - RNA, 1927 nt, Artificial Sequence
  mRNA product Design i-3 comprising derived and/or modified sequence from LASV(LASV1000-NIG-2009;Clade II)__AIT17783__NP (opt11)
gggagaaagcuuaccaugagcgccucaaaagaaguaaaauccuuccucuggacgcaaucgcucagacgagaacucucaggcuacugcagcaacauaaaacuccaaguagucaaagacgcacaagcccuccuacacggacucgacuucuccgaaguauccaacguacagcgacucaugcgcaaacaaaaacgagacgacagcgaccucaaacgccuccgcgaccuuaaccaagccgucaacaaccuagucgagcucaaaagcacccaacagaaaagcauacuccgcgucggaacccuaacaucagacgaccuccucacacuagcagcagaccucgagaagcuaaaaucaaaagugauccgcaccgaacgcccacuguccuccggaguauacaugggaaaccucuccacccaacaacuagaacaaaggcgcgcccuccucaacaugaucggcauggucggcggcgcccaaggcacccaacccggacgcgacggaguuguacgaguaugggacgucaaaaacccagaccuccucaacaaccaauucggcaccaugccaucacuaacauuggccugccuuaccaaacaaggucaaguagaccuaaacgacguggugcucgcacucaccgaccucggccucaucuacacggcaaaguaccccaacuccagcgaccucgaccgacuaucacaaucccaccccauccucaacauggucgacaccaagaaaucaucgcucaacaucucaggcuacaacuucucacuaggcgccgccgucaaagccggcgccugcaugcucgacggcggaaacaugcucgaaacuauaaaaguaacaccccaaaccauggacggcauccucaaaucaauacucaaaguuaagaaaagccuaggcauguucgucuccgacaccccaggagaacgcaaccccuacgaaaacauacuauacaaaaucugucuaagcggcgacggcuggcccuacaucgccucacgaaccuccaucgucggacgagcaugggagaacaccaccgucgaccuagaaucagacggaaaaccccaaaaagucggcaccgccggcuccaacaaaucacuucagucagcaggauuucccacaggucuaaccuacucccaacucaugacacuaaaagacucaaugaugcaacucgaccccucagccaaaacuuggaucgacaucgaaggccgccccgaagaucccguagaaaucgcgcucuaccaacccgucagcggcugcuauauccacuucuuccgugaaccuacagaccucaaacaauucaaacaagaugcgaaguacagccacggcauagacguagccgaccuauuccccgcccaaccaggacugacuuccgccgugauugaagcccucccccgcaacaugguacucacaugccaaggcuccgacgacaucaaaaggcuacucgacucacaaggccgacgggacaucaaacugaucgacaucgcacucucaaaagcagacucccgaagauucgaaaacgccgucugggaccaaugcaaagaccucugccacaugcacacaggcgucguagucgaaaagaagaaacgaggcggaaaagaagagauaaccccacacugcgcucugauggacugcaucauguacgacgccgcaguauccggcggccucaacauaccaguccucagagcaguccuacccagagauauggucuuccgcaccucaagccccaaaguaguccucuaaggacuaguuauaagacugacuagcccgaugggccucccaacgggcccuccuccccuccuugcaccgagauuaauaaaaaaaaaaaaaaaaaaaaaaaaaaaaaaaaaaaaaaaaaaaaaaaaaaaaaaaaaaaaaaaaugcaucccccccccccccccccccccccccccccccaaaggcucuuuucagagccaccagaauu

SEQ ID NO: 11149 - RNA, 1927 nt, Artificial Sequence
  mRNA product Design i-3 comprising derived and/or modified sequence from LASV(LASV221-NIG-2010;Clade II)__AIT17625__NP (opt11)
gggagaaagcuuaccauguccgcuuccaaagaaguaaaauccuuccucuggacccaaucucuacgccgagaacucucaggcuacugcucaucaaucaaacuccaagucgucaaagacgcacaagcccuacugcacggacucgacuucuccgaaguaucaaacguccagcggcucaugcggaaacagcgccgcgacgacuccgaccuuaagcgccuacgagaccugaaccaagcaguaaacaaccucguggaacuaaaauccacccaacaaaaaucaauccuccgagugggcacgcuaacuagcgacgaucuccuaacucuagccgccgaccuagaaaaacuaaaauccaaagucauacgcacagaacgcccgcucuccagcggcgucuacaugggaaaccuauccacacaacaacuagaacaacguagagcccuccuaaacaugauaggcauggucggcggagcccaaggaacacaacccggccgcgauggcgucguccgagucugggacgugaaaaacccagaccuacucaacaaccaauucggcaccaugcccucccucacacuagcgugccugacaaagcaaggacaaguagaccucaacgacgccguacucgcccuuaccgaccucggauuaaucuacacagccaaauacccaaacagcagcgacuuggacagacucucccagucccaccccauacucaacaugguggacaccaagaaauccucccucaacaucagcggguacaauuucucacucggggccgcagucaaagccggcgcaugcaugcuagacggcggcaacaugcucgaaaccaucaaagucaccccacaaacagucgacggcauccucaaaucaauccucaaggugaaacgcagucucggcauguucguuucagacacacccggcgaacgcaauccauacgaaaacauccucuacaaaaucugccucagcggugacggguggccauauaucgccucccgaaccuccaucgucggccgcgcaugggaaaacaccaccguagaccuagagagcgacggaaaaccccagaaggucggcacagcuggcuccaacaaaucccuccaauccgccggcuuccccaccggccucaccuacucacaacugaugacccuaaaagacucuaugaugcaacucgaccccuccgcuaaaaccuggauugacauagagggccgcccugaagaccccgucgaaaucgcccuauaccaacccaugucagggugcuacauccacuucuucagagaacccaccgaccucaagcaauucaaacaggacgcaaaauacucccacggcaucgacguagccgaccucuuccccgcacaacccggauuaaccagcgcaguaaucgaggcacucccacguaacaugguacugaccugucaaggcuccgacgacaucaaacgccugcuagacucccaaggucgaagagauauuaaacucaucgacaucgcccucagcaaagcggacucacgcaaauucgaaaacgcagucugggaucaaugcaaagaccuaugccacaugcacaccggcgucgucgucgagaaaaagaaacgcggcggaaaagaagaaaucaccccacacugcgcccuaauggauugcaucauguacgacgcagccgucucaggcggacucaacauccccguacuacgcgccguacuaccucgcgacauggucuuccggaccucaagccccaagguuguccuauaaggacuaguuauaagacugacuagcccgaugggccucccaacgggcccuccuccccuccuugcaccgagauuaauaaaaaaaaaaaaaaaaaaaaaaaaaaaaaaaaaaaaaaaaaaaaaaaaaaaaaaaaaaaaaaaaugcaucccccccccccccccccccccccccccccccaaaggcucuuuucagagccaccagaauu

SEQ ID NO: 11150 - RNA, 1927 nt, Artificial Sequence
  mRNA product Design i-3 comprising derived and/or modified sequence from LASV(LASV237-NIG-2010;Clade II)__AIT17639__NP (opt11)
gggagaaagcuuaccaugucggcaagcaaagaagucaaauccuuccuauggacccaaucacuccgccgagagcucucaggcuauugcucaaacaucaaacuucaaguagugaaagacgcacaagcacuccuccacggccucgacuuuucagaagucagcaacguacaacgccucaugcguaaacaaaaacgagacgacuccgaccucaaacgccuacgcgaccuaaaccaagcagucaacaaccucgucgagcucaaauccacccagcaaaaaucaauacuacgugucgggacccuaacuuccgacgaccuccuaacacuugccgccgaccucgaaaaacugaaaagcaaaguaauccguaccgaacgcccccucucaaguggcgucuacaugggaaaccuuagcacccaacaacuagaacaacgccgugcccuccucaacaugaucgguauggucggaggcgcccaaggcacacaacccggccgcgacggcguagucagaguaugggacguuaaaaaccccgaccuccucaauaaccaauuuggcacuaugcccucccuaacacucgcaugccucaccaaacaaggccaaguagaccuaaacgacgcaguccucgcccuaacagaccucggacucaucuacaccgccaaauacccuaacucauccgaccucgaccgccuaucacagagccaccccauccucaacauggucgacaucaagaaauccagccuaaacaucucagguuacaacuucucacuaggggccgccgucaaagcaggcgcaugcaugcucgacggcggcaacaugcuagaaaccaucaaagucacaccccaaaccauggacggaauccucaagagcauccucaaagucaaacgaucacuuggaauguucguauccgacacccccggcgaacgcaaccccuacgagaacauacuauacaaaaucugccuauccggcgacggcuggcccuacauagcuucacgcaccagcauaguaggccgcgccugggaaaauaccacaguagaccucgaaucagacggaaaaccccaaaaagugggaucagccgguucaaacaaaagccuccaauccgcaggauucccaaccggccuuacguacucccaacuaaugacccucaaagacucaaugaugcagcucgacccauccgcaaaaacauggauugacaucgaaggcagacccgaagacccagucgaaauugcccuuuaucaacccauguccggaugcuacauccacuucuuccgcgaaccaacagaccucaaacaauucaaacaagacgcuaaauacagccacgggauagacgucgccgaucucuucccagcccaacccggucuaaccagcgccguaaucgaagcccugccccgcaacaugguacuuacaugccagggcagcgacgacauaaaacgccuccucgacucccaaggccgacgcgacaucaaacuaaucgacaucgcacucuccaaagcugacucccgccgcuucgaaaacgcagucugggaucaaugcaaagaccuaugccacaugcacaccggaguagucgucgaaaagaagaaaagaggcggcaaagaagaaaucacaccccacugcgcacuaauggacugcauaauguacgacgcagcagugucaggaggacugaacauccccguacugcgagccguacucccccgagacauggucuuccgaaccagcucacccaaagucguccuuuaaggacuaguuauaagacugacuagcccgaugggccucccaacgggcccuccuccccuccuugcaccgagauuaauaaaaaaaaaaaaaaaaaaaaaaaaaaaaaaaaaaaaaaaaaaaaaaaaaaaaaaaaaaaaaaaaugcaucccccccccccccccccccccccccccccccaaaggcucuuuucagagccaccagaauu

SEQ ID NO: 11151 - RNA, 1927 nt, Artificial Sequence
  mRNA product Design i-3 comprising derived and/or modified sequence from LASV(LASV253-NIG-2011;Clade II)__AIT17671__NP (opt11)
gggagaaagcuuaccauguccgccuccaaagaagucaaauccuuccuauggacccaaucucugcgacgcgaacucucagguuacugcucaagcauaaaacuccaagucgucaaagacgcacaagcccuccuacacggacuagacuucuccgaaguaucaaacguccaacgccuaaugcgcaaacaaaaacgcgacgacagcgaccucaaacgccuccgagaucucaaccaggcugugaacaaccucguagagcucaaaucaacccaacaaaaaucuguccugcgcgucggaacccuaacgucagaugaucuccucacccuagccgccgaccuagaaaaacucaaauccaaagucauacgcacggaacgaccccucucaucaggcgucuacauggggaaccuauccacccagcaacucgagcaaagacgagcacuccucaacaugaucggcauggucggaggcgcccaaggaacccagcccggacgcgacggcguaguccgagucugggacgucaagaaccccgaccuacugaacaaccaauucggcacaaugccaagccucacccuagcaugccucaccaaacagggacaaguagaccucaacgacgugguccuagcccuaaccgaccucggccuaauauacaccgcaaaguaccccaacuccagcgaccucgaccgacuaucccaaagccauccaauacucaacauggucgacacaaagaaaagcucacuaaacaucagcggcuacaacuucagccucggugccgccgucaaagcaggcgccugcaugcucgacggcggaaacaugcucgaaaccauaaaagucacaccccaaaccauggacggcauccuaaaaagcauacucaaaguaaagaaaucacuaggcauguucgucuccgacacacccggcgaacgcaaccccuacgaaaacauacuauacaaaauaugccuaucgggcgauggcuggccauacauagcuucacgaaccucaauagucggcagagccugggaaaacaccaccgucgaucucgaaucggacggaaaaccacaaaaaguaggcaccgccggaagcaacaaaucccuacaaucagcaggcuucccaaccggccucaccuacagccaacucaugaccuuaaaagauuccaugaugcaacuggacccaagcgccaagacauggaucgacauugaaggacgacccgaagaccccgucgaaauagcccucuaccagcccaugagcggcugcuacauccacuucuuccgagaacccaccgaccuaaaacaauucaaacaagacgccaaguacucccacggcaucgacgucacagaccucuucccagcccaacccggccucaccagcgccgucaucgaagcgcuaccaagaaacaugguccuaacgugucaaggcucggacgacaucaaacgacuccucgacucgcaaggucgcagagacaucaaacuaaucgacaucgcacucaguaaagcugacucacgccgauucgaaaacgcagucugggaccagugcaaagaccucugccacaugcacacaggcgucguaguagaaaagaaaaagcgaggaggcaaagaagaaaucaccccacacugcgcacucauggacugcaucauguacgacgccgcggucucgggcggccuaaacauacccguacuccgcgcaguccuaccacgcgacauggucuucagaaccagcagcccaaaagucgugcucuaaggacuaguuauaagacugacuagcccgaugggccucccaacgggcccuccuccccuccuugcaccgagauuaauaaaaaaaaaaaaaaaaaaaaaaaaaaaaaaaaaaaaaaaaaaaaaaaaaaaaaaaaaaaaaaaaugcaucccccccccccccccccccccccccccccccaaaggcucuuuucagagccaccagaauu

SEQ ID NO: 11152 - RNA, 1927 nt, Artificial Sequence
  mRNA product Design i-3 comprising derived and/or modified sequence from LASV(LASV254-NIG-2011;Clade II)__AIT17675__NP (opt11)
gggagaaagcuuaccauguccgccuccaaagaagucaaaucauuccucuggacccaaucccuacgucgagaacucucaggauacugcuccuccaucaaacuacaagucguaaaagacgcccaagcacuccuccacggacuagacuucagcgaaguaucgaacguacaacgccucaugcgaaaacagaaaagggacgacuccgaccucaaacgccuacgcgaccucaaccaagcagucaacaaccuaguagaacucaaguccacucaacagaaaucaguauuacgugugggaacccuaacuagcgacgacuuacucacacucgccgccgaccucgagaaacucaaaucaaaaguaauccgaacagaacgcccccucucuagcggaguauacaugggcaaccugagcacccaacaacuagaacagcgacgagcccuccucaacaugaucggaaugguuggcggcgcacaaggcacgcaacccggacgcgacggcguaguacgaguaugggacgucaaaaaccccgaccuccuaaacaaccaauucggcacaaugcccucacucacacucgccugccuaaccaaacaaggccaagucgaccucaacgaugcaguccucgcccucaccgaccucggccuaauauacaccgcaaaauacccaaacaguuccgaccucgaccgacuaagccaaucccacccaauacucaacaugguagauaccaaaaaguccucccucaauaucuccggcuacaacuucucccucggcgccgcgguaaaagccggcgcgugcaugcucgacgggggaaacaugcucgaaaccaucaaagucacaccccaaaccauggacggaauccugaaaagcauccucaaaguuaagaaaucccuaggaauguucgucuccgacacccccggcgagcgcaacccauacgagaacauccuuuacaaaauaugccucuccggagacggcuggccguacaucgccucccgaaccucaaucguaggcagagccugggaaaacaccauagucgaccucgaaucagacggcaaaccacagaaagucggcaccgcaggaucaaacaaaucccuacaaucagcaggauuccccacaggucuuaccuacucccagcuaaugacacucaaagacuccaugaugcaacucgacccaucagcaaaaaccuggaucgacauagaaggucgcccagaagaccccgucgaaaucgcccuauaccaaccgauguccggcugcuacauccacuucuuccgggaacccaccgaccucaaacaauucaagcaagacgccaaauacucacacggcaucgacguagccgaccuauucccagcucaacccggccucaccuccgcagucaucgaagcccucccccgaaacaugguccucacaugccaaggcagcgacgacaucaaacgccuucucgacucacaaggccgacgugacaucaaacucaucgacaucgcccucuccaaagcagauucccgacgauucgaaaacgcagucugggaccaaugcaaagacuuaugucauaugcacaccggagucgucgucgagaaaaagaaacgcggaggcaaagaagaaaucacaccgcacugcgcccugauggacugcauaauguacgacgcagcaguaagcggcggccucaauauacccguccuccgcgcaguacucccucgagacaugguauuccgaaccuccagcccaaaaguaguccucuaaggacuaguuauaagacugacuagcccgaugggccucccaacgggcccuccuccccuccuugcaccgagauuaauaaaaaaaaaaaaaaaaaaaaaaaaaaaaaaaaaaaaaaaaaaaaaaaaaaaaaaaaaaaaaaaaugcaucccccccccccccccccccccccccccccccaaaggcucuuuucagagccaccagaauu

SEQ ID NO: 11153 - RNA, 1927 nt, Artificial Sequence
  mRNA product Design i-3 comprising derived and/or modified sequence from LASV(Nig08-04;Clade II)__ADU56611__NP (opt11)
gggagaaagcuuaccaugagcgcgucgaaagaagucaagagcuuccucuggacccaaucucugcgaagagaacucucuggcuacugcuccaacauaaaacuccaagucgucaaggacgcccaagcccuauuacacggccuagacuucuccgaaguaucaaacgugcaaagacucaugcgcaaacagaaacgagacgacggcgaccucaagagacuacgagaccuaaaccaagccguaaacaaccucgucgaacuaaaaagcacccagcaaaaaucaguccuacgggucggcacgcugaccagcgacgaccugcuaacacucgccgcagaccuagaaaaacuaaaaucaaaagucauacgcaccgaacgcccacuauccagcggagucuacauggggaaccucucaacccagcaauuagaacaaagaaaagcccugcuaucaaugauaggcauggucggcggcgcccaaggaacgcaacccggccgcgacggcgucguccgagucugggacgucaaaaacccagaccuacucaacaaccaauucggcaccaugccgucacuaacacuagcaugccucaccaaacagggccaagucgaccucaacgaugcaguccuagcccuaaccgaccucggccuaaucuacaccgcaaaauacccaaacuccucagaccuagaccgacuaucccaaucacacccaauccucaacauggucgacacaaagaaaucaucccucaacaucuccggcuacaacuucagccucggcgccgccgucaaagcaggcgccugcaugcucgacggcggcaacaugcucgaaaccaucaaaguaaccccacaaacaauggacgggauauuaaaauccauacucaaagucaagagaucccucggcauguucgucucggacaccccaggagaacgcaacccauacgaaaacauacucuacaagauaugccuauccggcgacggcuggccauacauagccuccagaaccuccauagucggccgggcgugggaaaacaccaccguagaccuagaaagcgacggcaaaccccagaaggucggcacugcgggcucaaacaaaucccuacaaucagccggauucccgacaggacucacauacucacaacugaugacccucaaagauucaaugaugcaacucgacccaagcgccaaaacguggaucgauaucgaagggagaccagaagacccggucgaaaucgcccuauaccaaccaaugagcggcugcuacauacacuucuucagggaacccacagaccuaaaacaauucaagcaagacgcaaaguacucacacggcauagaugucacagaccuauucagcgcccaaccaggacuuaccuccgcaguaaucgaagcacuacccaggaacaugguccugaccugccaaggaucagacgacauaaagaaacugcuagacagucagggacgacgagacaucaaacuaaucgacaucagccucaacaaagccgauagccgacguuucgaaaacgccgucugggaccaaugcaaagaccucugccacaugcacaccggcguagucguagaaaagaagaaacgcggcggaaaagaagaaauuacaccccacugcgcccucauggacugcaucauguucgacgcggcaguaagcggaggccucaacauaccgauccuccgagcaguccuccccagagacaugguauuccgcaccuccagcccaaaagucguccucuaaggacuaguuauaagacugacuagcccgaugggccucccaacgggcccuccuccccuccuugcaccgagauuaauaaaaaaaaaaaaaaaaaaaaaaaaaaaaaaaaaaaaaaaaaaaaaaaaaaaaaaaaaaaaaaaaugcaucccccccccccccccccccccccccccccccaaaggcucuuuucagagccaccagaauu

SEQ ID NO: 11154 - RNA, 1930 nt, Artificial Sequence
  mRNA product Design i-3 comprising derived and/or modified sequence from LASV(GA391;Clade III)__AAA46284__NP (opt11)
gggagaaagcuuaccauguccgcgaguaaagaaguacguucaugccuauggacgcaaucccuccggcgcgaacuuuccggcuacugcucaaacauaaaacugcaagugguaaaggacgcccaagcacuacuucacggacuagacuucucagaagugucaaacguccagagacuaaugcgaaaacagaaacgggacgauggagaccuaaaacgacugcgcgaccuaaaccaagcggucaacaaccuagucgagcucaaaagcacacaacagaaaucgguccuacgcguuggaacgcucuccagcgacgaccugcucauccucgcggccgaccucgaaaaacucaaaucaaaaguaacccgaaccgaacgcccgcuuucgagcggaguauauaugggaaaccuaaguucccaacagcucgaccaacgccgcgcacuccugaacaugauaggcaugacaggagugagcggcggagggaaaggcgcaucaaacggcaucgugcgcgucugggacgugaaaaacgccgaacuccuuaacaaccaguucgggaccaugcccucacuaacacucgcaugccuaaccaagcaaggacaaguagaccuaaacgacgccguacaagcacuaaccgaccuaggccuuaucuacacagcgaaauaccccaauagcucggaccuggacagacucucacaaucgcaccccauccugaacaugaucgacaccaagaaaucgagccuaaacauuuccggcuacaacuucucucucggggccgccgucaaagcaggggcaugcaugcuagacggaggcaacaugcucgaaacgaucaaagucucaccccaaaccauggacggcauacugaaauccauccuaaaagucaagaaaagccuaggaauguucgucagcgacaccccaggcgaacgcaaccccuacgaaaauauccuguacaaaaucugccucucgggagacggcuggagcuauaucgcgagcagaacaucaaucguaggccgcgcgugggagaacaccguaguugaccucgaacaagacaacaaaccacagaaaauaggcaacggcggauccaauaaaucacuccagagcgcaggcuucgcagcuggccuaaucuacagccaacucaugacacugaaagacuucaaaugcuucaaccucaucccaaacgccaaaacauggauggauaucgaagggcgccccgaagaccccguagaaauagcacucuaccaacccucgagcggcugcuacguucacuucuuccgcgagcccacagauuuaaaacaguucaaacaggacgccaaauacucacacggucgcgacgucacagaccucuucgcagcccaaccaggccugacaagcgcuguaauagaagcccucccacgaaacauggucauaaccugccaaggaucagaagauaucagaaaacuacucgaaagccaaggccgacgggacaucaaacucauagacauaacccuaagcaaagcagauagcagaaaauucgaaaacgccguaugggaccaauucaaagaccucugccacaugcacacaggcguagucguggaaaagaagaaacgcggaggcaaagaagaaaucacaccucacugcgcacucauggacugcauaauguuugaugcugcggucuccggcggacucgaugcaaaaguacuccgaguuguccuacccagagacaugguauuccgcaccucaacacccaaaguaguacucuaaggacuaguuauaagacugacuagcccgaugggccucccaacgggcccuccuccccuccuugcaccgagauuaauaaaaaaaaaaaaaaaaaaaaaaaaaaaaaaaaaaaaaaaaaaaaaaaaaaaaaaaaaaaaaaaaugcaucccccccccccccccccccccccccccccccaaaggcucuuuucagagccaccagaauu

SEQ ID NO: 11155 - RNA, 1927 nt, Artificial Sequence
  mRNA product Design i-3 comprising derived and/or modified sequence from LASV(Nig08-A19;Clade III)__ADU56619__NP (opt11)
gggagaaagcuuaccauguccgccucaaaagaggucaagagcuuccuauggacccaaucacuucgccgcgaacuuagcggcuacugcuccaacaucaaacuacaagucgucaaagacgcgcaggcccuccuccacggacucgacuucucagaaguauccaacguacaacgccugaugcgcaaacaaaaacgagacgacggcgaccucaaacgacuacgcgaccucaaccaagcaguuaacaaccuagucgaacucaaaagcacccaacagaaaagcguacuacgugucggcacgcuaagcagcgacgaccuacucguguuagccgcugaccucgaaaaacuaaaaucaaaaguaguccggaccgaacgcccacugagcagcggcaucuacaugggcaaccucucaucacaacaacuagaccaacgcaaagcacuacucaacaugaucggcaugacaggaggcaacggcggacgaaacacgaccuccgacggaauuguacgggucugggacgucaaaaacgcagagcuccuaaacaaucaauucggcacaaugccaucccuuacacuagcuugccucaccaaacaaggccagguagaccuaaaugaugccguacaagcccuuacagaccucggacucauauacaccgcaaaauacccuaacucaucagaccucgaccgacuagcacaaucacacccaauccugaacaugauagauaccaaaaaguccucccuuaacaucuccggauauaacuuuucccucggagcagccgucaaagcuggcgccugcaugcuggacggcggcaacaugcucgaaacaaucaaaguaagcccacaaacaauggacggaauccucaaauccauacuaaaaguaaaacgcucccuaggcauguucauauccgacacacccggcgaacgaaaccccuaugaaaacauacuuuacaagaucugccucucaggcgacggauggcccuacaucgcaucccggacauccaucguaggacgagccugggaaaacaccguagucgaccuggaaagcgacaacaagccccagaaaacaggcaacggcggcagcaacaagucccuccaaagcgccggcuucgcagcaggccuaaccuacucccaacucaugacacucaaagacagcaugcuccaacuagacccaaacgcaaaaaccuggauggauaucgaaggccggccagaagaccccguagaaauagcccuauaccaaccuagcucaggaugcuacauccauuucuuccgagaacccaccgaccuuaagcaauucaaacaggacgccaaauacagccacggcaucgacgucaccgaccucuucgccgcccaacccggccuaacaucagccgucauagaagcccuaccccgcaacauggucauaaccugccaaggauccgaagacauaagaaaacuccucgagucgcaaggccgccgagacaucaaacuaauagacaucucccuauccaaagucgacagccgcaaauucgaaaacgcagucugggaccaauuuaaagaccucugccacaugcauaccggcaucgucguagaaaagaagaaacgcggaggcaaagaagaaaucaccccacacugcgcucucauggacugcauaauguucgacgcggccguaucaggcggcgucgacgccaaaguccugagagccguccuucccagagacaugguauucagaaccuccacccccaaagucguccuauaaggacuaguuauaagacugacuagcccgaugggccucccaacgggcccuccuccccuccuugcaccgagauuaauaaaaaaaaaaaaaaaaaaaaaaaaaaaaaaaaaaaaaaaaaaaaaaaaaaaaaaaaaaaaaaaaugcaucccccccccccccccccccccccccccccccaaaggcucuuuucagagccaccagaauu

SEQ ID NO: 11156 - RNA, 1927 nt, Artificial Sequence
  mRNA product Design i-3 comprising derived and/or modified sequence from LASV(G1180-SLE-2010;Clade IV)__AIT17169__NP (opt11)
gggagaaagcuuaccaugucagccagcaaagagaucaaauccuuccucuggacccaaucccuccggcgcgaacucagcgguuacugcagcaacauaaaacuacaagucgucaaagacgcccaagcccuccuccacggccuagacuucuccgaagucuccaacguccagcgccuaaugcgcaaagaacgacgagacgacaacgaccucaaacgacugcgagaucuaaaccaagcaguuaacaaccucguagaacuaaaaucaacucaacaaaaaucaauccugagggucggcacccuaaccagcgacgaccuccuaauccuugccgcugaccucgagaaacucaaaagcaaagucauccgaacggaacgaccacuaagcgccggcgucuacaugggcaaccuaucaagccagcaacucgaccaaagacgcgcauuacucucgaugaucggaaugagcuccggcaaccaacgagcacaagccggccgagacggcgucguacgagucugggacgucaaaaacguugagcuacuaaacaaccaauucggaaccaugccaucacuaacccucgccugccucacaaaacaaggccaaguagaccucaacgacgccguccaagcccucaccgaccucggacuaauauacacagcaaaguaccccaacaccagcgaccuggaccgucuaacccagucacaccccauacucaacaugauagacaccaaaaaguccucacucaacauauccggauacaacuucucccucggcgccgccgucaaagccggagcaugcaugcuagacggcggcaauaugcucgaaacaaucaaagucucaccccaaaccauggacggcauacucaaaagcauacucaaagucaagaaagcccucggaauguuuaucucugacacacccggcgaacgcaaccccuacgaaaacauacuauacaaaauuugccugucaggagauggauggcccuacauagccagucgaaccuccaucaccggccgcgcaugggaaaacaccgucguugaccuagaauccgacggaaaaccccagaaagcaggcuccaauaacuccaacaaaagccuucaaagcgucggauucacagcgggccucaccuacucacaacuaaugacacuaaaagacgccaugcuccaacucgacccaaacgcuaaaaccuggauggacaucgaaggccgccccgaagacccaguagaaaucgcccucuaccagccuuccuccggcugcuacauccacuucuuccgagaacccaccgaccuaaaacaguucaaacaagacgccaaauacucccacggcaucgacgucacagaccuguucgccgcccaaccaggccucacgucugcaguaaucgacgcacugccccguaacaugguaauaaccugccaaggcucagacgacaucagaaaacuucuagaaucacaaggccgaaaagacaucaaacucaucgacaucgcccucuccaaaaccgacuccagaaaauacgaaaacgccguaugggaccaauacaaagacuuaugccacaugcacaccggaguagucgucgaaaagaagaaacgcggcggcaaagaagaaaucaccccacacugcgcacucauggacugcauuauguucgacgccgccgucucuggaggacuaaacaccucaguccucagagccguccucccuagagacaugguauuucgaaccagcacaccccgagucguccuauaaggacuaguuauaagacugacuagcccgaugggccucccaacgggcccuccuccccuccuugcaccgagauuaauaaaaaaaaaaaaaaaaaaaaaaaaaaaaaaaaaaaaaaaaaaaaaaaaaaaaaaaaaaaaaaaaugcaucccccccccccccccccccccccccccccccaaaggcucuuuucagagccaccagaauu

SEQ ID NO: 11157 - RNA, 1927 nt, Artificial Sequence
  mRNA product Design i-3 comprising derived and/or modified sequence from LASV(G1442-SLE-2011;Clade IV)__AIT17181__NP (opt11)
gggagaaagcuuaccauguccgccagcaaagaagucaaauccuuccuauggacccaaucacuccgccgcgaacuuagcggcuacugcucaaauauaaaacugcaagucgucaaagacgcucaagcccuccugcacgggcucgauuucucagagguauccaacguccaacggcuaaugcgcaagcaacgacgggacgacaaugaucucaaaagacuccgcgaccugaaccaagccgucaacaaccuugucgagcucaaauccacucaacagaaaaguguacuccgcgucgguacacucaccucggacgaccuucuaguacuagcagcugaccuagaaaaacuaaaauccaaagucauccgcaccgaacgcccccucagcgcaggcgucuauaugggcaaccucuccucccaacaacucgaccaaagacgagcacuccucaacaugaucgguaugagcggaggcauccaaggcacacgaaccggccgagacggcgucguccgaguaugggacgucaaaaacgccgaccuacucaacaaccaauucggaaccaugcccucccuaacacuagccugccucaccaagcaaggacaaguagaccucaaugacgucguccaagcccucacagaccucggccuaauauacaccgcaaaauaccccaacgccagcgaccucgacagacuaacccaaucccaccccauccuaaacaugaucgacacaaagaaaagcagccucaacaucuccggcuacaacuucucacuaggcgccgccgucaaagcaggagcaugcaugcuggauggcggcaacaugcucgaaacaaucaaagucucaccacaaacaauggacgguauccucaaauccauacuaaaagucaagaaaacucugggaauguucauauccgacacucccggagaacgcaaccccuaugaaaacauccuauacaaaaucugccugucaggagacggcuggcccuacaucgcuucccgaacaagcaucacaggacgcgccugggaaaacacaguuguagaccucgaaagcgacggcaaaccacaaaaagccggaucaaacaacucaaacaaaucccugcagagcgcgggcuucgccgccggucuaaccuauagccaacuaaugacccucaaagacgccaugcuccaacuggauccaaacgccaaaaccuggauggacauagagggccgccccgaagacccagucgagaucgcccuauaucaacccagcucaggcugcuacauccacuucuuccgcgaaccaacagaccucaaacaauucaaacaagacgccaaauacucucacggcauagacgucacagaucuauucgccgcacaaccaggacuuaccucagccguaauugaagcccucccccgcaacauggucauaaccugccaaggauccgacgacaucaagaaacuccuagaaucacaaggccggaaagauaucaaacuuaucgacauagcgcuaucaaaaacagacuccagaaaguacgaaaacgcagucugggaccaguacaaagaccucugccacaugcauaccggcgucgucgucgaaaagaagaaaagaggcggaaaagaggaaaucacgccccacugcgcccucauggacugcauaauguucgacgcagccgucagcggcggacucaacacccuaguccuccgcgccguacucccccgcgacaugguauuccguacauccacuccacgcguaguccuaugaggacuaguuauaagacugacuagcccgaugggccucccaacgggcccuccuccccuccuugcaccgagauuaauaaaaaaaaaaaaaaaaaaaaaaaaaaaaaaaaaaaaaaaaaaaaaaaaaaaaaaaaaaaaaaaaugcaucccccccccccccccccccccccccccccccaaaggcucuuuucagagccaccagaauu

SEQ ID NO: 11158 - RNA, 1927 nt, Artificial Sequence
  mRNA product Design i-3 comprising derived and/or modified sequence from LASV(G3010-SLE-2013;Clade IV)__AIT17345__NP (opt11)
gggagaaagcuuaccauguccgccucaaaagaaaucaaauccuuccucuggacacaaagccuccgccgcgaacucuccggauacugcucaaacaucaaacuucaaguagucaaagacgcccaggccuuacuacacggucuggacuucagugaaguuuccaacguccaacgccucaugcgaaaagaaagacgcgacgacaacgaccuaaaacgccuccgagaccucaaccaagcugucaacaaccuggucgaacuaaaauccacacaacaaaaaucaauccuacgaguaggcacccucaccucagacgaccuccucauccucgcagccgaucucgaaaaacuaaaaucaaaagucacccgcaccgaacgaccacucuccgccggcgucuauaugggaaaccugucaagccaacaacucgaccaacgccgcgcacuacucagcaugauuggcaugucaucaggcguccaaggcgcccgcgccggccgugacggcguaguacggguaugggacguuaagaacgcagaacuccucaacaaucaguucggcaccaugcccucccuaacacucgcuugccucaccaaacaaggacaaguagaucuaaacgacgucguacaagcgcuaacugaccucggacuuauauacaccgcaaaauacccaaauacaucagaccucgacagacuaacccaaagccacccaauccucaacaugaucgacacuaagaaauccucccuaaacauaucaggauacaacuucucccucggcgcagcagucaaagccggggcaugcaugcucgacggcgggaacaugcuagaaaccaucaaagucucgccccagaccauggacggcauccuaaaaagcauacucaaagucaagaaagcacucggcauguucaucuccgaaaccccaggcgagcgcaaccccuacgaaaacauucuauacaaaaucugccucucgggggacggcuggccauacaucgccucacgaaccucaaucacugguagagccugggaaaauaccgucguagaucucgaaagcgauggcaaaccucaaaaagcaggaucaaacaacaguaacaaaagccuucaauccgcaggcuuuacggccggccuuacuuacucccaacuaaugacccucaaagacgcaaugcuacaacuagaccccaacgccaaaaccuggauggacaucgaaggccgacccgaggacccugucgaggucgcucuuuaccaacccagcucaggaugcuacauccacuuuuuccgcgagcccaccgaccucaaacaauucaaacaagacgccaaauacucccauggcaucgacgucacagaccuauucgccgcccaaccaggccuuaccucagcagucaucgacgcccuacccagaaacauggucauaaccugccaaggcucagacgacauaaagaaacuacucgaaucccaaggacgcaaagacaucaaacucaucgacauagcacucuccaaaaccgacucacgcaaauacgaaaacgccgucugggaccaauacaaagaccuaugccauaugcacacaggcguugucgucgagaaaaagaaacgcggaggaaaagaagaaaucacaccccacugcgcccuaauggacugcaucauguucgacgcugcagucagcgguggccuaaacacgagcguccuccgcgcaguccucccccgcgacaugguuuucagaaccuccacuccccgagucguucucuaaggacuaguuauaagacugacuagcccgaugggccucccaacgggcccuccuccccuccuugcaccgagauuaauaaaaaaaaaaaaaaaaaaaaaaaaaaaaaaaaaaaaaaaaaaaaaaaaaaaaaaaaaaaaaaaaugcaucccccccccccccccccccccccccccccccaaaggcucuuuucagagccaccagaauu

SEQ ID NO: 11159 - RNA, 1927 nt, Artificial Sequence
  mRNA product Design i-3 comprising derived and/or modified sequence from LASV(G502-SLE-2009;Clade IV)__AIT17127__NP (opt11)
gggagaaagcuuaccauguccgccuccaaagaaauaaaauccuuucuauggacccaaucccuucgccgcgaacucuccggcuacugcuccaauaucaaacuccaagucgucaaagacgcccaagcacuacuacacggccuagacuucucagaagucucaaacguccaacgacucaugcgaaaagagagacgcgacgacaacgaccuaaaacgccuaagagaccucaaccaagccguaaacaaccucgucgaacuuaaaagcacgcaacaaaaauccauccuccgaguaggcacccuaaccucagacgaccuacuuauacuagcagcggaccucgaaaaacucaagagcaaggucauccgcacugaacgcccacuauccgcaggcgucuacaugggaaaccucucaucccaacaacucgaccaacgccgggcccuacucuccaugaucggcauguccgguggaaaccaaggagugcgagcaggcaaagacggcgucguacgcguaugggacgucaaaaacgcugaacuccucaacaaccaauuuggaacaaugcccagccucacccuugccugccucaccaaacaaggccaaguagaccuaaacgacgccguacaagcccuaaccgaccuaggacucauuuacacagccaaauacccuaacaccuccgaccuagaccgccucacacaaucccacccgauccuaaacaugauagacaccaaaaaguccucccucaacauauccggcuacaacuucagccucggagcugcagucaaagcaggcgccugcaugcucgacggcggcaacaugcucgaaaccaucaaagucagcccccaaaccauggacggcauacuaaaguccaucuugaaaguaaagaaagcgcuaggcauguucaucuccgacacaccaggagaaagaaaccccuacgaaaacauccuauacaaaauaugccucuccggagacggcuggccauacaucgccucacgcaccuccaucacaggccgugcaugggaaaacaccgucgucgaccuagaauccgacggcaaaccacaaaaagcaggcuccaacaacuccaacaaaucacuccaaucagcuggcuucaccgcuggucuaacauacucccagcucaugacccugaaagaugccaugcugcaacuagacccaaacaccaaaaccuggauggacaucgaaggacgacccgaagauccagucgaaauagcccucuaccaaccaucguccggcugcuacauccacuucuuccgcgaaccaacugaccucaaacaauucaaacaggacgcaaaauacucccacggaaucgacgucaccgaccuauucgcagcacaaccaggcuuaacauccgcugucaucgaugcccucccccgcaacaugguaauuacaugccaaggcuccgacgacauccgaaaacuacucgaaucccaaggacgcaaagacaucaaacucauagacauagcccucaacaaaaccgacucccgcaaauacgaaaacgcagucugggaccaauauaaagaccucugccauaugcacaccggugucgucgucgaaaagaagaaacgaggcgguaaagaagaaauaaccccgcacugcgcccuuauggacugcaucauguucgacgccgccgucucaggcggccucaauaccagcguacuccgggcaguccucccccgggacaugguauuccggacaagcacaccccgcguaguccucuagggacuaguuauaagacugacuagcccgaugggccucccaacgggcccuccuccccuccuugcaccgagauuaauaaaaaaaaaaaaaaaaaaaaaaaaaaaaaaaaaaaaaaaaaaaaaaaaaaaaaaaaaaaaaaaaugcaucccccccccccccccccccccccccccccccaaaggcucuuuucagagccaccagaauu

SEQ ID NO: 11160 - RNA, 1927 nt, Artificial Sequence
  mRNA product Design i-3 comprising derived and/or modified sequence from LASV(G733-SLE-2010;Clade IV)__AIT17155__NP (opt11)
gggagaaagcuuaccaugucugccagcaaagaaaucaaauccuuccucuggacucaaucacuccgccgcgaacuaagcggauacugcucgaacauuaaacuucaagugguaaaagacgcccaagcccuccuccacggacucgacuucucagaaguaucaaacguccaacgccuaaugcgcaaagagcggcgcgacgacaacgaccucaaacgccuccgcgaccucaaccaagcagucaacaaccucgucgaacucaaaucaacacaacaaaaaucaguacuacgcgucggcacauuaacaagcgacgaacuucucguacucgcagccgaccucgagaaacugaaauccaaaguuaucagaacagagcgaccccucuccgccggagucuacaugggaaaccucuccucccagcaacucgaccaacgacgcgcccuccucagcaugaucggcauguccggcggcaaccaaggcgcccgcacaggccgcgacggcguaguccgaguaugggacguuaaaaacgccgaacuccucaacaaccaauucggaacaaugccaucucuuacacucgcuugccuaaccaaacaaggacaaguagaccuaaacgacgccgugcaagcacuaaccgacuugggccucauauacaccgccaaauaccccaacaccuccgaccuagaccgccucacacaaucacacccaauacucaacaugaucgacaccaaaaagucaagucucaacauaagcggcuacaacuucucacucggcgccgccgucaaagccggcgcaugcaugcuggacggaggaaacaugcucgaaacaaucaaagucucaccccaaaccauggacggaauccucaaauccauacucaaagucaagaaagcccuaggcauguucauaagcgauacacccggcgaacgcaaccccuacgaaaacauccuauacaaaauaugccucuccggagauggauggcccuacaucgccucacgcaccagcaucacgggccgcgcuugggaaaacacaguagucgaccuagaaagcgacggcaaaccacaaaaagcaggcuccaacaauuccaacaaaucgcuucaguccgcuggcuucaccgccggccuaaccuacucacaacucaugacccugaaagacgcuaugcuccaacucgaccccaacgcaaaaacauggauggacaucgagggcagacccgaggaccccgucgaaauagcccucuaccaaccuuccuccggcugcuacauacacuucuucagagaacccaccgaccucaaacaauucaaacaagacgccaaauacucccacggcaucgacgucaccgaccucuucgccgcccagccaggacucaccuccgccgucaucgacgcccuccccaggaacaugguaauuaccugccaaggauccgacgacauccgcaaacuccucgaaucacaaggacgcaaagacaucaaacuaauagacaucgcccuaucaaaaauagacucccgcaaauacgaaaaugccguaugggaccaauacaaagaucugugccacaugcacaccggagucgucgucgaaaagaagaaacgcggcggaaaagaagaaauaacuccccacugcgcacuaauggacugcauaauguucgacgcagccgucuccggaggacuaaacucacucguccuaagagcagugcucccccgcgacaugguauuccgcacguccacaccccgcguaguccuauaaggacuaguuauaagacugacuagcccgaugggccucccaacgggcccuccuccccuccuugcaccgagauuaauaaaaaaaaaaaaaaaaaaaaaaaaaaaaaaaaaaaaaaaaaaaaaaaaaaaaaaaaaaaaaaaaugcaucccccccccccccccccccccccccccccccaaaggcucuuuucagagccaccagaauu

SEQ ID NO: 11161 - RNA, 1927 nt, Artificial Sequence
  mRNA product Design i-3 comprising derived and/or modified sequence from MOPV/LASV reassortant(IGS-1;Clade IV)__AFY05578__NP (opt11)
gggagaaagcuuaccaugagcgccagcaaagaaaucaagagcuuccuuuggacgcagucguuacgacgcgaacucuccggcuacugcucaaacaucaaacuacaaguagucaaagaugcccaagcccuacuccacggacucgacuucuccgaagucagcaacgugcaacgccuaaugcgcaaagaacgacgcgacgacaacgaccucaaacgacuccgagaccuaaaccaagccgucaacaaccucguagaacuaaaauccacacaacaaaaauccauauuacgagucggcacccucaccagcgaugaucuucuaauacuggccgcagaccucgaaaaacuucgcucaaaagugauucgcaccgaacgcccacucagcgccggaguuuacaugggcaaucucuccagccaacaacucgaccaacgaagggcccuccucaacaugauugggauguccggaggcaaccaaggagcccgagccggacgcgacggcguaguccgcguaugggacgucaaaaacgcagaacuacucagcaaccaauucggcaccaugcccucacucacgcuugccuguuugaccaaacaaggacagguagaucuuaacgacgcaguccaagcacuaacagaccucggccuaaucuacaccgcaaaauaccccaacaccuccgaccuagaccgacucacucaaucgcaccccauccuaaacaugaucgacaccaagaaaucgagccucaacauuagcgguuacaacuucucccuaggcgccgccgucaaagccggugcaugcaugcuugacggcggaaauaugcuagaaaccaucaaaguauccccacaaacaauggacggaauccucaaaucgauucucaaagucaagaaagcccucggcauguucaucucagacaccccaggagaaaggaacccguacgaaaauauccucuacaaaauaugucucucaggcgacggcuggccauacaucgccucccgcacaaguauaaccggacgagccugggaaaacaccguaguagaccuagaaagcgacgguaaaccccaaaaagcagacucuaacaacagcucgaaaucccuccaaagcgcaggcuucacagcgggccuaaccuacagccagcucaugacccucaaagacgcaaugcuccagcucgaccccaacgcgaaaaccuggauggacaucgagggcagaccagaagacccagucgaaaucgcacucuaccaacccuccuccggcugcuacauccacuuuuuccgcgaacccaccgaccuaaaacaauuuaaacaagacgcaaaauacucccacggcauagacguaacagaccucuucgcaacccagccaggccuaaccuccgccgucaucgacgcacucccccgcaacaugguaauaaccugccaaggcucagacgacauccgcaaacuccucgaaucccaaggcagaaaagacaucaaacuuaucgacauagaucucucuaaaaccgacucccguaaauacgagaacgccgucugggaccaauacaaagaccuaugccauaugcacaccggaguuguagucgaaaagaagaaacggggagguaaagaagaaauaacaccccacugcgcccuaauggacugcauuauguucgacgccgcaguaagcggcggccuaaacaccuccguccuccgcgcaguccucccacgcgacauggucuucagaaccuccacacccagagucguccucuaaggacuaguuauaagacugacuagcccgaugggccucccaacgggcccuccuccccuccuugcaccgagauuaauaaaaaaaaaaaaaaaaaaaaaaaaaaaaaaaaaaaaaaaaaaaaaaaaaaaaaaaaaaaaaaaaugcaucccccccccccccccccccccccccccccccaaaggcucuuuucagagccaccagaauu

SEQ ID NO: 11162 - RNA, 1927 nt, Artificial Sequence
  mRNA product Design i-3 comprising derived and/or modified sequence from LASV(LM765-SLE-2012;Clade IV)__AIT17815__NP (opt11)
gggagaaagcuuaccaugucagcauccaaagagaucaaauccuuccuguggacccaaucccuucgacgcgaacuaagcggauacugcagcaacaucaaacuacaagucguaaaagacgcccaagcacuccuacacggccuagacuucuccgagguauccaauguccaacgccucaugaggaaagaacgccgcgaugauaacgaucuuaaaagauuacgcgaccucaaccaggccguaaacaaccuagucgaacucaaaucaacccaacaaaaaucaauacuccgcgucggaacccuuacaucagacgaccuacucauacuggccgcagaccuugaaaaacucaaaucgaaagucacccgcaccgaaagaccccucuccgccggcgucuacaugggcaaccucagcucacaacagcucgaccaacgacgagcgcuccucgacaugauaggcauguccggaagcaaccaaggcgccagagccggcagagacggcgucguacgcgucugggacgucaaaaacgccgaacuccucaacaaccaauucggcaccaugcccucucucacgcucgccugccucaccaagcaaggccaagucgaccucaacgacgcaguacaagcacuaacggaccuaggccugaucuacacagccaaguaccccaacaccucggaccucgaccggcucacccaaagccaccccauccugaacaugaucgacaccaagaaauccucccuuaacauaucaggcuacaacuucucccugggcgccgcaguaaaagccggcgcaugcaugcuagacggaggaaacaugcucgaaacaaucaaagucucgccccaaacaauggauggcauacuaaaauccauccucaaagucaagaaagcccuaggaauguucauaucagaugcccccggcgaacgaaaccccuacgagaacauccuauacaaaauuugccucagcggcgacgguuggccguauaucgccaguagaaccuccaucaccggccgcgccugggaaaacaccguagucgaccuagaaagcgauggcaaaccccaaaaagcaggaaguaacggauccaacaaaagucuacaauccgccggcuucaccgccggucuaaccuacucccaacucaugacccucaaagacgccaugcuacaacuagacccaaacgccaaaaccuggauggacaucgaaggcagacccgaagacccagucgaaaucgcacuguaccaacccagcuccggcugcuacauccacuucuuccgcgaacccacagaccucaaacaauucaaacaagacgccaaauacagccacggcauagacguaaccgaccuauucgccgcacagcccggcuuaaccagcgcagucaucgacgcccuacccagaaacauggucauaaccugccaaggcucagacgacauccgcaaacucuucgagagccaaggcagaaaagacaucaaacucauagacaucgcccucagcaagacugacucccgcaaauacgaaaacgccgucugggaccaauacaaggaccuaugccauaugcacaccgggaucguaguagaaaagaagaaacgaggcggaaaagaggaaauaaccccacauugcgcccucauggacugcaucauguucgacgccgccguaagcggcggccuaaacaccucaguccuuagagccguccucccacgcgacauggucuuccgcaccucuacgccccgaguaguccuauaaggacuaguuauaagacugacuagcccgaugggccucccaacgggcccuccuccccuccuugcaccgagauuaauaaaaaaaaaaaaaaaaaaaaaaaaaaaaaaaaaaaaaaaaaaaaaaaaaaaaaaaaaaaaaaaaugcaucccccccccccccccccccccccccccccccaaaggcucuuuucagagccaccagaauu

SEQ ID NO: 11163 - RNA, 1927 nt, Artificial Sequence
  mRNA product Design i-3 comprising derived and/or modified sequence from LASV(LM776-SLE-2012;Clade IV)__AIT17825__NP (opt11)
gggagaaagcuuaccaugucagccuccaaagaaaucaaauccuuccucuggacccaaucccuccgccgcgaacuauccuccuacugcuccaacaucaaacuacaagucgucaaagacgcccaagcccuccugcacggacucgacuucucagaagucagcaacguacaacgacucaugcgaaaagaacgaagagacgacaacgaccucaaacgacuuagagaccucaaccaagcagucaacaaccucguagaacuaaaaucuacccaacaaaaaucaauacuccgcgucggcaccuuaacaagcgacgacuuacucauccucgcugccgaccucgaaaaacuaaaauccaaaguaacccgcaccgaacgcccccucucagccggcgucuacaugggcaaccucucaucccaacagcuagaccaacgcagagcccuccucuccaugauuggaauguccggaagcaaccaaggugccagagcaggccgagacggagucguccgcguuugggacgucaagaacgcagaacuccuaaacaaccaguucggcacaaugcccucccucacacuagcgugucucaccaaacaaggucaagucgaccuaaacgacgcaguacaagcccucacagaccucggccuaauauacacagccaaauacccaaacaccagcgaccucgaccgccucacccaaagccaccccauauuaaacaugauagacaccaagaaauccucucucaacaucuccggcuacaacuucucacuaggcgcagcaguaaaagccggcgcaugcaugcuggacgguggcaacaugcucgaaacaaucaaagucucaccccaaaccauggacggcauccuaaaauccauacucaaagucaagaaagcacucggaauguucaucucagacacccccggcgaacgcaaccccuacgaaaacauacucuacaaaauuugccucuccggcgacggcuggcccuauaucgccuccagaacauccaucaccggccgcgccugggaaaacaccguaguagaccuugaauccgacggaaaaccucagaaagccggaagcaacaacucaaacaaaucccuacaaucagccggauucaccgccggucuaacauacagccaacucaugacccuaaaggacgccaugcuacaacucgacccgaacgccaaaaccuggauggacaucgaaggccgacccgaagaccccgucgaggucgcccucuaccaacccagcagcggcugcuacauccacuucuucagagaaccaaccgaucucaagcaauuuaaacaagacgcgaaauacucccacggcauagaugucaccgaccucuucgcugcccaacccggccucaccucagccgucaucgacgcccuucccagaaacauggucaucacgugccaaggcuccgacgauauacgaaagcuacucgaaucgcaaggccgcaaggacaucaaguuaaucgacaucgcgcucuccaaaaccgacuccagaaaauacgaaaacgccgucugggaccaauacaaagaccucugccacaugcacaccggagucgucgucgaaaagaagaaaagaggcggcaaagaagaaauuaccccgcacugcgcacuaauggacugcaucauguucgacgccgcagucuccggaggccucaacaccucgguccuccgcgcgguacucccccgcgacauggucuuccguacaucaacaccccgcguaguccucuaaggacuaguuauaagacugacuagcccgaugggccucccaacgggcccuccuccccuccuugcaccgagauuaauaaaaaaaaaaaaaaaaaaaaaaaaaaaaaaaaaaaaaaaaaaaaaaaaaaaaaaaaaaaaaaaaugcaucccccccccccccccccccccccccccccccaaaggcucuuuucagagccaccagaauu

SEQ ID NO: 11164 - RNA, 1927 nt, Artificial Sequence
  mRNA product Design i-3 comprising derived and/or modified sequence from LASV(Mad39;Clade IV)__ANH09723__NP (opt11)
gggagaaagcuuaccaugucagcauccaaagaaaucaaguccuuuuuauggacgcaaucacuccgacgcgaacuauccggcuacuguuccaacaucaaacuccaaguagucaaggacgcacaagcacuucuccacggccuagacuucucagaagucagcaacguacaacgacuaaugcgcaaacaacggcgcgacgacaaugaccuaaagcgccucagagaccuaaaccaagccgucaacaaccuuguagagcuaaaguccacccaacaaaaauccguccugcgcguuggaacccuaacaagcgacgaccuccucacacucgcagcggaccuagaaaagcucaaauccaaggucacacgaacagagagaccccuaaccgcaggagucuauaugggcaaccuaagcucccaacaacuagaccaaagacgggcacuccucaacaugauaggaaugagcggcggaaaccaaggugcaagaaccggacgggacgggguaguccgagucugggacgucaagaacgcagaacuacuaaacaaccaguucgguaccaugcccucccucacccucgccugccugacaaaacaaggccaagucgaccucaacgacguuguccaagcacuaacagaccucggccuaauauacaccgcaaaguaccccaacacaucagaccuggaccgacuaacccaaucccaccccauccucaacaugaucgacaccaacaaguccucccuuaacauuagcggcuacaacuucagccucggagccgcagucaaggccggcgccugcaugcuagacggcggcaacaugcuagaaaccaucaaagucucaccccaaaccauggacggcauccucaaaagcauuuuaaaagucaaaaagucacuaggcauguucaucagcgacacccccggagagagaaaccccuacgaaaauauccucuacaaaauaugccucucaggcgacggcuggcccuacauagcaagccgaaccagcaucacaggcagagcaugggaaaacaccgucgucgaucuagaaucaggcggcaaaccccaaaaagccggaucaaacaacuccaacaaaucucuacaaagcgccggcuucgccgcaggacucacauacucccaacucaugacccuaaaagacgccaugcuucagcucgacccgaacgcaaaaaccuggauggacauagaaggcagacccgaagacccaguagaaauagcacuauaccagcccaucucaggguguuacauccacuucuuccgcgaaccgaccgaucuaaaacaauucaaacaagacgccaaauacucccacggcaucgacguaaccgaccuguuugcagcucaaccaggccucaccuccgccgucauagaagcccucccccgaaacauggucauaaccugccaaggcagcgacgacauccgcaaacuauucgaaucacagggcagaaaagacaucaaacucaucgacaucgcacucagcaaaaccgacucacguaaguacgagaacgcggucugggaccaauacaaagaccucugccacaugcacaccggugucgucgucgaaaagaaaaagaaaggcggaaaagaagaaauaaccccucacugcgcccucauggacugcaucauguuugacgccgccgucagcggaggccuaaacacgcuaguccuacgagcaguacucccacgcgacaugguauuccgcacaucaacccccaaaguagucuuauaaggacuaguuauaagacugacuagcccgaugggccucccaacgggcccuccuccccuccuugcaccgagauuaauaaaaaaaaaaaaaaaaaaaaaaaaaaaaaaaaaaaaaaaaaaaaaaaaaaaaaaaaaaaaaaaaugcaucccccccccccccccccccccccccccccccaaaggcucuuuucagagccaccagaauu

SEQ ID NO: 11165 - RNA, 1927 nt, Artificial Sequence
  mRNA product Design i-3 comprising derived and/or modified sequence from LASV(Z0947-SLE-2011;Clade IV)__AIT17841__NP (opt11)
gggagaaagcuuaccaugagcgccucaaaggaaaucaaaucguuccucuggacacaaucccuaagacgcgaacucucaggcuacugcuccaacaucaaacuacaagucguaaaagacgcgcaagcacuacuccacggacuagacuucagcgagguuuccaacguacaacgccugaugcgaaaagaacgccgagacgacaacgaccucaagcgacugcgcgaccucaaucaagccguaaacaaccucgucgaacuaaaauccacccaacaaaagucaauccuacgcguaggcacacugaccagcgaugaccuccucauccuugccgcagaccucgaaaagcuaaaaagcaaagucacccgcaccgaacgcccgcuauccgccggagucuacaugggaaaccuaaguagccaacaacucgaccaacggcgcgcacuacuaaacaugauaggcaugagcggcuccaaccaaggugcacguacaggcagggacggggucguacgcgucugggacgucaaaaacgccgaacuccucaacaaccaauucgguacaaugcccucacucacacuagcgugccucaccaagcagggacaaguagaccucaacgacgcaguacaagcgcuaacagaccucggccucauauacaccgcaaaauacccaaacaccucugaccuagaccgacucacucagucacacccaauccucaacaugauagacacaaagaaauccucgcuaaacauauccggcuacaauuucucccucggagccgccgucaaagccggcgcgugcaugcucgacggaggcaacaugcucgaaaccauaaaagucucaccacaaacaauggacggaauccucaaauccauccuaaaggucaagaaagcccuaggaauguucauauccgacgcccccggagaacgcaaccccuaugaaaacauccucuacaaaaucugccucuccggcgacggcuggcccuacaucgccagccgaacaagcaucaccggccgugccugggaaaacaccgucguagaucucgaaagcgacggaaaaccccaaaaagcaggcucgaacggcuccaacaaaucccuccagagcgccggcuucaccgcaggccuaaccuacucacaacugaugacacucaaagacgccaugcuacaacucgaccccaacgcaaaaaccuggauggacaucgaaggccgccccgaagaccccgucgagauagcucucuaccaacccuccucaggaugcuacauccacuucuuccgcgaaccaaccgaccugaaacaauucaaacaggacgcaaaauacucccacggcauagacguaaccgaccuauucgccgcgcaaccaggacucaccuccgccgucaucgacgcccucccaagaaacaugguuauaaccugccaaggcuccgacgacauccgcaaacuauucgaaucccaaggccgcaaagacaucaaguuaaucgacaucgcccugucaaagacagacucccgcaaauacgaaaacgcggucugggaccaauacaaagaccuuugccacaugcacaccgguaucgucguagagaaaaagaaacgaggaggcaaagaagagauaaccccacacugcgcuuuaauggacugcauaauguucgacgccgccgucucaggcggccuaaacaccagcguccuccgagcaguccucccccgcgacauggucuuucggaccuccacccccagagucguccuaugaggacuaguuauaagacugacuagcccgaugggccucccaacgggcccuccuccccuccuugcaccgagauuaauaaaaaaaaaaaaaaaaaaaaaaaaaaaaaaaaaaaaaaaaaaaaaaaaaaaaaaaaaaaaaaaaugcaucccccccccccccccccccccccccccccccaaaggcucuuuucagagccaccagaauu

SEQ ID NO: 11166 - protein, 99 aa, Artificial Sequence
  derived and/or modified protein sequence (wt) from LASV(Josiah;Clade IV)__ADY11072/NP_694871__Z
MGNKQAKAPESKDSPRASLIPDATHLGPQFCKSCWFENKGLVECNNHYLCLNCLTLLLSVSNRCPICKMPLPTKLRPSAAPTAPPTGAADSIRPPPYSP

SEQ ID NO: 11167 - protein, 100 aa, Artificial Sequence
  derived and/or modified protein sequence (wt) from LASV(Pinneo-NIG-1969;Clade I)__AIT17834__Z
MGNKQTRSPPKPEHPRPTLLPDASHLGPQFCKSCWFENKGLVECNNHYLCLNCLTLLLSVSDRCPICKMPLPTKLAVRTQPSAPPLNQGNTQSSPPPYSP

SEQ ID NO: 11168 - protein, 99 aa, Artificial Sequence
  derived and/or modified protein sequence (wt) from LASV(Nig08-04;Clade II)__ADU56612__Z
MGNRQTRPTEATEQSRAHLVPDASHLGPQFCKSCWFENRGLVECNNHYLCLNCLSLLLSVSSRCPICKMPLPTRLKASAQPSAPPTEAPQNTTPPPYTP

SEQ ID NO: 11169 - protein, 99 aa, Artificial Sequence
  derived and/or modified protein sequence (wt) from LASV(Nig08-A19;Clade III)__ADU56620__Z
MGGKHTKPQRESNSPRASLIPDATHLGPQFCKSCWFENKGLVECNNHYLCLNCLTLLLSVSNRCPICKMPLPTRLRASTNPTAPQVEQVGPTNPPPYSP

SEQ ID NO: 11170 - protein, 99 aa, Artificial Sequence
  derived and/or modified protein sequence (wt) from LASV(AV;Clade V)__CCA30312__Z
MGNRQAKNPEVENSPRASLIPDATHLGPQFCKSCWFENKGLVECNNHYLCLNCLSLLLSVSNRCPICKMPLPTRLRPTTTPTAPQIIKENTTNPPPYTP

SEQ ID NO: 11171 - protein, 99 aa, Artificial Sequence
  derived and/or modified protein sequence (wt) from LASV(Togo/2016/7082;Clade VI)__AMR44579__Z
MGARQTKQPQIEGSPRASLVPDASHLGPQFCKSCWFENKGLVECNNHYLCLNCLSLLLSVSNRCPICKMPLPTKLRVSSAPSAPPAATAQPGTPPPYSP

SEQ ID NO: 11172 - protein, 99 aa, Artificial Sequence
  derived and/or modified protein sequence (wt) from LASV(KAK-428;Clade n.d. (VII))__ANH09761__Z
MGNKGTKPTQNSEPSRANLVPDASYLGPQFCKSCWFENKGLVECNNHYLCLNCLTMLLSVSNRCPICKMPLPTKIKASGSPSAPPTEANSAVSPPPYTP

SEQ ID NO: 11173 - protein, 99 aa, Artificial Sequence
  derived and/or modified protein sequence (wt) from LASV(ISTH0009-NIG-2011;Clade II)__AIT17402__Z
MGNRQAKSTKVDEHQRAHLVPDASHLGPQFCKSCWFENRGLVECNNHYLCLNCLSLLLSVSSRCPICKMPLPTKLKAAAQPSAPSTETIQNTTPPPYTP

SEQ ID NO: 11174 - protein, 99 aa, Artificial Sequence
  derived and/or modified protein sequence (wt) from LASV(ISTH0012-NIG-2011;Clade II)__AIT17406__Z
MGNRQAKSSKVDEHQRAHLVPDASHLGPQFCKSCWFENKGLVECNNHYLCLNCLSLLLSVSSRCPICKMPLPTKLKAAAQPSAPSTEAVQNTAPPPYAP

SEQ ID NO: 11175 - protein, 99 aa, Artificial Sequence
  derived and/or modified protein sequence (wt) from LASV(ISTH0047-NIG-2011;Clade II)__AIT17410__Z
MGNKQAKSTKVDEHQRAHLVPDASHLGPQFCKSCWFENRGLVECNNHYLCLNCLSLLLSVSSRCPICKMPLPTRLKAATQPSAPSTEATQNTTPPPYTP

SEQ ID NO: 11176 - protein, 99 aa, Artificial Sequence
  derived and/or modified protein sequence (wt) from LASV(ISTH0230-NIG-2011;Clade II)__AIT17418__Z
MGNRQAKSTKVDEHQRAHLVPDASHLGPQFCKSCWFENRGLVECNNHYLCLNCLSLLLSVSSRCPICKMPLPTKLKAATQPSAPSTETIQNTTPPPYTP

SEQ ID NO: 11177 - protein, 99 aa, Artificial Sequence
  derived and/or modified protein sequence (wt) from LASV(ISTH0531-NIG-2011;Clade II)__AIT17422__Z
MGNRQAKSAKVDEHQRAHLVPDASHLGPQFCKSCWFENRGLVECNNHYLCLNCLSLLLSVSSRCPICKMPLPTKLKAATQPSAPSTEATQNTTPPPYTP

SEQ ID NO: 11178 - protein, 99 aa, Artificial Sequence
  derived and/or modified protein sequence (wt) from LASV(ISTH0595-NIG-2011;Clade II)__AIT17426__Z
MGNKQAKSTKVDEHQRAHLVPDASHLGPQFCKSCWFENRGLVECNNHYLCLNCLSLLLSVSSRCPICKMPLPTKLKAATQPSAPSTEATQNTTPPPYTP

SEQ ID NO: 11179 - protein, 99 aa, Artificial Sequence
  derived and/or modified protein sequence (wt) from LASV(ISTH1003-NIG-2011;Clade II)__AIT17432__Z
MGNKQAKSTKVDEHQRAHLVPDASHLGPQFCKSCWFENRGLVECNNHYLCLNCLSLLLSVSSRCPICKMPLPTRLKAATQPSAPSTEATQNTIPPPYTP

SEQ ID NO: 11180 - protein, 99 aa, Artificial Sequence
  derived and/or modified protein sequence (wt) from LASV(ISTH1038-NIG-2011;Clade II)__AIT17436__Z
MGNKQAKSTKADEHQRAHLVPDASHLGPQFCKSCWFENRGLVECNNHYLCLNCLSLLLSVSSRCPICKMPLPTKLKAATQPSAPSTEATRNTTPPPYTP

SEQ ID NO: 11181 - protein, 99 aa, Artificial Sequence
  derived and/or modified protein sequence (wt) from LASV(ISTH1058-NIG-2011;Clade II)__AIT17444__Z
MGNRQAKSTKVDEHQRAHLVPDASHLGPQFCKSCWFENKGLVECNNHYLCLNCLSLLLSVSSRCPICKMPLPTKLKAAAQPSAPSTEAAQNTAPPPYAP

SEQ ID NO: 11182 - protein, 99 aa, Artificial Sequence
  derived and/or modified protein sequence (wt) from LASV(ISTH1064-NIG-2011;Clade II)__AIT17448__Z
MGNRQAKSTKVGEHQRAHLVPDASHLGPQFCKSCWFENRGLVECNNHYLCLNCLSLLLSVSSRCPICKMPLPTKLKATAQPSAPSAEAIQNTTPPPYTP

SEQ ID NO: 11183 - protein, 99 aa, Artificial Sequence
  derived and/or modified protein sequence (wt) from LASV(ISTH1069-NIG-2011;Clade II)__AIT17452__Z
MGNRQAKSTRVDEHQRAHLVPDASHLGPQFCKSCWFENRGLVECNNHYLCLNCLSLLLSVSSRCPICKMPLPTRLRAAVQPSAPSTETTQDTTPPPYSP

SEQ ID NO: 11184 - protein, 99 aa, Artificial Sequence
  derived and/or modified protein sequence (wt) from LASV(ISTH1096-NIG-2012;Clade II)__AIT17456__Z
MGNRQAKSTEVNEHQRAHLVPDASHLGPQFCKSCWFENRGLVECNNHYLCLNCLSLLLSVSSRCPICKMPLPTKLKAATQPSAPSTEVTQNTVPPPYSP

SEQ ID NO: 11185 - protein, 99 aa, Artificial Sequence
  derived and/or modified protein sequence (wt) from LASV(ISTH1107-NIG-2012;Clade II)__AIT17460__Z
MGNRQAKSTKVDEHQRAHLVPDASHLGPQFCKSCWFENRGLVECNNHYLCLNCLSLLLSVSSRCPICKMPLPTKLKAAAQPSAPPTEATQNTTPPPYTP

SEQ ID NO: 11186 - protein, 99 aa, Artificial Sequence
  derived and/or modified protein sequence (wt) from LASV(ISTH1111-NIG-2011;Clade II)__AIT17464__Z
MGNRQAKSTKVDEHQRAHLVPDASHLGPQFCKSCWFENRGLVECNNHYLCLNCLSLLLSVSSRCPICKMPLPTKLKAAAQPSAPSTEATQDTTPPPYTP

SEQ ID NO: 11187 - protein, 99 aa, Artificial Sequence
  derived and/or modified protein sequence (wt) from LASV(ISTH1121-NIG-2012;Clade II)__AIT17468__Z
MGNRQAKQTKVDEHQRAHLVPDASHLGPQFCKSCWFENRGLVECNNHYLCLNCLSLLLSISSRCPICKMPLPTKLKAAAQPSAPSTEATQDTTPPPYTP

SEQ ID NO: 11188 - protein, 99 aa, Artificial Sequence
  derived and/or modified protein sequence (wt) from LASV(ISTH1129-NIG-2012;Clade II)__AIT17472__Z
MGNKQTKSTKADEHQRAHLVPDASHLGPQFCKSCWFENRGLVECNNHYLCLNCLSLLLSVSSRCPICKMPLPTRLKAAAQPSAPSTEATQDTTPPPYTP

SEQ ID NO: 11189 - protein, 99 aa, Artificial Sequence
  derived and/or modified protein sequence (wt) from LASV(ISTH1137-NIG-2011;Clade II)__AIT17476__Z
MGNRQAKSTKVDEHQRAHLVPDASHLGPQFCKSCWFENRGLVECNNHYLCLNCLSLLLSVSSRCPICKMPLPTKLKAAAQPSAPSAEAIQNTTPPPYTP

SEQ ID NO: 11190 - protein, 99 aa, Artificial Sequence
  derived and/or modified protein sequence (wt) from LASV(ISTH2010-NIG-2012;Clade II)__AIT17480__Z
MGNRHAKSTKVDEHQRAHLVPDASHLGPQFCKSCWFENRGLVECNNHYLCLNCLSLLLSVSSRCPICKMPLPTKLKAAAQPSAPSTEVIQSTTPPPYTP

SEQ ID NO: 11191 - protein, 99 aa, Artificial Sequence
  derived and/or modified protein sequence (wt) from LASV(ISTH2016-NIG-2012;Clade II)__AIT17484__Z
MGNRHAKSTKVDEHQRAHLVPDASHLGPQFCKSCWFENRGLVECNNHYLCLNCLSLLLSVSSRCPICKMPLPTKLKAAAQPSAPSTEEIQNTTPPPYTP

SEQ ID NO: 11192 - protein, 99 aa, Artificial Sequence
  derived and/or modified protein sequence (wt) from LASV(ISTH2020-NIG-2012;Clade II)__AIT17488__Z
MGNRQAKPTKVDEHQRAHLVPDASHLGPQFCKSCWFENKGLVECNNHYLCLNCLSLLLSVSSRCPICKMPLPTKLKAAAQPSAPSTEAAQNTAPPPYAP

SEQ ID NO: 11193 - protein, 99 aa, Artificial Sequence
  derived and/or modified protein sequence (wt) from LASV(ISTH2031-NIG-2012;Clade II)__AIT17496__Z
MGNRQAKSTKVDEHQRAHLVPDASHLGPQFCKSCWFENRGLVECNNHYLCLNCLSLLLSVSSRCPICKMPLPTRLKAATQPSAPSTEATQTTTPPPYTP

SEQ ID NO: 11194 - protein, 99 aa, Artificial Sequence
  derived and/or modified protein sequence (wt) from LASV(ISTH2037-NIG-2012;Clade II)__AIT17500__Z
MGNRQTKSTKVDEHQRAHLVPDASHLGPQFCKSCWFENKGLVECNNHYLCLNCLSLLLSVSSRCPICKMPLPTKLKTAAQPSAPPTEAARTTAPPPYAP

SEQ ID NO: 11195 - protein, 99 aa, Artificial Sequence
  derived and/or modified protein sequence (wt) from LASV(ISTH2042-NIG-2012;Clade II)__AIT17504__Z
MGNRHAKSTKVDEHQRAHLVPDASHLGPQFCKSCWFENRGLVECNNHYLCLNCLSLLLSVSSRCPICKMPLPTKLKAAAQPSAPSTEAIQNTTPPPYTP

SEQ ID NO: 11196 - protein, 99 aa, Artificial Sequence
  derived and/or modified protein sequence (wt) from LASV(ISTH2046-NIG-2012;Clade II)__AIT17508__Z
MGNRQTKSTKVDEHQRAHLVPDASHLGPQFCKSCWFENKGLVECNNHYLCLNCLSLLLSVSSRCPICKMPLPTKLKAAAQPSAPSTEATQNTAPPPYAP

SEQ ID NO: 11197 - protein, 99 aa, Artificial Sequence
  derived and/or modified protein sequence (wt) from LASV(ISTH2050-NIG-2012;Clade II)__AIT17512__Z
MGNRQAKSTKVYEHQRAHLVPDASHLGPQFCKSCWFENRGLVECNNHYLCLNCLSLLLSVSSRCPICKMPLPTRLKAATQPSAPSTEATQNTTPPPYTP

SEQ ID NO: 11198 - protein, 99 aa, Artificial Sequence
  derived and/or modified protein sequence (wt) from LASV(ISTH2057-NIG-2012;Clade II)__AIT17516__Z
MGNRQAKSTKVDEHQRAHLVPDASHLGPQFCKSCWFENRGLVECNNHYLCLNCLSLLLSVSSRCPICKMPLPTKLKTATQPSAPLTEATQNTTPPPYTP

SEQ ID NO: 11199 - protein, 99 aa, Artificial Sequence
  derived and/or modified protein sequence (wt) from LASV(ISTH2061-NIG-2012;Clade II)__AIT17520__Z
MGNKQAKSTKVDEHQRAHLVPDASHLGPQFCKSCWFENRGLVECNNHYLCLNCLSLLLSVSNRCPICKMPLPTKLKAAAQPSAPSTEATQNTTPPPYTP

SEQ ID NO: 11200 - protein, 99 aa, Artificial Sequence
  derived and/or modified protein sequence (wt) from LASV(ISTH2065-NIG-2012;Clade II)__AIT17526__Z
MGNRQAKSAKVTEHQRAHLVPDASHLGPQFCKSCWFENKGLVECNNHYLCLNCLSLLLSVSSRCPICKMPLPTRLKAATQPSAPSAEAPQSTTPPPYTP

SEQ ID NO: 11201 - protein, 99 aa, Artificial Sequence
  derived and/or modified protein sequence (wt) from LASV(ISTH2094-NIG-2012;Clade II)__AIT17536__Z
MGNRQTRPTEATEQSRAHLVPDASHLGPQFCKSCWFENKGLVECNNHYLCLNCLSLLLSVSSRCPICKMPLPTRLKASAQPSAPPTEAPQNKAPPPYTP

SEQ ID NO: 11202 - protein, 99 aa, Artificial Sequence
  derived and/or modified protein sequence (wt) from LASV(ISTH2129-NIG-2012;Clade II)__AIT17542__Z
MGNRQVKSTKVDEHQRAHLIPDASHLGPQFCKSCWFENRGLVECNNHYLCLNCLSLLLSVSSRCPICKMPLPTKLEAAAQPSAPSTEATQDTTPPPYTP

SEQ ID NO: 11203 - protein, 99 aa, Artificial Sequence
  derived and/or modified protein sequence (wt) from LASV(ISTH2217-NIG-2012;Clade II)__AIT17546__Z
MGNKQAKSTKVDEHQRAHLVPDASHLGPQFCKSCWFENRGLVECNNHYLCLNCLSLLLSVSSRCPICKMPLPTKLKAAAQPSAPSTETIQNTTPPPYTP

SEQ ID NO: 11204 - protein, 99 aa, Artificial Sequence
  derived and/or modified protein sequence (wt) from LASV(ISTH2271-NIG-2012;Clade II)__AIT17550__Z
MGNRQAKQTKVDEHQRAHLVPDASHLGPQFCKSCWFENRGLVECNNHYLCLNCLSLLLSVSSRCPICKMPLPTKLKAAAQPSAPSTEITQNTTPPPYTP

SEQ ID NO: 11205 - protein, 99 aa, Artificial Sequence
  derived and/or modified protein sequence (wt) from LASV(ISTH2304-NIG-2012;Clade II)__AIT17554__Z
MGNRQAKSTKADEHQRAHLVPDASHLGPQFCKSCWFENRGLVECNNHYLCLNCLSLLLSVSNRCPICKMPLPTRLKAAAQPSAPSTEATQDTTPPPYTP

SEQ ID NO: 11206 - protein, 99 aa, Artificial Sequence
  derived and/or modified protein sequence (wt) from LASV(ISTH2312-NIG-2012;Clade II)__AIT17558__Z
MGNRQAKSTKVDEHQRAHLVPDASHLGPQFCKSCWFENRGLVECNNHYLCLNCLSLLLSVSSRCPICKMPLPTRLKAAAQPSAPSTEAIRSTTPPPYTP

SEQ ID NO: 11207 - protein, 99 aa, Artificial Sequence
  derived and/or modified protein sequence (wt) from LASV(ISTH2358-NIG-2012;Clade II)__AIT17570__Z
MGNRQAKSAKVNEHQRAHLVPDASHLGPQFCKSCWFENRGLVECNNHYLCLNCLSLLLSVSSRCPICKMPLPTKLKAAAQPSAPSTEATQNITPPPYTP

SEQ ID NO: 11208 - protein, 99 aa, Artificial Sequence
  derived and/or modified protein sequence (wt) from LASV(Lassa virus/H.sapiens-wt/NGA/2016/ISTH_0017;Clade II)__AVO03713__Z
MGNRQAKSTKVDEHQRAHLVPDASHLGPQFCKSCWFENRGLVECNNHYLCLNCLSLLLSVSSRCPICKMPLPTKLKAATQPSAPSTEVNQNTTPPPYTP

SEQ ID NO: 11209 - protein, 99 aa, Artificial Sequence
  derived and/or modified protein sequence (wt) from LASV(Lassa virus/H.sapiens-wt/NGA/2016/ISTH_0035;Clade II)__AVO03731__Z
MGNRQAKSTKVDEHQRAHLLPDASHLGPQFCKSCWFENRGLVECNNHYLCLNCLSLLLSVSSRCPICKMPLPTKLKAATQPSAPSTEATQNTTPPPYTP

SEQ ID NO: 11210 - protein, 99 aa, Artificial Sequence
  derived and/or modified protein sequence (wt) from LASV(Lassa virus/H.sapiens-wt/NGA/2016/ISTH_0703;Clade II)__AVO03703__Z
MGNKQTKSTKVDEHQRAHLVPDASHLGPQFCKSCWFENRGLVECNNHYLCLNCLSLLLSVSSRCPICKMPLPTKLKAAAQPSAPSTEATQNITPPPYTP

SEQ ID NO: 11211 - protein, 99 aa, Artificial Sequence
  derived and/or modified protein sequence (wt) from LASV(Lassa virus/H.sapiens-wt/NGA/2016/ISTH_0717;Clade II)__AVO03670__Z
MGGKHSKPPGESNSPRASLIPDATHLGPQFCKSCWFENKGLVECNNHYLCLNCLSLLLSVSNRCPICKMPLPTRLRASTNPTAPQVGQIDPTNPPPYSP

SEQ ID NO: 11212 - protein, 99 aa, Artificial Sequence
  derived and/or modified protein sequence (wt) from LASV(Lassa virus/H.sapiens-wt/NGA/2016/ISTH_0753;Clade II)__AVO03748__Z
MGNRQAKSTKVDEHQRAHLVPDASHLGPQFCKSCWFENRGLVECNNHYLCLNCLSLLLSVSNRCPICKMPLPTKLKAAAQPSAPSTEATQDTTPPPYTP

SEQ ID NO: 11213 - protein, 99 aa, Artificial Sequence
  derived and/or modified protein sequence (wt) from LASV(Lassa virus/H.sapiens-wt/NGA/2016/ISTH_0919;Clade II)__AVO03760__Z
MGNRHAKPTKVDEHQRAHLVPDASHLGPQFCKSCWFENKGLVECNNHYLCLNCLSLLLSVSSRCPICKMPLPTKLKAAAQPSAPSAEATQNTAPPPYTP

SEQ ID NO: 11214 - protein, 99 aa, Artificial Sequence
  derived and/or modified protein sequence (wt) from LASV(Lassa virus/H.sapiens-wt/NGA/2016/ISTH_1006;Clade II)__AVO03750__Z
MGNKQTKSTKVDEHQRAHLVPDASHLGPQFCKSCWFENRGLVECNNHYLCLNCLSLLLSVSSRCPICKMPLPTKLKTVAQPSAPPTEATQNTTPPPYTP

SEQ ID NO: 11215 - protein, 98 aa, Artificial Sequence
  derived and/or modified protein sequence (wt) from LASV(Lassa virus/H.sapiens-wt/NGA/2016/ISTH_1070;Clade II)__AVO03754__Z
GNRQAKPTKVDEHQRAHLVPDASHLGPQFCKSCWFENKGLVECNNHYLCLNCLSLLLGVSSRCPICKMPLPTKLKAAAQPSAPSTEAAQNTAPPPYAP

SEQ ID NO: 11216 - protein, 99 aa, Artificial Sequence
  derived and/or modified protein sequence (wt) from LASV(Lassa virus/H.sapiens-wt/NGA/2016/ISTH_1174;Clade II)__AVO03716__Z
MGNRQAKSTKVDEHQRAHLVPDASHLGPQFCKSCWFENRGLVECNNHYLCLNCLSLLLSVSSRCPICKMPLPTKLKAATQPSAPPTETTQNTTPPPYTP

SEQ ID NO: 11217 - protein, 99 aa, Artificial Sequence
  derived and/or modified protein sequence (wt) from LASV(Lassa virus/H.sapiens-wt/NGA/2016/ISTH_1207;Clade II)__AVO03680__Z
MGNRQAKSTKVDEHQRAHLVPDASHLGPQFCKSCWFENRGLVECNNHYLCLNCLSLLLSVSSRCPICKMPLPTKLRATAQPSAPSTEATQNTTPPPYTP

SEQ ID NO: 11218 - protein, 99 aa, Artificial Sequence
  derived and/or modified protein sequence (wt) from LASV(Lassa virus/H.sapiens-wt/NGA/2016/ISTH_1311;Clade II)__AVO03739__Z
MGNRQAKPTEAIEQNRAHLVPDASHLGPQFCKSCWFENKGLVECNNHYLCLNCLSLLLSVSSRCPICKMPLPTRLKASAQPSAPSAEAPQNAKPPPYSP

SEQ ID NO: 11219 - protein, 99 aa, Artificial Sequence
  derived and/or modified protein sequence (wt) from LASV(Lassa virus/H.sapiens-wt/NGA/2016/ISTH_1423;Clade II)__AVO03685__Z
MGNKQAKSIKADEHQRAHLVPDASHLGPQFCKSCWFENRGLVECNNHYLCLNCLSLLLSVSSRCPICKMPLPTKLKTAAQPSAPPVGATQNTTPPPYTP

SEQ ID NO: 11220 - protein, 99 aa, Artificial Sequence
  derived and/or modified protein sequence (wt) from LASV(Lassa virus/H.sapiens-wt/NGA/2016/ISTH_1462;Clade II)__AVO03690__Z
MGNKQTKSTKVDEHQRAHLVPDASHLGPQFCKSCWFENRGLVECNNHYLCLNCLSLLLSVSSRCPICKMPLPTKLKAAAQPSAPSTEATQNTTPPPYTP

SEQ ID NO: 11221 - protein, 99 aa, Artificial Sequence
  derived and/or modified protein sequence (wt) from LASV(Lassa virus/H.sapiens-wt/NGA/2016/ISTH_1472;Clade II)__AVO03726__Z
MGNKQTKSTKVDEHQRAHLVPDASHLGPQFCKSCWFENRGLVECNNHYLCLNCLSLLLSVSSRCPICKMPLPTKLKAAAQPSAPPTEATQNTTPPPYTP

SEQ ID NO: 11222 - protein, 99 aa, Artificial Sequence
  derived and/or modified protein sequence (wt) from LASV(Lassa virus/H.sapiens-wt/NGA/2016/ISTH_1496;Clade II)__AVO03693__Z
MGNKQAKSTKIDDHQRAHLVPDASHLGPQFCKSCWFENRGLVECNNHYLCLNCLSLLLSVSSRCPICKMPLPTKLKAAAQPSAPSTETIQNTTPPPYTP

SEQ ID NO: 11223 - protein, 99 aa, Artificial Sequence
  derived and/or modified protein sequence (wt) from LASV(Lassa virus/H.sapiens-wt/NGA/2016/ISTH_1546;Clade II)__AVO03665__Z
MGGKQSRPPKKVDSPRANLIPDASYMGPQFCKSCWFENKGLVECNNHYLCLNCLSLLLSVSSRCPICKMPLPTKLKASTSPTAPPIIGTNTTNPPPYSP

SEQ ID NO: 11224 - protein, 99 aa, Artificial Sequence
  derived and/or modified protein sequence (wt) from LASV(Lassa virus/H.sapiens-wt/NGA/2016/ISTH_1568;Clade II)__AVO03711__Z
MGNRQARSTKVDEHQRAHLLPDASHLGPQFCKSCWFENRGLVECNNHYLCLNCLSLLLSVSSRCPICKMPLPTKLKAATQPSAPSTEATQNTTPPPYTP

SEQ ID NO: 11225 - protein, 99 aa, Artificial Sequence
  derived and/or modified protein sequence (wt) from LASV(Lassa virus/H.sapiens-wt/NGA/2016/ISTH_1610;Clade II)__AVO03687__Z
MGNRQAKSTKVAEHQRAHLVPDASHLGPQFCKSCWFENKGLVECNNHYLCLNCLSLLLSVSSRCPICKMPLPTKLRATAQPSAPPSEATQSTTPPPYTP

SEQ ID NO: 11226 - protein, 99 aa, Artificial Sequence
  derived and/or modified protein sequence (wt) from LASV(Lassa virus/H.sapiens-wt/NGA/2018/ISTH_0026;Clade II)__AVV65086__Z
MGNKQAKSTKVDEHQRAHLVPDASHLGPQFCKSCWFENRGLVECNNHYLCLNCLSLLLSVSSRCPICKMPLPTRLKAATQPSAPSTEATRNTTPPPYTP

SEQ ID NO: 11227 - protein, 99 aa, Artificial Sequence
  derived and/or modified protein sequence (wt) from LASV(Lassa virus/H.sapiens-wt/NGA/2018/ISTH_0097;Clade II)__AVV65091__Z
MGNKQTKSTKVDEHQRAHLVPDASHLGPQFCKSCWFENRGLVECNNHYLCLNCLSLLLSVSSRCPICKMPLPTKLKAAAQPSAPSTEVTQNTTPPPYTP

SEQ ID NO: 11228 - protein, 99 aa, Artificial Sequence
  derived and/or modified protein sequence (wt) from LASV(Lassa virus/H.sapiens-wt/NGA/2018/ISTH_0664;Clade II)__AVV65093__Z
MGNKQTKSTKVDEHQRAHLVPDASHLGPQFCKSCWFENRGLVECNNHYLCLNCLSLLLSVSGRCPICKMPLPTKLKAAAQPSAPSTEATQNTTPPPYTP

SEQ ID NO: 11229 - protein, 99 aa, Artificial Sequence
  derived and/or modified protein sequence (wt) from LASV(Lassa virus/H.sapiens-wt/NGA/2018/ISTH_0959;Clade II)__AVV65084__Z
MGNKQAKSTKVDEHQRAHLVPDASHLGPQFCKSCWFENRGLVECNNHYLCLNCLSLLLSVSSRCPICKMPLPTKLKAAAQPSAPSTEAIQSTTPPPYTP

SEQ ID NO: 11230 - protein, 99 aa, Artificial Sequence
  derived and/or modified protein sequence (wt) from LASV(Lassa virus/H.sapiens-wt/NGA/2018/ISTH_1079;Clade II)__AVV65074__Z
MGNKQTKSTKVDEHQRAHLVPDASHLGPQFCKSCWFENKGLVECNNHYLCLNCLSLLLSVSSRCPICKMPLPTKLKTAAQPSAPPTEATQNTTPPPYTP

SEQ ID NO: 11231 - protein, 99 aa, Artificial Sequence
  derived and/or modified protein sequence (wt) from LASV(Lassa virus/H.sapiens-wt/NGA/2018/ISTH_1177;Clade II)__AVV65080__Z
MGNRQTKSTKVDEHQRAHLVPDASHLGPQFCKSCWFENKGLVECNNHYLCLNCLSLLLSVSSRCPICKMPLPTKLKAAAQPSAPSTEAAQNTAPPPYAP

SEQ ID NO: 11232 - protein, 99 aa, Artificial Sequence
  derived and/or modified protein sequence (wt) from LASV(Lassa virus/H.sapiens-wt/NGA/2018/ISTH_1375;Clade II)__AVV65078__Z
MGNRHAKSTKINEHQRAHLVPDASHLGPQFCKSCWFENRGLVECNNHYLCLNCLSLLLSVSSRCPICKMPLPTKLKAAAQPSAPSTEAIQNTTPPPYTP

SEQ ID NO: 11233 - protein, 99 aa, Artificial Sequence
  derived and/or modified protein sequence (wt) from LASV(LASV003-NIG-2008;Clade II)__AIT17578__Z
MGNRQAKSTKVDEHQRAHLVPDASHLGPQFCKSCWFENKGLVECNNHYLCLNCLSLLLSVSSRCPICKMPLPTKLRAAAQPSAPSTESAQNTAPPPYAP

SEQ ID NO: 11234 - protein, 99 aa, Artificial Sequence
  derived and/or modified protein sequence (wt) from LASV(LASV035-NIG-2009;Clade II)__AIT17586__Z
MGNKQAKSTKVDEHQRAHLVPDASHLGPQFCKSCWFENRGLVECNNHYLCLNCLSLLLSVSSRCPICKMPLPTRLKAAAQPSAPSTEVTQNTTPPPYTP

SEQ ID NO: 11235 - protein, 99 aa, Artificial Sequence
  derived and/or modified protein sequence (wt) from LASV(LASV042-NIG-2009;Clade II)__AIT17590__Z
MGNRQAKSTKVDEHQRAHLVPDASHLGPQFCKSCWFENKGLVECNNHYLCLNCLSLLLSVSSRCPICKMPLPTKLEATTQPSAPSTEETQSTTPPPYTP

SEQ ID NO: 11236 - protein, 99 aa, Artificial Sequence
  derived and/or modified protein sequence (wt) from LASV(LASV049-NIG-2009;Clade II)__AIT17602__Z
MGNKQAKSTKVDEYQRAHLVPDASHLGPQFCKSCWFENRGLVECNNHYLCLNCLSLLLSVSNRCPICKMPLPTRLKAAAQPSAPPTEATQNTTPPPYTP

SEQ ID NO: 11237 - protein, 99 aa, Artificial Sequence
  derived and/or modified protein sequence (wt) from LASV(LASV056-NIG-2008;Clade II)__AIT17610__Z
MGNRQAKPTKVDEHQRAQLVPDASHLGPQFCKSCWFENRGLVECNNHYLCLNCLSLLLSVSSRCPICKMPLPTKLKAATQPSAPSTEATQNSTPPPYTP

SEQ ID NO: 11238 - protein, 99 aa, Artificial Sequence
  derived and/or modified protein sequence (wt) from LASV(LASV058-NIG-2008;Clade II)__AIT17614__Z
MGNRQAKSTKVDEHQRAHLVPDASHLGPQFCKSCWFENRGLVECNNHYLCLNCLSLLLSVSSRCPICKMPLPTKLKAATQPSAPSTEATQNTTPPPYTP

SEQ ID NO: 11239 - protein, 99 aa, Artificial Sequence
  derived and/or modified protein sequence (wt) from LASV(LASV063-NIG-2009;Clade II)__AIT17618__Z
MGNRQAKSTEVDEHQRAHLVPDASHLGPQFCKSCWFENRGLVECNNHYLCLNCLSLLLSVSNRCPICKMPLPTKLKAATQPSAPSTEATQNTTPPPYTP

SEQ ID NO: 11240 - protein, 99 aa, Artificial Sequence
  derived and/or modified protein sequence (wt) from LASV(LASV1000-NIG-2009;Clade II)__AIT17780__Z
MGNRQTKSTKVDEHQRAYLVPDASLLGPQFCKSCWFENKGLVECNNHYLCLNCLSLLLSVSSRCPICKMPLPTRLKAAAQPSAPPTEAIQNTTPPPYTP

SEQ ID NO: 11241 - protein, 99 aa, Artificial Sequence
  derived and/or modified protein sequence (wt) from LASV(LASV1008-NIG-2009;Clade II)__AIT17784__Z
MGNRQTKPTKVDEHQRAHLVPDASHLGPQFCKSCWFENKGLVECNNHYLCLNCLSLLLSVSSRCPICKMPLPTKLKATAQPSAPSTEAAQNTAPPPYAP

SEQ ID NO: 11242 - protein, 99 aa, Artificial Sequence
  derived and/or modified protein sequence (wt) from LASV(LASV1011-NIG-2009;Clade II)__AIT17788__Z
MGNRQVKSTKVDEHQRAHLVPDASHLGPQFCKSCWFENRGLVECNNHYLCLNCLSLLLSVSSRCPICKMPLPTKLKAATQPSAPPTEATQKTTPPPYTP

SEQ ID NO: 11243 - protein, 99 aa, Artificial Sequence
  derived and/or modified protein sequence (wt) from LASV(LASV1015-NIG-2009;Clade II)__AIT17792__Z
MGNKQAKSTKVDEHQRAHLVPDASHLGPQFCKSCWFENRGLVECNNHYLCLNCLSLLLSVSGRCPICKMPLPTKLKATAQPSAPSTEATQNTTPPPYTP

SEQ ID NO: 11244 - protein, 99 aa, Artificial Sequence
  derived and/or modified protein sequence (wt) from LASV(LASV1016-NIG-2009;Clade II)__AIT17796__Z
MGNKQAKSTKVDEHQRAHLVPDASHLGPQFCKSCWFENRGLVECNNHYLCLNCLSLLLSVSSRCPICKMPLPTKLKAAAQPSAPSTEAIQNTTPPPYTP

SEQ ID NO: 11245 - protein, 99 aa, Artificial Sequence
  derived and/or modified protein sequence (wt) from LASV(LASV221-NIG-2010;Clade II)__AIT17622__Z
MGNRQAKSTKVDEHQRAHLVPDASHLGPQFCKSCWFENRGLVECNNHYLCLNCLSLLLSVSSRCPICKMPLPTKLKAATQPSAPSTEVTQNTIPPPYSP

SEQ ID NO: 11246 - protein, 99 aa, Artificial Sequence
  derived and/or modified protein sequence (wt) from LASV(LASV225-NIG-2010;Clade II)__AIT17628__Z
MGNKQAKSTKIDEHQRAHLVPDASHLGPQFCKSCWFENRGLVECNNHYLCLNCLSLLLSVSSRCPICKMPLPTRLKAATQPSAPSTEATQNTTPPPYTP

SEQ ID NO: 11247 - protein, 99 aa, Artificial Sequence
  derived and/or modified protein sequence (wt) from LASV(LASV229-NIG-2010;Clade II)__AIT17632__Z
MGNRQAKSTKVDEHQRAHLVPDASHLGPQFCKSCWFENKGLVECNNHYLCLNCLSLLLSVSSRCPICKMPLPTKLRATAQPSAPSTEAIQNTTPPPYTP

SEQ ID NO: 11248 - protein, 99 aa, Artificial Sequence
  derived and/or modified protein sequence (wt) from LASV(LASV237-NIG-2010;Clade II)__AIT17636__Z
MGNRQAKSTKVDEHQRAHLVPDASHLGPQFCKSCWFENRGLVECNNHYLCLNCLSLLLSVSSRCPICKMPLPTKLKAAAQPSAPSIETIQNTTPPPYTP

SEQ ID NO: 11249 - protein, 99 aa, Artificial Sequence
  derived and/or modified protein sequence (wt) from LASV(LASV239-NIG-2010;Clade II)__AIT17640__Z
MGNRQAKSTKVGEHQRAHLVPDASHLGPQFCKSCWFENRGLVECNNHYLCLNCLSLLLSVSSRCPICKMPLPTKLKAAAQPSAPSTEATQDTTPPPYTP

SEQ ID NO: 11250 - protein, 99 aa, Artificial Sequence
  derived and/or modified protein sequence (wt) from LASV(LASV242-NIG-2010;Clade II)__AIT17648__Z
MGNRQAKSTKVDEHQRAHLVPDASHLGPQFCKSCWFENKGLVECNNHYLCLNCLSLLLSVSSRCPICKMPLPTKLKATVQPSAPSTEAAQSTAPPPYAP

SEQ ID NO: 11251 - protein, 99 aa, Artificial Sequence
  derived and/or modified protein sequence (wt) from LASV(LASV245-NIG-2011;Clade II)__AIT17652__Z
MGNRQAKSTKVGEHQRAHLVPDASHLGPQFCKSCWFENRGLVECNNHYLCLNCLSLLLSVSSRCPICKMPLPTKLKAAAQPSAPSAEAIQKTTPPPYTP

SEQ ID NO: 11252 - protein, 99 aa, Artificial Sequence
  derived and/or modified protein sequence (wt) from LASV(LASV246-NIG-2010;Clade II)__AIT17656__Z
MGNRQAKSTKVDDHQRAHLVPDASHLGPQFCKSCWFENRGLVECNNHYLCLNCLSLLLSVSSRCPICKMPLPTKLKAAAQPSAPSTEAAQDTTPPPYTP

SEQ ID NO: 11253 - protein, 99 aa, Artificial Sequence
  derived and/or modified protein sequence (wt) from LASV(LASV250-NIG-2011;Clade II)__AIT17660__Z
MGNRQAKSTKVDEHQRAHLVPDASHLGPQFCKSCWFENRGLVECNNHYLCLNCLSLLLSVSNRCPICKMPLPTKLKAAAQPSAPSTEAIQNTTPPPYAP

SEQ ID NO: 11254 - protein, 99 aa, Artificial Sequence
  derived and/or modified protein sequence (wt) from LASV(LASV251-NIG-2010;Clade II)__AIT17664__Z
MGNKQAKSTKVDEHQRAHLVPDASHLGPQFCKSCWFENKGLVECNNHYLCLNCLSLLLSVSSRCPICKMPLPTKLKAAAQPSAPSTEAAQNTAPPPYAP

SEQ ID NO: 11255 - protein, 99 aa, Artificial Sequence
  derived and/or modified protein sequence (wt) from LASV(LASV253-NIG-2011;Clade II)__AIT17668__Z
MGNRQAKSTKVDEHQRAHLVPDASHLGPQFCKSCWFENKGLVECNNHYLCLNCLSLLLSVSSRCPICKMPLPTKLKTTAQPSAPPTEAAKNTAPPPYAP

SEQ ID NO: 11256 - protein, 99 aa, Artificial Sequence
  derived and/or modified protein sequence (wt) from LASV(LASV256-NIG-2010;Clade II)__AIT17676__Z
MGNRQAKSTKVDEHQRAHLVPDASHLGPQFCKSCWFENRGLVECNNHYLCLNCLSLLLSVSSRCPICKMPLPTKLKAATQPSAPSTEVTQNTTPPPYTP

SEQ ID NO: 11257 - protein, 99 aa, Artificial Sequence
  derived and/or modified protein sequence (wt) from LASV(LASV263-NIG-2011;Clade II)__AIT17680__Z
MGNRQAKSTKIDEHQRAHLVPDASHLGPQFCKSCWFENRGLVECNNHYLCLNCLSLLLSVSSRCPICKMPLPTKLKAAAQPSAPSTEAIQNTTPPPYTP

SEQ ID NO: 11258 - protein, 99 aa, Artificial Sequence
  derived and/or modified protein sequence (wt) from LASV(LASV267-NIG-2010;Clade II)__AIT17684__Z
MGNRQAKSAKVDEHQRAHLVPDASHLGPQFCKSCWFENKGLVECNNHYLCLNCLSLLLSVSCRCPICKMPLPTKLKAATQPSAPSTEATQNTTPPPYTP

SEQ ID NO: 11259 - protein, 99 aa, Artificial Sequence
  derived and/or modified protein sequence (wt) from LASV(LASV274-NIG-2010;Clade II)__AIT17692__Z
MGNRHAKPTKVDEHQRAHLVPDASHLGPQFCKSCWFENRGLVECNNHYLCLNCLSLLLSVSSRCPICKMPLPTKLKAAAQPSAPSTEAIQNTTPPPYTP

SEQ ID NO: 11260 - protein, 99 aa, Artificial Sequence
  derived and/or modified protein sequence (wt) from LASV(LASV719-NIG-2009;Clade II)__AIT17702__Z
MGNRHAKSTKVDEHQRAHLVPDASHLGPQFCKSCWFENRGLVECNNHYLCLNCLSLLLSVSSRCPICKMPLPTKLKAAAQPSAPSTEAFQNTTPPPYTP

SEQ ID NO: 11261 - protein, 99 aa, Artificial Sequence
  derived and/or modified protein sequence (wt) from LASV(LASV737-NIG-2009;Clade II)__AIT17708__Z
MGNRHAKSTKVDEHQRAHLVPDASHLGPQFCKSCWFENRGLVECNNHYLCLNCLSLLLSVSSRCPICKMPLPTKLKAATQPSAPSTEAIQNTTPPPYTP

SEQ ID NO: 11262 - protein, 99 aa, Artificial Sequence
  derived and/or modified protein sequence (wt) from LASV(LASV966-NIG-2009;Clade II)__AIT17716__Z
MGNRPAKSTKVDEHQRAHLVPDASHLGPQFCKSCWFENRGLVECNNHYLCLNCLSLLLSVSSRCPICKMPLPTKLKAAAQPSAPSTEATQNTTPPPYTP

SEQ ID NO: 11263 - protein, 99 aa, Artificial Sequence
  derived and/or modified protein sequence (wt) from LASV(LASV967-NIG-2009;Clade II)__AIT17720__Z
MGNRQAKPTKVDEHQRAHLVPDASHLGPQFCKSCWFENRGLVECNNHYLCLNCLSLLLSVSSRCPICKMPLPTRLKAAAQPSAPSTEETQNTTPPPYTP

SEQ ID NO: 11264 - protein, 99 aa, Artificial Sequence
  derived and/or modified protein sequence (wt) from LASV(LASV975-NIG-2009;Clade II)__AIT17730__Z
MGNRQAKSTKVDEHQRAHLVPDASHLGPQFCKSCWFENRGLVECNNHYLCLNCLSLLLSVSSRCPICKMPLPTKLKAAAQPSAPLTEAIQNTTPPPYTP

SEQ ID NO: 11265 - protein, 99 aa, Artificial Sequence
  derived and/or modified protein sequence (wt) from LASV(LASV976-NIG-2009;Clade II)__AIT17734__Z
MGNRQAKSTKVDEHQRAHLVPDASHLGPQFCKSCWFENRGLVECNNHYLCLNCLSLLLSVSSRCPICKMPLPTKLKAAAQPSAPSTEAIQNTTPPPYTP

SEQ ID NO: 11266 - protein, 99 aa, Artificial Sequence
  derived and/or modified protein sequence (wt) from LASV(LASV977-NIG-2009;Clade II)__AIT17738__Z
MGNRQAKSTKVDEHQRAHLVPDASHLGPQFCKSCWFENRGLVECNNHYLCLNCLSLLLSVSSRCPICKMPLPTKLKAATLPSAPSTEVTQNTTPPPHSP

SEQ ID NO: 11267 - protein, 99 aa, Artificial Sequence
  derived and/or modified protein sequence (wt) from LASV(LASV981-NIG-2009;Clade II)__AIT17750__Z
MGNRQAKSAKVNEHQRAHLVPDASHLGPQFCKSCWFENRGLVECNNHYLCLNCLSLLLSVSSRCPICKMPLPTKLKAATQPSAPSTEATQNTTPPPYTP

SEQ ID NO: 11268 - protein, 99 aa, Artificial Sequence
  derived and/or modified protein sequence (wt) from LASV(LASV982-NIG-2009;Clade II)__AIT17754__Z
MGNRQAKSTKVDEHQRAHLVPDASHLGPQFCKSCWFENKGLVECNNHYLCLNCLSLLLSVSSRCPICKMPLPTKLKASAQPSAPSTEAAQNTAPPPYAP

SEQ ID NO: 11269 - protein, 99 aa, Artificial Sequence
  derived and/or modified protein sequence (wt) from LASV(LASV989-NIG-2009;Clade II)__AIT17760__Z
MGNRQAKSTRTDEHQRAHLVPDASHLGPQFCKSCWFENKGLVECNNHYLCLNCLSLLLSVSSRCPICKMPLPTKLKAAAQPSAPSTEAGQNTAPPPYAP

SEQ ID NO: 11270 - protein, 99 aa, Artificial Sequence
  derived and/or modified protein sequence (wt) from LASV(LASV991-NIG-2009;Clade II)__AIT17768__Z
MGNRQAKSATVDECQRAHLVPDASYLGPQFCKSCWFENKGLVECNNHYLCLNCLSLLLSVSSRCPICKMPLPTKLKAAAQPSAPSTRATQNTTPPPYTP

SEQ ID NO: 11271 - protein, 99 aa, Artificial Sequence
  derived and/or modified protein sequence (wt) from LASV(LASV993-NIG-2009;Clade II)__AIT17776__Z
MGNKQAKSTKVDEHQRAHLVPDASHLGPQFCKSCWFENKGLVECNNHYLCLNCLSLLLSVSSRCPICKMPLPTRLKAAAQPSAPSTEATQNAAPPPYAP

SEQ ID NO: 11272 - protein, 99 aa, Artificial Sequence
  derived and/or modified protein sequence (wt) from LASV(Nig08-A41;Clade II)__ADU56628__Z
MGNRQAKSTKVDEHQRAHLVPDASHLGPQFCKSCWFENRGLVECNNHYLCLNCLSLLLSVSSRCPICKMPLPTKLKAAAQPSAPSTEAIQNTTPPPYAP

SEQ ID NO: 11273 - protein, 99 aa, Artificial Sequence
  derived and/or modified protein sequence (wt) from LASV(CSF;Clade III)__AAO59514__Z
MGNKQVRSMKKVDSPRASLIPDASHLGPQFCKSCWFENRGLVECNNHYLCLNCLSLLLSVSSRCPICKMPLPTKLKTSTTPTAPSIREANTTSPPPYSP

SEQ ID NO: 11274 - protein, 99 aa, Artificial Sequence
  derived and/or modified protein sequence (wt) from LASV(Nig08-A18;Clade III)__ADU56616__Z
MGGKHTKQPRESNSPRASLIPDATHLGPQFCKSCWFENKGLVECNNHYLCLNCLSLLLSVSNRCPICKMPLPTRLRTSTNPTAPQVEQTGPASPPPYSP

SEQ ID NO: 11275 - protein, 99 aa, Artificial Sequence
  derived and/or modified protein sequence (wt) from LASV(ONM-299;Clade III)__ANH09755__Z
MGNKQTKTIKKTDSPRASLIPDASHMGPQFCKSCWFENRGLVECNNHYLCLNCLSLLLSVSNRCPICKMPLPTKLRASPSPTAPSIREANITNPPPYSP

SEQ ID NO: 11276 - protein, 99 aa, Artificial Sequence
  derived and/or modified protein sequence (wt) from LASV(ONM-700;Clade III)__ANH09759__Z
MGNKQTKTTKKTDSPRASLIPDASHMGPQFCKSCWFENRGLVECNNHYLCLNCLSLLLSVSNRCPICKMPLPTKLRASPSPTAPSIREANITNPPPYSP

SEQ ID NO: 11277 - protein, 99 aa, Artificial Sequence
  derived and/or modified protein sequence (wt) from LASV(BA366;Clade IV)__ADU56644__Z
MGNRQTKAPEAKGSPRASLIPDATHLGPQFCKSCWFENKGLVECNDHYLCLNCLTLLLSVSSRCPICKMPLPTRLRPSTNPTAPPARAEGGINPPPYSP

SEQ ID NO: 11278 - protein, 99 aa, Artificial Sequence
  derived and/or modified protein sequence (wt) from LASV(G1180-SLE-2010;Clade IV)__AIT17166__Z
MGNKQAKAPEAKDSPRASLIPDATHLGPQFCKSCWFETKGLVECNNHYLCLNCLTLLLSVSNRCPICKMPLPTKLRPSATPTAPPTEAADSIGPPPYSP

SEQ ID NO: 11279 - protein, 99 aa, Artificial Sequence
  derived and/or modified protein sequence (wt) from LASV(G1190-SLE-2010;Clade IV)__AIT17170__Z
MGNKQAKVPESKDSPRASLIPDATHLGPQFCKSCWFENKGLVECNNHYLCLNCLTLLLSVSNRCPICKMPLPTKLRPSAAPTAPPAGAADSIRPPPYSP

SEQ ID NO: 11280 - protein, 99 aa, Artificial Sequence
  derived and/or modified protein sequence (wt) from LASV(G1200-LIB-2010;Clade IV)__AIT17174__Z
MGNKQTKAPEAKGSPRASLIPDATHLGPQFCKSCWFENKGLVECNNHYLCLNCLTLLLSVSSRCPICKMPLPTKLRPSAVPTAPPTKAEDNTRPPPYSP

SEQ ID NO: 11281 - protein, 99 aa, Artificial Sequence
  derived and/or modified protein sequence (wt) from LASV(G1442-SLE-2011;Clade IV)__AIT17178__Z
MGNKQAKASEAKDSPRASLIPDATHLGPQFCKSCWFENKGLVECNNHYLCLNCLSLLLSVSSRCPICKMPLPTRLRPSTAPTAPPARAGDNIKPPPYSP

SEQ ID NO: 11282 - protein, 99 aa, Artificial Sequence
  derived and/or modified protein sequence (wt) from LASV(G1529-SLE-2011;Clade IV)__AIT17182__Z
MGNKQAKVPEVRDSPRASLIPDATHLGPQFCKSCWFENKGLVECNNHYLCLNCLTLLLSVSSRCPICKMPLPTKLRPSATPTAPPAGAGDGTRPPPYSP

SEQ ID NO: 11283 - protein, 99 aa, Artificial Sequence
  derived and/or modified protein sequence (wt) from LASV(G1618-SLE-2011;Clade IV)__AIT17186__Z
MGNKQAKTPETKDSPRASLIPDATHLGPQFCKSCWFENKGLVECNNHYLCLNCLTLLLSVSNRCPICKMPLPTKLRPSVAPTAPPAGAADNTRPPPYSP

SEQ ID NO: 11284 - protein, 99 aa, Artificial Sequence
  derived and/or modified protein sequence (wt) from LASV(G1647-SLE-2011;Clade IV)__AIT17194__Z
MGNKQAKAPEPKDSPRASLIPDATHLGPQFCKSCWFENKGLVECNNHYLCLNCLTLLLSVSNRCPICKMPLPTKLRPSVAPTAPPAGVVDSTRPPPYSP

SEQ ID NO: 11285 - protein, 99 aa, Artificial Sequence
  derived and/or modified protein sequence (wt) from LASV(G1727-SLE-2011;Clade IV)__AIT17198__Z
MGNKQAKVPESKDSPRASLIPDATHLGPQFCKSCWFENRGLVECNNHYLCLNCLTLLLSVSNRCPICKMPLPTKLRPSTAPTAPPTGAADSTRPPPYSP

SEQ ID NO: 11286 - protein, 99 aa, Artificial Sequence
  derived and/or modified protein sequence (wt) from LASV(G1774-SLE-2011;Clade IV)__AIT17202__Z
MGNKQAKTPESKDSPRASLIPDATHLGPQFCKSCWFENKGLVECNNHYLCLNCLTLLLSVSNRCPICKMPLPTRLRPSAAPTAPPSGAADSTRPPPYSP

SEQ ID NO: 11287 - protein, 99 aa, Artificial Sequence
  derived and/or modified protein sequence (wt) from LASV(G1792-SLE-2011;Clade IV)__AIT17206__Z
MGNKQAKAPEAKDSPRASLIPDATHLGPQFCKSCWFENKGLVECNNHYLCLNCLTLLLSVSYRCPICKMPLPTKLRPSATPTAPPTEAADSIRPPPYRP

SEQ ID NO: 11288 - protein, 99 aa, Artificial Sequence
  derived and/or modified protein sequence (wt) from LASV(G1959-SLE-2011;Clade IV)__AIT17214__Z
MGNKQAKAPEVKDSPRASLIPDATHLGPQFCKSCWFENKGLVECNNHYLCLNCLTLLLSVSNRCPICKMPLPTKLRPSAAPTAPPTGTADSIRPPPYSP

SEQ ID NO: 11289 - protein, 99 aa, Artificial Sequence
  derived and/or modified protein sequence (wt) from LASV(G2141-SLE-2011;Clade IV)__AIT17222__Z
MGNKQAKTPETKDSPRASLIPDATHLGPQFCKSCWFENKGLVECNSHYLCLNCLTLLLSVSSRCPICKMPLPTRLRPSTAPTAPPAGVGDSTSPPPYSP

SEQ ID NO: 11290 - protein, 99 aa, Artificial Sequence
  derived and/or modified protein sequence (wt) from LASV(G2147-SLE-2011;Clade IV)__AIT17226__Z
MGNKQAKTPEAKDSPRASLIPDATHLGPQFCKSCWFENKGLVECNNHYLCLNCLTLLLSVSNRCPICKMPLPTKLRPSATPTAPPAGAADSIGPPPYSP

SEQ ID NO: 11291 - protein, 98 aa, Artificial Sequence
  derived and/or modified protein sequence (wt) from LASV(G2165-SLE-2011;Clade IV)__AIT17230__Z
MGNKQAKASDKNSPRASLIPDATHLGPQFCKSCWFENKGLVECNNHYLCLNCLTLLLSVSNRCPICKMPLPTKLRPSATPTAPPTGAADSIRPPPYSP

SEQ ID NO: 11292 - protein, 99 aa, Artificial Sequence
  derived and/or modified protein sequence (wt) from LASV(G2184-SLE-2011;Clade IV)__AIT17234__Z
MGNKQAKASEEKNSPRASLIPDATHLGPQFCKSCWFENKGLVECNNHYLCLNCLTLLLSVSNRCPICKMPLPTKLRPSATPTAPPTGAADSIRPPPYSP

SEQ ID NO: 11293 - protein, 99 aa, Artificial Sequence
  derived and/or modified protein sequence (wt) from LASV(G2197-SLE-2011;Clade IV)__AIT17238__Z
MGNKQTKAPEAKGSPRASLIPDATHLGPQFCKSCWFENKGLVECNNHYLCLNCLTLLLSVSNRCPICKMPLPTKLRPSATPTAPPTEAADSIRPPPYRP

SEQ ID NO: 11294 - protein, 99 aa, Artificial Sequence
  derived and/or modified protein sequence (wt) from LASV(G2222-SLE-2011;Clade IV)__AIT17242__Z
MGNKQAKAPESKDSPRASLIPDATHLGPQFCKSCWFENKGLVECNNHYLCLNCLTLLLSVSNRCPICKMPLPTRLRPSAAPTAPPTGATDSTRPPPYSP

SEQ ID NO: 11295 - protein, 99 aa, Artificial Sequence
  derived and/or modified protein sequence (wt) from LASV(G2259-SLE-2012;Clade IV)__AIT17248__Z
MGNKQVKAPEARNSPRASLIPDATHLGPQFCKSCWFENKGLVECNNHYLCLNCLTLLLGVSSRCPICKTPLPTRLRPSATPTAPPAGAGDNTRPPPYSP

SEQ ID NO: 11296 - protein, 99 aa, Artificial Sequence
  derived and/or modified protein sequence (wt) from LASV(G2263-SLE-2012;Clade IV)__AIT17252__Z
MGNKQAKAPEAKDSPRASLIPDATHLGPQFCKSCWFENKGLVECNNHYLCLNCLTLLLSVSNRCPICKMPLPTKLRPSTAPTAPPAGAADSTRPPPYSP

SEQ ID NO: 11297 - protein, 99 aa, Artificial Sequence
  derived and/or modified protein sequence (wt) from LASV(G2280-SLE-2012;Clade IV)__AIT17256__Z
MGNKQAKAPETKDSPRASLIPDATHLGPQFCKSCWFENKGLVECNNHYLCLNCLTLLLSVSNRCPICKMPLPTKLRPSAAPTAPPVGAADNTRPPPYSP

SEQ ID NO: 11298 - protein, 99 aa, Artificial Sequence
  derived and/or modified protein sequence (wt) from LASV(G2295-SLE-2012;Clade IV)__AIT17260__Z
MGNKQAKAPELKDSPRASLIPDATHLGPQFCKSCWFENKGLVECNNHYLCLNCLTLLLSVSNRCPICKMPLPTKLRPSAAPTAPPAGAVDSTRPPPYSP

SEQ ID NO: 11299 - protein, 99 aa, Artificial Sequence
  derived and/or modified protein sequence (wt) from LASV(G2315-SLE-2012;Clade IV)__AIT17264__Z
MGNKQTKAPESKNSPRASLIPDATYLGPQFCKSCWFENKGLVECNNHYLCLNCLTLLLSVSNRCPICKMPLPTKLRSSAAPTAPPTGAADSTKPPPYSP

SEQ ID NO: 11300 - protein, 99 aa, Artificial Sequence
  derived and/or modified protein sequence (wt) from LASV(G2318-SLE-2012;Clade IV)__AIT17268__Z
MGNKQTKAPEVKGSPRASLIPDATHLGPQFCKSCWFENKGLVECNNHYLCLNCLTLLLSVSNRCPICKMPLPTKLKPSTTPTAPPTGAADSIRPPPYSP

SEQ ID NO: 11301 - protein, 99 aa, Artificial Sequence
  derived and/or modified protein sequence (wt) from LASV(G2363-SLE-2012;Clade IV)__AIT17272__Z
MGNKQVKTSEARDSPRASLIPDATDLGPQFCKSCWFENKGLVECNNHYLCLNCLTLLLSVSNRCPICKMPLPTRLRPSANPTAPPAETGDSTRPPPYSP

SEQ ID NO: 11302 - protein, 99 aa, Artificial Sequence
  derived and/or modified protein sequence (wt) from LASV(G2392-SLE-2012;Clade IV)__AIT17278__Z
MGSKQTKTPEVKDSPRASLIPDATHLGPQFCKSCWFENKGLVECNNHYLCLNCLTLLLSVSNRCPICKMPLPTKLRPSAAPTAPPARAADDTRPPPYSP

SEQ ID NO: 11303 - protein, 99 aa, Artificial Sequence
  derived and/or modified protein sequence (wt) from LASV(G2405-SLE-2012;Clade IV)__AIT17282__Z
MGNKQAKAPEPKDSPRASLIPDATHLGPQFCKSCWFENKGLVECNNHYLCLNCLTLLLSVSNRCPICKMPLPTKLRPSAAPTAPPAGAVDSIRPPPYSP

SEQ ID NO: 11304 - protein, 99 aa, Artificial Sequence
  derived and/or modified protein sequence (wt) from LASV(G2427-SLE-2012;Clade IV)__AIT17286__Z
MGNKQTKAPEVKDSPRASLIPDATHLGPQFCKSCWFENKGLVECNNHYLCLNCLTLLLSVSNRCPICKMPLPTKLRPSTAPTAPPAGTMDSTRPPPYSP

SEQ ID NO: 11305 - protein, 99 aa, Artificial Sequence
  derived and/or modified protein sequence (wt) from LASV(G2431-SLE-2012;Clade IV)__AIT17290__Z
MGNKQARAPEAKDSPRASLIPDATHLGPQFCKSCWFENKGLVECNNHYLCLNCLTLLLSVSSRCPICKMPLPTRLRPSAIPTAPPAGTGDSSRPPPYSP

SEQ ID NO: 11306 - protein, 99 aa, Artificial Sequence
  derived and/or modified protein sequence (wt) from LASV(G2554-SLE-2012;Clade IV)__AIT17296__Z
MGNKQAKTPEIKDSPRASLIPDATHLGPQFCKSCWFENKGLVECNNHYLCLNCLTLLLSVSNRCPICKMPLPTKLRPSAAPTAPPAGAADITRPPPYSP

SEQ ID NO: 11307 - protein, 99 aa, Artificial Sequence
  derived and/or modified protein sequence (wt) from LASV(G2557-SLE-2012;Clade IV)__AIT17300__Z
MGNKQVKAPEARNSPRASLIPDATHLGPQFCKSCWFENKGLVECNNHYLCLNCLTLLLGVSSRCPICKMPLPTRLRPSTAPTAPPAGAGDNTRPPPYSP

SEQ ID NO: 11308 - protein, 99 aa, Artificial Sequence
  derived and/or modified protein sequence (wt) from LASV(G2612-SLE-2012;Clade IV)__AIT17312__Z
MGNKQAKTPETKDSPRASLIPDATHLGPQFCKSCWFENKGLVECNNHYLCLNCLTLLLSVSNRCPICKMPLPTKLRPSAAPTAPPVGAADSTRPPPYSP

SEQ ID NO: 11309 - protein, 99 aa, Artificial Sequence
  derived and/or modified protein sequence (wt) from LASV(G2615-SLE-2012;Clade IV)__AIT17316__Z
MGNKQAKAPEARNSPRASLIPDATHLGPQFCKSCWFENRGLVECNNHYLCLNCLTLLLSVSSRCPICKMPLPTRLRPSAAPTAPPAGAGDNTRPPPYSP

SEQ ID NO: 11310 - protein, 99 aa, Artificial Sequence
  derived and/or modified protein sequence (wt) from LASV(G2723-SLE-2012;Clade IV)__AIT17320__Z
MGNKQAKAPEARNSPRASLIPDATHLGPQFCKSCWFENKGLVECNNHYLCLNCLTLLLGVSSRCPICKMPLPTRLRPSAAPTAPLAEAGDNTRPPPYSP

SEQ ID NO: 11311 - protein, 99 aa, Artificial Sequence
  derived and/or modified protein sequence (wt) from LASV(G2868-SLE-2012;Clade IV)__AIT17326__Z
MGNKQSKAPESRDSPRASLIPDATHLGPQFCKSCWFENKGLVECNNHYLCLNCLTLLLSVSNRCPICKMPLPTKLRPSATPTAPPTRAADSIRPPPYSP

SEQ ID NO: 11312 - protein, 99 aa, Artificial Sequence
  derived and/or modified protein sequence (wt) from LASV(G2903-SLE-2012;Clade IV)__AIT17330__Z
MGNKQAKALESKNSPRASLIPDATYLGPQFCKSCWFENKGLVECNNHYLCLNCLTLLLSVSNRCPICKMPLPTKLRSSAAPTAPPTGAADGTKPPPYSP

SEQ ID NO: 11313 - protein, 99 aa, Artificial Sequence
  derived and/or modified protein sequence (wt) from LASV(G3010-SLE-2013;Clade IV)__AIT17342__Z
MGNKQAKASEAKDSPRASLIPDATHLGPQFCKSCWFENKGLVECNNHYLCLNCLTLLLSVSNRCPICKMPLPTKLRPSTAPTAPQTGAADSIRPPPYSP

SEQ ID NO: 11314 - protein, 99 aa, Artificial Sequence
  derived and/or modified protein sequence (wt) from LASV(G3016-SLE-2013;Clade IV)__AIT17346__Z
MGNKQAKAPETKDSPRASLIPDATHLGPQFCKSCWFENKGLVECNNHYLCLNCLTLLLSVSNRCPICKMPLPTKLRPSAAPTAPPVGAADSTRPPPYSP

SEQ ID NO: 11315 - protein, 99 aa, Artificial Sequence
  derived and/or modified protein sequence (wt) from LASV(G3148-SLE-2013;Clade IV)__AIT17362__Z
MGNKQAKAPESKDSPRASLIPDATHLGPQFCKSCWFENKGLVECNNHYLCLNCLTLLLSVSNRCPICKMPLPTKLRPSAAPTAPPAGAADSIRPPPYSP

SEQ ID NO: 11316 - protein, 99 aa, Artificial Sequence
  derived and/or modified protein sequence (wt) from LASV(G3151-SLE-2013;Clade IV)__AIT17366__Z
MGNKQTKTPEVKDSPRASLIPDATHLGPQFCKSCWFENKGLVECNNHYLCLNCLTLLLSVSNRCPICKMPLPTKLRPSAAPTAPPARAADDTRPPPYSP

SEQ ID NO: 11317 - protein, 99 aa, Artificial Sequence
  derived and/or modified protein sequence (wt) from LASV(G3206-SLE-2013;Clade IV)__AIT17376__Z
MGNKQAKAPESKDSPRASLIPDATYLGPQFCKSCWFENKGLVECNNHYLCLNCLTLLLSVSNRCPICKMPLPTKLRSSVAPTAPPTRAADSTRPPPYSP

SEQ ID NO: 11318 - protein, 99 aa, Artificial Sequence
  derived and/or modified protein sequence (wt) from LASV(G3229-SLE-2013;Clade IV)__AIT17382__Z
MGNKQTKTSEVKDSPRASLIPDATHLGPQFCKSCWFENKGLVECNNHYLCLNCLTLLLSVSNRCPICKMPLPTKLRPSAAPTAPPARAADDTRPPPYSP

SEQ ID NO: 11319 - protein, 99 aa, Artificial Sequence
  derived and/or modified protein sequence (wt) from LASV(G3234-SLE-2013;Clade IV)__AIT17386__Z
MGNKQAKTPEARDSPRASLIPDATHLGPQFCKSCWFENKGLVECNNHYLCLNCLTLLLSVSSRCPICKMPLPTKLRPSATPTAPPAGAGDGTRPPPYSP

SEQ ID NO: 11320 - protein, 99 aa, Artificial Sequence
  derived and/or modified protein sequence (wt) from LASV(G3278-SLE-2013;Clade IV)__AIT17396__Z
MGNKQVKAPEARNSPRASLIPDATHLGPQFCKSCWFENKGLVECNNHYLCLNCLTLLLGVSSRCPICKMPLPTRLRPSAAPTAPPAEAGDNTRPPPYSP

SEQ ID NO: 11321 - protein, 99 aa, Artificial Sequence
  derived and/or modified protein sequence (wt) from LASV(G502-SLE-2009;Clade IV)__AIT17124__Z
MGNKQVKTPEAKDSPRASLIPDATHLGPQFCKSCWFENKGLVECNNHYLCLNCLTLLLSVGNRCPICKMPLPTKLRPSVTPTAPPTRAADSIGPPPYSP

SEQ ID NO: 11322 - protein, 99 aa, Artificial Sequence
  derived and/or modified protein sequence (wt) from LASV(G503-SLE-2009;Clade IV)__AIT17128__Z
MGNKQAKTPEAKDSPRANLIPDATHLGPQFCKSCWFENKGLVECNNHYLCLNCLTLLLSVSNRCPICKMPLPTKLRPSAAPTAPPTGAADSIRPPPYSP

SEQ ID NO: 11323 - protein, 99 aa, Artificial Sequence
  derived and/or modified protein sequence (wt) from LASV(G610-SLE-2009;Clade IV)__AIT17132__Z
MGNKQAKAPEARDSPRASLIPDATHLGPQFCKSCWFENKGLVECNNHYLCLNCLTLLLSVSNRCPICKMPLPTKLRPSATPTAPPTEAADSIRPPPYRP

SEQ ID NO: 11324 - protein, 99 aa, Artificial Sequence
  derived and/or modified protein sequence (wt) from LASV(G676-SLE-2009;Clade IV)__AIT17140__Z
MGNKQAKAPEPKDSPRASLIPDATHLGPQFCKSCWFENKGLVECNNHYLCLNCLTLLLSVSNRCPICKMPLPTKLRPSAAPTAPPAGAVDSTRPPPYSP

SEQ ID NO: 11325 - protein, 99 aa, Artificial Sequence
  derived and/or modified protein sequence (wt) from LASV(G692-SLE-2009;Clade IV)__AIT17144__Z
MGNKQAKTPESKDSPRASLIPDATHLGPQFCKSCWFENKGLVECNNHYLCLNCLTLLLGVSNRCPICKMPLPTKLRSSVAPTAPPTGAVDSIRPPPYSP

SEQ ID NO: 11326 - protein, 99 aa, Artificial Sequence
  derived and/or modified protein sequence (wt) from LASV(G733-SLE-2010;Clade IV)__AIT17152__Z
MGNKQAKTPETKDSPRASLIPDATHLGPQFCKSCWFENKGLVECNNHYLCLNCLTLLLSVSNRCPICKMPLPTKLRPSTAPTAPPAGAADNTRPPPYSP

SEQ ID NO: 11327 - protein, 99 aa, Artificial Sequence
  derived and/or modified protein sequence (wt) from LASV(G808-SLE-2010;Clade IV)__AIT17162__Z
MGNKQAKASESKDSPRASLIPDATHLGPQFCKSCWFENKGLVECNNHYLCLNCLTLLLSVSNRCPICKMPLPTKLRPSVTPTAPPTRTADNTRPPPYSP

SEQ ID NO: 11328 - protein, 99 aa, Artificial Sequence
  derived and/or modified protein sequence (wt) from LASV(Guinea Faranah;Clade IV)__AMZ00378__Z
MGNRQTKATEAKDSPRASLIPDATHLGPQFCKSCWFENKGLVECNNHYLCLNCLTLLLSVSSRCPICKMPLPTRLKSSTNPTAPSAKTESSINPPPYSP

SEQ ID NO: 11329 - protein, 99 aa, Artificial Sequence
  derived and/or modified protein sequence (wt) from LASV(GUINEA Z-185a;Clade IV)__AMZ00374__Z
MGNKQAKAPETKNSPRASLIPDATHLGPQFCKSCWFENKGLVECNNHYLCLNCLTLLLSVSNRCPICKMPLPTKLRPSAVPTAPPAQVGDRTRPPPYSP

SEQ ID NO: 11330 - protein, 103 aa, Artificial Sequence
  derived and/or modified protein sequence (wt) from MOPV/LASV reassortant(IGS-1;Clade IV)__AFY05533__Z
MGKTQSKGQPSTNLLKETEPRHPVIPDARGTGPEFCKSCWFERRGLVRCNDHYLCLNCLTLLHTVSDRCPICKHKLPFRLELQTQPTAPPEIPPSQNPPPYSP

SEQ ID NO: 11331 - protein, 99 aa, Artificial Sequence
  derived and/or modified protein sequence (wt) from LASV(LM032-SLE-2010;Clade IV)__AIT17800__Z
MGNKQAKAPEAKDSPRASLIPDATHLGPQFCKSCWFENKGLVECNNHYLCLNCLTLLLSVSNRCPICKMPLPTKLRPSATPTAPPTEAADSIRPPPYHP

SEQ ID NO: 11332 - protein, 99 aa, Artificial Sequence
  derived and/or modified protein sequence (wt) from LASV(LM222-SLE-2010;Clade IV)__AIT17804__Z
MGNKQAKASEEKNSPRASLIPDATHLGPQFCKSCWFENKGLVECNNHYLCLNCLTLLLSVSNRCPICKMPLPTKLRPSTTPTAPPTGAADSIRPPPYSP

SEQ ID NO: 11333 - protein, 99 aa, Artificial Sequence
  derived and/or modified protein sequence (wt) from LASV(LM395-SLE-2009;Clade IV)__AIT17808__Z
MGNKQAKAPESKDSPRASLIPDATHLGPQFCKSCWFENKGLVECNNHYLCLNCLTLLLSVSNRCPICKMPLPTRLRPSAAPTAPPTGAADSTRPPPYSP

SEQ ID NO: 11334 - protein, 99 aa, Artificial Sequence; identical to SEQ ID NO: 11332
  derived and/or modified protein sequence (wt) from LASV(LM776-SLE-2012;Clade IV)__AIT17824__Z

SEQ ID NO: 11335 - protein, 99 aa, Artificial Sequence
  derived and/or modified protein sequence (wt) from LASV(Mad39;Clade IV)__ANH09743__Z
MGNKQAKASEVEDGPRASLIPDATHLGPQFCKSCWFENKSLVECNNHYLCLNCLTLLLSVSNRCPICKMPLPTRLKPSVVPTAPPTRAGDGTRPPPYSP

SEQ ID NO: 11336 - protein, 99 aa, Artificial Sequence
  derived and/or modified protein sequence (wt) from LASV(Mad41;Clade IV)__ANH09745__Z
MGNKQTKAPEVEDGPRASLIPDATHLGPQFCKSCWFENKGLVECNNHYLCLNCLTLLLSVSSRCPICKMPLPTRLKPSIVPTAPPARTGENTRPPPYSP

SEQ ID NO: 11337 - protein, 99 aa, Artificial Sequence
  derived and/or modified protein sequence (wt) from LASV(Mad63;Clade IV)__ANH09749__Z
MGNKQAKAPEVEDGPRASLIPDATHLGPQFCKSCWFENRGLVECNNHYLCLNCLTLLLSVSNRCPICKMPLPTRLKPSVVPTAPPTGAGGDTRPPPYSP

SEQ ID NO: 11338 - protein, 99 aa, Artificial Sequence
  derived and/or modified protein sequence (wt) from LASV(Mad69;Clade IV)__ANH09751__Z
MGNKQAKAPKAEDGPRASLIPDATHLGPQFCKSCWFENKGLVECNNHYLCLNCLTLLLSVSNRCPICKMPLPTRLKPSVVPTAPPTGAGGDTRPPPHSP

SEQ ID NO: 11339 - protein, 99 aa, Artificial Sequence
  derived and/or modified protein sequence (wt) from LASV(Mad83;Clade IV)__ANH09753__Z
MGNKQAKASEAEDGPRASLIPDATHLGPQFCKSCWFENKGLVECNNHYLCLNCLTLLLSVSSRCPICKMPLPTRLRPSVVPTAPSAGAGDGTRPPPYSP

SEQ ID NO: 11340 - protein, 99 aa, Artificial Sequence
  derived and/or modified protein sequence (wt) from LASV(NL;Clade IV)__AAO59510__Z
MGNKQTKAPEAKDSPRASLIPDATYLGPQFCKSCWFENKGLVECNNHYLCLNCLTLLLSVSNRCPICKMPLPTKLRPSAAPTAPPAGAAHSARPPPYSP

SEQ ID NO: 11341 - protein, 99 aa, Artificial Sequence
  derived and/or modified protein sequence (wt) from LASV(Z0947-SLE-2011;Clade IV)__AIT17838__Z
MGNKQAKVPESKDSPRASLIPDATHLGPQFCKSCWFENKGLVECNNHYLCLNCLTLLLSVSNRCPICKMPLPTKLKPSAAPTAPPTGAADSIRPPPYSP

SEQ ID NO: 11342 - protein, 99 aa, Artificial Sequence
  derived and/or modified protein sequence (wt) from LASV(Z0948-SLE-2011;Clade IV)__AIT17842__Z
MGNKQAKVPESKDSPRASLIPDATHLGPQFCKSCWFENKGLVECNNHYLCLNCLTLLLSVSNRCPICKMPLPTKLRPSAAPTAPPTGVADSIRPPPYSP

SEQ ID NO: 11343 - protein, 99 aa, Artificial Sequence
  derived and/or modified protein sequence (wt) from LASV(Z148;Clade IV)__AAT49005__Z
MGNKQAKAPETKDSPRASLIPDATHLGPQFCKSCWFENKGLVECNNHYLCLNCLTLLLSVSNRCPICKMPLPTRLRPSAVPTAPPAPAGDRTKPPPYSP

SEQ ID NO: 11344 - protein, 99 aa, Artificial Sequence
  derived and/or modified protein sequence (wt) from LASV(Bamba-R114;Clade V)__AHC95547__Z
MGNRQAKDPKVESSPRASLIPDATHLGPQFCKSCWFENKGLVECNNHYLCLNCLSLLLSVSNRCPICKMPLPTRLRPTTMPTAPQIIKEGTTNPPPYTP

SEQ ID NO: 11345 - protein, 99 aa, Artificial Sequence
  derived and/or modified protein sequence (wt) from LASV(Komina-R16;Clade V)__AHC95545__Z
MGNKQAKDPKTESSPRASLIPDATHLGPQFCKSCWFENKGLVECNNHYLCLNCLSLLLSVSNRCPICKMPLPTKLKPITTPTAPQITRESITNPPPYTP

SEQ ID NO: 11346 - protein, 99 aa, Artificial Sequence; identical to SEQ ID NO: 11171
  derived and/or modified protein sequence (wt) from LASV(Alzey;Clade VI)__SCA79103__Z

SEQ ID NO: 11347 - protein, 99 aa, Artificial Sequence
  derived and/or modified protein sequence (wt) from LASV(NIGERIA IKEJI;Clade II)__AMZ00370__Z
MGNKQAKSTRVDEQQRAHLVPDASHLGPQFCKSCWFENKGLVECNNHYLCLNCLSLLLSVSSRCPICKMPLPTKLKTSTQPSAPRAEVPPSTTPPPYSP

SEQ ID NO: 11348 - RNA, 300 nt, Artificial Sequence
  derived and/or modified CDS sequence (wt) from LASV(Josiah;Clade IV)__ADY11072/NP_694871__Z
augggaaacaagcaagccaaagccccagaaucaaaagacaguccgagagccagccugaucccagaugccacacaucuagggccacaguucuguaagagcugcugguucgaaaacaagggccugguugagugcaacaaccacuaucugugucucaacugccucaccuuacuucuaagugucagcaacaggugucccauuugcaagaugccucuccccacaaaacugagaccaucagccgcuccaacagcaccuccaaccggagcagcggacagcaucagacccccacccuacagucccuga

SEQ ID NO: 11349 - RNA, 303 nt, Artificial Sequence
  derived and/or modified CDS sequence (wt) from LASV(Pinneo-NIG-1969;Clade I)__AIT17834__Z
augggcaacaagcagaccagguccccacccaaaccagagcaccccagaccaacccugcuacccgacgcaucccaccugggcccccaauucugcaagagcugcugguuugagaacaagggacugguggaguguaauaaccauuaccucugucuaaacugucucacacugcuucucagcgugagcgacagauguccuauuuguaagaugccccuccccaccaagcuggcaguccgaacccaaccaagugcacccccacucaaccagggcaacacucaauccuccccgccccccuacagccccuaa

SEQ ID NO: 11350 - RNA, 300 nt, Artificial Sequence
  derived and/or modified CDS sequence (wt) from LASV(Nig08-04;Clade II)__ADU56612__Z
augggcaacaggcaaaccaggccaacugaagccacugaacagagcagggcucacuugguaccagacgcaucccaccugggaccccaauucugcaagagcuguugguuugaaaacagaggucuaguggagugcaacaaccacuaccugugucucaacugucucaguuugcuccucagugucagcagcagauguccaaucugcaagaugccccuucccaccaggcugaaggcaucagcacagcccagcgcacccccaaccgaagcaccccagaacacaacacccccaccauacaccccauaa

SEQ ID NO: 11351 - RNA, 300 nt, Artificial Sequence
  derived and/or modified CDS sequence (wt) from LASV(Nig08-A19;Clade III)__ADU56620__Z
auggguggcaaacacaccaaaccacagagagaauccaacagucccagagccucucuaauucccgaugcaacacaccugggcccucaauuuugcaagaguuguugguuugagaacaaaggucugguggagugcaacaaccauuacuuaugccucaacugccuuacuuuacuccugucugucagcaacagaugccccaucuguaagaugccccuccccacgaggcugagagcaucaaccaacccaacagcaccccaggucgaacaagucggcccuacaaauccuccaccauacagucccuaa

SEQ ID NO: 11352 - RNA, 300 nt, Artificial Sequence
  derived and/or modified CDS sequence (wt) from LASV(AV;Clade V)__CCA30312__Z
auggggaacagacaagccaaaaauccagagguggagaacagcccaagggcuagucuaauuccggaugccacgcaccuugggccacaguucugcaagagcugcugguucgaaaacaaagguuuaguugaguguaauaaccacuaucuuugccucaacugccucuccuugcuuuuaagcgucagcaacaggugcccuaucugcaagaugccccuucccacgaggcugagaccgacaaccacaccaacagcgccacagaucaucaaggaaaacaccaccaaccccccgccauacacacccuaa

SEQ ID NO: 11353 - RNA, 300 nt, Artificial Sequence
  derived and/or modified CDS sequence (wt) from LASV(Togo/2016/7082;Clade VI)__AMR44579__Z
augggagccagacagaccaagcaaccucagauugagggaucuccuagagccucucuggugcccgaugcaagccaucuaggaccccaguucugcaagagcugcugguuugagaacaaagggcuuguggaguguaacaaucauuaccuuugccucaauugccucagccuccuacucagugucagcaacaggugcccuaucugcaagaugccccuccccaccaagcugagagugucaagcgcucccagugcacccccagcggccacggcccaacccggaacuccuccaccauacagccccuag

SEQ ID NO: 11354 - RNA, 300 nt, Artificial Sequence
  derived and/or modified CDS sequence (wt) from LASV(KAK-428;Clade n.d. (VII))__ANH09761__Z
augggcaacaaagggaccaaacccacccagaacucagaacccagcagggccaaccuagugccugaugcaagcuacuuaggaccccaguucugcaagaguugcugguuugaaaacaaagggcugguggaguguaacaaucauuaucucugccucaacugucucacaaugcuucucucugucagcaacaggugcccaaucugcaaaaugccgcuucccaccaaaauaaaggccucaggaagccccagcgcuccuccgaccgaggccaacuccgcagucagccccccuccauacacccccuaa

SEQ ID NO: 11355 - RNA, 300 nt, Artificial Sequence
  derived and/or modified CDS sequence (wt) from LASV(ISTH0009-NIG-2011;Clade II)__AIT17402__Z
augggcaacagacaggcuaaaucgacaaaagucgaugaacaucaaagagcucaucuagugccagaugcaucccaucuaggcccccaguucugcaagaguugcugguuugagaacagaggguugguagaguguaacaaucacuaccugugucucaacugucucagccugcuucucagcgucagcaguagaugcccgaucugcaagaugccccuucccaccaagcuaaaggcagcagcacagccgagcgcaccaucaaccgagacgauccagaacacaacaccuccaccguacaccccauaa

SEQ ID NO: 11356 - RNA, 300 nt, Artificial Sequence
  derived and/or modified CDS sequence (wt) from LASV(ISTH0012-NIG-2011;Clade II)__AIT17406__Z
augggcaacagacaggccaaaucaucaaaaguugaugagcaucaaagagcucaucuaguaccagaugcaucccaucuaggcccccaguuuugcaaaaguugcugguuugagaacaagggguugguagagugcaacaaccacuaccugugccucaacugucucagccugcuccucagcgucagcagcagaugcccgauuugcaagaugccccuucccaccaagcugaaagcagcagcacaaccgagcgcacccucaacugaggcgguccagaacacagcaccuccaccguaugccccauga

SEQ ID NO: 11357 - RNA, 300 nt, Artificial Sequence
  derived and/or modified CDS sequence (wt) from LASV(ISTH0047-NIG-2011;Clade II)__AIT17410__Z
augggcaacaagcaggccaaaucgacaaaggucgaugaacaucaaagagcucaucuggugccagaugcaucucaucuaggcccccaguucuguaagaguugcugguuugagaacagagggcugguggagugcaacaaccacuaucugugucucaacugucucagccugcuucucagcgucagcagcagguguccgaucugcaaaaugccucuucccaccaggcuaaaggcagcaacacagccgagcgcaccuucaaccgaggcgacccagaacacaacaccuccaccauacaccccguga

SEQ ID NO: 11358 - RNA, 300 nt, Artificial Sequence
  derived and/or modified CDS sequence (wt) from LASV(ISTH0230-NIG-2011;Clade II)__AIT17418__Z
augggcaacagacaggcuaaaucgacaaaagucgaugaacaucaaagagcucaucuagugccggaugcaucccaucuaggcccccaguucugcaagaguugcugguuugagaacagaggguugguagaguguaacaaucacuaccugugucucaacugucucagccugcuucucagcgucagcaguagaugcccgaucugcaagaugccccuucccaccaagcuaaaggcagcaacacagccgagcgcaccaucaaccgagacgauccagaacacaacacccccaccauacaccccauag

SEQ ID NO: 11359 - RNA, 300 nt, Artificial Sequence
  derived and/or modified CDS sequence (wt) from LASV(ISTH0531-NIG-2011;Clade II)__AIT17422__Z
augggcaauagacaagccaaaucggcaaaagucgaugaacaucaaagagcucaucuggugccagaugcgucccauuugggcccccaguucugcaagaguugcugguuugagaacagaggguugguagagugcaacaaccacuaccugugucucaacugucucagucugcuccucagcgucagcagcagaugcccgaucugcaagaugccccuucccaccaagcugaaggcagcaacacagccgagcgcacccucaaccgaggcgacccagaacacaacaccuccaccguacaccccauga

SEQ ID NO: 11360 - RNA, 300 nt, Artificial Sequence
  derived and/or modified CDS sequence (wt) from LASV(ISTH0595-NIG-2011;Clade II)__AIT17426__Z
augggcaacaaacaggccaaaucgacaaaagucgaugaacaccaaagagcucaucuagugccagaugcaucccaucuaggcccccaguucugcaagaguugcugguuugagaacagaggguugguagagugcaacaaucacuaccugugccucaacugucucagccugcuccucagcgucagcagcagaugcccaaucugcaagaugccccuucccaccaagcuaaaggcagcaacacagccgagcgcaccaucaaccgaggcgacccagaacacaacaccuccaccguacaccccauga

SEQ ID NO: 11361 - RNA, 300 nt, Artificial Sequence
  derived and/or modified CDS sequence (wt) from LASV(ISTH1003-NIG-2011;Clade II)__AIT17432__Z
augggcaacaagcaggccaaaucgacaaaaguugaugaacaucaaagagcucaucuagugccagaugcaucucaucuaggcccccaguucuguaagaguugcugguuugagaacagagggcugguggagugcaacaaccacuaccugugucucaacugucucagccugcuucucagcgucagcagcagguguccgaucugcaaaaugccucuucccaccaggcuaaaggcagcaacacagccgagcgcacccucaaccgaggcgacccagaacacaauaccuccaccauacaccccguga

SEQ ID NO: 11362 - RNA, 300 nt, Artificial Sequence
  derived and/or modified CDS sequence (wt) from LASV(ISTH1038-NIG-2011;Clade II)__AIT17436__Z
augggcaacaaacaggccaaaucgacaaaagccgaugaacaucaaagagcucaucuagugccagaugcaucccaucugggcccccaguucuguaagaguugcugguuugagaacagagggcugguggagugcaacaaucacuaucugugucucaacugucucagccugcuccucagcgucagcagcagaugcccgaucugcaagaugccucuucccaccaagcuaaaggcagcaacacagccgagcgcaccaucaacugaggcgacccggaacacaacacccccaccguacaccccauga

SEQ ID NO: 11363 - RNA, 300 nt, Artificial Sequence
  derived and/or modified CDS sequence (wt) from LASV(ISTH1058-NIG-2011;Clade II)__AIT17444__Z
augggcaacagacaggcuaaaucaacaaaagucgacgaacaucaaagagcucaccuagugccagaugcaucucaucuaggcccccaguuuugcaaaaguugcugguuugagaacaagggguugguagagugcaacaaccacuaccugugucucaacugucucagccugcuccucagcguuagcagcagaugcccgaucugcaagaugccccuucccaccaagcugaaggcagcagcacaaccgagcgcacccucaaccgaggcggcccagaacacagcaccuccaccguaugccccauga

SEQ ID NO: 11364 - RNA, 300 nt, Artificial Sequence
  derived and/or modified CDS sequence (wt) from LASV(ISTH1064-NIG-2011;Clade II)__AIT17448__Z
auggguaacagacaggccaaaucgacaaaagucggugaacaucaaagagcucaucuagugccagaugcaucccaucuaggcccccaguucugcaagaguugcugguuugagaacagaggguugguagagugcaacaaucacuaccugugucucaacugucucagccugcuccucagugucagcagcaggugcccgaucugcaagaugccccuccccaccaagcuaaaggcaacagcacagccaagcgcaccaucagccgaggcaauccagaacacaacaccuccaccguacaccccauaa

SEQ ID NO: 11365 - RNA, 300 nt, Artificial Sequence
  derived and/or modified CDS sequence (wt) from LASV(ISTH1069-NIG-2011;Clade II)__AIT17452__Z
augggcaacagacaggccaaaucgacaagagucgaugaacaucaaagagcccaucuagugccagaugcaucccaucuagguccucaguucugcaagagcuguugguuugaaaacagaggguugguagaguguaacaaccacuaucugugucucaacugucucagucuucuccuuagcgucagcagcagaugcccgaucugcaagaugccccuuccuaccaggcuaagggcagcaguacagccgagcgcacccucaaccgagacaacccaggacacaacaccuccaccguacuccccauga

SEQ ID NO: 11366 - RNA, 300 nt, Artificial Sequence
  derived and/or modified CDS sequence (wt) from LASV(ISTH1096-NIG-2012;Clade II)__AIT17456__Z
augggcaacagacaggccaaaucgacagaagucaaugaacaucaaagagcucaucuagugccagaugcaucccaucuaggcccucaguucugcaagaguugcugguucgagaacagaggguugguggagugcaacaaucacuaccugugucucaacugucucagcuugcuccucagcgucaguagcagaugcccgaucugcaagaugccccuucccaccaagcuaaaggcagcaacacagccgagcgcaccaucaaccgaagugacccagaacacagugccuccaccguauuccccauaa

SEQ ID NO: 11367 - RNA, 300 nt, Artificial Sequence
  derived and/or modified CDS sequence (wt) from LASV(ISTH1107-NIG-2012;Clade II)__AIT17460__Z
augggcaacagacaggccaaaucgacaaaagucgaugaacaucaaagagcucaucuaguaccagaugcaucccaucuaggcccucaguucugcaagaguugcugguuugagaacagagggcugguagagugcaacaaccacuaccugugucucaauugucucagccugcuccucagcgucagcagcagaugcccgaucuguaagaugccucuucccaccaaacuaaaggcagcagcacaaccgagcgcacccccaaccgaggcaacccaaaacacaacaccuccaccguacaccccguag

SEQ ID NO: 11368 - RNA, 300 nt, Artificial Sequence
  derived and/or modified CDS sequence (wt) from LASV(ISTH1111-NIG-2011;Clade II)__AIT17464__Z
augggcaacagacaggccaaaucgacaaaagucgaugaacaucaaagagcucaucuagugccagaugcaucccaucuaggcccucaguucugcaagaguugcugguuugagaacagagguuugguggagugcaacaaccacuaccugugucucaacugccucagcuugcuccucagcgucagcagcagaugcccgaucugcaagaugccccuccccaccaagcugaaggcagcagcacagccgagcgcacccucaaccgaggcgacccaggauacaacaccuccaccguacaccccauga

SEQ ID NO: 11369 - RNA, 300 nt, Artificial Sequence
  derived and/or modified CDS sequence (wt) from LASV(ISTH1121-NIG-2012;Clade II)__AIT17468__Z
augggcaacaggcaggccaaacagaccaaagucgacgaacaucaaagagcucaccuaguaccggaugcaucccaucuaggcccccaauucugcaagaguugcugguuugagaacagaggguugguagagugcaacaaccauuaccuaugucucaacugucucagcuuacuucucagcaucagcagcaggugccccaucugcaaaaugccucuucccaccaaacuaaaggcagcagcgcagccgagcgcacccucaacugaggcaacccaggacacaacaccuccaccauacaccccauga

SEQ ID NO: 11370 - RNA, 300 nt, Artificial Sequence
  derived and/or modified CDS sequence (wt) from LASV(ISTH1129-NIG-2012;Clade II)__AIT17472__Z
augggcaacaagcagaccaaaucgacaaaagcugaugaacaucaaagggcucaucuagugccagaugcaucccaucuaggcccccaguucugcaagaguugcugguuugagaacaggggguugguagagugcaacaaccacuacuugugucucaauugccucagucugcuccucagcgucagcagcagaugcccgaucugcaagaugccccuucccaccaggcuaaaggcagcagcacagccgagcgcacccucaaccgaggcgacccaggacacaacaccuccaccguauaccccauga

SEQ ID NO: 11371 - RNA, 300 nt, Artificial Sequence
  derived and/or modified CDS sequence (wt) from LASV(ISTH1137-NIG-2011;Clade II)__AIT17476__Z
augggcaauagacaggcuaagucgacaaaagucgaugaacaucaaagagcucaucuagugccagaugcaucccaucugggcccccaguucugcaagaguugcugguuugagaacagaggguuaguggagugcaacaaucacuaucugugucucaacugucucagccugcuccucagcgucagcagcagaugcccgauuugcaagaugccccuucccaccaagcuaaaggcagcagcacagccgagugcaccuucagccgaggcgauccagaacacaacgccuccaccauacaccccauaa

SEQ ID NO: 11372 - RNA, 300 nt, Artificial Sequence
  derived and/or modified CDS sequence (wt) from LASV(ISTH2010-NIG-2012;Clade II)__AIT17480__Z
auggguaacagacaugccaaaucgacaaaagucgaugaacaucaaagagcucaucuagugccagaugcaucccaucuaggcccccaguucugcaagaguugcugguuugagaauagaggguugguagagugcaacaaucacuaccugugucucaacugucucagccugcuccucagugucagcagcagaugcccgaucugcaagaugccccuucccaccaagcuaaaggcagcagcacagccgagcgcaccauccaccgaggugauccagagcacaacaccuccaccauacaccccauaa

SEQ ID NO: 11373 - RNA, 300 nt, Artificial Sequence
  derived and/or modified CDS sequence (wt) from LASV(ISTH2016-NIG-2012;Clade II)__AIT17484__Z
augggcaacagacaugccaaaucgacaaaagucgaugaacaucaaagagcucaucuagugccagaugcaucccaucuaggcccccaguucugcaagagcugcugguuugagaacagaggguugguagagugcaacaaucacuaccugugucucaacugucucagccugcuccucagugucagcagcagaugcccgaucugcaagaugccccuucccaccaagcuaaaggcagcagcacagccgagugcaccgucaaccgaggagauccagaacacaacaccuccaccauacaccccauaa

SEQ ID NO: 11374 - RNA, 300 nt, Artificial Sequence
  derived and/or modified CDS sequence (wt) from LASV(ISTH2020-NIG-2012;Clade II)__AIT17488__Z
augggcaacagacaggccaaaccaacgaaggucgaugagcaucaaagagcucaucuagugccagaugcaucccaucuaggcccccaguuuugcaaaaguugcugguuugagaacaagggguugguagagugcaacaaccacuaccugugccucaacugucucagucugcuccucagcgucagcagcagaugcccgaucugcaagaugccccuucccaccaagcugaaggcagcagcacagccgagcgcacccucaacugaggcggcccagaacacagcgccuccaccguaugccccauga

SEQ ID NO: 11375 - RNA, 300 nt, Artificial Sequence
  derived and/or modified CDS sequence (wt) from LASV(ISTH2031-NIG-2012;Clade II)__AIT17496__Z
augggcaacagacaggccaaaucgacaaaagucgaugaacaucaaagagcucaucuagugccagaugcaucccaucuaggcccccaguucugcaagaguugcugguuugagaacagaggguugguagagugcaacaaucacuaccugugucucaacugucucagccugcuccucagugucagcagcagaugcccaaucugcaagaugccccuuccuaccaggcuaaaggcagcgacacagccgagcgcaccaucaacugaggcgacccagaccacaacaccuccaccauacaccccauga

SEQ ID NO: 11376 - RNA, 300 nt, Artificial Sequence
  derived and/or modified CDS sequence (wt) from LASV(ISTH2037-NIG-2012;Clade II)__AIT17500__Z
augggcaacagacagaccaaaucaacaaaaguugaugaacaucaaagagcucaucuagugccagaugcgucccaucuaggcccccaguuuugcaaaaguugcugguuugagaacaagggguuaguagagugcaacaaccauuaccugugucucaacugucucagccugcuccucaguguuagcagcagaugcccgaucuguaagaugccccuuccuaccaagcugaagacagcagcacagccgagugcacccccaacugaggcggcccggaccacagcaccuccaccguacgccccauga

SEQ ID NO: 11377 - RNA, 300 nt, Artificial Sequence
  derived and/or modified CDS sequence (wt) from LASV(ISTH2042-NIG-2012;Clade II)__AIT17504__Z
augggcaacagacaugccaaaucgacaaaagucgaugaacaucaaagagcucaucuagugccagaugcaucccaucuaggcccccaguucugcaagaguugcugguuugagaacagaggguugguagagugcaacaaucacuaccugugucucaacugucucagccugcuccucagugucagcagcagaugcccgaucugcaagaugccccuucccaccaagcuaaaggcagcagcacagccaagcgcaccaucaaccgaggcgauccagaacacaacaccuccaccauacaccccauaa

SEQ ID NO: 11378 - RNA, 300 nt, Artificial Sequence
  derived and/or modified CDS sequence (wt) from LASV(ISTH2046-NIG-2012;Clade II)__AIT17508__Z
augggcaacagacagaccaaaucaacaaaagucgaugagcaucaaagagcucaucuagugccagaugcaucccaucuaggcccccaguuuugcaaaagcugcugguuugagaacaaaggguugguagagugcaacaaccacuaccugugccucaauugucucagccugcuccucagcgucaguagcagaugcccgaucugcaagaugccccuucccaccaagcugaaggcagcagcacagccgagcgcacccucaacugaggcaacccagaauacagcaccuccaccauaugccccauga

SEQ ID NO: 11379 - RNA, 300 nt, Artificial Sequence
  derived and/or modified CDS sequence (wt) from LASV(ISTH2050-NIG-2012;Clade II)__AIT17512__Z
augggcaacagacaggccaaaucgacaaaagucuaugaacaucaaagagcucaucuagugccagaugcaucccaucuaggcccccaguucugcaagaguugcugguuugagaacagaggguugguagaaugcaauaaucacuaccugugucucaacugucucagccugcuccucagugucagcagcagaugcccaaucugcaagaugccccuucccaccaggcuaaaggcagcgacacagcccagcgcaccaucaaccgaggcaacccaaaacacaacacccccaccguacaccccauaa

SEQ ID NO: 11380 - RNA, 300 nt, Artificial Sequence
  derived and/or modified CDS sequence (wt) from LASV(ISTH2057-NIG-2012;Clade II)__AIT17516__Z
augggcaacagacaagccaagucgacaaaaguugaugaacaucaaagagcucaucuagugccagaugcaucccaucuaggcccccaguucugcaagaguugcugguuugagaacagaggguugguggagugcaauaaucacuaucugugccucaacugucucagccugcuccucagcgucagcagcagaugcccgaucugcaagaugccccuucccaccaagcugaagacagcaacacagccgagcgcaccauuaacugaggcgacccagaacacaacacccccaccguacaccccauga

SEQ ID NO: 11381 - RNA, 300 nt, Artificial Sequence
  derived and/or modified CDS sequence (wt) from LASV(ISTH2061-NIG-2012;Clade II)__AIT17520__Z
augggcaacaaacaggcuaaaucgacaaaagucgaugaacaccaaagagcucaucuagugccagaugcaucccaucuaggcccccaguucugcaagaguugcugguuugagaacagaggguugguggagugcaacaaucacuacuugugucucaacugccucagccugcuccucagcgucagcaacagaugcccgaucugcaagaugccccuucccaccaagcuaaaggcagcagcacagccgagcgcaccaucaaccgaggcgacccagaacacaacaccuccaccauacaccccguaa

SEQ ID NO: 11382 - RNA, 300 nt, Artificial Sequence
  derived and/or modified CDS sequence (wt) from LASV(ISTH2065-NIG-2012;Clade II)__AIT17526__Z
auggguaacagacaggcuaaaucagccaaaguuacugagcaucagagagcacaucuagugccggaugcaucccauuuggguccucaauucuguaagagcugcugguuugagaacaaagggcugguggaaugcaacaaucauuaucugugucucaauugccuuaguuugcuccuuagcgucagcagcagaugcccaaucugcaagaugccccuucccaccagacuaaaggcagcgacacaacccagcgcacccucagccgaggcaccccagagcacaacgcccccaccauacaccccguaa

SEQ ID NO: 11383 - RNA, 300 nt, Artificial Sequence
  derived and/or modified CDS sequence (wt) from LASV(ISTH2094-NIG-2012;Clade II)__AIT17536__Z
augggcaacaggcaaaccaggccaacugaagccacugagcagagcagggcccacuugguaccagaugcaucccaccugggaccccaauucugcaagagcuguugguuugaaaacaaagguuuaguggagugcaacaaccacuaccugugucucaacugucucagcuugcuccucagugucagcagcagauguccaaucugcaagaugccccuucccaccaggcugaaggcaucagcacagcccagcgcacccccaaccgaagcaccccagaacaaagcaccuccaccauacaccccauaa

SEQ ID NO: 11384 - RNA, 300 nt, Artificial Sequence
  derived and/or modified CDS sequence (wt) from LASV(ISTH2129-NIG-2012;Clade II)__AIT17542__Z
augggcaauagacaggucaaaucgacaaaagucgaugaacaucaaagagcucaucuaauuccagaugcaucccauuuaggcccccaguucuguaagaguugcugguuugagaacagagggcugguagagugcaacaaucauuaccugugucucaacugucucagccuacuccucagcgucagcagcagaugcccgaucugcaagaugccccuucccaccaagcuagaggcagcagcacagccgagugcaccaucaacugaggcgacccaggacacaacaccuccaccguacaccccauaa

SEQ ID NO: 11385 - RNA, 300 nt, Artificial Sequence
  derived and/or modified CDS sequence (wt) from LASV(ISTH2217-NIG-2012;Clade II)__AIT17546__Z
augggcaacaaacaggcuaaaucgacaaaagucgaugaacaucaaagagcucaucuagugccagaugcaucccaucuaggcccucaguucugcaagaguugcugguuugagaacagaggguugguggagugcaacaaccacuaccugugucucaacugucucagccugcuccucagcgucagcagcagaugcccgaucugcaagaugccccuucccaccaagcuaaaggcagcagcacagccgagcgcaccaucaaccgagacaauccagaacacaacacccccaccguacaccccguaa

SEQ ID NO: 11386 - RNA, 300 nt, Artificial Sequence
  derived and/or modified CDS sequence (wt) from LASV(ISTH2271-NIG-2012;Clade II)__AIT17550__Z
augggcaacagacaggccaaacagaccaaagucgacgaacaucaaagggcucaccuaguaccggacgcaucccaucugggcccccaauucugcaagaguugcugguuugagaacagaggguugguggagugcaacaaccacuacuuaugucucaacugucucagcuuacuccucagcgucaguagcaggugccccauuugcaaaaugccucuucccacuaaacuaaaggcagcagcacagccaagcgcacccucaacugagauaacccagaacacaacaccuccaccauacaccccauga

SEQ ID NO: 11387 - RNA, 300 nt, Artificial Sequence
  derived and/or modified CDS sequence (wt) from LASV(ISTH2304-NIG-2012;Clade II)__AIT17554__Z
augggcaacaggcaggccaaaucgacaaaagcugacgaacaucaaagagcucaucuagugccagaugcaucccaucuaggcccccaguucugcaagaguugcugguuugagaacaggggguugguagaguguaacaaccacuacuugugucucaauugccucagucugcuccucagcgucagcaacagauguccgaucugcaagaugccccuucccaccaggcuaaaggcagcagcacagccgagcgcaccuucaaccgaggcgacccaggacacaacaccuccaccguauaccccauga

SEQ ID NO: 11388 - RNA, 300 nt, Artificial Sequence
  derived and/or modified CDS sequence (wt) from LASV(ISTH2312-NIG-2012;Clade II)__AIT17558__Z
augggcaacagacaagccaagucgacaaaagucgaugaacaucaaagagcucaucuagugccagaugcaucccaucuaggcccccaguucugcaagagcugcugguuugaaaacagaggguugguagaaugcaacaaucacuaccugugucucaacugucucagccugcuccucagugucagcagcagaugcccaaucugcaagaugccccuucccaccaggcugaaggcagcagcacaaccgagcgcaccaucaaccgaggcaauccggagcacaacaccuccaccguauaccccauaa

SEQ ID NO: 11389 - RNA, 300 nt, Artificial Sequence
  derived and/or modified CDS sequence (wt) from LASV(ISTH2358-NIG-2012;Clade II)__AIT17570__Z
augggcaacagacaggccaagucggcaaaagucaaugaacaucaaagagcucaucuggugccagaugcgucccauuuaggcccccaguucugcaagaguugcugguuugagaacagaggguugguggagugcaacaaccacuacuugugucucaacugucucagucugcuccucagcguuagcaguagaugcccgauuugcaagaugccccuccccaccaagcuaaaggcagcagcacagcccagcgcacccucaaccgaggcgacccagaacauaacaccuccaccguacaccccauga

SEQ ID NO: 11390 - RNA, 300 nt, Artificial Sequence
  derived and/or modified CDS sequence (wt) from LASV(Lassa virus/H.sapiens-wt/NGA/2016/ISTH_0017;Clade II)__AVO03713__Z
augggcaauagacaggccaagucgacaaaagucgaugaacaucaaagagcucaucuagugccagaugcaucccaucuaggcccccaguucugcaaaaguugcugguuugagaacaggggguuaguagagugcaacaaucacuaccugugucucaacugucucagccuacuccucagcgucaguagcagaugcccgaucugcaagaugccccuucccaccaagcuaaaggcggcaacacagccgagcgcaccaucaaccgaggugaaccagaauacaacaccuccaccguacacuccauga

SEQ ID NO: 11391 - RNA, 300 nt, Artificial Sequence
  derived and/or modified CDS sequence (wt) from LASV(Lassa virus/H.sapiens-wt/NGA/2016/ISTH_0035;Clade II)__AVO03731__Z
auggguaacagacaggccaaaucgacaaaagucgaugagcaucaaagggcucaucuacugccagaugcaucccaucuaggcccccaguucugcaagaguugcugguuugagaacagaggguugguggagugcaacaaucacuaccugugucuuaacugucucagccugcuccucagcgucagcagcagaugcccgaucugcaagaugccccuucccaccaagcuaaaggcagcaacacagccgagcgcaccaucaaccgaggcgacccagaacacaacaccuccaccauacaccccauga

SEQ ID NO: 11392 - RNA, 300 nt, Artificial Sequence
  derived and/or modified CDS sequence (wt) from LASV(Lassa virus/H.sapiens-wt/NGA/2016/ISTH_0703;Clade II)__AVO03703__Z
augggcaacaaacagacuaaaucgacaaaaguggaugaacaucaaagagcucaucuagugccagaugcaucccauuuaggcccucaguucugcaagaguugcugguuugagaacagaggccugguggagugcaacaaccacuaccugugucucaacugccucagccugcuccucagcgucaguagcagaugcccgaucugcaagaugccccuucccaccaagcuaaaggcagcagcacaaccgagcgcacccucaaccgaggcgacccagaacauaacaccuccaccguacaccccauga

SEQ ID NO: 11393 - RNA, 300 nt, Artificial Sequence
  derived and/or modified CDS sequence (wt) from LASV(Lassa virus/H.sapiens-wt/NGA/2016/ISTH_0717;Clade II)__AVO03670__Z
auggguggcaaacacuccaaaccaccgggagaauccaacaguccuagagcgucuuuaauccccgacgcaacacaccugggcccucaguucuguaagaguuguugguuugagaacaagggucugguggagugcaacaaucauuaucugugccuuaacugucucucgcugcuccuguccgucagcaacaggugccccauuugcaagaugccccuccccacaaggcugagagcaucaaccaacccaacagcaccccaagucggacaaaucgaccccacaaacccuccgccauacagucccuaa

SEQ ID NO: 11394 - RNA, 300 nt, Artificial Sequence
  derived and/or modified CDS sequence (wt) from LASV(Lassa virus/H.sapiens-wt/NGA/2016/ISTH_0753;Clade II)__AVO03748__Z
augggcaacagacaggccaaaucgacaaaagucgaugagcaucagagagcucaucuagugccagaugcaucccauuuaggcccccaguucugcaagaguugcugguuugagaacagaggguugguagagugcaacaaucacuaccugugucucaacugucucagccugcuccucagcgucagcaacagaugcccgaucuguaagaugccccuucccaccaagcuaaaagcagcggcacagccgagcgcaccaucaaccgaggcgacccaggacacaacaccuccaccauacaccccauga

SEQ ID NO: 11395 - RNA, 300 nt, Artificial Sequence
  derived and/or modified CDS sequence (wt) from LASV(Lassa virus/H.sapiens-wt/NGA/2016/ISTH_0919;Clade II)__AVO03760__Z
augggcaacagacaugccaaaccgacaaaagucgaugaacaucaaagagcucaucuagugccagaugcaucccaucuaggcccccaauucugcaagaguugcugguuugaaaacaaaggauugguagagugcaacaaucacuaccugugucucaacugucucagcuugcuccucagugucagcagcagaugcccgaucugcaagaugccccuccccaccaagcuaaaggcagcagcacagccgagugcaccaucagccgaggcgacccagaacacagcacccccaccauacaccccauga

SEQ ID NO: 11396 - RNA, 300 nt, Artificial Sequence
  derived and/or modified CDS sequence (wt) from LASV(Lassa virus/H.sapiens-wt/NGA/2016/ISTH_1006;Clade II)__AVO03750__Z
augggcaacaaacagaccaaaucgacaaaaguugaugaacaucaaagagcucaucuagugccagaugcaucccauuugggcccucaguucugcaagaguugcugguuugagaacagaggcuugguggagugcaacaaccacuauuugugucucaacugccucagccugcuccucagcgucagcagcagaugcccgaucugcaagaugccccuucccaccaagcuaaagacaguagcacagccgagcgcacccccaaccgaggcgacccagaacacaacaccuccaccguacaccccauga

SEQ ID NO: 11397 - RNA, 297 nt, Artificial Sequence
  derived and/or modified CDS sequence (wt) from LASV(Lassa virus/H.sapiens-wt/NGA/2016/ISTH_1070;Clade II)__AVO03754__Z
ggcaacagacaggccaaaccaacgaaggucgaugagcaucaaagagcucaucuagugccagaugcaucccaucuaggcccccaguuuugcaaaaguugcugguuugagaacaagggguugguggagugcaacaaccacuaccugugccucaacugucucagccugcuccucggcgucagcagcagaugcccgaucugcaagaugccccuucccaccaagcugaaagcagcagcacaaccgagcgcacccucaacugaggcggcccagaacacagcaccuccaccguaugccccauga

SEQ ID NO: 11398 - RNA, 300 nt, Artificial Sequence
  derived and/or modified CDS sequence (wt) from LASV(Lassa virus/H.sapiens-wt/NGA/2016/ISTH_1174;Clade II)__AVO03716__Z
augggcaacagacaggccaaaucgacaaaagucgaugaacaccaaagagcucaucuagugccagaugcaucccaucugggcccccaguucugcaagaguugcugguuugagaacagaggguugguagagugcaacaaccacuaccugugucucaacugucucaguuugcuccuuagcgucagcagcagaugcccgaucugcaagaugccucuucccaccaagcuaaaggcugcaacacagccgagcgcaccaccaaccgagacgacccagaacacaacaccuccaccguacaccccauaa

SEQ ID NO: 11399 - RNA, 300 nt, Artificial Sequence
  derived and/or modified CDS sequence (wt) from LASV(Lassa virus/H.sapiens-wt/NGA/2016/ISTH_1207;Clade II)__AVO03680__Z
augggcaacagacaggcuaaaucgacaaaagucgaugaacaucaaagagcccaucuagugccagaugcaucccaucuagggccccaguucugcaagaguugcugguuugagaacagaggguuaguagaaugcaacaaucacuaccugugucucaacugucucagccugcuccucagugucagcagcagauguccgaucugcaagaugccccuucccaccaagcuaagggcaacagcgcagccgagcgcaccaucaaccgaggcgacccagaacacaacaccuccaccguacaccccguaa

SEQ ID NO: 11400 - RNA, 300 nt, Artificial Sequence
  derived and/or modified CDS sequence (wt) from LASV(Lassa virus/H.sapiens-wt/NGA/2016/ISTH_1311;Clade II)__AVO03739__Z
augggcaauaggcaagcuaaaccaaccgaggccauugagcaaaacagggcucaucuggugccagacgcaucccaucuggggccccaauucugcaagagcugcugguuugaaaacaaaggauuaguggagugcaacaaccacuaccuaugucuuaauugucucagccugcuccucagcgucagcagcagauguccaauuugcaagaugccccuucccaccaggcugaaagcaucagcacagcccagcgcacccucggccgaagcaccccagaacgcaaaacccccaccauacagcccauaa

SEQ ID NO: 11401 - RNA, 300 nt, Artificial Sequence
  derived and/or modified CDS sequence (wt) from LASV(Lassa virus/H.sapiens-wt/NGA/2016/ISTH_1423;Clade II)__AVO03685__Z
auggguaauaaacaggcuaaaucaaucaaagcugaugaacaccaaagagcucaucuaguaccagaugcaucucaucuaggcccucaguucugcaagaguugcugguuugaaaacagagggcuaguagagugcaacaaccacuaccugugccucaacugucuuagccuacuccucagugucaguagcagaugcccaaucugcaagaugccccuccccaccaaacuaaagacagcagcacagccaagcgcacccccagucggagcaacccagaacacaacacccccaccguacaccccauga

SEQ ID NO: 11402 - RNA, 300 nt, Artificial Sequence
  derived and/or modified CDS sequence (wt) from LASV(Lassa virus/H.sapiens-wt/NGA/2016/ISTH_1462;Clade II)__AVO03690__Z
augggcaacaaacagacuaaaucgacaaaaguggaugaacaucaaagagcucaucuagugccagaugcaucccauuuaggcccucaguuuugcaagaguugcugguuugagaacagaggccugguggagugcaacaaccacuaccugugucucaacugccucagccugcuccucagcgucagcagcagaugcccgaucugcaagaugccccuucccaccaagcuaaaggcagcagcacaaccgagcgcacccucaaccgaggcgacccagaacacaacacccccaccguacaccccauga

SEQ ID NO: 11403 - RNA, 300 nt, Artificial Sequence
  derived and/or modified CDS sequence (wt) from LASV(Lassa virus/H.sapiens-wt/NGA/2016/ISTH_1472;Clade II)__AVO03726__Z
augggcaacaagcagaccaaaucgacaaaagucgaugaacaucaaagagcccaucuagugccagaugcaucccauuuaggcccucaguucuguaagaguugcugguuugagaacagaggccugguggagugcaacaaccacuaccugugucucaacugccucagccugcuccucagcgucagcagcagaugcccgauuugcaagaugccccuucccaccaagcuaaaggcagcagcacagccgagcgcacccccaaccgaggcaacccagaacacaacaccuccaccguauaccccauga

SEQ ID NO: 11404 - RNA, 300 nt, Artificial Sequence
  derived and/or modified CDS sequence (wt) from LASV(Lassa virus/H.sapiens-wt/NGA/2016/ISTH_1496;Clade II)__AVO03693__Z
augggcaacaaacaggccaaaucgacaaaaaucgaugaucaucaaagagcucaucuagugccagaugcaucccaucuaggcccccaguuuugcaagaguugcugguuugagaacagaggauugguggagugcaacaaucacuaccugugucucaacugucucagccugcuccucagcgucagcagcagauguccgauuugcaagaugccccuucccaccaagcuaaaggcagcagcacagccgagcgcaccaucaacugagacuauccagaacacaacgccuccaccguacaccccauaa

SEQ ID NO: 11405 - RNA, 300 nt, Artificial Sequence
  derived and/or modified CDS sequence (wt) from LASV(Lassa virus/H.sapiens-wt/NGA/2016/ISTH_1546;Clade II)__AVO03665__Z
auggguggcaaacaauccagaccuccaaagaaaguggacaguccaagagccaaccugauuccugaugcuucuuacauggguccucaguuuugcaaaaguugcugguuugaaaacaagggccuaguugaaugcaacaaccacuaucuaugccucaacugucucucucuucuucugagugucaguagcaggugccccaucuguaagaugccucuaccuacaaagcucaaggcauccaccaguccgacagccccucccaucauaggaaccaacaccacaaaucccccaccauacagccccuaa

SEQ ID NO: 11406 - RNA, 300 nt, Artificial Sequence
  derived and/or modified CDS sequence (wt) from LASV(Lassa virus/H.sapiens-wt/NGA/2016/ISTH_1568;Clade II)__AVO03711__Z
auggguaacagacaggccagaucgacaaaagucgaugagcaucaaagggcucaucuacugccagaugcaucccaucuaggcccccaguucugcaagaguugcugguuugagaacagaggguuaguggagugcaacaaucacuaccugugucuuaacugucucagccugcuccucagcgucagcagcagaugcccgaucugcaagaugccccuucccaccaagcuaaaggcagcaacacagccgagcgcaccaucaaccgaggcgacccagaacacaacaccuccaccauacaccccauga

SEQ ID NO: 11407 - RNA, 300 nt, Artificial Sequence
  derived and/or modified CDS sequence (wt) from LASV(Lassa virus/H.sapiens-wt/NGA/2016/ISTH_1610;Clade II)__AVO03687__Z
augggcaacagacaggccaaaucgaccaaagucgcugaacaucaaagagcucaucuggugccagaugcaucccaccuaggcccccaguucugcaagagcuguugguucgagaauaaagggcugguggaauguaacaaccauuaccugugucucaacugucucagccuacuccuaagcgucagcagcagguguccaaucugcaagaugccccuuccuaccaagcuaagggcaacagcacagccgagcgcacccccauccgaagcgacccagagcacgacacccccaccguacaccccauaa

SEQ ID NO: 11408 - RNA, 300 nt, Artificial Sequence
  derived and/or modified CDS sequence (wt) from LASV(Lassa virus/H.sapiens-wt/NGA/2018/ISTH_0026;Clade II)__AVV65086__Z
augggcaacaagcaggccaaaucgacaaaaguugaugaacaucaaagagcucaucuagugccagaugcaucucaucuaggcccccaguucugcaagaguugcugguuugagaacagagggcugguggaguguaacaaccacuaccugugucucaacugucucagccugcuucucagcgucagcagcagguguccgaucugcaaaaugccucuucccaccaggcuaaaggcagcaacacagccgagugcacccucaacugaggcgacccggaacacaacacccccaccauacaccccguga

SEQ ID NO: 11409 - RNA, 300 nt, Artificial Sequence
  derived and/or modified CDS sequence (wt) from LASV(Lassa virus/H.sapiens-wt/NGA/2018/ISTH_0097;Clade II)__AVV65091__Z
augggcaacaaacagacuaaaucgacaaaaguggaugaacaucaaagagcucaucuagugccagaugcaucccauuuaggcccucaguucugcaagaguugcugguuugagaacagaggccugguggagugcaacaaccacuaccugugucucaacugccucagccugcuccucagcgucagcagcagaugcccgaucugcaagaugccccuucccaccaagcuaaaggcagcagcacaaccgagcgcacccucaaccgaggugacccagaacacaacacccccaccguacaccccauga

SEQ ID NO: 11410 - RNA, 300 nt, Artificial Sequence
  derived and/or modified CDS sequence (wt) from LASV(Lassa virus/H.sapiens-wt/NGA/2018/ISTH_0664;Clade II)__AVV65093__Z
augggcaacaaacagaccaaaucgacaaaagucgaugaacaucaaagagcucaucuagugccagaugcuucccauuuaggcccucaguucugcaagaguugcugguuugagaacagaggcuugguggagugcaacaaccacuaccugugucucaacugccucagucugcuccucagcgucaguggcagaugcccgaucugcaagaugccccuucccaccaagcuaaaggcagcagcacagccgagcgcacccucaaccgaggcgacccaaaacacaacaccuccaccguacaccccauga

SEQ ID NO: 11411 - RNA, 300 nt, Artificial Sequence
  derived and/or modified CDS sequence (wt) from LASV(Lassa virus/H.sapiens-wt/NGA/2018/ISTH_0959;Clade II)__AVV65084__Z
augggcaacaaacaggccaaaucgacaaaagucgacgaacaucaaagggcucaucuaguaccggaugcaucccaucuaggcccccaguucugcaagaguugcugguuugagaacagaggguugguagagugcaacaaucacuaccugugucucaacugucucagccugcuucucagugucagcagcagaugcccgaucugcaagaugccccuucccaccaagcuaaaggcagcagcacagccgagcgcaccaucaacagaggcgauccagagcacaacaccuccaccguacacuccauaa

SEQ ID NO: 11412 - RNA, 300 nt, Artificial Sequence
  derived and/or modified CDS sequence (wt) from LASV(Lassa virus/H.sapiens-wt/NGA/2018/ISTH_1079;Clade II)__AVV65074__Z
augggcaacaaacagaccaaaucgacaaaaguugaugaacaucaaagagcucaucuagugccagaugcaucccauuugggcccucaguucugcaagaguugcugguuugagaacaaaggcuugguggaguguaacaaccacuauuugugucucaacugccucagccugcuccucagugucagcagcagaugcccgaucugcaagaugccccuucccaccaagcuaaagacagcagcacagccgagcgcaccuccaaccgaggcaacccagaacacaacaccuccaccguacaccccauga

SEQ ID NO: 11413 - RNA, 300 nt, Artificial Sequence
  derived and/or modified CDS sequence (wt) from LASV(Lassa virus/H.sapiens-wt/NGA/2018/ISTH_1177;Clade II)__AVV65080__Z
augggcaacagacagaccaaaucaacaaaagucgaugagcaucaaagagcucaucuagugccagaugcaucccaucuaggcccccaguuuugcaaaaguugcugguuugagaacaagggguugguagagugcaacaaccacuaccugugccucaacugucucagccugcuccucagcgucaguagcagaugcccgaucugcaagaugccccuucccaccaagcugaaggcagcagcacagcccagcgcacccucaacugaggcagcccagaacacagcaccuccaccguaugccccauga

SEQ ID NO: 11414 - RNA, 300 nt, Artificial Sequence
  derived and/or modified CDS sequence (wt) from LASV(Lassa virus/H.sapiens-wt/NGA/2018/ISTH_1375;Clade II)__AVV65078__Z
augggcaacagacaugccaaaucgacaaaaaucaaugaacaucaaagagcucaucuagugccagaugcaucccaucuaggcccccaguucugcaagaguugcugguuugagaacagaggguugguagagugcaacaaucacuaucugugucucaacugucucagccugcuccucagugucagcagcagaugcccgaucugcaagaugccccuucccaccaagcuaaaggcagcagcacagccaagugcaccaucgaccgaggcaauccagaacacaacaccuccaccauacaccccauaa

SEQ ID NO: 11415 - RNA, 300 nt, Artificial Sequence
  derived and/or modified CDS sequence (wt) from LASV(LASV003-NIG-2008;Clade II)__AIT17578__Z
augggcaacagacaggcuaaaucaacaaaagucgaugaacaucaaagagcucaucuagugccagaugcaucccaucuaggcccccaguuuugcaaaaguugcugguuugagaacaagggguugguggagugcaacaaccacuaccugugucucaacugucucagccugcuccucagcgucagcaguagaugcccgaucugcaagaugccccuucccaccaagcugagggcagcagcacagccgagcgcacccucaacugagucggcucagaacacagcaccuccaccguaugccccauga

SEQ ID NO: 11416 - RNA, 300 nt, Artificial Sequence
  derived and/or modified CDS sequence (wt) from LASV(LASV035-NIG-2009;Clade II)__AIT17586__Z
augggcaacaaacaggccaaaucgacaaaagucgaugaacaucaaagagcucaucuagugccagaugcaucucaucuaggcccccaguucuguaagagcugcugguuugagaacagagggcugguagagugcaacaaccacuaccugugucucaacugucucagccugcuucucagcgucagcagcagguguccgaucugcaaaaugccccuucccaccaggcugaaggcagcagcacagccgagcgcacccucaaccgaggugacccagaacacaacaccuccaccguacaccccguga

SEQ ID NO: 11417 - RNA, 300 nt, Artificial Sequence
  derived and/or modified CDS sequence (wt) from LASV(LASV042-NIG-2009;Clade II)__AIT17590__Z
augggcaacagacaggccaaaucgacaaagguugaugaacaucaaagagcucaucuagugccagaugcaucccaucuaggcccccaguucugcaagaguugcugguuugagaacaaaggguugguagagugcaauaaucauuaccugugucucaacugucucagcuugcuucucagcgucagcagcagaugcccgaucugcaagaugccucuucccaccaagcuagaggcaacgacacagccgagcgcaccaucaaccgaggagacccagagcacaacaccuccaccguacaccccguga

SEQ ID NO: 11418 - RNA, 300 nt, Artificial Sequence
  derived and/or modified CDS sequence (wt) from LASV(LASV049-NIG-2009;Clade II)__AIT17602__Z
augggcaacaaacaggccaaaucaacaaaggucgaugaauaucaaagagcucaucuagugccagaugcaucccaucuaggcccccaguucuguaagagcugcugguuugaaaacagaggguugguagagugcaacaaccacuaccugugucucaacugucucagccugcuccucagugucagcaacagaugcccgaucugcaagaugccccuucccaccaggcuaaaagcagcagcacagccgagcgcacccccaaccgaggcgacccagaacacaacacccccaccguacaccccauga

SEQ ID NO: 11419 - RNA, 300 nt, Artificial Sequence
  derived and/or modified CDS sequence (wt) from LASV(LASV056-NIG-2008;Clade II)__AIT17610__Z
augggcaacagacaggccaaaccaacaaaaguugaugaacaucaaagagcucaacuagugccagaugcaucccaucuaggcccccaguucugcaagaguugcugguuugagaacagaggguugguagagugcaacaaucacuaccugugucucaacugucucagccugcuccucagcgucagcagcagaugcccgaucugcaagaugccccuucccaccaagcuaaaggcggcaacacagccgagcgcaccaucaaccgaggcgacccagaacucaacaccuccaccguacaccccauga

SEQ ID NO: 11420 - RNA, 300 nt, Artificial Sequence
  derived and/or modified CDS sequence (wt) from LASV(LASV058-NIG-2008;Clade II)__AIT17614__Z
augggcaacagacaagccaaaucgacaaaaguugaugaacaucaaagagcucaucuagugccagaugcaucccaucuaggcccccaguucugcaagagcugcugguuugagaacagaggguugguggagugcaauaaucacuaucugugucucaacugucucagccugcuccucagcgucagcagcagaugcccgaucugcaagaugccccuucccaccaagcuaaaggcagcaacacagccgagcgcaccaucaacugaggcgacccagaacacaacacccccaccguacaccccauga

SEQ ID NO: 11421 - RNA, 300 nt, Artificial Sequence
  derived and/or modified CDS sequence (wt) from LASV(LASV063-NIG-2009;Clade II)__AIT17618__Z
augggcaacagacaggccaaaucgacagaagucgaugaacaucaaagagcucaucuagugccagaugcaucucaucuaggcccccaguucugcaagaguugcugguuugagaacagaggguugguagagugcaacaaucacuaccugugucucaacugucucagccugcuccucagcgucagcaacagaugcccgaucugcaagaugccucuccccaccaagcuaaaggcagcaacacagccgagcgcaccaucaaccgaggcgacccagaacacaacacccccaccauacaccccauga

SEQ ID NO: 11422 - RNA, 300 nt, Artificial Sequence
  derived and/or modified CDS sequence (wt) from LASV(LASV1000-NIG-2009;Clade II)__AIT17780__Z
augggcaacagacagaccaaaucgacaaaagucgaugaacaucaaagagcuuaucuagugccagaugcaucccuucuaggcccccaguucugcaagaguugcugguuugagaacaaaggguugguagaaugcaacaaucacuaccugugucuuaacugucucagccugcuccucagcgucagcagcagaugcccgaucugcaagaugccucuucccaccaggcuaaaggcagcagcacagccgagugcaccaccaacugaggcgauccagaacacaacaccuccaccguacaccccauaa

SEQ ID NO: 11423 - RNA, 300 nt, Artificial Sequence
  derived and/or modified CDS sequence (wt) from LASV(LASV1008-NIG-2009;Clade II)__AIT17784__Z
augggcaacagacagaccaaaccaacaaaagucgaugagcaucaaagagcucaucuagugccagaugcaucccaucuaggcccccaguuuugcaaaaguugcugguuugagaacaagggguugguggagugcaacaaccacuaccugugccucaacugucucagccuacuccucagcguuagcagcagaugcccgaucugcaagaugccccuucccaccaagcugaaggcaacagcacagccgagcgcacccucaacugaggcggcccagaacacagcaccuccaccguaugccccauga

SEQ ID NO: 11424 - RNA, 300 nt, Artificial Sequence
  derived and/or modified CDS sequence (wt) from LASV(LASV1011-NIG-2009;Clade II)__AIT17788__Z
augggcaacagacaggucaaaucgacaaaagucgaugaacaucaaagagcucaucuagugccagaugcaucccauuuaggcccccaguucugcaagaguugcugguuugagaacagaggguugguagagugcaauaaucacuaccugugucucaacugucucagccugcuccucagugucagcagcaggugcccgaucugcaagaugccccuccccaccaagcuaaaagcagcaacacagccaagcgcaccaccaaccgaggcgacccagaaaaccacaccuccaccguauaccccauaa

SEQ ID NO: 11425 - RNA, 300 nt, Artificial Sequence
  derived and/or modified CDS sequence (wt) from LASV(LASV1015-NIG-2009;Clade II)__AIT17792__Z
augggcaacaaacaggcaaaaucgacaaaggucgaugaacaucaaagagcucaucuagugccagaugcaucucaucuaggcccccaguucugcaagaguugcugguuugagaacagagggcugguugagugcaacaaccacuacuugugccucaacugucucagccugcuucucagugucagcggcagguguccgaucugcaaaaugccccuucccaccaagcuaaaagcaacagcacaaccgagugcacccucaaccgaggcgacccagaacacgacaccuccaccguacaccccguga

SEQ ID NO: 11426 - RNA, 300 nt, Artificial Sequence
  derived and/or modified CDS sequence (wt) from LASV(LASV1016-NIG-2009;Clade II)__AIT17796__Z
augggcaacaaacaggccaaaucgacaaaagucgaugaacaucaaagagcucaucuagugccagaugcaucccaucuaggcccccaguucugcaagaguugcugguuugagaacagaggguugguagaguguaacaaucacuaccugugucucaacugucuuagccugcuccucagcgucagcagcagaugcccgaucugcaagaugccccuucccaccaagcuaaaggcagcagcacagccgagcgcaccaucaacugaggcgauccagaacacaacaccuccaccuuacaccccauaa

SEQ ID NO: 11427 - RNA, 300 nt, Artificial Sequence
  derived and/or modified CDS sequence (wt) from LASV(LASV221-NIG-2010;Clade II)__AIT17622__Z
augggcaacagacaggccaaaucgacaaaagucgaugaacaucaaagagcucaucuagugccagaugcaucccaucucggcccucaauucugcaagaguugcugguuugagaacagagggcugguagagugcaacaaucacuaccugugucucaacugucucagccugcuccucagcgucagcagcagaugcccgaucugcaagaugccccuucccaccaagcuaaaagcagcaacacagccgagcgcaccaucaaccgaagugacccagaacacaauaccuccaccauacuccccauga

SEQ ID NO: 11428 - RNA, 300 nt, Artificial Sequence
  derived and/or modified CDS sequence (wt) from LASV(LASV225-NIG-2010;Clade II)__AIT17628__Z
augggcaacaagcaggccaaaucgacaaaaaucgaugaacaucaaagagcucaucuagugccagaugcaucucaucuaggcccccaguucuguaagaguugcugguuugagaacagagggcugguagagugcaacaaccacuaccugugucucaacugucucagccugcuucucagcgucagcagcagguguccgaucugcaaaaugccucuucccaccaggcugaaggcagcaacacagccgagcgcacccucaaccgaggcgacccagaacacaacaccuccaccauacaccccguga

SEQ ID NO: 11429 - RNA, 300 nt, Artificial Sequence
  derived and/or modified CDS sequence (wt) from LASV(LASV229-NIG-2010;Clade II)__AIT17632__Z
augggcaauagacaggccaaaucgacaaaagucgaugaacaucaaagagcucauuuagugccagaugcaucccaucuaggcccucaguucugcaagaguugcugguuugagaacaaaggguugguagagugcaacaaucacuaccugugucucaauugucucagccugcuccucagcgucagcaguaggugcccgaucugcaagaugccccuucccaccaagcugagggcaacagcacagccgagcgcaccaucaaccgaggcgauccagaacacaacaccuccaccguacaccccguga

SEQ ID NO: 11430 - RNA, 300 nt, Artificial Sequence
  derived and/or modified CDS sequence (wt) from LASV(LASV237-NIG-2010;Clade II)__AIT17636__Z
augggcaacagacaggcuaaaucgacaaaagucgaugaacaucaaagagcucaucuagugccagaugcaucccaucuaggcccccaguucugcaagaguuguugguuugagaacagaggguugguagaguguaacaaucacuaccugugucucaacugucucagccugcuucucagcgucagcaguagaugcccgaucugcaagaugccccuucccaccaagcuaaaggcagcagcacagccgagcgcaccaucaaucgagacgauccagaacacaacaccuccuccguacaccccauaa

SEQ ID NO: 11431 - RNA, 300 nt, Artificial Sequence
  derived and/or modified CDS sequence (wt) from LASV(LASV239-NIG-2010;Clade II)__AIT17640__Z
augggcaacagacaggccaaaucgacaaaagucggugaacaucaaagagcucaucuagugccagaugcaucccaucuaggcccccaguucuguaagaguugcugguuugagaacagaggguugguagaguguaacaaccacuaccugugucucaacugucucagccugcuccucagugucagcagcagaugcccgaucugcaagaugccccuucccaccaagcuaaaggcagcagcacagccaagcgcacccucaacugaggcgacccaggacacaacaccuccaccguacaccccauaa

SEQ ID NO: 11432 - RNA, 300 nt, Artificial Sequence
  derived and/or modified CDS sequence (wt) from LASV(LASV242-NIG-2010;Clade II)__AIT17648__Z
augggcaacagacaggccaaaucaacaaaagucgaugaacaucaaagagcucaucuagugccagaugcaucccaucuaggcccccaguuuugcaaaaguugcugguuugagaacaagggguugguagagugcaacaaccacuaccugugucucaacugccucagccugcuccuuagcguuagcagcagaugcccgauuuguaagaugccccuucccaccaagcuaaaggcaacaguacagccaagugcacccucgacugaggcggcccagagcacagcaccuccaccguaugccccauga

SEQ ID NO: 11433 - RNA, 300 nt, Artificial Sequence
  derived and/or modified CDS sequence (wt) from LASV(LASV245-NIG-2011;Clade II)__AIT17652__Z
auggguaacagacaggccaaaucgacaaaagucggugaacaucaaagagcucaucuagugccagaugcaucccaucuaggcccccaguucugcaagaguugcugguuugagaacagaggguugguagagugcaacaaucacuaccugugucucaacugucucagccugcuccucagugucagcagcaggugcccgaucugcaagaugccccuccccaccaagcuaaaggcagcagcacagccaagcgcaccaucagccgaggcaauccagaaaacaacaccuccaccguacaccccauaa

SEQ ID NO: 11434 - RNA, 300 nt, Artificial Sequence
  derived and/or modified CDS sequence (wt) from LASV(LASV246-NIG-2010;Clade II)__AIT17656__Z
augggcaacagacaggccaaaucgacaaaagucgaugaucaucaaagagcucaucuagugccagaugcaucccauuuaggcccccaguucugcaagaguuguugguuugagaacaggggguugguagaguguaacaaccacuaccugugucucaacugucucagucugcuccucagcgucagcagcagaugcccgaucugcaagaugccccuucccaccaagcuaaaggcagcagcacagccgagcgcacccucaaccgaggcggcccaggacacaacaccuccaccguacaccccauga

SEQ ID NO: 11435 - RNA, 300 nt, Artificial Sequence
  derived and/or modified CDS sequence (wt) from LASV(LASV250-NIG-2011;Clade II)__AIT17660__Z
augggcaacagacaggccaaaucgacaaaagucgaugaacaucaaagagcucaucuagugccagaugcaucccaucuaggcccccaguucugcaagaguugcugguuugagaacagaggguugguggagugcaacaaucacuaccugugucucaacugucucagccugcuccucagcgucaguaacaggugcccgaucugcaagaugccccuucccaccaagcuaaaggcagcagcacagccaagugcaccaucaaccgaggcgauccagaacacaacaccuccaccguacgcuccauaa

SEQ ID NO: 11436 - RNA, 300 nt, Artificial Sequence
  derived and/or modified CDS sequence (wt) from LASV(LASV251-NIG-2010;Clade II)__AIT17664__Z
augggcaacaaacaggccaaaucaacaaaagucgaugagcaucaaagagcucaucuagugccagaugcaucccauuugggcccccaauuuugcaaaaguugcugguuugagaacaaaggguugguggagugcaacaaucauuaccugugucucaacugucucagucugcuccucagcgucagcagcagaugcccgaucugcaagaugccccuucccaccaagcugaaggcagcugcacagccgagcgcacccucaaccgaggcggcccaaaacacagcaccuccaccguaugccccauga

SEQ ID NO: 11437 - RNA, 300 nt, Artificial Sequence
  derived and/or modified CDS sequence (wt) from LASV(LASV253-NIG-2011;Clade II)__AIT17668__Z
auggguaacagacaggccaaaucaacaaaagucgaugaacaucaaagagcucaucuagugccagaugcaucccaucuaggcccccaguuuugcaaaaguugcugguuugagaacaagggguugguugagugcaacaaccacuaccugugucucaacugucucagccugcuccuuagcguuagcagcagaugcccgauuugcaagaugccccuccccaccaagcuaaagacaacagcacagccaagugcacccccgacugaggcggccaagaacacagcaccuccaccguaugccccauga

SEQ ID NO: 11438 - RNA, 300 nt, Artificial Sequence
  derived and/or modified CDS sequence (wt) from LASV(LASV256-NIG-2010;Clade II)__AIT17676__Z
augggcaacagacaggccaaaucgacaaaagucgacgaacaucaaagagcacaucuagugccagaugcaucccaucuaggcccccaguucugcaagaguugcugguuugagaacagaggguuaguagagugcaacaaucauuaccugugucucaauugucucagccugcuucucagcgucagcagcagauguccaaucuguaagaugccccuucccaccaagcuaaaggcagcaacacagccgagugcaccaucaaccgaggugacccagaacacaacaccuccaccguacaccccauga

SEQ ID NO: 11439 - RNA, 300 nt, Artificial Sequence
  derived and/or modified CDS sequence (wt) from LASV(LASV263-NIG-2011;Clade II)__AIT17680__Z
auggguaacagacaggcuaaaucgacaaaaaucgaugaacaucaaagagcucaucuagugccagaugcaucccaucuaggcccccaguucugcaagaguugcugguuugagaacagaggguugguagagugcaacaaucacuaccugugucucaacugucucagccugcuccucagcgucagcagcagaugcccgaucugcaagaugccccuucccaccaagcuaaaggcagcagcacagccgagcgcaccaucaacagaggcgauccagaauacaacacccccaccguacaccccguaa

SEQ ID NO: 11440 - RNA, 300 nt, Artificial Sequence
  derived and/or modified CDS sequence (wt) from LASV(LASV267-NIG-2010;Clade II)__AIT17684__Z
augggcaacagacaggccaaaucggcaaaagucgaugaacaucaaagagcucaucuagugccagaugcaucccaucuaggcccccaguucugcaagaguugcugguucgagaacaagggguuaguagagugcaacaaucacuaccugugucucaauugucucagccuacuccucagcgucagcugcagaugcccgaucugcaagaugccccuucccaccaagcuaaaggcagcaacacagccaagcgcgccaucaaccgaggcgacccagaacacaacaccuccaccguacaccccauga

SEQ ID NO: 11441 - RNA, 300 nt, Artificial Sequence
  derived and/or modified CDS sequence (wt) from LASV(LASV274-NIG-2010;Clade II)__AIT17692__Z
augggcaacagacaugccaaaccgacaaaagucgaugaacaucaaagagcucaucuagugccagaugcaucccaucuaggcccccaguucugcaagaguugcugguuugagaacagaggguugguggagugcaacaaucacuaccugugucucaacugucucagcuugcuccucagugucagcagcagaugcccgaucugcaagaugccccuucccaccaagcugaaggcagcagcacagccgagugcaccaucaaccgaggcgauccagaauacaacacccccaccauacaccccauga

SEQ ID NO: 11442 - RNA, 300 nt, Artificial Sequence
  derived and/or modified CDS sequence (wt) from LASV(LASV719-NIG-2009;Clade II)__AIT17702__Z
augggcaacagacaugccaaaucgacaaaagucgaugaacaucaaagagcucaucuggugccagaugcaucccaucuaggcccccaguucugcaagaguugcugguuugagaacagaggguugguagagugcaacaaucacuaccugugucucaacugucucagccugcuccucagugucagcagcagaugcccgaucugcaagaugccccuucccaccaagcuaaaggcagcagcacagccgagugcaccaucaaccgaggcguuccagaacacaacaccuccaccauacaccccauaa

SEQ ID NO: 11443 - RNA, 300 nt, Artificial Sequence
  derived and/or modified CDS sequence (wt) from LASV(LASV737-NIG-2009;Clade II)__AIT17708__Z
augggcaacagacaugccaaaucgacaaaagucgaugaacaucaaagagcucaucuggugccagaugcaucccaucuaggcccccaguucugcaagaguugcugguuugagaacagagggcugguagagugcaacaaucacuaccugugucucaacugucucagccugcuccucagugucagcagcagaugcccgaucugcaagaugccccuucccaccaagcuaaaggcagcaacacagccgagugcaccaucaaccgaggcgauccagaacacaacaccuccaccauacaccccauaa

SEQ ID NO: 11444 - RNA, 300 nt, Artificial Sequence
  derived and/or modified CDS sequence (wt) from LASV(LASV966-NIG-2009;Clade II)__AIT17716__Z
augggcaauagaccggcgaaaucgacaaaaguugaugaacaucaaagagcucaucuagugccagaugcaucccaucuaggcccccaguucugcaagaguugcugguuugaaaacagagggcuaguagagugcaacaaccacuaccugugucucaacugucucagccugcuccucagcgucaguagcagaugcccgaucugcaagaugccccuucccaccaagcuaaaggcagcagcacagccgagcgcacccucaaccgaggcgacccagaacacaacaccuccaccguacaccccauga

SEQ ID NO: 11445 - RNA, 300 nt, Artificial Sequence
  derived and/or modified CDS sequence (wt) from LASV(LASV967-NIG-2009;Clade II)__AIT17720__Z
auggguaacagacaggccaaaccgacaaaagucgaugaacaucaaagagcucaucuagugccagaugcaucccaucugggcccccaauucugcaagaguugcugguuugagaacagaggguugguagagugcaacaaucacuacuugugucucaacugucucagcuugcuccucagcgucagcagcagaugcccgaucugcaagaugccucuucccaccaggcuaaaagcagcagcacagccgagcgcaccaucaaccgaagagacccagaacacaacaccuccaccguacaccccauga

SEQ ID NO: 11446 - RNA, 300 nt, Artificial Sequence
  derived and/or modified CDS sequence (wt) from LASV(LASV975-NIG-2009;Clade II)__AIT17730__Z
augggcaacagacaggcuaaaucgacaaaaguugaugaacaucaaagagcucaucuagugccagaugcaucccaucuaggcccccaguucugcaagagcugcugguuugagaacagaggguugguagaaugcaacaaucacuaccugugucucaacugucucagccugcuccucagcgucaguagcagaugcccgaucugcaagaugccccuccccacuaagcuaaaggcagcagcacagccgagcgcaccauuaaccgaggcgauccaaaacacaacaccuccaccauacaccccguaa

SEQ ID NO: 11447 - RNA, 300 nt, Artificial Sequence
  derived and/or modified CDS sequence (wt) from LASV(LASV976-NIG-2009;Clade II)__AIT17734__Z
augggcaacagacaggccaaaucgacaaaagucgaugaacaucaaagagcucaucuagugccagaugcaucccaucuaggcccccaauucugcaagaguugcugguuugagaacagaggguugguagaguguaacaaucacuaccugugucucaacugucuuagccugcuccucagcgucagcagcagaugcccgaucugcaagaugccccuucccaccaagcuaaaggcagcagcacagccgagcgcaccaucaaccgaggcgauccagaacacaacaccuccaccuuacaccccauaa

SEQ ID NO: 11448 - RNA, 300 nt, Artificial Sequence
  derived and/or modified CDS sequence (wt) from LASV(LASV977-NIG-2009;Clade II)__AIT17738__Z
augggcaacagacaggccaaaucgacaaaagucgaugaacaucaaagagcucaucuagugccagaugcaucccaucucggcccucaauucugcaagaguugcugguuugagaacagaggguugguagagugcaacaaucacuaccugugucucaacugucucagccugcuccucagcgucagcagcagaugcccgaucugcaagaugccccuucccaccaagcuaaaggcagcaacacugccgagcgcaccaucaaccgaagugacccagaacacaacaccuccaccacacuccccauga

SEQ ID NO: 11449 - RNA, 300 nt, Artificial Sequence
  derived and/or modified CDS sequence (wt) from LASV(LASV981-NIG-2009;Clade II)__AIT17750__Z
auggguaauagacaggccaaaucggcaaaagucaaugaacaucaaagagcucaccuagugccagaugcaucccauuuaggcccccaguucugcaagaguugcugguucgagaacagaggguugguagagugcaacaaccacuaccugugucucaacugucucagucugcuccucagcgucagcagcaggugcccgaucuguaagaugccccuucccaccaagcuaaaggcagcaacacagccgagugcacccucaacugaagcgacccagaacacaacaccuccgccguacaccccauaa

SEQ ID NO: 11450 - RNA, 300 nt, Artificial Sequence
  derived and/or modified CDS sequence (wt) from LASV(LASV982-NIG-2009;Clade II)__AIT17754__Z
auggguaacagacaggccaaaucaacaaaagucgaugaacaucaaagagcucaucuagugccagaugcaucccaucuaggcccccaguuuugcaaaaguugcugguuugagaacaagggguugguagagugcaacaaccacuaccugugucucaacugucucagccugcuccuuagcgucagcagcagaugcccgauuugcaagaugccccuucccaccaagcuaaaggcaucagcacagccaagugcacccucaacugaggcggcccagaacacagcaccuccaccguaugccccauga

SEQ ID NO: 11451 - RNA, 300 nt, Artificial Sequence
  derived and/or modified CDS sequence (wt) from LASV(LASV989-NIG-2009;Clade II)__AIT17760__Z
augggcaacagacaggccaaaucaacaagaacugaugaacaucaaagagcucaucuaguaccagaugcaucccaucuaggcccucaguucugcaaaaguugcugguuugagaacaagggguuaguagaaugcaacaaccacuaccugugucucaacugucucagccugcuccucuccgucagcagcagaugcccgaucugcaagaugccucuucccaccaaauuaaaggcagcagcacaaccgagcgcacccucaacugaggcgggccagaacacagcaccuccaccguacgccccauga

SEQ ID NO: 11452 - RNA, 300 nt, Artificial Sequence
  derived and/or modified CDS sequence (wt) from LASV(LASV991-NIG-2009;Clade II)__AIT17768__Z
augggcaacagacaggccaaaucagcaacagucgaugaaugucaaagagcucaucuaguaccagaugcauccuaucugggcccccaauucugcaagaguugcugguuugagaacaaagggcugguagagugcaacaaucacuaucugugucucaacugucucagccugcuccucagcgucagcagcagaugccccaucugcaagaugccucuucccaccaagcugaaggcagcagcacagccgagcgcaccaucaaccagggcgacccagaacacaacaccuccaccguauaccccauaa

SEQ ID NO: 11453 - RNA, 300 nt, Artificial Sequence
  derived and/or modified CDS sequence (wt) from LASV(LASV993-NIG-2009;Clade II)__AIT17776__Z
augggcaacaaacaagccaaaucaacaaaagucgaugagcaucaaagagcucaucuagugccagaugcaucccaucuaggcccccaguuuugcaaaagcugcugguuugagaacaagggguugguagaguguaacaaccacuaccugugccucaacugucucagccugcuccucagcgucagcagcagaugcccgaucugcaagaugccccuucccaccaggcuaaaggcagcagcacagccgagcgcacccucaacugaggcgacccagaacgcagcaccuccaccguaugccccauga

SEQ ID NO: 11454 - RNA, 300 nt, Artificial Sequence
  derived and/or modified CDS sequence (wt) from LASV(Nig08-A41;Clade II)__ADU56628__Z
augggcaacagacaggcuaaaucgacaaaagucgaugaacaucaaagagcucaucuagugccagaugcaucccaucugggcccccaauucugcaagaguugcugguuugagaacagaggauugguagagugcaacaaucacuaccugugucucaacugucucagccugcuccucagcgucagcagcagaugcccgaucugcaagaugccccuucccaccaagcuaaaggcagcagcacagccaagcgcaccaucaaccgaggcgauccagaacacaacaccuccaccguaugccccauaa

SEQ ID NO: 11455 - RNA, 300 nt, Artificial Sequence
  derived and/or modified CDS sequence (wt) from LASV(CSF;Clade III)__AAO59514__Z
augggcaacaaacaagucagauccaugaagaaaguagacagcccaagggccaguuugauuccugaugcuucccacuuggguccucaauuuugcaaaagcugcugguuugaaaacagaggccugguugaaugcaacaaccauuaccucugccucaauugccucucauugcuccugagugucagcagcaggugucccauuugcaagaugccccuacccacaaagcucaagacauccaccacuccaacugcucccuccaucagagaggccaacaccacaagucccccaccauauagucccuaa

SEQ ID NO: 11456 - RNA, 300 nt, Artificial Sequence
  derived and/or modified CDS sequence (wt) from LASV(Nig08-A18;Clade III)__ADU56616__Z
auggguggcaaacacaccaaacaaccaagagaauccaacagucccagagcuuccuuaauuccugaugcaacacacuugggcccucaauucugcaagaguuguugguuugagaacaaaggucugguagagugcaacaaccauuaccugugccucaacugccuuucucuacuccugucugucagcaacagaugccccaucugcaagaugccccucccuacgaggcucagaacaucaaccaauccaacagcaccccaggucgaacagaccggucccgcaaguccuccaccauauagucccuag

SEQ ID NO: 11457 - RNA, 300 nt, Artificial Sequence
  derived and/or modified CDS sequence (wt) from LASV(ONM-299;Clade III)__ANH09755__Z
augggcaacaaacaaaccaagaccaucaaaaagacagacagcccaagagcuagucugaucccugaugccucccacaugggaccccaguucugcaagaguuguugguuugaaaauagaggucuaguugagugcaacaaucacuaccuaugucucaauugccucucauuacuccugagcgucagcaacaggugucccaucugcaagaugccccuacccacaaaacucagggcaucccccagcccaacugcccccuccaucagagaggccaacaucacaaaucccccaccauauagccccuaa

SEQ ID NO: 11458 - RNA, 300 nt, Artificial Sequence
  derived and/or modified CDS sequence (wt) from LASV(ONM-700;Clade III)__ANH09759__Z
augggcaacaaacaaaccaagaccaccaaaaagacagacagcccgagagcuagucugaucccugaugccucccacaugggaccccaguucugcaagaguuguugguuugaaaauagaggucuaguugagugcaacaaucacuaccuaugucucaauugccucucauuacuccugagcgucagcaacaggugucccaucugcaagaugccccuacccacaaaacucagggcaucccccagcccaacugcccccuccaucagagaggccaacaucacaaaucccccaccauauagccccuaa

SEQ ID NO: 11459 - RNA, 300 nt, Artificial Sequence
  derived and/or modified CDS sequence (wt) from LASV(BA366;Clade IV)__ADU56644__Z
augggcaacaggcagaccaaagcuccagaagcaaagggcagcccaagagccagucugaucccagacgccacacaccuagggccacaauucugcaaaagcuguugguuugaaaacaagggccuaguugaaugcaaugaccauuacuugugucucaacugucucacccuacuuuuaagcgucagcagcagauguccuaucugcaaaaugccccuccccacaagacugaggccaucaaccaacccaacggcgcccccagccagagcagagggcggcaucaauccuccaccauacagccccuga

SEQ ID NO: 11460 - RNA, 300 nt, Artificial Sequence
  derived and/or modified CDS sequence (wt) from LASV(G1180-SLE-2010;Clade IV)__AIT17166__Z
augggaaacaagcaagccaaagccccggaagcaaaagacaguccgagagccagccugaucccagaugccacacaccuagggccacaguuuugcaagagcugcugguucgaaaccaagggccugguugagugcaacaaccacuaucuaugucucaauugccucacuuuacuucuaagugucagcaauaggugccccauuugcaagaugccccuucccacaaaacugagaccgucagccacuccaacggcacccccaaccgaagcugcggacagcaucggacccccacccuacagucccuga

SEQ ID NO: 11461 - RNA, 300 nt, Artificial Sequence
  derived and/or modified CDS sequence (wt) from LASV(G1190-SLE-2010;Clade IV)__AIT17170__Z
augggaaacaaacaagccaaggucccagaaucaaaagacagcccgagagccagccuaaucccagaugccacacaucuagggccgcaauucuguaagaguugcugguucgaaaacaaaggccugguugagugcaacaaccacuaucugugucucaacugccucaccuuacuuuuaagugucagcaacaggugccccauuugcaagaugccucuccccacaaaacugagaccaucagccgcuccaacagcacccccagcuggagcagcggacagcaucagacccccaccuuacagucccuga

SEQ ID NO: 11462 - RNA, 300 nt, Artificial Sequence
  derived and/or modified CDS sequence (wt) from LASV(G1200-LIB-2010;Clade IV)__AIT17174__Z
auggggaacaagcaaaccaaagcucccgaagccaaaggcagcccgagggccagucugaucccagacgccacacaccuggggccacaguucugcaagagcugcugguucgaaaacaagggcuugguugagugcaacaaccauuauuugugucucaacugccucacucugcuucugagugucagcagcaggugucccauuugcaagaugccccucccaacaaaacuaagaccaucagccgucccaacagcgcccccaaccaaagcagaagacaacaccagacccccacccuauagucccuga

SEQ ID NO: 11463 - RNA, 300 nt, Artificial Sequence
  derived and/or modified CDS sequence (wt) from LASV(G1442-SLE-2011;Clade IV)__AIT17178__Z
auggggaacaagcaagccaaagcuucagaagcaaaagacagcccgagggcuagucugauuccagaugccacacaccuaggaccacaguucuguaagagcuguugguuugagaacaagggccugguugaaugcaacaaucacuaucugugucucaacugccucagucugcuucugagugucagcagcaggugccccaucugcaaaaugccccucccgacaagacugaggccaucaacagccccaacagcacccccagccagagcaggggauaacaucaaacccccacccuacagucccuga

SEQ ID NO: 11464 - RNA, 300 nt, Artificial Sequence
  derived and/or modified CDS sequence (wt) from LASV(G1529-SLE-2011;Clade IV)__AIT17182__Z
auggggaacaagcaagccaaagucccagaaguaagggacagcccgagagccagucugaucccagaugccacacaccuagggccacaguucuguaagagcuguugguucgaaaacaaaggccuggucgagugcaacaaucacuaucuaugccucaacugccuuacucuacuucuaaguguuagcaguaggugucccaucugcaagaugccccuccccacaaaacugagaccaucagccaccccaacugcacccccagccggagcaggagauggcaccagacccccacccuacagucccuaa

SEQ ID NO: 11465 - RNA, 300 nt, Artificial Sequence
  derived and/or modified CDS sequence (wt) from LASV(G1618-SLE-2011;Clade IV)__AIT17186__Z
augggaaauaagcaagccaaaaccccagaaacaaaagacaguccgagagccagccugaucccagaugcuacacaccuagggccacaguuuuguaagagcugcugguucgaaaacaagggucugguugagugcaauaaccacuaucugugccucaauugucucacccuacuucuaagugucaguaacaggugucccauuugcaagaugccucuccccacaaaacugagaccaucaguagccccaacagcacccccagccggagcagcggacaacaccagacccccacccuacagucccuga

SEQ ID NO: 11466 - RNA, 300 nt, Artificial Sequence
  derived and/or modified CDS sequence (wt) from LASV(G1647-SLE-2011;Clade IV)__AIT17194__Z
augggaaacaagcaagccaaagccccagaaccaaaggacagcccgagagccagccugauuccagaugccacacaucuagggccgcaguucuguaagagcuguugguucgaaaacaagggccuaguugagugcaacaaccacuauuugugucucaacugccucacccuacucuugagugucagcaacaggugccccauuugcaagaugccccuccccacgaaacugagaccaucaguugcuccaacggcacccccagccggaguaguggacagcaccagacccccacccuacagucccuaa

SEQ ID NO: 11467 - RNA, 300 nt, Artificial Sequence
  derived and/or modified CDS sequence (wt) from LASV(G1727-SLE-2011;Clade IV)__AIT17198__Z
augggaaacaaacaagccaaggucccagaaucaaaagacagcccgagagccagccuaaucccagaugccacacaucuagggccgcaauucuguaagaguugcugguucgaaaacaggggccugguugagugcaacaaccacuaucugugucucaacugccucaccuuacuuuuaagugucaguaacaggugccccauuugcaagaugccucuccccacaaaacugagaccaucaaccgcuccaacagcacccccaacuggagcagcagacagcaccagacccccaccuuacagucccuga

SEQ ID NO: 11468 - RNA, 300 nt, Artificial Sequence
  derived and/or modified CDS sequence (wt) from LASV(G1774-SLE-2011;Clade IV)__AIT17202__Z
augggaaacaagcaagccaaaaccccagaaucaaaggacaguccgagagccagccugaucccagaugccacacaucuagggccgcaguucuguaagagcugcugguucgaaaacaagggccugguugagugcaacaaccacuaucugugucucaacugccucaccuuacuucuaagugucagcaauaggugccccauuugcaagaugccucuccccacaagacugagaccaucagccgcuccaacagcacccccauccggagcggcggacagcaccagaccuccacccuacagucccuga

SEQ ID NO: 11469 - RNA, 300 nt, Artificial Sequence
  derived and/or modified CDS sequence (wt) from LASV(G1792-SLE-2011;Clade IV)__AIT17206__Z
augggaaacaagcaagccaaagccccagaagcaaaagacagcccgagagccagccugaucccagaugccacacaucuagggccacaguucugcaaaagcugcugguucgaaaacaagggccugguugagugcaacaaccacuaucugugccucaacugccucaccuuacuucuaagugucagcuacaggugccccauuugcaagaugccucuucccacaaaacugagaccaucagccacuccaacagcacccccaaccgaagcagcagacagcaucagacccccacccuaccgccccuaa

SEQ ID NO: 11470 - RNA, 300 nt, Artificial Sequence
  derived and/or modified CDS sequence (wt) from LASV(G1959-SLE-2011;Clade IV)__AIT17214__Z
augggaaacaagcaggccaaagccccagaaguaaaagacaguccgagagccagccugaucccagaugccacacaucuagggccacaguucuguaagagcugcugguuugaaaacaagggucugguugagugcaauaaccacuaucugugucucaacugccuuacccuacuucuaagugucagcaauaggugccccauuuguaagaugccucuucccacaaaacugagaccaucagcugcuccaacagcaccuccaaccggaacagcggacagcaucagacccccacccuacagucccuaa

SEQ ID NO: 11471 - RNA, 300 nt, Artificial Sequence
  derived and/or modified CDS sequence (wt) from LASV(G2141-SLE-2011;Clade IV)__AIT17222__Z
auggggaacaagcaagccaaaacuccagaaacaaaagacagcccgagggccagucugaucccagaugccacacaucuagggccacaauucugcaagagcugcugguucgaaaacaagggucugguugagugcaacagucacuaucugugccucaacugccucacccuacuucuaagugucaguaguaggugucccaucugcaagaugccccuccccacaaggcugaggccaucaaccgcuccaacagcaccuccagccggagugggggacagcaccagccccccacccuacagccccuga

SEQ ID NO: 11472 - RNA, 300 nt, Artificial Sequence
  derived and/or modified CDS sequence (wt) from LASV(G2147-SLE-2011;Clade IV)__AIT17226__Z
augggaaacaagcaagccaaaaccccggaagcaaaagacaguccaagagccagccugaucccagaugccacacaccuagggccacaguucugcaagagcugcugguucgaaaacaagggccugguugagugcaacaaccacuaucugugucucaacugccucaccuuacuccuaagugucagcaacaggugccccauuugcaagaugccccuucccacaaaacugagaccgucagccacuccaacagcacccccagccggagcagcggacagcaucggaccaccacccuacagucccuga

SEQ ID NO: 11473 - RNA, 297 nt, Artificial Sequence
  derived and/or modified CDS sequence (wt) from LASV(G2165-SLE-2011;Clade IV)__AIT17230__Z
augggaaacaagcaagccaaggccucagauaaaaacagcccgagagccagccugauuccagaugccacacaccuagggccacaauucugcaagagcugcugguucgaaaacaaaggccugguugagugcaacaaccacuaucugugucucaacugccucaccuuacuuuuaagugucagcaacaggugccccaucugcaagaugccucuucccacaaaacugagaccaucagccacuccaacagcacccccaaccggagcagcggacagcaucagacccccacccuacagucccuga

SEQ ID NO: 11474 - RNA, 300 nt, Artificial Sequence
  derived and/or modified CDS sequence (wt) from LASV(G2184-SLE-2011;Clade IV)__AIT17234__Z
augggaaacaagcaagcuaaagccucagaagaaaaaaacaguccgagagccagccugauuccagaugccacacaccuagggccacaauucugcaagagcugcugguucgaaaacaagggccugguugagugcaacaaccacuaucugugucucaacugccucaccuuacuuuuaagugucagcaacaggugccccaucugcaagaugccucuucccacaaaacugagaccaucagccacuccgacagcaccuccaaccggagcagcagacagcaucagacccccacccuacagucccuga

SEQ ID NO: 11475 - RNA, 300 nt, Artificial Sequence
  derived and/or modified CDS sequence (wt) from LASV(G2197-SLE-2011;Clade IV)__AIT17238__Z
augggaaacaagcaaaccaaagcuccagaagcaaaaggcagcccuagagccagccugaucccagaugccacacaucuagggccacaguucugcaaaagcugcugguucgaaaacaagggccugguugagugcaacaaccacuaucugugucucaacugccucacuuuacuucuaagugucagcaacaggugccccauuugcaaaaugccucuuccuacaaaacugagaccaucagccacuccaacagcaccuccaaccgaagcagcggacagcaucagacccccacccuaccgucccuga

SEQ ID NO: 11476 - RNA, 300 nt, Artificial Sequence
  derived and/or modified CDS sequence (wt) from LASV(G2222-SLE-2011;Clade IV)__AIT17242__Z
augggaaacaagcaagccaaagccccagaaucaaaggacaguccgagagccagccugaucccagaugccacacaucuagggccgcaguuuuguaagagcugcugguucgaaaacaagggccugguugagugcaacaaccacuauuugugucucaacugccucaccuuacuucuaagugucagcaauaggugccccauuugcaagaugccucuccccacaagacugagaccaucagccgccccaacagcacccccaaccggagcaacggacagcaccagaccuccacccuacagucccuga

SEQ ID NO: 11477 - RNA, 300 nt, Artificial Sequence
  derived and/or modified CDS sequence (wt) from LASV(G2259-SLE-2012;Clade IV)__AIT17248__Z
auggggaacaagcaagucaaagcuccugaagcaaggaauaguccgagggccagucugaucccagacgccacacaccuagggccacaguucugcaagagcugcugguucgagaacaagggccuggucgagugcaacaaucacuaccugugccucaacugucuaacccuacuccuaggugucagcagcaggugucccaucugcaagacgccccuccccacaagacugagaccaucagccaccccaacggcgcccccagccggagcaggagacaacaccagacccccacccuacagucccuga

SEQ ID NO: 11478 - RNA, 300 nt, Artificial Sequence
  derived and/or modified CDS sequence (wt) from LASV(G2263-SLE-2012;Clade IV)__AIT17252__Z
auggggaacaagcaagccaaagccccagaggcaaaagacaguccgagagccagccugaucccagaugccacacaucuagggccacaauucugcaagagcugcugguucgaaaacaaaggccuggucgaaugcaauaaccacuaucugugucucaacugucuuacccuacuucuaagugucagcaacaggugccccaucugcaaaaugccccuucccacaaaacugagaccaucaaccgcaccaacggcacccccagcuggagcagcagacagcaccaggcccccacccuacagucccuga

SEQ ID NO: 11479 - RNA, 300 nt, Artificial Sequence
  derived and/or modified CDS sequence (wt) from LASV(G2280-SLE-2012;Clade IV)__AIT17256__Z
augggaaacaagcaagccaaagccccagaaacaaaggacaguccgagagccagccugaucccagaugccacacaucuagggccgcaguucuguaagagcugcugguucgaaaacaagggccugguugagugcaauaaccacuaucugugccucaacugccucaccuuacuuuuaagugucagcaacaggugucccauuugcaagaugccucuccccacaaaacugagaccaucagcugcuccaacagcacccccagucggagcagcagacaacaccagacccccacccuacagucccuga

SEQ ID NO: 11480 - RNA, 300 nt, Artificial Sequence
  derived and/or modified CDS sequence (wt) from LASV(G2295-SLE-2012;Clade IV)__AIT17260__Z
augggaaacaagcaagccaaagccccagaauuaaaggacagcccgagagccagccugaucccagaugccacacaucuagggccgcaguucuguaagagcugcugguucgaaaacaagggccuaguugagugcaacaaccacuaucugugucucaacugccucaccuuacuccuaagcgucagcaacaggugccccauuugcaagaugccccuccccacaaaacugagaccaucagcugcuccaacagcacccccagccggagcgguggacagcaccagacccccacccuacagucccuga

SEQ ID NO: 11481 - RNA, 300 nt, Artificial Sequence
  derived and/or modified CDS sequence (wt) from LASV(G2315-SLE-2012;Clade IV)__AIT17264__Z
augggaaacaagcaaaccaaagccccagaaucaaaaaacaguccgagagccagucugaucccagaugccacauaucuaggaccacaguucugcaagagcugcugguuugaaaacaagggccugguugagugcaacaaccacuaucugugucucaacugccucaccuuacuucuaagugucagcaacaggugccccauuugcaagaugccucuccccacaaaacugagaucaucagccgcuccaacagcacccccaaccggagcagcggacagcaccaaacccccacccuacagccccuga

SEQ ID NO: 11482 - RNA, 300 nt, Artificial Sequence
  derived and/or modified CDS sequence (wt) from LASV(G2318-SLE-2012;Clade IV)__AIT17268__Z
augggaaacaagcaaaccaaagccccagaagugaaaggcaguccgagagccagccugauuccagaugcuacacaccuaggaccacaauucugcaagagcuguugguucgaaaacaagggacugguugaguguaacaaccacuaccugugucucaacugccucaccuuacuucuaagugucagcaacaggugccccauuugcaagaugccccuucccacaaaacugaaaccaucaaccacaccaacagcacccccaaccggagcagcggacagcaucagaccuccacccuacagucccuga

SEQ ID NO: 11483 - RNA, 300 nt, Artificial Sequence
  derived and/or modified CDS sequence (wt) from LASV(G2363-SLE-2012;Clade IV)__AIT17272__Z
augggaaacaagcaagucaagaccucagaggcaagggacagcccaagggccagucugauuccggacgcuacagaccuaggaccacaguucuguaagagcugcugguucgaaaacaagggucugguugaguguaacaaucacuacuuaugccuuaauugccucacucuacuucugaguguuagcaacaggugucccaucugcaagaugccccuucccacaagacuaaggccaucagccaacccaacagcacccccagccgaaacaggggacagcaccagaccuccacccuacagccccuga

SEQ ID NO: 11484 - RNA, 300 nt, Artificial Sequence
  derived and/or modified CDS sequence (wt) from LASV(G2392-SLE-2012;Clade IV)__AIT17278__Z
auggggagcaagcaaaccaaaaccccagaaguaaaagacaguccgagagcuagccugauuccagaugccacacaucuagggccacaguucuguaagagcugcugguucgagaacaagggccugguugagugcaacaaccauuaucugugccucaacugccucaccuuacuucuaagugucagcaacaggugccccaucugcaagaugccccuucccacaaaacugaggccaucagccgcuccaacggcacccccagccagagcagcggacgacaccaggcccccgcccuacagucccuga

SEQ ID NO: 11485 - RNA, 300 nt, Artificial Sequence
  derived and/or modified CDS sequence (wt) from LASV(G2405-SLE-2012;Clade IV)__AIT17282__Z
augggaaacaagcaagccaaggccccagaaccaaaggauaguccgagagccagccugaucccagaugcuacacaucuagggccacaguucuguaagagcugcugguucgaaaacaagggccugguugagugcaacaaccacuauuugugccucaacugccucaccuuacucuuaagugucagcaacaggugccccaucugcaagaugccucuccccacaaaacugagaccaucagccgcuccgacagcacccccagccggagcaguggacagcaucagaccuccacccuacagucccuga

SEQ ID NO: 11486 - RNA, 300 nt, Artificial Sequence
  derived and/or modified CDS sequence (wt) from LASV(G2427-SLE-2012;Clade IV)__AIT17286__Z
auggggaacaagcaaaccaaagccccagagguaaaggacaguccgagagcuagccuaaucccagaugccacacaucuagggccacaguucugcaagagcugcugguucgagaacaagggccugguugagugcaacaaccacuaucugugccucaauugucuuaccuuacuucuaagugucagcaacaggugccccaucugcaagaugccccuucccacaaaacugagaccaucaaccgcuccaacagcacccccagccggaacaauggacagcaccaggcccccgcccuacagucccuga

SEQ ID NO: 11487 - RNA, 300 nt, Artificial Sequence
  derived and/or modified CDS sequence (wt) from LASV(G2431-SLE-2012;Clade IV)__AIT17290__Z
auggggaacaagcaagccagggcuccagaagcgaaggacagcccgagggccagucugaucccagaugcuacacaccuagggccacaguucugcaagagcugcugguucgaaaauaaaggccuaguagagugcaacaaucacuauuugugccucaacugccucacccugcuucuaagcgucagcagcaggugccccaucugcaagaugccccuccccacaagacugagaccaucagccaucccaacggcacccccagccgggacgggagacagcagcagacccccacccuacagccccuga

SEQ ID NO: 11488 - RNA, 300 nt, Artificial Sequence
  derived and/or modified CDS sequence (wt) from LASV(G2554-SLE-2012;Clade IV)__AIT17296__Z
augggaaacaagcaagccaaaaccccagaaauaaaagacagcccgagagccagccuaaucccagaugcuacacaccuagggccacaguucuguaagagcugcugguucgaaaacaagggccuaguugagugcaacaaccacuaucugugccucaauugucuuacccuacuucuaagugucagcaacaggugucccauuugcaaaaugccucuccccacaaaacugagaccaucagccgccccgacggcacccccagccggagcagcagacaucaccagacccccacccuacagucccuga

SEQ ID NO: 11489 - RNA, 300 nt, Artificial Sequence
  derived and/or modified CDS sequence (wt) from LASV(G2557-SLE-2012;Clade IV)__AIT17300__Z
auggggaacaagcaagucaaagcuccagaagcaaggaacaguccgagggccagucugaucccagacgccacacaccuagggccacaguucugcaagagcugcugguucgagaacaagggccuggucgagugcaacaaucacuaccugugccucaacugucuaacccuacuccuaggugucagcagcaggugucccaucugcaagaugccccuccccacaagacugagaccaucaacugccccaacggcgcccccagccggagcaggagacaacaccagacccccacccuacagucccuga

SEQ ID NO: 11490 - RNA, 300 nt, Artificial Sequence
  derived and/or modified CDS sequence (wt) from LASV(G2612-SLE-2012;Clade IV)__AIT17312__Z
augggaaacaagcaagccaaaaccccagaaacaaaggacaguccaagagccagccugaucccagaugccacacaucuagggccgcaguucuguaagagcugcugguucgaaaacaagggccugguugagugcaacaaccacuaucugugucucaacugccucaccuuacuuuuaagugucagcaacaggugccccauuugcaagaugccucucccaacaaaacugagaccaucagcugcuccaacagcacccccagucggagcagcagacagcaccagacccccacccuacagucccuga

SEQ ID NO: 11491 - RNA, 300 nt, Artificial Sequence
  derived and/or modified CDS sequence (wt) from LASV(G2615-SLE-2012;Clade IV)__AIT17316__Z
auggggaacaaacaagccaaagcuccagaagcaaggaacaguccgagggccagucugaucccagacgccacacaccuggggccacaguucugcaagagcugcugguucgagaacaggggccuggucgagugcaacaaucacuaccugugucucaacugucuaacccuacuccuaagugucagcagcaggugucccaucugcaagaugccccuccccacaagacugaggccaucagccgccccaacggcgcccccagcuggagcaggagacaacaccagacccccacccuacagucccuga

SEQ ID NO: 11492 - RNA, 300 nt, Artificial Sequence
  derived and/or modified CDS sequence (wt) from LASV(G2723-SLE-2012;Clade IV)__AIT17320__Z
auggggaacaagcaagccaaagcuccugaagcaaggaacaguccgagggccagucugaucccagacgccacacaccuagggccacaguucugcaagagcugcugguucgagaacaagggccuggucgagugcaacaaucacuaccugugccuuaacugucuaacucuacuccuaggugucagcagcaggugucccaucugcaagaugccccucccaacaagacugagaccaucagccgccccgacggcgccccuggcugaagcaggagacaacaccagacccccacccuacagucccuga

SEQ ID NO: 11493 - RNA, 300 nt, Artificial Sequence
  derived and/or modified CDS sequence (wt) from LASV(G2868-SLE-2012;Clade IV)__AIT17326__Z
augggaaacaagcaauccaaagccccagaaucaagagacaguccaagagccagccugaucccggaugccacacaucuagggccacaguucugcaagagcugcugguucgaaaacaagggccugguugagugcaacaaccacuaucugugucucaacugccucaccuuacuucugagugucagcaacaggugccccauuugcaagaugccucuccccacaaagcugagaccaucagccacuccaacagcaccuccaacuagagcagcagacagcaucagacccccacccuacagucccuga

SEQ ID NO: 11494 - RNA, 300 nt, Artificial Sequence
  derived and/or modified CDS sequence (wt) from LASV(G2903-SLE-2012;Clade IV)__AIT17330__Z
augggaaacaagcaagccaaagcccuagaaucaaaaaacaguccgagagccagucugaucccagaugccacauaucuaggaccacaguucugcaagagcugcugguucgaaaacaagggccugguugagugcaacaaccacuaucugugucucaacugccucaccuugcuucuaagugucagcaacaggugccccauuugcaagaugccucucccuacaaaacugagaucaucagccgcuccaacagcacccccaaccggagcagcggacggcaccaaacccccacccuacagccccuga

SEQ ID NO: 11495 - RNA, 300 nt, Artificial Sequence
  derived and/or modified CDS sequence (wt) from LASV(G3010-SLE-2013;Clade IV)__AIT17342__Z
augggaaacaagcaggccaaagccucagaagcaaaagacaguccgagagccagccugaucccagaugccacacaucuggggccacaguucuguaagagcugcugguuugaaaacaagggucugguugagugcaacaaccacuaucugugucucaacugccuuacccuacuucuaagugucagcaauagaugccccauuugcaagaugccucuucccacaaaacugagaccaucaacugcuccaacagcaccucaaaccggagcagcggacagcaucagacccccacccuauagucccuga

SEQ ID NO: 11496 - RNA, 300 nt, Artificial Sequence
  derived and/or modified CDS sequence (wt) from LASV(G3016-SLE-2013;Clade IV)__AIT17346__Z
auggggaacaagcaagccaaagccccagaaacaaaggauaguccgagagccagccugaucccagaugccacacaucuagggccacaguucuguaagagcugcugguucgaaaacaagggccugguugagugcaacaaccacuaucugugucucaacugccucaccuugcuuuugaguguuagcaacaggugccccauuugcaagaugccucuccccacaaaacugagaccaucagcugcuccaacagcacccccagucggagcagcagacagcaccagacccccacccuacagucccuga

SEQ ID NO: 11497 - RNA, 300 nt, Artificial Sequence
  derived and/or modified CDS sequence (wt) from LASV(G3148-SLE-2013;Clade IV)__AIT17362__Z
augggaaacaaacaagccaaggccccagaaucaaaagacagcccaagggccagccuaaucccagaugcuacacaucuagggccgcaauucuguaagaguugcugguucgaaaacaagggccugguugagugcaacaaccacuaucugugucucaacugccucaccuuacuuuuaagugucagcaacaggugccccauuugcaagaugccucuccccacaaaacugagaccaucagccgcuccaacagcacccccagccggggcagcagacagcauccgacccccacccuacagucccuga

SEQ ID NO: 11498 - RNA, 300 nt, Artificial Sequence
  derived and/or modified CDS sequence (wt) from LASV(G3151-SLE-2013;Clade IV)__AIT17366__Z
auggggaauaagcaaaccaaaaccccagaaguaaaagacaguccgagagcuagccugauuccagaugccacacaucuagggccacaguucuguaagagcugcugguucgagaacaagggccugguugagugcaacaaccauuaucugugccucaacugccucaccuuacuucuaagugucagcaacaggugccccaucuguaagaugccucuucccacaaaacugagaccaucagccgcuccaacagcacccccagccagagcagcggacgacaccaggcccccgcccuacagccccuga

SEQ ID NO: 11499 - RNA, 300 nt, Artificial Sequence
  derived and/or modified CDS sequence (wt) from LASV(G3206-SLE-2013;Clade IV)__AIT17376__Z
augggaaacaagcaagccaaagccccagaaucaaaagacaguccgagagccagccugaucccagaugccacauaucuaggaccacaguucuguaaaagcugcugguucgaaaacaagggccugguugaguguaacaaccacuaucugugucucaacugccucaccuuacuucuaagugucagcaacaggugcccuauuugcaagaugccucuccccacaaaacugagaucaucggucgcuccaacagcaccuccaaccagagcagcagacagcaccagacccccacccuacagucccuga

SEQ ID NO: 11500 - RNA, 300 nt, Artificial Sequence
  derived and/or modified CDS sequence (wt) from LASV(G3229-SLE-2013;Clade IV)__AIT17382__Z
auggggaacaagcaaaccaaaaccucagaaguaaaagacaguccgagagcuagccuaauuccagaugccacacaucuagggccacaguucuguaagagcugcugguucgagaacaagggccuggucgagugcaacaaccauuaucugugccucaacugccucaccuuacuucuaagugucagcaacaggugccccaucugcaagaugccucuucccacaaaacugagaccaucagccgcuccaacagcacccccagccagagcagcggacgacaccaggcccccgcccuacagucccuga

SEQ ID NO: 11501 - RNA, 300 nt, Artificial Sequence
  derived and/or modified CDS sequence (wt) from LASV(G3234-SLE-2013;Clade IV)__AIT17386__Z
auggggaacaagcaagccaaaaccccagaagcaagggacagcccgagagccagucugaucccagaugcuacacaccuagggccacaguucuguaagagcuguugguucgaaaacaaaggccuggucgagugcaacaaucacuaucugugccucaacugccuuacuuuacuucuaaguguuaguaguaggugucccaucugcaagaugccccuccccacaaaacugagaccaucagccaccccaacugcacccccagccggagcaggagacggcaccagacccccacccuacagucccuga

SEQ ID NO: 11502 - RNA, 300 nt, Artificial Sequence
  derived and/or modified CDS sequence (wt) from LASV(G3278-SLE-2013;Clade IV)__AIT17396__Z
auggggaacaagcaagucaaagcuccugaagcaaggaacaguccgagggccagccugaucccagaugccacacaccuagggccacaguucugcaagagcugcugguucgagaacaagggccuggucgagugcaacaaucacuaccugugccucaacugucuaacccuacuccuaggugucagcagcaggugucccaucugcaagaugccccucccaacaagacugagaccaucagccgccccaacggcgcccccagccgaagcaggagacaacaccagacccccacccuauagucccuga

SEQ ID NO: 11503 - RNA, 300 nt, Artificial Sequence
  derived and/or modified CDS sequence (wt) from LASV(G502-SLE-2009;Clade IV)__AIT17124__Z
augggaaacaagcaagucaaaaccccggaagcaaaagacaguccgagagccagccugaucccagaugccacacaccuagggccacaguucugcaagagcugcugguucgaaaacaagggccugguugagugcaacaaccacuaucugugucucaacugccucacuuuacuucuaaguguuggcaacaggugccccauuugcaagaugccccuucccacaaaacugagaccaucagucacuccaacagcacccccaaccagagcagcggacagcaucggacccccacccuacagucccuga

SEQ ID NO: 11504 - RNA, 300 nt, Artificial Sequence
  derived and/or modified CDS sequence (wt) from LASV(G503-SLE-2009;Clade IV)__AIT17128__Z
augggaaacaagcaagccaaaaccccggaggcaaaagacaguccaagagccaacuugaucccagaugccacacaccuggggccacaguucugcaagagcugcugguucgaaaauaaaggccugguugagugcaacaaccacuaucugugucucaacugccucaccuuacuucuaagugucagcaacaggugccccaucuguaagaugccucuucccacaaaacugagaccgucagccgcuccaacagcacccccaacuggagcagcggacagcaucagacccccacccuacagucccuga

SEQ ID NO: 11505 - RNA, 300 nt, Artificial Sequence
  derived and/or modified CDS sequence (wt) from LASV(G610-SLE-2009;Clade IV)__AIT17132__Z
augggaaacaagcaagccaaagccccagaagcaagagacagcccgagagccagccugaucccagacgccacacaucuagggccacaguucugcaaaagcugcugguucgaaaacaagggccugguugagugcaacaaccacuaucugugccucaacugccucaccuuacuucuaagugucagcaacaggugccccauuugcaagaugccucuucccacaaaacugagaccaucagccacaccaacagcacccccaaccgaagcagcagacagcaucagacccccacccuaccgucccuga

SEQ ID NO: 11506 - RNA, 300 nt, Artificial Sequence
  derived and/or modified CDS sequence (wt) from LASV(G676-SLE-2009;Clade IV)__AIT17140__Z
augggaaacaagcaagccaaggccccagaaccaaaggauaguccgagagccagccugaucccagaugcuacacaucuagggccacaguucuguaagagcugcugguucgaaaacaagggccugguugagugcaacaaccacuaucugugccucaacugccucaccuuacucuuaagugucagcaacaggugccccauuugcaagaugccucuccccacaaaacugagaccaucagccgcuccgacagcacccccagccggagcaguggacagcaccagaccuccacccuacagucccuga

SEQ ID NO: 11507 - RNA, 300 nt, Artificial Sequence
  derived and/or modified CDS sequence (wt) from LASV(G692-SLE-2009;Clade IV)__AIT17144__Z
augggaaacaagcaagcuaaaaccccagaaucaaaggacaguccgagagcuagccugaucccagaugccacacaucuagggccgcaguucuguaagagcugcugguucgaaaacaagggccugguugaguguaacaaccacuaucugugucucaacugccucaccuugcuucugggugucagcaacaggugccccauuugcaagaugccucuccccacaaaacugagaucaucagucgcuccaacagcacccccaaccggagcaguggacagcaucagacccccacccuacagucccuga

SEQ ID NO: 11508 - RNA, 300 nt, Artificial Sequence
  derived and/or modified CDS sequence (wt) from LASV(G733-SLE-2010;Clade IV)__AIT17152__Z
augggaaacaagcaagccaagaccccagaaacaaaagacaguccgagagccagccugaucccagaugccacacaccuagggccacaguuuugcaagagcugcugguucgaaaacaagggccugguugagugcaauaaccacuaucugugccucaauugucuuacccuacuucuaagugucagcaacaggugucccauuugcaagaugccucuccccacaaaacugagaccaucaaccgccccaacagcacccccagccggagcagcggacaacaccagacccccacccuauagccccuga

SEQ ID NO: 11509 - RNA, 300 nt, Artificial Sequence
  derived and/or modified CDS sequence (wt) from LASV(G808-SLE-2010;Clade IV)__AIT17162__Z
augggaaacaagcaagccaaggccucagaaucaaaggacagcccaagagccagccugaucccagaugccacacaucuagggccacaguucuguaagagcugcugguucgagaacaagggccugguugagugcaacaaccacuauuugugucucaacugccucacacuacuucugagugucagcaacaggugccccaucugcaagaugccucuccccacgaagcugagaccgucggucaccccaacagcgcccccaaccagaacagcagacaacaccagacccccacccuacagucccuga

SEQ ID NO: 11510 - RNA, 300 nt, Artificial Sequence
  derived and/or modified CDS sequence (wt) from LASV(Guinea Faranah;Clade IV)__AMZ00378__Z
augggcaacaggcaaaccaaggccacggaggcaaaggacagcccaagggccagucugaucccagaugcuacacauuuaggaccacaguucugcaaaaguuguugguuugaaaacaagggccuaguugagugcaauaaccacuaccugugucuuaacugccuuacccugcuccugagcgucagcagcagaugccccaucuguaaaaugccucuccccacaagacugaagucaucaaccaacccaacggcacccucagccaaaacagaaagcagcaucaacccuccaccguacagccccuga

SEQ ID NO: 11511 - RNA, 300 nt, Artificial Sequence
  derived and/or modified CDS sequence (wt) from LASV(GUINEA Z-185a;Clade IV)__AMZ00374__Z
auggggaacaagcaagccaaagcuccagaaacaaagaacagcccgagggccagucuaaucccugaugccacacaccuaggaccacaguuuugcaagagcugcugguuugaaaacaagggucugguugagugcaacaaccauuauuugugucucaauugccuuacccuucucuugagugucagcaacaggugccccaucugcaaaaugccacuccccacaaaacugagaccgucggccgucccaacagcgcccccagcccaagugggagaccgcaccagacccccacccuacagucccuga

SEQ ID NO: 11512 - RNA, 312 nt, Artificial Sequence
  derived and/or modified CDS sequence (wt) from MOPV/LASV reassortant(IGS-1;Clade IV)__AFY05533__Z
auggggaaaacgcaguccaagggacagcccagcacaaaucuccucaaggagacagaaccaaggcauccaguaauaccagaugccaggggaacuggcccugaauucugcaagagcugcugguucgaaaggaggggguuagucaggugcaacgaucacuaccuauguuugaacugucuuacacuuuuacacacagugucagauaggugccccaucugcaaacacaaacuacccuucagacuagagcuccagacccagccgacagcaccaccagaaaucccaccaucccaaaaucccccacccuacagccccuga

SEQ ID NO: 11513 - RNA, 300 nt, Artificial Sequence
  derived and/or modified CDS sequence (wt) from LASV(LM032-SLE-2010;Clade IV)__AIT17800__Z
augggaaacaagcaagccaaagccccagaagcaaaagacagcccgagagccagccuaaucccagaugccacacaucuagggccacaguucugcaagagcugcugguucgaaaacaagggccugguugagugcaacaaccacuaucugugucucaacugccucaccuuacuucuaagugucaguaacaggugccccauuugcaagaugccucuuccuacaaaacugagaccaucagccacuccaacagcaccuccaacugaagcagcggacagcaucagaccuccacccuaccaucccuga

SEQ ID NO: 11514 - RNA, 300 nt, Artificial Sequence
  derived and/or modified CDS sequence (wt) from LASV(LM222-SLE-2010;Clade IV)__AIT17804__Z
augggaaacaagcaagccaaagccucagaagaaaaaaacaguccgagagccagccugauuccagaugccacacaccuagggccacaauucugcaagagcugcugguucgaaaacaagggccugguugagugcaacaaccacuaucugugucucaacugccucaccuuacuuuuaagugucagcaacaggugccccaucugcaagaugccucuucccacaaaacugagaccaucaaccacuccaacagcaccuccaacuggagcagcggacagcaucagacccccacccuacagucccuga

SEQ ID NO: 11515 - RNA, 300 nt, Artificial Sequence
  derived and/or modified CDS sequence (wt) from LASV(LM395-SLE-2009;Clade IV)__AIT17808__Z
augggaaacaagcaagccaaagccccagaaucaaaggacaguccgagagccagucugaucccagaugcuacacaucuagggccgcaauucuguaagagcugcugguucgaaaacaagggccugguugagugcaacaaccacuaucugugucucaacugccucacccuacuucuaagugucagcaacaggugccccauuugcaagaugccucuccccacaagacugagaccaucagccgcuccaacagcacccccaaccggagcagcggacagcaccagaccuccacccuacagucccuga

SEQ ID NO: 11516 - RNA, 300 nt, Artificial Sequence
  derived and/or modified CDS sequence (wt) from LASV(LM776-SLE-2012;Clade IV)__AIT17824__Z
augggaaacaagcaagccaaagccucagaagaaaaaaacaguccgagagccagccugauuccagaugccacacaccuagggccacaauuuugcaagagcugcugguucgaaaacaagggccugguugagugcaacaaccacuaucugugucucaacugccucaccuuacuuuuaagugucagcaacaggugccccaucugcaagaugccucuucccacaaaacugagaccaucaaccacuccaacagcaccuccaaccggagcagcagacagcaucagacccccaccuuacagucccuga

SEQ ID NO: 11517 - RNA, 300 nt, Artificial Sequence
  derived and/or modified CDS sequence (wt) from LASV(Mad39;Clade IV)__ANH09743__Z
augggaaacaagcaggccaaagccucagaaguggaggaugguccaagggccagucugaucccagaugccacacaccuggggccacaguucugcaagagcugcugguucgaaaauaagagcuugguugagugcaacaaccauuaucugugccucaacugccucacucugcuucugagcgucagcaacaggugccccaucugcaaaaugccucucccaacaagacugaaaccaucagucgucccaacagcaccccccaccagagcaggagacggcaccaggcccccacccuacagucccuaa

SEQ ID NO: 11518 - RNA, 300 nt, Artificial Sequence
  derived and/or modified CDS sequence (wt) from LASV(Mad41;Clade IV)__ANH09745__Z
augggaaacaagcagaccaaagccccagaaguggaggauggcccgagggccagcuugaucccagaugccacacaccuagggccucaguucugcaagagcuguugguucgaaaauaagggcuugguugagugcaacaaccauuaucugugccucaacugccucacucugcuccugagcgucagcagcaggugccccaucugcaagaugccucucccgacaagacuaaaaccaucaaucgucccaacagcaccccccgccagaacaggagaaaacaccagaccuccacccuauagucccuga

SEQ ID NO: 11519 - RNA, 300 nt, Artificial Sequence
  derived and/or modified CDS sequence (wt) from LASV(Mad63;Clade IV)__ANH09749__Z
augggaaacaaacaggccaaagcuccagaaguagaggauggcccaagggccagucugaucccagaugccacacaccuagggccacaguucugcaagagcuguugguuugagaauaggggcuugguugagugcaacaaccauuaucugugccucaacugccucacucugcuucugagcgucagcaacaggugccccaucugcaaaaugccucucccaacaagacuaaaaccaucagucguuccaacagcaccccccacuggagcaggaggcgacaccagacccccacccuacagucccuga

SEQ ID NO: 11520 - RNA, 300 nt, Artificial Sequence
  derived and/or modified CDS sequence (wt) from LASV(Mad69;Clade IV)__ANH09751__Z
augggaaacaaacaggccaaagccccaaaagcggaggauggcccgagggccagucugaucccagaugccacacaccuagggccacaguucugcaagagcugcugguuugagaacaagggcuugguugagugcaacaaccauuaucuaugccucaacugccucacuuugcuucugagcgucagcaacaggugccccaucuguaaaaugccucucccaacaagacuaaaaccaucaguugucccaacagcaccccccaccggagcaggaggcgacaccagacccccaccccacagucccuga

SEQ ID NO: 11521 - RNA, 300 nt, Artificial Sequence
  derived and/or modified CDS sequence (wt) from LASV(Mad83;Clade IV)__ANH09753__Z
auggggaacaaacaggccaaagccucagaagcagaggauggcccgagggccagucugaucccagaugccacacaccuagggccacaguucugcaagagcugcugguuugaaaacaagggcuugguugagugcaacaaccauuaucugugccucaacugccucacucugcuucugagcgucagcagcaggugccccaucugcaaaaugccccucccaacaagauuaagaccaucagucgucccaacagcacccuccgccggagcaggagacggcaccaggcccccgcccuacagucccuaa

SEQ ID NO: 11522 - RNA, 300 nt, Artificial Sequence
  derived and/or modified CDS sequence (wt) from LASV(NL;Clade IV)__AAO59510__Z
augggaaacaagcaaaccaaagccccagaagcaaaagacagcccgagggccagccugaucccagaugccacauaucuagggccacaguucugcaagagcugcugguucgaaaacaagggccuggucgagugcaacaaccacuaucugugucucaacugucuuaccuuacuucugagugucagcaacaggugccccaucugcaagaugccucuccccacaaaacugagaccaucagcugccccaacagcacccccagccggagcagcgcacagcgccagaccuccacccuacagucccuga

SEQ ID NO: 11523 - RNA, 300 nt, Artificial Sequence
  derived and/or modified CDS sequence (wt) from LASV(Z0947-SLE-2011;Clade IV)__AIT17838__Z
augggaaacaaacaagccaaggucccagaaucaaaagacagcccgagagccagccuaaucccagaugccacacaucuagggccgcaauucuguaagaguugcugguucgaaaacaagggccugguugaguguaacaaccacuaucugugucucaacugccucaccuuacuuuugagugucagcaacaggugccccauuugcaagaugccucuccccacaaaacugaaaccaucagccgcuccaacagcacccccaacuggagcagcggacagcaucagacccccaccuuacagucccuga

SEQ ID NO: 11524 - RNA, 300 nt, Artificial Sequence
  derived and/or modified CDS sequence (wt) from LASV(Z0948-SLE-2011;Clade IV)__AIT17842__Z
augggaaacaaacaagccaaggucccagaaucaaaagacagcccgagagccagccuaaucccagaugccacacaucuagggccgcaauucuguaagaguugcugguucgaaaacaagggccugguugagugcaacaaccacuaucugugucucaacugccucaccuuacuuuugagugucagcaacaggugccccauuugcaagaugccucuccccacaaaacugagaccaucagccgcuccaacagcacccccaacuggaguagcggacagcaucagacccccaccuuacagucccuga

SEQ ID NO: 11525 - RNA, 300 nt, Artificial Sequence
  derived and/or modified CDS sequence (wt) from LASV(Z148;Clade IV)__AAT49005__Z
auggggaacaagcaagccaaagccccagaaacaaaggacagcccgagggcuagucugaucccugaugccacacaccuaggaccacaguucugcaagagcugcugguuugaaaacaagggucuaguugagugcaacaaccauuauuugugucucaacugccuuacccuucuccugagugucagcaacaggugccccaucugcaaaaugccacuccccacaagacugagaccgucagccgucccaacagcgcccccagccccagcgggagaccgcaccaaacccccacccuacagucccuga

SEQ ID NO: 11526 - RNA, 300 nt, Artificial Sequence
  derived and/or modified CDS sequence (wt) from LASV(Bamba-R114;Clade V)__AHC95547__Z
auggggaacagacaagccaaagacccaaagguggaaagcagcccaagggccagucugauuccagaugccacgcaccuuggaccgcaauucugcaagagcuguugguuugaaaauaagggccuaguugaguguaacaaccacuaccugugucucaacugccucucccuacuccugagcgucagcaacagaugcccuaucuguaagaugccccugcccacgaggcuaagaccaacaaccaugccgacagcaccacaaaucaucaaagaaggcaccaccaauccuccaccauacacacccuaa

SEQ ID NO: 11527 - RNA, 300 nt, Artificial Sequence
  derived and/or modified CDS sequence (wt) from LASV(Komina-R16;Clade V)__AHC95545__Z
auggggaauaagcaagccaaagauccaaagacagagagcagcccaagggccagucucauuccggaugccacacaccuuggaccacaauuuugcaagaguuguugguuugaaaacaaagguuuaguugaguguaacaaccacuaccugugccucaacugccucucccuacuuuugagugucagcaacaggugccccaucuguaagaugccucuucccacgaagcucaagccgauaaccacgccaacagcaccacaaaucaccagagagagcaucaccaaucccccaccauacacacccuaa

SEQ ID NO: 11528 - RNA, 300 nt, Artificial Sequence; identical to SEQ ID NO: 11353
  derived and/or modified CDS sequence (wt) from LASV(Alzey;Clade VI)__SCA79103__Z

SEQ ID NO: 11529 - RNA, 300 nt, Artificial Sequence
  derived and/or modified CDS sequence (wt) from LASV(NIGERIA IKEJI;Clade II)__AMZ00370__Z
augggcaacaaacaagccaagucaaccagaguugaugaacaacaaagagcucaucuagugccggaugcaucccaccuagguccucaguuuugcaagagcugcugguucgagaacaaaggacugguugaaugcaacaaccauuaucuaugucucaacugucucagccugcuccucagcgucagcagcagaugucccaucugcaaaaugccccuccccaccaaacugaagacaucaacacaacccagcgcaccccgagccgaagugcccccaagcacaacaccuccaccguacaguccauaa

SEQ ID NO: 11530 - RNA, 300 nt, Artificial Sequence
  derived and/or modified CDS sequence (opt1) from LASV(Josiah;Clade IV)__ADY11072/NP_694871__Z
augggcaacaagcaggccaaggcccccgagagcaaggacuccccgcgcgcgagccugauccccgacgccacccaccucgggccccaguucugcaaguccugcugguucgagaacaagggccugguggagugcaacaaccacuaccugugccucaacugccugacccugcuccugagcgucuccaaccggugccccaucugcaagaugccgcugcccacgaagcuccgccccagcgccgcccccaccgccccgcccaccggggcggccgacuccauccggcccccgcccuacagccccuga

SEQ ID NO: 11531 - RNA, 303 nt, Artificial Sequence
  derived and/or modified CDS sequence (opt1) from LASV(Pinneo-NIG-1969;Clade I)__AIT17834__Z
augggcaacaagcagacccgcagcccgcccaagcccgagcacccccggcccacccugcuccccgacgccucccaccuggggccccaguucugcaagagcugcugguucgagaacaagggccugguggagugcaacaaccacuaccucugccugaacugccugacgcuccugcuguccgucagcgaccgcugccccaucugcaagaugccccuccccaccaagcuggccgugcggacccagcccuccgcgccgccccugaaccaggggaacacccagagcagcccgccgcccuacucccccuga

SEQ ID NO: 11532 - RNA, 300 nt, Artificial Sequence
  derived and/or modified CDS sequence (opt1) from LASV(Nig08-04;Clade II)__ADU56612__Z
augggcaaccgccagacccggcccaccgaggccacggagcagagccgcgcccaccuggugccggacgccucccaccucgggccccaguucugcaagagcugcugguucgagaaccggggccuggucgagugcaacaaccacuaccugugccucaacugccugucccugcuccugagcguguccagccgcugccccaucugcaagaugccccugccgacccggcucaaggccuccgcccagcccagcgccccgcccaccgaggcgccccagaacaccacgcccccgcccuacacccccuga

SEQ ID NO: 11533 - RNA, 300 nt, Artificial Sequence
  derived and/or modified CDS sequence (opt1) from LASV(Nig08-A19;Clade III)__ADU56620__Z
augggcgggaagcacaccaagccccagcgcgagagcaacuccccgcgggccagccugauccccgacgccacccaccucggcccccaguucugcaaguccugcugguucgagaacaaggggcugguggagugcaacaaccacuaccugugccucaacugccugacgcugcuccugagcguguccaaccgcugccccaucugcaagaugccccugcccacccggcuccgcgccagcaccaaccccaccgcgccccagguggagcaggucggcccgacgaacccgccgcccuacucccccuga

SEQ ID NO: 11534 - RNA, 300 nt, Artificial Sequence
  derived and/or modified CDS sequence (opt1) from LASV(AV;Clade V)__CCA30312__Z
augggcaaccgccaggccaagaaccccgagguggagaacagcccccgggccucccugauccccgacgcgacccaccucgggccccaguucugcaagagcugcugguucgagaacaagggccuggucgagugcaacaaccacuaccugugccucaacugccugucccugcuccugagcguguccaaccgcugccccaucugcaagaugccgcugcccacccggcuccgccccacgaccacccccaccgccccgcagaucaucaaggagaacacgaccaacccgccgcccuacacccccuga

SEQ ID NO: 11535 - RNA, 300 nt, Artificial Sequence
  derived and/or modified CDS sequence (opt1) from LASV(Togo/2016/7082;Clade VI)__AMR44579__Z
augggcgcccgccagaccaagcagccccagaucgaggggagcccccgggccucccuggugcccgacgcgagccaccucggcccccaguucugcaaguccugcugguucgagaacaaggggcuggucgagugcaacaaccacuaccugugccucaacugccugagccugcuccuguccgugagcaaccgcugccccaucugcaagaugccgcugcccaccaagcuccggguguccagcgcccccuccgcgcccccggccgccacggcccagcccggcaccccgccgcccuacagccccuga

SEQ ID NO: 11536 - RNA, 300 nt, Artificial Sequence
  derived and/or modified CDS sequence (opt1) from LASV(KAK-428;Clade n.d. (VII))__ANH09761__Z
augggcaacaaggggaccaagcccacccagaacagcgagcccucccgcgccaaccuggugcccgacgccagcuaccucggcccccaguucugcaaguccugcugguucgagaacaaggggcuggucgagugcaacaaccacuaccugugccucaacugccugacgaugcugcucagcguguccaaccggugccccaucugcaagaugccgcugcccaccaagaucaaggccagcggcucccccagcgcgcccccgaccgaggccaacuccgccgugagcccgccgcccuacacccccuga

SEQ ID NO: 11537 - RNA, 300 nt, Artificial Sequence
  derived and/or modified CDS sequence (opt1) from LASV(ISTH0009-NIG-2011;Clade II)__AIT17402__Z
augggcaaccgccaggccaagagcaccaagguggacgagcaccagcgggcccaccugguccccgacgcgucccaccucgggccccaguucugcaagagcugcugguucgagaaccgcggccugguggagugcaacaaccacuaccugugccucaacugccugucccugcuccugagcguguccagccggugccccaucugcaagaugccccugcccaccaagcucaaggccgccgcccagccguccgcccccagcacggagaccauccagaacaccaccccgccgcccuacacgcccuga

SEQ ID NO: 11538 - RNA, 300 nt, Artificial Sequence
  derived and/or modified CDS sequence (opt1) from LASV(ISTH0012-NIG-2011;Clade II)__AIT17406__Z
augggcaaccgccaggccaagagcuccaagguggacgagcaccagcgggcccaccugguccccgacgcgagccaccucgggccccaguucugcaaguccugcugguucgagaacaagggccugguggagugcaacaaccacuaccugugccucaacugccugagccugcuccuguccgugagcucccgcugccccaucugcaagaugccccugcccaccaagcucaaggccgccgcccagccgagcgcccccuccaccgaggcgguccagaacacggccccgccgcccuacgcccccuga

SEQ ID NO: 11539 - RNA, 300 nt, Artificial Sequence
  derived and/or modified CDS sequence (opt1) from LASV(ISTH0047-NIG-2011;Clade II)__AIT17410__Z
augggcaacaagcaggccaagagcaccaagguggacgagcaccagcgcgcccaccugguccccgacgcgucccaccucgggccgcaguucugcaagagcugcugguucgagaaccggggccugguggagugcaacaaccacuaccugugccucaacugccugucccugcuccugagcguguccagccgcugccccaucugcaagaugccccugcccacccggcucaaggccgccacgcagccguccgcccccagcaccgaggccacccagaacaccacgcccccgcccuacacccccuga

SEQ ID NO: 11540 - RNA, 300 nt, Artificial Sequence
  derived and/or modified CDS sequence (opt1) from LASV(ISTH0230-NIG-2011;Clade II)__AIT17418__Z
augggcaaccgccaggccaagagcaccaagguggacgagcaccagcgggcccaccugguccccgacgcgucccaccucgggccgcaguucugcaagagcugcugguucgagaaccgcggccugguggagugcaacaaccacuaccugugccucaacugccugucccugcuccugagcguguccagccggugccccaucugcaagaugccccugcccaccaagcucaaggccgccacgcagccguccgcccccagcaccgagaccauccagaacaccacgcccccgcccuacacccccuga

SEQ ID NO: 11541 - RNA, 300 nt, Artificial Sequence
  derived and/or modified CDS sequence (opt1) from LASV(ISTH0531-NIG-2011;Clade II)__AIT17422__Z
augggcaaccgccaggccaagagcgccaagguggacgagcaccagcgggcgcaccugguccccgacgccucccaccucgggccccaguucugcaagagcugcugguucgagaaccgcggccugguggagugcaacaaccacuaccugugccucaacugccugucccugcuccugagcguguccagccggugccccaucugcaagaugccccugcccaccaagcucaaggccgccacccagccguccgcccccagcacggaggcgacccagaacaccaccccgccgcccuacacgcccuga

SEQ ID NO: 11542 - RNA, 300 nt, Artificial Sequence
  derived and/or modified CDS sequence (opt1) from LASV(ISTH0595-NIG-2011;Clade II)__AIT17426__Z
augggcaacaagcaggccaagagcaccaagguggacgagcaccagcgcgcccaccugguccccgacgcgucccaccucgggccgcaguucugcaagagcugcugguucgagaaccggggccugguggagugcaacaaccacuaccugugccucaacugccugucccugcuccugagcguguccagccgcugccccaucugcaagaugccccugcccaccaagcucaaggccgccacgcagccguccgcccccagcaccgaggccacccagaacaccacgcccccgcccuacacccccuga

SEQ ID NO: 11543 - RNA, 300 nt, Artificial Sequence
  derived and/or modified CDS sequence (opt1) from LASV(ISTH1003-NIG-2011;Clade II)__AIT17432__Z
augggcaacaagcaggccaagagcaccaagguggacgagcaccagcgcgcccaccugguccccgacgcgucccaccucgggccccaguucugcaagagcugcugguucgagaaccggggccugguggagugcaacaaccacuaccugugccucaacugccugucccugcuccugagcguguccagccgcugccccaucugcaagaugccccugcccacccggcucaaggccgccacgcagccguccgcccccagcaccgaggccacccagaacaccaucccgccgcccuacacgcccuga

SEQ ID NO: 11544 - RNA, 300 nt, Artificial Sequence
  derived and/or modified CDS sequence (opt1) from LASV(ISTH1038-NIG-2011;Clade II)__AIT17436__Z
augggcaacaagcaggccaagagcaccaaggccgacgagcaccagcgcgcgcaccuggugcccgacgccucccaccucgggccgcaguucugcaagagcugcugguucgagaaccggggccuggucgagugcaacaaccacuaccugugccucaacugccugucccugcuccugagcguguccagccgcugccccaucugcaagaugccccugcccaccaagcucaaggccgccacgcagccguccgcccccagcaccgaggcgacccggaacaccacgcccccgcccuacacccccuga

SEQ ID NO: 11545 - RNA, 300 nt, Artificial Sequence
  derived and/or modified CDS sequence (opt1) from LASV(ISTH1058-NIG-2011;Clade II)__AIT17444__Z
augggcaaccgccaggccaagagcaccaagguggacgagcaccagcgggcccaccugguccccgacgcgucccaccucgggccccaguucugcaagagcugcugguucgagaacaagggccugguggagugcaacaaccacuaccugugccucaacugccugucccugcuccugagcguguccagccgcugccccaucugcaagaugccccugcccaccaagcucaaggccgccgcccagccguccgcccccagcacggaggcggcccagaacaccgccccgccgcccuacgcccccuga

SEQ ID NO: 11546 - RNA, 300 nt, Artificial Sequence
  derived and/or modified CDS sequence (opt1) from LASV(ISTH1064-NIG-2011;Clade II)__AIT17448__Z
augggcaaccgccaggccaagagcaccaaggugggggagcaccagcgggcccaccugguccccgacgcgucccaccucggcccccaguucugcaagagcugcugguucgagaaccgcgggcugguggagugcaacaaccacuaccugugccucaacugccugucccugcuccugagcguguccagccggugccccaucugcaagaugccccugcccaccaagcucaaggccacggcccagccguccgcccccagcgccgaggcgauccagaacaccaccccgccgcccuacacccccuga

SEQ ID NO: 11547 - RNA, 300 nt, Artificial Sequence
  derived and/or modified CDS sequence (opt1) from LASV(ISTH1069-NIG-2011;Clade II)__AIT17452__Z
augggcaaccgccaggccaagagcacccggguggacgagcaccagcgcgcccaccugguccccgacgcgucccaccucgggccgcaguucugcaagagcugcugguucgagaaccggggccugguggagugcaacaaccacuaccugugccucaacugccugucccugcuccugagcguguccagccgcugccccaucugcaagaugccccugcccacccggcuccgcgccgccguccagccguccgcccccagcacggagaccacccaggacaccacgcccccgcccuacucccccuga

SEQ ID NO: 11548 - RNA, 300 nt, Artificial Sequence
  derived and/or modified CDS sequence (opt1) from LASV(ISTH1096-NIG-2012;Clade II)__AIT17456__Z
augggcaaccgccaggccaagagcaccgaggugaacgagcaccagcgggcccaccugguccccgacgcgucccaccucgggccgcaguucugcaagagcugcugguucgagaaccgcggccugguggagugcaacaaccacuaccugugccucaacugccugucccugcuccugagcguguccagccggugccccaucugcaagaugccccugcccaccaagcucaaggccgccacgcagccguccgcccccagcaccgaggucacccagaacaccgugcccccgcccuacucccccuga

SEQ ID NO: 11549 - RNA, 300 nt, Artificial Sequence
  derived and/or modified CDS sequence (opt1) from LASV(ISTH1107-NIG-2012;Clade II)__AIT17460__Z
augggcaaccgccaggccaagagcaccaagguggacgagcaccagcgggcccaccugguccccgacgcgucccaccucgggccccaguucugcaagagcugcugguucgagaaccgcggccugguggagugcaacaaccacuaccugugccucaacugccugucccugcuccugagcguguccagccggugccccaucugcaagaugccccugcccaccaagcucaaggccgccgcccagcccuccgccccgcccacggaggcgacccagaacaccacgccgccgcccuacacccccuga

SEQ ID NO: 11550 - RNA, 300 nt, Artificial Sequence
  derived and/or modified CDS sequence (opt1) from LASV(ISTH1111-NIG-2011;Clade II)__AIT17464__Z
augggcaaccgccaggccaagagcaccaagguggacgagcaccagcgggcccaccugguccccgacgcgucccaccucgggccccaguucugcaagagcugcugguucgagaaccgcggccugguggagugcaacaaccacuaccugugccucaacugccugucccugcuccugagcguguccagccggugccccaucugcaagaugccccugcccaccaagcucaaggccgccgcccagccguccgcccccagcacggaggcgacccaggacaccaccccgccgcccuacacgcccuga

SEQ ID NO: 11551 - RNA, 300 nt, Artificial Sequence
  derived and/or modified CDS sequence (opt1) from LASV(ISTH1121-NIG-2012;Clade II)__AIT17468__Z
augggcaaccgccaggccaagcagaccaagguggacgagcaccagcgggcccaccugguccccgacgcgagccaccucgggccccaguucugcaaguccugcugguucgagaaccgcggccugguggagugcaacaaccacuaccugugccucaacugccugagccugcuccuguccaucagcucccggugccccaucugcaagaugccccugcccaccaagcucaaggccgccgcccagccgagcgcccccuccacggaggcgacccaggacaccaccccgccgcccuacacgcccuga

SEQ ID NO: 11552 - RNA, 300 nt, Artificial Sequence
  derived and/or modified CDS sequence (opt1) from LASV(ISTH1129-NIG-2012;Clade II)__AIT17472__Z
augggcaacaagcagaccaagagcaccaaggccgacgagcaccagcgcgcccaccuggugcccgacgcgucccaccucgggccgcaguucugcaagagcugcugguucgagaaccggggccuggucgagugcaacaaccacuaccugugccucaacugccugucccugcuccugagcguguccagccgcugccccaucugcaagaugccccugcccacgcggcucaaggccgccgcccagccguccgcccccagcaccgaggcgacccaggacaccacgcccccgcccuacacccccuga

SEQ ID NO: 11553 - RNA, 300 nt, Artificial Sequence
  derived and/or modified CDS sequence (opt1) from LASV(ISTH1137-NIG-2011;Clade II)__AIT17476__Z
augggcaaccgccaggccaagagcaccaagguggacgagcaccagcgggcccaccugguccccgacgcgucccaccucgggccccaguucugcaagagcugcugguucgagaaccgcggccugguggagugcaacaaccacuaccugugccucaacugccugucccugcuccugagcguguccagccggugccccaucugcaagaugccccugcccaccaagcucaaggccgccgcccagccguccgcccccagcgcggaggccauccagaacacgaccccgccgcccuacacccccuga

SEQ ID NO: 11554 - RNA, 300 nt, Artificial Sequence
  derived and/or modified CDS sequence (opt1) from LASV(ISTH2010-NIG-2012;Clade II)__AIT17480__Z
augggcaaccgccacgccaagagcaccaagguggacgagcaccagcgggcccaccugguccccgacgcgucccaccucgggccccaguucugcaagagcugcugguucgagaaccgcggccugguggagugcaacaaccacuaccugugccucaacugccugucccugcuccugagcguguccagccggugccccaucugcaagaugccccugcccaccaagcucaaggccgccgcccagccguccgcccccagcacggaggucauccaguccaccaccccgccgcccuacacccccuga

SEQ ID NO: 11555 - RNA, 300 nt, Artificial Sequence
  derived and/or modified CDS sequence (opt1) from LASV(ISTH2016-NIG-2012;Clade II)__AIT17484__Z
augggcaaccgccacgccaagagcaccaagguggacgagcaccagcgggcccaccugguccccgacgcgucccaccucgggccccaguucugcaagagcugcugguucgagaaccgcggccugguggagugcaacaaccacuaccugugccucaacugccugucccugcuccugagcguguccagccggugccccaucugcaagaugccccugcccaccaagcucaaggccgccgcccagccguccgcccccagcacggaggagauccagaacaccaccccgccgcccuacacccccuga

SEQ ID NO: 11556 - RNA, 300 nt, Artificial Sequence
  derived and/or modified CDS sequence (opt1) from LASV(ISTH2020-NIG-2012;Clade II)__AIT17488__Z
augggcaaccgccaggccaagcccaccaagguggacgagcaccagcgggcccaccuggucccggacgccagccaccucgggccccaguucugcaaguccugcugguucgagaacaagggccugguggagugcaacaaccacuaccugugccucaacugccugagccugcuccuguccgugagcucccgcugccccaucugcaagaugccccugccgaccaagcucaaggccgccgcccagcccagcgcccccuccacggaggcggcccagaacaccgcgcccccgcccuacgcccccuga

SEQ ID NO: 11557 - RNA, 300 nt, Artificial Sequence
  derived and/or modified CDS sequence (opt1) from LASV(ISTH2031-NIG-2012;Clade II)__AIT17496__Z
augggcaaccgccaggccaagagcaccaagguggacgagcaccagcgggcccaccugguccccgacgcgucccaccucgggccccaguucugcaagagcugcugguucgagaaccgcggccugguggagugcaacaaccacuaccugugccucaacugccugucccugcuccugagcguguccagccggugccccaucugcaagaugccccugcccacccgccucaaggccgccacgcagccguccgcccccagcaccgaggccacccagaccacgaccccgccgcccuacacccccuga

SEQ ID NO: 11558 - RNA, 300 nt, Artificial Sequence
  derived and/or modified CDS sequence (opt1) from LASV(ISTH2037-NIG-2012;Clade II)__AIT17500__Z
augggcaaccgccagaccaagagcaccaagguggacgagcaccagcgggcccaccugguccccgacgccucccaccucgggccccaguucugcaagagcugcugguucgagaacaagggccugguggagugcaacaaccacuaccugugccucaacugccugucccugcuccugagcguguccagccgcugccccaucugcaagaugccccugcccacgaagcucaagaccgcggcccagccguccgccccgcccaccgaggccgcccggaccacggcgcccccgcccuacgcccccuga

SEQ ID NO: 11559 - RNA, 300 nt, Artificial Sequence
  derived and/or modified CDS sequence (opt1) from LASV(ISTH2042-NIG-2012;Clade II)__AIT17504__Z
augggcaaccgccacgccaagagcaccaagguggacgagcaccagcgggcccaccugguccccgacgcgucccaccucgggccccaguucugcaagagcugcugguucgagaaccgcggccugguggagugcaacaaccacuaccugugccucaacugccugucccugcuccugagcguguccagccggugccccaucugcaagaugccccugcccaccaagcucaaggccgccgcccagccguccgcccccagcacggaggcgauccagaacaccaccccgccgcccuacacccccuga

SEQ ID NO: 11560 - RNA, 300 nt, Artificial Sequence
  derived and/or modified CDS sequence (opt1) from LASV(ISTH2046-NIG-2012;Clade II)__AIT17508__Z
augggcaaccgccagaccaagagcaccaagguggacgagcaccagcgggcccaccugguccccgacgccucccaccucgggccgcaguucugcaagagcugcugguucgagaacaagggccugguggagugcaacaaccacuaccugugccucaacugccugucccugcuccugagcguguccagccgcugccccaucugcaagaugccccugcccacgaagcucaaggcggccgcccagccguccgcccccagcaccgaggccacccagaacaccgcgcccccgcccuacgcccccuga

SEQ ID NO: 11561 - RNA, 300 nt, Artificial Sequence
  derived and/or modified CDS sequence (opt1) from LASV(ISTH2050-NIG-2012;Clade II)__AIT17512__Z
augggcaaccgccaggccaagagcaccaagguguacgagcaccagcgggcccaccugguccccgacgcgucccaccucgggccgcaguucugcaagagcugcugguucgagaaccgcggccugguggagugcaacaaccacuaccugugccucaacugccugucccugcuccugagcguguccagccggugccccaucugcaagaugccccugcccacccgccucaaggccgccacgcagccguccgcccccagcaccgaggccacccagaacaccacgcccccgcccuacacccccuga

SEQ ID NO: 11562 - RNA, 300 nt, Artificial Sequence
  derived and/or modified CDS sequence (opt1) from LASV(ISTH2057-NIG-2012;Clade II)__AIT17516__Z
augggcaaccgccaggccaagagcaccaagguggacgagcaccagcgggcccaccugguccccgacgccucccaccucgggccccaguucugcaagagcugcugguucgagaaccgcggccugguggagugcaacaaccacuaccugugccucaacugccugucccugcuccugagcguguccagccggugccccaucugcaagaugccccugcccaccaagcucaagacggccacccagccguccgcgccccugaccgaggccacccagaacacgaccccgccgcccuacacccccuga

SEQ ID NO: 11563 - RNA, 300 nt, Artificial Sequence
  derived and/or modified CDS sequence (opt1) from LASV(ISTH2061-NIG-2012;Clade II)__AIT17520__Z
augggcaacaagcaggccaagagcaccaagguggacgagcaccagcgcgcccaccugguccccgacgcgucccaccucgggccccaguucugcaagagcugcugguucgagaaccggggccugguggagugcaacaaccacuaccugugccucaacugccugucccugcuccugagcguguccaaccgcugccccaucugcaagaugccccugcccaccaagcucaaggccgccgcccagccgagcgcccccuccacggaggcgacccagaacaccaccccgccgcccuacacgcccuga

SEQ ID NO: 11564 - RNA, 300 nt, Artificial Sequence
  derived and/or modified CDS sequence (opt1) from LASV(ISTH2065-NIG-2012;Clade II)__AIT17526__Z
augggcaaccgccaggccaagagcgccaaggugaccgagcaccagcgggcccaccugguccccgacgccucccaccucgggccgcaguucugcaagagcugcugguucgagaacaagggccugguggagugcaacaaccacuaccugugccucaacugccugucccugcuccugagcguguccagccgcugccccaucugcaagaugccccugcccacccggcucaaggccgccacccagccguccgcccccagcgcggaggcgccccaguccaccacgcccccgcccuacacccccuga

SEQ ID NO: 11565 - RNA, 300 nt, Artificial Sequence
  derived and/or modified CDS sequence (opt1) from LASV(ISTH2094-NIG-2012;Clade II)__AIT17536__Z
augggcaaccgccagacccggcccaccgaggccacggagcagagccgcgcccaccuggugccggacgccucccaccucgggccccaguucugcaagagcugcugguucgagaacaagggccuggucgagugcaacaaccacuaccugugccucaacugccugucccugcuccugagcguguccagccggugccccaucugcaagaugccccugccgacccgccucaaggccuccgcccagcccagcgccccgcccaccgaggcgccccagaacaaggcgcccccgcccuacacccccuga

SEQ ID NO: 11566 - RNA, 300 nt, Artificial Sequence
  derived and/or modified CDS sequence (opt1) from LASV(ISTH2129-NIG-2012;Clade II)__AIT17542__Z
augggcaaccgccaggucaagagcaccaagguggacgagcaccagcgggcccaccugauccccgacgccucccaccucgggccccaguucugcaagagcugcugguucgagaaccgcggccugguggagugcaacaaccacuaccugugccucaacugccugucccugcuccugagcguguccagccggugccccaucugcaagaugccccugcccaccaagcucgaggcggccgcccagccguccgcccccagcacggaggccacccaggacaccaccccgccgcccuacacgcccuga

SEQ ID NO: 11567 - RNA, 300 nt, Artificial Sequence
  derived and/or modified CDS sequence (opt1) from LASV(ISTH2217-NIG-2012;Clade II)__AIT17546__Z
augggcaacaagcaggccaagagcaccaagguggacgagcaccagcgcgcccaccugguccccgacgcgucccaccucgggccccaguucugcaagagcugcugguucgagaaccggggccugguggagugcaacaaccacuaccugugccucaacugccugucccugcuccugagcguguccagccgcugccccaucugcaagaugccccugcccaccaagcucaaggccgccgcccagccguccgcccccagcacggagaccauccagaacaccaccccgccgcccuacacgcccuga

SEQ ID NO: 11568 - RNA, 300 nt, Artificial Sequence
  derived and/or modified CDS sequence (opt1) from LASV(ISTH2271-NIG-2012;Clade II)__AIT17550__Z
augggcaaccgccaggccaagcagaccaagguggacgagcaccagcgggcccaccugguccccgacgcgagccaccucgggccccaguucugcaaguccugcugguucgagaaccgcggccugguggagugcaacaaccacuaccugugccucaacugccugagccugcuccuguccgugagcucccggugccccaucugcaagaugccccugcccaccaagcucaaggccgccgcccagccgagcgcccccuccacggagaucacccagaacaccaccccgccgcccuacacgcccuga

SEQ ID NO: 11569 - RNA, 300 nt, Artificial Sequence
  derived and/or modified CDS sequence (opt1) from LASV(ISTH2304-NIG-2012;Clade II)__AIT17554__Z
augggcaaccgccaggccaagagcaccaaggccgacgagcaccagcgggcgcaccuggugcccgacgccucccaccucgggccccaguucugcaagagcugcugguucgagaaccgcggccuggucgagugcaacaaccacuaccugugccucaacugccugucccugcuccugagcguguccaaccggugccccaucugcaagaugccccugcccacccgccucaaggccgccgcccagccgagcgcgcccuccacggaggccacccaggacaccaccccgccgcccuacacgcccuga

SEQ ID NO: 11570 - RNA, 300 nt, Artificial Sequence
  derived and/or modified CDS sequence (opt1) from LASV(ISTH2312-NIG-2012;Clade II)__AIT17558__Z
augggcaaccgccaggccaagagcaccaagguggacgagcaccagcgggcccaccugguccccgacgcgucccaccucgggccccaguucugcaagagcugcugguucgagaaccgcggccugguggagugcaacaaccacuaccugugccucaacugccugucccugcuccugagcguguccagccggugccccaucugcaagaugccccugcccacccgccucaaggccgccgcccagccguccgcccccagcacggaggcgauccgguccaccaccccgccgcccuacacccccuga

SEQ ID NO: 11571 - RNA, 300 nt, Artificial Sequence
  derived and/or modified CDS sequence (opt1) from LASV(ISTH2358-NIG-2012;Clade II)__AIT17570__Z
augggcaaccgccaggccaagagcgccaaggugaacgagcaccagcgggcgcaccugguccccgacgccucccaccucgggccccaguucugcaagagcugcugguucgagaaccgcggccugguggagugcaacaaccacuaccugugccucaacugccugucccugcuccugagcguguccagccggugccccaucugcaagaugccccugcccaccaagcucaaggccgccgcccagccguccgcgcccagcaccgaggccacgcagaacaucaccccgccgcccuacacccccuga

SEQ ID NO: 11572 - RNA, 300 nt, Artificial Sequence
  derived and/or modified CDS sequence (opt1) from LASV(Lassa virus/H.sapiens-wt/NGA/2016/ISTH_0017;Clade II)__AVO03713__Z
augggcaaccgccaggccaagagcaccaagguggacgagcaccagcgggcccaccugguccccgacgcgucccaccucgggccccaguucugcaagagcugcugguucgagaaccgcggccugguggagugcaacaaccacuaccugugccucaacugccugucccugcuccugagcguguccagccggugccccaucugcaagaugccccugcccaccaagcucaaggccgccacgcagccguccgcccccagcaccgaggucaaccagaacaccaccccgccgcccuacacgcccuga

SEQ ID NO: 11573 - RNA, 300 nt, Artificial Sequence
  derived and/or modified CDS sequence (opt1) from LASV(Lassa virus/H.sapiens-wt/NGA/2016/ISTH_0035;Clade II)__AVO03731__Z
augggcaaccgccaggccaagagcaccaagguggacgagcaccagcgggcccaccuccugcccgacgcgucccaccuggggccgcaguucugcaagagcugcugguucgagaaccgcggccuggucgagugcaacaaccacuaccucugccugaacugccugucccuccugcugagcguguccagccggugccccaucugcaagaugccccuccccaccaagcugaaggccgccacgcagccguccgcccccagcaccgaggccacccagaacaccacgcccccgcccuacacccccuga

SEQ ID NO: 11574 - RNA, 300 nt, Artificial Sequence
  derived and/or modified CDS sequence (opt1) from LASV(Lassa virus/H.sapiens-wt/NGA/2016/ISTH_0703;Clade II)__AVO03703__Z
augggcaacaagcagaccaagagcaccaagguggacgagcaccagcgcgcccaccugguccccgacgccucccaccucgggccccaguucugcaagagcugcugguucgagaaccggggccugguggagugcaacaaccacuaccugugccucaacugccugucccugcuccugagcguguccagccgcugccccaucugcaagaugccccugcccacgaagcucaaggcggccgcccagccguccgcccccagcaccgaggccacccagaacaucaccccgccgcccuacacgcccuga

SEQ ID NO: 11575 - RNA, 300 nt, Artificial Sequence
  derived and/or modified CDS sequence (opt1) from LASV(Lassa virus/H.sapiens-wt/NGA/2016/ISTH_0717;Clade II)__AVO03670__Z
augggcgggaagcacagcaagcccccgggcgaguccaacagcccccgcgccucccugauccccgacgccacccaccucgggccccaguucugcaagagcugcugguucgagaacaagggccugguggagugcaacaaccacuaccugugccucaacugccugucccugcuccugagcgucuccaaccggugcccgaucugcaagaugccccugcccacccgccuccgggccagcacgaaccccaccgcgccccagguggggcagaucgaccccaccaacccgcccccguacucccccuga

SEQ ID NO: 11576 - RNA, 300 nt, Artificial Sequence
  derived and/or modified CDS sequence (opt1) from LASV(Lassa virus/H.sapiens-wt/NGA/2016/ISTH_0753;Clade II)__AVO03748__Z
augggcaaccgccaggccaagagcaccaagguggacgagcaccagcgggcccaccugguccccgacgcgucccaccucgggccccaguucugcaagagcugcugguucgagaaccgcggccugguggagugcaacaaccacuaccugugccucaacugccugucccugcuccugagcguguccaaccggugccccaucugcaagaugccccugcccaccaagcucaaggccgccgcccagccgagcgcccccuccacggaggcgacccaggacaccaccccgccgcccuacacgcccuga

SEQ ID NO: 11577 - RNA, 300 nt, Artificial Sequence
  derived and/or modified CDS sequence (opt1) from LASV(Lassa virus/H.sapiens-wt/NGA/2016/ISTH_0919;Clade II)__AVO03760__Z
augggcaaccgccacgccaagcccaccaagguggacgagcaccagcgggcccaccuggucccggacgccagccaccucgggccccaguucugcaaguccugcugguucgagaacaagggccugguggagugcaacaaccacuaccugugccucaacugccugagccugcuccuguccgugagcucccgcugccccaucugcaagaugccccugccgaccaagcucaaggccgccgcccagcccagcgcccccuccgcggaggccacgcagaacaccgcgcccccgcccuacacccccuga

SEQ ID NO: 11578 - RNA, 300 nt, Artificial Sequence
  derived and/or modified CDS sequence (opt1) from LASV(Lassa virus/H.sapiens-wt/NGA/2016/ISTH_1006;Clade II)__AVO03750__Z
augggcaacaagcagaccaagagcaccaagguggacgagcaccagcgcgcccaccugguccccgacgccucccaccucgggccccaguucugcaagagcugcugguucgagaaccggggccugguggagugcaacaaccacuaccugugccucaacugccugucccugcuccugagcguguccagccgcugccccaucugcaagaugccccugcccaccaagcucaagaccgucgcgcagcccuccgccccgcccaccgaggccacccagaacacgacgccgccgcccuacacccccuga

SEQ ID NO: 11579 - RNA, 297 nt, Artificial Sequence
  derived and/or modified CDS sequence (opt1) from LASV(Lassa virus/H.sapiens-wt/NGA/2016/ISTH_1070;Clade II)__AVO03754__Z
ggcaaccgccaggccaagcccaccaagguggacgagcaccagcgggcccaccuggucccggacgccagccaccucgggccccaguucugcaaguccugcugguucgagaacaagggccugguggagugcaacaaccacuaccugugccucaacugccugagccugcuccuggggguguccagccgcugccccaucugcaagaugccccugccgaccaagcucaaggccgccgcccagcccuccgcccccagcacggaggcggcccagaacaccgcgcccccgcccuacgcccccuga

SEQ ID NO: 11580 - RNA, 300 nt, Artificial Sequence
  derived and/or modified CDS sequence (opt1) from LASV(Lassa virus/H.sapiens-wt/NGA/2016/ISTH_1174;Clade II)__AVO03716__Z
augggcaaccgccaggccaagagcaccaagguggacgagcaccagcgggcccaccugguccccgacgcgucccaccucgggccccaguucugcaagagcugcugguucgagaaccgcggccugguggagugcaacaaccacuaccugugccucaacugccugucccugcuccugagcguguccagccggugccccaucugcaagaugccccugcccaccaagcucaaggccgccacccagcccuccgccccgcccaccgagaccacccagaacacgacgccgccgcccuacacccccuga

SEQ ID NO: 11581 - RNA, 300 nt, Artificial Sequence
  derived and/or modified CDS sequence (opt1) from LASV(Lassa virus/H.sapiens-wt/NGA/2016/ISTH_1207;Clade II)__AVO03680__Z
augggcaaccgccaggccaagagcaccaagguggacgagcaccagcgggcccaccugguccccgacgcgucccaccucgggccgcaguucugcaagagcugcugguucgagaaccgcggccugguggagugcaacaaccacuaccugugccucaacugccugucccugcuccugagcguguccagccggugccccaucugcaagaugccccugcccaccaagcuccgcgccacggcccagccguccgcccccagcaccgaggccacccagaacaccacgcccccgcccuacacccccuga

SEQ ID NO: 11582 - RNA, 300 nt, Artificial Sequence
  derived and/or modified CDS sequence (opt1) from LASV(Lassa virus/H.sapiens-wt/NGA/2016/ISTH_1311;Clade II)__AVO03739__Z
augggcaaccgccaggccaagcccaccgaggccaucgagcagaaccgggcccaccuggugcccgacgccagccaccucgggccccaguucugcaaguccugcugguucgagaacaagggccuggucgagugcaacaaccacuaccugugccucaacugccugagccugcuccuguccgugagcucccgcugccccaucugcaagaugccccugccgacccggcucaaggccagcgcccagcccuccgcccccagcgcggaggcgccccagaacgccaagccgccgcccuacucccccuga

SEQ ID NO: 11583 - RNA, 300 nt, Artificial Sequence
  derived and/or modified CDS sequence (opt1) from LASV(Lassa virus/H.sapiens-wt/NGA/2016/ISTH_1423;Clade II)__AVO03685__Z
augggcaacaagcaggccaagagcaucaaggccgacgagcaccagcgcgcgcaccuggugcccgacgccucccaccucgggccccaguucugcaagagcugcugguucgagaaccggggccuggucgagugcaacaaccacuaccugugccucaacugccugucccugcuccugagcguguccagccgcugccccaucugcaagaugccccugcccaccaagcucaagaccgccgcccagcccuccgccccgcccgugggggcgacccagaacaccacgccgccgcccuacacccccuga

SEQ ID NO: 11584 - RNA, 300 nt, Artificial Sequence
  derived and/or modified CDS sequence (opt1) from LASV(Lassa virus/H.sapiens-wt/NGA/2016/ISTH_1462;Clade II)__AVO03690__Z
augggcaacaagcagaccaagagcaccaagguggacgagcaccagcgcgcccaccugguccccgacgccucccaccucgggccgcaguucugcaagagcugcugguucgagaaccggggccugguggagugcaacaaccacuaccugugccucaacugccugucccugcuccugagcguguccagccgcugccccaucugcaagaugccccugcccacgaagcucaaggcggccgcccagccguccgcccccagcaccgaggccacccagaacaccacgcccccgcccuacacccccuga

SEQ ID NO: 11585 - RNA, 300 nt, Artificial Sequence
  derived and/or modified CDS sequence (opt1) from LASV(Lassa virus/H.sapiens-wt/NGA/2016/ISTH_1472;Clade II)__AVO03726__Z
augggcaacaagcagaccaagagcaccaagguggacgagcaccagcgcgcccaccugguccccgacgccucccaccucgggccccaguucugcaagagcugcugguucgagaaccggggccugguggagugcaacaaccacuaccugugccucaacugccugucccugcuccugagcguguccagccgcugccccaucugcaagaugccccugcccacgaagcucaaggcggccgcccagccguccgccccgcccaccgaggccacccagaacaccacgcccccgcccuacacccccuga

SEQ ID NO: 11586 - RNA, 300 nt, Artificial Sequence
  derived and/or modified CDS sequence (opt1) from LASV(Lassa virus/H.sapiens-wt/NGA/2016/ISTH_1496;Clade II)__AVO03693__Z
augggcaacaagcaggccaagagcaccaagaucgacgaccaccagcgcgcccaccuggugcccgacgcgucccaccucgggccccaguucugcaagagcugcugguucgagaaccggggccuggucgagugcaacaaccacuaccugugccucaacugccugucccugcuccugagcguguccagccgcugccccaucugcaagaugccccugcccaccaagcucaaggccgccgcccagccguccgcccccagcacggagaccauccagaacaccaccccgccgcccuacacgcccuga

SEQ ID NO: 11587 - RNA, 300 nt, Artificial Sequence
  derived and/or modified CDS sequence (opt1) from LASV(Lassa virus/H.sapiens-wt/NGA/2016/ISTH_1546;Clade II)__AVO03665__Z
augggcgggaagcagagccgcccgcccaagaagguggacagcccccgggccaaccugauccccgacgccuccuacaugggcccccaguucugcaaguccugcugguucgagaacaaggggcucgucgagugcaacaaccacuaccugugccugaacugccucagccugcugcucuccgugagcucccgcugccccaucugcaagaugccccugcccaccaagcugaaggcgagcaccucccccacggccccgcccaucaucggcaccaacaccaccaacccgccgcccuacagccccuga

SEQ ID NO: 11588 - RNA, 300 nt, Artificial Sequence
  derived and/or modified CDS sequence (opt1) from LASV(Lassa virus/H.sapiens-wt/NGA/2016/ISTH_1568;Clade II)__AVO03711__Z
augggcaaccgccaggcccggagcaccaagguggacgagcaccagcgcgcccaccuccugcccgacgcgucccaccuggggccgcaguucugcaagagcugcugguucgagaaccggggccuggucgagugcaacaaccacuaccucugccugaacugccugucccuccugcugagcguguccagccgcugccccaucugcaagaugccccuccccaccaagcugaaggccgccacgcagccguccgcccccagcaccgaggccacccagaacaccacgcccccgcccuacacccccuga

SEQ ID NO: 11589 - RNA, 300 nt, Artificial Sequence
  derived and/or modified CDS sequence (opt1) from LASV(Lassa virus/H.sapiens-wt/NGA/2016/ISTH_1610;Clade II)__AVO03687__Z
augggcaaccgccaggccaagagcaccaagguggccgagcaccagcgggcgcaccugguccccgacgccucccaccucgggccccaguucugcaagagcugcugguucgagaacaagggccugguggagugcaacaaccacuaccugugccucaacugccugucccugcuccugagcguguccagccgcugccccaucugcaagaugccccugcccaccaagcuccgggccacggcccagcccuccgccccgcccagcgaggcgacccaguccaccacgccgccgcccuacacccccuga

SEQ ID NO: 11590 - RNA, 300 nt, Artificial Sequence
  derived and/or modified CDS sequence (opt1) from LASV(Lassa virus/H.sapiens-wt/NGA/2018/ISTH_0026;Clade II)__AVV65086__Z
augggcaacaagcaggccaagagcaccaagguggacgagcaccagcgcgcccaccugguccccgacgcgucccaccucgggccgcaguucugcaagagcugcugguucgagaaccggggccugguggagugcaacaaccacuaccugugccucaacugccugucccugcuccugagcguguccagccgcugccccaucugcaagaugccccugcccacccggcucaaggccgccacgcagccguccgcccccagcaccgaggccacccgcaacaccacgcccccgcccuacacccccuga

SEQ ID NO: 11591 - RNA, 300 nt, Artificial Sequence
  derived and/or modified CDS sequence (opt1) from LASV(Lassa virus/H.sapiens-wt/NGA/2018/ISTH_0097;Clade II)__AVV65091__Z
augggcaacaagcagaccaagagcaccaagguggacgagcaccagcgcgcccaccugguccccgacgccucccaccucgggccgcaguucugcaagagcugcugguucgagaaccggggccugguggagugcaacaaccacuaccugugccucaacugccugucccugcuccugagcguguccagccgcugccccaucugcaagaugccccugcccacgaagcucaaggcggccgcccagccguccgcccccagcaccgaggucacccagaacaccacgcccccgcccuacacccccuga

SEQ ID NO: 11592 - RNA, 300 nt, Artificial Sequence
  derived and/or modified CDS sequence (opt1) from LASV(Lassa virus/H.sapiens-wt/NGA/2018/ISTH_0664;Clade II)__AVV65093__Z
augggcaacaagcagaccaagagcaccaagguggacgagcaccagcgcgcccaccugguccccgacgccucccaccucgggccgcaguucugcaagagcugcugguucgagaaccggggccugguggagugcaacaaccacuaccugugccucaacugccugucccugcuccugagcguguccgggcgcugccccaucugcaagaugccccugcccacgaagcucaaggcggccgcccagccgagcgcccccuccaccgaggccacccagaacaccacgcccccgcccuacacccccuga

SEQ ID NO: 11593 - RNA, 300 nt, Artificial Sequence
  derived and/or modified CDS sequence (opt1) from LASV(Lassa virus/H.sapiens-wt/NGA/2018/ISTH_0959;Clade II)__AVV65084__Z
augggcaacaagcaggccaagagcaccaagguggacgagcaccagcgcgcccaccugguccccgacgcgucccaccucgggccccaguucugcaagagcugcugguucgagaaccggggccugguggagugcaacaaccacuaccugugccucaacugccugucccugcuccugagcguguccagccgcugccccaucugcaagaugccccugcccaccaagcucaaggccgccgcccagccguccgcccccagcacggaggcgauccaguccaccaccccgccgcccuacacccccuga

SEQ ID NO: 11594 - RNA, 300 nt, Artificial Sequence
  derived and/or modified CDS sequence (opt1) from LASV(Lassa virus/H.sapiens-wt/NGA/2018/ISTH_1079;Clade II)__AVV65074__Z
augggcaacaagcagaccaagagcaccaagguggacgagcaccagcgcgcccaccugguccccgacgccucccaccucgggccccaguucugcaagagcugcugguucgagaacaagggccugguggagugcaacaaccacuaccugugccucaacugccugucccugcuccugagcguguccagccggugccccaucugcaagaugccccugcccaccaagcucaagaccgcggcccagcccuccgccccgcccaccgaggccacccagaacacgacgccgccgcccuacacccccuga

SEQ ID NO: 11595 - RNA, 300 nt, Artificial Sequence
  derived and/or modified CDS sequence (opt1) from LASV(Lassa virus/H.sapiens-wt/NGA/2018/ISTH_1177;Clade II)__AVV65080__Z
augggcaaccgccagaccaagagcaccaagguggacgagcaccagcgggcccaccugguccccgacgccucccaccucgggccccaguucugcaagagcugcugguucgagaacaagggccugguggagugcaacaaccacuaccugugccucaacugccugucccugcuccugagcguguccagccgcugccccaucugcaagaugccccugcccacgaagcucaaggcggccgcccagccguccgcccccagcaccgaggccgcgcagaacaccgccccgccgcccuacgcccccuga

SEQ ID NO: 11596 - RNA, 300 nt, Artificial Sequence
  derived and/or modified CDS sequence (opt1) from LASV(Lassa virus/H.sapiens-wt/NGA/2018/ISTH_1375;Clade II)__AVV65078__Z
augggcaaccgccacgccaagagcaccaagaucaacgagcaccagcgggcccaccuggugcccgacgcgucccaccucgggccccaguucugcaagagcugcugguucgagaaccgcggccuggucgagugcaacaaccacuaccugugccucaacugccugucccugcuccugagcguguccagccggugccccaucugcaagaugccccugcccaccaagcucaaggccgccgcccagccguccgcccccagcacggaggcgauccagaacaccaccccgccgcccuacacccccuga

SEQ ID NO: 11597 - RNA, 300 nt, Artificial Sequence
  derived and/or modified CDS sequence (opt1) from LASV(LASV003-NIG-2008;Clade II)__AIT17578__Z
augggcaaccgccaggccaagagcaccaagguggacgagcaccagcgggcccaccugguccccgacgcgucccaccucgggccccaguucugcaagagcugcugguucgagaacaagggccugguggagugcaacaaccacuaccugugccucaacugccugucccugcuccugagcguguccagccgcugccccaucugcaagaugccccugcccaccaagcuccgggccgccgcccagccguccgcccccagcacggaguccgcgcagaacaccgccccgccgcccuacgcccccuga

SEQ ID NO: 11598 - RNA, 300 nt, Artificial Sequence
  derived and/or modified CDS sequence (opt1) from LASV(LASV035-NIG-2009;Clade II)__AIT17586__Z
augggcaacaagcaggccaagagcaccaagguggacgagcaccagcgcgcccaccugguccccgacgcgucccaccucgggccccaguucugcaagagcugcugguucgagaaccggggccugguggagugcaacaaccacuaccugugccucaacugccugucccugcuccugagcguguccagccgcugccccaucugcaagaugccccugcccacccggcucaaggccgccgcccagccguccgcccccagcacggaggucacccagaacaccaccccgccgcccuacacgcccuga

SEQ ID NO: 11599 - RNA, 300 nt, Artificial Sequence
  derived and/or modified CDS sequence (opt1) from LASV(LASV042-NIG-2009;Clade II)__AIT17590__Z
augggcaaccgccaggccaagagcaccaagguggacgagcaccagcgggcccaccugguccccgacgcgucccaccucgggccccaguucugcaagagcugcugguucgagaacaagggccugguggagugcaacaaccacuaccugugccucaacugccugucccugcuccugagcguguccagccgcugccccaucugcaagaugccccugcccaccaagcucgaggccacgacccagccguccgcccccagcaccgaggagacccaguccacgaccccgccgcccuacacccccuga

SEQ ID NO: 11600 - RNA, 300 nt, Artificial Sequence
  derived and/or modified CDS sequence (opt1) from LASV(LASV049-NIG-2009;Clade II)__AIT17602__Z
augggcaacaagcaggccaagagcaccaagguggacgaguaccagcgcgcccaccugguccccgacgcgucccaccucgggccccaguucugcaagagcugcugguucgagaaccggggccugguggagugcaacaaccacuaccugugccucaacugccugucccugcuccugagcguguccaaccgcugccccaucugcaagaugccccugcccacccggcucaaggccgccgcccagcccagcgccccgcccacggaggcgacccagaacaccacgccgccgcccuacacccccuga

SEQ ID NO: 11601 - RNA, 300 nt, Artificial Sequence
  derived and/or modified CDS sequence (opt1) from LASV(LASV056-NIG-2008;Clade II)__AIT17610__Z
augggcaaccgccaggccaagcccaccaagguggacgagcaccagcgggcccagcuggucccggacgcgagccaccucgggccccaguucugcaaguccugcugguucgagaaccgcggccugguggagugcaacaaccacuaccugugccucaacugccugagccugcuccuguccgugagcucccggugccccaucugcaagaugccccugccgaccaagcucaaggccgccacgcagcccagcgcccccuccaccgaggccacccagaacagcacgcccccgcccuacacccccuga

SEQ ID NO: 11602 - RNA, 300 nt, Artificial Sequence
  derived and/or modified CDS sequence (opt1) from LASV(LASV058-NIG-2008;Clade II)__AIT17614__Z
augggcaaccgccaggccaagagcaccaagguggacgagcaccagcgggcccaccugguccccgacgcgucccaccucgggccgcaguucugcaagagcugcugguucgagaaccgcggccugguggagugcaacaaccacuaccugugccucaacugccugucccugcuccugagcguguccagccggugccccaucugcaagaugccccugcccaccaagcucaaggccgccacgcagccguccgcccccagcaccgaggccacccagaacaccacgcccccgcccuacacccccuga

SEQ ID NO: 11603 - RNA, 300 nt, Artificial Sequence
  derived and/or modified CDS sequence (opt1) from LASV(LASV063-NIG-2009;Clade II)__AIT17618__Z
augggcaaccgccaggccaagagcaccgagguggacgagcaccagcgggcccaccugguccccgacgcgucccaccucgggccgcaguucugcaagagcugcugguucgagaaccgcggccugguggagugcaacaaccacuaccugugccucaacugccugucccugcuccugagcguguccaaccggugccccaucugcaagaugccccugcccaccaagcucaaggccgccacgcagccgagcgcccccuccaccgaggccacccagaacaccacgcccccgcccuacacccccuga

SEQ ID NO: 11604 - RNA, 300 nt, Artificial Sequence
  derived and/or modified CDS sequence (opt1) from LASV(LASV1000-NIG-2009;Clade II)__AIT17780__Z
augggcaaccgccagaccaagagcaccaagguggacgagcaccagcgggccuaccugguccccgacgccucccuccuggggccccaguucugcaagagcugcugguucgagaacaagggccugguggagugcaacaaccacuaccucugccugaacugccugucccuccugcugagcguguccagccgcugccccaucugcaagaugccccuccccacgcggcugaaggcggccgcccagcccuccgccccgcccaccgaggccauccagaacaccacgccgccgcccuacacccccuga

SEQ ID NO: 11605 - RNA, 300 nt, Artificial Sequence
  derived and/or modified CDS sequence (opt1) from LASV(LASV1008-NIG-2009;Clade II)__AIT17784__Z
augggcaaccgccagaccaagcccaccaagguggacgagcaccagcgggcccaccuggucccggacgccagccaccucgggccccaguucugcaaguccugcugguucgagaacaagggccugguggagugcaacaaccacuaccugugccucaacugccugagccugcuccuguccgugagcucccgcugccccaucugcaagaugccccugccgacgaagcucaaggcgaccgcccagcccagcgcccccuccaccgaggccgcccagaacaccgcgcccccgcccuacgcccccuga

SEQ ID NO: 11606 - RNA, 300 nt, Artificial Sequence
  derived and/or modified CDS sequence (opt1) from LASV(LASV1011-NIG-2009;Clade II)__AIT17788__Z
augggcaaccgccaggucaagagcaccaagguggacgagcaccagcgggcccaccuggugcccgacgccucccaccucgggccccaguucugcaagagcugcugguucgagaaccgcggccugguggagugcaacaaccacuaccugugccucaacugccugucccugcuccugagcgucuccagccggugccccaucugcaagaugccccugcccaccaagcucaaggcggccacgcagccguccgccccgcccaccgaggccacccagaagaccacgcccccgcccuacacccccuga

SEQ ID NO: 11607 - RNA, 300 nt, Artificial Sequence
  derived and/or modified CDS sequence (opt1) from LASV(LASV1015-NIG-2009;Clade II)__AIT17792__Z
augggcaacaagcaggccaagagcaccaagguggacgagcaccagcgcgcccaccugguccccgacgcgucccaccucgggccgcaguucugcaagagcugcugguucgagaaccggggccugguggagugcaacaaccacuaccugugccucaacugccugucccugcuccugagcguguccgggcgcugccccaucugcaagaugccccugcccaccaagcucaaggccacggcccagccgagcgcccccuccaccgaggccacccagaacaccacgcccccgcccuacacccccuga

SEQ ID NO: 11608 - RNA, 300 nt, Artificial Sequence
  derived and/or modified CDS sequence (opt1) from LASV(LASV1016-NIG-2009;Clade II)__AIT17796__Z
augggcaacaagcaggccaagagcaccaagguggacgagcaccagcgcgcccaccugguccccgacgcgucccaccucgggccccaguucugcaagagcugcugguucgagaaccggggccugguggagugcaacaaccacuaccugugccucaacugccugucccugcuccugagcguguccagccgcugccccaucugcaagaugccccugcccaccaagcucaaggccgccgcccagccguccgcccccagcacggaggcgauccagaacaccaccccgccgcccuacacccccuga

SEQ ID NO: 11609 - RNA, 300 nt, Artificial Sequence
  derived and/or modified CDS sequence (opt1) from LASV(LASV221-NIG-2010;Clade II)__AIT17622__Z
augggcaaccgccaggccaagagcaccaagguggacgagcaccagcgggcccaccugguccccgacgcgucccaccucgggccccaguucugcaagagcugcugguucgagaaccgcggccugguggagugcaacaaccacuaccugugccucaacugccugucccugcuccugagcguguccagccggugccccaucugcaagaugccccugcccaccaagcucaaggccgccacgcagccguccgcccccagcaccgaggucacccagaacaccaucccgccgcccuacucccccuga

SEQ ID NO: 11610 - RNA, 300 nt, Artificial Sequence
  derived and/or modified CDS sequence (opt1) from LASV(LASV225-NIG-2010;Clade II)__AIT17628__Z
augggcaacaagcaggccaagagcaccaagaucgacgagcaccagcgcgcccaccuggugcccgacgcgucccaccucgggccgcaguucugcaagagcugcugguucgagaaccggggccuggucgagugcaacaaccacuaccugugccucaacugccugucccugcuccugagcguguccagccgcugccccaucugcaagaugccccugcccacccggcucaaggccgccacgcagccguccgcccccagcaccgaggccacccagaacaccacgcccccgcccuacacccccuga

SEQ ID NO: 11611 - RNA, 300 nt, Artificial Sequence
  derived and/or modified CDS sequence (opt1) from LASV(LASV229-NIG-2010;Clade II)__AIT17632__Z
augggcaaccgccaggccaagagcaccaagguggacgagcaccagcgggcccaccugguccccgacgcgucccaccucgggccccaguucugcaagagcugcugguucgagaacaagggccugguggagugcaacaaccacuaccugugccucaacugccugucccugcuccugagcguguccagccgcugccccaucugcaagaugccccugcccaccaagcuccgggccacggcccagccguccgcccccagcaccgaggccauccagaacaccaccccgccgcccuacacgcccuga

SEQ ID NO: 11612 - RNA, 300 nt, Artificial Sequence
  derived and/or modified CDS sequence (opt1) from LASV(LASV237-NIG-2010;Clade II)__AIT17636__Z
augggcaaccgccaggccaagagcaccaagguggacgagcaccagcgggcccaccugguccccgacgcgucccaccucgggccccaguucugcaagagcugcugguucgagaaccgcggccugguggagugcaacaaccacuaccugugccucaacugccugucccugcuccugagcguguccagccggugccccaucugcaagaugccccugcccaccaagcucaaggccgccgcccagccguccgcccccagcaucgagacgauccagaacaccaccccgccgcccuacacccccuga

SEQ ID NO: 11613 - RNA, 300 nt, Artificial Sequence
  derived and/or modified CDS sequence (opt1) from LASV(LASV239-NIG-2010;Clade II)__AIT17640__Z
augggcaaccgccaggccaagagcaccaaggugggggagcaccagcgggcccaccugguccccgacgcgucccaccucggcccccaguucugcaagagcugcugguucgagaaccgcgggcugguggagugcaacaaccacuaccugugccucaacugccugucccugcuccugagcguguccagccggugccccaucugcaagaugccccugcccaccaagcucaaggccgccgcccagccguccgcccccagcacggaggcgacccaggacaccaccccgccgcccuacacgcccuga

SEQ ID NO: 11614 - RNA, 300 nt, Artificial Sequence
  derived and/or modified CDS sequence (opt1) from LASV(LASV242-NIG-2010;Clade II)__AIT17648__Z
augggcaaccgccaggccaagagcaccaagguggacgagcaccagcgggcccaccugguccccgacgcgucccaccucgggccgcaguucugcaagagcugcugguucgagaacaagggccugguggagugcaacaaccacuaccugugccucaacugccugucccugcuccugagcguguccagccgcugccccaucugcaagaugccccugcccaccaagcucaaggccacgguccagccguccgcccccagcaccgaggccgcccaguccaccgcgcccccgcccuacgcccccuga

SEQ ID NO: 11615 - RNA, 300 nt, Artificial Sequence
  derived and/or modified CDS sequence (opt1) from LASV(LASV245-NIG-2011;Clade II)__AIT17652__Z
augggcaaccgccaggccaagagcaccaaggugggggagcaccagcgggcccaccugguccccgacgcgucccaccucggcccccaguucugcaagagcugcugguucgagaaccgcgggcugguggagugcaacaaccacuaccugugccucaacugccugucccugcuccugagcguguccagccggugccccaucugcaagaugccccugcccaccaagcucaaggccgccgcccagccguccgcccccagcgcggaggccauccagaagacgaccccgccgcccuacacccccuga

SEQ ID NO: 11616 - RNA, 300 nt, Artificial Sequence
  derived and/or modified CDS sequence (opt1) from LASV(LASV246-NIG-2010;Clade II)__AIT17656__Z
augggcaaccgccaggccaagagcaccaagguggacgaccaccagcgggcccaccugguccccgacgcgucccaccucgggccccaguucugcaagagcugcugguucgagaaccgcggccugguggagugcaacaaccacuaccugugccucaacugccugucccugcuccugagcguguccagccggugccccaucugcaagaugccccugcccaccaagcucaaggccgccgcccagccguccgcccccagcacggaggcggcccaggacaccaccccgccgcccuacacccccuga

SEQ ID NO: 11617 - RNA, 300 nt, Artificial Sequence
  derived and/or modified CDS sequence (opt1) from LASV(LASV250-NIG-2011;Clade II)__AIT17660__Z
augggcaaccgccaggccaagagcaccaagguggacgagcaccagcgggcccaccugguccccgacgcgucccaccucgggccccaguucugcaagagcugcugguucgagaaccgcggccugguggagugcaacaaccacuaccugugccucaacugccugucccugcuccugagcguguccaaccggugccccaucugcaagaugccccugcccaccaagcucaaggccgccgcccagccgagcgcccccuccacggaggcgauccagaacaccaccccgccgcccuacgcccccuga

SEQ ID NO: 11618 - RNA, 300 nt, Artificial Sequence
  derived and/or modified CDS sequence (opt1) from LASV(LASV251-NIG-2010;Clade II)__AIT17664__Z
augggcaacaagcaggccaagagcaccaagguggacgagcaccagcgcgcccaccugguccccgacgcgucccaccucgggccccaguucugcaagagcugcugguucgagaacaagggccugguggagugcaacaaccacuaccugugccucaacugccugucccugcuccugagcguguccagccggugccccaucugcaagaugccccugcccaccaagcucaaggccgccgcccagccguccgcccccagcacggaggcggcccagaacaccgccccgccgcccuacgcccccuga

SEQ ID NO: 11619 - RNA, 300 nt, Artificial Sequence
  derived and/or modified CDS sequence (opt1) from LASV(LASV253-NIG-2011;Clade II)__AIT17668__Z
augggcaaccgccaggccaagagcaccaagguggacgagcaccagcgggcccaccugguccccgacgcgucccaccucgggccccaguucugcaagagcugcugguucgagaacaagggccugguggagugcaacaaccacuaccugugccucaacugccugucccugcuccugagcguguccagccgcugccccaucugcaagaugccccugcccaccaagcucaagacgaccgcccagccguccgccccgcccaccgaggccgccaagaacaccgcgcccccgcccuacgcccccuga

SEQ ID NO: 11620 - RNA, 300 nt, Artificial Sequence
  derived and/or modified CDS sequence (opt1) from LASV(LASV256-NIG-2010;Clade II)__AIT17676__Z
augggcaaccgccaggccaagagcaccaagguggacgagcaccagcgggcccaccugguccccgacgcgucccaccucgggccgcaguucugcaagagcugcugguucgagaaccgcggccugguggagugcaacaaccacuaccugugccucaacugccugucccugcuccugagcguguccagccggugccccaucugcaagaugccccugcccaccaagcucaaggccgccacgcagccguccgcccccagcaccgaggucacccagaacaccacgcccccgcccuacacccccuga

SEQ ID NO: 11621 - RNA, 300 nt, Artificial Sequence
  derived and/or modified CDS sequence (opt1) from LASV(LASV263-NIG-2011;Clade II)__AIT17680__Z
augggcaaccgccaggccaagagcaccaagaucgacgagcaccagcgggcccaccuggugcccgacgcgucccaccucgggccccaguucugcaagagcugcugguucgagaaccgcggccuggucgagugcaacaaccacuaccugugccucaacugccugucccugcuccugagcguguccagccggugccccaucugcaagaugccccugcccaccaagcucaaggccgccgcccagccguccgcccccagcacggaggcgauccagaacaccaccccgccgcccuacacccccuga

SEQ ID NO: 11622 - RNA, 300 nt, Artificial Sequence
  derived and/or modified CDS sequence (opt1) from LASV(LASV267-NIG-2010;Clade II)__AIT17684__Z
augggcaaccgccaggccaagagcgccaagguggacgagcaccagcgggcgcaccugguccccgacgccucccaccucgggccccaguucugcaagagcugcugguucgagaacaagggccugguggagugcaacaaccacuaccugugccucaacugccugucccugcuccugagcguguccugccgcugccccaucugcaagaugccccugcccaccaagcucaaggccgccacccagccgagcgcccccuccacggaggcgacccagaacaccaccccgccgcccuacacgcccuga

SEQ ID NO: 11623 - RNA, 300 nt, Artificial Sequence
  derived and/or modified CDS sequence (opt1) from LASV(LASV274-NIG-2010;Clade II)__AIT17692__Z
augggcaaccgccacgccaagcccaccaagguggacgagcaccagcgggcccaccuggucccggacgcgagccaccucgggccccaguucugcaaguccugcugguucgagaaccgcggccugguggagugcaacaaccacuaccugugccucaacugccugagccugcuccuguccgugagcucccggugccccaucugcaagaugccccugccgaccaagcucaaggccgccgcccagcccagcgcccccuccaccgaggcgauccagaacaccacgcccccgcccuacacccccuga

SEQ ID NO: 11624 - RNA, 300 nt, Artificial Sequence
  derived and/or modified CDS sequence (opt1) from LASV(LASV719-NIG-2009;Clade II)__AIT17702__Z
augggcaaccgccacgccaagagcaccaagguggacgagcaccagcgggcccaccugguccccgacgcgucccaccucgggccccaguucugcaagagcugcugguucgagaaccgcggccugguggagugcaacaaccacuaccugugccucaacugccugucccugcuccugagcguguccagccggugccccaucugcaagaugccccugcccaccaagcucaaggccgccgcccagccguccgcccccagcacggaggcguuccagaacaccaccccgccgcccuacacccccuga

SEQ ID NO: 11625 - RNA, 300 nt, Artificial Sequence
  derived and/or modified CDS sequence (opt1) from LASV(LASV737-NIG-2009;Clade II)__AIT17708__Z
augggcaaccgccacgccaagagcaccaagguggacgagcaccagcgggcccaccugguccccgacgcgucccaccucgggccccaguucugcaagagcugcugguucgagaaccgcggccugguggagugcaacaaccacuaccugugccucaacugccugucccugcuccugagcguguccagccggugccccaucugcaagaugccccugcccaccaagcucaaggccgccacgcagccguccgcccccagcaccgaggccauccagaacaccaccccgccgcccuacacgcccuga

SEQ ID NO: 11626 - RNA, 300 nt, Artificial Sequence
  derived and/or modified CDS sequence (opt1) from LASV(LASV966-NIG-2009;Clade II)__AIT17716__Z
augggcaaccgccccgccaagagcaccaagguggacgagcaccagcgggcccaccuggucccggacgcgucccaccucgggccccaguucugcaagagcugcugguucgagaaccgcggccugguggagugcaacaaccacuaccugugccucaacugccugucccugcuccugagcguguccagccggugccccaucugcaagaugccccugccgaccaagcucaaggccgccgcccagcccuccgcccccagcacggaggcgacccagaacaccacgcccccgcccuacacccccuga

SEQ ID NO: 11627 - RNA, 300 nt, Artificial Sequence
  derived and/or modified CDS sequence (opt1) from LASV(LASV967-NIG-2009;Clade II)__AIT17720__Z
augggcaaccgccaggccaagcccaccaagguggacgagcaccagcgggcccaccuggucccggacgcgagccaccucgggccccaguucugcaaguccugcugguucgagaaccgcggccugguggagugcaacaaccacuaccugugccucaacugccugagccugcuccuguccgugagcucccggugccccaucugcaagaugccccugccgacccgccucaaggccgccgcccagcccagcgcccccuccacggaggagacccagaacaccacgcccccgcccuacacccccuga

SEQ ID NO: 11628 - RNA, 300 nt, Artificial Sequence
  derived and/or modified CDS sequence (opt1) from LASV(LASV975-NIG-2009;Clade II)__AIT17730__Z
augggcaaccgccaggccaagagcaccaagguggacgagcaccagcgggcccaccugguccccgacgcgucccaccucgggccccaguucugcaagagcugcugguucgagaaccgcggccugguggagugcaacaaccacuaccugugccucaacugccugucccugcuccugagcguguccagccggugccccaucugcaagaugccccugcccaccaagcucaaggccgccgcccagccguccgcgccccugacggaggccauccagaacaccaccccgccgcccuacacccccuga

SEQ ID NO: 11629 - RNA, 300 nt, Artificial Sequence
  derived and/or modified CDS sequence (opt1) from LASV(LASV976-NIG-2009;Clade II)__AIT17734__Z
augggcaaccgccaggccaagagcaccaagguggacgagcaccagcgggcccaccugguccccgacgcgucccaccucgggccccaguucugcaagagcugcugguucgagaaccgcggccugguggagugcaacaaccacuaccugugccucaacugccugucccugcuccugagcguguccagccggugccccaucugcaagaugccccugcccaccaagcucaaggccgccgcccagccguccgcccccagcacggaggcgauccagaacaccaccccgccgcccuacacccccuga

SEQ ID NO: 11630 - RNA, 300 nt, Artificial Sequence
  derived and/or modified CDS sequence (opt1) from LASV(LASV977-NIG-2009;Clade II)__AIT17738__Z
augggcaaccgccaggccaagagcaccaagguggacgagcaccagcgggcccaccugguccccgacgcgucccaccucgggccgcaguucugcaagagcugcugguucgagaaccgcggccugguggagugcaacaaccacuaccugugccucaacugccugucccugcuccugagcguguccagccggugccccaucugcaagaugccccugcccaccaagcucaaggccgccacgcugccguccgcccccagcaccgaggucacccagaacaccacgcccccgccccacucccccuga

SEQ ID NO: 11631 - RNA, 300 nt, Artificial Sequence
  derived and/or modified CDS sequence (opt1) from LASV(LASV981-NIG-2009;Clade II)__AIT17750__Z
augggcaaccgccaggccaagagcgccaaggugaacgagcaccagcgggcgcaccugguccccgacgccucccaccucgggccccaguucugcaagagcugcugguucgagaaccgcggccugguggagugcaacaaccacuaccugugccucaacugccugucccugcuccugagcguguccagccggugccccaucugcaagaugccccugcccaccaagcucaaggccgccacccagccguccgcccccagcacggaggcgacccagaacaccaccccgccgcccuacacgcccuga

SEQ ID NO: 11632 - RNA, 300 nt, Artificial Sequence
  derived and/or modified CDS sequence (opt1) from LASV(LASV982-NIG-2009;Clade II)__AIT17754__Z
augggcaaccgccaggccaagagcaccaagguggacgagcaccagcgggcccaccugguccccgacgcgucccaccucgggccccaguucugcaagagcugcugguucgagaacaagggccugguggagugcaacaaccacuaccugugccucaacugccugucccugcuccugagcguguccagccgcugccccaucugcaagaugccccugcccaccaagcucaaggccuccgcccagccgagcgcccccuccacggaggccgcgcagaacaccgccccgccgcccuacgcccccuga

SEQ ID NO: 11633 - RNA, 300 nt, Artificial Sequence
  derived and/or modified CDS sequence (opt1) from LASV(LASV989-NIG-2009;Clade II)__AIT17760__Z
augggcaaccgccaggccaagagcacccggaccgacgagcaccagcgcgcccaccuggugcccgacgcgucccaccucgggccccaguucugcaagagcugcugguucgagaacaagggccuggucgagugcaacaaccacuaccugugccucaacugccugucccugcuccugagcguguccagccggugccccaucugcaagaugccccugcccacgaagcucaaggccgccgcccagccguccgcccccagcaccgaggcggggcagaacaccgccccgccgcccuacgcccccuga

SEQ ID NO: 11634 - RNA, 300 nt, Artificial Sequence
  derived and/or modified CDS sequence (opt1) from LASV(LASV991-NIG-2009;Clade II)__AIT17768__Z
augggcaaccgccaggccaagagcgccaccguggacgagugccagcgggcgcaccugguccccgacgccuccuaccucgggccccaguucugcaagagcugcugguucgagaacaagggccugguggagugcaacaaccacuaccugugccucaacugccugucccugcuccugagcguguccagccgcugccccaucugcaagaugccccugcccaccaagcucaaggccgccgcccagccguccgcgcccagcacgcgggccacccagaacaccaccccgccgcccuacacgcccuga

SEQ ID NO: 11635 - RNA, 300 nt, Artificial Sequence
  derived and/or modified CDS sequence (opt1) from LASV(LASV993-NIG-2009;Clade II)__AIT17776__Z
augggcaacaagcaggccaagagcaccaagguggacgagcaccagcgcgcccaccugguccccgacgcgucccaccucgggccccaguucugcaagagcugcugguucgagaacaagggccugguggagugcaacaaccacuaccugugccucaacugccugucccugcuccugagcguguccagccggugccccaucugcaagaugccccugcccacccgccucaaggccgccgcccagccguccgcccccagcacggaggcgacccagaacgccgccccgccgcccuacgcccccuga

SEQ ID NO: 11636 - RNA, 300 nt, Artificial Sequence
  derived and/or modified CDS sequence (opt1) from LASV(Nig08-A41;Clade II)__ADU56628__Z
augggcaaccgccaggccaagagcaccaagguggacgagcaccagcgggcccaccugguccccgacgcgucccaccucgggccccaguucugcaagagcugcugguucgagaaccgcggccugguggagugcaacaaccacuaccugugccucaacugccugucccugcuccugagcguguccagccggugccccaucugcaagaugccccugcccaccaagcucaaggccgccgcccagccguccgcccccagcacggaggcgauccagaacaccaccccgccgcccuacgcccccuga

SEQ ID NO: 11637 - RNA, 300 nt, Artificial Sequence
  derived and/or modified CDS sequence (opt1) from LASV(CSF;Clade III)__AAO59514__Z
augggcaacaagcagguccgcagcaugaagaagguggacagcccccgggccucccugauccccgacgccucccaccucgggccccaguucugcaagagcugcugguucgagaaccgcggccugguggagugcaacaaccacuaccugugccucaacugccugucccugcuccugagcguguccagccggugccccaucugcaagaugccccugccgaccaagcucaagaccuccacgacccccaccgcgcccagcauccgcgaggccaacaccacgagcccgccgcccuacucccccuga

SEQ ID NO: 11638 - RNA, 300 nt, Artificial Sequence
  derived and/or modified CDS sequence (opt1) from LASV(Nig08-A18;Clade III)__ADU56616__Z
augggcgggaagcacaccaagcagccccgcgagagcaacuccccgcgggccagccugauccccgacgccacccaccucggcccccaguucugcaaguccugcugguucgagaacaaggggcugguggagugcaacaaccacuaccugugccucaacugccugagccugcuccuguccgucagcaaccgcugccccaucugcaagaugccccugcccacgcggcuccgcaccuccaccaaccccaccgcgccccagguggagcagacgggcccggccagcccgccgcccuacucccccuga

SEQ ID NO: 11639 - RNA, 300 nt, Artificial Sequence
  derived and/or modified CDS sequence (opt1) from LASV(ONM-299;Clade III)__ANH09755__Z
augggcaacaagcagaccaagaccaucaagaagacggacagcccccgcgccucccugauccccgacgccagccacauggggccccaguucugcaaguccugcugguucgagaaccggggccucguggagugcaacaaccacuaccugugccugaacugccucagccugcugcucuccgucagcaaccgcugccccaucugcaagaugccccugccgaccaagcugcgggcgucccccagccccaccgcccccuccauccgcgaggccaacaucaccaacccgccgcccuacagccccuga

SEQ ID NO: 11640 - RNA, 300 nt, Artificial Sequence
  derived and/or modified CDS sequence (opt1) from LASV(ONM-700;Clade III)__ANH09759__Z
augggcaacaagcagaccaagaccacgaagaagaccgacagcccccgcgccucccugauccccgacgccagccacauggggccccaguucugcaaguccugcugguucgagaaccggggccucguggagugcaacaaccacuaccugugccugaacugccucagccugcugcucuccgucagcaaccgcugccccaucugcaagaugccccugccgaccaagcugcgggcgucccccagccccaccgcccccuccauccgcgaggccaacaucacgaacccgccgcccuacagccccuga

SEQ ID NO: 11641 - RNA, 300 nt, Artificial Sequence
  derived and/or modified CDS sequence (opt1) from LASV(BA366;Clade IV)__ADU56644__Z
augggcaaccgccagaccaaggcccccgaggccaaggggagcccccgggcgucccugauccccgacgccacccaccucggcccccaguucugcaagagcugcugguucgagaacaaggggcugguggagugcaacgaccacuaccugugccucaacugccugacgcugcuccuguccgucagcucccgcugccccaucugcaagaugccgcugcccacccggcuccgccccagcaccaaccccaccgccccgcccgcccgggccgagggcgggaucaacccgccgcccuacucccccuga

SEQ ID NO: 11642 - RNA, 300 nt, Artificial Sequence
  derived and/or modified CDS sequence (opt1) from LASV(G1180-SLE-2010;Clade IV)__AIT17166__Z
augggcaacaagcaggccaaggcccccgaggcgaaggacagcccgcgcgccucccugauccccgacgccacccaccucgggccccaguucugcaagagcugcugguucgagaccaagggccugguggagugcaacaaccacuaccugugccucaacugccugacgcugcuccuguccgucagcaaccggugccccaucugcaagaugccgcugcccaccaagcuccgccccuccgccacccccaccgccccgcccacggaggcggccgacagcaucgggcccccgcccuacucccccuga

SEQ ID NO: 11643 - RNA, 300 nt, Artificial Sequence
  derived and/or modified CDS sequence (opt1) from LASV(G1190-SLE-2010;Clade IV)__AIT17170__Z
augggcaacaagcaggccaaggugcccgagagcaaggacuccccgcgcgccagccugauccccgacgcgacccaccucgggccccaguucugcaaguccugcugguucgagaacaagggccuggucgagugcaacaaccacuaccugugccucaacugccugacccugcuccugagcguguccaaccggugccccaucugcaagaugccgcugcccacgaagcuccgccccagcgccgcccccaccgccccgcccgccggggcggccgacuccauccggcccccgcccuacagccccuga

SEQ ID NO: 11644 - RNA, 300 nt, Artificial Sequence
  derived and/or modified CDS sequence (opt1) from LASV(G1200-LIB-2010;Clade IV)__AIT17174__Z
augggcaacaagcagaccaaggcccccgaggccaaggggagcccgcgcgcgucccugauccccgacgccacccaccucggcccccaguucugcaagagcugcugguucgagaacaaggggcugguggagugcaacaaccacuaccugugccucaacugccugacgcugcuccuguccgucagcucccggugccccaucugcaagaugccgcugcccaccaagcuccgccccagcgccgugcccaccgccccgcccaccaaggccgaggacaacacgcggcccccgcccuacucccccuga

SEQ ID NO: 11645 - RNA, 300 nt, Artificial Sequence
  derived and/or modified CDS sequence (opt1) from LASV(G1442-SLE-2011;Clade IV)__AIT17178__Z
augggcaacaagcaggccaaggccagcgaggcgaaggacagcccccgcgccucccugaucccggacgccacccaccucgggccccaguucugcaaguccugcugguucgagaacaagggccugguggagugcaacaaccacuaccugugccucaacugccugagccugcuccuguccgucagcucccggugccccaucugcaagaugccccugccgacccgccuccggcccagcacggcccccaccgcgcccccggcccgcgccggggacaacaucaagcccccgcccuacucccccuga

SEQ ID NO: 11646 - RNA, 300 nt, Artificial Sequence
  derived and/or modified CDS sequence (opt1) from LASV(G1529-SLE-2011;Clade IV)__AIT17182__Z
augggcaacaagcaggccaaggugcccgagguccgcgacagcccccgggccucccugauccccgacgcgacccaccucgggccccaguucugcaagagcugcugguucgagaacaagggccugguggagugcaacaaccacuaccugugccucaacugccugacccugcuccuguccgugagcucccgcugccccaucugcaagaugccgcugcccacgaagcuccggcccagcgccacccccaccgccccgcccgccggggccggcgacgggacccgcccgccgcccuacucccccuga

SEQ ID NO: 11647 - RNA, 300 nt, Artificial Sequence
  derived and/or modified CDS sequence (opt1) from LASV(G1618-SLE-2011;Clade IV)__AIT17186__Z
augggcaacaagcaggccaagacccccgagaccaaggacagcccgcgcgccucccugauccccgacgcgacgcaccucgggccccaguucugcaagagcugcugguucgagaacaagggccugguggagugcaacaaccacuaccugugccucaacugccugacccugcuccuguccgucagcaaccggugccccaucugcaagaugccgcugcccaccaagcuccgccccuccguggcccccaccgccccgcccgccggggccgcggacaacacgcggcccccgcccuacagccccuga

SEQ ID NO: 11648 - RNA, 300 nt, Artificial Sequence
  derived and/or modified CDS sequence (opt1) from LASV(G1647-SLE-2011;Clade IV)__AIT17194__Z
augggcaacaagcaggccaaggcccccgagcccaaggacagcccccgcgcgucccugauccccgacgccacccaccucgggccccaguucugcaagagcugcugguucgagaacaagggccugguggagugcaacaaccacuaccugugccucaacugccugacccugcuccuguccgucagcaaccggugcccgaucugcaagaugccccugcccacgaagcuccgccccuccguggccccgaccgccccgcccgccgggguggucgacagcacccggcccccgcccuacucccccuga

SEQ ID NO: 11649 - RNA, 300 nt, Artificial Sequence
  derived and/or modified CDS sequence (opt1) from LASV(G1727-SLE-2011;Clade IV)__AIT17198__Z
augggcaacaagcaggccaaggugcccgagagcaaggacuccccgcgcgccagccugauccccgacgcgacccaccucgggccccaguucugcaaguccugcugguucgagaaccgcggccuggucgagugcaacaaccacuaccugugccucaacugccugacccugcuccugagcguguccaaccgcugccccaucugcaagaugccgcugcccacgaagcuccggcccagcaccgcccccaccgccccgcccaccggggccgccgacuccacgcggcccccgcccuacagccccuga

SEQ ID NO: 11650 - RNA, 300 nt, Artificial Sequence
  derived and/or modified CDS sequence (opt1) from LASV(G1774-SLE-2011;Clade IV)__AIT17202__Z
augggcaacaagcaggccaagacccccgagagcaaggacuccccgcgcgccagccugauccccgacgcgacccaccucgggccccaguucugcaaguccugcugguucgagaacaagggccugguggagugcaacaaccacuaccugugccucaacugccugacgcugcuccugagcgucuccaaccgcugccccaucugcaagaugccgcugcccacccgccuccggcccagcgccgcccccaccgccccgcccuccggggccgcggacagcacccggcccccgcccuacucccccuga

SEQ ID NO: 11651 - RNA, 300 nt, Artificial Sequence
  derived and/or modified CDS sequence (opt1) from LASV(G1792-SLE-2011;Clade IV)__AIT17206__Z
augggcaacaagcaggccaaggcccccgaggcgaaggacagcccgcgcgccucccugauccccgacgccacccaccucgggccccaguucugcaagagcugcugguucgagaacaagggccugguggagugcaacaaccacuaccugugccucaacugccugacccugcuccuguccgucagcuaccggugccccaucugcaagaugccgcugcccacgaagcuccgccccuccgccacccccaccgccccgcccaccgaggcggccgacagcauccggcccccgcccuaccgccccuga

SEQ ID NO: 11652 - RNA, 300 nt, Artificial Sequence
  derived and/or modified CDS sequence (opt1) from LASV(G1959-SLE-2011;Clade IV)__AIT17214__Z
augggcaacaagcaggccaaggcccccgaggugaaggacagcccgcgcgcgucccugauccccgacgccacccaccucgggccccaguucugcaagagcugcugguucgagaacaagggccuggucgagugcaacaaccacuaccugugccucaacugccugacccugcuccuguccgugagcaaccggugccccaucugcaagaugccgcugcccacgaagcuccgccccuccgccgcccccaccgccccgcccaccgggaccgcggacagcauccggcccccgcccuacucccccuga

SEQ ID NO: 11653 - RNA, 300 nt, Artificial Sequence
  derived and/or modified CDS sequence (opt1) from LASV(G2141-SLE-2011;Clade IV)__AIT17222__Z
augggcaacaagcaggccaagacccccgagaccaaggacagcccccgcgccucccugauccccgacgcgacgcaccucgggccccaguucugcaagagcugcugguucgagaacaagggccugguggagugcaacucccacuaccugugccucaacugccugacccugcuccugagcgucuccagccggugccccaucugcaagaugccgcugcccacccgccuccggcccuccaccgcccccacggccccgcccgccggggugggcgacagcaccuccccgccgcccuacagccccuga

SEQ ID NO: 11654 - RNA, 300 nt, Artificial Sequence
  derived and/or modified CDS sequence (opt1) from LASV(G2147-SLE-2011;Clade IV)__AIT17226__Z
augggcaacaagcaggccaagacccccgaggccaaggacagcccccgcgcgucccugauccccgacgccacccaccucgggccccaguucugcaagagcugcugguucgagaacaagggccugguggagugcaacaaccacuaccugugccucaacugccugacgcugcuccuguccgucagcaaccggugccccaucugcaagaugccgcugcccaccaagcuccgccccuccgccacccccaccgccccgcccgccggggcggccgacagcaucggcccgccgcccuacucccccuga

SEQ ID NO: 11655 - RNA, 297 nt, Artificial Sequence
  derived and/or modified CDS sequence (opt1) from LASV(G2165-SLE-2011;Clade IV)__AIT17230__Z
augggcaacaagcaggccaaggccagcgacaagaacagcccccgcgcgucccugaucccggacgccacccaccucgggccccaguucugcaaguccugcugguucgagaacaagggccugguggagugcaacaaccacuaccugugccucaacugccugacccugcuccugagcgucuccaaccggugccccaucugcaagaugccccugccgacgaagcuccgccccagcgccacccccaccgcgcccccgaccggggccgccgacuccauccggcccccgcccuacagccccuga

SEQ ID NO: 11656 - RNA, 300 nt, Artificial Sequence
  derived and/or modified CDS sequence (opt1) from LASV(G2184-SLE-2011;Clade IV)__AIT17234__Z
augggcaacaagcaggccaaggccagcgaggagaagaacagcccccgcgcgucccugaucccggacgccacccaccucgggccccaguucugcaaguccugcugguucgagaacaagggccugguggagugcaacaaccacuaccugugccucaacugccugacccugcuccugagcgucuccaaccggugccccaucugcaagaugccccugccgacgaagcuccgccccagcgccacccccaccgcgcccccgaccggggccgccgacuccauccggcccccgcccuacagccccuga

SEQ ID NO: 11657 - RNA, 300 nt, Artificial Sequence
  derived and/or modified CDS sequence (opt1) from LASV(G2197-SLE-2011;Clade IV)__AIT17238__Z
augggcaacaagcagaccaaggcccccgaggccaaggggagcccgcgcgcgucccugauccccgacgccacccaccucggcccccaguucugcaagagcugcugguucgagaacaaggggcugguggagugcaacaaccacuaccugugccucaacugccugacgcugcuccuguccgucagcaaccggugccccaucugcaagaugccgcugcccaccaagcuccgccccuccgccacccccaccgccccgcccacggaggccgcggacagcauccggcccccgcccuaccgccccuga

SEQ ID NO: 11658 - RNA, 300 nt, Artificial Sequence
  derived and/or modified CDS sequence (opt1) from LASV(G2222-SLE-2011;Clade IV)__AIT17242__Z
augggcaacaagcaggccaaggcccccgagagcaaggacuccccgcgcgcgagccugauccccgacgccacccaccucgggccccaguucugcaaguccugcugguucgagaacaagggccugguggagugcaacaaccacuaccugugccucaacugccugacccugcuccugagcgucuccaaccgcugccccaucugcaagaugccgcugcccacgcgccuccggcccagcgccgcccccaccgccccgcccaccggggcgaccgacuccacgcggcccccgcccuacagccccuga

SEQ ID NO: 11659 - RNA, 300 nt, Artificial Sequence
  derived and/or modified CDS sequence (opt1) from LASV(G2259-SLE-2012;Clade IV)__AIT17248__Z
augggcaacaagcaggucaaggcccccgaggcccgcaacagcccgcgggcgucccugauccccgacgccacccaccucgggccccaguucugcaagagcugcugguucgagaacaagggccugguggagugcaacaaccacuaccugugccucaacugccugacccugcuccuggggguguccagccgcugccccaucugcaagacgccgcugcccacccggcuccgccccuccgccacccccaccgccccgcccgccggcgcgggggacaacacgcggcccccgcccuacagccccuga

SEQ ID NO: 11660 - RNA, 300 nt, Artificial Sequence
  derived and/or modified CDS sequence (opt1) from LASV(G2263-SLE-2012;Clade IV)__AIT17252__Z
augggcaacaagcaggccaaggcccccgaggcgaaggacagcccgcgcgccucccugauccccgacgccacccaccucgggccccaguucugcaagagcugcugguucgagaacaagggccugguggagugcaacaaccacuaccugugccucaacugccugacccugcuccuguccgucagcaaccggugccccaucugcaagaugccgcugcccacgaagcuccgccccuccaccgcccccaccgccccgcccgcgggggccgccgacagcacccggcccccgcccuacucccccuga

SEQ ID NO: 11661 - RNA, 300 nt, Artificial Sequence
  derived and/or modified CDS sequence (opt1) from LASV(G2280-SLE-2012;Clade IV)__AIT17256__Z
augggcaacaagcaggccaaggcccccgagaccaaggacagcccgcgcgcgucccugauccccgacgccacccaccucgggccccaguucugcaagagcugcugguucgagaacaagggccugguggagugcaacaaccacuaccugugccucaacugccugacgcugcuccuguccgucagcaaccggugccccaucugcaagaugccgcugcccaccaagcuccgccccuccgccgcccccaccgccccgcccgugggggcggccgacaacacccggcccccgcccuacagccccuga

SEQ ID NO: 11662 - RNA, 300 nt, Artificial Sequence
  derived and/or modified CDS sequence (opt1) from LASV(G2295-SLE-2012;Clade IV)__AIT17260__Z
augggcaacaagcaggccaaggcccccgagcugaaggacagcccgcgcgcgucccucauccccgacgccacccaccuggggccccaguucugcaagagcugcugguucgagaacaagggccugguggagugcaacaaccacuaccucugccugaacugccugacccuccugcuguccgucagcaaccggugccccaucugcaagaugccgcuccccacgaagcugcgccccuccgccgcccccaccgccccgcccgcgggggccguggacagcacccggcccccgcccuacucccccuga

SEQ ID NO: 11663 - RNA, 300 nt, Artificial Sequence
  derived and/or modified CDS sequence (opt1) from LASV(G2315-SLE-2012;Clade IV)__AIT17264__Z
augggcaacaagcagaccaaggcccccgagagcaagaacuccccgcgcgccagccugauccccgacgcgaccuaccucgggccccaguucugcaaguccugcugguucgagaacaagggccugguggagugcaacaaccacuaccugugccucaacugccugacgcugcuccugagcgucuccaaccggugccccaucugcaagaugccgcugcccaccaagcuccgcagcuccgccgcccccaccgcgcccccgaccggggccgccgacagcacgaagcccccgcccuacucccccuga

SEQ ID NO: 11664 - RNA, 300 nt, Artificial Sequence
  derived and/or modified CDS sequence (opt1) from LASV(G2318-SLE-2012;Clade IV)__AIT17268__Z
augggcaacaagcagaccaaggcccccgaggugaaggggagcccccgcgccucccugauccccgacgcgacccaccucggcccccaguucugcaagagcugcugguucgagaacaaggggcuggucgagugcaacaaccacuaccugugccucaacugccugacgcugcuccuguccgugagcaaccggugccccaucugcaagaugccgcugcccaccaagcucaagcccuccaccacccccacggccccgcccaccggcgccgccgacagcauccgcccgccgcccuacucccccuga

SEQ ID NO: 11665 - RNA, 300 nt, Artificial Sequence
  derived and/or modified CDS sequence (opt1) from LASV(G2363-SLE-2012;Clade IV)__AIT17272__Z
augggcaacaagcaggucaagaccagcgaggcccgcgacagcccccgggccucccugaucccggacgccaccgaccucgggccccaguucugcaaguccugcugguucgagaacaagggccugguggagugcaacaaccacuaccugugccucaacugccugacgcugcuccugagcguguccaaccgcugccccaucugcaagaugccccugccgacccggcuccgccccagcgccaaccccaccgcgcccccggccgagaccggggacuccacgcggcccccgcccuacagccccuga

SEQ ID NO: 11666 - RNA, 300 nt, Artificial Sequence
  derived and/or modified CDS sequence (opt1) from LASV(G2392-SLE-2012;Clade IV)__AIT17278__Z
augggcagcaagcagaccaagacccccgaggugaaggacuccccgcgcgccagccugauccccgacgccacgcaccucgggccccaguucugcaaguccugcugguucgagaacaagggccuggucgagugcaacaaccacuaccugugccucaacugccugacccugcuccugagcguguccaaccgcugccccaucugcaagaugccgcugcccaccaagcuccgccccagcgcggcccccaccgccccgcccgcccgggccgcggacgacacgcggcccccgcccuacucccccuga

SEQ ID NO: 11667 - RNA, 300 nt, Artificial Sequence
  derived and/or modified CDS sequence (opt1) from LASV(G2405-SLE-2012;Clade IV)__AIT17282__Z
augggcaacaagcaggccaaggcccccgagcccaaggacagcccccgcgcgucccugauccccgacgccacccaccucgggccccaguucugcaagagcugcugguucgagaacaagggccugguggagugcaacaaccacuaccugugccucaacugccugacccugcuccuguccgucagcaaccggugcccgaucugcaagaugccccugcccacgaagcuccgccccuccgccgccccgaccgccccgcccgcgggggccguggacagcauccggcccccgcccuacucccccuga

SEQ ID NO: 11668 - RNA, 300 nt, Artificial Sequence
  derived and/or modified CDS sequence (opt1) from LASV(G2427-SLE-2012;Clade IV)__AIT17286__Z
augggcaacaagcagaccaaggcccccgaggugaaggacagcccgcgcgccucccugauccccgacgcgacccaccucgggccccaguucugcaagagcugcugguucgagaacaagggccuggucgagugcaacaaccacuaccugugccucaacugccugacgcugcuccuguccgugagcaaccggugccccaucugcaagaugccgcugcccaccaagcuccgccccuccaccgcccccaccgccccgcccgccgggacgauggacagcacccggcccccgcccuacucccccuga

SEQ ID NO: 11669 - RNA, 300 nt, Artificial Sequence
  derived and/or modified CDS sequence (opt1) from LASV(G2431-SLE-2012;Clade IV)__AIT17290__Z
augggcaacaagcaggcccgcgcccccgaggcgaaggacagcccgcgggccucccugauccccgacgccacccaccucgggccccaguucugcaagagcugcugguucgagaacaagggccugguggagugcaacaaccacuaccugugccucaacugccugacccugcuccuguccgucagcucccgcugccccaucugcaagaugccgcugcccacgcggcuccgccccagcgccauccccaccgccccgcccgcggggaccggcgacuccagccggcccccgcccuacucccccuga

SEQ ID NO: 11670 - RNA, 300 nt, Artificial Sequence
  derived and/or modified CDS sequence (opt1) from LASV(G2554-SLE-2012;Clade IV)__AIT17296__Z
augggcaacaagcaggccaagacccccgagaucaaggacagcccgcgcgccucccugauccccgacgcgacccaccucgggccccaguucugcaagagcugcugguucgagaacaagggccugguggagugcaacaaccacuaccugugccucaacugccugacgcugcuccuguccgucagcaaccggugccccaucugcaagaugccgcugcccaccaagcuccgccccuccgccgcccccaccgccccgcccgccggggcggccgacaucacccggcccccgcccuacagccccuga

SEQ ID NO: 11671 - RNA, 300 nt, Artificial Sequence
  derived and/or modified CDS sequence (opt1) from LASV(G2557-SLE-2012;Clade IV)__AIT17300__Z
augggcaacaagcaggucaaggcccccgaggcccgcaacagcccgcgggcgucccugauccccgacgccacccaccucgggccccaguucugcaagagcugcugguucgagaacaagggccugguggagugcaacaaccacuaccugugccucaacugccugacccugcuccuggggguguccagccgcugccccaucugcaagaugccgcugcccacgcggcuccgccccuccaccgcccccaccgccccgcccgccggcgcgggggacaacacccggcccccgcccuacagccccuga

SEQ ID NO: 11672 - RNA, 300 nt, Artificial Sequence
  derived and/or modified CDS sequence (opt1) from LASV(G2612-SLE-2012;Clade IV)__AIT17312__Z
augggcaacaagcaggccaagacccccgagaccaaggacagcccgcgcgccucccugauccccgacgcgacgcaccucgggccccaguucugcaagagcugcugguucgagaacaagggccugguggagugcaacaaccacuaccugugccucaacugccugacccugcuccuguccgucagcaaccggugccccaucugcaagaugccgcugcccaccaagcuccgccccuccgccgcccccaccgccccgcccgugggggccgcggacagcacgcggcccccgcccuacucccccuga

SEQ ID NO: 11673 - RNA, 300 nt, Artificial Sequence
  derived and/or modified CDS sequence (opt1) from LASV(G2615-SLE-2012;Clade IV)__AIT17316__Z
augggcaacaagcaggccaaggcccccgaggcgcgcaacagcccccgggccucccugauccccgacgccacccaccucgggccccaguucugcaagagcugcugguucgagaaccgcggccugguggagugcaacaaccacuaccugugccucaacugccugacccugcuccuguccgucagcucccggugccccaucugcaagaugccgcugcccacgcgccuccggcccagcgccgcccccaccgcgccgcccgccggggccggcgacaacacccgcccgccgcccuacucccccuga

SEQ ID NO: 11674 - RNA, 300 nt, Artificial Sequence
  derived and/or modified CDS sequence (opt1) from LASV(G2723-SLE-2012;Clade IV)__AIT17320__Z
augggcaacaagcaggccaaggcccccgaggcgcgcaacagcccgcgggccucccugauccccgacgccacccaccucgggccccaguucugcaagagcugcugguucgagaacaagggccugguggagugcaacaaccacuaccugugccucaacugccugacccugcuccugggggucuccagccgcugccccaucugcaagaugccgcugcccacgcggcuccgccccuccgccgcccccaccgcgccgcuggccgaggccggcgacaacacccggcccccgcccuacagccccuga

SEQ ID NO: 11675 - RNA, 300 nt, Artificial Sequence
  derived and/or modified CDS sequence (opt1) from LASV(G2868-SLE-2012;Clade IV)__AIT17326__Z
augggcaacaagcagagcaaggcccccgagucccgcgacagcccgcgggccucccugauccccgacgcgacccaccucgggccccaguucugcaagagcugcugguucgagaacaagggccugguggagugcaacaaccacuaccugugccucaacugccugacccugcuccuguccgucagcaaccgcugccccaucugcaagaugccgcugcccacgaagcuccggcccuccgccacccccaccgccccgcccacccgcgccgccgacagcauccggcccccgcccuacucccccuga

SEQ ID NO: 11676 - RNA, 300 nt, Artificial Sequence
  derived and/or modified CDS sequence (opt1) from LASV(G2903-SLE-2012;Clade IV)__AIT17330__Z
augggcaacaagcaggccaaggcccuggagagcaagaacagcccccgcgcgucccucauccccgacgccaccuaccuggggccccaguucugcaaguccugcugguucgagaacaagggccugguggagugcaacaaccacuaccucugccugaacugccugacccuccugcugagcgucuccaaccggugccccaucugcaagaugccccucccgacgaagcugcgcagcuccgccgcccccaccgccccgcccaccggggcggccgacggcaccaagcccccgcccuacagccccuga

SEQ ID NO: 11677 - RNA, 300 nt, Artificial Sequence
  derived and/or modified CDS sequence (opt1) from LASV(G3010-SLE-2013;Clade IV)__AIT17342__Z
augggcaacaagcaggccaaggccagcgaggcgaaggacagcccccgcgccucccugauccccgacgccacccaccucgggccccaguucugcaaguccugcugguucgagaacaagggccugguggagugcaacaaccacuaccugugccucaacugccugacccugcuccugagcgucuccaaccggugccccaucugcaagaugccccugccgacgaagcuccgccccagcaccgcccccaccgcgccccagaccggggccgccgacuccauccggccgccgcccuacagccccuga

SEQ ID NO: 11678 - RNA, 300 nt, Artificial Sequence
  derived and/or modified CDS sequence (opt1) from LASV(G3016-SLE-2013;Clade IV)__AIT17346__Z
augggcaacaagcaggccaaggcccccgagaccaaggacagcccgcgcgcgucccugauccccgacgccacccaccucgggccccaguucugcaagagcugcugguucgagaacaagggccugguggagugcaacaaccacuaccugugccucaacugccugacgcugcuccuguccgucagcaaccggugccccaucugcaagaugccgcugcccaccaagcuccgccccuccgccgcccccaccgccccgcccgugggggcggccgacagcacccggcccccgcccuacucccccuga

SEQ ID NO: 11679 - RNA, 300 nt, Artificial Sequence
  derived and/or modified CDS sequence (opt1) from LASV(G3148-SLE-2013;Clade IV)__AIT17362__Z
augggcaacaagcaggccaaggcccccgagagcaaggacuccccgcgcgcgagccugauccccgacgccacccaccucgggccccaguucugcaaguccugcugguucgagaacaagggccugguggagugcaacaaccacuaccugugccucaacugccugacccugcuccugagcgucuccaaccggugccccaucugcaagaugccgcugcccacgaagcuccgccccagcgccgcccccaccgccccgcccgcgggggccgccgacuccauccggcccccgcccuacagccccuga

SEQ ID NO: 11680 - RNA, 300 nt, Artificial Sequence
  derived and/or modified CDS sequence (opt1) from LASV(G3151-SLE-2013;Clade IV)__AIT17366__Z
augggcaacaagcagaccaagacccccgaggugaaggacagcccccgcgccucccugauccccgacgccacgcaccucgggccccaguucugcaagagcugcugguucgagaacaagggccuggucgagugcaacaaccacuaccugugccucaacugccugacccugcuccuguccgugagcaaccggugccccaucugcaagaugccgcugcccaccaagcuccgccccuccgcggcccccaccgccccgcccgcccgggccgcggacgacacgcgcccgccgcccuacagccccuga

SEQ ID NO: 11681 - RNA, 300 nt, Artificial Sequence
  derived and/or modified CDS sequence (opt1) from LASV(G3206-SLE-2013;Clade IV)__AIT17376__Z
augggcaacaagcaggccaaggcccccgagagcaaggacuccccgcgcgcgagccugauccccgacgccaccuaccucgggccccaguucugcaaguccugcugguucgagaacaagggccugguggagugcaacaaccacuaccugugccucaacugccugacccugcuccugagcgucuccaaccgcugccccaucugcaagaugccgcugcccacgaagcuccgcagcuccguggcccccaccgcgcccccgacccgggccgccgacagcacccggcccccgcccuacucccccuga

SEQ ID NO: 11682 - RNA, 300 nt, Artificial Sequence
  derived and/or modified CDS sequence (opt1) from LASV(G3229-SLE-2013;Clade IV)__AIT17382__Z
augggcaacaagcagaccaagaccagcgaggugaaggacagcccccgcgccucccugauccccgacgccacgcaccucgggccccaguucugcaaguccugcugguucgagaacaagggccuggucgagugcaacaaccacuaccugugccucaacugccugacccugcuccugagcguguccaaccggugccccaucugcaagaugccccugccgaccaagcuccgccccagcgcggcccccaccgcgcccccggcccgggccgccgacgacacgcgcccgccgcccuacucccccuga

SEQ ID NO: 11683 - RNA, 300 nt, Artificial Sequence
  derived and/or modified CDS sequence (opt1) from LASV(G3234-SLE-2013;Clade IV)__AIT17386__Z
augggcaacaagcaggccaagacccccgaggcccgcgacagcccccgggcgucccugauccccgacgccacccaccucgggccccaguucugcaagagcugcugguucgagaacaagggccugguggagugcaacaaccacuaccugugccucaacugccugacgcugcuccuguccgucagcucccgcugccccaucugcaagaugccgcugcccaccaagcuccggcccagcgccacccccaccgccccgcccgccggggcgggcgacgggacgcgcccgccgcccuacucccccuga

SEQ ID NO: 11684 - RNA, 300 nt, Artificial Sequence
  derived and/or modified CDS sequence (opt1) from LASV(G3278-SLE-2013;Clade IV)__AIT17396__Z
augggcaacaagcaggucaaggcccccgaggcccgcaacagcccgcgggcgucccugauccccgacgccacccaccucgggccccaguucugcaagagcugcugguucgagaacaagggccugguggagugcaacaaccacuaccugugccucaacugccugacccugcuccuggggguguccagccgcugccccaucugcaagaugccgcugcccacgcggcuccgccccuccgccgcccccaccgccccgcccgcggaggccggcgacaacacccggcccccgcccuacagccccuga

SEQ ID NO: 11685 - RNA, 300 nt, Artificial Sequence
  derived and/or modified CDS sequence (opt1) from LASV(G502-SLE-2009;Clade IV)__AIT17124__Z
augggcaacaagcaggucaagacccccgaggccaaggacagcccccgcgccucccugauccccgacgcgacccaccucgggccccaguucugcaagagcugcugguucgagaacaagggccugguggagugcaacaaccacuaccugugccucaacugccugacgcugcuccuguccguggggaaccggugccccaucugcaagaugccgcugcccaccaagcuccgccccagcgugacccccaccgccccgcccacgcgggccgccgacuccaucggcccgccgcccuacagccccuga

SEQ ID NO: 11686 - RNA, 300 nt, Artificial Sequence
  derived and/or modified CDS sequence (opt1) from LASV(G503-SLE-2009;Clade IV)__AIT17128__Z
augggcaacaagcaggccaagacccccgaggccaaggacagcccgcgcgcgaaccugauccccgacgccacccaccucgggccccaguucugcaaguccugcugguucgagaacaagggccugguggagugcaacaaccacuaccugugccucaacugccugacgcugcuccugagcgucuccaaccggugccccaucugcaagaugccgcugcccaccaagcuccgccccagcgccgcccccaccgccccgcccaccggggcggccgacuccauccggcccccgcccuacagccccuga

SEQ ID NO: 11687 - RNA, 300 nt, Artificial Sequence
  derived and/or modified CDS sequence (opt1) from LASV(G610-SLE-2009;Clade IV)__AIT17132__Z
augggcaacaagcaggccaaggcccccgaggcgcgcgacagcccccgggccucccugauccccgacgccacccaccucgggccccaguucugcaagagcugcugguucgagaacaagggccugguggagugcaacaaccacuaccugugccucaacugccugacccugcuccuguccgucagcaaccgcugccccaucugcaagaugccgcugcccacgaagcuccggcccuccgccacccccaccgccccgcccaccgaggcggccgacagcauccgcccgccgcccuaccggcccuga

SEQ ID NO: 11688 - RNA, 300 nt, Artificial Sequence
  derived and/or modified CDS sequence (opt1) from LASV(G676-SLE-2009;Clade IV)__AIT17140__Z
augggcaacaagcaggccaaggcccccgagcccaaggacagcccccgcgcgucccugauccccgacgccacccaccucgggccccaguucugcaagagcugcugguucgagaacaagggccugguggagugcaacaaccacuaccugugccucaacugccugacccugcuccuguccgucagcaaccggugcccgaucugcaagaugccccugcccacgaagcuccgccccuccgccgccccgaccgccccgcccgcgggggccguggacagcacccggcccccgcccuacucccccuga

SEQ ID NO: 11689 - RNA, 300 nt, Artificial Sequence
  derived and/or modified CDS sequence (opt1) from LASV(G692-SLE-2009;Clade IV)__AIT17144__Z
augggcaacaagcaggccaagacccccgagagcaaggacuccccgcgcgccagccugauccccgacgccacccaccucgggccccaguucugcaaguccugcugguucgagaacaagggccugguggagugcaacaaccacuaccugugccucaacugccugacgcugcuccugggggucagcaaccggugccccaucugcaagaugccgcugcccaccaagcuccgcuccagcguggcccccaccgcgcccccgaccggcgccguggacuccauccggcccccgcccuacagccccuga

SEQ ID NO: 11690 - RNA, 300 nt, Artificial Sequence
  derived and/or modified CDS sequence (opt1) from LASV(G733-SLE-2010;Clade IV)__AIT17152__Z
augggcaacaagcaggccaagacccccgagaccaaggacagcccgcgcgccucccugauccccgacgcgacgcaccucgggccccaguucugcaagagcugcugguucgagaacaagggccugguggagugcaacaaccacuaccugugccucaacugccugacccugcuccuguccgucagcaaccggugccccaucugcaagaugccgcugcccaccaagcuccgccccuccaccgcccccacggccccgcccgccggggccgcggacaacacccggcccccgcccuacagccccuga

SEQ ID NO: 11691 - RNA, 300 nt, Artificial Sequence
  derived and/or modified CDS sequence (opt1) from LASV(G808-SLE-2010;Clade IV)__AIT17162__Z
augggcaacaagcaggccaaggccagcgaguccaaggacagcccccgcgccucccugauccccgacgccacccaccucgggccccaguucugcaagagcugcugguucgagaacaagggccugguggagugcaacaaccacuaccugugccucaacugccugacccugcuccuguccgucagcaaccggugccccaucugcaagaugccccugccgacgaagcuccgccccuccgugacccccaccgcgcccccgacccggacggccgacaacacccgcccgccgcccuacagccccuga

SEQ ID NO: 11692 - RNA, 300 nt, Artificial Sequence
  derived and/or modified CDS sequence (opt1) from LASV(Guinea Faranah;Clade IV)__AMZ00378__Z
augggcaaccgccagaccaaggccaccgaggccaaggacagcccccgggcgucccugauccccgacgccacgcaccucgggccccaguucugcaagagcugcugguucgagaacaagggccugguggagugcaacaaccacuaccugugccucaacugccugacccugcuccuguccgucagcucccgcugccccaucugcaagaugccccugccgacccggcucaagagcuccaccaaccccacggcccccagcgccaagaccgaguccagcaucaacccgccgcccuacucccccuga

SEQ ID NO: 11693 - RNA, 300 nt, Artificial Sequence
  derived and/or modified CDS sequence (opt1) from LASV(GUINEA Z-185a;Clade IV)__AMZ00374__Z
augggcaacaagcaggccaaggcccccgagaccaagaacagcccccgcgcgucccugauccccgacgccacccaccucgggccccaguucugcaagagcugcugguucgagaacaagggccugguggagugcaacaaccacuaccugugccucaacugccugacgcugcuccuguccgucagcaaccggugccccaucugcaagaugccgcugcccaccaagcuccgccccuccgccgugcccaccgccccgcccgcccaggugggggaccggacccgcccgccgcccuacagccccuga

SEQ ID NO: 11694 - RNA, 312 nt, Artificial Sequence
  derived and/or modified CDS sequence (opt1) from MOPV/LASV reassortant(IGS-1;Clade IV)__AFY05533__Z
augggcaagacccagagcaaggggcagcccuccaccaaccugcucaaggagacggagccccgccaccccgugauccccgacgcccggggcaccgggcccgaguucugcaagagcugcugguucgagcgccggggccugguccgcugcaacgaccacuaccugugccucaacugccugacccugcuccacaccguguccgaccggugccccaucugcaagcacaagcugcccuuccgccuggagcuccagacgcagcccaccgccccgcccgagaucccgcccagccagaacccgccgcccuacucccccuga

SEQ ID NO: 11695 - RNA, 300 nt, Artificial Sequence
  derived and/or modified CDS sequence (opt1) from LASV(LM032-SLE-2010;Clade IV)__AIT17800__Z
augggcaacaagcaggccaaggcccccgaggcgaaggacagcccgcgcgccucccugauccccgacgccacccaccucgggccccaguucugcaagagcugcugguucgagaacaagggccugguggagugcaacaaccacuaccugugccucaacugccugacccugcuccuguccgucagcaaccggugccccaucugcaagaugccgcugcccacgaagcuccgccccuccgccacccccaccgccccgcccaccgaggcggccgacagcauccggcccccgcccuaccaccccuga

SEQ ID NO: 11696 - RNA, 300 nt, Artificial Sequence
  derived and/or modified CDS sequence (opt1) from LASV(LM222-SLE-2010;Clade IV)__AIT17804__Z
augggcaacaagcaggccaaggccagcgaggagaagaacagcccccgcgccucccugaucccggacgccacccaccucgggccccaguucugcaaguccugcugguucgagaacaagggccugguggagugcaacaaccacuaccugugccucaacugccugacccugcuccugagcgucuccaaccggugccccaucugcaagaugccccugccgacgaagcuccgccccagcaccacccccaccgcgcccccgacgggggccgccgacuccauccggcccccgcccuacagccccuga

SEQ ID NO: 11697 - RNA, 300 nt, Artificial Sequence
  derived and/or modified CDS sequence (opt1) from LASV(LM395-SLE-2009;Clade IV)__AIT17808__Z
augggcaacaagcaggccaaggcccccgagagcaaggacuccccgcgcgcgagccugauccccgacgccacccaccucgggccccaguucugcaaguccugcugguucgagaacaagggccugguggagugcaacaaccacuaccugugccucaacugccugacccugcuccugagcgucuccaaccgcugccccaucugcaagaugccgcugcccacgcgccuccggcccagcgccgcccccaccgccccgcccaccggggcggccgacuccacccggcccccgcccuacagccccuga

SEQ ID NO: 11698 - RNA, 300 nt, Artificial Sequence; identical to SEQ ID NO: 11696
  derived and/or modified CDS sequence (opt1) from LASV(LM776-SLE-2012;Clade IV)__AIT17824__Z

SEQ ID NO: 11699 - RNA, 300 nt, Artificial Sequence
  derived and/or modified CDS sequence (opt1) from LASV(Mad39;Clade IV)__ANH09743__Z
augggcaacaagcaggccaaggccagcgagguggaggacgggccccgcgccucccugauccccgacgccacccaccucggcccccaguucugcaagagcugcugguucgagaacaagucccuggucgagugcaacaaccacuaccugugccucaacugccugacccugcuccugagcguguccaaccggugccccaucugcaagaugccccugccgacgcgccucaagcccagcgugguccccaccgcgcccccgacccgggccggggacggcacccgcccgccgcccuacucccccuga

SEQ ID NO: 11700 - RNA, 300 nt, Artificial Sequence
  derived and/or modified CDS sequence (opt1) from LASV(Mad41;Clade IV)__ANH09745__Z
augggcaacaagcagaccaaggcccccgagguggaggacgggccccgcgccagccugauccccgacgcgacccaccucggcccccaguucugcaaguccugcugguucgagaacaaggggcuggucgagugcaacaaccacuaccugugccucaacugccugacgcugcuccugagcguguccagccggugccccaucugcaagaugccgcugcccacccgccucaagcccuccaucgugcccaccgccccgcccgcccggaccggcgagaacacgcgcccgccgcccuacagccccuga

SEQ ID NO: 11701 - RNA, 300 nt, Artificial Sequence
  derived and/or modified CDS sequence (opt1) from LASV(Mad63;Clade IV)__ANH09749__Z
augggcaacaagcaggccaaggcccccgagguggaggacgggccccgcgcgagccugauccccgacgccacccaccucggcccccaguucugcaaguccugcugguucgagaaccgggggcuggucgagugcaacaaccacuaccugugccucaacugccugacccugcuccugagcguguccaaccgcugccccaucugcaagaugccgcugcccacgcggcucaagcccagcgugguccccaccgccccgcccaccggcgccgggggcgacacccgcccgccgcccuacucccccuga

SEQ ID NO: 11702 - RNA, 300 nt, Artificial Sequence
  derived and/or modified CDS sequence (opt1) from LASV(Mad69;Clade IV)__ANH09751__Z
augggcaacaagcaggccaaggcccccaaggcggaggacgggccgcgcgccagccugauccccgacgccacccaccucggcccccaguucugcaaguccugcugguucgagaacaaggggcugguggagugcaacaaccacuaccugugccucaacugccugacccugcuccugagcgucuccaaccggugccccaucugcaagaugccgcugcccacgcgccucaagcccagcguggugcccaccgccccgcccaccggcgccgggggcgacacccggcccccgccccacucccccuga

SEQ ID NO: 11703 - RNA, 300 nt, Artificial Sequence
  derived and/or modified CDS sequence (opt1) from LASV(Mad83;Clade IV)__ANH09753__Z
augggcaacaagcaggccaaggccagcgaggcggaggacgggccccgcgccucccugauccccgacgccacccaccucggcccccaguucugcaagagcugcugguucgagaacaaggggcugguggagugcaacaaccacuaccugugccucaacugccugacccugcuccuguccgucagcucccggugccccaucugcaagaugccccugccgacgcgccuccggcccagcguggugcccaccgcccccuccgccggcgcgggggacggcacccgcccgccgcccuacagccccuga

SEQ ID NO: 11704 - RNA, 300 nt, Artificial Sequence
  derived and/or modified CDS sequence (opt1) from LASV(NL;Clade IV)__AAO59510__Z
augggcaacaagcagaccaaggcccccgaggccaaggacagcccgcgcgcgucccugauccccgacgccaccuaccucgggccccaguucugcaagagcugcugguucgagaacaagggccugguggagugcaacaaccacuaccugugccucaacugccugacgcugcuccuguccgucagcaaccggugccccaucugcaagaugccgcugcccaccaagcuccgccccuccgccgcccccaccgccccgcccgcgggggccgcccacagcgcccggcccccgcccuacucccccuga

SEQ ID NO: 11705 - RNA, 300 nt, Artificial Sequence
  derived and/or modified CDS sequence (opt1) from LASV(Z0947-SLE-2011;Clade IV)__AIT17838__Z
augggcaacaagcaggccaaggugcccgagagcaaggacuccccgcgcgccagccugauccccgacgcgacccaccucgggccccaguucugcaaguccugcugguucgagaacaagggccuggucgagugcaacaaccacuaccugugccucaacugccugacccugcuccugagcguguccaaccgcugccccaucugcaagaugccgcugcccacgaagcucaagcccagcgccgcccccaccgccccgcccaccggggccgcggacuccauccggcccccgcccuacagccccuga

SEQ ID NO: 11706 - RNA, 300 nt, Artificial Sequence
  derived and/or modified CDS sequence (opt1) from LASV(Z0948-SLE-2011;Clade IV)__AIT17842__Z
augggcaacaagcaggccaaggugcccgagagcaaggacuccccgcgcgccagccugauccccgacgcgacccaccucgggccccaguucugcaaguccugcugguucgagaacaagggccuggucgagugcaacaaccacuaccugugccucaacugccugacccugcuccugagcguguccaaccggugccccaucugcaagaugccgcugcccacgaagcuccgccccagcgccgcccccaccgccccgcccaccgggguggccgacuccauccggcccccgcccuacagccccuga

SEQ ID NO: 11707 - RNA, 300 nt, Artificial Sequence
  derived and/or modified CDS sequence (opt1) from LASV(Z148;Clade IV)__AAT49005__Z
augggcaacaagcaggccaaggcccccgagaccaaggacagcccgcgcgcgucccugauccccgacgccacccaccucgggccccaguucugcaagagcugcugguucgagaacaagggccugguggagugcaacaaccacuaccugugccucaacugccugacgcugcuccuguccgucagcaaccggugccccaucugcaagaugccgcugcccacccgccuccggcccuccgccgugcccaccgccccgcccgcccccgcgggggaccgcaccaagcccccgcccuacagccccuga

SEQ ID NO: 11708 - RNA, 300 nt, Artificial Sequence
  derived and/or modified CDS sequence (opt1) from LASV(Bamba-R114;Clade V)__AHC95547__Z
augggcaaccgccaggccaaggaccccaagguggagagcuccccgcgggccagccugauccccgacgcgacccaccucgggccccaguucugcaaguccugcugguucgagaacaagggccuggucgagugcaacaaccacuaccugugccucaacugccugagccugcuccuguccgugagcaaccgcugccccaucugcaagaugccccugcccacccggcuccgccccacgaccaugcccaccgccccgcagaucaucaaggaggggaccacgaacccgccgcccuacacccccuga

SEQ ID NO: 11709 - RNA, 300 nt, Artificial Sequence
  derived and/or modified CDS sequence (opt1) from LASV(Komina-R16;Clade V)__AHC95545__Z
augggcaacaagcaggccaaggaccccaagaccgagagcuccccgcgcgccagccugauccccgacgcgacccaccucgggccccaguucugcaaguccugcugguucgagaacaagggccugguggagugcaacaaccacuaccugugccucaacugccugagccugcuccuguccgucagcaaccggugccccaucugcaagaugccccugcccacgaagcucaagcccaucaccacccccaccgccccgcagaucacgcgcgaguccaucaccaacccgccgcccuacacccccuga

SEQ ID NO: 11710 - RNA, 300 nt, Artificial Sequence; identical to SEQ ID NO: 11535
  derived and/or modified CDS sequence (opt1) from LASV(Alzey;Clade VI)__SCA79103__Z

SEQ ID NO: 11711 - RNA, 300 nt, Artificial Sequence
  derived and/or modified CDS sequence (opt1) from LASV(NIGERIA IKEJI;Clade II)__AMZ00370__Z
augggcaacaagcaggccaagagcacccgcguggacgagcagcagcgggcccaccugguccccgacgccucccaccucgggccccaguucugcaagagcugcugguucgagaacaagggccugguggagugcaacaaccacuaccugugccucaacugccugucccugcuccugagcguguccagccgcugccccaucugcaagaugccccugcccaccaagcucaagaccuccacccagccgagcgcgccccgggccgaggucccgcccuccaccacgcccccgcccuacagccccuga

SEQ ID NO: 11712 - RNA, 300 nt, Artificial Sequence
  derived and/or modified CDS sequence (opt2) from LASV(Josiah;Clade IV)__ADY11072/NP_694871__Z
augggcaacaagcaggccaaggcccccgaguccaaggacuccccccgcgccucccucauccccgacgccacccaccucggcccccaguucugcaaguccugcugguucgagaacaagggccucgucgagugcaacaaccacuaccucugccucaacugccucacccuccuccucuccgucuccaaccgcugccccaucugcaagaugccccuccccaccaagcuccgccccuccgccgcccccaccgccccccccaccggcgccgccgacuccauccgccccccccccuacucccccuga

SEQ ID NO: 11713 - RNA, 303 nt, Artificial Sequence
  derived and/or modified CDS sequence (opt2) from LASV(Pinneo-NIG-1969;Clade I)__AIT17834__Z
augggcaacaagcagacccgcuccccccccaagcccgagcacccccgccccacccuccuccccgacgccucccaccucggcccccaguucugcaaguccugcugguucgagaacaagggccucgucgagugcaacaaccacuaccucugccucaacugccucacccuccuccucuccgucuccgaccgcugccccaucugcaagaugccccuccccaccaagcucgccguccgcacccagcccuccgcccccccccucaaccagggcaacacccaguccucccccccccccuacucccccuga

SEQ ID NO: 11714 - RNA, 300 nt, Artificial Sequence
  derived and/or modified CDS sequence (opt2) from LASV(Nig08-04;Clade II)__ADU56612__Z
augggcaaccgccagacccgccccaccgaggccaccgagcagucccgcgcccaccucguccccgacgccucccaccucggcccccaguucugcaaguccugcugguucgagaaccgcggccucgucgagugcaacaaccacuaccucugccucaacugccucucccuccuccucuccgucuccucccgcugccccaucugcaagaugccccuccccacccgccucaaggccuccgcccagcccuccgccccccccaccgaggccccccagaacaccacccccccccccuacacccccuga

SEQ ID NO: 11715 - RNA, 300 nt, Artificial Sequence
  derived and/or modified CDS sequence (opt2) from LASV(Nig08-A19;Clade III)__ADU56620__Z
augggcggcaagcacaccaagccccagcgcgaguccaacuccccccgcgccucccucauccccgacgccacccaccucggcccccaguucugcaaguccugcugguucgagaacaagggccucgucgagugcaacaaccacuaccucugccucaacugccucacccuccuccucuccgucuccaaccgcugccccaucugcaagaugccccuccccacccgccuccgcgccuccaccaaccccaccgccccccaggucgagcaggucggccccaccaaccccccccccuacucccccuga

SEQ ID NO: 11716 - RNA, 300 nt, Artificial Sequence
  derived and/or modified CDS sequence (opt2) from LASV(AV;Clade V)__CCA30312__Z
augggcaaccgccaggccaagaaccccgaggucgagaacuccccccgcgccucccucauccccgacgccacccaccucggcccccaguucugcaaguccugcugguucgagaacaagggccucgucgagugcaacaaccacuaccucugccucaacugccucucccuccuccucuccgucuccaaccgcugccccaucugcaagaugccccuccccacccgccuccgccccaccaccacccccaccgccccccagaucaucaaggagaacaccaccaaccccccccccuacacccccuga

SEQ ID NO: 11717 - RNA, 300 nt, Artificial Sequence
  derived and/or modified CDS sequence (opt2) from LASV(Togo/2016/7082;Clade VI)__AMR44579__Z
augggcgcccgccagaccaagcagccccagaucgagggcuccccccgcgccucccucguccccgacgccucccaccucggcccccaguucugcaaguccugcugguucgagaacaagggccucgucgagugcaacaaccacuaccucugccucaacugccucucccuccuccucuccgucuccaaccgcugccccaucugcaagaugccccuccccaccaagcuccgcgucuccuccgcccccuccgccccccccgccgccaccgcccagcccggcacccccccccccuacucccccuga

SEQ ID NO: 11718 - RNA, 300 nt, Artificial Sequence
  derived and/or modified CDS sequence (opt2) from LASV(KAK-428;Clade n.d. (VII))__ANH09761__Z
augggcaacaagggcaccaagcccacccagaacuccgagcccucccgcgccaaccucguccccgacgccuccuaccucggcccccaguucugcaaguccugcugguucgagaacaagggccucgucgagugcaacaaccacuaccucugccucaacugccucaccaugcuccucuccgucuccaaccgcugccccaucugcaagaugccccuccccaccaagaucaaggccuccggcucccccuccgccccccccaccgaggccaacuccgccgucucccccccccccuacacccccuga

SEQ ID NO: 11719 - RNA, 300 nt, Artificial Sequence
  derived and/or modified CDS sequence (opt2) from LASV(ISTH0009-NIG-2011;Clade II)__AIT17402__Z
augggcaaccgccaggccaaguccaccaaggucgacgagcaccagcgcgcccaccucguccccgacgccucccaccucggcccccaguucugcaaguccugcugguucgagaaccgcggccucgucgagugcaacaaccacuaccucugccucaacugccucucccuccuccucuccgucuccucccgcugccccaucugcaagaugccccuccccaccaagcucaaggccgccgcccagcccuccgcccccuccaccgagaccauccagaacaccacccccccccccuacacccccuga

SEQ ID NO: 11720 - RNA, 300 nt, Artificial Sequence
  derived and/or modified CDS sequence (opt2) from LASV(ISTH0012-NIG-2011;Clade II)__AIT17406__Z
augggcaaccgccaggccaaguccuccaaggucgacgagcaccagcgcgcccaccucguccccgacgccucccaccucggcccccaguucugcaaguccugcugguucgagaacaagggccucgucgagugcaacaaccacuaccucugccucaacugccucucccuccuccucuccgucuccucccgcugccccaucugcaagaugccccuccccaccaagcucaaggccgccgcccagcccuccgcccccuccaccgaggccguccagaacaccgcccccccccccuacgcccccuga

SEQ ID NO: 11721 - RNA, 300 nt, Artificial Sequence
  derived and/or modified CDS sequence (opt2) from LASV(ISTH0047-NIG-2011;Clade II)__AIT17410__Z
augggcaacaagcaggccaaguccaccaaggucgacgagcaccagcgcgcccaccucguccccgacgccucccaccucggcccccaguucugcaaguccugcugguucgagaaccgcggccucgucgagugcaacaaccacuaccucugccucaacugccucucccuccuccucuccgucuccucccgcugccccaucugcaagaugccccuccccacccgccucaaggccgccacccagcccuccgcccccuccaccgaggccacccagaacaccacccccccccccuacacccccuga

SEQ ID NO: 11722 - RNA, 300 nt, Artificial Sequence
  derived and/or modified CDS sequence (opt2) from LASV(ISTH0230-NIG-2011;Clade II)__AIT17418__Z
augggcaaccgccaggccaaguccaccaaggucgacgagcaccagcgcgcccaccucguccccgacgccucccaccucggcccccaguucugcaaguccugcugguucgagaaccgcggccucgucgagugcaacaaccacuaccucugccucaacugccucucccuccuccucuccgucuccucccgcugccccaucugcaagaugccccuccccaccaagcucaaggccgccacccagcccuccgcccccuccaccgagaccauccagaacaccacccccccccccuacacccccuga

SEQ ID NO: 11723 - RNA, 300 nt, Artificial Sequence
  derived and/or modified CDS sequence (opt2) from LASV(ISTH0531-NIG-2011;Clade II)__AIT17422__Z
augggcaaccgccaggccaaguccgccaaggucgacgagcaccagcgcgcccaccucguccccgacgccucccaccucggcccccaguucugcaaguccugcugguucgagaaccgcggccucgucgagugcaacaaccacuaccucugccucaacugccucucccuccuccucuccgucuccucccgcugccccaucugcaagaugccccuccccaccaagcucaaggccgccacccagcccuccgcccccuccaccgaggccacccagaacaccacccccccccccuacacccccuga

SEQ ID NO: 11724 - RNA, 300 nt, Artificial Sequence
  derived and/or modified CDS sequence (opt2) from LASV(ISTH0595-NIG-2011;Clade II)__AIT17426__Z
augggcaacaagcaggccaaguccaccaaggucgacgagcaccagcgcgcccaccucguccccgacgccucccaccucggcccccaguucugcaaguccugcugguucgagaaccgcggccucgucgagugcaacaaccacuaccucugccucaacugccucucccuccuccucuccgucuccucccgcugccccaucugcaagaugccccuccccaccaagcucaaggccgccacccagcccuccgcccccuccaccgaggccacccagaacaccacccccccccccuacacccccuga

SEQ ID NO: 11725 - RNA, 300 nt, Artificial Sequence
  derived and/or modified CDS sequence (opt2) from LASV(ISTH1003-NIG-2011;Clade II)__AIT17432__Z
augggcaacaagcaggccaaguccaccaaggucgacgagcaccagcgcgcccaccucguccccgacgccucccaccucggcccccaguucugcaaguccugcugguucgagaaccgcggccucgucgagugcaacaaccacuaccucugccucaacugccucucccuccuccucuccgucuccucccgcugccccaucugcaagaugccccuccccacccgccucaaggccgccacccagcccuccgcccccuccaccgaggccacccagaacaccauccccccccccuacacccccuga

SEQ ID NO: 11726 - RNA, 300 nt, Artificial Sequence
  derived and/or modified CDS sequence (opt2) from LASV(ISTH1038-NIG-2011;Clade II)__AIT17436__Z
augggcaacaagcaggccaaguccaccaaggccgacgagcaccagcgcgcccaccucguccccgacgccucccaccucggcccccaguucugcaaguccugcugguucgagaaccgcggccucgucgagugcaacaaccacuaccucugccucaacugccucucccuccuccucuccgucuccucccgcugccccaucugcaagaugccccuccccaccaagcucaaggccgccacccagcccuccgcccccuccaccgaggccacccgcaacaccacccccccccccuacacccccuga

SEQ ID NO: 11727 - RNA, 300 nt, Artificial Sequence
  derived and/or modified CDS sequence (opt2) from LASV(ISTH1058-NIG-2011;Clade II)__AIT17444__Z
augggcaaccgccaggccaaguccaccaaggucgacgagcaccagcgcgcccaccucguccccgacgccucccaccucggcccccaguucugcaaguccugcugguucgagaacaagggccucgucgagugcaacaaccacuaccucugccucaacugccucucccuccuccucuccgucuccucccgcugccccaucugcaagaugccccuccccaccaagcucaaggccgccgcccagcccuccgcccccuccaccgaggccgcccagaacaccgcccccccccccuacgcccccuga

SEQ ID NO: 11728 - RNA, 300 nt, Artificial Sequence
  derived and/or modified CDS sequence (opt2) from LASV(ISTH1064-NIG-2011;Clade II)__AIT17448__Z
augggcaaccgccaggccaaguccaccaaggucggcgagcaccagcgcgcccaccucguccccgacgccucccaccucggcccccaguucugcaaguccugcugguucgagaaccgcggccucgucgagugcaacaaccacuaccucugccucaacugccucucccuccuccucuccgucuccucccgcugccccaucugcaagaugccccuccccaccaagcucaaggccaccgcccagcccuccgcccccuccgccgaggccauccagaacaccacccccccccccuacacccccuga

SEQ ID NO: 11729 - RNA, 300 nt, Artificial Sequence
  derived and/or modified CDS sequence (opt2) from LASV(ISTH1069-NIG-2011;Clade II)__AIT17452__Z
augggcaaccgccaggccaaguccacccgcgucgacgagcaccagcgcgcccaccucguccccgacgccucccaccucggcccccaguucugcaaguccugcugguucgagaaccgcggccucgucgagugcaacaaccacuaccucugccucaacugccucucccuccuccucuccgucuccucccgcugccccaucugcaagaugccccuccccacccgccuccgcgccgccguccagcccuccgcccccuccaccgagaccacccaggacaccacccccccccccuacucccccuga

SEQ ID NO: 11730 - RNA, 300 nt, Artificial Sequence
  derived and/or modified CDS sequence (opt2) from LASV(ISTH1096-NIG-2012;Clade II)__AIT17456__Z
augggcaaccgccaggccaaguccaccgaggucaacgagcaccagcgcgcccaccucguccccgacgccucccaccucggcccccaguucugcaaguccugcugguucgagaaccgcggccucgucgagugcaacaaccacuaccucugccucaacugccucucccuccuccucuccgucuccucccgcugccccaucugcaagaugccccuccccaccaagcucaaggccgccacccagcccuccgcccccuccaccgaggucacccagaacaccguccccccccccuacucccccuga

SEQ ID NO: 11731 - RNA, 300 nt, Artificial Sequence
  derived and/or modified CDS sequence (opt2) from LASV(ISTH1107-NIG-2012;Clade II)__AIT17460__Z
augggcaaccgccaggccaaguccaccaaggucgacgagcaccagcgcgcccaccucguccccgacgccucccaccucggcccccaguucugcaaguccugcugguucgagaaccgcggccucgucgagugcaacaaccacuaccucugccucaacugccucucccuccuccucuccgucuccucccgcugccccaucugcaagaugccccuccccaccaagcucaaggccgccgcccagcccuccgccccccccaccgaggccacccagaacaccacccccccccccuacacccccuga

SEQ ID NO: 11732 - RNA, 300 nt, Artificial Sequence
  derived and/or modified CDS sequence (opt2) from LASV(ISTH1111-NIG-2011;Clade II)__AIT17464__Z
augggcaaccgccaggccaaguccaccaaggucgacgagcaccagcgcgcccaccucguccccgacgccucccaccucggcccccaguucugcaaguccugcugguucgagaaccgcggccucgucgagugcaacaaccacuaccucugccucaacugccucucccuccuccucuccgucuccucccgcugccccaucugcaagaugccccuccccaccaagcucaaggccgccgcccagcccuccgcccccuccaccgaggccacccaggacaccacccccccccccuacacccccuga

SEQ ID NO: 11733 - RNA, 300 nt, Artificial Sequence
  derived and/or modified CDS sequence (opt2) from LASV(ISTH1121-NIG-2012;Clade II)__AIT17468__Z
augggcaaccgccaggccaagcagaccaaggucgacgagcaccagcgcgcccaccucguccccgacgccucccaccucggcccccaguucugcaaguccugcugguucgagaaccgcggccucgucgagugcaacaaccacuaccucugccucaacugccucucccuccuccucuccaucuccucccgcugccccaucugcaagaugccccuccccaccaagcucaaggccgccgcccagcccuccgcccccuccaccgaggccacccaggacaccacccccccccccuacacccccuga

SEQ ID NO: 11734 - RNA, 300 nt, Artificial Sequence
  derived and/or modified CDS sequence (opt2) from LASV(ISTH1129-NIG-2012;Clade II)__AIT17472__Z
augggcaacaagcagaccaaguccaccaaggccgacgagcaccagcgcgcccaccucguccccgacgccucccaccucggcccccaguucugcaaguccugcugguucgagaaccgcggccucgucgagugcaacaaccacuaccucugccucaacugccucucccuccuccucuccgucuccucccgcugccccaucugcaagaugccccuccccacccgccucaaggccgccgcccagcccuccgcccccuccaccgaggccacccaggacaccacccccccccccuacacccccuga

SEQ ID NO: 11735 - RNA, 300 nt, Artificial Sequence
  derived and/or modified CDS sequence (opt2) from LASV(ISTH1137-NIG-2011;Clade II)__AIT17476__Z
augggcaaccgccaggccaaguccaccaaggucgacgagcaccagcgcgcccaccucguccccgacgccucccaccucggcccccaguucugcaaguccugcugguucgagaaccgcggccucgucgagugcaacaaccacuaccucugccucaacugccucucccuccuccucuccgucuccucccgcugccccaucugcaagaugccccuccccaccaagcucaaggccgccgcccagcccuccgcccccuccgccgaggccauccagaacaccacccccccccccuacacccccuga

SEQ ID NO: 11736 - RNA, 300 nt, Artificial Sequence
  derived and/or modified CDS sequence (opt2) from LASV(ISTH2010-NIG-2012;Clade II)__AIT17480__Z
augggcaaccgccacgccaaguccaccaaggucgacgagcaccagcgcgcccaccucguccccgacgccucccaccucggcccccaguucugcaaguccugcugguucgagaaccgcggccucgucgagugcaacaaccacuaccucugccucaacugccucucccuccuccucuccgucuccucccgcugccccaucugcaagaugccccuccccaccaagcucaaggccgccgcccagcccuccgcccccuccaccgaggucauccaguccaccacccccccccccuacacccccuga

SEQ ID NO: 11737 - RNA, 300 nt, Artificial Sequence
  derived and/or modified CDS sequence (opt2) from LASV(ISTH2016-NIG-2012;Clade II)__AIT17484__Z
augggcaaccgccacgccaaguccaccaaggucgacgagcaccagcgcgcccaccucguccccgacgccucccaccucggcccccaguucugcaaguccugcugguucgagaaccgcggccucgucgagugcaacaaccacuaccucugccucaacugccucucccuccuccucuccgucuccucccgcugccccaucugcaagaugccccuccccaccaagcucaaggccgccgcccagcccuccgcccccuccaccgaggagauccagaacaccacccccccccccuacacccccuga

SEQ ID NO: 11738 - RNA, 300 nt, Artificial Sequence
  derived and/or modified CDS sequence (opt2) from LASV(ISTH2020-NIG-2012;Clade II)__AIT17488__Z
augggcaaccgccaggccaagcccaccaaggucgacgagcaccagcgcgcccaccucguccccgacgccucccaccucggcccccaguucugcaaguccugcugguucgagaacaagggccucgucgagugcaacaaccacuaccucugccucaacugccucucccuccuccucuccgucuccucccgcugccccaucugcaagaugccccuccccaccaagcucaaggccgccgcccagcccuccgcccccuccaccgaggccgcccagaacaccgcccccccccccuacgcccccuga

SEQ ID NO: 11739 - RNA, 300 nt, Artificial Sequence
  derived and/or modified CDS sequence (opt2) from LASV(ISTH2031-NIG-2012;Clade II)__AIT17496__Z
augggcaaccgccaggccaaguccaccaaggucgacgagcaccagcgcgcccaccucguccccgacgccucccaccucggcccccaguucugcaaguccugcugguucgagaaccgcggccucgucgagugcaacaaccacuaccucugccucaacugccucucccuccuccucuccgucuccucccgcugccccaucugcaagaugccccuccccacccgccucaaggccgccacccagcccuccgcccccuccaccgaggccacccagaccaccacccccccccccuacacccccuga

SEQ ID NO: 11740 - RNA, 300 nt, Artificial Sequence
  derived and/or modified CDS sequence (opt2) from LASV(ISTH2037-NIG-2012;Clade II)__AIT17500__Z
augggcaaccgccagaccaaguccaccaaggucgacgagcaccagcgcgcccaccucguccccgacgccucccaccucggcccccaguucugcaaguccugcugguucgagaacaagggccucgucgagugcaacaaccacuaccucugccucaacugccucucccuccuccucuccgucuccucccgcugccccaucugcaagaugccccuccccaccaagcucaagaccgccgcccagcccuccgccccccccaccgaggccgcccgcaccaccgcccccccccccuacgcccccuga

SEQ ID NO: 11741 - RNA, 300 nt, Artificial Sequence
  derived and/or modified CDS sequence (opt2) from LASV(ISTH2042-NIG-2012;Clade II)__AIT17504__Z
augggcaaccgccacgccaaguccaccaaggucgacgagcaccagcgcgcccaccucguccccgacgccucccaccucggcccccaguucugcaaguccugcugguucgagaaccgcggccucgucgagugcaacaaccacuaccucugccucaacugccucucccuccuccucuccgucuccucccgcugccccaucugcaagaugccccuccccaccaagcucaaggccgccgcccagcccuccgcccccuccaccgaggccauccagaacaccacccccccccccuacacccccuga

SEQ ID NO: 11742 - RNA, 300 nt, Artificial Sequence
  derived and/or modified CDS sequence (opt2) from LASV(ISTH2046-NIG-2012;Clade II)__AIT17508__Z
augggcaaccgccagaccaaguccaccaaggucgacgagcaccagcgcgcccaccucguccccgacgccucccaccucggcccccaguucugcaaguccugcugguucgagaacaagggccucgucgagugcaacaaccacuaccucugccucaacugccucucccuccuccucuccgucuccucccgcugccccaucugcaagaugccccuccccaccaagcucaaggccgccgcccagcccuccgcccccuccaccgaggccacccagaacaccgcccccccccccuacgcccccuga

SEQ ID NO: 11743 - RNA, 300 nt, Artificial Sequence
  derived and/or modified CDS sequence (opt2) from LASV(ISTH2050-NIG-2012;Clade II)__AIT17512__Z
augggcaaccgccaggccaaguccaccaaggucuacgagcaccagcgcgcccaccucguccccgacgccucccaccucggcccccaguucugcaaguccugcugguucgagaaccgcggccucgucgagugcaacaaccacuaccucugccucaacugccucucccuccuccucuccgucuccucccgcugccccaucugcaagaugccccuccccacccgccucaaggccgccacccagcccuccgcccccuccaccgaggccacccagaacaccacccccccccccuacacccccuga

SEQ ID NO: 11744 - RNA, 300 nt, Artificial Sequence
  derived and/or modified CDS sequence (opt2) from LASV(ISTH2057-NIG-2012;Clade II)__AIT17516__Z
augggcaaccgccaggccaaguccaccaaggucgacgagcaccagcgcgcccaccucguccccgacgccucccaccucggcccccaguucugcaaguccugcugguucgagaaccgcggccucgucgagugcaacaaccacuaccucugccucaacugccucucccuccuccucuccgucuccucccgcugccccaucugcaagaugccccuccccaccaagcucaagaccgccacccagcccuccgccccccucaccgaggccacccagaacaccacccccccccccuacacccccuga

SEQ ID NO: 11745 - RNA, 300 nt, Artificial Sequence
  derived and/or modified CDS sequence (opt2) from LASV(ISTH2061-NIG-2012;Clade II)__AIT17520__Z
augggcaacaagcaggccaaguccaccaaggucgacgagcaccagcgcgcccaccucguccccgacgccucccaccucggcccccaguucugcaaguccugcugguucgagaaccgcggccucgucgagugcaacaaccacuaccucugccucaacugccucucccuccuccucuccgucuccaaccgcugccccaucugcaagaugccccuccccaccaagcucaaggccgccgcccagcccuccgcccccuccaccgaggccacccagaacaccacccccccccccuacacccccuga

SEQ ID NO: 11746 - RNA, 300 nt, Artificial Sequence
  derived and/or modified CDS sequence (opt2) from LASV(ISTH2065-NIG-2012;Clade II)__AIT17526__Z
augggcaaccgccaggccaaguccgccaaggucaccgagcaccagcgcgcccaccucguccccgacgccucccaccucggcccccaguucugcaaguccugcugguucgagaacaagggccucgucgagugcaacaaccacuaccucugccucaacugccucucccuccuccucuccgucuccucccgcugccccaucugcaagaugccccuccccacccgccucaaggccgccacccagcccuccgcccccuccgccgaggccccccaguccaccacccccccccccuacacccccuga

SEQ ID NO: 11747 - RNA, 300 nt, Artificial Sequence
  derived and/or modified CDS sequence (opt2) from LASV(ISTH2094-NIG-2012;Clade II)__AIT17536__Z
augggcaaccgccagacccgccccaccgaggccaccgagcagucccgcgcccaccucguccccgacgccucccaccucggcccccaguucugcaaguccugcugguucgagaacaagggccucgucgagugcaacaaccacuaccucugccucaacugccucucccuccuccucuccgucuccucccgcugccccaucugcaagaugccccuccccacccgccucaaggccuccgcccagcccuccgccccccccaccgaggccccccagaacaaggcccccccccccuacacccccuga

SEQ ID NO: 11748 - RNA, 300 nt, Artificial Sequence
  derived and/or modified CDS sequence (opt2) from LASV(ISTH2129-NIG-2012;Clade II)__AIT17542__Z
augggcaaccgccaggucaaguccaccaaggucgacgagcaccagcgcgcccaccucauccccgacgccucccaccucggcccccaguucugcaaguccugcugguucgagaaccgcggccucgucgagugcaacaaccacuaccucugccucaacugccucucccuccuccucuccgucuccucccgcugccccaucugcaagaugccccuccccaccaagcucgaggccgccgcccagcccuccgcccccuccaccgaggccacccaggacaccacccccccccccuacacccccuga

SEQ ID NO: 11749 - RNA, 300 nt, Artificial Sequence
  derived and/or modified CDS sequence (opt2) from LASV(ISTH2217-NIG-2012;Clade II)__AIT17546__Z
augggcaacaagcaggccaaguccaccaaggucgacgagcaccagcgcgcccaccucguccccgacgccucccaccucggcccccaguucugcaaguccugcugguucgagaaccgcggccucgucgagugcaacaaccacuaccucugccucaacugccucucccuccuccucuccgucuccucccgcugccccaucugcaagaugccccuccccaccaagcucaaggccgccgcccagcccuccgcccccuccaccgagaccauccagaacaccacccccccccccuacacccccuga

SEQ ID NO: 11750 - RNA, 300 nt, Artificial Sequence
  derived and/or modified CDS sequence (opt2) from LASV(ISTH2271-NIG-2012;Clade II)__AIT17550__Z
augggcaaccgccaggccaagcagaccaaggucgacgagcaccagcgcgcccaccucguccccgacgccucccaccucggcccccaguucugcaaguccugcugguucgagaaccgcggccucgucgagugcaacaaccacuaccucugccucaacugccucucccuccuccucuccgucuccucccgcugccccaucugcaagaugccccuccccaccaagcucaaggccgccgcccagcccuccgcccccuccaccgagaucacccagaacaccacccccccccccuacacccccuga

SEQ ID NO: 11751 - RNA, 300 nt, Artificial Sequence
  derived and/or modified CDS sequence (opt2) from LASV(ISTH2304-NIG-2012;Clade II)__AIT17554__Z
augggcaaccgccaggccaaguccaccaaggccgacgagcaccagcgcgcccaccucguccccgacgccucccaccucggcccccaguucugcaaguccugcugguucgagaaccgcggccucgucgagugcaacaaccacuaccucugccucaacugccucucccuccuccucuccgucuccaaccgcugccccaucugcaagaugccccuccccacccgccucaaggccgccgcccagcccuccgcccccuccaccgaggccacccaggacaccacccccccccccuacacccccuga

SEQ ID NO: 11752 - RNA, 300 nt, Artificial Sequence
  derived and/or modified CDS sequence (opt2) from LASV(ISTH2312-NIG-2012;Clade II)__AIT17558__Z
augggcaaccgccaggccaaguccaccaaggucgacgagcaccagcgcgcccaccucguccccgacgccucccaccucggcccccaguucugcaaguccugcugguucgagaaccgcggccucgucgagugcaacaaccacuaccucugccucaacugccucucccuccuccucuccgucuccucccgcugccccaucugcaagaugccccuccccacccgccucaaggccgccgcccagcccuccgcccccuccaccgaggccauccgcuccaccacccccccccccuacacccccuga

SEQ ID NO: 11753 - RNA, 300 nt, Artificial Sequence
  derived and/or modified CDS sequence (opt2) from LASV(ISTH2358-NIG-2012;Clade II)__AIT17570__Z
augggcaaccgccaggccaaguccgccaaggucaacgagcaccagcgcgcccaccucguccccgacgccucccaccucggcccccaguucugcaaguccugcugguucgagaaccgcggccucgucgagugcaacaaccacuaccucugccucaacugccucucccuccuccucuccgucuccucccgcugccccaucugcaagaugccccuccccaccaagcucaaggccgccgcccagcccuccgcccccuccaccgaggccacccagaacaucacccccccccccuacacccccuga

SEQ ID NO: 11754 - RNA, 300 nt, Artificial Sequence
  derived and/or modified CDS sequence (opt2) from LASV(Lassa virus/H.sapiens-wt/NGA/2016/ISTH_0017;Clade II)__AVO03713__Z
augggcaaccgccaggccaaguccaccaaggucgacgagcaccagcgcgcccaccucguccccgacgccucccaccucggcccccaguucugcaaguccugcugguucgagaaccgcggccucgucgagugcaacaaccacuaccucugccucaacugccucucccuccuccucuccgucuccucccgcugccccaucugcaagaugccccuccccaccaagcucaaggccgccacccagcccuccgcccccuccaccgaggucaaccagaacaccacccccccccccuacacccccuga

SEQ ID NO: 11755 - RNA, 300 nt, Artificial Sequence
  derived and/or modified CDS sequence (opt2) from LASV(Lassa virus/H.sapiens-wt/NGA/2016/ISTH_0035;Clade II)__AVO03731__Z
augggcaaccgccaggccaaguccaccaaggucgacgagcaccagcgcgcccaccuccuccccgacgccucccaccucggcccccaguucugcaaguccugcugguucgagaaccgcggccucgucgagugcaacaaccacuaccucugccucaacugccucucccuccuccucuccgucuccucccgcugccccaucugcaagaugccccuccccaccaagcucaaggccgccacccagcccuccgcccccuccaccgaggccacccagaacaccacccccccccccuacacccccuga

SEQ ID NO: 11756 - RNA, 300 nt, Artificial Sequence
  derived and/or modified CDS sequence (opt2) from LASV(Lassa virus/H.sapiens-wt/NGA/2016/ISTH_0703;Clade II)__AVO03703__Z
augggcaacaagcagaccaaguccaccaaggucgacgagcaccagcgcgcccaccucguccccgacgccucccaccucggcccccaguucugcaaguccugcugguucgagaaccgcggccucgucgagugcaacaaccacuaccucugccucaacugccucucccuccuccucuccgucuccucccgcugccccaucugcaagaugccccuccccaccaagcucaaggccgccgcccagcccuccgcccccuccaccgaggccacccagaacaucacccccccccccuacacccccuga

SEQ ID NO: 11757 - RNA, 300 nt, Artificial Sequence
  derived and/or modified CDS sequence (opt2) from LASV(Lassa virus/H.sapiens-wt/NGA/2016/ISTH_0717;Clade II)__AVO03670__Z
augggcggcaagcacuccaagccccccggcgaguccaacuccccccgcgccucccucauccccgacgccacccaccucggcccccaguucugcaaguccugcugguucgagaacaagggccucgucgagugcaacaaccacuaccucugccucaacugccucucccuccuccucuccgucuccaaccgcugccccaucugcaagaugccccuccccacccgccuccgcgccuccaccaaccccaccgccccccaggucggccagaucgaccccaccaaccccccccccuacucccccuga

SEQ ID NO: 11758 - RNA, 300 nt, Artificial Sequence
  derived and/or modified CDS sequence (opt2) from LASV(Lassa virus/H.sapiens-wt/NGA/2016/ISTH_0753;Clade II)__AVO03748__Z
augggcaaccgccaggccaaguccaccaaggucgacgagcaccagcgcgcccaccucguccccgacgccucccaccucggcccccaguucugcaaguccugcugguucgagaaccgcggccucgucgagugcaacaaccacuaccucugccucaacugccucucccuccuccucuccgucuccaaccgcugccccaucugcaagaugccccuccccaccaagcucaaggccgccgcccagcccuccgcccccuccaccgaggccacccaggacaccacccccccccccuacacccccuga

SEQ ID NO: 11759 - RNA, 300 nt, Artificial Sequence
  derived and/or modified CDS sequence (opt2) from LASV(Lassa virus/H.sapiens-wt/NGA/2016/ISTH_0919;Clade II)__AVO03760__Z
augggcaaccgccacgccaagcccaccaaggucgacgagcaccagcgcgcccaccucguccccgacgccucccaccucggcccccaguucugcaaguccugcugguucgagaacaagggccucgucgagugcaacaaccacuaccucugccucaacugccucucccuccuccucuccgucuccucccgcugccccaucugcaagaugccccuccccaccaagcucaaggccgccgcccagcccuccgcccccuccgccgaggccacccagaacaccgcccccccccccuacacccccuga

SEQ ID NO: 11760 - RNA, 300 nt, Artificial Sequence
  derived and/or modified CDS sequence (opt2) from LASV(Lassa virus/H.sapiens-wt/NGA/2016/ISTH_1006;Clade II)__AVO03750__Z
augggcaacaagcagaccaaguccaccaaggucgacgagcaccagcgcgcccaccucguccccgacgccucccaccucggcccccaguucugcaaguccugcugguucgagaaccgcggccucgucgagugcaacaaccacuaccucugccucaacugccucucccuccuccucuccgucuccucccgcugccccaucugcaagaugccccuccccaccaagcucaagaccgucgcccagcccuccgccccccccaccgaggccacccagaacaccacccccccccccuacacccccuga

SEQ ID NO: 11761 - RNA, 297 nt, Artificial Sequence
  derived and/or modified CDS sequence (opt2) from LASV(Lassa virus/H.sapiens-wt/NGA/2016/ISTH_1070;Clade II)__AVO03754__Z
ggcaaccgccaggccaagcccaccaaggucgacgagcaccagcgcgcccaccucguccccgacgccucccaccucggcccccaguucugcaaguccugcugguucgagaacaagggccucgucgagugcaacaaccacuaccucugccucaacugccucucccuccuccucggcgucuccucccgcugccccaucugcaagaugccccuccccaccaagcucaaggccgccgcccagcccuccgcccccuccaccgaggccgcccagaacaccgcccccccccccuacgcccccuga

SEQ ID NO: 11762 - RNA, 300 nt, Artificial Sequence
  derived and/or modified CDS sequence (opt2) from LASV(Lassa virus/H.sapiens-wt/NGA/2016/ISTH_1174;Clade II)__AVO03716__Z
augggcaaccgccaggccaaguccaccaaggucgacgagcaccagcgcgcccaccucguccccgacgccucccaccucggcccccaguucugcaaguccugcugguucgagaaccgcggccucgucgagugcaacaaccacuaccucugccucaacugccucucccuccuccucuccgucuccucccgcugccccaucugcaagaugccccuccccaccaagcucaaggccgccacccagcccuccgccccccccaccgagaccacccagaacaccacccccccccccuacacccccuga

SEQ ID NO: 11763 - RNA, 300 nt, Artificial Sequence
  derived and/or modified CDS sequence (opt2) from LASV(Lassa virus/H.sapiens-wt/NGA/2016/ISTH_1207;Clade II)__AVO03680__Z
augggcaaccgccaggccaaguccaccaaggucgacgagcaccagcgcgcccaccucguccccgacgccucccaccucggcccccaguucugcaaguccugcugguucgagaaccgcggccucgucgagugcaacaaccacuaccucugccucaacugccucucccuccuccucuccgucuccucccgcugccccaucugcaagaugccccuccccaccaagcuccgcgccaccgcccagcccuccgcccccuccaccgaggccacccagaacaccacccccccccccuacacccccuga

SEQ ID NO: 11764 - RNA, 300 nt, Artificial Sequence
  derived and/or modified CDS sequence (opt2) from LASV(Lassa virus/H.sapiens-wt/NGA/2016/ISTH_1311;Clade II)__AVO03739__Z
augggcaaccgccaggccaagcccaccgaggccaucgagcagaaccgcgcccaccucguccccgacgccucccaccucggcccccaguucugcaaguccugcugguucgagaacaagggccucgucgagugcaacaaccacuaccucugccucaacugccucucccuccuccucuccgucuccucccgcugccccaucugcaagaugccccuccccacccgccucaaggccuccgcccagcccuccgcccccuccgccgaggccccccagaacgccaagcccccccccuacucccccuga

SEQ ID NO: 11765 - RNA, 300 nt, Artificial Sequence
  derived and/or modified CDS sequence (opt2) from LASV(Lassa virus/H.sapiens-wt/NGA/2016/ISTH_1423;Clade II)__AVO03685__Z
augggcaacaagcaggccaaguccaucaaggccgacgagcaccagcgcgcccaccucguccccgacgccucccaccucggcccccaguucugcaaguccugcugguucgagaaccgcggccucgucgagugcaacaaccacuaccucugccucaacugccucucccuccuccucuccgucuccucccgcugccccaucugcaagaugccccuccccaccaagcucaagaccgccgcccagcccuccgccccccccgucggcgccacccagaacaccacccccccccccuacacccccuga

SEQ ID NO: 11766 - RNA, 300 nt, Artificial Sequence
  derived and/or modified CDS sequence (opt2) from LASV(Lassa virus/H.sapiens-wt/NGA/2016/ISTH_1462;Clade II)__AVO03690__Z
augggcaacaagcagaccaaguccaccaaggucgacgagcaccagcgcgcccaccucguccccgacgccucccaccucggcccccaguucugcaaguccugcugguucgagaaccgcggccucgucgagugcaacaaccacuaccucugccucaacugccucucccuccuccucuccgucuccucccgcugccccaucugcaagaugccccuccccaccaagcucaaggccgccgcccagcccuccgcccccuccaccgaggccacccagaacaccacccccccccccuacacccccuga

SEQ ID NO: 11767 - RNA, 300 nt, Artificial Sequence
  derived and/or modified CDS sequence (opt2) from LASV(Lassa virus/H.sapiens-wt/NGA/2016/ISTH_1472;Clade II)__AVO03726__Z
augggcaacaagcagaccaaguccaccaaggucgacgagcaccagcgcgcccaccucguccccgacgccucccaccucggcccccaguucugcaaguccugcugguucgagaaccgcggccucgucgagugcaacaaccacuaccucugccucaacugccucucccuccuccucuccgucuccucccgcugccccaucugcaagaugccccuccccaccaagcucaaggccgccgcccagcccuccgccccccccaccgaggccacccagaacaccacccccccccccuacacccccuga

SEQ ID NO: 11768 - RNA, 300 nt, Artificial Sequence
  derived and/or modified CDS sequence (opt2) from LASV(Lassa virus/H.sapiens-wt/NGA/2016/ISTH_1496;Clade II)__AVO03693__Z
augggcaacaagcaggccaaguccaccaagaucgacgaccaccagcgcgcccaccucguccccgacgccucccaccucggcccccaguucugcaaguccugcugguucgagaaccgcggccucgucgagugcaacaaccacuaccucugccucaacugccucucccuccuccucuccgucuccucccgcugccccaucugcaagaugccccuccccaccaagcucaaggccgccgcccagcccuccgcccccuccaccgagaccauccagaacaccacccccccccccuacacccccuga

SEQ ID NO: 11769 - RNA, 300 nt, Artificial Sequence
  derived and/or modified CDS sequence (opt2) from LASV(Lassa virus/H.sapiens-wt/NGA/2016/ISTH_1546;Clade II)__AVO03665__Z
augggcggcaagcagucccgcccccccaagaaggucgacuccccccgcgccaaccucauccccgacgccuccuacaugggcccccaguucugcaaguccugcugguucgagaacaagggccucgucgagugcaacaaccacuaccucugccucaacugccucucccuccuccucuccgucuccucccgcugccccaucugcaagaugccccuccccaccaagcucaaggccuccaccucccccaccgccccccccaucaucggcaccaacaccaccaaccccccccccuacucccccuga

SEQ ID NO: 11770 - RNA, 300 nt, Artificial Sequence
  derived and/or modified CDS sequence (opt2) from LASV(Lassa virus/H.sapiens-wt/NGA/2016/ISTH_1568;Clade II)__AVO03711__Z
augggcaaccgccaggcccgcuccaccaaggucgacgagcaccagcgcgcccaccuccuccccgacgccucccaccucggcccccaguucugcaaguccugcugguucgagaaccgcggccucgucgagugcaacaaccacuaccucugccucaacugccucucccuccuccucuccgucuccucccgcugccccaucugcaagaugccccuccccaccaagcucaaggccgccacccagcccuccgcccccuccaccgaggccacccagaacaccacccccccccccuacacccccuga

SEQ ID NO: 11771 - RNA, 300 nt, Artificial Sequence
  derived and/or modified CDS sequence (opt2) from LASV(Lassa virus/H.sapiens-wt/NGA/2016/ISTH_1610;Clade II)__AVO03687__Z
augggcaaccgccaggccaaguccaccaaggucgccgagcaccagcgcgcccaccucguccccgacgccucccaccucggcccccaguucugcaaguccugcugguucgagaacaagggccucgucgagugcaacaaccacuaccucugccucaacugccucucccuccuccucuccgucuccucccgcugccccaucugcaagaugccccuccccaccaagcuccgcgccaccgcccagcccuccgccccccccuccgaggccacccaguccaccacccccccccccuacacccccuga

SEQ ID NO: 11772 - RNA, 300 nt, Artificial Sequence
  derived and/or modified CDS sequence (opt2) from LASV(Lassa virus/H.sapiens-wt/NGA/2018/ISTH_0026;Clade II)__AVV65086__Z
augggcaacaagcaggccaaguccaccaaggucgacgagcaccagcgcgcccaccucguccccgacgccucccaccucggcccccaguucugcaaguccugcugguucgagaaccgcggccucgucgagugcaacaaccacuaccucugccucaacugccucucccuccuccucuccgucuccucccgcugccccaucugcaagaugccccuccccacccgccucaaggccgccacccagcccuccgcccccuccaccgaggccacccgcaacaccacccccccccccuacacccccuga

SEQ ID NO: 11773 - RNA, 300 nt, Artificial Sequence
  derived and/or modified CDS sequence (opt2) from LASV(Lassa virus/H.sapiens-wt/NGA/2018/ISTH_0097;Clade II)__AVV65091__Z
augggcaacaagcagaccaaguccaccaaggucgacgagcaccagcgcgcccaccucguccccgacgccucccaccucggcccccaguucugcaaguccugcugguucgagaaccgcggccucgucgagugcaacaaccacuaccucugccucaacugccucucccuccuccucuccgucuccucccgcugccccaucugcaagaugccccuccccaccaagcucaaggccgccgcccagcccuccgcccccuccaccgaggucacccagaacaccacccccccccccuacacccccuga

SEQ ID NO: 11774 - RNA, 300 nt, Artificial Sequence
  derived and/or modified CDS sequence (opt2) from LASV(Lassa virus/H.sapiens-wt/NGA/2018/ISTH_0664;Clade II)__AVV65093__Z
augggcaacaagcagaccaaguccaccaaggucgacgagcaccagcgcgcccaccucguccccgacgccucccaccucggcccccaguucugcaaguccugcugguucgagaaccgcggccucgucgagugcaacaaccacuaccucugccucaacugccucucccuccuccucuccgucuccggccgcugccccaucugcaagaugccccuccccaccaagcucaaggccgccgcccagcccuccgcccccuccaccgaggccacccagaacaccacccccccccccuacacccccuga

SEQ ID NO: 11775 - RNA, 300 nt, Artificial Sequence
  derived and/or modified CDS sequence (opt2) from LASV(Lassa virus/H.sapiens-wt/NGA/2018/ISTH_0959;Clade II)__AVV65084__Z
augggcaacaagcaggccaaguccaccaaggucgacgagcaccagcgcgcccaccucguccccgacgccucccaccucggcccccaguucugcaaguccugcugguucgagaaccgcggccucgucgagugcaacaaccacuaccucugccucaacugccucucccuccuccucuccgucuccucccgcugccccaucugcaagaugccccuccccaccaagcucaaggccgccgcccagcccuccgcccccuccaccgaggccauccaguccaccacccccccccccuacacccccuga

SEQ ID NO: 11776 - RNA, 300 nt, Artificial Sequence
  derived and/or modified CDS sequence (opt2) from LASV(Lassa virus/H.sapiens-wt/NGA/2018/ISTH_1079;Clade II)__AVV65074__Z
augggcaacaagcagaccaaguccaccaaggucgacgagcaccagcgcgcccaccucguccccgacgccucccaccucggcccccaguucugcaaguccugcugguucgagaacaagggccucgucgagugcaacaaccacuaccucugccucaacugccucucccuccuccucuccgucuccucccgcugccccaucugcaagaugccccuccccaccaagcucaagaccgccgcccagcccuccgccccccccaccgaggccacccagaacaccacccccccccccuacacccccuga

SEQ ID NO: 11777 - RNA, 300 nt, Artificial Sequence
  derived and/or modified CDS sequence (opt2) from LASV(Lassa virus/H.sapiens-wt/NGA/2018/ISTH_1177;Clade II)__AVV65080__Z
augggcaaccgccagaccaaguccaccaaggucgacgagcaccagcgcgcccaccucguccccgacgccucccaccucggcccccaguucugcaaguccugcugguucgagaacaagggccucgucgagugcaacaaccacuaccucugccucaacugccucucccuccuccucuccgucuccucccgcugccccaucugcaagaugccccuccccaccaagcucaaggccgccgcccagcccuccgcccccuccaccgaggccgcccagaacaccgcccccccccccuacgcccccuga

SEQ ID NO: 11778 - RNA, 300 nt, Artificial Sequence
  derived and/or modified CDS sequence (opt2) from LASV(Lassa virus/H.sapiens-wt/NGA/2018/ISTH_1375;Clade II)__AVV65078__Z
augggcaaccgccacgccaaguccaccaagaucaacgagcaccagcgcgcccaccucguccccgacgccucccaccucggcccccaguucugcaaguccugcugguucgagaaccgcggccucgucgagugcaacaaccacuaccucugccucaacugccucucccuccuccucuccgucuccucccgcugccccaucugcaagaugccccuccccaccaagcucaaggccgccgcccagcccuccgcccccuccaccgaggccauccagaacaccacccccccccccuacacccccuga

SEQ ID NO: 11779 - RNA, 300 nt, Artificial Sequence
  derived and/or modified CDS sequence (opt2) from LASV(LASV003-NIG-2008;Clade II)__AIT17578__Z
augggcaaccgccaggccaaguccaccaaggucgacgagcaccagcgcgcccaccucguccccgacgccucccaccucggcccccaguucugcaaguccugcugguucgagaacaagggccucgucgagugcaacaaccacuaccucugccucaacugccucucccuccuccucuccgucuccucccgcugccccaucugcaagaugccccuccccaccaagcuccgcgccgccgcccagcccuccgcccccuccaccgaguccgcccagaacaccgcccccccccccuacgcccccuga

SEQ ID NO: 11780 - RNA, 300 nt, Artificial Sequence
  derived and/or modified CDS sequence (opt2) from LASV(LASV035-NIG-2009;Clade II)__AIT17586__Z
augggcaacaagcaggccaaguccaccaaggucgacgagcaccagcgcgcccaccucguccccgacgccucccaccucggcccccaguucugcaaguccugcugguucgagaaccgcggccucgucgagugcaacaaccacuaccucugccucaacugccucucccuccuccucuccgucuccucccgcugccccaucugcaagaugccccuccccacccgccucaaggccgccgcccagcccuccgcccccuccaccgaggucacccagaacaccacccccccccccuacacccccuga

SEQ ID NO: 11781 - RNA, 300 nt, Artificial Sequence
  derived and/or modified CDS sequence (opt2) from LASV(LASV042-NIG-2009;Clade II)__AIT17590__Z
augggcaaccgccaggccaaguccaccaaggucgacgagcaccagcgcgcccaccucguccccgacgccucccaccucggcccccaguucugcaaguccugcugguucgagaacaagggccucgucgagugcaacaaccacuaccucugccucaacugccucucccuccuccucuccgucuccucccgcugccccaucugcaagaugccccuccccaccaagcucgaggccaccacccagcccuccgcccccuccaccgaggagacccaguccaccacccccccccccuacacccccuga

SEQ ID NO: 11782 - RNA, 300 nt, Artificial Sequence
  derived and/or modified CDS sequence (opt2) from LASV(LASV049-NIG-2009;Clade II)__AIT17602__Z
augggcaacaagcaggccaaguccaccaaggucgacgaguaccagcgcgcccaccucguccccgacgccucccaccucggcccccaguucugcaaguccugcugguucgagaaccgcggccucgucgagugcaacaaccacuaccucugccucaacugccucucccuccuccucuccgucuccaaccgcugccccaucugcaagaugccccuccccacccgccucaaggccgccgcccagcccuccgccccccccaccgaggccacccagaacaccacccccccccccuacacccccuga

SEQ ID NO: 11783 - RNA, 300 nt, Artificial Sequence
  derived and/or modified CDS sequence (opt2) from LASV(LASV056-NIG-2008;Clade II)__AIT17610__Z
augggcaaccgccaggccaagcccaccaaggucgacgagcaccagcgcgcccagcucguccccgacgccucccaccucggcccccaguucugcaaguccugcugguucgagaaccgcggccucgucgagugcaacaaccacuaccucugccucaacugccucucccuccuccucuccgucuccucccgcugccccaucugcaagaugccccuccccaccaagcucaaggccgccacccagcccuccgcccccuccaccgaggccacccagaacuccacccccccccccuacacccccuga

SEQ ID NO: 11784 - RNA, 300 nt, Artificial Sequence
  derived and/or modified CDS sequence (opt2) from LASV(LASV058-NIG-2008;Clade II)__AIT17614__Z
augggcaaccgccaggccaaguccaccaaggucgacgagcaccagcgcgcccaccucguccccgacgccucccaccucggcccccaguucugcaaguccugcugguucgagaaccgcggccucgucgagugcaacaaccacuaccucugccucaacugccucucccuccuccucuccgucuccucccgcugccccaucugcaagaugccccuccccaccaagcucaaggccgccacccagcccuccgcccccuccaccgaggccacccagaacaccacccccccccccuacacccccuga

SEQ ID NO: 11785 - RNA, 300 nt, Artificial Sequence
  derived and/or modified CDS sequence (opt2) from LASV(LASV063-NIG-2009;Clade II)__AIT17618__Z
augggcaaccgccaggccaaguccaccgaggucgacgagcaccagcgcgcccaccucguccccgacgccucccaccucggcccccaguucugcaaguccugcugguucgagaaccgcggccucgucgagugcaacaaccacuaccucugccucaacugccucucccuccuccucuccgucuccaaccgcugccccaucugcaagaugccccuccccaccaagcucaaggccgccacccagcccuccgcccccuccaccgaggccacccagaacaccacccccccccccuacacccccuga

SEQ ID NO: 11786 - RNA, 300 nt, Artificial Sequence
  derived and/or modified CDS sequence (opt2) from LASV(LASV1000-NIG-2009;Clade II)__AIT17780__Z
augggcaaccgccagaccaaguccaccaaggucgacgagcaccagcgcgccuaccucguccccgacgccucccuccucggcccccaguucugcaaguccugcugguucgagaacaagggccucgucgagugcaacaaccacuaccucugccucaacugccucucccuccuccucuccgucuccucccgcugccccaucugcaagaugccccuccccacccgccucaaggccgccgcccagcccuccgccccccccaccgaggccauccagaacaccacccccccccccuacacccccuga

SEQ ID NO: 11787 - RNA, 300 nt, Artificial Sequence
  derived and/or modified CDS sequence (opt2) from LASV(LASV1008-NIG-2009;Clade II)__AIT17784__Z
augggcaaccgccagaccaagcccaccaaggucgacgagcaccagcgcgcccaccucguccccgacgccucccaccucggcccccaguucugcaaguccugcugguucgagaacaagggccucgucgagugcaacaaccacuaccucugccucaacugccucucccuccuccucuccgucuccucccgcugccccaucugcaagaugccccuccccaccaagcucaaggccaccgcccagcccuccgcccccuccaccgaggccgcccagaacaccgcccccccccccuacgcccccuga

SEQ ID NO: 11788 - RNA, 300 nt, Artificial Sequence
  derived and/or modified CDS sequence (opt2) from LASV(LASV1011-NIG-2009;Clade II)__AIT17788__Z
augggcaaccgccaggucaaguccaccaaggucgacgagcaccagcgcgcccaccucguccccgacgccucccaccucggcccccaguucugcaaguccugcugguucgagaaccgcggccucgucgagugcaacaaccacuaccucugccucaacugccucucccuccuccucuccgucuccucccgcugccccaucugcaagaugccccuccccaccaagcucaaggccgccacccagcccuccgccccccccaccgaggccacccagaagaccacccccccccccuacacccccuga

SEQ ID NO: 11789 - RNA, 300 nt, Artificial Sequence
  derived and/or modified CDS sequence (opt2) from LASV(LASV1015-NIG-2009;Clade II)__AIT17792__Z
augggcaacaagcaggccaaguccaccaaggucgacgagcaccagcgcgcccaccucguccccgacgccucccaccucggcccccaguucugcaaguccugcugguucgagaaccgcggccucgucgagugcaacaaccacuaccucugccucaacugccucucccuccuccucuccgucuccggccgcugccccaucugcaagaugccccuccccaccaagcucaaggccaccgcccagcccuccgcccccuccaccgaggccacccagaacaccacccccccccccuacacccccuga

SEQ ID NO: 11790 - RNA, 300 nt, Artificial Sequence
  derived and/or modified CDS sequence (opt2) from LASV(LASV1016-NIG-2009;Clade II)__AIT17796__Z
augggcaacaagcaggccaaguccaccaaggucgacgagcaccagcgcgcccaccucguccccgacgccucccaccucggcccccaguucugcaaguccugcugguucgagaaccgcggccucgucgagugcaacaaccacuaccucugccucaacugccucucccuccuccucuccgucuccucccgcugccccaucugcaagaugccccuccccaccaagcucaaggccgccgcccagcccuccgcccccuccaccgaggccauccagaacaccacccccccccccuacacccccuga

SEQ ID NO: 11791 - RNA, 300 nt, Artificial Sequence
  derived and/or modified CDS sequence (opt2) from LASV(LASV221-NIG-2010;Clade II)__AIT17622__Z
augggcaaccgccaggccaaguccaccaaggucgacgagcaccagcgcgcccaccucguccccgacgccucccaccucggcccccaguucugcaaguccugcugguucgagaaccgcggccucgucgagugcaacaaccacuaccucugccucaacugccucucccuccuccucuccgucuccucccgcugccccaucugcaagaugccccuccccaccaagcucaaggccgccacccagcccuccgcccccuccaccgaggucacccagaacaccauccccccccccuacucccccuga

SEQ ID NO: 11792 - RNA, 300 nt, Artificial Sequence
  derived and/or modified CDS sequence (opt2) from LASV(LASV225-NIG-2010;Clade II)__AIT17628__Z
augggcaacaagcaggccaaguccaccaagaucgacgagcaccagcgcgcccaccucguccccgacgccucccaccucggcccccaguucugcaaguccugcugguucgagaaccgcggccucgucgagugcaacaaccacuaccucugccucaacugccucucccuccuccucuccgucuccucccgcugccccaucugcaagaugccccuccccacccgccucaaggccgccacccagcccuccgcccccuccaccgaggccacccagaacaccacccccccccccuacacccccuga

SEQ ID NO: 11793 - RNA, 300 nt, Artificial Sequence
  derived and/or modified CDS sequence (opt2) from LASV(LASV229-NIG-2010;Clade II)__AIT17632__Z
augggcaaccgccaggccaaguccaccaaggucgacgagcaccagcgcgcccaccucguccccgacgccucccaccucggcccccaguucugcaaguccugcugguucgagaacaagggccucgucgagugcaacaaccacuaccucugccucaacugccucucccuccuccucuccgucuccucccgcugccccaucugcaagaugccccuccccaccaagcuccgcgccaccgcccagcccuccgcccccuccaccgaggccauccagaacaccacccccccccccuacacccccuga

SEQ ID NO: 11794 - RNA, 300 nt, Artificial Sequence
  derived and/or modified CDS sequence (opt2) from LASV(LASV237-NIG-2010;Clade II)__AIT17636__Z
augggcaaccgccaggccaaguccaccaaggucgacgagcaccagcgcgcccaccucguccccgacgccucccaccucggcccccaguucugcaaguccugcugguucgagaaccgcggccucgucgagugcaacaaccacuaccucugccucaacugccucucccuccuccucuccgucuccucccgcugccccaucugcaagaugccccuccccaccaagcucaaggccgccgcccagcccuccgcccccuccaucgagaccauccagaacaccacccccccccccuacacccccuga

SEQ ID NO: 11795 - RNA, 300 nt, Artificial Sequence
  derived and/or modified CDS sequence (opt2) from LASV(LASV239-NIG-2010;Clade II)__AIT17640__Z
augggcaaccgccaggccaaguccaccaaggucggcgagcaccagcgcgcccaccucguccccgacgccucccaccucggcccccaguucugcaaguccugcugguucgagaaccgcggccucgucgagugcaacaaccacuaccucugccucaacugccucucccuccuccucuccgucuccucccgcugccccaucugcaagaugccccuccccaccaagcucaaggccgccgcccagcccuccgcccccuccaccgaggccacccaggacaccacccccccccccuacacccccuga

SEQ ID NO: 11796 - RNA, 300 nt, Artificial Sequence
  derived and/or modified CDS sequence (opt2) from LASV(LASV242-NIG-2010;Clade II)__AIT17648__Z
augggcaaccgccaggccaaguccaccaaggucgacgagcaccagcgcgcccaccucguccccgacgccucccaccucggcccccaguucugcaaguccugcugguucgagaacaagggccucgucgagugcaacaaccacuaccucugccucaacugccucucccuccuccucuccgucuccucccgcugccccaucugcaagaugccccuccccaccaagcucaaggccaccguccagcccuccgcccccuccaccgaggccgcccaguccaccgcccccccccccuacgcccccuga

SEQ ID NO: 11797 - RNA, 300 nt, Artificial Sequence
  derived and/or modified CDS sequence (opt2) from LASV(LASV245-NIG-2011;Clade II)__AIT17652__Z
augggcaaccgccaggccaaguccaccaaggucggcgagcaccagcgcgcccaccucguccccgacgccucccaccucggcccccaguucugcaaguccugcugguucgagaaccgcggccucgucgagugcaacaaccacuaccucugccucaacugccucucccuccuccucuccgucuccucccgcugccccaucugcaagaugccccuccccaccaagcucaaggccgccgcccagcccuccgcccccuccgccgaggccauccagaagaccacccccccccccuacacccccuga

SEQ ID NO: 11798 - RNA, 300 nt, Artificial Sequence
  derived and/or modified CDS sequence (opt2) from LASV(LASV246-NIG-2010;Clade II)__AIT17656__Z
augggcaaccgccaggccaaguccaccaaggucgacgaccaccagcgcgcccaccucguccccgacgccucccaccucggcccccaguucugcaaguccugcugguucgagaaccgcggccucgucgagugcaacaaccacuaccucugccucaacugccucucccuccuccucuccgucuccucccgcugccccaucugcaagaugccccuccccaccaagcucaaggccgccgcccagcccuccgcccccuccaccgaggccgcccaggacaccacccccccccccuacacccccuga

SEQ ID NO: 11799 - RNA, 300 nt, Artificial Sequence
  derived and/or modified CDS sequence (opt2) from LASV(LASV250-NIG-2011;Clade II)__AIT17660__Z
augggcaaccgccaggccaaguccaccaaggucgacgagcaccagcgcgcccaccucguccccgacgccucccaccucggcccccaguucugcaaguccugcugguucgagaaccgcggccucgucgagugcaacaaccacuaccucugccucaacugccucucccuccuccucuccgucuccaaccgcugccccaucugcaagaugccccuccccaccaagcucaaggccgccgcccagcccuccgcccccuccaccgaggccauccagaacaccacccccccccccuacgcccccuga

SEQ ID NO: 11800 - RNA, 300 nt, Artificial Sequence
  derived and/or modified CDS sequence (opt2) from LASV(LASV251-NIG-2010;Clade II)__AIT17664__Z
augggcaacaagcaggccaaguccaccaaggucgacgagcaccagcgcgcccaccucguccccgacgccucccaccucggcccccaguucugcaaguccugcugguucgagaacaagggccucgucgagugcaacaaccacuaccucugccucaacugccucucccuccuccucuccgucuccucccgcugccccaucugcaagaugccccuccccaccaagcucaaggccgccgcccagcccuccgcccccuccaccgaggccgcccagaacaccgcccccccccccuacgcccccuga

SEQ ID NO: 11801 - RNA, 300 nt, Artificial Sequence
  derived and/or modified CDS sequence (opt2) from LASV(LASV253-NIG-2011;Clade II)__AIT17668__Z
augggcaaccgccaggccaaguccaccaaggucgacgagcaccagcgcgcccaccucguccccgacgccucccaccucggcccccaguucugcaaguccugcugguucgagaacaagggccucgucgagugcaacaaccacuaccucugccucaacugccucucccuccuccucuccgucuccucccgcugccccaucugcaagaugccccuccccaccaagcucaagaccaccgcccagcccuccgccccccccaccgaggccgccaagaacaccgcccccccccccuacgcccccuga

SEQ ID NO: 11802 - RNA, 300 nt, Artificial Sequence
  derived and/or modified CDS sequence (opt2) from LASV(LASV256-NIG-2010;Clade II)__AIT17676__Z
augggcaaccgccaggccaaguccaccaaggucgacgagcaccagcgcgcccaccucguccccgacgccucccaccucggcccccaguucugcaaguccugcugguucgagaaccgcggccucgucgagugcaacaaccacuaccucugccucaacugccucucccuccuccucuccgucuccucccgcugccccaucugcaagaugccccuccccaccaagcucaaggccgccacccagcccuccgcccccuccaccgaggucacccagaacaccacccccccccccuacacccccuga

SEQ ID NO: 11803 - RNA, 300 nt, Artificial Sequence
  derived and/or modified CDS sequence (opt2) from LASV(LASV263-NIG-2011;Clade II)__AIT17680__Z
augggcaaccgccaggccaaguccaccaagaucgacgagcaccagcgcgcccaccucguccccgacgccucccaccucggcccccaguucugcaaguccugcugguucgagaaccgcggccucgucgagugcaacaaccacuaccucugccucaacugccucucccuccuccucuccgucuccucccgcugccccaucugcaagaugccccuccccaccaagcucaaggccgccgcccagcccuccgcccccuccaccgaggccauccagaacaccacccccccccccuacacccccuga

SEQ ID NO: 11804 - RNA, 300 nt, Artificial Sequence
  derived and/or modified CDS sequence (opt2) from LASV(LASV267-NIG-2010;Clade II)__AIT17684__Z
augggcaaccgccaggccaaguccgccaaggucgacgagcaccagcgcgcccaccucguccccgacgccucccaccucggcccccaguucugcaaguccugcugguucgagaacaagggccucgucgagugcaacaaccacuaccucugccucaacugccucucccuccuccucuccgucuccugccgcugccccaucugcaagaugccccuccccaccaagcucaaggccgccacccagcccuccgcccccuccaccgaggccacccagaacaccacccccccccccuacacccccuga

SEQ ID NO: 11805 - RNA, 300 nt, Artificial Sequence
  derived and/or modified CDS sequence (opt2) from LASV(LASV274-NIG-2010;Clade II)__AIT17692__Z
augggcaaccgccacgccaagcccaccaaggucgacgagcaccagcgcgcccaccucguccccgacgccucccaccucggcccccaguucugcaaguccugcugguucgagaaccgcggccucgucgagugcaacaaccacuaccucugccucaacugccucucccuccuccucuccgucuccucccgcugccccaucugcaagaugccccuccccaccaagcucaaggccgccgcccagcccuccgcccccuccaccgaggccauccagaacaccacccccccccccuacacccccuga

SEQ ID NO: 11806 - RNA, 300 nt, Artificial Sequence
  derived and/or modified CDS sequence (opt2) from LASV(LASV719-NIG-2009;Clade II)__AIT17702__Z
augggcaaccgccacgccaaguccaccaaggucgacgagcaccagcgcgcccaccucguccccgacgccucccaccucggcccccaguucugcaaguccugcugguucgagaaccgcggccucgucgagugcaacaaccacuaccucugccucaacugccucucccuccuccucuccgucuccucccgcugccccaucugcaagaugccccuccccaccaagcucaaggccgccgcccagcccuccgcccccuccaccgaggccuuccagaacaccacccccccccccuacacccccuga

SEQ ID NO: 11807 - RNA, 300 nt, Artificial Sequence
  derived and/or modified CDS sequence (opt2) from LASV(LASV737-NIG-2009;Clade II)__AIT17708__Z
augggcaaccgccacgccaaguccaccaaggucgacgagcaccagcgcgcccaccucguccccgacgccucccaccucggcccccaguucugcaaguccugcugguucgagaaccgcggccucgucgagugcaacaaccacuaccucugccucaacugccucucccuccuccucuccgucuccucccgcugccccaucugcaagaugccccuccccaccaagcucaaggccgccacccagcccuccgcccccuccaccgaggccauccagaacaccacccccccccccuacacccccuga

SEQ ID NO: 11808 - RNA, 300 nt, Artificial Sequence
  derived and/or modified CDS sequence (opt2) from LASV(LASV966-NIG-2009;Clade II)__AIT17716__Z
augggcaaccgccccgccaaguccaccaaggucgacgagcaccagcgcgcccaccucguccccgacgccucccaccucggcccccaguucugcaaguccugcugguucgagaaccgcggccucgucgagugcaacaaccacuaccucugccucaacugccucucccuccuccucuccgucuccucccgcugccccaucugcaagaugccccuccccaccaagcucaaggccgccgcccagcccuccgcccccuccaccgaggccacccagaacaccacccccccccccuacacccccuga

SEQ ID NO: 11809 - RNA, 300 nt, Artificial Sequence
  derived and/or modified CDS sequence (opt2) from LASV(LASV967-NIG-2009;Clade II)__AIT17720__Z
augggcaaccgccaggccaagcccaccaaggucgacgagcaccagcgcgcccaccucguccccgacgccucccaccucggcccccaguucugcaaguccugcugguucgagaaccgcggccucgucgagugcaacaaccacuaccucugccucaacugccucucccuccuccucuccgucuccucccgcugccccaucugcaagaugccccuccccacccgccucaaggccgccgcccagcccuccgcccccuccaccgaggagacccagaacaccacccccccccccuacacccccuga

SEQ ID NO: 11810 - RNA, 300 nt, Artificial Sequence
  derived and/or modified CDS sequence (opt2) from LASV(LASV975-NIG-2009;Clade II)__AIT17730__Z
augggcaaccgccaggccaaguccaccaaggucgacgagcaccagcgcgcccaccucguccccgacgccucccaccucggcccccaguucugcaaguccugcugguucgagaaccgcggccucgucgagugcaacaaccacuaccucugccucaacugccucucccuccuccucuccgucuccucccgcugccccaucugcaagaugccccuccccaccaagcucaaggccgccgcccagcccuccgccccccucaccgaggccauccagaacaccacccccccccccuacacccccuga

SEQ ID NO: 11811 - RNA, 300 nt, Artificial Sequence
  derived and/or modified CDS sequence (opt2) from LASV(LASV976-NIG-2009;Clade II)__AIT17734__Z
augggcaaccgccaggccaaguccaccaaggucgacgagcaccagcgcgcccaccucguccccgacgccucccaccucggcccccaguucugcaaguccugcugguucgagaaccgcggccucgucgagugcaacaaccacuaccucugccucaacugccucucccuccuccucuccgucuccucccgcugccccaucugcaagaugccccuccccaccaagcucaaggccgccgcccagcccuccgcccccuccaccgaggccauccagaacaccacccccccccccuacacccccuga

SEQ ID NO: 11812 - RNA, 300 nt, Artificial Sequence
  derived and/or modified CDS sequence (opt2) from LASV(LASV977-NIG-2009;Clade II)__AIT17738__Z
augggcaaccgccaggccaaguccaccaaggucgacgagcaccagcgcgcccaccucguccccgacgccucccaccucggcccccaguucugcaaguccugcugguucgagaaccgcggccucgucgagugcaacaaccacuaccucugccucaacugccucucccuccuccucuccgucuccucccgcugccccaucugcaagaugccccuccccaccaagcucaaggccgccacccuccccuccgcccccuccaccgaggucacccagaacaccaccccccccccccacucccccuga

SEQ ID NO: 11813 - RNA, 300 nt, Artificial Sequence
  derived and/or modified CDS sequence (opt2) from LASV(LASV981-NIG-2009;Clade II)__AIT17750__Z
augggcaaccgccaggccaaguccgccaaggucaacgagcaccagcgcgcccaccucguccccgacgccucccaccucggcccccaguucugcaaguccugcugguucgagaaccgcggccucgucgagugcaacaaccacuaccucugccucaacugccucucccuccuccucuccgucuccucccgcugccccaucugcaagaugccccuccccaccaagcucaaggccgccacccagcccuccgcccccuccaccgaggccacccagaacaccacccccccccccuacacccccuga

SEQ ID NO: 11814 - RNA, 300 nt, Artificial Sequence
  derived and/or modified CDS sequence (opt2) from LASV(LASV982-NIG-2009;Clade II)__AIT17754__Z
augggcaaccgccaggccaaguccaccaaggucgacgagcaccagcgcgcccaccucguccccgacgccucccaccucggcccccaguucugcaaguccugcugguucgagaacaagggccucgucgagugcaacaaccacuaccucugccucaacugccucucccuccuccucuccgucuccucccgcugccccaucugcaagaugccccuccccaccaagcucaaggccuccgcccagcccuccgcccccuccaccgaggccgcccagaacaccgcccccccccccuacgcccccuga

SEQ ID NO: 11815 - RNA, 300 nt, Artificial Sequence
  derived and/or modified CDS sequence (opt2) from LASV(LASV989-NIG-2009;Clade II)__AIT17760__Z
augggcaaccgccaggccaaguccacccgcaccgacgagcaccagcgcgcccaccucguccccgacgccucccaccucggcccccaguucugcaaguccugcugguucgagaacaagggccucgucgagugcaacaaccacuaccucugccucaacugccucucccuccuccucuccgucuccucccgcugccccaucugcaagaugccccuccccaccaagcucaaggccgccgcccagcccuccgcccccuccaccgaggccggccagaacaccgcccccccccccuacgcccccuga

SEQ ID NO: 11816 - RNA, 300 nt, Artificial Sequence
  derived and/or modified CDS sequence (opt2) from LASV(LASV991-NIG-2009;Clade II)__AIT17768__Z
augggcaaccgccaggccaaguccgccaccgucgacgagugccagcgcgcccaccucguccccgacgccuccuaccucggcccccaguucugcaaguccugcugguucgagaacaagggccucgucgagugcaacaaccacuaccucugccucaacugccucucccuccuccucuccgucuccucccgcugccccaucugcaagaugccccuccccaccaagcucaaggccgccgcccagcccuccgcccccuccacccgcgccacccagaacaccacccccccccccuacacccccuga

SEQ ID NO: 11817 - RNA, 300 nt, Artificial Sequence
  derived and/or modified CDS sequence (opt2) from LASV(LASV993-NIG-2009;Clade II)__AIT17776__Z
augggcaacaagcaggccaaguccaccaaggucgacgagcaccagcgcgcccaccucguccccgacgccucccaccucggcccccaguucugcaaguccugcugguucgagaacaagggccucgucgagugcaacaaccacuaccucugccucaacugccucucccuccuccucuccgucuccucccgcugccccaucugcaagaugccccuccccacccgccucaaggccgccgcccagcccuccgcccccuccaccgaggccacccagaacgccgcccccccccccuacgcccccuga

SEQ ID NO: 11818 - RNA, 300 nt, Artificial Sequence
  derived and/or modified CDS sequence (opt2) from LASV(Nig08-A41;Clade II)__ADU56628__Z
augggcaaccgccaggccaaguccaccaaggucgacgagcaccagcgcgcccaccucguccccgacgccucccaccucggcccccaguucugcaaguccugcugguucgagaaccgcggccucgucgagugcaacaaccacuaccucugccucaacugccucucccuccuccucuccgucuccucccgcugccccaucugcaagaugccccuccccaccaagcucaaggccgccgcccagcccuccgcccccuccaccgaggccauccagaacaccacccccccccccuacgcccccuga

SEQ ID NO: 11819 - RNA, 300 nt, Artificial Sequence
  derived and/or modified CDS sequence (opt2) from LASV(CSF;Clade III)__AAO59514__Z
augggcaacaagcagguccgcuccaugaagaaggucgacuccccccgcgccucccucauccccgacgccucccaccucggcccccaguucugcaaguccugcugguucgagaaccgcggccucgucgagugcaacaaccacuaccucugccucaacugccucucccuccuccucuccgucuccucccgcugccccaucugcaagaugccccuccccaccaagcucaagaccuccaccacccccaccgcccccuccauccgcgaggccaacaccaccucccccccccccuacucccccuga

SEQ ID NO: 11820 - RNA, 300 nt, Artificial Sequence
  derived and/or modified CDS sequence (opt2) from LASV(Nig08-A18;Clade III)__ADU56616__Z
augggcggcaagcacaccaagcagccccgcgaguccaacuccccccgcgccucccucauccccgacgccacccaccucggcccccaguucugcaaguccugcugguucgagaacaagggccucgucgagugcaacaaccacuaccucugccucaacugccucucccuccuccucuccgucuccaaccgcugccccaucugcaagaugccccuccccacccgccuccgcaccuccaccaaccccaccgccccccaggucgagcagaccggccccgccucccccccccccuacucccccuga

SEQ ID NO: 11821 - RNA, 300 nt, Artificial Sequence
  derived and/or modified CDS sequence (opt2) from LASV(ONM-299;Clade III)__ANH09755__Z
augggcaacaagcagaccaagaccaucaagaagaccgacuccccccgcgccucccucauccccgacgccucccacaugggcccccaguucugcaaguccugcugguucgagaaccgcggccucgucgagugcaacaaccacuaccucugccucaacugccucucccuccuccucuccgucuccaaccgcugccccaucugcaagaugccccuccccaccaagcuccgcgccucccccucccccaccgcccccuccauccgcgaggccaacaucaccaaccccccccccuacucccccuga

SEQ ID NO: 11822 - RNA, 300 nt, Artificial Sequence
  derived and/or modified CDS sequence (opt2) from LASV(ONM-700;Clade III)__ANH09759__Z
augggcaacaagcagaccaagaccaccaagaagaccgacuccccccgcgccucccucauccccgacgccucccacaugggcccccaguucugcaaguccugcugguucgagaaccgcggccucgucgagugcaacaaccacuaccucugccucaacugccucucccuccuccucuccgucuccaaccgcugccccaucugcaagaugccccuccccaccaagcuccgcgccucccccucccccaccgcccccuccauccgcgaggccaacaucaccaaccccccccccuacucccccuga

SEQ ID NO: 11823 - RNA, 300 nt, Artificial Sequence
  derived and/or modified CDS sequence (opt2) from LASV(BA366;Clade IV)__ADU56644__Z
augggcaaccgccagaccaaggcccccgaggccaagggcuccccccgcgccucccucauccccgacgccacccaccucggcccccaguucugcaaguccugcugguucgagaacaagggccucgucgagugcaacgaccacuaccucugccucaacugccucacccuccuccucuccgucuccucccgcugccccaucugcaagaugccccuccccacccgccuccgccccuccaccaaccccaccgccccccccgcccgcgccgagggcggcaucaaccccccccccuacucccccuga

SEQ ID NO: 11824 - RNA, 300 nt, Artificial Sequence
  derived and/or modified CDS sequence (opt2) from LASV(G1180-SLE-2010;Clade IV)__AIT17166__Z
augggcaacaagcaggccaaggcccccgaggccaaggacuccccccgcgccucccucauccccgacgccacccaccucggcccccaguucugcaaguccugcugguucgagaccaagggccucgucgagugcaacaaccacuaccucugccucaacugccucacccuccuccucuccgucuccaaccgcugccccaucugcaagaugccccuccccaccaagcuccgccccuccgccacccccaccgccccccccaccgaggccgccgacuccaucggccccccccccuacucccccuga

SEQ ID NO: 11825 - RNA, 300 nt, Artificial Sequence
  derived and/or modified CDS sequence (opt2) from LASV(G1190-SLE-2010;Clade IV)__AIT17170__Z
augggcaacaagcaggccaagguccccgaguccaaggacuccccccgcgccucccucauccccgacgccacccaccucggcccccaguucugcaaguccugcugguucgagaacaagggccucgucgagugcaacaaccacuaccucugccucaacugccucacccuccuccucuccgucuccaaccgcugccccaucugcaagaugccccuccccaccaagcuccgccccuccgccgcccccaccgccccccccgccggcgccgccgacuccauccgccccccccccuacucccccuga

SEQ ID NO: 11826 - RNA, 300 nt, Artificial Sequence
  derived and/or modified CDS sequence (opt2) from LASV(G1200-LIB-2010;Clade IV)__AIT17174__Z
augggcaacaagcagaccaaggcccccgaggccaagggcuccccccgcgccucccucauccccgacgccacccaccucggcccccaguucugcaaguccugcugguucgagaacaagggccucgucgagugcaacaaccacuaccucugccucaacugccucacccuccuccucuccgucuccucccgcugccccaucugcaagaugccccuccccaccaagcuccgccccuccgccguccccaccgccccccccaccaaggccgaggacaacacccgccccccccccuacucccccuga

SEQ ID NO: 11827 - RNA, 300 nt, Artificial Sequence
  derived and/or modified CDS sequence (opt2) from LASV(G1442-SLE-2011;Clade IV)__AIT17178__Z
augggcaacaagcaggccaaggccuccgaggccaaggacuccccccgcgccucccucauccccgacgccacccaccucggcccccaguucugcaaguccugcugguucgagaacaagggccucgucgagugcaacaaccacuaccucugccucaacugccucucccuccuccucuccgucuccucccgcugccccaucugcaagaugccccuccccacccgccuccgccccuccaccgcccccaccgccccccccgcccgcgccggcgacaacaucaagcccccccccuacucccccuga

SEQ ID NO: 11828 - RNA, 300 nt, Artificial Sequence
  derived and/or modified CDS sequence (opt2) from LASV(G1529-SLE-2011;Clade IV)__AIT17182__Z
augggcaacaagcaggccaagguccccgagguccgcgacuccccccgcgccucccucauccccgacgccacccaccucggcccccaguucugcaaguccugcugguucgagaacaagggccucgucgagugcaacaaccacuaccucugccucaacugccucacccuccuccucuccgucuccucccgcugccccaucugcaagaugccccuccccaccaagcuccgccccuccgccacccccaccgccccccccgccggcgccggcgacggcacccgccccccccccuacucccccuga

SEQ ID NO: 11829 - RNA, 300 nt, Artificial Sequence
  derived and/or modified CDS sequence (opt2) from LASV(G1618-SLE-2011;Clade IV)__AIT17186__Z
augggcaacaagcaggccaagacccccgagaccaaggacuccccccgcgccucccucauccccgacgccacccaccucggcccccaguucugcaaguccugcugguucgagaacaagggccucgucgagugcaacaaccacuaccucugccucaacugccucacccuccuccucuccgucuccaaccgcugccccaucugcaagaugccccuccccaccaagcuccgccccuccgucgcccccaccgccccccccgccggcgccgccgacaacacccgccccccccccuacucccccuga

SEQ ID NO: 11830 - RNA, 300 nt, Artificial Sequence
  derived and/or modified CDS sequence (opt2) from LASV(G1647-SLE-2011;Clade IV)__AIT17194__Z
augggcaacaagcaggccaaggcccccgagcccaaggacuccccccgcgccucccucauccccgacgccacccaccucggcccccaguucugcaaguccugcugguucgagaacaagggccucgucgagugcaacaaccacuaccucugccucaacugccucacccuccuccucuccgucuccaaccgcugccccaucugcaagaugccccuccccaccaagcuccgccccuccgucgcccccaccgccccccccgccggcgucgucgacuccacccgccccccccccuacucccccuga

SEQ ID NO: 11831 - RNA, 300 nt, Artificial Sequence
  derived and/or modified CDS sequence (opt2) from LASV(G1727-SLE-2011;Clade IV)__AIT17198__Z
augggcaacaagcaggccaagguccccgaguccaaggacuccccccgcgccucccucauccccgacgccacccaccucggcccccaguucugcaaguccugcugguucgagaaccgcggccucgucgagugcaacaaccacuaccucugccucaacugccucacccuccuccucuccgucuccaaccgcugccccaucugcaagaugccccuccccaccaagcuccgccccuccaccgcccccaccgccccccccaccggcgccgccgacuccacccgccccccccccuacucccccuga

SEQ ID NO: 11832 - RNA, 300 nt, Artificial Sequence
  derived and/or modified CDS sequence (opt2) from LASV(G1774-SLE-2011;Clade IV)__AIT17202__Z
augggcaacaagcaggccaagacccccgaguccaaggacuccccccgcgccucccucauccccgacgccacccaccucggcccccaguucugcaaguccugcugguucgagaacaagggccucgucgagugcaacaaccacuaccucugccucaacugccucacccuccuccucuccgucuccaaccgcugccccaucugcaagaugccccuccccacccgccuccgccccuccgccgcccccaccgccccccccuccggcgccgccgacuccacccgccccccccccuacucccccuga

SEQ ID NO: 11833 - RNA, 300 nt, Artificial Sequence
  derived and/or modified CDS sequence (opt2) from LASV(G1792-SLE-2011;Clade IV)__AIT17206__Z
augggcaacaagcaggccaaggcccccgaggccaaggacuccccccgcgccucccucauccccgacgccacccaccucggcccccaguucugcaaguccugcugguucgagaacaagggccucgucgagugcaacaaccacuaccucugccucaacugccucacccuccuccucuccgucuccuaccgcugccccaucugcaagaugccccuccccaccaagcuccgccccuccgccacccccaccgccccccccaccgaggccgccgacuccauccgccccccccccuaccgccccuga

SEQ ID NO: 11834 - RNA, 300 nt, Artificial Sequence
  derived and/or modified CDS sequence (opt2) from LASV(G1959-SLE-2011;Clade IV)__AIT17214__Z
augggcaacaagcaggccaaggcccccgaggucaaggacuccccccgcgccucccucauccccgacgccacccaccucggcccccaguucugcaaguccugcugguucgagaacaagggccucgucgagugcaacaaccacuaccucugccucaacugccucacccuccuccucuccgucuccaaccgcugccccaucugcaagaugccccuccccaccaagcuccgccccuccgccgcccccaccgccccccccaccggcaccgccgacuccauccgccccccccccuacucccccuga

SEQ ID NO: 11835 - RNA, 300 nt, Artificial Sequence
  derived and/or modified CDS sequence (opt2) from LASV(G2141-SLE-2011;Clade IV)__AIT17222__Z
augggcaacaagcaggccaagacccccgagaccaaggacuccccccgcgccucccucauccccgacgccacccaccucggcccccaguucugcaaguccugcugguucgagaacaagggccucgucgagugcaacucccacuaccucugccucaacugccucacccuccuccucuccgucuccucccgcugccccaucugcaagaugccccuccccacccgccuccgccccuccaccgcccccaccgccccccccgccggcgucggcgacuccaccucccccccccccuacucccccuga

SEQ ID NO: 11836 - RNA, 300 nt, Artificial Sequence
  derived and/or modified CDS sequence (opt2) from LASV(G2147-SLE-2011;Clade IV)__AIT17226__Z
augggcaacaagcaggccaagacccccgaggccaaggacuccccccgcgccucccucauccccgacgccacccaccucggcccccaguucugcaaguccugcugguucgagaacaagggccucgucgagugcaacaaccacuaccucugccucaacugccucacccuccuccucuccgucuccaaccgcugccccaucugcaagaugccccuccccaccaagcuccgccccuccgccacccccaccgccccccccgccggcgccgccgacuccaucggccccccccccuacucccccuga

SEQ ID NO: 11837 - RNA, 297 nt, Artificial Sequence
  derived and/or modified CDS sequence (opt2) from LASV(G2165-SLE-2011;Clade IV)__AIT17230__Z
augggcaacaagcaggccaaggccuccgacaagaacuccccccgcgccucccucauccccgacgccacccaccucggcccccaguucugcaaguccugcugguucgagaacaagggccucgucgagugcaacaaccacuaccucugccucaacugccucacccuccuccucuccgucuccaaccgcugccccaucugcaagaugccccuccccaccaagcuccgccccuccgccacccccaccgccccccccaccggcgccgccgacuccauccgccccccccccuacucccccuga

SEQ ID NO: 11838 - RNA, 300 nt, Artificial Sequence
  derived and/or modified CDS sequence (opt2) from LASV(G2184-SLE-2011;Clade IV)__AIT17234__Z
augggcaacaagcaggccaaggccuccgaggagaagaacuccccccgcgccucccucauccccgacgccacccaccucggcccccaguucugcaaguccugcugguucgagaacaagggccucgucgagugcaacaaccacuaccucugccucaacugccucacccuccuccucuccgucuccaaccgcugccccaucugcaagaugccccuccccaccaagcuccgccccuccgccacccccaccgccccccccaccggcgccgccgacuccauccgccccccccccuacucccccuga

SEQ ID NO: 11839 - RNA, 300 nt, Artificial Sequence
  derived and/or modified CDS sequence (opt2) from LASV(G2197-SLE-2011;Clade IV)__AIT17238__Z
augggcaacaagcagaccaaggcccccgaggccaagggcuccccccgcgccucccucauccccgacgccacccaccucggcccccaguucugcaaguccugcugguucgagaacaagggccucgucgagugcaacaaccacuaccucugccucaacugccucacccuccuccucuccgucuccaaccgcugccccaucugcaagaugccccuccccaccaagcuccgccccuccgccacccccaccgccccccccaccgaggccgccgacuccauccgccccccccccuaccgccccuga

SEQ ID NO: 11840 - RNA, 300 nt, Artificial Sequence
  derived and/or modified CDS sequence (opt2) from LASV(G2222-SLE-2011;Clade IV)__AIT17242__Z
augggcaacaagcaggccaaggcccccgaguccaaggacuccccccgcgccucccucauccccgacgccacccaccucggcccccaguucugcaaguccugcugguucgagaacaagggccucgucgagugcaacaaccacuaccucugccucaacugccucacccuccuccucuccgucuccaaccgcugccccaucugcaagaugccccuccccacccgccuccgccccuccgccgcccccaccgccccccccaccggcgccaccgacuccacccgccccccccccuacucccccuga

SEQ ID NO: 11841 - RNA, 300 nt, Artificial Sequence
  derived and/or modified CDS sequence (opt2) from LASV(G2259-SLE-2012;Clade IV)__AIT17248__Z
augggcaacaagcaggucaaggcccccgaggcccgcaacuccccccgcgccucccucauccccgacgccacccaccucggcccccaguucugcaaguccugcugguucgagaacaagggccucgucgagugcaacaaccacuaccucugccucaacugccucacccuccuccucggcgucuccucccgcugccccaucugcaagaccccccuccccacccgccuccgccccuccgccacccccaccgccccccccgccggcgccggcgacaacacccgccccccccccuacucccccuga

SEQ ID NO: 11842 - RNA, 300 nt, Artificial Sequence
  derived and/or modified CDS sequence (opt2) from LASV(G2263-SLE-2012;Clade IV)__AIT17252__Z
augggcaacaagcaggccaaggcccccgaggccaaggacuccccccgcgccucccucauccccgacgccacccaccucggcccccaguucugcaaguccugcugguucgagaacaagggccucgucgagugcaacaaccacuaccucugccucaacugccucacccuccuccucuccgucuccaaccgcugccccaucugcaagaugccccuccccaccaagcuccgccccuccaccgcccccaccgccccccccgccggcgccgccgacuccacccgccccccccccuacucccccuga

SEQ ID NO: 11843 - RNA, 300 nt, Artificial Sequence
  derived and/or modified CDS sequence (opt2) from LASV(G2280-SLE-2012;Clade IV)__AIT17256__Z
augggcaacaagcaggccaaggcccccgagaccaaggacuccccccgcgccucccucauccccgacgccacccaccucggcccccaguucugcaaguccugcugguucgagaacaagggccucgucgagugcaacaaccacuaccucugccucaacugccucacccuccuccucuccgucuccaaccgcugccccaucugcaagaugccccuccccaccaagcuccgccccuccgccgcccccaccgccccccccgucggcgccgccgacaacacccgccccccccccuacucccccuga

SEQ ID NO: 11844 - RNA, 300 nt, Artificial Sequence
  derived and/or modified CDS sequence (opt2) from LASV(G2295-SLE-2012;Clade IV)__AIT17260__Z
augggcaacaagcaggccaaggcccccgagcucaaggacuccccccgcgccucccucauccccgacgccacccaccucggcccccaguucugcaaguccugcugguucgagaacaagggccucgucgagugcaacaaccacuaccucugccucaacugccucacccuccuccucuccgucuccaaccgcugccccaucugcaagaugccccuccccaccaagcuccgccccuccgccgcccccaccgccccccccgccggcgccgucgacuccacccgccccccccccuacucccccuga

SEQ ID NO: 11845 - RNA, 300 nt, Artificial Sequence
  derived and/or modified CDS sequence (opt2) from LASV(G2315-SLE-2012;Clade IV)__AIT17264__Z
augggcaacaagcagaccaaggcccccgaguccaagaacuccccccgcgccucccucauccccgacgccaccuaccucggcccccaguucugcaaguccugcugguucgagaacaagggccucgucgagugcaacaaccacuaccucugccucaacugccucacccuccuccucuccgucuccaaccgcugccccaucugcaagaugccccuccccaccaagcuccgcuccuccgccgcccccaccgccccccccaccggcgccgccgacuccaccaagcccccccccuacucccccuga

SEQ ID NO: 11846 - RNA, 300 nt, Artificial Sequence
  derived and/or modified CDS sequence (opt2) from LASV(G2318-SLE-2012;Clade IV)__AIT17268__Z
augggcaacaagcagaccaaggcccccgaggucaagggcuccccccgcgccucccucauccccgacgccacccaccucggcccccaguucugcaaguccugcugguucgagaacaagggccucgucgagugcaacaaccacuaccucugccucaacugccucacccuccuccucuccgucuccaaccgcugccccaucugcaagaugccccuccccaccaagcucaagcccuccaccacccccaccgccccccccaccggcgccgccgacuccauccgccccccccccuacucccccuga

SEQ ID NO: 11847 - RNA, 300 nt, Artificial Sequence
  derived and/or modified CDS sequence (opt2) from LASV(G2363-SLE-2012;Clade IV)__AIT17272__Z
augggcaacaagcaggucaagaccuccgaggcccgcgacuccccccgcgccucccucauccccgacgccaccgaccucggcccccaguucugcaaguccugcugguucgagaacaagggccucgucgagugcaacaaccacuaccucugccucaacugccucacccuccuccucuccgucuccaaccgcugccccaucugcaagaugccccuccccacccgccuccgccccuccgccaaccccaccgccccccccgccgagaccggcgacuccacccgccccccccccuacucccccuga

SEQ ID NO: 11848 - RNA, 300 nt, Artificial Sequence
  derived and/or modified CDS sequence (opt2) from LASV(G2392-SLE-2012;Clade IV)__AIT17278__Z
augggcuccaagcagaccaagacccccgaggucaaggacuccccccgcgccucccucauccccgacgccacccaccucggcccccaguucugcaaguccugcugguucgagaacaagggccucgucgagugcaacaaccacuaccucugccucaacugccucacccuccuccucuccgucuccaaccgcugccccaucugcaagaugccccuccccaccaagcuccgccccuccgccgcccccaccgccccccccgcccgcgccgccgacgacacccgccccccccccuacucccccuga

SEQ ID NO: 11849 - RNA, 300 nt, Artificial Sequence
  derived and/or modified CDS sequence (opt2) from LASV(G2405-SLE-2012;Clade IV)__AIT17282__Z
augggcaacaagcaggccaaggcccccgagcccaaggacuccccccgcgccucccucauccccgacgccacccaccucggcccccaguucugcaaguccugcugguucgagaacaagggccucgucgagugcaacaaccacuaccucugccucaacugccucacccuccuccucuccgucuccaaccgcugccccaucugcaagaugccccuccccaccaagcuccgccccuccgccgcccccaccgccccccccgccggcgccgucgacuccauccgccccccccccuacucccccuga

SEQ ID NO: 11850 - RNA, 300 nt, Artificial Sequence
  derived and/or modified CDS sequence (opt2) from LASV(G2427-SLE-2012;Clade IV)__AIT17286__Z
augggcaacaagcagaccaaggcccccgaggucaaggacuccccccgcgccucccucauccccgacgccacccaccucggcccccaguucugcaaguccugcugguucgagaacaagggccucgucgagugcaacaaccacuaccucugccucaacugccucacccuccuccucuccgucuccaaccgcugccccaucugcaagaugccccuccccaccaagcuccgccccuccaccgcccccaccgccccccccgccggcaccauggacuccacccgccccccccccuacucccccuga

SEQ ID NO: 11851 - RNA, 300 nt, Artificial Sequence
  derived and/or modified CDS sequence (opt2) from LASV(G2431-SLE-2012;Clade IV)__AIT17290__Z
augggcaacaagcaggcccgcgcccccgaggccaaggacuccccccgcgccucccucauccccgacgccacccaccucggcccccaguucugcaaguccugcugguucgagaacaagggccucgucgagugcaacaaccacuaccucugccucaacugccucacccuccuccucuccgucuccucccgcugccccaucugcaagaugccccuccccacccgccuccgccccuccgccauccccaccgccccccccgccggcaccggcgacuccucccgccccccccccuacucccccuga

SEQ ID NO: 11852 - RNA, 300 nt, Artificial Sequence
  derived and/or modified CDS sequence (opt2) from LASV(G2554-SLE-2012;Clade IV)__AIT17296__Z
augggcaacaagcaggccaagacccccgagaucaaggacuccccccgcgccucccucauccccgacgccacccaccucggcccccaguucugcaaguccugcugguucgagaacaagggccucgucgagugcaacaaccacuaccucugccucaacugccucacccuccuccucuccgucuccaaccgcugccccaucugcaagaugccccuccccaccaagcuccgccccuccgccgcccccaccgccccccccgccggcgccgccgacaucacccgccccccccccuacucccccuga

SEQ ID NO: 11853 - RNA, 300 nt, Artificial Sequence
  derived and/or modified CDS sequence (opt2) from LASV(G2557-SLE-2012;Clade IV)__AIT17300__Z
augggcaacaagcaggucaaggcccccgaggcccgcaacuccccccgcgccucccucauccccgacgccacccaccucggcccccaguucugcaaguccugcugguucgagaacaagggccucgucgagugcaacaaccacuaccucugccucaacugccucacccuccuccucggcgucuccucccgcugccccaucugcaagaugccccuccccacccgccuccgccccuccaccgcccccaccgccccccccgccggcgccggcgacaacacccgccccccccccuacucccccuga

SEQ ID NO: 11854 - RNA, 300 nt, Artificial Sequence
  derived and/or modified CDS sequence (opt2) from LASV(G2612-SLE-2012;Clade IV)__AIT17312__Z
augggcaacaagcaggccaagacccccgagaccaaggacuccccccgcgccucccucauccccgacgccacccaccucggcccccaguucugcaaguccugcugguucgagaacaagggccucgucgagugcaacaaccacuaccucugccucaacugccucacccuccuccucuccgucuccaaccgcugccccaucugcaagaugccccuccccaccaagcuccgccccuccgccgcccccaccgccccccccgucggcgccgccgacuccacccgccccccccccuacucccccuga

SEQ ID NO: 11855 - RNA, 300 nt, Artificial Sequence
  derived and/or modified CDS sequence (opt2) from LASV(G2615-SLE-2012;Clade IV)__AIT17316__Z
augggcaacaagcaggccaaggcccccgaggcccgcaacuccccccgcgccucccucauccccgacgccacccaccucggcccccaguucugcaaguccugcugguucgagaaccgcggccucgucgagugcaacaaccacuaccucugccucaacugccucacccuccuccucuccgucuccucccgcugccccaucugcaagaugccccuccccacccgccuccgccccuccgccgcccccaccgccccccccgccggcgccggcgacaacacccgccccccccccuacucccccuga

SEQ ID NO: 11856 - RNA, 300 nt, Artificial Sequence
  derived and/or modified CDS sequence (opt2) from LASV(G2723-SLE-2012;Clade IV)__AIT17320__Z
augggcaacaagcaggccaaggcccccgaggcccgcaacuccccccgcgccucccucauccccgacgccacccaccucggcccccaguucugcaaguccugcugguucgagaacaagggccucgucgagugcaacaaccacuaccucugccucaacugccucacccuccuccucggcgucuccucccgcugccccaucugcaagaugccccuccccacccgccuccgccccuccgccgcccccaccgccccccucgccgaggccggcgacaacacccgccccccccccuacucccccuga

SEQ ID NO: 11857 - RNA, 300 nt, Artificial Sequence
  derived and/or modified CDS sequence (opt2) from LASV(G2868-SLE-2012;Clade IV)__AIT17326__Z
augggcaacaagcaguccaaggcccccgagucccgcgacuccccccgcgccucccucauccccgacgccacccaccucggcccccaguucugcaaguccugcugguucgagaacaagggccucgucgagugcaacaaccacuaccucugccucaacugccucacccuccuccucuccgucuccaaccgcugccccaucugcaagaugccccuccccaccaagcuccgccccuccgccacccccaccgccccccccacccgcgccgccgacuccauccgccccccccccuacucccccuga

SEQ ID NO: 11858 - RNA, 300 nt, Artificial Sequence
  derived and/or modified CDS sequence (opt2) from LASV(G2903-SLE-2012;Clade IV)__AIT17330__Z
augggcaacaagcaggccaaggcccucgaguccaagaacuccccccgcgccucccucauccccgacgccaccuaccucggcccccaguucugcaaguccugcugguucgagaacaagggccucgucgagugcaacaaccacuaccucugccucaacugccucacccuccuccucuccgucuccaaccgcugccccaucugcaagaugccccuccccaccaagcuccgcuccuccgccgcccccaccgccccccccaccggcgccgccgacggcaccaagcccccccccuacucccccuga

SEQ ID NO: 11859 - RNA, 300 nt, Artificial Sequence
  derived and/or modified CDS sequence (opt2) from LASV(G3010-SLE-2013;Clade IV)__AIT17342__Z
augggcaacaagcaggccaaggccuccgaggccaaggacuccccccgcgccucccucauccccgacgccacccaccucggcccccaguucugcaaguccugcugguucgagaacaagggccucgucgagugcaacaaccacuaccucugccucaacugccucacccuccuccucuccgucuccaaccgcugccccaucugcaagaugccccuccccaccaagcuccgccccuccaccgcccccaccgccccccagaccggcgccgccgacuccauccgccccccccccuacucccccuga

SEQ ID NO: 11860 - RNA, 300 nt, Artificial Sequence
  derived and/or modified CDS sequence (opt2) from LASV(G3016-SLE-2013;Clade IV)__AIT17346__Z
augggcaacaagcaggccaaggcccccgagaccaaggacuccccccgcgccucccucauccccgacgccacccaccucggcccccaguucugcaaguccugcugguucgagaacaagggccucgucgagugcaacaaccacuaccucugccucaacugccucacccuccuccucuccgucuccaaccgcugccccaucugcaagaugccccuccccaccaagcuccgccccuccgccgcccccaccgccccccccgucggcgccgccgacuccacccgccccccccccuacucccccuga

SEQ ID NO: 11861 - RNA, 300 nt, Artificial Sequence
  derived and/or modified CDS sequence (opt2) from LASV(G3148-SLE-2013;Clade IV)__AIT17362__Z
augggcaacaagcaggccaaggcccccgaguccaaggacuccccccgcgccucccucauccccgacgccacccaccucggcccccaguucugcaaguccugcugguucgagaacaagggccucgucgagugcaacaaccacuaccucugccucaacugccucacccuccuccucuccgucuccaaccgcugccccaucugcaagaugccccuccccaccaagcuccgccccuccgccgcccccaccgccccccccgccggcgccgccgacuccauccgccccccccccuacucccccuga

SEQ ID NO: 11862 - RNA, 300 nt, Artificial Sequence
  derived and/or modified CDS sequence (opt2) from LASV(G3151-SLE-2013;Clade IV)__AIT17366__Z
augggcaacaagcagaccaagacccccgaggucaaggacuccccccgcgccucccucauccccgacgccacccaccucggcccccaguucugcaaguccugcugguucgagaacaagggccucgucgagugcaacaaccacuaccucugccucaacugccucacccuccuccucuccgucuccaaccgcugccccaucugcaagaugccccuccccaccaagcuccgccccuccgccgcccccaccgccccccccgcccgcgccgccgacgacacccgccccccccccuacucccccuga

SEQ ID NO: 11863 - RNA, 300 nt, Artificial Sequence
  derived and/or modified CDS sequence (opt2) from LASV(G3206-SLE-2013;Clade IV)__AIT17376__Z
augggcaacaagcaggccaaggcccccgaguccaaggacuccccccgcgccucccucauccccgacgccaccuaccucggcccccaguucugcaaguccugcugguucgagaacaagggccucgucgagugcaacaaccacuaccucugccucaacugccucacccuccuccucuccgucuccaaccgcugccccaucugcaagaugccccuccccaccaagcuccgcuccuccgucgcccccaccgccccccccacccgcgccgccgacuccacccgccccccccccuacucccccuga

SEQ ID NO: 11864 - RNA, 300 nt, Artificial Sequence
  derived and/or modified CDS sequence (opt2) from LASV(G3229-SLE-2013;Clade IV)__AIT17382__Z
augggcaacaagcagaccaagaccuccgaggucaaggacuccccccgcgccucccucauccccgacgccacccaccucggcccccaguucugcaaguccugcugguucgagaacaagggccucgucgagugcaacaaccacuaccucugccucaacugccucacccuccuccucuccgucuccaaccgcugccccaucugcaagaugccccuccccaccaagcuccgccccuccgccgcccccaccgccccccccgcccgcgccgccgacgacacccgccccccccccuacucccccuga

SEQ ID NO: 11865 - RNA, 300 nt, Artificial Sequence
  derived and/or modified CDS sequence (opt2) from LASV(G3234-SLE-2013;Clade IV)__AIT17386__Z
augggcaacaagcaggccaagacccccgaggcccgcgacuccccccgcgccucccucauccccgacgccacccaccucggcccccaguucugcaaguccugcugguucgagaacaagggccucgucgagugcaacaaccacuaccucugccucaacugccucacccuccuccucuccgucuccucccgcugccccaucugcaagaugccccuccccaccaagcuccgccccuccgccacccccaccgccccccccgccggcgccggcgacggcacccgccccccccccuacucccccuga

SEQ ID NO: 11866 - RNA, 300 nt, Artificial Sequence
  derived and/or modified CDS sequence (opt2) from LASV(G3278-SLE-2013;Clade IV)__AIT17396__Z
augggcaacaagcaggucaaggcccccgaggcccgcaacuccccccgcgccucccucauccccgacgccacccaccucggcccccaguucugcaaguccugcugguucgagaacaagggccucgucgagugcaacaaccacuaccucugccucaacugccucacccuccuccucggcgucuccucccgcugccccaucugcaagaugccccuccccacccgccuccgccccuccgccgcccccaccgccccccccgccgaggccggcgacaacacccgccccccccccuacucccccuga

SEQ ID NO: 11867 - RNA, 300 nt, Artificial Sequence
  derived and/or modified CDS sequence (opt2) from LASV(G502-SLE-2009;Clade IV)__AIT17124__Z
augggcaacaagcaggucaagacccccgaggccaaggacuccccccgcgccucccucauccccgacgccacccaccucggcccccaguucugcaaguccugcugguucgagaacaagggccucgucgagugcaacaaccacuaccucugccucaacugccucacccuccuccucuccgucggcaaccgcugccccaucugcaagaugccccuccccaccaagcuccgccccuccgucacccccaccgccccccccacccgcgccgccgacuccaucggccccccccccuacucccccuga

SEQ ID NO: 11868 - RNA, 300 nt, Artificial Sequence
  derived and/or modified CDS sequence (opt2) from LASV(G503-SLE-2009;Clade IV)__AIT17128__Z
augggcaacaagcaggccaagacccccgaggccaaggacuccccccgcgccaaccucauccccgacgccacccaccucggcccccaguucugcaaguccugcugguucgagaacaagggccucgucgagugcaacaaccacuaccucugccucaacugccucacccuccuccucuccgucuccaaccgcugccccaucugcaagaugccccuccccaccaagcuccgccccuccgccgcccccaccgccccccccaccggcgccgccgacuccauccgccccccccccuacucccccuga

SEQ ID NO: 11869 - RNA, 300 nt, Artificial Sequence
  derived and/or modified CDS sequence (opt2) from LASV(G610-SLE-2009;Clade IV)__AIT17132__Z
augggcaacaagcaggccaaggcccccgaggcccgcgacuccccccgcgccucccucauccccgacgccacccaccucggcccccaguucugcaaguccugcugguucgagaacaagggccucgucgagugcaacaaccacuaccucugccucaacugccucacccuccuccucuccgucuccaaccgcugccccaucugcaagaugccccuccccaccaagcuccgccccuccgccacccccaccgccccccccaccgaggccgccgacuccauccgccccccccccuaccgccccuga

SEQ ID NO: 11870 - RNA, 300 nt, Artificial Sequence
  derived and/or modified CDS sequence (opt2) from LASV(G676-SLE-2009;Clade IV)__AIT17140__Z
augggcaacaagcaggccaaggcccccgagcccaaggacuccccccgcgccucccucauccccgacgccacccaccucggcccccaguucugcaaguccugcugguucgagaacaagggccucgucgagugcaacaaccacuaccucugccucaacugccucacccuccuccucuccgucuccaaccgcugccccaucugcaagaugccccuccccaccaagcuccgccccuccgccgcccccaccgccccccccgccggcgccgucgacuccacccgccccccccccuacucccccuga

SEQ ID NO: 11871 - RNA, 300 nt, Artificial Sequence
  derived and/or modified CDS sequence (opt2) from LASV(G692-SLE-2009;Clade IV)__AIT17144__Z
augggcaacaagcaggccaagacccccgaguccaaggacuccccccgcgccucccucauccccgacgccacccaccucggcccccaguucugcaaguccugcugguucgagaacaagggccucgucgagugcaacaaccacuaccucugccucaacugccucacccuccuccucggcgucuccaaccgcugccccaucugcaagaugccccuccccaccaagcuccgcuccuccgucgcccccaccgccccccccaccggcgccgucgacuccauccgccccccccccuacucccccuga

SEQ ID NO: 11872 - RNA, 300 nt, Artificial Sequence
  derived and/or modified CDS sequence (opt2) from LASV(G733-SLE-2010;Clade IV)__AIT17152__Z
augggcaacaagcaggccaagacccccgagaccaaggacuccccccgcgccucccucauccccgacgccacccaccucggcccccaguucugcaaguccugcugguucgagaacaagggccucgucgagugcaacaaccacuaccucugccucaacugccucacccuccuccucuccgucuccaaccgcugccccaucugcaagaugccccuccccaccaagcuccgccccuccaccgcccccaccgccccccccgccggcgccgccgacaacacccgccccccccccuacucccccuga

SEQ ID NO: 11873 - RNA, 300 nt, Artificial Sequence
  derived and/or modified CDS sequence (opt2) from LASV(G808-SLE-2010;Clade IV)__AIT17162__Z
augggcaacaagcaggccaaggccuccgaguccaaggacuccccccgcgccucccucauccccgacgccacccaccucggcccccaguucugcaaguccugcugguucgagaacaagggccucgucgagugcaacaaccacuaccucugccucaacugccucacccuccuccucuccgucuccaaccgcugccccaucugcaagaugccccuccccaccaagcuccgccccuccgucacccccaccgccccccccacccgcaccgccgacaacacccgccccccccccuacucccccuga

SEQ ID NO: 11874 - RNA, 300 nt, Artificial Sequence
  derived and/or modified CDS sequence (opt2) from LASV(Guinea Faranah;Clade IV)__AMZ00378__Z
augggcaaccgccagaccaaggccaccgaggccaaggacuccccccgcgccucccucauccccgacgccacccaccucggcccccaguucugcaaguccugcugguucgagaacaagggccucgucgagugcaacaaccacuaccucugccucaacugccucacccuccuccucuccgucuccucccgcugccccaucugcaagaugccccuccccacccgccucaaguccuccaccaaccccaccgcccccuccgccaagaccgaguccuccaucaaccccccccccuacucccccuga

SEQ ID NO: 11875 - RNA, 300 nt, Artificial Sequence
  derived and/or modified CDS sequence (opt2) from LASV(GUINEA Z-185a;Clade IV)__AMZ00374__Z
augggcaacaagcaggccaaggcccccgagaccaagaacuccccccgcgccucccucauccccgacgccacccaccucggcccccaguucugcaaguccugcugguucgagaacaagggccucgucgagugcaacaaccacuaccucugccucaacugccucacccuccuccucuccgucuccaaccgcugccccaucugcaagaugccccuccccaccaagcuccgccccuccgccguccccaccgccccccccgcccaggucggcgaccgcacccgccccccccccuacucccccuga

SEQ ID NO: 11876 - RNA, 312 nt, Artificial Sequence
  derived and/or modified CDS sequence (opt2) from MOPV/LASV reassortant(IGS-1;Clade IV)__AFY05533__Z
augggcaagacccaguccaagggccagcccuccaccaaccuccucaaggagaccgagccccgccaccccgucauccccgacgcccgcggcaccggccccgaguucugcaaguccugcugguucgagcgccgcggccucguccgcugcaacgaccacuaccucugccucaacugccucacccuccuccacaccgucuccgaccgcugccccaucugcaagcacaagcuccccuuccgccucgagcuccagacccagcccaccgccccccccgagaucccccccucccagaaccccccccccuacucccccuga

SEQ ID NO: 11877 - RNA, 300 nt, Artificial Sequence
  derived and/or modified CDS sequence (opt2) from LASV(LM032-SLE-2010;Clade IV)__AIT17800__Z
augggcaacaagcaggccaaggcccccgaggccaaggacuccccccgcgccucccucauccccgacgccacccaccucggcccccaguucugcaaguccugcugguucgagaacaagggccucgucgagugcaacaaccacuaccucugccucaacugccucacccuccuccucuccgucuccaaccgcugccccaucugcaagaugccccuccccaccaagcuccgccccuccgccacccccaccgccccccccaccgaggccgccgacuccauccgccccccccccuaccaccccuga

SEQ ID NO: 11878 - RNA, 300 nt, Artificial Sequence
  derived and/or modified CDS sequence (opt2) from LASV(LM222-SLE-2010;Clade IV)__AIT17804__Z
augggcaacaagcaggccaaggccuccgaggagaagaacuccccccgcgccucccucauccccgacgccacccaccucggcccccaguucugcaaguccugcugguucgagaacaagggccucgucgagugcaacaaccacuaccucugccucaacugccucacccuccuccucuccgucuccaaccgcugccccaucugcaagaugccccuccccaccaagcuccgccccuccaccacccccaccgccccccccaccggcgccgccgacuccauccgccccccccccuacucccccuga

SEQ ID NO: 11879 - RNA, 300 nt, Artificial Sequence
  derived and/or modified CDS sequence (opt2) from LASV(LM395-SLE-2009;Clade IV)__AIT17808__Z
augggcaacaagcaggccaaggcccccgaguccaaggacuccccccgcgccucccucauccccgacgccacccaccucggcccccaguucugcaaguccugcugguucgagaacaagggccucgucgagugcaacaaccacuaccucugccucaacugccucacccuccuccucuccgucuccaaccgcugccccaucugcaagaugccccuccccacccgccuccgccccuccgccgcccccaccgccccccccaccggcgccgccgacuccacccgccccccccccuacucccccuga

SEQ ID NO: 11880 - RNA, 300 nt, Artificial Sequence; identical to SEQ ID NO: 11878
  derived and/or modified CDS sequence (opt2) from LASV(LM776-SLE-2012;Clade IV)__AIT17824__Z

SEQ ID NO: 11881 - RNA, 300 nt, Artificial Sequence
  derived and/or modified CDS sequence (opt2) from LASV(Mad39;Clade IV)__ANH09743__Z
augggcaacaagcaggccaaggccuccgaggucgaggacggcccccgcgccucccucauccccgacgccacccaccucggcccccaguucugcaaguccugcugguucgagaacaagucccucgucgagugcaacaaccacuaccucugccucaacugccucacccuccuccucuccgucuccaaccgcugccccaucugcaagaugccccuccccacccgccucaagcccuccgucguccccaccgccccccccacccgcgccggcgacggcacccgccccccccccuacucccccuga

SEQ ID NO: 11882 - RNA, 300 nt, Artificial Sequence
  derived and/or modified CDS sequence (opt2) from LASV(Mad41;Clade IV)__ANH09745__Z
augggcaacaagcagaccaaggcccccgaggucgaggacggcccccgcgccucccucauccccgacgccacccaccucggcccccaguucugcaaguccugcugguucgagaacaagggccucgucgagugcaacaaccacuaccucugccucaacugccucacccuccuccucuccgucuccucccgcugccccaucugcaagaugccccuccccacccgccucaagcccuccaucguccccaccgccccccccgcccgcaccggcgagaacacccgccccccccccuacucccccuga

SEQ ID NO: 11883 - RNA, 300 nt, Artificial Sequence
  derived and/or modified CDS sequence (opt2) from LASV(Mad63;Clade IV)__ANH09749__Z
augggcaacaagcaggccaaggcccccgaggucgaggacggcccccgcgccucccucauccccgacgccacccaccucggcccccaguucugcaaguccugcugguucgagaaccgcggccucgucgagugcaacaaccacuaccucugccucaacugccucacccuccuccucuccgucuccaaccgcugccccaucugcaagaugccccuccccacccgccucaagcccuccgucguccccaccgccccccccaccggcgccggcggcgacacccgccccccccccuacucccccuga

SEQ ID NO: 11884 - RNA, 300 nt, Artificial Sequence
  derived and/or modified CDS sequence (opt2) from LASV(Mad69;Clade IV)__ANH09751__Z
augggcaacaagcaggccaaggcccccaaggccgaggacggcccccgcgccucccucauccccgacgccacccaccucggcccccaguucugcaaguccugcugguucgagaacaagggccucgucgagugcaacaaccacuaccucugccucaacugccucacccuccuccucuccgucuccaaccgcugccccaucugcaagaugccccuccccacccgccucaagcccuccgucguccccaccgccccccccaccggcgccggcggcgacacccgcccccccccccacucccccuga

SEQ ID NO: 11885 - RNA, 300 nt, Artificial Sequence
  derived and/or modified CDS sequence (opt2) from LASV(Mad83;Clade IV)__ANH09753__Z
augggcaacaagcaggccaaggccuccgaggccgaggacggcccccgcgccucccucauccccgacgccacccaccucggcccccaguucugcaaguccugcugguucgagaacaagggccucgucgagugcaacaaccacuaccucugccucaacugccucacccuccuccucuccgucuccucccgcugccccaucugcaagaugccccuccccacccgccuccgccccuccgucguccccaccgcccccuccgccggcgccggcgacggcacccgccccccccccuacucccccuga

SEQ ID NO: 11886 - RNA, 300 nt, Artificial Sequence
  derived and/or modified CDS sequence (opt2) from LASV(NL;Clade IV)__AAO59510__Z
augggcaacaagcagaccaaggcccccgaggccaaggacuccccccgcgccucccucauccccgacgccaccuaccucggcccccaguucugcaaguccugcugguucgagaacaagggccucgucgagugcaacaaccacuaccucugccucaacugccucacccuccuccucuccgucuccaaccgcugccccaucugcaagaugccccuccccaccaagcuccgccccuccgccgcccccaccgccccccccgccggcgccgcccacuccgcccgccccccccccuacucccccuga

SEQ ID NO: 11887 - RNA, 300 nt, Artificial Sequence
  derived and/or modified CDS sequence (opt2) from LASV(Z0947-SLE-2011;Clade IV)__AIT17838__Z
augggcaacaagcaggccaagguccccgaguccaaggacuccccccgcgccucccucauccccgacgccacccaccucggcccccaguucugcaaguccugcugguucgagaacaagggccucgucgagugcaacaaccacuaccucugccucaacugccucacccuccuccucuccgucuccaaccgcugccccaucugcaagaugccccuccccaccaagcucaagcccuccgccgcccccaccgccccccccaccggcgccgccgacuccauccgccccccccccuacucccccuga

SEQ ID NO: 11888 - RNA, 300 nt, Artificial Sequence
  derived and/or modified CDS sequence (opt2) from LASV(Z0948-SLE-2011;Clade IV)__AIT17842__Z
augggcaacaagcaggccaagguccccgaguccaaggacuccccccgcgccucccucauccccgacgccacccaccucggcccccaguucugcaaguccugcugguucgagaacaagggccucgucgagugcaacaaccacuaccucugccucaacugccucacccuccuccucuccgucuccaaccgcugccccaucugcaagaugccccuccccaccaagcuccgccccuccgccgcccccaccgccccccccaccggcgucgccgacuccauccgccccccccccuacucccccuga

SEQ ID NO: 11889 - RNA, 300 nt, Artificial Sequence
  derived and/or modified CDS sequence (opt2) from LASV(Z148;Clade IV)__AAT49005__Z
augggcaacaagcaggccaaggcccccgagaccaaggacuccccccgcgccucccucauccccgacgccacccaccucggcccccaguucugcaaguccugcugguucgagaacaagggccucgucgagugcaacaaccacuaccucugccucaacugccucacccuccuccucuccgucuccaaccgcugccccaucugcaagaugccccuccccacccgccuccgccccuccgccguccccaccgccccccccgcccccgccggcgaccgcaccaagcccccccccuacucccccuga

SEQ ID NO: 11890 - RNA, 300 nt, Artificial Sequence
  derived and/or modified CDS sequence (opt2) from LASV(Bamba-R114;Clade V)__AHC95547__Z
augggcaaccgccaggccaaggaccccaaggucgaguccuccccccgcgccucccucauccccgacgccacccaccucggcccccaguucugcaaguccugcugguucgagaacaagggccucgucgagugcaacaaccacuaccucugccucaacugccucucccuccuccucuccgucuccaaccgcugccccaucugcaagaugccccuccccacccgccuccgccccaccaccaugcccaccgccccccagaucaucaaggagggcaccaccaaccccccccccuacacccccuga

SEQ ID NO: 11891 - RNA, 300 nt, Artificial Sequence
  derived and/or modified CDS sequence (opt2) from LASV(Komina-R16;Clade V)__AHC95545__Z
augggcaacaagcaggccaaggaccccaagaccgaguccuccccccgcgccucccucauccccgacgccacccaccucggcccccaguucugcaaguccugcugguucgagaacaagggccucgucgagugcaacaaccacuaccucugccucaacugccucucccuccuccucuccgucuccaaccgcugccccaucugcaagaugccccuccccaccaagcucaagcccaucaccacccccaccgccccccagaucacccgcgaguccaucaccaaccccccccccuacacccccuga

SEQ ID NO: 11892 - RNA, 300 nt, Artificial Sequence; identical to SEQ ID NO: 11717
  derived and/or modified CDS sequence (opt2) from LASV(Alzey;Clade VI)__SCA79103__Z

SEQ ID NO: 11893 - RNA, 300 nt, Artificial Sequence
  derived and/or modified CDS sequence (opt2) from LASV(NIGERIA IKEJI;Clade II)__AMZ00370__Z
augggcaacaagcaggccaaguccacccgcgucgacgagcagcagcgcgcccaccucguccccgacgccucccaccucggcccccaguucugcaaguccugcugguucgagaacaagggccucgucgagugcaacaaccacuaccucugccucaacugccucucccuccuccucuccgucuccucccgcugccccaucugcaagaugccccuccccaccaagcucaagaccuccacccagcccuccgccccccgcgccgaggucccccccuccaccacccccccccccuacucccccuga

SEQ ID NO: 11894 - RNA, 300 nt, Artificial Sequence
  derived and/or modified CDS sequence (opt3) from LASV(Josiah;Clade IV)__ADY11072/NP_694871__Z
augggcaacaagcaggccaaggcucccgagagcaaggacuccccuagagcaucucugaucccagaugccacccaccucgggccgcaauucugcaaaucauguugguuugaaaauaagggacuuguggagugcaacaaucauuaccuguguuugaacugcuuaacacugcuacucagugucagcaauaggugucccauuugcaaaaugccucugccaacuaaacuucggcccuccgcggcuccuacggccccacccaccggugcagccgacucuauacgcccuccaccguauucgcccuga

SEQ ID NO: 11895 - RNA, 303 nt, Artificial Sequence
  derived and/or modified CDS sequence (opt3) from LASV(Pinneo-NIG-1969;Clade I)__AIT17834__Z
augggcaacaagcagaccagaagcccucccaaaccagagcacccgaggcccacacugcucccugacgccucccaucuugggccacaauucugcaagucuuguugguuugaaaauaaaggacugguggagugcaacaaucacuacuuguguuuaaacugccugacucuacuccugucagucagugaucggugucccaucugcaagaugccucuuccaacgaaacuggcuguucgcacccagcccagcgcaccuccauugaaucaggguaacacacaguccucuccgcccccuuauucgccauga

SEQ ID NO: 11896 - RNA, 300 nt, Artificial Sequence
  derived and/or modified CDS sequence (opt3) from LASV(Nig08-04;Clade II)__ADU56612__Z
augggcaacagacagaccaggcccacagaggccacugaacaaagccgggcucaccuggugccugacgcaucccaucucgggccacaguucugcaagucuuguugguuugagaaucgcggacuugucgaaugcaacaaucacuaccuguguuugaacugcuuaucacugcuacucaguguuagcucccgauguccgaucugcaaaaugccccugccuacgcgucuuaaggccucugcgcagccaucggcucccccuaccgaggccccacagaauacaacucccccuccauauaccccguga

SEQ ID NO: 11897 - RNA, 300 nt, Artificial Sequence
  derived and/or modified CDS sequence (opt3) from LASV(Nig08-A19;Clade III)__ADU56620__Z
augggcgggaagcacaccaaaccccagagagagagcaacuccccuagggccucucugaucccagacgcuacacaucucggaccgcaauucugcaagucauguugguuugaaaauaaaggucuuguggagugcaacaaucacuaccuguguuugaacugcuuaacucugcuacucagugucagcaaucggugucccauuugcaagaugccucugccaacgcgccuucgagcauccaccaaccccacagccccucagguugaacaggugggcccaacuaaucccccuccauauucuccguga

SEQ ID NO: 11898 - RNA, 300 nt, Artificial Sequence
  derived and/or modified CDS sequence (opt3) from LASV(AV;Clade V)__CCA30312__Z
augggcaacagacaggccaagaaucccgagguggaaaacagcccuagggcuucccugaucccagacgcaacccaccucgggccgcaauucugcaaaucuuguugguuugagaauaagggacuugucgaaugcaacaaucauuaccuguguuugaacugcuuaucacugcuacucaguguuagcaaucggugucccauuugcaaaaugccucugccaacacgccuucgacccacuacgaccccuacagccccacagauaaucaaggagaacacuaccaaucccccuccauauacaccguga

SEQ ID NO: 11899 - RNA, 300 nt, Artificial Sequence
  derived and/or modified CDS sequence (opt3) from LASV(Togo/2016/7082;Clade VI)__AMR44579__Z
augggcgccagacagaccaagcaaccccagaucgaggggagcccuagggcuucccuggugccagacgcaucucaccucggaccgcaguucugcaagucauguugguuugaaaacaagggucuugucgagugcaauaaccauuaccuguguuugaauugcuuaagucugcuacucagcguuuccaaccggugucccauuugcaaaaugccucugccaacaaaacuucgcgugucuucggcccccucagcgccuccagcugccacugcacagcccggcacgccuccaccguauagccccuga

SEQ ID NO: 11900 - RNA, 300 nt, Artificial Sequence
  derived and/or modified CDS sequence (opt3) from LASV(KAK-428;Clade n.d. (VII))__ANH09761__Z
augggcaacaaggggaccaaacccacacagaauagcgagccuuccagagccaaccuggugccagacgcuucuuaccucggaccgcaauucugcaagucauguugguuugaaaauaaaggucuugucgagugcaacaaucacuaucuguguuugaacugcuuaacuaugcugcuaaguguuagcaauaggugucccaucugcaagaugccucucccaacgaaaauuaaggcauccggcucucccucggccccuccaaccgaagcgaacucagcugugagcccucccccauacacaccguga

SEQ ID NO: 11901 - RNA, 300 nt, Artificial Sequence
  derived and/or modified CDS sequence (opt3) from LASV(ISTH0009-NIG-2011;Clade II)__AIT17402__Z
augggcaacagacaggccaagagcaccaaaguggacgagcaccaaagggcucaucugguccccgaugcaucccaccucgggccucaguucugcaagucuuguugguuugaaaaucggggacuuguugagugcaacaaucauuaccuguguuugaacugcuuaucacugcuacucagugugagcucccgcuguccaaucugcaaaaugccgcugcccacaaaacuuaaggccgcggcucagccuucugccccaucgacugaaacgauucagaauaccacacccccuccauauacucccuga

SEQ ID NO: 11902 - RNA, 300 nt, Artificial Sequence
  derived and/or modified CDS sequence (opt3) from LASV(ISTH0012-NIG-2011;Clade II)__AIT17406__Z
augggcaacagacaggccaagagcuccaaaguggacgagcaccaaagggcucaucugguccccgaugcaucucaccucgggccucaguucugcaagucauguugguuugaaaauaaaggacuuguugagugcaacaaucauuaccuguguuugaacugcuuaagucugcuacucagcguguccucucgguguccaaucugcaagaugccgcugcccaccaaacuuaaggccgcggcucagccuucggccccaucaacagaagcaguacagaauacugcucccccuccauaugcccccuga

SEQ ID NO: 11903 - RNA, 300 nt, Artificial Sequence
  derived and/or modified CDS sequence (opt3) from LASV(ISTH0047-NIG-2011;Clade II)__AIT17410__Z
augggcaacaagcaggccaaaagcaccaagguggacgagcaccaaagagcucaucugguccccgaugcaucccaccucgggccucaguucugcaaaucuuguugguuugaaaauaggggacuuguugagugcaacaaucauuaccuguguuugaacugcuuaucacugcuacucagugugagcucccgguguccaaucugcaagaugccgcugcccacacgccuuaaagccgcgacucagccuucugcuccaucgacggaagccacccagaauacaacucccccuccauauacccccuga

SEQ ID NO: 11904 - RNA, 300 nt, Artificial Sequence
  derived and/or modified CDS sequence (opt3) from LASV(ISTH0230-NIG-2011;Clade II)__AIT17418__Z
augggcaacagacaggccaagagcaccaaaguggacgagcaccaaagggcucaucugguccccgaugcaucccaccucgggccucaguucugcaagucuuguugguuugaaaaucggggacuuguugagugcaacaaucauuaccuguguuugaacugcuuaucacugcuacucagugugagcucccgcuguccaaucugcaaaaugccgcugcccacaaaacuuaaggccgcgacucagccuucugcuccaucgacggaaaccauucagaauacaacucccccuccauauacccccuga

SEQ ID NO: 11905 - RNA, 300 nt, Artificial Sequence
  derived and/or modified CDS sequence (opt3) from LASV(ISTH0531-NIG-2011;Clade II)__AIT17422__Z
augggcaacagacaggccaagagcgcuaaaguggacgagcaccaaagggcacaucugguccccgaugccucccaccucgggccucaguucugcaagucuuguugguuugaaaaucggggacuuguugagugcaacaaucauuaccuguguuugaacugcuuaucacugcuacucagugugagcucccgcuguccaaucugcaaaaugccgcugcccaccaaacuuaaggcggcuacacagccuucugccccaucgacugaagcaacgcagaauaccacacccccuccauauacucccuga

SEQ ID NO: 11906 - RNA, 300 nt, Artificial Sequence
  derived and/or modified CDS sequence (opt3) from LASV(ISTH0595-NIG-2011;Clade II)__AIT17426__Z
augggcaacaagcaggccaaaagcaccaagguggacgagcaccaaagagcucaucugguccccgaugcaucccaccucgggccucaguucugcaaaucuuguugguuugaaaauaggggacuuguugagugcaacaaucauuaccuguguuugaacugcuuaucacugcuacucagugugagcucccgguguccaaucugcaagaugccgcugcccacaaaacuuaaggccgcgacucagccuucugcuccaucgacggaagccacccagaauacaacucccccuccauauacccccuga

SEQ ID NO: 11907 - RNA, 300 nt, Artificial Sequence
  derived and/or modified CDS sequence (opt3) from LASV(ISTH1003-NIG-2011;Clade II)__AIT17432__Z
augggcaacaagcaggccaaaagcaccaagguggacgagcaccaaagagcucaucugguccccgaugcaucccaccucgggccucaguucugcaaaucuuguugguuugaaaauaggggacuuguugagugcaacaaucauuaccuguguuugaacugcuuaucacugcuacucagugugagcucccgguguccaaucugcaagaugccgcugcccacacgccuuaaagccgcgacucagccuucugcuccaucgacggaagccacccagaauacaauucccccuccauauacucccuga

SEQ ID NO: 11908 - RNA, 300 nt, Artificial Sequence
  derived and/or modified CDS sequence (opt3) from LASV(ISTH1038-NIG-2011;Clade II)__AIT17436__Z
augggcaacaagcaggccaaaagcaccaaggcugacgagcaccaaagagcacaucuggugcccgaugccucccaccucgggccucaguucugcaaaucuuguugguuugaaaauaggggacuugucgagugcaacaaucauuaccuguguuugaacugcuuaucacugcuacucaguguuagcucccgguguccaaucugcaagaugccgcugcccacaaaacuuaaggcggcuacucagccuucugccccaucgacggaagcaacccgcaauacaacucccccuccauauacccccuga

SEQ ID NO: 11909 - RNA, 300 nt, Artificial Sequence
  derived and/or modified CDS sequence (opt3) from LASV(ISTH1058-NIG-2011;Clade II)__AIT17444__Z
augggcaacagacaggccaagagcaccaaaguggacgagcaccaaagggcucaucugguccccgaugcaucccaccucgggccucaguucugcaagucuuguugguuugaaaauaaaggacuuguugagugcaacaaucauuaccuguguuugaacugcuuaucacugcuacucagugugagcucccgguguccaaucugcaagaugccgcugcccacaaaacuuaaggccgcggcucagccuucugccccaucgacugaagcagcccagaauacggcucccccuccauaugcacccuga

SEQ ID NO: 11910 - RNA, 300 nt, Artificial Sequence
  derived and/or modified CDS sequence (opt3) from LASV(ISTH1064-NIG-2011;Clade II)__AIT17448__Z
augggcaacagacaggccaagagcaccaaagugggggagcaccaaagggcucaucugguccccgacgcaucccaccucggaccucaguucugcaagucuuguugguuugaaaaucggggucuuguugagugcaacaaucauuaccuguguuugaacugcuuaucacugcuacucagugugagcucccgcuguccaaucugcaaaaugccgcugcccacaaaacuuaaggccacugcgcagccuucugcuccaucggccgaagcaauucagaauacgacacccccuccauauacccccuga

SEQ ID NO: 11911 - RNA, 300 nt, Artificial Sequence
  derived and/or modified CDS sequence (opt3) from LASV(ISTH1069-NIG-2011;Clade II)__AIT17452__Z
augggcaacagacaggccaagagcaccaggguggacgagcaccaacgggcucaucugguccccgaugcaucccaccucgggccucaguucugcaaaucuuguugguuugaaaaucgcggacuuguugagugcaacaaucauuaccuguguuugaacugcuuaucacugcuacucagugugagcucccgauguccaaucugcaagaugccgcugcccacacgucuuagagccgcgguacagccuucugcuccaucgacugaaacgacccaggacacaacucccccuccauauucacccuga

SEQ ID NO: 11912 - RNA, 300 nt, Artificial Sequence
  derived and/or modified CDS sequence (opt3) from LASV(ISTH1096-NIG-2012;Clade II)__AIT17456__Z
augggcaacagacaggccaagagcaccgaggugaaugaacaccaaagggcucaucugguccccgacgcaucccaccucgggccucaguucugcaaaucuuguugguuugagaaccggggacuuguugaaugcaauaaccauuaccuguguuugaauugcuuaucacugcuacucagugugagcucccgcuguccaaucugcaagaugccgcugcccacaaaacuuaaggccgcgacucagccuucugcuccaucgacggagguaacccagaacacagugcccccuccauauucacccuga

SEQ ID NO: 11913 - RNA, 300 nt, Artificial Sequence
  derived and/or modified CDS sequence (opt3) from LASV(ISTH1107-NIG-2012;Clade II)__AIT17460__Z
augggcaacagacaggccaagagcaccaaaguggacgagcaccaaagggcucaucugguccccgaugcaucccaccucgggccucaguucugcaagucuuguugguuugaaaaucggggacuuguugagugcaacaaucauuaccuguguuugaacugcuuaucacugcuacucagugugagcucccgcuguccaaucugcaaaaugccgcugcccacaaaacuuaaggccgcggcucagccuucugccccacccacugaagcaacgcagaauaccacaccuccacccuauacuccuuga

SEQ ID NO: 11914 - RNA, 300 nt, Artificial Sequence
  derived and/or modified CDS sequence (opt3) from LASV(ISTH1111-NIG-2011;Clade II)__AIT17464__Z
augggcaacagacaggccaagagcaccaaaguggacgagcaccaaagggcucaucugguccccgaugcaucccaccucgggccucaguucugcaagucuuguugguuugaaaaucggggacuuguugagugcaacaaucauuaccuguguuugaacugcuuaucacugcuacucagugugagcucccgcuguccaaucugcaaaaugccgcugcccacaaaacuuaaggccgcggcucagccuucugccccaucgacugaagcaacgcaggacaccacacccccuccauauacucccuga

SEQ ID NO: 11915 - RNA, 300 nt, Artificial Sequence
  derived and/or modified CDS sequence (opt3) from LASV(ISTH1121-NIG-2012;Clade II)__AIT17468__Z
augggcaacagacaggccaagcaaaccaaaguggacgagcaccagagggcucaucugguccccgaugcaagccaccucgggccucaguucugcaaguccuguugguuugaaaaucggggacuuguugagugcaacaaucauuaccuguguuugaacugcuuaucucugcuacucucaaucaguagccgcuguccaauuugcaaaaugccgcugcccacaaaacuuaaggccgcggcucagccuuccgccccaucuacugaagcaacgcaagacaccacacccccuccauauacucccuga

SEQ ID NO: 11916 - RNA, 300 nt, Artificial Sequence
  derived and/or modified CDS sequence (opt3) from LASV(ISTH1129-NIG-2012;Clade II)__AIT17472__Z
augggcaacaagcagaccaaaagcacaaaggccgacgagcaccaaagagcucaucuggugcccgaugcaucccaccucgggccucaguucugcaaaucuuguugguuugaaaauaggggacuugucgagugcaacaaucauuaccuguguuugaacugcuuaucacugcuacucaguguuagcucccgguguccaaucugcaagaugccgcugcccacucgccuuaaagccgcggcucagccuucugccccaucgacggaagcaacccaggacacaacucccccuccauauacccccuga

SEQ ID NO: 11917 - RNA, 300 nt, Artificial Sequence
  derived and/or modified CDS sequence (opt3) from LASV(ISTH1137-NIG-2011;Clade II)__AIT17476__Z
augggcaacagacaggccaagagcaccaaaguggacgagcaccaaagggcucaucugguccccgaugcaucccaccucgggccucaguucugcaagucuuguugguuugaaaaucggggacuuguugagugcaacaaucauuaccuguguuugaacugcuuaucacugcuacucagugugagcucccgcuguccaaucugcaaaaugccgcugcccacaaaacuuaaggccgcggcucagccuucugccccaucggcagaagccauucagaauacuacgcccccuccauauacccccuga

SEQ ID NO: 11918 - RNA, 300 nt, Artificial Sequence
  derived and/or modified CDS sequence (opt3) from LASV(ISTH2010-NIG-2012;Clade II)__AIT17480__Z
augggcaacagacacgccaagagcaccaaaguggacgagcaucagagggcucaccugguccccgaugcaucccaucucgggccucaauucugcaagucuuguugguuugaaaaucggggacuuguugagugcaacaaucacuaccuguguuugaacugcuuaucacugcuacucagugugagcucccgcuguccaaucugcaaaaugccgcugcccacaaaacuuaaggccgcggcucagccuucugccccaucgacugaaguaauucagucaacgacacccccuccauauacccccuga

SEQ ID NO: 11919 - RNA, 300 nt, Artificial Sequence
  derived and/or modified CDS sequence (opt3) from LASV(ISTH2016-NIG-2012;Clade II)__AIT17484__Z
augggcaacagacacgccaagagcaccaaaguggacgagcaucagagggcucaccugguccccgaugcaucccaucucgggccucaauucugcaagucuuguugguuugaaaaucggggacuuguugagugcaacaaucacuaccuguguuugaacugcuuaucacugcuacucagugugagcucccgcuguccaaucugcaaaaugccgcugcccacaaaacuuaaggccgcggcucagccuucugccccaucgacugaagagauucagaauacgacacccccuccauauacccccuga

SEQ ID NO: 11920 - RNA, 300 nt, Artificial Sequence
  derived and/or modified CDS sequence (opt3) from LASV(ISTH2020-NIG-2012;Clade II)__AIT17488__Z
augggcaacagacaggccaagcccaccaaaguggacgagcaccaaagggcucaucuggucccugaugcaagccaccucgggccacaguucugcaaguccuguugguuugaaaauaaaggacuuguugagugcaacaaucauuaccuguguuugaacugcuuaucucugcuacucucagugaguagccgguguccgaucugcaagaugccccugccuacaaaacuuaaggccgcggcucagccauccgcccccucuacugaagcagcccagaauacggcuccuccacccuaugcaccuuga

SEQ ID NO: 11921 - RNA, 300 nt, Artificial Sequence
  derived and/or modified CDS sequence (opt3) from LASV(ISTH2031-NIG-2012;Clade II)__AIT17496__Z
augggcaacagacaggccaagagcaccaaaguggacgagcaccaaagggcucaucugguccccgaugcaucccaccucgggccucaguucugcaagucuuguugguuugaaaaucggggacuuguugagugcaacaaucauuaccuguguuugaacugcuuaucacugcuacucagugugagcucccgcuguccaaucugcaaaaugccgcugcccacacgacuuaaggccgcgacucagccuucugcuccaucgacggaagccacccagacaacuacacccccuccauauacccccuga

SEQ ID NO: 11922 - RNA, 300 nt, Artificial Sequence
  derived and/or modified CDS sequence (opt3) from LASV(ISTH2037-NIG-2012;Clade II)__AIT17500__Z
augggcaacagacagaccaagagcacaaaaguggacgagcaccaaagggcccaucugguccccgaugcuucccaccucgggccucaguucugcaagucuuguugguuugaaaauaaaggacuuguugagugcaacaaucauuaccuguguuugaacugcuuaucacugcuacucagugugagcucccgguguccaaucugcaagaugccgcugcccacuaaacuuaagacggcagcccagccuucugcgccacccaccgaagcugcccgcacaacugcaccuccacccuaugccccuuga

SEQ ID NO: 11923 - RNA, 300 nt, Artificial Sequence
  derived and/or modified CDS sequence (opt3) from LASV(ISTH2042-NIG-2012;Clade II)__AIT17504__Z
augggcaacagacacgccaagagcaccaaaguggacgagcaucagagggcucaccugguccccgaugcaucccaucucgggccucaauucugcaagucuuguugguuugaaaaucggggacuuguugagugcaacaaucacuaccuguguuugaacugcuuaucacugcuacucagugugagcucccgcuguccaaucugcaaaaugccgcugcccacaaaacuuaaggccgcggcucagccuucugccccaucgacugaagcaauucagaauacgacacccccuccauauacccccuga

SEQ ID NO: 11924 - RNA, 300 nt, Artificial Sequence
  derived and/or modified CDS sequence (opt3) from LASV(ISTH2046-NIG-2012;Clade II)__AIT17508__Z
augggcaacagacagaccaagagcacaaaaguggacgagcaccaaagggcccaucugguccccgaugcuucccaccucgggccucaguucugcaagucuuguugguuugaaaauaaaggacuuguugagugcaacaaucauuaccuguguuugaacugcuuaucacugcuacucagugugagcucccgguguccaaucugcaagaugccgcugcccacuaaacuuaaggcagccgcgcagccuucugcuccaucgacggaagccacccagaauacagcacccccuccauaugcccccuga

SEQ ID NO: 11925 - RNA, 300 nt, Artificial Sequence
  derived and/or modified CDS sequence (opt3) from LASV(ISTH2050-NIG-2012;Clade II)__AIT17512__Z
augggcaacagacaggccaagagcaccaaaguguacgagcaccaaagggcucaucugguccccgacgcaucccaccucgggccucaguucugcaagucuuguugguuugaaaaucggggacuuguugagugcaacaaucauuaucuguguuugaacugcuuaucacugcuacucagugugagcucccgcuguccaaucugcaaaaugccgcugcccacacgacuuaaggccgcgacucagccuucugcuccaucgacggaagccacccagaauacaacucccccuccauacacccccuga

SEQ ID NO: 11926 - RNA, 300 nt, Artificial Sequence
  derived and/or modified CDS sequence (opt3) from LASV(ISTH2057-NIG-2012;Clade II)__AIT17516__Z
augggcaacagacaggccaagagcaccaaaguggacgagcaccaaagggcucaucugguccccgaugcaucccaccucgggccucaguucugcaagucuuguugguuugaaaaucggggacuuguugagugcaacaaucauuaccuguguuugaacugcuuaucacugcuacucagugugagcucccgcuguccaaucugcaaaaugccgcugcccacaaaacuuaagacugccacgcagccuucugcgccacugaccgaagcuacacagaauacuacacccccuccauauacccccuga

SEQ ID NO: 11927 - RNA, 300 nt, Artificial Sequence
  derived and/or modified CDS sequence (opt3) from LASV(ISTH2061-NIG-2012;Clade II)__AIT17520__Z
augggcaacaagcaggccaaaagcaccaagguggacgagcaccaaagagcucaucugguccccgaugcaucccaccucgggccucaguucugcaaaucuuguugguuugaaaauaggggacuuguugagugcaacaaucauuaccuguguuugaacugcuuaucacugcuacucagugugagcaaucgguguccaaucugcaagaugccgcugcccacaaaacuuaaggccgcggcucagccuuccgccccaucuacugaagcaacgcagaacaccacacccccuccauauacucccuga

SEQ ID NO: 11928 - RNA, 300 nt, Artificial Sequence
  derived and/or modified CDS sequence (opt3) from LASV(ISTH2065-NIG-2012;Clade II)__AIT17526__Z
augggcaacagacaggccaagagcgccaaagugaccgagcaccaaagggcacaucugguccccgacgccucccaccucgggccucaguucugcaagucuuguugguuugaaaauaaaggacuuguugagugcaacaaucauuaccuguguuugaacugcuuaucacugcuacucagugugagcucccgguguccaaucugcaagaugccgcugcccacacgccuuaaagcggcuacucagccuucugccccaucggcagaagcuccccagucaacgaccccuccacccuauacaccuuga

SEQ ID NO: 11929 - RNA, 300 nt, Artificial Sequence
  derived and/or modified CDS sequence (opt3) from LASV(ISTH2094-NIG-2012;Clade II)__AIT17536__Z
augggcaacagacagaccaggcccacagaggccacugaacaaagccgggcucaccuggugccugacgcaucccaucucgggccacaguucugcaagucuuguugguuugagaauaaaggacuugucgaaugcaacaaucacuaccuguguuugaacugcuuaucacugcuacucaguguuagcucccgcuguccgaucugcaagaugccccugccuacgcgacuuaaagccucugcgcagccaucggcucccccuaccgaggccccacagaauaaggcacccccuccauauacaccguga

SEQ ID NO: 11930 - RNA, 300 nt, Artificial Sequence
  derived and/or modified CDS sequence (opt3) from LASV(ISTH2129-NIG-2012;Clade II)__AIT17542__Z
augggcaacagacaggucaagagcaccaagguggacgagcaccaaagggcccaucugauccccgaugcuucccaccucgggccucaguucugcaagucuuguugguuugaaaaucggggacuuguugagugcaacaaucauuaccuguguuugaacugcuuaucacugcuacucagugugagcucccgcuguccaauuugcaaaaugccgcugcccacaaaacuugaagcagccgcgcagccuucugcuccaucgacugaggccacgcaggacaccacacccccuccauauacucccuga

SEQ ID NO: 11931 - RNA, 300 nt, Artificial Sequence
  derived and/or modified CDS sequence (opt3) from LASV(ISTH2217-NIG-2012;Clade II)__AIT17546__Z
augggcaacaagcaggccaaaagcaccaagguggacgagcaccaaagagcucaucugguccccgaugcaucccaccucgggccucaguucugcaaaucuuguugguuugaaaauaggggacuuguugagugcaacaaucauuaccuguguuugaacugcuuaucacugcuacucagugugagcucccgguguccaaucugcaagaugccgcugcccacaaaacuuaaggccgcggcucagccuucugccccaucgacugaaacgauucagaauaccacacccccuccauauacucccuga

SEQ ID NO: 11932 - RNA, 300 nt, Artificial Sequence
  derived and/or modified CDS sequence (opt3) from LASV(ISTH2271-NIG-2012;Clade II)__AIT17550__Z
augggcaacagacaggccaagcaaaccaaaguggacgagcaccagagggcucaucugguccccgaugcaagccaccucgggccucaguucugcaaguccuguugguuugaaaaucggggacuuguugagugcaacaaucauuaccuguguuugaacugcuuaucucugcuacucucagugaguagccgcuguccaaucugcaaaaugccgcugcccacaaaacuuaaggccgcggcucagccuuccgccccaucuacugaaauuacgcaaaauaccacacccccuccauauacucccuga

SEQ ID NO: 11933 - RNA, 300 nt, Artificial Sequence
  derived and/or modified CDS sequence (opt3) from LASV(ISTH2304-NIG-2012;Clade II)__AIT17554__Z
augggcaacagacaggccaagagcaccaaagcugacgagcaccaaagggcacaucuggugcccgaugccucccaccucgggccucaguucugcaagucuuguugguuugaaaaucggggacuugucgagugcaacaaucauuaccuguguuugaacugcuuaucacugcuacucaguguuagcaaucgcuguccaaucugcaaaaugccgcugcccacacgacuuaaggcggcugcccagccuuccgcaccaucuacugaagccacgcaggacaccacacccccuccauauacucccuga

SEQ ID NO: 11934 - RNA, 300 nt, Artificial Sequence
  derived and/or modified CDS sequence (opt3) from LASV(ISTH2312-NIG-2012;Clade II)__AIT17558__Z
augggcaacagacaggccaagagcaccaaaguggacgagcaccaaagggcucaucugguccccgaugcaucccaccucgggccucaguucugcaagucuuguugguuugaaaaucggggacuuguugagugcaacaaucauuaccuguguuugaacugcuuaucacugcuacucagugugagcucccgcuguccaaucugcaaaaugccgcugcccacacgacuuaaggccgcggcucagccuucugccccaucgacugaagcaauucguucaacgacacccccuccauauacccccuga

SEQ ID NO: 11935 - RNA, 300 nt, Artificial Sequence
  derived and/or modified CDS sequence (opt3) from LASV(ISTH2358-NIG-2012;Clade II)__AIT17570__Z
augggcaacagacaggccaagagcgcuaaagugaaugagcaccaaagggcacaucugguccccgacgccucccaccucgggccucaguucugcaagucuuguugguuugaaaaccggggacuuguugagugcaauaaccauuaccuguguuugaauugcuuaucacugcuacucagugugagcucccgcuguccaaucugcaaaaugccgcugcccaccaaacuuaaggcggcugcccagccuucugcaccaucgacagaagccacucagaacauuacgcccccuccauauacccccuga

SEQ ID NO: 11936 - RNA, 300 nt, Artificial Sequence
  derived and/or modified CDS sequence (opt3) from LASV(Lassa virus/H.sapiens-wt/NGA/2016/ISTH_0017;Clade II)__AVO03713__Z
augggcaacagacaggccaagagcaccaaaguggacgagcaccaaagggcucaucugguccccgaugcaucccaccucgggccucaguucugcaagucuuguugguuugaaaaucggggacuuguugagugcaacaaucauuaccuguguuugaacugcuuaucacugcuacucagugugagcucccgcuguccaaucugcaaaaugccgcugcccacaaaacuuaaggccgcgacucagccuucugcuccaucgacggaaguaaaucagaacaccacacccccuccauauacucccuga

SEQ ID NO: 11937 - RNA, 300 nt, Artificial Sequence
  derived and/or modified CDS sequence (opt3) from LASV(Lassa virus/H.sapiens-wt/NGA/2016/ISTH_0035;Clade II)__AVO03731__Z
augggcaacagacaggccaagagcaccaaaguggacgagcaccaaagggcucaucugcuccccgaugcaucccaccuugggccucaguucugcaagucuuguugguuugaaaaucggggacuggucgagugcaacaaucauuacuuguguuuaaacugccugucacuacuccugaguguuagcucccgcuguccaaucugcaaaaugccgcuucccacaaagcugaaagccgcgacucagccuucugcuccaucgacggaagccacccagaauacaacucccccuccauauacccccuga

SEQ ID NO: 11938 - RNA, 300 nt, Artificial Sequence
  derived and/or modified CDS sequence (opt3) from LASV(Lassa virus/H.sapiens-wt/NGA/2016/ISTH_0703;Clade II)__AVO03703__Z
augggcaacaagcagaccaaaagcacaaagguggacgagcaccaaagagcccaucugguccccgaugcuucccaccucgggccucaguucugcaaaucuuguugguuugaaaauaggggacuuguugagugcaacaaucauuaccuguguuugaacugcuuaucacugcuacucagugugagcucccgguguccaaucugcaagaugccgcugcccacuaaacuuaaggcagccgcgcagccuucugcuccaucgacggaagccacccagaauauuacacccccuccauauacucccuga

SEQ ID NO: 11939 - RNA, 300 nt, Artificial Sequence
  derived and/or modified CDS sequence (opt3) from LASV(Lassa virus/H.sapiens-wt/NGA/2016/ISTH_0717;Clade II)__AVO03670__Z
augggcgggaagcacagcaaacccccuggagaguccaacucuccaagagccucacugaucccggacgcuacccaucucgguccccaguucugcaagaguuguugguuugaaaauaaaggccuuguggagugcaacaaucacuaccuguguuugaacugcuuaagccugcuacucuccgucucuaauagguguccuauuugcaagaugccacugcccacacggcuucgcgcaucgacuaacccuacggccccacaaguugggcagauagaucccaccaauccuccaccguauucacccuga

SEQ ID NO: 11940 - RNA, 300 nt, Artificial Sequence
  derived and/or modified CDS sequence (opt3) from LASV(Lassa virus/H.sapiens-wt/NGA/2016/ISTH_0753;Clade II)__AVO03748__Z
augggcaacagacaggccaagagcaccaaaguggacgagcaccaaagggcucaucugguccccgaugcaucccaccucgggccucaguucugcaagucuuguugguuugaaaaucggggacuuguugagugcaacaaucauuaccuguguuugaacugcuuaucacugcuacucagugugagcaaucgcuguccaaucugcaaaaugccgcugcccacaaaacuuaaggccgcggcucagccuuccgccccaucuacugaagcaacgcaggacaccacacccccuccauauacucccuga

SEQ ID NO: 11941 - RNA, 300 nt, Artificial Sequence
  derived and/or modified CDS sequence (opt3) from LASV(Lassa virus/H.sapiens-wt/NGA/2016/ISTH_0919;Clade II)__AVO03760__Z
augggcaacagacacgccaagcccaccaaaguggacgagcaucagagggcucaccuggucccugaugcaagccaucucgggccacaauucugcaaguccuguugguuugaaaauaaaggacuuguugagugcaacaaucacuaccuguguuugaacugcuuaucucugcuacucucagugaguagccgguguccgaucugcaagaugccccugccuacaaaacuuaaggccgcggcucagccauccgcccccucugcagaagccacucagaauacggcuccuccacccuauaccccuuga

SEQ ID NO: 11942 - RNA, 300 nt, Artificial Sequence
  derived and/or modified CDS sequence (opt3) from LASV(Lassa virus/H.sapiens-wt/NGA/2016/ISTH_1006;Clade II)__AVO03750__Z
augggcaacaagcagaccaaaagcacaaagguggacgagcaccaaagagcccaucugguccccgaugcuucccaccucgggccucaguucugcaaaucuuguugguuugaaaauaggggacuuguugagugcaacaaucauuaccuguguuugaacugcuuaucacugcuacucagugugagcucccgguguccaaucugcaagaugccgcugcccacuaaacuuaagacgguagcacagccuucugccccacccaccgaagcgacacagaauacuaccccuccacccuauacaccuuga

SEQ ID NO: 11943 - RNA, 297 nt, Artificial Sequence
  derived and/or modified CDS sequence (opt3) from LASV(Lassa virus/H.sapiens-wt/NGA/2016/ISTH_1070;Clade II)__AVO03754__Z
ggcaacagacaggccaagcccaccaaaguggacgagcaccaaagggcucaucuggucccugaugcaagccaccucgggccacaguucugcaaguccuguugguuugaaaauaaaggacuuguugagugcaacaaucauuaccuguguuugaacugcuuaucucugcuacucggugugucaagucgguguccgaucugcaagaugccccugccuacaaaacuuaaggccgcggcucagccaagcgcccccuccacugaagcagcccagaauacggcuccuccacccuaugcaccuuga

SEQ ID NO: 11944 - RNA, 300 nt, Artificial Sequence
  derived and/or modified CDS sequence (opt3) from LASV(Lassa virus/H.sapiens-wt/NGA/2016/ISTH_1174;Clade II)__AVO03716__Z
augggcaacagacaggccaagagcaccaaaguggacgagcaccaaagggcucaucugguccccgaugcaucccaccucgggccucaguucugcaagucuuguugguuugaaaaucggggacuuguugagugcaacaaucauuaccuguguuugaacugcuuaucacugcuacucagugugagcucccgcuguccaaucugcaaaaugccgcugcccacaaaacuuaaggccgcgacucagccuucugcuccacccacggaaaccacacagaauacuaccccuccacccuauacaccuuga

SEQ ID NO: 11945 - RNA, 300 nt, Artificial Sequence
  derived and/or modified CDS sequence (opt3) from LASV(Lassa virus/H.sapiens-wt/NGA/2016/ISTH_1207;Clade II)__AVO03680__Z
augggcaacagacaggccaagagcaccaagguggacgagcaccaaagggcucaucugguccccgaugcaucccaccucgggccucaguucugcaagucuuguugguuugaaaaucggggacuuguugagugcaacaaucauuaccuguguuugaacugcuuaucacugcuacucagugugagcucccgcuguccaaucugcaaaaugccgcugcccacaaaacuucgagccacugcgcagccuucugcuccaucgacggaagccacccagaauacaacucccccuccauauacccccuga

SEQ ID NO: 11946 - RNA, 300 nt, Artificial Sequence
  derived and/or modified CDS sequence (opt3) from LASV(Lassa virus/H.sapiens-wt/NGA/2016/ISTH_1311;Clade II)__AVO03739__Z
augggcaacagacaggccaagcccaccgaggcuaucgaacaaaauagggcacaccuggugccugacgccagccaucucgggccacaguucugcaaauccuguugguuugagaacaagggacuugucgaaugcaauaaccacuaccuguguuugaauugcuuaucucugcuacucucaguuaguagccgguguccgauuugcaaaaugccccugccuacacgccuuaaggcguccgcucagccaucugcccccucggcagaggccccucagaacgcuaaaccacccccuuauucaccauga

SEQ ID NO: 11947 - RNA, 300 nt, Artificial Sequence
  derived and/or modified CDS sequence (opt3) from LASV(Lassa virus/H.sapiens-wt/NGA/2016/ISTH_1423;Clade II)__AVO03685__Z
augggcaacaagcaggccaaaagcaucaaggcugacgagcaccaaagagcacaucuggugcccgaugccucccaccucgggccucaguucugcaaaucuuguugguuugaaaauaggggacuugucgagugcaacaaucauuaccuguguuugaacugcuuaucacugcuacucaguguuagcucccgguguccaauuugcaagaugccgcugcccaccaaacuuaagacagcggcucagccuucugccccacccgugggugcaacucagaauacgaccccuccacccuauacaccuuga

SEQ ID NO: 11948 - RNA, 300 nt, Artificial Sequence
  derived and/or modified CDS sequence (opt3) from LASV(Lassa virus/H.sapiens-wt/NGA/2016/ISTH_1462;Clade II)__AVO03690__Z
augggcaacaagcagaccaaaagcacaaagguggacgagcaccaaagagcccaucugguccccgaugcuucccaccucgggccucaguucugcaaaucuuguugguuugaaaauaggggacuuguugagugcaacaaucauuaccuguguuugaacugcuuaucacugcuacucagugugagcucccgguguccaaucugcaagaugccgcugcccacuaaacuuaaggcagccgcgcagccuucugcuccaucgacggaagccacccagaauacaacucccccuccauauacccccuga

SEQ ID NO: 11949 - RNA, 300 nt, Artificial Sequence
  derived and/or modified CDS sequence (opt3) from LASV(Lassa virus/H.sapiens-wt/NGA/2016/ISTH_1472;Clade II)__AVO03726__Z
augggcaacaagcagaccaaaagcacaaagguggacgagcaccaaagagcccaucugguccccgaugcuucccaccucgggccucaguucugcaaaucuuguugguuugaaaauaggggacuuguugagugcaacaaucauuaccuguguuugaacugcuuaucacugcuacucagugugagcucccgguguccaaucugcaagaugccgcugcccacuaaacuuaaggcagccgcgcagccuucugcuccacccacggaagccacccagaauacaacuccuccacccuauaccccuuga

SEQ ID NO: 11950 - RNA, 300 nt, Artificial Sequence
  derived and/or modified CDS sequence (opt3) from LASV(Lassa virus/H.sapiens-wt/NGA/2016/ISTH_1496;Clade II)__AVO03693__Z
augggcaacaagcaggccaaaagcaccaagaucgacgaucaccaaagagcucaucuggugcccgacgcaucccaccucgggccucaguucugcaaaucuuguugguuugagaauaggggacuugucgaaugcaacaaucauuaccuguguuugaacugcuuaucacugcuacucaguguuagcucccgguguccaauuugcaagaugccgcugcccacaaaacuuaaggccgcggcucagccuucugccccaucgacugagacgauacagaauaccacacccccuccauauacucccuga

SEQ ID NO: 11951 - RNA, 300 nt, Artificial Sequence
  derived and/or modified CDS sequence (opt3) from LASV(Lassa virus/H.sapiens-wt/NGA/2016/ISTH_1546;Clade II)__AVO03665__Z
augggcgggaagcagagcagacccccuaaaaagguggacuccccaagggccaaccugaucccggaugcuucuuacaugggaccccaauucugcaaaucauguugguuugagaauaagggucucgucgaaugcaacaaucacuaucuuugucugaacugcuugaguuuacugcuaagcguuuccucucgguguccuauuugcaaaaugccacuccccaccaagcugaaggcaucgacaucaccuacugccccacccauaaucggcacgaauaccacaaacccuccaccguacagccccuga

SEQ ID NO: 11952 - RNA, 300 nt, Artificial Sequence
  derived and/or modified CDS sequence (opt3) from LASV(Lassa virus/H.sapiens-wt/NGA/2016/ISTH_1568;Clade II)__AVO03711__Z
augggcaacagacaggccaggagcaccaagguggacgagcaccaacgggcucaucugcuccccgaugcaucccaccuugggccucaguucugcaaaucuuguugguuugaaaaucgcggacuggucgagugcaacaaucauuacuuguguuuaaacugccugucacuacuccugaguguuagcucccgauguccaaucugcaagaugccgcuucccacaaaacugaaggccgcgacucagccuucugcuccaucgacggaagccacccagaauacaacucccccuccauauacccccuga

SEQ ID NO: 11953 - RNA, 300 nt, Artificial Sequence
  derived and/or modified CDS sequence (opt3) from LASV(Lassa virus/H.sapiens-wt/NGA/2016/ISTH_1610;Clade II)__AVO03687__Z
augggcaacagacaggccaagagcaccaaaguggcugagcaccaaagggcacaucugguccccgacgccucccaccucgggccucaguucugcaagucuuguugguuugaaaauaaaggacuuguugagugcaacaaucauuaccuguguuugaacugcuuaucacugcuacucagugugagcucccgguguccaaucugcaagaugccgcugcccacaaaacuucgcgcgacugcucagccuucugccccacccucggaagcaacgcagucaaccacaccuccacccuauacuccuuga

SEQ ID NO: 11954 - RNA, 300 nt, Artificial Sequence
  derived and/or modified CDS sequence (opt3) from LASV(Lassa virus/H.sapiens-wt/NGA/2018/ISTH_0026;Clade II)__AVV65086__Z
augggcaacaagcaggccaaaagcaccaagguggacgagcaccaaagagcucaucugguccccgaugcaucccaccucgggccucaguucugcaaaucuuguugguuugaaaauaggggacuuguugagugcaacaaucauuaccuguguuugaacugcuuaucacugcuacucagugugagcucccgguguccaaucugcaagaugccgcugcccacacgccuuaaagccgcgacucagccuucugcuccaucgacggaagccacccgaaauacaacucccccuccauauacccccuga

SEQ ID NO: 11955 - RNA, 300 nt, Artificial Sequence
  derived and/or modified CDS sequence (opt3) from LASV(Lassa virus/H.sapiens-wt/NGA/2018/ISTH_0097;Clade II)__AVV65091__Z
augggcaacaagcagaccaaaagcacaaagguggacgagcaccaaagagcccaucugguccccgaugcuucccaccucgggccucaguucugcaaaucuuguugguuugaaaauaggggacuuguugagugcaacaaucauuaccuguguuugaacugcuuaucacugcuacucagugugagcucccgguguccaaucugcaagaugccgcugcccacuaaacuuaaggcagccgcgcagccuucugcuccaucgacggaaguaacccagaauacaacucccccuccauauacccccuga

SEQ ID NO: 11956 - RNA, 300 nt, Artificial Sequence
  derived and/or modified CDS sequence (opt3) from LASV(Lassa virus/H.sapiens-wt/NGA/2018/ISTH_0664;Clade II)__AVV65093__Z
augggcaacaagcagaccaaaagcacaaagguggacgagcaccaaagagcccaucugguccccgaugcuucccaccucgggccucaguucugcaaaucuuguugguuugaaaauaggggacuuguugagugcaacaaucauuaccuguguuugaacugcuuaucacugcuacucagugugagcggucgguguccaaucugcaagaugccgcugcccacuaaacuuaaggcagccgcgcagccuuccgcuccaucuacggaagccacccagaauacaacucccccuccauauacccccuga

SEQ ID NO: 11957 - RNA, 300 nt, Artificial Sequence
  derived and/or modified CDS sequence (opt3) from LASV(Lassa virus/H.sapiens-wt/NGA/2018/ISTH_0959;Clade II)__AVV65084__Z
augggcaacaagcaggccaaaagcaccaagguggacgagcaccaaagagcucaucugguccccgaugcaucccaccucgggccucaguucugcaaaucuuguugguuugaaaauaggggacuuguugagugcaacaaucauuaccuguguuugaacugcuuaucacugcuacucagugugagcucccgguguccaaucugcaagaugccgcugcccacaaaacuuaaggccgcggcucagccuucugccccaucgacugaagcaauucagucaacgacacccccuccauauacccccuga

SEQ ID NO: 11958 - RNA, 300 nt, Artificial Sequence
  derived and/or modified CDS sequence (opt3) from LASV(Lassa virus/H.sapiens-wt/NGA/2018/ISTH_1079;Clade II)__AVV65074__Z
augggcaacaagcagaccaagagcacaaagguggacgagcaccaaagagcccaucugguccccgaugcuucccaccucgggccucaguucugcaaaucuuguugguuugaaaauaagggacuuguugagugcaacaaucauuaccuguguuugaacugcuuaucacugcuacucagugugagcuccagguguccaaucugcaaaaugccgcugcccacuaaacuuaagacggcagcccagccuucugcgccacccaccgaagcuacacagaauacuaccccuccacccuauacaccuuga

SEQ ID NO: 11959 - RNA, 300 nt, Artificial Sequence
  derived and/or modified CDS sequence (opt3) from LASV(Lassa virus/H.sapiens-wt/NGA/2018/ISTH_1177;Clade II)__AVV65080__Z
augggcaacagacagaccaagagcacaaaaguggacgagcaccaaagggcccaucugguccccgaugcuucccaccucgggccucaguucugcaagucuuguugguuugaaaauaaaggacuuguugagugcaacaaucauuaccuguguuugaacugcuuaucacugcuacucagugugagcucccgguguccaaucugcaagaugccgcugcccacuaaacuuaaggcagccgcgcagccuucugcuccaucgacggaagccgcacagaauaccgcucccccuccauaugcccccuga

SEQ ID NO: 11960 - RNA, 300 nt, Artificial Sequence
  derived and/or modified CDS sequence (opt3) from LASV(Lassa virus/H.sapiens-wt/NGA/2018/ISTH_1375;Clade II)__AVV65078__Z
augggcaacagacacgccaagagcaccaaaaucaaugagcaucagagggcucaccuggugcccgacgcaucccaucucgggccucaauucugcaagucuuguugguuugaaaaccggggacuugucgagugcaauaaccacuaccuguguuugaauugcuuaucacugcuacucaguguuagcucccgcuguccaauuugcaaaaugccgcugcccacaaaacuuaaggccgcggcucagccuucugccccaucgacugaagcaauacagaacacgacacccccuccauauacccccuga

SEQ ID NO: 11961 - RNA, 300 nt, Artificial Sequence
  derived and/or modified CDS sequence (opt3) from LASV(LASV003-NIG-2008;Clade II)__AIT17578__Z
augggcaacagacaggccaagagcaccaaaguggacgagcaccaaagggcucaucugguccccgaugcaucccaccucgggccucaguucugcaagucuuguugguuugaaaauaaaggacuuguugagugcaacaaucauuaccuguguuugaacugcuuaucacugcuacucagugugagcucccgguguccaaucugcaagaugccgcugcccacaaaacuucgcgccgcggcucagccuucugccccaucgacugaaucagcacagaauacggcucccccuccauaugcccccuga

SEQ ID NO: 11962 - RNA, 300 nt, Artificial Sequence
  derived and/or modified CDS sequence (opt3) from LASV(LASV035-NIG-2009;Clade II)__AIT17586__Z
augggcaacaagcaggccaaaagcaccaagguggacgagcaccaaagagcucaucugguccccgaugcaucccaccucgggccucaguucugcaaaucuuguugguuugaaaauaggggacuuguugagugcaacaaucauuaccuguguuugaacugcuuaucacugcuacucagugugagcucccgguguccaaucugcaagaugccgcugcccacacgccuuaaagccgcggcucagccuucugccccaucgacugaaguaacgcagaauaccacacccccuccauauacucccuga

SEQ ID NO: 11963 - RNA, 300 nt, Artificial Sequence
  derived and/or modified CDS sequence (opt3) from LASV(LASV042-NIG-2009;Clade II)__AIT17590__Z
augggcaacagacaggccaagagcaccaaaguggacgagcaccaaagggcucaucugguccccgaugcaucccaccucgggccucaguucugcaagucuuguugguuugaaaauaaaggacuuguugagugcaacaaucauuaccuguguuugaacugcuuaucacugcuacucagugugagcucccgguguccaaucugcaagaugccgcugcccacaaaacuugaagccacuacgcagccuucugcgccaucgaccgaggaaacacagucaacuacacccccuccauauacccccuga

SEQ ID NO: 11964 - RNA, 300 nt, Artificial Sequence
  derived and/or modified CDS sequence (opt3) from LASV(LASV049-NIG-2009;Clade II)__AIT17602__Z
augggcaacaagcaggccaaaagcaccaagguggacgaguaccaaagagcucaccugguccccgaugcaucccaucucgggccucaguucugcaaaucuuguugguuugaaaauaggggacuuguugagugcaacaaucacuaucuguguuugaacugcuuaucacugcuacucagugugagcaaucgguguccaaucugcaagaugccgcugcccacacgccuuaaagccgcggcucagccuuccgccccacccacugaagcaacgcagaacaccacaccuccacccuacacuccuuga

SEQ ID NO: 11965 - RNA, 300 nt, Artificial Sequence
  derived and/or modified CDS sequence (opt3) from LASV(LASV056-NIG-2008;Clade II)__AIT17610__Z
augggcaacagacaggccaagcccaccaaaguggacgagcaccaaagggcucagcuggucccugaugcaagccaucucgggccacaguucugcaaguccuguugguuugaaaaucggggacuuguugagugcaacaaucacuaccuguguuugaacugcuuaucucugcuacucucagugaguagccgcuguccgaucugcaaaaugccccugccuacaaaacuuaaggccgcgacucagccauccgcucccucuacggaagccacccaaaauucgacaccuccacccuauacuccuuga

SEQ ID NO: 11966 - RNA, 300 nt, Artificial Sequence
  derived and/or modified CDS sequence (opt3) from LASV(LASV058-NIG-2008;Clade II)__AIT17614__Z
augggcaacagacaggccaagagcaccaaaguggacgagcaccaaagggcucaucugguccccgaugcaucccaccucgggccucaguucugcaagucuuguugguuugaaaaucggggacuuguugagugcaacaaucauuaccuguguuugaacugcuuaucacugcuacucagugugagcucccgcuguccaaucugcaaaaugccgcugcccacaaaacuuaaggccgcgacucagccuucugcuccaucgacggaagccacccagaauacaacucccccuccauauacccccuga

SEQ ID NO: 11967 - RNA, 300 nt, Artificial Sequence
  derived and/or modified CDS sequence (opt3) from LASV(LASV063-NIG-2009;Clade II)__AIT17618__Z
augggcaacagacaggccaagagcaccgagguggacgaacaccaaagggcucaucugguccccgaugcaucccaccucgggccucaguucugcaaaucuuguugguuugagaaucggggacuuguugaaugcaacaaucauuaccuguguuugaacugcuuaucacugcuacucagugugagcaaucgcuguccaaucugcaagaugccgcugcccacaaaacuuaaggccgcgacucagccuuccgcuccaucuacggaggccacccagaacacaacucccccuccauauacccccuga

SEQ ID NO: 11968 - RNA, 300 nt, Artificial Sequence
  derived and/or modified CDS sequence (opt3) from LASV(LASV1000-NIG-2009;Clade II)__AIT17780__Z
augggcaacagacagaccaagagcacaaaaguggacgagcaccaaagggccuaccugguccccgaugcuucccuccuugggccucaguucugcaagucuuguugguuugaaaauaaaggacugguugagugcaacaaucauuauuuguguuuaaacugccugucacuacuccugagugugagcucccgguguccaaucugcaagaugccgcuucccacucgccugaaagcagccgcgcagccuucugcuccacccacggaagccauucagaauaccacaccuccacccuacacuccuuga

SEQ ID NO: 11969 - RNA, 300 nt, Artificial Sequence
  derived and/or modified CDS sequence (opt3) from LASV(LASV1008-NIG-2009;Clade II)__AIT17784__Z
augggcaacagacagaccaagcccacaaaaguggacgagcaccaaagggcccaucuggucccugaugcuagccaccucgggccacaguucugcaaguccuguugguuugaaaauaaaggacuuguugagugcaacaaucauuaccuguguuugaacugcuuaucucugcuacucucagugaguagccgguguccgaucugcaagaugccccugccuacuaaacuuaaggcaacggcccagccauccgcgcccucuaccgaagcugcccagaauacagcaccuccacccuaugccccuuga

SEQ ID NO: 11970 - RNA, 300 nt, Artificial Sequence
  derived and/or modified CDS sequence (opt3) from LASV(LASV1011-NIG-2009;Clade II)__AIT17788__Z
augggcaacagacaggucaagagcaccaaaguggacgagcaccaaagggcccaucugguucccgaugcuucccaccucgggccucaguucugcaagucuuguugguuugaaaaucggggacuuguggagugcaacaaucauuaccuguguuugaacugcuuaucacugcuacucaguguaagcucccgcuguccaaucugcaaaaugccgcugcccacaaaacuuaaggcagccacucagccuucugcgccacccacggaagcuacccagaagacaacuccuccacccuauaccccuuga

SEQ ID NO: 11971 - RNA, 300 nt, Artificial Sequence
  derived and/or modified CDS sequence (opt3) from LASV(LASV1015-NIG-2009;Clade II)__AIT17792__Z
augggcaacaagcaggccaaaagcaccaagguggacgagcaccaaagagcucaucugguccccgaugcaucccaccucgggccucaguucugcaaaucuuguugguuugaaaauaggggacuuguugagugcaacaaucauuaccuguguuugaacugcuuaucacugcuacucagugugagcggucgguguccaaucugcaagaugccgcugcccacaaaacuuaaggccacugcgcagccuuccgcuccaucuacggaagccacccagaauacaacucccccuccauauacccccuga

SEQ ID NO: 11972 - RNA, 300 nt, Artificial Sequence
  derived and/or modified CDS sequence (opt3) from LASV(LASV1016-NIG-2009;Clade II)__AIT17796__Z
augggcaacaagcaggccaaaagcaccaagguggacgagcaccaaagagcucaucugguccccgaugcaucccaccucgggccucaguucugcaaaucuuguugguuugaaaauaggggacuuguugagugcaacaaucauuaccuguguuugaacugcuuaucacugcuacucagugugagcucccgguguccaaucugcaagaugccgcugcccacaaaacuuaaggccgcggcucagccuucugccccaucgacugaagcaauucagaauacgacacccccuccauauacccccuga

SEQ ID NO: 11973 - RNA, 300 nt, Artificial Sequence
  derived and/or modified CDS sequence (opt3) from LASV(LASV221-NIG-2010;Clade II)__AIT17622__Z
augggcaacagacaggccaagagcaccaaaguggacgagcaccaaagggcucaucugguccccgaugcaucccaccucgggccucaguucugcaagucuuguugguuugaaaaucggggacuuguugagugcaacaaucauuaccuguguuugaacugcuuaucacugcuacucagugugagcucccgcuguccaaucugcaaaaugccgcugcccacaaaacuuaaggccgcgacucagccuucugcuccaucgacggaaguaacccagaauacaauucccccuccauauucacccuga

SEQ ID NO: 11974 - RNA, 300 nt, Artificial Sequence
  derived and/or modified CDS sequence (opt3) from LASV(LASV225-NIG-2010;Clade II)__AIT17628__Z
augggcaacaagcaggccaaaagcaccaagaucgacgagcaccaaagagcucaucuggugcccgaugcaucccaccucgggccucaguucugcaaaucuuguugguuugaaaauaggggacuugucgagugcaacaaucauuaccuguguuugaacugcuuaucacugcuacucaguguuagcucccgguguccaauuugcaagaugccgcugcccacacgccuuaaagccgcgacucagccuucugcuccaucgacggaagccacccagaauacaacucccccuccauauacccccuga

SEQ ID NO: 11975 - RNA, 300 nt, Artificial Sequence
  derived and/or modified CDS sequence (opt3) from LASV(LASV229-NIG-2010;Clade II)__AIT17632__Z
augggcaacagacaggccaagagcaccaaaguggacgagcaccaaagggcucaucugguccccgaugcaucccaccucgggccucaguucugcaagucuuguugguuugaaaauaaaggacuuguugagugcaacaaucauuaccuguguuugaacugcuuaucacugcuacucagugugagcucccgguguccaaucugcaagaugccgcugcccacaaaacuucgcgccacugcgcagccuucugcuccaucgacggaagccauucagaauaccacacccccuccauauacucccuga

SEQ ID NO: 11976 - RNA, 300 nt, Artificial Sequence
  derived and/or modified CDS sequence (opt3) from LASV(LASV237-NIG-2010;Clade II)__AIT17636__Z
augggcaacagacaggccaagagcaccaaaguggacgagcaccaaagggcucaucugguccccgaugcaucccaccucgggccucaguucugcaagucuuguugguuugaaaaucggggacuuguugagugcaacaaucauuaccuguguuugaacugcuuaucacugcuacucagugugagcucccgcuguccaaucugcaaaaugccgcugcccacaaaacuuaaggccgcggcucagccuucugccccaucgauugaaacuauacagaauacgacacccccuccauauacccccuga

SEQ ID NO: 11977 - RNA, 300 nt, Artificial Sequence
  derived and/or modified CDS sequence (opt3) from LASV(LASV239-NIG-2010;Clade II)__AIT17640__Z
augggcaacagacaggccaagagcaccaaagugggggagcaccaaagggcucaucugguccccgacgcaucccaccucggaccucaguucugcaagucuuguugguuugaaaaucggggucuuguugagugcaacaaucauuaccuguguuugaacugcuuaucacugcuacucagugugagcucccgcuguccaaucugcaaaaugccgcugcccacaaaacuuaaggccgcggcucagccuucugccccaucgacugaagcaacgcaggauaccacacccccuccauauacucccuga

SEQ ID NO: 11978 - RNA, 300 nt, Artificial Sequence
  derived and/or modified CDS sequence (opt3) from LASV(LASV242-NIG-2010;Clade II)__AIT17648__Z
augggcaacagacaggccaagagcaccaaaguggacgagcaccaaagggcucaucugguccccgaugcaucccaccucgggccucaguucugcaagucuuguugguuugaaaauaaaggacuuguugagugcaacaaucauuaccuguguuugaacugcuuaucacugcuacucagugugagcucccgguguccaaucugcaagaugccgcugcccacaaaacuuaaggccacuguacagccuucugcgccaucgacggaagcugcccagucaaccgcacccccuccauaugcccccuga

SEQ ID NO: 11979 - RNA, 300 nt, Artificial Sequence
  derived and/or modified CDS sequence (opt3) from LASV(LASV245-NIG-2011;Clade II)__AIT17652__Z
augggcaacagacaggccaagagcaccaaagugggggagcaccaaagggcucaucugguccccgacgcaucccaccucggaccucaguucugcaagucuuguugguuugaaaaucggggucuuguugagugcaacaaucauuaccuguguuugaacugcuuaucacugcuacucagugugagcucccgcuguccaaucugcaaaaugccgcugcccacaaaacuuaaggccgcggcucagccuucugccccaucggcagaagccauucagaagacuacgcccccuccauauacccccuga

SEQ ID NO: 11980 - RNA, 300 nt, Artificial Sequence
  derived and/or modified CDS sequence (opt3) from LASV(LASV246-NIG-2010;Clade II)__AIT17656__Z
augggcaacagacaggccaagagcaccaaaguggacgaucaccaaagggcucaucugguccccgacgcaucccaccucgggccucaguucugcaagucuuguugguuugagaaucggggacuuguugaaugcaacaaucauuaccuguguuugaacugcuuaucacugcuacucagugugagcucccgcuguccaaucugcaaaaugccgcugcccacaaaacuuaaggccgcggcucagccuucugccccaucgacugaggcagcccaggauacgacacccccuccauauacccccuga

SEQ ID NO: 11981 - RNA, 300 nt, Artificial Sequence
  derived and/or modified CDS sequence (opt3) from LASV(LASV250-NIG-2011;Clade II)__AIT17660__Z
augggcaacagacaggccaagagcaccaaaguggacgagcaccaaagggcucaucugguccccgaugcaucccaccucgggccucaguucugcaagucuuguugguuugaaaaucggggacuuguugagugcaacaaucauuaccuguguuugaacugcuuaucacugcuacucagugugagcaaucgcuguccaaucugcaaaaugccgcugcccaccaaacuuaaggccgcggcucagccuuccgccccaucuacugaagcaauucagaacacgacacccccuccauaugcccccuga

SEQ ID NO: 11982 - RNA, 300 nt, Artificial Sequence
  derived and/or modified CDS sequence (opt3) from LASV(LASV251-NIG-2010;Clade II)__AIT17664__Z
augggcaacaagcaggccaagagcaccaagguggacgagcaccaaagagcucaucugguccccgaugcaucccaccucgggccucaguucugcaaaucuuguugguuugaaaauaagggacuuguugagugcaacaaucauuaccuguguuugaacugcuuaucacugcuacucagugugagcuccagguguccaaucugcaaaaugccgcugcccacaaaacuuaaggccgcggcucagccuucugccccaucgacugaagcagcccagaauacggcucccccuccauaugcacccuga

SEQ ID NO: 11983 - RNA, 300 nt, Artificial Sequence
  derived and/or modified CDS sequence (opt3) from LASV(LASV253-NIG-2011;Clade II)__AIT17668__Z
augggcaacagacaggccaagagcaccaaaguggacgagcaccaaagggcucaucugguccccgaugcaucccaccucgggccucaguucugcaagucuuguugguuugaaaauaaaggacuuguugagugcaacaaucauuaccuguguuugaacugcuuaucacugcuacucagugugagcucccgguguccaaucugcaagaugccgcugcccacaaaacuuaagacuacggcccagccuucugcgccacccaccgaagcugccaagaauacagcaccuccacccuaugccccuuga

SEQ ID NO: 11984 - RNA, 300 nt, Artificial Sequence
  derived and/or modified CDS sequence (opt3) from LASV(LASV256-NIG-2010;Clade II)__AIT17676__Z
augggcaacagacaggccaagagcaccaaaguggacgagcaccaaagggcucaucugguccccgaugcaucccaccucgggccucaguucugcaagucuuguugguuugaaaaucggggacuuguugagugcaacaaucauuaccuguguuugaacugcuuaucacugcuacucagugugagcucccgcuguccaaucugcaaaaugccgcugcccacaaaacuuaaggccgcgacucagccuucugcuccaucgacggaaguaacccagaauacaacucccccuccauauacccccuga

SEQ ID NO: 11985 - RNA, 300 nt, Artificial Sequence
  derived and/or modified CDS sequence (opt3) from LASV(LASV263-NIG-2011;Clade II)__AIT17680__Z
augggcaacagacaggccaagagcaccaaaaucgacgagcaccaaagggcucaucuggugcccgaugcaucccaccucgggccucaguucugcaagucuuguugguuugaaaaucggggacuugucgagugcaacaaucauuaccuguguuugaacugcuuaucacugcuacucaguguuagcucccgcuguccaauuugcaaaaugccgcugcccacaaaacuuaaggccgcggcucagccuucugccccaucgacugaagcaauacagaauacgacacccccuccauauacccccuga

SEQ ID NO: 11986 - RNA, 300 nt, Artificial Sequence
  derived and/or modified CDS sequence (opt3) from LASV(LASV267-NIG-2010;Clade II)__AIT17684__Z
augggcaacagacaggccaagagcgcuaaaguggacgagcaccaaagggcacaucugguccccgaugccucccaccucgggccucaguucugcaagucuuguugguuugaaaauaaaggacuuguugagugcaacaaucauuaccuguguuugaacugcuuaucacugcuacucagugugagcugucggugcccaaucuguaagaugccgcugcccaccaaacuuaaggcggcuacacagccuuccgccccaucuacugaagcaacgcagaauaccacacccccuccauauacucccuga

SEQ ID NO: 11987 - RNA, 300 nt, Artificial Sequence
  derived and/or modified CDS sequence (opt3) from LASV(LASV274-NIG-2010;Clade II)__AIT17692__Z
augggcaacagacacgccaagcccaccaaaguggacgagcaucagagggcucaccuggucccugaugcaagccaucucgggccacaauucugcaaguccuguugguuugaaaaucggggacuuguugagugcaacaaucacuaccuguguuugaacugcuuaucucugcuacucucagugaguagccgcuguccgaucugcaaaaugccccugccuacaaaacuuaaggccgcggcucagccauccgcccccucuacugaagcaauucagaauacgaccccuccacccuauacaccuuga

SEQ ID NO: 11988 - RNA, 300 nt, Artificial Sequence
  derived and/or modified CDS sequence (opt3) from LASV(LASV719-NIG-2009;Clade II)__AIT17702__Z
augggcaacagacacgccaagagcaccaaaguggacgagcaucagagggcucaccugguccccgaugcaucccaucucgggccucaauucugcaagucuuguugguuugaaaaucggggacuuguugagugcaacaaucacuaccuguguuugaacugcuuaucacugcuacucagugugagcucccgcuguccaaucugcaaaaugccgcugcccacaaaacuuaaggccgcggcucagccuucugccccaucgacugaagcauuccagaauacgacacccccuccauauacccccuga

SEQ ID NO: 11989 - RNA, 300 nt, Artificial Sequence
  derived and/or modified CDS sequence (opt3) from LASV(LASV737-NIG-2009;Clade II)__AIT17708__Z
augggcaacagacacgccaagagcaccaaaguggacgagcaucagagggcucaccugguccccgaugcaucccaucucgggccucaauucugcaagucuuguugguuugaaaaucggggacuuguugagugcaacaaucacuaccuguguuugaacugcuuaucacugcuacucagugugagcucccgcuguccaaucugcaaaaugccgcugcccacaaaacuuaaggccgcgacucagccuucugcuccaucgacggaagccauucagaauaccacacccccuccauauacucccuga

SEQ ID NO: 11990 - RNA, 300 nt, Artificial Sequence
  derived and/or modified CDS sequence (opt3) from LASV(LASV966-NIG-2009;Clade II)__AIT17716__Z
augggcaacagacccgccaagagcaccaaaguggacgagcaccagagggcucaucuggucccugaugcaucccaccucgggccacaauucugcaagucuuguugguuugaaaaucggggacuuguugagugcaacaaucauuaccuguguuugaacugcuuaucacugcuacucagugugagcucccgcuguccgaucugcaaaaugccccugccuacaaaacuuaaggccgcggcucagccaucugcccccucgacugaagcaacgcagaauaccacaccuccacccuauacuccuuga

SEQ ID NO: 11991 - RNA, 300 nt, Artificial Sequence
  derived and/or modified CDS sequence (opt3) from LASV(LASV967-NIG-2009;Clade II)__AIT17720__Z
augggcaacagacaggccaagcccaccaaaguggacgagcaccaaagggcucaucuggucccugaugcaagccaccucgggccacaguucugcaaguccuguugguuugaaaaucggggacuuguugagugcaacaaucauuaccuguguuugaacugcuuaucucugcuacucucagugaguagccgcuguccgaucugcaaaaugccccugccuacacgacuuaaggccgcggcucagccauccgcccccucuacugaagagacgcagaauaccacaccuccacccuauacuccuuga

SEQ ID NO: 11992 - RNA, 300 nt, Artificial Sequence
  derived and/or modified CDS sequence (opt3) from LASV(LASV975-NIG-2009;Clade II)__AIT17730__Z
augggcaacagacaggccaagagcaccaaaguggacgagcaccaaagggcucaucugguccccgaugcaucccaccucgggccucaguucugcaagucuuguugguuugaaaaucggggacuuguugagugcaacaaucauuaccuguguuugaacugcuuaucacugcuacucagugugagcucccgcuguccaaucugcaaaaugccgcugcccacaaaacuuaaggccgcggcucagccuucugccccacugacugaagcaauucagaauacgacacccccuccauauacccccuga

SEQ ID NO: 11993 - RNA, 300 nt, Artificial Sequence
  derived and/or modified CDS sequence (opt3) from LASV(LASV976-NIG-2009;Clade II)__AIT17734__Z
augggcaacagacaggccaagagcaccaaaguggacgagcaccaaagggcucaucugguccccgaugcaucccaccucgggccucaguucugcaagucuuguugguuugaaaaucggggacuuguugagugcaacaaucauuaccuguguuugaacugcuuaucacugcuacucagugugagcucccgcuguccaaucugcaaaaugccgcugcccacaaaacuuaaggccgcggcucagccuucugccccaucgacugaagcaauucagaauacgacacccccuccauauacccccuga

SEQ ID NO: 11994 - RNA, 300 nt, Artificial Sequence
  derived and/or modified CDS sequence (opt3) from LASV(LASV977-NIG-2009;Clade II)__AIT17738__Z
augggcaacagacaggccaagagcaccaaaguggacgagcaccaaagggcucaucugguccccgaugcaucccaccucgggccucaguucugcaagucuuguugguuugaaaaucggggacuuguugagugcaacaaucauuaccuguguuugaacugcuuaucacugcuacucagugugagcucccgcuguccaaucugcaaaaugccgcugcccacaaaacuuaaggccgcgacucugccuucugcuccaucgacggaaguaacccagaauacaacucccccuccacacucacccuga

SEQ ID NO: 11995 - RNA, 300 nt, Artificial Sequence
  derived and/or modified CDS sequence (opt3) from LASV(LASV981-NIG-2009;Clade II)__AIT17750__Z
augggcaacagacaggccaagagcgcuaaagugaaugagcaccaaagggcacaucugguccccgacgccucccaccucgggccucaguucugcaagucuuguugguuugaaaaccggggacuuguugagugcaauaaccauuaccuguguuugaauugcuuaucacugcuacucagugugagcucccgcuguccaaucugcaaaaugccgcugcccaccaaacuuaaggcggcuacacagccuucugccccaucgacugaagcaacgcagaacaccacacccccuccauauacucccuga

SEQ ID NO: 11996 - RNA, 300 nt, Artificial Sequence
  derived and/or modified CDS sequence (opt3) from LASV(LASV982-NIG-2009;Clade II)__AIT17754__Z
augggcaacagacaggccaagagcaccaaaguggacgagcaccaaagggcucaucugguccccgaugcaucccaccucgggccucaguucugcaagucuuguugguuugaaaauaaaggacuuguugagugcaacaaucauuaccuguguuugaacugcuuaucacugcuacucagugugagcucccgguguccaaucugcaagaugccgcugcccacaaaacuuaaggccucugcgcagccuucggcuccaucaacugaagccgcacagaauacggcucccccuccauaugcccccuga

SEQ ID NO: 11997 - RNA, 300 nt, Artificial Sequence
  derived and/or modified CDS sequence (opt3) from LASV(LASV989-NIG-2009;Clade II)__AIT17760__Z
augggcaacagacaggccaagagcaccaggacagacgagcaccaacgggcucaucuggugcccgaugcaucccaccucgggccucaguucugcaaaucuuguugguuugaaaauaagggacuugucgagugcaacaaucauuaccuguguuugaacugcuuaucacugcuacucaguguuagcucccgcuguccaaucugcaaaaugccgcugcccacuaaacuuaaggccgcggcucagccuucugccccaucgacggaagcaggucagaauaccgcucccccuccauaugcccccuga

SEQ ID NO: 11998 - RNA, 300 nt, Artificial Sequence
  derived and/or modified CDS sequence (opt3) from LASV(LASV991-NIG-2009;Clade II)__AIT17768__Z
augggcaacagacaggccaagagcgcuaccguggacgagugccaaagggcacaccugguccccgaugccuccuaccucgggccucaguucuguaaaucuugcugguuugaaaauaagggacuuguugaguguaacaaucauuaucugugcuugaacuguuuaucacugcuacucagugugagcucccggugcccaaucuguaaaaugccgcugcccacaaaacuuaaggcggcugcccagccuucugcaccaucgacucgcgccacgcagaauaccacacccccuccauacacucccuga

SEQ ID NO: 11999 - RNA, 300 nt, Artificial Sequence
  derived and/or modified CDS sequence (opt3) from LASV(LASV993-NIG-2009;Clade II)__AIT17776__Z
augggcaacaagcaggccaaaagcaccaagguggacgagcaccaaagagcucaucugguccccgaugcaucccaccucgggccucaguucugcaaaucuuguugguuugaaaauaagggacuuguugagugcaacaaucauuaccuguguuugaacugcuuaucacugcuacucagugugagcuccagguguccaaucugcaaaaugccgcugcccacacggcuuaaggccgcggcucagccuucugccccaucgacugaagcaacgcagaaugccgcucccccuccauaugcacccuga

SEQ ID NO: 12000 - RNA, 300 nt, Artificial Sequence
  derived and/or modified CDS sequence (opt3) from LASV(Nig08-A41;Clade II)__ADU56628__Z
augggcaacagacaggccaagagcaccaaaguggacgagcaccaaagggcucaucugguccccgaugcaucccaccucgggccucaguucugcaagucuuguugguuugaaaaucggggacuuguugagugcaacaaucauuaccuguguuugaacugcuuaucacugcuacucagugugagcucccgcuguccaaucugcaaaaugccgcugcccaccaaacuuaaggccgcggcucagccuucugccccaucgacugaagcaauucagaauacgacacccccuccauaugcccccuga

SEQ ID NO: 12001 - RNA, 300 nt, Artificial Sequence
  derived and/or modified CDS sequence (opt3) from LASV(CSF;Clade III)__AAO59514__Z
augggcaacaaacaggugagaagcaugaagaaggucgacucccccagggccucucugaucccugaugcuucacaccucgggccacaauucugcaaaaguuguugguuugagaaucggggacuuguugaaugcaacaaucauuaccuguguuugaacugcuuaagccugcuacucuccgugucuucgcgcuguccgauuugcaagaugccccugccuacuaaacuuaagacaucaacuacgccaaccgcacccagcauacgagaggccaauacaaccaguccuccacccuauuccccuuga

SEQ ID NO: 12002 - RNA, 300 nt, Artificial Sequence
  derived and/or modified CDS sequence (opt3) from LASV(Nig08-A18;Clade III)__ADU56616__Z
augggcgggaagcacaccaaacagcccagagagagcaacuccccuagggccucucugaucccagacgcuacacaucucggaccgcaauucugcaagucauguugguuugaaaauaaaggucuuguggagugcaacaaucacuaccuguguuugaacugcuuaagucugcuacucagcgucuccaaucggugucccauuugcaagaugccucugccaacucgccuucgaacgucuaccaaccccacagcaccucagguugaacagacuggcccagccucgcccccuccauauucaccguga

SEQ ID NO: 12003 - RNA, 300 nt, Artificial Sequence
  derived and/or modified CDS sequence (opt3) from LASV(ONM-299;Clade III)__ANH09755__Z
augggcaacaagcagaccaaaacaaucaagaaaacugacagccccagagccucccugauuccugaugcuucucacauggggccacaauucugcaagucauguugguuugagaauaggggacucguggaaugcaacaaucauuaccuuugucugaacugcuugaguuuacugcuaagcgucuccaaucgguguccgauaugcaaaaugccccucccuacgaagcugcgcgcaucuccaucgcccaccgccccuucaauccgagaggcgaacauuacaaauccacccccuuauagcccauga

SEQ ID NO: 12004 - RNA, 300 nt, Artificial Sequence
  derived and/or modified CDS sequence (opt3) from LASV(ONM-700;Clade III)__ANH09759__Z
augggcaacaagcagaccaaaacaacuaagaaaacggacagccccagagccucccugaucccugaugcuucucacauggggccacaauucugcaagucauguugguuugagaauaggggacucguggaaugcaacaaucauuaccuuugucugaacugcuugaguuuacugcuaagcgucuccaaucgguguccgauuugcaaaaugccccucccuaccaagcugcgcgcaucuccaucgcccacagccccuucaauacgagaggcgaacaucacuaauccacccccuuauagcccauga

SEQ ID NO: 12005 - RNA, 300 nt, Artificial Sequence
  derived and/or modified CDS sequence (opt3) from LASV(BA366;Clade IV)__ADU56644__Z
augggcaacagacagaccaaggcccccgaggcuaaagggagcccuagggcaucccugaucccagacgccacacaccucggaccgcaauucugcaagucuuguugguuugaaaauaaaggucuuguggagugcaacgaucauuaccuguguuugaauugcuuaacucugcuacucucagucaguagccggugucccauuugcaagaugccucugccaacgcgccuucgacccuccaccaacccuacagcgccacccgcucgugccgaaggcgggauaaauccuccaccguauucucccuga

SEQ ID NO: 12006 - RNA, 300 nt, Artificial Sequence
  derived and/or modified CDS sequence (opt3) from LASV(G1180-SLE-2010;Clade IV)__AIT17166__Z
augggcaacaagcaggccaaggcucccgaggcaaaggacagcccuagagccucccugaucccagaugcgacccaccucgggccgcaauucugcaaaucuuguugguuugaaacaaagggacuuguggagugcaauaaccauuaccuguguuugaauugcuuaacucugcuacucucagucaguaacaggugucccauuugcaaaaugccucugccaacgaaacuucggcccagcgcuaccccuacagccccacccacugaagcagccgacuccauagguccuccaccguauucucccuga

SEQ ID NO: 12007 - RNA, 300 nt, Artificial Sequence
  derived and/or modified CDS sequence (opt3) from LASV(G1190-SLE-2010;Clade IV)__AIT17170__Z
augggcaacaagcaggccaaggugcccgagagcaaggacuccccuagagcuucucugaucccagaugcaacccaccucgggccgcaauucugcaaaucauguugguuugaaaauaagggacuugucgagugcaacaaucauuaccuguguuugaacugcuuaacacugcuacucaguguuagcaauaggugucccauuugcaaaaugccucugccaacuaaacuucggcccuccgccgcgccuacggcuccacccgccggugcagccgacucuauacgcccuccaccguauucgcccuga

SEQ ID NO: 12008 - RNA, 300 nt, Artificial Sequence
  derived and/or modified CDS sequence (opt3) from LASV(G1200-LIB-2010;Clade IV)__AIT17174__Z
augggcaacaagcagaccaaggcccccgaggcuaaggggagcccuagagcaucccugaucccagacgccacacaccucggaccgcaauucugcaaaucuuguugguuugaaaauaagggucuuguggagugcaacaaucauuaccuguguuugaacugcuuaacucugcuacucucagucaguuccaggugucccauuugcaaaaugccucugccaacgaaacuucggcccagcgcgguuccuaccgcuccacccacaaaggccgaagauaauacucgcccuccaccguauucucccuga

SEQ ID NO: 12009 - RNA, 300 nt, Artificial Sequence
  derived and/or modified CDS sequence (opt3) from LASV(G1442-SLE-2011;Clade IV)__AIT17178__Z
augggcaacaagcaggccaaagcuagcgaggcaaaggacucccccagagccucucugaucccugaugcgacccaccucgggccacaauucugcaaaucauguugguuugaaaauaagggacuuguggagugcaacaaucauuaccuguguuugaacugcuuaagucugcuacucagcgucuccucuagguguccgauuugcaaaaugccccugccuacacggcuucgcccaucgacugcucccacggccccuccagcacgagccggugacaauauaaagcccccuccauauucaccguga

SEQ ID NO: 12010 - RNA, 300 nt, Artificial Sequence
  derived and/or modified CDS sequence (opt3) from LASV(G1529-SLE-2011;Clade IV)__AIT17182__Z
augggcaacaagcaggccaaagugcccgaggucagagacagcccuagggcuucccugaucccagaugcaacccaccucgggccgcaauucugcaagucuuguugguuugaaaauaaaggacuuguugagugcaacaaucauuaccuguguuugaacugcuuaacacugcuacucucagugaguagccggugucccauuugcaagaugccucugccaacuaaacuucgccccuccgccacgccuaccgcgccacccgcuggugccggcgacgggacacgaccuccaccguauucucccuga

SEQ ID NO: 12011 - RNA, 300 nt, Artificial Sequence
  derived and/or modified CDS sequence (opt3) from LASV(G1618-SLE-2011;Clade IV)__AIT17186__Z
augggcaacaagcaggccaagacccccgagacaaaggacagcccuagagcuucccugaucccagaugcaacucaccucgggccgcaauucugcaaaucuuguugguuugaaaauaagggacuuguggagugcaacaaucauuaccuguguuugaacugcuuaacgcugcuacucucagucaguaauaggugucccauuugcaaaaugccucugccaaccaaacuucggcccagcguugccccuacagcgccacccgcuggugccgcagacaacacucgcccuccaccguauucccccuga

SEQ ID NO: 12012 - RNA, 300 nt, Artificial Sequence
  derived and/or modified CDS sequence (opt3) from LASV(G1647-SLE-2011;Clade IV)__AIT17194__Z
augggcaacaagcaggccaaggcucccgagccuaaggacagcccaagagcaucccugaucccggaugccacccaccucgggccccaauucugcaaaucuuguugguuugaaaauaagggacuuguggagugcaacaaucauuaccuguguuugaacugcuuaacacugcuacucucagucaguaauagguguccuauuugcaaaaugccacugcccacuaaacuucggccuagcguugcgccaacggcucccccugccggugugguagacuccacccgcccaccgcccuauucuccuuga

SEQ ID NO: 12013 - RNA, 300 nt, Artificial Sequence
  derived and/or modified CDS sequence (opt3) from LASV(G1727-SLE-2011;Clade IV)__AIT17198__Z
augggcaacaagcaggccaaagugcccgagagcaaggacuccccuagagcuucucugaucccagaugcaacccaccucgggccgcaauucugcaaaucauguugguuugaaaauaggggacuugucgagugcaacaaucauuaccuguguuugaacugcuuaacacugcuacucaguguuagcaaucggugucccauuugcaagaugccucugccaacuaaacuucgccccuccacggccccuaccgcgccacccacaggugcugccgacucuacucgaccuccaccguauucgcccuga

SEQ ID NO: 12014 - RNA, 300 nt, Artificial Sequence
  derived and/or modified CDS sequence (opt3) from LASV(G1774-SLE-2011;Clade IV)__AIT17202__Z
augggcaacaagcaggccaaaacccccgagagcaaggacuccccuagagcuucucugaucccagaugcaacacaccucgggccgcaauucugcaaaucauguugguuugaaaauaagggacuuguggagugcaacaaucauuaccuguguuugaacugcuuaacucugcuacucagugucagcaauaggugucccauuugcaaaaugccucugccaacgcggcuucgccccuccgccgcgccuaccgcuccacccucuggugccgcagacucgacacgaccuccaccguauucacccuga

SEQ ID NO: 12015 - RNA, 300 nt, Artificial Sequence
  derived and/or modified CDS sequence (opt3) from LASV(G1792-SLE-2011;Clade IV)__AIT17206__Z
augggcaacaagcaggccaaggcucccgaggcaaaggacagcccuagagccucccugaucccagaugcgacccaccucgggccgcaauucugcaaaucuuguugguuugaaaauaagggacuuguggagugcaacaaucauuaccuguguuugaacugcuuaacacugcuacucucagucaguuauaggugucccauuugcaaaaugccucugccaacuaaacuucggcccagcgcuacgccuaccgccccacccacagaagcagccgacuccauacgcccuccaccguaccgacccuga

SEQ ID NO: 12016 - RNA, 300 nt, Artificial Sequence
  derived and/or modified CDS sequence (opt3) from LASV(G1959-SLE-2011;Clade IV)__AIT17214__Z
augggcaacaagcaggccaaggcucccgaggugaaggacagcccuagagcaucccugaucccagaugccacccaccucgggccgcaauucugcaaaucuuguugguuugaaaauaagggacuugucgagugcaacaaucauuaccuguguuugaacugcuuaacacugcuacucucaguuaguaauaggugucccauuugcaaaaugccucugccaacuaaacuucggcccagcgcggcuccuacggccccacccaccgguacagcagacuccauacgcccuccaccguauucucccuga

SEQ ID NO: 12017 - RNA, 300 nt, Artificial Sequence
  derived and/or modified CDS sequence (opt3) from LASV(G2141-SLE-2011;Clade IV)__AIT17222__Z
augggcaacaagcaggccaaaacccccgagacaaaggacagcccuagagcuucccugaucccagaugcaacucaccucgggccgcaauucugcaaaucuuguugguuugaaaauaagggacuuguggagugcaacucacauuaccuguguuugaauugcuuaacgcugcuacucagugucagcuccaggugucccauuugcaaaaugccucugccaacccggcuucgccccucuacagccccuacugcgccacccgcugguguuggcgacucgaccucaccuccaccguauagccccuga

SEQ ID NO: 12018 - RNA, 300 nt, Artificial Sequence
  derived and/or modified CDS sequence (opt3) from LASV(G2147-SLE-2011;Clade IV)__AIT17226__Z
augggcaacaagcaggccaagacccccgaggcuaaggacagcccuagagcaucccugaucccagaugccacacaccucgggccgcaauucugcaaaucuuguugguuugaaaauaagggacuuguggagugcaacaaucauuaccuguguuugaacugcuuaacucugcuacucucagucaguaauaggugucccauuugcaaaaugccucugccaacgaaacuucggcccagcgcgaccccuacagcuccacccgccggugcagccgacuccauaggcccuccaccguauucucccuga

SEQ ID NO: 12019 - RNA, 297 nt, Artificial Sequence
  derived and/or modified CDS sequence (opt3) from LASV(G2165-SLE-2011;Clade IV)__AIT17230__Z
augggcaacaagcaggccaaggcuagcgacaaaaauucccccagagcaucucugaucccugaugccacccaccucgggccacaauucugcaagucauguugguuugagaacaagggacuuguggaaugcaauaaccauuaccuguguuugaauugcuuaacacugcuacucagugucagcaacagguguccgauuugcaaaaugccccugccuacuaaacuucggccauccgcgacgcccaccgcuccuccaacaggugccgcagacucuauacgcccucccccauauucgccguga

SEQ ID NO: 12020 - RNA, 300 nt, Artificial Sequence
  derived and/or modified CDS sequence (opt3) from LASV(G2184-SLE-2011;Clade IV)__AIT17234__Z
augggcaacaagcaggccaaggcuagcgaggaaaagaacucccccagagcaucucugaucccugacgccacccaccucgggccacaauucugcaaaucauguugguuugagaauaagggacuuguggaaugcaauaaccauuaccuguguuugaauugcuuaacacugcuacucagugucagcaacagguguccgauuugcaaaaugccccugccuacuaaacuucggccauccgcgacgcccaccgcuccuccaacaggugccgcagauucuauacgcccucccccauauucgccguga

SEQ ID NO: 12021 - RNA, 300 nt, Artificial Sequence
  derived and/or modified CDS sequence (opt3) from LASV(G2197-SLE-2011;Clade IV)__AIT17238__Z
augggcaacaagcagaccaaggcccccgaggcuaaggggagcccuagagcaucccugaucccagacgccacacaccucggaccgcaauucugcaaaucuuguugguuugaaaauaagggucuuguggagugcaacaaucauuaccuguguuugaacugcuuaacucugcuacucucagucaguaauaggugucccauuugcaaaaugccucugccaacgaaacuucggcccagcgcgaccccuacagcuccacccacugaagccgcagauuccauacgcccuccaccguaucgacccuga

SEQ ID NO: 12022 - RNA, 300 nt, Artificial Sequence
  derived and/or modified CDS sequence (opt3) from LASV(G2222-SLE-2011;Clade IV)__AIT17242__Z
augggcaacaagcaggccaaagcucccgagagcaaggacuccccuagagcaucucugaucccagaugccacccaccucgggccgcaauucugcaaaucauguugguuugaaaauaagggacuuguggagugcaacaaucauuaccuguguuugaacugcuuaacacugcuacucagugucagcaauaggugucccauuugcaaaaugccucugccaacucggcuucgccccuccgcggcuccuacggccccacccaccggugcaacagacucuacucgaccuccaccguauucgcccuga

SEQ ID NO: 12023 - RNA, 300 nt, Artificial Sequence
  derived and/or modified CDS sequence (opt3) from LASV(G2259-SLE-2012;Clade IV)__AIT17248__Z
augggcaacaaacaggugaaggcccccgaggcuagaaauagcccuagggcaucccugaucccagacgccacccaccucgggccgcaauucugcaagucuuguugguuugaaaacaaaggacuugucgagugcaauaaccauuaccuguguuugaauugcuuaacacugcuacucgguguuucaagucggugucccauuugcaagacuccucugccaacgcgccuucgacccagcgcgaccccuacagcuccacccgccggcgcaggggauaacacucguccuccaccguauucccccuga

SEQ ID NO: 12024 - RNA, 300 nt, Artificial Sequence
  derived and/or modified CDS sequence (opt3) from LASV(G2263-SLE-2012;Clade IV)__AIT17252__Z
augggcaacaagcaggccaaggcucccgaggcaaaggacagcccuagagccucccugaucccagaugcgacccaccucgggccgcaauucugcaaaucuuguugguuugaaaauaagggacuuguggagugcaacaaucauuaccuguguuugaacugcuuaacacugcuacucucagucaguaauaggugucccauuugcaaaaugccucugccaacuaaacuucggcccagcacggcuccuaccgccccacccgccggugcagcugacuccacacgcccuccaccguauucucccuga

SEQ ID NO: 12025 - RNA, 300 nt, Artificial Sequence
  derived and/or modified CDS sequence (opt3) from LASV(G2280-SLE-2012;Clade IV)__AIT17256__Z
augggcaacaagcaggccaaggcucccgagaccaaggacagcccuagagcaucccugaucccagaugccacacaccucgggccgcaauucugcaaaucuuguugguuugaaaauaagggacuuguggagugcaacaaucauuaccuguguuugaacugcuuaacucugcuacucucagucaguaauaggugucccauuugcaaaaugccucugccaacgaaacuucggcccagcgcggcuccuaccgccccacccguuggugcagccgacaacacacgcccuccaccguauucccccuga

SEQ ID NO: 12026 - RNA, 300 nt, Artificial Sequence
  derived and/or modified CDS sequence (opt3) from LASV(G2295-SLE-2012;Clade IV)__AIT17260__Z
augggcaacaagcaggccaaagcucccgagcugaaggacagcccuagagcaucccucaucccagaugccacccaccuugggccgcaauucugcaaaucuuguugguuugaaaauaagggacugguggagugcaacaaucauuacuuguguuuaaacugccugacacuacuccugucagucaguaauaggugucccauuugcaaaaugccucuuccaacuaagcugcggcccagcgcggcuccuacggccccacccgccggugcaguugacuccacccgcccuccaccguauucucccuga

SEQ ID NO: 12027 - RNA, 300 nt, Artificial Sequence
  derived and/or modified CDS sequence (opt3) from LASV(G2315-SLE-2012;Clade IV)__AIT17264__Z
augggcaacaagcagaccaaggcccccgagagcaaaaauuccccuagagcuucucugaucccagacgcaacauaccucgggccgcaauucugcaagucauguugguuugaaaacaagggacuuguggagugcaauaaccacuaucuguguuugaauugcuuaacucugcuacucagugucagcaacaggugucccauuugcaaaaugccucugccaacgaaacuucgguccucugccgcgcccaccgcuccuccaacaggugccgcagauucgacuaagcccccuccauacucaccguga

SEQ ID NO: 12028 - RNA, 300 nt, Artificial Sequence
  derived and/or modified CDS sequence (opt3) from LASV(G2318-SLE-2012;Clade IV)__AIT17268__Z
augggcaacaagcagaccaaggcccccgaggugaaggggagcccuagagcuucccugaucccagacgcaacacaccucggaccgcaauucugcaaaucuuguugguuugaaaauaagggucuugucgagugcaacaaucauuaccuguguuugaacugcuuaacucugcuacucucaguuaguaauaggugucccauuugcaaaaugccucugccaacgaaacuuaagcccagcaccacaccuacugccccacccaccggcgcggcugauuccauacggccuccaccguauucucccuga

SEQ ID NO: 12029 - RNA, 300 nt, Artificial Sequence
  derived and/or modified CDS sequence (opt3) from LASV(G2363-SLE-2012;Clade IV)__AIT17272__Z
augggcaacaaacaggugaagaccagcgaggccagagacucccccagggcuucucugaucccugaugcaacagaccucgggccacaauucugcaagucauguugguuugaaaauaaaggacuugucgagugcaacaaucacuaccuguguuugaacugcuuaacucugcuacucaguguuagcaaucgguguccgauuugcaagaugccccugccuacgcgccuucgaccauccgccaaccccaccgcgccuccagcugaaacaggugauucuacucgucccccuccauauucgccguga

SEQ ID NO: 12030 - RNA, 300 nt, Artificial Sequence
  derived and/or modified CDS sequence (opt3) from LASV(G2392-SLE-2012;Clade IV)__AIT17278__Z
augggcagcaagcagaccaagacacccgaggugaaggacuccccuagagccucucugaucccagaugcuacucaccucgggccgcaauucugcaaaucauguugguuugaaaacaagggacuugucgagugcaauaaccauuaccuguguuugaauugcuuaacgcugcuacucaguguuagcaacaggugucccauuugcaaaaugccucugccaaccaaacuucggcccuccgcagccccuacagcgccacccgcucgcgccgcagacgauacucgaccuccaccguauucucccuga

SEQ ID NO: 12031 - RNA, 300 nt, Artificial Sequence
  derived and/or modified CDS sequence (opt3) from LASV(G2405-SLE-2012;Clade IV)__AIT17282__Z
augggcaacaagcaggccaaggcucccgagccuaaggacagcccaagagcaucccugaucccggaugccacccaccucgggccccaauucugcaaaucuuguugguuugaaaauaagggacuuguggagugcaacaaucauuaccuguguuugaacugcuuaacacugcuacucucagucaguaauagguguccuauuugcaaaaugccacugcccacuaaacuucggccuagcgcggcuccaacggcacccccugccggugccguugacuccauacgcccaccgcccuauucuccuuga

SEQ ID NO: 12032 - RNA, 300 nt, Artificial Sequence
  derived and/or modified CDS sequence (opt3) from LASV(G2427-SLE-2012;Clade IV)__AIT17286__Z
augggcaacaagcagaccaaggcccccgaggugaaggacagcccuagagcuucccugaucccagaugcaacacaccucgggccgcaauucugcaaaucuuguugguuugaaaauaagggacuugucgagugcaacaaucauuaccuguguuugaacugcuuaacucugcuacucucaguuaguaauaggugucccauuugcaaaaugccucugccaacgaaacuucggcccagcaccgccccuacagcgccacccgcugguacuauggacuccacccgcccuccaccguauucucccuga

SEQ ID NO: 12033 - RNA, 300 nt, Artificial Sequence
  derived and/or modified CDS sequence (opt3) from LASV(G2431-SLE-2012;Clade IV)__AIT17290__Z
augggcaacaagcaggccagagcucccgaggcaaaagacagcccuagggccucccugaucccagaugcgacccaccucgggccgcaauucugcaagucuuguugguuugaaaauaaaggacuuguggagugcaacaaucauuaccuguguuugaacugcuuaacacugcuacucucagucaguagccggugucccauuugcaagaugccucugccaacucgccuucgacccuccgcuauaccuacggccccacccgcagguaccggcgacucuucgcguccuccaccguauucacccuga

SEQ ID NO: 12034 - RNA, 300 nt, Artificial Sequence
  derived and/or modified CDS sequence (opt3) from LASV(G2554-SLE-2012;Clade IV)__AIT17296__Z
augggcaacaagcaggccaagacccccgagaucaaggacagcccuagagcuucccugauuccagaugcaacacaccucgggccgcaauucugcaaaucuuguugguuugaaaauaagggacuuguggagugcaacaaucauuaccuguguuugaacugcuuaacucugcuacucucagucaguaauaggugucccauaugcaaaaugccucugccaacgaaacuucggcccagcgccgcgccuaccgcuccacccgccggugcagccgacaucacacgcccuccaccguauucccccuga

SEQ ID NO: 12035 - RNA, 300 nt, Artificial Sequence
  derived and/or modified CDS sequence (opt3) from LASV(G2557-SLE-2012;Clade IV)__AIT17300__Z
augggcaacaaacaggugaaggcccccgaggcuagaaauagcccuagggcaucccugaucccagacgccacccaccucgggccgcaauucugcaagucuuguugguuugaaaacaaaggacuugucgagugcaauaaccauuaccuguguuugaauugcuuaacacugcuacucgguguuucaagucggugucccauuugcaagaugccucugccaacucgccuucgacccagcacggcgccuaccgcuccacccgccggcgcaggggauaacacacguccuccaccguauucccccuga

SEQ ID NO: 12036 - RNA, 300 nt, Artificial Sequence
  derived and/or modified CDS sequence (opt3) from LASV(G2612-SLE-2012;Clade IV)__AIT17312__Z
augggcaacaagcaggccaagacccccgagacaaaggacagcccuagagcuucccugaucccagaugcaacucaccucgggccgcaauucugcaaaucuuguugguuugaaaauaagggacuuguggagugcaacaaucauuaccuguguuugaacugcuuaacgcugcuacucucagucaguaauaggugucccauuugcaaaaugccucugccaaccaaacuucggcccagcgccgcgccuacagcuccacccguuggugccgcagacuccacucgcccuccaccguauucucccuga

SEQ ID NO: 12037 - RNA, 300 nt, Artificial Sequence
  derived and/or modified CDS sequence (opt3) from LASV(G2615-SLE-2012;Clade IV)__AIT17316__Z
augggcaacaagcaggccaaagcucccgaggcaagaaauagcccuagggccucccugaucccagacgcgacccaccucgggccgcaauucugcaagucuuguugguuugaaaaccggggacuuguggagugcaauaaccauuaccuguguuugaauugcuuaacacugcuacucucagucaguagccgcugucccauuugcaaaaugccucugccaacucgacuucgucccuccgcugccccuacggcaccacccgccggugcuggcgauaacaccagaccuccaccguauucucccuga

SEQ ID NO: 12038 - RNA, 300 nt, Artificial Sequence
  derived and/or modified CDS sequence (opt3) from LASV(G2723-SLE-2012;Clade IV)__AIT17320__Z
augggcaacaagcaggccaaagcucccgaggcaagaaauagcccuagggccucccugaucccagacgcgacccaccucgggccgcaauucugcaagucuuguugguuugaaaacaaaggacuuguggagugcaauaaccauuaccuguguuugaauugcuuaacacugcuacucggugucucaagucggugucccauuugcaagaugccucugccaacucgccuucgacccagcgcugccccuacggcaccacuggccgaagcuggcgauaacacccgucccccuccauauuccccguga

SEQ ID NO: 12039 - RNA, 300 nt, Artificial Sequence
  derived and/or modified CDS sequence (opt3) from LASV(G2868-SLE-2012;Clade IV)__AIT17326__Z
augggcaacaagcagagcaaagcccccgaguccagagacucuccuagggcuucacugaucccagaugcaacccaccucgggccgcaauucugcaagaguuguugguuugaaaauaaaggacuuguggagugcaacaaucauuaccuguguuugaacugcuuaacacugcuacucagcgucuccaaucggugucccauuugcaagaugccucugccaacuaaacuucgccccucugccacgccuaccgcgccacccacacgagcugccgacucgauacguccuccaccguauucacccuga

SEQ ID NO: 12040 - RNA, 300 nt, Artificial Sequence
  derived and/or modified CDS sequence (opt3) from LASV(G2903-SLE-2012;Clade IV)__AIT17330__Z
augggcaacaagcaggccaaagcucuggagagcaaaaauucccccagagcaucucucaucccugacgccaccuaccuugggccacaauucugcaagucauguugguuugaaaacaagggacugguggagugcaauaaccacuauuuguguuuaaauugccugacacuacuccugagugucagcaacagguguccgauuugcaaaaugccccuuccuacuaagcugcgguccucugcggcuccaacggcacccccuaccggugccgccgauggcacaaagccacccccuuacucgccauga

SEQ ID NO: 12041 - RNA, 300 nt, Artificial Sequence
  derived and/or modified CDS sequence (opt3) from LASV(G3010-SLE-2013;Clade IV)__AIT17342__Z
augggcaacaagcaggccaaggcuagcgaggcaaaggacucccccagagccucucugaucccugaugcgacccaccucgggccacaauucugcaaaucauguugguuugaaaauaagggacuuguggagugcaacaaucauuaccuguguuugaacugcuuaacacugcuacucagugucagcaauagguguccgauuugcaaaaugccccugccuacuaaacuucggccauccacggcucccaccgccccucagacaggugcagccgacucuauacgcccacccccuuauucgccauga

SEQ ID NO: 12042 - RNA, 300 nt, Artificial Sequence
  derived and/or modified CDS sequence (opt3) from LASV(G3016-SLE-2013;Clade IV)__AIT17346__Z
augggcaacaagcaggccaaggcucccgagaccaaggacagcccuagagcaucccugaucccagaugccacacaccucgggccgcaauucugcaaaucuuguugguuugaaaauaagggacuuguggagugcaacaaucauuaccuguguuugaacugcuuaacucugcuacucucagucaguaauaggugucccauuugcaaaaugccucugccaacgaaacuucggcccagcgcggcuccuaccgccccacccguuggugcagccgacuccacacgcccuccaccguauucucccuga

SEQ ID NO: 12043 - RNA, 300 nt, Artificial Sequence
  derived and/or modified CDS sequence (opt3) from LASV(G3148-SLE-2013;Clade IV)__AIT17362__Z
augggcaacaagcaggccaaggcucccgagagcaaggacuccccuagagcaucucugaucccagaugccacccaccucgggccgcaauucugcaaaucauguugguuugaaaauaagggacuuguggagugcaacaaucauuaccuguguuugaacugcuuaacacugcuacucagugucagcaauaggugucccauuugcaaaaugccucugccaacuaaacuucggcccuccgcggcuccuacggccccacccgccggugcagcugacucuauacgcccuccaccguauucgcccuga

SEQ ID NO: 12044 - RNA, 300 nt, Artificial Sequence
  derived and/or modified CDS sequence (opt3) from LASV(G3151-SLE-2013;Clade IV)__AIT17366__Z
augggcaacaagcagaccaagacacccgaggugaaggacagcccuagagccucccugaucccagaugcuacucaccucgggccgcaauucugcaaaucuuguugguuugaaaauaagggacuugucgagugcaacaaucauuaccuguguuugaacugcuuaacgcugcuacucucaguuaguaauaggugucccauuugcaaaaugccucugccaaccaaacuucggcccagcgcagccccuacagcgccacccgcucgcgccgcagacgauacucgaccuccaccguauucccccuga

SEQ ID NO: 12045 - RNA, 300 nt, Artificial Sequence
  derived and/or modified CDS sequence (opt3) from LASV(G3206-SLE-2013;Clade IV)__AIT17376__Z
augggcaacaagcaggccaaggcucccgagagcaaggacuccccuagagcaucucugaucccagaugccaccuaccucgggccgcaauucugcaaaucauguugguuugaaaauaagggacuuguggagugcaacaaucacuaucuguguuugaacugcuuaacacugcuacucagugucagcaauaggugucccauuugcaaaaugccucugccaacuaaacuucgguccucuguugcgcccacggcuccuccaacccgcgccgcagacucgacacgacccccuccauacucaccguga

SEQ ID NO: 12046 - RNA, 300 nt, Artificial Sequence
  derived and/or modified CDS sequence (opt3) from LASV(G3229-SLE-2013;Clade IV)__AIT17382__Z
augggcaacaagcagaccaagacaagcgaggugaaggacucccccagagccucucugaucccugaugcuacucaccucgggccacaauucugcaaaucauguugguuugaaaauaagggacuugucgagugcaacaaucauuaccuguguuugaacugcuuaacgcugcuacucaguguuagcaauagguguccgauuugcaaaaugccccugccuaccaaacuucggccauccgcagcccccacagcgccuccagcucgcgccgcagacgauacucgacccccuccauauucuccguga

SEQ ID NO: 12047 - RNA, 300 nt, Artificial Sequence
  derived and/or modified CDS sequence (opt3) from LASV(G3234-SLE-2013;Clade IV)__AIT17386__Z
augggcaacaagcaggccaaaacccccgaggcuagagacagcccuagggcaucccugaucccagaugccacacaccucgggccgcaauucugcaagucuuguugguuugaaaauaaaggacuuguggagugcaacaaucauuaccuguguuugaacugcuuaacucugcuacucucagucaguagccggugucccauuugcaagaugccucugccaacgaaacuucgccccuccgcgaccccuacagcuccacccgccggugcaggcgacgggacucgaccuccaccguauucucccuga

SEQ ID NO: 12048 - RNA, 300 nt, Artificial Sequence
  derived and/or modified CDS sequence (opt3) from LASV(G3278-SLE-2013;Clade IV)__AIT17396__Z
augggcaacaaacaggugaaggcccccgaggcuagaaauagcccuagggcaucccugaucccagacgccacccaccucgggccgcaauucugcaagucuuguugguuugaaaacaaaggacuugucgagugcaauaaccauuaccuguguuugaauugcuuaacacugcuacucgguguuucaagucggugucccauuugcaagaugccucugccaacucgccuucgacccagcgcggcuccuacggccccacccgcagaagccggcgauaacacccguccuccaccguauucccccuga

SEQ ID NO: 12049 - RNA, 300 nt, Artificial Sequence
  derived and/or modified CDS sequence (opt3) from LASV(G502-SLE-2009;Clade IV)__AIT17124__Z
augggcaacaaacaggugaagacccccgaggccaaggacagcccuagagcuucccugaucccagaugcaacacaccucgggccgcaauucugcaagucuuguugguuugaaaauaagggacuugucgagugcaacaaucauuaccuguguuugaacugcuuaacucugcuacucucaguugguaauaggugucccauuugcaaaaugccucugccaacgaaacuucggcccagugugaccccuacagccccacccacucgcgcggcugacagcauaggcccuccaccguauucccccuga

SEQ ID NO: 12050 - RNA, 300 nt, Artificial Sequence
  derived and/or modified CDS sequence (opt3) from LASV(G503-SLE-2009;Clade IV)__AIT17128__Z
augggcaacaagcaggccaagacccccgaggcuaaggacagcccuagagcaaaucugaucccagaugccacacaccucgggccgcaauucugcaaauccuguugguuugaaaacaagggacuuguggagugcaauaaccauuaccuguguuugaauugcuuaacucugcuacucucugucucaaacaggugucccauuugcaaaaugccucugccaacgaaacuucggcccagugcggcuccuaccgccccacccacaggugcagccgacagcauacgcccuccaccguauucccccuga

SEQ ID NO: 12051 - RNA, 300 nt, Artificial Sequence
  derived and/or modified CDS sequence (opt3) from LASV(G610-SLE-2009;Clade IV)__AIT17132__Z
augggcaacaagcaggccaaagcucccgaggcaagagacagcccuagggccucccugaucccagaugcgacccaccucgggccgcaauucugcaagucuuguugguuugaaaauaaaggacuuguggagugcaacaaucauuaccuguguuugaacugcuuaacacugcuacucucagucaguaaucggugucccauuugcaagaugccucugccaacuaaacuucgccccagcgcuacgccuaccgccccacccacagaagcagccgacuccauacgaccuccaccguaucgucccuga

SEQ ID NO: 12052 - RNA, 300 nt, Artificial Sequence
  derived and/or modified CDS sequence (opt3) from LASV(G676-SLE-2009;Clade IV)__AIT17140__Z
augggcaacaagcaggccaaggcucccgagccuaaggacagcccaagagcaucccugaucccggaugccacccaccucgggccccaauucugcaaaucuuguugguuugaaaauaagggacuuguggagugcaacaaucauuaccuguguuugaacugcuuaacacugcuacucucagucaguaauagguguccuauuugcaaaaugccacugcccacuaaacuucggccuagcgcggcuccaacggcacccccugccggugccguugacuccacccgcccaccgcccuauucuccuuga

SEQ ID NO: 12053 - RNA, 300 nt, Artificial Sequence
  derived and/or modified CDS sequence (opt3) from LASV(G692-SLE-2009;Clade IV)__AIT17144__Z
augggcaacaagcaggccaagacccccgagagcaaggacuccccucgcgcuucucugaucccagaugcaacacaccucgggccgcaauucugcaaaucauguugguuugaaaauaagggacuuguggagugcaacaaucauuaccuguguuugaacugcuuaacucugcuacucggugucaguaauaggugucccauuugcaaaaugccucugccaacgaaacuucggagcuccguugcccccaccgcgccuccaacaggcgcuguggacucuauaagacccccuccauauucgccguga

SEQ ID NO: 12054 - RNA, 300 nt, Artificial Sequence
  derived and/or modified CDS sequence (opt3) from LASV(G733-SLE-2010;Clade IV)__AIT17152__Z
augggcaacaagcaggccaagacccccgagacaaaggacagcccuagagcuucccugaucccagaugcaacucaccucgggccgcaauucugcaaaucuuguugguuugaaaauaagggacuuguggagugcaacaaucauuaccuguguuugaacugcuuaacgcugcuacucucagucaguaauaggugucccauuugcaaaaugccucugccaaccaaacuucggcccagcacagccccuacugcgccacccgcuggugccgcagacaacacccgcccuccaccguauucccccuga

SEQ ID NO: 12055 - RNA, 300 nt, Artificial Sequence
  derived and/or modified CDS sequence (opt3) from LASV(G808-SLE-2010;Clade IV)__AIT17162__Z
augggcaacaagcaggccaaggcuagcgaguccaaggacucucccagagcaucacugaucccugaugccacccaccucgggccacaauucugcaaaaguuguugguuugaaaauaagggacuuguggagugcaacaaucauuaccuguguuugaacugcuuaacacugcuacucagcgucuccaauagguguccgauuugcaaaaugccccugccuacuaaacuucggccaucuguuacgcccaccgcgccuccaacacgcacugcugacaacacccgacccccuccauauucgccguga

SEQ ID NO: 12056 - RNA, 300 nt, Artificial Sequence
  derived and/or modified CDS sequence (opt3) from LASV(Guinea Faranah;Clade IV)__AMZ00378__Z
augggcaacagacagaccaaggccacagaggcuaaagacagccccagggcaucccugaucccugaugccacucaccucgggccacaauucugcaagucuuguugguuugaaaauaaaggacuuguggagugcaacaaucauuaccuguguuugaacugcuuaacgcugcuacucucagucaguagccgguguccgauuugcaagaugccccugccuacccgccuuaaauccucuacaaauccaacugcgcccucggcuaagaccgaaucaagcauaaacccuccacccuauaguccuuga

SEQ ID NO: 12057 - RNA, 300 nt, Artificial Sequence
  derived and/or modified CDS sequence (opt3) from LASV(GUINEA Z-185a;Clade IV)__AMZ00374__Z
augggcaacaagcaggccaaggcucccgagaccaagaauagcccuagagcaucccugaucccagacgccacacaccucgggccgcaauucugcaaaucuuguugguuugaaaacaagggacuuguggagugcaauaaccauuaccuguguuugaauugcuuaacucugcuacucucagucaguaacaggugucccauuugcaaaaugccucugccaacgaaacuucggcccagcgcgguuccuaccgcuccacccgcccaggugggugaucgcacacgaccuccaccguauucccccuga

SEQ ID NO: 12058 - RNA, 312 nt, Artificial Sequence
  derived and/or modified CDS sequence (opt3) from MOPV/LASV reassortant(IGS-1;Clade IV)__AFY05533__Z
augggcaagacccagagcaaagggcaacccuccacaaaccugcucaaggagacugaaccuagacacccagugaucccggacgccaggggaacgggucccgaguucugcaaaucuuguugguuugaacggcgcggccuuguccgaugcaaugaucauuaccuguguuugaacugcuuaacccugcuacacacaguuucagaccguuguccuauuugcaagcauaaacucccauucagacuggagcuucagacucagcccaccgcuccuccagaaauacccccuagucagaauccaccgcccuauagcccuuga

SEQ ID NO: 12059 - RNA, 300 nt, Artificial Sequence
  derived and/or modified CDS sequence (opt3) from LASV(LM032-SLE-2010;Clade IV)__AIT17800__Z
augggcaacaagcaggccaaggcucccgaggcaaaggacagcccuagagccucccugaucccagaugcgacccaccucgggccgcaauucugcaaaucuuguugguuugaaaauaagggacuuguggagugcaacaaucauuaccuguguuugaacugcuuaacacugcuacucucagucaguaauaggugucccauuugcaaaaugccucugccaacuaaacuucggcccagcgcuacgccuaccgccccacccacagaagcagccgacuccauacgcccuccaccguaucaccccuga

SEQ ID NO: 12060 - RNA, 300 nt, Artificial Sequence
  derived and/or modified CDS sequence (opt3) from LASV(LM222-SLE-2010;Clade IV)__AIT17804__Z
augggcaacaagcaggccaaggcuagcgaggaaaagaacucccccagagcaucucugaucccugacgccacccaccucgggccacaauucugcaaaucauguugguuugagaauaagggacuuguggaaugcaauaaccauuaccuguguuugaauugcuuaacacugcuacucagugucagcaacagguguccgauuugcaaaaugccccugccuacuaaacuucggccauccacgacccccacagcgccuccaacuggugcugccgauucuauacgcccucccccauauucgccguga

SEQ ID NO: 12061 - RNA, 300 nt, Artificial Sequence
  derived and/or modified CDS sequence (opt3) from LASV(LM395-SLE-2009;Clade IV)__AIT17808__Z
augggcaacaagcaggccaaagcucccgagagcaaggacuccccuagagcaucucugaucccagaugccacccaccucgggccgcaauucugcaaaucauguugguuugaaaauaagggacuuguggagugcaacaaucauuaccuguguuugaacugcuuaacacugcuacucagugucagcaauaggugucccauuugcaaaaugccucugccaacucggcuucgccccuccgcggcuccuacggccccacccaccggugcagccgacucuacacgaccuccaccguauucgcccuga

SEQ ID NO: 12062 - RNA, 300 nt, Artificial Sequence; identical to SEQ ID NO: 12060
  derived and/or modified CDS sequence (opt3) from LASV(LM776-SLE-2012;Clade IV)__AIT17824__Z

SEQ ID NO: 12063 - RNA, 300 nt, Artificial Sequence
  derived and/or modified CDS sequence (opt3) from LASV(Mad39;Clade IV)__ANH09743__Z
augggcaacaagcaggccaaagcuagcgagguggaagacgggcccagagcaucccugaucccugaugccacccaccucggaccacaauucugcaagucuuguugguuugagaauaaaucacuugucgaaugcaacaaucauuaccuguguuugaacugcuuaacacugcuacucaguguuagcaauagguguccgauuugcaagaugccccugccuacucggcuuaaaccauccgugguacccacggcgccuccaacccgcgcuggugacggcacacgacccccuccauauucuccguga

SEQ ID NO: 12064 - RNA, 300 nt, Artificial Sequence
  derived and/or modified CDS sequence (opt3) from LASV(Mad41;Clade IV)__ANH09745__Z
augggcaacaagcagaccaaagcccccgagguggaagacgggccuagagcuagccugaucccagaugcaacacaccucggaccgcaauucugcaaguccuguugguuugagaauaaaggucuugucgaaugcaacaaucauuaccuguguuugaacugcuuaacucugcuacucucuguuucaaguaggugucccauuugcaagaugccucugccaacgcggcuuaaacccagcauagugccuaccgccccacccgcgcgcacaggcgagaauacucgaccuccaccguauucccccuga

SEQ ID NO: 12065 - RNA, 300 nt, Artificial Sequence
  derived and/or modified CDS sequence (opt3) from LASV(Mad63;Clade IV)__ANH09749__Z
augggcaacaagcaggccaaagcucccgagguggaagacgggccuagagcaagccugaucccagaugccacccaccucggaccgcaauucugcaaguccuguugguuugagaauaggggucuugucgaaugcaacaaucauuaccuguguuugaacugcuuaacacugcuacucucuguuucaaaucggugucccauuugcaaaaugccucugccaacucgccuuaagcccagugugguaccuacggcgccacccaccggcgcugggggagacacacgaccuccaccguauagccccuga

SEQ ID NO: 12066 - RNA, 300 nt, Artificial Sequence
  derived and/or modified CDS sequence (opt3) from LASV(Mad69;Clade IV)__ANH09751__Z
augggcaacaagcaggccaaagcucccaaggcagaggacgggccuagagccagccugaucccagaugcgacccaccucggaccgcaauucugcaaauccuguugguuugaaaauaagggucuuguggagugcaacaaucauuaccuguguuugaacugcuuaacacugcuacucucugucucaaauaggugucccauuugcaaaaugccucugccaacucggcuuaagcccaguguugugccuacggcuccacccaccggcgccgggggagacacacgcccuccaccgcacagccccuga

SEQ ID NO: 12067 - RNA, 300 nt, Artificial Sequence
  derived and/or modified CDS sequence (opt3) from LASV(Mad83;Clade IV)__ANH09753__Z
augggcaacaagcaggccaaagcuagcgaggcagaagacgggcccagagccucccugaucccugaugcgacccaccucggaccacaauucugcaagucuuguugguuugagaauaaaggucuuguggaaugcaacaaucauuaccuguguuugaacugcuuaacacugcuacucucagucaguuccagguguccgauuugcaagaugccccugccuacucggcuucgcccaagcguugugcccacggcuccuucugccggcgcaggggacggaacccgaccacccccuuauucgccauga

SEQ ID NO: 12068 - RNA, 300 nt, Artificial Sequence
  derived and/or modified CDS sequence (opt3) from LASV(NL;Clade IV)__AAO59510__Z
augggcaacaagcagaccaaggcccccgaggcuaaggacagcccuagagcaucccugaucccagaugccacauaccucgggccgcaauucugcaaaucuuguugguuugaaaauaagggacuuguggagugcaacaaucacuaucuguguuugaacugcuuaacucugcuacucucagucaguaauaggugucccauuugcaaaaugccucugccaacgaaacuucggcccagcgcggcuccuaccgccccacccgccggugcagcucauuccgcacgcccuccaccguacucucccuga

SEQ ID NO: 12069 - RNA, 300 nt, Artificial Sequence
  derived and/or modified CDS sequence (opt3) from LASV(Z0947-SLE-2011;Clade IV)__AIT17838__Z
augggcaacaagcaggccaaggugcccgagagcaaggacuccccuagagcuucucugaucccagaugcaacccaccucgggccgcaauucugcaaaucauguugguuugaaaauaagggacuugucgagugcaacaaucauuaccuguguuugaacugcuuaacacugcuacucaguguuagcaauaggugucccauuugcaaaaugccucugccaacuaaacuuaagcccuccgccgcgccuacggcuccacccaccggugccgcagacucuauacggccuccaccguauucgcccuga

SEQ ID NO: 12070 - RNA, 300 nt, Artificial Sequence
  derived and/or modified CDS sequence (opt3) from LASV(Z0948-SLE-2011;Clade IV)__AIT17842__Z
augggcaacaagcaggccaaggugcccgagagcaaggacuccccuagagcuucucugaucccagaugcaacccaccucgggccgcaauucugcaaaucauguugguuugaaaauaagggacuugucgagugcaacaaucauuaccuguguuugaacugcuuaacacugcuacucaguguuagcaauaggugucccauuugcaaaaugccucugccaacuaaacuucggcccuccgccgcgccuacggcuccacccaccgguguggccgacucuauacgcccuccaccguauucgcccuga

SEQ ID NO: 12071 - RNA, 300 nt, Artificial Sequence
  derived and/or modified CDS sequence (opt3) from LASV(Z148;Clade IV)__AAT49005__Z
augggcaacaagcaggcaaaagcucccgagaccaaggacagcccuagagcaucccugaucccagaugccacacaccucgggccgcaauucugcaaaucuuguugguuugaaaauaagggacuuguggagugcaacaaucauuaccuguguuugaacugcuuaacucugcuacucucagucaguaauaggugucccauuugcaaaaugccucugccaacgcggcuucgccccagcgcgguuccuaccgcuccacccgccccugccggugaccgaacaaagccaccgcccuauuccccuuga

SEQ ID NO: 12072 - RNA, 300 nt, Artificial Sequence
  derived and/or modified CDS sequence (opt3) from LASV(Bamba-R114;Clade V)__AHC95547__Z
augggcaacagacaggccaaggaccccaaaguggagagcuccccuagggcuucucugaucccagaugcaacccaccucgggccgcaauucugcaagucauguugguuugaaaacaaaggacuugucgagugcaacaaucauuaccuguguuugaacugcuuaagucugcuacucagcguuuccaaucggugucccauuugcaagaugccucugccaacacgccuucgacccacuacgaugccuaccgccccacagauaaucaaagaagguacaacuaaucccccuccauauaccccguga

SEQ ID NO: 12073 - RNA, 300 nt, Artificial Sequence
  derived and/or modified CDS sequence (opt3) from LASV(Komina-R16;Clade V)__AHC95545__Z
augggcaacaagcaggccaaggaccccaagaccgagagcuccccuagagcuucucugaucccagaugcaacacaccucgggccgcaauucugcaaaucauguugguuugaaaacaagggacuuguggagugcaacaaucauuaccuguguuugaacugcuuaagucugcuacucagcgucuccaauaggugucccauuugcaaaaugccucugccaacuaaacuuaagcccauaacgaccccuacagccccacagaucacucgggaaucuauuaccaaucccccuccauauacaccguga

SEQ ID NO: 12074 - RNA, 300 nt, Artificial Sequence; identical to SEQ ID NO: 11899
  derived and/or modified CDS sequence (opt3) from LASV(Alzey;Clade VI)__SCA79103__Z

SEQ ID NO: 12075 - RNA, 300 nt, Artificial Sequence
  derived and/or modified CDS sequence (opt3) from LASV(NIGERIA IKEJI;Clade II)__AMZ00370__Z
augggcaacaagcaggccaaaagcaccagaguggacgagcaacagagggcucaccugguccccgaugcaucccaucucgggccucaguucugcaagucuuguugguuugaaaauaaaggacuuguugagugcaacaaucacuaccuguguuugaacugcuuaucacugcuacucagugugagcucccgguguccaaucugcaagaugccgcugcccacaaaacuuaagacuucuacgcagccuucggccccacgcgcggaaguacccccuucaaccacaccacccccuuauagcccauga

SEQ ID NO: 12076 - RNA, 300 nt, Artificial Sequence
  derived and/or modified CDS sequence (opt4) from LASV(Josiah;Clade IV)__ADY11072/NP_694871__Z
augggcaacaagcaggccaaggcccccgagagcaaggacagccccagagccagccugauccccgacgccacccaccugggcccccaguucugcaagagcugcugguucgagaacaagggccugguggagugcaacaaccacuaccugugccugaacugccugacccugcugcugagcgugagcaacagaugccccaucugcaagaugccccugcccaccaagcugagacccagcgccgcccccaccgccccccccaccggcgccgccgacagcaucagacccccccccuacagccccuga

SEQ ID NO: 12077 - RNA, 303 nt, Artificial Sequence
  derived and/or modified CDS sequence (opt4) from LASV(Pinneo-NIG-1969;Clade I)__AIT17834__Z
augggcaacaagcagaccagaagcccccccaagcccgagcaccccagacccacccugcugcccgacgccagccaccugggcccccaguucugcaagagcugcugguucgagaacaagggccugguggagugcaacaaccacuaccugugccugaacugccugacccugcugcugagcgugagcgacagaugccccaucugcaagaugccccugcccaccaagcuggccgugagaacccagcccagcgcccccccccugaaccagggcaacacccagagcagccccccccccuacagccccuga

SEQ ID NO: 12078 - RNA, 300 nt, Artificial Sequence
  derived and/or modified CDS sequence (opt4) from LASV(Nig08-04;Clade II)__ADU56612__Z
augggcaacagacagaccagacccaccgaggccaccgagcagagcagagcccaccuggugcccgacgccagccaccugggcccccaguucugcaagagcugcugguucgagaacagaggccugguggagugcaacaaccacuaccugugccugaacugccugagccugcugcugagcgugagcagcagaugccccaucugcaagaugccccugcccaccagacugaaggccagcgcccagcccagcgccccccccaccgaggccccccagaacaccacccccccccccuacacccccuga

SEQ ID NO: 12079 - RNA, 300 nt, Artificial Sequence
  derived and/or modified CDS sequence (opt4) from LASV(Nig08-A19;Clade III)__ADU56620__Z
augggcggcaagcacaccaagccccagagagagagcaacagccccagagccagccugauccccgacgccacccaccugggcccccaguucugcaagagcugcugguucgagaacaagggccugguggagugcaacaaccacuaccugugccugaacugccugacccugcugcugagcgugagcaacagaugccccaucugcaagaugccccugcccaccagacugagagccagcaccaaccccaccgccccccagguggagcaggugggccccaccaaccccccccccuacagccccuga

SEQ ID NO: 12080 - RNA, 300 nt, Artificial Sequence
  derived and/or modified CDS sequence (opt4) from LASV(AV;Clade V)__CCA30312__Z
augggcaacagacaggccaagaaccccgagguggagaacagccccagagccagccugauccccgacgccacccaccugggcccccaguucugcaagagcugcugguucgagaacaagggccugguggagugcaacaaccacuaccugugccugaacugccugagccugcugcugagcgugagcaacagaugccccaucugcaagaugccccugcccaccagacugagacccaccaccacccccaccgccccccagaucaucaaggagaacaccaccaaccccccccccuacacccccuga

SEQ ID NO: 12081 - RNA, 300 nt, Artificial Sequence
  derived and/or modified CDS sequence (opt4) from LASV(Togo/2016/7082;Clade VI)__AMR44579__Z
augggcgccagacagaccaagcagccccagaucgagggcagccccagagccagccuggugcccgacgccagccaccugggcccccaguucugcaagagcugcugguucgagaacaagggccugguggagugcaacaaccacuaccugugccugaacugccugagccugcugcugagcgugagcaacagaugccccaucugcaagaugccccugcccaccaagcugagagugagcagcgcccccagcgccccccccgccgccaccgcccagcccggcacccccccccccuacagccccuga

SEQ ID NO: 12082 - RNA, 300 nt, Artificial Sequence
  derived and/or modified CDS sequence (opt4) from LASV(KAK-428;Clade n.d. (VII))__ANH09761__Z
augggcaacaagggcaccaagcccacccagaacagcgagcccagcagagccaaccuggugcccgacgccagcuaccugggcccccaguucugcaagagcugcugguucgagaacaagggccugguggagugcaacaaccacuaccugugccugaacugccugaccaugcugcugagcgugagcaacagaugccccaucugcaagaugccccugcccaccaagaucaaggccagcggcagccccagcgccccccccaccgaggccaacagcgccgugagccccccccccuacacccccuga

SEQ ID NO: 12083 - RNA, 300 nt, Artificial Sequence
  derived and/or modified CDS sequence (opt4) from LASV(ISTH0009-NIG-2011;Clade II)__AIT17402__Z
augggcaacagacaggccaagagcaccaagguggacgagcaccagagagcccaccuggugcccgacgccagccaccugggcccccaguucugcaagagcugcugguucgagaacagaggccugguggagugcaacaaccacuaccugugccugaacugccugagccugcugcugagcgugagcagcagaugccccaucugcaagaugccccugcccaccaagcugaaggccgccgcccagcccagcgcccccagcaccgagaccauccagaacaccacccccccccccuacacccccuga

SEQ ID NO: 12084 - RNA, 300 nt, Artificial Sequence
  derived and/or modified CDS sequence (opt4) from LASV(ISTH0012-NIG-2011;Clade II)__AIT17406__Z
augggcaacagacaggccaagagcagcaagguggacgagcaccagagagcccaccuggugcccgacgccagccaccugggcccccaguucugcaagagcugcugguucgagaacaagggccugguggagugcaacaaccacuaccugugccugaacugccugagccugcugcugagcgugagcagcagaugccccaucugcaagaugccccugcccaccaagcugaaggccgccgcccagcccagcgcccccagcaccgaggccgugcagaacaccgcccccccccccuacgcccccuga

SEQ ID NO: 12085 - RNA, 300 nt, Artificial Sequence
  derived and/or modified CDS sequence (opt4) from LASV(ISTH0047-NIG-2011;Clade II)__AIT17410__Z
augggcaacaagcaggccaagagcaccaagguggacgagcaccagagagcccaccuggugcccgacgccagccaccugggcccccaguucugcaagagcugcugguucgagaacagaggccugguggagugcaacaaccacuaccugugccugaacugccugagccugcugcugagcgugagcagcagaugccccaucugcaagaugccccugcccaccagacugaaggccgccacccagcccagcgcccccagcaccgaggccacccagaacaccacccccccccccuacacccccuga

SEQ ID NO: 12086 - RNA, 300 nt, Artificial Sequence
  derived and/or modified CDS sequence (opt4) from LASV(ISTH0230-NIG-2011;Clade II)__AIT17418__Z
augggcaacagacaggccaagagcaccaagguggacgagcaccagagagcccaccuggugcccgacgccagccaccugggcccccaguucugcaagagcugcugguucgagaacagaggccugguggagugcaacaaccacuaccugugccugaacugccugagccugcugcugagcgugagcagcagaugccccaucugcaagaugccccugcccaccaagcugaaggccgccacccagcccagcgcccccagcaccgagaccauccagaacaccacccccccccccuacacccccuga

SEQ ID NO: 12087 - RNA, 300 nt, Artificial Sequence
  derived and/or modified CDS sequence (opt4) from LASV(ISTH0531-NIG-2011;Clade II)__AIT17422__Z
augggcaacagacaggccaagagcgccaagguggacgagcaccagagagcccaccuggugcccgacgccagccaccugggcccccaguucugcaagagcugcugguucgagaacagaggccugguggagugcaacaaccacuaccugugccugaacugccugagccugcugcugagcgugagcagcagaugccccaucugcaagaugccccugcccaccaagcugaaggccgccacccagcccagcgcccccagcaccgaggccacccagaacaccacccccccccccuacacccccuga

SEQ ID NO: 12088 - RNA, 300 nt, Artificial Sequence
  derived and/or modified CDS sequence (opt4) from LASV(ISTH0595-NIG-2011;Clade II)__AIT17426__Z
augggcaacaagcaggccaagagcaccaagguggacgagcaccagagagcccaccuggugcccgacgccagccaccugggcccccaguucugcaagagcugcugguucgagaacagaggccugguggagugcaacaaccacuaccugugccugaacugccugagccugcugcugagcgugagcagcagaugccccaucugcaagaugccccugcccaccaagcugaaggccgccacccagcccagcgcccccagcaccgaggccacccagaacaccacccccccccccuacacccccuga

SEQ ID NO: 12089 - RNA, 300 nt, Artificial Sequence
  derived and/or modified CDS sequence (opt4) from LASV(ISTH1003-NIG-2011;Clade II)__AIT17432__Z
augggcaacaagcaggccaagagcaccaagguggacgagcaccagagagcccaccuggugcccgacgccagccaccugggcccccaguucugcaagagcugcugguucgagaacagaggccugguggagugcaacaaccacuaccugugccugaacugccugagccugcugcugagcgugagcagcagaugccccaucugcaagaugccccugcccaccagacugaaggccgccacccagcccagcgcccccagcaccgaggccacccagaacaccauccccccccccuacacccccuga

SEQ ID NO: 12090 - RNA, 300 nt, Artificial Sequence
  derived and/or modified CDS sequence (opt4) from LASV(ISTH1038-NIG-2011;Clade II)__AIT17436__Z
augggcaacaagcaggccaagagcaccaaggccgacgagcaccagagagcccaccuggugcccgacgccagccaccugggcccccaguucugcaagagcugcugguucgagaacagaggccugguggagugcaacaaccacuaccugugccugaacugccugagccugcugcugagcgugagcagcagaugccccaucugcaagaugccccugcccaccaagcugaaggccgccacccagcccagcgcccccagcaccgaggccaccagaaacaccacccccccccccuacacccccuga

SEQ ID NO: 12091 - RNA, 300 nt, Artificial Sequence
  derived and/or modified CDS sequence (opt4) from LASV(ISTH1058-NIG-2011;Clade II)__AIT17444__Z
augggcaacagacaggccaagagcaccaagguggacgagcaccagagagcccaccuggugcccgacgccagccaccugggcccccaguucugcaagagcugcugguucgagaacaagggccugguggagugcaacaaccacuaccugugccugaacugccugagccugcugcugagcgugagcagcagaugccccaucugcaagaugccccugcccaccaagcugaaggccgccgcccagcccagcgcccccagcaccgaggccgcccagaacaccgcccccccccccuacgcccccuga

SEQ ID NO: 12092 - RNA, 300 nt, Artificial Sequence
  derived and/or modified CDS sequence (opt4) from LASV(ISTH1064-NIG-2011;Clade II)__AIT17448__Z
augggcaacagacaggccaagagcaccaaggugggcgagcaccagagagcccaccuggugcccgacgccagccaccugggcccccaguucugcaagagcugcugguucgagaacagaggccugguggagugcaacaaccacuaccugugccugaacugccugagccugcugcugagcgugagcagcagaugccccaucugcaagaugccccugcccaccaagcugaaggccaccgcccagcccagcgcccccagcgccgaggccauccagaacaccacccccccccccuacacccccuga

SEQ ID NO: 12093 - RNA, 300 nt, Artificial Sequence
  derived and/or modified CDS sequence (opt4) from LASV(ISTH1069-NIG-2011;Clade II)__AIT17452__Z
augggcaacagacaggccaagagcaccagaguggacgagcaccagagagcccaccuggugcccgacgccagccaccugggcccccaguucugcaagagcugcugguucgagaacagaggccugguggagugcaacaaccacuaccugugccugaacugccugagccugcugcugagcgugagcagcagaugccccaucugcaagaugccccugcccaccagacugagagccgccgugcagcccagcgcccccagcaccgagaccacccaggacaccacccccccccccuacagccccuga

SEQ ID NO: 12094 - RNA, 300 nt, Artificial Sequence
  derived and/or modified CDS sequence (opt4) from LASV(ISTH1096-NIG-2012;Clade II)__AIT17456__Z
augggcaacagacaggccaagagcaccgaggugaacgagcaccagagagcccaccuggugcccgacgccagccaccugggcccccaguucugcaagagcugcugguucgagaacagaggccugguggagugcaacaaccacuaccugugccugaacugccugagccugcugcugagcgugagcagcagaugccccaucugcaagaugccccugcccaccaagcugaaggccgccacccagcccagcgcccccagcaccgaggugacccagaacaccgugcccccccccuacagccccuga

SEQ ID NO: 12095 - RNA, 300 nt, Artificial Sequence
  derived and/or modified CDS sequence (opt4) from LASV(ISTH1107-NIG-2012;Clade II)__AIT17460__Z
augggcaacagacaggccaagagcaccaagguggacgagcaccagagagcccaccuggugcccgacgccagccaccugggcccccaguucugcaagagcugcugguucgagaacagaggccugguggagugcaacaaccacuaccugugccugaacugccugagccugcugcugagcgugagcagcagaugccccaucugcaagaugccccugcccaccaagcugaaggccgccgcccagcccagcgccccccccaccgaggccacccagaacaccacccccccccccuacacccccuga

SEQ ID NO: 12096 - RNA, 300 nt, Artificial Sequence
  derived and/or modified CDS sequence (opt4) from LASV(ISTH1111-NIG-2011;Clade II)__AIT17464__Z
augggcaacagacaggccaagagcaccaagguggacgagcaccagagagcccaccuggugcccgacgccagccaccugggcccccaguucugcaagagcugcugguucgagaacagaggccugguggagugcaacaaccacuaccugugccugaacugccugagccugcugcugagcgugagcagcagaugccccaucugcaagaugccccugcccaccaagcugaaggccgccgcccagcccagcgcccccagcaccgaggccacccaggacaccacccccccccccuacacccccuga

SEQ ID NO: 12097 - RNA, 300 nt, Artificial Sequence
  derived and/or modified CDS sequence (opt4) from LASV(ISTH1121-NIG-2012;Clade II)__AIT17468__Z
augggcaacagacaggccaagcagaccaagguggacgagcaccagagagcccaccuggugcccgacgccagccaccugggcccccaguucugcaagagcugcugguucgagaacagaggccugguggagugcaacaaccacuaccugugccugaacugccugagccugcugcugagcaucagcagcagaugccccaucugcaagaugccccugcccaccaagcugaaggccgccgcccagcccagcgcccccagcaccgaggccacccaggacaccacccccccccccuacacccccuga

SEQ ID NO: 12098 - RNA, 300 nt, Artificial Sequence
  derived and/or modified CDS sequence (opt4) from LASV(ISTH1129-NIG-2012;Clade II)__AIT17472__Z
augggcaacaagcagaccaagagcaccaaggccgacgagcaccagagagcccaccuggugcccgacgccagccaccugggcccccaguucugcaagagcugcugguucgagaacagaggccugguggagugcaacaaccacuaccugugccugaacugccugagccugcugcugagcgugagcagcagaugccccaucugcaagaugccccugcccaccagacugaaggccgccgcccagcccagcgcccccagcaccgaggccacccaggacaccacccccccccccuacacccccuga

SEQ ID NO: 12099 - RNA, 300 nt, Artificial Sequence
  derived and/or modified CDS sequence (opt4) from LASV(ISTH1137-NIG-2011;Clade II)__AIT17476__Z
augggcaacagacaggccaagagcaccaagguggacgagcaccagagagcccaccuggugcccgacgccagccaccugggcccccaguucugcaagagcugcugguucgagaacagaggccugguggagugcaacaaccacuaccugugccugaacugccugagccugcugcugagcgugagcagcagaugccccaucugcaagaugccccugcccaccaagcugaaggccgccgcccagcccagcgcccccagcgccgaggccauccagaacaccacccccccccccuacacccccuga

SEQ ID NO: 12100 - RNA, 300 nt, Artificial Sequence
  derived and/or modified CDS sequence (opt4) from LASV(ISTH2010-NIG-2012;Clade II)__AIT17480__Z
augggcaacagacacgccaagagcaccaagguggacgagcaccagagagcccaccuggugcccgacgccagccaccugggcccccaguucugcaagagcugcugguucgagaacagaggccugguggagugcaacaaccacuaccugugccugaacugccugagccugcugcugagcgugagcagcagaugccccaucugcaagaugccccugcccaccaagcugaaggccgccgcccagcccagcgcccccagcaccgaggugauccagagcaccacccccccccccuacacccccuga

SEQ ID NO: 12101 - RNA, 300 nt, Artificial Sequence
  derived and/or modified CDS sequence (opt4) from LASV(ISTH2016-NIG-2012;Clade II)__AIT17484__Z
augggcaacagacacgccaagagcaccaagguggacgagcaccagagagcccaccuggugcccgacgccagccaccugggcccccaguucugcaagagcugcugguucgagaacagaggccugguggagugcaacaaccacuaccugugccugaacugccugagccugcugcugagcgugagcagcagaugccccaucugcaagaugccccugcccaccaagcugaaggccgccgcccagcccagcgcccccagcaccgaggagauccagaacaccacccccccccccuacacccccuga

SEQ ID NO: 12102 - RNA, 300 nt, Artificial Sequence
  derived and/or modified CDS sequence (opt4) from LASV(ISTH2020-NIG-2012;Clade II)__AIT17488__Z
augggcaacagacaggccaagcccaccaagguggacgagcaccagagagcccaccuggugcccgacgccagccaccugggcccccaguucugcaagagcugcugguucgagaacaagggccugguggagugcaacaaccacuaccugugccugaacugccugagccugcugcugagcgugagcagcagaugccccaucugcaagaugccccugcccaccaagcugaaggccgccgcccagcccagcgcccccagcaccgaggccgcccagaacaccgcccccccccccuacgcccccuga

SEQ ID NO: 12103 - RNA, 300 nt, Artificial Sequence
  derived and/or modified CDS sequence (opt4) from LASV(ISTH2031-NIG-2012;Clade II)__AIT17496__Z
augggcaacagacaggccaagagcaccaagguggacgagcaccagagagcccaccuggugcccgacgccagccaccugggcccccaguucugcaagagcugcugguucgagaacagaggccugguggagugcaacaaccacuaccugugccugaacugccugagccugcugcugagcgugagcagcagaugccccaucugcaagaugccccugcccaccagacugaaggccgccacccagcccagcgcccccagcaccgaggccacccagaccaccacccccccccccuacacccccuga

SEQ ID NO: 12104 - RNA, 300 nt, Artificial Sequence
  derived and/or modified CDS sequence (opt4) from LASV(ISTH2037-NIG-2012;Clade II)__AIT17500__Z
augggcaacagacagaccaagagcaccaagguggacgagcaccagagagcccaccuggugcccgacgccagccaccugggcccccaguucugcaagagcugcugguucgagaacaagggccugguggagugcaacaaccacuaccugugccugaacugccugagccugcugcugagcgugagcagcagaugccccaucugcaagaugccccugcccaccaagcugaagaccgccgcccagcccagcgccccccccaccgaggccgccagaaccaccgcccccccccccuacgcccccuga

SEQ ID NO: 12105 - RNA, 300 nt, Artificial Sequence
  derived and/or modified CDS sequence (opt4) from LASV(ISTH2042-NIG-2012;Clade II)__AIT17504__Z
augggcaacagacacgccaagagcaccaagguggacgagcaccagagagcccaccuggugcccgacgccagccaccugggcccccaguucugcaagagcugcugguucgagaacagaggccugguggagugcaacaaccacuaccugugccugaacugccugagccugcugcugagcgugagcagcagaugccccaucugcaagaugccccugcccaccaagcugaaggccgccgcccagcccagcgcccccagcaccgaggccauccagaacaccacccccccccccuacacccccuga

SEQ ID NO: 12106 - RNA, 300 nt, Artificial Sequence
  derived and/or modified CDS sequence (opt4) from LASV(ISTH2046-NIG-2012;Clade II)__AIT17508__Z
augggcaacagacagaccaagagcaccaagguggacgagcaccagagagcccaccuggugcccgacgccagccaccugggcccccaguucugcaagagcugcugguucgagaacaagggccugguggagugcaacaaccacuaccugugccugaacugccugagccugcugcugagcgugagcagcagaugccccaucugcaagaugccccugcccaccaagcugaaggccgccgcccagcccagcgcccccagcaccgaggccacccagaacaccgcccccccccccuacgcccccuga

SEQ ID NO: 12107 - RNA, 300 nt, Artificial Sequence
  derived and/or modified CDS sequence (opt4) from LASV(ISTH2050-NIG-2012;Clade II)__AIT17512__Z
augggcaacagacaggccaagagcaccaagguguacgagcaccagagagcccaccuggugcccgacgccagccaccugggcccccaguucugcaagagcugcugguucgagaacagaggccugguggagugcaacaaccacuaccugugccugaacugccugagccugcugcugagcgugagcagcagaugccccaucugcaagaugccccugcccaccagacugaaggccgccacccagcccagcgcccccagcaccgaggccacccagaacaccacccccccccccuacacccccuga

SEQ ID NO: 12108 - RNA, 300 nt, Artificial Sequence
  derived and/or modified CDS sequence (opt4) from LASV(ISTH2057-NIG-2012;Clade II)__AIT17516__Z
augggcaacagacaggccaagagcaccaagguggacgagcaccagagagcccaccuggugcccgacgccagccaccugggcccccaguucugcaagagcugcugguucgagaacagaggccugguggagugcaacaaccacuaccugugccugaacugccugagccugcugcugagcgugagcagcagaugccccaucugcaagaugccccugcccaccaagcugaagaccgccacccagcccagcgccccccugaccgaggccacccagaacaccacccccccccccuacacccccuga

SEQ ID NO: 12109 - RNA, 300 nt, Artificial Sequence
  derived and/or modified CDS sequence (opt4) from LASV(ISTH2061-NIG-2012;Clade II)__AIT17520__Z
augggcaacaagcaggccaagagcaccaagguggacgagcaccagagagcccaccuggugcccgacgccagccaccugggcccccaguucugcaagagcugcugguucgagaacagaggccugguggagugcaacaaccacuaccugugccugaacugccugagccugcugcugagcgugagcaacagaugccccaucugcaagaugccccugcccaccaagcugaaggccgccgcccagcccagcgcccccagcaccgaggccacccagaacaccacccccccccccuacacccccuga

SEQ ID NO: 12110 - RNA, 300 nt, Artificial Sequence
  derived and/or modified CDS sequence (opt4) from LASV(ISTH2065-NIG-2012;Clade II)__AIT17526__Z
augggcaacagacaggccaagagcgccaaggugaccgagcaccagagagcccaccuggugcccgacgccagccaccugggcccccaguucugcaagagcugcugguucgagaacaagggccugguggagugcaacaaccacuaccugugccugaacugccugagccugcugcugagcgugagcagcagaugccccaucugcaagaugccccugcccaccagacugaaggccgccacccagcccagcgcccccagcgccgaggccccccagagcaccacccccccccccuacacccccuga

SEQ ID NO: 12111 - RNA, 300 nt, Artificial Sequence
  derived and/or modified CDS sequence (opt4) from LASV(ISTH2094-NIG-2012;Clade II)__AIT17536__Z
augggcaacagacagaccagacccaccgaggccaccgagcagagcagagcccaccuggugcccgacgccagccaccugggcccccaguucugcaagagcugcugguucgagaacaagggccugguggagugcaacaaccacuaccugugccugaacugccugagccugcugcugagcgugagcagcagaugccccaucugcaagaugccccugcccaccagacugaaggccagcgcccagcccagcgccccccccaccgaggccccccagaacaaggcccccccccccuacacccccuga

SEQ ID NO: 12112 - RNA, 300 nt, Artificial Sequence
  derived and/or modified CDS sequence (opt4) from LASV(ISTH2129-NIG-2012;Clade II)__AIT17542__Z
augggcaacagacaggugaagagcaccaagguggacgagcaccagagagcccaccugauccccgacgccagccaccugggcccccaguucugcaagagcugcugguucgagaacagaggccugguggagugcaacaaccacuaccugugccugaacugccugagccugcugcugagcgugagcagcagaugccccaucugcaagaugccccugcccaccaagcuggaggccgccgcccagcccagcgcccccagcaccgaggccacccaggacaccacccccccccccuacacccccuga

SEQ ID NO: 12113 - RNA, 300 nt, Artificial Sequence
  derived and/or modified CDS sequence (opt4) from LASV(ISTH2217-NIG-2012;Clade II)__AIT17546__Z
augggcaacaagcaggccaagagcaccaagguggacgagcaccagagagcccaccuggugcccgacgccagccaccugggcccccaguucugcaagagcugcugguucgagaacagaggccugguggagugcaacaaccacuaccugugccugaacugccugagccugcugcugagcgugagcagcagaugccccaucugcaagaugccccugcccaccaagcugaaggccgccgcccagcccagcgcccccagcaccgagaccauccagaacaccacccccccccccuacacccccuga

SEQ ID NO: 12114 - RNA, 300 nt, Artificial Sequence
  derived and/or modified CDS sequence (opt4) from LASV(ISTH2271-NIG-2012;Clade II)__AIT17550__Z
augggcaacagacaggccaagcagaccaagguggacgagcaccagagagcccaccuggugcccgacgccagccaccugggcccccaguucugcaagagcugcugguucgagaacagaggccugguggagugcaacaaccacuaccugugccugaacugccugagccugcugcugagcgugagcagcagaugccccaucugcaagaugccccugcccaccaagcugaaggccgccgcccagcccagcgcccccagcaccgagaucacccagaacaccacccccccccccuacacccccuga

SEQ ID NO: 12115 - RNA, 300 nt, Artificial Sequence
  derived and/or modified CDS sequence (opt4) from LASV(ISTH2304-NIG-2012;Clade II)__AIT17554__Z
augggcaacagacaggccaagagcaccaaggccgacgagcaccagagagcccaccuggugcccgacgccagccaccugggcccccaguucugcaagagcugcugguucgagaacagaggccugguggagugcaacaaccacuaccugugccugaacugccugagccugcugcugagcgugagcaacagaugccccaucugcaagaugccccugcccaccagacugaaggccgccgcccagcccagcgcccccagcaccgaggccacccaggacaccacccccccccccuacacccccuga

SEQ ID NO: 12116 - RNA, 300 nt, Artificial Sequence
  derived and/or modified CDS sequence (opt4) from LASV(ISTH2312-NIG-2012;Clade II)__AIT17558__Z
augggcaacagacaggccaagagcaccaagguggacgagcaccagagagcccaccuggugcccgacgccagccaccugggcccccaguucugcaagagcugcugguucgagaacagaggccugguggagugcaacaaccacuaccugugccugaacugccugagccugcugcugagcgugagcagcagaugccccaucugcaagaugccccugcccaccagacugaaggccgccgcccagcccagcgcccccagcaccgaggccaucagaagcaccacccccccccccuacacccccuga

SEQ ID NO: 12117 - RNA, 300 nt, Artificial Sequence
  derived and/or modified CDS sequence (opt4) from LASV(ISTH2358-NIG-2012;Clade II)__AIT17570__Z
augggcaacagacaggccaagagcgccaaggugaacgagcaccagagagcccaccuggugcccgacgccagccaccugggcccccaguucugcaagagcugcugguucgagaacagaggccugguggagugcaacaaccacuaccugugccugaacugccugagccugcugcugagcgugagcagcagaugccccaucugcaagaugccccugcccaccaagcugaaggccgccgcccagcccagcgcccccagcaccgaggccacccagaacaucacccccccccccuacacccccuga

SEQ ID NO: 12118 - RNA, 300 nt, Artificial Sequence
  derived and/or modified CDS sequence (opt4) from LASV(Lassa virus/H.sapiens-wt/NGA/2016/ISTH_0017;Clade II)__AVO03713__Z
augggcaacagacaggccaagagcaccaagguggacgagcaccagagagcccaccuggugcccgacgccagccaccugggcccccaguucugcaagagcugcugguucgagaacagaggccugguggagugcaacaaccacuaccugugccugaacugccugagccugcugcugagcgugagcagcagaugccccaucugcaagaugccccugcccaccaagcugaaggccgccacccagcccagcgcccccagcaccgaggugaaccagaacaccacccccccccccuacacccccuga

SEQ ID NO: 12119 - RNA, 300 nt, Artificial Sequence
  derived and/or modified CDS sequence (opt4) from LASV(Lassa virus/H.sapiens-wt/NGA/2016/ISTH_0035;Clade II)__AVO03731__Z
augggcaacagacaggccaagagcaccaagguggacgagcaccagagagcccaccugcugcccgacgccagccaccugggcccccaguucugcaagagcugcugguucgagaacagaggccugguggagugcaacaaccacuaccugugccugaacugccugagccugcugcugagcgugagcagcagaugccccaucugcaagaugccccugcccaccaagcugaaggccgccacccagcccagcgcccccagcaccgaggccacccagaacaccacccccccccccuacacccccuga

SEQ ID NO: 12120 - RNA, 300 nt, Artificial Sequence
  derived and/or modified CDS sequence (opt4) from LASV(Lassa virus/H.sapiens-wt/NGA/2016/ISTH_0703;Clade II)__AVO03703__Z
augggcaacaagcagaccaagagcaccaagguggacgagcaccagagagcccaccuggugcccgacgccagccaccugggcccccaguucugcaagagcugcugguucgagaacagaggccugguggagugcaacaaccacuaccugugccugaacugccugagccugcugcugagcgugagcagcagaugccccaucugcaagaugccccugcccaccaagcugaaggccgccgcccagcccagcgcccccagcaccgaggccacccagaacaucacccccccccccuacacccccuga

SEQ ID NO: 12121 - RNA, 300 nt, Artificial Sequence
  derived and/or modified CDS sequence (opt4) from LASV(Lassa virus/H.sapiens-wt/NGA/2016/ISTH_0717;Clade II)__AVO03670__Z
augggcggcaagcacagcaagccccccggcgagagcaacagccccagagccagccugauccccgacgccacccaccugggcccccaguucugcaagagcugcugguucgagaacaagggccugguggagugcaacaaccacuaccugugccugaacugccugagccugcugcugagcgugagcaacagaugccccaucugcaagaugccccugcccaccagacugagagccagcaccaaccccaccgccccccaggugggccagaucgaccccaccaaccccccccccuacagccccuga

SEQ ID NO: 12122 - RNA, 300 nt, Artificial Sequence
  derived and/or modified CDS sequence (opt4) from LASV(Lassa virus/H.sapiens-wt/NGA/2016/ISTH_0753;Clade II)__AVO03748__Z
augggcaacagacaggccaagagcaccaagguggacgagcaccagagagcccaccuggugcccgacgccagccaccugggcccccaguucugcaagagcugcugguucgagaacagaggccugguggagugcaacaaccacuaccugugccugaacugccugagccugcugcugagcgugagcaacagaugccccaucugcaagaugccccugcccaccaagcugaaggccgccgcccagcccagcgcccccagcaccgaggccacccaggacaccacccccccccccuacacccccuga

SEQ ID NO: 12123 - RNA, 300 nt, Artificial Sequence
  derived and/or modified CDS sequence (opt4) from LASV(Lassa virus/H.sapiens-wt/NGA/2016/ISTH_0919;Clade II)__AVO03760__Z
augggcaacagacacgccaagcccaccaagguggacgagcaccagagagcccaccuggugcccgacgccagccaccugggcccccaguucugcaagagcugcugguucgagaacaagggccugguggagugcaacaaccacuaccugugccugaacugccugagccugcugcugagcgugagcagcagaugccccaucugcaagaugccccugcccaccaagcugaaggccgccgcccagcccagcgcccccagcgccgaggccacccagaacaccgcccccccccccuacacccccuga

SEQ ID NO: 12124 - RNA, 300 nt, Artificial Sequence
  derived and/or modified CDS sequence (opt4) from LASV(Lassa virus/H.sapiens-wt/NGA/2016/ISTH_1006;Clade II)__AVO03750__Z
augggcaacaagcagaccaagagcaccaagguggacgagcaccagagagcccaccuggugcccgacgccagccaccugggcccccaguucugcaagagcugcugguucgagaacagaggccugguggagugcaacaaccacuaccugugccugaacugccugagccugcugcugagcgugagcagcagaugccccaucugcaagaugccccugcccaccaagcugaagaccguggcccagcccagcgccccccccaccgaggccacccagaacaccacccccccccccuacacccccuga

SEQ ID NO: 12125 - RNA, 297 nt, Artificial Sequence
  derived and/or modified CDS sequence (opt4) from LASV(Lassa virus/H.sapiens-wt/NGA/2016/ISTH_1070;Clade II)__AVO03754__Z
ggcaacagacaggccaagcccaccaagguggacgagcaccagagagcccaccuggugcccgacgccagccaccugggcccccaguucugcaagagcugcugguucgagaacaagggccugguggagugcaacaaccacuaccugugccugaacugccugagccugcugcugggcgugagcagcagaugccccaucugcaagaugccccugcccaccaagcugaaggccgccgcccagcccagcgcccccagcaccgaggccgcccagaacaccgcccccccccccuacgcccccuga

SEQ ID NO: 12126 - RNA, 300 nt, Artificial Sequence
  derived and/or modified CDS sequence (opt4) from LASV(Lassa virus/H.sapiens-wt/NGA/2016/ISTH_1174;Clade II)__AVO03716__Z
augggcaacagacaggccaagagcaccaagguggacgagcaccagagagcccaccuggugcccgacgccagccaccugggcccccaguucugcaagagcugcugguucgagaacagaggccugguggagugcaacaaccacuaccugugccugaacugccugagccugcugcugagcgugagcagcagaugccccaucugcaagaugccccugcccaccaagcugaaggccgccacccagcccagcgccccccccaccgagaccacccagaacaccacccccccccccuacacccccuga

SEQ ID NO: 12127 - RNA, 300 nt, Artificial Sequence
  derived and/or modified CDS sequence (opt4) from LASV(Lassa virus/H.sapiens-wt/NGA/2016/ISTH_1207;Clade II)__AVO03680__Z
augggcaacagacaggccaagagcaccaagguggacgagcaccagagagcccaccuggugcccgacgccagccaccugggcccccaguucugcaagagcugcugguucgagaacagaggccugguggagugcaacaaccacuaccugugccugaacugccugagccugcugcugagcgugagcagcagaugccccaucugcaagaugccccugcccaccaagcugagagccaccgcccagcccagcgcccccagcaccgaggccacccagaacaccacccccccccccuacacccccuga

SEQ ID NO: 12128 - RNA, 300 nt, Artificial Sequence
  derived and/or modified CDS sequence (opt4) from LASV(Lassa virus/H.sapiens-wt/NGA/2016/ISTH_1311;Clade II)__AVO03739__Z
augggcaacagacaggccaagcccaccgaggccaucgagcagaacagagcccaccuggugcccgacgccagccaccugggcccccaguucugcaagagcugcugguucgagaacaagggccugguggagugcaacaaccacuaccugugccugaacugccugagccugcugcugagcgugagcagcagaugccccaucugcaagaugccccugcccaccagacugaaggccagcgcccagcccagcgcccccagcgccgaggccccccagaacgccaagcccccccccuacagccccuga

SEQ ID NO: 12129 - RNA, 300 nt, Artificial Sequence
  derived and/or modified CDS sequence (opt4) from LASV(Lassa virus/H.sapiens-wt/NGA/2016/ISTH_1423;Clade II)__AVO03685__Z
augggcaacaagcaggccaagagcaucaaggccgacgagcaccagagagcccaccuggugcccgacgccagccaccugggcccccaguucugcaagagcugcugguucgagaacagaggccugguggagugcaacaaccacuaccugugccugaacugccugagccugcugcugagcgugagcagcagaugccccaucugcaagaugccccugcccaccaagcugaagaccgccgcccagcccagcgccccccccgugggcgccacccagaacaccacccccccccccuacacccccuga

SEQ ID NO: 12130 - RNA, 300 nt, Artificial Sequence
  derived and/or modified CDS sequence (opt4) from LASV(Lassa virus/H.sapiens-wt/NGA/2016/ISTH_1462;Clade II)__AVO03690__Z
augggcaacaagcagaccaagagcaccaagguggacgagcaccagagagcccaccuggugcccgacgccagccaccugggcccccaguucugcaagagcugcugguucgagaacagaggccugguggagugcaacaaccacuaccugugccugaacugccugagccugcugcugagcgugagcagcagaugccccaucugcaagaugccccugcccaccaagcugaaggccgccgcccagcccagcgcccccagcaccgaggccacccagaacaccacccccccccccuacacccccuga

SEQ ID NO: 12131 - RNA, 300 nt, Artificial Sequence
  derived and/or modified CDS sequence (opt4) from LASV(Lassa virus/H.sapiens-wt/NGA/2016/ISTH_1472;Clade II)__AVO03726__Z
augggcaacaagcagaccaagagcaccaagguggacgagcaccagagagcccaccuggugcccgacgccagccaccugggcccccaguucugcaagagcugcugguucgagaacagaggccugguggagugcaacaaccacuaccugugccugaacugccugagccugcugcugagcgugagcagcagaugccccaucugcaagaugccccugcccaccaagcugaaggccgccgcccagcccagcgccccccccaccgaggccacccagaacaccacccccccccccuacacccccuga

SEQ ID NO: 12132 - RNA, 300 nt, Artificial Sequence
  derived and/or modified CDS sequence (opt4) from LASV(Lassa virus/H.sapiens-wt/NGA/2016/ISTH_1496;Clade II)__AVO03693__Z
augggcaacaagcaggccaagagcaccaagaucgacgaccaccagagagcccaccuggugcccgacgccagccaccugggcccccaguucugcaagagcugcugguucgagaacagaggccugguggagugcaacaaccacuaccugugccugaacugccugagccugcugcugagcgugagcagcagaugccccaucugcaagaugccccugcccaccaagcugaaggccgccgcccagcccagcgcccccagcaccgagaccauccagaacaccacccccccccccuacacccccuga

SEQ ID NO: 12133 - RNA, 300 nt, Artificial Sequence
  derived and/or modified CDS sequence (opt4) from LASV(Lassa virus/H.sapiens-wt/NGA/2016/ISTH_1546;Clade II)__AVO03665__Z
augggcggcaagcagagcagaccccccaagaagguggacagccccagagccaaccugauccccgacgccagcuacaugggcccccaguucugcaagagcugcugguucgagaacaagggccugguggagugcaacaaccacuaccugugccugaacugccugagccugcugcugagcgugagcagcagaugccccaucugcaagaugccccugcccaccaagcugaaggccagcaccagccccaccgccccccccaucaucggcaccaacaccaccaaccccccccccuacagccccuga

SEQ ID NO: 12134 - RNA, 300 nt, Artificial Sequence
  derived and/or modified CDS sequence (opt4) from LASV(Lassa virus/H.sapiens-wt/NGA/2016/ISTH_1568;Clade II)__AVO03711__Z
augggcaacagacaggccagaagcaccaagguggacgagcaccagagagcccaccugcugcccgacgccagccaccugggcccccaguucugcaagagcugcugguucgagaacagaggccugguggagugcaacaaccacuaccugugccugaacugccugagccugcugcugagcgugagcagcagaugccccaucugcaagaugccccugcccaccaagcugaaggccgccacccagcccagcgcccccagcaccgaggccacccagaacaccacccccccccccuacacccccuga

SEQ ID NO: 12135 - RNA, 300 nt, Artificial Sequence
  derived and/or modified CDS sequence (opt4) from LASV(Lassa virus/H.sapiens-wt/NGA/2016/ISTH_1610;Clade II)__AVO03687__Z
augggcaacagacaggccaagagcaccaagguggccgagcaccagagagcccaccuggugcccgacgccagccaccugggcccccaguucugcaagagcugcugguucgagaacaagggccugguggagugcaacaaccacuaccugugccugaacugccugagccugcugcugagcgugagcagcagaugccccaucugcaagaugccccugcccaccaagcugagagccaccgcccagcccagcgccccccccagcgaggccacccagagcaccacccccccccccuacacccccuga

SEQ ID NO: 12136 - RNA, 300 nt, Artificial Sequence
  derived and/or modified CDS sequence (opt4) from LASV(Lassa virus/H.sapiens-wt/NGA/2018/ISTH_0026;Clade II)__AVV65086__Z
augggcaacaagcaggccaagagcaccaagguggacgagcaccagagagcccaccuggugcccgacgccagccaccugggcccccaguucugcaagagcugcugguucgagaacagaggccugguggagugcaacaaccacuaccugugccugaacugccugagccugcugcugagcgugagcagcagaugccccaucugcaagaugccccugcccaccagacugaaggccgccacccagcccagcgcccccagcaccgaggccaccagaaacaccacccccccccccuacacccccuga

SEQ ID NO: 12137 - RNA, 300 nt, Artificial Sequence
  derived and/or modified CDS sequence (opt4) from LASV(Lassa virus/H.sapiens-wt/NGA/2018/ISTH_0097;Clade II)__AVV65091__Z
augggcaacaagcagaccaagagcaccaagguggacgagcaccagagagcccaccuggugcccgacgccagccaccugggcccccaguucugcaagagcugcugguucgagaacagaggccugguggagugcaacaaccacuaccugugccugaacugccugagccugcugcugagcgugagcagcagaugccccaucugcaagaugccccugcccaccaagcugaaggccgccgcccagcccagcgcccccagcaccgaggugacccagaacaccacccccccccccuacacccccuga

SEQ ID NO: 12138 - RNA, 300 nt, Artificial Sequence
  derived and/or modified CDS sequence (opt4) from LASV(Lassa virus/H.sapiens-wt/NGA/2018/ISTH_0664;Clade II)__AVV65093__Z
augggcaacaagcagaccaagagcaccaagguggacgagcaccagagagcccaccuggugcccgacgccagccaccugggcccccaguucugcaagagcugcugguucgagaacagaggccugguggagugcaacaaccacuaccugugccugaacugccugagccugcugcugagcgugagcggcagaugccccaucugcaagaugccccugcccaccaagcugaaggccgccgcccagcccagcgcccccagcaccgaggccacccagaacaccacccccccccccuacacccccuga

SEQ ID NO: 12139 - RNA, 300 nt, Artificial Sequence
  derived and/or modified CDS sequence (opt4) from LASV(Lassa virus/H.sapiens-wt/NGA/2018/ISTH_0959;Clade II)__AVV65084__Z
augggcaacaagcaggccaagagcaccaagguggacgagcaccagagagcccaccuggugcccgacgccagccaccugggcccccaguucugcaagagcugcugguucgagaacagaggccugguggagugcaacaaccacuaccugugccugaacugccugagccugcugcugagcgugagcagcagaugccccaucugcaagaugccccugcccaccaagcugaaggccgccgcccagcccagcgcccccagcaccgaggccauccagagcaccacccccccccccuacacccccuga

SEQ ID NO: 12140 - RNA, 300 nt, Artificial Sequence
  derived and/or modified CDS sequence (opt4) from LASV(Lassa virus/H.sapiens-wt/NGA/2018/ISTH_1079;Clade II)__AVV65074__Z
augggcaacaagcagaccaagagcaccaagguggacgagcaccagagagcccaccuggugcccgacgccagccaccugggcccccaguucugcaagagcugcugguucgagaacaagggccugguggagugcaacaaccacuaccugugccugaacugccugagccugcugcugagcgugagcagcagaugccccaucugcaagaugccccugcccaccaagcugaagaccgccgcccagcccagcgccccccccaccgaggccacccagaacaccacccccccccccuacacccccuga

SEQ ID NO: 12141 - RNA, 300 nt, Artificial Sequence
  derived and/or modified CDS sequence (opt4) from LASV(Lassa virus/H.sapiens-wt/NGA/2018/ISTH_1177;Clade II)__AVV65080__Z
augggcaacagacagaccaagagcaccaagguggacgagcaccagagagcccaccuggugcccgacgccagccaccugggcccccaguucugcaagagcugcugguucgagaacaagggccugguggagugcaacaaccacuaccugugccugaacugccugagccugcugcugagcgugagcagcagaugccccaucugcaagaugccccugcccaccaagcugaaggccgccgcccagcccagcgcccccagcaccgaggccgcccagaacaccgcccccccccccuacgcccccuga

SEQ ID NO: 12142 - RNA, 300 nt, Artificial Sequence
  derived and/or modified CDS sequence (opt4) from LASV(Lassa virus/H.sapiens-wt/NGA/2018/ISTH_1375;Clade II)__AVV65078__Z
augggcaacagacacgccaagagcaccaagaucaacgagcaccagagagcccaccuggugcccgacgccagccaccugggcccccaguucugcaagagcugcugguucgagaacagaggccugguggagugcaacaaccacuaccugugccugaacugccugagccugcugcugagcgugagcagcagaugccccaucugcaagaugccccugcccaccaagcugaaggccgccgcccagcccagcgcccccagcaccgaggccauccagaacaccacccccccccccuacacccccuga

SEQ ID NO: 12143 - RNA, 300 nt, Artificial Sequence
  derived and/or modified CDS sequence (opt4) from LASV(LASV003-NIG-2008;Clade II)__AIT17578__Z
augggcaacagacaggccaagagcaccaagguggacgagcaccagagagcccaccuggugcccgacgccagccaccugggcccccaguucugcaagagcugcugguucgagaacaagggccugguggagugcaacaaccacuaccugugccugaacugccugagccugcugcugagcgugagcagcagaugccccaucugcaagaugccccugcccaccaagcugagagccgccgcccagcccagcgcccccagcaccgagagcgcccagaacaccgcccccccccccuacgcccccuga

SEQ ID NO: 12144 - RNA, 300 nt, Artificial Sequence
  derived and/or modified CDS sequence (opt4) from LASV(LASV035-NIG-2009;Clade II)__AIT17586__Z
augggcaacaagcaggccaagagcaccaagguggacgagcaccagagagcccaccuggugcccgacgccagccaccugggcccccaguucugcaagagcugcugguucgagaacagaggccugguggagugcaacaaccacuaccugugccugaacugccugagccugcugcugagcgugagcagcagaugccccaucugcaagaugccccugcccaccagacugaaggccgccgcccagcccagcgcccccagcaccgaggugacccagaacaccacccccccccccuacacccccuga

SEQ ID NO: 12145 - RNA, 300 nt, Artificial Sequence
  derived and/or modified CDS sequence (opt4) from LASV(LASV042-NIG-2009;Clade II)__AIT17590__Z
augggcaacagacaggccaagagcaccaagguggacgagcaccagagagcccaccuggugcccgacgccagccaccugggcccccaguucugcaagagcugcugguucgagaacaagggccugguggagugcaacaaccacuaccugugccugaacugccugagccugcugcugagcgugagcagcagaugccccaucugcaagaugccccugcccaccaagcuggaggccaccacccagcccagcgcccccagcaccgaggagacccagagcaccacccccccccccuacacccccuga

SEQ ID NO: 12146 - RNA, 300 nt, Artificial Sequence
  derived and/or modified CDS sequence (opt4) from LASV(LASV049-NIG-2009;Clade II)__AIT17602__Z
augggcaacaagcaggccaagagcaccaagguggacgaguaccagagagcccaccuggugcccgacgccagccaccugggcccccaguucugcaagagcugcugguucgagaacagaggccugguggagugcaacaaccacuaccugugccugaacugccugagccugcugcugagcgugagcaacagaugccccaucugcaagaugccccugcccaccagacugaaggccgccgcccagcccagcgccccccccaccgaggccacccagaacaccacccccccccccuacacccccuga

SEQ ID NO: 12147 - RNA, 300 nt, Artificial Sequence
  derived and/or modified CDS sequence (opt4) from LASV(LASV056-NIG-2008;Clade II)__AIT17610__Z
augggcaacagacaggccaagcccaccaagguggacgagcaccagagagcccagcuggugcccgacgccagccaccugggcccccaguucugcaagagcugcugguucgagaacagaggccugguggagugcaacaaccacuaccugugccugaacugccugagccugcugcugagcgugagcagcagaugccccaucugcaagaugccccugcccaccaagcugaaggccgccacccagcccagcgcccccagcaccgaggccacccagaacagcacccccccccccuacacccccuga

SEQ ID NO: 12148 - RNA, 300 nt, Artificial Sequence
  derived and/or modified CDS sequence (opt4) from LASV(LASV058-NIG-2008;Clade II)__AIT17614__Z
augggcaacagacaggccaagagcaccaagguggacgagcaccagagagcccaccuggugcccgacgccagccaccugggcccccaguucugcaagagcugcugguucgagaacagaggccugguggagugcaacaaccacuaccugugccugaacugccugagccugcugcugagcgugagcagcagaugccccaucugcaagaugccccugcccaccaagcugaaggccgccacccagcccagcgcccccagcaccgaggccacccagaacaccacccccccccccuacacccccuga

SEQ ID NO: 12149 - RNA, 300 nt, Artificial Sequence
  derived and/or modified CDS sequence (opt4) from LASV(LASV063-NIG-2009;Clade II)__AIT17618__Z
augggcaacagacaggccaagagcaccgagguggacgagcaccagagagcccaccuggugcccgacgccagccaccugggcccccaguucugcaagagcugcugguucgagaacagaggccugguggagugcaacaaccacuaccugugccugaacugccugagccugcugcugagcgugagcaacagaugccccaucugcaagaugccccugcccaccaagcugaaggccgccacccagcccagcgcccccagcaccgaggccacccagaacaccacccccccccccuacacccccuga

SEQ ID NO: 12150 - RNA, 300 nt, Artificial Sequence
  derived and/or modified CDS sequence (opt4) from LASV(LASV1000-NIG-2009;Clade II)__AIT17780__Z
augggcaacagacagaccaagagcaccaagguggacgagcaccagagagccuaccuggugcccgacgccagccugcugggcccccaguucugcaagagcugcugguucgagaacaagggccugguggagugcaacaaccacuaccugugccugaacugccugagccugcugcugagcgugagcagcagaugccccaucugcaagaugccccugcccaccagacugaaggccgccgcccagcccagcgccccccccaccgaggccauccagaacaccacccccccccccuacacccccuga

SEQ ID NO: 12151 - RNA, 300 nt, Artificial Sequence
  derived and/or modified CDS sequence (opt4) from LASV(LASV1008-NIG-2009;Clade II)__AIT17784__Z
augggcaacagacagaccaagcccaccaagguggacgagcaccagagagcccaccuggugcccgacgccagccaccugggcccccaguucugcaagagcugcugguucgagaacaagggccugguggagugcaacaaccacuaccugugccugaacugccugagccugcugcugagcgugagcagcagaugccccaucugcaagaugccccugcccaccaagcugaaggccaccgcccagcccagcgcccccagcaccgaggccgcccagaacaccgcccccccccccuacgcccccuga

SEQ ID NO: 12152 - RNA, 300 nt, Artificial Sequence
  derived and/or modified CDS sequence (opt4) from LASV(LASV1011-NIG-2009;Clade II)__AIT17788__Z
augggcaacagacaggugaagagcaccaagguggacgagcaccagagagcccaccuggugcccgacgccagccaccugggcccccaguucugcaagagcugcugguucgagaacagaggccugguggagugcaacaaccacuaccugugccugaacugccugagccugcugcugagcgugagcagcagaugccccaucugcaagaugccccugcccaccaagcugaaggccgccacccagcccagcgccccccccaccgaggccacccagaagaccacccccccccccuacacccccuga

SEQ ID NO: 12153 - RNA, 300 nt, Artificial Sequence
  derived and/or modified CDS sequence (opt4) from LASV(LASV1015-NIG-2009;Clade II)__AIT17792__Z
augggcaacaagcaggccaagagcaccaagguggacgagcaccagagagcccaccuggugcccgacgccagccaccugggcccccaguucugcaagagcugcugguucgagaacagaggccugguggagugcaacaaccacuaccugugccugaacugccugagccugcugcugagcgugagcggcagaugccccaucugcaagaugccccugcccaccaagcugaaggccaccgcccagcccagcgcccccagcaccgaggccacccagaacaccacccccccccccuacacccccuga

SEQ ID NO: 12154 - RNA, 300 nt, Artificial Sequence
  derived and/or modified CDS sequence (opt4) from LASV(LASV1016-NIG-2009;Clade II)__AIT17796__Z
augggcaacaagcaggccaagagcaccaagguggacgagcaccagagagcccaccuggugcccgacgccagccaccugggcccccaguucugcaagagcugcugguucgagaacagaggccugguggagugcaacaaccacuaccugugccugaacugccugagccugcugcugagcgugagcagcagaugccccaucugcaagaugccccugcccaccaagcugaaggccgccgcccagcccagcgcccccagcaccgaggccauccagaacaccacccccccccccuacacccccuga

SEQ ID NO: 12155 - RNA, 300 nt, Artificial Sequence
  derived and/or modified CDS sequence (opt4) from LASV(LASV221-NIG-2010;Clade II)__AIT17622__Z
augggcaacagacaggccaagagcaccaagguggacgagcaccagagagcccaccuggugcccgacgccagccaccugggcccccaguucugcaagagcugcugguucgagaacagaggccugguggagugcaacaaccacuaccugugccugaacugccugagccugcugcugagcgugagcagcagaugccccaucugcaagaugccccugcccaccaagcugaaggccgccacccagcccagcgcccccagcaccgaggugacccagaacaccauccccccccccuacagccccuga

SEQ ID NO: 12156 - RNA, 300 nt, Artificial Sequence
  derived and/or modified CDS sequence (opt4) from LASV(LASV225-NIG-2010;Clade II)__AIT17628__Z
augggcaacaagcaggccaagagcaccaagaucgacgagcaccagagagcccaccuggugcccgacgccagccaccugggcccccaguucugcaagagcugcugguucgagaacagaggccugguggagugcaacaaccacuaccugugccugaacugccugagccugcugcugagcgugagcagcagaugccccaucugcaagaugccccugcccaccagacugaaggccgccacccagcccagcgcccccagcaccgaggccacccagaacaccacccccccccccuacacccccuga

SEQ ID NO: 12157 - RNA, 300 nt, Artificial Sequence
  derived and/or modified CDS sequence (opt4) from LASV(LASV229-NIG-2010;Clade II)__AIT17632__Z
augggcaacagacaggccaagagcaccaagguggacgagcaccagagagcccaccuggugcccgacgccagccaccugggcccccaguucugcaagagcugcugguucgagaacaagggccugguggagugcaacaaccacuaccugugccugaacugccugagccugcugcugagcgugagcagcagaugccccaucugcaagaugccccugcccaccaagcugagagccaccgcccagcccagcgcccccagcaccgaggccauccagaacaccacccccccccccuacacccccuga

SEQ ID NO: 12158 - RNA, 300 nt, Artificial Sequence
  derived and/or modified CDS sequence (opt4) from LASV(LASV237-NIG-2010;Clade II)__AIT17636__Z
augggcaacagacaggccaagagcaccaagguggacgagcaccagagagcccaccuggugcccgacgccagccaccugggcccccaguucugcaagagcugcugguucgagaacagaggccugguggagugcaacaaccacuaccugugccugaacugccugagccugcugcugagcgugagcagcagaugccccaucugcaagaugccccugcccaccaagcugaaggccgccgcccagcccagcgcccccagcaucgagaccauccagaacaccacccccccccccuacacccccuga

SEQ ID NO: 12159 - RNA, 300 nt, Artificial Sequence
  derived and/or modified CDS sequence (opt4) from LASV(LASV239-NIG-2010;Clade II)__AIT17640__Z
augggcaacagacaggccaagagcaccaaggugggcgagcaccagagagcccaccuggugcccgacgccagccaccugggcccccaguucugcaagagcugcugguucgagaacagaggccugguggagugcaacaaccacuaccugugccugaacugccugagccugcugcugagcgugagcagcagaugccccaucugcaagaugccccugcccaccaagcugaaggccgccgcccagcccagcgcccccagcaccgaggccacccaggacaccacccccccccccuacacccccuga

SEQ ID NO: 12160 - RNA, 300 nt, Artificial Sequence
  derived and/or modified CDS sequence (opt4) from LASV(LASV242-NIG-2010;Clade II)__AIT17648__Z
augggcaacagacaggccaagagcaccaagguggacgagcaccagagagcccaccuggugcccgacgccagccaccugggcccccaguucugcaagagcugcugguucgagaacaagggccugguggagugcaacaaccacuaccugugccugaacugccugagccugcugcugagcgugagcagcagaugccccaucugcaagaugccccugcccaccaagcugaaggccaccgugcagcccagcgcccccagcaccgaggccgcccagagcaccgcccccccccccuacgcccccuga

SEQ ID NO: 12161 - RNA, 300 nt, Artificial Sequence
  derived and/or modified CDS sequence (opt4) from LASV(LASV245-NIG-2011;Clade II)__AIT17652__Z
augggcaacagacaggccaagagcaccaaggugggcgagcaccagagagcccaccuggugcccgacgccagccaccugggcccccaguucugcaagagcugcugguucgagaacagaggccugguggagugcaacaaccacuaccugugccugaacugccugagccugcugcugagcgugagcagcagaugccccaucugcaagaugccccugcccaccaagcugaaggccgccgcccagcccagcgcccccagcgccgaggccauccagaagaccacccccccccccuacacccccuga

SEQ ID NO: 12162 - RNA, 300 nt, Artificial Sequence
  derived and/or modified CDS sequence (opt4) from LASV(LASV246-NIG-2010;Clade II)__AIT17656__Z
augggcaacagacaggccaagagcaccaagguggacgaccaccagagagcccaccuggugcccgacgccagccaccugggcccccaguucugcaagagcugcugguucgagaacagaggccugguggagugcaacaaccacuaccugugccugaacugccugagccugcugcugagcgugagcagcagaugccccaucugcaagaugccccugcccaccaagcugaaggccgccgcccagcccagcgcccccagcaccgaggccgcccaggacaccacccccccccccuacacccccuga

SEQ ID NO: 12163 - RNA, 300 nt, Artificial Sequence
  derived and/or modified CDS sequence (opt4) from LASV(LASV250-NIG-2011;Clade II)__AIT17660__Z
augggcaacagacaggccaagagcaccaagguggacgagcaccagagagcccaccuggugcccgacgccagccaccugggcccccaguucugcaagagcugcugguucgagaacagaggccugguggagugcaacaaccacuaccugugccugaacugccugagccugcugcugagcgugagcaacagaugccccaucugcaagaugccccugcccaccaagcugaaggccgccgcccagcccagcgcccccagcaccgaggccauccagaacaccacccccccccccuacgcccccuga

SEQ ID NO: 12164 - RNA, 300 nt, Artificial Sequence
  derived and/or modified CDS sequence (opt4) from LASV(LASV251-NIG-2010;Clade II)__AIT17664__Z
augggcaacaagcaggccaagagcaccaagguggacgagcaccagagagcccaccuggugcccgacgccagccaccugggcccccaguucugcaagagcugcugguucgagaacaagggccugguggagugcaacaaccacuaccugugccugaacugccugagccugcugcugagcgugagcagcagaugccccaucugcaagaugccccugcccaccaagcugaaggccgccgcccagcccagcgcccccagcaccgaggccgcccagaacaccgcccccccccccuacgcccccuga

SEQ ID NO: 12165 - RNA, 300 nt, Artificial Sequence
  derived and/or modified CDS sequence (opt4) from LASV(LASV253-NIG-2011;Clade II)__AIT17668__Z
augggcaacagacaggccaagagcaccaagguggacgagcaccagagagcccaccuggugcccgacgccagccaccugggcccccaguucugcaagagcugcugguucgagaacaagggccugguggagugcaacaaccacuaccugugccugaacugccugagccugcugcugagcgugagcagcagaugccccaucugcaagaugccccugcccaccaagcugaagaccaccgcccagcccagcgccccccccaccgaggccgccaagaacaccgcccccccccccuacgcccccuga

SEQ ID NO: 12166 - RNA, 300 nt, Artificial Sequence
  derived and/or modified CDS sequence (opt4) from LASV(LASV256-NIG-2010;Clade II)__AIT17676__Z
augggcaacagacaggccaagagcaccaagguggacgagcaccagagagcccaccuggugcccgacgccagccaccugggcccccaguucugcaagagcugcugguucgagaacagaggccugguggagugcaacaaccacuaccugugccugaacugccugagccugcugcugagcgugagcagcagaugccccaucugcaagaugccccugcccaccaagcugaaggccgccacccagcccagcgcccccagcaccgaggugacccagaacaccacccccccccccuacacccccuga

SEQ ID NO: 12167 - RNA, 300 nt, Artificial Sequence
  derived and/or modified CDS sequence (opt4) from LASV(LASV263-NIG-2011;Clade II)__AIT17680__Z
augggcaacagacaggccaagagcaccaagaucgacgagcaccagagagcccaccuggugcccgacgccagccaccugggcccccaguucugcaagagcugcugguucgagaacagaggccugguggagugcaacaaccacuaccugugccugaacugccugagccugcugcugagcgugagcagcagaugccccaucugcaagaugccccugcccaccaagcugaaggccgccgcccagcccagcgcccccagcaccgaggccauccagaacaccacccccccccccuacacccccuga

SEQ ID NO: 12168 - RNA, 300 nt, Artificial Sequence
  derived and/or modified CDS sequence (opt4) from LASV(LASV267-NIG-2010;Clade II)__AIT17684__Z
augggcaacagacaggccaagagcgccaagguggacgagcaccagagagcccaccuggugcccgacgccagccaccugggcccccaguucugcaagagcugcugguucgagaacaagggccugguggagugcaacaaccacuaccugugccugaacugccugagccugcugcugagcgugagcugcagaugccccaucugcaagaugccccugcccaccaagcugaaggccgccacccagcccagcgcccccagcaccgaggccacccagaacaccacccccccccccuacacccccuga

SEQ ID NO: 12169 - RNA, 300 nt, Artificial Sequence
  derived and/or modified CDS sequence (opt4) from LASV(LASV274-NIG-2010;Clade II)__AIT17692__Z
augggcaacagacacgccaagcccaccaagguggacgagcaccagagagcccaccuggugcccgacgccagccaccugggcccccaguucugcaagagcugcugguucgagaacagaggccugguggagugcaacaaccacuaccugugccugaacugccugagccugcugcugagcgugagcagcagaugccccaucugcaagaugccccugcccaccaagcugaaggccgccgcccagcccagcgcccccagcaccgaggccauccagaacaccacccccccccccuacacccccuga

SEQ ID NO: 12170 - RNA, 300 nt, Artificial Sequence
  derived and/or modified CDS sequence (opt4) from LASV(LASV719-NIG-2009;Clade II)__AIT17702__Z
augggcaacagacacgccaagagcaccaagguggacgagcaccagagagcccaccuggugcccgacgccagccaccugggcccccaguucugcaagagcugcugguucgagaacagaggccugguggagugcaacaaccacuaccugugccugaacugccugagccugcugcugagcgugagcagcagaugccccaucugcaagaugccccugcccaccaagcugaaggccgccgcccagcccagcgcccccagcaccgaggccuuccagaacaccacccccccccccuacacccccuga

SEQ ID NO: 12171 - RNA, 300 nt, Artificial Sequence
  derived and/or modified CDS sequence (opt4) from LASV(LASV737-NIG-2009;Clade II)__AIT17708__Z
augggcaacagacacgccaagagcaccaagguggacgagcaccagagagcccaccuggugcccgacgccagccaccugggcccccaguucugcaagagcugcugguucgagaacagaggccugguggagugcaacaaccacuaccugugccugaacugccugagccugcugcugagcgugagcagcagaugccccaucugcaagaugccccugcccaccaagcugaaggccgccacccagcccagcgcccccagcaccgaggccauccagaacaccacccccccccccuacacccccuga

SEQ ID NO: 12172 - RNA, 300 nt, Artificial Sequence
  derived and/or modified CDS sequence (opt4) from LASV(LASV966-NIG-2009;Clade II)__AIT17716__Z
augggcaacagacccgccaagagcaccaagguggacgagcaccagagagcccaccuggugcccgacgccagccaccugggcccccaguucugcaagagcugcugguucgagaacagaggccugguggagugcaacaaccacuaccugugccugaacugccugagccugcugcugagcgugagcagcagaugccccaucugcaagaugccccugcccaccaagcugaaggccgccgcccagcccagcgcccccagcaccgaggccacccagaacaccacccccccccccuacacccccuga

SEQ ID NO: 12173 - RNA, 300 nt, Artificial Sequence
  derived and/or modified CDS sequence (opt4) from LASV(LASV967-NIG-2009;Clade II)__AIT17720__Z
augggcaacagacaggccaagcccaccaagguggacgagcaccagagagcccaccuggugcccgacgccagccaccugggcccccaguucugcaagagcugcugguucgagaacagaggccugguggagugcaacaaccacuaccugugccugaacugccugagccugcugcugagcgugagcagcagaugccccaucugcaagaugccccugcccaccagacugaaggccgccgcccagcccagcgcccccagcaccgaggagacccagaacaccacccccccccccuacacccccuga

SEQ ID NO: 12174 - RNA, 300 nt, Artificial Sequence
  derived and/or modified CDS sequence (opt4) from LASV(LASV975-NIG-2009;Clade II)__AIT17730__Z
augggcaacagacaggccaagagcaccaagguggacgagcaccagagagcccaccuggugcccgacgccagccaccugggcccccaguucugcaagagcugcugguucgagaacagaggccugguggagugcaacaaccacuaccugugccugaacugccugagccugcugcugagcgugagcagcagaugccccaucugcaagaugccccugcccaccaagcugaaggccgccgcccagcccagcgccccccugaccgaggccauccagaacaccacccccccccccuacacccccuga

SEQ ID NO: 12175 - RNA, 300 nt, Artificial Sequence
  derived and/or modified CDS sequence (opt4) from LASV(LASV976-NIG-2009;Clade II)__AIT17734__Z
augggcaacagacaggccaagagcaccaagguggacgagcaccagagagcccaccuggugcccgacgccagccaccugggcccccaguucugcaagagcugcugguucgagaacagaggccugguggagugcaacaaccacuaccugugccugaacugccugagccugcugcugagcgugagcagcagaugccccaucugcaagaugccccugcccaccaagcugaaggccgccgcccagcccagcgcccccagcaccgaggccauccagaacaccacccccccccccuacacccccuga

SEQ ID NO: 12176 - RNA, 300 nt, Artificial Sequence
  derived and/or modified CDS sequence (opt4) from LASV(LASV977-NIG-2009;Clade II)__AIT17738__Z
augggcaacagacaggccaagagcaccaagguggacgagcaccagagagcccaccuggugcccgacgccagccaccugggcccccaguucugcaagagcugcugguucgagaacagaggccugguggagugcaacaaccacuaccugugccugaacugccugagccugcugcugagcgugagcagcagaugccccaucugcaagaugccccugcccaccaagcugaaggccgccacccugcccagcgcccccagcaccgaggugacccagaacaccaccccccccccccacagccccuga

SEQ ID NO: 12177 - RNA, 300 nt, Artificial Sequence
  derived and/or modified CDS sequence (opt4) from LASV(LASV981-NIG-2009;Clade II)__AIT17750__Z
augggcaacagacaggccaagagcgccaaggugaacgagcaccagagagcccaccuggugcccgacgccagccaccugggcccccaguucugcaagagcugcugguucgagaacagaggccugguggagugcaacaaccacuaccugugccugaacugccugagccugcugcugagcgugagcagcagaugccccaucugcaagaugccccugcccaccaagcugaaggccgccacccagcccagcgcccccagcaccgaggccacccagaacaccacccccccccccuacacccccuga

SEQ ID NO: 12178 - RNA, 300 nt, Artificial Sequence
  derived and/or modified CDS sequence (opt4) from LASV(LASV982-NIG-2009;Clade II)__AIT17754__Z
augggcaacagacaggccaagagcaccaagguggacgagcaccagagagcccaccuggugcccgacgccagccaccugggcccccaguucugcaagagcugcugguucgagaacaagggccugguggagugcaacaaccacuaccugugccugaacugccugagccugcugcugagcgugagcagcagaugccccaucugcaagaugccccugcccaccaagcugaaggccagcgcccagcccagcgcccccagcaccgaggccgcccagaacaccgcccccccccccuacgcccccuga

SEQ ID NO: 12179 - RNA, 300 nt, Artificial Sequence
  derived and/or modified CDS sequence (opt4) from LASV(LASV989-NIG-2009;Clade II)__AIT17760__Z
augggcaacagacaggccaagagcaccagaaccgacgagcaccagagagcccaccuggugcccgacgccagccaccugggcccccaguucugcaagagcugcugguucgagaacaagggccugguggagugcaacaaccacuaccugugccugaacugccugagccugcugcugagcgugagcagcagaugccccaucugcaagaugccccugcccaccaagcugaaggccgccgcccagcccagcgcccccagcaccgaggccggccagaacaccgcccccccccccuacgcccccuga

SEQ ID NO: 12180 - RNA, 300 nt, Artificial Sequence
  derived and/or modified CDS sequence (opt4) from LASV(LASV991-NIG-2009;Clade II)__AIT17768__Z
augggcaacagacaggccaagagcgccaccguggacgagugccagagagcccaccuggugcccgacgccagcuaccugggcccccaguucugcaagagcugcugguucgagaacaagggccugguggagugcaacaaccacuaccugugccugaacugccugagccugcugcugagcgugagcagcagaugccccaucugcaagaugccccugcccaccaagcugaaggccgccgcccagcccagcgcccccagcaccagagccacccagaacaccacccccccccccuacacccccuga

SEQ ID NO: 12181 - RNA, 300 nt, Artificial Sequence
  derived and/or modified CDS sequence (opt4) from LASV(LASV993-NIG-2009;Clade II)__AIT17776__Z
augggcaacaagcaggccaagagcaccaagguggacgagcaccagagagcccaccuggugcccgacgccagccaccugggcccccaguucugcaagagcugcugguucgagaacaagggccugguggagugcaacaaccacuaccugugccugaacugccugagccugcugcugagcgugagcagcagaugccccaucugcaagaugccccugcccaccagacugaaggccgccgcccagcccagcgcccccagcaccgaggccacccagaacgccgcccccccccccuacgcccccuga

SEQ ID NO: 12182 - RNA, 300 nt, Artificial Sequence
  derived and/or modified CDS sequence (opt4) from LASV(Nig08-A41;Clade II)__ADU56628__Z
augggcaacagacaggccaagagcaccaagguggacgagcaccagagagcccaccuggugcccgacgccagccaccugggcccccaguucugcaagagcugcugguucgagaacagaggccugguggagugcaacaaccacuaccugugccugaacugccugagccugcugcugagcgugagcagcagaugccccaucugcaagaugccccugcccaccaagcugaaggccgccgcccagcccagcgcccccagcaccgaggccauccagaacaccacccccccccccuacgcccccuga

SEQ ID NO: 12183 - RNA, 300 nt, Artificial Sequence
  derived and/or modified CDS sequence (opt4) from LASV(CSF;Clade III)__AAO59514__Z
augggcaacaagcaggugagaagcaugaagaagguggacagccccagagccagccugauccccgacgccagccaccugggcccccaguucugcaagagcugcugguucgagaacagaggccugguggagugcaacaaccacuaccugugccugaacugccugagccugcugcugagcgugagcagcagaugccccaucugcaagaugccccugcccaccaagcugaagaccagcaccacccccaccgcccccagcaucagagaggccaacaccaccagccccccccccuacagccccuga

SEQ ID NO: 12184 - RNA, 300 nt, Artificial Sequence
  derived and/or modified CDS sequence (opt4) from LASV(Nig08-A18;Clade III)__ADU56616__Z
augggcggcaagcacaccaagcagcccagagagagcaacagccccagagccagccugauccccgacgccacccaccugggcccccaguucugcaagagcugcugguucgagaacaagggccugguggagugcaacaaccacuaccugugccugaacugccugagccugcugcugagcgugagcaacagaugccccaucugcaagaugccccugcccaccagacugagaaccagcaccaaccccaccgccccccagguggagcagaccggccccgccagccccccccccuacagccccuga

SEQ ID NO: 12185 - RNA, 300 nt, Artificial Sequence
  derived and/or modified CDS sequence (opt4) from LASV(ONM-299;Clade III)__ANH09755__Z
augggcaacaagcagaccaagaccaucaagaagaccgacagccccagagccagccugauccccgacgccagccacaugggcccccaguucugcaagagcugcugguucgagaacagaggccugguggagugcaacaaccacuaccugugccugaacugccugagccugcugcugagcgugagcaacagaugccccaucugcaagaugccccugcccaccaagcugagagccagccccagccccaccgcccccagcaucagagaggccaacaucaccaaccccccccccuacagccccuga

SEQ ID NO: 12186 - RNA, 300 nt, Artificial Sequence
  derived and/or modified CDS sequence (opt4) from LASV(ONM-700;Clade III)__ANH09759__Z
augggcaacaagcagaccaagaccaccaagaagaccgacagccccagagccagccugauccccgacgccagccacaugggcccccaguucugcaagagcugcugguucgagaacagaggccugguggagugcaacaaccacuaccugugccugaacugccugagccugcugcugagcgugagcaacagaugccccaucugcaagaugccccugcccaccaagcugagagccagccccagccccaccgcccccagcaucagagaggccaacaucaccaaccccccccccuacagccccuga

SEQ ID NO: 12187 - RNA, 300 nt, Artificial Sequence
  derived and/or modified CDS sequence (opt4) from LASV(BA366;Clade IV)__ADU56644__Z
augggcaacagacagaccaaggcccccgaggccaagggcagccccagagccagccugauccccgacgccacccaccugggcccccaguucugcaagagcugcugguucgagaacaagggccugguggagugcaacgaccacuaccugugccugaacugccugacccugcugcugagcgugagcagcagaugccccaucugcaagaugccccugcccaccagacugagacccagcaccaaccccaccgccccccccgccagagccgagggcggcaucaaccccccccccuacagccccuga

SEQ ID NO: 12188 - RNA, 300 nt, Artificial Sequence
  derived and/or modified CDS sequence (opt4) from LASV(G1180-SLE-2010;Clade IV)__AIT17166__Z
augggcaacaagcaggccaaggcccccgaggccaaggacagccccagagccagccugauccccgacgccacccaccugggcccccaguucugcaagagcugcugguucgagaccaagggccugguggagugcaacaaccacuaccugugccugaacugccugacccugcugcugagcgugagcaacagaugccccaucugcaagaugccccugcccaccaagcugagacccagcgccacccccaccgccccccccaccgaggccgccgacagcaucggccccccccccuacagccccuga

SEQ ID NO: 12189 - RNA, 300 nt, Artificial Sequence
  derived and/or modified CDS sequence (opt4) from LASV(G1190-SLE-2010;Clade IV)__AIT17170__Z
augggcaacaagcaggccaaggugcccgagagcaaggacagccccagagccagccugauccccgacgccacccaccugggcccccaguucugcaagagcugcugguucgagaacaagggccugguggagugcaacaaccacuaccugugccugaacugccugacccugcugcugagcgugagcaacagaugccccaucugcaagaugccccugcccaccaagcugagacccagcgccgcccccaccgccccccccgccggcgccgccgacagcaucagacccccccccuacagccccuga

SEQ ID NO: 12190 - RNA, 300 nt, Artificial Sequence
  derived and/or modified CDS sequence (opt4) from LASV(G1200-LIB-2010;Clade IV)__AIT17174__Z
augggcaacaagcagaccaaggcccccgaggccaagggcagccccagagccagccugauccccgacgccacccaccugggcccccaguucugcaagagcugcugguucgagaacaagggccugguggagugcaacaaccacuaccugugccugaacugccugacccugcugcugagcgugagcagcagaugccccaucugcaagaugccccugcccaccaagcugagacccagcgccgugcccaccgccccccccaccaaggccgaggacaacaccagacccccccccuacagccccuga

SEQ ID NO: 12191 - RNA, 300 nt, Artificial Sequence
  derived and/or modified CDS sequence (opt4) from LASV(G1442-SLE-2011;Clade IV)__AIT17178__Z
augggcaacaagcaggccaaggccagcgaggccaaggacagccccagagccagccugauccccgacgccacccaccugggcccccaguucugcaagagcugcugguucgagaacaagggccugguggagugcaacaaccacuaccugugccugaacugccugagccugcugcugagcgugagcagcagaugccccaucugcaagaugccccugcccaccagacugagacccagcaccgcccccaccgccccccccgccagagccggcgacaacaucaagcccccccccuacagccccuga

SEQ ID NO: 12192 - RNA, 300 nt, Artificial Sequence
  derived and/or modified CDS sequence (opt4) from LASV(G1529-SLE-2011;Clade IV)__AIT17182__Z
augggcaacaagcaggccaaggugcccgaggugagagacagccccagagccagccugauccccgacgccacccaccugggcccccaguucugcaagagcugcugguucgagaacaagggccugguggagugcaacaaccacuaccugugccugaacugccugacccugcugcugagcgugagcagcagaugccccaucugcaagaugccccugcccaccaagcugagacccagcgccacccccaccgccccccccgccggcgccggcgacggcaccagacccccccccuacagccccuga

SEQ ID NO: 12193 - RNA, 300 nt, Artificial Sequence
  derived and/or modified CDS sequence (opt4) from LASV(G1618-SLE-2011;Clade IV)__AIT17186__Z
augggcaacaagcaggccaagacccccgagaccaaggacagccccagagccagccugauccccgacgccacccaccugggcccccaguucugcaagagcugcugguucgagaacaagggccugguggagugcaacaaccacuaccugugccugaacugccugacccugcugcugagcgugagcaacagaugccccaucugcaagaugccccugcccaccaagcugagacccagcguggcccccaccgccccccccgccggcgccgccgacaacaccagacccccccccuacagccccuga

SEQ ID NO: 12194 - RNA, 300 nt, Artificial Sequence
  derived and/or modified CDS sequence (opt4) from LASV(G1647-SLE-2011;Clade IV)__AIT17194__Z
augggcaacaagcaggccaaggcccccgagcccaaggacagccccagagccagccugauccccgacgccacccaccugggcccccaguucugcaagagcugcugguucgagaacaagggccugguggagugcaacaaccacuaccugugccugaacugccugacccugcugcugagcgugagcaacagaugccccaucugcaagaugccccugcccaccaagcugagacccagcguggcccccaccgccccccccgccggcgugguggacagcaccagacccccccccuacagccccuga

SEQ ID NO: 12195 - RNA, 300 nt, Artificial Sequence
  derived and/or modified CDS sequence (opt4) from LASV(G1727-SLE-2011;Clade IV)__AIT17198__Z
augggcaacaagcaggccaaggugcccgagagcaaggacagccccagagccagccugauccccgacgccacccaccugggcccccaguucugcaagagcugcugguucgagaacagaggccugguggagugcaacaaccacuaccugugccugaacugccugacccugcugcugagcgugagcaacagaugccccaucugcaagaugccccugcccaccaagcugagacccagcaccgcccccaccgccccccccaccggcgccgccgacagcaccagacccccccccuacagccccuga

SEQ ID NO: 12196 - RNA, 300 nt, Artificial Sequence
  derived and/or modified CDS sequence (opt4) from LASV(G1774-SLE-2011;Clade IV)__AIT17202__Z
augggcaacaagcaggccaagacccccgagagcaaggacagccccagagccagccugauccccgacgccacccaccugggcccccaguucugcaagagcugcugguucgagaacaagggccugguggagugcaacaaccacuaccugugccugaacugccugacccugcugcugagcgugagcaacagaugccccaucugcaagaugccccugcccaccagacugagacccagcgccgcccccaccgccccccccagcggcgccgccgacagcaccagacccccccccuacagccccuga

SEQ ID NO: 12197 - RNA, 300 nt, Artificial Sequence
  derived and/or modified CDS sequence (opt4) from LASV(G1792-SLE-2011;Clade IV)__AIT17206__Z
augggcaacaagcaggccaaggcccccgaggccaaggacagccccagagccagccugauccccgacgccacccaccugggcccccaguucugcaagagcugcugguucgagaacaagggccugguggagugcaacaaccacuaccugugccugaacugccugacccugcugcugagcgugagcuacagaugccccaucugcaagaugccccugcccaccaagcugagacccagcgccacccccaccgccccccccaccgaggccgccgacagcaucagacccccccccuacagacccuga

SEQ ID NO: 12198 - RNA, 300 nt, Artificial Sequence
  derived and/or modified CDS sequence (opt4) from LASV(G1959-SLE-2011;Clade IV)__AIT17214__Z
augggcaacaagcaggccaaggcccccgaggugaaggacagccccagagccagccugauccccgacgccacccaccugggcccccaguucugcaagagcugcugguucgagaacaagggccugguggagugcaacaaccacuaccugugccugaacugccugacccugcugcugagcgugagcaacagaugccccaucugcaagaugccccugcccaccaagcugagacccagcgccgcccccaccgccccccccaccggcaccgccgacagcaucagacccccccccuacagccccuga

SEQ ID NO: 12199 - RNA, 300 nt, Artificial Sequence
  derived and/or modified CDS sequence (opt4) from LASV(G2141-SLE-2011;Clade IV)__AIT17222__Z
augggcaacaagcaggccaagacccccgagaccaaggacagccccagagccagccugauccccgacgccacccaccugggcccccaguucugcaagagcugcugguucgagaacaagggccugguggagugcaacagccacuaccugugccugaacugccugacccugcugcugagcgugagcagcagaugccccaucugcaagaugccccugcccaccagacugagacccagcaccgcccccaccgccccccccgccggcgugggcgacagcaccagccccccccccuacagccccuga

SEQ ID NO: 12200 - RNA, 300 nt, Artificial Sequence
  derived and/or modified CDS sequence (opt4) from LASV(G2147-SLE-2011;Clade IV)__AIT17226__Z
augggcaacaagcaggccaagacccccgaggccaaggacagccccagagccagccugauccccgacgccacccaccugggcccccaguucugcaagagcugcugguucgagaacaagggccugguggagugcaacaaccacuaccugugccugaacugccugacccugcugcugagcgugagcaacagaugccccaucugcaagaugccccugcccaccaagcugagacccagcgccacccccaccgccccccccgccggcgccgccgacagcaucggccccccccccuacagccccuga

SEQ ID NO: 12201 - RNA, 297 nt, Artificial Sequence
  derived and/or modified CDS sequence (opt4) from LASV(G2165-SLE-2011;Clade IV)__AIT17230__Z
augggcaacaagcaggccaaggccagcgacaagaacagccccagagccagccugauccccgacgccacccaccugggcccccaguucugcaagagcugcugguucgagaacaagggccugguggagugcaacaaccacuaccugugccugaacugccugacccugcugcugagcgugagcaacagaugccccaucugcaagaugccccugcccaccaagcugagacccagcgccacccccaccgccccccccaccggcgccgccgacagcaucagacccccccccuacagccccuga

SEQ ID NO: 12202 - RNA, 300 nt, Artificial Sequence
  derived and/or modified CDS sequence (opt4) from LASV(G2184-SLE-2011;Clade IV)__AIT17234__Z
augggcaacaagcaggccaaggccagcgaggagaagaacagccccagagccagccugauccccgacgccacccaccugggcccccaguucugcaagagcugcugguucgagaacaagggccugguggagugcaacaaccacuaccugugccugaacugccugacccugcugcugagcgugagcaacagaugccccaucugcaagaugccccugcccaccaagcugagacccagcgccacccccaccgccccccccaccggcgccgccgacagcaucagacccccccccuacagccccuga

SEQ ID NO: 12203 - RNA, 300 nt, Artificial Sequence
  derived and/or modified CDS sequence (opt4) from LASV(G2197-SLE-2011;Clade IV)__AIT17238__Z
augggcaacaagcagaccaaggcccccgaggccaagggcagccccagagccagccugauccccgacgccacccaccugggcccccaguucugcaagagcugcugguucgagaacaagggccugguggagugcaacaaccacuaccugugccugaacugccugacccugcugcugagcgugagcaacagaugccccaucugcaagaugccccugcccaccaagcugagacccagcgccacccccaccgccccccccaccgaggccgccgacagcaucagacccccccccuacagacccuga

SEQ ID NO: 12204 - RNA, 300 nt, Artificial Sequence
  derived and/or modified CDS sequence (opt4) from LASV(G2222-SLE-2011;Clade IV)__AIT17242__Z
augggcaacaagcaggccaaggcccccgagagcaaggacagccccagagccagccugauccccgacgccacccaccugggcccccaguucugcaagagcugcugguucgagaacaagggccugguggagugcaacaaccacuaccugugccugaacugccugacccugcugcugagcgugagcaacagaugccccaucugcaagaugccccugcccaccagacugagacccagcgccgcccccaccgccccccccaccggcgccaccgacagcaccagacccccccccuacagccccuga

SEQ ID NO: 12205 - RNA, 300 nt, Artificial Sequence
  derived and/or modified CDS sequence (opt4) from LASV(G2259-SLE-2012;Clade IV)__AIT17248__Z
augggcaacaagcaggugaaggcccccgaggccagaaacagccccagagccagccugauccccgacgccacccaccugggcccccaguucugcaagagcugcugguucgagaacaagggccugguggagugcaacaaccacuaccugugccugaacugccugacccugcugcugggcgugagcagcagaugccccaucugcaagaccccccugcccaccagacugagacccagcgccacccccaccgccccccccgccggcgccggcgacaacaccagacccccccccuacagccccuga

SEQ ID NO: 12206 - RNA, 300 nt, Artificial Sequence
  derived and/or modified CDS sequence (opt4) from LASV(G2263-SLE-2012;Clade IV)__AIT17252__Z
augggcaacaagcaggccaaggcccccgaggccaaggacagccccagagccagccugauccccgacgccacccaccugggcccccaguucugcaagagcugcugguucgagaacaagggccugguggagugcaacaaccacuaccugugccugaacugccugacccugcugcugagcgugagcaacagaugccccaucugcaagaugccccugcccaccaagcugagacccagcaccgcccccaccgccccccccgccggcgccgccgacagcaccagacccccccccuacagccccuga

SEQ ID NO: 12207 - RNA, 300 nt, Artificial Sequence
  derived and/or modified CDS sequence (opt4) from LASV(G2280-SLE-2012;Clade IV)__AIT17256__Z
augggcaacaagcaggccaaggcccccgagaccaaggacagccccagagccagccugauccccgacgccacccaccugggcccccaguucugcaagagcugcugguucgagaacaagggccugguggagugcaacaaccacuaccugugccugaacugccugacccugcugcugagcgugagcaacagaugccccaucugcaagaugccccugcccaccaagcugagacccagcgccgcccccaccgccccccccgugggcgccgccgacaacaccagacccccccccuacagccccuga

SEQ ID NO: 12208 - RNA, 300 nt, Artificial Sequence
  derived and/or modified CDS sequence (opt4) from LASV(G2295-SLE-2012;Clade IV)__AIT17260__Z
augggcaacaagcaggccaaggcccccgagcugaaggacagccccagagccagccugauccccgacgccacccaccugggcccccaguucugcaagagcugcugguucgagaacaagggccugguggagugcaacaaccacuaccugugccugaacugccugacccugcugcugagcgugagcaacagaugccccaucugcaagaugccccugcccaccaagcugagacccagcgccgcccccaccgccccccccgccggcgccguggacagcaccagacccccccccuacagccccuga

SEQ ID NO: 12209 - RNA, 300 nt, Artificial Sequence
  derived and/or modified CDS sequence (opt4) from LASV(G2315-SLE-2012;Clade IV)__AIT17264__Z
augggcaacaagcagaccaaggcccccgagagcaagaacagccccagagccagccugauccccgacgccaccuaccugggcccccaguucugcaagagcugcugguucgagaacaagggccugguggagugcaacaaccacuaccugugccugaacugccugacccugcugcugagcgugagcaacagaugccccaucugcaagaugccccugcccaccaagcugagaagcagcgccgcccccaccgccccccccaccggcgccgccgacagcaccaagcccccccccuacagccccuga

SEQ ID NO: 12210 - RNA, 300 nt, Artificial Sequence
  derived and/or modified CDS sequence (opt4) from LASV(G2318-SLE-2012;Clade IV)__AIT17268__Z
augggcaacaagcagaccaaggcccccgaggugaagggcagccccagagccagccugauccccgacgccacccaccugggcccccaguucugcaagagcugcugguucgagaacaagggccugguggagugcaacaaccacuaccugugccugaacugccugacccugcugcugagcgugagcaacagaugccccaucugcaagaugccccugcccaccaagcugaagcccagcaccacccccaccgccccccccaccggcgccgccgacagcaucagacccccccccuacagccccuga

SEQ ID NO: 12211 - RNA, 300 nt, Artificial Sequence
  derived and/or modified CDS sequence (opt4) from LASV(G2363-SLE-2012;Clade IV)__AIT17272__Z
augggcaacaagcaggugaagaccagcgaggccagagacagccccagagccagccugauccccgacgccaccgaccugggcccccaguucugcaagagcugcugguucgagaacaagggccugguggagugcaacaaccacuaccugugccugaacugccugacccugcugcugagcgugagcaacagaugccccaucugcaagaugccccugcccaccagacugagacccagcgccaaccccaccgccccccccgccgagaccggcgacagcaccagacccccccccuacagccccuga

SEQ ID NO: 12212 - RNA, 300 nt, Artificial Sequence
  derived and/or modified CDS sequence (opt4) from LASV(G2392-SLE-2012;Clade IV)__AIT17278__Z
augggcagcaagcagaccaagacccccgaggugaaggacagccccagagccagccugauccccgacgccacccaccugggcccccaguucugcaagagcugcugguucgagaacaagggccugguggagugcaacaaccacuaccugugccugaacugccugacccugcugcugagcgugagcaacagaugccccaucugcaagaugccccugcccaccaagcugagacccagcgccgcccccaccgccccccccgccagagccgccgacgacaccagacccccccccuacagccccuga

SEQ ID NO: 12213 - RNA, 300 nt, Artificial Sequence
  derived and/or modified CDS sequence (opt4) from LASV(G2405-SLE-2012;Clade IV)__AIT17282__Z
augggcaacaagcaggccaaggcccccgagcccaaggacagccccagagccagccugauccccgacgccacccaccugggcccccaguucugcaagagcugcugguucgagaacaagggccugguggagugcaacaaccacuaccugugccugaacugccugacccugcugcugagcgugagcaacagaugccccaucugcaagaugccccugcccaccaagcugagacccagcgccgcccccaccgccccccccgccggcgccguggacagcaucagacccccccccuacagccccuga

SEQ ID NO: 12214 - RNA, 300 nt, Artificial Sequence
  derived and/or modified CDS sequence (opt4) from LASV(G2427-SLE-2012;Clade IV)__AIT17286__Z
augggcaacaagcagaccaaggcccccgaggugaaggacagccccagagccagccugauccccgacgccacccaccugggcccccaguucugcaagagcugcugguucgagaacaagggccugguggagugcaacaaccacuaccugugccugaacugccugacccugcugcugagcgugagcaacagaugccccaucugcaagaugccccugcccaccaagcugagacccagcaccgcccccaccgccccccccgccggcaccauggacagcaccagacccccccccuacagccccuga

SEQ ID NO: 12215 - RNA, 300 nt, Artificial Sequence
  derived and/or modified CDS sequence (opt4) from LASV(G2431-SLE-2012;Clade IV)__AIT17290__Z
augggcaacaagcaggccagagcccccgaggccaaggacagccccagagccagccugauccccgacgccacccaccugggcccccaguucugcaagagcugcugguucgagaacaagggccugguggagugcaacaaccacuaccugugccugaacugccugacccugcugcugagcgugagcagcagaugccccaucugcaagaugccccugcccaccagacugagacccagcgccauccccaccgccccccccgccggcaccggcgacagcagcagacccccccccuacagccccuga

SEQ ID NO: 12216 - RNA, 300 nt, Artificial Sequence
  derived and/or modified CDS sequence (opt4) from LASV(G2554-SLE-2012;Clade IV)__AIT17296__Z
augggcaacaagcaggccaagacccccgagaucaaggacagccccagagccagccugauccccgacgccacccaccugggcccccaguucugcaagagcugcugguucgagaacaagggccugguggagugcaacaaccacuaccugugccugaacugccugacccugcugcugagcgugagcaacagaugccccaucugcaagaugccccugcccaccaagcugagacccagcgccgcccccaccgccccccccgccggcgccgccgacaucaccagacccccccccuacagccccuga

SEQ ID NO: 12217 - RNA, 300 nt, Artificial Sequence
  derived and/or modified CDS sequence (opt4) from LASV(G2557-SLE-2012;Clade IV)__AIT17300__Z
augggcaacaagcaggugaaggcccccgaggccagaaacagccccagagccagccugauccccgacgccacccaccugggcccccaguucugcaagagcugcugguucgagaacaagggccugguggagugcaacaaccacuaccugugccugaacugccugacccugcugcugggcgugagcagcagaugccccaucugcaagaugccccugcccaccagacugagacccagcaccgcccccaccgccccccccgccggcgccggcgacaacaccagacccccccccuacagccccuga

SEQ ID NO: 12218 - RNA, 300 nt, Artificial Sequence
  derived and/or modified CDS sequence (opt4) from LASV(G2612-SLE-2012;Clade IV)__AIT17312__Z
augggcaacaagcaggccaagacccccgagaccaaggacagccccagagccagccugauccccgacgccacccaccugggcccccaguucugcaagagcugcugguucgagaacaagggccugguggagugcaacaaccacuaccugugccugaacugccugacccugcugcugagcgugagcaacagaugccccaucugcaagaugccccugcccaccaagcugagacccagcgccgcccccaccgccccccccgugggcgccgccgacagcaccagacccccccccuacagccccuga

SEQ ID NO: 12219 - RNA, 300 nt, Artificial Sequence
  derived and/or modified CDS sequence (opt4) from LASV(G2615-SLE-2012;Clade IV)__AIT17316__Z
augggcaacaagcaggccaaggcccccgaggccagaaacagccccagagccagccugauccccgacgccacccaccugggcccccaguucugcaagagcugcugguucgagaacagaggccugguggagugcaacaaccacuaccugugccugaacugccugacccugcugcugagcgugagcagcagaugccccaucugcaagaugccccugcccaccagacugagacccagcgccgcccccaccgccccccccgccggcgccggcgacaacaccagacccccccccuacagccccuga

SEQ ID NO: 12220 - RNA, 300 nt, Artificial Sequence
  derived and/or modified CDS sequence (opt4) from LASV(G2723-SLE-2012;Clade IV)__AIT17320__Z
augggcaacaagcaggccaaggcccccgaggccagaaacagccccagagccagccugauccccgacgccacccaccugggcccccaguucugcaagagcugcugguucgagaacaagggccugguggagugcaacaaccacuaccugugccugaacugccugacccugcugcugggcgugagcagcagaugccccaucugcaagaugccccugcccaccagacugagacccagcgccgcccccaccgccccccuggccgaggccggcgacaacaccagacccccccccuacagccccuga

SEQ ID NO: 12221 - RNA, 300 nt, Artificial Sequence
  derived and/or modified CDS sequence (opt4) from LASV(G2868-SLE-2012;Clade IV)__AIT17326__Z
augggcaacaagcagagcaaggcccccgagagcagagacagccccagagccagccugauccccgacgccacccaccugggcccccaguucugcaagagcugcugguucgagaacaagggccugguggagugcaacaaccacuaccugugccugaacugccugacccugcugcugagcgugagcaacagaugccccaucugcaagaugccccugcccaccaagcugagacccagcgccacccccaccgccccccccaccagagccgccgacagcaucagacccccccccuacagccccuga

SEQ ID NO: 12222 - RNA, 300 nt, Artificial Sequence
  derived and/or modified CDS sequence (opt4) from LASV(G2903-SLE-2012;Clade IV)__AIT17330__Z
augggcaacaagcaggccaaggcccuggagagcaagaacagccccagagccagccugauccccgacgccaccuaccugggcccccaguucugcaagagcugcugguucgagaacaagggccugguggagugcaacaaccacuaccugugccugaacugccugacccugcugcugagcgugagcaacagaugccccaucugcaagaugccccugcccaccaagcugagaagcagcgccgcccccaccgccccccccaccggcgccgccgacggcaccaagcccccccccuacagccccuga

SEQ ID NO: 12223 - RNA, 300 nt, Artificial Sequence
  derived and/or modified CDS sequence (opt4) from LASV(G3010-SLE-2013;Clade IV)__AIT17342__Z
augggcaacaagcaggccaaggccagcgaggccaaggacagccccagagccagccugauccccgacgccacccaccugggcccccaguucugcaagagcugcugguucgagaacaagggccugguggagugcaacaaccacuaccugugccugaacugccugacccugcugcugagcgugagcaacagaugccccaucugcaagaugccccugcccaccaagcugagacccagcaccgcccccaccgccccccagaccggcgccgccgacagcaucagacccccccccuacagccccuga

SEQ ID NO: 12224 - RNA, 300 nt, Artificial Sequence
  derived and/or modified CDS sequence (opt4) from LASV(G3016-SLE-2013;Clade IV)__AIT17346__Z
augggcaacaagcaggccaaggcccccgagaccaaggacagccccagagccagccugauccccgacgccacccaccugggcccccaguucugcaagagcugcugguucgagaacaagggccugguggagugcaacaaccacuaccugugccugaacugccugacccugcugcugagcgugagcaacagaugccccaucugcaagaugccccugcccaccaagcugagacccagcgccgcccccaccgccccccccgugggcgccgccgacagcaccagacccccccccuacagccccuga

SEQ ID NO: 12225 - RNA, 300 nt, Artificial Sequence
  derived and/or modified CDS sequence (opt4) from LASV(G3148-SLE-2013;Clade IV)__AIT17362__Z
augggcaacaagcaggccaaggcccccgagagcaaggacagccccagagccagccugauccccgacgccacccaccugggcccccaguucugcaagagcugcugguucgagaacaagggccugguggagugcaacaaccacuaccugugccugaacugccugacccugcugcugagcgugagcaacagaugccccaucugcaagaugccccugcccaccaagcugagacccagcgccgcccccaccgccccccccgccggcgccgccgacagcaucagacccccccccuacagccccuga

SEQ ID NO: 12226 - RNA, 300 nt, Artificial Sequence
  derived and/or modified CDS sequence (opt4) from LASV(G3151-SLE-2013;Clade IV)__AIT17366__Z
augggcaacaagcagaccaagacccccgaggugaaggacagccccagagccagccugauccccgacgccacccaccugggcccccaguucugcaagagcugcugguucgagaacaagggccugguggagugcaacaaccacuaccugugccugaacugccugacccugcugcugagcgugagcaacagaugccccaucugcaagaugccccugcccaccaagcugagacccagcgccgcccccaccgccccccccgccagagccgccgacgacaccagacccccccccuacagccccuga

SEQ ID NO: 12227 - RNA, 300 nt, Artificial Sequence
  derived and/or modified CDS sequence (opt4) from LASV(G3206-SLE-2013;Clade IV)__AIT17376__Z
augggcaacaagcaggccaaggcccccgagagcaaggacagccccagagccagccugauccccgacgccaccuaccugggcccccaguucugcaagagcugcugguucgagaacaagggccugguggagugcaacaaccacuaccugugccugaacugccugacccugcugcugagcgugagcaacagaugccccaucugcaagaugccccugcccaccaagcugagaagcagcguggcccccaccgccccccccaccagagccgccgacagcaccagacccccccccuacagccccuga

SEQ ID NO: 12228 - RNA, 300 nt, Artificial Sequence
  derived and/or modified CDS sequence (opt4) from LASV(G3229-SLE-2013;Clade IV)__AIT17382__Z
augggcaacaagcagaccaagaccagcgaggugaaggacagccccagagccagccugauccccgacgccacccaccugggcccccaguucugcaagagcugcugguucgagaacaagggccugguggagugcaacaaccacuaccugugccugaacugccugacccugcugcugagcgugagcaacagaugccccaucugcaagaugccccugcccaccaagcugagacccagcgccgcccccaccgccccccccgccagagccgccgacgacaccagacccccccccuacagccccuga

SEQ ID NO: 12229 - RNA, 300 nt, Artificial Sequence
  derived and/or modified CDS sequence (opt4) from LASV(G3234-SLE-2013;Clade IV)__AIT17386__Z
augggcaacaagcaggccaagacccccgaggccagagacagccccagagccagccugauccccgacgccacccaccugggcccccaguucugcaagagcugcugguucgagaacaagggccugguggagugcaacaaccacuaccugugccugaacugccugacccugcugcugagcgugagcagcagaugccccaucugcaagaugccccugcccaccaagcugagacccagcgccacccccaccgccccccccgccggcgccggcgacggcaccagacccccccccuacagccccuga

SEQ ID NO: 12230 - RNA, 300 nt, Artificial Sequence
  derived and/or modified CDS sequence (opt4) from LASV(G3278-SLE-2013;Clade IV)__AIT17396__Z
augggcaacaagcaggugaaggcccccgaggccagaaacagccccagagccagccugauccccgacgccacccaccugggcccccaguucugcaagagcugcugguucgagaacaagggccugguggagugcaacaaccacuaccugugccugaacugccugacccugcugcugggcgugagcagcagaugccccaucugcaagaugccccugcccaccagacugagacccagcgccgcccccaccgccccccccgccgaggccggcgacaacaccagacccccccccuacagccccuga

SEQ ID NO: 12231 - RNA, 300 nt, Artificial Sequence
  derived and/or modified CDS sequence (opt4) from LASV(G502-SLE-2009;Clade IV)__AIT17124__Z
augggcaacaagcaggugaagacccccgaggccaaggacagccccagagccagccugauccccgacgccacccaccugggcccccaguucugcaagagcugcugguucgagaacaagggccugguggagugcaacaaccacuaccugugccugaacugccugacccugcugcugagcgugggcaacagaugccccaucugcaagaugccccugcccaccaagcugagacccagcgugacccccaccgccccccccaccagagccgccgacagcaucggccccccccccuacagccccuga

SEQ ID NO: 12232 - RNA, 300 nt, Artificial Sequence
  derived and/or modified CDS sequence (opt4) from LASV(G503-SLE-2009;Clade IV)__AIT17128__Z
augggcaacaagcaggccaagacccccgaggccaaggacagccccagagccaaccugauccccgacgccacccaccugggcccccaguucugcaagagcugcugguucgagaacaagggccugguggagugcaacaaccacuaccugugccugaacugccugacccugcugcugagcgugagcaacagaugccccaucugcaagaugccccugcccaccaagcugagacccagcgccgcccccaccgccccccccaccggcgccgccgacagcaucagacccccccccuacagccccuga

SEQ ID NO: 12233 - RNA, 300 nt, Artificial Sequence
  derived and/or modified CDS sequence (opt4) from LASV(G610-SLE-2009;Clade IV)__AIT17132__Z
augggcaacaagcaggccaaggcccccgaggccagagacagccccagagccagccugauccccgacgccacccaccugggcccccaguucugcaagagcugcugguucgagaacaagggccugguggagugcaacaaccacuaccugugccugaacugccugacccugcugcugagcgugagcaacagaugccccaucugcaagaugccccugcccaccaagcugagacccagcgccacccccaccgccccccccaccgaggccgccgacagcaucagacccccccccuacagacccuga

SEQ ID NO: 12234 - RNA, 300 nt, Artificial Sequence
  derived and/or modified CDS sequence (opt4) from LASV(G676-SLE-2009;Clade IV)__AIT17140__Z
augggcaacaagcaggccaaggcccccgagcccaaggacagccccagagccagccugauccccgacgccacccaccugggcccccaguucugcaagagcugcugguucgagaacaagggccugguggagugcaacaaccacuaccugugccugaacugccugacccugcugcugagcgugagcaacagaugccccaucugcaagaugccccugcccaccaagcugagacccagcgccgcccccaccgccccccccgccggcgccguggacagcaccagacccccccccuacagccccuga

SEQ ID NO: 12235 - RNA, 300 nt, Artificial Sequence
  derived and/or modified CDS sequence (opt4) from LASV(G692-SLE-2009;Clade IV)__AIT17144__Z
augggcaacaagcaggccaagacccccgagagcaaggacagccccagagccagccugauccccgacgccacccaccugggcccccaguucugcaagagcugcugguucgagaacaagggccugguggagugcaacaaccacuaccugugccugaacugccugacccugcugcugggcgugagcaacagaugccccaucugcaagaugccccugcccaccaagcugagaagcagcguggcccccaccgccccccccaccggcgccguggacagcaucagacccccccccuacagccccuga

SEQ ID NO: 12236 - RNA, 300 nt, Artificial Sequence
  derived and/or modified CDS sequence (opt4) from LASV(G733-SLE-2010;Clade IV)__AIT17152__Z
augggcaacaagcaggccaagacccccgagaccaaggacagccccagagccagccugauccccgacgccacccaccugggcccccaguucugcaagagcugcugguucgagaacaagggccugguggagugcaacaaccacuaccugugccugaacugccugacccugcugcugagcgugagcaacagaugccccaucugcaagaugccccugcccaccaagcugagacccagcaccgcccccaccgccccccccgccggcgccgccgacaacaccagacccccccccuacagccccuga

SEQ ID NO: 12237 - RNA, 300 nt, Artificial Sequence
  derived and/or modified CDS sequence (opt4) from LASV(G808-SLE-2010;Clade IV)__AIT17162__Z
augggcaacaagcaggccaaggccagcgagagcaaggacagccccagagccagccugauccccgacgccacccaccugggcccccaguucugcaagagcugcugguucgagaacaagggccugguggagugcaacaaccacuaccugugccugaacugccugacccugcugcugagcgugagcaacagaugccccaucugcaagaugccccugcccaccaagcugagacccagcgugacccccaccgccccccccaccagaaccgccgacaacaccagacccccccccuacagccccuga

SEQ ID NO: 12238 - RNA, 300 nt, Artificial Sequence
  derived and/or modified CDS sequence (opt4) from LASV(Guinea Faranah;Clade IV)__AMZ00378__Z
augggcaacagacagaccaaggccaccgaggccaaggacagccccagagccagccugauccccgacgccacccaccugggcccccaguucugcaagagcugcugguucgagaacaagggccugguggagugcaacaaccacuaccugugccugaacugccugacccugcugcugagcgugagcagcagaugccccaucugcaagaugccccugcccaccagacugaagagcagcaccaaccccaccgcccccagcgccaagaccgagagcagcaucaaccccccccccuacagccccuga

SEQ ID NO: 12239 - RNA, 300 nt, Artificial Sequence
  derived and/or modified CDS sequence (opt4) from LASV(GUINEA Z-185a;Clade IV)__AMZ00374__Z
augggcaacaagcaggccaaggcccccgagaccaagaacagccccagagccagccugauccccgacgccacccaccugggcccccaguucugcaagagcugcugguucgagaacaagggccugguggagugcaacaaccacuaccugugccugaacugccugacccugcugcugagcgugagcaacagaugccccaucugcaagaugccccugcccaccaagcugagacccagcgccgugcccaccgccccccccgcccaggugggcgacagaaccagacccccccccuacagccccuga

SEQ ID NO: 12240 - RNA, 312 nt, Artificial Sequence
  derived and/or modified CDS sequence (opt4) from MOPV/LASV reassortant(IGS-1;Clade IV)__AFY05533__Z
augggcaagacccagagcaagggccagcccagcaccaaccugcugaaggagaccgagcccagacaccccgugauccccgacgccagaggcaccggccccgaguucugcaagagcugcugguucgagagaagaggccuggugagaugcaacgaccacuaccugugccugaacugccugacccugcugcacaccgugagcgacagaugccccaucugcaagcacaagcugcccuucagacuggagcugcagacccagcccaccgccccccccgagaucccccccagccagaaccccccccccuacagccccuga

SEQ ID NO: 12241 - RNA, 300 nt, Artificial Sequence
  derived and/or modified CDS sequence (opt4) from LASV(LM032-SLE-2010;Clade IV)__AIT17800__Z
augggcaacaagcaggccaaggcccccgaggccaaggacagccccagagccagccugauccccgacgccacccaccugggcccccaguucugcaagagcugcugguucgagaacaagggccugguggagugcaacaaccacuaccugugccugaacugccugacccugcugcugagcgugagcaacagaugccccaucugcaagaugccccugcccaccaagcugagacccagcgccacccccaccgccccccccaccgaggccgccgacagcaucagacccccccccuaccaccccuga

SEQ ID NO: 12242 - RNA, 300 nt, Artificial Sequence
  derived and/or modified CDS sequence (opt4) from LASV(LM222-SLE-2010;Clade IV)__AIT17804__Z
augggcaacaagcaggccaaggccagcgaggagaagaacagccccagagccagccugauccccgacgccacccaccugggcccccaguucugcaagagcugcugguucgagaacaagggccugguggagugcaacaaccacuaccugugccugaacugccugacccugcugcugagcgugagcaacagaugccccaucugcaagaugccccugcccaccaagcugagacccagcaccacccccaccgccccccccaccggcgccgccgacagcaucagacccccccccuacagccccuga

SEQ ID NO: 12243 - RNA, 300 nt, Artificial Sequence
  derived and/or modified CDS sequence (opt4) from LASV(LM395-SLE-2009;Clade IV)__AIT17808__Z
augggcaacaagcaggccaaggcccccgagagcaaggacagccccagagccagccugauccccgacgccacccaccugggcccccaguucugcaagagcugcugguucgagaacaagggccugguggagugcaacaaccacuaccugugccugaacugccugacccugcugcugagcgugagcaacagaugccccaucugcaagaugccccugcccaccagacugagacccagcgccgcccccaccgccccccccaccggcgccgccgacagcaccagacccccccccuacagccccuga

SEQ ID NO: 12244 - RNA, 300 nt, Artificial Sequence; identical to SEQ ID NO: 12242
  derived and/or modified CDS sequence (opt4) from LASV(LM776-SLE-2012;Clade IV)__AIT17824__Z

SEQ ID NO: 12245 - RNA, 300 nt, Artificial Sequence
  derived and/or modified CDS sequence (opt4) from LASV(Mad39;Clade IV)__ANH09743__Z
augggcaacaagcaggccaaggccagcgagguggaggacggccccagagccagccugauccccgacgccacccaccugggcccccaguucugcaagagcugcugguucgagaacaagagccugguggagugcaacaaccacuaccugugccugaacugccugacccugcugcugagcgugagcaacagaugccccaucugcaagaugccccugcccaccagacugaagcccagcguggugcccaccgccccccccaccagagccggcgacggcaccagacccccccccuacagccccuga

SEQ ID NO: 12246 - RNA, 300 nt, Artificial Sequence
  derived and/or modified CDS sequence (opt4) from LASV(Mad41;Clade IV)__ANH09745__Z
augggcaacaagcagaccaaggcccccgagguggaggacggccccagagccagccugauccccgacgccacccaccugggcccccaguucugcaagagcugcugguucgagaacaagggccugguggagugcaacaaccacuaccugugccugaacugccugacccugcugcugagcgugagcagcagaugccccaucugcaagaugccccugcccaccagacugaagcccagcaucgugcccaccgccccccccgccagaaccggcgagaacaccagacccccccccuacagccccuga

SEQ ID NO: 12247 - RNA, 300 nt, Artificial Sequence
  derived and/or modified CDS sequence (opt4) from LASV(Mad63;Clade IV)__ANH09749__Z
augggcaacaagcaggccaaggcccccgagguggaggacggccccagagccagccugauccccgacgccacccaccugggcccccaguucugcaagagcugcugguucgagaacagaggccugguggagugcaacaaccacuaccugugccugaacugccugacccugcugcugagcgugagcaacagaugccccaucugcaagaugccccugcccaccagacugaagcccagcguggugcccaccgccccccccaccggcgccggcggcgacaccagacccccccccuacagccccuga

SEQ ID NO: 12248 - RNA, 300 nt, Artificial Sequence
  derived and/or modified CDS sequence (opt4) from LASV(Mad69;Clade IV)__ANH09751__Z
augggcaacaagcaggccaaggcccccaaggccgaggacggccccagagccagccugauccccgacgccacccaccugggcccccaguucugcaagagcugcugguucgagaacaagggccugguggagugcaacaaccacuaccugugccugaacugccugacccugcugcugagcgugagcaacagaugccccaucugcaagaugccccugcccaccagacugaagcccagcguggugcccaccgccccccccaccggcgccggcggcgacaccagaccccccccccacagccccuga

SEQ ID NO: 12249 - RNA, 300 nt, Artificial Sequence
  derived and/or modified CDS sequence (opt4) from LASV(Mad83;Clade IV)__ANH09753__Z
augggcaacaagcaggccaaggccagcgaggccgaggacggccccagagccagccugauccccgacgccacccaccugggcccccaguucugcaagagcugcugguucgagaacaagggccugguggagugcaacaaccacuaccugugccugaacugccugacccugcugcugagcgugagcagcagaugccccaucugcaagaugccccugcccaccagacugagacccagcguggugcccaccgcccccagcgccggcgccggcgacggcaccagacccccccccuacagccccuga

SEQ ID NO: 12250 - RNA, 300 nt, Artificial Sequence
  derived and/or modified CDS sequence (opt4) from LASV(NL;Clade IV)__AAO59510__Z
augggcaacaagcagaccaaggcccccgaggccaaggacagccccagagccagccugauccccgacgccaccuaccugggcccccaguucugcaagagcugcugguucgagaacaagggccugguggagugcaacaaccacuaccugugccugaacugccugacccugcugcugagcgugagcaacagaugccccaucugcaagaugccccugcccaccaagcugagacccagcgccgcccccaccgccccccccgccggcgccgcccacagcgccagacccccccccuacagccccuga

SEQ ID NO: 12251 - RNA, 300 nt, Artificial Sequence
  derived and/or modified CDS sequence (opt4) from LASV(Z0947-SLE-2011;Clade IV)__AIT17838__Z
augggcaacaagcaggccaaggugcccgagagcaaggacagccccagagccagccugauccccgacgccacccaccugggcccccaguucugcaagagcugcugguucgagaacaagggccugguggagugcaacaaccacuaccugugccugaacugccugacccugcugcugagcgugagcaacagaugccccaucugcaagaugccccugcccaccaagcugaagcccagcgccgcccccaccgccccccccaccggcgccgccgacagcaucagacccccccccuacagccccuga

SEQ ID NO: 12252 - RNA, 300 nt, Artificial Sequence
  derived and/or modified CDS sequence (opt4) from LASV(Z0948-SLE-2011;Clade IV)__AIT17842__Z
augggcaacaagcaggccaaggugcccgagagcaaggacagccccagagccagccugauccccgacgccacccaccugggcccccaguucugcaagagcugcugguucgagaacaagggccugguggagugcaacaaccacuaccugugccugaacugccugacccugcugcugagcgugagcaacagaugccccaucugcaagaugccccugcccaccaagcugagacccagcgccgcccccaccgccccccccaccggcguggccgacagcaucagacccccccccuacagccccuga

SEQ ID NO: 12253 - RNA, 300 nt, Artificial Sequence
  derived and/or modified CDS sequence (opt4) from LASV(Z148;Clade IV)__AAT49005__Z
augggcaacaagcaggccaaggcccccgagaccaaggacagccccagagccagccugauccccgacgccacccaccugggcccccaguucugcaagagcugcugguucgagaacaagggccugguggagugcaacaaccacuaccugugccugaacugccugacccugcugcugagcgugagcaacagaugccccaucugcaagaugccccugcccaccagacugagacccagcgccgugcccaccgccccccccgcccccgccggcgacagaaccaagcccccccccuacagccccuga

SEQ ID NO: 12254 - RNA, 300 nt, Artificial Sequence
  derived and/or modified CDS sequence (opt4) from LASV(Bamba-R114;Clade V)__AHC95547__Z
augggcaacagacaggccaaggaccccaagguggagagcagccccagagccagccugauccccgacgccacccaccugggcccccaguucugcaagagcugcugguucgagaacaagggccugguggagugcaacaaccacuaccugugccugaacugccugagccugcugcugagcgugagcaacagaugccccaucugcaagaugccccugcccaccagacugagacccaccaccaugcccaccgccccccagaucaucaaggagggcaccaccaaccccccccccuacacccccuga

SEQ ID NO: 12255 - RNA, 300 nt, Artificial Sequence
  derived and/or modified CDS sequence (opt4) from LASV(Komina-R16;Clade V)__AHC95545__Z
augggcaacaagcaggccaaggaccccaagaccgagagcagccccagagccagccugauccccgacgccacccaccugggcccccaguucugcaagagcugcugguucgagaacaagggccugguggagugcaacaaccacuaccugugccugaacugccugagccugcugcugagcgugagcaacagaugccccaucugcaagaugccccugcccaccaagcugaagcccaucaccacccccaccgccccccagaucaccagagagagcaucaccaaccccccccccuacacccccuga

SEQ ID NO: 12256 - RNA, 300 nt, Artificial Sequence; identical to SEQ ID NO: 12081
  derived and/or modified CDS sequence (opt4) from LASV(Alzey;Clade VI)__SCA79103__Z

SEQ ID NO: 12257 - RNA, 300 nt, Artificial Sequence
  derived and/or modified CDS sequence (opt4) from LASV(NIGERIA IKEJI;Clade II)__AMZ00370__Z
augggcaacaagcaggccaagagcaccagaguggacgagcagcagagagcccaccuggugcccgacgccagccaccugggcccccaguucugcaagagcugcugguucgagaacaagggccugguggagugcaacaaccacuaccugugccugaacugccugagccugcugcugagcgugagcagcagaugccccaucugcaagaugccccugcccaccaagcugaagaccagcacccagcccagcgcccccagagccgaggugccccccagcaccacccccccccccuacagccccuga

SEQ ID NO: 12258 - RNA, 300 nt, Artificial Sequence
  derived and/or modified CDS sequence (opt5) from LASV(Josiah;Clade IV)__ADY11072/NP_694871__Z
augggcaacaagcaggccaaagcucccgagagcaaggacuccccuagagccucucugaucccggaugcgacccaccucgggccccaauucugcaaaagcuguugguuugaaaauaagggacugguggagugcaacaaucauuaccuuugucugaacugccucacacugcuucuguccgucucuaaucgguguccuauuugcaaaaugccccucccuacgaagcugcgccccagcgcugccccuaccgccccgcccacaggcgcugccgacuccaucagaccucccccuuauucucccuga

SEQ ID NO: 12259 - RNA, 303 nt, Artificial Sequence
  derived and/or modified CDS sequence (opt5) from LASV(Pinneo-NIG-1969;Clade I)__AIT17834__Z
augggcaacaagcagaccagaagcccucccaaaccggagcacccccggccuacacugcuccccgacgccucccaucuggggccucaauucugcaagucuuguugguuugaaaauaaaggacuuguggagugcaacaaucacuaccugugucucaacugccugacgcuucugcucagcgucuccgaucgcugucccaucugcaagaugccucugccgaccaaacuggcuguuagaacacagcccucugccccuccccucaaucagggcaacacccagagcuccccucccccguauucuccuuga

SEQ ID NO: 12260 - RNA, 300 nt, Artificial Sequence
  derived and/or modified CDS sequence (opt5) from LASV(Nig08-04;Clade II)__ADU56612__Z
augggcaacagacagacccggcccacagaggccacggaacaaagccgcgcccaccuggugccugacgccucccaucucgggccgcaguucugcaagucuuguugguuugagaauagaggacuggucgaaugcaacaaucacuaccuuugucugaacugccucagccugcuucuguccguuucuagccggugucccaucugcaaaaugccucuccccacccgccugaaggcguccgcucagccuucugcucccccuacagaggccccgcagaauaccacacccccucccuauaccccuuga

SEQ ID NO: 12261 - RNA, 300 nt, Artificial Sequence
  derived and/or modified CDS sequence (opt5) from LASV(Nig08-A19;Clade III)__ADU56620__Z
augggcgggaagcacaccaaaccccagagagagagcaacuccccucgggccucucugaucccggacgcuacacaucucggaccccaauucugcaagagcuguugguuugaaaauaaaggccugguggagugcaacaaucacuaccuuugucugaacugccucacgcugcuucuguccgucucuaaucgcuguccuauuugcaagaugccccucccuaccagacugcgggccagcacaaaccccaccgcgccucagguugaacagguggggccgacaaaucccccucccuauuccccuuga

SEQ ID NO: 12262 - RNA, 300 nt, Artificial Sequence
  derived and/or modified CDS sequence (opt5) from LASV(AV;Clade V)__CCA30312__Z
augggcaacagacaggccaagaaucccgagguggaaaacagcccucgggcuucccugaucccggacgccacccaccucgggccccaauucugcaaaucuuguugguuugagaauaagggacuggucgaaugcaacaaucauuaccuuugucugaacugccucagccugcuucuguccguuucuaaucgcuguccuauuugcaaaaugccccucccuacaagacugcggcccacgaccacaccuaccgcgccgcagaucauuaaggagaacacaaccaaucccccucccuauacaccuuga

SEQ ID NO: 12263 - RNA, 300 nt, Artificial Sequence
  derived and/or modified CDS sequence (opt5) from LASV(Togo/2016/7082;Clade VI)__AMR44579__Z
augggcgccagacagaccaagcaaccccagaucgaggggagcccucgggcuucccuggugccggacgccucucaccucggaccccaguucugcaaaagcuguugguuugaaaacaagggccuggucgagugcaauaaccauuaccuuugucugaauugccucucccugcuucugucuguuagcaaccgcuguccuauuugcaaaaugccccucccuacaaagcugagaguguccucugcgcccagcgcuccuccggccgccacggcucagcccgggaccccucccccuuauucccccuga

SEQ ID NO: 12264 - RNA, 300 nt, Artificial Sequence
  derived and/or modified CDS sequence (opt5) from LASV(KAK-428;Clade n.d. (VII))__ANH09761__Z
augggcaacaaggggaccaaacccacacagaauagcgagccuuccagagccaaccuggugccggacgcuucuuaccucggaccccaauucugcaagagcuguugguuugaaaauaaaggccuggucgagugcaacaaucacuaucuuugucugaacugccucacgaugcugcuuuccguuuccaaucgguguccuaucugcaagaugccccugccuaccaaaauuaaggccagcgggucccccucugcgccuccgacagaagcuaacagcgccgugucucccccucccuacaccccuuga

SEQ ID NO: 12265 - RNA, 300 nt, Artificial Sequence
  derived and/or modified CDS sequence (opt5) from LASV(ISTH0009-NIG-2011;Clade II)__AIT17402__Z
augggcaacagacaggccaagagcaccaaaguggacgagcaccaacgggcucaucugguccccgaugccucccaccucgggccucaguucugcaagucuuguugguuugaaaaucgcggacugguugagugcaacaaucauuaccuuugucugaacugccucagccugcuucuguccgugucuagcagauguccgaucugcaaaaugccccucccuacaaagcugaaagcggcugcccagcccuccgccccuucuacggaaaccauucagaauacaacacccccuccguauacccccuga

SEQ ID NO: 12266 - RNA, 300 nt, Artificial Sequence
  derived and/or modified CDS sequence (opt5) from LASV(ISTH0012-NIG-2011;Clade II)__AIT17406__Z
augggcaacagacaggccaagagcuccaaaguggacgagcaccaacgggcucaucugguccccgaugccucucaccucgggccucaguucugcaagagcuguugguuugaaaauaaaggacugguugagugcaacaaucauuaccuuugucugaacugccucucccugcuucugucugugagcucccgcuguccgaucugcaagaugccccucccuaccaaacugaaggcggcugcccagcccucugccccuagcacagaagcugugcagaauacggcucccccuccguaugcccccuga

SEQ ID NO: 12267 - RNA, 300 nt, Artificial Sequence
  derived and/or modified CDS sequence (opt5) from LASV(ISTH0047-NIG-2011;Clade II)__AIT17410__Z
augggcaacaagcaggccaaaagcaccaagguggacgagcaccaaagagcucaucugguccccgaugccucccaccucgggccucaguucugcaaaucuuguugguuugaaaaucggggacugguugagugcaacaaucauuaccuuugucugaacugccucagccugcuucuguccgugucuagccgcuguccgaucugcaagaugccccucccuacaagacugaaagcggcuacgcagcccuccgccccuucuaccgaagccacacagaauaccacacccccuccguauacccccuga

SEQ ID NO: 12268 - RNA, 300 nt, Artificial Sequence
  derived and/or modified CDS sequence (opt5) from LASV(ISTH0230-NIG-2011;Clade II)__AIT17418__Z
augggcaacagacaggccaagagcaccaaaguggacgagcaccaacgggcucaucugguccccgaugccucccaccucgggccucaguucugcaagucuuguugguuugaaaaucgcggacugguugagugcaacaaucauuaccuuugucugaacugccucagccugcuucuguccgugucuagcagauguccgaucugcaaaaugccccucccuacaaagcugaaagcggcuacgcagcccuccgccccuucuaccgaaacaauucagaauaccacacccccuccguauacccccuga

SEQ ID NO: 12269 - RNA, 300 nt, Artificial Sequence
  derived and/or modified CDS sequence (opt5) from LASV(ISTH0531-NIG-2011;Clade II)__AIT17422__Z
augggcaacagacaggccaagagcgcuaaaguggacgagcaccaacgggcccaucugguccccgaugcgucccaccucgggccucaguucugcaagucuuguugguuugaaaaucgcggacugguugagugcaacaaucauuaccuuugucugaacugccucagccugcuucuguccgugucuagcagauguccgaucugcaaaaugccccucccuaccaagcugaaagcugccacacagcccuccgccccuucuacggaagcuacccagaauacaacacccccuccguauacccccuga

SEQ ID NO: 12270 - RNA, 300 nt, Artificial Sequence
  derived and/or modified CDS sequence (opt5) from LASV(ISTH0595-NIG-2011;Clade II)__AIT17426__Z
augggcaacaagcaggccaaaagcaccaagguggacgagcaccaaagagcucaucugguccccgaugccucccaccucgggccucaguucugcaaaucuuguugguuugaaaaucggggacugguugagugcaacaaucauuaccuuugucugaacugccucagccugcuucuguccgugucuagccgcuguccgaucugcaagaugccccucccuacaaaacugaaggcggcuacgcagcccuccgccccuucuaccgaagccacacagaauaccacacccccuccguauacccccuga

SEQ ID NO: 12271 - RNA, 300 nt, Artificial Sequence
  derived and/or modified CDS sequence (opt5) from LASV(ISTH1003-NIG-2011;Clade II)__AIT17432__Z
augggcaacaagcaggccaaaagcaccaagguggacgagcaccaaagagcucaucugguccccgaugccucccaccucgggccucaguucugcaaaucuuguugguuugaaaaucggggacugguugagugcaacaaucauuaccuuugucugaacugccucagccugcuucuguccgugucuagccgcuguccgaucugcaagaugccccucccuacaagacugaaagcggcuacgcagcccuccgccccuucuaccgaagccacacagaauaccauucccccuccguauacacccuga

SEQ ID NO: 12272 - RNA, 300 nt, Artificial Sequence
  derived and/or modified CDS sequence (opt5) from LASV(ISTH1038-NIG-2011;Clade II)__AIT17436__Z
augggcaacaagcaggccaaaagcaccaaggcugacgagcaccaaagagcccaucuggugcccgaugcgucccaccucgggccucaguucugcaaaucuuguugguuugaaaaucggggacuggucgagugcaacaaucauuaccuuugucugaacugccucagccugcuucuguccguuucuagccgcuguccgaucugcaagaugccccucccuacaaaacugaaggcugccacgcagcccuccgccccuucuaccgaagcuacaagaaauaccacacccccuccguauacccccuga

SEQ ID NO: 12273 - RNA, 300 nt, Artificial Sequence
  derived and/or modified CDS sequence (opt5) from LASV(ISTH1058-NIG-2011;Clade II)__AIT17444__Z
augggcaacagacaggccaagagcaccaaaguggacgagcaccaacgggcucaucugguccccgaugccucccaccucgggccucaguucugcaagucuuguugguuugaaaauaaaggacugguugagugcaacaaucauuaccuuugucugaacugccucagccugcuucuguccgugucuagccgcuguccgaucugcaagaugccccucccuacaaaacugaaggcggcugcccagcccuccgccccuucuacggaagcugcccagaauaccgcucccccuccguaugcccccuga

SEQ ID NO: 12274 - RNA, 300 nt, Artificial Sequence
  derived and/or modified CDS sequence (opt5) from LASV(ISTH1064-NIG-2011;Clade II)__AIT17448__Z
augggcaacagacaggccaagagcaccaaagugggggagcaccaacgggcucaucugguccccgacgccucccaccucggaccucaguucugcaagucuuguugguuugaaaaucgcggccugguugagugcaacaaucauuaccuuugucugaacugccucagccugcuucuguccgugucuagcagauguccgaucugcaaaaugccccucccuacaaagcugaaagcgacggcucagcccuccgccccuucugccgaagcuauucagaauaccacacccccuccguauacccccuga

SEQ ID NO: 12275 - RNA, 300 nt, Artificial Sequence
  derived and/or modified CDS sequence (opt5) from LASV(ISTH1069-NIG-2011;Clade II)__AIT17452__Z
augggcaacagacaggccaagagcacccggguggacgagcaccaacgcgcucaucugguccccgaugccucccaccucgggccucaguucugcaaaucuuguugguuugaaaauagaggacugguugagugcaacaaucauuaccuuugucugaacugccucagccugcuucuguccgugucuagccgguguccgaucugcaagaugccccucccuacacgccugagagcggcugugcagcccuccgccccuucuacggaaaccacacaggacaccacacccccuccguauagccccuga

SEQ ID NO: 12276 - RNA, 300 nt, Artificial Sequence
  derived and/or modified CDS sequence (opt5) from LASV(ISTH1096-NIG-2012;Clade II)__AIT17456__Z
augggcaacagacaggccaagagcaccgaggucaaugaacaccaacgggcucaucugguccccgacgccucccaccucgggccucaguucugcaaaucuuguugguuugagaaccgcggacugguugaaugcaauaaccauuaccuuugucugaauugccucagccugcuucuguccgugucuagcagauguccgaucugcaagaugccccucccuacaaaacugaaggcggcuacgcagcccuccgccccuucuaccgaggugacacagaacaccgugcccccuccguauagccccuga

SEQ ID NO: 12277 - RNA, 300 nt, Artificial Sequence
  derived and/or modified CDS sequence (opt5) from LASV(ISTH1107-NIG-2012;Clade II)__AIT17460__Z
augggcaacagacaggccaagagcaccaaaguggacgagcaccaacgggcucaucugguccccgaugccucccaccucgggccucaguucugcaagucuuguugguuugaaaaucgcggacugguugagugcaacaaucauuaccuuugucugaacugccucagccugcuucuguccgugucuagcagauguccgaucugcaaaaugccccucccuacaaagcugaaagcggcugcccagcccuccgccccucccacggaagcuacccagaauacaaccccuccgcccuauacaccuuga

SEQ ID NO: 12278 - RNA, 300 nt, Artificial Sequence
  derived and/or modified CDS sequence (opt5) from LASV(ISTH1111-NIG-2011;Clade II)__AIT17464__Z
augggcaacagacaggccaagagcaccaaaguggacgagcaccaacgggcucaucugguccccgaugccucccaccucgggccucaguucugcaagucuuguugguuugaaaaucgcggacugguugagugcaacaaucauuaccuuugucugaacugccucagccugcuucuguccgugucuagcagauguccgaucugcaaaaugccccucccuacaaagcugaaagcggcugcccagcccuccgccccuucuacggaagcuacccaggacacaacacccccuccguauacccccuga

SEQ ID NO: 12279 - RNA, 300 nt, Artificial Sequence
  derived and/or modified CDS sequence (opt5) from LASV(ISTH1121-NIG-2012;Clade II)__AIT17468__Z
augggcaacagacaggccaagcaaaccaaaguggacgagcaccagcgggcucaucugguccccgaugccagccaccucgggccucaguucugcaaguccuguugguuugaaaaucgcggacugguugagugcaacaaucauuaccuuugucugaacugccucucucugcuucugagcaucuccucuagauguccgauuugcaaaaugccccucccuacaaagcugaaagcggcugcccagcccagcgccccuuccacggaagcuacccaagacacaacacccccuccguauacccccuga

SEQ ID NO: 12280 - RNA, 300 nt, Artificial Sequence
  derived and/or modified CDS sequence (opt5) from LASV(ISTH1129-NIG-2012;Clade II)__AIT17472__Z
augggcaacaagcagaccaaaagcacaaaggccgacgagcaccaaagagcucaucuggugcccgaugccucccaccucgggccucaguucugcaaaucuuguugguuugaaaaucggggacuggucgagugcaacaaucauuaccuuugucugaacugccucagccugcuucuguccguuucuagccgcuguccgaucugcaagaugccccucccuacgagacugaaagcggcugcccagcccuccgccccuucuaccgaagcuacacaggacaccacacccccuccguauacccccuga

SEQ ID NO: 12281 - RNA, 300 nt, Artificial Sequence
  derived and/or modified CDS sequence (opt5) from LASV(ISTH1137-NIG-2011;Clade II)__AIT17476__Z
augggcaacagacaggccaagagcaccaaaguggacgagcaccaacgggcucaucugguccccgaugccucccaccucgggccucaguucugcaagucuuguugguuugaaaaucgcggacugguugagugcaacaaucauuaccuuugucugaacugccucagccugcuucuguccgugucuagcagauguccgaucugcaaaaugccccucccuacaaagcugaaagcggcugcccagcccuccgccccuucugcugaagccauucagaauacgacacccccuccguauacccccuga

SEQ ID NO: 12282 - RNA, 300 nt, Artificial Sequence
  derived and/or modified CDS sequence (opt5) from LASV(ISTH2010-NIG-2012;Clade II)__AIT17480__Z
augggcaacagacacgccaagagcaccaaaguggacgagcaucagcgggcucaccugguccccgaugccucccaucucgggccucaauucugcaagucuuguugguuugaaaaucgcggacugguugagugcaacaaucacuaccuuugucugaacugccucagccugcuucuguccgugucuagcagauguccgaucugcaaaaugccccucccuacaaagcugaaagcggcugcccagcccuccgccccuucuacggaagugauucagagcaccacacccccuccguauacccccuga

SEQ ID NO: 12283 - RNA, 300 nt, Artificial Sequence
  derived and/or modified CDS sequence (opt5) from LASV(ISTH2016-NIG-2012;Clade II)__AIT17484__Z
augggcaacagacacgccaagagcaccaaaguggacgagcaucagcgggcucaccugguccccgaugccucccaucucgggccucaauucugcaagucuuguugguuugaaaaucgcggacugguugagugcaacaaucacuaccuuugucugaacugccucagccugcuucuguccgugucuagcagauguccgaucugcaaaaugccccucccuacaaagcugaaagcggcugcccagcccuccgccccuucuacggaagagauucagaauaccacacccccuccguauacccccuga

SEQ ID NO: 12284 - RNA, 300 nt, Artificial Sequence
  derived and/or modified CDS sequence (opt5) from LASV(ISTH2020-NIG-2012;Clade II)__AIT17488__Z
augggcaacagacaggccaagcccaccaaaguggacgagcaccaacgggcucaucuggucccugaugccagccaccucgggccgcaguucugcaaguccuguugguuugaaaauaaaggacugguugagugcaacaaucauuaccuuugucugaacugccucucucugcuucugagcguguccucucgcugucccaucugcaagaugccucuccccacaaaacugaaggcggcugcccagccuagcgcccccuccacggaagcugcccagaauaccgcuccuccgcccuaugccccuuga

SEQ ID NO: 12285 - RNA, 300 nt, Artificial Sequence
  derived and/or modified CDS sequence (opt5) from LASV(ISTH2031-NIG-2012;Clade II)__AIT17496__Z
augggcaacagacaggccaagagcaccaaaguggacgagcaccaacgggcucaucugguccccgaugccucccaccucgggccucaguucugcaagucuuguugguuugaaaaucgcggacugguugagugcaacaaucauuaccuuugucugaacugccucagccugcuucuguccgugucuagcagauguccgaucugcaaaaugccccucccuacacggcugaaggcggcuacgcagcccuccgccccuucuaccgaagccacacagaccacaacacccccuccguauacccccuga

SEQ ID NO: 12286 - RNA, 300 nt, Artificial Sequence
  derived and/or modified CDS sequence (opt5) from LASV(ISTH2037-NIG-2012;Clade II)__AIT17500__Z
augggcaacagacagaccaagagcacaaaaguggacgagcaccaacgggcccaucugguccccgaugcuucccaccucgggccucaguucugcaagucuuguugguuugaaaauaaaggacugguugagugcaacaaucauuaccuuugucugaacugccucagccugcuucuguccgugucuagccgcuguccgaucugcaagaugccccucccuacgaaacugaagaccgccgcgcagcccuccgcuccucccacagaagccgccagaaccacagcuccuccgcccuaugccccuuga

SEQ ID NO: 12287 - RNA, 300 nt, Artificial Sequence
  derived and/or modified CDS sequence (opt5) from LASV(ISTH2042-NIG-2012;Clade II)__AIT17504__Z
augggcaacagacacgccaagagcaccaaaguggacgagcaucagcgggcucaccugguccccgaugccucccaucucgggccucaauucugcaagucuuguugguuugaaaaucgcggacugguugagugcaacaaucacuaccuuugucugaacugccucagccugcuucuguccgugucuagcagauguccgaucugcaaaaugccccucccuacaaagcugaaagcggcugcccagcccuccgccccuucuacggaagcuauucagaauaccacacccccuccguauacccccuga

SEQ ID NO: 12288 - RNA, 300 nt, Artificial Sequence
  derived and/or modified CDS sequence (opt5) from LASV(ISTH2046-NIG-2012;Clade II)__AIT17508__Z
augggcaacagacagaccaagagcacaaaaguggacgagcaccaacgggcccaucugguccccgaugcuucccaccucgggccucaguucugcaagucuuguugguuugaaaauaaaggacugguugagugcaacaaucauuaccuuugucugaacugccucagccugcuucuguccgugucuagccgcuguccgaucugcaagaugccccucccuacgaaacugaaggccgcggcucagcccuccgccccuucuaccgaagccacacagaauaccgcucccccuccguaugcccccuga

SEQ ID NO: 12289 - RNA, 300 nt, Artificial Sequence
  derived and/or modified CDS sequence (opt5) from LASV(ISTH2050-NIG-2012;Clade II)__AIT17512__Z
augggcaacagacaggccaagagcaccaaaguguacgagcaccaacgggcucaucugguccccgacgccucccaccucgggccucaguucugcaagucuuguugguuugaaaaucgcggacugguugagugcaacaaucauuaucuuugucugaacugccucagccugcuucuguccgugucuagcagauguccgaucugcaaaaugccccucccuacacggcugaaggcggcuacgcagcccuccgccccuucuaccgaagccacacagaauaccacacccccuccguacacccccuga

SEQ ID NO: 12290 - RNA, 300 nt, Artificial Sequence
  derived and/or modified CDS sequence (opt5) from LASV(ISTH2057-NIG-2012;Clade II)__AIT17516__Z
augggcaacagacaggccaagagcaccaaaguggacgagcaccaacgggcucaucugguccccgaugccucccaccucgggccucaguucugcaagucuuguugguuugaaaaucgcggacugguugagugcaacaaucauuaccuuugucugaacugccucagccugcuucuguccgugucuagcagauguccgaucugcaaaaugccccucccuacaaagcugaaaacggcgacccagcccuccgcuccucugacagaagccacccagaauacaacacccccuccguauacccccuga

SEQ ID NO: 12291 - RNA, 300 nt, Artificial Sequence
  derived and/or modified CDS sequence (opt5) from LASV(ISTH2061-NIG-2012;Clade II)__AIT17520__Z
augggcaacaagcaggccaaaagcaccaagguggacgagcaccaaagagcucaucugguccccgaugccucccaccucgggccucaguucugcaaaucuuguugguuugaaaaucggggacugguugagugcaacaaucauuaccuuugucugaacugccucagccugcuucuguccgugucuaaucgcuguccgaucugcaagaugccccucccuacaaaacugaaggcggcugcccagcccagcgccccuuccacggaagcuacccagaacacaacacccccuccguauacccccuga

SEQ ID NO: 12292 - RNA, 300 nt, Artificial Sequence
  derived and/or modified CDS sequence (opt5) from LASV(ISTH2065-NIG-2012;Clade II)__AIT17526__Z
augggcaacagacaggccaagagcgccaaagugaccgagcaccaacgggcccaucugguccccgacgcgucccaccucgggccucaguucugcaagucuuguugguuugaaaauaaaggacugguugagugcaacaaucauuaccuuugucugaacugccucagccugcuucuguccgugucuagccgcuguccgaucugcaagaugccccucccuacaagacugaaagcugccacgcagcccuccgccccuucugcugaagcuccccagagcaccacaccuccgcccuauaccccuuga

SEQ ID NO: 12293 - RNA, 300 nt, Artificial Sequence
  derived and/or modified CDS sequence (opt5) from LASV(ISTH2094-NIG-2012;Clade II)__AIT17536__Z
augggcaacagacagacccggcccacagaggccacggaacaaagccgcgcucaccuggugccugacgccucccaucucgggccgcaguucugcaagucuuguugguuugagaauaaaggacuggucgaaugcaacaaucacuaccuuugucugaacugccucagccugcuucuguccguuucuagcagaugucccaucugcaagaugccucuccccacccggcugaaagcguccgcucagccuucugccccucccacagaggccccgcagaauaaggcucccccucccuauaccccuuga

SEQ ID NO: 12294 - RNA, 300 nt, Artificial Sequence
  derived and/or modified CDS sequence (opt5) from LASV(ISTH2129-NIG-2012;Clade II)__AIT17542__Z
augggcaacagacaggucaagagcaccaaaguggacgagcaccaacgggcccaucugauccccgaugcuucccaccucgggccucaguucugcaagucuuguugguuugaaaaucgcggacugguugagugcaacaaucauuaccuuugucugaacugccucagccugcuucuguccgugucuagcagauguccgauuugcaaaaugccccucccuacaaagcuggaagccgcggcucagcccuccgccccuucuacggaggccacccaggacacaacacccccuccguauacccccuga

SEQ ID NO: 12295 - RNA, 300 nt, Artificial Sequence
  derived and/or modified CDS sequence (opt5) from LASV(ISTH2217-NIG-2012;Clade II)__AIT17546__Z
augggcaacaagcaggccaaaagcaccaagguggacgagcaccaaagagcucaucugguccccgaugccucccaccucgggccucaguucugcaaaucuuguugguuugaaaaucggggacugguugagugcaacaaucauuaccuuugucugaacugccucagccugcuucuguccgugucuagccgcuguccgaucugcaagaugccccucccuacaaaacugaaggcggcugcccagcccuccgccccuucuacggaaaccauucagaauacaacacccccuccguauacccccuga

SEQ ID NO: 12296 - RNA, 300 nt, Artificial Sequence
  derived and/or modified CDS sequence (opt5) from LASV(ISTH2271-NIG-2012;Clade II)__AIT17550__Z
augggcaacagacaggccaagcaaaccaaaguggacgagcaccagcgggcucaucugguccccgaugccagccaccucgggccucaguucugcaaguccuguugguuugaaaaucgcggacugguugagugcaacaaucauuaccuuugucugaacugccucucucugcuucugagcguguccucuagauguccgaucugcaaaaugccccucccuacaaagcugaaagcggcugcccagcccagcgccccuuccacggaaauuacccaaaauacaacacccccuccguauacccccuga

SEQ ID NO: 12297 - RNA, 300 nt, Artificial Sequence
  derived and/or modified CDS sequence (opt5) from LASV(ISTH2304-NIG-2012;Clade II)__AIT17554__Z
augggcaacagacaggccaagagcaccaaagcugacgagcaccaacgggcccaucuggugcccgaugcgucccaccucgggccucaguucugcaagucuuguugguuugaaaaucgcggacuggucgagugcaacaaucauuaccuuugucugaacugccucagccugcuucuguccguuucuaauagauguccgaucugcaaaaugccccucccuacacggcugaaggcugccgcccagcccagcgcuccuuccacggaagccacccaggacacaacacccccuccguauacccccuga

SEQ ID NO: 12298 - RNA, 300 nt, Artificial Sequence
  derived and/or modified CDS sequence (opt5) from LASV(ISTH2312-NIG-2012;Clade II)__AIT17558__Z
augggcaacagacaggccaagagcaccaaaguggacgagcaccaacgggcucaucugguccccgaugccucccaccucgggccucaguucugcaagucuuguugguuugaaaaucgcggacugguugagugcaacaaucauuaccuuugucugaacugccucagccugcuucuguccgugucuagcagauguccgaucugcaaaaugccccucccuacacggcugaaggcggcugcccagcccuccgccccuucuacggaagcuauucgcagcaccacacccccuccguauacccccuga

SEQ ID NO: 12299 - RNA, 300 nt, Artificial Sequence
  derived and/or modified CDS sequence (opt5) from LASV(ISTH2358-NIG-2012;Clade II)__AIT17570__Z
augggcaacagacaggccaagagcgcuaaagugaaugagcaccaacgggcccaucugguccccgacgcgucccaccucgggccucaguucugcaagucuuguugguuugaaaaccgcggacugguugagugcaauaaccauuaccuuugucugaauugccucagccugcuucuguccgugucuagcagauguccgaucugcaaaaugccccucccuaccaagcugaaagcugccgcccagcccuccgcuccuucuacagaagccacgcagaacauuacacccccuccguauacccccuga

SEQ ID NO: 12300 - RNA, 300 nt, Artificial Sequence
  derived and/or modified CDS sequence (opt5) from LASV(Lassa virus/H.sapiens-wt/NGA/2016/ISTH_0017;Clade II)__AVO03713__Z
augggcaacagacaggccaagagcaccaaaguggacgagcaccaacgggcucaucugguccccgaugccucccaccucgggccucaguucugcaagucuuguugguuugaaaaucgcggacugguugagugcaacaaucauuaccuuugucugaacugccucagccugcuucuguccgugucuagcagauguccgaucugcaaaaugccccucccuacaaagcugaaagcggcuacgcagcccuccgccccuucuaccgaagugaaucagaacacaacacccccuccguauacccccuga

SEQ ID NO: 12301 - RNA, 300 nt, Artificial Sequence
  derived and/or modified CDS sequence (opt5) from LASV(Lassa virus/H.sapiens-wt/NGA/2016/ISTH_0035;Clade II)__AVO03731__Z
augggcaacagacaggccaagagcaccaaaguggacgagcaccaacgggcucaucugcuccccgaugccucccaccuggggccucaguucugcaagucuuguugguuugaaaaucgcggacuugucgagugcaacaaucauuaccugugucucaacugccugagccuucugcucuccguuucuagcagauguccgaucugcaaaaugccccugccuacaaagcugaaagcggcuacgcagcccuccgccccuucuaccgaagccacacagaauaccacacccccuccguauacccccuga

SEQ ID NO: 12302 - RNA, 300 nt, Artificial Sequence
  derived and/or modified CDS sequence (opt5) from LASV(Lassa virus/H.sapiens-wt/NGA/2016/ISTH_0703;Clade II)__AVO03703__Z
augggcaacaagcagaccaaaagcacaaagguggacgagcaccaaagagcccaucugguccccgaugcuucccaccucgggccucaguucugcaaaucuuguugguuugaaaaucggggacugguugagugcaacaaucauuaccuuugucugaacugccucagccugcuucuguccgugucuagccgcuguccgaucugcaagaugccccucccuacgaaacugaaggccgcggcucagcccuccgccccuucuaccgaagccacacagaauauuacacccccuccguauacccccuga

SEQ ID NO: 12303 - RNA, 300 nt, Artificial Sequence
  derived and/or modified CDS sequence (opt5) from LASV(Lassa virus/H.sapiens-wt/NGA/2016/ISTH_0717;Clade II)__AVO03670__Z
augggcgggaagcacagcaaacccccuggagaguccaacucuccgagagccagccugauccccgacgcuacccaucucggcccucaguucugcaaguccuguugguuugaaaauaaagggcugguggagugcaacaaucacuaccuuugucugaacugccucucucugcuucugagcgucuccaaucggugucccauuugcaagaugccucuccccacacgccugagagccucuacgaacccuaccgcgccgcaaguuggacagaucgaucccacaaauccucccccuuauagccccuga

SEQ ID NO: 12304 - RNA, 300 nt, Artificial Sequence
  derived and/or modified CDS sequence (opt5) from LASV(Lassa virus/H.sapiens-wt/NGA/2016/ISTH_0753;Clade II)__AVO03748__Z
augggcaacagacaggccaagagcaccaaaguggacgagcaccaacgggcucaucugguccccgaugccucccaccucgggccucaguucugcaagucuuguugguuugaaaaucgcggacugguugagugcaacaaucauuaccuuugucugaacugccucagccugcuucuguccgugucuaauagauguccgaucugcaaaaugccccucccuacaaagcugaaagcggcugcccagcccagcgccccuuccacggaagcuacccaggacacaacacccccuccguauacccccuga

SEQ ID NO: 12305 - RNA, 300 nt, Artificial Sequence
  derived and/or modified CDS sequence (opt5) from LASV(Lassa virus/H.sapiens-wt/NGA/2016/ISTH_0919;Clade II)__AVO03760__Z
augggcaacagacacgccaagcccaccaaaguggacgagcaucagcgggcucaccuggucccugaugccagccaucucgggccgcaauucugcaaguccuguugguuugaaaauaaaggacugguugagugcaacaaucacuaccuuugucugaacugccucucucugcuucugagcguguccucucgcugucccaucugcaagaugccucuccccacaaaacugaaggcggcugcccagccuagcgcccccuccgcugaagccacgcagaauaccgcuccuccgcccuauacaccuuga

SEQ ID NO: 12306 - RNA, 300 nt, Artificial Sequence
  derived and/or modified CDS sequence (opt5) from LASV(Lassa virus/H.sapiens-wt/NGA/2016/ISTH_1006;Clade II)__AVO03750__Z
augggcaacaagcagaccaaaagcacaaagguggacgagcaccaaagagcccaucugguccccgaugcuucccaccucgggccucaguucugcaaaucuuguugguuugaaaaucggggacugguugagugcaacaaucauuaccuuugucugaacugccucagccugcuucuguccgugucuagccgcuguccgaucugcaagaugccccucccuacgaaacugaagaccguggcccagcccuccgcgccucccacagaagcuacccagaauacaaccccuccgcccuauacaccuuga

SEQ ID NO: 12307 - RNA, 297 nt, Artificial Sequence
  derived and/or modified CDS sequence (opt5) from LASV(Lassa virus/H.sapiens-wt/NGA/2016/ISTH_1070;Clade II)__AVO03754__Z
ggcaacagacaggccaagcccaccaaaguggacgagcaccaacgggcucaucuggucccugaugccagccaccucgggccgcaguucugcaaguccuguugguuugaaaauaaaggacugguugagugcaacaaucauuaccuuugucugaacugccucucucugcuucugggcgugagcucccgcugucccaucugcaagaugccucuccccacaaaacugaaggcggcugcccagccuucugcccccagcacggaagcugcccagaauaccgcuccuccgcccuaugccccuuga

SEQ ID NO: 12308 - RNA, 300 nt, Artificial Sequence
  derived and/or modified CDS sequence (opt5) from LASV(Lassa virus/H.sapiens-wt/NGA/2016/ISTH_1174;Clade II)__AVO03716__Z
augggcaacagacaggccaagagcaccaaaguggacgagcaccaacgggcucaucugguccccgaugccucccaccucgggccucaguucugcaagucuuguugguuugaaaaucgcggacugguugagugcaacaaucauuaccuuugucugaacugccucagccugcuucuguccgugucuagcagauguccgaucugcaaaaugccccucccuacaaagcugaaagcggcuacgcagcccuccgccccucccaccgaaacaacccagaauacaaccccuccgcccuauacaccuuga

SEQ ID NO: 12309 - RNA, 300 nt, Artificial Sequence
  derived and/or modified CDS sequence (opt5) from LASV(Lassa virus/H.sapiens-wt/NGA/2016/ISTH_1207;Clade II)__AVO03680__Z
augggcaacagacaggccaagagcaccaaaguggacgagcaccaacgggcucaucugguccccgaugccucccaccucgggccucaguucugcaagucuuguugguuugaaaaucgcggacugguugagugcaacaaucauuaccuuugucugaacugccucagccugcuucuguccgugucuagcagauguccgaucugcaaaaugccccucccuacaaagcugcgggcgacggcucagcccuccgccccuucuaccgaagccacacagaauaccacacccccuccguauacccccuga

SEQ ID NO: 12310 - RNA, 300 nt, Artificial Sequence
  derived and/or modified CDS sequence (opt5) from LASV(Lassa virus/H.sapiens-wt/NGA/2016/ISTH_1311;Clade II)__AVO03739__Z
augggcaacagacaggccaagcccaccgaggcuaucgaacaaaaucgggcccaccuggugccugacgcgagccaucucgggccgcaguucugcaaauccuguugguuugagaacaagggacuggucgaaugcaauaaccacuaccuuugucugaauugccucucucugcuucugagcguuuccucucgcugucccauuugcaaaaugccucuccccacaagacugaaggcuagcgcccagccuuccgcccccucugcugaggccccucagaacgcuaaaccgcccccuuauagccccuga

SEQ ID NO: 12311 - RNA, 300 nt, Artificial Sequence
  derived and/or modified CDS sequence (opt5) from LASV(Lassa virus/H.sapiens-wt/NGA/2016/ISTH_1423;Clade II)__AVO03685__Z
augggcaacaagcaggccaaaagcaucaaggcugacgagcaccaaagagcccaucuggugcccgaugcgucccaccucgggccucaguucugcaaaucuuguugguuugaaaaucggggacuggucgagugcaacaaucauuaccuuugucugaacugccucagccugcuucuguccguuucuagccgcuguccgauuugcaagaugccccucccuaccaaacugaagacagcugcccagcccuccgccccucccgugggcgcuacgcagaauaccacaccuccgcccuauaccccuuga

SEQ ID NO: 12312 - RNA, 300 nt, Artificial Sequence
  derived and/or modified CDS sequence (opt5) from LASV(Lassa virus/H.sapiens-wt/NGA/2016/ISTH_1462;Clade II)__AVO03690__Z
augggcaacaagcagaccaaaagcacaaagguggacgagcaccaaagagcccaucugguccccgaugcuucccaccucgggccucaguucugcaaaucuuguugguuugaaaaucggggacugguugagugcaacaaucauuaccuuugucugaacugccucagccugcuucuguccgugucuagccgcuguccgaucugcaagaugccccucccuacgaaacugaaggccgcggcucagcccuccgccccuucuaccgaagccacacagaauaccacacccccuccguauacccccuga

SEQ ID NO: 12313 - RNA, 300 nt, Artificial Sequence
  derived and/or modified CDS sequence (opt5) from LASV(Lassa virus/H.sapiens-wt/NGA/2016/ISTH_1472;Clade II)__AVO03726__Z
augggcaacaagcagaccaaaagcacaaagguggacgagcaccaaagagcccaucugguccccgaugcuucccaccucgggccucaguucugcaaaucuuguugguuugaaaaucggggacugguugagugcaacaaucauuaccuuugucugaacugccucagccugcuucuguccgugucuagccgcuguccgaucugcaagaugccccucccuacgaaacugaaggccgcggcucagcccuccgccccucccaccgaagccacacagaauaccacaccuccgcccuauaccccuuga

SEQ ID NO: 12314 - RNA, 300 nt, Artificial Sequence
  derived and/or modified CDS sequence (opt5) from LASV(Lassa virus/H.sapiens-wt/NGA/2016/ISTH_1496;Clade II)__AVO03693__Z
augggcaacaagcaggccaaaagcaccaagaucgacgaucaccaaagagcucaucuggugcccgacgccucccaccucgggccucaguucugcaaaucuuguugguuugagaaucggggacuggucgaaugcaacaaucauuaccuuugucugaacugccucagccugcuucuguccguuucuagccgcuguccgauuugcaagaugccccucccuacaaaacugaaggcggcugcccagcccuccgccccuucuacggagaccauccagaauacaacacccccuccguauacccccuga

SEQ ID NO: 12315 - RNA, 300 nt, Artificial Sequence
  derived and/or modified CDS sequence (opt5) from LASV(Lassa virus/H.sapiens-wt/NGA/2016/ISTH_1546;Clade II)__AVO03665__Z
augggcgggaagcagagcagacccccuaaaaagguggacuccccgcgggccaaccugauccccgaugcuucuuacaugggaccucaauucugcaaaagcuguugguuugagaauaagggccucgucgaaugcaacaaucacuaucugugucuuaacugccugucccuccugcuuucuguuagcucccgcugucccauuugcaaaaugccucugcccaccaagcucaaggccucuacaagcccuacggcgccgcccaucauugggaccaauacaaccaacccucccccuuacucccccuga

SEQ ID NO: 12316 - RNA, 300 nt, Artificial Sequence
  derived and/or modified CDS sequence (opt5) from LASV(Lassa virus/H.sapiens-wt/NGA/2016/ISTH_1568;Clade II)__AVO03711__Z
augggcaacagacaggcccggagcaccaagguggacgagcaccaacgcgcucaucugcuccccgaugccucccaccuggggccucaguucugcaaaucuuguugguuugaaaauagaggacuugucgagugcaacaaucauuaccugugucucaacugccugagccuucugcucuccguuucuagccgguguccgaucugcaagaugccccugccuacaaaacugaaggcggcuacgcagcccuccgccccuucuaccgaagccacacagaauaccacacccccuccguauacccccuga

SEQ ID NO: 12317 - RNA, 300 nt, Artificial Sequence
  derived and/or modified CDS sequence (opt5) from LASV(Lassa virus/H.sapiens-wt/NGA/2016/ISTH_1610;Clade II)__AVO03687__Z
augggcaacagacaggccaagagcaccaaaguggcugagcaccaacgggcccaucugguccccgacgcgucccaccucgggccucaguucugcaagucuuguugguuugaaaauaaaggacugguugagugcaacaaucauuaccuuugucugaacugccucagccugcuucuguccgugucuagccgcuguccgaucugcaagaugccccucccuacaaaacugagagcuacggcccagcccuccgccccucccucugaagcuacccagagcacaaccccuccgcccuauacaccuuga

SEQ ID NO: 12318 - RNA, 300 nt, Artificial Sequence
  derived and/or modified CDS sequence (opt5) from LASV(Lassa virus/H.sapiens-wt/NGA/2018/ISTH_0026;Clade II)__AVV65086__Z
augggcaacaagcaggccaaaagcaccaagguggacgagcaccaaagagcucaucugguccccgaugccucccaccucgggccucaguucugcaaaucuuguugguuugaaaaucggggacugguugagugcaacaaucauuaccuuugucugaacugccucagccugcuucuguccgugucuagccgcuguccgaucugcaagaugccccucccuacaagacugaaagcggcuacgcagcccuccgccccuucuaccgaagccacacggaauaccacacccccuccguauacccccuga

SEQ ID NO: 12319 - RNA, 300 nt, Artificial Sequence
  derived and/or modified CDS sequence (opt5) from LASV(Lassa virus/H.sapiens-wt/NGA/2018/ISTH_0097;Clade II)__AVV65091__Z
augggcaacaagcagaccaaaagcacaaagguggacgagcaccaaagagcccaucugguccccgaugcuucccaccucgggccucaguucugcaaaucuuguugguuugaaaaucggggacugguugagugcaacaaucauuaccuuugucugaacugccucagccugcuucuguccgugucuagccgcuguccgaucugcaagaugccccucccuacgaaacugaaggccgcggcucagcccuccgccccuucuaccgaagugacacagaauaccacacccccuccguauacccccuga

SEQ ID NO: 12320 - RNA, 300 nt, Artificial Sequence
  derived and/or modified CDS sequence (opt5) from LASV(Lassa virus/H.sapiens-wt/NGA/2018/ISTH_0664;Clade II)__AVV65093__Z
augggcaacaagcagaccaaaagcacaaagguggacgagcaccaaagagcccaucugguccccgaugcuucccaccucgggccucaguucugcaaaucuuguugguuugaaaaucggggacugguugagugcaacaaucauuaccuuugucugaacugccucagccugcuucuguccgugucuggccgcuguccgaucugcaagaugccccucccuacgaaacugaaggccgcggcucagcccagcgccccuuccaccgaagccacacagaauaccacacccccuccguauacccccuga

SEQ ID NO: 12321 - RNA, 300 nt, Artificial Sequence
  derived and/or modified CDS sequence (opt5) from LASV(Lassa virus/H.sapiens-wt/NGA/2018/ISTH_0959;Clade II)__AVV65084__Z
augggcaacaagcaggccaaaagcaccaagguggacgagcaccaaagagcucaucugguccccgaugccucccaccucgggccucaguucugcaaaucuuguugguuugaaaaucggggacugguugagugcaacaaucauuaccuuugucugaacugccucagccugcuucuguccgugucuagccgcuguccgaucugcaagaugccccucccuacaaaacugaaggcggcugcccagcccuccgccccuucuacggaagcuauucagagcaccacacccccuccguauacccccuga

SEQ ID NO: 12322 - RNA, 300 nt, Artificial Sequence
  derived and/or modified CDS sequence (opt5) from LASV(Lassa virus/H.sapiens-wt/NGA/2018/ISTH_1079;Clade II)__AVV65074__Z
augggcaacaagcagaccaaaagcacaaagguggacgagcaccaaagagcccaucugguccccgaugcuucccaccucgggccucaguucugcaaaucuuguugguuugaaaauaagggacugguugagugcaacaaucauuaccuuugucugaacugccucagccugcuucuguccgugucuagccgguguccgaucugcaaaaugccccucccuacgaagcugaagaccgccgcgcagcccuccgcuccucccacagaagccacccagaauacaaccccuccgcccuauacaccuuga

SEQ ID NO: 12323 - RNA, 300 nt, Artificial Sequence
  derived and/or modified CDS sequence (opt5) from LASV(Lassa virus/H.sapiens-wt/NGA/2018/ISTH_1177;Clade II)__AVV65080__Z
augggcaacagacagaccaagagcacaaaaguggacgagcaccaacgggcccaucugguccccgaugcuucccaccucgggccucaguucugcaagucuuguugguuugaaaauaaaggacugguugagugcaacaaucauuaccuuugucugaacugccucagccugcuucuguccgugucuagccgcuguccgaucugcaagaugccccucccuacgaaacugaaggccgcggcucagcccuccgccccuucuaccgaagccgcucagaauacagcucccccuccguaugcccccuga

SEQ ID NO: 12324 - RNA, 300 nt, Artificial Sequence
  derived and/or modified CDS sequence (opt5) from LASV(Lassa virus/H.sapiens-wt/NGA/2018/ISTH_1375;Clade II)__AVV65078__Z
augggcaacagacacgccaagagcaccaaaaucaaugagcaucagcgggcucaccuggugcccgacgccucccaucucgggccucaauucugcaagucuuguugguuugaaaaccgcggacuggucgagugcaauaaccacuaccuuugucugaauugccucagccugcuucuguccguuucuagcagauguccgauuugcaaaaugccccucccuacaaagcugaaagcggcugcccagcccuccgccccuucuacggaagcuauccagaacaccacacccccuccguauacccccuga

SEQ ID NO: 12325 - RNA, 300 nt, Artificial Sequence
  derived and/or modified CDS sequence (opt5) from LASV(LASV003-NIG-2008;Clade II)__AIT17578__Z
augggcaacagacaggccaagagcaccaaaguggacgagcaccaacgggcucaucugguccccgaugccucccaccucgggccucaguucugcaagucuuguugguuugaaaauaaaggacugguugagugcaacaaucauuaccuuugucugaacugccucagccugcuucuguccgugucuagccgcuguccgaucugcaagaugccccucccuacaaaacugagagcggcugcccagcccuccgccccuucuacggaaagcgcucagaauaccgcucccccuccguaugcccccuga

SEQ ID NO: 12326 - RNA, 300 nt, Artificial Sequence
  derived and/or modified CDS sequence (opt5) from LASV(LASV035-NIG-2009;Clade II)__AIT17586__Z
augggcaacaagcaggccaaaagcaccaagguggacgagcaccaaagagcucaucugguccccgaugccucccaccucgggccucaguucugcaaaucuuguugguuugaaaaucggggacugguugagugcaacaaucauuaccuuugucugaacugccucagccugcuucuguccgugucuagccgcuguccgaucugcaagaugccccucccuacaagacugaaagcggcugcccagcccuccgccccuucuacggaagugacccagaauacaacacccccuccguauacccccuga

SEQ ID NO: 12327 - RNA, 300 nt, Artificial Sequence
  derived and/or modified CDS sequence (opt5) from LASV(LASV042-NIG-2009;Clade II)__AIT17590__Z
augggcaacagacaggccaagagcaccaaaguggacgagcaccaacgggcucaucugguccccgaugccucccaccucgggccucaguucugcaagucuuguugguuugaaaauaaaggacugguugagugcaacaaucauuaccuuugucugaacugccucagccugcuucuguccgugucuagccgcuguccgaucugcaagaugccccucccuacaaaacuggaagcgacgacccagcccuccgcuccuucuacagaggaaacccagagcacaacacccccuccguauacccccuga

SEQ ID NO: 12328 - RNA, 300 nt, Artificial Sequence
  derived and/or modified CDS sequence (opt5) from LASV(LASV049-NIG-2009;Clade II)__AIT17602__Z
augggcaacaagcaggccaaaagcaccaagguggacgaguaccaaagagcucaccugguccccgaugccucccaucucgggccucaguucugcaaaucuuguugguuugaaaaucggggacugguugagugcaacaaucacuaucuuugucugaacugccucagccugcuucuguccgugucuaaucgcuguccgaucugcaagaugccccucccuacaagacugaaagcggcugcccagcccagcgccccucccacggaagcuacccagaacacaaccccuccgcccuacacaccuuga

SEQ ID NO: 12329 - RNA, 300 nt, Artificial Sequence
  derived and/or modified CDS sequence (opt5) from LASV(LASV056-NIG-2008;Clade II)__AIT17610__Z
augggcaacagacaggccaagcccaccaaaguggacgagcaccaacgggcucagcuggucccugaugccagccaucucgggccgcaguucugcaaguccuguugguuugaaaaucgcggacugguugagugcaacaaucacuaccuuugucugaacugccucucucugcuucugagcguguccucuagaugucccaucugcaaaaugccucuccccacaaagcugaaagcggcuacgcagccuagcgcccccuccaccgaagccacacaaaauucuaccccuccgcccuauacaccuuga

SEQ ID NO: 12330 - RNA, 300 nt, Artificial Sequence
  derived and/or modified CDS sequence (opt5) from LASV(LASV058-NIG-2008;Clade II)__AIT17614__Z
augggcaacagacaggccaagagcaccaaaguggacgagcaccaacgggcucaucugguccccgaugccucccaccucgggccucaguucugcaagucuuguugguuugaaaaucgcggacugguugagugcaacaaucauuaccuuugucugaacugccucagccugcuucuguccgugucuagcagauguccgaucugcaaaaugccccucccuacaaagcugaaagcggcuacgcagcccuccgccccuucuaccgaagccacacagaauaccacacccccuccguauacccccuga

SEQ ID NO: 12331 - RNA, 300 nt, Artificial Sequence
  derived and/or modified CDS sequence (opt5) from LASV(LASV063-NIG-2009;Clade II)__AIT17618__Z
augggcaacagacaggccaagagcaccgagguggacgaacaccaacgggcucaucugguccccgaugccucccaccucgggccucaguucugcaaaucuuguugguuugagaaucgcggacugguugaaugcaacaaucauuaccuuugucugaacugccucagccugcuucuguccgugucuaauagauguccgaucugcaagaugccccucccuacaaaacugaaggcggcuacgcagcccagcgccccuuccaccgaggccacacagaacaccacacccccuccguauacccccuga

SEQ ID NO: 12332 - RNA, 300 nt, Artificial Sequence
  derived and/or modified CDS sequence (opt5) from LASV(LASV1000-NIG-2009;Clade II)__AIT17780__Z
augggcaacagacagaccaagagcacaaaaguggacgagcaccaacgggccuaccugguccccgaugcuucccuccuggggccucaguucugcaagucuuguugguuugaaaauaaaggacuuguugagugcaacaaucauuaucugugucucaacugccugagccuucugcucuccgugucuagccgcuguccgaucugcaagaugccccugccuacgagacugaaagccgcggcucagcccuccgccccucccaccgaagccauucagaauacaaccccuccgcccuacacaccuuga

SEQ ID NO: 12333 - RNA, 300 nt, Artificial Sequence
  derived and/or modified CDS sequence (opt5) from LASV(LASV1008-NIG-2009;Clade II)__AIT17784__Z
augggcaacagacagaccaagcccacaaaaguggacgagcaccaacgggcccaucuggucccugaugcuagccaccucgggccgcaguucugcaaguccuguugguuugaaaauaaaggacugguugagugcaacaaucauuaccuuugucugaacugccucucucugcuucugagcguguccucucgcugucccaucugcaagaugccucuccccacgaaacugaaggccaccgcgcagccuagcgcucccuccacagaagccgcccagaauaccgcuccuccgcccuaugccccuuga

SEQ ID NO: 12334 - RNA, 300 nt, Artificial Sequence
  derived and/or modified CDS sequence (opt5) from LASV(LASV1011-NIG-2009;Clade II)__AIT17788__Z
augggcaacagacaggucaagagcaccaaaguggacgagcaccaacgggcccaucugguucccgaugcuucccaccucgggccucaguucugcaagucuuguugguuugaaaaucgcggacugguggagugcaacaaucauuaccuuugucugaacugccucagccugcuucuguccgugucuagcagauguccgaucugcaaaaugccccucccuacaaagcugaaagccgcgacgcagcccuccgcuccucccaccgaagccacacagaagaccacaccuccgcccuauaccccuuga

SEQ ID NO: 12335 - RNA, 300 nt, Artificial Sequence
  derived and/or modified CDS sequence (opt5) from LASV(LASV1015-NIG-2009;Clade II)__AIT17792__Z
augggcaacaagcaggccaaaagcaccaagguggacgagcaccaaagagcucaucugguccccgaugccucccaccucgggccucaguucugcaaaucuuguugguuugaaaaucggggacugguugagugcaacaaucauuaccuuugucugaacugccucagccugcuucuguccgugucuggccgcuguccgaucugcaagaugccccucccuacaaaacugaaggcgacggcucagcccagcgccccuuccaccgaagccacacagaauaccacacccccuccguauacccccuga

SEQ ID NO: 12336 - RNA, 300 nt, Artificial Sequence
  derived and/or modified CDS sequence (opt5) from LASV(LASV1016-NIG-2009;Clade II)__AIT17796__Z
augggcaacaagcaggccaaaagcaccaagguggacgagcaccaaagagcucaucugguccccgaugccucccaccucgggccucaguucugcaaaucuuguugguuugaaaaucggggacugguugagugcaacaaucauuaccuuugucugaacugccucagccugcuucuguccgugucuagccgcuguccgaucugcaagaugccccucccuacaaaacugaaggcggcugcccagcccuccgccccuucuacggaagcuauucagaauaccacacccccuccguauacccccuga

SEQ ID NO: 12337 - RNA, 300 nt, Artificial Sequence
  derived and/or modified CDS sequence (opt5) from LASV(LASV221-NIG-2010;Clade II)__AIT17622__Z
augggcaacagacaggccaagagcaccaaaguggacgagcaccaacgggcucaucugguccccgaugccucccaccucgggccucaguucugcaagucuuguugguuugaaaaucgcggacugguugagugcaacaaucauuaccuuugucugaacugccucagccugcuucuguccgugucuagcagauguccgaucugcaaaaugccccucccuacaaagcugaaagcggcuacgcagcccuccgccccuucuaccgaagugacacagaauaccauucccccuccguauagccccuga

SEQ ID NO: 12338 - RNA, 300 nt, Artificial Sequence
  derived and/or modified CDS sequence (opt5) from LASV(LASV225-NIG-2010;Clade II)__AIT17628__Z
augggcaacaagcaggccaaaagcaccaagaucgacgagcaccaaagagcucaucuggugcccgaugccucccaccucgggccucaguucugcaaaucuuguugguuugaaaaucggggacuggucgagugcaacaaucauuaccuuugucugaacugccucagccugcuucuguccguuucuagccgcuguccgauuugcaagaugccccucccuacaagacugaaagcggcuacgcagcccuccgccccuucuaccgaagccacacagaauaccacacccccuccguauacccccuga

SEQ ID NO: 12339 - RNA, 300 nt, Artificial Sequence
  derived and/or modified CDS sequence (opt5) from LASV(LASV229-NIG-2010;Clade II)__AIT17632__Z
augggcaacagacaggccaagagcaccaaaguggacgagcaccaacgggcucaucugguccccgaugccucccaccucgggccucaguucugcaagucuuguugguuugaaaauaaaggacugguugagugcaacaaucauuaccuuugucugaacugccucagccugcuucuguccgugucuagccgcuguccgaucugcaagaugccccucccuacaaaacugagagcgacggcucagcccuccgccccuucuaccgaagccauucagaauacaacacccccuccguauacccccuga

SEQ ID NO: 12340 - RNA, 300 nt, Artificial Sequence
  derived and/or modified CDS sequence (opt5) from LASV(LASV237-NIG-2010;Clade II)__AIT17636__Z
augggcaacagacaggccaagagcaccaaaguggacgagcaccaacgggcucaucugguccccgaugccucccaccucgggccucaguucugcaagucuuguugguuugaaaaucgcggacugguugagugcaacaaucauuaccuuugucugaacugccucagccugcuucuguccgugucuagcagauguccgaucugcaaaaugccccucccuacaaagcugaaagcggcugcccagcccuccgccccuucuauugaaacgauccagaauaccacacccccuccguauacccccuga

SEQ ID NO: 12341 - RNA, 300 nt, Artificial Sequence
  derived and/or modified CDS sequence (opt5) from LASV(LASV239-NIG-2010;Clade II)__AIT17640__Z
augggcaacagacaggccaagagcaccaaagugggggagcaccaacgggcucaucugguccccgacgccucccaccucggaccucaguucugcaagucuuguugguuugaaaaucgcggccugguugagugcaacaaucauuaccuuugucugaacugccucagccugcuucuguccgugucuagcagauguccgaucugcaaaaugccccucccuacaaagcugaaagcggcugcccagcccuccgccccuucuacggaagcuacccaggauacaacacccccuccguauacccccuga

SEQ ID NO: 12342 - RNA, 300 nt, Artificial Sequence
  derived and/or modified CDS sequence (opt5) from LASV(LASV242-NIG-2010;Clade II)__AIT17648__Z
augggcaacagacaggccaagagcaccaaaguggacgagcaccaacgggcucaucugguccccgaugccucccaccucgggccucaguucugcaagucuuguugguuugaaaauaaaggacugguugagugcaacaaucauuaccuuugucugaacugccucagccugcuucuguccgugucuagccgcuguccgaucugcaagaugccccucccuacaaaacugaaggcgacggugcagcccuccgcuccuucuaccgaagccgcccagagcacagcucccccuccguaugcccccuga

SEQ ID NO: 12343 - RNA, 300 nt, Artificial Sequence
  derived and/or modified CDS sequence (opt5) from LASV(LASV245-NIG-2011;Clade II)__AIT17652__Z
augggcaacagacaggccaagagcaccaaagugggggagcaccaacgggcucaucugguccccgacgccucccaccucggaccucaguucugcaagucuuguugguuugaaaaucgcggccugguugagugcaacaaucauuaccuuugucugaacugccucagccugcuucuguccgugucuagcagauguccgaucugcaaaaugccccucccuacaaagcugaaagcggcugcccagcccuccgccccuucugcugaagccauucagaagacgacacccccuccguauacccccuga

SEQ ID NO: 12344 - RNA, 300 nt, Artificial Sequence
  derived and/or modified CDS sequence (opt5) from LASV(LASV246-NIG-2010;Clade II)__AIT17656__Z
augggcaacagacaggccaagagcaccaaaguggacgaucaccaacgggcucaucugguccccgacgccucccaccucgggccucaguucugcaagucuuguugguuugagaaucgcggacugguugaaugcaacaaucauuaccuuugucugaacugccucagccugcuucuguccgugucuagcagauguccgaucugcaaaaugccccucccuacaaagcugaaagcggcugcccagcccuccgccccuucuacggaggcugcccaggauaccacacccccuccguauacccccuga

SEQ ID NO: 12345 - RNA, 300 nt, Artificial Sequence
  derived and/or modified CDS sequence (opt5) from LASV(LASV250-NIG-2011;Clade II)__AIT17660__Z
augggcaacagacaggccaagagcaccaaaguggacgagcaccaacgggcucaucugguccccgaugccucccaccucgggccucaguucugcaagucuuguugguuugaaaaucgcggacugguugagugcaacaaucauuaccuuugucugaacugccucagccugcuucuguccgugucuaauagauguccgaucugcaaaaugccccucccuacaaagcugaaagcggcugcccagcccagcgccccuuccacggaagcuauucagaacaccacacccccuccguaugcccccuga

SEQ ID NO: 12346 - RNA, 300 nt, Artificial Sequence
  derived and/or modified CDS sequence (opt5) from LASV(LASV251-NIG-2010;Clade II)__AIT17664__Z
augggcaacaagcaggccaaaagcaccaagguggacgagcaccaaagagcucaucugguccccgaugccucccaccucgggccucaguucugcaaaucuuguugguuugaaaauaagggacugguugagugcaacaaucauuaccuuugucugaacugccucagccugcuucuguccgugucuagccgguguccgaucugcaaaaugccccucccuacaaagcugaaggcggcugcccagcccuccgccccuucuacggaagcugcccagaauaccgcucccccuccguaugcccccuga

SEQ ID NO: 12347 - RNA, 300 nt, Artificial Sequence
  derived and/or modified CDS sequence (opt5) from LASV(LASV253-NIG-2011;Clade II)__AIT17668__Z
augggcaacagacaggccaagagcaccaaaguggacgagcaccaacgggcucaucugguccccgaugccucccaccucgggccucaguucugcaagucuuguugguuugaaaauaaaggacugguugagugcaacaaucauuaccuuugucugaacugccucagccugcuucuguccgugucuagccgcuguccgaucugcaagaugccccucccuacaaaacugaagacgaccgcgcagcccuccgcuccucccacagaagccgccaagaauaccgcuccuccgcccuaugccccuuga

SEQ ID NO: 12348 - RNA, 300 nt, Artificial Sequence
  derived and/or modified CDS sequence (opt5) from LASV(LASV256-NIG-2010;Clade II)__AIT17676__Z
augggcaacagacaggccaagagcaccaaaguggacgagcaccaacgggcucaucugguccccgaugccucccaccucgggccucaguucugcaagucuuguugguuugaaaaucgcggacugguugagugcaacaaucauuaccuuugucugaacugccucagccugcuucuguccgugucuagcagauguccgaucugcaaaaugccccucccuacaaagcugaaagcggcuacgcagcccuccgccccuucuaccgaagugacacagaauaccacacccccuccguauacccccuga

SEQ ID NO: 12349 - RNA, 300 nt, Artificial Sequence
  derived and/or modified CDS sequence (opt5) from LASV(LASV263-NIG-2011;Clade II)__AIT17680__Z
augggcaacagacaggccaagagcaccaaaaucgacgagcaccaacgggcucaucuggugcccgaugccucccaccucgggccucaguucugcaagucuuguugguuugaaaaucgcggacuggucgagugcaacaaucauuaccuuugucugaacugccucagccugcuucuguccguuucuagcagauguccgauuugcaaaaugccccucccuacaaagcugaaagcggcugcccagcccuccgccccuucuacggaagcuauccagaauaccacacccccuccguauacccccuga

SEQ ID NO: 12350 - RNA, 300 nt, Artificial Sequence
  derived and/or modified CDS sequence (opt5) from LASV(LASV267-NIG-2010;Clade II)__AIT17684__Z
augggcaacagacaggccaagagcgcuaaaguggacgagcaccaacgggcccaucugguccccgaugcgucccaccucgggccucaguucugcaagucuuguugguuugaaaauaaaggacugguugagugcaacaaucauuaccuuugucugaacugccucagccugcuucuguccgugucuugucgcugcccgaucuguaagaugccccucccuaccaaacugaaggcugccacacagcccagcgccccuuccacggaagcuacccagaauacaacacccccuccguauacccccuga

SEQ ID NO: 12351 - RNA, 300 nt, Artificial Sequence
  derived and/or modified CDS sequence (opt5) from LASV(LASV274-NIG-2010;Clade II)__AIT17692__Z
augggcaacagacacgccaagcccaccaaaguggacgagcaucagcgggcucaccuggucccugaugccagccaucucgggccgcaauucugcaaguccuguugguuugaaaaucgcggacugguugagugcaacaaucacuaccuuugucugaacugccucucucugcuucugagcguguccucuagaugucccaucugcaaaaugccucuccccacaaagcugaaagcggcugcccagccuagcgcccccuccacggaagcuauucagaauaccacaccuccgcccuauaccccuuga

SEQ ID NO: 12352 - RNA, 300 nt, Artificial Sequence
  derived and/or modified CDS sequence (opt5) from LASV(LASV719-NIG-2009;Clade II)__AIT17702__Z
augggcaacagacacgccaagagcaccaaaguggacgaacaucagcgggcucaccugguccccgaugccucccaucucgggccucaauucugcaagucuuguugguuugaaaaucgcggacugguugagugcaacaaucacuaccuuugucugaacugccucagccugcuucuguccgugucuagcagauguccgaucugcaaaaugccccucccuacaaagcugaaagcggcugcccagcccuccgccccuucuacggaggcuuuccagaauaccacacccccuccguauacccccuga

SEQ ID NO: 12353 - RNA, 300 nt, Artificial Sequence
  derived and/or modified CDS sequence (opt5) from LASV(LASV737-NIG-2009;Clade II)__AIT17708__Z
augggcaacagacacgccaagagcaccaaaguggacgagcaucagcgggcucaccugguccccgaugccucccaucucgggccucaauucugcaagucuuguugguuugaaaaucgcggacugguugagugcaacaaucacuaccuuugucugaacugccucagccugcuucuguccgugucuagcagauguccgaucugcaaaaugccccucccuacaaagcugaaagcggcuacgcagcccuccgccccuucuaccgaagccauucagaauacaacacccccuccguauacccccuga

SEQ ID NO: 12354 - RNA, 300 nt, Artificial Sequence
  derived and/or modified CDS sequence (opt5) from LASV(LASV966-NIG-2009;Clade II)__AIT17716__Z
augggcaacagacccgccaagagcaccaaaguggacgagcaccagcgggcucaucuggucccugaugccucccaccucgggccgcaauucugcaagucuuguugguuugaaaaucgcggacugguugagugcaacaaucauuaccuuugucugaacugccucagccugcuucuguccgugucuagcagaugucccaucugcaaaaugccucuccccacaaagcugaaagcggcugcccagccuuccgcccccucuacggaagcuacccagaauacaaccccuccgcccuauacaccuuga

SEQ ID NO: 12355 - RNA, 300 nt, Artificial Sequence
  derived and/or modified CDS sequence (opt5) from LASV(LASV967-NIG-2009;Clade II)__AIT17720__Z
augggcaacagacaggccaagcccaccaaaguggacgagcaccaacgggcucaucuggucccugaugccagccaccucgggccgcaguucugcaaguccuguugguuugaaaaucgcggacugguugagugcaacaaucauuaccuuugucugaacugccucucucugcuucugagcguguccucuagaugucccaucugcaaaaugccucuccccacacggcugaaggcggcugcccagccuagcgcccccuccacggaagagacccagaauacaaccccuccgcccuauacaccuuga

SEQ ID NO: 12356 - RNA, 300 nt, Artificial Sequence
  derived and/or modified CDS sequence (opt5) from LASV(LASV975-NIG-2009;Clade II)__AIT17730__Z
augggcaacagacaggccaagagcaccaaaguggacgagcaccaacgggcucaucugguccccgaugccucccaccucgggccucaguucugcaagucuuguugguuugaaaaucgcggacugguugagugcaacaaucauuaccuuugucugaacugccucagccugcuucuguccgugucuagcagauguccgaucugcaaaaugccccucccuacaaagcugaaagcggcugcccagcccuccgccccucugacggaagcuauucagaauaccacacccccuccguauacccccuga

SEQ ID NO: 12357 - RNA, 300 nt, Artificial Sequence
  derived and/or modified CDS sequence (opt5) from LASV(LASV976-NIG-2009;Clade II)__AIT17734__Z
augggcaacagacaggccaagagcaccaaaguggacgagcaccaacgggcucaucugguccccgaugccucccaccucgggccucaguucugcaagucuuguugguuugaaaaucgcggacugguugagugcaacaaucauuaccuuugucugaacugccucagccugcuucuguccgugucuagcagauguccgaucugcaaaaugccccucccuacaaagcugaaagcggcugcccagcccuccgccccuucuacggaagcuauucagaauaccacacccccuccguauacccccuga

SEQ ID NO: 12358 - RNA, 300 nt, Artificial Sequence
  derived and/or modified CDS sequence (opt5) from LASV(LASV977-NIG-2009;Clade II)__AIT17738__Z
augggcaacagacaggccaagagcaccaaaguggacgagcaccaacgggcucaucugguccccgaugccucccaccucgggccucaguucugcaagucuuguugguuugaaaaucgcggacugguugagugcaacaaucauuaccuuugucugaacugccucagccugcuucuguccgugucuagcagauguccgaucugcaaaaugccccucccuacaaagcugaaagcggcuacgcugcccuccgccccuucuaccgaagugacacagaauaccacacccccuccgcacagccccuga

SEQ ID NO: 12359 - RNA, 300 nt, Artificial Sequence
  derived and/or modified CDS sequence (opt5) from LASV(LASV981-NIG-2009;Clade II)__AIT17750__Z
augggcaacagacaggccaagagcgcuaaagugaaugagcaccaacgggcccaucugguccccgacgcgucccaccucgggccucaguucugcaagucuuguugguuugaaaaccgcggacugguugagugcaauaaccauuaccuuugucugaauugccucagccugcuucuguccgugucuagcagauguccgaucugcaaaaugccccucccuaccaagcugaaagcugccacacagcccuccgccccuucuacggaagcuacccagaacacaacacccccuccguauacccccuga

SEQ ID NO: 12360 - RNA, 300 nt, Artificial Sequence
  derived and/or modified CDS sequence (opt5) from LASV(LASV982-NIG-2009;Clade II)__AIT17754__Z
augggcaacagacaggccaagagcaccaaaguggacgagcaccaacgggcucaucugguccccgaugccucccaccucgggccucaguucugcaagucuuguugguuugaaaauaaaggacugguugagugcaacaaucauuaccuuugucugaacugccucagccugcuucuguccgugucuagccgcuguccgaucugcaagaugccccucccuacaaaacugaaggcguccgcucagcccucugccccuagcacggaagccgcucagaauaccgcucccccuccguaugcccccuga

SEQ ID NO: 12361 - RNA, 300 nt, Artificial Sequence
  derived and/or modified CDS sequence (opt5) from LASV(LASV989-NIG-2009;Clade II)__AIT17760__Z
augggcaacagacaggccaagagcacccggacagacgagcaccaacgcgcucaucuggugcccgaugccucccaccucgggccucaguucugcaaaucuuguugguuugaaaauaagggacuggucgagugcaacaaucauuaccuuugucugaacugccucagccugcuucuguccguuucuagcagauguccgaucugcaaaaugccccucccuacgaagcugaaagcggcugcccagcccuccgccccuucuaccgaagcuggccagaauacagcucccccuccguaugcccccuga

SEQ ID NO: 12362 - RNA, 300 nt, Artificial Sequence
  derived and/or modified CDS sequence (opt5) from LASV(LASV991-NIG-2009;Clade II)__AIT17768__Z
augggcaacagacaggccaagagcgcuaccguggacgagugccaacgggcccaccugguccccgaugcguccuaccucgggccucaguucuguaaaucuugcugguuugaaaauaagggacugguugaguguaacaaucauuaucuuugccugaacugucucagccugcuucuguccgugucuagccgcugcccgaucuguaaaaugccccucccuacaaagcugaaagcugccgcccagcccuccgcuccuucuacgagagccacccagaauacaacacccccuccguacacccccuga

SEQ ID NO: 12363 - RNA, 300 nt, Artificial Sequence
  derived and/or modified CDS sequence (opt5) from LASV(LASV993-NIG-2009;Clade II)__AIT17776__Z
augggcaacaagcaggccaaaagcaccaagguggacgagcaccaaagagcucaucugguccccgaugccucccaccucgggccucaguucugcaaaucuuguugguuugaaaauaagggacugguugagugcaacaaucauuaccuuugucugaacugccucagccugcuucuguccgugucuagccgguguccgaucugcaaaaugccccucccuacacgccugaaggcggcugcccagcccuccgccccuucuacggaagcuacccagaaugccgcucccccuccguaugcccccuga

SEQ ID NO: 12364 - RNA, 300 nt, Artificial Sequence
  derived and/or modified CDS sequence (opt5) from LASV(Nig08-A41;Clade II)__ADU56628__Z
augggcaacagacaggccaagagcaccaaaguggacgagcaccaacgggcucaucugguccccgaugccucccaccucgggccucaguucugcaagucuuguugguuugaaaaucgcggacugguugagugcaacaaucauuaccuuugucugaacugccucagccugcuucuguccgugucuagcagauguccgaucugcaaaaugccccucccuacaaagcugaaagcggcugcccagcccuccgccccuucuacggaagcuauucagaauaccacacccccuccguaugcccccuga

SEQ ID NO: 12365 - RNA, 300 nt, Artificial Sequence
  derived and/or modified CDS sequence (opt5) from LASV(CSF;Clade III)__AAO59514__Z
augggcaacaaacaggugagaagcaugaagaaggucgacucuccccgggccucccugaucccugaugcuagccaccucgggccgcaauucugcaaauccuguugguuugagaaucgcggacugguugaaugcaacaaucauuaccuuugucugaacugccucucucugcuucugagcguguccucuagaugucccauuugcaagaugccucuccccaccaaacugaagacaagcacgaccccuacagcccccuccauccgggaggcgaauaccacaagcccuccgcccuauucuccuuga

SEQ ID NO: 12366 - RNA, 300 nt, Artificial Sequence
  derived and/or modified CDS sequence (opt5) from LASV(Nig08-A18;Clade III)__ADU56616__Z
augggcgggaagcacaccaaacagcccagagagagcaacuccccucgggccucucugaucccggacgcuacacaucucggaccccaauucugcaagagcuguugguuugaaaauaaaggccugguggagugcaacaaucacuaccuuugucugaacugccucucccugcuucugucugucagcaaucgcuguccuauuugcaagaugccccucccuacgagacugcggaccuccacaaaccccaccgccccucagguugaacagacagggccggcgucucccccucccuauagcccuuga

SEQ ID NO: 12367 - RNA, 300 nt, Artificial Sequence
  derived and/or modified CDS sequence (opt5) from LASV(ONM-299;Clade III)__ANH09755__Z
augggcaacaagcagaccaaaacaaucaagaaaacggacagccccagagccucccugauuccugaugcuucucacauggggccgcaauucugcaagagcuguugguuugagaaucggggacucguggaaugcaacaaucauuaccugugucuuaacugccugucccuccugcuuucugucagcaaucgcugucccaucugcaaaaugccucugcccaccaagcucagagccuccccuucucccacagcgccuagcauucgggaggcuaacaucaccaauccgcccccuuauucccccuga

SEQ ID NO: 12368 - RNA, 300 nt, Artificial Sequence
  derived and/or modified CDS sequence (opt5) from LASV(ONM-700;Clade III)__ANH09759__Z
augggcaacaagcagaccaaaacaacgaagaaaaccgacagccccagagccucccugaucccugaugcuucucacauggggccgcaauucugcaagagcuguugguuugagaaucggggacucguggaaugcaacaaucauuaccugugucuuaacugccugucccuccugcuuucugucagcaaucgcugucccauuugcaaaaugccucugcccacaaagcucagagccuccccuucucccaccgcgccuagcauccgggaggcuaacauuacaaauccgcccccuuauucccccuga

SEQ ID NO: 12369 - RNA, 300 nt, Artificial Sequence
  derived and/or modified CDS sequence (opt5) from LASV(BA366;Clade IV)__ADU56644__Z
augggcaacagacagaccaaggcccccgaggcuaaagggagcccucgggccucccugaucccggacgcgacacaccucggaccccaauucugcaagucuuguugguuugaaaauaaaggccugguggagugcaacgaucauuaccuuugucugaauugccucacgcugcuucugagcgucuccucucgcuguccuauuugcaagaugccccucccuaccagacugcggcccagcacaaacccuaccgcuccgcccgcccgcgccgaagggggaaucaauccucccccuuauucccccuga

SEQ ID NO: 12370 - RNA, 300 nt, Artificial Sequence
  derived and/or modified CDS sequence (opt5) from LASV(G1180-SLE-2010;Clade IV)__AIT17166__Z
augggcaacaagcaggccaaagcucccgaggccaaggacagcccuagagcgucccugaucccggaugcuacccaccucgggccccaauucugcaaaucuuguugguuugaaacaaagggacugguggagugcaauaaccauuaccuuugucugaauugccucacgcugcuucugagcgucuccaaccgguguccuauuugcaaaaugccccucccuaccaagcugcgccccucugccacaccuaccgccccgcccacagaagcugccgacagcaucggcccucccccuuauucccccuga

SEQ ID NO: 12371 - RNA, 300 nt, Artificial Sequence
  derived and/or modified CDS sequence (opt5) from LASV(G1190-SLE-2010;Clade IV)__AIT17170__Z
augggcaacaagcaggccaaagugcccgagagcaaggacuccccuagagcuucucugaucccggaugccacccaccucgggccccaauucugcaaaagcuguugguuugaaaauaagggacuggucgagugcaacaaucauuaccuuugucugaacugccucacacugcuucuguccguuucuaaucgguguccuauuugcaaaaugccccucccuacgaagcugcgccccagcgcggcuccuaccgccccgcccgccggcgcugccgacuccaucagaccucccccuuauucucccuga

SEQ ID NO: 12372 - RNA, 300 nt, Artificial Sequence
  derived and/or modified CDS sequence (opt5) from LASV(G1200-LIB-2010;Clade IV)__AIT17174__Z
augggcaacaagcagaccaaagcccccgaggcuaaggggagcccuagagccucccugaucccggacgcgacacaccucggaccccaauucugcaaaucuuguugguuugaaaauaagggccugguggagugcaacaaucauuaccuuugucugaacugccucacgcugcuucugagcgucuccucucgguguccuauuugcaaaaugccccucccuaccaagcugcgccccagcgcuguuccuacagccccgcccaccaaggccgaagauaauacaagaccucccccuuauucccccuga

SEQ ID NO: 12373 - RNA, 300 nt, Artificial Sequence
  derived and/or modified CDS sequence (opt5) from LASV(G1442-SLE-2011;Clade IV)__AIT17178__Z
augggcaacaagcaggccaaagcuagcgaggccaaggacucccccagagcgucucugaucccugaugcuacccaccucgggccgcaauucugcaaaagcuguugguuugaaaauaagggacugguggagugcaacaaucauuaccuuugucugaacugccucucccugcuucugucugucagcucccggugucccauuugcaaaaugccucuccccacacgccugagaccuucuacggcccccaccgccccuccggcucgggccggcgacaauaucaagcccccucccuauagcccuuga

SEQ ID NO: 12374 - RNA, 300 nt, Artificial Sequence
  derived and/or modified CDS sequence (opt5) from LASV(G1529-SLE-2011;Clade IV)__AIT17182__Z
augggcaacaagcaggccaaagugcccgaggucagagacagcccucgggcuucccugaucccggaugccacccaccucgggccccaauucugcaagucuuguugguuugaaaauaaaggacugguugagugcaacaaucauuaccuuugucugaacugccucacacugcuucugagcguguccucucgcuguccuauuugcaagaugccccucccuacgaaacugagacccagcgcgaccccuacagcuccgcccgccggcgccggggacggaacccggccucccccuuauucccccuga

SEQ ID NO: 12375 - RNA, 300 nt, Artificial Sequence
  derived and/or modified CDS sequence (opt5) from LASV(G1618-SLE-2011;Clade IV)__AIT17186__Z
augggcaacaagcaggccaaaacccccgagacaaaggacagcccuagagcuucccugaucccggaugccacgcaccucgggccccaauucugcaaaucuuguugguuugaaaauaagggacugguggagugcaacaaucauuaccuuugucugaacugccucacccugcuucugagcgucuccaaucgguguccuauuugcaaaaugccccucccuacaaagcugcgccccucuguugcgccuaccgcuccgcccgccggcgccgcugacaacacaagaccucccccuuauagccccuga

SEQ ID NO: 12376 - RNA, 300 nt, Artificial Sequence
  derived and/or modified CDS sequence (opt5) from LASV(G1647-SLE-2011;Clade IV)__AIT17194__Z
augggcaacaagcaggccaaagcccccgagccuaaggacagcccgagagccucccugauccccgaugcgacccaccucgggccucaauucugcaaaucuuguugguuugaaaauaagggacugguggagugcaacaaucauuaccuuugucugaacugccucacacugcuucugagcgucuccaaucggugucccauuugcaaaaugccucuccccacgaagcugcgcccuucuguugcuccgaccgcucccccugccggcgugguggacagcacaagacccccucccuauuccccguga

SEQ ID NO: 12377 - RNA, 300 nt, Artificial Sequence
  derived and/or modified CDS sequence (opt5) from LASV(G1727-SLE-2011;Clade IV)__AIT17198__Z
augggcaacaagcaggccaaagugcccgagagcaaggacuccccuagagcuucucugaucccggaugccacccaccucgggccccaauucugcaaaagcuguugguuugaaaaucggggacuggucgagugcaacaaucauuaccuuugucugaacugccucacacugcuucuguccguuucuaaucgcuguccuauuugcaagaugccccucccuacgaaacugagacccagcaccgcgccuacagcuccgcccaccggcgccgccgacuccacacggccucccccuuauucucccuga

SEQ ID NO: 12378 - RNA, 300 nt, Artificial Sequence
  derived and/or modified CDS sequence (opt5) from LASV(G1774-SLE-2011;Clade IV)__AIT17202__Z
augggcaacaagcaggccaaaacccccgagagcaaggacuccccuagagcuucucugaucccggaugccacacaccucgggccccaauucugcaaaagcuguugguuugaaaauaagggacugguggagugcaacaaucauuaccuuugucugaacugccucacgcugcuucuguccgucucuaaucgguguccuauuugcaaaaugccccucccuacccgccugagacccagcgcggcuccuacagccccgcccuccggcgccgcugacucuacccggccucccccuuauagccccuga

SEQ ID NO: 12379 - RNA, 300 nt, Artificial Sequence
  derived and/or modified CDS sequence (opt5) from LASV(G1792-SLE-2011;Clade IV)__AIT17206__Z
augggcaacaagcaggccaaagcucccgaggccaaggacagcccuagagcgucccugaucccggaugcuacccaccucgggccccaauucugcaaaucuuguugguuugaaaauaagggacugguggagugcaacaaucauuaccuuugucugaacugccucacacugcuucugagcgucuccuaucgguguccuauuugcaaaaugccccucccuacgaagcugcgccccucugccaccccuacagccccgcccaccgaagcugccgacagcaucagaccucccccuuaccggcccuga

SEQ ID NO: 12380 - RNA, 300 nt, Artificial Sequence
  derived and/or modified CDS sequence (opt5) from LASV(G1959-SLE-2011;Clade IV)__AIT17214__Z
augggcaacaagcaggccaaagcucccgaggugaaggacagcccuagagccucccugaucccggaugcgacccaccucgggccccaauucugcaaaucuuguugguuugaaaauaagggacuggucgagugcaacaaucauuaccuuugucugaacugccucacacugcuucugagcguuuccaaucgguguccuauuugcaaaaugccccucccuacgaagcugcgccccucugcugccccuaccgccccgcccacaggcaccgcugacagcaucagaccucccccuuauucccccuga

SEQ ID NO: 12381 - RNA, 300 nt, Artificial Sequence
  derived and/or modified CDS sequence (opt5) from LASV(G2141-SLE-2011;Clade IV)__AIT17222__Z
augggcaacaagcaggccaaaacccccgagacaaaggacagcccuagagcuucccugaucccggaugccacgcaccucgggccccaauucugcaaaucuuguugguuugaaaauaagggacugguggagugcaacagccauuaccuuugucugaauugccucacccugcuucuguccgucucuagccgguguccuauuugcaaaaugccccucccuacacgccugagacccuccaccgcgccuacagcuccgcccgccggcguuggggacucuaccagcccucccccuuauucccccuga

SEQ ID NO: 12382 - RNA, 300 nt, Artificial Sequence
  derived and/or modified CDS sequence (opt5) from LASV(G2147-SLE-2011;Clade IV)__AIT17226__Z
augggcaacaagcaggccaaaacccccgaggcuaaggacagcccuagagccucccugaucccggaugcgacacaccucgggccccaauucugcaaaucuuguugguuugaaaauaagggacugguggagugcaacaaucauuaccuuugucugaacugccucacgcugcuucugagcgucuccaaucgguguccuauuugcaaaaugccccucccuaccaagcugcgccccucugcuacaccuaccgccccgcccgccggcgcugccgacagcaucgggccucccccuuauucccccuga

SEQ ID NO: 12383 - RNA, 297 nt, Artificial Sequence
  derived and/or modified CDS sequence (opt5) from LASV(G2165-SLE-2011;Clade IV)__AIT17230__Z
augggcaacaagcaggccaaagcuagcgacaaaaauucccccagagccucucugaucccugaugcgacccaccucgggccgcaauucugcaagagcuguugguuugagaacaagggacugguggaaugcaauaaccauuaccuuugucugaauugccucacacugcuucuguccgucucuaaccggugucccauuugcaaaaugccucuccccacgaagcugcgcccuagcgcuacccccacagccccuccgaccggcgccgcugacuccaucagacccccucccuauucuccuuga

SEQ ID NO: 12384 - RNA, 300 nt, Artificial Sequence
  derived and/or modified CDS sequence (opt5) from LASV(G2184-SLE-2011;Clade IV)__AIT17234__Z
augggcaacaagcaggccaaagcuagcgaggaaaagaacucccccagagccucucugaucccugacgcgacccaccucgggccgcaauucugcaaaagcuguugguuugagaauaagggacugguggaaugcaauaaccauuaccuuugucugaauugccucacacugcuucuguccgucucuaaccggugucccauuugcaaaaugccucuccccacgaagcugcgcccuagcgcuacccccacagccccuccgaccggcgccgcugauuccaucagacccccucccuauucuccuuga

SEQ ID NO: 12385 - RNA, 300 nt, Artificial Sequence
  derived and/or modified CDS sequence (opt5) from LASV(G2197-SLE-2011;Clade IV)__AIT17238__Z
augggcaacaagcagaccaaagcccccgaggcuaaggggagcccuagagccucccugaucccggacgcgacacaccucggaccccaauucugcaaaucuuguugguuugaaaauaagggccugguggagugcaacaaucauuaccuuugucugaacugccucacgcugcuucugagcgucuccaaucgguguccuauuugcaaaaugccccucccuaccaagcugcgccccucugcuacaccuaccgccccgcccacagaagccgcugauagcaucagaccucccccuuaucggcccuga

SEQ ID NO: 12386 - RNA, 300 nt, Artificial Sequence
  derived and/or modified CDS sequence (opt5) from LASV(G2222-SLE-2011;Clade IV)__AIT17242__Z
augggcaacaagcaggccaaagcucccgagagcaaggacuccccuagagccucucugaucccggaugcgacccaccucgggccccaauucugcaaaagcuguugguuugaaaauaagggacugguggagugcaacaaucauuaccuuugucugaacugccucacacugcuucuguccgucucuaaucgguguccuauuugcaaaaugccccucccuacgcgccugagacccagcgcugccccuaccgccccgcccacaggcgcuaccgacuccacacggccucccccuuauucucccuga

SEQ ID NO: 12387 - RNA, 300 nt, Artificial Sequence
  derived and/or modified CDS sequence (opt5) from LASV(G2259-SLE-2012;Clade IV)__AIT17248__Z
augggcaacaaacaggugaaggcccccgaggcuagaaauagcccucgggccucccugaucccggacgcgacccaccucgggccccaauucugcaagucuuguugguuugaaaacaaaggacuggucgagugcaauaaccauuaccuuugucugaauugccucacacugcuucugggcguuagcucccgcuguccuauuugcaagacgccccucccuaccagacugcggcccucugcuacaccuaccgccccgcccgccggggcuggagauaacacacgcccucccccuuauagccccuga

SEQ ID NO: 12388 - RNA, 300 nt, Artificial Sequence
  derived and/or modified CDS sequence (opt5) from LASV(G2263-SLE-2012;Clade IV)__AIT17252__Z
augggcaacaagcaggccaaagcucccgaggccaaggacagcccuagagcgucccugaucccggaugcuacccaccucgggccccaauucugcaaaucuuguugguuugaaaauaagggacugguggagugcaacaaucauuaccuuugucugaacugccucacacugcuucugagcgucuccaaucgguguccuauuugcaaaaugccccucccuacgaagcugcgccccucuaccgccccuacagccccgcccgcuggcgccgcugacagcaccagaccucccccuuauucccccuga

SEQ ID NO: 12389 - RNA, 300 nt, Artificial Sequence
  derived and/or modified CDS sequence (opt5) from LASV(G2280-SLE-2012;Clade IV)__AIT17256__Z
augggcaacaagcaggccaaagcucccgagaccaaggacagcccuagagccucccugaucccggaugcgacacaccucgggccccaauucugcaaaucuuguugguuugaaaauaagggacugguggagugcaacaaucauuaccuuugucugaacugccucacgcugcuucugagcgucuccaaucgguguccuauuugcaaaaugccccucccuaccaagcugcgccccucugcugccccuacagccccgcccguuggcgcugccgacaacaccagaccucccccuuauagccccuga

SEQ ID NO: 12390 - RNA, 300 nt, Artificial Sequence
  derived and/or modified CDS sequence (opt5) from LASV(G2295-SLE-2012;Clade IV)__AIT17260__Z
augggcaacaagcaggccaaagcucccgagcugaaggacagcccuagagccucccucaucccggaugcgacccaccuggggccccaauucugcaaaucuuguugguuugaaaauaagggacuuguggagugcaacaaucauuaccugugucucaacugccugacacuucugcucagcgucuccaaucgguguccuauuugcaaaaugccccugccuacgaagcugcgccccucugcugccccuaccgccccgcccgcuggcgccguugacagcacaagaccucccccuuauucccccuga

SEQ ID NO: 12391 - RNA, 300 nt, Artificial Sequence
  derived and/or modified CDS sequence (opt5) from LASV(G2315-SLE-2012;Clade IV)__AIT17264__Z
augggcaacaagcagaccaaagcccccgagagcaaaaauuccccuagagcuucucugaucccggacgccacauaccucgggccccaauucugcaagagcuguugguuugaaaacaagggacugguggagugcaauaaccacuaucuuugucugaauugccucacgcugcuucuguccgucucuaaccgguguccuauuugcaaaaugccccucccuaccaagcugcgcagcuccgcggcucccacagccccuccgaccggcgccgcugauucuacaaagcccccucccuacagcccuuga

SEQ ID NO: 12392 - RNA, 300 nt, Artificial Sequence
  derived and/or modified CDS sequence (opt5) from LASV(G2318-SLE-2012;Clade IV)__AIT17268__Z
augggcaacaagcagaccaaagcccccgaggugaaggggagcccuagagcuucccugaucccggacgccacacaccucggaccccaauucugcaaaucuuguugguuugaaaauaagggccuggucgagugcaacaaucauuaccuuugucugaacugccucacgcugcuucugagcguuuccaaucgguguccuauuugcaaaaugccccucccuaccaagcugaagcccucuacaaccccuacagcgccgcccaccggggcugccgauagcauccgcccucccccuuauucccccuga

SEQ ID NO: 12393 - RNA, 300 nt, Artificial Sequence
  derived and/or modified CDS sequence (opt5) from LASV(G2363-SLE-2012;Clade IV)__AIT17272__Z
augggcaacaaacaggugaagaccagcgaggcccgcgacucuccccgggcuucccugaucccugaugccacagaccucgggccgcaauucugcaagagcuguugguuugaaaauaaaggacuggucgagugcaacaaucacuaccuuugucugaacugccucacgcugcuucuguccguuucuaaucgcugucccauuugcaagaugccucuccccaccagacugcggccuagcgcgaaccccacagcuccuccggccgaaaccggcgauuccacaagacccccucccuauucuccuuga

SEQ ID NO: 12394 - RNA, 300 nt, Artificial Sequence
  derived and/or modified CDS sequence (opt5) from LASV(G2392-SLE-2012;Clade IV)__AIT17278__Z
augggcagcaagcagaccaaaacacccgaggugaaggacuccccuagagccucucugaucccggaugcuacgcaccucgggccccaauucugcaaaagcuguugguuugaaaacaagggacuggucgagugcaauaaccauuaccuuugucugaauugccucacccugcuucuguccguuucuaaccgguguccuauuugcaaaaugccccucccuacaaagcugcgccccagcgccgcgccuaccgcuccgcccgccagagccgcugacgauacacggccucccccuuauucccccuga

SEQ ID NO: 12395 - RNA, 300 nt, Artificial Sequence
  derived and/or modified CDS sequence (opt5) from LASV(G2405-SLE-2012;Clade IV)__AIT17282__Z
augggcaacaagcaggccaaagcucccgagccuaaggacagcccgagagccucccugauccccgaugcgacccaccucgggccucaauucugcaaaucuuguugguuugaaaauaagggacugguggagugcaacaaucauuaccuuugucugaacugccucacacugcuucugagcgucuccaaucggugucccauuugcaaaaugccucuccccacgaagcugcgcccuucugcugccccgaccgcucccccugccggcgccguugacagcaucagacccccucccuauuccccguga

SEQ ID NO: 12396 - RNA, 300 nt, Artificial Sequence
  derived and/or modified CDS sequence (opt5) from LASV(G2427-SLE-2012;Clade IV)__AIT17286__Z
augggcaacaagcagaccaaagcccccgaggugaaggacagcccuagagcuucccugaucccggaugccacacaccucgggccccaauucugcaaaucuuguugguuugaaaauaagggacuggucgagugcaacaaucauuaccuuugucugaacugccucacgcugcuucugagcguuuccaaucgguguccuauuugcaaaaugccccucccuaccaagcugcgccccucuacagcgccuaccgcuccgcccgccggcacaauggacagcaccagaccucccccuuauucccccuga

SEQ ID NO: 12397 - RNA, 300 nt, Artificial Sequence
  derived and/or modified CDS sequence (opt5) from LASV(G2431-SLE-2012;Clade IV)__AIT17290__Z
augggcaacaagcaggccagagcucccgaggccaaagacagcccucgggcgucccugaucccggaugcuacccaccucgggccccaauucugcaagucuuguugguuugaaaauaaaggacugguggagugcaacaaucauuaccuuugucugaacugccucacacugcuucugagcgucuccucucgcuguccuauuugcaagaugccccucccuacgagacugcggcccagcgccaucccuaccgccccgcccgcuggcacaggggacuccucucgcccucccccuuauagccccuga

SEQ ID NO: 12398 - RNA, 300 nt, Artificial Sequence
  derived and/or modified CDS sequence (opt5) from LASV(G2554-SLE-2012;Clade IV)__AIT17296__Z
augggcaacaagcaggccaaaacccccgagaucaaggacagcccuagagcuucccugauuccggaugccacacaccucgggccccaauucugcaaaucuuguugguuugaaaauaagggacugguggagugcaacaaucauuaccuuugucugaacugccucacgcugcuucugagcgucuccaaucgguguccuaucugcaaaaugccccucccuaccaagcugcgccccucugcggcuccuacagccccgcccgccggcgcugccgacauuaccagaccucccccuuauagccccuga

SEQ ID NO: 12399 - RNA, 300 nt, Artificial Sequence
  derived and/or modified CDS sequence (opt5) from LASV(G2557-SLE-2012;Clade IV)__AIT17300__Z
augggcaacaaacaggugaaggcccccgaggcuagaaauagcccucgggccucccugaucccggacgcgacccaccucgggccccaauucugcaagucuuguugguuugaaaacaaaggacuggucgagugcaauaaccauuaccuuugucugaauugccucacacugcuucugggcguuagcucccgcuguccuauuugcaagaugccccucccuacgagacugcggcccucuaccgcuccuacagccccgcccgccggggcuggagauaacacccgcccucccccuuauagccccuga

SEQ ID NO: 12400 - RNA, 300 nt, Artificial Sequence
  derived and/or modified CDS sequence (opt5) from LASV(G2612-SLE-2012;Clade IV)__AIT17312__Z
augggcaacaagcaggccaaaacccccgagacaaaggacagcccuagagcuucccugaucccggaugccacgcaccucgggccccaauucugcaaaucuuguugguuugaaaauaagggacugguggagugcaacaaucauuaccuuugucugaacugccucacccugcuucugagcgucuccaaucgguguccuauuugcaaaaugccccucccuacaaagcugcgccccucugcggcuccuaccgccccgcccguuggcgccgcugacagcacaagaccucccccuuauucccccuga

SEQ ID NO: 12401 - RNA, 300 nt, Artificial Sequence
  derived and/or modified CDS sequence (opt5) from LASV(G2615-SLE-2012;Clade IV)__AIT17316__Z
augggcaacaagcaggccaaagcucccgaggccagaaauagcccucgggcgucccugaucccggacgcuacccaccucgggccccaauucugcaagucuuguugguuugaaaaccgcggacugguggagugcaauaaccauuaccuuugucugaauugccucacacugcuucugagcgucuccucuagauguccuauuugcaaaaugccccucccuacgcggcugcgccccagcgccgccccuaccgcuccgcccgccggcgcuggggauaacacaagaccucccccuuauucccccuga

SEQ ID NO: 12402 - RNA, 300 nt, Artificial Sequence
  derived and/or modified CDS sequence (opt5) from LASV(G2723-SLE-2012;Clade IV)__AIT17320__Z
augggcaacaagcaggccaaagcucccgaggcccgcaauagcccucgggcgucccugaucccggacgcuacccaccucgggccccaauucugcaagucuuguugguuugaaaacaaaggacugguggagugcaauaaccauuaccuuugucugaauugccucacacugcuucugggcgucagcucccgcuguccuauuugcaagaugccccucccuacgagacugcggcccucugccgccccuaccgcuccgcuggccgaagcuggggauaacacaagacccccucccuauagcccuuga

SEQ ID NO: 12403 - RNA, 300 nt, Artificial Sequence
  derived and/or modified CDS sequence (opt5) from LASV(G2868-SLE-2012;Clade IV)__AIT17326__Z
augggcaacaagcagagcaaagcccccgaguccagagacucuccucgggcuagccugaucccggaugccacccaccucgggccccaauucugcaaguccuguugguuugaaaauaaaggacugguggagugcaacaaucauuaccuuugucugaacugccucacacugcuucugucugucagcaaucgcuguccuauuugcaagaugccccucccuacgaaacugagacccuccgcgaccccuacagcuccgcccacccgggccgccgacucuauccgcccucccccuuauagccccuga

SEQ ID NO: 12404 - RNA, 300 nt, Artificial Sequence
  derived and/or modified CDS sequence (opt5) from LASV(G2903-SLE-2012;Clade IV)__AIT17330__Z
augggcaacaagcaggccaaagcucuggagagcaaaaauucccccagagccucucucaucccugacgcgaccuaccuggggccgcaauucugcaagagcuguugguuugaaaacaagggacuuguggagugcaauaaccacuaucugugucucaauugccugacacuucugcucuccgucucuaaccggugucccauuugcaaaaugccucugcccacgaagcugcgcagcuccgcugccccuaccgcucccccuacaggcgccgccgaugggaccaagccgcccccuuacucucccuga

SEQ ID NO: 12405 - RNA, 300 nt, Artificial Sequence
  derived and/or modified CDS sequence (opt5) from LASV(G3010-SLE-2013;Clade IV)__AIT17342__Z
augggcaacaagcaggccaaagcuagcgaggccaaggacucccccagagcgucucugaucccugaugcuacccaccucgggccgcaauucugcaaaagcuguugguuugaaaauaagggacugguggagugcaacaaucauuaccuuugucugaacugccucacacugcuucuguccgucucuaaucggugucccauuugcaaaaugccucuccccacgaagcugcgcccuagcaccgcccccacagccccucagaccggcgcugccgacuccaucagaccgcccccuuauucucccuga

SEQ ID NO: 12406 - RNA, 300 nt, Artificial Sequence
  derived and/or modified CDS sequence (opt5) from LASV(G3016-SLE-2013;Clade IV)__AIT17346__Z
augggcaacaagcaggccaaagcucccgagaccaaggacagcccuagagccucccugaucccggaugcgacacaccucgggccccaauucugcaaaucuuguugguuugaaaauaagggacugguggagugcaacaaucauuaccuuugucugaacugccucacgcugcuucugagcgucuccaaucgguguccuauuugcaaaaugccccucccuaccaagcugcgccccucugcugccccuacagccccgcccguuggcgcugccgacagcaccagaccucccccuuauucccccuga

SEQ ID NO: 12407 - RNA, 300 nt, Artificial Sequence
  derived and/or modified CDS sequence (opt5) from LASV(G3148-SLE-2013;Clade IV)__AIT17362__Z
augggcaacaagcaggccaaagcucccgagagcaaggacuccccuagagccucucugaucccggaugcgacccaccucgggccccaauucugcaaaagcuguugguuugaaaauaagggacugguggagugcaacaaucauuaccuuugucugaacugccucacacugcuucuguccgucucuaaucgguguccuauuugcaaaaugccccucccuacgaagcugcgccccagcgcugccccuaccgccccgcccgcuggcgccgcugacuccaucagaccucccccuuauucucccuga

SEQ ID NO: 12408 - RNA, 300 nt, Artificial Sequence
  derived and/or modified CDS sequence (opt5) from LASV(G3151-SLE-2013;Clade IV)__AIT17366__Z
augggcaacaagcagaccaaaacacccgaggugaaggacagcccuagagccucccugaucccggaugcuacgcaccucgggccccaauucugcaaaucuuguugguuugaaaauaagggacuggucgagugcaacaaucauuaccuuugucugaacugccucacccugcuucugagcguuuccaaucgguguccuauuugcaaaaugccccucccuacaaagcugcgccccucugccgcgccuaccgcuccgcccgccagagccgcugacgauacacggccucccccuuauagccccuga

SEQ ID NO: 12409 - RNA, 300 nt, Artificial Sequence
  derived and/or modified CDS sequence (opt5) from LASV(G3206-SLE-2013;Clade IV)__AIT17376__Z
augggcaacaagcaggccaaagcucccgagagcaaggacuccccuagagccucucugaucccggaugcgaccuaccucgggccccaauucugcaaaagcuguugguuugaaaauaagggacugguggagugcaacaaucacuaucuuugucugaacugccucacacugcuucuguccgucucuaaucgguguccuauuugcaaaaugccccucccuacgaagcugcgcagcuccguugcucccaccgccccuccgacaagagccgcugacucuacccggcccccucccuacagcccuuga

SEQ ID NO: 12410 - RNA, 300 nt, Artificial Sequence
  derived and/or modified CDS sequence (opt5) from LASV(G3229-SLE-2013;Clade IV)__AIT17382__Z
augggcaacaagcagaccaaaacaagcgaggugaaggacucccccagagccucucugaucccugaugcuacgcaccucgggccgcaauucugcaaaagcuguugguuugaaaauaagggacuggucgagugcaacaaucauuaccuuugucugaacugccucacccugcuucuguccguuucuaaucggugucccauuugcaaaaugccucuccccacaaagcugcgcccuagcgccgcgcccaccgcuccuccggccagagccgcugacgauacacggcccccucccuauuccccuuga

SEQ ID NO: 12411 - RNA, 300 nt, Artificial Sequence
  derived and/or modified CDS sequence (opt5) from LASV(G3234-SLE-2013;Clade IV)__AIT17386__Z
augggcaacaagcaggccaaaacccccgaggcuagagacagcccucgggccucccugaucccggaugcgacacaccucgggccccaauucugcaagucuuguugguuugaaaauaaaggacugguggagugcaacaaucauuaccuuugucugaacugccucacgcugcuucugagcgucuccucucgcuguccuauuugcaagaugccccucccuaccaaacugagacccagcgcuacaccuaccgccccgcccgccggcgcuggggacggaacacggccucccccuuauucccccuga

SEQ ID NO: 12412 - RNA, 300 nt, Artificial Sequence
  derived and/or modified CDS sequence (opt5) from LASV(G3278-SLE-2013;Clade IV)__AIT17396__Z
augggcaacaaacaggugaaggcccccgaggcuagaaauagcccucgggccucccugaucccggacgcgacccaccucgggccccaauucugcaagucuuguugguuugaaaacaaaggacuggucgagugcaauaaccauuaccuuugucugaauugccucacacugcuucugggcguuagcucccgcuguccuauuugcaagaugccccucccuacgagacugcggcccucugcugccccuaccgccccgcccgcugaagccggggauaacacacgcccucccccuuauagccccuga

SEQ ID NO: 12413 - RNA, 300 nt, Artificial Sequence
  derived and/or modified CDS sequence (opt5) from LASV(G502-SLE-2009;Clade IV)__AIT17124__Z
augggcaacaaacaggugaagacccccgaggccaaggacagcccuagagcuucccugaucccggaugccacacaccucgggccccaauucugcaaaucuuguugguuugaaaauaagggacuggucgagugcaacaaucauuaccuuugucugaacugccucacgcugcuucugagcguuggcaaucgguguccuauuugcaaaaugccccucccuaccaagcugcgccccuccgugacaccuaccgcgccgcccacaagagcugccgacucuaucgggccucccccuuauagccccuga

SEQ ID NO: 12414 - RNA, 300 nt, Artificial Sequence
  derived and/or modified CDS sequence (opt5) from LASV(G503-SLE-2009;Clade IV)__AIT17128__Z
augggcaacaagcaggccaaaacccccgaggcuaaggacagcccuagagccaaucugaucccggaugcgacacaccucgggccccaauucugcaaauccuguugguuugaaaacaagggacugguggagugcaauaaccauuaccuuugucugaauugccucacgcugcuucugucugucagcaaccgguguccuauuugcaaaaugccccucccuaccaagcugcgccccuccgcugccccuacagccccgcccaccggcgcugccgacucuaucagaccucccccuuauagccccuga

SEQ ID NO: 12415 - RNA, 300 nt, Artificial Sequence
  derived and/or modified CDS sequence (opt5) from LASV(G610-SLE-2009;Clade IV)__AIT17132__Z
augggcaacaagcaggccaaagcucccgaggccagagacagcccucgggcgucccugaucccggaugcuacccaccucgggccccaauucugcaagucuuguugguuugaaaauaaaggacugguggagugcaacaaucauuaccuuugucugaacugccucacacugcuucugagcgucuccaaucgcuguccuauuugcaagaugccccucccuacgaaacugagacccucugccaccccuacagccccgcccaccgaagcugccgacagcauccggccucccccuuaucgccccuga

SEQ ID NO: 12416 - RNA, 300 nt, Artificial Sequence
  derived and/or modified CDS sequence (opt5) from LASV(G676-SLE-2009;Clade IV)__AIT17140__Z
augggcaacaagcaggccaaagcucccgagccuaaggacagcccgagagccucccugauccccgaugcgacccaccucgggccucaauucugcaaaucuuguugguuugaaaauaagggacugguggagugcaacaaucauuaccuuugucugaacugccucacacugcuucugagcgucuccaaucggugucccauuugcaaaaugccucuccccacgaagcugcgcccuucugcugccccgaccgcucccccugccggcgccguugacagcacaagacccccucccuauuccccguga

SEQ ID NO: 12417 - RNA, 300 nt, Artificial Sequence
  derived and/or modified CDS sequence (opt5) from LASV(G692-SLE-2009;Clade IV)__AIT17144__Z
augggcaacaagcaggccaaaacccccgagagcaaggacuccccuagagcuucucugaucccggaugccacacaccucgggccccaauucugcaaaagcuguugguuugaaaauaagggacugguggagugcaacaaucauuaccuuugucugaacugccucacgcugcuucugggcgucuccaaucgguguccuauuugcaaaaugccccucccuaccaagcugcgcucuagcguugcgcccacagcuccuccgaccggggccguggacuccaucagacccccucccuauucuccuuga

SEQ ID NO: 12418 - RNA, 300 nt, Artificial Sequence
  derived and/or modified CDS sequence (opt5) from LASV(G733-SLE-2010;Clade IV)__AIT17152__Z
augggcaacaagcaggccaaaacccccgagacaaaggacagcccuagagcuucccugaucccggaugccacgcaccucgggccccaauucugcaaaucuuguugguuugaaaauaagggacugguggagugcaacaaucauuaccuuugucugaacugccucacccugcuucugagcgucuccaaucgguguccuauuugcaaaaugccccucccuacaaagcugcgccccucuaccgcgccuacagcuccgcccgccggcgccgcugacaacaccagaccucccccuuauagccccuga

SEQ ID NO: 12419 - RNA, 300 nt, Artificial Sequence
  derived and/or modified CDS sequence (opt5) from LASV(G808-SLE-2010;Clade IV)__AIT17162__Z
augggcaacaagcaggccaaagcuagcgaguccaaggacucucccagagccagccugaucccugaugcgacccaccucgggccgcaauucugcaaauccuguugguuugaaaauaagggacugguggagugcaacaaucauuaccuuugucugaacugccucacacugcuucugucugucagcaaucggugucccauuugcaaaaugccucuccccacgaagcugcgcccuuccguuacccccacagcuccuccgaccagaacagccgacaacacccggcccccucccuauucuccuuga

SEQ ID NO: 12420 - RNA, 300 nt, Artificial Sequence
  derived and/or modified CDS sequence (opt5) from LASV(Guinea Faranah;Clade IV)__AMZ00378__Z
augggcaacagacagaccaaggccacagaggcuaaagacagcccccgggccucccugaucccugaugcgacgcaccucgggccgcaauucugcaagucuuguugguuugaaaauaaaggacugguggagugcaacaaucauuaccuuugucugaacugccucacccugcuucugagcgucuccucucgcugucccauuugcaagaugccucuccccacaagacugaaaagcuccaccaauccuacagcucccucugccaagaccgaaagcuccaucaacccuccgcccuauagcccuuga

SEQ ID NO: 12421 - RNA, 300 nt, Artificial Sequence
  derived and/or modified CDS sequence (opt5) from LASV(GUINEA Z-185a;Clade IV)__AMZ00374__Z
augggcaacaagcaggccaaagcucccgagaccaagaauagcccuagagccucccugaucccggacgcgacacaccucgggccccaauucugcaaaucuuguugguuugaaaacaagggacugguggagugcaauaaccauuaccuuugucugaauugccucacgcugcuucugagcgucuccaaccgguguccuauuugcaaaaugccccucccuaccaagcugcgccccucugcuguuccuacagccccgcccgcccaggugggcgauagaacccggccucccccuuauagccccuga

SEQ ID NO: 12422 - RNA, 312 nt, Artificial Sequence
  derived and/or modified CDS sequence (opt5) from MOPV/LASV reassortant(IGS-1;Clade IV)__AFY05533__Z
augggcaagacccagagcaaagggcaacccuccacaaaccugcucaaggagacggaaccuagacacccggugauccccgacgcccggggaaccggcccugaguucugcaaaucuuguugguuugaacgcagagggcugguccggugcaaugaucauuaccuuugucugaacugccucacacugcuucacaccguuagcgaccgcugucccaucugcaagcauaaacugccuuucagacucgagcugcagacacagcccaccgcuccuccggaaauucccccuucccagaaucccccucccuauucuccguga

SEQ ID NO: 12423 - RNA, 300 nt, Artificial Sequence
  derived and/or modified CDS sequence (opt5) from LASV(LM032-SLE-2010;Clade IV)__AIT17800__Z
augggcaacaagcaggccaaagcucccgaggccaaggacagcccuagagcgucccugaucccggaugcuacccaccucgggccccaauucugcaaaucuuguugguuugaaaauaagggacugguggagugcaacaaucauuaccuuugucugaacugccucacacugcuucugagcgucuccaaucgguguccuauuugcaaaaugccccucccuacgaagcugcgccccucugccaccccuacagccccgcccaccgaagcugccgacagcaucagaccucccccuuaucaccccuga

SEQ ID NO: 12424 - RNA, 300 nt, Artificial Sequence
  derived and/or modified CDS sequence (opt5) from LASV(LM222-SLE-2010;Clade IV)__AIT17804__Z
augggcaacaagcaggccaaagcuagcgaggaaaagaacucccccagagccucucugaucccugacgcgacccaccucgggccgcaauucugcaaaagcuguugguuugagaauaagggacugguggaaugcaauaaccauuaccuuugucugaauugccucacacugcuucuguccgucucuaaccggugucccauuugcaaaaugccucuccccacgaagcugcgcccuagcaccacacccaccgcuccuccgacaggcgccgccgauuccaucagacccccucccuauucuccuuga

SEQ ID NO: 12425 - RNA, 300 nt, Artificial Sequence
  derived and/or modified CDS sequence (opt5) from LASV(LM395-SLE-2009;Clade IV)__AIT17808__Z
augggcaacaagcaggccaaagcucccgagagcaaggacuccccuagagccucucugaucccggaugcgacccaccucgggccccaauucugcaaaagcuguugguuugaaaauaagggacugguggagugcaacaaucauuaccuuugucugaacugccucacacugcuucuguccgucucuaaucgguguccuauuugcaaaaugccccucccuacgcgccugagacccagcgcugccccuaccgccccgcccacaggcgcugccgacuccacccggccucccccuuauucucccuga

SEQ ID NO: 12426 - RNA, 300 nt, Artificial Sequence; identical to SEQ ID NO: 12424
  derived and/or modified CDS sequence (opt5) from LASV(LM776-SLE-2012;Clade IV)__AIT17824__Z

SEQ ID NO: 12427 - RNA, 300 nt, Artificial Sequence
  derived and/or modified CDS sequence (opt5) from LASV(Mad39;Clade IV)__ANH09743__Z
augggcaacaagcaggccaaagcuagcgagguggaagacgggcccagagccucccugaucccugaugcgacccaccucggaccgcaauucugcaagucuuguugguuugagaauaaaagccuggucgaaugcaacaaucauuaccuuugucugaacugccucacacugcuucuguccguuucuaaucggugucccauuugcaagaugccucuccccacgcgccugaaaccuagcguggugcccaccgcuccuccgacaagagccggcgacgggacccggcccccucccuauuccccuuga

SEQ ID NO: 12428 - RNA, 300 nt, Artificial Sequence
  derived and/or modified CDS sequence (opt5) from LASV(Mad41;Clade IV)__ANH09745__Z
augggcaacaagcagaccaaagcccccgagguggaagacgggccuagagcuagccugaucccggaugccacacaccucggaccccaauucugcaaguccuguugguuugagaauaaaggccuggucgaaugcaacaaucauuaccuuugucugaacugccucacgcugcuucugucuguuagcucccgguguccuauuugcaagaugccccucccuacccgccugaaacccucuaucgugccuacagcgccgcccgcuagaaccggggagaauacacggccucccccuuauagccccuga

SEQ ID NO: 12429 - RNA, 300 nt, Artificial Sequence
  derived and/or modified CDS sequence (opt5) from LASV(Mad63;Clade IV)__ANH09749__Z
augggcaacaagcaggccaaagcucccgagguggaagacgggccuagagccagccugaucccggaugcgacccaccucggaccccaauucugcaaguccuguugguuugagaaucggggccuggucgaaugcaacaaucauuaccuuugucugaacugccucacacugcuucugucuguuagcaaucgcuguccuauuugcaaaaugccccucccuacgagacugaagcccuccguggugccuaccgcuccgcccacaggggccggaggcgacacccggccucccccuuauucucccuga

SEQ ID NO: 12430 - RNA, 300 nt, Artificial Sequence
  derived and/or modified CDS sequence (opt5) from LASV(Mad69;Clade IV)__ANH09751__Z
augggcaacaagcaggccaaagcucccaaggccgaggacgggccuagagcgagccugaucccggaugcuacccaccucggaccccaauucugcaaauccuguugguuugaaaauaagggccugguggagugcaacaaucauuaccuuugucugaacugccucacacugcuucugucugucagcaaucgguguccuauuugcaaaaugccccucccuacgcgccugaagcccuccguugugccuaccgccccgcccacaggggccggaggcgacaccagaccucccccucacucucccuga

SEQ ID NO: 12431 - RNA, 300 nt, Artificial Sequence
  derived and/or modified CDS sequence (opt5) from LASV(Mad83;Clade IV)__ANH09753__Z
augggcaacaagcaggccaaagcuagcgaggccgaagacgggcccagagcgucccugaucccugaugcuacccaccucggaccgcaauucugcaagucuuguugguuugagaauaaaggccugguggaaugcaacaaucauuaccuuugucugaacugccucacacugcuucugagcgucuccucucggugucccauuugcaagaugccucuccccacgcgccugagaccuagcguugugcccaccgccccuuccgccggggcuggagacggcacacggccgcccccuuauucucccuga

SEQ ID NO: 12432 - RNA, 300 nt, Artificial Sequence
  derived and/or modified CDS sequence (opt5) from LASV(NL;Clade IV)__AAO59510__Z
augggcaacaagcagaccaaagcccccgaggcuaaggacagcccuagagccucccugaucccggaugcgacauaccucgggccccaauucugcaaaucuuguugguuugaaaauaagggacugguggagugcaacaaucacuaucuuugucugaacugccucacgcugcuucugagcgucuccaaucgguguccuauuugcaaaaugccccucccuaccaagcugcgccccucugcugccccuacagccccgcccgcuggcgccgcucauagcgccagaccucccccuuacucccccuga

SEQ ID NO: 12433 - RNA, 300 nt, Artificial Sequence
  derived and/or modified CDS sequence (opt5) from LASV(Z0947-SLE-2011;Clade IV)__AIT17838__Z
augggcaacaagcaggccaaagugcccgagagcaaggacuccccuagagcuucucugaucccggaugccacccaccucgggccccaauucugcaaaagcuguugguuugaaaauaagggacuggucgagugcaacaaucauuaccuuugucugaacugccucacacugcuucuguccguuucuaaucgguguccuauuugcaaaaugccccucccuacgaagcugaagcccagcgcggcuccuaccgccccgcccacaggcgccgcugacuccauccgcccucccccuuauucucccuga

SEQ ID NO: 12434 - RNA, 300 nt, Artificial Sequence
  derived and/or modified CDS sequence (opt5) from LASV(Z0948-SLE-2011;Clade IV)__AIT17842__Z
augggcaacaagcaggccaaagugcccgagagcaaggacuccccuagagcuucucugaucccggaugccacccaccucgggccccaauucugcaaaagcuguugguuugaaaauaagggacuggucgagugcaacaaucauuaccuuugucugaacugccucacacugcuucuguccguuucuaaucgguguccuauuugcaaaaugccccucccuacgaagcugcgccccagcgcggcuccuaccgccccgcccacaggcguggccgacuccaucagaccucccccuuauucucccuga

SEQ ID NO: 12435 - RNA, 300 nt, Artificial Sequence
  derived and/or modified CDS sequence (opt5) from LASV(Z148;Clade IV)__AAT49005__Z
augggcaacaagcaggccaaagcucccgagaccaaggacagcccuagagccucccugaucccggaugcgacacaccucgggccccaauucugcaaaucuuguugguuugaaaauaagggacugguggagugcaacaaucauuaccuuugucugaacugccucacgcugcuucugagcgucuccaaucgguguccuauuugcaaaaugccccucccuacccgccugagacccucugcuguuccuacagccccgcccgccccugcuggcgaccggaccaagcccccucccuauagcccguga

SEQ ID NO: 12436 - RNA, 300 nt, Artificial Sequence
  derived and/or modified CDS sequence (opt5) from LASV(Bamba-R114;Clade V)__AHC95547__Z
augggcaacagacaggccaaggaccccaaaguggagagcuccccucgggcuucucugaucccggaugccacccaccucgggccccaauucugcaagagcuguugguuugaaaacaaaggacuggucgagugcaacaaucauuaccuuugucugaacugccucucccugcuucugucuguuagcaaucgcuguccuauuugcaagaugccccucccuacaagacugcggcccacgaccaugccuacagcgccgcagaucauuaaagaaggcaccacaaaucccccucccuauaccccuuga

SEQ ID NO: 12437 - RNA, 300 nt, Artificial Sequence
  derived and/or modified CDS sequence (opt5) from LASV(Komina-R16;Clade V)__AHC95545__Z
augggcaacaagcaggccaaagaccccaagaccgagagcuccccuagagcuucucugaucccggaugccacacaccucgggccccaauucugcaaaagcuguugguuugaaaacaagggacugguggagugcaacaaucauuaccuuugucugaacugccucucccugcuucugucugucagcaaucgguguccuauuugcaaaaugccccucccuacgaagcugaagcccaucaccacaccuaccgcgccgcagauuacacgcgaauccaucaccaaucccccucccuauacaccuuga

SEQ ID NO: 12438 - RNA, 300 nt, Artificial Sequence; identical to SEQ ID NO: 12263
  derived and/or modified CDS sequence (opt5) from LASV(Alzey;Clade VI)__SCA79103__Z

SEQ ID NO: 12439 - RNA, 300 nt, Artificial Sequence
  derived and/or modified CDS sequence (opt5) from LASV(NIGERIA IKEJI;Clade II)__AMZ00370__Z
augggcaacaagcaggccaaaagcaccagaguggacgagcaacagcgggcucaccugguccccgaugccucccaucucgggccucaguucugcaagucuuguugguuugaaaauaaaggacugguugagugcaacaaucacuaccuuugucugaacugccucagccugcuucuguccgugucuagccgcuguccgaucugcaagaugccccucccuacaaaacugaagacguccacccagcccucugcgccuagagcugaagugcccccuagcacaaccccgcccccuuauucccccuga

SEQ ID NO: 12440 - RNA, 300 nt, Artificial Sequence
  derived and/or modified CDS sequence (opt6) from LASV(Josiah;Clade IV)__ADY11072/NP_694871__Z
augggaaacaaacaagcaaaagcaccagaaucaaaagacucaccaagagcaucacuaauaccagacgcaacacaccuaggaccacaauucugcaaaucaugcugguucgaaaacaaaggacuuguagaaugcaacaaccacuaccuaugccuaaacugccuaacacuacuacuaucaguaucaaacagaugcccaauaugcaaaaugccacuaccaacaaaacuaagaccaucagcagcaccaacagcaccaccaacaggagcagcagacucaauaagaccaccaccauacucaccauaa

SEQ ID NO: 12441 - RNA, 303 nt, Artificial Sequence
  derived and/or modified CDS sequence (opt6) from LASV(Pinneo-NIG-1969;Clade I)__AIT17834__Z
augggaaacaaacaaacaagaucaccaccaaaaccagaacacccaagaccaacacuacuaccagacgcaucacaccuaggaccacaauucugcaaaucaugcugguucgaaaacaaaggacuaguagaaugcaacaaccacuaccuaugccuaaacugccuaacacuacuacuaucaguaucagacagaugcccaauaugcaaaaugccacuaccaacaaaacuagcaguaagaacacaaccaucagcaccaccacuaaaccaaggaaacacacaaucaucaccaccaccauacucaccauaa

SEQ ID NO: 12442 - RNA, 300 nt, Artificial Sequence
  derived and/or modified CDS sequence (opt6) from LASV(Nig08-04;Clade II)__ADU56612__Z
augggaaacagacaaacaagaccaacagaagcaacagaacaaucaagagcacaccuaguaccagacgcaucacaccuaggaccacaauucugcaaaucaugcugguucgaaaacagaggacuaguagaaugcaacaaccacuaccuaugccuaaacugccuaucacuacuacuaucaguaucaucaagaugcccaauaugcaaaaugccacuaccaacaagacuaaaagcaucagcacaaccaucagcaccaccaacagaagcaccacaaaacacaacaccaccaccauacacaccauaa

SEQ ID NO: 12443 - RNA, 300 nt, Artificial Sequence
  derived and/or modified CDS sequence (opt6) from LASV(Nig08-A19;Clade III)__ADU56620__Z
augggaggaaaacacacaaaaccacaaagagaaucaaacucaccaagagcaucacuaauaccagacgcaacacaccuaggaccacaauucugcaaaucaugcugguucgaaaacaaaggauuaguagaaugcaacaaccacuaccuaugccuaaacugccuaacacuacuacuaucaguaucaaacagaugcccaauaugcaaaaugccacuaccaacaagacuaagagcaucaacaaacccaacagcaccacaaguagaacaaguaggaccaacaaacccaccaccauacucaccauaa

SEQ ID NO: 12444 - RNA, 300 nt, Artificial Sequence
  derived and/or modified CDS sequence (opt6) from LASV(AV;Clade V)__CCA30312__Z
augggaaacagacaagcaaaaaacccagaaguagaaaacucaccaagagcaucacuaauaccagacgcaacacaccuaggaccacaauucugcaaaucaugcugguucgaaaacaaaggacuaguagaaugcaacaaccacuaccuaugccuaaacugccuaucacuacuacuaucaguaucaaacagaugcccaauaugcaaaaugccacuaccaacaagacuaagaccaacaacaacaccaacagcaccacaaauaauaaaagaaaacacaacaaacccaccaccauacacaccauaa

SEQ ID NO: 12445 - RNA, 300 nt, Artificial Sequence
  derived and/or modified CDS sequence (opt6) from LASV(Togo/2016/7082;Clade VI)__AMR44579__Z
augggagcaagacaaacaaaacaaccacaaauagaaggaucaccaagagcaucacuaguaccagacgcaucacaccuaggaccacaauucugcaaaucaugcugguucgaaaacaaaggacuaguagaaugcaacaaccacuacuuaugccuaaacugccuaucacuacuacuaucaguaucaaacagaugcccaauaugcaaaaugccacuaccaacaaaacuaagaguaucaucagcaccaucagcaccaccagcagcaacagcacaaccaggaacaccaccaccauacucaccauaa

SEQ ID NO: 12446 - RNA, 300 nt, Artificial Sequence
  derived and/or modified CDS sequence (opt6) from LASV(KAK-428;Clade n.d. (VII))__ANH09761__Z
augggaaacaaaggaacaaaaccaacacaaaacucagaaccaucaagagcaaaccuaguaccagacgcaucauaccuaggaccacaauucugcaaaucaugcugguucgaaaacaaaggacuaguagaaugcaacaaccacuaccuaugccuaaacugccuaacaaugcuacuaucaguaucaaacagaugcccaauaugcaaaaugccacuaccaacaaaaauaaaagcaucaggaucaccaucagcaccaccaacagaagcaaacucagcaguaucaccaccaccauacacaccauaa

SEQ ID NO: 12447 - RNA, 300 nt, Artificial Sequence
  derived and/or modified CDS sequence (opt6) from LASV(ISTH0009-NIG-2011;Clade II)__AIT17402__Z
augggaaacagacaagcaaaaucaacaaaaguagacgaacaccaaagagcacaccuaguaccagacgcaucacaccuaggaccacaauucugcaaaucaugcugguucgaaaacagaggacuaguagaaugcaacaaccacuaccuaugccuaaacugccuaucacuacuacuaucaguaucaucaagaugcccaauaugcaaaaugccacuaccaacaaaacuaaaagcagcagcacaaccaucagcaccaucaacagaaacaauacaaaacacaacaccaccaccauacacaccauaa

SEQ ID NO: 12448 - RNA, 300 nt, Artificial Sequence
  derived and/or modified CDS sequence (opt6) from LASV(ISTH0012-NIG-2011;Clade II)__AIT17406__Z
augggaaacagacaagcaaaaucaucaaaaguagacgaacaccaaagagcacaccuaguaccagacgcaucacaccuaggaccacaauucugcaaaucaugcugguucgaaaacaaaggacuaguagaaugcaacaaccacuaccuaugccuaaacugccuaucacuacuacuaucaguaucaucaagaugcccaauaugcaaaaugccacuaccaacaaaacuaaaagcagcagcacaaccaucagcaccaucaacagaagcaguacaaaacacagcaccaccaccauacgcaccauaa

SEQ ID NO: 12449 - RNA, 300 nt, Artificial Sequence
  derived and/or modified CDS sequence (opt6) from LASV(ISTH0047-NIG-2011;Clade II)__AIT17410__Z
augggaaacaaacaagcaaaaucaacaaaaguagacgaacaccaaagagcacaccuaguaccagacgcaucacaccuaggaccacaauucugcaaaucaugcugguucgaaaacagaggacucguagaaugcaacaaccacuaccuaugccuaaacugccuaucacuacuacuaucaguaucaucaagaugcccaauaugcaaaaugccacuaccaacaagacuaaaagcagcaacacaaccaucagcaccaucaacagaagcaacacaaaacacaacaccaccaccauacacaccauaa

SEQ ID NO: 12450 - RNA, 300 nt, Artificial Sequence
  derived and/or modified CDS sequence (opt6) from LASV(ISTH0230-NIG-2011;Clade II)__AIT17418__Z
augggaaacagacaagcaaaaucaacaaaaguagacgaacaccaaagagcacaccuaguaccagacgcaucacaccuaggaccacaauucugcaaaucaugcugguucgaaaacagaggacuaguagaauguaacaaccacuaccuaugccuaaacugccuaucacuacuacuaucaguaucauccagaugcccaauaugcaaaaugccacuaccaacaaaacuaaaagcagcaacacaaccaucagcaccaucaacagaaacaauacaaaacacaacaccaccaccauacacaccauaa

SEQ ID NO: 12451 - RNA, 300 nt, Artificial Sequence
  derived and/or modified CDS sequence (opt6) from LASV(ISTH0531-NIG-2011;Clade II)__AIT17422__Z
augggaaacagacaagcaaaaucagcaaaaguagacgaacaccaaagagcacaccuaguaccagacgcaucacaccuaggaccacaauucugcaaaucaugcugguucgaaaacagaggacuaguagaaugcaacaaccacuaccuaugccuaaacugccuaucacuacuacuaucaguaucaucaagaugcccaauaugcaaaaugccacuaccaacaaaacuaaaagcagcaacacaaccaucagcaccaucaacagaagcaacacaaaacacaacaccaccaccauacacaccauaa

SEQ ID NO: 12452 - RNA, 300 nt, Artificial Sequence
  derived and/or modified CDS sequence (opt6) from LASV(ISTH0595-NIG-2011;Clade II)__AIT17426__Z
augggaaacaaacaagcaaaaucaacaaaaguagacgaacaccaaagagcacaccuaguaccagacgcaucacaccuaggaccacaauucugcaaaucaugcugguucgaaaacagaggacuaguagaaugcaacaaccacuaccuaugccuaaacugccuaucacuacuacuaucaguaucaucaagaugcccaauaugcaaaaugccacuaccaacaaaacuaaaagcagcaacacaaccaucagcaccaucaacagaagcaacacaaaacacaacaccaccaccauacacaccauaa

SEQ ID NO: 12453 - RNA, 300 nt, Artificial Sequence
  derived and/or modified CDS sequence (opt6) from LASV(ISTH1003-NIG-2011;Clade II)__AIT17432__Z
augggaaacaaacaagcaaaaucaacaaaaguagacgaacaccaaagagcacaccuaguaccagacgcaucacaccuaggaccacaauucugcaaaucaugcugguucgaaaacagaggacuaguagaaugcaacaaccacuaccuaugccuaaacugccuaucacuacuacuaucaguaucaucaagaugcccaauaugcaaaaugccacuaccaacaagacuaaaagcagcaacacaaccauccgcaccaucaacagaagcaacacaaaacacaauaccaccaccauacacaccauaa

SEQ ID NO: 12454 - RNA, 300 nt, Artificial Sequence
  derived and/or modified CDS sequence (opt6) from LASV(ISTH1038-NIG-2011;Clade II)__AIT17436__Z
augggaaacaaacaagcaaaaucaacaaaagcagacgaacaccaaagagcacaccuaguaccagacgcaucacaccuaggaccacaauucugcaaaucaugcugguucgaaaacagaggacuaguagaaugcaacaaccacuaccuaugccuaaacugccuaucacuacuacuaucaguaucaucaagaugcccaauaugcaaaaugccacuaccaacaaaacuaaaagcagcaacacaaccaucagcaccaucaacagaagcaacaagaaacacaacaccaccaccauacacaccauaa

SEQ ID NO: 12455 - RNA, 300 nt, Artificial Sequence
  derived and/or modified CDS sequence (opt6) from LASV(ISTH1058-NIG-2011;Clade II)__AIT17444__Z
augggaaaccgacaagcaaaaucaacaaaaguagacgaacaccaaagagcacaccuaguaccagacgcaucacaccuaggaccacaauucugcaaaucaugcugguucgaaaacaaaggacuaguagaaugcaacaaccacuaccuaugccuaaacugccuaucacuacuacuaucaguaucaucaagaugcccaauaugcaaaaugccacuaccaacaaaacuaaaagcagcagcacaaccauccgcaccaucaacagaagcagcacaaaacacagcaccaccaccauacgcaccauaa

SEQ ID NO: 12456 - RNA, 300 nt, Artificial Sequence
  derived and/or modified CDS sequence (opt6) from LASV(ISTH1064-NIG-2011;Clade II)__AIT17448__Z
augggaaacagacaagcaaaaucaacaaaaguaggagaacaccaaagagcacaccuaguaccagacgcaucacaccuaggaccacaauucugcaaaucaugcugguucgaaaacagaggacuaguagaaugcaacaaccacuaccuaugccuaaacugccuaucacuacuacuaucaguaucaucaagaugcccaauaugcaaaaugccacuaccaacaaaacuaaaagcaacagcacaaccaucagcaccaucagcagaagcaauacaaaacacaacaccaccaccauacacaccauaa

SEQ ID NO: 12457 - RNA, 300 nt, Artificial Sequence
  derived and/or modified CDS sequence (opt6) from LASV(ISTH1069-NIG-2011;Clade II)__AIT17452__Z
augggaaacagacaagcaaaaucaacaagaguagacgaacaccaaagagcacacuuaguaccagacgcaucacaccuaggaccacaauucugcaaaucaugcugguucgaaaacagaggauuaguagaaugcaacaaccacuaccuaugccuaaacugccuaucacuacuacuaucaguaucaucaagaugcccaauaugcaaaaugccacuaccaacaagacuaagagcagcaguacaaccaucagcaccaucaacagaaacaacacaagacacaacaccaccaccauacucaccauaa

SEQ ID NO: 12458 - RNA, 300 nt, Artificial Sequence
  derived and/or modified CDS sequence (opt6) from LASV(ISTH1096-NIG-2012;Clade II)__AIT17456__Z
augggaaacagacaagcaaaaucaacagaaguaaacgaacaccaaagagcacaccuaguaccagacgcaucacaccuaggaccacaauucugcaaaucaugcugguucgaaaacagaggauuaguagaaugcaacaaccacuaccuaugccuaaacugccuaucacuacuacuaucaguaucaucaagaugcccaauaugcaaaaugccauuaccaacaaaacuaaaagcagcaacacaaccaucagcaccaucaacagaaguaacacaaaacacaguaccaccaccauacucaccauaa

SEQ ID NO: 12459 - RNA, 300 nt, Artificial Sequence
  derived and/or modified CDS sequence (opt6) from LASV(ISTH1107-NIG-2012;Clade II)__AIT17460__Z
augggaaacagacaagcaaaaucaacaaaaguagacgaacaccaaagagcacaccuaguaccagacgcaucacaccuaggaccacaauucugcaaaucaugcugguucgaaaacagaggauuaguagaaugcaacaaccacuaccuaugccuaaacugccuaucacuacuacuaucaguaucaucaagaugcccaauaugcaaaaugccacuaccaacaaaacuaaaagcagcagcacaaccaucagcaccaccaacagaagcaacacaaaacacaacaccaccaccauacacaccauaa

SEQ ID NO: 12460 - RNA, 300 nt, Artificial Sequence
  derived and/or modified CDS sequence (opt6) from LASV(ISTH1111-NIG-2011;Clade II)__AIT17464__Z
augggaaacagacaagcaaaaucaacaaaaguagacgaacaccaaagagcacaccuaguaccagacgcaucacaccuaggaccacaauucugcaaaucaugcugguucgaaaacagaggacuaguagaaugcaacaaccacuaccuaugccuaaacugccuaucacuacuacuaucaguaucaucaagaugcccaauaugcaaaaugccacuaccaacaaaacuaaaagcagcagcacaaccaucagcaccaucaacagaagcaacacaagacacaacaccaccaccauacacaccauaa

SEQ ID NO: 12461 - RNA, 300 nt, Artificial Sequence
  derived and/or modified CDS sequence (opt6) from LASV(ISTH1121-NIG-2012;Clade II)__AIT17468__Z
augggaaacagacaagcaaaacaaacaaaaguagacgaacaccaaagagcacaccuaguaccagacgcaucacaccuaggaccacaauucugcaaaucaugcugguucgaaaacagaggacuaguagaaugcaacaaccacuaccuaugccuaaacugccuaucacuacuacuaucaauaucaucaagaugcccaauaugcaaaaugccacuaccaacaaaacuaaaagcagcagcacaaccaucagcaccaucaacagaagcaacacaagacacaacaccaccaccauacacaccauaa

SEQ ID NO: 12462 - RNA, 300 nt, Artificial Sequence
  derived and/or modified CDS sequence (opt6) from LASV(ISTH1129-NIG-2012;Clade II)__AIT17472__Z
augggaaacaaacaaacaaaaucaacaaaagcagacgaacaccaaagagcacaccuaguaccagacgcaucacaccuaggaccacaauucugcaaaucaugcugguucgaaaacagaggacuaguagaaugcaacaaccacuaccuaugccuaaacugccuaucacuacuacuaucaguaucaucaagaugcccaauaugcaaaaugccacuaccaacaagacuaaaagcagcagcacaaccaucagcaccaucaacagaagcaacacaagacacaacaccaccaccauacacaccauaa

SEQ ID NO: 12463 - RNA, 300 nt, Artificial Sequence
  derived and/or modified CDS sequence (opt6) from LASV(ISTH1137-NIG-2011;Clade II)__AIT17476__Z
augggaaacagacaagcaaaaucaacaaaaguagacgaacaccaaagagcacaccuaguaccagacgcaucacaccuaggaccacaauucugcaaaucaugcugguucgaaaacagaggacuaguagaaugcaacaaccacuaccuaugccuaaacugccuaucacuacuacuaucaguaucaucaagaugcccaauaugcaaaaugccacuaccaacaaaacuaaaagcagcagcacaaccaucagcaccaucagcagaagcaauacaaaacacaacaccaccaccauacacaccauaa

SEQ ID NO: 12464 - RNA, 300 nt, Artificial Sequence
  derived and/or modified CDS sequence (opt6) from LASV(ISTH2010-NIG-2012;Clade II)__AIT17480__Z
augggaaacagacacgcaaaaucaacaaaaguagacgaacaccaaagagcacaccuaguaccagacgcaucacaccuaggaccacaauucugcaaaucaugcugguucgaaaacagaggacuaguagaaugcaacaaccacuaccuaugccuaaacugccuaucacuacuacuaucaguaucaucaagaugcccaauaugcaaaaugccacuaccaacaaaacuaaaagcagcagcacaaccaucagcaccaucaacagaaguaauacaaucaacaacacccccaccauacacaccauaa

SEQ ID NO: 12465 - RNA, 300 nt, Artificial Sequence
  derived and/or modified CDS sequence (opt6) from LASV(ISTH2016-NIG-2012;Clade II)__AIT17484__Z
augggaaacagacacgcaaaaucaacaaaaguagacgaacaccaaagagcacaccuaguaccagacgcaucacaccuaggaccacaauucugcaaaucaugcugguucgaaaacagaggauuaguagaaugcaacaaccacuaccuaugccuaaacugccuaucacuacuacuaucaguaucaucaagaugcccaauaugcaaaaugccacuaccaacaaaacuaaaagcagcagcacaaccaucagcaccaucaacagaagaaauacaaaacacaacaccaccaccauacacaccauaa

SEQ ID NO: 12466 - RNA, 300 nt, Artificial Sequence
  derived and/or modified CDS sequence (opt6) from LASV(ISTH2020-NIG-2012;Clade II)__AIT17488__Z
augggaaacagacaagcaaaaccaacaaaaguagacgaacaccaaagagcacaccuaguaccagacgcaucacaccuaggaccacaauucugcaaaucaugcugguucgaaaacaaaggacuaguagaaugcaacaaccacuaccuaugccuaaacugccuaucacuacuacuaucaguaucaucaagaugcccaauaugcaaaaugccacuaccaacaaaacuaaaagcagcagcacaaccaucagcaccaucaacagaagcagcacaaaacacagcaccaccaccauacgcaccauaa

SEQ ID NO: 12467 - RNA, 300 nt, Artificial Sequence
  derived and/or modified CDS sequence (opt6) from LASV(ISTH2031-NIG-2012;Clade II)__AIT17496__Z
augggaaacagacaagcaaaaucaacaaaaguagacgaacaccaaagagcacaccuaguaccagacgcaucacaccuaggaccacaauucugcaaaucaugcugguucgaaaacagaggauuaguagaaugcaacaaccacuaccuaugcuuaaacugccuaucacuacuacucucagucucaucaagaugcccaauaugcaaaaugccacuaccaacaagacuaaaagcagcaacacaaccaucagcaccaucaacagaagcaacacaaacaacaacaccaccaccauacacaccauaa

SEQ ID NO: 12468 - RNA, 300 nt, Artificial Sequence
  derived and/or modified CDS sequence (opt6) from LASV(ISTH2037-NIG-2012;Clade II)__AIT17500__Z
augggaaacagacaaacaaaaucaacaaaaguagacgaacaccaaagagcacaccuaguaccagacgcaucacaccuaggaccacaauucugcaaaucaugcugguucgaaaacaaaggacuaguagaaugcaacaaccacuaccuaugccuaaacugccuaucacuacuacuaucaguaucaucaagaugcccaauaugcaaaaugccacuaccaacaaaacuaaaaacagcagcacaaccaucagcacccccaacagaagcagcaagaacaacagcaccaccaccauacgcaccauaa

SEQ ID NO: 12469 - RNA, 300 nt, Artificial Sequence
  derived and/or modified CDS sequence (opt6) from LASV(ISTH2042-NIG-2012;Clade II)__AIT17504__Z
augggaaacagacacgcaaaaucaacaaaaguagacgaacaccaaagagcacaccuaguaccagacgcaucacaccuaggaccacaauucugcaaaucaugcugguucgaaaacagaggacuaguagaaugcaacaaccacuaccuaugccuaaacugccuaucacuacuacuaucaguaucaucaagaugcccaauaugcaaaaugccacuaccaacaaaacuaaaagcagcagcacaaccaucagcaccaucaacagaagcaauacaaaacacaacaccaccaccauacacaccauaa

SEQ ID NO: 12470 - RNA, 300 nt, Artificial Sequence
  derived and/or modified CDS sequence (opt6) from LASV(ISTH2046-NIG-2012;Clade II)__AIT17508__Z
augggaaacagacaaacaaaaucaacaaaaguagacgaacaccaaagagcacaccuaguaccagacgcaucacaccuaggaccacaauucugcaaaucaugcugguucgaaaacaaaggacuaguagaaugcaacaaccacuaccuaugccuaaacugccuaucacuacuacuaucaguaucaucaagaugcccaauaugcaaaaugccacuaccaacaaaacuaaaagcagcagcacaaccaucagcaccaucaacagaagcaacacaaaacacagcaccaccaccauacgcaccauaa

SEQ ID NO: 12471 - RNA, 300 nt, Artificial Sequence
  derived and/or modified CDS sequence (opt6) from LASV(ISTH2050-NIG-2012;Clade II)__AIT17512__Z
augggaaacagacaagcaaaaucaacaaaaguauacgaacaccaaagagcacaccuaguaccagacgcaucacaccuaggaccacaauucugcaaaucaugcugguucgaaaacagaggacuaguagaaugcaacaaccacuaccuaugccuaaacugccuaucacuacuacuaucaguaucaucaagaugcccaauaugcaaaaugccacuaccaacaagacuaaaagcagcaacacaaccaucagcaccaucaacagaagcaacacaaaacacaacaccaccaccauacacaccauaa

SEQ ID NO: 12472 - RNA, 300 nt, Artificial Sequence
  derived and/or modified CDS sequence (opt6) from LASV(ISTH2057-NIG-2012;Clade II)__AIT17516__Z
augggaaacagacaagcaaaaucaacaaaaguagacgaacaccaaagagcacaccuaguaccagacgcaucacaccuaggaccacaauucugcaaaucaugcugguucgaaaacagaggccuaguagaaugcaacaaccacuaccuaugccuaaacugccuaucacuacuacuaucaguaucaucaagaugcccaauaugcaaaaugccacuaccaacaaaacuaaaaacagcaacacaaccaucagcaccacuaacagaagcaacacaaaacacaacaccaccaccauacacaccauaa

SEQ ID NO: 12473 - RNA, 300 nt, Artificial Sequence
  derived and/or modified CDS sequence (opt6) from LASV(ISTH2061-NIG-2012;Clade II)__AIT17520__Z
augggaaacaaacaagcaaaaucaacaaaaguagacgaacaccaaagagcacaccuaguaccagacgcaucacaccuaggaccacaauucugcaaaucaugcugguucgaaaacagaggacuaguagaaugcaacaaccauuaccuaugccuaaacugccuaucacuacuacuaucaguaucaaacagaugcccaauaugcaaaaugccacuaccaacaaaacuaaaagcagcagcacaaccaucagcaccaucaacagaagcaacacaaaacacaacaccaccaccauacacaccauaa

SEQ ID NO: 12474 - RNA, 300 nt, Artificial Sequence
  derived and/or modified CDS sequence (opt6) from LASV(ISTH2065-NIG-2012;Clade II)__AIT17526__Z
augggaaacagacaagcaaaaucagcaaaaguaacagaacaccaaagagcacaccuaguaccagacgcaucacaccuaggaccacaauucugcaaaucaugcugguucgaaaacaaaggacuaguagaaugcaacaaccacuaccuaugccuaaacugccuaucacuacuacuauccguaucaucaagaugcccaauaugcaaaaugccacuaccaacaagacuaaaagcagcaacacaaccauccgcaccaucagcagaagcaccacaaucaacaacaccaccaccauacacaccauaa

SEQ ID NO: 12475 - RNA, 300 nt, Artificial Sequence
  derived and/or modified CDS sequence (opt6) from LASV(ISTH2094-NIG-2012;Clade II)__AIT17536__Z
augggaaacagacaaacaagaccaacagaagcaacagaacaaucaagagcacaccuaguaccagacgcaucacaccuaggaccacaauucugcaaaucaugcugguucgaaaacaaaggacuaguagaaugcaacaaccacuaccuaugccuaaacugccuaucacuacuacuaucaguaucaucaagaugcccaauaugcaaaaugccacuaccaacaagacuaaaagcaucagcacaaccaucagcaccaccaacagaagcaccacaaaacaaagcaccaccaccauacacaccauaa

SEQ ID NO: 12476 - RNA, 300 nt, Artificial Sequence
  derived and/or modified CDS sequence (opt6) from LASV(ISTH2129-NIG-2012;Clade II)__AIT17542__Z
augggaaacagacaaguaaaaucaacaaaaguagacgaacaccaaagagcacaccuaauaccagacgcaucacaccuaggaccccaauucugcaaaucaugcugguucgaaaacagaggacuaguagaaugcaacaaccacuaccuaugccuaaacugccuaucacuacuacuaucaguaucaucaagaugcccaauaugcaaaaugccacuaccaacaaaacuagaagcagcagcacaaccaucagcaccaucaacagaagcaacacaagacacaacaccaccaccauacacaccauaa

SEQ ID NO: 12477 - RNA, 300 nt, Artificial Sequence
  derived and/or modified CDS sequence (opt6) from LASV(ISTH2217-NIG-2012;Clade II)__AIT17546__Z
augggaaacaaacaagcaaaaucaacaaaaguagacgaacaccaaagagcacaccuaguaccagacgcaucacaccuaggaccacaauucugcaaaucaugcugguucgaaaacagaggacuaguagaaugcaacaaccacuaccuaugccuaaacugccuaucacuacuacuaucaguaucaucaagaugcccaauaugcaaaaugccacuaccaacaaaacuaaaagcagcagcacaaccaucagcaccaucaacagaaacaauacaaaacacaacaccaccaccauacacaccauaa

SEQ ID NO: 12478 - RNA, 300 nt, Artificial Sequence
  derived and/or modified CDS sequence (opt6) from LASV(ISTH2271-NIG-2012;Clade II)__AIT17550__Z
augggaaacagacaagcaaaacaaacaaaaguagacgaacaccaaagagcacaccuaguaccagacgcaucacaccuaggaccacaauucugcaaaucaugcugguucgaaaacagaggacuaguagaaugcaacaaccacuaccuaugccuaaacugccuaucacuacuacuaucaguaucaucaagaugcccaauaugcaaaaugccacuaccaacaaaacuaaaagcagccgcacaaccaucagcaccaucaacagaaauaacacaaaacacaacaccaccaccauacacaccauaa

SEQ ID NO: 12479 - RNA, 300 nt, Artificial Sequence
  derived and/or modified CDS sequence (opt6) from LASV(ISTH2304-NIG-2012;Clade II)__AIT17554__Z
augggaaacagacaagcaaaaucaacaaaagcagacgaacaccaaagagcacaccuaguaccagacgcaucacaccuaggaccacaauucugcaaaucaugcugguucgaaaacagaggacuaguagaaugcaacaaccacuaccuaugccuaaacugccuaucacuacuacuaucaguaucaaacagaugcccaauaugcaaaaugccacuaccaacaagacuaaaagcagcagcacaaccaucagcaccaucaacagaagcaacacaagacacaacaccaccaccauacacaccauaa

SEQ ID NO: 12480 - RNA, 300 nt, Artificial Sequence
  derived and/or modified CDS sequence (opt6) from LASV(ISTH2312-NIG-2012;Clade II)__AIT17558__Z
augggaaacagacaagcaaaaucaacaaaaguagacgaacaccaaagagcacaccuaguaccagacgcaucacaccuaggaccacaauucugcaaaucaugcugguucgaaaacagaggacuaguagaaugcaacaaccacuaccuaugccuaaacugccuaucacuacuacuaucaguaucaucaagaugcccaauaugcaaaaugccacuaccaacaagacuaaaagcagcagcacaaccaucagcaccaucaacagaagcaauaagaucaacaacaccaccaccauacacaccauaa

SEQ ID NO: 12481 - RNA, 300 nt, Artificial Sequence
  derived and/or modified CDS sequence (opt6) from LASV(ISTH2358-NIG-2012;Clade II)__AIT17570__Z
augggaaacagacaagcaaaaucagcaaaaguaaacgaacaccaaagagcacaccuaguaccagacgcaucacaccuaggaccacaauucugcaaaucaugcugguucgaaaacagaggacuaguagaaugcaacaaccacuaccuaugccuaaacugccuaucacuacuacuaucaguaucaucaagaugcccaauaugcaaaaugccacuaccaacaaaacuaaaagcagcagcacaaccaucagcaccaucaacagaagcaacacaaaacauaacaccaccaccauacacaccauaa

SEQ ID NO: 12482 - RNA, 300 nt, Artificial Sequence
  derived and/or modified CDS sequence (opt6) from LASV(Lassa virus/H.sapiens-wt/NGA/2016/ISTH_0017;Clade II)__AVO03713__Z
augggaaacagacaagcaaaaucaacaaaaguagacgaacaccaaagagcacaccuaguaccagacgcaucacaccuaggaccacaauucugcaaaucaugcugguucgaaaacagaggacuaguagaaugcaacaaccacuaccuaugccuaaacugccuaucacuacuacuaucaguaucaucaagaugcccaauaugcaaaaugccacuaccaacaaaacuaaaagcagcaacacaaccaucagcaccaucaacagaaguaaaccaaaacacaacaccaccaccauacacaccauaa

SEQ ID NO: 12483 - RNA, 300 nt, Artificial Sequence
  derived and/or modified CDS sequence (opt6) from LASV(Lassa virus/H.sapiens-wt/NGA/2016/ISTH_0035;Clade II)__AVO03731__Z
augggaaacagacaagcaaaaucaacaaaaguagacgaacaccaaagagcacaccuacuaccagacgcaucacaccuaggaccacaauucugcaaaucaugcugguucgaaaacagaggauuaguagaaugcaacaaccacuaccuaugccuaaacugccuaucacuacuacuaucaguaucaucaagaugcccaauaugcaaaaugccacuaccaacaaaacuaaaagcagcaacacaaccaucagcaccaucaacagaagcaacacaaaacacaacaccaccaccauacacaccauaa

SEQ ID NO: 12484 - RNA, 300 nt, Artificial Sequence
  derived and/or modified CDS sequence (opt6) from LASV(Lassa virus/H.sapiens-wt/NGA/2016/ISTH_0703;Clade II)__AVO03703__Z
augggaaacaaacaaacaaaaucaacaaaaguagacgaacaccaaagagcacaccuaguaccagacgcaucccaccuaggaccacaauucugcaaaucaugcugguucgaaaacagaggauuaguagaaugcaacaaccacuaccuaugccuaaacugccuaucacuacuacuaucaguaucaucaagaugcccaauaugcaaaaugccacuaccaacaaaacuaaaagcagcagcacaaccaucagcaccaucaacagaagcaacacaaaacauaacaccaccaccauacacaccauaa

SEQ ID NO: 12485 - RNA, 300 nt, Artificial Sequence
  derived and/or modified CDS sequence (opt6) from LASV(Lassa virus/H.sapiens-wt/NGA/2016/ISTH_0717;Clade II)__AVO03670__Z
augggaggaaaacacucaaaaccaccaggagaaucaaacucaccaagagcaucacuaauaccagacgcaacacaccuaggaccacaauucugcaaaucaugcugguucgaaaacaaaggauuaguagaaugcaacaaccacuaccuaugccuaaacugccuaucacuacuacuaucaguaucaaacagaugcccaauaugcaaaaugccacuaccaacaagacuaagagcaucaacaaacccaacagcaccacaaguaggacaaauagacccaacaaacccaccaccauacucaccauaa

SEQ ID NO: 12486 - RNA, 300 nt, Artificial Sequence
  derived and/or modified CDS sequence (opt6) from LASV(Lassa virus/H.sapiens-wt/NGA/2016/ISTH_0753;Clade II)__AVO03748__Z
augggaaacagacaagcaaaaucaacaaaaguagacgaacaccaaagagcacaccuaguaccagacgcaucacaccuaggaccacaauucuguaaaucaugcugguucgaaaacagaggauuaguagaaugcaacaaccacuaccuaugccuaaacugccuaucacuacuacuaucaguaucaaacagaugcccaauaugcaaaaugccacuaccaacaaaacuaaaagcagcagcacaaccaucagcaccaucaacagaagcaacacaagacacaacaccaccaccauacacaccauaa

SEQ ID NO: 12487 - RNA, 300 nt, Artificial Sequence
  derived and/or modified CDS sequence (opt6) from LASV(Lassa virus/H.sapiens-wt/NGA/2016/ISTH_0919;Clade II)__AVO03760__Z
augggaaacagacacgcaaaaccaacaaaaguagacgaacaccaaagagcacaccuaguaccagacgcaucacaccuaggaccacaauucugcaaaucaugcugguucgaaaacaaaggacuaguagaaugcaacaaccacuaccuaugccuaaacugccuaucacuacuacuaucaguaucaucaagaugcccaauaugcaaaaugccacuaccaacaaaacuaaaagcagcagcacaaccaucagcaccaucagcagaagcaacacaaaacacagcaccaccaccauacacaccauaa

SEQ ID NO: 12488 - RNA, 300 nt, Artificial Sequence
  derived and/or modified CDS sequence (opt6) from LASV(Lassa virus/H.sapiens-wt/NGA/2016/ISTH_1006;Clade II)__AVO03750__Z
augggaaacaaacaaacaaaaucaacaaaaguagacgaacaccaaagagcacaccuaguaccagacgcaucacaccuaggaccacaauucugcaaaucaugcugguucgaaaacagaggacuaguagaaugcaacaaccacuaccuaugccuaaacugccuaucacuacuacuaucaguaucaucaagaugcccaauaugcaaaaugccacuaccaacaaaacuaaaaacaguagcacaaccaucagcaccaccaacagaagcaacacaaaacacaacaccaccaccauacacaccauaa

SEQ ID NO: 12489 - RNA, 297 nt, Artificial Sequence
  derived and/or modified CDS sequence (opt6) from LASV(Lassa virus/H.sapiens-wt/NGA/2016/ISTH_1070;Clade II)__AVO03754__Z
ggaaacagacaagcaaaaccaacaaaaguagacgaacaccaaagagcacaccuaguaccagacgcaucacaccuaggaccacaauucugcaaaucaugcugguucgaaaacaaaggacuaguagaaugcaacaaccacuaccuaugccuaaacugccuaucacuacuacuaggaguaucaucaagaugcccaauaugcaaaaugccacuaccaacaaaacuaaaagcagcagcacaaccaucagcaccaucaacagaagcagcacaaaacacagcaccaccaccauacgcaccauaa

SEQ ID NO: 12490 - RNA, 300 nt, Artificial Sequence
  derived and/or modified CDS sequence (opt6) from LASV(Lassa virus/H.sapiens-wt/NGA/2016/ISTH_1174;Clade II)__AVO03716__Z
augggaaacagacaagcaaaaucaacaaaaguagacgaacaccaaagagcacaccuaguaccagacgcaucacaccuaggaccacaauucugcaaaucaugcugguucgaaaacagaggacuaguagaaugcaacaaccacuaccuaugccuaaacugccuaucacuacuacuaucaguaucaucaagaugcccaauaugcaaaaugccacuaccaacaaaacuaaaagcagcaacacaaccaucagcaccaccaacagaaacaacacaaaacacaacaccaccaccauacacaccauaa

SEQ ID NO: 12491 - RNA, 300 nt, Artificial Sequence
  derived and/or modified CDS sequence (opt6) from LASV(Lassa virus/H.sapiens-wt/NGA/2016/ISTH_1207;Clade II)__AVO03680__Z
augggaaacagacaagcaaaaucaacaaaaguagacgaacaccaaagagcacaccuaguaccagacgcaucacaccuaggaccacaauucugcaaaucaugcugguucgaaaacagaggacucguagaaugcaacaaccacuaccuaugccuaaacugccuaucacuacuacuaucaguaucaucaagaugcccaauaugcaaaaugccacuaccaacaaaacuaagagcaacagcacaaccaucagcaccaucaacagaagcaacacaaaacacaacaccaccaccauacacaccauaa

SEQ ID NO: 12492 - RNA, 300 nt, Artificial Sequence
  derived and/or modified CDS sequence (opt6) from LASV(Lassa virus/H.sapiens-wt/NGA/2016/ISTH_1311;Clade II)__AVO03739__Z
augggaaacagacaagcaaaaccaacagaagcaauagaacaaaacagagcacaccuaguaccagacgcaucacaccuaggaccacaauucugcaaaucaugcugguucgaaaacaaaggacuaguagaaugcaacaaccacuaccuaugccuaaacugccuaucacuacuacuaucaguaucaucaagaugcccaauaugcaaaaugccacuaccaacaagacuaaaagcaucagcacaaccaucagcaccaucagcagaagcaccacaaaacgcaaaaccaccaccauacucaccauaa

SEQ ID NO: 12493 - RNA, 300 nt, Artificial Sequence
  derived and/or modified CDS sequence (opt6) from LASV(Lassa virus/H.sapiens-wt/NGA/2016/ISTH_1423;Clade II)__AVO03685__Z
augggaaacaaacaagcaaaaucaauaaaagcagacgaacaccaaagagcacaccuaguaccagacgcaucacaccuaggaccacaauucugcaaaucaugcugguucgaaaacagaggauuaguagaaugcaacaaccacuaccuaugccuaaacugccuaucacuacuacuaucaguaucaucaagaugcccaauaugcaaaaugccacuaccaacaaaacuaaaaacagcagcacaaccaucagcaccaccaguaggagcaacacaaaacacaacaccaccaccauacacaccauaa

SEQ ID NO: 12494 - RNA, 300 nt, Artificial Sequence
  derived and/or modified CDS sequence (opt6) from LASV(Lassa virus/H.sapiens-wt/NGA/2016/ISTH_1462;Clade II)__AVO03690__Z
augggaaacaaacaaacaaaaucaacaaaaguagacgaacaccaaagagcacaccuaguaccagacgcaucacaccuaggaccacaauucugcaaaucaugcugguucgaaaacagaggacuaguagaaugcaacaaccacuaccuaugccuaaacugccuaucacuacuacuaucaguaucaucaagaugcccaauaugcaaaaugccacuaccaacaaaacuaaaagcagcagcacaaccaucagcaccaucaacagaagcaacacaaaacacaacaccaccaccauacacaccauaa

SEQ ID NO: 12495 - RNA, 300 nt, Artificial Sequence
  derived and/or modified CDS sequence (opt6) from LASV(Lassa virus/H.sapiens-wt/NGA/2016/ISTH_1472;Clade II)__AVO03726__Z
augggaaacaaacaaacaaaaucaacaaaaguagacgaacaccaaagagcacaccuaguaccagacgcaucacaccuaggaccacaauucugcaaaucaugcugguucgaaaacagaggacuaguagaaugcaacaaccacuaccuaugccuaaacugccuaucacuacuacuaucaguaucaucaagaugcccaauaugcaaaaugccacuaccaacaaaacuaaaagcagcagcacaaccaucagcaccaccaacagaagcaacacaaaacacaacaccaccaccauacacaccauaa

SEQ ID NO: 12496 - RNA, 300 nt, Artificial Sequence
  derived and/or modified CDS sequence (opt6) from LASV(Lassa virus/H.sapiens-wt/NGA/2016/ISTH_1496;Clade II)__AVO03693__Z
augggaaacaaacaagcaaaaucaacaaaaauagacgaccaccaaagagcacaccuaguaccagacgcaucacaccuaggaccacaauucugcaaaucaugcugguucgaaaacagaggacuaguagaaugcaacaaccacuaccuaugccuaaacugccuaucacuacuacuaucaguaucaucaagaugcccaauaugcaaaaugccacuaccaacaaaacuaaaagcagcagcacaaccaucagcaccaucaacagaaacaauacaaaacacaacaccaccaccauacacaccauaa

SEQ ID NO: 12497 - RNA, 300 nt, Artificial Sequence
  derived and/or modified CDS sequence (opt6) from LASV(Lassa virus/H.sapiens-wt/NGA/2016/ISTH_1546;Clade II)__AVO03665__Z
augggaggaaaacaaucaagaccaccaaaaaaagucgacucaccaagagcaaaccuaauaccagacgcaucauacaugggaccacaauucugcaaaucaugcugguucgaaaacaaaggacuagucgaaugcaacaaccacuaccuaugccuaaacugccuaucacuacuacuaucaguaucaucaagaugcccaauaugcaaaaugccacuaccaacaaaacuaaaagcaucaacaucaccaacagcaccaccaauaauaggaacaaacacaacaaacccaccaccauacucaccauaa

SEQ ID NO: 12498 - RNA, 300 nt, Artificial Sequence
  derived and/or modified CDS sequence (opt6) from LASV(Lassa virus/H.sapiens-wt/NGA/2016/ISTH_1568;Clade II)__AVO03711__Z
augggaaacagacaagcaagaucaacaaaaguagacgaacaccaaagagcacaccuacuaccagacgcaucacaccuaggaccacaauucugcaaaucaugcugguucgaaaacagaggacuaguagaaugcaacaaccacuaccuaugccuaaacugccuaucacuacuacuaucaguaucaucaagaugcccaauaugcaaaaugccacuaccaacaaaacuaaaagcagcaacacaaccaucagcaccaucaacagaagcaacacaaaacacaacaccaccaccauacacaccauaa

SEQ ID NO: 12499 - RNA, 300 nt, Artificial Sequence
  derived and/or modified CDS sequence (opt6) from LASV(Lassa virus/H.sapiens-wt/NGA/2016/ISTH_1610;Clade II)__AVO03687__Z
augggaaacagacaagcaaaaucaacaaaaguagcagaacaccaaagagcacaccuaguaccagacgcaucacaccuaggaccacaauucugcaaaucaugcugguucgaaaacaaaggacuaguagaaugcaacaaccacuaccuaugccuaaacugccuaucacuacuacuaucaguaucaucaagaugcccaauaugcaaaaugccacuaccaacaaaacuaagagcaacagcacaaccaucagcaccaccaucagaagcaacacaaucaacaacaccaccaccauacacaccauaa

SEQ ID NO: 12500 - RNA, 300 nt, Artificial Sequence
  derived and/or modified CDS sequence (opt6) from LASV(Lassa virus/H.sapiens-wt/NGA/2018/ISTH_0026;Clade II)__AVV65086__Z
augggaaacaaacaagcaaaaucaacaaaaguagacgaacaccaaagagcacaccuaguaccagacgcaucacaccuaggaccacaauucugcaaaucaugcugguucgaaaacagaggacuaguagaaugcaacaaccacuaccuaugccuaaacugccuaucacuacuacuaucaguaucaucaagaugcccaauaugcaaaaugccacuaccaacaagacuaaaagcagcaacacaaccaucagcaccaucaacagaagcaacaagaaacacaacaccaccaccauacacaccauaa

SEQ ID NO: 12501 - RNA, 300 nt, Artificial Sequence
  derived and/or modified CDS sequence (opt6) from LASV(Lassa virus/H.sapiens-wt/NGA/2018/ISTH_0097;Clade II)__AVV65091__Z
augggaaacaaacaaacaaaaucaacaaaaguagacgaacaccaaagagcacaccuaguaccagacgcaucacaccuaggaccacaauucugcaaaucaugcugguucgaaaacagaggacuaguagaaugcaacaaccacuaccuaugccuaaacugccuaucacuacuacuaucaguaucaucaagaugcccaauaugcaaaaugccacuaccaacaaaacuaaaagcagcagcacaaccaucagcaccaucaacagaaguaacacaaaacacaacaccaccaccauacacaccauaa

SEQ ID NO: 12502 - RNA, 300 nt, Artificial Sequence
  derived and/or modified CDS sequence (opt6) from LASV(Lassa virus/H.sapiens-wt/NGA/2018/ISTH_0664;Clade II)__AVV65093__Z
augggaaacaaacaaacaaaaucaacaaaaguagacgaacaccaaagagcacaccuaguaccagacgcaucacaccuaggaccacaauucugcaaaucaugcugguucgaaaacagaggacuaguagaaugcaacaaccacuaccuaugccuaaacugccuaucacuacuacuaucaguaucaggaagaugcccaauaugcaaaaugccacuaccaacaaaacuaaaagcagcagcacaaccaucagcaccaucaacagaagcaacacaaaacacaacaccaccaccauacacaccauaa

SEQ ID NO: 12503 - RNA, 300 nt, Artificial Sequence
  derived and/or modified CDS sequence (opt6) from LASV(Lassa virus/H.sapiens-wt/NGA/2018/ISTH_0959;Clade II)__AVV65084__Z
augggaaacaaacaagcaaaaucaacaaaaguagacgaacaccaaagagcacaccuaguuccagacgcaucacaccuaggaccacaauucugcaaaucaugcugguucgaaaacagaggacuaguagaaugcaacaaccacuaccuaugccuaaacugccuaucacuacuacuaucaguaucaucaagaugcccaauaugcaaaaugccacuaccaacaaaacuaaaagcagcagcacaaccaucagcaccaucaacagaagcaauacaaucaacaacaccaccaccauacacaccauaa

SEQ ID NO: 12504 - RNA, 300 nt, Artificial Sequence
  derived and/or modified CDS sequence (opt6) from LASV(Lassa virus/H.sapiens-wt/NGA/2018/ISTH_1079;Clade II)__AVV65074__Z
augggaaacaaacaaacaaaaucaacaaaaguagacgaacaccaaagagcacaccuaguaccagacgcaucacaccuaggaccacaauucugcaaaucaugcugguucgaaaacaaaggacuaguagaaugcaacaaccacuaccuaugccuaaacugccuaucacuacuacuaucaguaucaucaagaugcccaauaugcaaaaugccacuaccaacaaaacuaaaaacagcagcacaaccaucagcaccaccaacagaagcaacacaaaacacaacaccaccaccauacacaccauaa

SEQ ID NO: 12505 - RNA, 300 nt, Artificial Sequence
  derived and/or modified CDS sequence (opt6) from LASV(Lassa virus/H.sapiens-wt/NGA/2018/ISTH_1177;Clade II)__AVV65080__Z
augggaaacagacaaacaaaaucaacaaaaguagacgaacaccaaagagcacaccuaguaccagacgcaucacaccuaggaccacaauucugcaaaucaugcugguucgaaaacaaaggauuaguagaaugcaacaaccacuaccuaugccuaaacugccuaucacuacuacuaucaguaucaucaagaugcccaauaugcaaaaugccacuaccaacaaaacuaaaagcagcagcacaaccaucagcaccaucaacagaagcagcacaaaacacagcaccaccaccauacgcaccauaa

SEQ ID NO: 12506 - RNA, 300 nt, Artificial Sequence
  derived and/or modified CDS sequence (opt6) from LASV(Lassa virus/H.sapiens-wt/NGA/2018/ISTH_1375;Clade II)__AVV65078__Z
augggaaacagacacgcaaaaucaacaaaaauaaacgaacaccaaagagcacaccuaguaccagacgcaucacaccuaggaccacaauucugcaaaucaugcugguucgaaaacagaggacuaguagaaugcaacaaccacuaccuaugccuaaacugccuaucacuacuacuaucaguaucaucaagaugcccaauaugcaaaaugccacuaccaacaaaacuaaaagcagcagcacaaccaucagcaccaucaacagaagcaauacaaaacacaacaccaccaccauacacaccauaa

SEQ ID NO: 12507 - RNA, 300 nt, Artificial Sequence
  derived and/or modified CDS sequence (opt6) from LASV(LASV003-NIG-2008;Clade II)__AIT17578__Z
augggaaacagacaagcaaaaucaacaaaaguagacgaacaccaaagagcacaccuaguaccagacgcaucacaccuaggaccacaauucugcaaaucaugcugguucgaaaacaaaggacuaguagaaugcaacaaccacuaccuaugccuaaacugccuaucacuacuacuaucaguaucaucaagaugcccaauaugcaaaaugccacuaccaacaaaacuaagagcagcagcacaaccaucagcaccaucaacagaaucagcacaaaacacagcaccaccaccauacgcaccauaa

SEQ ID NO: 12508 - RNA, 300 nt, Artificial Sequence
  derived and/or modified CDS sequence (opt6) from LASV(LASV035-NIG-2009;Clade II)__AIT17586__Z
augggaaacaaacaagcaaaaucaacaaaaguagacgaacaccaaagagcacaccuaguaccagacgcaucacaccuaggaccacaauucugcaaaucaugcugguucgaaaacagaggacuaguagaaugcaacaaccacuaccuaugccuaaacugccuaucacuacuacuaucaguaucaucaagaugcccaauaugcaaaaugccacuaccaacaagacuaaaagcagcagcacaaccaucagcaccaucaacagaaguaacacaaaacacaacaccaccaccauacacaccauaa

SEQ ID NO: 12509 - RNA, 300 nt, Artificial Sequence
  derived and/or modified CDS sequence (opt6) from LASV(LASV042-NIG-2009;Clade II)__AIT17590__Z
augggaaacagacaagcaaaaucaacaaaaguagacgaacaccaaagagcacaccuaguaccagacgcaucacaccuaggaccacaauucugcaaaucaugcugguucgaaaacaaaggacuaguagaaugcaacaaccacuaccuaugccuaaacugccuaucacuacuacuaucaguaucaucaagaugcccaauaugcaaaaugccacuaccaacaaaacuagaagcaacaacacaaccaucagcaccaucaacagaagaaacacaaucaacaacaccaccaccauacacaccauaa

SEQ ID NO: 12510 - RNA, 300 nt, Artificial Sequence
  derived and/or modified CDS sequence (opt6) from LASV(LASV049-NIG-2009;Clade II)__AIT17602__Z
augggaaacaaacaagcaaaaucaacaaaaguagacgaauaccaaagagcacaccuaguaccagacgcaucacaccuaggaccacaauucugcaaaucaugcugguucgaaaacagaggacuaguagaaugcaacaaccacuaccuaugccuaaacugccuaucacuacuacuaucaguaucaaacagaugcccaauaugcaaaaugccacuaccaacaagacuaaaagcagcagcacaaccaucagcaccaccaacagaagcaacacaaaacacaacaccaccaccauacacaccauaa

SEQ ID NO: 12511 - RNA, 300 nt, Artificial Sequence
  derived and/or modified CDS sequence (opt6) from LASV(LASV056-NIG-2008;Clade II)__AIT17610__Z
augggaaacagacaagcaaaaccaacaaaaguagacgaacaccaaagagcacaacuaguaccagacgcaucacaccuaggaccacaauucugcaaaucaugcugguucgaaaacagaggacuaguagaaugcaacaaccacuaccuaugccuaaacugccuaucacuacuacuaucaguaucaucaagaugcccaauaugcaaaaugccacuaccaacaaaacuaaaagcagcaacacaaccaucagcaccaucaacagaagcaacacaaaacucaacaccaccaccauacacaccauaa

SEQ ID NO: 12512 - RNA, 300 nt, Artificial Sequence
  derived and/or modified CDS sequence (opt6) from LASV(LASV058-NIG-2008;Clade II)__AIT17614__Z
augggaaacagacaagcaaaaucaacaaaaguagacgaacaccaaagagcacaccuaguaccagacgcaucacaccuaggaccacaauucugcaaaucaugcugguucgaaaacagaggacuaguagaaugcaacaaccacuaccuaugccuaaacugccuaucacuacuacuaucaguaucaucaagaugcccaauaugcaaaaugccacuaccaacaaaacuaaaagcagcaacacaaccaucagcaccaucaacagaagcaacacaaaacacaacaccaccaccauacacaccauaa

SEQ ID NO: 12513 - RNA, 300 nt, Artificial Sequence
  derived and/or modified CDS sequence (opt6) from LASV(LASV063-NIG-2009;Clade II)__AIT17618__Z
augggaaacagacaagcaaaaucaacagaaguagacgaacaccaaagagcacaccuaguaccagacgcaucacaccuaggaccacaauucugcaaaucaugcugguucgaaaacagaggacuaguagaaugcaacaaccacuaccuaugccuaaacugccuaucacuacuacuaucaguaucaaacagaugcccaauaugcaaaaugccacuaccaacaaaacuaaaagcagcaacacaaccaucagcaccaucaacagaagcaacacaaaacacaacaccaccaccauacacaccauaa

SEQ ID NO: 12514 - RNA, 300 nt, Artificial Sequence
  derived and/or modified CDS sequence (opt6) from LASV(LASV1000-NIG-2009;Clade II)__AIT17780__Z
augggaaacagacaaacaaaaucaacaaaaguagacgaacaccaaagagcauaccuaguaccagacgcaucacuacuaggaccacaauucugcaaaucaugcugguucgaaaacaaaggacuaguagaaugcaacaaccacuaccuaugccuaaacugccuaucacuacuacuaucaguaucaucaagaugcccaauaugcaaaaugccacuaccaacaagacuaaaagcagcagcacaaccaucagcaccaccaacagaagcaauacaaaacacaacaccaccaccauacacaccauaa

SEQ ID NO: 12515 - RNA, 300 nt, Artificial Sequence
  derived and/or modified CDS sequence (opt6) from LASV(LASV1008-NIG-2009;Clade II)__AIT17784__Z
augggaaacagacaaacaaaaccaacaaaaguagacgaacaccaaagagcacaccuaguaccagacgcaucacaccuaggaccacaauucugcaaaucaugcugguucgaaaacaaaggacucguagaaugcaacaaccacuaccuaugccuaaacugccuaucacuacuauuaucaguaucaucaagaugcccaauaugcaaaaugccacuaccaacaaaacuaaaagcaacagcacaaccaucagcaccaucaacagaagcagcacaaaacacagcaccaccaccauacgcaccauaa

SEQ ID NO: 12516 - RNA, 300 nt, Artificial Sequence
  derived and/or modified CDS sequence (opt6) from LASV(LASV1011-NIG-2009;Clade II)__AIT17788__Z
augggaaacagacaaguaaaaucaacaaaaguagacgaacaccaaagagcacaccuaguaccagacgcaucacaccuaggaccacaauucugcaaaucaugcugguucgaaaacagaggacuaguagaaugcaacaaccacuaccuaugccuaaacugccuaucacuacuacuaucaguaucaucaagaugcccaauaugcaaaaugccacuaccaacaaaacuaaaagcagcaacacaaccaucagcaccaccaacagaagcaacacaaaaaacaacaccaccaccauacacaccauaa

SEQ ID NO: 12517 - RNA, 300 nt, Artificial Sequence
  derived and/or modified CDS sequence (opt6) from LASV(LASV1015-NIG-2009;Clade II)__AIT17792__Z
augggaaacaaacaagcaaaaucaacaaaaguagacgaacaccaaagagcacaccuaguaccagacgcaucacaccuaggaccacaauucugcaaaucaugcugguucgaaaacagaggauuaguagaaugcaacaaccacuaccuaugccuaaacugccuaucacuacuacuaucaguaucaggaagaugcccaauaugcaaaaugccacuaccaacaaaacuaaaagcaacagcacaaccaucagcaccaucaacagaagcaacacaaaacacaacaccaccaccauacacaccauaa

SEQ ID NO: 12518 - RNA, 300 nt, Artificial Sequence
  derived and/or modified CDS sequence (opt6) from LASV(LASV1016-NIG-2009;Clade II)__AIT17796__Z
augggaaacaaacaagcaaaaucaacaaaaguagacgaacaccaaagagcacaccuaguaccagacgcaucacaccuaggaccacaauucugcaaaucaugcugguucgaaaacagaggauuaguagaaugcaacaaccacuaccuaugccuaaacugccuaucacuacuacuaucaguaucaucaagaugcccaauaugcaaaaugccacuaccaacaaaacuaaaagcagcagcacaaccaucagcaccaucaacagaagcaauacaaaacacaacaccaccaccauacacaccauaa

SEQ ID NO: 12519 - RNA, 300 nt, Artificial Sequence
  derived and/or modified CDS sequence (opt6) from LASV(LASV221-NIG-2010;Clade II)__AIT17622__Z
augggaaacagacaagccaaaucaacaaaaguagacgaacaccaaagagcacaccuaguaccagacgcaucacaccuaggaccacaauucugcaaaucaugcugguucgaaaacagaggauuaguagaaugcaacaaccacuaccuaugccuaaacugccuaucacuacuacuaucaguaucaucaagaugcccaauaugcaaaaugccacuaccaacaaaacuaaaagcagcaacacaaccaucagcaccaucaacagaaguaacacaaaacacaauaccaccaccauacucaccauaa

SEQ ID NO: 12520 - RNA, 300 nt, Artificial Sequence
  derived and/or modified CDS sequence (opt6) from LASV(LASV225-NIG-2010;Clade II)__AIT17628__Z
augggaaacaaacaagcaaaaucaacaaaaauagacgaacaccaaagagcacaccuaguaccagacgcaucacaccucggaccacaauucugcaaaucaugcugguucgaaaacagaggauuaguagaaugcaacaaccacuaccuaugccuaaacugccuaucacuacuacuaucaguaucaucaagaugcccaauaugcaaaaugccacuaccaacaagacuaaaagcagcaacacaaccaucagcaccaucaacagaagcaacacaaaacacaacaccaccaccauacacaccauaa

SEQ ID NO: 12521 - RNA, 300 nt, Artificial Sequence
  derived and/or modified CDS sequence (opt6) from LASV(LASV229-NIG-2010;Clade II)__AIT17632__Z
augggaaacagacaagcaaaaucaacaaaaguagacgaacaccaaagagcacaccuaguaccagacgcaucacaccuaggaccacaauucugcaaaucaugcugguucgaaaacaaaggacucguagaaugcaacaaccacuaccuaugccuaaacugccuaucacuacuacuaucaguaucaucaagaugcccaauaugcaaaaugccacuaccaacaaaacuaagagcaacagcacaaccaucagcaccaucaacagaagcaauacaaaacacaacaccaccaccauacacaccauaa

SEQ ID NO: 12522 - RNA, 300 nt, Artificial Sequence
  derived and/or modified CDS sequence (opt6) from LASV(LASV237-NIG-2010;Clade II)__AIT17636__Z
augggaaacagacaagcaaaaucaacaaaaguagacgaacaccaaagagcacaccuaguaccagacgcaucacaccuaggaccacaauucugcaaaucaugcugguucgaaaacagaggacucguagaaugcaacaaccacuaccuaugccuaaacugccuaucacuacuacuaucaguaucaucaagaugcccaauaugcaaaaugccacuaccaacaaaacuaaaagcagcagcacaaccaucagcaccaucaauagaaacaauacaaaacacaacaccaccaccauacacaccauaa

SEQ ID NO: 12523 - RNA, 300 nt, Artificial Sequence
  derived and/or modified CDS sequence (opt6) from LASV(LASV239-NIG-2010;Clade II)__AIT17640__Z
augggaaacagacaagccaaaucaacaaaaguaggagaacaccaaagagcacaccuaguaccagacgcaucacaccuaggaccacaauucugcaaaucaugcugguucgaaaacagaggauuaguagaaugcaacaaccacuaccuaugccuaaacugccuaucacuacuacuaucaguaucaucaagaugcccaauaugcaaaaugccacuaccaacaaaacuaaaagcagcagcacaaccaucagcaccaucaacagaagcaacacaagacacaacaccaccaccauacacaccauaa

SEQ ID NO: 12524 - RNA, 300 nt, Artificial Sequence
  derived and/or modified CDS sequence (opt6) from LASV(LASV242-NIG-2010;Clade II)__AIT17648__Z
augggaaacagacaagcaaaaucaacaaaaguagacgaacaccaaagagcacaccuaguaccagacgcaucacaccuaggaccacaauucugcaaaucaugcugguucgaaaacaaaggauuaguagaaugcaacaaccacuaccuaugccuaaacugccuaucacuacuacuaucaguaucaucaagaugcccaauaugcaaaaugccacuaccaacaaaacuaaaagcaacaguacaaccaucagcaccaucaacagaagcagcacaaucaacagcaccaccaccauacgcaccauaa

SEQ ID NO: 12525 - RNA, 300 nt, Artificial Sequence
  derived and/or modified CDS sequence (opt6) from LASV(LASV245-NIG-2011;Clade II)__AIT17652__Z
augggaaacagacaagcaaaaucaacaaaaguaggagaacaccaaagagcacaccuaguaccagacgcaucacaccuaggaccacaauucugcaaaucaugcugguucgaaaacagaggacuaguagaaugcaacaaccacuaccuaugccuaaacugccuaucacuacuacuaucaguaucaucaagaugcccaauaugcaaaaugccacuaccaacaaaacuaaaagcagcagcacaaccaucagcaccaucagcagaagcaauacaaaaaacaacaccaccaccauacacaccauaa

SEQ ID NO: 12526 - RNA, 300 nt, Artificial Sequence
  derived and/or modified CDS sequence (opt6) from LASV(LASV246-NIG-2010;Clade II)__AIT17656__Z
augggaaacagacaagcaaaaucaacaaaaguagacgaccaccaaagagcacaccuaguaccagacgcaucacaccuaggaccacaauucugcaaaucaugcugguucgaaaacagaggacuaguagaaugcaacaaccacuaccuaugccuaaacugccuaucacuacuacuaucaguaucaucaagaugcccaauaugcaaaaugccacuaccaacaaaacuaaaagcagcagcacaaccaucagcaccaucaacagaagcagcacaagacacaacaccaccaccauacacaccauaa

SEQ ID NO: 12527 - RNA, 300 nt, Artificial Sequence
  derived and/or modified CDS sequence (opt6) from LASV(LASV250-NIG-2011;Clade II)__AIT17660__Z
augggaaacagacaagcaaaaucaacaaaaguagacgaacaccaaagagcacaccuaguaccagacgcaucacaccuaggaccacaauucugcaaaucaugcugguucgaaaacagaggauuaguagaaugcaacaaccacuaccuaugccuaaacugccuaucacuacuacuaucaguaucaaacagaugcccaauaugcaaaaugccacuaccaacaaaacuaaaagcagcagcacaaccaucagcaccaucaacagaagcaauacaaaacacaacaccaccaccauacgcaccauaa

SEQ ID NO: 12528 - RNA, 300 nt, Artificial Sequence
  derived and/or modified CDS sequence (opt6) from LASV(LASV251-NIG-2010;Clade II)__AIT17664__Z
augggaaacaaacaagcaaaaucaacaaaaguagacgaacaccaaagagcacaccuaguaccagacgcaucacaccuaggaccacaauucugcaaaucaugcugguucgaaaacaaaggacuaguagaaugcaacaaccacuaccuaugccuaaacugccuaucacuacuacuaucaguaucaucaagaugcccaauaugcaaaaugccacuaccaacaaaacuaaaagcagcagcacaaccaucagcaccaucaacagaagcagcacaaaacacagcaccaccacccuacgcaccauaa

SEQ ID NO: 12529 - RNA, 300 nt, Artificial Sequence
  derived and/or modified CDS sequence (opt6) from LASV(LASV253-NIG-2011;Clade II)__AIT17668__Z
augggaaacagacaagcaaaaucaacaaaaguagacgaacaccaaagagcacaccuaguaccagacgcaucacaccuaggaccacaauucugcaaaucaugcugguucgaaaacaaaggacuaguagaaugcaacaaccacuaccuaugccuaaacugccuaucacuacuacuaucaguaucaucaagaugcccaauaugcaaaaugccauuaccaacaaaacuaaaaacaacagcacaaccaucagcaccaccaacagaagcagcaaaaaacacagcaccaccaccauacgcaccauaa

SEQ ID NO: 12530 - RNA, 300 nt, Artificial Sequence
  derived and/or modified CDS sequence (opt6) from LASV(LASV256-NIG-2010;Clade II)__AIT17676__Z
augggaaacagacaagcaaaaucaacaaaaguagacgaacaccaaagagcacaccuaguaccagacgcaucacaccuaggaccacaauucugcaaaucaugcugguucgaaaacagaggauuaguagaaugcaacaaccacuaccuaugccuaaacugccuaucacuacuacuaucaguaucaucaagaugcccaauaugcaaaaugccacuaccaacaaaacuaaaagcagcaacacaaccaucagcaccaucaacagaaguaacacaaaacacaacaccaccaccauacacaccauaa

SEQ ID NO: 12531 - RNA, 300 nt, Artificial Sequence
  derived and/or modified CDS sequence (opt6) from LASV(LASV263-NIG-2011;Clade II)__AIT17680__Z
augggaaacagacaagcaaaaucaacaaaaauagacgaacaccaacgagcacaccuaguaccagacgcaucacaccuaggaccacaauucugcaaaucaugcugguucgaaaacagaggacuaguagaaugcaacaaccacuaccuaugccuaaacugccuaucacuacuacuaucaguaucaucaagaugcccaauaugcaaaaugccacuaccaacaaaacuaaaagcagcagcacaaccauccgcaccaucaacagaagcaauacaaaacacaacaccaccaccauacacaccauaa

SEQ ID NO: 12532 - RNA, 300 nt, Artificial Sequence
  derived and/or modified CDS sequence (opt6) from LASV(LASV267-NIG-2010;Clade II)__AIT17684__Z
augggaaacagacaagcaaaauccgcaaaaguagacgaacaccaaagagcacaccuaguaccagacgcaucacaccuaggaccacaauucugcaaaucaugcugguucgaaaacaaaggacuagucgaaugcaacaaccacuaccuaugccuaaacugccuaucacuacuacuaucaguaucaugcagaugcccaauaugcaaaaugccacuaccaacaaaacuaaaagcagcaacacaaccaucagcaccaucaacagaagcaacacaaaacacaacaccaccaccauacacaccauaa

SEQ ID NO: 12533 - RNA, 300 nt, Artificial Sequence
  derived and/or modified CDS sequence (opt6) from LASV(LASV274-NIG-2010;Clade II)__AIT17692__Z
augggaaacagacacgcaaaaccaacaaaaguagacgaacaccaaagagcacaccuaguaccagacgcaucacaccuaggaccacaauucugcaaaucaugcugguucgaaaacagaggacuaguagaaugcaacaaccacuaccuaugccuaaacugccuaucacuacuacuaucaguaucaucaagaugcccaauaugcaaaaugccacuaccaacaaaacuaaaagcagcagcacaaccaucagcaccaucaacagaagcaauacaaaacacaacaccaccaccauacacaccauaa

SEQ ID NO: 12534 - RNA, 300 nt, Artificial Sequence
  derived and/or modified CDS sequence (opt6) from LASV(LASV719-NIG-2009;Clade II)__AIT17702__Z
augggaaacagacacgcaaaaucaacaaaaguagacgaacaccaaagagcacaccuaguaccagacgcaucacaccuaggaccacaauucugcaaaucaugcugguucgaaaacagaggacuaguagaaugcaacaaccacuaccuaugccuaaacugccuaucacuacuacuaucaguaucaucaagaugcccaauaugcaaaaugccacuaccaacaaaacuaaaagcagcagcacaaccaucagcaccaucaaccgaagcauuccaaaacacaacaccaccaccauacacaccauaa

SEQ ID NO: 12535 - RNA, 300 nt, Artificial Sequence
  derived and/or modified CDS sequence (opt6) from LASV(LASV737-NIG-2009;Clade II)__AIT17708__Z
augggaaacagacacgcaaaaucaacaaaaguagacgaacaccaaagagcacaccuaguaccagacgcaucacaccuaggaccacaauucugcaaaucaugcugguucgaaaacagaggacuaguagaaugcaacaaccacuaccuaugccuaaacugccuaucacuacuacuaucaguaucaucaagaugcccaauaugcaaaaugccacuaccaacaaaacuaaaagcagcaacacaaccaucagcaccaucaacagaagcaauacaaaacacaacaccaccaccauacacaccauaa

SEQ ID NO: 12536 - RNA, 300 nt, Artificial Sequence
  derived and/or modified CDS sequence (opt6) from LASV(LASV966-NIG-2009;Clade II)__AIT17716__Z
augggaaacagaccagcaaaaucaacaaaaguagacgaacaccaaagagcacaccuaguaccagacgcaucacaccuaggaccacaauucugcaaaucaugcugguucgaaaacagaggacuaguagaaugcaacaaccacuaccuaugccuaaacugccuaucacuacuacuaucaguaucaucaagaugcccaauaugcaaaaugccacuaccaacaaaacuaaaagcagcagcacaaccaucagcaccaucaacagaagcaacacaaaacacaacaccaccaccauacacaccauaa

SEQ ID NO: 12537 - RNA, 300 nt, Artificial Sequence
  derived and/or modified CDS sequence (opt6) from LASV(LASV967-NIG-2009;Clade II)__AIT17720__Z
augggaaacagacaagcaaaaccaacaaaaguagacgaacaccaaagagcacaccuaguaccagacgcaucacaccuaggaccacaauucugcaaaucaugcugguucgaaaacagaggacuaguagaaugcaacaaccacuaccuaugccuaaacugccuaucacuacuacuaucaguaucaucaagaugcccaauaugcaaaaugccacuaccaacaagacuaaaagcagcagcacaaccaucagcaccaucaacagaagaaacacaaaacacaacaccaccaccauacacaccauaa

SEQ ID NO: 12538 - RNA, 300 nt, Artificial Sequence
  derived and/or modified CDS sequence (opt6) from LASV(LASV975-NIG-2009;Clade II)__AIT17730__Z
augggaaacagacaagcaaaaucaacaaaaguagacgaacaccaaagagcacaccuaguaccagacgcaucacaccuaggaccacaauucugcaaaucaugcugguucgaaaacagaggacuaguagaaugcaacaaccacuaccuaugccuaaacugccuaucacuacuacuaucaguaucaucaagaugcccaauaugcaaaaugccacuaccaacaaaacuaaaagcagcagcacaaccaucagcaccacuaacagaagcaauacaaaacacaacaccaccaccauacacaccauaa

SEQ ID NO: 12539 - RNA, 300 nt, Artificial Sequence
  derived and/or modified CDS sequence (opt6) from LASV(LASV976-NIG-2009;Clade II)__AIT17734__Z
augggaaacagacaagcaaaaucaacaaaaguagacgaacaccaaagagcacaccuaguaccagacgcaucacaccuaggaccacaauucugcaaaucaugcugguucgaaaacagaggauuaguagaaugcaacaaccacuaccuaugccuaaacugccuaucacuacuacuaucaguaucaucaagaugcccaauaugcaaaaugccacuaccaacaaaacuaaaagcagcagcacaaccaucagcaccaucaacagaagcaauacaaaacacaacaccaccaccauacacaccauaa

SEQ ID NO: 12540 - RNA, 300 nt, Artificial Sequence
  derived and/or modified CDS sequence (opt6) from LASV(LASV977-NIG-2009;Clade II)__AIT17738__Z
augggaaacagacaagcaaaaucaacaaaaguagacgaacaccaaagagcacaccuaguaccagacgcaucacaccuaggaccacaauucugcaaaucaugcugguucgaaaacagaggauuaguagaaugcaacaaccacuaccuaugccuaaacugccuaucacuacuacuaucaguaucaucaagaugcccaauaugcaaaaugccacuaccaacaaaacuaaaagcagcaacacuaccaucagcaccaucaacagaaguaacacaaaacacaacaccaccaccacacucaccauaa

SEQ ID NO: 12541 - RNA, 300 nt, Artificial Sequence
  derived and/or modified CDS sequence (opt6) from LASV(LASV981-NIG-2009;Clade II)__AIT17750__Z
augggaaacagacaagcaaaaucagcaaaaguaaacgaacaccaaagagcacaccuaguaccagacgcaucacaccuaggaccacaauucugcaaaucaugcugguucgaaaacagaggauuaguagaaugcaacaaccacuaccuaugccuaaacugccuaucacuacuacuaucaguaucaucaagaugcccaauaugcaaaaugccacuaccaacaaaacuaaaagcagcaacacaaccaucagcaccaucaacagaagcaacacaaaacacaacaccaccaccauacacaccauaa

SEQ ID NO: 12542 - RNA, 300 nt, Artificial Sequence
  derived and/or modified CDS sequence (opt6) from LASV(LASV982-NIG-2009;Clade II)__AIT17754__Z
augggaaacagacaagcaaaaucaacaaaaguagacgaacaccaaagagcacaccuaguaccagacgcaucacaccuaggaccacaauucugcaaaucaugcugguucgaaaacaaaggccuaguagaaugcaacaaccacuaccuaugccuaaacugccuaucacuacuacuaucaguaucaucaagaugcccaauaugcaaaaugccacuaccaacaaaacuaaaagcaucagcacaaccaucagcaccaucaacagaagcagcacaaaacacagcaccaccaccauacgcaccauaa

SEQ ID NO: 12543 - RNA, 300 nt, Artificial Sequence
  derived and/or modified CDS sequence (opt6) from LASV(LASV989-NIG-2009;Clade II)__AIT17760__Z
augggaaacagacaagcaaaaucaacaagaacagacgaacaccaaagagcacaccuaguaccagacgcaucacaccuaggaccacaauucugcaaaucaugcugguucgaaaacaaaggauuaguagaaugcaacaaccacuaccuaugccuaaacugccuaucacuacuacuaucaguaucaucaagaugcccaauaugcaaaaugccacuaccaacaaaacuaaaagcagcagcacaaccaucagcaccaucaacagaagcaggacaaaacacagcaccaccaccauacgcaccauaa

SEQ ID NO: 12544 - RNA, 300 nt, Artificial Sequence
  derived and/or modified CDS sequence (opt6) from LASV(LASV991-NIG-2009;Clade II)__AIT17768__Z
augggaaacagacaagcaaaaucagcaacaguagacgaaugccaaagagcacaccuaguaccagacgcaucauaccuaggaccacaauucugcaaaucaugcugguucgaaaacaaaggacuaguagaaugcaacaaccacuaccuaugccuaaacugccuaucacuacuacuaucaguaucaucaagaugcccaauaugcaaaaugccacuacccacaaaacuaaaagcagcagcacaaccaucagcaccaucaacaagagcaacacaaaacacaacaccaccaccauacacaccauaa

SEQ ID NO: 12545 - RNA, 300 nt, Artificial Sequence
  derived and/or modified CDS sequence (opt6) from LASV(LASV993-NIG-2009;Clade II)__AIT17776__Z
augggaaacaaacaagcaaaauccacaaaaguagacgaacaccaaagagcacaccuaguaccagacgcaucacaccuaggaccacaauucugcaaaucaugcugguucgaaaacaaaggauuaguagaaugcaacaaccacuaccuaugccuaaacugccuaucacuacuacuaucaguaucaucaagaugcccaauaugcaaaaugccacuaccaacaagacuaaaagcagcagcacaaccaucagcaccaucaacagaagcaacacaaaacgcagcaccaccaccauacgcaccauaa

SEQ ID NO: 12546 - RNA, 300 nt, Artificial Sequence
  derived and/or modified CDS sequence (opt6) from LASV(Nig08-A41;Clade II)__ADU56628__Z
augggaaacagacaagcaaaaucaacaaaaguagacgaacaccaaagagcacaccuaguaccagacgcaucacaccuaggaccacaauucugcaaaucaugcugguucgaaaacagaggacuaguagaaugcaacaaccacuaccuaugccuaaacugccuaucacuacuacuaucaguaucaucaagaugcccaauaugcaaaaugccacuaccaacaaaacuaaaagcagcagcacaaccaucagcaccaucaacagaagcaauacaaaacacaacaccaccaccauacgcaccauaa

SEQ ID NO: 12547 - RNA, 300 nt, Artificial Sequence
  derived and/or modified CDS sequence (opt6) from LASV(CSF;Clade III)__AAO59514__Z
augggaaacaaacaaguaagaucaaugaaaaaaguagacucaccaagagcaucacuaauaccagacgcaucacaccuaggaccacaauucugcaaaucaugcugguucgaaaacagaggacuaguagaaugcaacaaccacuaccuaugccuaaacugccuaucacuacuacuaucaguaucaucaagaugcccaauaugcaaaaugccacuaccaacaaaacuaaaaacaucaacaacaccaacagcaccaucaauaagagaagcaaacacaacaucaccaccaccauacucaccauaa

SEQ ID NO: 12548 - RNA, 300 nt, Artificial Sequence
  derived and/or modified CDS sequence (opt6) from LASV(Nig08-A18;Clade III)__ADU56616__Z
augggaggaaaacacacaaaacaaccaagagaaucaaacucaccaagagcaucacuaauaccagacgcaacacaccuaggaccacaauucugcaaaucaugcugguucgaaaacaaaggccuaguagaaugcaacaaccacuaccuaugccuaaacugccuaucacuacuacuaucaguaucaaacagaugcccaauaugcaaaaugccacuaccaacaagacuaagaacaucaacaaacccaacagcaccacaaguagaacaaacaggaccagcaucaccaccaccauacucaccauaa

SEQ ID NO: 12549 - RNA, 300 nt, Artificial Sequence
  derived and/or modified CDS sequence (opt6) from LASV(ONM-299;Clade III)__ANH09755__Z
augggaaacaaacaaacaaaaacaauaaaaaaaacagacucaccaagagcaucacuaauaccagacgcaucacacaugggaccacaauucugcaaaucaugcugguucgaaaacagaggacuaguagaaugcaacaaccacuaccuaugccuaaacugccuaucacuacuacuaucaguaucaaacagaugcccaauaugcaaaaugccacuaccaacaaaacuaagagcaucaccaucaccaacagcaccaucaauaagagaagcaaacauaacaaacccaccacccuacucaccauaa

SEQ ID NO: 12550 - RNA, 300 nt, Artificial Sequence
  derived and/or modified CDS sequence (opt6) from LASV(ONM-700;Clade III)__ANH09759__Z
augggaaacaaacaaacaaaaacaacaaaaaaaacagacucaccaagagcaucacuaauaccagacgcaucacacaugggaccacaauucugcaaaucaugcugguucgaaaacagaggacuaguagaaugcaacaaccacuaccuaugccuaaacugccuaucccuacuacuaucaguaucaaacagaugcccaauaugcaaaaugccacuaccaacaaaacuaagagcaucaccaucaccaacagcaccaucaauaagagaagcaaacauaacaaacccaccaccauacucaccauaa

SEQ ID NO: 12551 - RNA, 300 nt, Artificial Sequence
  derived and/or modified CDS sequence (opt6) from LASV(BA366;Clade IV)__ADU56644__Z
augggaaacagacaaacaaaagcaccagaagcaaaaggaucaccaagagcaucacuaauaccagacgcaacacaccuaggaccacaauucugcaaaucaugcugguucgaaaacaaaggacuaguagaaugcaacgaccacuaccuaugccuaaacugccuaacacuacuacuaucaguaucaucaagaugcccaauaugcaaaaugccacuaccaacaagacuaagaccaucaacaaacccaacagcaccaccagcaagagcagaaggaggaauaaacccaccaccauacucaccauaa

SEQ ID NO: 12552 - RNA, 300 nt, Artificial Sequence
  derived and/or modified CDS sequence (opt6) from LASV(G1180-SLE-2010;Clade IV)__AIT17166__Z
augggaaacaaacaagcaaaagcaccagaagcaaaagacucaccaagagcaucacuaauaccagacgcaacacaccuaggaccacaauucugcaaaucaugcugguucgaaacaaaaggacuaguagaaugcaacaaccacuaccuaugccuaaacugccuaacacuacuacuaucaguaucaaacagaugcccaauaugcaaaaugccacuaccaacaaaacuaagaccaucagcaacaccaacagcaccaccaacagaagcagcagacucaauaggaccaccaccauacucaccauaa

SEQ ID NO: 12553 - RNA, 300 nt, Artificial Sequence
  derived and/or modified CDS sequence (opt6) from LASV(G1190-SLE-2010;Clade IV)__AIT17170__Z
augggaaacaaacaagcaaaaguaccagaaucaaaagacucaccaagagcaucacuaauaccagacgcaacacaccuaggaccacaauucugcaaaucaugcugguucgaaaacaaaggauuaguagaaugcaacaaccacuaccuaugccuaaacugccuaacacuacuacuaucaguaucaaacagaugcccaauaugcaaaaugccacuaccaacaaaacuaagaccaucagcagcaccaacagcaccaccagcaggagcagcagacucaauaagaccaccaccauacucaccauaa

SEQ ID NO: 12554 - RNA, 300 nt, Artificial Sequence
  derived and/or modified CDS sequence (opt6) from LASV(G1200-LIB-2010;Clade IV)__AIT17174__Z
augggaaacaaacaaacaaaagcaccagaagcaaaaggaucaccaagagcaucacuaauaccagacgcaacacaccuaggaccacaauucugcaaaucaugcugguucgaaaacaaaggacuaguagaaugcaacaaccauuaccuaugccuaaacugccuaacacuacuacuaucaguaucaucaagaugcccaauaugcaaaaugccacuaccaacaaaacuaagaccaucagcaguaccaacagcaccaccaacaaaagcagaagacaacacaagaccaccaccauacucaccauaa

SEQ ID NO: 12555 - RNA, 300 nt, Artificial Sequence
  derived and/or modified CDS sequence (opt6) from LASV(G1442-SLE-2011;Clade IV)__AIT17178__Z
augggaaacaaacaagcaaaagcaucagaagcaaaagacucaccaagagcaucacuaauaccagacgcaacacaccuaggaccacaauucugcaaaucaugcugguucgaaaacaaaggauuaguagaaugcaacaaccacuaccuaugccuaaacugccuaucacuacuacuaucaguaucaucaagaugcccaauaugcaaaaugccacuaccaacaagacuaagaccaucaacagcaccaacagcaccaccagcaagagcaggagacaacauaaaaccaccaccauacucaccauaa

SEQ ID NO: 12556 - RNA, 300 nt, Artificial Sequence
  derived and/or modified CDS sequence (opt6) from LASV(G1529-SLE-2011;Clade IV)__AIT17182__Z
augggaaacaaacaagcaaaaguaccagaaguaagagacucaccaagagcaucacuaauaccagacgcaacacaccuaggaccacaauucugcaaaucaugcugguucgaaaacaaaggauuaguagaaugcaacaaccacuaccuaugccuaaacugccuaacacuacuacuaucaguaucaucaagaugcccaauaugcaaaaugccacuaccaacaaaacuaagaccaucagcaacaccaacagcaccaccagcaggagcaggagacggaacaagaccaccaccauacucaccauaa

SEQ ID NO: 12557 - RNA, 300 nt, Artificial Sequence
  derived and/or modified CDS sequence (opt6) from LASV(G1618-SLE-2011;Clade IV)__AIT17186__Z
augggaaacaaacaagcaaaaacaccagaaacaaaagacucaccaagagcaucacuaauaccagacgcaacacaccuaggaccacaauucugcaaaucaugcugguucgaaaacaaaggauuaguagaaugcaacaaccacuaccuaugccuaaacugccuaacacuauuacuaucaguaucaaacagaugcccaauaugcaaaaugccacuaccaacaaaacuaagaccaucaguagcaccaacagcaccaccagcaggagcagcagacaacacaagaccaccaccauacucaccauaa

SEQ ID NO: 12558 - RNA, 300 nt, Artificial Sequence
  derived and/or modified CDS sequence (opt6) from LASV(G1647-SLE-2011;Clade IV)__AIT17194__Z
augggaaacaaacaagcaaaagcaccagaaccaaaagacucaccaagagcaucacuaauaccagacgcaacacaccuaggaccacaauucugcaaaucaugcugguucgaaaacaaaggacuaguagaaugcaacaaccacuaccuaugccuaaacugccuaacacuacuacuaucaguaucaaacagaugcccaauaugcaaaaugccacuaccaacaaaacuaagaccaucaguagcaccaacagcaccaccagcaggaguaguagacucaacaagaccaccaccauacucaccauaa

SEQ ID NO: 12559 - RNA, 300 nt, Artificial Sequence
  derived and/or modified CDS sequence (opt6) from LASV(G1727-SLE-2011;Clade IV)__AIT17198__Z
augggaaacaaacaagcaaaaguaccagaaucaaaagacucaccaagagcaucacuaauaccagacgcaacacaccuaggaccacaauucugcaaaucaugcugguucgaaaacagaggauuaguagaaugcaacaaccacuaccuaugccuaaacugccuaacacuacuacuaucaguaucaaacagaugcccaauaugcaaaaugccacuaccaacaaaacuaagaccaucaacagcaccaacagcaccaccaacaggagcagcagacucaacaagaccaccaccauacucaccauaa

SEQ ID NO: 12560 - RNA, 300 nt, Artificial Sequence
  derived and/or modified CDS sequence (opt6) from LASV(G1774-SLE-2011;Clade IV)__AIT17202__Z
augggaaacaaacaagcaaaaacaccagaaucaaaagacucaccaagagcaucacuaauaccagacgcaacacaccuaggaccacaauucugcaaaucaugcugguucgaaaacaaaggacuaguagaaugcaacaaccacuaccuaugccuaaacugccuaacacuacuacuaucaguaucaaacagaugcccaauaugcaaaaugccacuaccaacaagacuaagaccaucagcagcaccaacagcaccaccaucaggagcagcagacucaacaagaccaccaccauacucaccauaa

SEQ ID NO: 12561 - RNA, 300 nt, Artificial Sequence
  derived and/or modified CDS sequence (opt6) from LASV(G1792-SLE-2011;Clade IV)__AIT17206__Z
augggaaacaaacaagcaaaagcaccagaagcaaaagacucaccaagagcaucacuaauaccagacgcaacacaccuaggaccacaauucugcaaaucaugcugguucgaaaacaaaggacuaguagaaugcaacaaccacuaccuaugccuaaacugccuaacacuacuacuaucaguaucauacagaugcccaauaugcaaaaugccacuaccaacaaaacuaagaccaucagcaacaccaacagcaccaccaacagaagcagcagacucaauaagaccaccaccauacagaccauaa

SEQ ID NO: 12562 - RNA, 300 nt, Artificial Sequence
  derived and/or modified CDS sequence (opt6) from LASV(G1959-SLE-2011;Clade IV)__AIT17214__Z
augggaaacaaacaagcaaaagcaccagaaguaaaagacucaccaagagcaucacuaauaccagacgcaacacaccuaggaccacaauucugcaaaucaugcugguucgaaaacaaaggauuaguagaaugcaacaaccacuaccuaugccuaaacugccuaacacuacuacuaucaguaucaaacagaugcccaauaugcaaaaugccacuaccaacaaaacuaagaccaucagcagcaccaacagcaccaccaacaggaacagcagacucaauaagaccaccaccauacucaccauaa

SEQ ID NO: 12563 - RNA, 300 nt, Artificial Sequence
  derived and/or modified CDS sequence (opt6) from LASV(G2141-SLE-2011;Clade IV)__AIT17222__Z
augggaaacaaacaagcaaaaacaccagaaacaaaagacucaccaagagcaucacuaauaccagacgcaacacaccuaggaccacaauucugcaaaucaugcugguucgaaaacaaaggacuaguagaaugcaacucacacuaccuaugccuaaacugccuaacacuacuacuaucaguaucaucaagaugcccaauaugcaaaaugccacuaccaacaagacuaagaccaucaacagcaccaacagcaccaccagcaggaguaggagacucaacaucaccaccaccauacucaccauaa

SEQ ID NO: 12564 - RNA, 300 nt, Artificial Sequence
  derived and/or modified CDS sequence (opt6) from LASV(G2147-SLE-2011;Clade IV)__AIT17226__Z
augggaaacaaacaagcaaaaacaccagaagcaaaagacucaccaagagcaucacuaauaccagacgcaacacaccuaggaccacaauucugcaaaucaugcugguucgaaaacaaaggauuaguagaaugcaacaaccacuaccuaugccuaaacugccuaacacuacuacuaucaguaucaaacagaugcccaauaugcaaaaugccacuaccaacaaaacuaagaccaucagcaacaccaacagcaccaccagcaggagcagcagacucaauaggaccaccaccauacucaccauaa

SEQ ID NO: 12565 - RNA, 297 nt, Artificial Sequence
  derived and/or modified CDS sequence (opt6) from LASV(G2165-SLE-2011;Clade IV)__AIT17230__Z
augggaaacaaacaagcaaaagcaucagacaaaaacucaccaagagcaucacuaauaccagacgcaacacaccuaggaccacaauucugcaaaucaugcugguucgaaaacaaaggacuagucgaaugcaacaaccacuaccuaugccuaaacugccuaacacuacuacuaucaguaucaaacagaugcccaauaugcaaaaugccacuaccaacaaaacuaagaccaucagcaacaccaacagcaccaccaacaggagcagcagacucaauaagaccaccaccauacucaccauaa

SEQ ID NO: 12566 - RNA, 300 nt, Artificial Sequence
  derived and/or modified CDS sequence (opt6) from LASV(G2184-SLE-2011;Clade IV)__AIT17234__Z
augggaaacaaacaagcaaaagcaucagaagaaaaaaacucaccaagagcaucacuaauaccagacgcaacacaccuaggaccacaauucugcaaaucaugcugguucgaaaacaaaggacuaguagaaugcaacaaccacuaccuaugccuaaacugccuaacacuacuacuaucaguaucaaacagaugcccaauaugcaaaaugccacuaccaacaaaacuaagaccaucagcaacaccaacagcaccaccaacaggagcagcagacucaauaagaccaccaccauacucaccauaa

SEQ ID NO: 12567 - RNA, 300 nt, Artificial Sequence
  derived and/or modified CDS sequence (opt6) from LASV(G2197-SLE-2011;Clade IV)__AIT17238__Z
augggaaacaaacaaacaaaagcacccgaagcaaaaggaucaccaagagcaucacuaauaccagacgcaacacaccuaggaccacaauucugcaaaucaugcugguucgaaaacaaaggacuaguagaaugcaacaaccacuaccuaugccuaaacugccuaacacuacuacuaucaguaucaaacagaugcccaauaugcaaaaugccacuaccaacaaaacuacgaccaucagcaacaccaacagcaccaccaacagaagcagcagacucaauaagaccaccaccauacagaccauaa

SEQ ID NO: 12568 - RNA, 300 nt, Artificial Sequence
  derived and/or modified CDS sequence (opt6) from LASV(G2222-SLE-2011;Clade IV)__AIT17242__Z
augggaaacaaacaagcaaaagcaccagaaucaaaagacucaccaagagcaucacuaauaccagacgcaacacaccuaggaccacaauucugcaaaucaugcugguucgaaaacaaaggacuaguagaaugcaacaaccacuaccuaugccuaaacugccuaacacuacuacuaucaguaucaaacagaugcccaauaugcaaaaugccacuaccaacaagacuaagaccaucagcagcaccaacagcaccaccaacaggagcaacagacucaacaagaccaccaccauacucaccauaa

SEQ ID NO: 12569 - RNA, 300 nt, Artificial Sequence
  derived and/or modified CDS sequence (opt6) from LASV(G2259-SLE-2012;Clade IV)__AIT17248__Z
augggaaacaaacaaguaaaagcaccagaagcaagaaacucaccaagagcaucacuaauaccagacgcaacacaccuaggaccacaauucugcaaaucaugcugguucgaaaacaaaggacuaguagaaugcaacaaccacuaccuaugccuaaacugccuaacacuacuacuaggaguaucaucaagaugcccaauaugcaaaacaccacuaccaacaagacuaagaccaucagcaacaccaacagcaccaccagcaggagcaggagacaacacaagaccaccaccauacucaccauaa

SEQ ID NO: 12570 - RNA, 300 nt, Artificial Sequence
  derived and/or modified CDS sequence (opt6) from LASV(G2263-SLE-2012;Clade IV)__AIT17252__Z
augggaaacaaacaagcaaaagcaccagaagcaaaagacucaccaagagcaucacuaauaccagacgcaacacaccuaggaccacaauucugcaaaucaugcugguucgaaaacaaaggauuaguagaaugcaacaaccacuaccuaugccuaaacugccuaacacuacuacuaucaguaucaaacagaugcccaauaugcaaaaugccacuaccaacaaaacuaagaccaucaacagcaccaacagcaccaccagcaggagcagcagacucaacaagaccaccaccauacucaccauaa

SEQ ID NO: 12571 - RNA, 300 nt, Artificial Sequence
  derived and/or modified CDS sequence (opt6) from LASV(G2280-SLE-2012;Clade IV)__AIT17256__Z
augggaaacaaacaagcaaaagcaccagaaacaaaagacucaccaagagcaucacuaauaccagacgcaacacaccuaggaccacaauucugcaaaucaugcugguucgaaaacaaaggacuaguagaaugcaacaaccacuaccuaugccuaaacugccuaacacuacuacuaucaguaucaaacagaugcccaauaugcaaaaugccacuaccaacaaaacuaagaccaucagcagcaccaacagcaccaccaguaggagcagcagacaacacaagaccaccaccauacucaccauaa

SEQ ID NO: 12572 - RNA, 300 nt, Artificial Sequence
  derived and/or modified CDS sequence (opt6) from LASV(G2295-SLE-2012;Clade IV)__AIT17260__Z
augggaaacaaacaagcaaaagcaccagaacuaaaagacucaccaagagcaucacuaauaccagacgcaacacaccuaggaccacaauucugcaaaucaugcugguucgaaaacaaaggauuaguagaaugcaacaaccacuaccuaugccuaaacugccuaacacuacuacuaucaguaucaaacagaugcccaauaugcaaaaugccacuaccaacaaaacuaagaccaucagcagcaccaacagcaccaccagcaggagcaguagacucaacaagaccaccaccauacucaccauaa

SEQ ID NO: 12573 - RNA, 300 nt, Artificial Sequence
  derived and/or modified CDS sequence (opt6) from LASV(G2315-SLE-2012;Clade IV)__AIT17264__Z
augggaaacaaacaaacaaaagcaccagaaucaaaaaacucaccaagagcaucauuaauaccagacgcaacauaccuaggaccacaauucugcaaaucaugcugguucgaaaacaaaggacuaguagaaugcaacaaccacuaccuaugccuaaacugccuaacacuacuacuaucaguaucaaacagaugcccaauaugcaaaaugccacuaccaacaaaacuaagaucaucagcagcaccaacagcaccaccaacaggagcagcagacucaacaaaaccaccaccauacucaccauaa

SEQ ID NO: 12574 - RNA, 300 nt, Artificial Sequence
  derived and/or modified CDS sequence (opt6) from LASV(G2318-SLE-2012;Clade IV)__AIT17268__Z
augggaaacaaacaaacaaaagcaccagaaguaaaaggaucaccaagagcaucacuaauaccagacgcaacacaccuaggaccacaauucugcaaaucaugcugguucgaaaacaaaggacuaguagaaugcaacaaccacuaccuaugccuaaacugccuaacacuacuacuaucaguaucaaacagaugcccaauaugcaaaaugccacuaccaacaaaacuaaaaccaucaacaacaccaacagcaccaccaacaggagcagcagacucaauaagaccaccaccauacucaccauaa

SEQ ID NO: 12575 - RNA, 300 nt, Artificial Sequence
  derived and/or modified CDS sequence (opt6) from LASV(G2363-SLE-2012;Clade IV)__AIT17272__Z
augggaaacaaacaaguaaaaacaucagaagcaagagacucaccaagagcaucacuaauaccagacgcaacagaccuaggaccacaauucugcaaaucaugcugguucgaaaacaaaggacuaguagaaugcaacaaccacuaccuaugccuaaacugccuaacacuacuacuaucaguaucaaacagaugcccaauaugcaaaaugccacuaccaacaagacuaagaccaucagcaaacccaacagcaccaccagcagaaacaggagacucaacaagaccaccaccauacucaccauaa

SEQ ID NO: 12576 - RNA, 300 nt, Artificial Sequence
  derived and/or modified CDS sequence (opt6) from LASV(G2392-SLE-2012;Clade IV)__AIT17278__Z
augggaucaaaacaaaccaaaacaccagaaguaaaagacucaccaagagcaucacuaauaccagacgcaacacaccuaggaccacaauucugcaaaucaugcugguucgaaaacaaaggacuaguagaaugcaacaaccacuaccuaugccuaaacugccuaacacuacuacuaucaguaucaaacagaugcccaauaugcaaaaugccacuaccaacaaaacuaagaccaucagcagcaccaacagcaccaccagcaagagcagcagacgacacaagaccaccaccauacucaccauaa

SEQ ID NO: 12577 - RNA, 300 nt, Artificial Sequence
  derived and/or modified CDS sequence (opt6) from LASV(G2405-SLE-2012;Clade IV)__AIT17282__Z
augggaaacaaacaagcaaaagcaccagaaccaaaagacucaccaagagcaucacuaauaccagacgcaacacaccuaggaccacaauucugcaaaucaugcugguucgaaaacaaaggacuaguagaaugcaacaaccacuaccuaugccuaaacugccuaacacuacuacuaucaguaucaaacagaugcccaauaugcaaaaugccacuaccaacaaaacuaagaccaucagcagcaccaacagcaccaccagcaggagcaguagacucaauaagaccaccaccauacucaccauaa

SEQ ID NO: 12578 - RNA, 300 nt, Artificial Sequence
  derived and/or modified CDS sequence (opt6) from LASV(G2427-SLE-2012;Clade IV)__AIT17286__Z
augggaaacaaacaaacaaaagcaccagaaguaaaagacucaccaagagcaucacuaauaccagacgcaacacaccuaggaccacaauucugcaaaucaugcugguucgaaaacaaaggacuaguagaaugcaacaaccacuaccuaugccuaaacugccuaacacuacuacuaucaguaucaaacagaugcccaauaugcaaaaugccacuaccaacaaaacuaagaccaucaacagcaccaacagcaccaccagcaggaacaauggacucaacaagaccaccaccauacucaccauaa

SEQ ID NO: 12579 - RNA, 300 nt, Artificial Sequence
  derived and/or modified CDS sequence (opt6) from LASV(G2431-SLE-2012;Clade IV)__AIT17290__Z
augggaaacaaacaagcaagagcaccagaagcaaaagacucaccaagagcaucauuaauaccagacgcaacacaccuaggaccacaauucugcaaaucaugcugguucgaaaacaaaggauuaguagaaugcaacaaccacuaccuaugccuaaacugccuaacacuacuacuaucaguaucaucaagaugcccaauaugcaaaaugccacuaccaacaagacuaagaccaucagcaauaccaacagcaccaccagcaggaacaggagacucaucaagaccaccaccauacucaccauaa

SEQ ID NO: 12580 - RNA, 300 nt, Artificial Sequence
  derived and/or modified CDS sequence (opt6) from LASV(G2554-SLE-2012;Clade IV)__AIT17296__Z
augggaaacaaacaagcaaaaacaccagaaauaaaagacucaccaagagcaucacuaauaccagacgcaacacaccuaggaccacaauucugcaaaucaugcugguucgaaaacaaaggacuaguagaaugcaacaaccacuaccuaugccuaaacugccuaacacuacuacuaucaguaucaaacagaugcccaauaugcaaaaugccacuaccaacaaaacuaagaccaucagcagcaccaacagcaccaccagcaggagcagcagacauaacaagaccaccaccauacucaccauaa

SEQ ID NO: 12581 - RNA, 300 nt, Artificial Sequence
  derived and/or modified CDS sequence (opt6) from LASV(G2557-SLE-2012;Clade IV)__AIT17300__Z
augggaaacaaacaaguaaaagcaccagaagcaagaaacucaccaagagcaucacuaauaccagacgcaacacacuuaggaccacaauucugcaaaucaugcugguucgaaaacaaaggauuaguagaaugcaacaaccacuaccuaugccuaaacugccuaacacuacuacuaggaguaucaucaagaugcccaauaugcaaaaugccccuaccaacaagacuaagaccaucaacagcaccaacagcaccaccagcaggagcaggagacaacacaagaccaccaccauacucaccauaa

SEQ ID NO: 12582 - RNA, 300 nt, Artificial Sequence
  derived and/or modified CDS sequence (opt6) from LASV(G2612-SLE-2012;Clade IV)__AIT17312__Z
augggaaacaaacaagcaaaaacaccagaaacaaaagacucaccaagagcaucacuaauaccagacgcaacacaccuaggaccacaauucugcaaaucaugcugguucgaaaacaaaggauuaguagaaugcaacaaccacuaccuaugccuaaacugccuaacacuacuacuauccguaucaaacagaugcccaauaugcaaaaugccacuaccaacaaaacuaagaccaucagcagcaccaacagcaccaccaguaggagcagcagacucaacaagaccaccaccauacucaccauaa

SEQ ID NO: 12583 - RNA, 300 nt, Artificial Sequence
  derived and/or modified CDS sequence (opt6) from LASV(G2615-SLE-2012;Clade IV)__AIT17316__Z
augggaaacaaacaagcaaaagcaccagaagcaagaaacucaccaagagcaucacuaauaccagacgcaacacaccuaggaccacaauucugcaaaucaugcugguucgaaaacagaggacuaguagaaugcaacaaccacuaccuaugccuaaacugccuaacacuacuacuaucaguaucaucaagaugcccaauaugcaaaaugccacuaccaacaagacuaagaccaucagcagcaccaacagcaccaccagcaggagcaggagacaacacaagaccaccaccauacucaccauaa

SEQ ID NO: 12584 - RNA, 300 nt, Artificial Sequence
  derived and/or modified CDS sequence (opt6) from LASV(G2723-SLE-2012;Clade IV)__AIT17320__Z
augggaaacaaacaagcaaaagcaccagaagcaagaaacucaccaagagcaucacuaauaccagacgcaacacaccuaggaccacaauucugcaaaucaugcugguucgaaaacaaaggacuaguagaaugcaacaaccacuaccuaugccuaaacugccuaacacuacuacuaggaguaucaucaagaugcccaauaugcaaaaugccacuaccaacaagacuaagaccaucagcagcaccaacagcaccacuagcagaagcaggagacaacacaagaccaccaccauacucaccauaa

SEQ ID NO: 12585 - RNA, 300 nt, Artificial Sequence
  derived and/or modified CDS sequence (opt6) from LASV(G2868-SLE-2012;Clade IV)__AIT17326__Z
augggaaacaaacaaucaaaagcaccagaaucaagagacucaccaagagcaucacuaauaccagacgcaacacaccuaggaccacaauucugcaaaucaugcugguucgaaaacaaaggacucguagaaugcaacaaccacuaccuaugccuaaacugccuaacacuacuacuaucaguaucaaacagaugcccaauaugcaaaaugccacuaccaacaaaacuaagaccaucagcaacaccaacagcaccaccaacaagagcagcagacucaauaagaccaccaccauacucaccauaa

SEQ ID NO: 12586 - RNA, 300 nt, Artificial Sequence
  derived and/or modified CDS sequence (opt6) from LASV(G2903-SLE-2012;Clade IV)__AIT17330__Z
augggaaacaaacaagcaaaagcacuagaaucaaaaaacucaccaagagcaucacuaauaccagacgcaacauaccuaggaccacaauucugcaaaucaugcugguucgaaaacaaaggauuaguagaaugcaacaaccacuaccuaugccuaaacugccuaacacuacuacuaucaguaucaaacagaugcccaauaugcaaaaugccacuaccaacaaaacuaagaucaucagcagcaccaacagcaccaccaacaggagcagcagacggaacaaaaccaccaccauacucaccauaa

SEQ ID NO: 12587 - RNA, 300 nt, Artificial Sequence
  derived and/or modified CDS sequence (opt6) from LASV(G3010-SLE-2013;Clade IV)__AIT17342__Z
augggaaacaaacaagcaaaagcaucagaagcaaaagacucaccaagagcaucacuaauaccagacgcaacacaccuaggaccacaauucugcaaaucaugcugguucgaaaacaaaggauuaguagaaugcaacaaccacuaccuaugccuaaacugccuaacacuacuacuaucaguaucaaacagaugcccaauaugcaaaaugccacuaccaacaaaacuaagaccaucaacagcaccaacagcaccacaaacaggagcagcagacucaauaagaccaccaccauacucaccauaa

SEQ ID NO: 12588 - RNA, 300 nt, Artificial Sequence
  derived and/or modified CDS sequence (opt6) from LASV(G3016-SLE-2013;Clade IV)__AIT17346__Z
augggaaacaaacaagcaaaagcaccagaaacaaaagacucaccaagagcaucacuaauaccagacgcaacacaccuaggaccacaauucugcaaaucaugcugguucgaaaacaaaggacuaguagaaugcaacaaccacuaccuaugccuaaacugccuaacacuacuacuaucaguaucaaacagaugcccaauaugcaaaaugccacuaccaacaaaacuaagaccaucagcagcaccaacagcaccaccaguaggagcagcagacucaacaagaccaccaccauacucaccauaa

SEQ ID NO: 12589 - RNA, 300 nt, Artificial Sequence
  derived and/or modified CDS sequence (opt6) from LASV(G3148-SLE-2013;Clade IV)__AIT17362__Z
augggaaacaaacaagcaaaagcaccagaaucaaaagacucaccaagagcaucacuaauaccagacgcaacacaccuaggaccacaauucugcaaaucaugcugguucgaaaacaaaggauuaguagaaugcaacaaccacuaccuaugccuaaacugccuaacacuacuacuaucaguaucaaacagaugcccaauaugcaaaaugccacuaccaacaaaacuaagaccaucagcagcaccaacagcaccaccagcaggagcagcagacucaauaagaccaccaccauacucaccauaa

SEQ ID NO: 12590 - RNA, 300 nt, Artificial Sequence
  derived and/or modified CDS sequence (opt6) from LASV(G3151-SLE-2013;Clade IV)__AIT17366__Z
augggaaacaaacaaacaaaaacaccagaaguaaaagacucaccaagagcaucacuaauaccagacgcaacacaccuaggaccacaauucugcaaaucaugcugguucgaaaacaaaggauuaguagaaugcaacaaccacuaccuaugccuaaacugccuaacacuacuacuaucaguaucaaacagaugcccaauaugcaaaaugccacuaccaacaaaacuaagaccaucagcagcaccaacagcaccaccagcaagagcagcagacgacacaagaccaccaccauacucaccauaa

SEQ ID NO: 12591 - RNA, 300 nt, Artificial Sequence
  derived and/or modified CDS sequence (opt6) from LASV(G3206-SLE-2013;Clade IV)__AIT17376__Z
augggaaacaaacaagcaaaagcaccagaaucaaaagacucaccaagagcaucacuaauaccagacgcaacauaccuaggaccacaauucugcaaaucaugcugguucgaaaacaaaggacuaguagaaugcaacaaccacuaccuaugccuaaacugccuaacacuacuacuaucaguaucaaacagaugcccaauaugcaaaaugccacuaccaacaaaacuaagaucaucaguagcaccaacagcaccaccaacaagagcagcagacucaacaagaccaccaccauacucaccauaa

SEQ ID NO: 12592 - RNA, 300 nt, Artificial Sequence
  derived and/or modified CDS sequence (opt6) from LASV(G3229-SLE-2013;Clade IV)__AIT17382__Z
augggaaacaaacaaacaaaaacaucagaaguaaaagacucaccaagagcaucacuaauaccagacgcaacacaccuaggaccacaauucugcaaaucaugcugguucgaaaacaaaggacuaguagaaugcaacaaccacuaccuaugccuaaacugccuaacacuacuacuaucaguaucaaacagaugcccaauaugcaaaaugccacuaccaacaaaacuaagaccaucagcagcaccaacagcaccaccagcaagagcagcagacgacacaagaccaccaccauacucaccauaa

SEQ ID NO: 12593 - RNA, 300 nt, Artificial Sequence
  derived and/or modified CDS sequence (opt6) from LASV(G3234-SLE-2013;Clade IV)__AIT17386__Z
augggaaacaaacaagcaaaaacaccagaagcaagagacucaccaagagcaucacuaauaccagacgcaacacaccuaggaccacaauucugcaaaucaugcugguucgaaaacaaaggacuaguagaaugcaacaaccacuaccuaugccuaaacugccuaacacuacuacuaucaguaucaucaagaugcccaauaugcaaaaugccacuaccaacaaaacuaagaccaucagcaacaccaacagcaccaccagcaggagcaggagacggaacaagaccaccaccauacucaccauaa

SEQ ID NO: 12594 - RNA, 300 nt, Artificial Sequence
  derived and/or modified CDS sequence (opt6) from LASV(G3278-SLE-2013;Clade IV)__AIT17396__Z
augggaaacaaacaaguaaaagcaccagaagcaagaaacucaccaagagcaucacuaauaccagacgcaacacaccuaggaccacaauucugcaaaucaugcugguucgaaaacaaaggccuaguagaaugcaacaaccacuaccuaugccuaaacugccuaacacuacuacuaggaguaucaucaagaugcccaauaugcaaaaugccacuaccaacaagacuaagaccaucagcagcaccaacagcaccaccagcagaagcaggagacaacacaagaccaccaccauacucaccauaa

SEQ ID NO: 12595 - RNA, 300 nt, Artificial Sequence
  derived and/or modified CDS sequence (opt6) from LASV(G502-SLE-2009;Clade IV)__AIT17124__Z
augggaaacaaacaaguaaaaacaccagaagcaaaagacucaccaagagcaucacuaauaccagacgcaacacaccuaggaccacaauucugcaaaucaugcugguucgaaaacaaaggacuaguagaaugcaacaaccacuaccuaugccuaaacugccuaacacuacuacuaucaguaggaaacagaugcccaauaugcaaaaugccacuaccaacaaaacuaagaccaucagucacaccaacagcaccaccaacaagagcagcagacucaauaggaccaccaccauacucaccauaa

SEQ ID NO: 12596 - RNA, 300 nt, Artificial Sequence
  derived and/or modified CDS sequence (opt6) from LASV(G503-SLE-2009;Clade IV)__AIT17128__Z
augggaaacaaacaagcaaaaacaccagaagcaaaagacucaccaagagcaaaccuaauaccagacgcaacacaccuaggaccacaauucugcaaaucaugcugguucgaaaacaaaggacuaguagaaugcaacaaccacuaccuaugccuaaacugccuaacacuacuacuaucaguaucaaacagaugcccaauaugcaaaaugccacuaccaacaaaacuaagaccaucagcagcaccaacagcaccaccaacaggagcagcagacucaauaagaccaccaccauacucaccauaa

SEQ ID NO: 12597 - RNA, 300 nt, Artificial Sequence
  derived and/or modified CDS sequence (opt6) from LASV(G610-SLE-2009;Clade IV)__AIT17132__Z
augggaaacaaacaagcaaaagcaccagaagcaagagacucaccaagagcaucacuaauaccagacgcaacacaccuaggaccacaauucugcaaaucaugcugguucgaaaacaaaggauuaguagaaugcaacaaccacuaccuaugccuaaacugccuaacacuacuacuaucaguaucaaacagaugcccaauaugcaaaaugccacuaccaacaaaacuaagaccaucagcaacaccaacagcaccaccaacagaagcagcagacucaauaagaccaccaccauacagaccauaa

SEQ ID NO: 12598 - RNA, 300 nt, Artificial Sequence
  derived and/or modified CDS sequence (opt6) from LASV(G676-SLE-2009;Clade IV)__AIT17140__Z
augggaaacaaacaagcaaaagcaccagaaccaaaagacucaccaagagcaucacuaauaccagacgcaacacaccuaggaccacaauucugcaaaucaugcugguucgaaaacaaaggauuaguagaaugcaacaaccacuaccuaugccuaaacugccuaacacuacuacuaucaguaucaaacagaugcccaauaugcaaaaugccacuaccaacaaaacuaagaccaucagcagcaccaacagcaccaccagcaggagcaguagacucaacaagaccaccaccauacucaccauaa

SEQ ID NO: 12599 - RNA, 300 nt, Artificial Sequence
  derived and/or modified CDS sequence (opt6) from LASV(G692-SLE-2009;Clade IV)__AIT17144__Z
augggaaacaaacaagcaaaaacaccagaaucaaaagacucaccaagagcaucacuaauaccagacgcaacacaccuaggaccacaauucugcaaaucaugcugguucgaaaacaaaggauuaguagaaugcaacaaccacuaccuaugccuaaacugccuaacacuacuacuaggaguaucaaacagaugcccaauaugcaaaaugccacuaccaacaaaacuaagaucaucaguagcaccaacagcaccaccaacaggagcaguagacucaauaagaccaccaccauacucaccauaa

SEQ ID NO: 12600 - RNA, 300 nt, Artificial Sequence
  derived and/or modified CDS sequence (opt6) from LASV(G733-SLE-2010;Clade IV)__AIT17152__Z
augggaaacaaacaagcaaaaacaccagaaacaaaagacucaccaagagcaucauuaauaccagacgcaacacaccuaggaccacaauucugcaaaucaugcugguucgaaaacaaaggauuaguagaaugcaacaaccacuaccuaugccuaaacugccuaacacuacuacuaucaguaucaaacagaugcccaauaugcaaaaugccacuaccaacaaaacuaagaccaucaacagcaccaacagcaccaccagcaggagcagcagacaacacaagaccaccaccauacucaccauaa

SEQ ID NO: 12601 - RNA, 300 nt, Artificial Sequence
  derived and/or modified CDS sequence (opt6) from LASV(G808-SLE-2010;Clade IV)__AIT17162__Z
augggaaacaaacaagcaaaagcaucagaaucaaaagacucaccaagagcaucacuaauaccagacgcaacacaccucggaccacaauucugcaaaucaugcugguucgaaaacaaaggauuaguagaaugcaacaaccacuaccuaugccuaaacugccuaacacuacuacuaucaguaucaaacagaugcccaauaugcaaaaugccacuaccaacaaaacuaagaccaucaguaacaccaacagcaccaccaacaagaacagcagacaacacaagaccaccaccauacucaccauaa

SEQ ID NO: 12602 - RNA, 300 nt, Artificial Sequence
  derived and/or modified CDS sequence (opt6) from LASV(Guinea Faranah;Clade IV)__AMZ00378__Z
augggaaacagacaaacaaaagcaacagaagcaaaagacucaccaagagcaucacuaauaccagacgcaacacaccuaggaccacaauucugcaaaucaugcugguucgaaaacaaaggacuaguagaaugcaacaaccacuaccuaugccuaaacugccuaacacuacuacuaucaguaucaucaagaugcccaauaugcaaaaugccacuaccaacaagacuaaaaucaucaacaaacccaacagcaccaucagcaaaaacagaaucaucaauaaacccaccaccauacucaccauaa

SEQ ID NO: 12603 - RNA, 300 nt, Artificial Sequence
  derived and/or modified CDS sequence (opt6) from LASV(GUINEA Z-185a;Clade IV)__AMZ00374__Z
augggaaacaaacaagcaaaagcaccagaaacaaaaaacucaccaagagcaucacuaauaccagacgcaacacaccuaggaccacaauucugcaaaucaugcugguucgaaaacaaaggacuaguagaaugcaacaaccacuaccuaugccuaaacugccuaacacuacuacuaucaguaucaaacagaugcccaauaugcaaaaugccacuaccaacaaaacuaagaccaucagcaguaccaacagcaccaccagcacaaguaggagacagaacaagaccaccaccauacucaccauaa

SEQ ID NO: 12604 - RNA, 312 nt, Artificial Sequence
  derived and/or modified CDS sequence (opt6) from MOPV/LASV reassortant(IGS-1;Clade IV)__AFY05533__Z
augggaaaaacacaaucaaaaggacaaccauccacaaaccuacuaaaagaaacagaaccaagacacccaguaauaccagacgcaagaggaacaggaccagaauucugcaaaucaugcugguucgaaagaagaggacuaguaagaugcaacgaccacuaccuaugccuaaacugccuaacacuacuacacacaguaucagacagaugcccaauaugcaaacacaaacuaccauucagacuagaacuacaaacacaaccaacagcaccaccagaaauaccaccaucacaaaacccaccaccauacucaccauaa

SEQ ID NO: 12605 - RNA, 300 nt, Artificial Sequence
  derived and/or modified CDS sequence (opt6) from LASV(LM032-SLE-2010;Clade IV)__AIT17800__Z
augggaaacaaacaagcaaaagcaccagaagcaaaagacucaccaagagcaucacuaauaccagacgcaacacaccuaggaccacaauucugcaaaucaugcugguucgaaaacaaaggacuaguagaaugcaacaaccacuaccuaugccuaaacugccuaacacuacuacuaucaguaucaaaccgaugcccaauaugcaaaaugccacuaccaacaaaacuaagaccaucagcaacaccaacagcaccaccaacagaagcagcagacucaauaagaccaccaccauaccacccauaa

SEQ ID NO: 12606 - RNA, 300 nt, Artificial Sequence
  derived and/or modified CDS sequence (opt6) from LASV(LM222-SLE-2010;Clade IV)__AIT17804__Z
augggaaacaaacaagcaaaagcaucagaagaaaaaaacucaccaagagcaucacuaauaccagacgcaacacaccuaggaccacaauucugcaaaucaugcugguucgaaaacaaaggacuaguagaaugcaacaaccacuaccuaugccuaaacugccuaacacuacuacuaucaguaucaaacagaugcccaauaugcaaaaugccacuaccaacaaaacuaagaccaucaacaacaccaacagcaccaccaacaggagcagcagacucaauaagaccaccaccauacucaccauaa

SEQ ID NO: 12607 - RNA, 300 nt, Artificial Sequence
  derived and/or modified CDS sequence (opt6) from LASV(LM395-SLE-2009;Clade IV)__AIT17808__Z
augggaaacaaacaagcaaaagcaccagaaucaaaagacucaccaagagcaucacuaauaccagacgcaacacaccuaggaccacaauucugcaaaucaugcugguucgaaaacaaaggacuaguagaaugcaacaaccacuaccuaugccuaaacugccuaacacuacuacuaucaguaucaaacagaugcccaauaugcaaaaugccacuaccaacaagacuaagaccaucagcagcaccaacagcaccaccaacaggagcagcagacucaacaagaccaccaccauacucaccauaa

SEQ ID NO: 12608 - RNA, 300 nt, Artificial Sequence
  derived and/or modified CDS sequence (opt6) from LASV(LM776-SLE-2012;Clade IV)__AIT17824__Z
augggaaacaaacaagcaaaagcaucagaagaaaaaaacucaccaagagcaucacuaauaccagacgcaacacaccuaggaccacaauucugcaaaucaugcugguucgaaaacaaaggacuaguagaaugcaacaaucacuaccuaugccuaaacugccuaacacuacuacuaucaguaucaaacagaugcccaauaugcaaaaugccacuaccaacaaaacuaagaccaucaacaacaccaacagcaccaccaacaggagcagcagacucaauaagaccaccaccauacucaccauaa

SEQ ID NO: 12609 - RNA, 300 nt, Artificial Sequence
  derived and/or modified CDS sequence (opt6) from LASV(Mad39;Clade IV)__ANH09743__Z
augggaaacaaacaagcaaaagcaucagaaguagaagacggaccaagagcaucacuaauaccagacgcaacacaccuaggaccacaauucugcaaaucaugcugguucgaaaacaaaucacuaguagaaugcaacaaccacuaccuaugccuaaacugccuaacacuacuacuaucaguaucaaacagaugcccaauaugcaaaaugccacuaccaacaagacuaaaaccaucaguaguaccaacagcaccaccaacacgagcaggagacggaacaagaccaccaccauacucaccauaa

SEQ ID NO: 12610 - RNA, 300 nt, Artificial Sequence
  derived and/or modified CDS sequence (opt6) from LASV(Mad41;Clade IV)__ANH09745__Z
augggaaacaaacaaacaaaagcaccagaaguagaagacggaccaagagcaucacuaauaccagacgcaacacaccuaggaccacaauucugcaaaucaugcugguucgaaaacaaaggacuaguagaaugcaacaaccacuaccuaugccuaaacugccuaacacuacuacuaucaguaucaucaagaugcccaauaugcaaaaugccacuaccaacaagacuaaaaccaucaauaguaccaaccgcaccaccagcaagaacaggagaaaacacaagaccaccaccauacucaccauaa

SEQ ID NO: 12611 - RNA, 300 nt, Artificial Sequence
  derived and/or modified CDS sequence (opt6) from LASV(Mad63;Clade IV)__ANH09749__Z
augggaaacaaacaagcaaaagcaccagaaguagaagacggaccaagagcaucacuaauaccagacgcaacacaccuaggaccacaauucugcaaaucaugcugguucgaaaacagaggacuaguagaaugcaacaaccacuaccuaugccuaaacugccuaacacuacuacuaucaguaucaaacagaugcccaauaugcaaaaugccacuaccaacaagacuaaaaccaucaguaguaccaacagcaccaccaacaggagcaggaggagacacaagaccaccaccauacucaccauaa

SEQ ID NO: 12612 - RNA, 300 nt, Artificial Sequence
  derived and/or modified CDS sequence (opt6) from LASV(Mad69;Clade IV)__ANH09751__Z
augggaaacaaacaagcaaaagcaccaaaagcagaagacggaccaagagcaucacuaauaccagacgcaacacaccuaggaccacaauucugcaaaucaugcugguucgaaaacaaaggacuaguagaaugcaacaaccacuaccuaugccuaaacugccuaacacuacuacuaucaguaucaaacagaugcccaauaugcaaaaugccacuaccaacaagacuaaaaccaucaguaguaccaacagcaccaccaacaggagcaggaggagacacaagaccaccaccacacucaccauaa

SEQ ID NO: 12613 - RNA, 300 nt, Artificial Sequence
  derived and/or modified CDS sequence (opt6) from LASV(Mad83;Clade IV)__ANH09753__Z
augggaaacaaacaagcaaaagcaucagaagcagaagacggaccaagagcaucacuaauaccagacgcaacacacuuaggaccacaauucugcaaaucaugcugguucgaaaacaaaggauuaguagaaugcaacaaccacuaccuaugccuaaacugccuaacacuacuacuaucaguaucaucaagaugcccaauaugcaaaaugccacuaccaacaagacuaagaccaucaguaguaccaacagcaccaucagcaggagcaggagacggaacaagaccaccaccauacucaccauaa

SEQ ID NO: 12614 - RNA, 300 nt, Artificial Sequence
  derived and/or modified CDS sequence (opt6) from LASV(NL;Clade IV)__AAO59510__Z
augggaaauaaacaaacaaaagcaccagaagcaaaagacucaccaagagcaucacuaauaccagacgcaacauaccuaggaccacaauucugcaaaucaugcugguucgaaaacaaaggauuaguagaaugcaacaaccacuaccuaugccuaaacugccuaacacuacuacuaucaguaucaaacagaugcccaauaugcaaaaugccacuaccaacaaaauuaagaccaucagcagcaccaacagcaccaccagcaggagcagcacacucagcaagaccaccaccauacucaccauaa

SEQ ID NO: 12615 - RNA, 300 nt, Artificial Sequence
  derived and/or modified CDS sequence (opt6) from LASV(Z0947-SLE-2011;Clade IV)__AIT17838__Z
augggaaacaaacaagcaaaaguaccagaaucaaaagacucaccaagagcaucacuaauaccagacgcaacacaccuaggaccacaauucugcaaaucaugcugguucgaaaacaaaggacuaguagaaugcaacaaccacuaccuaugccuaaacugccuaacacuacuacuaucaguaucaaacagaugcccaauaugcaaaaugccacuaccaacaaaacuaaaaccaucagcagcaccaacagcaccaccaacaggagcagcagacucaauaagaccaccaccauacucaccauaa

SEQ ID NO: 12616 - RNA, 300 nt, Artificial Sequence
  derived and/or modified CDS sequence (opt6) from LASV(Z0948-SLE-2011;Clade IV)__AIT17842__Z
augggaaacaaacaagcaaaaguaccagaaucaaaagacucaccaagagcaucacuaauaccagacgcaacacaccuaggaccacaauucugcaaaucaugcugguucgaaaacaaaggacuaguagaaugcaacaaccacuaccuaugccuaaacugccuaacacuacuacuaucaguaucaaacagaugcccaauaugcaaaaugccacuaccaacaaaacuaagaccaucagcagcaccaacagcaccaccaacaggaguagcagacucaauaagaccaccaccauacucaccauaa

SEQ ID NO: 12617 - RNA, 300 nt, Artificial Sequence
  derived and/or modified CDS sequence (opt6) from LASV(Z148;Clade IV)__AAT49005__Z
augggaaacaaacaagcaaaagcaccagaaacaaaagacucaccaagagcaucacuaauaccagacgcaacacaccuaggaccacaauucugcaaaucaugcugguucgaaaacaaaggacuaguagaaugcaacaaccacuaccuaugccuaaacugccuaacacuacuacuaucaguaucaaacagaugcccaauaugcaaaaugccacuaccaacaagacuaagaccaucagcaguaccaacagcaccaccagcaccagcaggagacagaacaaaaccaccaccauacucaccauaa

SEQ ID NO: 12618 - RNA, 300 nt, Artificial Sequence
  derived and/or modified CDS sequence (opt6) from LASV(Bamba-R114;Clade V)__AHC95547__Z
augggaaacagacaagcaaaagacccaaaaguagaaucaucaccaagagcaucacuaauaccagacgcaacacaccuaggaccacaauucugcaaaucaugcugguucgaaaacaaaggacuaguagaaugcaacaaccacuaccuaugccuaaacugccuaucacuacuacuaucaguaucaaacagaugcccaauaugcaaaaugccacuaccaacaagacuaagaccaacaacaaugccaacagcaccacaaauaauaaaagaaggaacaacaaacccaccaccauacacaccauaa

SEQ ID NO: 12619 - RNA, 300 nt, Artificial Sequence
  derived and/or modified CDS sequence (opt6) from LASV(Komina-R16;Clade V)__AHC95545__Z
augggaaacaaacaagcaaaagacccaaaaacagaaucaucaccaagagcaucacuaauaccagacgcaacacaccuaggaccacaauucugcaaaucaugcugguucgaaaacaaaggacuaguagaaugcaacaaccacuaccuaugccuaaacugccuaucacuacuacuaucaguaucaaacagaugcccaauaugcaaaaugccacuaccaacaaaacuaaaaccaauaacaacaccaacagcaccacaaauaacaagagaaucaauaacaaacccaccaccauacacaccauaa

SEQ ID NO: 12620 - RNA, 300 nt, Artificial Sequence
  derived and/or modified CDS sequence (opt6) from LASV(Alzey;Clade VI)__SCA79103__Z
augggagcaagacaaacaaaacaaccacaaauagaaggaucaccaagagcaucacuaguaccagacgcaucacaccuaggaccacaauucugcaaaucaugcugguucgaaaacaaaggacuaguagaaugcaacaaccacuaccuaugccuaaacugccuaucacuacuacuaucaguaucaaacagaugcccaauaugcaaaaugccacuaccaacaaaacuaagaguaucaucagcaccaucagcaccaccagcagcaacagcacaaccaggaacaccaccacccuacucaccauaa

SEQ ID NO: 12621 - RNA, 300 nt, Artificial Sequence
  derived and/or modified CDS sequence (opt6) from LASV(NIGERIA IKEJI;Clade II)__AMZ00370__Z
augggaaacaaacaagcaaaaucaacaagaguagacgaacaacaaagagcacaccuaguaccagacgcaucacaccuaggaccacaauucugcaaaucaugcugguucgaaaacaaaggauuaguagaaugcaacaaccacuaccuaugccuaaacugccuaucacuacuacuaucaguaucaucaagaugcccaauaugcaaaaugccacuaccaacaaaacuaaaaacaucaacacaaccaucagcaccaagagcagaaguaccaccaucaacaacaccaccaccauacucaccauaa

SEQ ID NO: 12622 - RNA, 300 nt, Artificial Sequence
  derived and/or modified CDS sequence (opt11) from LASV(Josiah;Clade IV)__ADY11072/NP_694871__Z
augggcaacaaacaagccaaagcccccgaauccaaagacuccccccgcgccucccucauccccgacgccacccaccucggcccccaauucugcaaauccugcugguucgaaaacaaaggccucgucgaaugcaacaaccacuaccucugccucaacugccucacccuacuccucuccgucuccaaccgcugccccaucugcaaaaugccccuccccaccaaacuccgccccuccgccgcccccaccgccccccccaccggcgccgccgacuccauccgccccccccccuacucccccuaa

SEQ ID NO: 12623 - RNA, 303 nt, Artificial Sequence
  derived and/or modified CDS sequence (opt11) from LASV(Pinneo-NIG-1969;Clade I)__AIT17834__Z
augggcaacaaacaaacccgcuccccccccaaacccgaacacccccgccccacccuccucccagacgccucccaccucggcccccaauucugcaaauccugcugguucgaaaacaaaggccuagucgaaugcaacaaccacuaccucugccucaacugccucacccuccuccucuccgucuccgaccgcugccccaucugcaaaaugccccuccccaccaaacuugccguccgcacccaacccuccgcccccccccucaaccaaggcaacacccaauccucccccccccccuacucccccuaa

SEQ ID NO: 12624 - RNA, 300 nt, Artificial Sequence
  derived and/or modified CDS sequence (opt11) from LASV(Nig08-04;Clade II)__ADU56612__Z
augggcaaccgccaaacccgccccaccgaagcaaccgaacaaucccgcgcccaccucguccccgacgccucccaccucggcccccaauucugcaaauccugcugguucgaaaaccgcggccucgucgaaugcaacaaccacuaccucugccucaacugccucucccuccuccucuccgucuccucccgcugccccaucugcaaaaugccccuccccacccgccucaaagccuccgcccaacccuccgccccccccaccgaagccccccaaaacaccacccccccccccuacacccccuaa

SEQ ID NO: 12625 - RNA, 300 nt, Artificial Sequence
  derived and/or modified CDS sequence (opt11) from LASV(Nig08-A19;Clade III)__ADU56620__Z
augggcggcaaacacaccaaaccccaacgcgaauccaacuccccccgcgccucccucauccccgacgccacccaccucggcccccaauucugcaaauccugcugguucgaaaacaaaggccucgucgaaugcaacaaccacuaccucugccucaacugccucacccuccuccucuccgucuccaaccgcugccccaucugcaaaaugccccuccccacccgccuccgcgccuccaccaaccccaccgccccccaagucgaacaagucggccccaccaaccccccccccuacucccccuaa

SEQ ID NO: 12626 - RNA, 300 nt, Artificial Sequence
  derived and/or modified CDS sequence (opt11) from LASV(AV;Clade V)__CCA30312__Z
augggcaaccgccaagccaaaaaccccgaagucgaaaacuccccccgcgccucccucauccccgacgccacccaccucggcccccaauucugcaaauccugcugguucgaaaacaaaggccucgucgaaugcaacaaccacuaccucugccucaacugccucucccuccuccucuccgucuccaaccgcugccccaucugcaaaaugccccuccccacccgccuccgccccaccaccacccccaccgccccccaaaucaucaaagaaaacaccaccaaccccccccccuacacccccuaa

SEQ ID NO: 12627 - RNA, 300 nt, Artificial Sequence
  derived and/or modified CDS sequence (opt11) from LASV(Togo/2016/7082;Clade VI)__AMR44579__Z
augggcgcccgccaaaccaaacaaccccaaaucgaaggcuccccccgcgccucccucguccccgacgccucccaccucggcccccaauucugcaaauccugcugguucgaaaacaaaggccucgucgaaugcaacaaccacuaccucugccucaacugccucucccuccuccuauccgucucaaaccgcugccccaucugcaaaaugccccuccccaccaaacuccgcgucuccuccgcccccuccgccccccccgccgccaccgcccaacccggcacccccccccccuacucccccuaa

SEQ ID NO: 12628 - RNA, 300 nt, Artificial Sequence
  derived and/or modified CDS sequence (opt11) from LASV(KAK-428;Clade n.d. (VII))__ANH09761__Z
augggcaacaaaggcaccaaacccacccaaaacuccgaacccucccgcgccaaccucguccccgacgccuccuaccucggcccccaauucugcaaauccugcugguucgaaaacaaaggccucgucgaaugcaacaaccacuaccucugccucaacugccucaccaugcuccucuccgucuccaaccgcugccccaucugcaaaaugccccuccccaccaaaaucaaagccuccggcucccccuccgccccccccaccgaagccaacuccgccgucucccccccccccuacacccccuaa

SEQ ID NO: 12629 - RNA, 300 nt, Artificial Sequence
  derived and/or modified CDS sequence (opt11) from LASV(ISTH0009-NIG-2011;Clade II)__AIT17402__Z
augggcaaccgccaagccaaauccaccaaagucgacgaacaccaacgcgcccaccucguccccgacgccucccaccucggcccccaauucugcaaauccugcugguucgaaaaccgcggccuagucgaaugcaacaaccacuaccucugccucaacugccucucccuccuccucuccgucuccucccgcugccccaucugcaaaaugccccuccccaccaaacucaaagccgccgcccaacccuccgcccccuccaccgaaaccauccaaaacaccacccccccccccuacacccccuaa

SEQ ID NO: 12630 - RNA, 300 nt, Artificial Sequence
  derived and/or modified CDS sequence (opt11) from LASV(ISTH0012-NIG-2011;Clade II)__AIT17406__Z
augggcaaccgccaagccaaauccucaaaagucgacgaacaccaacgcgcccaccucguccccgacgccucccaccucggcccccaauucugcaaauccugcugguucgaaaacaaaggccucgucgaaugcaacaaccacuaccucugccucaacugccucucccuccuccucuccgucuccucccgcugccccaucugcaaaaugccccuccccaccaaacucaaagccgccgcccaacccuccgcccccuccaccgaagccguccaaaacaccgcccccccccccuacgccccauaa

SEQ ID NO: 12631 - RNA, 300 nt, Artificial Sequence
  derived and/or modified CDS sequence (opt11) from LASV(ISTH0047-NIG-2011;Clade II)__AIT17410__Z
augggcaacaaacaagccaaauccaccaaagucgacgaacaccaacgcgcccaccucguccccgacgccucacaccucggcccccaauucugcaaauccugcugguucgaaaaccgcggccucgucgaaugcaacaaccacuaccucugccucaacugccucucccuccuccucuccgucuccucccgcugccccaucugcaaaaugccccuccccacccgccucaaagccgccacccaacccuccgcccccuccaccgaagccacccaaaacaccacccccccccccuacacccccuaa

SEQ ID NO: 12632 - RNA, 300 nt, Artificial Sequence
  derived and/or modified CDS sequence (opt11) from LASV(ISTH0230-NIG-2011;Clade II)__AIT17418__Z
augggcaaccgccaagccaaauccaccaaagucgacgaacaccaacgcgcccaccucguccccgacgccucccaccucggcccccaauucugcaaauccugcugguucgaaaaccgcggccucgucgaaugcaacaaccacuaccucugccucaacugccucucccuccuccucuccgucuccucccgcugccccaucugcaaaaugccccuccccaccaaacucaaagccgccacccaacccuccgcccccuccaccgaaaccauccaaaacaccacccccccccccuacacccccuaa

SEQ ID NO: 12633 - RNA, 300 nt, Artificial Sequence
  derived and/or modified CDS sequence (opt11) from LASV(ISTH0531-NIG-2011;Clade II)__AIT17422__Z
augggcaaccgccaagccaaauccgccaaagucgacgaacaccaacgcgcccaccucguccccgacgccucccaccucggcccccaauucugcaaauccugcugguucgaaaaccgcggccucgucgaaugcaacaaccacuaccucugccucaacugccucucccuccuccucuccgucuccucccgcugccccaucugcaaaaugccccuacccaccaaacucaaagccgccacccaacccuccgcccccuccaccgaagccacccaaaacaccacccccccccccuacacccccuaa

SEQ ID NO: 12634 - RNA, 300 nt, Artificial Sequence
  derived and/or modified CDS sequence (opt11) from LASV(ISTH0595-NIG-2011;Clade II)__AIT17426__Z
augggcaacaaacaagccaaauccaccaaagucgacgaacaccaacgcgcccaccucguccccgacgccucccaccucggcccccaauucugcaaauccugcugguucgaaaaccgcggccucgucgaaugcaacaaccacuaccucugccucaacugccucucccuccuccucuccgucuccucccgcugccccaucugcaaaaugccccuccccaccaaacucaaagccgccacccaacccuccgcccccuccaccgaagccacccaaaacaccacccccccccccuacacccccuaa

SEQ ID NO: 12635 - RNA, 300 nt, Artificial Sequence
  derived and/or modified CDS sequence (opt11) from LASV(ISTH1003-NIG-2011;Clade II)__AIT17432__Z
augggcaacaaacaagccaaauccaccaaagucgacgaacaccaacgcgcccaccucguccccgacgcaucccaccucggcccccaauucugcaaauccugcugguucgaaaaccgcggccucgucgaaugcaacaaccacuaccucugccucaacugccucucacuccuccucuccgucucaucccgcugccccaucugcaaaaugccccuccccacccgccucaaagccgccacccaacccuccgcccccuccaccgaagccacccaaaacaccauccccccccccuacacccccuaa

SEQ ID NO: 12636 - RNA, 300 nt, Artificial Sequence
  derived and/or modified CDS sequence (opt11) from LASV(ISTH1038-NIG-2011;Clade II)__AIT17436__Z
augggcaacaaacaagccaaauccaccaaagccgacgaacaccaacgcgcccaccucguccccgacgccucccaccucggcccccaauucugcaaauccugcugguucgaaaaccgcggccucgucgaaugcaacaaccacuaccucugccucaacugccucucccuccuccucuccgucuccucccgcugccccaucugcaaaaugccccuccccaccaaacucaaagccgccacccaacccuccgcccccuccaccgaagccacccgcaacaccacccccccccccuacacccccuaa

SEQ ID NO: 12637 - RNA, 300 nt, Artificial Sequence
  derived and/or modified CDS sequence (opt11) from LASV(ISTH1058-NIG-2011;Clade II)__AIT17444__Z
augggcaaccgccaagccaaauccaccaaagucgacgaacaccaacgcgcccaccucguccccgacgccucccaccucggcccccaauucugcaaauccugcugguucgaaaacaaaggccucgucgaaugcaacaaccacuaccucugccucaacugccucucccuccuccucuccgucuccucccgcugccccaucugcaaaaugccccuccccaccaaacucaaagccgccgcccaacccuccgcccccuccaccgaagccgcccaaaacaccgcccccccccccuacgcccccuaa

SEQ ID NO: 12638 - RNA, 300 nt, Artificial Sequence
  derived and/or modified CDS sequence (opt11) from LASV(ISTH1064-NIG-2011;Clade II)__AIT17448__Z
augggcaaccgccaagccaaauccaccaaagucggcgaacaccaacgcgcccaccucguccccgacgccucccaccucggcccccaauucugcaaauccugcugguucgaaaaccgcggccuagucgaaugcaacaaccacuaccucugccucaacugccucucccuccuccucuccgucuccucccgcugccccaucugcaaaaugccccuccccaccaaacucaaagccaccgcccaacccuccgcccccuccgccgaagccauccaaaacaccacccccccccccuacacccccuaa

SEQ ID NO: 12639 - RNA, 300 nt, Artificial Sequence
  derived and/or modified CDS sequence (opt11) from LASV(ISTH1069-NIG-2011;Clade II)__AIT17452__Z
augggcaaccgccaagccaaauccacccgcgucgacgaacaccaacgcgcccaccucguccccgacgccucccaccucggcccccaauucugcaaaucaugcugguucgaaaaccgaggccucgucgaaugcaacaaccacuaccucugccucaacugccucucccuccuccucuccgucuccucccgcugccccaucugcaaaaugccccuccccacccgccuccgcgccgccguccaacccuccgcccccuccaccgaaaccacccaagacaccacccccccccccuacucccccuaa

SEQ ID NO: 12640 - RNA, 300 nt, Artificial Sequence
  derived and/or modified CDS sequence (opt11) from LASV(ISTH1096-NIG-2012;Clade II)__AIT17456__Z
augggcaaccgccaagccaaauccaccgaagucaacgaacaccaacgcgcccaccucguccccgacgccucccaccucggcccccaauucugcaaauccugcugguucgaaaaccgcggccucgucgaaugcaacaaccacuaccucugccucaacugccucucccuccuccucuccgucuccucccgcugccccaucugcaaaaugccccuccccaccaaacucaaagccgccacccaacccuccgccccauccaccgaagucacccaaaacaccguccccccccccuacucccccuaa

SEQ ID NO: 12641 - RNA, 300 nt, Artificial Sequence
  derived and/or modified CDS sequence (opt11) from LASV(ISTH1107-NIG-2012;Clade II)__AIT17460__Z
augggcaaccgccaagccaaauccaccaaagucgacgaacaccaacgcgcccaccucguccccgacgccucccaccucggcccccaauucugcaaauccugcugguucgaaaaccgcggccucgucgaaugcaacaaccacuaccucugccucaacugccucucccuccuccucuccgucuccucccgcugccccaucugcaaaaugccccuccccaccaaacucaaagccgccgcccaacccuccgccccccccaccgaagccacccaaaacaccacccccccccccuacacccccuaa

SEQ ID NO: 12642 - RNA, 300 nt, Artificial Sequence
  derived and/or modified CDS sequence (opt11) from LASV(ISTH1111-NIG-2011;Clade II)__AIT17464__Z
augggcaaccgccaagccaaauccaccaaagucgacgaacaccaacgcgcccaccucguccccgacgccucacaccucggcccccaauucugcaaauccugcugguucgaaaaccgcggccucgucgaaugcaacaaccacuaccucugccucaacugccucucccuccuccucuccgucuccucccgcugccccaucugcaaaaugccccuccccaccaaacucaaagccgccgcccaacccuccgcccccuccaccgaagccacccaagacaccacccccccccccuacacccccuaa

SEQ ID NO: 12643 - RNA, 300 nt, Artificial Sequence
  derived and/or modified CDS sequence (opt11) from LASV(ISTH1121-NIG-2012;Clade II)__AIT17468__Z
augggcaaccgccaagccaaacaaaccaaagucgacgaacaccaacgcgcccaccucguccccgacgccucccaccucggcccccaauucugcaaauccugcugguucgaaaaccgcggccucguagaaugcaacaaccacuaccucugccucaacugccucucccuccuccucuccaucuccucccgcugccccaucugcaaaaugccccuccccaccaaacucaaagccgccgcccaacccuccgcccccuccaccgaagccacccaagacaccacccccccccccuacacccccuaa

SEQ ID NO: 12644 - RNA, 300 nt, Artificial Sequence
  derived and/or modified CDS sequence (opt11) from LASV(ISTH1129-NIG-2012;Clade II)__AIT17472__Z
augggcaacaaacaaaccaaauccaccaaagccgacgaacaccaacgcgcccaccucguccccgacgccucccaccucggcccccaauucugcaaauccugcugguucgaaaaccgcggccucgucgaaugcaacaaccacuaccucugccucaacugccucucccuccuccucuccgucuccucccgcugccccaucugcaaaaugccccuccccacccgccucaaagccgccgcccaacccuccgcccccuccaccgaagccacccaagacaccacccccccccccuacacccccuaa

SEQ ID NO: 12645 - RNA, 300 nt, Artificial Sequence
  derived and/or modified CDS sequence (opt11) from LASV(ISTH1137-NIG-2011;Clade II)__AIT17476__Z
augggcaaccgccaagccaaauccaccaaagucgacgaacaccaacgcgcccaccucguccccgacgccucccaccucggcccccaauucugcaaauccugcugguucgaaaaccgaggccucgucgaaugcaacaaccacuaccucugccucaacugccucucccuccuccucuccgucuccucccgcugccccaucugcaaaaugccccuccccaccaaacucaaagccgccgcccaacccuccgcccccucagccgaagccauccaaaacaccacccccccccccuacacccccuaa

SEQ ID NO: 12646 - RNA, 300 nt, Artificial Sequence
  derived and/or modified CDS sequence (opt11) from LASV(ISTH2010-NIG-2012;Clade II)__AIT17480__Z
augggcaaccgccacgccaaauccaccaaagucgacgaacaccaacgcgcccaccucguccccgacgccucccaccuaggcccccaauucugcaaauccugcugguucgaaaaccgcggccucgucgaaugcaacaaccacuaccucugccucaacugccucucccuccuccucuccgucuccucccgcugccccaucugcaaaaugccccuccccaccaaacucaaagccgccgcccaaccauccgcccccuccaccgaagucauccaauccaccacccccccccccuacacccccuaa

SEQ ID NO: 12647 - RNA, 300 nt, Artificial Sequence
  derived and/or modified CDS sequence (opt11) from LASV(ISTH2016-NIG-2012;Clade II)__AIT17484__Z
augggcaaccgccacgccaaauccaccaaagucgacgaacaccaacgcgcccaccucguccccgacgccucccaccucggcccccaauucugcaaauccugcugguucgaaaaccgcggccucgucgaaugcaacaaccacuaccucugccucaacugccucucccuccuccucuccgucuccucccgcugccccaucugcaaaaugccccuccccaccaaacucaaagccgccgcccaacccuccgcccccuccaccgaagaaauccaaaacaccacccccccccccuacacccccuaa

SEQ ID NO: 12648 - RNA, 300 nt, Artificial Sequence
  derived and/or modified CDS sequence (opt11) from LASV(ISTH2020-NIG-2012;Clade II)__AIT17488__Z
augggcaaccgccaagccaaacccaccaaagucgacgaacaccaacgcgcccaccucguccccgacgccucccaccucggcccccaauucugcaaauccugcugguucgaaaacaaaggccucgucgaaugcaacaaccacuaccucugccucaacugccucucccuccuccucuccgucuccucccgcugccccaucugcaaaaugccccuccccaccaaacucaaagccgccgcccaacccuccgcccccuccaccgaagccgcccaaaacaccgcccccccccccuacgcccccuaa

SEQ ID NO: 12649 - RNA, 300 nt, Artificial Sequence
  derived and/or modified CDS sequence (opt11) from LASV(ISTH2031-NIG-2012;Clade II)__AIT17496__Z
augggcaaccgccaagccaaauccaccaaagucgacgaacaccaacgcgcccaccucguccccgacgccucccaccucggcccccaauucugcaaauccugcugguucgaaaaccgcggccucgucgaaugcaacaaccacuaccucugccucaacugccucucccuccuccucuccgucuccucccgcugccccaucugcaaaaugccccuccccacccgccucaaagccgccacccaacccuccgcccccuccaccgaagccacccaaaccaccacccccccccccuacacacccuaa

SEQ ID NO: 12650 - RNA, 300 nt, Artificial Sequence
  derived and/or modified CDS sequence (opt11) from LASV(ISTH2037-NIG-2012;Clade II)__AIT17500__Z
augggcaaccgccaaaccaaauccacaaaagucgacgaacaccaacgcgcccaccucguccccgacgccucccaccucggcccccaauucugcaaauccugcugguucgaaaacaaaggccucgucgaaugcaacaaccacuaccucugccucaacugccucucccuccuccucuccgucuccucccgcugccccaucugcaaaaugccccuccccaccaaacucaaaaccgccgcccaacccuccgccccccccaccgaagccgcccgcaccaccgcccccccccccuacgcccccuaa

SEQ ID NO: 12651 - RNA, 300 nt, Artificial Sequence
  derived and/or modified CDS sequence (opt11) from LASV(ISTH2042-NIG-2012;Clade II)__AIT17504__Z
augggcaaccgccacgccaaauccaccaaagucgacgaacaccaacgcgcccaccucguccccgacgccucccaccucggcccccaauucugcaaauccugcugguucgaaaaccgcggccucgucgaaugcaacaaccacuaccucugccucaacugccucucccuccuccucuccgucuccucccgcugccccaucugcaaaaugccccuccccaccaaacucaaagccgccgcccaacccuccgcccccuccacagaagccauccaaaacaccacccccccccccuacacccccuaa

SEQ ID NO: 12652 - RNA, 300 nt, Artificial Sequence
  derived and/or modified CDS sequence (opt11) from LASV(ISTH2046-NIG-2012;Clade II)__AIT17508__Z
augggcaaccgccaaaccaaauccaccaaagucgacgaacaccaacgagcccaccucguccccgacgccucccaccucggcccccaauucugcaaauccugcugguucgaaaacaaaggccucgucgaaugcaacaaccacuaccucugccucaacugccucucccuccuccucuccgucuccucccgcugccccaucugcaaaaugccccuccccaccaaacucaaagccgccgcccaacccuccgcccccuccaccgaagccacccaaaacaccgcccccccccccuacgcccccuaa

SEQ ID NO: 12653 - RNA, 300 nt, Artificial Sequence
  derived and/or modified CDS sequence (opt11) from LASV(ISTH2050-NIG-2012;Clade II)__AIT17512__Z
augggcaaccgccaagccaaauccaccaaagucuacgaacaccaacgcgcccaccucguccccgacgccucccaccucggaccccaauucugcaaauccugcugguucgaaaaccgcggccucgucgaaugcaacaaccacuaccucugccucaacugccucucccuccuccucuccgucuccucccgcugccccaucugcaaaaugccccuccccacccgccucaaagccgccacccaacccuccgcccccuccaccgaagccacccaaaacaccacccccccccccuacacccccuaa

SEQ ID NO: 12654 - RNA, 300 nt, Artificial Sequence
  derived and/or modified CDS sequence (opt11) from LASV(ISTH2057-NIG-2012;Clade II)__AIT17516__Z
augggcaaccgccaagccaaauccaccaaagucgacgaacaccaacgcgcccaccucguccccgacgccucccaccucggcccccaauucugcaaauccugcugguucgaaaaccgcggccucgucgaaugcaacaaccacuaccucugccucaacugccucucccuccuccucuccgucuccucccgcugccccaucugcaaaaugccccuccccaccaaacucaaaaccgccacccaaccauccgccccccucaccgaagccacccaaaacaccacacccccccccuacacccccuaa

SEQ ID NO: 12655 - RNA, 300 nt, Artificial Sequence
  derived and/or modified CDS sequence (opt11) from LASV(ISTH2061-NIG-2012;Clade II)__AIT17520__Z
augggcaacaaacaagccaaauccaccaaagucgacgaacaccaacgcgcccaccucguccccgacgccucccaccucggcccccaauucugcaaaucaugcugguucgaaaaccgcggccucgucgaaugcaacaaccacuaccucugccucaacugccucucccuccuccucuccgucuccaaccgcugccccaucugcaaaaugccccuccccaccaaacucaaagccgccgcccaacccuccgcccccuccaccgaagccacccaaaacaccacccccccccccuacacccccuaa

SEQ ID NO: 12656 - RNA, 300 nt, Artificial Sequence
  derived and/or modified CDS sequence (opt11) from LASV(ISTH2065-NIG-2012;Clade II)__AIT17526__Z
augggcaaccgccaagccaaauccgccaaagucaccgaacaccaacgcgcccaccucguccccgacgccucccaccucggcccccaauucugcaaauccugcugguucgaaaacaaaggccucgucgaaugcaacaaccacuaccucugccucaacugccucucccuccuccucuccgucuccucccgcugccccaucugcaaaaugccccuccccacccgccucaaagccgccacccaaccauccgcccccuccgccgaagccccccaauccaccacccccccccccuacacccccuaa

SEQ ID NO: 12657 - RNA, 300 nt, Artificial Sequence
  derived and/or modified CDS sequence (opt11) from LASV(ISTH2094-NIG-2012;Clade II)__AIT17536__Z
augggcaaccgccaaacccgccccaccgaagccaccgaacaaucccgcgcccaccucguccccgacgccucccaccucggcccccaauucugcaaauccugcugguucgaaaacaaaggccucgucgaaugcaacaaccacuaccucugccucaacugccucucccuccuacucuccgucuccucccgcugccccaucugcaaaaugccccuccccacccgccucaaagccuccgcccaacccuccgccccccccaccgaagccccccaaaacaaagcccccccccccuacacccccuaa

SEQ ID NO: 12658 - RNA, 300 nt, Artificial Sequence
  derived and/or modified CDS sequence (opt11) from LASV(ISTH2129-NIG-2012;Clade II)__AIT17542__Z
augggcaaccgccaagucaaauccaccaaagucgacgaacaccaacgcgcccaccucauccccgacgccucccaccucggcccccaauucugcaaauccugcugguucgaaaaccgcggccucgucgaaugcaacaaccacuaccuaugccucaacugccucucccuccuccucuccgucuccucccgcugccccaucugcaaaaugccccucccaaccaaacucgaagccgccgcccaacccuccgcccccuccaccgaagccacccaagacaccacccccccccccuacacccccuaa

SEQ ID NO: 12659 - RNA, 300 nt, Artificial Sequence
  derived and/or modified CDS sequence (opt11) from LASV(ISTH2217-NIG-2012;Clade II)__AIT17546__Z
augggcaacaaacaagccaaauccaccaaagucgacgaacaccaacgcgcccaccucguccccgacgccucccaccucggcccccaauucugcaaauccugcugguucgaaaaccgcggccucgucgaaugcaacaaccacuaccucugccucaacugccucucccuccuccucuccgucuccucccgcugccccaucugcaaaaugccccuccccaccaaacucaaagccgccgcccaacccuccgcccccuccaccgaaaccauccaaaacaccacccccccccccuacacccccuaa

SEQ ID NO: 12660 - RNA, 300 nt, Artificial Sequence
  derived and/or modified CDS sequence (opt11) from LASV(ISTH2271-NIG-2012;Clade II)__AIT17550__Z
augggcaaccgccaagccaaacaaaccaaagucgacgaacaccaacgcgcccaccucguccccgacgccucccaccucggcccccaauucugcaaauccugcugguucgaaaaccgcggccucgucgaaugcaacaaccacuaccucugccucaacugccucucccuccuccucuccgucuccucccgcugccccaucugcaaaaugccccuccccaccaaacucaaagccgccgcccaacccuccgcccccuccaccgaaaucacccaaaacaccacccccccccccuacacccccuaa

SEQ ID NO: 12661 - RNA, 300 nt, Artificial Sequence
  derived and/or modified CDS sequence (opt11) from LASV(ISTH2304-NIG-2012;Clade II)__AIT17554__Z
augggcaaccgccaagccaaauccaccaaagccgacgaacaccaacgcgcccaccucguccccgacgccucccaccucggcccccaauucugcaaauccugcugguucgaaaaccgcggccucgucgaaugcaacaaccacuaccucugccuaaacugccucucccuccuccucuccgucuccaaccgcugccccaucugcaaaaugccccuccccacccgccucaaagccgccgcacaacccuccgcccccuccaccgaagccacccaagacaccacccccccccccuacacccccuaa

SEQ ID NO: 12662 - RNA, 300 nt, Artificial Sequence
  derived and/or modified CDS sequence (opt11) from LASV(ISTH2312-NIG-2012;Clade II)__AIT17558__Z
augggcaaccgccaagccaaauccaccaaagucgacgaacaccaacgcgcccaccucguccccgacgccucccaccucggcccccaauucugcaaauccugcugguucgaaaaccgcggccucgucgaaugcaacaaccacuaccucugccucaacugccucucccuccuccucuccgucuccucccgcugccccaucugcaaaaugccccuacccacccgccucaaagccgccgcccaacccuccgcccccuccaccgaagccauccgcuccaccacccccccccccuacacccccuaa

SEQ ID NO: 12663 - RNA, 300 nt, Artificial Sequence
  derived and/or modified CDS sequence (opt11) from LASV(ISTH2358-NIG-2012;Clade II)__AIT17570__Z
augggcaaccgccaagccaaauccgccaaagucaacgaacaccaacgcgcccaccucguccccgacgccucccaccucggcccccaauucugcaaauccugcugguucgaaaaccgcggccucgucgaaugcaacaaccacuaccucugccucaacugccucucccuccuccucuccgucuccucccgcugccccaucugcaaaaugccccuccccaccaaacucaaagccgccgcccaacccuccgcccccuccaccgaagccacccaaaacaucacccccccccccuacacccccuaa

SEQ ID NO: 12664 - RNA, 300 nt, Artificial Sequence
  derived and/or modified CDS sequence (opt11) from LASV(Lassa virus/H.sapiens-wt/NGA/2016/ISTH_0017;Clade II)__AVO03713__Z
augggcaaccgccaagccaaauccaccaaagucgacgaacaccaacgcgcccaccucguccccgacgccucccaccucggcccccaauucugcaaauccugcugguucgaaaaccgcggccucgucgaaugcaacaaccacuaccucugccucaacugccucucccuccuccucuccgucuccucccgcugccccaucugcaaaaugccccuccccaccaaacucaaagccgccacccaacccuccgcccccuccaccgaagucaaccaaaacaccacccccccccccuacacccccuaa

SEQ ID NO: 12665 - RNA, 300 nt, Artificial Sequence
  derived and/or modified CDS sequence (opt11) from LASV(Lassa virus/H.sapiens-wt/NGA/2016/ISTH_0035;Clade II)__AVO03731__Z
augggcaaccgccaagccaaauccaccaaagucgacgaacaccaacgcgcccaccuccuccccgacgccucacaccucggcccccaauucugcaaauccugcugguucgaaaaccgcggccucgucgaaugcaacaaccacuaccucugccucaacugccucucccuccuacucuccgucuccucccgcugccccaucugcaaaaugccccuccccaccaaacucaaagccgccacccaacccuccgcacccuccaccgaagccacccaaaacaccacccccccccccuacacccccuaa

SEQ ID NO: 12666 - RNA, 300 nt, Artificial Sequence
  derived and/or modified CDS sequence (opt11) from LASV(Lassa virus/H.sapiens-wt/NGA/2016/ISTH_0703;Clade II)__AVO03703__Z
augggcaacaaacaaaccaaauccaccaaagucgacgaacaccaacgcgcccaccucguccccgacgccucccaccucggcccccaauucugcaaauccugcugguucgaaaaccgcggccucgucgaaugcaacaaccacuaccucugccucaacugccucucccuccuccucuccgucuccucccgcugccccaucugcaaaaugccccuccccaccaaacucaaagccgccgcccaacccuccgcccccuccaccgaagccacccaaaacaucacccccccccccuacacccccuaa

SEQ ID NO: 12667 - RNA, 300 nt, Artificial Sequence
  derived and/or modified CDS sequence (opt11) from LASV(Lassa virus/H.sapiens-wt/NGA/2016/ISTH_0717;Clade II)__AVO03670__Z
augggcggcaaacacuccaaaccccccggcgaauccaacuccccccgcgccucccucauccccgacgccacccaccucggcccccaauucugcaaauccugcugguucgaaaacaaaggccucgucgaaugcaacaaccacuaccucugccucaacugccucucccuccuccucuccgucuccaaccgcugccccaucugcaaaaugccccuccccacccgccuccgcgccuccaccaaccccaccgccccccaagucggccaaaucgaccccaccaaccccccccccuacucccccuaa

SEQ ID NO: 12668 - RNA, 300 nt, Artificial Sequence
  derived and/or modified CDS sequence (opt11) from LASV(Lassa virus/H.sapiens-wt/NGA/2016/ISTH_0753;Clade II)__AVO03748__Z
augggcaaccgccaagccaaauccaccaaagucgacgaacaccaacgcgcccaccucguccccgacgccucccaccucggcccccaauucugcaaauccugcugguucgaaaaccgcggccucgucgaaugcaacaaccacuaccucugccucaacugccucucccuccuccucuccgucuccaaccgcugccccaucugcaaaaugccccuccccaccaaacucaaagccgccgcccaacccuccgcccccuccaccgaagccacccaagacaccacccccccccccuacacccccuaa

SEQ ID NO: 12669 - RNA, 300 nt, Artificial Sequence
  derived and/or modified CDS sequence (opt11) from LASV(Lassa virus/H.sapiens-wt/NGA/2016/ISTH_0919;Clade II)__AVO03760__Z
augggcaaccgccacgccaaacccaccaaagucgacgaacaccaacgcgcccaccucguccccgacgccucccaccucggcccccaauucugcaaauccugcugguucgaaaacaaaggccucgucgaaugcaacaaccacuaccucugccucaacugccucucccuccuccucucagucuccucccgcugccccaucugcaaaaugccccuccccaccaaacucaaagccgccgcccaacccuccgcccccuccgccgaagccacccaaaacaccgcccccccccccuacacccccuaa

SEQ ID NO: 12670 - RNA, 300 nt, Artificial Sequence
  derived and/or modified CDS sequence (opt11) from LASV(Lassa virus/H.sapiens-wt/NGA/2016/ISTH_1006;Clade II)__AVO03750__Z
augggcaacaaacaaaccaaauccaccaaagucgacgaacaccaacgcgcccaccucguccccgacgccucccaccucggcccccaauucugcaaauccugcugguucgaaaaccgcggccucgucgaaugcaacaaccacuaccucugccucaacugccucucccuccuccuauccgucuccucccgcugccccaucugcaaaaugccccuccccaccaaacucaaaaccgucgcccaacccuccgccccccccaccgaagccacccaaaacaccacccccccccccuacacccccuaa

SEQ ID NO: 12671 - RNA, 297 nt, Artificial Sequence
  derived and/or modified CDS sequence (opt11) from LASV(Lassa virus/H.sapiens-wt/NGA/2016/ISTH_1070;Clade II)__AVO03754__Z
ggcaaccgccaagccaaacccaccaaagucgacgaacaccaacgcgcccaccucguccccgacgccucccaccucggcccccaauucugcaaauccugcugguucgaaaacaaaggccucgucgaaugcaacaaccacuaccucugccucaacugccucucccuccuccucggcgucuccucccgcugccccaucugcaaaaugccccuccccaccaaacucaaagccgccgcccaacccuccgcccccuccaccgaagccgcccaaaacaccgcccccccccccuacgcccccuaa

SEQ ID NO: 12672 - RNA, 300 nt, Artificial Sequence
  derived and/or modified CDS sequence (opt11) from LASV(Lassa virus/H.sapiens-wt/NGA/2016/ISTH_1174;Clade II)__AVO03716__Z
augggcaaccgccaagccaaauccaccaaagucgacgaacaccaacgcgcccaccucguccccgacgccucccaccucggcccccaauucugcaaauccugcugguucgaaaaccgcggccucgucgaaugcaacaaccacuaccucugccucaacugccucucccuccuccucuccgucuccucccgcugccccaucugcaaaaugccccuccccaccaaacucaaagccgccacccaacccuccgccccccccaccgaaaccacccaaaacaccacccccccccccuacacccccuaa

SEQ ID NO: 12673 - RNA, 300 nt, Artificial Sequence
  derived and/or modified CDS sequence (opt11) from LASV(Lassa virus/H.sapiens-wt/NGA/2016/ISTH_1207;Clade II)__AVO03680__Z
augggcaaccgccaagccaaauccaccaaagucgacgaacaccaacgcgcccaccucguccccgacgccucccaccucggcccccaauucugcaaauccugcugguucgaaaaccgcggccucgucgaaugcaacaaccacuaccucugccucaacugccucucccuccuccucuccgucuccucccgcugccccaucugcaaaaugccccuccccaccaaacuacgcgccaccgcccaacccuccgcccccuccaccgaagccacccaaaacaccacccccccccccuacacccccuaa

SEQ ID NO: 12674 - RNA, 300 nt, Artificial Sequence
  derived and/or modified CDS sequence (opt11) from LASV(Lassa virus/H.sapiens-wt/NGA/2016/ISTH_1311;Clade II)__AVO03739__Z
augggcaaccgccaagccaaacccaccgaagccaucgaacaaaaccgcgcccaccucguccccgacgccucccaccucggcccccaauucugcaaauccugcugguucgaaaacaaaggccucgucgaaugcaacaaccacuaccucugccucaacugccucucccuccuccucuccgucuccucccgcugccccaucugcaaaaugccccuccccacccgccucaaagccuccgcccaacccuccgcccccuccgccgaagccccccaaaacgccaaacccccccccuacucccccuaa

SEQ ID NO: 12675 - RNA, 300 nt, Artificial Sequence
  derived and/or modified CDS sequence (opt11) from LASV(Lassa virus/H.sapiens-wt/NGA/2016/ISTH_1423;Clade II)__AVO03685__Z
augggcaacaaacaagccaaauccaucaaagccgacgaacaccaacgcgcccaccucguccccgacgccucccaccucggcccccaauucugcaaauccugcugguucgaaaaccgcggccucgucgaaugcaacaaccacuaccucugccucaacugccucucccuccuccucuccgucuccucccgaugccccaucugcaaaaugccccuccccaccaaacucaaaaccgccgcccaacccuccgccccccccgucggcgccacacaaaacaccacccccccccccuacacccccuaa

SEQ ID NO: 12676 - RNA, 300 nt, Artificial Sequence
  derived and/or modified CDS sequence (opt11) from LASV(Lassa virus/H.sapiens-wt/NGA/2016/ISTH_1462;Clade II)__AVO03690__Z
augggcaacaaacaaaccaaauccaccaaagucgacgaacaccaacgcgcccaccucguccccgacgccucccaccucggcccccaauucugcaaauccugcugguucgaaaaccgcggccucgucgaaugcaacaaccacuaccucugccucaacugccucucccuccuccucuccgucuccucccgcugccccaucugcaaaaugccccuccccaccaaacucaaagccgccgcccaacccuccgcccccuccaccgaagccacccaaaacaccacccccccccccuacacccccuaa

SEQ ID NO: 12677 - RNA, 300 nt, Artificial Sequence
  derived and/or modified CDS sequence (opt11) from LASV(Lassa virus/H.sapiens-wt/NGA/2016/ISTH_1472;Clade II)__AVO03726__Z
augggcaacaaacaaaccaaauccaccaaagucgacgaacaccaacgcgcccaccucguccccgacgccucccaccucggcccccaauucugcaaauccugcugguucgaaaaccgcggccucgucgaaugcaacaaccacuaccucugccucaacugccucucccuccuccucuccgucuccucccgcugccccaucugcaaaaugccccuccccaccaaacucaaagccgccgcccaacccuccgccccccccaccgaagccacccaaaacaccacccccccccccuacacccccuaa

SEQ ID NO: 12678 - RNA, 300 nt, Artificial Sequence
  derived and/or modified CDS sequence (opt11) from LASV(Lassa virus/H.sapiens-wt/NGA/2016/ISTH_1496;Clade II)__AVO03693__Z
augggcaacaaacaagccaaauccaccaaaaucgacgaccaccaacgcgcccaccucguccccgacgccucccaccucggcccccaauucugcaaauccugcugguucgaaaaccgaggccucgucgaaugcaacaaccacuaccucugccucaacugccucucccuccuccucucagucuccucccgcugccccaucugcaaaaugccccuccccaccaaacucaaagccgccgcccaacccuccgcccccuccaccgaaaccauccaaaacaccacccccccccccuacacccccuaa

SEQ ID NO: 12679 - RNA, 300 nt, Artificial Sequence
  derived and/or modified CDS sequence (opt11) from LASV(Lassa virus/H.sapiens-wt/NGA/2016/ISTH_1546;Clade II)__AVO03665__Z
augggcggcaaacaaucccgcccccccaaaaaagucgacuccccccgcgccaaccucauccccgacgccuccuacaugggcccccaauucugcaaauccugcugguucgaaaacaaaggccucgucgaaugcaacaaccacuaccucugccucaacugccucucccuccuccucuccgucuccucccgcugccccaucugcaaaaugccccuccccaccaaacucaaagccucaaccucccccaccgccccccccaucaucggcaccaacaccaccaaccccccccccuacucccccuaa

SEQ ID NO: 12680 - RNA, 300 nt, Artificial Sequence
  derived and/or modified CDS sequence (opt11) from LASV(Lassa virus/H.sapiens-wt/NGA/2016/ISTH_1568;Clade II)__AVO03711__Z
augggcaaccgccaagcccgcuccaccaaagucgacgaacaccaacgcgcccaccuccuccccgacgccucccaccucggcccccaauucugcaaauccugcugguucgaaaaccgcggccucgucgaaugcaacaaccacuaccucugccucaacugccucucccuccuccucuccgucuccucccgcugccccaucugcaaaaugccccuccccaccaaacucaaagccgccacccaacccuccgcccccuccaccgaagccacccaaaacaccacccccccccccuacacccccuaa

SEQ ID NO: 12681 - RNA, 300 nt, Artificial Sequence
  derived and/or modified CDS sequence (opt11) from LASV(Lassa virus/H.sapiens-wt/NGA/2016/ISTH_1610;Clade II)__AVO03687__Z
augggcaaccgccaagccaaauccaccaaagucgccgaacaccaacgcgcccaccucguccccgacgccucccaccucggcccccaauucugcaaauccugcugguucgaaaacaaaggccuagucgaaugcaacaaccacuaccucugccuaaacugccucucccuccuccucuccgucuccucccgcugccccaucugcaaaaugccccuccccaccaaacuccgcgccaccgcccaacccuccgccccccccuccgaagccacccaaucaaccacccccccccccuacacccccuaa

SEQ ID NO: 12682 - RNA, 300 nt, Artificial Sequence
  derived and/or modified CDS sequence (opt11) from LASV(Lassa virus/H.sapiens-wt/NGA/2018/ISTH_0026;Clade II)__AVV65086__Z
augggcaacaaacaagccaaauccaccaaagucgacgaacaccaacgcgcccaccucguccccgacgccucccaccucggcccccaauucugcaaauccugcugguucgaaaaccgcggccucgucgaaugcaacaaccacuaccucugccucaacugccucucccuccuacucuccgucuccucccgcugccccaucugcaaaaugccccuccccacccgccucaaagccgccacccaacccuccgcccccucaaccgaagccacccgcaacaccacccccccccccuacacccccuaa

SEQ ID NO: 12683 - RNA, 300 nt, Artificial Sequence
  derived and/or modified CDS sequence (opt11) from LASV(Lassa virus/H.sapiens-wt/NGA/2018/ISTH_0097;Clade II)__AVV65091__Z
augggcaacaaacaaaccaaauccaccaaagucgacgaacaccaacgcgcccaccucguccccgacgccucccaccucggcccccaauucugcaaauccugcugguucgaaaaccgaggccucgucgaaugcaacaaccacuaccucugccucaacugccucucccuccuccucuccgucuccucccgcugccccaucugcaaaaugccccuccccaccaaacucaaagccgccgcccaacccuccgcccccuccaccgaagucacccaaaacaccacccccccccccuacacccccuaa

SEQ ID NO: 12684 - RNA, 300 nt, Artificial Sequence
  derived and/or modified CDS sequence (opt11) from LASV(Lassa virus/H.sapiens-wt/NGA/2018/ISTH_0664;Clade II)__AVV65093__Z
augggcaacaaacaaaccaaauccaccaaagucgacgaacaccaacgcgcccaccucguccccgacgccucccaccucggcccccaauucugcaaauccugcugguucgaaaaccgcggccucgucgaaugcaacaaccacuaccucugccucaacugccucucccuccuccucuccgucuccggccgcugccccaucugcaaaaugccccuccccaccaaacucaaagccgccgcccaacccuccgcccccuccaccgaagccacccaaaacaccacccccccccccuacacccccuaa

SEQ ID NO: 12685 - RNA, 300 nt, Artificial Sequence
  derived and/or modified CDS sequence (opt11) from LASV(Lassa virus/H.sapiens-wt/NGA/2018/ISTH_0959;Clade II)__AVV65084__Z
augggcaacaaacaagccaaauccaccaaagucgacgaacaccaacgcgcccaccucguccccgacgccucccaccucggcccccaauucugcaaauccugcugguucgaaaaccgcggccucgucgaaugcaacaaccacuaccucugccucaacugccucucccuccuccucuccgucuccucccgcugccccaucugcaaaaugccccuccccaccaaacucaaagccgccgcccaacccuccgcccccuccaccgaagccauccaauccaccacccccccccccuacacccccuaa

SEQ ID NO: 12686 - RNA, 300 nt, Artificial Sequence
  derived and/or modified CDS sequence (opt11) from LASV(Lassa virus/H.sapiens-wt/NGA/2018/ISTH_1079;Clade II)__AVV65074__Z
augggcaacaaacaaaccaaauccaccaaagucgacgaacaccaacgcgcccaccucguccccgacgccucccaccucggcccccaauucugcaaauccugcugguucgaaaacaaaggccucgucgaaugcaacaaccacuaccucugccucaacugccucucccuccuccucucagucuccucccgcugccccaucugcaaaaugccccuccccaccaaacucaaaaccgccgcccaacccuccgccccccccaccgaagccacccaaaacaccacccccccccccuacacccccuaa

SEQ ID NO: 12687 - RNA, 300 nt, Artificial Sequence
  derived and/or modified CDS sequence (opt11) from LASV(Lassa virus/H.sapiens-wt/NGA/2018/ISTH_1177;Clade II)__AVV65080__Z
augggcaaccgccaaaccaaauccaccaaagucgacgaacaccaacgcgcccaccucguccccgacgccucccaccucggcccacaauucugcaaauccugcugguucgaaaacaaaggccucgucgaaugcaacaaccacuaccucugccucaacugccucucccuccuccucuccgucuccucccgcugccccaucugcaaaaugccccuccccaccaaacucaaagccgccgcccaacccuccgcccccuccaccgaagccgcccaaaacaccgcccccccccccuacgcccccuaa

SEQ ID NO: 12688 - RNA, 300 nt, Artificial Sequence
  derived and/or modified CDS sequence (opt11) from LASV(Lassa virus/H.sapiens-wt/NGA/2018/ISTH_1375;Clade II)__AVV65078__Z
augggcaaccgccacgccaaauccaccaaaaucaacgaacaccaacgcgcccaccucguccccgacgccucccaccucggcccccaauucugcaaauccugcugguucgaaaaccgcggccucgucgaaugcaacaaccacuaccucugccucaacugccucucccuccuccucuccgucuccucccgcugccccaucugcaaaaugccccuccccaccaaacucaaagccgccgcccaacccuccgcccccuccaccgaagccauccaaaacaccacccccccccccuacacccccuaa

SEQ ID NO: 12689 - RNA, 300 nt, Artificial Sequence
  derived and/or modified CDS sequence (opt11) from LASV(LASV003-NIG-2008;Clade II)__AIT17578__Z
augggcaaccgccaagccaaauccaccaaagucgacgaacaccaacgcgcccaccucguccccgacgccucccaccucggcccccaauucugcaaaucaugcugguucgaaaacaaaggccucgucgaaugcaacaaccacuaccucugccucaacugccucucacuccuccucuccgucuccucccgcugccccaucugcaaaaugccccuccccaccaaacuccgcgccgccgcccaacccuccgcccccuccaccgaauccgcccaaaacaccgcccccccccccuacgcccccuaa

SEQ ID NO: 12690 - RNA, 300 nt, Artificial Sequence
  derived and/or modified CDS sequence (opt11) from LASV(LASV035-NIG-2009;Clade II)__AIT17586__Z
augggcaacaaacaagccaaauccaccaaagucgacgaacaccaacgcgcccaccucguccccgacgccucccaccucggcccccaauucugcaaauccugcugguucgaaaaccgcggccucgucgaaugcaacaaccacuaccucugccucaacugccucucccuccuccucuccgucuccucccgcugccccaucugcaaaaugccccuccccacccgccucaaagccgccgcccaacccuccgcccccuccaccgaagucacccaaaacaccacccccccccccuacacccccuaa

SEQ ID NO: 12691 - RNA, 300 nt, Artificial Sequence
  derived and/or modified CDS sequence (opt11) from LASV(LASV042-NIG-2009;Clade II)__AIT17590__Z
augggcaaccgccaagccaaauccaccaaagucgacgaacaccaacgcgcccaccucguccccgacgccucccaccucggcccccaauucugcaaauccugcugguucgaaaacaaaggccucgucgaaugcaacaaccacuaccucugccucaacugccucucccuccuccucuccgucuccucccgcugccccaucugcaaaaugccccuccccaccaaacucgaagccaccacccaacccuccgcccccuccaccgaagaaacccaauccaccacccccccccccuacacccccuaa

SEQ ID NO: 12692 - RNA, 300 nt, Artificial Sequence
  derived and/or modified CDS sequence (opt11) from LASV(LASV049-NIG-2009;Clade II)__AIT17602__Z
augggcaacaaacaagccaaauccaccaaagucgacgaauaccaacgcgcccaccucguccccgacgccucccaccucggcccccaauucugcaaauccugcugguucgaaaaccgcggccucgucgaaugcaacaaccacuaccucugccucaacugccucucccuccuccucuccgucuccaaccgcugccccaucugcaaaaugccccuccccacccgccucaaagccgccgcccaacccuccgccccccccaccgaagccacccaaaacaccacccccccccccuacacccccuaa

SEQ ID NO: 12693 - RNA, 300 nt, Artificial Sequence
  derived and/or modified CDS sequence (opt11) from LASV(LASV056-NIG-2008;Clade II)__AIT17610__Z
augggcaaccgccaagccaaacccaccaaaguagacgaacaccaacgcgcccaacucguccccgacgccucccaccucggcccccaauucugcaaauccugcugguucgaaaaccgcggccucgucgaaugcaacaaccacuaccucugccucaacugccucucccuccuccucuccgucuccucccgcugccccaucugcaaaaugccccuccccaccaaacucaaagccgccacccaacccuccgcccccuccaccgaagccacccaaaacuccacccccccccccuacacccccuaa

SEQ ID NO: 12694 - RNA, 300 nt, Artificial Sequence
  derived and/or modified CDS sequence (opt11) from LASV(LASV058-NIG-2008;Clade II)__AIT17614__Z
augggcaaccgccaagccaaauccaccaaagucgacgaacaccaacgcgcccaccucguccccgacgccucccaccucggcccccaauucugcaaauccugcugguucgaaaaccgcggccucgucgaaugcaacaaccacuaccucugccucaacugccucucccuccuccucuccgucuccucccgcugccccaucugcaaaaugccccuccccaccaaacucaaagccgccacccaacccuccgcccccuccaccgaagccacccaaaacaccacccccccccccuacacccccuaa

SEQ ID NO: 12695 - RNA, 300 nt, Artificial Sequence
  derived and/or modified CDS sequence (opt11) from LASV(LASV063-NIG-2009;Clade II)__AIT17618__Z
augggcaaccgccaagccaaauccaccgaagucgacgaacaccaacgcgcccaccucguccccgacgccucccaccucggcccccaauucugcaaauccugcugguucgaaaaccgcggccucgucgaaugcaacaaccacuaccucugccucaacugccucucccuccuccucucagucuccaaccgcugccccaucugcaaaaugccccuccccaccaaacucaaagccgccacccaacccuccgcccccucaaccgaagccacccaaaacaccacccccccccccuacacccccuaa

SEQ ID NO: 12696 - RNA, 300 nt, Artificial Sequence
  derived and/or modified CDS sequence (opt11) from LASV(LASV1000-NIG-2009;Clade II)__AIT17780__Z
augggcaaccgccaaaccaaauccaccaaagucgacgaacaccaacgcgcauaccucguccccgacgccucccuccucggcccccaauucugcaaauccugcugguucgaaaacaaaggccucgucgaaugcaacaaccacuaccucugccucaacugccucucccuccuccucuccgucuccucccgcugccccaucugcaaaaugccccuccccacccgccucaaagccgccgcccaacccuccgccccccccacagaagccauccaaaacaccacccccccccccuacacccccuaa

SEQ ID NO: 12697 - RNA, 300 nt, Artificial Sequence
  derived and/or modified CDS sequence (opt11) from LASV(LASV1008-NIG-2009;Clade II)__AIT17784__Z
augggcaaccgccaaaccaaacccaccaaagucgacgaacaccaacgcgcccaccucguccccgacgccucccaccucggcccccaauucugcaaauccugcugguucgaaaacaaaggccucgucgaaugcaacaaccacuaccucugccucaacugccucucccuccuccucuccgucuccucccgcugccccaucugcaaaaugccccuccccaccaaacucaaagccaccgcccaacccuccgcccccuccaccgaagccgcccaaaacaccgcccccccccccuacgcccccuaa

SEQ ID NO: 12698 - RNA, 300 nt, Artificial Sequence
  derived and/or modified CDS sequence (opt11) from LASV(LASV1011-NIG-2009;Clade II)__AIT17788__Z
augggcaaccgccaagucaaauccaccaaagucgacgaacaccaacgcgcccaccucguccccgacgccucccaccucggcccccaauucugcaaauccugcugguucgaaaaccgcggccuagucgaaugcaacaaccacuaccucugccucaacugccucucccuccuccucuccgucuccucccgcugccccaucugcaaaaugccccuccccaccaaacucaaagccgccacccaacccuccgccccccccaccgaagccacccaaaaaaccacccccccccccuacacccccuaa

SEQ ID NO: 12699 - RNA, 300 nt, Artificial Sequence
  derived and/or modified CDS sequence (opt11) from LASV(LASV1015-NIG-2009;Clade II)__AIT17792__Z
augggcaacaaacaagccaaauccaccaaagucgacgaacaccaacgcgcccaccucguccccgacgccucccaccucggcccccaauucugcaaauccugcugguucgaaaaccgcggccucgucgaaugcaacaaccacuaccucugccucaacugccucucccuccuccucuccgucuccggccgcugccccaucugcaaaaugccccuccccaccaaacuaaaagccaccgcccaacccuccgcacccuccaccgaagccacccaaaacaccacccccccccccuacacccccuaa

SEQ ID NO: 12700 - RNA, 300 nt, Artificial Sequence
  derived and/or modified CDS sequence (opt11) from LASV(LASV1016-NIG-2009;Clade II)__AIT17796__Z
augggcaacaaacaagccaaauccaccaaagucgacgaacaccaacgcgcccaccucguccccgacgccucccaccucggcccccaauucugcaaauccugcugguucgaaaaccgcggccucgucgaaugcaacaaccacuaccucugccucaacugccucucccuccuccucuccgucuccucccgcugccccaucugcaaaaugccccuccccaccaaacucaaagccgccgcccaacccuccgcccccuccaccgaagccauccaaaacaccacccccccccccuacacccccuaa

SEQ ID NO: 12701 - RNA, 300 nt, Artificial Sequence
  derived and/or modified CDS sequence (opt11) from LASV(LASV221-NIG-2010;Clade II)__AIT17622__Z
augggcaaccgccaagccaaauccaccaaagucgacgaacaccaacgcgcccaccucguccccgacgccucccaccucggcccccaauucugcaaauccugcugguucgaaaaccgcggccucgucgaaugcaacaaccacuaccucugccucaacugccuaucccuccuccucuccgucuccucccgcugccccaucugcaaaaugccccuccccaccaaacucaaagccgccacccaacccuccgcccccuccaccgaagucacccaaaacaccauccccccccccuacucccccuaa

SEQ ID NO: 12702 - RNA, 300 nt, Artificial Sequence
  derived and/or modified CDS sequence (opt11) from LASV(LASV225-NIG-2010;Clade II)__AIT17628__Z
augggcaacaaacaagccaaauccaccaaaaucgacgaacaccaacgcgcccaccucguccccgacgccucccaccuaggcccccaauucugcaaauccugcugguucgaaaaccgcggccucgucgaaugcaacaaccacuaccucugccucaacugccucucccuccuccucucagucuccucccgcugccccaucugcaaaaugccccuccccacccgccucaaagccgccacccaacccuccgcccccuccaccgaagccacccaaaacaccacccccccccccuacacccccuaa

SEQ ID NO: 12703 - RNA, 300 nt, Artificial Sequence
  derived and/or modified CDS sequence (opt11) from LASV(LASV229-NIG-2010;Clade II)__AIT17632__Z
augggcaaccgccaagccaaauccaccaaagucgacgaacaccaacgcgcccaccucguccccgacgccucccaccucggcccccaauucugcaaauccugcugguucgaaaacaaaggccucgucgaaugcaacaaccacuaccucugccucaacugccucucccuccuccucuccgucuccucccgcugccccaucugcaaaaugccccuccccaccaaacuccgcgccaccgcccaacccuccgcccccuccaccgaagccauccaaaacaccacccccccccccuacacccccuaa

SEQ ID NO: 12704 - RNA, 300 nt, Artificial Sequence
  derived and/or modified CDS sequence (opt11) from LASV(LASV237-NIG-2010;Clade II)__AIT17636__Z
augggcaaccgccaagccaaauccaccaaagucgacgaacaccaacgcgcccaccuaguccccgacgccucacaccucggcccccaauucugcaaauccugcugguucgaaaaccgcggccucgucgaaugcaacaaccacuaccucugccucaacugccucucccuccuccucuccgucuccucccgcugccccaucugcaaaaugccccuccccaccaaacucaaagccgcagcccaacccuccgcccccucaaucgaaaccauccaaaacaccacacccccccccuacacccccuaa

SEQ ID NO: 12705 - RNA, 300 nt, Artificial Sequence
  derived and/or modified CDS sequence (opt11) from LASV(LASV239-NIG-2010;Clade II)__AIT17640__Z
augggcaaccgccaagccaaauccaccaaagucggcgaacaccaacgcgcccaccucguccccgacgccucccaccucggcccccaauucugcaaauccugcugguucgaaaaccgaggccucgucgaaugcaacaaccacuaccucugccucaacugccucucccuccuccucuccgucuccucccgcugccccaucugcaaaaugccccuccccacaaaacucaaagccgccgcccaacccuccgcccccuccaccgaagccacccaagacaccacccccccccccuacacccccuaa

SEQ ID NO: 12706 - RNA, 300 nt, Artificial Sequence
  derived and/or modified CDS sequence (opt11) from LASV(LASV242-NIG-2010;Clade II)__AIT17648__Z
augggcaaccgccaagccaaauccaccaaagucgacgaacaccaacgcgcacaccucguccccgacgccucccaccucggcccccaauucugcaaauccugcugguucgaaaacaaaggccucgucgaaugcaacaaccacuaccucugccucaacugccuaucccuccuccucuccgucuccucccgcugccccaucugcaaaaugccccuccccaccaaacucaaagccaccguccaacccuccgcccccuccaccgaagccgcccaauccaccgcccccccccccuacgcccccuaa

SEQ ID NO: 12707 - RNA, 300 nt, Artificial Sequence
  derived and/or modified CDS sequence (opt11) from LASV(LASV245-NIG-2011;Clade II)__AIT17652__Z
augggcaaccgccaagccaaauccacaaaagucggcgaacaccaacgcgcccaccucguccccgacgccucccaccucggcccccaauucugcaaauccugcugguucgaaaaccgcggccucgucgaaugcaacaaccacuaccucugccucaacugccucucccuccuccucuccgucuccucccgcugccccaucugcaaaaugccccuccccaccaaacucaaagccgccgcccaacccuccgcccccuccgccgaagccauccaaaaaaccacccccccccccuacacccccuaa

SEQ ID NO: 12708 - RNA, 300 nt, Artificial Sequence
  derived and/or modified CDS sequence (opt11) from LASV(LASV246-NIG-2010;Clade II)__AIT17656__Z
augggcaaccgccaagccaaauccaccaaagucgacgaccaccaacgcgcccaccucguccccgacgcaucccaccucggcccccaauucugcaaauccugcugguucgaaaaccgcggccuagucgaaugcaacaaccacuaccucugccucaacugccucucccuccuccucuccgucucaucccgcugccccaucugcaaaaugccccuccccaccaaacucaaagccgccgcccaacccuccgcccccuccaccgaagccgcccaagacaccacccccccccccuacacccccuaa

SEQ ID NO: 12709 - RNA, 300 nt, Artificial Sequence
  derived and/or modified CDS sequence (opt11) from LASV(LASV250-NIG-2011;Clade II)__AIT17660__Z
augggcaaccgccaagccaaauccaccaaagucgacgaacaccaacgcgcccaccucguccccgacgccucccaccucggcccccaauucugcaaauccugcugguucgaaaaccgcggccucgucgaaugcaacaaccacuaccucugccucaacugccucucccuccuccucuccgucuccaaccgcugccccaucugcaaaaugccccuccccaccaaacucaaagccgccgcccaacccuccgcccccuccaccgaagccauccaaaacaccacccccccccccuacgcccccuaa

SEQ ID NO: 12710 - RNA, 300 nt, Artificial Sequence
  derived and/or modified CDS sequence (opt11) from LASV(LASV251-NIG-2010;Clade II)__AIT17664__Z
augggcaacaaacaagccaaauccaccaaagucgacgaacaccaacgcgcccaccucguccccgacgccucccaccucggcccccaauucugcaaauccugcugguucgaaaacaaaggccucgucgaaugcaacaaccacuaccucugccucaacugccucucccuccuccucuccgucuccucccgcugccccaucugcaaaaugccccuccccaccaaacuaaaagccgccgcccaacccuccgcccccuccaccgaagccgcccaaaacaccgcccccccccccuacgcccccuaa

SEQ ID NO: 12711 - RNA, 300 nt, Artificial Sequence
  derived and/or modified CDS sequence (opt11) from LASV(LASV253-NIG-2011;Clade II)__AIT17668__Z
augggcaaccgccaagccaaauccacaaaagucgacgaacaccaacgcgcccaccucguccccgacgccucccaccucggcccccaauucugcaaauccugcugguucgaaaacaaaggccucgucgaaugcaacaaccacuaccucugccucaacugccucucccuccuccucuccgucuccucccgcugccccaucugcaaaaugccccuccccaccaaacucaaaaccaccgcccaacccuccgccccccccaccgaagccgccaaaaacaccgcccccccccccuacgcccccuaa

SEQ ID NO: 12712 - RNA, 300 nt, Artificial Sequence
  derived and/or modified CDS sequence (opt11) from LASV(LASV256-NIG-2010;Clade II)__AIT17676__Z
augggcaaccgccaagccaaauccaccaaagucgacgaacaccaacgcgcccaccucguccccgacgccucccaccucggcccccaauucugcaaauccugcugguucgaaaaccgcggccucgucgaaugcaacaaccacuaccucugccucaacugccucucccuccuccucuccgucuccucccgcugccccaucugcaaaaugccccuccccaccaaacuaaaagccgccacccaacccuccgcccccuccaccgaagucacccaaaacaccacccccccccccuacacccccuaa

SEQ ID NO: 12713 - RNA, 300 nt, Artificial Sequence
  derived and/or modified CDS sequence (opt11) from LASV(LASV263-NIG-2011;Clade II)__AIT17680__Z
augggcaaccgccaagccaaauccaccaaaaucgacgaacaccaacgcgcccaccucguccccgacgccucccaccucggcccccaauucugcaaauccugcugguucgaaaaccgcggccucgucgaaugcaacaaccacuaccuaugccucaacugccucucccuccuccucuccgucuccucccgcugccccaucugcaaaaugccccuccccaccaaacucaaagccgccgcccaacccuccgcccccuccaccgaagccauccaaaacaccacccccccccccuacacccccuaa

SEQ ID NO: 12714 - RNA, 300 nt, Artificial Sequence
  derived and/or modified CDS sequence (opt11) from LASV(LASV267-NIG-2010;Clade II)__AIT17684__Z
augggcaaccgccaagccaaauccgccaaagucgacgaacaccaacgcgcccaccucguccccgacgccucccaccucggcccccaauucugcaaauccugcugguucgaaaacaaaggccucgucgaaugcaacaaccacuaccucugccucaacugccucucccuccuccucuccgucuccugccgcugccccaucugcaaaaugccccuccccaccaaacucaaagccgccacccaacccuccgcccccuccaccgaagccacccaaaacaccacccccccccccuacacccccuaa

SEQ ID NO: 12715 - RNA, 300 nt, Artificial Sequence
  derived and/or modified CDS sequence (opt11) from LASV(LASV274-NIG-2010;Clade II)__AIT17692__Z
augggcaaccgccacgccaaacccaccaaagucgacgaacaccaacgcgcccaccucguccccgacgccucccaccucggcccccaauucugcaaauccugcugguucgaaaaccgcggccucgucgaaugcaacaaccacuaccucugccucaacugccucucccuccuccucuccgucuccucccgcugccccaucugcaaaaugccccuccccaccaaacucaaagccgccgcccaacccucagcccccuccaccgaagccauccaaaacaccacacccccacccuacacccccuaa

SEQ ID NO: 12716 - RNA, 300 nt, Artificial Sequence
  derived and/or modified CDS sequence (opt11) from LASV(LASV719-NIG-2009;Clade II)__AIT17702__Z
augggcaaccgccacgccaaauccaccaaagucgacgaacaccaacgcgcccaccucguccccgacgccucccaccucggcccccaauucugcaaauccugcugguucgaaaaccgcggccucgucgaaugcaacaaccacuaccucugccucaacugccucucccuccuccucuccgucuccucccgcugccccaucugcaaaaugccccuccccaccaaacuaaaagccgccgcccaacccucagcccccuccaccgaagccuuccaaaacaccacccccccccccuacacccccuaa

SEQ ID NO: 12717 - RNA, 300 nt, Artificial Sequence
  derived and/or modified CDS sequence (opt11) from LASV(LASV737-NIG-2009;Clade II)__AIT17708__Z
augggcaaccgccacgccaaauccaccaaagucgacgaacaccaacgcgcccaccucguccccgacgccucccaccucggcccccaauucugcaaaucaugcugguucgaaaaccgcggccuagucgaaugcaacaaccacuaccucugccucaacugccuaucccuccuccucuccgucuccucccgcugccccaucugcaaaaugccccuccccaccaaacucaaagccgccacccaacccuccgcccccuccaccgaagccauccaaaacaccacccccccccccuacacccccuaa

SEQ ID NO: 12718 - RNA, 300 nt, Artificial Sequence
  derived and/or modified CDS sequence (opt11) from LASV(LASV966-NIG-2009;Clade II)__AIT17716__Z
augggcaaccgccccgccaaauccaccaaagucgacgaacaccaacgcgcccaccucguccccgacgccucccaccucggcccccaauucugcaaauccugcugguucgaaaaccgcggccucgucgaaugcaacaaccacuaccucugccucaacugccucucccuccuccucucagucuccucccgcugccccaucugcaaaaugccccuccccaccaaacucaaagccgccgcccaacccuccgcccccuccaccgaagccacccaaaacaccacccccccccccuacacccccuaa

SEQ ID NO: 12719 - RNA, 300 nt, Artificial Sequence
  derived and/or modified CDS sequence (opt11) from LASV(LASV967-NIG-2009;Clade II)__AIT17720__Z
augggcaaccgccaagccaaacccaccaaagucgacgaacaccaacgcgcccaccucguccccgacgccucccaccucggcccccaauucugcaaauccugcugguucgaaaaccgcggccucgucgaaugcaacaaccacuaccucugccucaacugccucucccuccuccucuccgucuccucccgcugcccaaucugcaaaaugccccuccccacccgccucaaagccgccgcccaacccuccgcccccuccaccgaagaaacccaaaacaccacccccccccccuacacccccuaa

SEQ ID NO: 12720 - RNA, 300 nt, Artificial Sequence
  derived and/or modified CDS sequence (opt11) from LASV(LASV975-NIG-2009;Clade II)__AIT17730__Z
augggcaaccgccaagccaaauccaccaaagucgacgaacaccaacgcgcccaccuaguccccgacgccucccaccucggcccccaauucugcaaauccugcugguucgaaaaccgcggccucgucgaaugcaacaaccacuaccucugccucaacugccucucccuccuccucuccgucuccucccgcugccccaucugcaaaaugccccuccccaccaaacucaaagccgccgcccaacccuccgccccccucaccgaagccauccaaaacaccacccccccccccuacacccccuaa

SEQ ID NO: 12721 - RNA, 300 nt, Artificial Sequence
  derived and/or modified CDS sequence (opt11) from LASV(LASV976-NIG-2009;Clade II)__AIT17734__Z
augggcaaccgccaagccaaauccaccaaagucgacgaacaccaacgcgcacaccucguccccgacgccucccaccucggcccccaauucugcaaauccugcugguucgaaaaccgcggccucgucgaaugcaacaaccacuaccucugccucaacugccucucccuccuccucuccgucuccucccgcugccccaucugcaaaaugccccuccccaccaaacucaaagccgccgcccaacccuccgcccccuccaccgaagccauccaaaacaccacccccccccccuacacccccuaa

SEQ ID NO: 12722 - RNA, 300 nt, Artificial Sequence
  derived and/or modified CDS sequence (opt11) from LASV(LASV977-NIG-2009;Clade II)__AIT17738__Z
augggcaaccgccaagccaaauccaccaaagucgacgaacaccaacgcgcccaccuaguccccgacgccucccaccucggcccccaauucugcaaauccugcugguucgaaaaccgcggccucgucgaaugcaacaaccacuaccucugccucaacugccucucccuccuccucuccgucuccucccgcugccccaucugcaaaaugccccuccccaccaaacucaaagccgccacccuccccuccgcccccuccaccgaagucacccaaaacaccaccccccccccccacucccccuaa

SEQ ID NO: 12723 - RNA, 300 nt, Artificial Sequence
  derived and/or modified CDS sequence (opt11) from LASV(LASV981-NIG-2009;Clade II)__AIT17750__Z
augggcaaccgccaagccaaauccgccaaagucaacgaacaccaacgcgcccaccucguccccgacgccucccaccucggcccccaauucugcaaauccugcugguucgaaaaccgcggccucgucgaaugcaacaaccacuaccucugccucaacugccucucccuccuccucuccgucuccucccgcugccccaucugcaaaaugccccuccccaccaaacucaaagccgccacccaacccuccgcccccuccaccgaagccacccaaaacaccacccccccccccuacacccccuaa

SEQ ID NO: 12724 - RNA, 300 nt, Artificial Sequence
  derived and/or modified CDS sequence (opt11) from LASV(LASV982-NIG-2009;Clade II)__AIT17754__Z
augggcaaccgccaagccaaauccaccaaagucgacgaacaccaacgcgcccaccucguccccgacgccucccaccucggcccccaauucugcaaauccugcugguucgaaaacaaaggccucgucgaaugcaacaaccacuaccucugccucaacugccucucccuccuccucuccgucuccucccgcugccccaucugcaaaaugccccuacccaccaaacucaaagccuccgcccaacccuccgcccccuccaccgaagccgcccaaaacaccgcccccccccccuacgcccccuaa

SEQ ID NO: 12725 - RNA, 300 nt, Artificial Sequence
  derived and/or modified CDS sequence (opt11) from LASV(LASV989-NIG-2009;Clade II)__AIT17760__Z
augggcaaccgccaagccaaauccacccgcaccgacgaacaccaacgcgcccaccucguccccgacgccucccaccucggcccccaauucugcaaauccugcugguucgaaaacaaaggccucgucgaaugcaacaaccacuaccucugccucaacugccucucccuccuccucuccgucuccucccgcugccccaucugcaaaaugccccuccccaccaaacucaaagccgccgcccaacccuccgcccccuccaccgaagccggccaaaacaccgcccccccccccuacgcccccuaa

SEQ ID NO: 12726 - RNA, 300 nt, Artificial Sequence
  derived and/or modified CDS sequence (opt11) from LASV(LASV991-NIG-2009;Clade II)__AIT17768__Z
augggcaaccgccaagccaaauccgccaccgucgacgaaugccaacgcgcccaccucguccccgacgccuccuaccucggcccccaauucugcaaauccugcugguucgaaaacaaaggccucgucgaaugcaacaaccacuaccucugccucaacugccucucccuccuccucuccgucuccucccgcugccccaucugcaaaaugccccuccccaccaaacucaaagccgccgcccaacccucagcccccuccacccgagcaacccaaaacaccacccccccccccuacacccccuaa

SEQ ID NO: 12727 - RNA, 300 nt, Artificial Sequence
  derived and/or modified CDS sequence (opt11) from LASV(LASV993-NIG-2009;Clade II)__AIT17776__Z
augggcaacaaacaagccaaauccaccaaagucgacgaacaccaacgcgcccaccucguccccgacgccucccaccucggcccccaauucugcaaauccugcugguucgaaaacaaaggccucgucgaaugcaacaaccacuaccucugccucaacugccucucccuccuccucuccgucuccucccgcugccccaucugcaaaaugccccuccccacccgccucaaagccgccgcccaacccuccgcccccuccaccgaagccacccaaaacgccgcccccccccccuacgcccccuaa

SEQ ID NO: 12728 - RNA, 300 nt, Artificial Sequence
  derived and/or modified CDS sequence (opt11) from LASV(Nig08-A41;Clade II)__ADU56628__Z
augggcaaccgccaagccaaauccaccaaagucgacgaacaccaacgcgcccaccucguccccgacgccucccaccucggcccccaauucugcaaauccugcugguucgaaaaccgcggccuagucgaaugcaacaaccacuaccucugccucaacugccucucccuccuccucuccgucuccucccgcugccccaucugcaaaaugccccuccccaccaaacucaaagccgccgcccaacccuccgcccccuccaccgaagccauccaaaacaccacccccccacccuacgcccccuaa

SEQ ID NO: 12729 - RNA, 300 nt, Artificial Sequence
  derived and/or modified CDS sequence (opt11) from LASV(CSF;Clade III)__AAO59514__Z
augggcaacaaacaaguccgcuccaugaaaaaagucgacuccccccgcgccucccucauccccgacgccucccaccucggcccccaauucugcaaauccugcugguucgaaaaccgcggccucgucgaaugcaacaaccacuaccucugccucaacugccucucccuccuccucuccgucuccucccgcugccccaucugcaaaaugccccuccccaccaaacucaaaaccuccaccacccccaccgcccccuccauccgcgaagccaacaccaccucccccccccccuacucccccuaa

SEQ ID NO: 12730 - RNA, 300 nt, Artificial Sequence
  derived and/or modified CDS sequence (opt11) from LASV(Nig08-A18;Clade III)__ADU56616__Z
augggcggcaaacacaccaaacaaccccgcgaauccaacuccccccgcgccucacucauccccgacgccacccaccucggcccccaauucugcaaauccugcugguucgaaaacaaaggccucgucgaaugcaacaaccacuaccucugccucaacugccucucccuccuccucuccgucuccaaccgcugccccaucugcaaaaugccccuccccacccgccuccgcaccuccaccaaccccaccgccccccaagucgaacaaaccggccccgccucccccccccccuacucccccuaa

SEQ ID NO: 12731 - RNA, 300 nt, Artificial Sequence
  derived and/or modified CDS sequence (opt11) from LASV(ONM-299;Clade III)__ANH09755__Z
augggcaacaaacaaaccaaaaccaucaaaaaaaccgacuccccccgcgccucccucauccccgacgccucccacaugggcccccaauucugcaaauccugcugguucgaaaaccgcggccucgucgaaugcaacaaccacuaccucugccucaacugccucucccuccuacucucagucuccaaccgcugccccaucugcaaaaugccccuccccaccaaacuccgcgccucccccucccccaccgcccccuccauccgcgaagccaacaucaccaaccccccccccuacucccccuaa

SEQ ID NO: 12732 - RNA, 300 nt, Artificial Sequence
  derived and/or modified CDS sequence (opt11) from LASV(ONM-700;Clade III)__ANH09759__Z
augggcaacaaacaaaccaaaaccaccaaaaaaaccgacuccccccgcgccucccucauccccgacgccucccacaugggcccccaauucugcaaauccugcugguucgaaaaccgcggccucgucgaaugcaacaaccacuaccucugccucaacugccucucccuccuccucuccgucuccaaccgcugccccaucugcaaaaugccccuccccaccaaacuccgcgccucccccucccccaccgcccccuccauccgcgaagccaacaucaccaaccccccccccuacucccccuaa

SEQ ID NO: 12733 - RNA, 300 nt, Artificial Sequence
  derived and/or modified CDS sequence (opt11) from LASV(BA366;Clade IV)__ADU56644__Z
augggcaaccgccaaaccaaagcccccgaagccaaaggcuccccccgcgccucccucauccccgacgccacccaccucggcccccaauucugcaaauccugcugguucgaaaacaaaggccucgucgaaugcaacgaccacuaccucugccucaacugccucacccuccuccucuccgucuccucccgcugccccaucugcaaaaugccccuccccacccgccuacgccccuccaccaaccccaccgccccccccgcccgcgccgaaggcggcaucaaccccccccccuacucccccuaa

SEQ ID NO: 12734 - RNA, 300 nt, Artificial Sequence
  derived and/or modified CDS sequence (opt11) from LASV(G1180-SLE-2010;Clade IV)__AIT17166__Z
augggcaacaaacaagccaaagcccccgaagccaaagacuccccccgcgccucccucauccccgacgccacccaccucggcccccaauucugcaaauccugcugguucgaaaccaaaggccucgucgaaugcaacaaccacuaccucugccucaacugccucacccuccuccucuccgucuccaaccgcugccccaucugcaaaaugccccuccccaccaaacuccgccccuccgccacccccaccgccccccccaccgaagccgccgacuccaucggccccccccccuacucccccuaa

SEQ ID NO: 12735 - RNA, 300 nt, Artificial Sequence
  derived and/or modified CDS sequence (opt11) from LASV(G1190-SLE-2010;Clade IV)__AIT17170__Z
augggcaacaaacaagccaaaguccccgaauccaaagacuccccccgcgccucccucauccccgacgccacccaccucggcccccaauucugcaaauccugcugguucgaaaacaaaggccucgucgaaugcaacaaccacuaccucugccucaacugccucacccuccuccucuccgucuccaaccgcugccccaucugcaaaaugccccuccccaccaaacuccgccccuccgccgcccccaccgccccccccgccggcgccgccgacuccauccgccccccccccuacucccccuaa

SEQ ID NO: 12736 - RNA, 300 nt, Artificial Sequence
  derived and/or modified CDS sequence (opt11) from LASV(G1200-LIB-2010;Clade IV)__AIT17174__Z
augggcaacaaacaaaccaaagcccccgaagccaaaggcuccccccgcgccucccucauccccgacgccacccaccucggcccccaauucugcaaauccugcugguucgaaaacaaaggccucgucgaaugcaacaaccacuaccuaugccucaacugccucacacuccuccucuccgucuccucccgcugccccaucugcaaaaugccccuccccaccaaacuccgccccuccgccguccccaccgccccccccaccaaagccgaagacaacacccgccccccccccuacucccccuaa

SEQ ID NO: 12737 - RNA, 300 nt, Artificial Sequence
  derived and/or modified CDS sequence (opt11) from LASV(G1442-SLE-2011;Clade IV)__AIT17178__Z
augggcaacaaacaagccaaagccuccgaagccaaagacuccccccgcgccucccucauccccgacgccacccaccucggcccccaauucugcaaauccugcugguucgaaaacaaaggccucgucgaaugcaacaaccacuaccucugccucaacugccucucccuccuccucuccgucuccucccgcugccccaucugcaaaaugccccuccccacccgccuccgccccuccaccgcccccaccgcaccccccgcccgcgccggcgacaacaucaaacccccccccuacucccccuaa

SEQ ID NO: 12738 - RNA, 300 nt, Artificial Sequence
  derived and/or modified CDS sequence (opt11) from LASV(G1529-SLE-2011;Clade IV)__AIT17182__Z
augggcaacaaacaagccaaaguccccgaaguccgagacuccccccgcgccucccucauccccgacgccacccaccucggcccccaauucugcaaauccugcugguucgaaaacaaaggccucgucgaaugcaacaaccacuaccucugccucaacugccucacccuccuccucuccgucuccucccgcugccccaucugcaaaaugccccuccccaccaaacuccgccccuccgccacccccaccgccccccccgccggcgccggcgacggcacccgccccccccccuacucccccuaa

SEQ ID NO: 12739 - RNA, 300 nt, Artificial Sequence
  derived and/or modified CDS sequence (opt11) from LASV(G1618-SLE-2011;Clade IV)__AIT17186__Z
augggcaacaaacaagccaaaacccccgaaaccaaagacuccccacgcgccucccucauccccgacgccacccaccucggcccccaauucugcaaauccugcugguucgaaaacaaaggccucgucgaaugcaacaaccacuaccucugccucaacugccucacccuccuccucuccgucuccaaccgcugccccaucugcaaaaugccccuccccaccaaacuccgccccuccgucgcccccaccgccccccccgccggcgccgccgacaacacccgccccccccccuacucccccuaa

SEQ ID NO: 12740 - RNA, 300 nt, Artificial Sequence
  derived and/or modified CDS sequence (opt11) from LASV(G1647-SLE-2011;Clade IV)__AIT17194__Z
augggcaacaaacaagccaaagcccccgaacccaaagacuccccccgcgccucccucauccccgacgccacccaccucggcccccaauucugcaaauccugcugguucgaaaacaaaggccucgucgaaugcaacaaccacuaccucugccucaacugccucacccuccuccucuccgucuccaaccgcugccccaucugcaaaaugccccuccccaccaaacuccgccccuccgucgcccccaccgccccccccgccggcgucgucgacuccacccgccccccccccuacucccccuaa

SEQ ID NO: 12741 - RNA, 300 nt, Artificial Sequence
  derived and/or modified CDS sequence (opt11) from LASV(G1727-SLE-2011;Clade IV)__AIT17198__Z
augggcaacaaacaagccaaaguccccgaauccaaagacuccccccgcgccucccucauccccgacgccacccaccucggcccccaauucugcaaauccugcugguucgaaaaccgcggccucgucgaaugcaacaaccacuaccucugccucaacugccucacccuccuccucuccgucuccaaccgcugccccaucugcaaaaugccccuccccaccaaacuccgccccuccaccgcccccaccgccccccccaccggcgccgccgacuccacccgccccccccccuacucccccuaa

SEQ ID NO: 12742 - RNA, 300 nt, Artificial Sequence
  derived and/or modified CDS sequence (opt11) from LASV(G1774-SLE-2011;Clade IV)__AIT17202__Z
augggcaacaaacaagccaaaacccccgaauccaaagacuccccccgcgccucccucauccccgacgccacccaccucggcccccaauucugcaaauccugcugguucgaaaacaaaggccucgucgaaugcaacaaccacuaccuaugccucaacugccucacccuccuccucuccgucuccaaccgcugccccaucugcaaaaugccccuccccacccgccuccgccccuccgccgcccccaccgccccccccuccggcgccgccgacuccacccgccccccccccuacucccccuaa

SEQ ID NO: 12743 - RNA, 300 nt, Artificial Sequence
  derived and/or modified CDS sequence (opt11) from LASV(G1792-SLE-2011;Clade IV)__AIT17206__Z
augggcaacaaacaagccaaagcccccgaagccaaagacuccccccgcgccucacuaauccccgacgccacccaccucggcccccaauucugcaaauccugcugguucgaaaacaaaggccucgucgaaugcaacaaccacuaccucugccucaacugccucacccuccuccucuccgucuccuaccgcugccccaucugcaaaaugccccuccccaccaaacuccgccccuccgccacccccaccgccccccccaccgaagccgccgacuccauccgccccccccccuaccgccccuaa

SEQ ID NO: 12744 - RNA, 300 nt, Artificial Sequence
  derived and/or modified CDS sequence (opt11) from LASV(G1959-SLE-2011;Clade IV)__AIT17214__Z
augggcaacaaacaagccaaagcccccgaagucaaagacuccccccgcgccucccucauccccgacgccacccaccucggcccccaauucugcaaauccugcugguucgaaaacaaaggccucgucgaaugcaacaaccacuaccucugccucaacugccucacccuccuccucuccgucuccaaccgcugccccaucugcaaaaugccccuccccaccaaacuccgccccuccgccgcccccaccgccccccccaccggcaccgccgacuccauccgccccccccccuacucccccuaa

SEQ ID NO: 12745 - RNA, 300 nt, Artificial Sequence
  derived and/or modified CDS sequence (opt11) from LASV(G2141-SLE-2011;Clade IV)__AIT17222__Z
augggcaacaaacaagccaaaacccccgaaaccaaagacuccccccgcgccucacucauccccgacgccacccaccucggcccccaauucugcaaauccugcugguucgaaaacaaaggccucgucgaaugcaacucccacuaccucugccucaacugccucacccuccuccucuccgucuccucccgcugccccaucugcaaaaugccccuccccacccgccuccgccccuccaccgcccccaccgccccccccgccggcgucggcgacuccaccucccccccccccuacucccccuaa

SEQ ID NO: 12746 - RNA, 300 nt, Artificial Sequence
  derived and/or modified CDS sequence (opt11) from LASV(G2147-SLE-2011;Clade IV)__AIT17226__Z
augggcaacaaacaagccaaaacccccgaagccaaagacuccccccgcgccucccucauccccgacgccacccaccucggcccccaauucugcaaauccugcugguucgaaaacaaaggccuagucgaaugcaacaaccacuaccucugccucaacugccucacccuccuccucuccgucuccaaccgcugccccaucugcaaaaugccccuccccaccaaacuccgccccuccgcaacccccaccgccccccccgccggcgccgccgacuccaucggccccccccccuacucccccuaa

SEQ ID NO: 12747 - RNA, 297 nt, Artificial Sequence
  derived and/or modified CDS sequence (opt11) from LASV(G2165-SLE-2011;Clade IV)__AIT17230__Z
augggcaacaaacaagccaaagccuccgacaaaaacuccccccgcgccucccucauccccgacgccacccaccucggcccccaauucugcaaauccugcugguucgaaaacaaaggccucgucgaaugcaacaaccacuaccucugccucaacugccucacccuccuccucuccgucuccaaccgcugccccaucugcaaaaugccccuccccaccaaacuccgccccuccgccacccccaccgccccccccaccggcgccgccgacucaauccgccccccccccuacucccccuaa

SEQ ID NO: 12748 - RNA, 300 nt, Artificial Sequence
  derived and/or modified CDS sequence (opt11) from LASV(G2184-SLE-2011;Clade IV)__AIT17234__Z
augggcaacaaacaagccaaagccuccgaagaaaaaaacuccccccgcgccucccucauccccgacgccacccaccucggcccccaauucugcaaauccugcugguucgaaaacaaaggccucgucgaaugcaacaaccacuaccucugccucaacugccucacccuccuccucuccgucuccaaccgcugccccaucugcaaaaugccccuccccaccaaacuccgccccuccgccacccccaccgccccccccaccggcgccgccgacuccauccgccccccccccuacucccccuaa

SEQ ID NO: 12749 - RNA, 300 nt, Artificial Sequence
  derived and/or modified CDS sequence (opt11) from LASV(G2197-SLE-2011;Clade IV)__AIT17238__Z
augggaaacaaacaaaccaaagcccccgaagccaaaggcuccccccgcgccucccucauccccgacgccacccaccucggcccccaauucugcaaauccugcugguucgaaaacaaaggccucgucgaaugcaacaaccacuaccucugccucaacugccucacccuccuccucuccgucuccaaccgcugccccaucugcaaaaugccccuccccaccaaacuccgccccuccgccacccccaccgccccccccaccgaagccgccgacuccauccgccccccccccuaccgccccuaa

SEQ ID NO: 12750 - RNA, 300 nt, Artificial Sequence
  derived and/or modified CDS sequence (opt11) from LASV(G2222-SLE-2011;Clade IV)__AIT17242__Z
augggcaacaaacaagccaaagcccccgaauccaaagacuccccccgcgccucccucauccccgacgccacccaccucggcccccaauucugcaaauccugcugguucgaaaacaaaggccucgucgaaugcaacaaccacuaccucugccucaacugccucacccuccuccucuccgucuccaaccgcugccccaucugcaaaaugccccuccccacccgccuccgccccuccgccgcccccaccgccccccccaccggcgccaccgacuccacccgccccccccccuacucccccuaa

SEQ ID NO: 12751 - RNA, 300 nt, Artificial Sequence
  derived and/or modified CDS sequence (opt11) from LASV(G2259-SLE-2012;Clade IV)__AIT17248__Z
augggcaacaaacaagucaaagcccccgaagcccgcaacuccccccgcgccucccucauccccgacgccacccaccucggcccccaauucugcaaauccugcugguucgaaaacaaaggccucgucgaaugcaacaaccacuaccucugccucaacugccucacccuccuccucggcgucuccucccgcugccccaucugcaaaaccccccuacccacccgccuccgccccuccgccacccccaccgccccccccgccggcgccggcgacaacacccgccccccccccuacucccccuaa

SEQ ID NO: 12752 - RNA, 300 nt, Artificial Sequence
  derived and/or modified CDS sequence (opt11) from LASV(G2263-SLE-2012;Clade IV)__AIT17252__Z
augggcaacaaacaagccaaagcccccgaagccaaagacuccccccgcgccucccucauccccgacgccacccaccucggcccccaauucugcaaauccugcugguucgaaaacaaaggccucgucgaaugcaacaaccacuaccucugccucaacugccuaacccuccuccucuccgucuccaaccgcugccccaucugcaaaaugccccuccccaccaaacuccgccccuccaccgcccccaccgccccccccgccggcgccgccgacuccacccgacccccccccuacucccccuaa

SEQ ID NO: 12753 - RNA, 300 nt, Artificial Sequence
  derived and/or modified CDS sequence (opt11) from LASV(G2280-SLE-2012;Clade IV)__AIT17256__Z
augggcaacaaacaagccaaagcccccgaaaccaaagacuccccccgcgccucccucauccccgacgccacccaccucggcccccaauucugcaaauccugcugguucgaaaacaaaggccucgucgaaugcaacaaccacuaccucugccucaacugccucacccuccuccucuccgucuccaaccgcugccccaucugcaaaaugccccuccccaccaaacuccgccccuccgccgcccccaccgccccccccgucggcgccgccgacaacacccgccccccccccuacucccccuaa

SEQ ID NO: 12754 - RNA, 300 nt, Artificial Sequence
  derived and/or modified CDS sequence (opt11) from LASV(G2295-SLE-2012;Clade IV)__AIT17260__Z
augggcaacaaacaagccaaagcccccgaacucaaagacuccccccgcgccucccucauccccgacgccacccaccucggcccccaauucugcaaauccugcugguucgaaaacaaaggccucgucgaaugcaacaaccacuaccucugccucaacugccucacccuccuccucuccgucuccaaccgcugccccaucugcaaaaugccccuccccaccaaacuccgccccuccgccgcccccaccgccccccccgccggcgccgucgacuccacccgccccccccccuacucccccuaa

SEQ ID NO: 12755 - RNA, 300 nt, Artificial Sequence
  derived and/or modified CDS sequence (opt11) from LASV(G2315-SLE-2012;Clade IV)__AIT17264__Z
augggcaacaaacaaaccaaagcccccgaauccaaaaacuccccccgcgccucccucauccccgacgccaccuaccucggcccccaauucugcaaauccugcugguucgaaaacaaaggccuagucgaaugcaacaaccacuaccucugccucaacugccucacccuccuccucuccgucuccaaccgcugccccaucugcaaaaugccccuccccaccaaacuccgauccuccgccgcccccaccgccccccccaccggcgccgccgacucaaccaaacccccccccuacucccccuaa

SEQ ID NO: 12756 - RNA, 300 nt, Artificial Sequence
  derived and/or modified CDS sequence (opt11) from LASV(G2318-SLE-2012;Clade IV)__AIT17268__Z
augggcaacaaacaaaccaaagcccccgaagucaaaggcuccccccgcgccucccucauccccgacgccacccaccucggcccccaauucugcaaauccugcugguucgaaaacaaaggccucgucgaaugcaacaaccacuaccucugccucaacugccucacccuccuccucuccgucuccaaccgcugccccaucugcaaaaugccccuccccaccaaacucaaacccuccaccacccccaccgccccccccaccggcgccgccgacuccauccgccccccccccuacucccccuaa

SEQ ID NO: 12757 - RNA, 300 nt, Artificial Sequence
  derived and/or modified CDS sequence (opt11) from LASV(G2363-SLE-2012;Clade IV)__AIT17272__Z
augggcaacaaacaagucaaaaccuccgaagcccgcgacuccccccgcgccucccucauccccgacgccaccgaccucggcccccaauucugcaaauccugcugguucgaaaacaaaggccucgucgaaugcaacaaccacuaccucugccucaacugccucacccuccuccucuccgucuccaaccgcugccccaucugcaaaaugccccuacccacccgccuucgccccuccgccaaccccaccgccccccccgccgaaaccggcgacucaacccgccccccccccuacucccccuaa

SEQ ID NO: 12758 - RNA, 300 nt, Artificial Sequence
  derived and/or modified CDS sequence (opt11) from LASV(G2392-SLE-2012;Clade IV)__AIT17278__Z
augggcuccaaacaaaccaaaacccccgaagucaaagacuccccccgcgcaucccucauccccgacgccacccaccucggcccccaauucugcaaaucaugcugguucgaaaacaaaggccucgucgaaugcaacaaccacuaccucugccucaacugccucacccuccuccucuccgucuccaaccgcugccccaucugcaaaaugccccuccccaccaaacuccgccccuccgccgcccccaccgccccccccgcccgcgccgccgacgacacccgccccccccccuacucccccuaa

SEQ ID NO: 12759 - RNA, 300 nt, Artificial Sequence
  derived and/or modified CDS sequence (opt11) from LASV(G2405-SLE-2012;Clade IV)__AIT17282__Z
augggcaacaaacaagccaaagccccugaacccaaagacuccccccgcgccucccucauccccgacgccacccaccucggcccccaauucugcaaauccugcugguucgaaaacaaaggccucgucgaaugcaacaaccacuaccucugccucaacugccucacccuccuccucuccgucuccaaccgcugccccaucugcaaaaugccccuccccaccaaacuccgccccuccgccgcccccaccgccccccccgccggcgccgucgacuccauccgccccccccccuacucccccuaa

SEQ ID NO: 12760 - RNA, 300 nt, Artificial Sequence
  derived and/or modified CDS sequence (opt11) from LASV(G2427-SLE-2012;Clade IV)__AIT17286__Z
augggcaacaaacaaaccaaagcccccgaagucaaagacuccccccgcgccucccucauccccgacgccacccaccucggcccccaauucugcaaauccugcugguucgaaaacaaaggccucgucgaaugcaacaaccacuaccucugccucaacugccucacccuccuccuauccgucuccaaccgcugccccaucugcaaaaugccccuccccaccaaacuccgccccuccaccgcccccaccgccccccccgccggcaccauggacuccacccgccccccccccuacucccccuaa

SEQ ID NO: 12761 - RNA, 300 nt, Artificial Sequence
  derived and/or modified CDS sequence (opt11) from LASV(G2431-SLE-2012;Clade IV)__AIT17290__Z
augggcaacaaacaagcccgcgcccccgaagccaaagacuccccccgcgccucccucauccccgacgccacccaccucggcccccaauucugcaaauccugcugguucgaaaacaaaggccucgucgaaugcaacaaccacuaccucugccucaacugccucacccuccuccucuccgucuccucccgcugccccaucugcaaaaugccccuccccacccgccuccgccccuccgccauccccaccgccccccccgccggcaccggcgacuccucccgccccccccccuacucccccuaa

SEQ ID NO: 12762 - RNA, 300 nt, Artificial Sequence
  derived and/or modified CDS sequence (opt11) from LASV(G2554-SLE-2012;Clade IV)__AIT17296__Z
augggcaacaaacaagccaaaacccccgaaaucaaagacuccccccgcgccucccucauccccgacgccacccaccucggcccccaauucugcaaauccugcugguucgaaaacaaaggccucgucgaaugcaacaaccacuaccucugccucaacugccucacccuccuccucuccgucuccaaccgcugccccaucugcaaaaugccccuccccaccaaacuccgccccuccgccgcccccaccgccccccccgccggcgccgccgacaucacccgccccccccccuacucccccuaa

SEQ ID NO: 12763 - RNA, 300 nt, Artificial Sequence
  derived and/or modified CDS sequence (opt11) from LASV(G2557-SLE-2012;Clade IV)__AIT17300__Z
augggcaacaaacaagucaaagcccccgaagcccgcaacuccccccgcgccucccucauccccgacgccacccaccucggcccccaauucugcaaauccugcugguucgaaaacaaaggccucgucgaaugcaacaaccacuaccucugccucaacugccucacccuccuccucggcgucuccucccgcugccccaucugcaaaaugccccuccccacccgccuccgccccuccaccgcccccaccgccccccccgccggcgccggcgacaacacccgccccccccccuacucacccuaa

SEQ ID NO: 12764 - RNA, 300 nt, Artificial Sequence
  derived and/or modified CDS sequence (opt11) from LASV(G2612-SLE-2012;Clade IV)__AIT17312__Z
augggcaacaaacaagccaaaacccccgaaaccaaagacuccccccgagccucccucauccccgacgccacccaccucggcccccaauucugcaaauccugcugguucgaaaacaaaggccucgucgaaugcaacaaccacuaccucugccucaacugccucacccuccuccucuccgucuccaaccgcugccccaucugcaaaaugccccuccccaccaaacuccgccccuccgccgcccccaccgccccccccgucggcgccgccgacuccacccgccccccccccuacucccccuaa

SEQ ID NO: 12765 - RNA, 300 nt, Artificial Sequence
  derived and/or modified CDS sequence (opt11) from LASV(G2615-SLE-2012;Clade IV)__AIT17316__Z
augggcaacaaacaagccaaagcccccgaagcccgcaacuccccccgcgccucccucauccccgacgccacccaccucggcccacaauucugcaaauccugcugguucgaaaaccgcggccucgucgaaugcaacaaccacuaccucugccucaacugccucacccuccuccucuccgucuccucccgcugccccaucugcaaaaugccccuccccacccgccuccgccccuccgccgcccccaccgccccccccgccggcgccggcgacaacacccgccccccccccuacucccccuaa

SEQ ID NO: 12766 - RNA, 300 nt, Artificial Sequence
  derived and/or modified CDS sequence (opt11) from LASV(G2723-SLE-2012;Clade IV)__AIT17320__Z
augggcaacaaacaagccaaagcccccgaagcccgcaacuccccccgcgccucccucauccccgacgccacccaccucggcccccaauucugcaaauccugcugguucgaaaacaaaggccucgucgaaugcaacaaccacuaccucugccucaacugccucacccuccuccucggcgucuccucccgcugccccaucugcaaaaugccccuccccacccgccuccgccccuccgccgcccccaccgccccccucgccgaagccggcgacaacacccgccccccccccuacucccccuaa

SEQ ID NO: 12767 - RNA, 300 nt, Artificial Sequence
  derived and/or modified CDS sequence (opt11) from LASV(G2868-SLE-2012;Clade IV)__AIT17326__Z
augggcaacaaacaauccaaagcccccgaaucccgcgacuccccccgcgccucccucauccccgacgccacccaccuaggcccccaauucugcaaauccugcugguucgaaaacaaaggccucgucgaaugcaacaaccacuaccucugccucaacugccucacccuccuccucuccgucuccaaccgcugccccaucugcaaaaugccccuccccaccaaacuccgccccuccgccacccccaccgccccccccacccgcgccgccgacuccauccgccccccccccuacucccccuaa

SEQ ID NO: 12768 - RNA, 300 nt, Artificial Sequence
  derived and/or modified CDS sequence (opt11) from LASV(G2903-SLE-2012;Clade IV)__AIT17330__Z
augggcaacaaacaagccaaagcccucgaauccaaaaacuccccccgcgccucccucauccccgacgccaccuaccucggcccccaauucugcaaauccugcugguucgaaaacaaaggccucgucgaaugcaacaaccacuaccucugccucaacugccucacccuccuccucuccgucuccaaccgcugccccaucugcaaaaugccccuccccacaaaacuccgcuccuccgccgcccccaccgccccccccaccggcgccgccgacggcaccaaacccccccccuacucccccuaa

SEQ ID NO: 12769 - RNA, 300 nt, Artificial Sequence
  derived and/or modified CDS sequence (opt11) from LASV(G3010-SLE-2013;Clade IV)__AIT17342__Z
augggcaacaaacaagccaaagccuccgaagcaaaagacuccccccgcgccucccucauccccgacgccacccaccucggcccccaauucugcaaauccugcugguucgaaaacaaaggccucgucgaaugcaacaaccacuaccucugccucaacugccucacacuccuccucuccgucuccaaccgcugccccaucugcaaaaugccccuccccaccaaacuccgccccuccaccgcccccaccgccccccaaaccggcgccgccgacuccauccgccccccccccuacucccccuaa

SEQ ID NO: 12770 - RNA, 300 nt, Artificial Sequence
  derived and/or modified CDS sequence (opt11) from LASV(G3016-SLE-2013;Clade IV)__AIT17346__Z
augggcaacaaacaagccaaagcccccgaaaccaaagacuccccccgcgccucccucauccccgacgccacccaccucggcccccaauucugcaaauccugcugguucgaaaacaaaggccucgucgaaugcaacaaccacuaccucugccucaacugccucacccuccuccucuccgucuccaaccgcugccccaucugcaaaaugccccuccccaccaaacuccgccccuccgccgcccccaccgccccccccgucggcgccgccgacuccacccgccccccccccuacucccccuaa

SEQ ID NO: 12771 - RNA, 300 nt, Artificial Sequence
  derived and/or modified CDS sequence (opt11) from LASV(G3148-SLE-2013;Clade IV)__AIT17362__Z
augggcaacaaacaagccaaagcccccgaauccaaagacuccccccgcgccucccucauccccgacgccacccaccucggcccccaauucugcaaauccugcugguucgaaaacaaaggccucgucgaaugcaacaaccacuaccucugccucaacugccucacccuccuccuauccgucuccaaccgcugccccaucugcaaaaugccccuccccaccaaacuccgccccuccgccgcccccaccgccccccccgccggcgccgccgacuccauccgccccccccccuacucccccuaa

SEQ ID NO: 12772 - RNA, 300 nt, Artificial Sequence
  derived and/or modified CDS sequence (opt11) from LASV(G3151-SLE-2013;Clade IV)__AIT17366__Z
augggcaacaaacaaaccaaaacccccgaagucaaagacuccccccgcgccucccucauccccgacgccacccaccucggcccccaauucugcaaauccugcugguucgaaaacaaaggccucgucgaaugcaacaaccacuaccucugccucaacugccucacccuccuccucuccgucuccaaccgcugccccaucugcaaaaugccccuccccaccaaacuccgccccuccgccgcccccaccgccccccccgcccgcgccgccgacgacacccgccccccccccuacucccccuaa

SEQ ID NO: 12773 - RNA, 300 nt, Artificial Sequence
  derived and/or modified CDS sequence (opt11) from LASV(G3206-SLE-2013;Clade IV)__AIT17376__Z
augggcaacaaacaagccaaagcccccgaauccaaagacuccccccgcgccucccucauccccgacgccaccuaccucggcccccaauucugcaaauccugcugguucgaaaacaaaggccucgucgaaugcaacaaccacuaccucugccucaacugccucacccuccuccucuccgucuccaaccgcugccccaucugcaaaaugccccuccccaccaaacuccgcuccuccgucgcccccaccgccccccccacccgcgccgccgacuccacccgccccccccccuacucccccuaa

SEQ ID NO: 12774 - RNA, 300 nt, Artificial Sequence
  derived and/or modified CDS sequence (opt11) from LASV(G3229-SLE-2013;Clade IV)__AIT17382__Z
augggcaacaaacaaaccaaaaccuccgaagucaaagacuccccccgcgccucccucauccccgacgccacccaccucggcccccaauucugcaaauccugcugguucgaaaacaaaggccucgucgaaugcaacaaccacuaccucugccucaacugccucacccuccuccucuccgucuccaaccgcugccccaucugcaaaaugccccuccccaccaaacuccgccccuccgccgcccccaccgccccccccgcccgcgccgccgacgacacccgccccccccccuacucccccuaa

SEQ ID NO: 12775 - RNA, 300 nt, Artificial Sequence
  derived and/or modified CDS sequence (opt11) from LASV(G3234-SLE-2013;Clade IV)__AIT17386__Z
augggcaacaaacaagccaaaacccccgaagcccgcgacuccccccgcgccucccucauccccgacgccacccaccucggcccccaauucugcaaauccugcugguucgaaaacaaaggccucgucgaaugcaacaaccacuaccucugccucaacugccucacccuccuccucuccgucuccucccgcugccccaucugcaaaaugccccuccccaccaaacuccgccccuccgccacccccaccgccccccccgccggcgccggcgacggcacccgccccccccccuacucccccuaa

SEQ ID NO: 12776 - RNA, 300 nt, Artificial Sequence
  derived and/or modified CDS sequence (opt11) from LASV(G3278-SLE-2013;Clade IV)__AIT17396__Z
augggcaacaaacaagucaaagcccccgaagcccgcaacuccccccgcgccucccucauccccgacgccacccaccucggcccccaauucugcaaauccugcugguucgaaaacaaaggccucgucgaaugcaacaaccacuaccucugccucaacugccucacccuccuccucggcgucuccucccgcugccccaucugcaaaaugccccuccccacccgccuccgccccuccgccgcccccaccgccccccccgccgaagccggcgacaacacccgccccccccccuacucccccuaa

SEQ ID NO: 12777 - RNA, 300 nt, Artificial Sequence
  derived and/or modified CDS sequence (opt11) from LASV(G502-SLE-2009;Clade IV)__AIT17124__Z
augggcaacaaacaagucaaaacccccgaagccaaagacuccccccgcgccucccucauccccgacgccacccaccucggcccccaauucugcaaauccugcugguucgaaaacaaaggccucgucgaaugcaacaaccacuaccucugccucaacugccucacccuccuccucuccgucggcaaccgcugccccaucugcaaaaugccccuccccaccaaacuccgccccuccgucacccccaccgccccccccacccgcgccgccgacuccaucggccccccccccuacucccccuaa

SEQ ID NO: 12778 - RNA, 300 nt, Artificial Sequence
  derived and/or modified CDS sequence (opt11) from LASV(G503-SLE-2009;Clade IV)__AIT17128__Z
augggcaacaaacaagccaaaacccccgaagccaaagacuccccccgcgccaaccucauccccgacgccacccaccucggcccccaauucugcaaauccugcugguucgaaaacaaaggccucgucgaaugcaacaaccacuaccucugccuaaacugccuaacccuccuccucuccgucuccaaccgcugccccaucugcaaaaugccccuccccaccaaacuccgccccuccgccgcccccaccgccccccccaccggcgccgccgacuccauccgccccccccccuacucccccuaa

SEQ ID NO: 12779 - RNA, 300 nt, Artificial Sequence
  derived and/or modified CDS sequence (opt11) from LASV(G610-SLE-2009;Clade IV)__AIT17132__Z
augggcaacaaacaagccaaagcccccgaagcccgcgacuccccccgcgccucccucauccccgacgccacccaccucggcccccaauucugcaaauccugcugguucgaaaacaaaggccucgucgaaugcaacaaccacuaccucugccucaacugccucacccuccuccucuccgucuccaaccgcugccccaucugcaaaaugccccuccccaccaaacuccgccccuccgccacccccaccgccccccccaccgaagccgccgacuccauccgccccccccccuaccgccccuaa

SEQ ID NO: 12780 - RNA, 300 nt, Artificial Sequence
  derived and/or modified CDS sequence (opt11) from LASV(G676-SLE-2009;Clade IV)__AIT17140__Z
augggcaacaaacaagccaaagcccccgaacccaaagacucaccccgcgccucccucauccccgacgccacccaccucggcccccaauucugcaaauccugcugguucgaaaacaaaggccuagucgaaugcaacaaccacuaccucugccucaacugccucacccuccuacucuccgucuccaaccgcugccccaucugcaaaaugccccuccccaccaaacuccgccccuccgccgcccccaccgccccccccgccggcgccgucgacuccacccgacccccccccuacucccccuaa

SEQ ID NO: 12781 - RNA, 300 nt, Artificial Sequence
  derived and/or modified CDS sequence (opt11) from LASV(G692-SLE-2009;Clade IV)__AIT17144__Z
augggcaacaaacaagccaaaacccccgaauccaaagacuccccccgcgccucccucauccccgacgccacccaccucggcccccaauucugcaaauccugcugguucgaaaacaaaggccucgucgaaugcaacaaccacuaccucugccucaacugccucacccuccuccucggcgucuccaaccgcugccccaucugcaaaaugccccuccccaccaaacuccgcuccuccgucgcccccaccgccccccccaccggcgccgucgacuccauccgccccccccccuacucccccuaa

SEQ ID NO: 12782 - RNA, 300 nt, Artificial Sequence
  derived and/or modified CDS sequence (opt11) from LASV(G733-SLE-2010;Clade IV)__AIT17152__Z
augggcaacaaacaagccaaaacccccgaaaccaaagacuccccccgcgccucacucauccccgacgccacccaccucggcccccaauucugcaaauccugcugguucgaaaacaaaggccucgucgaaugcaacaaccacuaccucugccucaacugccucacccuccuccucuccgucuccaaccgcugccccaucugcaaaaugccccuccccaccaaacuccgccccuccaccgcccccaccgccccccccgccggcgccgccgacaacacccgccccccccccuacucccccuaa

SEQ ID NO: 12783 - RNA, 300 nt, Artificial Sequence
  derived and/or modified CDS sequence (opt11) from LASV(G808-SLE-2010;Clade IV)__AIT17162__Z
augggcaacaaacaagccaaagccuccgaauccaaagacuccccccgcgccucccucauccccgacgccacccaccucggcccccaauucugcaaauccugcugguucgaaaacaaaggccucgucgaaugcaacaaccacuaccucugccucaacugccucacccuccuccucuccgucuccaaccgcugcccaaucugcaaaaugccccuccccaccaaacuccgccccuccgucacccccaccgccccccccacccgcaccgccgacaacacccgccccccccccuacucccccuaa

SEQ ID NO: 12784 - RNA, 300 nt, Artificial Sequence
  derived and/or modified CDS sequence (opt11) from LASV(Guinea Faranah;Clade IV)__AMZ00378__Z
augggcaaccgccaaaccaaagccaccgaagccaaagacuccccccgcgccucccucauccccgacgccacccaccucggcccccaauucugcaaauccugcugguucgaaaacaaaggccucgucgaaugcaacaaccacuaccucugccucaacugccucacccuccuccucuccgucuccucccgcugccccaucugcaaaaugccccuccccacccgccucaaauccuccaccaaccccaccgcccccuccgccaaaaccgaauccuccaucaaccccccccccuacucccccuaa

SEQ ID NO: 12785 - RNA, 300 nt, Artificial Sequence
  derived and/or modified CDS sequence (opt11) from LASV(GUINEA Z-185a;Clade IV)__AMZ00374__Z
augggcaacaaacaagccaaagcccccgaaaccaaaaacuccccccgcgccucccucauccccgacgccacccaccucggcccccaauucugcaaauccugcugguucgaaaacaaaggccucgucgaaugcaacaaccacuaccucugccucaacugccucacccuccuccucuccgucuccaaccgcugccccaucugcaaaaugccccuccccaccaaacuccgccccuccgccguccccaccgccccccccgcccaagucggcgaccgcacccgccccccccccuacucccccuaa

SEQ ID NO: 12786 - RNA, 312 nt, Artificial Sequence
  derived and/or modified CDS sequence (opt11) from MOPV/LASV reassortant(IGS-1;Clade IV)__AFY05533__Z
augggcaaaacccaauccaaaggccaacccuccaccaaccuacucaaagaaaccgaaccccgccaccccgucauccccgacgcccgcggcaccggccccgaauucugcaaauccugcugguucgaacgccgcggccucguccgcugcaacgaccacuaccucugccucaacugccucacccuccuccacaccgucuccgaccgcugccccaucugcaaacacaaacuccccuuccgccucgaacuccaaacccaacccaccgccccccccgaaaucccccccucccaaaaccccccccccuacucccccuaa

SEQ ID NO: 12787 - RNA, 300 nt, Artificial Sequence
  derived and/or modified CDS sequence (opt11) from LASV(LM032-SLE-2010;Clade IV)__AIT17800__Z
augggcaacaaacaagccaaagcccccgaagcuaaagacuccccccgcgccucccucauccccgacgccacccaccucggcccccaauucugcaaauccugcugguucgaaaacaaaggccucgucgaaugcaacaaccacuaccucugccucaacugccucacccuccuccucuccgucuccaaccgcugccccaucugcaaaaugccccuccccaccaaacuccgccccuccgccacccccaccgccccccccaccgaagccgccgacuccauccgccccccccccuaccaccccuaa

SEQ ID NO: 12788 - RNA, 300 nt, Artificial Sequence
  derived and/or modified CDS sequence (opt11) from LASV(LM222-SLE-2010;Clade IV)__AIT17804__Z
augggcaacaaacaagccaaagccuccgaagaaaaaaacuccccccgcgccucccucauccccgacgccacccaccucggcccccaauucugcaaauccugcugguucgaaaacaaaggccucgucgaaugcaacaaccacuaccucugccucaacugccucacccuccuccucuccgucuccaaccgcugccccaucugcaaaaugccccuccccaccaaacuccgccccuccaccacccccaccgccccccccaccggcgccgccgacuccauccgccccccccccuacucccccuaa

SEQ ID NO: 12789 - RNA, 300 nt, Artificial Sequence
  derived and/or modified CDS sequence (opt11) from LASV(LM395-SLE-2009;Clade IV)__AIT17808__Z
augggcaacaaacaagccaaagcccccgaaucaaaagacuccccccgcgccucccucauccccgacgccacccaccucggcccccaauucugcaaauccugcugguucgaaaacaaaggccucgucgaaugcaacaaccacuaccucugccucaacugccucacccuccuccucuccgucuccaaccgcugccccaucugcaaaaugccccuccccacccgccuccgccccuccgccgcccccaccgccccccccaccggcgccgccgacuccacccgccccccccccuacucccccuaa

SEQ ID NO: 12790 - RNA, 300 nt, Artificial Sequence
  derived and/or modified CDS sequence (opt11) from LASV(LM776-SLE-2012;Clade IV)__AIT17824__Z
augggcaacaaacaagccaaagccuccgaagaaaaaaacuccccccgcgccucccucauccccgacgccacccaccucggcccccaauucugcaaauccugcugguucgaaaacaaaggccuagucgaaugcaacaaccacuaccucugccucaacugccucacccuccuccucucagucuccaaccgcugccccaucugcaaaaugccccuccccaccaaacuccgccccuccaccacccccaccgccccccccaccggcgccgccgacuccauccgccccccccccuacucccccuaa

SEQ ID NO: 12791 - RNA, 300 nt, Artificial Sequence
  derived and/or modified CDS sequence (opt11) from LASV(Mad39;Clade IV)__ANH09743__Z
augggcaacaaacaagccaaagccuccgaagucgaagacggcccccgcgccucccucauccccgacgccacccaccucggcccccaauucugcaaauccugcugguucgaaaacaaaucccucgucgaaugcaacaaccacuaccucugccuaaacugccucacccuccuccucuccgucuccaaccgcugccccaucugcaaaaugccccuccccacccgccucaaacccuccgucguccccaccgccccccccacccgcgccggcgacggcacccgccccccccccuacucccccuaa

SEQ ID NO: 12792 - RNA, 300 nt, Artificial Sequence
  derived and/or modified CDS sequence (opt11) from LASV(Mad41;Clade IV)__ANH09745__Z
augggcaacaaacaaaccaaagcccccgaagucgaagacggcccccgcgccucccucauccccgacgccacccaccucggcccccaauucugcaaauccugcugguucgaaaacaaaggccucgucgaaugcaacaaccacuaccucugccucaacugccucacccuccuccucuccgucuccucccgcugccccaucugcaaaaugccccuccccacccgccucaaacccuccaucguccccaccgccccccccgcccgcaccggcgaaaacacccgccccccccccuacucccccuaa

SEQ ID NO: 12793 - RNA, 300 nt, Artificial Sequence
  derived and/or modified CDS sequence (opt11) from LASV(Mad63;Clade IV)__ANH09749__Z
augggcaacaaacaagccaaagcccccgaagucgaagacggcccccgcgccucccucauccccgacgccacccaccucggcccccaauucugcaaauccugcugguucgaaaaccgcggccucgucgaaugcaacaaccacuaccucugccucaacugccucacccuccuccucuccgucuccaaccgcugccccaucugcaaaaugccccuccccacccgccucaaacccuccgucguccccaccgccccccccaccggcgccggcggcgacacccgccccccccccuacucccccuaa

SEQ ID NO: 12794 - RNA, 300 nt, Artificial Sequence
  derived and/or modified CDS sequence (opt11) from LASV(Mad69;Clade IV)__ANH09751__Z
augggcaacaaacaagccaaagcccccaaagccgaagacggcccccgcgccucccucauccccgacgccacccaccucggcccccaauucugcaaauccugcugguucgaaaacaaaggccucgucgaaugcaacaaccacuaccucugccucaacugccucacccuccuacucuccgucuccaaccgcugccccaucugcaaaaugccccuccccacccgccuaaaacccuccguaguccccaccgccccccccaccggcgccggcggcgacacccgcccccccccccacucccccuaa

SEQ ID NO: 12795 - RNA, 300 nt, Artificial Sequence
  derived and/or modified CDS sequence (opt11) from LASV(Mad83;Clade IV)__ANH09753__Z
augggcaacaaacaagccaaagccuccgaagccgaagacggcccccgcgccucccucauccccgacgccacccaccucggcccccaauucugcaaauccugcugguucgaaaacaaaggccucgucgaaugcaacaaccacuaccucugccucaacugccucacccuccuccucuccgucuccucccgcugccccaucugcaaaaugccccuccccacccgccuccgccccuccgucguccccaccgcccccuccgccggcgccggcgacggcacccgccccccccccuacucccccuaa

SEQ ID NO: 12796 - RNA, 300 nt, Artificial Sequence
  derived and/or modified CDS sequence (opt11) from LASV(NL;Clade IV)__AAO59510__Z
augggcaacaaacaaaccaaagcccccgaagccaaagacuccccccgcgccucccucauccccgacgccaccuaccucggcccccaauucugcaaauccugcugguucgaaaacaaaggccucgucgaaugcaacaaccacuaccucugccucaacugccucacccuccuccucuccgucuccaaccgcugccccaucugcaaaaugccccuccccaccaaacuccgccccuccgccgcccccaccgccccccccgccggcgccgcccacuccgcccgccccccccccuacucccccuaa

SEQ ID NO: 12797 - RNA, 300 nt, Artificial Sequence
  derived and/or modified CDS sequence (opt11) from LASV(Z0947-SLE-2011;Clade IV)__AIT17838__Z
augggcaacaaacaagccaaaguccccgaauccaaagacuccccccgcgccucccucauccccgacgccacccaccucggcccccaauucugcaaauccugcugguucgaaaacaaaggccucgucgaaugcaacaaccacuaccucugccucaacugccucacccuccuccucuccgucuccaaccgcugccccaucugcaaaaugccccuccccaccaaacucaaacccuccgccgcccccaccgccccccccaccggcgccgccgacuccauccgccccccccccuacuccccauaa

SEQ ID NO: 12798 - RNA, 300 nt, Artificial Sequence
  derived and/or modified CDS sequence (opt11) from LASV(Z0948-SLE-2011;Clade IV)__AIT17842__Z
augggcaacaaacaagccaaaguccccgaauccaaagacuccccccgcgccucccucauccccgacgccacccaccuaggcccccaauucugcaaauccugcugguucgaaaacaaaggccucgucgaaugcaacaaccacuaccucugccucaacugccucacccuacuccucuccgucuccaaccgcugccccaucugcaaaaugccccuccccaccaaacuccgccccuccgccgcccccaccgccccccccaccggcgucgccgacucaauccgccccccccccuacucccccuaa

SEQ ID NO: 12799 - RNA, 300 nt, Artificial Sequence
  derived and/or modified CDS sequence (opt11) from LASV(Z148;Clade IV)__AAT49005__Z
augggcaacaaacaagccaaagcccccgaaaccaaagacuccccccgcgccucccucauccccgacgccacccaccucggcccccaauucugcaaauccugcugguucgaaaacaaaggccucgucgaaugcaacaaccacuaccucugccucaacugccucacccuccuccucuccgucuccaaccgcugccccaucugcaaaaugccccuccccacccgccuccgccccuccgccguccccaccgccccccccgcccccgccggcgaccgcaccaaacccccccccuacucccccuaa

SEQ ID NO: 12800 - RNA, 300 nt, Artificial Sequence
  derived and/or modified CDS sequence (opt11) from LASV(Bamba-R114;Clade V)__AHC95547__Z
augggcaaccgccaagccaaagaccccaaagucgaauccuccccccgcgccucccucauccccgacgccacccaccucggcccccaauucugcaaauccugcugguucgaaaacaaaggccucgucgaaugcaacaaccacuaccucugccucaacugccucucccuccuccucuccgucuccaaccgcugccccaucugcaaaaugccccuccccacccgccuccgccccaccaccaugcccaccgccccccaaaucaucaaagaaggcaccaccaaccccccccccuacacccccuaa

SEQ ID NO: 12801 - RNA, 300 nt, Artificial Sequence
  derived and/or modified CDS sequence (opt11) from LASV(Komina-R16;Clade V)__AHC95545__Z
augggcaacaaacaagccaaagaccccaaaaccgaauccuccccccgcgccucccuaauccccgacgccacccaccucggcccccaauucugcaaauccugcugguucgaaaacaaaggccucgucgaaugcaacaaccacuaccucugccucaacugccucucccuccuccucuccgucuccaaccgcugccccaucugcaaaaugccccuccccaccaaacucaaacccaucaccacccccaccgccccccaaaucacccgcgaauccaucaccaaccccccccccuacacccccuaa

SEQ ID NO: 12802 - RNA, 300 nt, Artificial Sequence
  derived and/or modified CDS sequence (opt11) from LASV(Alzey;Clade VI)__SCA79103__Z
augggcgcccgccaaaccaaacaaccccaaaucgaaggcucaccccgcgccucccucguccccgacgccucccaccucggcccccaauucugcaaauccugcugguucgaaaacaaaggccucgucgaaugcaacaaccacuaccucugccucaacugccucucccuccuccucuccgucuccaaccgcugccccaucugcaaaaugccccuccccaccaaacuccgcgucuccuccgcccccuccgccccccccgccgccaccgcccaacccggcacccccccccccuacucccccuaa

SEQ ID NO: 12803 - RNA, 300 nt, Artificial Sequence
  derived and/or modified CDS sequence (opt11) from LASV(NIGERIA IKEJI;Clade II)__AMZ00370__Z
augggcaacaaacaagccaaaucaacccgcgucgacgaacaacaacgcgcccaccucguccccgacgccucccaccucggcccccaauucugcaaauccugcugguucgaaaacaaaggccucgucgaaugcaacaaccacuaccucugccucaacugccucucccuccuccucuccgucuccucccgcugccccaucugcaaaaugccccuccccaccaaacucaaaaccuccacccaacccuccgccccccgcgccgaagucccccccuccaccacccccccccccuacucccccuaa

SEQ ID NO: 12804 - RNA, 576 nt, Artificial Sequence
  mRNA product Design a-1 comprising derived and/or modified sequence from LASV(Josiah;Clade IV)__ADY11072/NP_694871__Z (wt)
gggagagucccgcagucggcguccagcggcucugcuuguucgugugugugucguugcaggccuuauucaagcuuaccaugggaaacaagcaagccaaagccccagaaucaaaagacaguccgagagccagccugaucccagaugccacacaucuagggccacaguucuguaagagcugcugguucgaaaacaagggccugguugagugcaacaaccacuaucugugucucaacugccucaccuuacuucuaagugucagcaacaggugucccauuugcaagaugccucuccccacaaaacugagaccaucagccgcuccaacagcaccuccaaccggagcagcggacagcaucagacccccacccuacagucccugaggacuagucccuguucccagagcccacuuuuuuuucuuuuuuugaaauaaaauagccugucuuucagaucuaaaaaaaaaaaaaaaaaaaaaaaaaaaaaaaaaaaaaaaaaaaaaaaaaaaaaaaaaaaaaaaaugcaucccccccccccccccccccccccccccccccaaaggcucuuuucagagccaccagaauu

SEQ ID NO: 12805 - RNA, 579 nt, Artificial Sequence
  mRNA product Design a-1 comprising derived and/or modified sequence from LASV(Pinneo-NIG-1969;Clade I)__AIT17834__Z (wt)
gggagagucccgcagucggcguccagcggcucugcuuguucgugugugugucguugcaggccuuauucaagcuuaccaugggcaacaagcagaccagguccccacccaaaccagagcaccccagaccaacccugcuacccgacgcaucccaccugggcccccaauucugcaagagcugcugguuugagaacaagggacugguggaguguaauaaccauuaccucugucuaaacugucucacacugcuucucagcgugagcgacagauguccuauuuguaagaugccccuccccaccaagcuggcaguccgaacccaaccaagugcacccccacucaaccagggcaacacucaauccuccccgccccccuacagccccuaaggacuagucccuguucccagagcccacuuuuuuuucuuuuuuugaaauaaaauagccugucuuucagaucuaaaaaaaaaaaaaaaaaaaaaaaaaaaaaaaaaaaaaaaaaaaaaaaaaaaaaaaaaaaaaaaaugcaucccccccccccccccccccccccccccccccaaaggcucuuuucagagccaccagaauu

SEQ ID NO: 12806 - RNA, 576 nt, Artificial Sequence
  mRNA product Design a-1 comprising derived and/or modified sequence from LASV(Nig08-04;Clade II)__ADU56612__Z (wt)
gggagagucccgcagucggcguccagcggcucugcuuguucgugugugugucguugcaggccuuauucaagcuuaccaugggcaacaggcaaaccaggccaacugaagccacugaacagagcagggcucacuugguaccagacgcaucccaccugggaccccaauucugcaagagcuguugguuugaaaacagaggucuaguggagugcaacaaccacuaccugugucucaacugucucaguuugcuccucagugucagcagcagauguccaaucugcaagaugccccuucccaccaggcugaaggcaucagcacagcccagcgcacccccaaccgaagcaccccagaacacaacacccccaccauacaccccauaaggacuagucccuguucccagagcccacuuuuuuuucuuuuuuugaaauaaaauagccugucuuucagaucuaaaaaaaaaaaaaaaaaaaaaaaaaaaaaaaaaaaaaaaaaaaaaaaaaaaaaaaaaaaaaaaaugcaucccccccccccccccccccccccccccccccaaaggcucuuuucagagccaccagaauu

SEQ ID NO: 12807 - RNA, 576 nt, Artificial Sequence
  mRNA product Design a-1 comprising derived and/or modified sequence from LASV(Nig08-A19;Clade III)__ADU56620__Z (wt)
gggagagucccgcagucggcguccagcggcucugcuuguucgugugugugucguugcaggccuuauucaagcuuaccauggguggcaaacacaccaaaccacagagagaauccaacagucccagagccucucuaauucccgaugcaacacaccugggcccucaauuuugcaagaguuguugguuugagaacaaaggucugguggagugcaacaaccauuacuuaugccucaacugccuuacuuuacuccugucugucagcaacagaugccccaucuguaagaugccccuccccacgaggcugagagcaucaaccaacccaacagcaccccaggucgaacaagucggcccuacaaauccuccaccauacagucccuaaggacuagucccuguucccagagcccacuuuuuuuucuuuuuuugaaauaaaauagccugucuuucagaucuaaaaaaaaaaaaaaaaaaaaaaaaaaaaaaaaaaaaaaaaaaaaaaaaaaaaaaaaaaaaaaaaugcaucccccccccccccccccccccccccccccccaaaggcucuuuucagagccaccagaauu

SEQ ID NO: 12808 - RNA, 576 nt, Artificial Sequence
  mRNA product Design a-1 comprising derived and/or modified sequence from LASV(AV;Clade V)__CCA30312__Z (wt)
gggagagucccgcagucggcguccagcggcucugcuuguucgugugugugucguugcaggccuuauucaagcuuaccauggggaacagacaagccaaaaauccagagguggagaacagcccaagggcuagucuaauuccggaugccacgcaccuugggccacaguucugcaagagcugcugguucgaaaacaaagguuuaguugaguguaauaaccacuaucuuugccucaacugccucuccuugcuuuuaagcgucagcaacaggugcccuaucugcaagaugccccuucccacgaggcugagaccgacaaccacaccaacagcgccacagaucaucaaggaaaacaccaccaaccccccgccauacacacccuaaggacuagucccuguucccagagcccacuuuuuuuucuuuuuuugaaauaaaauagccugucuuucagaucuaaaaaaaaaaaaaaaaaaaaaaaaaaaaaaaaaaaaaaaaaaaaaaaaaaaaaaaaaaaaaaaaugcaucccccccccccccccccccccccccccccccaaaggcucuuuucagagccaccagaauu

SEQ ID NO: 12809 - RNA, 576 nt, Artificial Sequence
  mRNA product Design a-1 comprising derived and/or modified sequence from LASV(Togo/2016/7082;Clade VI)__AMR44579__Z (wt)
gggagagucccgcagucggcguccagcggcucugcuuguucgugugugugucguugcaggccuuauucaagcuuaccaugggagccagacagaccaagcaaccucagauugagggaucuccuagagccucucuggugcccgaugcaagccaucuaggaccccaguucugcaagagcugcugguuugagaacaaagggcuuguggaguguaacaaucauuaccuuugccucaauugccucagccuccuacucagugucagcaacaggugcccuaucugcaagaugccccuccccaccaagcugagagugucaagcgcucccagugcacccccagcggccacggcccaacccggaacuccuccaccauacagccccuagggacuagucccuguucccagagcccacuuuuuuuucuuuuuuugaaauaaaauagccugucuuucagaucuaaaaaaaaaaaaaaaaaaaaaaaaaaaaaaaaaaaaaaaaaaaaaaaaaaaaaaaaaaaaaaaaugcaucccccccccccccccccccccccccccccccaaaggcucuuuucagagccaccagaauu

SEQ ID NO: 12810 - RNA, 576 nt, Artificial Sequence
  mRNA product Design a-1 comprising derived and/or modified sequence from LASV(KAK-428;Clade n.d. (VII))__ANH09761__Z (wt)
gggagagucccgcagucggcguccagcggcucugcuuguucgugugugugucguugcaggccuuauucaagcuuaccaugggcaacaaagggaccaaacccacccagaacucagaacccagcagggccaaccuagugccugaugcaagcuacuuaggaccccaguucugcaagaguugcugguuugaaaacaaagggcugguggaguguaacaaucauuaucucugccucaacugucucacaaugcuucucucugucagcaacaggugcccaaucugcaaaaugccgcuucccaccaaaauaaaggccucaggaagccccagcgcuccuccgaccgaggccaacuccgcagucagccccccuccauacacccccuaaggacuagucccuguucccagagcccacuuuuuuuucuuuuuuugaaauaaaauagccugucuuucagaucuaaaaaaaaaaaaaaaaaaaaaaaaaaaaaaaaaaaaaaaaaaaaaaaaaaaaaaaaaaaaaaaaugcaucccccccccccccccccccccccccccccccaaaggcucuuuucagagccaccagaauu

SEQ ID NO: 12811 - RNA, 576 nt, Artificial Sequence
  mRNA product Design a-1 comprising derived and/or modified sequence from LASV(ISTH0009-NIG-2011;Clade II)__AIT17402__Z (wt)
gggagagucccgcagucggcguccagcggcucugcuuguucgugugugugucguugcaggccuuauucaagcuuaccaugggcaacagacaggcuaaaucgacaaaagucgaugaacaucaaagagcucaucuagugccagaugcaucccaucuaggcccccaguucugcaagaguugcugguuugagaacagaggguugguagaguguaacaaucacuaccugugucucaacugucucagccugcuucucagcgucagcaguagaugcccgaucugcaagaugccccuucccaccaagcuaaaggcagcagcacagccgagcgcaccaucaaccgagacgauccagaacacaacaccuccaccguacaccccauaaggacuagucccuguucccagagcccacuuuuuuuucuuuuuuugaaauaaaauagccugucuuucagaucuaaaaaaaaaaaaaaaaaaaaaaaaaaaaaaaaaaaaaaaaaaaaaaaaaaaaaaaaaaaaaaaaugcaucccccccccccccccccccccccccccccccaaaggcucuuuucagagccaccagaauu

SEQ ID NO: 12812 - RNA, 576 nt, Artificial Sequence
  mRNA product Design a-1 comprising derived and/or modified sequence from LASV(ISTH2010-NIG-2012;Clade II)__AIT17480__Z (wt)
gggagagucccgcagucggcguccagcggcucugcuuguucgugugugugucguugcaggccuuauucaagcuuaccauggguaacagacaugccaaaucgacaaaagucgaugaacaucaaagagcucaucuagugccagaugcaucccaucuaggcccccaguucugcaagaguugcugguuugagaauagaggguugguagagugcaacaaucacuaccugugucucaacugucucagccugcuccucagugucagcagcagaugcccgaucugcaagaugccccuucccaccaagcuaaaggcagcagcacagccgagcgcaccauccaccgaggugauccagagcacaacaccuccaccauacaccccauaaggacuagucccuguucccagagcccacuuuuuuuucuuuuuuugaaauaaaauagccugucuuucagaucuaaaaaaaaaaaaaaaaaaaaaaaaaaaaaaaaaaaaaaaaaaaaaaaaaaaaaaaaaaaaaaaaugcaucccccccccccccccccccccccccccccccaaaggcucuuuucagagccaccagaauu

SEQ ID NO: 12813 - RNA, 576 nt, Artificial Sequence
  mRNA product Design a-1 comprising derived and/or modified sequence from LASV(Lassa virus/H.sapiens-wt/NGA/2016/ISTH_0017;Clade II)__AVO03713__Z (wt)
gggagagucccgcagucggcguccagcggcucugcuuguucgugugugugucguugcaggccuuauucaagcuuaccaugggcaauagacaggccaagucgacaaaagucgaugaacaucaaagagcucaucuagugccagaugcaucccaucuaggcccccaguucugcaaaaguugcugguuugagaacaggggguuaguagagugcaacaaucacuaccugugucucaacugucucagccuacuccucagcgucaguagcagaugcccgaucugcaagaugccccuucccaccaagcuaaaggcggcaacacagccgagcgcaccaucaaccgaggugaaccagaauacaacaccuccaccguacacuccaugaggacuagucccuguucccagagcccacuuuuuuuucuuuuuuugaaauaaaauagccugucuuucagaucuaaaaaaaaaaaaaaaaaaaaaaaaaaaaaaaaaaaaaaaaaaaaaaaaaaaaaaaaaaaaaaaaugcaucccccccccccccccccccccccccccccccaaaggcucuuuucagagccaccagaauu

SEQ ID NO: 12814 - RNA, 576 nt, Artificial Sequence
  mRNA product Design a-1 comprising derived and/or modified sequence from LASV(Lassa virus/H.sapiens-wt/NGA/2018/ISTH_0959;Clade II)__AVV65084__Z (wt)
gggagagucccgcagucggcguccagcggcucugcuuguucgugugugugucguugcaggccuuauucaagcuuaccaugggcaacaaacaggccaaaucgacaaaagucgacgaacaucaaagggcucaucuaguaccggaugcaucccaucuaggcccccaguucugcaagaguugcugguuugagaacagaggguugguagagugcaacaaucacuaccugugucucaacugucucagccugcuucucagugucagcagcagaugcccgaucugcaagaugccccuucccaccaagcuaaaggcagcagcacagccgagcgcaccaucaacagaggcgauccagagcacaacaccuccaccguacacuccauaaggacuagucccuguucccagagcccacuuuuuuuucuuuuuuugaaauaaaauagccugucuuucagaucuaaaaaaaaaaaaaaaaaaaaaaaaaaaaaaaaaaaaaaaaaaaaaaaaaaaaaaaaaaaaaaaaugcaucccccccccccccccccccccccccccccccaaaggcucuuuucagagccaccagaauu

SEQ ID NO: 12815 - RNA, 576 nt, Artificial Sequence
  mRNA product Design a-1 comprising derived and/or modified sequence from LASV(LASV003-NIG-2008;Clade II)__AIT17578__Z (wt)
gggagagucccgcagucggcguccagcggcucugcuuguucgugugugugucguugcaggccuuauucaagcuuaccaugggcaacagacaggcuaaaucaacaaaagucgaugaacaucaaagagcucaucuagugccagaugcaucccaucuaggcccccaguuuugcaaaaguugcugguuugagaacaagggguugguggagugcaacaaccacuaccugugucucaacugucucagccugcuccucagcgucagcaguagaugcccgaucugcaagaugccccuucccaccaagcugagggcagcagcacagccgagcgcacccucaacugagucggcucagaacacagcaccuccaccguaugccccaugaggacuagucccuguucccagagcccacuuuuuuuucuuuuuuugaaauaaaauagccugucuuucagaucuaaaaaaaaaaaaaaaaaaaaaaaaaaaaaaaaaaaaaaaaaaaaaaaaaaaaaaaaaaaaaaaaugcaucccccccccccccccccccccccccccccccaaaggcucuuuucagagccaccagaauu

SEQ ID NO: 12816 - RNA, 576 nt, Artificial Sequence
  mRNA product Design a-1 comprising derived and/or modified sequence from LASV(LASV035-NIG-2009;Clade II)__AIT17586__Z (wt)
gggagagucccgcagucggcguccagcggcucugcuuguucgugugugugucguugcaggccuuauucaagcuuaccaugggcaacaaacaggccaaaucgacaaaagucgaugaacaucaaagagcucaucuagugccagaugcaucucaucuaggcccccaguucuguaagagcugcugguuugagaacagagggcugguagagugcaacaaccacuaccugugucucaacugucucagccugcuucucagcgucagcagcagguguccgaucugcaaaaugccccuucccaccaggcugaaggcagcagcacagccgagcgcacccucaaccgaggugacccagaacacaacaccuccaccguacaccccgugaggacuagucccuguucccagagcccacuuuuuuuucuuuuuuugaaauaaaauagccugucuuucagaucuaaaaaaaaaaaaaaaaaaaaaaaaaaaaaaaaaaaaaaaaaaaaaaaaaaaaaaaaaaaaaaaaugcaucccccccccccccccccccccccccccccccaaaggcucuuuucagagccaccagaauu

SEQ ID NO: 12817 - RNA, 576 nt, Artificial Sequence
  mRNA product Design a-1 comprising derived and/or modified sequence from LASV(LASV1000-NIG-2009;Clade II)__AIT17780__Z (wt)
gggagagucccgcagucggcguccagcggcucugcuuguucgugugugugucguugcaggccuuauucaagcuuaccaugggcaacagacagaccaaaucgacaaaagucgaugaacaucaaagagcuuaucuagugccagaugcaucccuucuaggcccccaguucugcaagaguugcugguuugagaacaaaggguugguagaaugcaacaaucacuaccugugucuuaacugucucagccugcuccucagcgucagcagcagaugcccgaucugcaagaugccucuucccaccaggcuaaaggcagcagcacagccgagugcaccaccaacugaggcgauccagaacacaacaccuccaccguacaccccauaaggacuagucccuguucccagagcccacuuuuuuuucuuuuuuugaaauaaaauagccugucuuucagaucuaaaaaaaaaaaaaaaaaaaaaaaaaaaaaaaaaaaaaaaaaaaaaaaaaaaaaaaaaaaaaaaaugcaucccccccccccccccccccccccccccccccaaaggcucuuuucagagccaccagaauu

SEQ ID NO: 12818 - RNA, 576 nt, Artificial Sequence
  mRNA product Design a-1 comprising derived and/or modified sequence from LASV(LASV221-NIG-2010;Clade II)__AIT17622__Z (wt)
gggagagucccgcagucggcguccagcggcucugcuuguucgugugugugucguugcaggccuuauucaagcuuaccaugggcaacagacaggccaaaucgacaaaagucgaugaacaucaaagagcucaucuagugccagaugcaucccaucucggcccucaauucugcaagaguugcugguuugagaacagagggcugguagagugcaacaaucacuaccugugucucaacugucucagccugcuccucagcgucagcagcagaugcccgaucugcaagaugccccuucccaccaagcuaaaagcagcaacacagccgagcgcaccaucaaccgaagugacccagaacacaauaccuccaccauacuccccaugaggacuagucccuguucccagagcccacuuuuuuuucuuuuuuugaaauaaaauagccugucuuucagaucuaaaaaaaaaaaaaaaaaaaaaaaaaaaaaaaaaaaaaaaaaaaaaaaaaaaaaaaaaaaaaaaaugcaucccccccccccccccccccccccccccccccaaaggcucuuuucagagccaccagaauu

SEQ ID NO: 12819 - RNA, 576 nt, Artificial Sequence
  mRNA product Design a-1 comprising derived and/or modified sequence from LASV(LASV237-NIG-2010;Clade II)__AIT17636__Z (wt)
gggagagucccgcagucggcguccagcggcucugcuuguucgugugugugucguugcaggccuuauucaagcuuaccaugggcaacagacaggcuaaaucgacaaaagucgaugaacaucaaagagcucaucuagugccagaugcaucccaucuaggcccccaguucugcaagaguuguugguuugagaacagaggguugguagaguguaacaaucacuaccugugucucaacugucucagccugcuucucagcgucagcaguagaugcccgaucugcaagaugccccuucccaccaagcuaaaggcagcagcacagccgagcgcaccaucaaucgagacgauccagaacacaacaccuccuccguacaccccauaaggacuagucccuguucccagagcccacuuuuuuuucuuuuuuugaaauaaaauagccugucuuucagaucuaaaaaaaaaaaaaaaaaaaaaaaaaaaaaaaaaaaaaaaaaaaaaaaaaaaaaaaaaaaaaaaaugcaucccccccccccccccccccccccccccccccaaaggcucuuuucagagccaccagaauu

SEQ ID NO: 12820 - RNA, 576 nt, Artificial Sequence
  mRNA product Design a-1 comprising derived and/or modified sequence from LASV(LASV253-NIG-2011;Clade II)__AIT17668__Z (wt)
gggagagucccgcagucggcguccagcggcucugcuuguucgugugugugucguugcaggccuuauucaagcuuaccauggguaacagacaggccaaaucaacaaaagucgaugaacaucaaagagcucaucuagugccagaugcaucccaucuaggcccccaguuuugcaaaaguugcugguuugagaacaagggguugguugagugcaacaaccacuaccugugucucaacugucucagccugcuccuuagcguuagcagcagaugcccgauuugcaagaugccccuccccaccaagcuaaagacaacagcacagccaagugcacccccgacugaggcggccaagaacacagcaccuccaccguaugccccaugaggacuagucccuguucccagagcccacuuuuuuuucuuuuuuugaaauaaaauagccugucuuucagaucuaaaaaaaaaaaaaaaaaaaaaaaaaaaaaaaaaaaaaaaaaaaaaaaaaaaaaaaaaaaaaaaaugcaucccccccccccccccccccccccccccccccaaaggcucuuuucagagccaccagaauu

SEQ ID NO: 12821 - RNA, 576 nt, Artificial Sequence
  mRNA product Design a-1 comprising derived and/or modified sequence from LASV(G1180-SLE-2010;Clade IV)__AIT17166__Z (wt)
gggagagucccgcagucggcguccagcggcucugcuuguucgugugugugucguugcaggccuuauucaagcuuaccaugggaaacaagcaagccaaagccccggaagcaaaagacaguccgagagccagccugaucccagaugccacacaccuagggccacaguuuugcaagagcugcugguucgaaaccaagggccugguugagugcaacaaccacuaucuaugucucaauugccucacuuuacuucuaagugucagcaauaggugccccauuugcaagaugccccuucccacaaaacugagaccgucagccacuccaacggcacccccaaccgaagcugcggacagcaucggacccccacccuacagucccugaggacuagucccuguucccagagcccacuuuuuuuucuuuuuuugaaauaaaauagccugucuuucagaucuaaaaaaaaaaaaaaaaaaaaaaaaaaaaaaaaaaaaaaaaaaaaaaaaaaaaaaaaaaaaaaaaugcaucccccccccccccccccccccccccccccccaaaggcucuuuucagagccaccagaauu

SEQ ID NO: 12822 - RNA, 576 nt, Artificial Sequence
  mRNA product Design a-1 comprising derived and/or modified sequence from LASV(G1442-SLE-2011;Clade IV)__AIT17178__Z (wt)
gggagagucccgcagucggcguccagcggcucugcuuguucgugugugugucguugcaggccuuauucaagcuuaccauggggaacaagcaagccaaagcuucagaagcaaaagacagcccgagggcuagucugauuccagaugccacacaccuaggaccacaguucuguaagagcuguugguuugagaacaagggccugguugaaugcaacaaucacuaucugugucucaacugccucagucugcuucugagugucagcagcaggugccccaucugcaaaaugccccucccgacaagacugaggccaucaacagccccaacagcacccccagccagagcaggggauaacaucaaacccccacccuacagucccugaggacuagucccuguucccagagcccacuuuuuuuucuuuuuuugaaauaaaauagccugucuuucagaucuaaaaaaaaaaaaaaaaaaaaaaaaaaaaaaaaaaaaaaaaaaaaaaaaaaaaaaaaaaaaaaaaugcaucccccccccccccccccccccccccccccccaaaggcucuuuucagagccaccagaauu

SEQ ID NO: 12823 - RNA, 576 nt, Artificial Sequence
  mRNA product Design a-1 comprising derived and/or modified sequence from LASV(G502-SLE-2009;Clade IV)__AIT17124__Z (wt)
gggagagucccgcagucggcguccagcggcucugcuuguucgugugugugucguugcaggccuuauucaagcuuaccaugggaaacaagcaagucaaaaccccggaagcaaaagacaguccgagagccagccugaucccagaugccacacaccuagggccacaguucugcaagagcugcugguucgaaaacaagggccugguugagugcaacaaccacuaucugugucucaacugccucacuuuacuucuaaguguuggcaacaggugccccauuugcaagaugccccuucccacaaaacugagaccaucagucacuccaacagcacccccaaccagagcagcggacagcaucggacccccacccuacagucccugaggacuagucccuguucccagagcccacuuuuuuuucuuuuuuugaaauaaaauagccugucuuucagaucuaaaaaaaaaaaaaaaaaaaaaaaaaaaaaaaaaaaaaaaaaaaaaaaaaaaaaaaaaaaaaaaaugcaucccccccccccccccccccccccccccccccaaaggcucuuuucagagccaccagaauu

SEQ ID NO: 12824 - RNA, 576 nt, Artificial Sequence
  mRNA product Design a-1 comprising derived and/or modified sequence from LASV(G733-SLE-2010;Clade IV)__AIT17152__Z (wt)
gggagagucccgcagucggcguccagcggcucugcuuguucgugugugugucguugcaggccuuauucaagcuuaccaugggaaacaagcaagccaagaccccagaaacaaaagacaguccgagagccagccugaucccagaugccacacaccuagggccacaguuuugcaagagcugcugguucgaaaacaagggccugguugagugcaauaaccacuaucugugccucaauugucuuacccuacuucuaagugucagcaacaggugucccauuugcaagaugccucuccccacaaaacugagaccaucaaccgccccaacagcacccccagccggagcagcggacaacaccagacccccacccuauagccccugaggacuagucccuguucccagagcccacuuuuuuuucuuuuuuugaaauaaaauagccugucuuucagaucuaaaaaaaaaaaaaaaaaaaaaaaaaaaaaaaaaaaaaaaaaaaaaaaaaaaaaaaaaaaaaaaaugcaucccccccccccccccccccccccccccccccaaaggcucuuuucagagccaccagaauu

SEQ ID NO: 12825 - RNA, 588 nt, Artificial Sequence
  mRNA product Design a-1 comprising derived and/or modified sequence from MOPV/LASV reassortant(IGS-1;Clade IV)__AFY05533__Z (wt)
gggagagucccgcagucggcguccagcggcucugcuuguucgugugugugucguugcaggccuuauucaagcuuaccauggggaaaacgcaguccaagggacagcccagcacaaaucuccucaaggagacagaaccaaggcauccaguaauaccagaugccaggggaacuggcccugaauucugcaagagcugcugguucgaaaggaggggguuagucaggugcaacgaucacuaccuauguuugaacugucuuacacuuuuacacacagugucagauaggugccccaucugcaaacacaaacuacccuucagacuagagcuccagacccagccgacagcaccaccagaaaucccaccaucccaaaaucccccacccuacagccccugaggacuagucccuguucccagagcccacuuuuuuuucuuuuuuugaaauaaaauagccugucuuucagaucuaaaaaaaaaaaaaaaaaaaaaaaaaaaaaaaaaaaaaaaaaaaaaaaaaaaaaaaaaaaaaaaaugcaucccccccccccccccccccccccccccccccaaaggcucuuuucagagccaccagaauu

SEQ ID NO: 12826 - RNA, 576 nt, Artificial Sequence
  mRNA product Design a-1 comprising derived and/or modified sequence from LASV(LM776-SLE-2012;Clade IV)__AIT17824__Z (wt)
gggagagucccgcagucggcguccagcggcucugcuuguucgugugugugucguugcaggccuuauucaagcuuaccaugggaaacaagcaagccaaagccucagaagaaaaaaacaguccgagagccagccugauuccagaugccacacaccuagggccacaauuuugcaagagcugcugguucgaaaacaagggccugguugagugcaacaaccacuaucugugucucaacugccucaccuuacuuuuaagugucagcaacaggugccccaucugcaagaugccucuucccacaaaacugagaccaucaaccacuccaacagcaccuccaaccggagcagcagacagcaucagacccccaccuuacagucccugaggacuagucccuguucccagagcccacuuuuuuuucuuuuuuugaaauaaaauagccugucuuucagaucuaaaaaaaaaaaaaaaaaaaaaaaaaaaaaaaaaaaaaaaaaaaaaaaaaaaaaaaaaaaaaaaaugcaucccccccccccccccccccccccccccccccaaaggcucuuuucagagccaccagaauu

SEQ ID NO: 12827 - RNA, 576 nt, Artificial Sequence
  mRNA product Design a-1 comprising derived and/or modified sequence from LASV(Mad39;Clade IV)__ANH09743__Z (wt)
gggagagucccgcagucggcguccagcggcucugcuuguucgugugugugucguugcaggccuuauucaagcuuaccaugggaaacaagcaggccaaagccucagaaguggaggaugguccaagggccagucugaucccagaugccacacaccuggggccacaguucugcaagagcugcugguucgaaaauaagagcuugguugagugcaacaaccauuaucugugccucaacugccucacucugcuucugagcgucagcaacaggugccccaucugcaaaaugccucucccaacaagacugaaaccaucagucgucccaacagcaccccccaccagagcaggagacggcaccaggcccccacccuacagucccuaaggacuagucccuguucccagagcccacuuuuuuuucuuuuuuugaaauaaaauagccugucuuucagaucuaaaaaaaaaaaaaaaaaaaaaaaaaaaaaaaaaaaaaaaaaaaaaaaaaaaaaaaaaaaaaaaaugcaucccccccccccccccccccccccccccccccaaaggcucuuuucagagccaccagaauu

SEQ ID NO: 12828 - RNA, 576 nt, Artificial Sequence
  mRNA product Design a-1 comprising derived and/or modified sequence from LASV(Z0947-SLE-2011;Clade IV)__AIT17838__Z (wt)
gggagagucccgcagucggcguccagcggcucugcuuguucgugugugugucguugcaggccuuauucaagcuuaccaugggaaacaaacaagccaaggucccagaaucaaaagacagcccgagagccagccuaaucccagaugccacacaucuagggccgcaauucuguaagaguugcugguucgaaaacaagggccugguugaguguaacaaccacuaucugugucucaacugccucaccuuacuuuugagugucagcaacaggugccccauuugcaagaugccucuccccacaaaacugaaaccaucagccgcuccaacagcacccccaacuggagcagcggacagcaucagacccccaccuuacagucccugaggacuagucccuguucccagagcccacuuuuuuuucuuuuuuugaaauaaaauagccugucuuucagaucuaaaaaaaaaaaaaaaaaaaaaaaaaaaaaaaaaaaaaaaaaaaaaaaaaaaaaaaaaaaaaaaaugcaucccccccccccccccccccccccccccccccaaaggcucuuuucagagccaccagaauu

SEQ ID NO: 12829 - RNA, 576 nt, Artificial Sequence
  mRNA product Design a-1 comprising derived and/or modified sequence from LASV(Josiah;Clade IV)__ADY11072/NP_694871__Z (opt1)
gggagagucccgcagucggcguccagcggcucugcuuguucgugugugugucguugcaggccuuauucaagcuuaccaugggcaacaagcaggccaaggcccccgagagcaaggacuccccgcgcgcgagccugauccccgacgccacccaccucgggccccaguucugcaaguccugcugguucgagaacaagggccugguggagugcaacaaccacuaccugugccucaacugccugacccugcuccugagcgucuccaaccggugccccaucugcaagaugccgcugcccacgaagcuccgccccagcgccgcccccaccgccccgcccaccggggcggccgacuccauccggcccccgcccuacagccccugaggacuagucccuguucccagagcccacuuuuuuuucuuuuuuugaaauaaaauagccugucuuucagaucuaaaaaaaaaaaaaaaaaaaaaaaaaaaaaaaaaaaaaaaaaaaaaaaaaaaaaaaaaaaaaaaaugcaucccccccccccccccccccccccccccccccaaaggcucuuuucagagccaccagaauu

SEQ ID NO: 12830 - RNA, 579 nt, Artificial Sequence
  mRNA product Design a-1 comprising derived and/or modified sequence from LASV(Pinneo-NIG-1969;Clade I)__AIT17834__Z (opt1)
gggagagucccgcagucggcguccagcggcucugcuuguucgugugugugucguugcaggccuuauucaagcuuaccaugggcaacaagcagacccgcagcccgcccaagcccgagcacccccggcccacccugcuccccgacgccucccaccuggggccccaguucugcaagagcugcugguucgagaacaagggccugguggagugcaacaaccacuaccucugccugaacugccugacgcuccugcuguccgucagcgaccgcugccccaucugcaagaugccccuccccaccaagcuggccgugcggacccagcccuccgcgccgccccugaaccaggggaacacccagagcagcccgccgcccuacucccccugaggacuagucccuguucccagagcccacuuuuuuuucuuuuuuugaaauaaaauagccugucuuucagaucuaaaaaaaaaaaaaaaaaaaaaaaaaaaaaaaaaaaaaaaaaaaaaaaaaaaaaaaaaaaaaaaaugcaucccccccccccccccccccccccccccccccaaaggcucuuuucagagccaccagaauu

SEQ ID NO: 12831 - RNA, 576 nt, Artificial Sequence
  mRNA product Design a-1 comprising derived and/or modified sequence from LASV(Nig08-04;Clade II)__ADU56612__Z (opt1)
gggagagucccgcagucggcguccagcggcucugcuuguucgugugugugucguugcaggccuuauucaagcuuaccaugggcaaccgccagacccggcccaccgaggccacggagcagagccgcgcccaccuggugccggacgccucccaccucgggccccaguucugcaagagcugcugguucgagaaccggggccuggucgagugcaacaaccacuaccugugccucaacugccugucccugcuccugagcguguccagccgcugccccaucugcaagaugccccugccgacccggcucaaggccuccgcccagcccagcgccccgcccaccgaggcgccccagaacaccacgcccccgcccuacacccccugaggacuagucccuguucccagagcccacuuuuuuuucuuuuuuugaaauaaaauagccugucuuucagaucuaaaaaaaaaaaaaaaaaaaaaaaaaaaaaaaaaaaaaaaaaaaaaaaaaaaaaaaaaaaaaaaaugcaucccccccccccccccccccccccccccccccaaaggcucuuuucagagccaccagaauu

SEQ ID NO: 12832 - RNA, 576 nt, Artificial Sequence
  mRNA product Design a-1 comprising derived and/or modified sequence from LASV(Nig08-A19;Clade III)__ADU56620__Z (opt1)
gggagagucccgcagucggcguccagcggcucugcuuguucgugugugugucguugcaggccuuauucaagcuuaccaugggcgggaagcacaccaagccccagcgcgagagcaacuccccgcgggccagccugauccccgacgccacccaccucggcccccaguucugcaaguccugcugguucgagaacaaggggcugguggagugcaacaaccacuaccugugccucaacugccugacgcugcuccugagcguguccaaccgcugccccaucugcaagaugccccugcccacccggcuccgcgccagcaccaaccccaccgcgccccagguggagcaggucggcccgacgaacccgccgcccuacucccccugaggacuagucccuguucccagagcccacuuuuuuuucuuuuuuugaaauaaaauagccugucuuucagaucuaaaaaaaaaaaaaaaaaaaaaaaaaaaaaaaaaaaaaaaaaaaaaaaaaaaaaaaaaaaaaaaaugcaucccccccccccccccccccccccccccccccaaaggcucuuuucagagccaccagaauu

SEQ ID NO: 12833 - RNA, 576 nt, Artificial Sequence
  mRNA product Design a-1 comprising derived and/or modified sequence from LASV(AV;Clade V)__CCA30312__Z (opt1)
gggagagucccgcagucggcguccagcggcucugcuuguucgugugugugucguugcaggccuuauucaagcuuaccaugggcaaccgccaggccaagaaccccgagguggagaacagcccccgggccucccugauccccgacgcgacccaccucgggccccaguucugcaagagcugcugguucgagaacaagggccuggucgagugcaacaaccacuaccugugccucaacugccugucccugcuccugagcguguccaaccgcugccccaucugcaagaugccgcugcccacccggcuccgccccacgaccacccccaccgccccgcagaucaucaaggagaacacgaccaacccgccgcccuacacccccugaggacuagucccuguucccagagcccacuuuuuuuucuuuuuuugaaauaaaauagccugucuuucagaucuaaaaaaaaaaaaaaaaaaaaaaaaaaaaaaaaaaaaaaaaaaaaaaaaaaaaaaaaaaaaaaaaugcaucccccccccccccccccccccccccccccccaaaggcucuuuucagagccaccagaauu

SEQ ID NO: 12834 - RNA, 576 nt, Artificial Sequence
  mRNA product Design a-1 comprising derived and/or modified sequence from LASV(Togo/2016/7082;Clade VI)__AMR44579__Z (opt1)
gggagagucccgcagucggcguccagcggcucugcuuguucgugugugugucguugcaggccuuauucaagcuuaccaugggcgcccgccagaccaagcagccccagaucgaggggagcccccgggccucccuggugcccgacgcgagccaccucggcccccaguucugcaaguccugcugguucgagaacaaggggcuggucgagugcaacaaccacuaccugugccucaacugccugagccugcuccuguccgugagcaaccgcugccccaucugcaagaugccgcugcccaccaagcuccggguguccagcgcccccuccgcgcccccggccgccacggcccagcccggcaccccgccgcccuacagccccugaggacuagucccuguucccagagcccacuuuuuuuucuuuuuuugaaauaaaauagccugucuuucagaucuaaaaaaaaaaaaaaaaaaaaaaaaaaaaaaaaaaaaaaaaaaaaaaaaaaaaaaaaaaaaaaaaugcaucccccccccccccccccccccccccccccccaaaggcucuuuucagagccaccagaauu

SEQ ID NO: 12835 - RNA, 576 nt, Artificial Sequence
  mRNA product Design a-1 comprising derived and/or modified sequence from LASV(KAK-428;Clade n.d. (VII))__ANH09761__Z (opt1)
gggagagucccgcagucggcguccagcggcucugcuuguucgugugugugucguugcaggccuuauucaagcuuaccaugggcaacaaggggaccaagcccacccagaacagcgagcccucccgcgccaaccuggugcccgacgccagcuaccucggcccccaguucugcaaguccugcugguucgagaacaaggggcuggucgagugcaacaaccacuaccugugccucaacugccugacgaugcugcucagcguguccaaccggugccccaucugcaagaugccgcugcccaccaagaucaaggccagcggcucccccagcgcgcccccgaccgaggccaacuccgccgugagcccgccgcccuacacccccugaggacuagucccuguucccagagcccacuuuuuuuucuuuuuuugaaauaaaauagccugucuuucagaucuaaaaaaaaaaaaaaaaaaaaaaaaaaaaaaaaaaaaaaaaaaaaaaaaaaaaaaaaaaaaaaaaugcaucccccccccccccccccccccccccccccccaaaggcucuuuucagagccaccagaauu

SEQ ID NO: 12836 - RNA, 576 nt, Artificial Sequence
  mRNA product Design a-1 comprising derived and/or modified sequence from LASV(ISTH0009-NIG-2011;Clade II)__AIT17402__Z (opt1)
gggagagucccgcagucggcguccagcggcucugcuuguucgugugugugucguugcaggccuuauucaagcuuaccaugggcaaccgccaggccaagagcaccaagguggacgagcaccagcgggcccaccugguccccgacgcgucccaccucgggccccaguucugcaagagcugcugguucgagaaccgcggccugguggagugcaacaaccacuaccugugccucaacugccugucccugcuccugagcguguccagccggugccccaucugcaagaugccccugcccaccaagcucaaggccgccgcccagccguccgcccccagcacggagaccauccagaacaccaccccgccgcccuacacgcccugaggacuagucccuguucccagagcccacuuuuuuuucuuuuuuugaaauaaaauagccugucuuucagaucuaaaaaaaaaaaaaaaaaaaaaaaaaaaaaaaaaaaaaaaaaaaaaaaaaaaaaaaaaaaaaaaaugcaucccccccccccccccccccccccccccccccaaaggcucuuuucagagccaccagaauu

SEQ ID NO: 12837 - RNA, 576 nt, Artificial Sequence
  mRNA product Design a-1 comprising derived and/or modified sequence from LASV(ISTH2010-NIG-2012;Clade II)__AIT17480__Z (opt1)
gggagagucccgcagucggcguccagcggcucugcuuguucgugugugugucguugcaggccuuauucaagcuuaccaugggcaaccgccacgccaagagcaccaagguggacgagcaccagcgggcccaccugguccccgacgcgucccaccucgggccccaguucugcaagagcugcugguucgagaaccgcggccugguggagugcaacaaccacuaccugugccucaacugccugucccugcuccugagcguguccagccggugccccaucugcaagaugccccugcccaccaagcucaaggccgccgcccagccguccgcccccagcacggaggucauccaguccaccaccccgccgcccuacacccccugaggacuagucccuguucccagagcccacuuuuuuuucuuuuuuugaaauaaaauagccugucuuucagaucuaaaaaaaaaaaaaaaaaaaaaaaaaaaaaaaaaaaaaaaaaaaaaaaaaaaaaaaaaaaaaaaaugcaucccccccccccccccccccccccccccccccaaaggcucuuuucagagccaccagaauu

SEQ ID NO: 12838 - RNA, 576 nt, Artificial Sequence
  mRNA product Design a-1 comprising derived and/or modified sequence from LASV(Lassa virus/H.sapiens-wt/NGA/2016/ISTH_0017;Clade II)__AVO03713__Z (opt1)
gggagagucccgcagucggcguccagcggcucugcuuguucgugugugugucguugcaggccuuauucaagcuuaccaugggcaaccgccaggccaagagcaccaagguggacgagcaccagcgggcccaccugguccccgacgcgucccaccucgggccccaguucugcaagagcugcugguucgagaaccgcggccugguggagugcaacaaccacuaccugugccucaacugccugucccugcuccugagcguguccagccggugccccaucugcaagaugccccugcccaccaagcucaaggccgccacgcagccguccgcccccagcaccgaggucaaccagaacaccaccccgccgcccuacacgcccugaggacuagucccuguucccagagcccacuuuuuuuucuuuuuuugaaauaaaauagccugucuuucagaucuaaaaaaaaaaaaaaaaaaaaaaaaaaaaaaaaaaaaaaaaaaaaaaaaaaaaaaaaaaaaaaaaugcaucccccccccccccccccccccccccccccccaaaggcucuuuucagagccaccagaauu

SEQ ID NO: 12839 - RNA, 576 nt, Artificial Sequence
  mRNA product Design a-1 comprising derived and/or modified sequence from LASV(Lassa virus/H.sapiens-wt/NGA/2018/ISTH_0959;Clade II)__AVV65084__Z (opt1)
gggagagucccgcagucggcguccagcggcucugcuuguucgugugugugucguugcaggccuuauucaagcuuaccaugggcaacaagcaggccaagagcaccaagguggacgagcaccagcgcgcccaccugguccccgacgcgucccaccucgggccccaguucugcaagagcugcugguucgagaaccggggccugguggagugcaacaaccacuaccugugccucaacugccugucccugcuccugagcguguccagccgcugccccaucugcaagaugccccugcccaccaagcucaaggccgccgcccagccguccgcccccagcacggaggcgauccaguccaccaccccgccgcccuacacccccugaggacuagucccuguucccagagcccacuuuuuuuucuuuuuuugaaauaaaauagccugucuuucagaucuaaaaaaaaaaaaaaaaaaaaaaaaaaaaaaaaaaaaaaaaaaaaaaaaaaaaaaaaaaaaaaaaugcaucccccccccccccccccccccccccccccccaaaggcucuuuucagagccaccagaauu

SEQ ID NO: 12840 - RNA, 576 nt, Artificial Sequence
  mRNA product Design a-1 comprising derived and/or modified sequence from LASV(LASV003-NIG-2008;Clade II)__AIT17578__Z (opt1)
gggagagucccgcagucggcguccagcggcucugcuuguucgugugugugucguugcaggccuuauucaagcuuaccaugggcaaccgccaggccaagagcaccaagguggacgagcaccagcgggcccaccugguccccgacgcgucccaccucgggccccaguucugcaagagcugcugguucgagaacaagggccugguggagugcaacaaccacuaccugugccucaacugccugucccugcuccugagcguguccagccgcugccccaucugcaagaugccccugcccaccaagcuccgggccgccgcccagccguccgcccccagcacggaguccgcgcagaacaccgccccgccgcccuacgcccccugaggacuagucccuguucccagagcccacuuuuuuuucuuuuuuugaaauaaaauagccugucuuucagaucuaaaaaaaaaaaaaaaaaaaaaaaaaaaaaaaaaaaaaaaaaaaaaaaaaaaaaaaaaaaaaaaaugcaucccccccccccccccccccccccccccccccaaaggcucuuuucagagccaccagaauu

SEQ ID NO: 12841 - RNA, 576 nt, Artificial Sequence
  mRNA product Design a-1 comprising derived and/or modified sequence from LASV(LASV035-NIG-2009;Clade II)__AIT17586__Z (opt1)
gggagagucccgcagucggcguccagcggcucugcuuguucgugugugugucguugcaggccuuauucaagcuuaccaugggcaacaagcaggccaagagcaccaagguggacgagcaccagcgcgcccaccugguccccgacgcgucccaccucgggccccaguucugcaagagcugcugguucgagaaccggggccugguggagugcaacaaccacuaccugugccucaacugccugucccugcuccugagcguguccagccgcugccccaucugcaagaugccccugcccacccggcucaaggccgccgcccagccguccgcccccagcacggaggucacccagaacaccaccccgccgcccuacacgcccugaggacuagucccuguucccagagcccacuuuuuuuucuuuuuuugaaauaaaauagccugucuuucagaucuaaaaaaaaaaaaaaaaaaaaaaaaaaaaaaaaaaaaaaaaaaaaaaaaaaaaaaaaaaaaaaaaugcaucccccccccccccccccccccccccccccccaaaggcucuuuucagagccaccagaauu

SEQ ID NO: 12842 - RNA, 576 nt, Artificial Sequence
  mRNA product Design a-1 comprising derived and/or modified sequence from LASV(LASV1000-NIG-2009;Clade II)__AIT17780__Z (opt1)
gggagagucccgcagucggcguccagcggcucugcuuguucgugugugugucguugcaggccuuauucaagcuuaccaugggcaaccgccagaccaagagcaccaagguggacgagcaccagcgggccuaccugguccccgacgccucccuccuggggccccaguucugcaagagcugcugguucgagaacaagggccugguggagugcaacaaccacuaccucugccugaacugccugucccuccugcugagcguguccagccgcugccccaucugcaagaugccccuccccacgcggcugaaggcggccgcccagcccuccgccccgcccaccgaggccauccagaacaccacgccgccgcccuacacccccugaggacuagucccuguucccagagcccacuuuuuuuucuuuuuuugaaauaaaauagccugucuuucagaucuaaaaaaaaaaaaaaaaaaaaaaaaaaaaaaaaaaaaaaaaaaaaaaaaaaaaaaaaaaaaaaaaugcaucccccccccccccccccccccccccccccccaaaggcucuuuucagagccaccagaauu

SEQ ID NO: 12843 - RNA, 576 nt, Artificial Sequence
  mRNA product Design a-1 comprising derived and/or modified sequence from LASV(LASV221-NIG-2010;Clade II)__AIT17622__Z (opt1)
gggagagucccgcagucggcguccagcggcucugcuuguucgugugugugucguugcaggccuuauucaagcuuaccaugggcaaccgccaggccaagagcaccaagguggacgagcaccagcgggcccaccugguccccgacgcgucccaccucgggccccaguucugcaagagcugcugguucgagaaccgcggccugguggagugcaacaaccacuaccugugccucaacugccugucccugcuccugagcguguccagccggugccccaucugcaagaugccccugcccaccaagcucaaggccgccacgcagccguccgcccccagcaccgaggucacccagaacaccaucccgccgcccuacucccccugaggacuagucccuguucccagagcccacuuuuuuuucuuuuuuugaaauaaaauagccugucuuucagaucuaaaaaaaaaaaaaaaaaaaaaaaaaaaaaaaaaaaaaaaaaaaaaaaaaaaaaaaaaaaaaaaaugcaucccccccccccccccccccccccccccccccaaaggcucuuuucagagccaccagaauu

SEQ ID NO: 12844 - RNA, 576 nt, Artificial Sequence
  mRNA product Design a-1 comprising derived and/or modified sequence from LASV(LASV237-NIG-2010;Clade II)__AIT17636__Z (opt1)
gggagagucccgcagucggcguccagcggcucugcuuguucgugugugugucguugcaggccuuauucaagcuuaccaugggcaaccgccaggccaagagcaccaagguggacgagcaccagcgggcccaccugguccccgacgcgucccaccucgggccccaguucugcaagagcugcugguucgagaaccgcggccugguggagugcaacaaccacuaccugugccucaacugccugucccugcuccugagcguguccagccggugccccaucugcaagaugccccugcccaccaagcucaaggccgccgcccagccguccgcccccagcaucgagacgauccagaacaccaccccgccgcccuacacccccugaggacuagucccuguucccagagcccacuuuuuuuucuuuuuuugaaauaaaauagccugucuuucagaucuaaaaaaaaaaaaaaaaaaaaaaaaaaaaaaaaaaaaaaaaaaaaaaaaaaaaaaaaaaaaaaaaugcaucccccccccccccccccccccccccccccccaaaggcucuuuucagagccaccagaauu

SEQ ID NO: 12845 - RNA, 576 nt, Artificial Sequence
  mRNA product Design a-1 comprising derived and/or modified sequence from LASV(LASV253-NIG-2011;Clade II)__AIT17668__Z (opt1)
gggagagucccgcagucggcguccagcggcucugcuuguucgugugugugucguugcaggccuuauucaagcuuaccaugggcaaccgccaggccaagagcaccaagguggacgagcaccagcgggcccaccugguccccgacgcgucccaccucgggccccaguucugcaagagcugcugguucgagaacaagggccugguggagugcaacaaccacuaccugugccucaacugccugucccugcuccugagcguguccagccgcugccccaucugcaagaugccccugcccaccaagcucaagacgaccgcccagccguccgccccgcccaccgaggccgccaagaacaccgcgcccccgcccuacgcccccugaggacuagucccuguucccagagcccacuuuuuuuucuuuuuuugaaauaaaauagccugucuuucagaucuaaaaaaaaaaaaaaaaaaaaaaaaaaaaaaaaaaaaaaaaaaaaaaaaaaaaaaaaaaaaaaaaugcaucccccccccccccccccccccccccccccccaaaggcucuuuucagagccaccagaauu

SEQ ID NO: 12846 - RNA, 576 nt, Artificial Sequence
  mRNA product Design a-1 comprising derived and/or modified sequence from LASV(G1180-SLE-2010;Clade IV)__AIT17166__Z (opt1)
gggagagucccgcagucggcguccagcggcucugcuuguucgugugugugucguugcaggccuuauucaagcuuaccaugggcaacaagcaggccaaggcccccgaggcgaaggacagcccgcgcgccucccugauccccgacgccacccaccucgggccccaguucugcaagagcugcugguucgagaccaagggccugguggagugcaacaaccacuaccugugccucaacugccugacgcugcuccuguccgucagcaaccggugccccaucugcaagaugccgcugcccaccaagcuccgccccuccgccacccccaccgccccgcccacggaggcggccgacagcaucgggcccccgcccuacucccccugaggacuagucccuguucccagagcccacuuuuuuuucuuuuuuugaaauaaaauagccugucuuucagaucuaaaaaaaaaaaaaaaaaaaaaaaaaaaaaaaaaaaaaaaaaaaaaaaaaaaaaaaaaaaaaaaaugcaucccccccccccccccccccccccccccccccaaaggcucuuuucagagccaccagaauu

SEQ ID NO: 12847 - RNA, 576 nt, Artificial Sequence
  mRNA product Design a-1 comprising derived and/or modified sequence from LASV(G1442-SLE-2011;Clade IV)__AIT17178__Z (opt1)
gggagagucccgcagucggcguccagcggcucugcuuguucgugugugugucguugcaggccuuauucaagcuuaccaugggcaacaagcaggccaaggccagcgaggcgaaggacagcccccgcgccucccugaucccggacgccacccaccucgggccccaguucugcaaguccugcugguucgagaacaagggccugguggagugcaacaaccacuaccugugccucaacugccugagccugcuccuguccgucagcucccggugccccaucugcaagaugccccugccgacccgccuccggcccagcacggcccccaccgcgcccccggcccgcgccggggacaacaucaagcccccgcccuacucccccugaggacuagucccuguucccagagcccacuuuuuuuucuuuuuuugaaauaaaauagccugucuuucagaucuaaaaaaaaaaaaaaaaaaaaaaaaaaaaaaaaaaaaaaaaaaaaaaaaaaaaaaaaaaaaaaaaugcaucccccccccccccccccccccccccccccccaaaggcucuuuucagagccaccagaauu

SEQ ID NO: 12848 - RNA, 576 nt, Artificial Sequence
  mRNA product Design a-1 comprising derived and/or modified sequence from LASV(G502-SLE-2009;Clade IV)__AIT17124__Z (opt1)
gggagagucccgcagucggcguccagcggcucugcuuguucgugugugugucguugcaggccuuauucaagcuuaccaugggcaacaagcaggucaagacccccgaggccaaggacagcccccgcgccucccugauccccgacgcgacccaccucgggccccaguucugcaagagcugcugguucgagaacaagggccugguggagugcaacaaccacuaccugugccucaacugccugacgcugcuccuguccguggggaaccggugccccaucugcaagaugccgcugcccaccaagcuccgccccagcgugacccccaccgccccgcccacgcgggccgccgacuccaucggcccgccgcccuacagccccugaggacuagucccuguucccagagcccacuuuuuuuucuuuuuuugaaauaaaauagccugucuuucagaucuaaaaaaaaaaaaaaaaaaaaaaaaaaaaaaaaaaaaaaaaaaaaaaaaaaaaaaaaaaaaaaaaugcaucccccccccccccccccccccccccccccccaaaggcucuuuucagagccaccagaauu

SEQ ID NO: 12849 - RNA, 576 nt, Artificial Sequence
  mRNA product Design a-1 comprising derived and/or modified sequence from LASV(G733-SLE-2010;Clade IV)__AIT17152__Z (opt1)
gggagagucccgcagucggcguccagcggcucugcuuguucgugugugugucguugcaggccuuauucaagcuuaccaugggcaacaagcaggccaagacccccgagaccaaggacagcccgcgcgccucccugauccccgacgcgacgcaccucgggccccaguucugcaagagcugcugguucgagaacaagggccugguggagugcaacaaccacuaccugugccucaacugccugacccugcuccuguccgucagcaaccggugccccaucugcaagaugccgcugcccaccaagcuccgccccuccaccgcccccacggccccgcccgccggggccgcggacaacacccggcccccgcccuacagccccugaggacuagucccuguucccagagcccacuuuuuuuucuuuuuuugaaauaaaauagccugucuuucagaucuaaaaaaaaaaaaaaaaaaaaaaaaaaaaaaaaaaaaaaaaaaaaaaaaaaaaaaaaaaaaaaaaugcaucccccccccccccccccccccccccccccccaaaggcucuuuucagagccaccagaauu

SEQ ID NO: 12850 - RNA, 588 nt, Artificial Sequence
  mRNA product Design a-1 comprising derived and/or modified sequence from MOPV/LASV reassortant(IGS-1;Clade IV)__AFY05533__Z (opt1)
gggagagucccgcagucggcguccagcggcucugcuuguucgugugugugucguugcaggccuuauucaagcuuaccaugggcaagacccagagcaaggggcagcccuccaccaaccugcucaaggagacggagccccgccaccccgugauccccgacgcccggggcaccgggcccgaguucugcaagagcugcugguucgagcgccggggccugguccgcugcaacgaccacuaccugugccucaacugccugacccugcuccacaccguguccgaccggugccccaucugcaagcacaagcugcccuuccgccuggagcuccagacgcagcccaccgccccgcccgagaucccgcccagccagaacccgccgcccuacucccccugaggacuagucccuguucccagagcccacuuuuuuuucuuuuuuugaaauaaaauagccugucuuucagaucuaaaaaaaaaaaaaaaaaaaaaaaaaaaaaaaaaaaaaaaaaaaaaaaaaaaaaaaaaaaaaaaaugcaucccccccccccccccccccccccccccccccaaaggcucuuuucagagccaccagaauu

SEQ ID NO: 12851 - RNA, 576 nt, Artificial Sequence
  mRNA product Design a-1 comprising derived and/or modified sequence from LASV(LM776-SLE-2012;Clade IV)__AIT17824__Z (opt1)
gggagagucccgcagucggcguccagcggcucugcuuguucgugugugugucguugcaggccuuauucaagcuuaccaugggcaacaagcaggccaaggccagcgaggagaagaacagcccccgcgccucccugaucccggacgccacccaccucgggccccaguucugcaaguccugcugguucgagaacaagggccugguggagugcaacaaccacuaccugugccucaacugccugacccugcuccugagcgucuccaaccggugccccaucugcaagaugccccugccgacgaagcuccgccccagcaccacccccaccgcgcccccgacgggggccgccgacuccauccggcccccgcccuacagccccugaggacuagucccuguucccagagcccacuuuuuuuucuuuuuuugaaauaaaauagccugucuuucagaucuaaaaaaaaaaaaaaaaaaaaaaaaaaaaaaaaaaaaaaaaaaaaaaaaaaaaaaaaaaaaaaaaugcaucccccccccccccccccccccccccccccccaaaggcucuuuucagagccaccagaauu

SEQ ID NO: 12852 - RNA, 576 nt, Artificial Sequence
  mRNA product Design a-1 comprising derived and/or modified sequence from LASV(Mad39;Clade IV)__ANH09743__Z (opt1)
gggagagucccgcagucggcguccagcggcucugcuuguucgugugugugucguugcaggccuuauucaagcuuaccaugggcaacaagcaggccaaggccagcgagguggaggacgggccccgcgccucccugauccccgacgccacccaccucggcccccaguucugcaagagcugcugguucgagaacaagucccuggucgagugcaacaaccacuaccugugccucaacugccugacccugcuccugagcguguccaaccggugccccaucugcaagaugccccugccgacgcgccucaagcccagcgugguccccaccgcgcccccgacccgggccggggacggcacccgcccgccgcccuacucccccugaggacuagucccuguucccagagcccacuuuuuuuucuuuuuuugaaauaaaauagccugucuuucagaucuaaaaaaaaaaaaaaaaaaaaaaaaaaaaaaaaaaaaaaaaaaaaaaaaaaaaaaaaaaaaaaaaugcaucccccccccccccccccccccccccccccccaaaggcucuuuucagagccaccagaauu

SEQ ID NO: 12853 - RNA, 576 nt, Artificial Sequence
  mRNA product Design a-1 comprising derived and/or modified sequence from LASV(Z0947-SLE-2011;Clade IV)__AIT17838__Z (opt1)
gggagagucccgcagucggcguccagcggcucugcuuguucgugugugugucguugcaggccuuauucaagcuuaccaugggcaacaagcaggccaaggugcccgagagcaaggacuccccgcgcgccagccugauccccgacgcgacccaccucgggccccaguucugcaaguccugcugguucgagaacaagggccuggucgagugcaacaaccacuaccugugccucaacugccugacccugcuccugagcguguccaaccgcugccccaucugcaagaugccgcugcccacgaagcucaagcccagcgccgcccccaccgccccgcccaccggggccgcggacuccauccggcccccgcccuacagccccugaggacuagucccuguucccagagcccacuuuuuuuucuuuuuuugaaauaaaauagccugucuuucagaucuaaaaaaaaaaaaaaaaaaaaaaaaaaaaaaaaaaaaaaaaaaaaaaaaaaaaaaaaaaaaaaaaugcaucccccccccccccccccccccccccccccccaaaggcucuuuucagagccaccagaauu

SEQ ID NO: 12854 - RNA, 576 nt, Artificial Sequence
  mRNA product Design a-1 comprising derived and/or modified sequence from LASV(Josiah;Clade IV)__ADY11072/NP_694871__Z (opt2)
gggagagucccgcagucggcguccagcggcucugcuuguucgugugugugucguugcaggccuuauucaagcuuaccaugggcaacaagcaggccaaggcccccgaguccaaggacuccccccgcgccucccucauccccgacgccacccaccucggcccccaguucugcaaguccugcugguucgagaacaagggccucgucgagugcaacaaccacuaccucugccucaacugccucacccuccuccucuccgucuccaaccgcugccccaucugcaagaugccccuccccaccaagcuccgccccuccgccgcccccaccgccccccccaccggcgccgccgacuccauccgccccccccccuacucccccugaggacuagucccuguucccagagcccacuuuuuuuucuuuuuuugaaauaaaauagccugucuuucagaucuaaaaaaaaaaaaaaaaaaaaaaaaaaaaaaaaaaaaaaaaaaaaaaaaaaaaaaaaaaaaaaaaugcaucccccccccccccccccccccccccccccccaaaggcucuuuucagagccaccagaauu

SEQ ID NO: 12855 - RNA, 579 nt, Artificial Sequence
  mRNA product Design a-1 comprising derived and/or modified sequence from LASV(Pinneo-NIG-1969;Clade I)__AIT17834__Z (opt2)
gggagagucccgcagucggcguccagcggcucugcuuguucgugugugugucguugcaggccuuauucaagcuuaccaugggcaacaagcagacccgcuccccccccaagcccgagcacccccgccccacccuccuccccgacgccucccaccucggcccccaguucugcaaguccugcugguucgagaacaagggccucgucgagugcaacaaccacuaccucugccucaacugccucacccuccuccucuccgucuccgaccgcugccccaucugcaagaugccccuccccaccaagcucgccguccgcacccagcccuccgcccccccccucaaccagggcaacacccaguccucccccccccccuacucccccugaggacuagucccuguucccagagcccacuuuuuuuucuuuuuuugaaauaaaauagccugucuuucagaucuaaaaaaaaaaaaaaaaaaaaaaaaaaaaaaaaaaaaaaaaaaaaaaaaaaaaaaaaaaaaaaaaugcaucccccccccccccccccccccccccccccccaaaggcucuuuucagagccaccagaauu

SEQ ID NO: 12856 - RNA, 576 nt, Artificial Sequence
  mRNA product Design a-1 comprising derived and/or modified sequence from LASV(Nig08-04;Clade II)__ADU56612__Z (opt2)
gggagagucccgcagucggcguccagcggcucugcuuguucgugugugugucguugcaggccuuauucaagcuuaccaugggcaaccgccagacccgccccaccgaggccaccgagcagucccgcgcccaccucguccccgacgccucccaccucggcccccaguucugcaaguccugcugguucgagaaccgcggccucgucgagugcaacaaccacuaccucugccucaacugccucucccuccuccucuccgucuccucccgcugccccaucugcaagaugccccuccccacccgccucaaggccuccgcccagcccuccgccccccccaccgaggccccccagaacaccacccccccccccuacacccccugaggacuagucccuguucccagagcccacuuuuuuuucuuuuuuugaaauaaaauagccugucuuucagaucuaaaaaaaaaaaaaaaaaaaaaaaaaaaaaaaaaaaaaaaaaaaaaaaaaaaaaaaaaaaaaaaaugcaucccccccccccccccccccccccccccccccaaaggcucuuuucagagccaccagaauu

SEQ ID NO: 12857 - RNA, 576 nt, Artificial Sequence
  mRNA product Design a-1 comprising derived and/or modified sequence from LASV(Nig08-A19;Clade III)__ADU56620__Z (opt2)
gggagagucccgcagucggcguccagcggcucugcuuguucgugugugugucguugcaggccuuauucaagcuuaccaugggcggcaagcacaccaagccccagcgcgaguccaacuccccccgcgccucccucauccccgacgccacccaccucggcccccaguucugcaaguccugcugguucgagaacaagggccucgucgagugcaacaaccacuaccucugccucaacugccucacccuccuccucuccgucuccaaccgcugccccaucugcaagaugccccuccccacccgccuccgcgccuccaccaaccccaccgccccccaggucgagcaggucggccccaccaaccccccccccuacucccccugaggacuagucccuguucccagagcccacuuuuuuuucuuuuuuugaaauaaaauagccugucuuucagaucuaaaaaaaaaaaaaaaaaaaaaaaaaaaaaaaaaaaaaaaaaaaaaaaaaaaaaaaaaaaaaaaaugcaucccccccccccccccccccccccccccccccaaaggcucuuuucagagccaccagaauu

SEQ ID NO: 12858 - RNA, 576 nt, Artificial Sequence
  mRNA product Design a-1 comprising derived and/or modified sequence from LASV(AV;Clade V)__CCA30312__Z (opt2)
gggagagucccgcagucggcguccagcggcucugcuuguucgugugugugucguugcaggccuuauucaagcuuaccaugggcaaccgccaggccaagaaccccgaggucgagaacuccccccgcgccucccucauccccgacgccacccaccucggcccccaguucugcaaguccugcugguucgagaacaagggccucgucgagugcaacaaccacuaccucugccucaacugccucucccuccuccucuccgucuccaaccgcugccccaucugcaagaugccccuccccacccgccuccgccccaccaccacccccaccgccccccagaucaucaaggagaacaccaccaaccccccccccuacacccccugaggacuagucccuguucccagagcccacuuuuuuuucuuuuuuugaaauaaaauagccugucuuucagaucuaaaaaaaaaaaaaaaaaaaaaaaaaaaaaaaaaaaaaaaaaaaaaaaaaaaaaaaaaaaaaaaaugcaucccccccccccccccccccccccccccccccaaaggcucuuuucagagccaccagaauu

SEQ ID NO: 12859 - RNA, 576 nt, Artificial Sequence
  mRNA product Design a-1 comprising derived and/or modified sequence from LASV(Togo/2016/7082;Clade VI)__AMR44579__Z (opt2)
gggagagucccgcagucggcguccagcggcucugcuuguucgugugugugucguugcaggccuuauucaagcuuaccaugggcgcccgccagaccaagcagccccagaucgagggcuccccccgcgccucccucguccccgacgccucccaccucggcccccaguucugcaaguccugcugguucgagaacaagggccucgucgagugcaacaaccacuaccucugccucaacugccucucccuccuccucuccgucuccaaccgcugccccaucugcaagaugccccuccccaccaagcuccgcgucuccuccgcccccuccgccccccccgccgccaccgcccagcccggcacccccccccccuacucccccugaggacuagucccuguucccagagcccacuuuuuuuucuuuuuuugaaauaaaauagccugucuuucagaucuaaaaaaaaaaaaaaaaaaaaaaaaaaaaaaaaaaaaaaaaaaaaaaaaaaaaaaaaaaaaaaaaugcaucccccccccccccccccccccccccccccccaaaggcucuuuucagagccaccagaauu

SEQ ID NO: 12860 - RNA, 576 nt, Artificial Sequence
  mRNA product Design a-1 comprising derived and/or modified sequence from LASV(KAK-428;Clade n.d. (VII))__ANH09761__Z (opt2)
gggagagucccgcagucggcguccagcggcucugcuuguucgugugugugucguugcaggccuuauucaagcuuaccaugggcaacaagggcaccaagcccacccagaacuccgagcccucccgcgccaaccucguccccgacgccuccuaccucggcccccaguucugcaaguccugcugguucgagaacaagggccucgucgagugcaacaaccacuaccucugccucaacugccucaccaugcuccucuccgucuccaaccgcugccccaucugcaagaugccccuccccaccaagaucaaggccuccggcucccccuccgccccccccaccgaggccaacuccgccgucucccccccccccuacacccccugaggacuagucccuguucccagagcccacuuuuuuuucuuuuuuugaaauaaaauagccugucuuucagaucuaaaaaaaaaaaaaaaaaaaaaaaaaaaaaaaaaaaaaaaaaaaaaaaaaaaaaaaaaaaaaaaaugcaucccccccccccccccccccccccccccccccaaaggcucuuuucagagccaccagaauu

SEQ ID NO: 12861 - RNA, 576 nt, Artificial Sequence
  mRNA product Design a-1 comprising derived and/or modified sequence from LASV(ISTH0009-NIG-2011;Clade II)__AIT17402__Z (opt2)
gggagagucccgcagucggcguccagcggcucugcuuguucgugugugugucguugcaggccuuauucaagcuuaccaugggcaaccgccaggccaaguccaccaaggucgacgagcaccagcgcgcccaccucguccccgacgccucccaccucggcccccaguucugcaaguccugcugguucgagaaccgcggccucgucgagugcaacaaccacuaccucugccucaacugccucucccuccuccucuccgucuccucccgcugccccaucugcaagaugccccuccccaccaagcucaaggccgccgcccagcccuccgcccccuccaccgagaccauccagaacaccacccccccccccuacacccccugaggacuagucccuguucccagagcccacuuuuuuuucuuuuuuugaaauaaaauagccugucuuucagaucuaaaaaaaaaaaaaaaaaaaaaaaaaaaaaaaaaaaaaaaaaaaaaaaaaaaaaaaaaaaaaaaaugcaucccccccccccccccccccccccccccccccaaaggcucuuuucagagccaccagaauu

SEQ ID NO: 12862 - RNA, 576 nt, Artificial Sequence
  mRNA product Design a-1 comprising derived and/or modified sequence from LASV(ISTH2010-NIG-2012;Clade II)__AIT17480__Z (opt2)
gggagagucccgcagucggcguccagcggcucugcuuguucgugugugugucguugcaggccuuauucaagcuuaccaugggcaaccgccacgccaaguccaccaaggucgacgagcaccagcgcgcccaccucguccccgacgccucccaccucggcccccaguucugcaaguccugcugguucgagaaccgcggccucgucgagugcaacaaccacuaccucugccucaacugccucucccuccuccucuccgucuccucccgcugccccaucugcaagaugccccuccccaccaagcucaaggccgccgcccagcccuccgcccccuccaccgaggucauccaguccaccacccccccccccuacacccccugaggacuagucccuguucccagagcccacuuuuuuuucuuuuuuugaaauaaaauagccugucuuucagaucuaaaaaaaaaaaaaaaaaaaaaaaaaaaaaaaaaaaaaaaaaaaaaaaaaaaaaaaaaaaaaaaaugcaucccccccccccccccccccccccccccccccaaaggcucuuuucagagccaccagaauu

SEQ ID NO: 12863 - RNA, 576 nt, Artificial Sequence
  mRNA product Design a-1 comprising derived and/or modified sequence from LASV(Lassa virus/H.sapiens-wt/NGA/2016/ISTH_0017;Clade II)__AVO03713__Z (opt2)
gggagagucccgcagucggcguccagcggcucugcuuguucgugugugugucguugcaggccuuauucaagcuuaccaugggcaaccgccaggccaaguccaccaaggucgacgagcaccagcgcgcccaccucguccccgacgccucccaccucggcccccaguucugcaaguccugcugguucgagaaccgcggccucgucgagugcaacaaccacuaccucugccucaacugccucucccuccuccucuccgucuccucccgcugccccaucugcaagaugccccuccccaccaagcucaaggccgccacccagcccuccgcccccuccaccgaggucaaccagaacaccacccccccccccuacacccccugaggacuagucccuguucccagagcccacuuuuuuuucuuuuuuugaaauaaaauagccugucuuucagaucuaaaaaaaaaaaaaaaaaaaaaaaaaaaaaaaaaaaaaaaaaaaaaaaaaaaaaaaaaaaaaaaaugcaucccccccccccccccccccccccccccccccaaaggcucuuuucagagccaccagaauu

SEQ ID NO: 12864 - RNA, 576 nt, Artificial Sequence
  mRNA product Design a-1 comprising derived and/or modified sequence from LASV(Lassa virus/H.sapiens-wt/NGA/2018/ISTH_0959;Clade II)__AVV65084__Z (opt2)
gggagagucccgcagucggcguccagcggcucugcuuguucgugugugugucguugcaggccuuauucaagcuuaccaugggcaacaagcaggccaaguccaccaaggucgacgagcaccagcgcgcccaccucguccccgacgccucccaccucggcccccaguucugcaaguccugcugguucgagaaccgcggccucgucgagugcaacaaccacuaccucugccucaacugccucucccuccuccucuccgucuccucccgcugccccaucugcaagaugccccuccccaccaagcucaaggccgccgcccagcccuccgcccccuccaccgaggccauccaguccaccacccccccccccuacacccccugaggacuagucccuguucccagagcccacuuuuuuuucuuuuuuugaaauaaaauagccugucuuucagaucuaaaaaaaaaaaaaaaaaaaaaaaaaaaaaaaaaaaaaaaaaaaaaaaaaaaaaaaaaaaaaaaaugcaucccccccccccccccccccccccccccccccaaaggcucuuuucagagccaccagaauu

SEQ ID NO: 12865 - RNA, 576 nt, Artificial Sequence
  mRNA product Design a-1 comprising derived and/or modified sequence from LASV(LASV003-NIG-2008;Clade II)__AIT17578__Z (opt2)
gggagagucccgcagucggcguccagcggcucugcuuguucgugugugugucguugcaggccuuauucaagcuuaccaugggcaaccgccaggccaaguccaccaaggucgacgagcaccagcgcgcccaccucguccccgacgccucccaccucggcccccaguucugcaaguccugcugguucgagaacaagggccucgucgagugcaacaaccacuaccucugccucaacugccucucccuccuccucuccgucuccucccgcugccccaucugcaagaugccccuccccaccaagcuccgcgccgccgcccagcccuccgcccccuccaccgaguccgcccagaacaccgcccccccccccuacgcccccugaggacuagucccuguucccagagcccacuuuuuuuucuuuuuuugaaauaaaauagccugucuuucagaucuaaaaaaaaaaaaaaaaaaaaaaaaaaaaaaaaaaaaaaaaaaaaaaaaaaaaaaaaaaaaaaaaugcaucccccccccccccccccccccccccccccccaaaggcucuuuucagagccaccagaauu

SEQ ID NO: 12866 - RNA, 576 nt, Artificial Sequence
  mRNA product Design a-1 comprising derived and/or modified sequence from LASV(LASV035-NIG-2009;Clade II)__AIT17586__Z (opt2)
gggagagucccgcagucggcguccagcggcucugcuuguucgugugugugucguugcaggccuuauucaagcuuaccaugggcaacaagcaggccaaguccaccaaggucgacgagcaccagcgcgcccaccucguccccgacgccucccaccucggcccccaguucugcaaguccugcugguucgagaaccgcggccucgucgagugcaacaaccacuaccucugccucaacugccucucccuccuccucuccgucuccucccgcugccccaucugcaagaugccccuccccacccgccucaaggccgccgcccagcccuccgcccccuccaccgaggucacccagaacaccacccccccccccuacacccccugaggacuagucccuguucccagagcccacuuuuuuuucuuuuuuugaaauaaaauagccugucuuucagaucuaaaaaaaaaaaaaaaaaaaaaaaaaaaaaaaaaaaaaaaaaaaaaaaaaaaaaaaaaaaaaaaaugcaucccccccccccccccccccccccccccccccaaaggcucuuuucagagccaccagaauu

SEQ ID NO: 12867 - RNA, 576 nt, Artificial Sequence
  mRNA product Design a-1 comprising derived and/or modified sequence from LASV(LASV1000-NIG-2009;Clade II)__AIT17780__Z (opt2)
gggagagucccgcagucggcguccagcggcucugcuuguucgugugugugucguugcaggccuuauucaagcuuaccaugggcaaccgccagaccaaguccaccaaggucgacgagcaccagcgcgccuaccucguccccgacgccucccuccucggcccccaguucugcaaguccugcugguucgagaacaagggccucgucgagugcaacaaccacuaccucugccucaacugccucucccuccuccucuccgucuccucccgcugccccaucugcaagaugccccuccccacccgccucaaggccgccgcccagcccuccgccccccccaccgaggccauccagaacaccacccccccccccuacacccccugaggacuagucccuguucccagagcccacuuuuuuuucuuuuuuugaaauaaaauagccugucuuucagaucuaaaaaaaaaaaaaaaaaaaaaaaaaaaaaaaaaaaaaaaaaaaaaaaaaaaaaaaaaaaaaaaaugcaucccccccccccccccccccccccccccccccaaaggcucuuuucagagccaccagaauu

SEQ ID NO: 12868 - RNA, 576 nt, Artificial Sequence
  mRNA product Design a-1 comprising derived and/or modified sequence from LASV(LASV221-NIG-2010;Clade II)__AIT17622__Z (opt2)
gggagagucccgcagucggcguccagcggcucugcuuguucgugugugugucguugcaggccuuauucaagcuuaccaugggcaaccgccaggccaaguccaccaaggucgacgagcaccagcgcgcccaccucguccccgacgccucccaccucggcccccaguucugcaaguccugcugguucgagaaccgcggccucgucgagugcaacaaccacuaccucugccucaacugccucucccuccuccucuccgucuccucccgcugccccaucugcaagaugccccuccccaccaagcucaaggccgccacccagcccuccgcccccuccaccgaggucacccagaacaccauccccccccccuacucccccugaggacuagucccuguucccagagcccacuuuuuuuucuuuuuuugaaauaaaauagccugucuuucagaucuaaaaaaaaaaaaaaaaaaaaaaaaaaaaaaaaaaaaaaaaaaaaaaaaaaaaaaaaaaaaaaaaugcaucccccccccccccccccccccccccccccccaaaggcucuuuucagagccaccagaauu

SEQ ID NO: 12869 - RNA, 576 nt, Artificial Sequence
  mRNA product Design a-1 comprising derived and/or modified sequence from LASV(LASV237-NIG-2010;Clade II)__AIT17636__Z (opt2)
gggagagucccgcagucggcguccagcggcucugcuuguucgugugugugucguugcaggccuuauucaagcuuaccaugggcaaccgccaggccaaguccaccaaggucgacgagcaccagcgcgcccaccucguccccgacgccucccaccucggcccccaguucugcaaguccugcugguucgagaaccgcggccucgucgagugcaacaaccacuaccucugccucaacugccucucccuccuccucuccgucuccucccgcugccccaucugcaagaugccccuccccaccaagcucaaggccgccgcccagcccuccgcccccuccaucgagaccauccagaacaccacccccccccccuacacccccugaggacuagucccuguucccagagcccacuuuuuuuucuuuuuuugaaauaaaauagccugucuuucagaucuaaaaaaaaaaaaaaaaaaaaaaaaaaaaaaaaaaaaaaaaaaaaaaaaaaaaaaaaaaaaaaaaugcaucccccccccccccccccccccccccccccccaaaggcucuuuucagagccaccagaauu

SEQ ID NO: 12870 - RNA, 576 nt, Artificial Sequence
  mRNA product Design a-1 comprising derived and/or modified sequence from LASV(LASV253-NIG-2011;Clade II)__AIT17668__Z (opt2)
gggagagucccgcagucggcguccagcggcucugcuuguucgugugugugucguugcaggccuuauucaagcuuaccaugggcaaccgccaggccaaguccaccaaggucgacgagcaccagcgcgcccaccucguccccgacgccucccaccucggcccccaguucugcaaguccugcugguucgagaacaagggccucgucgagugcaacaaccacuaccucugccucaacugccucucccuccuccucuccgucuccucccgcugccccaucugcaagaugccccuccccaccaagcucaagaccaccgcccagcccuccgccccccccaccgaggccgccaagaacaccgcccccccccccuacgcccccugaggacuagucccuguucccagagcccacuuuuuuuucuuuuuuugaaauaaaauagccugucuuucagaucuaaaaaaaaaaaaaaaaaaaaaaaaaaaaaaaaaaaaaaaaaaaaaaaaaaaaaaaaaaaaaaaaugcaucccccccccccccccccccccccccccccccaaaggcucuuuucagagccaccagaauu

SEQ ID NO: 12871 - RNA, 576 nt, Artificial Sequence
  mRNA product Design a-1 comprising derived and/or modified sequence from LASV(G1180-SLE-2010;Clade IV)__AIT17166__Z (opt2)
gggagagucccgcagucggcguccagcggcucugcuuguucgugugugugucguugcaggccuuauucaagcuuaccaugggcaacaagcaggccaaggcccccgaggccaaggacuccccccgcgccucccucauccccgacgccacccaccucggcccccaguucugcaaguccugcugguucgagaccaagggccucgucgagugcaacaaccacuaccucugccucaacugccucacccuccuccucuccgucuccaaccgcugccccaucugcaagaugccccuccccaccaagcuccgccccuccgccacccccaccgccccccccaccgaggccgccgacuccaucggccccccccccuacucccccugaggacuagucccuguucccagagcccacuuuuuuuucuuuuuuugaaauaaaauagccugucuuucagaucuaaaaaaaaaaaaaaaaaaaaaaaaaaaaaaaaaaaaaaaaaaaaaaaaaaaaaaaaaaaaaaaaugcaucccccccccccccccccccccccccccccccaaaggcucuuuucagagccaccagaauu

SEQ ID NO: 12872 - RNA, 576 nt, Artificial Sequence
  mRNA product Design a-1 comprising derived and/or modified sequence from LASV(G1442-SLE-2011;Clade IV)__AIT17178__Z (opt2)
gggagagucccgcagucggcguccagcggcucugcuuguucgugugugugucguugcaggccuuauucaagcuuaccaugggcaacaagcaggccaaggccuccgaggccaaggacuccccccgcgccucccucauccccgacgccacccaccucggcccccaguucugcaaguccugcugguucgagaacaagggccucgucgagugcaacaaccacuaccucugccucaacugccucucccuccuccucuccgucuccucccgcugccccaucugcaagaugccccuccccacccgccuccgccccuccaccgcccccaccgccccccccgcccgcgccggcgacaacaucaagcccccccccuacucccccugaggacuagucccuguucccagagcccacuuuuuuuucuuuuuuugaaauaaaauagccugucuuucagaucuaaaaaaaaaaaaaaaaaaaaaaaaaaaaaaaaaaaaaaaaaaaaaaaaaaaaaaaaaaaaaaaaugcaucccccccccccccccccccccccccccccccaaaggcucuuuucagagccaccagaauu

SEQ ID NO: 12873 - RNA, 576 nt, Artificial Sequence
  mRNA product Design a-1 comprising derived and/or modified sequence from LASV(G502-SLE-2009;Clade IV)__AIT17124__Z (opt2)
gggagagucccgcagucggcguccagcggcucugcuuguucgugugugugucguugcaggccuuauucaagcuuaccaugggcaacaagcaggucaagacccccgaggccaaggacuccccccgcgccucccucauccccgacgccacccaccucggcccccaguucugcaaguccugcugguucgagaacaagggccucgucgagugcaacaaccacuaccucugccucaacugccucacccuccuccucuccgucggcaaccgcugccccaucugcaagaugccccuccccaccaagcuccgccccuccgucacccccaccgccccccccacccgcgccgccgacuccaucggccccccccccuacucccccugaggacuagucccuguucccagagcccacuuuuuuuucuuuuuuugaaauaaaauagccugucuuucagaucuaaaaaaaaaaaaaaaaaaaaaaaaaaaaaaaaaaaaaaaaaaaaaaaaaaaaaaaaaaaaaaaaugcaucccccccccccccccccccccccccccccccaaaggcucuuuucagagccaccagaauu

SEQ ID NO: 12874 - RNA, 576 nt, Artificial Sequence
  mRNA product Design a-1 comprising derived and/or modified sequence from LASV(G733-SLE-2010;Clade IV)__AIT17152__Z (opt2)
gggagagucccgcagucggcguccagcggcucugcuuguucgugugugugucguugcaggccuuauucaagcuuaccaugggcaacaagcaggccaagacccccgagaccaaggacuccccccgcgccucccucauccccgacgccacccaccucggcccccaguucugcaaguccugcugguucgagaacaagggccucgucgagugcaacaaccacuaccucugccucaacugccucacccuccuccucuccgucuccaaccgcugccccaucugcaagaugccccuccccaccaagcuccgccccuccaccgcccccaccgccccccccgccggcgccgccgacaacacccgccccccccccuacucccccugaggacuagucccuguucccagagcccacuuuuuuuucuuuuuuugaaauaaaauagccugucuuucagaucuaaaaaaaaaaaaaaaaaaaaaaaaaaaaaaaaaaaaaaaaaaaaaaaaaaaaaaaaaaaaaaaaugcaucccccccccccccccccccccccccccccccaaaggcucuuuucagagccaccagaauu

SEQ ID NO: 12875 - RNA, 588 nt, Artificial Sequence
  mRNA product Design a-1 comprising derived and/or modified sequence from MOPV/LASV reassortant(IGS-1;Clade IV)__AFY05533__Z (opt2)
gggagagucccgcagucggcguccagcggcucugcuuguucgugugugugucguugcaggccuuauucaagcuuaccaugggcaagacccaguccaagggccagcccuccaccaaccuccucaaggagaccgagccccgccaccccgucauccccgacgcccgcggcaccggccccgaguucugcaaguccugcugguucgagcgccgcggccucguccgcugcaacgaccacuaccucugccucaacugccucacccuccuccacaccgucuccgaccgcugccccaucugcaagcacaagcuccccuuccgccucgagcuccagacccagcccaccgccccccccgagaucccccccucccagaaccccccccccuacucccccugaggacuagucccuguucccagagcccacuuuuuuuucuuuuuuugaaauaaaauagccugucuuucagaucuaaaaaaaaaaaaaaaaaaaaaaaaaaaaaaaaaaaaaaaaaaaaaaaaaaaaaaaaaaaaaaaaugcaucccccccccccccccccccccccccccccccaaaggcucuuuucagagccaccagaauu

SEQ ID NO: 12876 - RNA, 576 nt, Artificial Sequence
  mRNA product Design a-1 comprising derived and/or modified sequence from LASV(LM776-SLE-2012;Clade IV)__AIT17824__Z (opt2)
gggagagucccgcagucggcguccagcggcucugcuuguucgugugugugucguugcaggccuuauucaagcuuaccaugggcaacaagcaggccaaggccuccgaggagaagaacuccccccgcgccucccucauccccgacgccacccaccucggcccccaguucugcaaguccugcugguucgagaacaagggccucgucgagugcaacaaccacuaccucugccucaacugccucacccuccuccucuccgucuccaaccgcugccccaucugcaagaugccccuccccaccaagcuccgccccuccaccacccccaccgccccccccaccggcgccgccgacuccauccgccccccccccuacucccccugaggacuagucccuguucccagagcccacuuuuuuuucuuuuuuugaaauaaaauagccugucuuucagaucuaaaaaaaaaaaaaaaaaaaaaaaaaaaaaaaaaaaaaaaaaaaaaaaaaaaaaaaaaaaaaaaaugcaucccccccccccccccccccccccccccccccaaaggcucuuuucagagccaccagaauu

SEQ ID NO: 12877 - RNA, 576 nt, Artificial Sequence
  mRNA product Design a-1 comprising derived and/or modified sequence from LASV(Mad39;Clade IV)__ANH09743__Z (opt2)
gggagagucccgcagucggcguccagcggcucugcuuguucgugugugugucguugcaggccuuauucaagcuuaccaugggcaacaagcaggccaaggccuccgaggucgaggacggcccccgcgccucccucauccccgacgccacccaccucggcccccaguucugcaaguccugcugguucgagaacaagucccucgucgagugcaacaaccacuaccucugccucaacugccucacccuccuccucuccgucuccaaccgcugccccaucugcaagaugccccuccccacccgccucaagcccuccgucguccccaccgccccccccacccgcgccggcgacggcacccgccccccccccuacucccccugaggacuagucccuguucccagagcccacuuuuuuuucuuuuuuugaaauaaaauagccugucuuucagaucuaaaaaaaaaaaaaaaaaaaaaaaaaaaaaaaaaaaaaaaaaaaaaaaaaaaaaaaaaaaaaaaaugcaucccccccccccccccccccccccccccccccaaaggcucuuuucagagccaccagaauu

SEQ ID NO: 12878 - RNA, 576 nt, Artificial Sequence
  mRNA product Design a-1 comprising derived and/or modified sequence from LASV(Z0947-SLE-2011;Clade IV)__AIT17838__Z (opt2)
gggagagucccgcagucggcguccagcggcucugcuuguucgugugugugucguugcaggccuuauucaagcuuaccaugggcaacaagcaggccaagguccccgaguccaaggacuccccccgcgccucccucauccccgacgccacccaccucggcccccaguucugcaaguccugcugguucgagaacaagggccucgucgagugcaacaaccacuaccucugccucaacugccucacccuccuccucuccgucuccaaccgcugccccaucugcaagaugccccuccccaccaagcucaagcccuccgccgcccccaccgccccccccaccggcgccgccgacuccauccgccccccccccuacucccccugaggacuagucccuguucccagagcccacuuuuuuuucuuuuuuugaaauaaaauagccugucuuucagaucuaaaaaaaaaaaaaaaaaaaaaaaaaaaaaaaaaaaaaaaaaaaaaaaaaaaaaaaaaaaaaaaaugcaucccccccccccccccccccccccccccccccaaaggcucuuuucagagccaccagaauu

SEQ ID NO: 12879 - RNA, 576 nt, Artificial Sequence
  mRNA product Design a-1 comprising derived and/or modified sequence from LASV(Josiah;Clade IV)__ADY11072/NP_694871__Z (opt3)
gggagagucccgcagucggcguccagcggcucugcuuguucgugugugugucguugcaggccuuauucaagcuuaccaugggcaacaagcaggccaaggcucccgagagcaaggacuccccuagagcaucucugaucccagaugccacccaccucgggccgcaauucugcaaaucauguugguuugaaaauaagggacuuguggagugcaacaaucauuaccuguguuugaacugcuuaacacugcuacucagugucagcaauaggugucccauuugcaaaaugccucugccaacuaaacuucggcccuccgcggcuccuacggccccacccaccggugcagccgacucuauacgcccuccaccguauucgcccugaggacuagucccuguucccagagcccacuuuuuuuucuuuuuuugaaauaaaauagccugucuuucagaucuaaaaaaaaaaaaaaaaaaaaaaaaaaaaaaaaaaaaaaaaaaaaaaaaaaaaaaaaaaaaaaaaugcaucccccccccccccccccccccccccccccccaaaggcucuuuucagagccaccagaauu

SEQ ID NO: 12880 - RNA, 579 nt, Artificial Sequence
  mRNA product Design a-1 comprising derived and/or modified sequence from LASV(Pinneo-NIG-1969;Clade I)__AIT17834__Z (opt3)
gggagagucccgcagucggcguccagcggcucugcuuguucgugugugugucguugcaggccuuauucaagcuuaccaugggcaacaagcagaccagaagcccucccaaaccagagcacccgaggcccacacugcucccugacgccucccaucuugggccacaauucugcaagucuuguugguuugaaaauaaaggacugguggagugcaacaaucacuacuuguguuuaaacugccugacucuacuccugucagucagugaucggugucccaucugcaagaugccucuuccaacgaaacuggcuguucgcacccagcccagcgcaccuccauugaaucaggguaacacacaguccucuccgcccccuuauucgccaugaggacuagucccuguucccagagcccacuuuuuuuucuuuuuuugaaauaaaauagccugucuuucagaucuaaaaaaaaaaaaaaaaaaaaaaaaaaaaaaaaaaaaaaaaaaaaaaaaaaaaaaaaaaaaaaaaugcaucccccccccccccccccccccccccccccccaaaggcucuuuucagagccaccagaauu

SEQ ID NO: 12881 - RNA, 576 nt, Artificial Sequence
  mRNA product Design a-1 comprising derived and/or modified sequence from LASV(Nig08-04;Clade II)__ADU56612__Z (opt3)
gggagagucccgcagucggcguccagcggcucugcuuguucgugugugugucguugcaggccuuauucaagcuuaccaugggcaacagacagaccaggcccacagaggccacugaacaaagccgggcucaccuggugccugacgcaucccaucucgggccacaguucugcaagucuuguugguuugagaaucgcggacuugucgaaugcaacaaucacuaccuguguuugaacugcuuaucacugcuacucaguguuagcucccgauguccgaucugcaaaaugccccugccuacgcgucuuaaggccucugcgcagccaucggcucccccuaccgaggccccacagaauacaacucccccuccauauaccccgugaggacuagucccuguucccagagcccacuuuuuuuucuuuuuuugaaauaaaauagccugucuuucagaucuaaaaaaaaaaaaaaaaaaaaaaaaaaaaaaaaaaaaaaaaaaaaaaaaaaaaaaaaaaaaaaaaugcaucccccccccccccccccccccccccccccccaaaggcucuuuucagagccaccagaauu

SEQ ID NO: 12882 - RNA, 576 nt, Artificial Sequence
  mRNA product Design a-1 comprising derived and/or modified sequence from LASV(Nig08-A19;Clade III)__ADU56620__Z (opt3)
gggagagucccgcagucggcguccagcggcucugcuuguucgugugugugucguugcaggccuuauucaagcuuaccaugggcgggaagcacaccaaaccccagagagagagcaacuccccuagggccucucugaucccagacgcuacacaucucggaccgcaauucugcaagucauguugguuugaaaauaaaggucuuguggagugcaacaaucacuaccuguguuugaacugcuuaacucugcuacucagugucagcaaucggugucccauuugcaagaugccucugccaacgcgccuucgagcauccaccaaccccacagccccucagguugaacaggugggcccaacuaaucccccuccauauucuccgugaggacuagucccuguucccagagcccacuuuuuuuucuuuuuuugaaauaaaauagccugucuuucagaucuaaaaaaaaaaaaaaaaaaaaaaaaaaaaaaaaaaaaaaaaaaaaaaaaaaaaaaaaaaaaaaaaugcaucccccccccccccccccccccccccccccccaaaggcucuuuucagagccaccagaauu

SEQ ID NO: 12883 - RNA, 576 nt, Artificial Sequence
  mRNA product Design a-1 comprising derived and/or modified sequence from LASV(AV;Clade V)__CCA30312__Z (opt3)
gggagagucccgcagucggcguccagcggcucugcuuguucgugugugugucguugcaggccuuauucaagcuuaccaugggcaacagacaggccaagaaucccgagguggaaaacagcccuagggcuucccugaucccagacgcaacccaccucgggccgcaauucugcaaaucuuguugguuugagaauaagggacuugucgaaugcaacaaucauuaccuguguuugaacugcuuaucacugcuacucaguguuagcaaucggugucccauuugcaaaaugccucugccaacacgccuucgacccacuacgaccccuacagccccacagauaaucaaggagaacacuaccaaucccccuccauauacaccgugaggacuagucccuguucccagagcccacuuuuuuuucuuuuuuugaaauaaaauagccugucuuucagaucuaaaaaaaaaaaaaaaaaaaaaaaaaaaaaaaaaaaaaaaaaaaaaaaaaaaaaaaaaaaaaaaaugcaucccccccccccccccccccccccccccccccaaaggcucuuuucagagccaccagaauu

SEQ ID NO: 12884 - RNA, 576 nt, Artificial Sequence
  mRNA product Design a-1 comprising derived and/or modified sequence from LASV(Togo/2016/7082;Clade VI)__AMR44579__Z (opt3)
gggagagucccgcagucggcguccagcggcucugcuuguucgugugugugucguugcaggccuuauucaagcuuaccaugggcgccagacagaccaagcaaccccagaucgaggggagcccuagggcuucccuggugccagacgcaucucaccucggaccgcaguucugcaagucauguugguuugaaaacaagggucuugucgagugcaauaaccauuaccuguguuugaauugcuuaagucugcuacucagcguuuccaaccggugucccauuugcaaaaugccucugccaacaaaacuucgcgugucuucggcccccucagcgccuccagcugccacugcacagcccggcacgccuccaccguauagccccugaggacuagucccuguucccagagcccacuuuuuuuucuuuuuuugaaauaaaauagccugucuuucagaucuaaaaaaaaaaaaaaaaaaaaaaaaaaaaaaaaaaaaaaaaaaaaaaaaaaaaaaaaaaaaaaaaugcaucccccccccccccccccccccccccccccccaaaggcucuuuucagagccaccagaauu

SEQ ID NO: 12885 - RNA, 576 nt, Artificial Sequence
  mRNA product Design a-1 comprising derived and/or modified sequence from LASV(KAK-428;Clade n.d. (VII))__ANH09761__Z (opt3)
gggagagucccgcagucggcguccagcggcucugcuuguucgugugugugucguugcaggccuuauucaagcuuaccaugggcaacaaggggaccaaacccacacagaauagcgagccuuccagagccaaccuggugccagacgcuucuuaccucggaccgcaauucugcaagucauguugguuugaaaauaaaggucuugucgagugcaacaaucacuaucuguguuugaacugcuuaacuaugcugcuaaguguuagcaauaggugucccaucugcaagaugccucucccaacgaaaauuaaggcauccggcucucccucggccccuccaaccgaagcgaacucagcugugagcccucccccauacacaccgugaggacuagucccuguucccagagcccacuuuuuuuucuuuuuuugaaauaaaauagccugucuuucagaucuaaaaaaaaaaaaaaaaaaaaaaaaaaaaaaaaaaaaaaaaaaaaaaaaaaaaaaaaaaaaaaaaugcaucccccccccccccccccccccccccccccccaaaggcucuuuucagagccaccagaauu

SEQ ID NO: 12886 - RNA, 576 nt, Artificial Sequence
  mRNA product Design a-1 comprising derived and/or modified sequence from LASV(ISTH0009-NIG-2011;Clade II)__AIT17402__Z (opt3)
gggagagucccgcagucggcguccagcggcucugcuuguucgugugugugucguugcaggccuuauucaagcuuaccaugggcaacagacaggccaagagcaccaaaguggacgagcaccaaagggcucaucugguccccgaugcaucccaccucgggccucaguucugcaagucuuguugguuugaaaaucggggacuuguugagugcaacaaucauuaccuguguuugaacugcuuaucacugcuacucagugugagcucccgcuguccaaucugcaaaaugccgcugcccacaaaacuuaaggccgcggcucagccuucugccccaucgacugaaacgauucagaauaccacacccccuccauauacucccugaggacuagucccuguucccagagcccacuuuuuuuucuuuuuuugaaauaaaauagccugucuuucagaucuaaaaaaaaaaaaaaaaaaaaaaaaaaaaaaaaaaaaaaaaaaaaaaaaaaaaaaaaaaaaaaaaugcaucccccccccccccccccccccccccccccccaaaggcucuuuucagagccaccagaauu

SEQ ID NO: 12887 - RNA, 576 nt, Artificial Sequence
  mRNA product Design a-1 comprising derived and/or modified sequence from LASV(ISTH2010-NIG-2012;Clade II)__AIT17480__Z (opt3)
gggagagucccgcagucggcguccagcggcucugcuuguucgugugugugucguugcaggccuuauucaagcuuaccaugggcaacagacacgccaagagcaccaaaguggacgagcaucagagggcucaccugguccccgaugcaucccaucucgggccucaauucugcaagucuuguugguuugaaaaucggggacuuguugagugcaacaaucacuaccuguguuugaacugcuuaucacugcuacucagugugagcucccgcuguccaaucugcaaaaugccgcugcccacaaaacuuaaggccgcggcucagccuucugccccaucgacugaaguaauucagucaacgacacccccuccauauacccccugaggacuagucccuguucccagagcccacuuuuuuuucuuuuuuugaaauaaaauagccugucuuucagaucuaaaaaaaaaaaaaaaaaaaaaaaaaaaaaaaaaaaaaaaaaaaaaaaaaaaaaaaaaaaaaaaaugcaucccccccccccccccccccccccccccccccaaaggcucuuuucagagccaccagaauu

SEQ ID NO: 12888 - RNA, 576 nt, Artificial Sequence
  mRNA product Design a-1 comprising derived and/or modified sequence from LASV(Lassa virus/H.sapiens-wt/NGA/2016/ISTH_0017;Clade II)__AVO03713__Z (opt3)
gggagagucccgcagucggcguccagcggcucugcuuguucgugugugugucguugcaggccuuauucaagcuuaccaugggcaacagacaggccaagagcaccaaaguggacgagcaccaaagggcucaucugguccccgaugcaucccaccucgggccucaguucugcaagucuuguugguuugaaaaucggggacuuguugagugcaacaaucauuaccuguguuugaacugcuuaucacugcuacucagugugagcucccgcuguccaaucugcaaaaugccgcugcccacaaaacuuaaggccgcgacucagccuucugcuccaucgacggaaguaaaucagaacaccacacccccuccauauacucccugaggacuagucccuguucccagagcccacuuuuuuuucuuuuuuugaaauaaaauagccugucuuucagaucuaaaaaaaaaaaaaaaaaaaaaaaaaaaaaaaaaaaaaaaaaaaaaaaaaaaaaaaaaaaaaaaaugcaucccccccccccccccccccccccccccccccaaaggcucuuuucagagccaccagaauu

SEQ ID NO: 12889 - RNA, 576 nt, Artificial Sequence
  mRNA product Design a-1 comprising derived and/or modified sequence from LASV(Lassa virus/H.sapiens-wt/NGA/2018/ISTH_0959;Clade II)__AVV65084__Z (opt3)
gggagagucccgcagucggcguccagcggcucugcuuguucgugugugugucguugcaggccuuauucaagcuuaccaugggcaacaagcaggccaaaagcaccaagguggacgagcaccaaagagcucaucugguccccgaugcaucccaccucgggccucaguucugcaaaucuuguugguuugaaaauaggggacuuguugagugcaacaaucauuaccuguguuugaacugcuuaucacugcuacucagugugagcucccgguguccaaucugcaagaugccgcugcccacaaaacuuaaggccgcggcucagccuucugccccaucgacugaagcaauucagucaacgacacccccuccauauacccccugaggacuagucccuguucccagagcccacuuuuuuuucuuuuuuugaaauaaaauagccugucuuucagaucuaaaaaaaaaaaaaaaaaaaaaaaaaaaaaaaaaaaaaaaaaaaaaaaaaaaaaaaaaaaaaaaaugcaucccccccccccccccccccccccccccccccaaaggcucuuuucagagccaccagaauu

SEQ ID NO: 12890 - RNA, 576 nt, Artificial Sequence
  mRNA product Design a-1 comprising derived and/or modified sequence from LASV(LASV003-NIG-2008;Clade II)__AIT17578__Z (opt3)
gggagagucccgcagucggcguccagcggcucugcuuguucgugugugugucguugcaggccuuauucaagcuuaccaugggcaacagacaggccaagagcaccaaaguggacgagcaccaaagggcucaucugguccccgaugcaucccaccucgggccucaguucugcaagucuuguugguuugaaaauaaaggacuuguugagugcaacaaucauuaccuguguuugaacugcuuaucacugcuacucagugugagcucccgguguccaaucugcaagaugccgcugcccacaaaacuucgcgccgcggcucagccuucugccccaucgacugaaucagcacagaauacggcucccccuccauaugcccccugaggacuagucccuguucccagagcccacuuuuuuuucuuuuuuugaaauaaaauagccugucuuucagaucuaaaaaaaaaaaaaaaaaaaaaaaaaaaaaaaaaaaaaaaaaaaaaaaaaaaaaaaaaaaaaaaaugcaucccccccccccccccccccccccccccccccaaaggcucuuuucagagccaccagaauu

SEQ ID NO: 12891 - RNA, 576 nt, Artificial Sequence
  mRNA product Design a-1 comprising derived and/or modified sequence from LASV(LASV035-NIG-2009;Clade II)__AIT17586__Z (opt3)
gggagagucccgcagucggcguccagcggcucugcuuguucgugugugugucguugcaggccuuauucaagcuuaccaugggcaacaagcaggccaaaagcaccaagguggacgagcaccaaagagcucaucugguccccgaugcaucccaccucgggccucaguucugcaaaucuuguugguuugaaaauaggggacuuguugagugcaacaaucauuaccuguguuugaacugcuuaucacugcuacucagugugagcucccgguguccaaucugcaagaugccgcugcccacacgccuuaaagccgcggcucagccuucugccccaucgacugaaguaacgcagaauaccacacccccuccauauacucccugaggacuagucccuguucccagagcccacuuuuuuuucuuuuuuugaaauaaaauagccugucuuucagaucuaaaaaaaaaaaaaaaaaaaaaaaaaaaaaaaaaaaaaaaaaaaaaaaaaaaaaaaaaaaaaaaaugcaucccccccccccccccccccccccccccccccaaaggcucuuuucagagccaccagaauu

SEQ ID NO: 12892 - RNA, 576 nt, Artificial Sequence
  mRNA product Design a-1 comprising derived and/or modified sequence from LASV(LASV1000-NIG-2009;Clade II)__AIT17780__Z (opt3)
gggagagucccgcagucggcguccagcggcucugcuuguucgugugugugucguugcaggccuuauucaagcuuaccaugggcaacagacagaccaagagcacaaaaguggacgagcaccaaagggccuaccugguccccgaugcuucccuccuugggccucaguucugcaagucuuguugguuugaaaauaaaggacugguugagugcaacaaucauuauuuguguuuaaacugccugucacuacuccugagugugagcucccgguguccaaucugcaagaugccgcuucccacucgccugaaagcagccgcgcagccuucugcuccacccacggaagccauucagaauaccacaccuccacccuacacuccuugaggacuagucccuguucccagagcccacuuuuuuuucuuuuuuugaaauaaaauagccugucuuucagaucuaaaaaaaaaaaaaaaaaaaaaaaaaaaaaaaaaaaaaaaaaaaaaaaaaaaaaaaaaaaaaaaaugcaucccccccccccccccccccccccccccccccaaaggcucuuuucagagccaccagaauu

SEQ ID NO: 12893 - RNA, 576 nt, Artificial Sequence
  mRNA product Design a-1 comprising derived and/or modified sequence from LASV(LASV221-NIG-2010;Clade II)__AIT17622__Z (opt3)
gggagagucccgcagucggcguccagcggcucugcuuguucgugugugugucguugcaggccuuauucaagcuuaccaugggcaacagacaggccaagagcaccaaaguggacgagcaccaaagggcucaucugguccccgaugcaucccaccucgggccucaguucugcaagucuuguugguuugaaaaucggggacuuguugagugcaacaaucauuaccuguguuugaacugcuuaucacugcuacucagugugagcucccgcuguccaaucugcaaaaugccgcugcccacaaaacuuaaggccgcgacucagccuucugcuccaucgacggaaguaacccagaauacaauucccccuccauauucacccugaggacuagucccuguucccagagcccacuuuuuuuucuuuuuuugaaauaaaauagccugucuuucagaucuaaaaaaaaaaaaaaaaaaaaaaaaaaaaaaaaaaaaaaaaaaaaaaaaaaaaaaaaaaaaaaaaugcaucccccccccccccccccccccccccccccccaaaggcucuuuucagagccaccagaauu

SEQ ID NO: 12894 - RNA, 576 nt, Artificial Sequence
  mRNA product Design a-1 comprising derived and/or modified sequence from LASV(LASV237-NIG-2010;Clade II)__AIT17636__Z (opt3)
gggagagucccgcagucggcguccagcggcucugcuuguucgugugugugucguugcaggccuuauucaagcuuaccaugggcaacagacaggccaagagcaccaaaguggacgagcaccaaagggcucaucugguccccgaugcaucccaccucgggccucaguucugcaagucuuguugguuugaaaaucggggacuuguugagugcaacaaucauuaccuguguuugaacugcuuaucacugcuacucagugugagcucccgcuguccaaucugcaaaaugccgcugcccacaaaacuuaaggccgcggcucagccuucugccccaucgauugaaacuauacagaauacgacacccccuccauauacccccugaggacuagucccuguucccagagcccacuuuuuuuucuuuuuuugaaauaaaauagccugucuuucagaucuaaaaaaaaaaaaaaaaaaaaaaaaaaaaaaaaaaaaaaaaaaaaaaaaaaaaaaaaaaaaaaaaugcaucccccccccccccccccccccccccccccccaaaggcucuuuucagagccaccagaauu

SEQ ID NO: 12895 - RNA, 576 nt, Artificial Sequence
  mRNA product Design a-1 comprising derived and/or modified sequence from LASV(LASV253-NIG-2011;Clade II)__AIT17668__Z (opt3)
gggagagucccgcagucggcguccagcggcucugcuuguucgugugugugucguugcaggccuuauucaagcuuaccaugggcaacagacaggccaagagcaccaaaguggacgagcaccaaagggcucaucugguccccgaugcaucccaccucgggccucaguucugcaagucuuguugguuugaaaauaaaggacuuguugagugcaacaaucauuaccuguguuugaacugcuuaucacugcuacucagugugagcucccgguguccaaucugcaagaugccgcugcccacaaaacuuaagacuacggcccagccuucugcgccacccaccgaagcugccaagaauacagcaccuccacccuaugccccuugaggacuagucccuguucccagagcccacuuuuuuuucuuuuuuugaaauaaaauagccugucuuucagaucuaaaaaaaaaaaaaaaaaaaaaaaaaaaaaaaaaaaaaaaaaaaaaaaaaaaaaaaaaaaaaaaaugcaucccccccccccccccccccccccccccccccaaaggcucuuuucagagccaccagaauu

SEQ ID NO: 12896 - RNA, 576 nt, Artificial Sequence
  mRNA product Design a-1 comprising derived and/or modified sequence from LASV(G1180-SLE-2010;Clade IV)__AIT17166__Z (opt3)
gggagagucccgcagucggcguccagcggcucugcuuguucgugugugugucguugcaggccuuauucaagcuuaccaugggcaacaagcaggccaaggcucccgaggcaaaggacagcccuagagccucccugaucccagaugcgacccaccucgggccgcaauucugcaaaucuuguugguuugaaacaaagggacuuguggagugcaauaaccauuaccuguguuugaauugcuuaacucugcuacucucagucaguaacaggugucccauuugcaaaaugccucugccaacgaaacuucggcccagcgcuaccccuacagccccacccacugaagcagccgacuccauagguccuccaccguauucucccugaggacuagucccuguucccagagcccacuuuuuuuucuuuuuuugaaauaaaauagccugucuuucagaucuaaaaaaaaaaaaaaaaaaaaaaaaaaaaaaaaaaaaaaaaaaaaaaaaaaaaaaaaaaaaaaaaugcaucccccccccccccccccccccccccccccccaaaggcucuuuucagagccaccagaauu

SEQ ID NO: 12897 - RNA, 576 nt, Artificial Sequence
  mRNA product Design a-1 comprising derived and/or modified sequence from LASV(G1442-SLE-2011;Clade IV)__AIT17178__Z (opt3)
gggagagucccgcagucggcguccagcggcucugcuuguucgugugugugucguugcaggccuuauucaagcuuaccaugggcaacaagcaggccaaagcuagcgaggcaaaggacucccccagagccucucugaucccugaugcgacccaccucgggccacaauucugcaaaucauguugguuugaaaauaagggacuuguggagugcaacaaucauuaccuguguuugaacugcuuaagucugcuacucagcgucuccucuagguguccgauuugcaaaaugccccugccuacacggcuucgcccaucgacugcucccacggccccuccagcacgagccggugacaauauaaagcccccuccauauucaccgugaggacuagucccuguucccagagcccacuuuuuuuucuuuuuuugaaauaaaauagccugucuuucagaucuaaaaaaaaaaaaaaaaaaaaaaaaaaaaaaaaaaaaaaaaaaaaaaaaaaaaaaaaaaaaaaaaugcaucccccccccccccccccccccccccccccccaaaggcucuuuucagagccaccagaauu

SEQ ID NO: 12898 - RNA, 576 nt, Artificial Sequence
  mRNA product Design a-1 comprising derived and/or modified sequence from LASV(G502-SLE-2009;Clade IV)__AIT17124__Z (opt3)
gggagagucccgcagucggcguccagcggcucugcuuguucgugugugugucguugcaggccuuauucaagcuuaccaugggcaacaaacaggugaagacccccgaggccaaggacagcccuagagcuucccugaucccagaugcaacacaccucgggccgcaauucugcaagucuuguugguuugaaaauaagggacuugucgagugcaacaaucauuaccuguguuugaacugcuuaacucugcuacucucaguugguaauaggugucccauuugcaaaaugccucugccaacgaaacuucggcccagugugaccccuacagccccacccacucgcgcggcugacagcauaggcccuccaccguauucccccugaggacuagucccuguucccagagcccacuuuuuuuucuuuuuuugaaauaaaauagccugucuuucagaucuaaaaaaaaaaaaaaaaaaaaaaaaaaaaaaaaaaaaaaaaaaaaaaaaaaaaaaaaaaaaaaaaugcaucccccccccccccccccccccccccccccccaaaggcucuuuucagagccaccagaauu

SEQ ID NO: 12899 - RNA, 576 nt, Artificial Sequence
  mRNA product Design a-1 comprising derived and/or modified sequence from LASV(G733-SLE-2010;Clade IV)__AIT17152__Z (opt3)
gggagagucccgcagucggcguccagcggcucugcuuguucgugugugugucguugcaggccuuauucaagcuuaccaugggcaacaagcaggccaagacccccgagacaaaggacagcccuagagcuucccugaucccagaugcaacucaccucgggccgcaauucugcaaaucuuguugguuugaaaauaagggacuuguggagugcaacaaucauuaccuguguuugaacugcuuaacgcugcuacucucagucaguaauaggugucccauuugcaaaaugccucugccaaccaaacuucggcccagcacagccccuacugcgccacccgcuggugccgcagacaacacccgcccuccaccguauucccccugaggacuagucccuguucccagagcccacuuuuuuuucuuuuuuugaaauaaaauagccugucuuucagaucuaaaaaaaaaaaaaaaaaaaaaaaaaaaaaaaaaaaaaaaaaaaaaaaaaaaaaaaaaaaaaaaaugcaucccccccccccccccccccccccccccccccaaaggcucuuuucagagccaccagaauu

SEQ ID NO: 12900 - RNA, 588 nt, Artificial Sequence
  mRNA product Design a-1 comprising derived and/or modified sequence from MOPV/LASV reassortant(IGS-1;Clade IV)__AFY05533__Z (opt3)
gggagagucccgcagucggcguccagcggcucugcuuguucgugugugugucguugcaggccuuauucaagcuuaccaugggcaagacccagagcaaagggcaacccuccacaaaccugcucaaggagacugaaccuagacacccagugaucccggacgccaggggaacgggucccgaguucugcaaaucuuguugguuugaacggcgcggccuuguccgaugcaaugaucauuaccuguguuugaacugcuuaacccugcuacacacaguuucagaccguuguccuauuugcaagcauaaacucccauucagacuggagcuucagacucagcccaccgcuccuccagaaauacccccuagucagaauccaccgcccuauagcccuugaggacuagucccuguucccagagcccacuuuuuuuucuuuuuuugaaauaaaauagccugucuuucagaucuaaaaaaaaaaaaaaaaaaaaaaaaaaaaaaaaaaaaaaaaaaaaaaaaaaaaaaaaaaaaaaaaugcaucccccccccccccccccccccccccccccccaaaggcucuuuucagagccaccagaauu

SEQ ID NO: 12901 - RNA, 576 nt, Artificial Sequence
  mRNA product Design a-1 comprising derived and/or modified sequence from LASV(LM776-SLE-2012;Clade IV)__AIT17824__Z (opt3)
gggagagucccgcagucggcguccagcggcucugcuuguucgugugugugucguugcaggccuuauucaagcuuaccaugggcaacaagcaggccaaggcuagcgaggaaaagaacucccccagagcaucucugaucccugacgccacccaccucgggccacaauucugcaaaucauguugguuugagaauaagggacuuguggaaugcaauaaccauuaccuguguuugaauugcuuaacacugcuacucagugucagcaacagguguccgauuugcaaaaugccccugccuacuaaacuucggccauccacgacccccacagcgccuccaacuggugcugccgauucuauacgcccucccccauauucgccgugaggacuagucccuguucccagagcccacuuuuuuuucuuuuuuugaaauaaaauagccugucuuucagaucuaaaaaaaaaaaaaaaaaaaaaaaaaaaaaaaaaaaaaaaaaaaaaaaaaaaaaaaaaaaaaaaaugcaucccccccccccccccccccccccccccccccaaaggcucuuuucagagccaccagaauu

SEQ ID NO: 12902 - RNA, 576 nt, Artificial Sequence
  mRNA product Design a-1 comprising derived and/or modified sequence from LASV(Mad39;Clade IV)__ANH09743__Z (opt3)
gggagagucccgcagucggcguccagcggcucugcuuguucgugugugugucguugcaggccuuauucaagcuuaccaugggcaacaagcaggccaaagcuagcgagguggaagacgggcccagagcaucccugaucccugaugccacccaccucggaccacaauucugcaagucuuguugguuugagaauaaaucacuugucgaaugcaacaaucauuaccuguguuugaacugcuuaacacugcuacucaguguuagcaauagguguccgauuugcaagaugccccugccuacucggcuuaaaccauccgugguacccacggcgccuccaacccgcgcuggugacggcacacgacccccuccauauucuccgugaggacuagucccuguucccagagcccacuuuuuuuucuuuuuuugaaauaaaauagccugucuuucagaucuaaaaaaaaaaaaaaaaaaaaaaaaaaaaaaaaaaaaaaaaaaaaaaaaaaaaaaaaaaaaaaaaugcaucccccccccccccccccccccccccccccccaaaggcucuuuucagagccaccagaauu

SEQ ID NO: 12903 - RNA, 576 nt, Artificial Sequence
  mRNA product Design a-1 comprising derived and/or modified sequence from LASV(Z0947-SLE-2011;Clade IV)__AIT17838__Z (opt3)
gggagagucccgcagucggcguccagcggcucugcuuguucgugugugugucguugcaggccuuauucaagcuuaccaugggcaacaagcaggccaaggugcccgagagcaaggacuccccuagagcuucucugaucccagaugcaacccaccucgggccgcaauucugcaaaucauguugguuugaaaauaagggacuugucgagugcaacaaucauuaccuguguuugaacugcuuaacacugcuacucaguguuagcaauaggugucccauuugcaaaaugccucugccaacuaaacuuaagcccuccgccgcgccuacggcuccacccaccggugccgcagacucuauacggccuccaccguauucgcccugaggacuagucccuguucccagagcccacuuuuuuuucuuuuuuugaaauaaaauagccugucuuucagaucuaaaaaaaaaaaaaaaaaaaaaaaaaaaaaaaaaaaaaaaaaaaaaaaaaaaaaaaaaaaaaaaaugcaucccccccccccccccccccccccccccccccaaaggcucuuuucagagccaccagaauu

SEQ ID NO: 12904 - RNA, 576 nt, Artificial Sequence
  mRNA product Design a-1 comprising derived and/or modified sequence from LASV(Josiah;Clade IV)__ADY11072/NP_694871__Z (opt4)
gggagagucccgcagucggcguccagcggcucugcuuguucgugugugugucguugcaggccuuauucaagcuuaccaugggcaacaagcaggccaaggcccccgagagcaaggacagccccagagccagccugauccccgacgccacccaccugggcccccaguucugcaagagcugcugguucgagaacaagggccugguggagugcaacaaccacuaccugugccugaacugccugacccugcugcugagcgugagcaacagaugccccaucugcaagaugccccugcccaccaagcugagacccagcgccgcccccaccgccccccccaccggcgccgccgacagcaucagacccccccccuacagccccugaggacuagucccuguucccagagcccacuuuuuuuucuuuuuuugaaauaaaauagccugucuuucagaucuaaaaaaaaaaaaaaaaaaaaaaaaaaaaaaaaaaaaaaaaaaaaaaaaaaaaaaaaaaaaaaaaugcaucccccccccccccccccccccccccccccccaaaggcucuuuucagagccaccagaauu

SEQ ID NO: 12905 - RNA, 579 nt, Artificial Sequence
  mRNA product Design a-1 comprising derived and/or modified sequence from LASV(Pinneo-NIG-1969;Clade I)__AIT17834__Z (opt4)
gggagagucccgcagucggcguccagcggcucugcuuguucgugugugugucguugcaggccuuauucaagcuuaccaugggcaacaagcagaccagaagcccccccaagcccgagcaccccagacccacccugcugcccgacgccagccaccugggcccccaguucugcaagagcugcugguucgagaacaagggccugguggagugcaacaaccacuaccugugccugaacugccugacccugcugcugagcgugagcgacagaugccccaucugcaagaugccccugcccaccaagcuggccgugagaacccagcccagcgcccccccccugaaccagggcaacacccagagcagccccccccccuacagccccugaggacuagucccuguucccagagcccacuuuuuuuucuuuuuuugaaauaaaauagccugucuuucagaucuaaaaaaaaaaaaaaaaaaaaaaaaaaaaaaaaaaaaaaaaaaaaaaaaaaaaaaaaaaaaaaaaugcaucccccccccccccccccccccccccccccccaaaggcucuuuucagagccaccagaauu

SEQ ID NO: 12906 - RNA, 576 nt, Artificial Sequence
  mRNA product Design a-1 comprising derived and/or modified sequence from LASV(Nig08-04;Clade II)__ADU56612__Z (opt4)
gggagagucccgcagucggcguccagcggcucugcuuguucgugugugugucguugcaggccuuauucaagcuuaccaugggcaacagacagaccagacccaccgaggccaccgagcagagcagagcccaccuggugcccgacgccagccaccugggcccccaguucugcaagagcugcugguucgagaacagaggccugguggagugcaacaaccacuaccugugccugaacugccugagccugcugcugagcgugagcagcagaugccccaucugcaagaugccccugcccaccagacugaaggccagcgcccagcccagcgccccccccaccgaggccccccagaacaccacccccccccccuacacccccugaggacuagucccuguucccagagcccacuuuuuuuucuuuuuuugaaauaaaauagccugucuuucagaucuaaaaaaaaaaaaaaaaaaaaaaaaaaaaaaaaaaaaaaaaaaaaaaaaaaaaaaaaaaaaaaaaugcaucccccccccccccccccccccccccccccccaaaggcucuuuucagagccaccagaauu

SEQ ID NO: 12907 - RNA, 576 nt, Artificial Sequence
  mRNA product Design a-1 comprising derived and/or modified sequence from LASV(Nig08-A19;Clade III)__ADU56620__Z (opt4)
gggagagucccgcagucggcguccagcggcucugcuuguucgugugugugucguugcaggccuuauucaagcuuaccaugggcggcaagcacaccaagccccagagagagagcaacagccccagagccagccugauccccgacgccacccaccugggcccccaguucugcaagagcugcugguucgagaacaagggccugguggagugcaacaaccacuaccugugccugaacugccugacccugcugcugagcgugagcaacagaugccccaucugcaagaugccccugcccaccagacugagagccagcaccaaccccaccgccccccagguggagcaggugggccccaccaaccccccccccuacagccccugaggacuagucccuguucccagagcccacuuuuuuuucuuuuuuugaaauaaaauagccugucuuucagaucuaaaaaaaaaaaaaaaaaaaaaaaaaaaaaaaaaaaaaaaaaaaaaaaaaaaaaaaaaaaaaaaaugcaucccccccccccccccccccccccccccccccaaaggcucuuuucagagccaccagaauu

SEQ ID NO: 12908 - RNA, 576 nt, Artificial Sequence
  mRNA product Design a-1 comprising derived and/or modified sequence from LASV(AV;Clade V)__CCA30312__Z (opt4)
gggagagucccgcagucggcguccagcggcucugcuuguucgugugugugucguugcaggccuuauucaagcuuaccaugggcaacagacaggccaagaaccccgagguggagaacagccccagagccagccugauccccgacgccacccaccugggcccccaguucugcaagagcugcugguucgagaacaagggccugguggagugcaacaaccacuaccugugccugaacugccugagccugcugcugagcgugagcaacagaugccccaucugcaagaugccccugcccaccagacugagacccaccaccacccccaccgccccccagaucaucaaggagaacaccaccaaccccccccccuacacccccugaggacuagucccuguucccagagcccacuuuuuuuucuuuuuuugaaauaaaauagccugucuuucagaucuaaaaaaaaaaaaaaaaaaaaaaaaaaaaaaaaaaaaaaaaaaaaaaaaaaaaaaaaaaaaaaaaugcaucccccccccccccccccccccccccccccccaaaggcucuuuucagagccaccagaauu

SEQ ID NO: 12909 - RNA, 576 nt, Artificial Sequence
  mRNA product Design a-1 comprising derived and/or modified sequence from LASV(Togo/2016/7082;Clade VI)__AMR44579__Z (opt4)
gggagagucccgcagucggcguccagcggcucugcuuguucgugugugugucguugcaggccuuauucaagcuuaccaugggcgccagacagaccaagcagccccagaucgagggcagccccagagccagccuggugcccgacgccagccaccugggcccccaguucugcaagagcugcugguucgagaacaagggccugguggagugcaacaaccacuaccugugccugaacugccugagccugcugcugagcgugagcaacagaugccccaucugcaagaugccccugcccaccaagcugagagugagcagcgcccccagcgccccccccgccgccaccgcccagcccggcacccccccccccuacagccccugaggacuagucccuguucccagagcccacuuuuuuuucuuuuuuugaaauaaaauagccugucuuucagaucuaaaaaaaaaaaaaaaaaaaaaaaaaaaaaaaaaaaaaaaaaaaaaaaaaaaaaaaaaaaaaaaaugcaucccccccccccccccccccccccccccccccaaaggcucuuuucagagccaccagaauu

SEQ ID NO: 12910 - RNA, 576 nt, Artificial Sequence
  mRNA product Design a-1 comprising derived and/or modified sequence from LASV(KAK-428;Clade n.d. (VII))__ANH09761__Z (opt4)
gggagagucccgcagucggcguccagcggcucugcuuguucgugugugugucguugcaggccuuauucaagcuuaccaugggcaacaagggcaccaagcccacccagaacagcgagcccagcagagccaaccuggugcccgacgccagcuaccugggcccccaguucugcaagagcugcugguucgagaacaagggccugguggagugcaacaaccacuaccugugccugaacugccugaccaugcugcugagcgugagcaacagaugccccaucugcaagaugccccugcccaccaagaucaaggccagcggcagccccagcgccccccccaccgaggccaacagcgccgugagccccccccccuacacccccugaggacuagucccuguucccagagcccacuuuuuuuucuuuuuuugaaauaaaauagccugucuuucagaucuaaaaaaaaaaaaaaaaaaaaaaaaaaaaaaaaaaaaaaaaaaaaaaaaaaaaaaaaaaaaaaaaugcaucccccccccccccccccccccccccccccccaaaggcucuuuucagagccaccagaauu

SEQ ID NO: 12911 - RNA, 576 nt, Artificial Sequence
  mRNA product Design a-1 comprising derived and/or modified sequence from LASV(ISTH0009-NIG-2011;Clade II)__AIT17402__Z (opt4)
gggagagucccgcagucggcguccagcggcucugcuuguucgugugugugucguugcaggccuuauucaagcuuaccaugggcaacagacaggccaagagcaccaagguggacgagcaccagagagcccaccuggugcccgacgccagccaccugggcccccaguucugcaagagcugcugguucgagaacagaggccugguggagugcaacaaccacuaccugugccugaacugccugagccugcugcugagcgugagcagcagaugccccaucugcaagaugccccugcccaccaagcugaaggccgccgcccagcccagcgcccccagcaccgagaccauccagaacaccacccccccccccuacacccccugaggacuagucccuguucccagagcccacuuuuuuuucuuuuuuugaaauaaaauagccugucuuucagaucuaaaaaaaaaaaaaaaaaaaaaaaaaaaaaaaaaaaaaaaaaaaaaaaaaaaaaaaaaaaaaaaaugcaucccccccccccccccccccccccccccccccaaaggcucuuuucagagccaccagaauu

SEQ ID NO: 12912 - RNA, 576 nt, Artificial Sequence
  mRNA product Design a-1 comprising derived and/or modified sequence from LASV(ISTH2010-NIG-2012;Clade II)__AIT17480__Z (opt4)
gggagagucccgcagucggcguccagcggcucugcuuguucgugugugugucguugcaggccuuauucaagcuuaccaugggcaacagacacgccaagagcaccaagguggacgagcaccagagagcccaccuggugcccgacgccagccaccugggcccccaguucugcaagagcugcugguucgagaacagaggccugguggagugcaacaaccacuaccugugccugaacugccugagccugcugcugagcgugagcagcagaugccccaucugcaagaugccccugcccaccaagcugaaggccgccgcccagcccagcgcccccagcaccgaggugauccagagcaccacccccccccccuacacccccugaggacuagucccuguucccagagcccacuuuuuuuucuuuuuuugaaauaaaauagccugucuuucagaucuaaaaaaaaaaaaaaaaaaaaaaaaaaaaaaaaaaaaaaaaaaaaaaaaaaaaaaaaaaaaaaaaugcaucccccccccccccccccccccccccccccccaaaggcucuuuucagagccaccagaauu

SEQ ID NO: 12913 - RNA, 576 nt, Artificial Sequence
  mRNA product Design a-1 comprising derived and/or modified sequence from LASV(Lassa virus/H.sapiens-wt/NGA/2016/ISTH_0017;Clade II)__AVO03713__Z (opt4)
gggagagucccgcagucggcguccagcggcucugcuuguucgugugugugucguugcaggccuuauucaagcuuaccaugggcaacagacaggccaagagcaccaagguggacgagcaccagagagcccaccuggugcccgacgccagccaccugggcccccaguucugcaagagcugcugguucgagaacagaggccugguggagugcaacaaccacuaccugugccugaacugccugagccugcugcugagcgugagcagcagaugccccaucugcaagaugccccugcccaccaagcugaaggccgccacccagcccagcgcccccagcaccgaggugaaccagaacaccacccccccccccuacacccccugaggacuagucccuguucccagagcccacuuuuuuuucuuuuuuugaaauaaaauagccugucuuucagaucuaaaaaaaaaaaaaaaaaaaaaaaaaaaaaaaaaaaaaaaaaaaaaaaaaaaaaaaaaaaaaaaaugcaucccccccccccccccccccccccccccccccaaaggcucuuuucagagccaccagaauu

SEQ ID NO: 12914 - RNA, 576 nt, Artificial Sequence
  mRNA product Design a-1 comprising derived and/or modified sequence from LASV(Lassa virus/H.sapiens-wt/NGA/2018/ISTH_0959;Clade II)__AVV65084__Z (opt4)
gggagagucccgcagucggcguccagcggcucugcuuguucgugugugugucguugcaggccuuauucaagcuuaccaugggcaacaagcaggccaagagcaccaagguggacgagcaccagagagcccaccuggugcccgacgccagccaccugggcccccaguucugcaagagcugcugguucgagaacagaggccugguggagugcaacaaccacuaccugugccugaacugccugagccugcugcugagcgugagcagcagaugccccaucugcaagaugccccugcccaccaagcugaaggccgccgcccagcccagcgcccccagcaccgaggccauccagagcaccacccccccccccuacacccccugaggacuagucccuguucccagagcccacuuuuuuuucuuuuuuugaaauaaaauagccugucuuucagaucuaaaaaaaaaaaaaaaaaaaaaaaaaaaaaaaaaaaaaaaaaaaaaaaaaaaaaaaaaaaaaaaaugcaucccccccccccccccccccccccccccccccaaaggcucuuuucagagccaccagaauu

SEQ ID NO: 12915 - RNA, 576 nt, Artificial Sequence
  mRNA product Design a-1 comprising derived and/or modified sequence from LASV(LASV003-NIG-2008;Clade II)__AIT17578__Z (opt4)
gggagagucccgcagucggcguccagcggcucugcuuguucgugugugugucguugcaggccuuauucaagcuuaccaugggcaacagacaggccaagagcaccaagguggacgagcaccagagagcccaccuggugcccgacgccagccaccugggcccccaguucugcaagagcugcugguucgagaacaagggccugguggagugcaacaaccacuaccugugccugaacugccugagccugcugcugagcgugagcagcagaugccccaucugcaagaugccccugcccaccaagcugagagccgccgcccagcccagcgcccccagcaccgagagcgcccagaacaccgcccccccccccuacgcccccugaggacuagucccuguucccagagcccacuuuuuuuucuuuuuuugaaauaaaauagccugucuuucagaucuaaaaaaaaaaaaaaaaaaaaaaaaaaaaaaaaaaaaaaaaaaaaaaaaaaaaaaaaaaaaaaaaugcaucccccccccccccccccccccccccccccccaaaggcucuuuucagagccaccagaauu

SEQ ID NO: 12916 - RNA, 576 nt, Artificial Sequence
  mRNA product Design a-1 comprising derived and/or modified sequence from LASV(LASV035-NIG-2009;Clade II)__AIT17586__Z (opt4)
gggagagucccgcagucggcguccagcggcucugcuuguucgugugugugucguugcaggccuuauucaagcuuaccaugggcaacaagcaggccaagagcaccaagguggacgagcaccagagagcccaccuggugcccgacgccagccaccugggcccccaguucugcaagagcugcugguucgagaacagaggccugguggagugcaacaaccacuaccugugccugaacugccugagccugcugcugagcgugagcagcagaugccccaucugcaagaugccccugcccaccagacugaaggccgccgcccagcccagcgcccccagcaccgaggugacccagaacaccacccccccccccuacacccccugaggacuagucccuguucccagagcccacuuuuuuuucuuuuuuugaaauaaaauagccugucuuucagaucuaaaaaaaaaaaaaaaaaaaaaaaaaaaaaaaaaaaaaaaaaaaaaaaaaaaaaaaaaaaaaaaaugcaucccccccccccccccccccccccccccccccaaaggcucuuuucagagccaccagaauu

SEQ ID NO: 12917 - RNA, 576 nt, Artificial Sequence
  mRNA product Design a-1 comprising derived and/or modified sequence from LASV(LASV1000-NIG-2009;Clade II)__AIT17780__Z (opt4)
gggagagucccgcagucggcguccagcggcucugcuuguucgugugugugucguugcaggccuuauucaagcuuaccaugggcaacagacagaccaagagcaccaagguggacgagcaccagagagccuaccuggugcccgacgccagccugcugggcccccaguucugcaagagcugcugguucgagaacaagggccugguggagugcaacaaccacuaccugugccugaacugccugagccugcugcugagcgugagcagcagaugccccaucugcaagaugccccugcccaccagacugaaggccgccgcccagcccagcgccccccccaccgaggccauccagaacaccacccccccccccuacacccccugaggacuagucccuguucccagagcccacuuuuuuuucuuuuuuugaaauaaaauagccugucuuucagaucuaaaaaaaaaaaaaaaaaaaaaaaaaaaaaaaaaaaaaaaaaaaaaaaaaaaaaaaaaaaaaaaaugcaucccccccccccccccccccccccccccccccaaaggcucuuuucagagccaccagaauu

SEQ ID NO: 12918 - RNA, 576 nt, Artificial Sequence
  mRNA product Design a-1 comprising derived and/or modified sequence from LASV(LASV221-NIG-2010;Clade II)__AIT17622__Z (opt4)
gggagagucccgcagucggcguccagcggcucugcuuguucgugugugugucguugcaggccuuauucaagcuuaccaugggcaacagacaggccaagagcaccaagguggacgagcaccagagagcccaccuggugcccgacgccagccaccugggcccccaguucugcaagagcugcugguucgagaacagaggccugguggagugcaacaaccacuaccugugccugaacugccugagccugcugcugagcgugagcagcagaugccccaucugcaagaugccccugcccaccaagcugaaggccgccacccagcccagcgcccccagcaccgaggugacccagaacaccauccccccccccuacagccccugaggacuagucccuguucccagagcccacuuuuuuuucuuuuuuugaaauaaaauagccugucuuucagaucuaaaaaaaaaaaaaaaaaaaaaaaaaaaaaaaaaaaaaaaaaaaaaaaaaaaaaaaaaaaaaaaaugcaucccccccccccccccccccccccccccccccaaaggcucuuuucagagccaccagaauu

SEQ ID NO: 12919 - RNA, 576 nt, Artificial Sequence
  mRNA product Design a-1 comprising derived and/or modified sequence from LASV(LASV237-NIG-2010;Clade II)__AIT17636__Z (opt4)
gggagagucccgcagucggcguccagcggcucugcuuguucgugugugugucguugcaggccuuauucaagcuuaccaugggcaacagacaggccaagagcaccaagguggacgagcaccagagagcccaccuggugcccgacgccagccaccugggcccccaguucugcaagagcugcugguucgagaacagaggccugguggagugcaacaaccacuaccugugccugaacugccugagccugcugcugagcgugagcagcagaugccccaucugcaagaugccccugcccaccaagcugaaggccgccgcccagcccagcgcccccagcaucgagaccauccagaacaccacccccccccccuacacccccugaggacuagucccuguucccagagcccacuuuuuuuucuuuuuuugaaauaaaauagccugucuuucagaucuaaaaaaaaaaaaaaaaaaaaaaaaaaaaaaaaaaaaaaaaaaaaaaaaaaaaaaaaaaaaaaaaugcaucccccccccccccccccccccccccccccccaaaggcucuuuucagagccaccagaauu

SEQ ID NO: 12920 - RNA, 576 nt, Artificial Sequence
  mRNA product Design a-1 comprising derived and/or modified sequence from LASV(LASV253-NIG-2011;Clade II)__AIT17668__Z (opt4)
gggagagucccgcagucggcguccagcggcucugcuuguucgugugugugucguugcaggccuuauucaagcuuaccaugggcaacagacaggccaagagcaccaagguggacgagcaccagagagcccaccuggugcccgacgccagccaccugggcccccaguucugcaagagcugcugguucgagaacaagggccugguggagugcaacaaccacuaccugugccugaacugccugagccugcugcugagcgugagcagcagaugccccaucugcaagaugccccugcccaccaagcugaagaccaccgcccagcccagcgccccccccaccgaggccgccaagaacaccgcccccccccccuacgcccccugaggacuagucccuguucccagagcccacuuuuuuuucuuuuuuugaaauaaaauagccugucuuucagaucuaaaaaaaaaaaaaaaaaaaaaaaaaaaaaaaaaaaaaaaaaaaaaaaaaaaaaaaaaaaaaaaaugcaucccccccccccccccccccccccccccccccaaaggcucuuuucagagccaccagaauu

SEQ ID NO: 12921 - RNA, 576 nt, Artificial Sequence
  mRNA product Design a-1 comprising derived and/or modified sequence from LASV(G1180-SLE-2010;Clade IV)__AIT17166__Z (opt4)
gggagagucccgcagucggcguccagcggcucugcuuguucgugugugugucguugcaggccuuauucaagcuuaccaugggcaacaagcaggccaaggcccccgaggccaaggacagccccagagccagccugauccccgacgccacccaccugggcccccaguucugcaagagcugcugguucgagaccaagggccugguggagugcaacaaccacuaccugugccugaacugccugacccugcugcugagcgugagcaacagaugccccaucugcaagaugccccugcccaccaagcugagacccagcgccacccccaccgccccccccaccgaggccgccgacagcaucggccccccccccuacagccccugaggacuagucccuguucccagagcccacuuuuuuuucuuuuuuugaaauaaaauagccugucuuucagaucuaaaaaaaaaaaaaaaaaaaaaaaaaaaaaaaaaaaaaaaaaaaaaaaaaaaaaaaaaaaaaaaaugcaucccccccccccccccccccccccccccccccaaaggcucuuuucagagccaccagaauu

SEQ ID NO: 12922 - RNA, 576 nt, Artificial Sequence
  mRNA product Design a-1 comprising derived and/or modified sequence from LASV(G1442-SLE-2011;Clade IV)__AIT17178__Z (opt4)
gggagagucccgcagucggcguccagcggcucugcuuguucgugugugugucguugcaggccuuauucaagcuuaccaugggcaacaagcaggccaaggccagcgaggccaaggacagccccagagccagccugauccccgacgccacccaccugggcccccaguucugcaagagcugcugguucgagaacaagggccugguggagugcaacaaccacuaccugugccugaacugccugagccugcugcugagcgugagcagcagaugccccaucugcaagaugccccugcccaccagacugagacccagcaccgcccccaccgccccccccgccagagccggcgacaacaucaagcccccccccuacagccccugaggacuagucccuguucccagagcccacuuuuuuuucuuuuuuugaaauaaaauagccugucuuucagaucuaaaaaaaaaaaaaaaaaaaaaaaaaaaaaaaaaaaaaaaaaaaaaaaaaaaaaaaaaaaaaaaaugcaucccccccccccccccccccccccccccccccaaaggcucuuuucagagccaccagaauu

SEQ ID NO: 12923 - RNA, 576 nt, Artificial Sequence
  mRNA product Design a-1 comprising derived and/or modified sequence from LASV(G502-SLE-2009;Clade IV)__AIT17124__Z (opt4)
gggagagucccgcagucggcguccagcggcucugcuuguucgugugugugucguugcaggccuuauucaagcuuaccaugggcaacaagcaggugaagacccccgaggccaaggacagccccagagccagccugauccccgacgccacccaccugggcccccaguucugcaagagcugcugguucgagaacaagggccugguggagugcaacaaccacuaccugugccugaacugccugacccugcugcugagcgugggcaacagaugccccaucugcaagaugccccugcccaccaagcugagacccagcgugacccccaccgccccccccaccagagccgccgacagcaucggccccccccccuacagccccugaggacuagucccuguucccagagcccacuuuuuuuucuuuuuuugaaauaaaauagccugucuuucagaucuaaaaaaaaaaaaaaaaaaaaaaaaaaaaaaaaaaaaaaaaaaaaaaaaaaaaaaaaaaaaaaaaugcaucccccccccccccccccccccccccccccccaaaggcucuuuucagagccaccagaauu

SEQ ID NO: 12924 - RNA, 576 nt, Artificial Sequence
  mRNA product Design a-1 comprising derived and/or modified sequence from LASV(G733-SLE-2010;Clade IV)__AIT17152__Z (opt4)
gggagagucccgcagucggcguccagcggcucugcuuguucgugugugugucguugcaggccuuauucaagcuuaccaugggcaacaagcaggccaagacccccgagaccaaggacagccccagagccagccugauccccgacgccacccaccugggcccccaguucugcaagagcugcugguucgagaacaagggccugguggagugcaacaaccacuaccugugccugaacugccugacccugcugcugagcgugagcaacagaugccccaucugcaagaugccccugcccaccaagcugagacccagcaccgcccccaccgccccccccgccggcgccgccgacaacaccagacccccccccuacagccccugaggacuagucccuguucccagagcccacuuuuuuuucuuuuuuugaaauaaaauagccugucuuucagaucuaaaaaaaaaaaaaaaaaaaaaaaaaaaaaaaaaaaaaaaaaaaaaaaaaaaaaaaaaaaaaaaaugcaucccccccccccccccccccccccccccccccaaaggcucuuuucagagccaccagaauu

SEQ ID NO: 12925 - RNA, 588 nt, Artificial Sequence
  mRNA product Design a-1 comprising derived and/or modified sequence from MOPV/LASV reassortant(IGS-1;Clade IV)__AFY05533__Z (opt4)
gggagagucccgcagucggcguccagcggcucugcuuguucgugugugugucguugcaggccuuauucaagcuuaccaugggcaagacccagagcaagggccagcccagcaccaaccugcugaaggagaccgagcccagacaccccgugauccccgacgccagaggcaccggccccgaguucugcaagagcugcugguucgagagaagaggccuggugagaugcaacgaccacuaccugugccugaacugccugacccugcugcacaccgugagcgacagaugccccaucugcaagcacaagcugcccuucagacuggagcugcagacccagcccaccgccccccccgagaucccccccagccagaaccccccccccuacagccccugaggacuagucccuguucccagagcccacuuuuuuuucuuuuuuugaaauaaaauagccugucuuucagaucuaaaaaaaaaaaaaaaaaaaaaaaaaaaaaaaaaaaaaaaaaaaaaaaaaaaaaaaaaaaaaaaaugcaucccccccccccccccccccccccccccccccaaaggcucuuuucagagccaccagaauu

SEQ ID NO: 12926 - RNA, 576 nt, Artificial Sequence
  mRNA product Design a-1 comprising derived and/or modified sequence from LASV(LM776-SLE-2012;Clade IV)__AIT17824__Z (opt4)
gggagagucccgcagucggcguccagcggcucugcuuguucgugugugugucguugcaggccuuauucaagcuuaccaugggcaacaagcaggccaaggccagcgaggagaagaacagccccagagccagccugauccccgacgccacccaccugggcccccaguucugcaagagcugcugguucgagaacaagggccugguggagugcaacaaccacuaccugugccugaacugccugacccugcugcugagcgugagcaacagaugccccaucugcaagaugccccugcccaccaagcugagacccagcaccacccccaccgccccccccaccggcgccgccgacagcaucagacccccccccuacagccccugaggacuagucccuguucccagagcccacuuuuuuuucuuuuuuugaaauaaaauagccugucuuucagaucuaaaaaaaaaaaaaaaaaaaaaaaaaaaaaaaaaaaaaaaaaaaaaaaaaaaaaaaaaaaaaaaaugcaucccccccccccccccccccccccccccccccaaaggcucuuuucagagccaccagaauu

SEQ ID NO: 12927 - RNA, 576 nt, Artificial Sequence
  mRNA product Design a-1 comprising derived and/or modified sequence from LASV(Mad39;Clade IV)__ANH09743__Z (opt4)
gggagagucccgcagucggcguccagcggcucugcuuguucgugugugugucguugcaggccuuauucaagcuuaccaugggcaacaagcaggccaaggccagcgagguggaggacggccccagagccagccugauccccgacgccacccaccugggcccccaguucugcaagagcugcugguucgagaacaagagccugguggagugcaacaaccacuaccugugccugaacugccugacccugcugcugagcgugagcaacagaugccccaucugcaagaugccccugcccaccagacugaagcccagcguggugcccaccgccccccccaccagagccggcgacggcaccagacccccccccuacagccccugaggacuagucccuguucccagagcccacuuuuuuuucuuuuuuugaaauaaaauagccugucuuucagaucuaaaaaaaaaaaaaaaaaaaaaaaaaaaaaaaaaaaaaaaaaaaaaaaaaaaaaaaaaaaaaaaaugcaucccccccccccccccccccccccccccccccaaaggcucuuuucagagccaccagaauu

SEQ ID NO: 12928 - RNA, 576 nt, Artificial Sequence
  mRNA product Design a-1 comprising derived and/or modified sequence from LASV(Z0947-SLE-2011;Clade IV)__AIT17838__Z (opt4)
gggagagucccgcagucggcguccagcggcucugcuuguucgugugugugucguugcaggccuuauucaagcuuaccaugggcaacaagcaggccaaggugcccgagagcaaggacagccccagagccagccugauccccgacgccacccaccugggcccccaguucugcaagagcugcugguucgagaacaagggccugguggagugcaacaaccacuaccugugccugaacugccugacccugcugcugagcgugagcaacagaugccccaucugcaagaugccccugcccaccaagcugaagcccagcgccgcccccaccgccccccccaccggcgccgccgacagcaucagacccccccccuacagccccugaggacuagucccuguucccagagcccacuuuuuuuucuuuuuuugaaauaaaauagccugucuuucagaucuaaaaaaaaaaaaaaaaaaaaaaaaaaaaaaaaaaaaaaaaaaaaaaaaaaaaaaaaaaaaaaaaugcaucccccccccccccccccccccccccccccccaaaggcucuuuucagagccaccagaauu

SEQ ID NO: 12929 - RNA, 576 nt, Artificial Sequence
  mRNA product Design a-1 comprising derived and/or modified sequence from LASV(Josiah;Clade IV)__ADY11072/NP_694871__Z (opt5)
gggagagucccgcagucggcguccagcggcucugcuuguucgugugugugucguugcaggccuuauucaagcuuaccaugggcaacaagcaggccaaagcucccgagagcaaggacuccccuagagccucucugaucccggaugcgacccaccucgggccccaauucugcaaaagcuguugguuugaaaauaagggacugguggagugcaacaaucauuaccuuugucugaacugccucacacugcuucuguccgucucuaaucgguguccuauuugcaaaaugccccucccuacgaagcugcgccccagcgcugccccuaccgccccgcccacaggcgcugccgacuccaucagaccucccccuuauucucccugaggacuagucccuguucccagagcccacuuuuuuuucuuuuuuugaaauaaaauagccugucuuucagaucuaaaaaaaaaaaaaaaaaaaaaaaaaaaaaaaaaaaaaaaaaaaaaaaaaaaaaaaaaaaaaaaaugcaucccccccccccccccccccccccccccccccaaaggcucuuuucagagccaccagaauu

SEQ ID NO: 12930 - RNA, 579 nt, Artificial Sequence
  mRNA product Design a-1 comprising derived and/or modified sequence from LASV(Pinneo-NIG-1969;Clade I)__AIT17834__Z (opt5)
gggagagucccgcagucggcguccagcggcucugcuuguucgugugugugucguugcaggccuuauucaagcuuaccaugggcaacaagcagaccagaagcccucccaaaccggagcacccccggccuacacugcuccccgacgccucccaucuggggccucaauucugcaagucuuguugguuugaaaauaaaggacuuguggagugcaacaaucacuaccugugucucaacugccugacgcuucugcucagcgucuccgaucgcugucccaucugcaagaugccucugccgaccaaacuggcuguuagaacacagcccucugccccuccccucaaucagggcaacacccagagcuccccucccccguauucuccuugaggacuagucccuguucccagagcccacuuuuuuuucuuuuuuugaaauaaaauagccugucuuucagaucuaaaaaaaaaaaaaaaaaaaaaaaaaaaaaaaaaaaaaaaaaaaaaaaaaaaaaaaaaaaaaaaaugcaucccccccccccccccccccccccccccccccaaaggcucuuuucagagccaccagaauu

SEQ ID NO: 12931 - RNA, 576 nt, Artificial Sequence
  mRNA product Design a-1 comprising derived and/or modified sequence from LASV(Nig08-04;Clade II)__ADU56612__Z (opt5)
gggagagucccgcagucggcguccagcggcucugcuuguucgugugugugucguugcaggccuuauucaagcuuaccaugggcaacagacagacccggcccacagaggccacggaacaaagccgcgcccaccuggugccugacgccucccaucucgggccgcaguucugcaagucuuguugguuugagaauagaggacuggucgaaugcaacaaucacuaccuuugucugaacugccucagccugcuucuguccguuucuagccggugucccaucugcaaaaugccucuccccacccgccugaaggcguccgcucagccuucugcucccccuacagaggccccgcagaauaccacacccccucccuauaccccuugaggacuagucccuguucccagagcccacuuuuuuuucuuuuuuugaaauaaaauagccugucuuucagaucuaaaaaaaaaaaaaaaaaaaaaaaaaaaaaaaaaaaaaaaaaaaaaaaaaaaaaaaaaaaaaaaaugcaucccccccccccccccccccccccccccccccaaaggcucuuuucagagccaccagaauu

SEQ ID NO: 12932 - RNA, 576 nt, Artificial Sequence
  mRNA product Design a-1 comprising derived and/or modified sequence from LASV(Nig08-A19;Clade III)__ADU56620__Z (opt5)
gggagagucccgcagucggcguccagcggcucugcuuguucgugugugugucguugcaggccuuauucaagcuuaccaugggcgggaagcacaccaaaccccagagagagagcaacuccccucgggccucucugaucccggacgcuacacaucucggaccccaauucugcaagagcuguugguuugaaaauaaaggccugguggagugcaacaaucacuaccuuugucugaacugccucacgcugcuucuguccgucucuaaucgcuguccuauuugcaagaugccccucccuaccagacugcgggccagcacaaaccccaccgcgccucagguugaacagguggggccgacaaaucccccucccuauuccccuugaggacuagucccuguucccagagcccacuuuuuuuucuuuuuuugaaauaaaauagccugucuuucagaucuaaaaaaaaaaaaaaaaaaaaaaaaaaaaaaaaaaaaaaaaaaaaaaaaaaaaaaaaaaaaaaaaugcaucccccccccccccccccccccccccccccccaaaggcucuuuucagagccaccagaauu

SEQ ID NO: 12933 - RNA, 576 nt, Artificial Sequence
  mRNA product Design a-1 comprising derived and/or modified sequence from LASV(AV;Clade V)__CCA30312__Z (opt5)
gggagagucccgcagucggcguccagcggcucugcuuguucgugugugugucguugcaggccuuauucaagcuuaccaugggcaacagacaggccaagaaucccgagguggaaaacagcccucgggcuucccugaucccggacgccacccaccucgggccccaauucugcaaaucuuguugguuugagaauaagggacuggucgaaugcaacaaucauuaccuuugucugaacugccucagccugcuucuguccguuucuaaucgcuguccuauuugcaaaaugccccucccuacaagacugcggcccacgaccacaccuaccgcgccgcagaucauuaaggagaacacaaccaaucccccucccuauacaccuugaggacuagucccuguucccagagcccacuuuuuuuucuuuuuuugaaauaaaauagccugucuuucagaucuaaaaaaaaaaaaaaaaaaaaaaaaaaaaaaaaaaaaaaaaaaaaaaaaaaaaaaaaaaaaaaaaugcaucccccccccccccccccccccccccccccccaaaggcucuuuucagagccaccagaauu

SEQ ID NO: 12934 - RNA, 576 nt, Artificial Sequence
  mRNA product Design a-1 comprising derived and/or modified sequence from LASV(Togo/2016/7082;Clade VI)__AMR44579__Z (opt5)
gggagagucccgcagucggcguccagcggcucugcuuguucgugugugugucguugcaggccuuauucaagcuuaccaugggcgccagacagaccaagcaaccccagaucgaggggagcccucgggcuucccuggugccggacgccucucaccucggaccccaguucugcaaaagcuguugguuugaaaacaagggccuggucgagugcaauaaccauuaccuuugucugaauugccucucccugcuucugucuguuagcaaccgcuguccuauuugcaaaaugccccucccuacaaagcugagaguguccucugcgcccagcgcuccuccggccgccacggcucagcccgggaccccucccccuuauucccccugaggacuagucccuguucccagagcccacuuuuuuuucuuuuuuugaaauaaaauagccugucuuucagaucuaaaaaaaaaaaaaaaaaaaaaaaaaaaaaaaaaaaaaaaaaaaaaaaaaaaaaaaaaaaaaaaaugcaucccccccccccccccccccccccccccccccaaaggcucuuuucagagccaccagaauu

SEQ ID NO: 12935 - RNA, 576 nt, Artificial Sequence
  mRNA product Design a-1 comprising derived and/or modified sequence from LASV(KAK-428;Clade n.d. (VII))__ANH09761__Z (opt5)
gggagagucccgcagucggcguccagcggcucugcuuguucgugugugugucguugcaggccuuauucaagcuuaccaugggcaacaaggggaccaaacccacacagaauagcgagccuuccagagccaaccuggugccggacgcuucuuaccucggaccccaauucugcaagagcuguugguuugaaaauaaaggccuggucgagugcaacaaucacuaucuuugucugaacugccucacgaugcugcuuuccguuuccaaucgguguccuaucugcaagaugccccugccuaccaaaauuaaggccagcgggucccccucugcgccuccgacagaagcuaacagcgccgugucucccccucccuacaccccuugaggacuagucccuguucccagagcccacuuuuuuuucuuuuuuugaaauaaaauagccugucuuucagaucuaaaaaaaaaaaaaaaaaaaaaaaaaaaaaaaaaaaaaaaaaaaaaaaaaaaaaaaaaaaaaaaaugcaucccccccccccccccccccccccccccccccaaaggcucuuuucagagccaccagaauu

SEQ ID NO: 12936 - RNA, 576 nt, Artificial Sequence
  mRNA product Design a-1 comprising derived and/or modified sequence from LASV(ISTH0009-NIG-2011;Clade II)__AIT17402__Z (opt5)
gggagagucccgcagucggcguccagcggcucugcuuguucgugugugugucguugcaggccuuauucaagcuuaccaugggcaacagacaggccaagagcaccaaaguggacgagcaccaacgggcucaucugguccccgaugccucccaccucgggccucaguucugcaagucuuguugguuugaaaaucgcggacugguugagugcaacaaucauuaccuuugucugaacugccucagccugcuucuguccgugucuagcagauguccgaucugcaaaaugccccucccuacaaagcugaaagcggcugcccagcccuccgccccuucuacggaaaccauucagaauacaacacccccuccguauacccccugaggacuagucccuguucccagagcccacuuuuuuuucuuuuuuugaaauaaaauagccugucuuucagaucuaaaaaaaaaaaaaaaaaaaaaaaaaaaaaaaaaaaaaaaaaaaaaaaaaaaaaaaaaaaaaaaaugcaucccccccccccccccccccccccccccccccaaaggcucuuuucagagccaccagaauu

SEQ ID NO: 12937 - RNA, 576 nt, Artificial Sequence
  mRNA product Design a-1 comprising derived and/or modified sequence from LASV(ISTH2010-NIG-2012;Clade II)__AIT17480__Z (opt5)
gggagagucccgcagucggcguccagcggcucugcuuguucgugugugugucguugcaggccuuauucaagcuuaccaugggcaacagacacgccaagagcaccaaaguggacgagcaucagcgggcucaccugguccccgaugccucccaucucgggccucaauucugcaagucuuguugguuugaaaaucgcggacugguugagugcaacaaucacuaccuuugucugaacugccucagccugcuucuguccgugucuagcagauguccgaucugcaaaaugccccucccuacaaagcugaaagcggcugcccagcccuccgccccuucuacggaagugauucagagcaccacacccccuccguauacccccugaggacuagucccuguucccagagcccacuuuuuuuucuuuuuuugaaauaaaauagccugucuuucagaucuaaaaaaaaaaaaaaaaaaaaaaaaaaaaaaaaaaaaaaaaaaaaaaaaaaaaaaaaaaaaaaaaugcaucccccccccccccccccccccccccccccccaaaggcucuuuucagagccaccagaauu

SEQ ID NO: 12938 - RNA, 576 nt, Artificial Sequence
  mRNA product Design a-1 comprising derived and/or modified sequence from LASV(Lassa virus/H.sapiens-wt/NGA/2016/ISTH_0017;Clade II)__AVO03713__Z (opt5)
gggagagucccgcagucggcguccagcggcucugcuuguucgugugugugucguugcaggccuuauucaagcuuaccaugggcaacagacaggccaagagcaccaaaguggacgagcaccaacgggcucaucugguccccgaugccucccaccucgggccucaguucugcaagucuuguugguuugaaaaucgcggacugguugagugcaacaaucauuaccuuugucugaacugccucagccugcuucuguccgugucuagcagauguccgaucugcaaaaugccccucccuacaaagcugaaagcggcuacgcagcccuccgccccuucuaccgaagugaaucagaacacaacacccccuccguauacccccugaggacuagucccuguucccagagcccacuuuuuuuucuuuuuuugaaauaaaauagccugucuuucagaucuaaaaaaaaaaaaaaaaaaaaaaaaaaaaaaaaaaaaaaaaaaaaaaaaaaaaaaaaaaaaaaaaugcaucccccccccccccccccccccccccccccccaaaggcucuuuucagagccaccagaauu

SEQ ID NO: 12939 - RNA, 576 nt, Artificial Sequence
  mRNA product Design a-1 comprising derived and/or modified sequence from LASV(Lassa virus/H.sapiens-wt/NGA/2018/ISTH_0959;Clade II)__AVV65084__Z (opt5)
gggagagucccgcagucggcguccagcggcucugcuuguucgugugugugucguugcaggccuuauucaagcuuaccaugggcaacaagcaggccaaaagcaccaagguggacgagcaccaaagagcucaucugguccccgaugccucccaccucgggccucaguucugcaaaucuuguugguuugaaaaucggggacugguugagugcaacaaucauuaccuuugucugaacugccucagccugcuucuguccgugucuagccgcuguccgaucugcaagaugccccucccuacaaaacugaaggcggcugcccagcccuccgccccuucuacggaagcuauucagagcaccacacccccuccguauacccccugaggacuagucccuguucccagagcccacuuuuuuuucuuuuuuugaaauaaaauagccugucuuucagaucuaaaaaaaaaaaaaaaaaaaaaaaaaaaaaaaaaaaaaaaaaaaaaaaaaaaaaaaaaaaaaaaaugcaucccccccccccccccccccccccccccccccaaaggcucuuuucagagccaccagaauu

SEQ ID NO: 12940 - RNA, 576 nt, Artificial Sequence
  mRNA product Design a-1 comprising derived and/or modified sequence from LASV(LASV003-NIG-2008;Clade II)__AIT17578__Z (opt5)
gggagagucccgcagucggcguccagcggcucugcuuguucgugugugugucguugcaggccuuauucaagcuuaccaugggcaacagacaggccaagagcaccaaaguggacgagcaccaacgggcucaucugguccccgaugccucccaccucgggccucaguucugcaagucuuguugguuugaaaauaaaggacugguugagugcaacaaucauuaccuuugucugaacugccucagccugcuucuguccgugucuagccgcuguccgaucugcaagaugccccucccuacaaaacugagagcggcugcccagcccuccgccccuucuacggaaagcgcucagaauaccgcucccccuccguaugcccccugaggacuagucccuguucccagagcccacuuuuuuuucuuuuuuugaaauaaaauagccugucuuucagaucuaaaaaaaaaaaaaaaaaaaaaaaaaaaaaaaaaaaaaaaaaaaaaaaaaaaaaaaaaaaaaaaaugcaucccccccccccccccccccccccccccccccaaaggcucuuuucagagccaccagaauu

SEQ ID NO: 12941 - RNA, 576 nt, Artificial Sequence
  mRNA product Design a-1 comprising derived and/or modified sequence from LASV(LASV035-NIG-2009;Clade II)__AIT17586__Z (opt5)
gggagagucccgcagucggcguccagcggcucugcuuguucgugugugugucguugcaggccuuauucaagcuuaccaugggcaacaagcaggccaaaagcaccaagguggacgagcaccaaagagcucaucugguccccgaugccucccaccucgggccucaguucugcaaaucuuguugguuugaaaaucggggacugguugagugcaacaaucauuaccuuugucugaacugccucagccugcuucuguccgugucuagccgcuguccgaucugcaagaugccccucccuacaagacugaaagcggcugcccagcccuccgccccuucuacggaagugacccagaauacaacacccccuccguauacccccugaggacuagucccuguucccagagcccacuuuuuuuucuuuuuuugaaauaaaauagccugucuuucagaucuaaaaaaaaaaaaaaaaaaaaaaaaaaaaaaaaaaaaaaaaaaaaaaaaaaaaaaaaaaaaaaaaugcaucccccccccccccccccccccccccccccccaaaggcucuuuucagagccaccagaauu

SEQ ID NO: 12942 - RNA, 576 nt, Artificial Sequence
  mRNA product Design a-1 comprising derived and/or modified sequence from LASV(LASV1000-NIG-2009;Clade II)__AIT17780__Z (opt5)
gggagagucccgcagucggcguccagcggcucugcuuguucgugugugugucguugcaggccuuauucaagcuuaccaugggcaacagacagaccaagagcacaaaaguggacgagcaccaacgggccuaccugguccccgaugcuucccuccuggggccucaguucugcaagucuuguugguuugaaaauaaaggacuuguugagugcaacaaucauuaucugugucucaacugccugagccuucugcucuccgugucuagccgcuguccgaucugcaagaugccccugccuacgagacugaaagccgcggcucagcccuccgccccucccaccgaagccauucagaauacaaccccuccgcccuacacaccuugaggacuagucccuguucccagagcccacuuuuuuuucuuuuuuugaaauaaaauagccugucuuucagaucuaaaaaaaaaaaaaaaaaaaaaaaaaaaaaaaaaaaaaaaaaaaaaaaaaaaaaaaaaaaaaaaaugcaucccccccccccccccccccccccccccccccaaaggcucuuuucagagccaccagaauu

SEQ ID NO: 12943 - RNA, 576 nt, Artificial Sequence
  mRNA product Design a-1 comprising derived and/or modified sequence from LASV(LASV221-NIG-2010;Clade II)__AIT17622__Z (opt5)
gggagagucccgcagucggcguccagcggcucugcuuguucgugugugugucguugcaggccuuauucaagcuuaccaugggcaacagacaggccaagagcaccaaaguggacgagcaccaacgggcucaucugguccccgaugccucccaccucgggccucaguucugcaagucuuguugguuugaaaaucgcggacugguugagugcaacaaucauuaccuuugucugaacugccucagccugcuucuguccgugucuagcagauguccgaucugcaaaaugccccucccuacaaagcugaaagcggcuacgcagcccuccgccccuucuaccgaagugacacagaauaccauucccccuccguauagccccugaggacuagucccuguucccagagcccacuuuuuuuucuuuuuuugaaauaaaauagccugucuuucagaucuaaaaaaaaaaaaaaaaaaaaaaaaaaaaaaaaaaaaaaaaaaaaaaaaaaaaaaaaaaaaaaaaugcaucccccccccccccccccccccccccccccccaaaggcucuuuucagagccaccagaauu

SEQ ID NO: 12944 - RNA, 576 nt, Artificial Sequence
  mRNA product Design a-1 comprising derived and/or modified sequence from LASV(LASV237-NIG-2010;Clade II)__AIT17636__Z (opt5)
gggagagucccgcagucggcguccagcggcucugcuuguucgugugugugucguugcaggccuuauucaagcuuaccaugggcaacagacaggccaagagcaccaaaguggacgagcaccaacgggcucaucugguccccgaugccucccaccucgggccucaguucugcaagucuuguugguuugaaaaucgcggacugguugagugcaacaaucauuaccuuugucugaacugccucagccugcuucuguccgugucuagcagauguccgaucugcaaaaugccccucccuacaaagcugaaagcggcugcccagcccuccgccccuucuauugaaacgauccagaauaccacacccccuccguauacccccugaggacuagucccuguucccagagcccacuuuuuuuucuuuuuuugaaauaaaauagccugucuuucagaucuaaaaaaaaaaaaaaaaaaaaaaaaaaaaaaaaaaaaaaaaaaaaaaaaaaaaaaaaaaaaaaaaugcaucccccccccccccccccccccccccccccccaaaggcucuuuucagagccaccagaauu

SEQ ID NO: 12945 - RNA, 576 nt, Artificial Sequence
  mRNA product Design a-1 comprising derived and/or modified sequence from LASV(LASV253-NIG-2011;Clade II)__AIT17668__Z (opt5)
gggagagucccgcagucggcguccagcggcucugcuuguucgugugugugucguugcaggccuuauucaagcuuaccaugggcaacagacaggccaagagcaccaaaguggacgagcaccaacgggcucaucugguccccgaugccucccaccucgggccucaguucugcaagucuuguugguuugaaaauaaaggacugguugagugcaacaaucauuaccuuugucugaacugccucagccugcuucuguccgugucuagccgcuguccgaucugcaagaugccccucccuacaaaacugaagacgaccgcgcagcccuccgcuccucccacagaagccgccaagaauaccgcuccuccgcccuaugccccuugaggacuagucccuguucccagagcccacuuuuuuuucuuuuuuugaaauaaaauagccugucuuucagaucuaaaaaaaaaaaaaaaaaaaaaaaaaaaaaaaaaaaaaaaaaaaaaaaaaaaaaaaaaaaaaaaaugcaucccccccccccccccccccccccccccccccaaaggcucuuuucagagccaccagaauu

SEQ ID NO: 12946 - RNA, 576 nt, Artificial Sequence
  mRNA product Design a-1 comprising derived and/or modified sequence from LASV(G1180-SLE-2010;Clade IV)__AIT17166__Z (opt5)
gggagagucccgcagucggcguccagcggcucugcuuguucgugugugugucguugcaggccuuauucaagcuuaccaugggcaacaagcaggccaaagcucccgaggccaaggacagcccuagagcgucccugaucccggaugcuacccaccucgggccccaauucugcaaaucuuguugguuugaaacaaagggacugguggagugcaauaaccauuaccuuugucugaauugccucacgcugcuucugagcgucuccaaccgguguccuauuugcaaaaugccccucccuaccaagcugcgccccucugccacaccuaccgccccgcccacagaagcugccgacagcaucggcccucccccuuauucccccugaggacuagucccuguucccagagcccacuuuuuuuucuuuuuuugaaauaaaauagccugucuuucagaucuaaaaaaaaaaaaaaaaaaaaaaaaaaaaaaaaaaaaaaaaaaaaaaaaaaaaaaaaaaaaaaaaugcaucccccccccccccccccccccccccccccccaaaggcucuuuucagagccaccagaauu

SEQ ID NO: 12947 - RNA, 576 nt, Artificial Sequence
  mRNA product Design a-1 comprising derived and/or modified sequence from LASV(G1442-SLE-2011;Clade IV)__AIT17178__Z (opt5)
gggagagucccgcagucggcguccagcggcucugcuuguucgugugugugucguugcaggccuuauucaagcuuaccaugggcaacaagcaggccaaagcuagcgaggccaaggacucccccagagcgucucugaucccugaugcuacccaccucgggccgcaauucugcaaaagcuguugguuugaaaauaagggacugguggagugcaacaaucauuaccuuugucugaacugccucucccugcuucugucugucagcucccggugucccauuugcaaaaugccucuccccacacgccugagaccuucuacggcccccaccgccccuccggcucgggccggcgacaauaucaagcccccucccuauagcccuugaggacuagucccuguucccagagcccacuuuuuuuucuuuuuuugaaauaaaauagccugucuuucagaucuaaaaaaaaaaaaaaaaaaaaaaaaaaaaaaaaaaaaaaaaaaaaaaaaaaaaaaaaaaaaaaaaugcaucccccccccccccccccccccccccccccccaaaggcucuuuucagagccaccagaauu

SEQ ID NO: 12948 - RNA, 576 nt, Artificial Sequence
  mRNA product Design a-1 comprising derived and/or modified sequence from LASV(G502-SLE-2009;Clade IV)__AIT17124__Z (opt5)
gggagagucccgcagucggcguccagcggcucugcuuguucgugugugugucguugcaggccuuauucaagcuuaccaugggcaacaaacaggugaagacccccgaggccaaggacagcccuagagcuucccugaucccggaugccacacaccucgggccccaauucugcaaaucuuguugguuugaaaauaagggacuggucgagugcaacaaucauuaccuuugucugaacugccucacgcugcuucugagcguuggcaaucgguguccuauuugcaaaaugccccucccuaccaagcugcgccccuccgugacaccuaccgcgccgcccacaagagcugccgacucuaucgggccucccccuuauagccccugaggacuagucccuguucccagagcccacuuuuuuuucuuuuuuugaaauaaaauagccugucuuucagaucuaaaaaaaaaaaaaaaaaaaaaaaaaaaaaaaaaaaaaaaaaaaaaaaaaaaaaaaaaaaaaaaaugcaucccccccccccccccccccccccccccccccaaaggcucuuuucagagccaccagaauu

SEQ ID NO: 12949 - RNA, 576 nt, Artificial Sequence
  mRNA product Design a-1 comprising derived and/or modified sequence from LASV(G733-SLE-2010;Clade IV)__AIT17152__Z (opt5)
gggagagucccgcagucggcguccagcggcucugcuuguucgugugugugucguugcaggccuuauucaagcuuaccaugggcaacaagcaggccaaaacccccgagacaaaggacagcccuagagcuucccugaucccggaugccacgcaccucgggccccaauucugcaaaucuuguugguuugaaaauaagggacugguggagugcaacaaucauuaccuuugucugaacugccucacccugcuucugagcgucuccaaucgguguccuauuugcaaaaugccccucccuacaaagcugcgccccucuaccgcgccuacagcuccgcccgccggcgccgcugacaacaccagaccucccccuuauagccccugaggacuagucccuguucccagagcccacuuuuuuuucuuuuuuugaaauaaaauagccugucuuucagaucuaaaaaaaaaaaaaaaaaaaaaaaaaaaaaaaaaaaaaaaaaaaaaaaaaaaaaaaaaaaaaaaaugcaucccccccccccccccccccccccccccccccaaaggcucuuuucagagccaccagaauu

SEQ ID NO: 12950 - RNA, 588 nt, Artificial Sequence
  mRNA product Design a-1 comprising derived and/or modified sequence from MOPV/LASV reassortant(IGS-1;Clade IV)__AFY05533__Z (opt5)
gggagagucccgcagucggcguccagcggcucugcuuguucgugugugugucguugcaggccuuauucaagcuuaccaugggcaagacccagagcaaagggcaacccuccacaaaccugcucaaggagacggaaccuagacacccggugauccccgacgcccggggaaccggcccugaguucugcaaaucuuguugguuugaacgcagagggcugguccggugcaaugaucauuaccuuugucugaacugccucacacugcuucacaccguuagcgaccgcugucccaucugcaagcauaaacugccuuucagacucgagcugcagacacagcccaccgcuccuccggaaauucccccuucccagaaucccccucccuauucuccgugaggacuagucccuguucccagagcccacuuuuuuuucuuuuuuugaaauaaaauagccugucuuucagaucuaaaaaaaaaaaaaaaaaaaaaaaaaaaaaaaaaaaaaaaaaaaaaaaaaaaaaaaaaaaaaaaaugcaucccccccccccccccccccccccccccccccaaaggcucuuuucagagccaccagaauu

SEQ ID NO: 12951 - RNA, 576 nt, Artificial Sequence
  mRNA product Design a-1 comprising derived and/or modified sequence from LASV(LM776-SLE-2012;Clade IV)__AIT17824__Z (opt5)
gggagagucccgcagucggcguccagcggcucugcuuguucgugugugugucguugcaggccuuauucaagcuuaccaugggcaacaagcaggccaaagcuagcgaggaaaagaacucccccagagccucucugaucccugacgcgacccaccucgggccgcaauucugcaaaagcuguugguuugagaauaagggacugguggaaugcaauaaccauuaccuuugucugaauugccucacacugcuucuguccgucucuaaccggugucccauuugcaaaaugccucuccccacgaagcugcgcccuagcaccacacccaccgcuccuccgacaggcgccgccgauuccaucagacccccucccuauucuccuugaggacuagucccuguucccagagcccacuuuuuuuucuuuuuuugaaauaaaauagccugucuuucagaucuaaaaaaaaaaaaaaaaaaaaaaaaaaaaaaaaaaaaaaaaaaaaaaaaaaaaaaaaaaaaaaaaugcaucccccccccccccccccccccccccccccccaaaggcucuuuucagagccaccagaauu

SEQ ID NO: 12952 - RNA, 576 nt, Artificial Sequence
  mRNA product Design a-1 comprising derived and/or modified sequence from LASV(Mad39;Clade IV)__ANH09743__Z (opt5)
gggagagucccgcagucggcguccagcggcucugcuuguucgugugugugucguugcaggccuuauucaagcuuaccaugggcaacaagcaggccaaagcuagcgagguggaagacgggcccagagccucccugaucccugaugcgacccaccucggaccgcaauucugcaagucuuguugguuugagaauaaaagccuggucgaaugcaacaaucauuaccuuugucugaacugccucacacugcuucuguccguuucuaaucggugucccauuugcaagaugccucuccccacgcgccugaaaccuagcguggugcccaccgcuccuccgacaagagccggcgacgggacccggcccccucccuauuccccuugaggacuagucccuguucccagagcccacuuuuuuuucuuuuuuugaaauaaaauagccugucuuucagaucuaaaaaaaaaaaaaaaaaaaaaaaaaaaaaaaaaaaaaaaaaaaaaaaaaaaaaaaaaaaaaaaaugcaucccccccccccccccccccccccccccccccaaaggcucuuuucagagccaccagaauu

SEQ ID NO: 12953 - RNA, 576 nt, Artificial Sequence
  mRNA product Design a-1 comprising derived and/or modified sequence from LASV(Z0947-SLE-2011;Clade IV)__AIT17838__Z (opt5)
gggagagucccgcagucggcguccagcggcucugcuuguucgugugugugucguugcaggccuuauucaagcuuaccaugggcaacaagcaggccaaagugcccgagagcaaggacuccccuagagcuucucugaucccggaugccacccaccucgggccccaauucugcaaaagcuguugguuugaaaauaagggacuggucgagugcaacaaucauuaccuuugucugaacugccucacacugcuucuguccguuucuaaucgguguccuauuugcaaaaugccccucccuacgaagcugaagcccagcgcggcuccuaccgccccgcccacaggcgccgcugacuccauccgcccucccccuuauucucccugaggacuagucccuguucccagagcccacuuuuuuuucuuuuuuugaaauaaaauagccugucuuucagaucuaaaaaaaaaaaaaaaaaaaaaaaaaaaaaaaaaaaaaaaaaaaaaaaaaaaaaaaaaaaaaaaaugcaucccccccccccccccccccccccccccccccaaaggcucuuuucagagccaccagaauu

SEQ ID NO: 12954 - RNA, 576 nt, Artificial Sequence
  mRNA product Design a-1 comprising derived and/or modified sequence from LASV(Josiah;Clade IV)__ADY11072/NP_694871__Z (opt6)
gggagagucccgcagucggcguccagcggcucugcuuguucgugugugugucguugcaggccuuauucaagcuuaccaugggaaacaaacaagcaaaagcaccagaaucaaaagacucaccaagagcaucacuaauaccagacgcaacacaccuaggaccacaauucugcaaaucaugcugguucgaaaacaaaggacuuguagaaugcaacaaccacuaccuaugccuaaacugccuaacacuacuacuaucaguaucaaacagaugcccaauaugcaaaaugccacuaccaacaaaacuaagaccaucagcagcaccaacagcaccaccaacaggagcagcagacucaauaagaccaccaccauacucaccauaaggacuagucccuguucccagagcccacuuuuuuuucuuuuuuugaaauaaaauagccugucuuucagaucuaaaaaaaaaaaaaaaaaaaaaaaaaaaaaaaaaaaaaaaaaaaaaaaaaaaaaaaaaaaaaaaaugcaucccccccccccccccccccccccccccccccaaaggcucuuuucagagccaccagaauu

SEQ ID NO: 12955 - RNA, 579 nt, Artificial Sequence
  mRNA product Design a-1 comprising derived and/or modified sequence from LASV(Pinneo-NIG-1969;Clade I)__AIT17834__Z (opt6)
gggagagucccgcagucggcguccagcggcucugcuuguucgugugugugucguugcaggccuuauucaagcuuaccaugggaaacaaacaaacaagaucaccaccaaaaccagaacacccaagaccaacacuacuaccagacgcaucacaccuaggaccacaauucugcaaaucaugcugguucgaaaacaaaggacuaguagaaugcaacaaccacuaccuaugccuaaacugccuaacacuacuacuaucaguaucagacagaugcccaauaugcaaaaugccacuaccaacaaaacuagcaguaagaacacaaccaucagcaccaccacuaaaccaaggaaacacacaaucaucaccaccaccauacucaccauaaggacuagucccuguucccagagcccacuuuuuuuucuuuuuuugaaauaaaauagccugucuuucagaucuaaaaaaaaaaaaaaaaaaaaaaaaaaaaaaaaaaaaaaaaaaaaaaaaaaaaaaaaaaaaaaaaugcaucccccccccccccccccccccccccccccccaaaggcucuuuucagagccaccagaauu

SEQ ID NO: 12956 - RNA, 576 nt, Artificial Sequence
  mRNA product Design a-1 comprising derived and/or modified sequence from LASV(Nig08-04;Clade II)__ADU56612__Z (opt6)
gggagagucccgcagucggcguccagcggcucugcuuguucgugugugugucguugcaggccuuauucaagcuuaccaugggaaacagacaaacaagaccaacagaagcaacagaacaaucaagagcacaccuaguaccagacgcaucacaccuaggaccacaauucugcaaaucaugcugguucgaaaacagaggacuaguagaaugcaacaaccacuaccuaugccuaaacugccuaucacuacuacuaucaguaucaucaagaugcccaauaugcaaaaugccacuaccaacaagacuaaaagcaucagcacaaccaucagcaccaccaacagaagcaccacaaaacacaacaccaccaccauacacaccauaaggacuagucccuguucccagagcccacuuuuuuuucuuuuuuugaaauaaaauagccugucuuucagaucuaaaaaaaaaaaaaaaaaaaaaaaaaaaaaaaaaaaaaaaaaaaaaaaaaaaaaaaaaaaaaaaaugcaucccccccccccccccccccccccccccccccaaaggcucuuuucagagccaccagaauu

SEQ ID NO: 12957 - RNA, 576 nt, Artificial Sequence
  mRNA product Design a-1 comprising derived and/or modified sequence from LASV(Nig08-A19;Clade III)__ADU56620__Z (opt6)
gggagagucccgcagucggcguccagcggcucugcuuguucgugugugugucguugcaggccuuauucaagcuuaccaugggaggaaaacacacaaaaccacaaagagaaucaaacucaccaagagcaucacuaauaccagacgcaacacaccuaggaccacaauucugcaaaucaugcugguucgaaaacaaaggauuaguagaaugcaacaaccacuaccuaugccuaaacugccuaacacuacuacuaucaguaucaaacagaugcccaauaugcaaaaugccacuaccaacaagacuaagagcaucaacaaacccaacagcaccacaaguagaacaaguaggaccaacaaacccaccaccauacucaccauaaggacuagucccuguucccagagcccacuuuuuuuucuuuuuuugaaauaaaauagccugucuuucagaucuaaaaaaaaaaaaaaaaaaaaaaaaaaaaaaaaaaaaaaaaaaaaaaaaaaaaaaaaaaaaaaaaugcaucccccccccccccccccccccccccccccccaaaggcucuuuucagagccaccagaauu

SEQ ID NO: 12958 - RNA, 576 nt, Artificial Sequence
  mRNA product Design a-1 comprising derived and/or modified sequence from LASV(AV;Clade V)__CCA30312__Z (opt6)
gggagagucccgcagucggcguccagcggcucugcuuguucgugugugugucguugcaggccuuauucaagcuuaccaugggaaacagacaagcaaaaaacccagaaguagaaaacucaccaagagcaucacuaauaccagacgcaacacaccuaggaccacaauucugcaaaucaugcugguucgaaaacaaaggacuaguagaaugcaacaaccacuaccuaugccuaaacugccuaucacuacuacuaucaguaucaaacagaugcccaauaugcaaaaugccacuaccaacaagacuaagaccaacaacaacaccaacagcaccacaaauaauaaaagaaaacacaacaaacccaccaccauacacaccauaaggacuagucccuguucccagagcccacuuuuuuuucuuuuuuugaaauaaaauagccugucuuucagaucuaaaaaaaaaaaaaaaaaaaaaaaaaaaaaaaaaaaaaaaaaaaaaaaaaaaaaaaaaaaaaaaaugcaucccccccccccccccccccccccccccccccaaaggcucuuuucagagccaccagaauu

SEQ ID NO: 12959 - RNA, 576 nt, Artificial Sequence
  mRNA product Design a-1 comprising derived and/or modified sequence from LASV(Togo/2016/7082;Clade VI)__AMR44579__Z (opt6)
gggagagucccgcagucggcguccagcggcucugcuuguucgugugugugucguugcaggccuuauucaagcuuaccaugggagcaagacaaacaaaacaaccacaaauagaaggaucaccaagagcaucacuaguaccagacgcaucacaccuaggaccacaauucugcaaaucaugcugguucgaaaacaaaggacuaguagaaugcaacaaccacuacuuaugccuaaacugccuaucacuacuacuaucaguaucaaacagaugcccaauaugcaaaaugccacuaccaacaaaacuaagaguaucaucagcaccaucagcaccaccagcagcaacagcacaaccaggaacaccaccaccauacucaccauaaggacuagucccuguucccagagcccacuuuuuuuucuuuuuuugaaauaaaauagccugucuuucagaucuaaaaaaaaaaaaaaaaaaaaaaaaaaaaaaaaaaaaaaaaaaaaaaaaaaaaaaaaaaaaaaaaugcaucccccccccccccccccccccccccccccccaaaggcucuuuucagagccaccagaauu

SEQ ID NO: 12960 - RNA, 576 nt, Artificial Sequence
  mRNA product Design a-1 comprising derived and/or modified sequence from LASV(KAK-428;Clade n.d. (VII))__ANH09761__Z (opt6)
gggagagucccgcagucggcguccagcggcucugcuuguucgugugugugucguugcaggccuuauucaagcuuaccaugggaaacaaaggaacaaaaccaacacaaaacucagaaccaucaagagcaaaccuaguaccagacgcaucauaccuaggaccacaauucugcaaaucaugcugguucgaaaacaaaggacuaguagaaugcaacaaccacuaccuaugccuaaacugccuaacaaugcuacuaucaguaucaaacagaugcccaauaugcaaaaugccacuaccaacaaaaauaaaagcaucaggaucaccaucagcaccaccaacagaagcaaacucagcaguaucaccaccaccauacacaccauaaggacuagucccuguucccagagcccacuuuuuuuucuuuuuuugaaauaaaauagccugucuuucagaucuaaaaaaaaaaaaaaaaaaaaaaaaaaaaaaaaaaaaaaaaaaaaaaaaaaaaaaaaaaaaaaaaugcaucccccccccccccccccccccccccccccccaaaggcucuuuucagagccaccagaauu

SEQ ID NO: 12961 - RNA, 576 nt, Artificial Sequence
  mRNA product Design a-1 comprising derived and/or modified sequence from LASV(ISTH0009-NIG-2011;Clade II)__AIT17402__Z (opt6)
gggagagucccgcagucggcguccagcggcucugcuuguucgugugugugucguugcaggccuuauucaagcuuaccaugggaaacagacaagcaaaaucaacaaaaguagacgaacaccaaagagcacaccuaguaccagacgcaucacaccuaggaccacaauucugcaaaucaugcugguucgaaaacagaggacuaguagaaugcaacaaccacuaccuaugccuaaacugccuaucacuacuacuaucaguaucaucaagaugcccaauaugcaaaaugccacuaccaacaaaacuaaaagcagcagcacaaccaucagcaccaucaacagaaacaauacaaaacacaacaccaccaccauacacaccauaaggacuagucccuguucccagagcccacuuuuuuuucuuuuuuugaaauaaaauagccugucuuucagaucuaaaaaaaaaaaaaaaaaaaaaaaaaaaaaaaaaaaaaaaaaaaaaaaaaaaaaaaaaaaaaaaaugcaucccccccccccccccccccccccccccccccaaaggcucuuuucagagccaccagaauu

SEQ ID NO: 12962 - RNA, 576 nt, Artificial Sequence
  mRNA product Design a-1 comprising derived and/or modified sequence from LASV(ISTH2010-NIG-2012;Clade II)__AIT17480__Z (opt6)
gggagagucccgcagucggcguccagcggcucugcuuguucgugugugugucguugcaggccuuauucaagcuuaccaugggaaacagacacgcaaaaucaacaaaaguagacgaacaccaaagagcacaccuaguaccagacgcaucacaccuaggaccacaauucugcaaaucaugcugguucgaaaacagaggacuaguagaaugcaacaaccacuaccuaugccuaaacugccuaucacuacuacuaucaguaucaucaagaugcccaauaugcaaaaugccacuaccaacaaaacuaaaagcagcagcacaaccaucagcaccaucaacagaaguaauacaaucaacaacacccccaccauacacaccauaaggacuagucccuguucccagagcccacuuuuuuuucuuuuuuugaaauaaaauagccugucuuucagaucuaaaaaaaaaaaaaaaaaaaaaaaaaaaaaaaaaaaaaaaaaaaaaaaaaaaaaaaaaaaaaaaaugcaucccccccccccccccccccccccccccccccaaaggcucuuuucagagccaccagaauu

SEQ ID NO: 12963 - RNA, 576 nt, Artificial Sequence
  mRNA product Design a-1 comprising derived and/or modified sequence from LASV(Lassa virus/H.sapiens-wt/NGA/2016/ISTH_0017;Clade II)__AVO03713__Z (opt6)
gggagagucccgcagucggcguccagcggcucugcuuguucgugugugugucguugcaggccuuauucaagcuuaccaugggaaacagacaagcaaaaucaacaaaaguagacgaacaccaaagagcacaccuaguaccagacgcaucacaccuaggaccacaauucugcaaaucaugcugguucgaaaacagaggacuaguagaaugcaacaaccacuaccuaugccuaaacugccuaucacuacuacuaucaguaucaucaagaugcccaauaugcaaaaugccacuaccaacaaaacuaaaagcagcaacacaaccaucagcaccaucaacagaaguaaaccaaaacacaacaccaccaccauacacaccauaaggacuagucccuguucccagagcccacuuuuuuuucuuuuuuugaaauaaaauagccugucuuucagaucuaaaaaaaaaaaaaaaaaaaaaaaaaaaaaaaaaaaaaaaaaaaaaaaaaaaaaaaaaaaaaaaaugcaucccccccccccccccccccccccccccccccaaaggcucuuuucagagccaccagaauu

SEQ ID NO: 12964 - RNA, 576 nt, Artificial Sequence
  mRNA product Design a-1 comprising derived and/or modified sequence from LASV(Lassa virus/H.sapiens-wt/NGA/2018/ISTH_0959;Clade II)__AVV65084__Z (opt6)
gggagagucccgcagucggcguccagcggcucugcuuguucgugugugugucguugcaggccuuauucaagcuuaccaugggaaacaaacaagcaaaaucaacaaaaguagacgaacaccaaagagcacaccuaguuccagacgcaucacaccuaggaccacaauucugcaaaucaugcugguucgaaaacagaggacuaguagaaugcaacaaccacuaccuaugccuaaacugccuaucacuacuacuaucaguaucaucaagaugcccaauaugcaaaaugccacuaccaacaaaacuaaaagcagcagcacaaccaucagcaccaucaacagaagcaauacaaucaacaacaccaccaccauacacaccauaaggacuagucccuguucccagagcccacuuuuuuuucuuuuuuugaaauaaaauagccugucuuucagaucuaaaaaaaaaaaaaaaaaaaaaaaaaaaaaaaaaaaaaaaaaaaaaaaaaaaaaaaaaaaaaaaaugcaucccccccccccccccccccccccccccccccaaaggcucuuuucagagccaccagaauu

SEQ ID NO: 12965 - RNA, 576 nt, Artificial Sequence
  mRNA product Design a-1 comprising derived and/or modified sequence from LASV(LASV003-NIG-2008;Clade II)__AIT17578__Z (opt6)
gggagagucccgcagucggcguccagcggcucugcuuguucgugugugugucguugcaggccuuauucaagcuuaccaugggaaacagacaagcaaaaucaacaaaaguagacgaacaccaaagagcacaccuaguaccagacgcaucacaccuaggaccacaauucugcaaaucaugcugguucgaaaacaaaggacuaguagaaugcaacaaccacuaccuaugccuaaacugccuaucacuacuacuaucaguaucaucaagaugcccaauaugcaaaaugccacuaccaacaaaacuaagagcagcagcacaaccaucagcaccaucaacagaaucagcacaaaacacagcaccaccaccauacgcaccauaaggacuagucccuguucccagagcccacuuuuuuuucuuuuuuugaaauaaaauagccugucuuucagaucuaaaaaaaaaaaaaaaaaaaaaaaaaaaaaaaaaaaaaaaaaaaaaaaaaaaaaaaaaaaaaaaaugcaucccccccccccccccccccccccccccccccaaaggcucuuuucagagccaccagaauu

SEQ ID NO: 12966 - RNA, 576 nt, Artificial Sequence
  mRNA product Design a-1 comprising derived and/or modified sequence from LASV(LASV035-NIG-2009;Clade II)__AIT17586__Z (opt6)
gggagagucccgcagucggcguccagcggcucugcuuguucgugugugugucguugcaggccuuauucaagcuuaccaugggaaacaaacaagcaaaaucaacaaaaguagacgaacaccaaagagcacaccuaguaccagacgcaucacaccuaggaccacaauucugcaaaucaugcugguucgaaaacagaggacuaguagaaugcaacaaccacuaccuaugccuaaacugccuaucacuacuacuaucaguaucaucaagaugcccaauaugcaaaaugccacuaccaacaagacuaaaagcagcagcacaaccaucagcaccaucaacagaaguaacacaaaacacaacaccaccaccauacacaccauaaggacuagucccuguucccagagcccacuuuuuuuucuuuuuuugaaauaaaauagccugucuuucagaucuaaaaaaaaaaaaaaaaaaaaaaaaaaaaaaaaaaaaaaaaaaaaaaaaaaaaaaaaaaaaaaaaugcaucccccccccccccccccccccccccccccccaaaggcucuuuucagagccaccagaauu

SEQ ID NO: 12967 - RNA, 576 nt, Artificial Sequence
  mRNA product Design a-1 comprising derived and/or modified sequence from LASV(LASV1000-NIG-2009;Clade II)__AIT17780__Z (opt6)
gggagagucccgcagucggcguccagcggcucugcuuguucgugugugugucguugcaggccuuauucaagcuuaccaugggaaacagacaaacaaaaucaacaaaaguagacgaacaccaaagagcauaccuaguaccagacgcaucacuacuaggaccacaauucugcaaaucaugcugguucgaaaacaaaggacuaguagaaugcaacaaccacuaccuaugccuaaacugccuaucacuacuacuaucaguaucaucaagaugcccaauaugcaaaaugccacuaccaacaagacuaaaagcagcagcacaaccaucagcaccaccaacagaagcaauacaaaacacaacaccaccaccauacacaccauaaggacuagucccuguucccagagcccacuuuuuuuucuuuuuuugaaauaaaauagccugucuuucagaucuaaaaaaaaaaaaaaaaaaaaaaaaaaaaaaaaaaaaaaaaaaaaaaaaaaaaaaaaaaaaaaaaugcaucccccccccccccccccccccccccccccccaaaggcucuuuucagagccaccagaauu

SEQ ID NO: 12968 - RNA, 576 nt, Artificial Sequence
  mRNA product Design a-1 comprising derived and/or modified sequence from LASV(LASV221-NIG-2010;Clade II)__AIT17622__Z (opt6)
gggagagucccgcagucggcguccagcggcucugcuuguucgugugugugucguugcaggccuuauucaagcuuaccaugggaaacagacaagccaaaucaacaaaaguagacgaacaccaaagagcacaccuaguaccagacgcaucacaccuaggaccacaauucugcaaaucaugcugguucgaaaacagaggauuaguagaaugcaacaaccacuaccuaugccuaaacugccuaucacuacuacuaucaguaucaucaagaugcccaauaugcaaaaugccacuaccaacaaaacuaaaagcagcaacacaaccaucagcaccaucaacagaaguaacacaaaacacaauaccaccaccauacucaccauaaggacuagucccuguucccagagcccacuuuuuuuucuuuuuuugaaauaaaauagccugucuuucagaucuaaaaaaaaaaaaaaaaaaaaaaaaaaaaaaaaaaaaaaaaaaaaaaaaaaaaaaaaaaaaaaaaugcaucccccccccccccccccccccccccccccccaaaggcucuuuucagagccaccagaauu

SEQ ID NO: 12969 - RNA, 576 nt, Artificial Sequence
  mRNA product Design a-1 comprising derived and/or modified sequence from LASV(LASV237-NIG-2010;Clade II)__AIT17636__Z (opt6)
gggagagucccgcagucggcguccagcggcucugcuuguucgugugugugucguugcaggccuuauucaagcuuaccaugggaaacagacaagcaaaaucaacaaaaguagacgaacaccaaagagcacaccuaguaccagacgcaucacaccuaggaccacaauucugcaaaucaugcugguucgaaaacagaggacucguagaaugcaacaaccacuaccuaugccuaaacugccuaucacuacuacuaucaguaucaucaagaugcccaauaugcaaaaugccacuaccaacaaaacuaaaagcagcagcacaaccaucagcaccaucaauagaaacaauacaaaacacaacaccaccaccauacacaccauaaggacuagucccuguucccagagcccacuuuuuuuucuuuuuuugaaauaaaauagccugucuuucagaucuaaaaaaaaaaaaaaaaaaaaaaaaaaaaaaaaaaaaaaaaaaaaaaaaaaaaaaaaaaaaaaaaugcaucccccccccccccccccccccccccccccccaaaggcucuuuucagagccaccagaauu

SEQ ID NO: 12970 - RNA, 576 nt, Artificial Sequence
  mRNA product Design a-1 comprising derived and/or modified sequence from LASV(LASV253-NIG-2011;Clade II)__AIT17668__Z (opt6)
gggagagucccgcagucggcguccagcggcucugcuuguucgugugugugucguugcaggccuuauucaagcuuaccaugggaaacagacaagcaaaaucaacaaaaguagacgaacaccaaagagcacaccuaguaccagacgcaucacaccuaggaccacaauucugcaaaucaugcugguucgaaaacaaaggacuaguagaaugcaacaaccacuaccuaugccuaaacugccuaucacuacuacuaucaguaucaucaagaugcccaauaugcaaaaugccauuaccaacaaaacuaaaaacaacagcacaaccaucagcaccaccaacagaagcagcaaaaaacacagcaccaccaccauacgcaccauaaggacuagucccuguucccagagcccacuuuuuuuucuuuuuuugaaauaaaauagccugucuuucagaucuaaaaaaaaaaaaaaaaaaaaaaaaaaaaaaaaaaaaaaaaaaaaaaaaaaaaaaaaaaaaaaaaugcaucccccccccccccccccccccccccccccccaaaggcucuuuucagagccaccagaauu

SEQ ID NO: 12971 - RNA, 576 nt, Artificial Sequence
  mRNA product Design a-1 comprising derived and/or modified sequence from LASV(G1180-SLE-2010;Clade IV)__AIT17166__Z (opt6)
gggagagucccgcagucggcguccagcggcucugcuuguucgugugugugucguugcaggccuuauucaagcuuaccaugggaaacaaacaagcaaaagcaccagaagcaaaagacucaccaagagcaucacuaauaccagacgcaacacaccuaggaccacaauucugcaaaucaugcugguucgaaacaaaaggacuaguagaaugcaacaaccacuaccuaugccuaaacugccuaacacuacuacuaucaguaucaaacagaugcccaauaugcaaaaugccacuaccaacaaaacuaagaccaucagcaacaccaacagcaccaccaacagaagcagcagacucaauaggaccaccaccauacucaccauaaggacuagucccuguucccagagcccacuuuuuuuucuuuuuuugaaauaaaauagccugucuuucagaucuaaaaaaaaaaaaaaaaaaaaaaaaaaaaaaaaaaaaaaaaaaaaaaaaaaaaaaaaaaaaaaaaugcaucccccccccccccccccccccccccccccccaaaggcucuuuucagagccaccagaauu

SEQ ID NO: 12972 - RNA, 576 nt, Artificial Sequence
  mRNA product Design a-1 comprising derived and/or modified sequence from LASV(G1442-SLE-2011;Clade IV)__AIT17178__Z (opt6)
gggagagucccgcagucggcguccagcggcucugcuuguucgugugugugucguugcaggccuuauucaagcuuaccaugggaaacaaacaagcaaaagcaucagaagcaaaagacucaccaagagcaucacuaauaccagacgcaacacaccuaggaccacaauucugcaaaucaugcugguucgaaaacaaaggauuaguagaaugcaacaaccacuaccuaugccuaaacugccuaucacuacuacuaucaguaucaucaagaugcccaauaugcaaaaugccacuaccaacaagacuaagaccaucaacagcaccaacagcaccaccagcaagagcaggagacaacauaaaaccaccaccauacucaccauaaggacuagucccuguucccagagcccacuuuuuuuucuuuuuuugaaauaaaauagccugucuuucagaucuaaaaaaaaaaaaaaaaaaaaaaaaaaaaaaaaaaaaaaaaaaaaaaaaaaaaaaaaaaaaaaaaugcaucccccccccccccccccccccccccccccccaaaggcucuuuucagagccaccagaauu

SEQ ID NO: 12973 - RNA, 576 nt, Artificial Sequence
  mRNA product Design a-1 comprising derived and/or modified sequence from LASV(G502-SLE-2009;Clade IV)__AIT17124__Z (opt6)
gggagagucccgcagucggcguccagcggcucugcuuguucgugugugugucguugcaggccuuauucaagcuuaccaugggaaacaaacaaguaaaaacaccagaagcaaaagacucaccaagagcaucacuaauaccagacgcaacacaccuaggaccacaauucugcaaaucaugcugguucgaaaacaaaggacuaguagaaugcaacaaccacuaccuaugccuaaacugccuaacacuacuacuaucaguaggaaacagaugcccaauaugcaaaaugccacuaccaacaaaacuaagaccaucagucacaccaacagcaccaccaacaagagcagcagacucaauaggaccaccaccauacucaccauaaggacuagucccuguucccagagcccacuuuuuuuucuuuuuuugaaauaaaauagccugucuuucagaucuaaaaaaaaaaaaaaaaaaaaaaaaaaaaaaaaaaaaaaaaaaaaaaaaaaaaaaaaaaaaaaaaugcaucccccccccccccccccccccccccccccccaaaggcucuuuucagagccaccagaauu

SEQ ID NO: 12974 - RNA, 576 nt, Artificial Sequence
  mRNA product Design a-1 comprising derived and/or modified sequence from LASV(G733-SLE-2010;Clade IV)__AIT17152__Z (opt6)
gggagagucccgcagucggcguccagcggcucugcuuguucgugugugugucguugcaggccuuauucaagcuuaccaugggaaacaaacaagcaaaaacaccagaaacaaaagacucaccaagagcaucauuaauaccagacgcaacacaccuaggaccacaauucugcaaaucaugcugguucgaaaacaaaggauuaguagaaugcaacaaccacuaccuaugccuaaacugccuaacacuacuacuaucaguaucaaacagaugcccaauaugcaaaaugccacuaccaacaaaacuaagaccaucaacagcaccaacagcaccaccagcaggagcagcagacaacacaagaccaccaccauacucaccauaaggacuagucccuguucccagagcccacuuuuuuuucuuuuuuugaaauaaaauagccugucuuucagaucuaaaaaaaaaaaaaaaaaaaaaaaaaaaaaaaaaaaaaaaaaaaaaaaaaaaaaaaaaaaaaaaaugcaucccccccccccccccccccccccccccccccaaaggcucuuuucagagccaccagaauu

SEQ ID NO: 12975 - RNA, 588 nt, Artificial Sequence
  mRNA product Design a-1 comprising derived and/or modified sequence from MOPV/LASV reassortant(IGS-1;Clade IV)__AFY05533__Z (opt6)
gggagagucccgcagucggcguccagcggcucugcuuguucgugugugugucguugcaggccuuauucaagcuuaccaugggaaaaacacaaucaaaaggacaaccauccacaaaccuacuaaaagaaacagaaccaagacacccaguaauaccagacgcaagaggaacaggaccagaauucugcaaaucaugcugguucgaaagaagaggacuaguaagaugcaacgaccacuaccuaugccuaaacugccuaacacuacuacacacaguaucagacagaugcccaauaugcaaacacaaacuaccauucagacuagaacuacaaacacaaccaacagcaccaccagaaauaccaccaucacaaaacccaccaccauacucaccauaaggacuagucccuguucccagagcccacuuuuuuuucuuuuuuugaaauaaaauagccugucuuucagaucuaaaaaaaaaaaaaaaaaaaaaaaaaaaaaaaaaaaaaaaaaaaaaaaaaaaaaaaaaaaaaaaaugcaucccccccccccccccccccccccccccccccaaaggcucuuuucagagccaccagaauu

SEQ ID NO: 12976 - RNA, 576 nt, Artificial Sequence
  mRNA product Design a-1 comprising derived and/or modified sequence from LASV(LM776-SLE-2012;Clade IV)__AIT17824__Z (opt6)
gggagagucccgcagucggcguccagcggcucugcuuguucgugugugugucguugcaggccuuauucaagcuuaccaugggaaacaaacaagcaaaagcaucagaagaaaaaaacucaccaagagcaucacuaauaccagacgcaacacaccuaggaccacaauucugcaaaucaugcugguucgaaaacaaaggacuaguagaaugcaacaaucacuaccuaugccuaaacugccuaacacuacuacuaucaguaucaaacagaugcccaauaugcaaaaugccacuaccaacaaaacuaagaccaucaacaacaccaacagcaccaccaacaggagcagcagacucaauaagaccaccaccauacucaccauaaggacuagucccuguucccagagcccacuuuuuuuucuuuuuuugaaauaaaauagccugucuuucagaucuaaaaaaaaaaaaaaaaaaaaaaaaaaaaaaaaaaaaaaaaaaaaaaaaaaaaaaaaaaaaaaaaugcaucccccccccccccccccccccccccccccccaaaggcucuuuucagagccaccagaauu

SEQ ID NO: 12977 - RNA, 576 nt, Artificial Sequence
  mRNA product Design a-1 comprising derived and/or modified sequence from LASV(Mad39;Clade IV)__ANH09743__Z (opt6)
gggagagucccgcagucggcguccagcggcucugcuuguucgugugugugucguugcaggccuuauucaagcuuaccaugggaaacaaacaagcaaaagcaucagaaguagaagacggaccaagagcaucacuaauaccagacgcaacacaccuaggaccacaauucugcaaaucaugcugguucgaaaacaaaucacuaguagaaugcaacaaccacuaccuaugccuaaacugccuaacacuacuacuaucaguaucaaacagaugcccaauaugcaaaaugccacuaccaacaagacuaaaaccaucaguaguaccaacagcaccaccaacacgagcaggagacggaacaagaccaccaccauacucaccauaaggacuagucccuguucccagagcccacuuuuuuuucuuuuuuugaaauaaaauagccugucuuucagaucuaaaaaaaaaaaaaaaaaaaaaaaaaaaaaaaaaaaaaaaaaaaaaaaaaaaaaaaaaaaaaaaaugcaucccccccccccccccccccccccccccccccaaaggcucuuuucagagccaccagaauu

SEQ ID NO: 12978 - RNA, 576 nt, Artificial Sequence
  mRNA product Design a-1 comprising derived and/or modified sequence from LASV(Z0947-SLE-2011;Clade IV)__AIT17838__Z (opt6)
gggagagucccgcagucggcguccagcggcucugcuuguucgugugugugucguugcaggccuuauucaagcuuaccaugggaaacaaacaagcaaaaguaccagaaucaaaagacucaccaagagcaucacuaauaccagacgcaacacaccuaggaccacaauucugcaaaucaugcugguucgaaaacaaaggacuaguagaaugcaacaaccacuaccuaugccuaaacugccuaacacuacuacuaucaguaucaaacagaugcccaauaugcaaaaugccacuaccaacaaaacuaaaaccaucagcagcaccaacagcaccaccaacaggagcagcagacucaauaagaccaccaccauacucaccauaaggacuagucccuguucccagagcccacuuuuuuuucuuuuuuugaaauaaaauagccugucuuucagaucuaaaaaaaaaaaaaaaaaaaaaaaaaaaaaaaaaaaaaaaaaaaaaaaaaaaaaaaaaaaaaaaaugcaucccccccccccccccccccccccccccccccaaaggcucuuuucagagccaccagaauu

SEQ ID NO: 12979 - RNA, 576 nt, Artificial Sequence
  mRNA product Design a-1 comprising derived and/or modified sequence from LASV(Josiah;Clade IV)__ADY11072/NP_694871__Z (opt11)
gggagagucccgcagucggcguccagcggcucugcuuguucgugugugugucguugcaggccuuauucaagcuuaccaugggcaacaaacaagccaaagcccccgaauccaaagacuccccccgcgccucccucauccccgacgccacccaccucggcccccaauucugcaaauccugcugguucgaaaacaaaggccucgucgaaugcaacaaccacuaccucugccucaacugccucacccuacuccucuccgucuccaaccgcugccccaucugcaaaaugccccuccccaccaaacuccgccccuccgccgcccccaccgccccccccaccggcgccgccgacuccauccgccccccccccuacucccccuaaggacuagucccuguucccagagcccacuuuuuuuucuuuuuuugaaauaaaauagccugucuuucagaucuaaaaaaaaaaaaaaaaaaaaaaaaaaaaaaaaaaaaaaaaaaaaaaaaaaaaaaaaaaaaaaaaugcaucccccccccccccccccccccccccccccccaaaggcucuuuucagagccaccagaauu

SEQ ID NO: 12980 - RNA, 579 nt, Artificial Sequence
  mRNA product Design a-1 comprising derived and/or modified sequence from LASV(Pinneo-NIG-1969;Clade I)__AIT17834__Z (opt11)
gggagagucccgcagucggcguccagcggcucugcuuguucgugugugugucguugcaggccuuauucaagcuuaccaugggcaacaaacaaacccgcuccccccccaaacccgaacacccccgccccacccuccucccagacgccucccaccucggcccccaauucugcaaauccugcugguucgaaaacaaaggccuagucgaaugcaacaaccacuaccucugccucaacugccucacccuccuccucuccgucuccgaccgcugccccaucugcaaaaugccccuccccaccaaacuugccguccgcacccaacccuccgcccccccccucaaccaaggcaacacccaauccucccccccccccuacucccccuaaggacuagucccuguucccagagcccacuuuuuuuucuuuuuuugaaauaaaauagccugucuuucagaucuaaaaaaaaaaaaaaaaaaaaaaaaaaaaaaaaaaaaaaaaaaaaaaaaaaaaaaaaaaaaaaaaugcaucccccccccccccccccccccccccccccccaaaggcucuuuucagagccaccagaauu

SEQ ID NO: 12981 - RNA, 576 nt, Artificial Sequence
  mRNA product Design a-1 comprising derived and/or modified sequence from LASV(Nig08-04;Clade II)__ADU56612__Z (opt11)
gggagagucccgcagucggcguccagcggcucugcuuguucgugugugugucguugcaggccuuauucaagcuuaccaugggcaaccgccaaacccgccccaccgaagcaaccgaacaaucccgcgcccaccucguccccgacgccucccaccucggcccccaauucugcaaauccugcugguucgaaaaccgcggccucgucgaaugcaacaaccacuaccucugccucaacugccucucccuccuccucuccgucuccucccgcugccccaucugcaaaaugccccuccccacccgccucaaagccuccgcccaacccuccgccccccccaccgaagccccccaaaacaccacccccccccccuacacccccuaaggacuagucccuguucccagagcccacuuuuuuuucuuuuuuugaaauaaaauagccugucuuucagaucuaaaaaaaaaaaaaaaaaaaaaaaaaaaaaaaaaaaaaaaaaaaaaaaaaaaaaaaaaaaaaaaaugcaucccccccccccccccccccccccccccccccaaaggcucuuuucagagccaccagaauu

SEQ ID NO: 12982 - RNA, 576 nt, Artificial Sequence
  mRNA product Design a-1 comprising derived and/or modified sequence from LASV(Nig08-A19;Clade III)__ADU56620__Z (opt11)
gggagagucccgcagucggcguccagcggcucugcuuguucgugugugugucguugcaggccuuauucaagcuuaccaugggcggcaaacacaccaaaccccaacgcgaauccaacuccccccgcgccucccucauccccgacgccacccaccucggcccccaauucugcaaauccugcugguucgaaaacaaaggccucgucgaaugcaacaaccacuaccucugccucaacugccucacccuccuccucuccgucuccaaccgcugccccaucugcaaaaugccccuccccacccgccuccgcgccuccaccaaccccaccgccccccaagucgaacaagucggccccaccaaccccccccccuacucccccuaaggacuagucccuguucccagagcccacuuuuuuuucuuuuuuugaaauaaaauagccugucuuucagaucuaaaaaaaaaaaaaaaaaaaaaaaaaaaaaaaaaaaaaaaaaaaaaaaaaaaaaaaaaaaaaaaaugcaucccccccccccccccccccccccccccccccaaaggcucuuuucagagccaccagaauu

SEQ ID NO: 12983 - RNA, 576 nt, Artificial Sequence
  mRNA product Design a-1 comprising derived and/or modified sequence from LASV(AV;Clade V)__CCA30312__Z (opt11)
gggagagucccgcagucggcguccagcggcucugcuuguucgugugugugucguugcaggccuuauucaagcuuaccaugggcaaccgccaagccaaaaaccccgaagucgaaaacuccccccgcgccucccucauccccgacgccacccaccucggcccccaauucugcaaauccugcugguucgaaaacaaaggccucgucgaaugcaacaaccacuaccucugccucaacugccucucccuccuccucuccgucuccaaccgcugccccaucugcaaaaugccccuccccacccgccuccgccccaccaccacccccaccgccccccaaaucaucaaagaaaacaccaccaaccccccccccuacacccccuaaggacuagucccuguucccagagcccacuuuuuuuucuuuuuuugaaauaaaauagccugucuuucagaucuaaaaaaaaaaaaaaaaaaaaaaaaaaaaaaaaaaaaaaaaaaaaaaaaaaaaaaaaaaaaaaaaugcaucccccccccccccccccccccccccccccccaaaggcucuuuucagagccaccagaauu

SEQ ID NO: 12984 - RNA, 576 nt, Artificial Sequence
  mRNA product Design a-1 comprising derived and/or modified sequence from LASV(Togo/2016/7082;Clade VI)__AMR44579__Z (opt11)
gggagagucccgcagucggcguccagcggcucugcuuguucgugugugugucguugcaggccuuauucaagcuuaccaugggcgcccgccaaaccaaacaaccccaaaucgaaggcuccccccgcgccucccucguccccgacgccucccaccucggcccccaauucugcaaauccugcugguucgaaaacaaaggccucgucgaaugcaacaaccacuaccucugccucaacugccucucccuccuccuauccgucucaaaccgcugccccaucugcaaaaugccccuccccaccaaacuccgcgucuccuccgcccccuccgccccccccgccgccaccgcccaacccggcacccccccccccuacucccccuaaggacuagucccuguucccagagcccacuuuuuuuucuuuuuuugaaauaaaauagccugucuuucagaucuaaaaaaaaaaaaaaaaaaaaaaaaaaaaaaaaaaaaaaaaaaaaaaaaaaaaaaaaaaaaaaaaugcaucccccccccccccccccccccccccccccccaaaggcucuuuucagagccaccagaauu

SEQ ID NO: 12985 - RNA, 576 nt, Artificial Sequence
  mRNA product Design a-1 comprising derived and/or modified sequence from LASV(KAK-428;Clade n.d. (VII))__ANH09761__Z (opt11)
gggagagucccgcagucggcguccagcggcucugcuuguucgugugugugucguugcaggccuuauucaagcuuaccaugggcaacaaaggcaccaaacccacccaaaacuccgaacccucccgcgccaaccucguccccgacgccuccuaccucggcccccaauucugcaaauccugcugguucgaaaacaaaggccucgucgaaugcaacaaccacuaccucugccucaacugccucaccaugcuccucuccgucuccaaccgcugccccaucugcaaaaugccccuccccaccaaaaucaaagccuccggcucccccuccgccccccccaccgaagccaacuccgccgucucccccccccccuacacccccuaaggacuagucccuguucccagagcccacuuuuuuuucuuuuuuugaaauaaaauagccugucuuucagaucuaaaaaaaaaaaaaaaaaaaaaaaaaaaaaaaaaaaaaaaaaaaaaaaaaaaaaaaaaaaaaaaaugcaucccccccccccccccccccccccccccccccaaaggcucuuuucagagccaccagaauu

SEQ ID NO: 12986 - RNA, 576 nt, Artificial Sequence
  mRNA product Design a-1 comprising derived and/or modified sequence from LASV(ISTH0009-NIG-2011;Clade II)__AIT17402__Z (opt11)
gggagagucccgcagucggcguccagcggcucugcuuguucgugugugugucguugcaggccuuauucaagcuuaccaugggcaaccgccaagccaaauccaccaaagucgacgaacaccaacgcgcccaccucguccccgacgccucccaccucggcccccaauucugcaaauccugcugguucgaaaaccgcggccuagucgaaugcaacaaccacuaccucugccucaacugccucucccuccuccucuccgucuccucccgcugccccaucugcaaaaugccccuccccaccaaacucaaagccgccgcccaacccuccgcccccuccaccgaaaccauccaaaacaccacccccccccccuacacccccuaaggacuagucccuguucccagagcccacuuuuuuuucuuuuuuugaaauaaaauagccugucuuucagaucuaaaaaaaaaaaaaaaaaaaaaaaaaaaaaaaaaaaaaaaaaaaaaaaaaaaaaaaaaaaaaaaaugcaucccccccccccccccccccccccccccccccaaaggcucuuuucagagccaccagaauu

SEQ ID NO: 12987 - RNA, 576 nt, Artificial Sequence
  mRNA product Design a-1 comprising derived and/or modified sequence from LASV(ISTH2010-NIG-2012;Clade II)__AIT17480__Z (opt11)
gggagagucccgcagucggcguccagcggcucugcuuguucgugugugugucguugcaggccuuauucaagcuuaccaugggcaaccgccacgccaaauccaccaaagucgacgaacaccaacgcgcccaccucguccccgacgccucccaccuaggcccccaauucugcaaauccugcugguucgaaaaccgcggccucgucgaaugcaacaaccacuaccucugccucaacugccucucccuccuccucuccgucuccucccgcugccccaucugcaaaaugccccuccccaccaaacucaaagccgccgcccaaccauccgcccccuccaccgaagucauccaauccaccacccccccccccuacacccccuaaggacuagucccuguucccagagcccacuuuuuuuucuuuuuuugaaauaaaauagccugucuuucagaucuaaaaaaaaaaaaaaaaaaaaaaaaaaaaaaaaaaaaaaaaaaaaaaaaaaaaaaaaaaaaaaaaugcaucccccccccccccccccccccccccccccccaaaggcucuuuucagagccaccagaauu

SEQ ID NO: 12988 - RNA, 576 nt, Artificial Sequence
  mRNA product Design a-1 comprising derived and/or modified sequence from LASV(Lassa virus/H.sapiens-wt/NGA/2016/ISTH_0017;Clade II)__AVO03713__Z (opt11)
gggagagucccgcagucggcguccagcggcucugcuuguucgugugugugucguugcaggccuuauucaagcuuaccaugggcaaccgccaagccaaauccaccaaagucgacgaacaccaacgcgcccaccucguccccgacgccucccaccucggcccccaauucugcaaauccugcugguucgaaaaccgcggccucgucgaaugcaacaaccacuaccucugccucaacugccucucccuccuccucuccgucuccucccgcugccccaucugcaaaaugccccuccccaccaaacucaaagccgccacccaacccuccgcccccuccaccgaagucaaccaaaacaccacccccccccccuacacccccuaaggacuagucccuguucccagagcccacuuuuuuuucuuuuuuugaaauaaaauagccugucuuucagaucuaaaaaaaaaaaaaaaaaaaaaaaaaaaaaaaaaaaaaaaaaaaaaaaaaaaaaaaaaaaaaaaaugcaucccccccccccccccccccccccccccccccaaaggcucuuuucagagccaccagaauu

SEQ ID NO: 12989 - RNA, 576 nt, Artificial Sequence
  mRNA product Design a-1 comprising derived and/or modified sequence from LASV(Lassa virus/H.sapiens-wt/NGA/2018/ISTH_0959;Clade II)__AVV65084__Z (opt11)
gggagagucccgcagucggcguccagcggcucugcuuguucgugugugugucguugcaggccuuauucaagcuuaccaugggcaacaaacaagccaaauccaccaaagucgacgaacaccaacgcgcccaccucguccccgacgccucccaccucggcccccaauucugcaaauccugcugguucgaaaaccgcggccucgucgaaugcaacaaccacuaccucugccucaacugccucucccuccuccucuccgucuccucccgcugccccaucugcaaaaugccccuccccaccaaacucaaagccgccgcccaacccuccgcccccuccaccgaagccauccaauccaccacccccccccccuacacccccuaaggacuagucccuguucccagagcccacuuuuuuuucuuuuuuugaaauaaaauagccugucuuucagaucuaaaaaaaaaaaaaaaaaaaaaaaaaaaaaaaaaaaaaaaaaaaaaaaaaaaaaaaaaaaaaaaaugcaucccccccccccccccccccccccccccccccaaaggcucuuuucagagccaccagaauu

SEQ ID NO: 12990 - RNA, 576 nt, Artificial Sequence
  mRNA product Design a-1 comprising derived and/or modified sequence from LASV(LASV003-NIG-2008;Clade II)__AIT17578__Z (opt11)
gggagagucccgcagucggcguccagcggcucugcuuguucgugugugugucguugcaggccuuauucaagcuuaccaugggcaaccgccaagccaaauccaccaaagucgacgaacaccaacgcgcccaccucguccccgacgccucccaccucggcccccaauucugcaaaucaugcugguucgaaaacaaaggccucgucgaaugcaacaaccacuaccucugccucaacugccucucacuccuccucuccgucuccucccgcugccccaucugcaaaaugccccuccccaccaaacuccgcgccgccgcccaacccuccgcccccuccaccgaauccgcccaaaacaccgcccccccccccuacgcccccuaaggacuagucccuguucccagagcccacuuuuuuuucuuuuuuugaaauaaaauagccugucuuucagaucuaaaaaaaaaaaaaaaaaaaaaaaaaaaaaaaaaaaaaaaaaaaaaaaaaaaaaaaaaaaaaaaaugcaucccccccccccccccccccccccccccccccaaaggcucuuuucagagccaccagaauu

SEQ ID NO: 12991 - RNA, 576 nt, Artificial Sequence
  mRNA product Design a-1 comprising derived and/or modified sequence from LASV(LASV035-NIG-2009;Clade II)__AIT17586__Z (opt11)
gggagagucccgcagucggcguccagcggcucugcuuguucgugugugugucguugcaggccuuauucaagcuuaccaugggcaacaaacaagccaaauccaccaaagucgacgaacaccaacgcgcccaccucguccccgacgccucccaccucggcccccaauucugcaaauccugcugguucgaaaaccgcggccucgucgaaugcaacaaccacuaccucugccucaacugccucucccuccuccucuccgucuccucccgcugccccaucugcaaaaugccccuccccacccgccucaaagccgccgcccaacccuccgcccccuccaccgaagucacccaaaacaccacccccccccccuacacccccuaaggacuagucccuguucccagagcccacuuuuuuuucuuuuuuugaaauaaaauagccugucuuucagaucuaaaaaaaaaaaaaaaaaaaaaaaaaaaaaaaaaaaaaaaaaaaaaaaaaaaaaaaaaaaaaaaaugcaucccccccccccccccccccccccccccccccaaaggcucuuuucagagccaccagaauu

SEQ ID NO: 12992 - RNA, 576 nt, Artificial Sequence
  mRNA product Design a-1 comprising derived and/or modified sequence from LASV(LASV1000-NIG-2009;Clade II)__AIT17780__Z (opt11)
gggagagucccgcagucggcguccagcggcucugcuuguucgugugugugucguugcaggccuuauucaagcuuaccaugggcaaccgccaaaccaaauccaccaaagucgacgaacaccaacgcgcauaccucguccccgacgccucccuccucggcccccaauucugcaaauccugcugguucgaaaacaaaggccucgucgaaugcaacaaccacuaccucugccucaacugccucucccuccuccucuccgucuccucccgcugccccaucugcaaaaugccccuccccacccgccucaaagccgccgcccaacccuccgccccccccacagaagccauccaaaacaccacccccccccccuacacccccuaaggacuagucccuguucccagagcccacuuuuuuuucuuuuuuugaaauaaaauagccugucuuucagaucuaaaaaaaaaaaaaaaaaaaaaaaaaaaaaaaaaaaaaaaaaaaaaaaaaaaaaaaaaaaaaaaaugcaucccccccccccccccccccccccccccccccaaaggcucuuuucagagccaccagaauu

SEQ ID NO: 12993 - RNA, 576 nt, Artificial Sequence
  mRNA product Design a-1 comprising derived and/or modified sequence from LASV(LASV221-NIG-2010;Clade II)__AIT17622__Z (opt11)
gggagagucccgcagucggcguccagcggcucugcuuguucgugugugugucguugcaggccuuauucaagcuuaccaugggcaaccgccaagccaaauccaccaaagucgacgaacaccaacgcgcccaccucguccccgacgccucccaccucggcccccaauucugcaaauccugcugguucgaaaaccgcggccucgucgaaugcaacaaccacuaccucugccucaacugccuaucccuccuccucuccgucuccucccgcugccccaucugcaaaaugccccuccccaccaaacucaaagccgccacccaacccuccgcccccuccaccgaagucacccaaaacaccauccccccccccuacucccccuaaggacuagucccuguucccagagcccacuuuuuuuucuuuuuuugaaauaaaauagccugucuuucagaucuaaaaaaaaaaaaaaaaaaaaaaaaaaaaaaaaaaaaaaaaaaaaaaaaaaaaaaaaaaaaaaaaugcaucccccccccccccccccccccccccccccccaaaggcucuuuucagagccaccagaauu

SEQ ID NO: 12994 - RNA, 576 nt, Artificial Sequence
  mRNA product Design a-1 comprising derived and/or modified sequence from LASV(LASV237-NIG-2010;Clade II)__AIT17636__Z (opt11)
gggagagucccgcagucggcguccagcggcucugcuuguucgugugugugucguugcaggccuuauucaagcuuaccaugggcaaccgccaagccaaauccaccaaagucgacgaacaccaacgcgcccaccuaguccccgacgccucacaccucggcccccaauucugcaaauccugcugguucgaaaaccgcggccucgucgaaugcaacaaccacuaccucugccucaacugccucucccuccuccucuccgucuccucccgcugccccaucugcaaaaugccccuccccaccaaacucaaagccgcagcccaacccuccgcccccucaaucgaaaccauccaaaacaccacacccccccccuacacccccuaaggacuagucccuguucccagagcccacuuuuuuuucuuuuuuugaaauaaaauagccugucuuucagaucuaaaaaaaaaaaaaaaaaaaaaaaaaaaaaaaaaaaaaaaaaaaaaaaaaaaaaaaaaaaaaaaaugcaucccccccccccccccccccccccccccccccaaaggcucuuuucagagccaccagaauu

SEQ ID NO: 12995 - RNA, 576 nt, Artificial Sequence
  mRNA product Design a-1 comprising derived and/or modified sequence from LASV(LASV253-NIG-2011;Clade II)__AIT17668__Z (opt11)
gggagagucccgcagucggcguccagcggcucugcuuguucgugugugugucguugcaggccuuauucaagcuuaccaugggcaaccgccaagccaaauccacaaaagucgacgaacaccaacgcgcccaccucguccccgacgccucccaccucggcccccaauucugcaaauccugcugguucgaaaacaaaggccucgucgaaugcaacaaccacuaccucugccucaacugccucucccuccuccucuccgucuccucccgcugccccaucugcaaaaugccccuccccaccaaacucaaaaccaccgcccaacccuccgccccccccaccgaagccgccaaaaacaccgcccccccccccuacgcccccuaaggacuagucccuguucccagagcccacuuuuuuuucuuuuuuugaaauaaaauagccugucuuucagaucuaaaaaaaaaaaaaaaaaaaaaaaaaaaaaaaaaaaaaaaaaaaaaaaaaaaaaaaaaaaaaaaaugcaucccccccccccccccccccccccccccccccaaaggcucuuuucagagccaccagaauu

SEQ ID NO: 12996 - RNA, 576 nt, Artificial Sequence
  mRNA product Design a-1 comprising derived and/or modified sequence from LASV(G1180-SLE-2010;Clade IV)__AIT17166__Z (opt11)
gggagagucccgcagucggcguccagcggcucugcuuguucgugugugugucguugcaggccuuauucaagcuuaccaugggcaacaaacaagccaaagcccccgaagccaaagacuccccccgcgccucccucauccccgacgccacccaccucggcccccaauucugcaaauccugcugguucgaaaccaaaggccucgucgaaugcaacaaccacuaccucugccucaacugccucacccuccuccucuccgucuccaaccgcugccccaucugcaaaaugccccuccccaccaaacuccgccccuccgccacccccaccgccccccccaccgaagccgccgacuccaucggccccccccccuacucccccuaaggacuagucccuguucccagagcccacuuuuuuuucuuuuuuugaaauaaaauagccugucuuucagaucuaaaaaaaaaaaaaaaaaaaaaaaaaaaaaaaaaaaaaaaaaaaaaaaaaaaaaaaaaaaaaaaaugcaucccccccccccccccccccccccccccccccaaaggcucuuuucagagccaccagaauu

SEQ ID NO: 12997 - RNA, 576 nt, Artificial Sequence
  mRNA product Design a-1 comprising derived and/or modified sequence from LASV(G1442-SLE-2011;Clade IV)__AIT17178__Z (opt11)
gggagagucccgcagucggcguccagcggcucugcuuguucgugugugugucguugcaggccuuauucaagcuuaccaugggcaacaaacaagccaaagccuccgaagccaaagacuccccccgcgccucccucauccccgacgccacccaccucggcccccaauucugcaaauccugcugguucgaaaacaaaggccucgucgaaugcaacaaccacuaccucugccucaacugccucucccuccuccucuccgucuccucccgcugccccaucugcaaaaugccccuccccacccgccuccgccccuccaccgcccccaccgcaccccccgcccgcgccggcgacaacaucaaacccccccccuacucccccuaaggacuagucccuguucccagagcccacuuuuuuuucuuuuuuugaaauaaaauagccugucuuucagaucuaaaaaaaaaaaaaaaaaaaaaaaaaaaaaaaaaaaaaaaaaaaaaaaaaaaaaaaaaaaaaaaaugcaucccccccccccccccccccccccccccccccaaaggcucuuuucagagccaccagaauu

SEQ ID NO: 12998 - RNA, 576 nt, Artificial Sequence
  mRNA product Design a-1 comprising derived and/or modified sequence from LASV(G502-SLE-2009;Clade IV)__AIT17124__Z (opt11)
gggagagucccgcagucggcguccagcggcucugcuuguucgugugugugucguugcaggccuuauucaagcuuaccaugggcaacaaacaagucaaaacccccgaagccaaagacuccccccgcgccucccucauccccgacgccacccaccucggcccccaauucugcaaauccugcugguucgaaaacaaaggccucgucgaaugcaacaaccacuaccucugccucaacugccucacccuccuccucuccgucggcaaccgcugccccaucugcaaaaugccccuccccaccaaacuccgccccuccgucacccccaccgccccccccacccgcgccgccgacuccaucggccccccccccuacucccccuaaggacuagucccuguucccagagcccacuuuuuuuucuuuuuuugaaauaaaauagccugucuuucagaucuaaaaaaaaaaaaaaaaaaaaaaaaaaaaaaaaaaaaaaaaaaaaaaaaaaaaaaaaaaaaaaaaugcaucccccccccccccccccccccccccccccccaaaggcucuuuucagagccaccagaauu

SEQ ID NO: 12999 - RNA, 576 nt, Artificial Sequence
  mRNA product Design a-1 comprising derived and/or modified sequence from LASV(G733-SLE-2010;Clade IV)__AIT17152__Z (opt11)
gggagagucccgcagucggcguccagcggcucugcuuguucgugugugugucguugcaggccuuauucaagcuuaccaugggcaacaaacaagccaaaacccccgaaaccaaagacuccccccgcgccucacucauccccgacgccacccaccucggcccccaauucugcaaauccugcugguucgaaaacaaaggccucgucgaaugcaacaaccacuaccucugccucaacugccucacccuccuccucuccgucuccaaccgcugccccaucugcaaaaugccccuccccaccaaacuccgccccuccaccgcccccaccgccccccccgccggcgccgccgacaacacccgccccccccccuacucccccuaaggacuagucccuguucccagagcccacuuuuuuuucuuuuuuugaaauaaaauagccugucuuucagaucuaaaaaaaaaaaaaaaaaaaaaaaaaaaaaaaaaaaaaaaaaaaaaaaaaaaaaaaaaaaaaaaaugcaucccccccccccccccccccccccccccccccaaaggcucuuuucagagccaccagaauu

SEQ ID NO: 13000 - RNA, 588 nt, Artificial Sequence
  mRNA product Design a-1 comprising derived and/or modified sequence from MOPV/LASV reassortant(IGS-1;Clade IV)__AFY05533__Z (opt11)
gggagagucccgcagucggcguccagcggcucugcuuguucgugugugugucguugcaggccuuauucaagcuuaccaugggcaaaacccaauccaaaggccaacccuccaccaaccuacucaaagaaaccgaaccccgccaccccgucauccccgacgcccgcggcaccggccccgaauucugcaaauccugcugguucgaacgccgcggccucguccgcugcaacgaccacuaccucugccucaacugccucacccuccuccacaccgucuccgaccgcugccccaucugcaaacacaaacuccccuuccgccucgaacuccaaacccaacccaccgccccccccgaaaucccccccucccaaaaccccccccccuacucccccuaaggacuagucccuguucccagagcccacuuuuuuuucuuuuuuugaaauaaaauagccugucuuucagaucuaaaaaaaaaaaaaaaaaaaaaaaaaaaaaaaaaaaaaaaaaaaaaaaaaaaaaaaaaaaaaaaaugcaucccccccccccccccccccccccccccccccaaaggcucuuuucagagccaccagaauu

SEQ ID NO: 13001 - RNA, 576 nt, Artificial Sequence
  mRNA product Design a-1 comprising derived and/or modified sequence from LASV(LM776-SLE-2012;Clade IV)__AIT17824__Z (opt11)
gggagagucccgcagucggcguccagcggcucugcuuguucgugugugugucguugcaggccuuauucaagcuuaccaugggcaacaaacaagccaaagccuccgaagaaaaaaacuccccccgcgccucccucauccccgacgccacccaccucggcccccaauucugcaaauccugcugguucgaaaacaaaggccuagucgaaugcaacaaccacuaccucugccucaacugccucacccuccuccucucagucuccaaccgcugccccaucugcaaaaugccccuccccaccaaacuccgccccuccaccacccccaccgccccccccaccggcgccgccgacuccauccgccccccccccuacucccccuaaggacuagucccuguucccagagcccacuuuuuuuucuuuuuuugaaauaaaauagccugucuuucagaucuaaaaaaaaaaaaaaaaaaaaaaaaaaaaaaaaaaaaaaaaaaaaaaaaaaaaaaaaaaaaaaaaugcaucccccccccccccccccccccccccccccccaaaggcucuuuucagagccaccagaauu

SEQ ID NO: 13002 - RNA, 576 nt, Artificial Sequence
  mRNA product Design a-1 comprising derived and/or modified sequence from LASV(Mad39;Clade IV)__ANH09743__Z (opt11)
gggagagucccgcagucggcguccagcggcucugcuuguucgugugugugucguugcaggccuuauucaagcuuaccaugggcaacaaacaagccaaagccuccgaagucgaagacggcccccgcgccucccucauccccgacgccacccaccucggcccccaauucugcaaauccugcugguucgaaaacaaaucccucgucgaaugcaacaaccacuaccucugccuaaacugccucacccuccuccucuccgucuccaaccgcugccccaucugcaaaaugccccuccccacccgccucaaacccuccgucguccccaccgccccccccacccgcgccggcgacggcacccgccccccccccuacucccccuaaggacuagucccuguucccagagcccacuuuuuuuucuuuuuuugaaauaaaauagccugucuuucagaucuaaaaaaaaaaaaaaaaaaaaaaaaaaaaaaaaaaaaaaaaaaaaaaaaaaaaaaaaaaaaaaaaugcaucccccccccccccccccccccccccccccccaaaggcucuuuucagagccaccagaauu

SEQ ID NO: 13003 - RNA, 576 nt, Artificial Sequence
  mRNA product Design a-1 comprising derived and/or modified sequence from LASV(Z0947-SLE-2011;Clade IV)__AIT17838__Z (opt11)
gggagagucccgcagucggcguccagcggcucugcuuguucgugugugugucguugcaggccuuauucaagcuuaccaugggcaacaaacaagccaaaguccccgaauccaaagacuccccccgcgccucccucauccccgacgccacccaccucggcccccaauucugcaaauccugcugguucgaaaacaaaggccucgucgaaugcaacaaccacuaccucugccucaacugccucacccuccuccucuccgucuccaaccgcugccccaucugcaaaaugccccuccccaccaaacucaaacccuccgccgcccccaccgccccccccaccggcgccgccgacuccauccgccccccccccuacuccccauaaggacuagucccuguucccagagcccacuuuuuuuucuuuuuuugaaauaaaauagccugucuuucagaucuaaaaaaaaaaaaaaaaaaaaaaaaaaaaaaaaaaaaaaaaaaaaaaaaaaaaaaaaaaaaaaaaugcaucccccccccccccccccccccccccccccccaaaggcucuuuucagagccaccagaauu

SEQ ID NO: 13004 - RNA, 595 nt, Artificial Sequence
  mRNA product Design a-2 comprising derived and/or modified sequence from LASV(Josiah;Clade IV)__ADY11072/NP_694871__Z (wt)
gggagaguccgcucagccagguugcagaagcggcuuagcguguguccuaaucuucucucugcguguagguaggccugugccgcaaacaagcuuaccaugggaaacaagcaagccaaagccccagaaucaaaagacaguccgagagccagccugaucccagaugccacacaucuagggccacaguucuguaagagcugcugguucgaaaacaagggccugguugagugcaacaaccacuaucugugucucaacugccucaccuuacuucuaagugucagcaacaggugucccauuugcaagaugccucuccccacaaaacugagaccaucagccgcuccaacagcaccuccaaccggagcagcggacagcaucagacccccacccuacagucccugaggacuagucccuguucccagagcccacuuuuuuuucuuuuuuugaaauaaaauagccugucuuucagaucuaaaaaaaaaaaaaaaaaaaaaaaaaaaaaaaaaaaaaaaaaaaaaaaaaaaaaaaaaaaaaaaaugcaucccccccccccccccccccccccccccccccaaaggcucuuuucagagccaccagaauu

SEQ ID NO: 13005 - RNA, 598 nt, Artificial Sequence
  mRNA product Design a-2 comprising derived and/or modified sequence from LASV(Pinneo-NIG-1969;Clade I)__AIT17834__Z (wt)
gggagaguccgcucagccagguugcagaagcggcuuagcguguguccuaaucuucucucugcguguagguaggccugugccgcaaacaagcuuaccaugggcaacaagcagaccagguccccacccaaaccagagcaccccagaccaacccugcuacccgacgcaucccaccugggcccccaauucugcaagagcugcugguuugagaacaagggacugguggaguguaauaaccauuaccucugucuaaacugucucacacugcuucucagcgugagcgacagauguccuauuuguaagaugccccuccccaccaagcuggcaguccgaacccaaccaagugcacccccacucaaccagggcaacacucaauccuccccgccccccuacagccccuaaggacuagucccuguucccagagcccacuuuuuuuucuuuuuuugaaauaaaauagccugucuuucagaucuaaaaaaaaaaaaaaaaaaaaaaaaaaaaaaaaaaaaaaaaaaaaaaaaaaaaaaaaaaaaaaaaugcaucccccccccccccccccccccccccccccccaaaggcucuuuucagagccaccagaauu

SEQ ID NO: 13006 - RNA, 595 nt, Artificial Sequence
  mRNA product Design a-2 comprising derived and/or modified sequence from LASV(Nig08-04;Clade II)__ADU56612__Z (wt)
gggagaguccgcucagccagguugcagaagcggcuuagcguguguccuaaucuucucucugcguguagguaggccugugccgcaaacaagcuuaccaugggcaacaggcaaaccaggccaacugaagccacugaacagagcagggcucacuugguaccagacgcaucccaccugggaccccaauucugcaagagcuguugguuugaaaacagaggucuaguggagugcaacaaccacuaccugugucucaacugucucaguuugcuccucagugucagcagcagauguccaaucugcaagaugccccuucccaccaggcugaaggcaucagcacagcccagcgcacccccaaccgaagcaccccagaacacaacacccccaccauacaccccauaaggacuagucccuguucccagagcccacuuuuuuuucuuuuuuugaaauaaaauagccugucuuucagaucuaaaaaaaaaaaaaaaaaaaaaaaaaaaaaaaaaaaaaaaaaaaaaaaaaaaaaaaaaaaaaaaaugcaucccccccccccccccccccccccccccccccaaaggcucuuuucagagccaccagaauu

SEQ ID NO: 13007 - RNA, 595 nt, Artificial Sequence
  mRNA product Design a-2 comprising derived and/or modified sequence from LASV(Nig08-A19;Clade III)__ADU56620__Z (wt)
gggagaguccgcucagccagguugcagaagcggcuuagcguguguccuaaucuucucucugcguguagguaggccugugccgcaaacaagcuuaccauggguggcaaacacaccaaaccacagagagaauccaacagucccagagccucucuaauucccgaugcaacacaccugggcccucaauuuugcaagaguuguugguuugagaacaaaggucugguggagugcaacaaccauuacuuaugccucaacugccuuacuuuacuccugucugucagcaacagaugccccaucuguaagaugccccuccccacgaggcugagagcaucaaccaacccaacagcaccccaggucgaacaagucggcccuacaaauccuccaccauacagucccuaaggacuagucccuguucccagagcccacuuuuuuuucuuuuuuugaaauaaaauagccugucuuucagaucuaaaaaaaaaaaaaaaaaaaaaaaaaaaaaaaaaaaaaaaaaaaaaaaaaaaaaaaaaaaaaaaaugcaucccccccccccccccccccccccccccccccaaaggcucuuuucagagccaccagaauu

SEQ ID NO: 13008 - RNA, 595 nt, Artificial Sequence
  mRNA product Design a-2 comprising derived and/or modified sequence from LASV(AV;Clade V)__CCA30312__Z (wt)
gggagaguccgcucagccagguugcagaagcggcuuagcguguguccuaaucuucucucugcguguagguaggccugugccgcaaacaagcuuaccauggggaacagacaagccaaaaauccagagguggagaacagcccaagggcuagucuaauuccggaugccacgcaccuugggccacaguucugcaagagcugcugguucgaaaacaaagguuuaguugaguguaauaaccacuaucuuugccucaacugccucuccuugcuuuuaagcgucagcaacaggugcccuaucugcaagaugccccuucccacgaggcugagaccgacaaccacaccaacagcgccacagaucaucaaggaaaacaccaccaaccccccgccauacacacccuaaggacuagucccuguucccagagcccacuuuuuuuucuuuuuuugaaauaaaauagccugucuuucagaucuaaaaaaaaaaaaaaaaaaaaaaaaaaaaaaaaaaaaaaaaaaaaaaaaaaaaaaaaaaaaaaaaugcaucccccccccccccccccccccccccccccccaaaggcucuuuucagagccaccagaauu

SEQ ID NO: 13009 - RNA, 595 nt, Artificial Sequence
  mRNA product Design a-2 comprising derived and/or modified sequence from LASV(Togo/2016/7082;Clade VI)__AMR44579__Z (wt)
gggagaguccgcucagccagguugcagaagcggcuuagcguguguccuaaucuucucucugcguguagguaggccugugccgcaaacaagcuuaccaugggagccagacagaccaagcaaccucagauugagggaucuccuagagccucucuggugcccgaugcaagccaucuaggaccccaguucugcaagagcugcugguuugagaacaaagggcuuguggaguguaacaaucauuaccuuugccucaauugccucagccuccuacucagugucagcaacaggugcccuaucugcaagaugccccuccccaccaagcugagagugucaagcgcucccagugcacccccagcggccacggcccaacccggaacuccuccaccauacagccccuagggacuagucccuguucccagagcccacuuuuuuuucuuuuuuugaaauaaaauagccugucuuucagaucuaaaaaaaaaaaaaaaaaaaaaaaaaaaaaaaaaaaaaaaaaaaaaaaaaaaaaaaaaaaaaaaaugcaucccccccccccccccccccccccccccccccaaaggcucuuuucagagccaccagaauu

SEQ ID NO: 13010 - RNA, 595 nt, Artificial Sequence
  mRNA product Design a-2 comprising derived and/or modified sequence from LASV(KAK-428;Clade n.d. (VII))__ANH09761__Z (wt)
gggagaguccgcucagccagguugcagaagcggcuuagcguguguccuaaucuucucucugcguguagguaggccugugccgcaaacaagcuuaccaugggcaacaaagggaccaaacccacccagaacucagaacccagcagggccaaccuagugccugaugcaagcuacuuaggaccccaguucugcaagaguugcugguuugaaaacaaagggcugguggaguguaacaaucauuaucucugccucaacugucucacaaugcuucucucugucagcaacaggugcccaaucugcaaaaugccgcuucccaccaaaauaaaggccucaggaagccccagcgcuccuccgaccgaggccaacuccgcagucagccccccuccauacacccccuaaggacuagucccuguucccagagcccacuuuuuuuucuuuuuuugaaauaaaauagccugucuuucagaucuaaaaaaaaaaaaaaaaaaaaaaaaaaaaaaaaaaaaaaaaaaaaaaaaaaaaaaaaaaaaaaaaugcaucccccccccccccccccccccccccccccccaaaggcucuuuucagagccaccagaauu

SEQ ID NO: 13011 - RNA, 595 nt, Artificial Sequence
  mRNA product Design a-2 comprising derived and/or modified sequence from LASV(ISTH0009-NIG-2011;Clade II)__AIT17402__Z (wt)
gggagaguccgcucagccagguugcagaagcggcuuagcguguguccuaaucuucucucugcguguagguaggccugugccgcaaacaagcuuaccaugggcaacagacaggcuaaaucgacaaaagucgaugaacaucaaagagcucaucuagugccagaugcaucccaucuaggcccccaguucugcaagaguugcugguuugagaacagaggguugguagaguguaacaaucacuaccugugucucaacugucucagccugcuucucagcgucagcaguagaugcccgaucugcaagaugccccuucccaccaagcuaaaggcagcagcacagccgagcgcaccaucaaccgagacgauccagaacacaacaccuccaccguacaccccauaaggacuagucccuguucccagagcccacuuuuuuuucuuuuuuugaaauaaaauagccugucuuucagaucuaaaaaaaaaaaaaaaaaaaaaaaaaaaaaaaaaaaaaaaaaaaaaaaaaaaaaaaaaaaaaaaaugcaucccccccccccccccccccccccccccccccaaaggcucuuuucagagccaccagaauu

SEQ ID NO: 13012 - RNA, 595 nt, Artificial Sequence
  mRNA product Design a-2 comprising derived and/or modified sequence from LASV(ISTH2010-NIG-2012;Clade II)__AIT17480__Z (wt)
gggagaguccgcucagccagguugcagaagcggcuuagcguguguccuaaucuucucucugcguguagguaggccugugccgcaaacaagcuuaccauggguaacagacaugccaaaucgacaaaagucgaugaacaucaaagagcucaucuagugccagaugcaucccaucuaggcccccaguucugcaagaguugcugguuugagaauagaggguugguagagugcaacaaucacuaccugugucucaacugucucagccugcuccucagugucagcagcagaugcccgaucugcaagaugccccuucccaccaagcuaaaggcagcagcacagccgagcgcaccauccaccgaggugauccagagcacaacaccuccaccauacaccccauaaggacuagucccuguucccagagcccacuuuuuuuucuuuuuuugaaauaaaauagccugucuuucagaucuaaaaaaaaaaaaaaaaaaaaaaaaaaaaaaaaaaaaaaaaaaaaaaaaaaaaaaaaaaaaaaaaugcaucccccccccccccccccccccccccccccccaaaggcucuuuucagagccaccagaauu

SEQ ID NO: 13013 - RNA, 595 nt, Artificial Sequence
  mRNA product Design a-2 comprising derived and/or modified sequence from LASV(Lassa virus/H.sapiens-wt/NGA/2016/ISTH_0017;Clade II)__AVO03713__Z (wt)
gggagaguccgcucagccagguugcagaagcggcuuagcguguguccuaaucuucucucugcguguagguaggccugugccgcaaacaagcuuaccaugggcaauagacaggccaagucgacaaaagucgaugaacaucaaagagcucaucuagugccagaugcaucccaucuaggcccccaguucugcaaaaguugcugguuugagaacaggggguuaguagagugcaacaaucacuaccugugucucaacugucucagccuacuccucagcgucaguagcagaugcccgaucugcaagaugccccuucccaccaagcuaaaggcggcaacacagccgagcgcaccaucaaccgaggugaaccagaauacaacaccuccaccguacacuccaugaggacuagucccuguucccagagcccacuuuuuuuucuuuuuuugaaauaaaauagccugucuuucagaucuaaaaaaaaaaaaaaaaaaaaaaaaaaaaaaaaaaaaaaaaaaaaaaaaaaaaaaaaaaaaaaaaugcaucccccccccccccccccccccccccccccccaaaggcucuuuucagagccaccagaauu

SEQ ID NO: 13014 - RNA, 595 nt, Artificial Sequence
  mRNA product Design a-2 comprising derived and/or modified sequence from LASV(Lassa virus/H.sapiens-wt/NGA/2018/ISTH_0959;Clade II)__AVV65084__Z (wt)
gggagaguccgcucagccagguugcagaagcggcuuagcguguguccuaaucuucucucugcguguagguaggccugugccgcaaacaagcuuaccaugggcaacaaacaggccaaaucgacaaaagucgacgaacaucaaagggcucaucuaguaccggaugcaucccaucuaggcccccaguucugcaagaguugcugguuugagaacagaggguugguagagugcaacaaucacuaccugugucucaacugucucagccugcuucucagugucagcagcagaugcccgaucugcaagaugccccuucccaccaagcuaaaggcagcagcacagccgagcgcaccaucaacagaggcgauccagagcacaacaccuccaccguacacuccauaaggacuagucccuguucccagagcccacuuuuuuuucuuuuuuugaaauaaaauagccugucuuucagaucuaaaaaaaaaaaaaaaaaaaaaaaaaaaaaaaaaaaaaaaaaaaaaaaaaaaaaaaaaaaaaaaaugcaucccccccccccccccccccccccccccccccaaaggcucuuuucagagccaccagaauu

SEQ ID NO: 13015 - RNA, 595 nt, Artificial Sequence
  mRNA product Design a-2 comprising derived and/or modified sequence from LASV(LASV003-NIG-2008;Clade II)__AIT17578__Z (wt)
gggagaguccgcucagccagguugcagaagcggcuuagcguguguccuaaucuucucucugcguguagguaggccugugccgcaaacaagcuuaccaugggcaacagacaggcuaaaucaacaaaagucgaugaacaucaaagagcucaucuagugccagaugcaucccaucuaggcccccaguuuugcaaaaguugcugguuugagaacaagggguugguggagugcaacaaccacuaccugugucucaacugucucagccugcuccucagcgucagcaguagaugcccgaucugcaagaugccccuucccaccaagcugagggcagcagcacagccgagcgcacccucaacugagucggcucagaacacagcaccuccaccguaugccccaugaggacuagucccuguucccagagcccacuuuuuuuucuuuuuuugaaauaaaauagccugucuuucagaucuaaaaaaaaaaaaaaaaaaaaaaaaaaaaaaaaaaaaaaaaaaaaaaaaaaaaaaaaaaaaaaaaugcaucccccccccccccccccccccccccccccccaaaggcucuuuucagagccaccagaauu

SEQ ID NO: 13016 - RNA, 595 nt, Artificial Sequence
  mRNA product Design a-2 comprising derived and/or modified sequence from LASV(LASV035-NIG-2009;Clade II)__AIT17586__Z (wt)
gggagaguccgcucagccagguugcagaagcggcuuagcguguguccuaaucuucucucugcguguagguaggccugugccgcaaacaagcuuaccaugggcaacaaacaggccaaaucgacaaaagucgaugaacaucaaagagcucaucuagugccagaugcaucucaucuaggcccccaguucuguaagagcugcugguuugagaacagagggcugguagagugcaacaaccacuaccugugucucaacugucucagccugcuucucagcgucagcagcagguguccgaucugcaaaaugccccuucccaccaggcugaaggcagcagcacagccgagcgcacccucaaccgaggugacccagaacacaacaccuccaccguacaccccgugaggacuagucccuguucccagagcccacuuuuuuuucuuuuuuugaaauaaaauagccugucuuucagaucuaaaaaaaaaaaaaaaaaaaaaaaaaaaaaaaaaaaaaaaaaaaaaaaaaaaaaaaaaaaaaaaaugcaucccccccccccccccccccccccccccccccaaaggcucuuuucagagccaccagaauu

SEQ ID NO: 13017 - RNA, 595 nt, Artificial Sequence
  mRNA product Design a-2 comprising derived and/or modified sequence from LASV(LASV1000-NIG-2009;Clade II)__AIT17780__Z (wt)
gggagaguccgcucagccagguugcagaagcggcuuagcguguguccuaaucuucucucugcguguagguaggccugugccgcaaacaagcuuaccaugggcaacagacagaccaaaucgacaaaagucgaugaacaucaaagagcuuaucuagugccagaugcaucccuucuaggcccccaguucugcaagaguugcugguuugagaacaaaggguugguagaaugcaacaaucacuaccugugucuuaacugucucagccugcuccucagcgucagcagcagaugcccgaucugcaagaugccucuucccaccaggcuaaaggcagcagcacagccgagugcaccaccaacugaggcgauccagaacacaacaccuccaccguacaccccauaaggacuagucccuguucccagagcccacuuuuuuuucuuuuuuugaaauaaaauagccugucuuucagaucuaaaaaaaaaaaaaaaaaaaaaaaaaaaaaaaaaaaaaaaaaaaaaaaaaaaaaaaaaaaaaaaaugcaucccccccccccccccccccccccccccccccaaaggcucuuuucagagccaccagaauu

SEQ ID NO: 13018 - RNA, 595 nt, Artificial Sequence
  mRNA product Design a-2 comprising derived and/or modified sequence from LASV(LASV221-NIG-2010;Clade II)__AIT17622__Z (wt)
gggagaguccgcucagccagguugcagaagcggcuuagcguguguccuaaucuucucucugcguguagguaggccugugccgcaaacaagcuuaccaugggcaacagacaggccaaaucgacaaaagucgaugaacaucaaagagcucaucuagugccagaugcaucccaucucggcccucaauucugcaagaguugcugguuugagaacagagggcugguagagugcaacaaucacuaccugugucucaacugucucagccugcuccucagcgucagcagcagaugcccgaucugcaagaugccccuucccaccaagcuaaaagcagcaacacagccgagcgcaccaucaaccgaagugacccagaacacaauaccuccaccauacuccccaugaggacuagucccuguucccagagcccacuuuuuuuucuuuuuuugaaauaaaauagccugucuuucagaucuaaaaaaaaaaaaaaaaaaaaaaaaaaaaaaaaaaaaaaaaaaaaaaaaaaaaaaaaaaaaaaaaugcaucccccccccccccccccccccccccccccccaaaggcucuuuucagagccaccagaauu

SEQ ID NO: 13019 - RNA, 595 nt, Artificial Sequence
  mRNA product Design a-2 comprising derived and/or modified sequence from LASV(LASV237-NIG-2010;Clade II)__AIT17636__Z (wt)
gggagaguccgcucagccagguugcagaagcggcuuagcguguguccuaaucuucucucugcguguagguaggccugugccgcaaacaagcuuaccaugggcaacagacaggcuaaaucgacaaaagucgaugaacaucaaagagcucaucuagugccagaugcaucccaucuaggcccccaguucugcaagaguuguugguuugagaacagaggguugguagaguguaacaaucacuaccugugucucaacugucucagccugcuucucagcgucagcaguagaugcccgaucugcaagaugccccuucccaccaagcuaaaggcagcagcacagccgagcgcaccaucaaucgagacgauccagaacacaacaccuccuccguacaccccauaaggacuagucccuguucccagagcccacuuuuuuuucuuuuuuugaaauaaaauagccugucuuucagaucuaaaaaaaaaaaaaaaaaaaaaaaaaaaaaaaaaaaaaaaaaaaaaaaaaaaaaaaaaaaaaaaaugcaucccccccccccccccccccccccccccccccaaaggcucuuuucagagccaccagaauu

SEQ ID NO: 13020 - RNA, 595 nt, Artificial Sequence
  mRNA product Design a-2 comprising derived and/or modified sequence from LASV(LASV253-NIG-2011;Clade II)__AIT17668__Z (wt)
gggagaguccgcucagccagguugcagaagcggcuuagcguguguccuaaucuucucucugcguguagguaggccugugccgcaaacaagcuuaccauggguaacagacaggccaaaucaacaaaagucgaugaacaucaaagagcucaucuagugccagaugcaucccaucuaggcccccaguuuugcaaaaguugcugguuugagaacaagggguugguugagugcaacaaccacuaccugugucucaacugucucagccugcuccuuagcguuagcagcagaugcccgauuugcaagaugccccuccccaccaagcuaaagacaacagcacagccaagugcacccccgacugaggcggccaagaacacagcaccuccaccguaugccccaugaggacuagucccuguucccagagcccacuuuuuuuucuuuuuuugaaauaaaauagccugucuuucagaucuaaaaaaaaaaaaaaaaaaaaaaaaaaaaaaaaaaaaaaaaaaaaaaaaaaaaaaaaaaaaaaaaugcaucccccccccccccccccccccccccccccccaaaggcucuuuucagagccaccagaauu

SEQ ID NO: 13021 - RNA, 595 nt, Artificial Sequence
  mRNA product Design a-2 comprising derived and/or modified sequence from LASV(G1180-SLE-2010;Clade IV)__AIT17166__Z (wt)
gggagaguccgcucagccagguugcagaagcggcuuagcguguguccuaaucuucucucugcguguagguaggccugugccgcaaacaagcuuaccaugggaaacaagcaagccaaagccccggaagcaaaagacaguccgagagccagccugaucccagaugccacacaccuagggccacaguuuugcaagagcugcugguucgaaaccaagggccugguugagugcaacaaccacuaucuaugucucaauugccucacuuuacuucuaagugucagcaauaggugccccauuugcaagaugccccuucccacaaaacugagaccgucagccacuccaacggcacccccaaccgaagcugcggacagcaucggacccccacccuacagucccugaggacuagucccuguucccagagcccacuuuuuuuucuuuuuuugaaauaaaauagccugucuuucagaucuaaaaaaaaaaaaaaaaaaaaaaaaaaaaaaaaaaaaaaaaaaaaaaaaaaaaaaaaaaaaaaaaugcaucccccccccccccccccccccccccccccccaaaggcucuuuucagagccaccagaauu

SEQ ID NO: 13022 - RNA, 595 nt, Artificial Sequence
  mRNA product Design a-2 comprising derived and/or modified sequence from LASV(G1442-SLE-2011;Clade IV)__AIT17178__Z (wt)
gggagaguccgcucagccagguugcagaagcggcuuagcguguguccuaaucuucucucugcguguagguaggccugugccgcaaacaagcuuaccauggggaacaagcaagccaaagcuucagaagcaaaagacagcccgagggcuagucugauuccagaugccacacaccuaggaccacaguucuguaagagcuguugguuugagaacaagggccugguugaaugcaacaaucacuaucugugucucaacugccucagucugcuucugagugucagcagcaggugccccaucugcaaaaugccccucccgacaagacugaggccaucaacagccccaacagcacccccagccagagcaggggauaacaucaaacccccacccuacagucccugaggacuagucccuguucccagagcccacuuuuuuuucuuuuuuugaaauaaaauagccugucuuucagaucuaaaaaaaaaaaaaaaaaaaaaaaaaaaaaaaaaaaaaaaaaaaaaaaaaaaaaaaaaaaaaaaaugcaucccccccccccccccccccccccccccccccaaaggcucuuuucagagccaccagaauu

SEQ ID NO: 13023 - RNA, 595 nt, Artificial Sequence
  mRNA product Design a-2 comprising derived and/or modified sequence from LASV(G502-SLE-2009;Clade IV)__AIT17124__Z (wt)
gggagaguccgcucagccagguugcagaagcggcuuagcguguguccuaaucuucucucugcguguagguaggccugugccgcaaacaagcuuaccaugggaaacaagcaagucaaaaccccggaagcaaaagacaguccgagagccagccugaucccagaugccacacaccuagggccacaguucugcaagagcugcugguucgaaaacaagggccugguugagugcaacaaccacuaucugugucucaacugccucacuuuacuucuaaguguuggcaacaggugccccauuugcaagaugccccuucccacaaaacugagaccaucagucacuccaacagcacccccaaccagagcagcggacagcaucggacccccacccuacagucccugaggacuagucccuguucccagagcccacuuuuuuuucuuuuuuugaaauaaaauagccugucuuucagaucuaaaaaaaaaaaaaaaaaaaaaaaaaaaaaaaaaaaaaaaaaaaaaaaaaaaaaaaaaaaaaaaaugcaucccccccccccccccccccccccccccccccaaaggcucuuuucagagccaccagaauu

SEQ ID NO: 13024 - RNA, 595 nt, Artificial Sequence
  mRNA product Design a-2 comprising derived and/or modified sequence from LASV(G733-SLE-2010;Clade IV)__AIT17152__Z (wt)
gggagaguccgcucagccagguugcagaagcggcuuagcguguguccuaaucuucucucugcguguagguaggccugugccgcaaacaagcuuaccaugggaaacaagcaagccaagaccccagaaacaaaagacaguccgagagccagccugaucccagaugccacacaccuagggccacaguuuugcaagagcugcugguucgaaaacaagggccugguugagugcaauaaccacuaucugugccucaauugucuuacccuacuucuaagugucagcaacaggugucccauuugcaagaugccucuccccacaaaacugagaccaucaaccgccccaacagcacccccagccggagcagcggacaacaccagacccccacccuauagccccugaggacuagucccuguucccagagcccacuuuuuuuucuuuuuuugaaauaaaauagccugucuuucagaucuaaaaaaaaaaaaaaaaaaaaaaaaaaaaaaaaaaaaaaaaaaaaaaaaaaaaaaaaaaaaaaaaugcaucccccccccccccccccccccccccccccccaaaggcucuuuucagagccaccagaauu

SEQ ID NO: 13025 - RNA, 607 nt, Artificial Sequence
  mRNA product Design a-2 comprising derived and/or modified sequence from MOPV/LASV reassortant(IGS-1;Clade IV)__AFY05533__Z (wt)
gggagaguccgcucagccagguugcagaagcggcuuagcguguguccuaaucuucucucugcguguagguaggccugugccgcaaacaagcuuaccauggggaaaacgcaguccaagggacagcccagcacaaaucuccucaaggagacagaaccaaggcauccaguaauaccagaugccaggggaacuggcccugaauucugcaagagcugcugguucgaaaggaggggguuagucaggugcaacgaucacuaccuauguuugaacugucuuacacuuuuacacacagugucagauaggugccccaucugcaaacacaaacuacccuucagacuagagcuccagacccagccgacagcaccaccagaaaucccaccaucccaaaaucccccacccuacagccccugaggacuagucccuguucccagagcccacuuuuuuuucuuuuuuugaaauaaaauagccugucuuucagaucuaaaaaaaaaaaaaaaaaaaaaaaaaaaaaaaaaaaaaaaaaaaaaaaaaaaaaaaaaaaaaaaaugcaucccccccccccccccccccccccccccccccaaaggcucuuuucagagccaccagaauu

SEQ ID NO: 13026 - RNA, 595 nt, Artificial Sequence
  mRNA product Design a-2 comprising derived and/or modified sequence from LASV(LM776-SLE-2012;Clade IV)__AIT17824__Z (wt)
gggagaguccgcucagccagguugcagaagcggcuuagcguguguccuaaucuucucucugcguguagguaggccugugccgcaaacaagcuuaccaugggaaacaagcaagccaaagccucagaagaaaaaaacaguccgagagccagccugauuccagaugccacacaccuagggccacaauuuugcaagagcugcugguucgaaaacaagggccugguugagugcaacaaccacuaucugugucucaacugccucaccuuacuuuuaagugucagcaacaggugccccaucugcaagaugccucuucccacaaaacugagaccaucaaccacuccaacagcaccuccaaccggagcagcagacagcaucagacccccaccuuacagucccugaggacuagucccuguucccagagcccacuuuuuuuucuuuuuuugaaauaaaauagccugucuuucagaucuaaaaaaaaaaaaaaaaaaaaaaaaaaaaaaaaaaaaaaaaaaaaaaaaaaaaaaaaaaaaaaaaugcaucccccccccccccccccccccccccccccccaaaggcucuuuucagagccaccagaauu

SEQ ID NO: 13027 - RNA, 595 nt, Artificial Sequence
  mRNA product Design a-2 comprising derived and/or modified sequence from LASV(Mad39;Clade IV)__ANH09743__Z (wt)
gggagaguccgcucagccagguugcagaagcggcuuagcguguguccuaaucuucucucugcguguagguaggccugugccgcaaacaagcuuaccaugggaaacaagcaggccaaagccucagaaguggaggaugguccaagggccagucugaucccagaugccacacaccuggggccacaguucugcaagagcugcugguucgaaaauaagagcuugguugagugcaacaaccauuaucugugccucaacugccucacucugcuucugagcgucagcaacaggugccccaucugcaaaaugccucucccaacaagacugaaaccaucagucgucccaacagcaccccccaccagagcaggagacggcaccaggcccccacccuacagucccuaaggacuagucccuguucccagagcccacuuuuuuuucuuuuuuugaaauaaaauagccugucuuucagaucuaaaaaaaaaaaaaaaaaaaaaaaaaaaaaaaaaaaaaaaaaaaaaaaaaaaaaaaaaaaaaaaaugcaucccccccccccccccccccccccccccccccaaaggcucuuuucagagccaccagaauu

SEQ ID NO: 13028 - RNA, 595 nt, Artificial Sequence
  mRNA product Design a-2 comprising derived and/or modified sequence from LASV(Z0947-SLE-2011;Clade IV)__AIT17838__Z (wt)
gggagaguccgcucagccagguugcagaagcggcuuagcguguguccuaaucuucucucugcguguagguaggccugugccgcaaacaagcuuaccaugggaaacaaacaagccaaggucccagaaucaaaagacagcccgagagccagccuaaucccagaugccacacaucuagggccgcaauucuguaagaguugcugguucgaaaacaagggccugguugaguguaacaaccacuaucugugucucaacugccucaccuuacuuuugagugucagcaacaggugccccauuugcaagaugccucuccccacaaaacugaaaccaucagccgcuccaacagcacccccaacuggagcagcggacagcaucagacccccaccuuacagucccugaggacuagucccuguucccagagcccacuuuuuuuucuuuuuuugaaauaaaauagccugucuuucagaucuaaaaaaaaaaaaaaaaaaaaaaaaaaaaaaaaaaaaaaaaaaaaaaaaaaaaaaaaaaaaaaaaugcaucccccccccccccccccccccccccccccccaaaggcucuuuucagagccaccagaauu

SEQ ID NO: 13029 - RNA, 595 nt, Artificial Sequence
  mRNA product Design a-2 comprising derived and/or modified sequence from LASV(Josiah;Clade IV)__ADY11072/NP_694871__Z (opt1)
gggagaguccgcucagccagguugcagaagcggcuuagcguguguccuaaucuucucucugcguguagguaggccugugccgcaaacaagcuuaccaugggcaacaagcaggccaaggcccccgagagcaaggacuccccgcgcgcgagccugauccccgacgccacccaccucgggccccaguucugcaaguccugcugguucgagaacaagggccugguggagugcaacaaccacuaccugugccucaacugccugacccugcuccugagcgucuccaaccggugccccaucugcaagaugccgcugcccacgaagcuccgccccagcgccgcccccaccgccccgcccaccggggcggccgacuccauccggcccccgcccuacagccccugaggacuagucccuguucccagagcccacuuuuuuuucuuuuuuugaaauaaaauagccugucuuucagaucuaaaaaaaaaaaaaaaaaaaaaaaaaaaaaaaaaaaaaaaaaaaaaaaaaaaaaaaaaaaaaaaaugcaucccccccccccccccccccccccccccccccaaaggcucuuuucagagccaccagaauu

SEQ ID NO: 13030 - RNA, 598 nt, Artificial Sequence
  mRNA product Design a-2 comprising derived and/or modified sequence from LASV(Pinneo-NIG-1969;Clade I)__AIT17834__Z (opt1)
gggagaguccgcucagccagguugcagaagcggcuuagcguguguccuaaucuucucucugcguguagguaggccugugccgcaaacaagcuuaccaugggcaacaagcagacccgcagcccgcccaagcccgagcacccccggcccacccugcuccccgacgccucccaccuggggccccaguucugcaagagcugcugguucgagaacaagggccugguggagugcaacaaccacuaccucugccugaacugccugacgcuccugcuguccgucagcgaccgcugccccaucugcaagaugccccuccccaccaagcuggccgugcggacccagcccuccgcgccgccccugaaccaggggaacacccagagcagcccgccgcccuacucccccugaggacuagucccuguucccagagcccacuuuuuuuucuuuuuuugaaauaaaauagccugucuuucagaucuaaaaaaaaaaaaaaaaaaaaaaaaaaaaaaaaaaaaaaaaaaaaaaaaaaaaaaaaaaaaaaaaugcaucccccccccccccccccccccccccccccccaaaggcucuuuucagagccaccagaauu

SEQ ID NO: 13031 - RNA, 595 nt, Artificial Sequence
  mRNA product Design a-2 comprising derived and/or modified sequence from LASV(Nig08-04;Clade II)__ADU56612__Z (opt1)
gggagaguccgcucagccagguugcagaagcggcuuagcguguguccuaaucuucucucugcguguagguaggccugugccgcaaacaagcuuaccaugggcaaccgccagacccggcccaccgaggccacggagcagagccgcgcccaccuggugccggacgccucccaccucgggccccaguucugcaagagcugcugguucgagaaccggggccuggucgagugcaacaaccacuaccugugccucaacugccugucccugcuccugagcguguccagccgcugccccaucugcaagaugccccugccgacccggcucaaggccuccgcccagcccagcgccccgcccaccgaggcgccccagaacaccacgcccccgcccuacacccccugaggacuagucccuguucccagagcccacuuuuuuuucuuuuuuugaaauaaaauagccugucuuucagaucuaaaaaaaaaaaaaaaaaaaaaaaaaaaaaaaaaaaaaaaaaaaaaaaaaaaaaaaaaaaaaaaaugcaucccccccccccccccccccccccccccccccaaaggcucuuuucagagccaccagaauu

SEQ ID NO: 13032 - RNA, 595 nt, Artificial Sequence
  mRNA product Design a-2 comprising derived and/or modified sequence from LASV(Nig08-A19;Clade III)__ADU56620__Z (opt1)
gggagaguccgcucagccagguugcagaagcggcuuagcguguguccuaaucuucucucugcguguagguaggccugugccgcaaacaagcuuaccaugggcgggaagcacaccaagccccagcgcgagagcaacuccccgcgggccagccugauccccgacgccacccaccucggcccccaguucugcaaguccugcugguucgagaacaaggggcugguggagugcaacaaccacuaccugugccucaacugccugacgcugcuccugagcguguccaaccgcugccccaucugcaagaugccccugcccacccggcuccgcgccagcaccaaccccaccgcgccccagguggagcaggucggcccgacgaacccgccgcccuacucccccugaggacuagucccuguucccagagcccacuuuuuuuucuuuuuuugaaauaaaauagccugucuuucagaucuaaaaaaaaaaaaaaaaaaaaaaaaaaaaaaaaaaaaaaaaaaaaaaaaaaaaaaaaaaaaaaaaugcaucccccccccccccccccccccccccccccccaaaggcucuuuucagagccaccagaauu

SEQ ID NO: 13033 - RNA, 595 nt, Artificial Sequence
  mRNA product Design a-2 comprising derived and/or modified sequence from LASV(AV;Clade V)__CCA30312__Z (opt1)
gggagaguccgcucagccagguugcagaagcggcuuagcguguguccuaaucuucucucugcguguagguaggccugugccgcaaacaagcuuaccaugggcaaccgccaggccaagaaccccgagguggagaacagcccccgggccucccugauccccgacgcgacccaccucgggccccaguucugcaagagcugcugguucgagaacaagggccuggucgagugcaacaaccacuaccugugccucaacugccugucccugcuccugagcguguccaaccgcugccccaucugcaagaugccgcugcccacccggcuccgccccacgaccacccccaccgccccgcagaucaucaaggagaacacgaccaacccgccgcccuacacccccugaggacuagucccuguucccagagcccacuuuuuuuucuuuuuuugaaauaaaauagccugucuuucagaucuaaaaaaaaaaaaaaaaaaaaaaaaaaaaaaaaaaaaaaaaaaaaaaaaaaaaaaaaaaaaaaaaugcaucccccccccccccccccccccccccccccccaaaggcucuuuucagagccaccagaauu

SEQ ID NO: 13034 - RNA, 595 nt, Artificial Sequence
  mRNA product Design a-2 comprising derived and/or modified sequence from LASV(Togo/2016/7082;Clade VI)__AMR44579__Z (opt1)
gggagaguccgcucagccagguugcagaagcggcuuagcguguguccuaaucuucucucugcguguagguaggccugugccgcaaacaagcuuaccaugggcgcccgccagaccaagcagccccagaucgaggggagcccccgggccucccuggugcccgacgcgagccaccucggcccccaguucugcaaguccugcugguucgagaacaaggggcuggucgagugcaacaaccacuaccugugccucaacugccugagccugcuccuguccgugagcaaccgcugccccaucugcaagaugccgcugcccaccaagcuccggguguccagcgcccccuccgcgcccccggccgccacggcccagcccggcaccccgccgcccuacagccccugaggacuagucccuguucccagagcccacuuuuuuuucuuuuuuugaaauaaaauagccugucuuucagaucuaaaaaaaaaaaaaaaaaaaaaaaaaaaaaaaaaaaaaaaaaaaaaaaaaaaaaaaaaaaaaaaaugcaucccccccccccccccccccccccccccccccaaaggcucuuuucagagccaccagaauu

SEQ ID NO: 13035 - RNA, 595 nt, Artificial Sequence
  mRNA product Design a-2 comprising derived and/or modified sequence from LASV(KAK-428;Clade n.d. (VII))__ANH09761__Z (opt1)
gggagaguccgcucagccagguugcagaagcggcuuagcguguguccuaaucuucucucugcguguagguaggccugugccgcaaacaagcuuaccaugggcaacaaggggaccaagcccacccagaacagcgagcccucccgcgccaaccuggugcccgacgccagcuaccucggcccccaguucugcaaguccugcugguucgagaacaaggggcuggucgagugcaacaaccacuaccugugccucaacugccugacgaugcugcucagcguguccaaccggugccccaucugcaagaugccgcugcccaccaagaucaaggccagcggcucccccagcgcgcccccgaccgaggccaacuccgccgugagcccgccgcccuacacccccugaggacuagucccuguucccagagcccacuuuuuuuucuuuuuuugaaauaaaauagccugucuuucagaucuaaaaaaaaaaaaaaaaaaaaaaaaaaaaaaaaaaaaaaaaaaaaaaaaaaaaaaaaaaaaaaaaugcaucccccccccccccccccccccccccccccccaaaggcucuuuucagagccaccagaauu

SEQ ID NO: 13036 - RNA, 595 nt, Artificial Sequence
  mRNA product Design a-2 comprising derived and/or modified sequence from LASV(ISTH0009-NIG-2011;Clade II)__AIT17402__Z (opt1)
gggagaguccgcucagccagguugcagaagcggcuuagcguguguccuaaucuucucucugcguguagguaggccugugccgcaaacaagcuuaccaugggcaaccgccaggccaagagcaccaagguggacgagcaccagcgggcccaccugguccccgacgcgucccaccucgggccccaguucugcaagagcugcugguucgagaaccgcggccugguggagugcaacaaccacuaccugugccucaacugccugucccugcuccugagcguguccagccggugccccaucugcaagaugccccugcccaccaagcucaaggccgccgcccagccguccgcccccagcacggagaccauccagaacaccaccccgccgcccuacacgcccugaggacuagucccuguucccagagcccacuuuuuuuucuuuuuuugaaauaaaauagccugucuuucagaucuaaaaaaaaaaaaaaaaaaaaaaaaaaaaaaaaaaaaaaaaaaaaaaaaaaaaaaaaaaaaaaaaugcaucccccccccccccccccccccccccccccccaaaggcucuuuucagagccaccagaauu

SEQ ID NO: 13037 - RNA, 595 nt, Artificial Sequence
  mRNA product Design a-2 comprising derived and/or modified sequence from LASV(ISTH2010-NIG-2012;Clade II)__AIT17480__Z (opt1)
gggagaguccgcucagccagguugcagaagcggcuuagcguguguccuaaucuucucucugcguguagguaggccugugccgcaaacaagcuuaccaugggcaaccgccacgccaagagcaccaagguggacgagcaccagcgggcccaccugguccccgacgcgucccaccucgggccccaguucugcaagagcugcugguucgagaaccgcggccugguggagugcaacaaccacuaccugugccucaacugccugucccugcuccugagcguguccagccggugccccaucugcaagaugccccugcccaccaagcucaaggccgccgcccagccguccgcccccagcacggaggucauccaguccaccaccccgccgcccuacacccccugaggacuagucccuguucccagagcccacuuuuuuuucuuuuuuugaaauaaaauagccugucuuucagaucuaaaaaaaaaaaaaaaaaaaaaaaaaaaaaaaaaaaaaaaaaaaaaaaaaaaaaaaaaaaaaaaaugcaucccccccccccccccccccccccccccccccaaaggcucuuuucagagccaccagaauu

SEQ ID NO: 13038 - RNA, 595 nt, Artificial Sequence
  mRNA product Design a-2 comprising derived and/or modified sequence from LASV(Lassa virus/H.sapiens-wt/NGA/2016/ISTH_0017;Clade II)__AVO03713__Z (opt1)
gggagaguccgcucagccagguugcagaagcggcuuagcguguguccuaaucuucucucugcguguagguaggccugugccgcaaacaagcuuaccaugggcaaccgccaggccaagagcaccaagguggacgagcaccagcgggcccaccugguccccgacgcgucccaccucgggccccaguucugcaagagcugcugguucgagaaccgcggccugguggagugcaacaaccacuaccugugccucaacugccugucccugcuccugagcguguccagccggugccccaucugcaagaugccccugcccaccaagcucaaggccgccacgcagccguccgcccccagcaccgaggucaaccagaacaccaccccgccgcccuacacgcccugaggacuagucccuguucccagagcccacuuuuuuuucuuuuuuugaaauaaaauagccugucuuucagaucuaaaaaaaaaaaaaaaaaaaaaaaaaaaaaaaaaaaaaaaaaaaaaaaaaaaaaaaaaaaaaaaaugcaucccccccccccccccccccccccccccccccaaaggcucuuuucagagccaccagaauu

SEQ ID NO: 13039 - RNA, 595 nt, Artificial Sequence
  mRNA product Design a-2 comprising derived and/or modified sequence from LASV(Lassa virus/H.sapiens-wt/NGA/2018/ISTH_0959;Clade II)__AVV65084__Z (opt1)
gggagaguccgcucagccagguugcagaagcggcuuagcguguguccuaaucuucucucugcguguagguaggccugugccgcaaacaagcuuaccaugggcaacaagcaggccaagagcaccaagguggacgagcaccagcgcgcccaccugguccccgacgcgucccaccucgggccccaguucugcaagagcugcugguucgagaaccggggccugguggagugcaacaaccacuaccugugccucaacugccugucccugcuccugagcguguccagccgcugccccaucugcaagaugccccugcccaccaagcucaaggccgccgcccagccguccgcccccagcacggaggcgauccaguccaccaccccgccgcccuacacccccugaggacuagucccuguucccagagcccacuuuuuuuucuuuuuuugaaauaaaauagccugucuuucagaucuaaaaaaaaaaaaaaaaaaaaaaaaaaaaaaaaaaaaaaaaaaaaaaaaaaaaaaaaaaaaaaaaugcaucccccccccccccccccccccccccccccccaaaggcucuuuucagagccaccagaauu

SEQ ID NO: 13040 - RNA, 595 nt, Artificial Sequence
  mRNA product Design a-2 comprising derived and/or modified sequence from LASV(LASV003-NIG-2008;Clade II)__AIT17578__Z (opt1)
gggagaguccgcucagccagguugcagaagcggcuuagcguguguccuaaucuucucucugcguguagguaggccugugccgcaaacaagcuuaccaugggcaaccgccaggccaagagcaccaagguggacgagcaccagcgggcccaccugguccccgacgcgucccaccucgggccccaguucugcaagagcugcugguucgagaacaagggccugguggagugcaacaaccacuaccugugccucaacugccugucccugcuccugagcguguccagccgcugccccaucugcaagaugccccugcccaccaagcuccgggccgccgcccagccguccgcccccagcacggaguccgcgcagaacaccgccccgccgcccuacgcccccugaggacuagucccuguucccagagcccacuuuuuuuucuuuuuuugaaauaaaauagccugucuuucagaucuaaaaaaaaaaaaaaaaaaaaaaaaaaaaaaaaaaaaaaaaaaaaaaaaaaaaaaaaaaaaaaaaugcaucccccccccccccccccccccccccccccccaaaggcucuuuucagagccaccagaauu

SEQ ID NO: 13041 - RNA, 595 nt, Artificial Sequence
  mRNA product Design a-2 comprising derived and/or modified sequence from LASV(LASV035-NIG-2009;Clade II)__AIT17586__Z (opt1)
gggagaguccgcucagccagguugcagaagcggcuuagcguguguccuaaucuucucucugcguguagguaggccugugccgcaaacaagcuuaccaugggcaacaagcaggccaagagcaccaagguggacgagcaccagcgcgcccaccugguccccgacgcgucccaccucgggccccaguucugcaagagcugcugguucgagaaccggggccugguggagugcaacaaccacuaccugugccucaacugccugucccugcuccugagcguguccagccgcugccccaucugcaagaugccccugcccacccggcucaaggccgccgcccagccguccgcccccagcacggaggucacccagaacaccaccccgccgcccuacacgcccugaggacuagucccuguucccagagcccacuuuuuuuucuuuuuuugaaauaaaauagccugucuuucagaucuaaaaaaaaaaaaaaaaaaaaaaaaaaaaaaaaaaaaaaaaaaaaaaaaaaaaaaaaaaaaaaaaugcaucccccccccccccccccccccccccccccccaaaggcucuuuucagagccaccagaauu

SEQ ID NO: 13042 - RNA, 595 nt, Artificial Sequence
  mRNA product Design a-2 comprising derived and/or modified sequence from LASV(LASV1000-NIG-2009;Clade II)__AIT17780__Z (opt1)
gggagaguccgcucagccagguugcagaagcggcuuagcguguguccuaaucuucucucugcguguagguaggccugugccgcaaacaagcuuaccaugggcaaccgccagaccaagagcaccaagguggacgagcaccagcgggccuaccugguccccgacgccucccuccuggggccccaguucugcaagagcugcugguucgagaacaagggccugguggagugcaacaaccacuaccucugccugaacugccugucccuccugcugagcguguccagccgcugccccaucugcaagaugccccuccccacgcggcugaaggcggccgcccagcccuccgccccgcccaccgaggccauccagaacaccacgccgccgcccuacacccccugaggacuagucccuguucccagagcccacuuuuuuuucuuuuuuugaaauaaaauagccugucuuucagaucuaaaaaaaaaaaaaaaaaaaaaaaaaaaaaaaaaaaaaaaaaaaaaaaaaaaaaaaaaaaaaaaaugcaucccccccccccccccccccccccccccccccaaaggcucuuuucagagccaccagaauu

SEQ ID NO: 13043 - RNA, 595 nt, Artificial Sequence
  mRNA product Design a-2 comprising derived and/or modified sequence from LASV(LASV221-NIG-2010;Clade II)__AIT17622__Z (opt1)
gggagaguccgcucagccagguugcagaagcggcuuagcguguguccuaaucuucucucugcguguagguaggccugugccgcaaacaagcuuaccaugggcaaccgccaggccaagagcaccaagguggacgagcaccagcgggcccaccugguccccgacgcgucccaccucgggccccaguucugcaagagcugcugguucgagaaccgcggccugguggagugcaacaaccacuaccugugccucaacugccugucccugcuccugagcguguccagccggugccccaucugcaagaugccccugcccaccaagcucaaggccgccacgcagccguccgcccccagcaccgaggucacccagaacaccaucccgccgcccuacucccccugaggacuagucccuguucccagagcccacuuuuuuuucuuuuuuugaaauaaaauagccugucuuucagaucuaaaaaaaaaaaaaaaaaaaaaaaaaaaaaaaaaaaaaaaaaaaaaaaaaaaaaaaaaaaaaaaaugcaucccccccccccccccccccccccccccccccaaaggcucuuuucagagccaccagaauu

SEQ ID NO: 13044 - RNA, 595 nt, Artificial Sequence
  mRNA product Design a-2 comprising derived and/or modified sequence from LASV(LASV237-NIG-2010;Clade II)__AIT17636__Z (opt1)
gggagaguccgcucagccagguugcagaagcggcuuagcguguguccuaaucuucucucugcguguagguaggccugugccgcaaacaagcuuaccaugggcaaccgccaggccaagagcaccaagguggacgagcaccagcgggcccaccugguccccgacgcgucccaccucgggccccaguucugcaagagcugcugguucgagaaccgcggccugguggagugcaacaaccacuaccugugccucaacugccugucccugcuccugagcguguccagccggugccccaucugcaagaugccccugcccaccaagcucaaggccgccgcccagccguccgcccccagcaucgagacgauccagaacaccaccccgccgcccuacacccccugaggacuagucccuguucccagagcccacuuuuuuuucuuuuuuugaaauaaaauagccugucuuucagaucuaaaaaaaaaaaaaaaaaaaaaaaaaaaaaaaaaaaaaaaaaaaaaaaaaaaaaaaaaaaaaaaaugcaucccccccccccccccccccccccccccccccaaaggcucuuuucagagccaccagaauu

SEQ ID NO: 13045 - RNA, 595 nt, Artificial Sequence
  mRNA product Design a-2 comprising derived and/or modified sequence from LASV(LASV253-NIG-2011;Clade II)__AIT17668__Z (opt1)
gggagaguccgcucagccagguugcagaagcggcuuagcguguguccuaaucuucucucugcguguagguaggccugugccgcaaacaagcuuaccaugggcaaccgccaggccaagagcaccaagguggacgagcaccagcgggcccaccugguccccgacgcgucccaccucgggccccaguucugcaagagcugcugguucgagaacaagggccugguggagugcaacaaccacuaccugugccucaacugccugucccugcuccugagcguguccagccgcugccccaucugcaagaugccccugcccaccaagcucaagacgaccgcccagccguccgccccgcccaccgaggccgccaagaacaccgcgcccccgcccuacgcccccugaggacuagucccuguucccagagcccacuuuuuuuucuuuuuuugaaauaaaauagccugucuuucagaucuaaaaaaaaaaaaaaaaaaaaaaaaaaaaaaaaaaaaaaaaaaaaaaaaaaaaaaaaaaaaaaaaugcaucccccccccccccccccccccccccccccccaaaggcucuuuucagagccaccagaauu

SEQ ID NO: 13046 - RNA, 595 nt, Artificial Sequence
  mRNA product Design a-2 comprising derived and/or modified sequence from LASV(G1180-SLE-2010;Clade IV)__AIT17166__Z (opt1)
gggagaguccgcucagccagguugcagaagcggcuuagcguguguccuaaucuucucucugcguguagguaggccugugccgcaaacaagcuuaccaugggcaacaagcaggccaaggcccccgaggcgaaggacagcccgcgcgccucccugauccccgacgccacccaccucgggccccaguucugcaagagcugcugguucgagaccaagggccugguggagugcaacaaccacuaccugugccucaacugccugacgcugcuccuguccgucagcaaccggugccccaucugcaagaugccgcugcccaccaagcuccgccccuccgccacccccaccgccccgcccacggaggcggccgacagcaucgggcccccgcccuacucccccugaggacuagucccuguucccagagcccacuuuuuuuucuuuuuuugaaauaaaauagccugucuuucagaucuaaaaaaaaaaaaaaaaaaaaaaaaaaaaaaaaaaaaaaaaaaaaaaaaaaaaaaaaaaaaaaaaugcaucccccccccccccccccccccccccccccccaaaggcucuuuucagagccaccagaauu

SEQ ID NO: 13047 - RNA, 595 nt, Artificial Sequence
  mRNA product Design a-2 comprising derived and/or modified sequence from LASV(G1442-SLE-2011;Clade IV)__AIT17178__Z (opt1)
gggagaguccgcucagccagguugcagaagcggcuuagcguguguccuaaucuucucucugcguguagguaggccugugccgcaaacaagcuuaccaugggcaacaagcaggccaaggccagcgaggcgaaggacagcccccgcgccucccugaucccggacgccacccaccucgggccccaguucugcaaguccugcugguucgagaacaagggccugguggagugcaacaaccacuaccugugccucaacugccugagccugcuccuguccgucagcucccggugccccaucugcaagaugccccugccgacccgccuccggcccagcacggcccccaccgcgcccccggcccgcgccggggacaacaucaagcccccgcccuacucccccugaggacuagucccuguucccagagcccacuuuuuuuucuuuuuuugaaauaaaauagccugucuuucagaucuaaaaaaaaaaaaaaaaaaaaaaaaaaaaaaaaaaaaaaaaaaaaaaaaaaaaaaaaaaaaaaaaugcaucccccccccccccccccccccccccccccccaaaggcucuuuucagagccaccagaauu

SEQ ID NO: 13048 - RNA, 595 nt, Artificial Sequence
  mRNA product Design a-2 comprising derived and/or modified sequence from LASV(G502-SLE-2009;Clade IV)__AIT17124__Z (opt1)
gggagaguccgcucagccagguugcagaagcggcuuagcguguguccuaaucuucucucugcguguagguaggccugugccgcaaacaagcuuaccaugggcaacaagcaggucaagacccccgaggccaaggacagcccccgcgccucccugauccccgacgcgacccaccucgggccccaguucugcaagagcugcugguucgagaacaagggccugguggagugcaacaaccacuaccugugccucaacugccugacgcugcuccuguccguggggaaccggugccccaucugcaagaugccgcugcccaccaagcuccgccccagcgugacccccaccgccccgcccacgcgggccgccgacuccaucggcccgccgcccuacagccccugaggacuagucccuguucccagagcccacuuuuuuuucuuuuuuugaaauaaaauagccugucuuucagaucuaaaaaaaaaaaaaaaaaaaaaaaaaaaaaaaaaaaaaaaaaaaaaaaaaaaaaaaaaaaaaaaaugcaucccccccccccccccccccccccccccccccaaaggcucuuuucagagccaccagaauu

SEQ ID NO: 13049 - RNA, 595 nt, Artificial Sequence
  mRNA product Design a-2 comprising derived and/or modified sequence from LASV(G733-SLE-2010;Clade IV)__AIT17152__Z (opt1)
gggagaguccgcucagccagguugcagaagcggcuuagcguguguccuaaucuucucucugcguguagguaggccugugccgcaaacaagcuuaccaugggcaacaagcaggccaagacccccgagaccaaggacagcccgcgcgccucccugauccccgacgcgacgcaccucgggccccaguucugcaagagcugcugguucgagaacaagggccugguggagugcaacaaccacuaccugugccucaacugccugacccugcuccuguccgucagcaaccggugccccaucugcaagaugccgcugcccaccaagcuccgccccuccaccgcccccacggccccgcccgccggggccgcggacaacacccggcccccgcccuacagccccugaggacuagucccuguucccagagcccacuuuuuuuucuuuuuuugaaauaaaauagccugucuuucagaucuaaaaaaaaaaaaaaaaaaaaaaaaaaaaaaaaaaaaaaaaaaaaaaaaaaaaaaaaaaaaaaaaugcaucccccccccccccccccccccccccccccccaaaggcucuuuucagagccaccagaauu

SEQ ID NO: 13050 - RNA, 607 nt, Artificial Sequence
  mRNA product Design a-2 comprising derived and/or modified sequence from MOPV/LASV reassortant(IGS-1;Clade IV)__AFY05533__Z (opt1)
gggagaguccgcucagccagguugcagaagcggcuuagcguguguccuaaucuucucucugcguguagguaggccugugccgcaaacaagcuuaccaugggcaagacccagagcaaggggcagcccuccaccaaccugcucaaggagacggagccccgccaccccgugauccccgacgcccggggcaccgggcccgaguucugcaagagcugcugguucgagcgccggggccugguccgcugcaacgaccacuaccugugccucaacugccugacccugcuccacaccguguccgaccggugccccaucugcaagcacaagcugcccuuccgccuggagcuccagacgcagcccaccgccccgcccgagaucccgcccagccagaacccgccgcccuacucccccugaggacuagucccuguucccagagcccacuuuuuuuucuuuuuuugaaauaaaauagccugucuuucagaucuaaaaaaaaaaaaaaaaaaaaaaaaaaaaaaaaaaaaaaaaaaaaaaaaaaaaaaaaaaaaaaaaugcaucccccccccccccccccccccccccccccccaaaggcucuuuucagagccaccagaauu

SEQ ID NO: 13051 - RNA, 595 nt, Artificial Sequence
  mRNA product Design a-2 comprising derived and/or modified sequence from LASV(LM776-SLE-2012;Clade IV)__AIT17824__Z (opt1)
gggagaguccgcucagccagguugcagaagcggcuuagcguguguccuaaucuucucucugcguguagguaggccugugccgcaaacaagcuuaccaugggcaacaagcaggccaaggccagcgaggagaagaacagcccccgcgccucccugaucccggacgccacccaccucgggccccaguucugcaaguccugcugguucgagaacaagggccugguggagugcaacaaccacuaccugugccucaacugccugacccugcuccugagcgucuccaaccggugccccaucugcaagaugccccugccgacgaagcuccgccccagcaccacccccaccgcgcccccgacgggggccgccgacuccauccggcccccgcccuacagccccugaggacuagucccuguucccagagcccacuuuuuuuucuuuuuuugaaauaaaauagccugucuuucagaucuaaaaaaaaaaaaaaaaaaaaaaaaaaaaaaaaaaaaaaaaaaaaaaaaaaaaaaaaaaaaaaaaugcaucccccccccccccccccccccccccccccccaaaggcucuuuucagagccaccagaauu

SEQ ID NO: 13052 - RNA, 595 nt, Artificial Sequence
  mRNA product Design a-2 comprising derived and/or modified sequence from LASV(Mad39;Clade IV)__ANH09743__Z (opt1)
gggagaguccgcucagccagguugcagaagcggcuuagcguguguccuaaucuucucucugcguguagguaggccugugccgcaaacaagcuuaccaugggcaacaagcaggccaaggccagcgagguggaggacgggccccgcgccucccugauccccgacgccacccaccucggcccccaguucugcaagagcugcugguucgagaacaagucccuggucgagugcaacaaccacuaccugugccucaacugccugacccugcuccugagcguguccaaccggugccccaucugcaagaugccccugccgacgcgccucaagcccagcgugguccccaccgcgcccccgacccgggccggggacggcacccgcccgccgcccuacucccccugaggacuagucccuguucccagagcccacuuuuuuuucuuuuuuugaaauaaaauagccugucuuucagaucuaaaaaaaaaaaaaaaaaaaaaaaaaaaaaaaaaaaaaaaaaaaaaaaaaaaaaaaaaaaaaaaaugcaucccccccccccccccccccccccccccccccaaaggcucuuuucagagccaccagaauu

SEQ ID NO: 13053 - RNA, 595 nt, Artificial Sequence
  mRNA product Design a-2 comprising derived and/or modified sequence from LASV(Z0947-SLE-2011;Clade IV)__AIT17838__Z (opt1)
gggagaguccgcucagccagguugcagaagcggcuuagcguguguccuaaucuucucucugcguguagguaggccugugccgcaaacaagcuuaccaugggcaacaagcaggccaaggugcccgagagcaaggacuccccgcgcgccagccugauccccgacgcgacccaccucgggccccaguucugcaaguccugcugguucgagaacaagggccuggucgagugcaacaaccacuaccugugccucaacugccugacccugcuccugagcguguccaaccgcugccccaucugcaagaugccgcugcccacgaagcucaagcccagcgccgcccccaccgccccgcccaccggggccgcggacuccauccggcccccgcccuacagccccugaggacuagucccuguucccagagcccacuuuuuuuucuuuuuuugaaauaaaauagccugucuuucagaucuaaaaaaaaaaaaaaaaaaaaaaaaaaaaaaaaaaaaaaaaaaaaaaaaaaaaaaaaaaaaaaaaugcaucccccccccccccccccccccccccccccccaaaggcucuuuucagagccaccagaauu

SEQ ID NO: 13054 - RNA, 595 nt, Artificial Sequence
  mRNA product Design a-2 comprising derived and/or modified sequence from LASV(Josiah;Clade IV)__ADY11072/NP_694871__Z (opt2)
gggagaguccgcucagccagguugcagaagcggcuuagcguguguccuaaucuucucucugcguguagguaggccugugccgcaaacaagcuuaccaugggcaacaagcaggccaaggcccccgaguccaaggacuccccccgcgccucccucauccccgacgccacccaccucggcccccaguucugcaaguccugcugguucgagaacaagggccucgucgagugcaacaaccacuaccucugccucaacugccucacccuccuccucuccgucuccaaccgcugccccaucugcaagaugccccuccccaccaagcuccgccccuccgccgcccccaccgccccccccaccggcgccgccgacuccauccgccccccccccuacucccccugaggacuagucccuguucccagagcccacuuuuuuuucuuuuuuugaaauaaaauagccugucuuucagaucuaaaaaaaaaaaaaaaaaaaaaaaaaaaaaaaaaaaaaaaaaaaaaaaaaaaaaaaaaaaaaaaaugcaucccccccccccccccccccccccccccccccaaaggcucuuuucagagccaccagaauu

SEQ ID NO: 13055 - RNA, 598 nt, Artificial Sequence
  mRNA product Design a-2 comprising derived and/or modified sequence from LASV(Pinneo-NIG-1969;Clade I)__AIT17834__Z (opt2)
gggagaguccgcucagccagguugcagaagcggcuuagcguguguccuaaucuucucucugcguguagguaggccugugccgcaaacaagcuuaccaugggcaacaagcagacccgcuccccccccaagcccgagcacccccgccccacccuccuccccgacgccucccaccucggcccccaguucugcaaguccugcugguucgagaacaagggccucgucgagugcaacaaccacuaccucugccucaacugccucacccuccuccucuccgucuccgaccgcugccccaucugcaagaugccccuccccaccaagcucgccguccgcacccagcccuccgcccccccccucaaccagggcaacacccaguccucccccccccccuacucccccugaggacuagucccuguucccagagcccacuuuuuuuucuuuuuuugaaauaaaauagccugucuuucagaucuaaaaaaaaaaaaaaaaaaaaaaaaaaaaaaaaaaaaaaaaaaaaaaaaaaaaaaaaaaaaaaaaugcaucccccccccccccccccccccccccccccccaaaggcucuuuucagagccaccagaauu

SEQ ID NO: 13056 - RNA, 595 nt, Artificial Sequence
  mRNA product Design a-2 comprising derived and/or modified sequence from LASV(Nig08-04;Clade II)__ADU56612__Z (opt2)
gggagaguccgcucagccagguugcagaagcggcuuagcguguguccuaaucuucucucugcguguagguaggccugugccgcaaacaagcuuaccaugggcaaccgccagacccgccccaccgaggccaccgagcagucccgcgcccaccucguccccgacgccucccaccucggcccccaguucugcaaguccugcugguucgagaaccgcggccucgucgagugcaacaaccacuaccucugccucaacugccucucccuccuccucuccgucuccucccgcugccccaucugcaagaugccccuccccacccgccucaaggccuccgcccagcccuccgccccccccaccgaggccccccagaacaccacccccccccccuacacccccugaggacuagucccuguucccagagcccacuuuuuuuucuuuuuuugaaauaaaauagccugucuuucagaucuaaaaaaaaaaaaaaaaaaaaaaaaaaaaaaaaaaaaaaaaaaaaaaaaaaaaaaaaaaaaaaaaugcaucccccccccccccccccccccccccccccccaaaggcucuuuucagagccaccagaauu

SEQ ID NO: 13057 - RNA, 595 nt, Artificial Sequence
  mRNA product Design a-2 comprising derived and/or modified sequence from LASV(Nig08-A19;Clade III)__ADU56620__Z (opt2)
gggagaguccgcucagccagguugcagaagcggcuuagcguguguccuaaucuucucucugcguguagguaggccugugccgcaaacaagcuuaccaugggcggcaagcacaccaagccccagcgcgaguccaacuccccccgcgccucccucauccccgacgccacccaccucggcccccaguucugcaaguccugcugguucgagaacaagggccucgucgagugcaacaaccacuaccucugccucaacugccucacccuccuccucuccgucuccaaccgcugccccaucugcaagaugccccuccccacccgccuccgcgccuccaccaaccccaccgccccccaggucgagcaggucggccccaccaaccccccccccuacucccccugaggacuagucccuguucccagagcccacuuuuuuuucuuuuuuugaaauaaaauagccugucuuucagaucuaaaaaaaaaaaaaaaaaaaaaaaaaaaaaaaaaaaaaaaaaaaaaaaaaaaaaaaaaaaaaaaaugcaucccccccccccccccccccccccccccccccaaaggcucuuuucagagccaccagaauu

SEQ ID NO: 13058 - RNA, 595 nt, Artificial Sequence
  mRNA product Design a-2 comprising derived and/or modified sequence from LASV(AV;Clade V)__CCA30312__Z (opt2)
gggagaguccgcucagccagguugcagaagcggcuuagcguguguccuaaucuucucucugcguguagguaggccugugccgcaaacaagcuuaccaugggcaaccgccaggccaagaaccccgaggucgagaacuccccccgcgccucccucauccccgacgccacccaccucggcccccaguucugcaaguccugcugguucgagaacaagggccucgucgagugcaacaaccacuaccucugccucaacugccucucccuccuccucuccgucuccaaccgcugccccaucugcaagaugccccuccccacccgccuccgccccaccaccacccccaccgccccccagaucaucaaggagaacaccaccaaccccccccccuacacccccugaggacuagucccuguucccagagcccacuuuuuuuucuuuuuuugaaauaaaauagccugucuuucagaucuaaaaaaaaaaaaaaaaaaaaaaaaaaaaaaaaaaaaaaaaaaaaaaaaaaaaaaaaaaaaaaaaugcaucccccccccccccccccccccccccccccccaaaggcucuuuucagagccaccagaauu

SEQ ID NO: 13059 - RNA, 595 nt, Artificial Sequence
  mRNA product Design a-2 comprising derived and/or modified sequence from LASV(Togo/2016/7082;Clade VI)__AMR44579__Z (opt2)
gggagaguccgcucagccagguugcagaagcggcuuagcguguguccuaaucuucucucugcguguagguaggccugugccgcaaacaagcuuaccaugggcgcccgccagaccaagcagccccagaucgagggcuccccccgcgccucccucguccccgacgccucccaccucggcccccaguucugcaaguccugcugguucgagaacaagggccucgucgagugcaacaaccacuaccucugccucaacugccucucccuccuccucuccgucuccaaccgcugccccaucugcaagaugccccuccccaccaagcuccgcgucuccuccgcccccuccgccccccccgccgccaccgcccagcccggcacccccccccccuacucccccugaggacuagucccuguucccagagcccacuuuuuuuucuuuuuuugaaauaaaauagccugucuuucagaucuaaaaaaaaaaaaaaaaaaaaaaaaaaaaaaaaaaaaaaaaaaaaaaaaaaaaaaaaaaaaaaaaugcaucccccccccccccccccccccccccccccccaaaggcucuuuucagagccaccagaauu

SEQ ID NO: 13060 - RNA, 595 nt, Artificial Sequence
  mRNA product Design a-2 comprising derived and/or modified sequence from LASV(KAK-428;Clade n.d. (VII))__ANH09761__Z (opt2)
gggagaguccgcucagccagguugcagaagcggcuuagcguguguccuaaucuucucucugcguguagguaggccugugccgcaaacaagcuuaccaugggcaacaagggcaccaagcccacccagaacuccgagcccucccgcgccaaccucguccccgacgccuccuaccucggcccccaguucugcaaguccugcugguucgagaacaagggccucgucgagugcaacaaccacuaccucugccucaacugccucaccaugcuccucuccgucuccaaccgcugccccaucugcaagaugccccuccccaccaagaucaaggccuccggcucccccuccgccccccccaccgaggccaacuccgccgucucccccccccccuacacccccugaggacuagucccuguucccagagcccacuuuuuuuucuuuuuuugaaauaaaauagccugucuuucagaucuaaaaaaaaaaaaaaaaaaaaaaaaaaaaaaaaaaaaaaaaaaaaaaaaaaaaaaaaaaaaaaaaugcaucccccccccccccccccccccccccccccccaaaggcucuuuucagagccaccagaauu

SEQ ID NO: 13061 - RNA, 595 nt, Artificial Sequence
  mRNA product Design a-2 comprising derived and/or modified sequence from LASV(ISTH0009-NIG-2011;Clade II)__AIT17402__Z (opt2)
gggagaguccgcucagccagguugcagaagcggcuuagcguguguccuaaucuucucucugcguguagguaggccugugccgcaaacaagcuuaccaugggcaaccgccaggccaaguccaccaaggucgacgagcaccagcgcgcccaccucguccccgacgccucccaccucggcccccaguucugcaaguccugcugguucgagaaccgcggccucgucgagugcaacaaccacuaccucugccucaacugccucucccuccuccucuccgucuccucccgcugccccaucugcaagaugccccuccccaccaagcucaaggccgccgcccagcccuccgcccccuccaccgagaccauccagaacaccacccccccccccuacacccccugaggacuagucccuguucccagagcccacuuuuuuuucuuuuuuugaaauaaaauagccugucuuucagaucuaaaaaaaaaaaaaaaaaaaaaaaaaaaaaaaaaaaaaaaaaaaaaaaaaaaaaaaaaaaaaaaaugcaucccccccccccccccccccccccccccccccaaaggcucuuuucagagccaccagaauu

SEQ ID NO: 13062 - RNA, 595 nt, Artificial Sequence
  mRNA product Design a-2 comprising derived and/or modified sequence from LASV(ISTH2010-NIG-2012;Clade II)__AIT17480__Z (opt2)
gggagaguccgcucagccagguugcagaagcggcuuagcguguguccuaaucuucucucugcguguagguaggccugugccgcaaacaagcuuaccaugggcaaccgccacgccaaguccaccaaggucgacgagcaccagcgcgcccaccucguccccgacgccucccaccucggcccccaguucugcaaguccugcugguucgagaaccgcggccucgucgagugcaacaaccacuaccucugccucaacugccucucccuccuccucuccgucuccucccgcugccccaucugcaagaugccccuccccaccaagcucaaggccgccgcccagcccuccgcccccuccaccgaggucauccaguccaccacccccccccccuacacccccugaggacuagucccuguucccagagcccacuuuuuuuucuuuuuuugaaauaaaauagccugucuuucagaucuaaaaaaaaaaaaaaaaaaaaaaaaaaaaaaaaaaaaaaaaaaaaaaaaaaaaaaaaaaaaaaaaugcaucccccccccccccccccccccccccccccccaaaggcucuuuucagagccaccagaauu

SEQ ID NO: 13063 - RNA, 595 nt, Artificial Sequence
  mRNA product Design a-2 comprising derived and/or modified sequence from LASV(Lassa virus/H.sapiens-wt/NGA/2016/ISTH_0017;Clade II)__AVO03713__Z (opt2)
gggagaguccgcucagccagguugcagaagcggcuuagcguguguccuaaucuucucucugcguguagguaggccugugccgcaaacaagcuuaccaugggcaaccgccaggccaaguccaccaaggucgacgagcaccagcgcgcccaccucguccccgacgccucccaccucggcccccaguucugcaaguccugcugguucgagaaccgcggccucgucgagugcaacaaccacuaccucugccucaacugccucucccuccuccucuccgucuccucccgcugccccaucugcaagaugccccuccccaccaagcucaaggccgccacccagcccuccgcccccuccaccgaggucaaccagaacaccacccccccccccuacacccccugaggacuagucccuguucccagagcccacuuuuuuuucuuuuuuugaaauaaaauagccugucuuucagaucuaaaaaaaaaaaaaaaaaaaaaaaaaaaaaaaaaaaaaaaaaaaaaaaaaaaaaaaaaaaaaaaaugcaucccccccccccccccccccccccccccccccaaaggcucuuuucagagccaccagaauu

SEQ ID NO: 13064 - RNA, 595 nt, Artificial Sequence
  mRNA product Design a-2 comprising derived and/or modified sequence from LASV(Lassa virus/H.sapiens-wt/NGA/2018/ISTH_0959;Clade II)__AVV65084__Z (opt2)
gggagaguccgcucagccagguugcagaagcggcuuagcguguguccuaaucuucucucugcguguagguaggccugugccgcaaacaagcuuaccaugggcaacaagcaggccaaguccaccaaggucgacgagcaccagcgcgcccaccucguccccgacgccucccaccucggcccccaguucugcaaguccugcugguucgagaaccgcggccucgucgagugcaacaaccacuaccucugccucaacugccucucccuccuccucuccgucuccucccgcugccccaucugcaagaugccccuccccaccaagcucaaggccgccgcccagcccuccgcccccuccaccgaggccauccaguccaccacccccccccccuacacccccugaggacuagucccuguucccagagcccacuuuuuuuucuuuuuuugaaauaaaauagccugucuuucagaucuaaaaaaaaaaaaaaaaaaaaaaaaaaaaaaaaaaaaaaaaaaaaaaaaaaaaaaaaaaaaaaaaugcaucccccccccccccccccccccccccccccccaaaggcucuuuucagagccaccagaauu

SEQ ID NO: 13065 - RNA, 595 nt, Artificial Sequence
  mRNA product Design a-2 comprising derived and/or modified sequence from LASV(LASV003-NIG-2008;Clade II)__AIT17578__Z (opt2)
gggagaguccgcucagccagguugcagaagcggcuuagcguguguccuaaucuucucucugcguguagguaggccugugccgcaaacaagcuuaccaugggcaaccgccaggccaaguccaccaaggucgacgagcaccagcgcgcccaccucguccccgacgccucccaccucggcccccaguucugcaaguccugcugguucgagaacaagggccucgucgagugcaacaaccacuaccucugccucaacugccucucccuccuccucuccgucuccucccgcugccccaucugcaagaugccccuccccaccaagcuccgcgccgccgcccagcccuccgcccccuccaccgaguccgcccagaacaccgcccccccccccuacgcccccugaggacuagucccuguucccagagcccacuuuuuuuucuuuuuuugaaauaaaauagccugucuuucagaucuaaaaaaaaaaaaaaaaaaaaaaaaaaaaaaaaaaaaaaaaaaaaaaaaaaaaaaaaaaaaaaaaugcaucccccccccccccccccccccccccccccccaaaggcucuuuucagagccaccagaauu

SEQ ID NO: 13066 - RNA, 595 nt, Artificial Sequence
  mRNA product Design a-2 comprising derived and/or modified sequence from LASV(LASV035-NIG-2009;Clade II)__AIT17586__Z (opt2)
gggagaguccgcucagccagguugcagaagcggcuuagcguguguccuaaucuucucucugcguguagguaggccugugccgcaaacaagcuuaccaugggcaacaagcaggccaaguccaccaaggucgacgagcaccagcgcgcccaccucguccccgacgccucccaccucggcccccaguucugcaaguccugcugguucgagaaccgcggccucgucgagugcaacaaccacuaccucugccucaacugccucucccuccuccucuccgucuccucccgcugccccaucugcaagaugccccuccccacccgccucaaggccgccgcccagcccuccgcccccuccaccgaggucacccagaacaccacccccccccccuacacccccugaggacuagucccuguucccagagcccacuuuuuuuucuuuuuuugaaauaaaauagccugucuuucagaucuaaaaaaaaaaaaaaaaaaaaaaaaaaaaaaaaaaaaaaaaaaaaaaaaaaaaaaaaaaaaaaaaugcaucccccccccccccccccccccccccccccccaaaggcucuuuucagagccaccagaauu

SEQ ID NO: 13067 - RNA, 595 nt, Artificial Sequence
  mRNA product Design a-2 comprising derived and/or modified sequence from LASV(LASV1000-NIG-2009;Clade II)__AIT17780__Z (opt2)
gggagaguccgcucagccagguugcagaagcggcuuagcguguguccuaaucuucucucugcguguagguaggccugugccgcaaacaagcuuaccaugggcaaccgccagaccaaguccaccaaggucgacgagcaccagcgcgccuaccucguccccgacgccucccuccucggcccccaguucugcaaguccugcugguucgagaacaagggccucgucgagugcaacaaccacuaccucugccucaacugccucucccuccuccucuccgucuccucccgcugccccaucugcaagaugccccuccccacccgccucaaggccgccgcccagcccuccgccccccccaccgaggccauccagaacaccacccccccccccuacacccccugaggacuagucccuguucccagagcccacuuuuuuuucuuuuuuugaaauaaaauagccugucuuucagaucuaaaaaaaaaaaaaaaaaaaaaaaaaaaaaaaaaaaaaaaaaaaaaaaaaaaaaaaaaaaaaaaaugcaucccccccccccccccccccccccccccccccaaaggcucuuuucagagccaccagaauu

SEQ ID NO: 13068 - RNA, 595 nt, Artificial Sequence
  mRNA product Design a-2 comprising derived and/or modified sequence from LASV(LASV221-NIG-2010;Clade II)__AIT17622__Z (opt2)
gggagaguccgcucagccagguugcagaagcggcuuagcguguguccuaaucuucucucugcguguagguaggccugugccgcaaacaagcuuaccaugggcaaccgccaggccaaguccaccaaggucgacgagcaccagcgcgcccaccucguccccgacgccucccaccucggcccccaguucugcaaguccugcugguucgagaaccgcggccucgucgagugcaacaaccacuaccucugccucaacugccucucccuccuccucuccgucuccucccgcugccccaucugcaagaugccccuccccaccaagcucaaggccgccacccagcccuccgcccccuccaccgaggucacccagaacaccauccccccccccuacucccccugaggacuagucccuguucccagagcccacuuuuuuuucuuuuuuugaaauaaaauagccugucuuucagaucuaaaaaaaaaaaaaaaaaaaaaaaaaaaaaaaaaaaaaaaaaaaaaaaaaaaaaaaaaaaaaaaaugcaucccccccccccccccccccccccccccccccaaaggcucuuuucagagccaccagaauu

SEQ ID NO: 13069 - RNA, 595 nt, Artificial Sequence
  mRNA product Design a-2 comprising derived and/or modified sequence from LASV(LASV237-NIG-2010;Clade II)__AIT17636__Z (opt2)
gggagaguccgcucagccagguugcagaagcggcuuagcguguguccuaaucuucucucugcguguagguaggccugugccgcaaacaagcuuaccaugggcaaccgccaggccaaguccaccaaggucgacgagcaccagcgcgcccaccucguccccgacgccucccaccucggcccccaguucugcaaguccugcugguucgagaaccgcggccucgucgagugcaacaaccacuaccucugccucaacugccucucccuccuccucuccgucuccucccgcugccccaucugcaagaugccccuccccaccaagcucaaggccgccgcccagcccuccgcccccuccaucgagaccauccagaacaccacccccccccccuacacccccugaggacuagucccuguucccagagcccacuuuuuuuucuuuuuuugaaauaaaauagccugucuuucagaucuaaaaaaaaaaaaaaaaaaaaaaaaaaaaaaaaaaaaaaaaaaaaaaaaaaaaaaaaaaaaaaaaugcaucccccccccccccccccccccccccccccccaaaggcucuuuucagagccaccagaauu

SEQ ID NO: 13070 - RNA, 595 nt, Artificial Sequence
  mRNA product Design a-2 comprising derived and/or modified sequence from LASV(LASV253-NIG-2011;Clade II)__AIT17668__Z (opt2)
gggagaguccgcucagccagguugcagaagcggcuuagcguguguccuaaucuucucucugcguguagguaggccugugccgcaaacaagcuuaccaugggcaaccgccaggccaaguccaccaaggucgacgagcaccagcgcgcccaccucguccccgacgccucccaccucggcccccaguucugcaaguccugcugguucgagaacaagggccucgucgagugcaacaaccacuaccucugccucaacugccucucccuccuccucuccgucuccucccgcugccccaucugcaagaugccccuccccaccaagcucaagaccaccgcccagcccuccgccccccccaccgaggccgccaagaacaccgcccccccccccuacgcccccugaggacuagucccuguucccagagcccacuuuuuuuucuuuuuuugaaauaaaauagccugucuuucagaucuaaaaaaaaaaaaaaaaaaaaaaaaaaaaaaaaaaaaaaaaaaaaaaaaaaaaaaaaaaaaaaaaugcaucccccccccccccccccccccccccccccccaaaggcucuuuucagagccaccagaauu

SEQ ID NO: 13071 - RNA, 595 nt, Artificial Sequence
  mRNA product Design a-2 comprising derived and/or modified sequence from LASV(G1180-SLE-2010;Clade IV)__AIT17166__Z (opt2)
gggagaguccgcucagccagguugcagaagcggcuuagcguguguccuaaucuucucucugcguguagguaggccugugccgcaaacaagcuuaccaugggcaacaagcaggccaaggcccccgaggccaaggacuccccccgcgccucccucauccccgacgccacccaccucggcccccaguucugcaaguccugcugguucgagaccaagggccucgucgagugcaacaaccacuaccucugccucaacugccucacccuccuccucuccgucuccaaccgcugccccaucugcaagaugccccuccccaccaagcuccgccccuccgccacccccaccgccccccccaccgaggccgccgacuccaucggccccccccccuacucccccugaggacuagucccuguucccagagcccacuuuuuuuucuuuuuuugaaauaaaauagccugucuuucagaucuaaaaaaaaaaaaaaaaaaaaaaaaaaaaaaaaaaaaaaaaaaaaaaaaaaaaaaaaaaaaaaaaugcaucccccccccccccccccccccccccccccccaaaggcucuuuucagagccaccagaauu

SEQ ID NO: 13072 - RNA, 595 nt, Artificial Sequence
  mRNA product Design a-2 comprising derived and/or modified sequence from LASV(G1442-SLE-2011;Clade IV)__AIT17178__Z (opt2)
gggagaguccgcucagccagguugcagaagcggcuuagcguguguccuaaucuucucucugcguguagguaggccugugccgcaaacaagcuuaccaugggcaacaagcaggccaaggccuccgaggccaaggacuccccccgcgccucccucauccccgacgccacccaccucggcccccaguucugcaaguccugcugguucgagaacaagggccucgucgagugcaacaaccacuaccucugccucaacugccucucccuccuccucuccgucuccucccgcugccccaucugcaagaugccccuccccacccgccuccgccccuccaccgcccccaccgccccccccgcccgcgccggcgacaacaucaagcccccccccuacucccccugaggacuagucccuguucccagagcccacuuuuuuuucuuuuuuugaaauaaaauagccugucuuucagaucuaaaaaaaaaaaaaaaaaaaaaaaaaaaaaaaaaaaaaaaaaaaaaaaaaaaaaaaaaaaaaaaaugcaucccccccccccccccccccccccccccccccaaaggcucuuuucagagccaccagaauu

SEQ ID NO: 13073 - RNA, 595 nt, Artificial Sequence
  mRNA product Design a-2 comprising derived and/or modified sequence from LASV(G502-SLE-2009;Clade IV)__AIT17124__Z (opt2)
gggagaguccgcucagccagguugcagaagcggcuuagcguguguccuaaucuucucucugcguguagguaggccugugccgcaaacaagcuuaccaugggcaacaagcaggucaagacccccgaggccaaggacuccccccgcgccucccucauccccgacgccacccaccucggcccccaguucugcaaguccugcugguucgagaacaagggccucgucgagugcaacaaccacuaccucugccucaacugccucacccuccuccucuccgucggcaaccgcugccccaucugcaagaugccccuccccaccaagcuccgccccuccgucacccccaccgccccccccacccgcgccgccgacuccaucggccccccccccuacucccccugaggacuagucccuguucccagagcccacuuuuuuuucuuuuuuugaaauaaaauagccugucuuucagaucuaaaaaaaaaaaaaaaaaaaaaaaaaaaaaaaaaaaaaaaaaaaaaaaaaaaaaaaaaaaaaaaaugcaucccccccccccccccccccccccccccccccaaaggcucuuuucagagccaccagaauu

SEQ ID NO: 13074 - RNA, 595 nt, Artificial Sequence
  mRNA product Design a-2 comprising derived and/or modified sequence from LASV(G733-SLE-2010;Clade IV)__AIT17152__Z (opt2)
gggagaguccgcucagccagguugcagaagcggcuuagcguguguccuaaucuucucucugcguguagguaggccugugccgcaaacaagcuuaccaugggcaacaagcaggccaagacccccgagaccaaggacuccccccgcgccucccucauccccgacgccacccaccucggcccccaguucugcaaguccugcugguucgagaacaagggccucgucgagugcaacaaccacuaccucugccucaacugccucacccuccuccucuccgucuccaaccgcugccccaucugcaagaugccccuccccaccaagcuccgccccuccaccgcccccaccgccccccccgccggcgccgccgacaacacccgccccccccccuacucccccugaggacuagucccuguucccagagcccacuuuuuuuucuuuuuuugaaauaaaauagccugucuuucagaucuaaaaaaaaaaaaaaaaaaaaaaaaaaaaaaaaaaaaaaaaaaaaaaaaaaaaaaaaaaaaaaaaugcaucccccccccccccccccccccccccccccccaaaggcucuuuucagagccaccagaauu

SEQ ID NO: 13075 - RNA, 607 nt, Artificial Sequence
  mRNA product Design a-2 comprising derived and/or modified sequence from MOPV/LASV reassortant(IGS-1;Clade IV)__AFY05533__Z (opt2)
gggagaguccgcucagccagguugcagaagcggcuuagcguguguccuaaucuucucucugcguguagguaggccugugccgcaaacaagcuuaccaugggcaagacccaguccaagggccagcccuccaccaaccuccucaaggagaccgagccccgccaccccgucauccccgacgcccgcggcaccggccccgaguucugcaaguccugcugguucgagcgccgcggccucguccgcugcaacgaccacuaccucugccucaacugccucacccuccuccacaccgucuccgaccgcugccccaucugcaagcacaagcuccccuuccgccucgagcuccagacccagcccaccgccccccccgagaucccccccucccagaaccccccccccuacucccccugaggacuagucccuguucccagagcccacuuuuuuuucuuuuuuugaaauaaaauagccugucuuucagaucuaaaaaaaaaaaaaaaaaaaaaaaaaaaaaaaaaaaaaaaaaaaaaaaaaaaaaaaaaaaaaaaaugcaucccccccccccccccccccccccccccccccaaaggcucuuuucagagccaccagaauu

SEQ ID NO: 13076 - RNA, 595 nt, Artificial Sequence
  mRNA product Design a-2 comprising derived and/or modified sequence from LASV(LM776-SLE-2012;Clade IV)__AIT17824__Z (opt2)
gggagaguccgcucagccagguugcagaagcggcuuagcguguguccuaaucuucucucugcguguagguaggccugugccgcaaacaagcuuaccaugggcaacaagcaggccaaggccuccgaggagaagaacuccccccgcgccucccucauccccgacgccacccaccucggcccccaguucugcaaguccugcugguucgagaacaagggccucgucgagugcaacaaccacuaccucugccucaacugccucacccuccuccucuccgucuccaaccgcugccccaucugcaagaugccccuccccaccaagcuccgccccuccaccacccccaccgccccccccaccggcgccgccgacuccauccgccccccccccuacucccccugaggacuagucccuguucccagagcccacuuuuuuuucuuuuuuugaaauaaaauagccugucuuucagaucuaaaaaaaaaaaaaaaaaaaaaaaaaaaaaaaaaaaaaaaaaaaaaaaaaaaaaaaaaaaaaaaaugcaucccccccccccccccccccccccccccccccaaaggcucuuuucagagccaccagaauu

SEQ ID NO: 13077 - RNA, 595 nt, Artificial Sequence
  mRNA product Design a-2 comprising derived and/or modified sequence from LASV(Mad39;Clade IV)__ANH09743__Z (opt2)
gggagaguccgcucagccagguugcagaagcggcuuagcguguguccuaaucuucucucugcguguagguaggccugugccgcaaacaagcuuaccaugggcaacaagcaggccaaggccuccgaggucgaggacggcccccgcgccucccucauccccgacgccacccaccucggcccccaguucugcaaguccugcugguucgagaacaagucccucgucgagugcaacaaccacuaccucugccucaacugccucacccuccuccucuccgucuccaaccgcugccccaucugcaagaugccccuccccacccgccucaagcccuccgucguccccaccgccccccccacccgcgccggcgacggcacccgccccccccccuacucccccugaggacuagucccuguucccagagcccacuuuuuuuucuuuuuuugaaauaaaauagccugucuuucagaucuaaaaaaaaaaaaaaaaaaaaaaaaaaaaaaaaaaaaaaaaaaaaaaaaaaaaaaaaaaaaaaaaugcaucccccccccccccccccccccccccccccccaaaggcucuuuucagagccaccagaauu

SEQ ID NO: 13078 - RNA, 595 nt, Artificial Sequence
  mRNA product Design a-2 comprising derived and/or modified sequence from LASV(Z0947-SLE-2011;Clade IV)__AIT17838__Z (opt2)
gggagaguccgcucagccagguugcagaagcggcuuagcguguguccuaaucuucucucugcguguagguaggccugugccgcaaacaagcuuaccaugggcaacaagcaggccaagguccccgaguccaaggacuccccccgcgccucccucauccccgacgccacccaccucggcccccaguucugcaaguccugcugguucgagaacaagggccucgucgagugcaacaaccacuaccucugccucaacugccucacccuccuccucuccgucuccaaccgcugccccaucugcaagaugccccuccccaccaagcucaagcccuccgccgcccccaccgccccccccaccggcgccgccgacuccauccgccccccccccuacucccccugaggacuagucccuguucccagagcccacuuuuuuuucuuuuuuugaaauaaaauagccugucuuucagaucuaaaaaaaaaaaaaaaaaaaaaaaaaaaaaaaaaaaaaaaaaaaaaaaaaaaaaaaaaaaaaaaaugcaucccccccccccccccccccccccccccccccaaaggcucuuuucagagccaccagaauu

SEQ ID NO: 13079 - RNA, 595 nt, Artificial Sequence
  mRNA product Design a-2 comprising derived and/or modified sequence from LASV(Josiah;Clade IV)__ADY11072/NP_694871__Z (opt3)
gggagaguccgcucagccagguugcagaagcggcuuagcguguguccuaaucuucucucugcguguagguaggccugugccgcaaacaagcuuaccaugggcaacaagcaggccaaggcucccgagagcaaggacuccccuagagcaucucugaucccagaugccacccaccucgggccgcaauucugcaaaucauguugguuugaaaauaagggacuuguggagugcaacaaucauuaccuguguuugaacugcuuaacacugcuacucagugucagcaauaggugucccauuugcaaaaugccucugccaacuaaacuucggcccuccgcggcuccuacggccccacccaccggugcagccgacucuauacgcccuccaccguauucgcccugaggacuagucccuguucccagagcccacuuuuuuuucuuuuuuugaaauaaaauagccugucuuucagaucuaaaaaaaaaaaaaaaaaaaaaaaaaaaaaaaaaaaaaaaaaaaaaaaaaaaaaaaaaaaaaaaaugcaucccccccccccccccccccccccccccccccaaaggcucuuuucagagccaccagaauu

SEQ ID NO: 13080 - RNA, 598 nt, Artificial Sequence
  mRNA product Design a-2 comprising derived and/or modified sequence from LASV(Pinneo-NIG-1969;Clade I)__AIT17834__Z (opt3)
gggagaguccgcucagccagguugcagaagcggcuuagcguguguccuaaucuucucucugcguguagguaggccugugccgcaaacaagcuuaccaugggcaacaagcagaccagaagcccucccaaaccagagcacccgaggcccacacugcucccugacgccucccaucuugggccacaauucugcaagucuuguugguuugaaaauaaaggacugguggagugcaacaaucacuacuuguguuuaaacugccugacucuacuccugucagucagugaucggugucccaucugcaagaugccucuuccaacgaaacuggcuguucgcacccagcccagcgcaccuccauugaaucaggguaacacacaguccucuccgcccccuuauucgccaugaggacuagucccuguucccagagcccacuuuuuuuucuuuuuuugaaauaaaauagccugucuuucagaucuaaaaaaaaaaaaaaaaaaaaaaaaaaaaaaaaaaaaaaaaaaaaaaaaaaaaaaaaaaaaaaaaugcaucccccccccccccccccccccccccccccccaaaggcucuuuucagagccaccagaauu

SEQ ID NO: 13081 - RNA, 595 nt, Artificial Sequence
  mRNA product Design a-2 comprising derived and/or modified sequence from LASV(Nig08-04;Clade II)__ADU56612__Z (opt3)
gggagaguccgcucagccagguugcagaagcggcuuagcguguguccuaaucuucucucugcguguagguaggccugugccgcaaacaagcuuaccaugggcaacagacagaccaggcccacagaggccacugaacaaagccgggcucaccuggugccugacgcaucccaucucgggccacaguucugcaagucuuguugguuugagaaucgcggacuugucgaaugcaacaaucacuaccuguguuugaacugcuuaucacugcuacucaguguuagcucccgauguccgaucugcaaaaugccccugccuacgcgucuuaaggccucugcgcagccaucggcucccccuaccgaggccccacagaauacaacucccccuccauauaccccgugaggacuagucccuguucccagagcccacuuuuuuuucuuuuuuugaaauaaaauagccugucuuucagaucuaaaaaaaaaaaaaaaaaaaaaaaaaaaaaaaaaaaaaaaaaaaaaaaaaaaaaaaaaaaaaaaaugcaucccccccccccccccccccccccccccccccaaaggcucuuuucagagccaccagaauu

SEQ ID NO: 13082 - RNA, 595 nt, Artificial Sequence
  mRNA product Design a-2 comprising derived and/or modified sequence from LASV(Nig08-A19;Clade III)__ADU56620__Z (opt3)
gggagaguccgcucagccagguugcagaagcggcuuagcguguguccuaaucuucucucugcguguagguaggccugugccgcaaacaagcuuaccaugggcgggaagcacaccaaaccccagagagagagcaacuccccuagggccucucugaucccagacgcuacacaucucggaccgcaauucugcaagucauguugguuugaaaauaaaggucuuguggagugcaacaaucacuaccuguguuugaacugcuuaacucugcuacucagugucagcaaucggugucccauuugcaagaugccucugccaacgcgccuucgagcauccaccaaccccacagccccucagguugaacaggugggcccaacuaaucccccuccauauucuccgugaggacuagucccuguucccagagcccacuuuuuuuucuuuuuuugaaauaaaauagccugucuuucagaucuaaaaaaaaaaaaaaaaaaaaaaaaaaaaaaaaaaaaaaaaaaaaaaaaaaaaaaaaaaaaaaaaugcaucccccccccccccccccccccccccccccccaaaggcucuuuucagagccaccagaauu

SEQ ID NO: 13083 - RNA, 595 nt, Artificial Sequence
  mRNA product Design a-2 comprising derived and/or modified sequence from LASV(AV;Clade V)__CCA30312__Z (opt3)
gggagaguccgcucagccagguugcagaagcggcuuagcguguguccuaaucuucucucugcguguagguaggccugugccgcaaacaagcuuaccaugggcaacagacaggccaagaaucccgagguggaaaacagcccuagggcuucccugaucccagacgcaacccaccucgggccgcaauucugcaaaucuuguugguuugagaauaagggacuugucgaaugcaacaaucauuaccuguguuugaacugcuuaucacugcuacucaguguuagcaaucggugucccauuugcaaaaugccucugccaacacgccuucgacccacuacgaccccuacagccccacagauaaucaaggagaacacuaccaaucccccuccauauacaccgugaggacuagucccuguucccagagcccacuuuuuuuucuuuuuuugaaauaaaauagccugucuuucagaucuaaaaaaaaaaaaaaaaaaaaaaaaaaaaaaaaaaaaaaaaaaaaaaaaaaaaaaaaaaaaaaaaugcaucccccccccccccccccccccccccccccccaaaggcucuuuucagagccaccagaauu

SEQ ID NO: 13084 - RNA, 595 nt, Artificial Sequence
  mRNA product Design a-2 comprising derived and/or modified sequence from LASV(Togo/2016/7082;Clade VI)__AMR44579__Z (opt3)
gggagaguccgcucagccagguugcagaagcggcuuagcguguguccuaaucuucucucugcguguagguaggccugugccgcaaacaagcuuaccaugggcgccagacagaccaagcaaccccagaucgaggggagcccuagggcuucccuggugccagacgcaucucaccucggaccgcaguucugcaagucauguugguuugaaaacaagggucuugucgagugcaauaaccauuaccuguguuugaauugcuuaagucugcuacucagcguuuccaaccggugucccauuugcaaaaugccucugccaacaaaacuucgcgugucuucggcccccucagcgccuccagcugccacugcacagcccggcacgccuccaccguauagccccugaggacuagucccuguucccagagcccacuuuuuuuucuuuuuuugaaauaaaauagccugucuuucagaucuaaaaaaaaaaaaaaaaaaaaaaaaaaaaaaaaaaaaaaaaaaaaaaaaaaaaaaaaaaaaaaaaugcaucccccccccccccccccccccccccccccccaaaggcucuuuucagagccaccagaauu

SEQ ID NO: 13085 - RNA, 595 nt, Artificial Sequence
  mRNA product Design a-2 comprising derived and/or modified sequence from LASV(KAK-428;Clade n.d. (VII))__ANH09761__Z (opt3)
gggagaguccgcucagccagguugcagaagcggcuuagcguguguccuaaucuucucucugcguguagguaggccugugccgcaaacaagcuuaccaugggcaacaaggggaccaaacccacacagaauagcgagccuuccagagccaaccuggugccagacgcuucuuaccucggaccgcaauucugcaagucauguugguuugaaaauaaaggucuugucgagugcaacaaucacuaucuguguuugaacugcuuaacuaugcugcuaaguguuagcaauaggugucccaucugcaagaugccucucccaacgaaaauuaaggcauccggcucucccucggccccuccaaccgaagcgaacucagcugugagcccucccccauacacaccgugaggacuagucccuguucccagagcccacuuuuuuuucuuuuuuugaaauaaaauagccugucuuucagaucuaaaaaaaaaaaaaaaaaaaaaaaaaaaaaaaaaaaaaaaaaaaaaaaaaaaaaaaaaaaaaaaaugcaucccccccccccccccccccccccccccccccaaaggcucuuuucagagccaccagaauu

SEQ ID NO: 13086 - RNA, 595 nt, Artificial Sequence
  mRNA product Design a-2 comprising derived and/or modified sequence from LASV(ISTH0009-NIG-2011;Clade II)__AIT17402__Z (opt3)
gggagaguccgcucagccagguugcagaagcggcuuagcguguguccuaaucuucucucugcguguagguaggccugugccgcaaacaagcuuaccaugggcaacagacaggccaagagcaccaaaguggacgagcaccaaagggcucaucugguccccgaugcaucccaccucgggccucaguucugcaagucuuguugguuugaaaaucggggacuuguugagugcaacaaucauuaccuguguuugaacugcuuaucacugcuacucagugugagcucccgcuguccaaucugcaaaaugccgcugcccacaaaacuuaaggccgcggcucagccuucugccccaucgacugaaacgauucagaauaccacacccccuccauauacucccugaggacuagucccuguucccagagcccacuuuuuuuucuuuuuuugaaauaaaauagccugucuuucagaucuaaaaaaaaaaaaaaaaaaaaaaaaaaaaaaaaaaaaaaaaaaaaaaaaaaaaaaaaaaaaaaaaugcaucccccccccccccccccccccccccccccccaaaggcucuuuucagagccaccagaauu

SEQ ID NO: 13087 - RNA, 595 nt, Artificial Sequence
  mRNA product Design a-2 comprising derived and/or modified sequence from LASV(ISTH2010-NIG-2012;Clade II)__AIT17480__Z (opt3)
gggagaguccgcucagccagguugcagaagcggcuuagcguguguccuaaucuucucucugcguguagguaggccugugccgcaaacaagcuuaccaugggcaacagacacgccaagagcaccaaaguggacgagcaucagagggcucaccugguccccgaugcaucccaucucgggccucaauucugcaagucuuguugguuugaaaaucggggacuuguugagugcaacaaucacuaccuguguuugaacugcuuaucacugcuacucagugugagcucccgcuguccaaucugcaaaaugccgcugcccacaaaacuuaaggccgcggcucagccuucugccccaucgacugaaguaauucagucaacgacacccccuccauauacccccugaggacuagucccuguucccagagcccacuuuuuuuucuuuuuuugaaauaaaauagccugucuuucagaucuaaaaaaaaaaaaaaaaaaaaaaaaaaaaaaaaaaaaaaaaaaaaaaaaaaaaaaaaaaaaaaaaugcaucccccccccccccccccccccccccccccccaaaggcucuuuucagagccaccagaauu

SEQ ID NO: 13088 - RNA, 595 nt, Artificial Sequence
  mRNA product Design a-2 comprising derived and/or modified sequence from LASV(Lassa virus/H.sapiens-wt/NGA/2016/ISTH_0017;Clade II)__AVO03713__Z (opt3)
gggagaguccgcucagccagguugcagaagcggcuuagcguguguccuaaucuucucucugcguguagguaggccugugccgcaaacaagcuuaccaugggcaacagacaggccaagagcaccaaaguggacgagcaccaaagggcucaucugguccccgaugcaucccaccucgggccucaguucugcaagucuuguugguuugaaaaucggggacuuguugagugcaacaaucauuaccuguguuugaacugcuuaucacugcuacucagugugagcucccgcuguccaaucugcaaaaugccgcugcccacaaaacuuaaggccgcgacucagccuucugcuccaucgacggaaguaaaucagaacaccacacccccuccauauacucccugaggacuagucccuguucccagagcccacuuuuuuuucuuuuuuugaaauaaaauagccugucuuucagaucuaaaaaaaaaaaaaaaaaaaaaaaaaaaaaaaaaaaaaaaaaaaaaaaaaaaaaaaaaaaaaaaaugcaucccccccccccccccccccccccccccccccaaaggcucuuuucagagccaccagaauu

SEQ ID NO: 13089 - RNA, 595 nt, Artificial Sequence
  mRNA product Design a-2 comprising derived and/or modified sequence from LASV(Lassa virus/H.sapiens-wt/NGA/2018/ISTH_0959;Clade II)__AVV65084__Z (opt3)
gggagaguccgcucagccagguugcagaagcggcuuagcguguguccuaaucuucucucugcguguagguaggccugugccgcaaacaagcuuaccaugggcaacaagcaggccaaaagcaccaagguggacgagcaccaaagagcucaucugguccccgaugcaucccaccucgggccucaguucugcaaaucuuguugguuugaaaauaggggacuuguugagugcaacaaucauuaccuguguuugaacugcuuaucacugcuacucagugugagcucccgguguccaaucugcaagaugccgcugcccacaaaacuuaaggccgcggcucagccuucugccccaucgacugaagcaauucagucaacgacacccccuccauauacccccugaggacuagucccuguucccagagcccacuuuuuuuucuuuuuuugaaauaaaauagccugucuuucagaucuaaaaaaaaaaaaaaaaaaaaaaaaaaaaaaaaaaaaaaaaaaaaaaaaaaaaaaaaaaaaaaaaugcaucccccccccccccccccccccccccccccccaaaggcucuuuucagagccaccagaauu

SEQ ID NO: 13090 - RNA, 595 nt, Artificial Sequence
  mRNA product Design a-2 comprising derived and/or modified sequence from LASV(LASV003-NIG-2008;Clade II)__AIT17578__Z (opt3)
gggagaguccgcucagccagguugcagaagcggcuuagcguguguccuaaucuucucucugcguguagguaggccugugccgcaaacaagcuuaccaugggcaacagacaggccaagagcaccaaaguggacgagcaccaaagggcucaucugguccccgaugcaucccaccucgggccucaguucugcaagucuuguugguuugaaaauaaaggacuuguugagugcaacaaucauuaccuguguuugaacugcuuaucacugcuacucagugugagcucccgguguccaaucugcaagaugccgcugcccacaaaacuucgcgccgcggcucagccuucugccccaucgacugaaucagcacagaauacggcucccccuccauaugcccccugaggacuagucccuguucccagagcccacuuuuuuuucuuuuuuugaaauaaaauagccugucuuucagaucuaaaaaaaaaaaaaaaaaaaaaaaaaaaaaaaaaaaaaaaaaaaaaaaaaaaaaaaaaaaaaaaaugcaucccccccccccccccccccccccccccccccaaaggcucuuuucagagccaccagaauu

SEQ ID NO: 13091 - RNA, 595 nt, Artificial Sequence
  mRNA product Design a-2 comprising derived and/or modified sequence from LASV(LASV035-NIG-2009;Clade II)__AIT17586__Z (opt3)
gggagaguccgcucagccagguugcagaagcggcuuagcguguguccuaaucuucucucugcguguagguaggccugugccgcaaacaagcuuaccaugggcaacaagcaggccaaaagcaccaagguggacgagcaccaaagagcucaucugguccccgaugcaucccaccucgggccucaguucugcaaaucuuguugguuugaaaauaggggacuuguugagugcaacaaucauuaccuguguuugaacugcuuaucacugcuacucagugugagcucccgguguccaaucugcaagaugccgcugcccacacgccuuaaagccgcggcucagccuucugccccaucgacugaaguaacgcagaauaccacacccccuccauauacucccugaggacuagucccuguucccagagcccacuuuuuuuucuuuuuuugaaauaaaauagccugucuuucagaucuaaaaaaaaaaaaaaaaaaaaaaaaaaaaaaaaaaaaaaaaaaaaaaaaaaaaaaaaaaaaaaaaugcaucccccccccccccccccccccccccccccccaaaggcucuuuucagagccaccagaauu

SEQ ID NO: 13092 - RNA, 595 nt, Artificial Sequence
  mRNA product Design a-2 comprising derived and/or modified sequence from LASV(LASV1000-NIG-2009;Clade II)__AIT17780__Z (opt3)
gggagaguccgcucagccagguugcagaagcggcuuagcguguguccuaaucuucucucugcguguagguaggccugugccgcaaacaagcuuaccaugggcaacagacagaccaagagcacaaaaguggacgagcaccaaagggccuaccugguccccgaugcuucccuccuugggccucaguucugcaagucuuguugguuugaaaauaaaggacugguugagugcaacaaucauuauuuguguuuaaacugccugucacuacuccugagugugagcucccgguguccaaucugcaagaugccgcuucccacucgccugaaagcagccgcgcagccuucugcuccacccacggaagccauucagaauaccacaccuccacccuacacuccuugaggacuagucccuguucccagagcccacuuuuuuuucuuuuuuugaaauaaaauagccugucuuucagaucuaaaaaaaaaaaaaaaaaaaaaaaaaaaaaaaaaaaaaaaaaaaaaaaaaaaaaaaaaaaaaaaaugcaucccccccccccccccccccccccccccccccaaaggcucuuuucagagccaccagaauu

SEQ ID NO: 13093 - RNA, 595 nt, Artificial Sequence
  mRNA product Design a-2 comprising derived and/or modified sequence from LASV(LASV221-NIG-2010;Clade II)__AIT17622__Z (opt3)
gggagaguccgcucagccagguugcagaagcggcuuagcguguguccuaaucuucucucugcguguagguaggccugugccgcaaacaagcuuaccaugggcaacagacaggccaagagcaccaaaguggacgagcaccaaagggcucaucugguccccgaugcaucccaccucgggccucaguucugcaagucuuguugguuugaaaaucggggacuuguugagugcaacaaucauuaccuguguuugaacugcuuaucacugcuacucagugugagcucccgcuguccaaucugcaaaaugccgcugcccacaaaacuuaaggccgcgacucagccuucugcuccaucgacggaaguaacccagaauacaauucccccuccauauucacccugaggacuagucccuguucccagagcccacuuuuuuuucuuuuuuugaaauaaaauagccugucuuucagaucuaaaaaaaaaaaaaaaaaaaaaaaaaaaaaaaaaaaaaaaaaaaaaaaaaaaaaaaaaaaaaaaaugcaucccccccccccccccccccccccccccccccaaaggcucuuuucagagccaccagaauu

SEQ ID NO: 13094 - RNA, 595 nt, Artificial Sequence
  mRNA product Design a-2 comprising derived and/or modified sequence from LASV(LASV237-NIG-2010;Clade II)__AIT17636__Z (opt3)
gggagaguccgcucagccagguugcagaagcggcuuagcguguguccuaaucuucucucugcguguagguaggccugugccgcaaacaagcuuaccaugggcaacagacaggccaagagcaccaaaguggacgagcaccaaagggcucaucugguccccgaugcaucccaccucgggccucaguucugcaagucuuguugguuugaaaaucggggacuuguugagugcaacaaucauuaccuguguuugaacugcuuaucacugcuacucagugugagcucccgcuguccaaucugcaaaaugccgcugcccacaaaacuuaaggccgcggcucagccuucugccccaucgauugaaacuauacagaauacgacacccccuccauauacccccugaggacuagucccuguucccagagcccacuuuuuuuucuuuuuuugaaauaaaauagccugucuuucagaucuaaaaaaaaaaaaaaaaaaaaaaaaaaaaaaaaaaaaaaaaaaaaaaaaaaaaaaaaaaaaaaaaugcaucccccccccccccccccccccccccccccccaaaggcucuuuucagagccaccagaauu

SEQ ID NO: 13095 - RNA, 595 nt, Artificial Sequence
  mRNA product Design a-2 comprising derived and/or modified sequence from LASV(LASV253-NIG-2011;Clade II)__AIT17668__Z (opt3)
gggagaguccgcucagccagguugcagaagcggcuuagcguguguccuaaucuucucucugcguguagguaggccugugccgcaaacaagcuuaccaugggcaacagacaggccaagagcaccaaaguggacgagcaccaaagggcucaucugguccccgaugcaucccaccucgggccucaguucugcaagucuuguugguuugaaaauaaaggacuuguugagugcaacaaucauuaccuguguuugaacugcuuaucacugcuacucagugugagcucccgguguccaaucugcaagaugccgcugcccacaaaacuuaagacuacggcccagccuucugcgccacccaccgaagcugccaagaauacagcaccuccacccuaugccccuugaggacuagucccuguucccagagcccacuuuuuuuucuuuuuuugaaauaaaauagccugucuuucagaucuaaaaaaaaaaaaaaaaaaaaaaaaaaaaaaaaaaaaaaaaaaaaaaaaaaaaaaaaaaaaaaaaugcaucccccccccccccccccccccccccccccccaaaggcucuuuucagagccaccagaauu

SEQ ID NO: 13096 - RNA, 595 nt, Artificial Sequence
  mRNA product Design a-2 comprising derived and/or modified sequence from LASV(G1180-SLE-2010;Clade IV)__AIT17166__Z (opt3)
gggagaguccgcucagccagguugcagaagcggcuuagcguguguccuaaucuucucucugcguguagguaggccugugccgcaaacaagcuuaccaugggcaacaagcaggccaaggcucccgaggcaaaggacagcccuagagccucccugaucccagaugcgacccaccucgggccgcaauucugcaaaucuuguugguuugaaacaaagggacuuguggagugcaauaaccauuaccuguguuugaauugcuuaacucugcuacucucagucaguaacaggugucccauuugcaaaaugccucugccaacgaaacuucggcccagcgcuaccccuacagccccacccacugaagcagccgacuccauagguccuccaccguauucucccugaggacuagucccuguucccagagcccacuuuuuuuucuuuuuuugaaauaaaauagccugucuuucagaucuaaaaaaaaaaaaaaaaaaaaaaaaaaaaaaaaaaaaaaaaaaaaaaaaaaaaaaaaaaaaaaaaugcaucccccccccccccccccccccccccccccccaaaggcucuuuucagagccaccagaauu

SEQ ID NO: 13097 - RNA, 595 nt, Artificial Sequence
  mRNA product Design a-2 comprising derived and/or modified sequence from LASV(G1442-SLE-2011;Clade IV)__AIT17178__Z (opt3)
gggagaguccgcucagccagguugcagaagcggcuuagcguguguccuaaucuucucucugcguguagguaggccugugccgcaaacaagcuuaccaugggcaacaagcaggccaaagcuagcgaggcaaaggacucccccagagccucucugaucccugaugcgacccaccucgggccacaauucugcaaaucauguugguuugaaaauaagggacuuguggagugcaacaaucauuaccuguguuugaacugcuuaagucugcuacucagcgucuccucuagguguccgauuugcaaaaugccccugccuacacggcuucgcccaucgacugcucccacggccccuccagcacgagccggugacaauauaaagcccccuccauauucaccgugaggacuagucccuguucccagagcccacuuuuuuuucuuuuuuugaaauaaaauagccugucuuucagaucuaaaaaaaaaaaaaaaaaaaaaaaaaaaaaaaaaaaaaaaaaaaaaaaaaaaaaaaaaaaaaaaaugcaucccccccccccccccccccccccccccccccaaaggcucuuuucagagccaccagaauu

SEQ ID NO: 13098 - RNA, 595 nt, Artificial Sequence
  mRNA product Design a-2 comprising derived and/or modified sequence from LASV(G502-SLE-2009;Clade IV)__AIT17124__Z (opt3)
gggagaguccgcucagccagguugcagaagcggcuuagcguguguccuaaucuucucucugcguguagguaggccugugccgcaaacaagcuuaccaugggcaacaaacaggugaagacccccgaggccaaggacagcccuagagcuucccugaucccagaugcaacacaccucgggccgcaauucugcaagucuuguugguuugaaaauaagggacuugucgagugcaacaaucauuaccuguguuugaacugcuuaacucugcuacucucaguugguaauaggugucccauuugcaaaaugccucugccaacgaaacuucggcccagugugaccccuacagccccacccacucgcgcggcugacagcauaggcccuccaccguauucccccugaggacuagucccuguucccagagcccacuuuuuuuucuuuuuuugaaauaaaauagccugucuuucagaucuaaaaaaaaaaaaaaaaaaaaaaaaaaaaaaaaaaaaaaaaaaaaaaaaaaaaaaaaaaaaaaaaugcaucccccccccccccccccccccccccccccccaaaggcucuuuucagagccaccagaauu

SEQ ID NO: 13099 - RNA, 595 nt, Artificial Sequence
  mRNA product Design a-2 comprising derived and/or modified sequence from LASV(G733-SLE-2010;Clade IV)__AIT17152__Z (opt3)
gggagaguccgcucagccagguugcagaagcggcuuagcguguguccuaaucuucucucugcguguagguaggccugugccgcaaacaagcuuaccaugggcaacaagcaggccaagacccccgagacaaaggacagcccuagagcuucccugaucccagaugcaacucaccucgggccgcaauucugcaaaucuuguugguuugaaaauaagggacuuguggagugcaacaaucauuaccuguguuugaacugcuuaacgcugcuacucucagucaguaauaggugucccauuugcaaaaugccucugccaaccaaacuucggcccagcacagccccuacugcgccacccgcuggugccgcagacaacacccgcccuccaccguauucccccugaggacuagucccuguucccagagcccacuuuuuuuucuuuuuuugaaauaaaauagccugucuuucagaucuaaaaaaaaaaaaaaaaaaaaaaaaaaaaaaaaaaaaaaaaaaaaaaaaaaaaaaaaaaaaaaaaugcaucccccccccccccccccccccccccccccccaaaggcucuuuucagagccaccagaauu

SEQ ID NO: 13100 - RNA, 607 nt, Artificial Sequence
  mRNA product Design a-2 comprising derived and/or modified sequence from MOPV/LASV reassortant(IGS-1;Clade IV)__AFY05533__Z (opt3)
gggagaguccgcucagccagguugcagaagcggcuuagcguguguccuaaucuucucucugcguguagguaggccugugccgcaaacaagcuuaccaugggcaagacccagagcaaagggcaacccuccacaaaccugcucaaggagacugaaccuagacacccagugaucccggacgccaggggaacgggucccgaguucugcaaaucuuguugguuugaacggcgcggccuuguccgaugcaaugaucauuaccuguguuugaacugcuuaacccugcuacacacaguuucagaccguuguccuauuugcaagcauaaacucccauucagacuggagcuucagacucagcccaccgcuccuccagaaauacccccuagucagaauccaccgcccuauagcccuugaggacuagucccuguucccagagcccacuuuuuuuucuuuuuuugaaauaaaauagccugucuuucagaucuaaaaaaaaaaaaaaaaaaaaaaaaaaaaaaaaaaaaaaaaaaaaaaaaaaaaaaaaaaaaaaaaugcaucccccccccccccccccccccccccccccccaaaggcucuuuucagagccaccagaauu

SEQ ID NO: 13101 - RNA, 595 nt, Artificial Sequence
  mRNA product Design a-2 comprising derived and/or modified sequence from LASV(LM776-SLE-2012;Clade IV)__AIT17824__Z (opt3)
gggagaguccgcucagccagguugcagaagcggcuuagcguguguccuaaucuucucucugcguguagguaggccugugccgcaaacaagcuuaccaugggcaacaagcaggccaaggcuagcgaggaaaagaacucccccagagcaucucugaucccugacgccacccaccucgggccacaauucugcaaaucauguugguuugagaauaagggacuuguggaaugcaauaaccauuaccuguguuugaauugcuuaacacugcuacucagugucagcaacagguguccgauuugcaaaaugccccugccuacuaaacuucggccauccacgacccccacagcgccuccaacuggugcugccgauucuauacgcccucccccauauucgccgugaggacuagucccuguucccagagcccacuuuuuuuucuuuuuuugaaauaaaauagccugucuuucagaucuaaaaaaaaaaaaaaaaaaaaaaaaaaaaaaaaaaaaaaaaaaaaaaaaaaaaaaaaaaaaaaaaugcaucccccccccccccccccccccccccccccccaaaggcucuuuucagagccaccagaauu

SEQ ID NO: 13102 - RNA, 595 nt, Artificial Sequence
  mRNA product Design a-2 comprising derived and/or modified sequence from LASV(Mad39;Clade IV)__ANH09743__Z (opt3)
gggagaguccgcucagccagguugcagaagcggcuuagcguguguccuaaucuucucucugcguguagguaggccugugccgcaaacaagcuuaccaugggcaacaagcaggccaaagcuagcgagguggaagacgggcccagagcaucccugaucccugaugccacccaccucggaccacaauucugcaagucuuguugguuugagaauaaaucacuugucgaaugcaacaaucauuaccuguguuugaacugcuuaacacugcuacucaguguuagcaauagguguccgauuugcaagaugccccugccuacucggcuuaaaccauccgugguacccacggcgccuccaacccgcgcuggugacggcacacgacccccuccauauucuccgugaggacuagucccuguucccagagcccacuuuuuuuucuuuuuuugaaauaaaauagccugucuuucagaucuaaaaaaaaaaaaaaaaaaaaaaaaaaaaaaaaaaaaaaaaaaaaaaaaaaaaaaaaaaaaaaaaugcaucccccccccccccccccccccccccccccccaaaggcucuuuucagagccaccagaauu

SEQ ID NO: 13103 - RNA, 595 nt, Artificial Sequence
  mRNA product Design a-2 comprising derived and/or modified sequence from LASV(Z0947-SLE-2011;Clade IV)__AIT17838__Z (opt3)
gggagaguccgcucagccagguugcagaagcggcuuagcguguguccuaaucuucucucugcguguagguaggccugugccgcaaacaagcuuaccaugggcaacaagcaggccaaggugcccgagagcaaggacuccccuagagcuucucugaucccagaugcaacccaccucgggccgcaauucugcaaaucauguugguuugaaaauaagggacuugucgagugcaacaaucauuaccuguguuugaacugcuuaacacugcuacucaguguuagcaauaggugucccauuugcaaaaugccucugccaacuaaacuuaagcccuccgccgcgccuacggcuccacccaccggugccgcagacucuauacggccuccaccguauucgcccugaggacuagucccuguucccagagcccacuuuuuuuucuuuuuuugaaauaaaauagccugucuuucagaucuaaaaaaaaaaaaaaaaaaaaaaaaaaaaaaaaaaaaaaaaaaaaaaaaaaaaaaaaaaaaaaaaugcaucccccccccccccccccccccccccccccccaaaggcucuuuucagagccaccagaauu

SEQ ID NO: 13104 - RNA, 595 nt, Artificial Sequence
  mRNA product Design a-2 comprising derived and/or modified sequence from LASV(Josiah;Clade IV)__ADY11072/NP_694871__Z (opt4)
gggagaguccgcucagccagguugcagaagcggcuuagcguguguccuaaucuucucucugcguguagguaggccugugccgcaaacaagcuuaccaugggcaacaagcaggccaaggcccccgagagcaaggacagccccagagccagccugauccccgacgccacccaccugggcccccaguucugcaagagcugcugguucgagaacaagggccugguggagugcaacaaccacuaccugugccugaacugccugacccugcugcugagcgugagcaacagaugccccaucugcaagaugccccugcccaccaagcugagacccagcgccgcccccaccgccccccccaccggcgccgccgacagcaucagacccccccccuacagccccugaggacuagucccuguucccagagcccacuuuuuuuucuuuuuuugaaauaaaauagccugucuuucagaucuaaaaaaaaaaaaaaaaaaaaaaaaaaaaaaaaaaaaaaaaaaaaaaaaaaaaaaaaaaaaaaaaugcaucccccccccccccccccccccccccccccccaaaggcucuuuucagagccaccagaauu

SEQ ID NO: 13105 - RNA, 598 nt, Artificial Sequence
  mRNA product Design a-2 comprising derived and/or modified sequence from LASV(Pinneo-NIG-1969;Clade I)__AIT17834__Z (opt4)
gggagaguccgcucagccagguugcagaagcggcuuagcguguguccuaaucuucucucugcguguagguaggccugugccgcaaacaagcuuaccaugggcaacaagcagaccagaagcccccccaagcccgagcaccccagacccacccugcugcccgacgccagccaccugggcccccaguucugcaagagcugcugguucgagaacaagggccugguggagugcaacaaccacuaccugugccugaacugccugacccugcugcugagcgugagcgacagaugccccaucugcaagaugccccugcccaccaagcuggccgugagaacccagcccagcgcccccccccugaaccagggcaacacccagagcagccccccccccuacagccccugaggacuagucccuguucccagagcccacuuuuuuuucuuuuuuugaaauaaaauagccugucuuucagaucuaaaaaaaaaaaaaaaaaaaaaaaaaaaaaaaaaaaaaaaaaaaaaaaaaaaaaaaaaaaaaaaaugcaucccccccccccccccccccccccccccccccaaaggcucuuuucagagccaccagaauu

SEQ ID NO: 13106 - RNA, 595 nt, Artificial Sequence
  mRNA product Design a-2 comprising derived and/or modified sequence from LASV(Nig08-04;Clade II)__ADU56612__Z (opt4)
gggagaguccgcucagccagguugcagaagcggcuuagcguguguccuaaucuucucucugcguguagguaggccugugccgcaaacaagcuuaccaugggcaacagacagaccagacccaccgaggccaccgagcagagcagagcccaccuggugcccgacgccagccaccugggcccccaguucugcaagagcugcugguucgagaacagaggccugguggagugcaacaaccacuaccugugccugaacugccugagccugcugcugagcgugagcagcagaugccccaucugcaagaugccccugcccaccagacugaaggccagcgcccagcccagcgccccccccaccgaggccccccagaacaccacccccccccccuacacccccugaggacuagucccuguucccagagcccacuuuuuuuucuuuuuuugaaauaaaauagccugucuuucagaucuaaaaaaaaaaaaaaaaaaaaaaaaaaaaaaaaaaaaaaaaaaaaaaaaaaaaaaaaaaaaaaaaugcaucccccccccccccccccccccccccccccccaaaggcucuuuucagagccaccagaauu

SEQ ID NO: 13107 - RNA, 595 nt, Artificial Sequence
  mRNA product Design a-2 comprising derived and/or modified sequence from LASV(Nig08-A19;Clade III)__ADU56620__Z (opt4)
gggagaguccgcucagccagguugcagaagcggcuuagcguguguccuaaucuucucucugcguguagguaggccugugccgcaaacaagcuuaccaugggcggcaagcacaccaagccccagagagagagcaacagccccagagccagccugauccccgacgccacccaccugggcccccaguucugcaagagcugcugguucgagaacaagggccugguggagugcaacaaccacuaccugugccugaacugccugacccugcugcugagcgugagcaacagaugccccaucugcaagaugccccugcccaccagacugagagccagcaccaaccccaccgccccccagguggagcaggugggccccaccaaccccccccccuacagccccugaggacuagucccuguucccagagcccacuuuuuuuucuuuuuuugaaauaaaauagccugucuuucagaucuaaaaaaaaaaaaaaaaaaaaaaaaaaaaaaaaaaaaaaaaaaaaaaaaaaaaaaaaaaaaaaaaugcaucccccccccccccccccccccccccccccccaaaggcucuuuucagagccaccagaauu

SEQ ID NO: 13108 - RNA, 595 nt, Artificial Sequence
  mRNA product Design a-2 comprising derived and/or modified sequence from LASV(AV;Clade V)__CCA30312__Z (opt4)
gggagaguccgcucagccagguugcagaagcggcuuagcguguguccuaaucuucucucugcguguagguaggccugugccgcaaacaagcuuaccaugggcaacagacaggccaagaaccccgagguggagaacagccccagagccagccugauccccgacgccacccaccugggcccccaguucugcaagagcugcugguucgagaacaagggccugguggagugcaacaaccacuaccugugccugaacugccugagccugcugcugagcgugagcaacagaugccccaucugcaagaugccccugcccaccagacugagacccaccaccacccccaccgccccccagaucaucaaggagaacaccaccaaccccccccccuacacccccugaggacuagucccuguucccagagcccacuuuuuuuucuuuuuuugaaauaaaauagccugucuuucagaucuaaaaaaaaaaaaaaaaaaaaaaaaaaaaaaaaaaaaaaaaaaaaaaaaaaaaaaaaaaaaaaaaugcaucccccccccccccccccccccccccccccccaaaggcucuuuucagagccaccagaauu

SEQ ID NO: 13109 - RNA, 595 nt, Artificial Sequence
  mRNA product Design a-2 comprising derived and/or modified sequence from LASV(Togo/2016/7082;Clade VI)__AMR44579__Z (opt4)
gggagaguccgcucagccagguugcagaagcggcuuagcguguguccuaaucuucucucugcguguagguaggccugugccgcaaacaagcuuaccaugggcgccagacagaccaagcagccccagaucgagggcagccccagagccagccuggugcccgacgccagccaccugggcccccaguucugcaagagcugcugguucgagaacaagggccugguggagugcaacaaccacuaccugugccugaacugccugagccugcugcugagcgugagcaacagaugccccaucugcaagaugccccugcccaccaagcugagagugagcagcgcccccagcgccccccccgccgccaccgcccagcccggcacccccccccccuacagccccugaggacuagucccuguucccagagcccacuuuuuuuucuuuuuuugaaauaaaauagccugucuuucagaucuaaaaaaaaaaaaaaaaaaaaaaaaaaaaaaaaaaaaaaaaaaaaaaaaaaaaaaaaaaaaaaaaugcaucccccccccccccccccccccccccccccccaaaggcucuuuucagagccaccagaauu

SEQ ID NO: 13110 - RNA, 595 nt, Artificial Sequence
  mRNA product Design a-2 comprising derived and/or modified sequence from LASV(KAK-428;Clade n.d. (VII))__ANH09761__Z (opt4)
gggagaguccgcucagccagguugcagaagcggcuuagcguguguccuaaucuucucucugcguguagguaggccugugccgcaaacaagcuuaccaugggcaacaagggcaccaagcccacccagaacagcgagcccagcagagccaaccuggugcccgacgccagcuaccugggcccccaguucugcaagagcugcugguucgagaacaagggccugguggagugcaacaaccacuaccugugccugaacugccugaccaugcugcugagcgugagcaacagaugccccaucugcaagaugccccugcccaccaagaucaaggccagcggcagccccagcgccccccccaccgaggccaacagcgccgugagccccccccccuacacccccugaggacuagucccuguucccagagcccacuuuuuuuucuuuuuuugaaauaaaauagccugucuuucagaucuaaaaaaaaaaaaaaaaaaaaaaaaaaaaaaaaaaaaaaaaaaaaaaaaaaaaaaaaaaaaaaaaugcaucccccccccccccccccccccccccccccccaaaggcucuuuucagagccaccagaauu

SEQ ID NO: 13111 - RNA, 595 nt, Artificial Sequence
  mRNA product Design a-2 comprising derived and/or modified sequence from LASV(ISTH0009-NIG-2011;Clade II)__AIT17402__Z (opt4)
gggagaguccgcucagccagguugcagaagcggcuuagcguguguccuaaucuucucucugcguguagguaggccugugccgcaaacaagcuuaccaugggcaacagacaggccaagagcaccaagguggacgagcaccagagagcccaccuggugcccgacgccagccaccugggcccccaguucugcaagagcugcugguucgagaacagaggccugguggagugcaacaaccacuaccugugccugaacugccugagccugcugcugagcgugagcagcagaugccccaucugcaagaugccccugcccaccaagcugaaggccgccgcccagcccagcgcccccagcaccgagaccauccagaacaccacccccccccccuacacccccugaggacuagucccuguucccagagcccacuuuuuuuucuuuuuuugaaauaaaauagccugucuuucagaucuaaaaaaaaaaaaaaaaaaaaaaaaaaaaaaaaaaaaaaaaaaaaaaaaaaaaaaaaaaaaaaaaugcaucccccccccccccccccccccccccccccccaaaggcucuuuucagagccaccagaauu

SEQ ID NO: 13112 - RNA, 595 nt, Artificial Sequence
  mRNA product Design a-2 comprising derived and/or modified sequence from LASV(ISTH2010-NIG-2012;Clade II)__AIT17480__Z (opt4)
gggagaguccgcucagccagguugcagaagcggcuuagcguguguccuaaucuucucucugcguguagguaggccugugccgcaaacaagcuuaccaugggcaacagacacgccaagagcaccaagguggacgagcaccagagagcccaccuggugcccgacgccagccaccugggcccccaguucugcaagagcugcugguucgagaacagaggccugguggagugcaacaaccacuaccugugccugaacugccugagccugcugcugagcgugagcagcagaugccccaucugcaagaugccccugcccaccaagcugaaggccgccgcccagcccagcgcccccagcaccgaggugauccagagcaccacccccccccccuacacccccugaggacuagucccuguucccagagcccacuuuuuuuucuuuuuuugaaauaaaauagccugucuuucagaucuaaaaaaaaaaaaaaaaaaaaaaaaaaaaaaaaaaaaaaaaaaaaaaaaaaaaaaaaaaaaaaaaugcaucccccccccccccccccccccccccccccccaaaggcucuuuucagagccaccagaauu

SEQ ID NO: 13113 - RNA, 595 nt, Artificial Sequence
  mRNA product Design a-2 comprising derived and/or modified sequence from LASV(Lassa virus/H.sapiens-wt/NGA/2016/ISTH_0017;Clade II)__AVO03713__Z (opt4)
gggagaguccgcucagccagguugcagaagcggcuuagcguguguccuaaucuucucucugcguguagguaggccugugccgcaaacaagcuuaccaugggcaacagacaggccaagagcaccaagguggacgagcaccagagagcccaccuggugcccgacgccagccaccugggcccccaguucugcaagagcugcugguucgagaacagaggccugguggagugcaacaaccacuaccugugccugaacugccugagccugcugcugagcgugagcagcagaugccccaucugcaagaugccccugcccaccaagcugaaggccgccacccagcccagcgcccccagcaccgaggugaaccagaacaccacccccccccccuacacccccugaggacuagucccuguucccagagcccacuuuuuuuucuuuuuuugaaauaaaauagccugucuuucagaucuaaaaaaaaaaaaaaaaaaaaaaaaaaaaaaaaaaaaaaaaaaaaaaaaaaaaaaaaaaaaaaaaugcaucccccccccccccccccccccccccccccccaaaggcucuuuucagagccaccagaauu

SEQ ID NO: 13114 - RNA, 595 nt, Artificial Sequence
  mRNA product Design a-2 comprising derived and/or modified sequence from LASV(Lassa virus/H.sapiens-wt/NGA/2018/ISTH_0959;Clade II)__AVV65084__Z (opt4)
gggagaguccgcucagccagguugcagaagcggcuuagcguguguccuaaucuucucucugcguguagguaggccugugccgcaaacaagcuuaccaugggcaacaagcaggccaagagcaccaagguggacgagcaccagagagcccaccuggugcccgacgccagccaccugggcccccaguucugcaagagcugcugguucgagaacagaggccugguggagugcaacaaccacuaccugugccugaacugccugagccugcugcugagcgugagcagcagaugccccaucugcaagaugccccugcccaccaagcugaaggccgccgcccagcccagcgcccccagcaccgaggccauccagagcaccacccccccccccuacacccccugaggacuagucccuguucccagagcccacuuuuuuuucuuuuuuugaaauaaaauagccugucuuucagaucuaaaaaaaaaaaaaaaaaaaaaaaaaaaaaaaaaaaaaaaaaaaaaaaaaaaaaaaaaaaaaaaaugcaucccccccccccccccccccccccccccccccaaaggcucuuuucagagccaccagaauu

SEQ ID NO: 13115 - RNA, 595 nt, Artificial Sequence
  mRNA product Design a-2 comprising derived and/or modified sequence from LASV(LASV003-NIG-2008;Clade II)__AIT17578__Z (opt4)
gggagaguccgcucagccagguugcagaagcggcuuagcguguguccuaaucuucucucugcguguagguaggccugugccgcaaacaagcuuaccaugggcaacagacaggccaagagcaccaagguggacgagcaccagagagcccaccuggugcccgacgccagccaccugggcccccaguucugcaagagcugcugguucgagaacaagggccugguggagugcaacaaccacuaccugugccugaacugccugagccugcugcugagcgugagcagcagaugccccaucugcaagaugccccugcccaccaagcugagagccgccgcccagcccagcgcccccagcaccgagagcgcccagaacaccgcccccccccccuacgcccccugaggacuagucccuguucccagagcccacuuuuuuuucuuuuuuugaaauaaaauagccugucuuucagaucuaaaaaaaaaaaaaaaaaaaaaaaaaaaaaaaaaaaaaaaaaaaaaaaaaaaaaaaaaaaaaaaaugcaucccccccccccccccccccccccccccccccaaaggcucuuuucagagccaccagaauu

SEQ ID NO: 13116 - RNA, 595 nt, Artificial Sequence
  mRNA product Design a-2 comprising derived and/or modified sequence from LASV(LASV035-NIG-2009;Clade II)__AIT17586__Z (opt4)
gggagaguccgcucagccagguugcagaagcggcuuagcguguguccuaaucuucucucugcguguagguaggccugugccgcaaacaagcuuaccaugggcaacaagcaggccaagagcaccaagguggacgagcaccagagagcccaccuggugcccgacgccagccaccugggcccccaguucugcaagagcugcugguucgagaacagaggccugguggagugcaacaaccacuaccugugccugaacugccugagccugcugcugagcgugagcagcagaugccccaucugcaagaugccccugcccaccagacugaaggccgccgcccagcccagcgcccccagcaccgaggugacccagaacaccacccccccccccuacacccccugaggacuagucccuguucccagagcccacuuuuuuuucuuuuuuugaaauaaaauagccugucuuucagaucuaaaaaaaaaaaaaaaaaaaaaaaaaaaaaaaaaaaaaaaaaaaaaaaaaaaaaaaaaaaaaaaaugcaucccccccccccccccccccccccccccccccaaaggcucuuuucagagccaccagaauu

SEQ ID NO: 13117 - RNA, 595 nt, Artificial Sequence
  mRNA product Design a-2 comprising derived and/or modified sequence from LASV(LASV1000-NIG-2009;Clade II)__AIT17780__Z (opt4)
gggagaguccgcucagccagguugcagaagcggcuuagcguguguccuaaucuucucucugcguguagguaggccugugccgcaaacaagcuuaccaugggcaacagacagaccaagagcaccaagguggacgagcaccagagagccuaccuggugcccgacgccagccugcugggcccccaguucugcaagagcugcugguucgagaacaagggccugguggagugcaacaaccacuaccugugccugaacugccugagccugcugcugagcgugagcagcagaugccccaucugcaagaugccccugcccaccagacugaaggccgccgcccagcccagcgccccccccaccgaggccauccagaacaccacccccccccccuacacccccugaggacuagucccuguucccagagcccacuuuuuuuucuuuuuuugaaauaaaauagccugucuuucagaucuaaaaaaaaaaaaaaaaaaaaaaaaaaaaaaaaaaaaaaaaaaaaaaaaaaaaaaaaaaaaaaaaugcaucccccccccccccccccccccccccccccccaaaggcucuuuucagagccaccagaauu

SEQ ID NO: 13118 - RNA, 595 nt, Artificial Sequence
  mRNA product Design a-2 comprising derived and/or modified sequence from LASV(LASV221-NIG-2010;Clade II)__AIT17622__Z (opt4)
gggagaguccgcucagccagguugcagaagcggcuuagcguguguccuaaucuucucucugcguguagguaggccugugccgcaaacaagcuuaccaugggcaacagacaggccaagagcaccaagguggacgagcaccagagagcccaccuggugcccgacgccagccaccugggcccccaguucugcaagagcugcugguucgagaacagaggccugguggagugcaacaaccacuaccugugccugaacugccugagccugcugcugagcgugagcagcagaugccccaucugcaagaugccccugcccaccaagcugaaggccgccacccagcccagcgcccccagcaccgaggugacccagaacaccauccccccccccuacagccccugaggacuagucccuguucccagagcccacuuuuuuuucuuuuuuugaaauaaaauagccugucuuucagaucuaaaaaaaaaaaaaaaaaaaaaaaaaaaaaaaaaaaaaaaaaaaaaaaaaaaaaaaaaaaaaaaaugcaucccccccccccccccccccccccccccccccaaaggcucuuuucagagccaccagaauu

SEQ ID NO: 13119 - RNA, 595 nt, Artificial Sequence
  mRNA product Design a-2 comprising derived and/or modified sequence from LASV(LASV237-NIG-2010;Clade II)__AIT17636__Z (opt4)
gggagaguccgcucagccagguugcagaagcggcuuagcguguguccuaaucuucucucugcguguagguaggccugugccgcaaacaagcuuaccaugggcaacagacaggccaagagcaccaagguggacgagcaccagagagcccaccuggugcccgacgccagccaccugggcccccaguucugcaagagcugcugguucgagaacagaggccugguggagugcaacaaccacuaccugugccugaacugccugagccugcugcugagcgugagcagcagaugccccaucugcaagaugccccugcccaccaagcugaaggccgccgcccagcccagcgcccccagcaucgagaccauccagaacaccacccccccccccuacacccccugaggacuagucccuguucccagagcccacuuuuuuuucuuuuuuugaaauaaaauagccugucuuucagaucuaaaaaaaaaaaaaaaaaaaaaaaaaaaaaaaaaaaaaaaaaaaaaaaaaaaaaaaaaaaaaaaaugcaucccccccccccccccccccccccccccccccaaaggcucuuuucagagccaccagaauu

SEQ ID NO: 13120 - RNA, 595 nt, Artificial Sequence
  mRNA product Design a-2 comprising derived and/or modified sequence from LASV(LASV253-NIG-2011;Clade II)__AIT17668__Z (opt4)
gggagaguccgcucagccagguugcagaagcggcuuagcguguguccuaaucuucucucugcguguagguaggccugugccgcaaacaagcuuaccaugggcaacagacaggccaagagcaccaagguggacgagcaccagagagcccaccuggugcccgacgccagccaccugggcccccaguucugcaagagcugcugguucgagaacaagggccugguggagugcaacaaccacuaccugugccugaacugccugagccugcugcugagcgugagcagcagaugccccaucugcaagaugccccugcccaccaagcugaagaccaccgcccagcccagcgccccccccaccgaggccgccaagaacaccgcccccccccccuacgcccccugaggacuagucccuguucccagagcccacuuuuuuuucuuuuuuugaaauaaaauagccugucuuucagaucuaaaaaaaaaaaaaaaaaaaaaaaaaaaaaaaaaaaaaaaaaaaaaaaaaaaaaaaaaaaaaaaaugcaucccccccccccccccccccccccccccccccaaaggcucuuuucagagccaccagaauu

SEQ ID NO: 13121 - RNA, 595 nt, Artificial Sequence
  mRNA product Design a-2 comprising derived and/or modified sequence from LASV(G1180-SLE-2010;Clade IV)__AIT17166__Z (opt4)
gggagaguccgcucagccagguugcagaagcggcuuagcguguguccuaaucuucucucugcguguagguaggccugugccgcaaacaagcuuaccaugggcaacaagcaggccaaggcccccgaggccaaggacagccccagagccagccugauccccgacgccacccaccugggcccccaguucugcaagagcugcugguucgagaccaagggccugguggagugcaacaaccacuaccugugccugaacugccugacccugcugcugagcgugagcaacagaugccccaucugcaagaugccccugcccaccaagcugagacccagcgccacccccaccgccccccccaccgaggccgccgacagcaucggccccccccccuacagccccugaggacuagucccuguucccagagcccacuuuuuuuucuuuuuuugaaauaaaauagccugucuuucagaucuaaaaaaaaaaaaaaaaaaaaaaaaaaaaaaaaaaaaaaaaaaaaaaaaaaaaaaaaaaaaaaaaugcaucccccccccccccccccccccccccccccccaaaggcucuuuucagagccaccagaauu

SEQ ID NO: 13122 - RNA, 595 nt, Artificial Sequence
  mRNA product Design a-2 comprising derived and/or modified sequence from LASV(G1442-SLE-2011;Clade IV)__AIT17178__Z (opt4)
gggagaguccgcucagccagguugcagaagcggcuuagcguguguccuaaucuucucucugcguguagguaggccugugccgcaaacaagcuuaccaugggcaacaagcaggccaaggccagcgaggccaaggacagccccagagccagccugauccccgacgccacccaccugggcccccaguucugcaagagcugcugguucgagaacaagggccugguggagugcaacaaccacuaccugugccugaacugccugagccugcugcugagcgugagcagcagaugccccaucugcaagaugccccugcccaccagacugagacccagcaccgcccccaccgccccccccgccagagccggcgacaacaucaagcccccccccuacagccccugaggacuagucccuguucccagagcccacuuuuuuuucuuuuuuugaaauaaaauagccugucuuucagaucuaaaaaaaaaaaaaaaaaaaaaaaaaaaaaaaaaaaaaaaaaaaaaaaaaaaaaaaaaaaaaaaaugcaucccccccccccccccccccccccccccccccaaaggcucuuuucagagccaccagaauu

SEQ ID NO: 13123 - RNA, 595 nt, Artificial Sequence
  mRNA product Design a-2 comprising derived and/or modified sequence from LASV(G502-SLE-2009;Clade IV)__AIT17124__Z (opt4)
gggagaguccgcucagccagguugcagaagcggcuuagcguguguccuaaucuucucucugcguguagguaggccugugccgcaaacaagcuuaccaugggcaacaagcaggugaagacccccgaggccaaggacagccccagagccagccugauccccgacgccacccaccugggcccccaguucugcaagagcugcugguucgagaacaagggccugguggagugcaacaaccacuaccugugccugaacugccugacccugcugcugagcgugggcaacagaugccccaucugcaagaugccccugcccaccaagcugagacccagcgugacccccaccgccccccccaccagagccgccgacagcaucggccccccccccuacagccccugaggacuagucccuguucccagagcccacuuuuuuuucuuuuuuugaaauaaaauagccugucuuucagaucuaaaaaaaaaaaaaaaaaaaaaaaaaaaaaaaaaaaaaaaaaaaaaaaaaaaaaaaaaaaaaaaaugcaucccccccccccccccccccccccccccccccaaaggcucuuuucagagccaccagaauu

SEQ ID NO: 13124 - RNA, 595 nt, Artificial Sequence
  mRNA product Design a-2 comprising derived and/or modified sequence from LASV(G733-SLE-2010;Clade IV)__AIT17152__Z (opt4)
gggagaguccgcucagccagguugcagaagcggcuuagcguguguccuaaucuucucucugcguguagguaggccugugccgcaaacaagcuuaccaugggcaacaagcaggccaagacccccgagaccaaggacagccccagagccagccugauccccgacgccacccaccugggcccccaguucugcaagagcugcugguucgagaacaagggccugguggagugcaacaaccacuaccugugccugaacugccugacccugcugcugagcgugagcaacagaugccccaucugcaagaugccccugcccaccaagcugagacccagcaccgcccccaccgccccccccgccggcgccgccgacaacaccagacccccccccuacagccccugaggacuagucccuguucccagagcccacuuuuuuuucuuuuuuugaaauaaaauagccugucuuucagaucuaaaaaaaaaaaaaaaaaaaaaaaaaaaaaaaaaaaaaaaaaaaaaaaaaaaaaaaaaaaaaaaaugcaucccccccccccccccccccccccccccccccaaaggcucuuuucagagccaccagaauu

SEQ ID NO: 13125 - RNA, 607 nt, Artificial Sequence
  mRNA product Design a-2 comprising derived and/or modified sequence from MOPV/LASV reassortant(IGS-1;Clade IV)__AFY05533__Z (opt4)
gggagaguccgcucagccagguugcagaagcggcuuagcguguguccuaaucuucucucugcguguagguaggccugugccgcaaacaagcuuaccaugggcaagacccagagcaagggccagcccagcaccaaccugcugaaggagaccgagcccagacaccccgugauccccgacgccagaggcaccggccccgaguucugcaagagcugcugguucgagagaagaggccuggugagaugcaacgaccacuaccugugccugaacugccugacccugcugcacaccgugagcgacagaugccccaucugcaagcacaagcugcccuucagacuggagcugcagacccagcccaccgccccccccgagaucccccccagccagaaccccccccccuacagccccugaggacuagucccuguucccagagcccacuuuuuuuucuuuuuuugaaauaaaauagccugucuuucagaucuaaaaaaaaaaaaaaaaaaaaaaaaaaaaaaaaaaaaaaaaaaaaaaaaaaaaaaaaaaaaaaaaugcaucccccccccccccccccccccccccccccccaaaggcucuuuucagagccaccagaauu

SEQ ID NO: 13126 - RNA, 595 nt, Artificial Sequence
  mRNA product Design a-2 comprising derived and/or modified sequence from LASV(LM776-SLE-2012;Clade IV)__AIT17824__Z (opt4)
gggagaguccgcucagccagguugcagaagcggcuuagcguguguccuaaucuucucucugcguguagguaggccugugccgcaaacaagcuuaccaugggcaacaagcaggccaaggccagcgaggagaagaacagccccagagccagccugauccccgacgccacccaccugggcccccaguucugcaagagcugcugguucgagaacaagggccugguggagugcaacaaccacuaccugugccugaacugccugacccugcugcugagcgugagcaacagaugccccaucugcaagaugccccugcccaccaagcugagacccagcaccacccccaccgccccccccaccggcgccgccgacagcaucagacccccccccuacagccccugaggacuagucccuguucccagagcccacuuuuuuuucuuuuuuugaaauaaaauagccugucuuucagaucuaaaaaaaaaaaaaaaaaaaaaaaaaaaaaaaaaaaaaaaaaaaaaaaaaaaaaaaaaaaaaaaaugcaucccccccccccccccccccccccccccccccaaaggcucuuuucagagccaccagaauu

SEQ ID NO: 13127 - RNA, 595 nt, Artificial Sequence
  mRNA product Design a-2 comprising derived and/or modified sequence from LASV(Mad39;Clade IV)__ANH09743__Z (opt4)
gggagaguccgcucagccagguugcagaagcggcuuagcguguguccuaaucuucucucugcguguagguaggccugugccgcaaacaagcuuaccaugggcaacaagcaggccaaggccagcgagguggaggacggccccagagccagccugauccccgacgccacccaccugggcccccaguucugcaagagcugcugguucgagaacaagagccugguggagugcaacaaccacuaccugugccugaacugccugacccugcugcugagcgugagcaacagaugccccaucugcaagaugccccugcccaccagacugaagcccagcguggugcccaccgccccccccaccagagccggcgacggcaccagacccccccccuacagccccugaggacuagucccuguucccagagcccacuuuuuuuucuuuuuuugaaauaaaauagccugucuuucagaucuaaaaaaaaaaaaaaaaaaaaaaaaaaaaaaaaaaaaaaaaaaaaaaaaaaaaaaaaaaaaaaaaugcaucccccccccccccccccccccccccccccccaaaggcucuuuucagagccaccagaauu

SEQ ID NO: 13128 - RNA, 595 nt, Artificial Sequence
  mRNA product Design a-2 comprising derived and/or modified sequence from LASV(Z0947-SLE-2011;Clade IV)__AIT17838__Z (opt4)
gggagaguccgcucagccagguugcagaagcggcuuagcguguguccuaaucuucucucugcguguagguaggccugugccgcaaacaagcuuaccaugggcaacaagcaggccaaggugcccgagagcaaggacagccccagagccagccugauccccgacgccacccaccugggcccccaguucugcaagagcugcugguucgagaacaagggccugguggagugcaacaaccacuaccugugccugaacugccugacccugcugcugagcgugagcaacagaugccccaucugcaagaugccccugcccaccaagcugaagcccagcgccgcccccaccgccccccccaccggcgccgccgacagcaucagacccccccccuacagccccugaggacuagucccuguucccagagcccacuuuuuuuucuuuuuuugaaauaaaauagccugucuuucagaucuaaaaaaaaaaaaaaaaaaaaaaaaaaaaaaaaaaaaaaaaaaaaaaaaaaaaaaaaaaaaaaaaugcaucccccccccccccccccccccccccccccccaaaggcucuuuucagagccaccagaauu

SEQ ID NO: 13129 - RNA, 595 nt, Artificial Sequence
  mRNA product Design a-2 comprising derived and/or modified sequence from LASV(Josiah;Clade IV)__ADY11072/NP_694871__Z (opt5)
gggagaguccgcucagccagguugcagaagcggcuuagcguguguccuaaucuucucucugcguguagguaggccugugccgcaaacaagcuuaccaugggcaacaagcaggccaaagcucccgagagcaaggacuccccuagagccucucugaucccggaugcgacccaccucgggccccaauucugcaaaagcuguugguuugaaaauaagggacugguggagugcaacaaucauuaccuuugucugaacugccucacacugcuucuguccgucucuaaucgguguccuauuugcaaaaugccccucccuacgaagcugcgccccagcgcugccccuaccgccccgcccacaggcgcugccgacuccaucagaccucccccuuauucucccugaggacuagucccuguucccagagcccacuuuuuuuucuuuuuuugaaauaaaauagccugucuuucagaucuaaaaaaaaaaaaaaaaaaaaaaaaaaaaaaaaaaaaaaaaaaaaaaaaaaaaaaaaaaaaaaaaugcaucccccccccccccccccccccccccccccccaaaggcucuuuucagagccaccagaauu

SEQ ID NO: 13130 - RNA, 598 nt, Artificial Sequence
  mRNA product Design a-2 comprising derived and/or modified sequence from LASV(Pinneo-NIG-1969;Clade I)__AIT17834__Z (opt5)
gggagaguccgcucagccagguugcagaagcggcuuagcguguguccuaaucuucucucugcguguagguaggccugugccgcaaacaagcuuaccaugggcaacaagcagaccagaagcccucccaaaccggagcacccccggccuacacugcuccccgacgccucccaucuggggccucaauucugcaagucuuguugguuugaaaauaaaggacuuguggagugcaacaaucacuaccugugucucaacugccugacgcuucugcucagcgucuccgaucgcugucccaucugcaagaugccucugccgaccaaacuggcuguuagaacacagcccucugccccuccccucaaucagggcaacacccagagcuccccucccccguauucuccuugaggacuagucccuguucccagagcccacuuuuuuuucuuuuuuugaaauaaaauagccugucuuucagaucuaaaaaaaaaaaaaaaaaaaaaaaaaaaaaaaaaaaaaaaaaaaaaaaaaaaaaaaaaaaaaaaaugcaucccccccccccccccccccccccccccccccaaaggcucuuuucagagccaccagaauu

SEQ ID NO: 13131 - RNA, 595 nt, Artificial Sequence
  mRNA product Design a-2 comprising derived and/or modified sequence from LASV(Nig08-04;Clade II)__ADU56612__Z (opt5)
gggagaguccgcucagccagguugcagaagcggcuuagcguguguccuaaucuucucucugcguguagguaggccugugccgcaaacaagcuuaccaugggcaacagacagacccggcccacagaggccacggaacaaagccgcgcccaccuggugccugacgccucccaucucgggccgcaguucugcaagucuuguugguuugagaauagaggacuggucgaaugcaacaaucacuaccuuugucugaacugccucagccugcuucuguccguuucuagccggugucccaucugcaaaaugccucuccccacccgccugaaggcguccgcucagccuucugcucccccuacagaggccccgcagaauaccacacccccucccuauaccccuugaggacuagucccuguucccagagcccacuuuuuuuucuuuuuuugaaauaaaauagccugucuuucagaucuaaaaaaaaaaaaaaaaaaaaaaaaaaaaaaaaaaaaaaaaaaaaaaaaaaaaaaaaaaaaaaaaugcaucccccccccccccccccccccccccccccccaaaggcucuuuucagagccaccagaauu

SEQ ID NO: 13132 - RNA, 595 nt, Artificial Sequence
  mRNA product Design a-2 comprising derived and/or modified sequence from LASV(Nig08-A19;Clade III)__ADU56620__Z (opt5)
gggagaguccgcucagccagguugcagaagcggcuuagcguguguccuaaucuucucucugcguguagguaggccugugccgcaaacaagcuuaccaugggcgggaagcacaccaaaccccagagagagagcaacuccccucgggccucucugaucccggacgcuacacaucucggaccccaauucugcaagagcuguugguuugaaaauaaaggccugguggagugcaacaaucacuaccuuugucugaacugccucacgcugcuucuguccgucucuaaucgcuguccuauuugcaagaugccccucccuaccagacugcgggccagcacaaaccccaccgcgccucagguugaacagguggggccgacaaaucccccucccuauuccccuugaggacuagucccuguucccagagcccacuuuuuuuucuuuuuuugaaauaaaauagccugucuuucagaucuaaaaaaaaaaaaaaaaaaaaaaaaaaaaaaaaaaaaaaaaaaaaaaaaaaaaaaaaaaaaaaaaugcaucccccccccccccccccccccccccccccccaaaggcucuuuucagagccaccagaauu

SEQ ID NO: 13133 - RNA, 595 nt, Artificial Sequence
  mRNA product Design a-2 comprising derived and/or modified sequence from LASV(AV;Clade V)__CCA30312__Z (opt5)
gggagaguccgcucagccagguugcagaagcggcuuagcguguguccuaaucuucucucugcguguagguaggccugugccgcaaacaagcuuaccaugggcaacagacaggccaagaaucccgagguggaaaacagcccucgggcuucccugaucccggacgccacccaccucgggccccaauucugcaaaucuuguugguuugagaauaagggacuggucgaaugcaacaaucauuaccuuugucugaacugccucagccugcuucuguccguuucuaaucgcuguccuauuugcaaaaugccccucccuacaagacugcggcccacgaccacaccuaccgcgccgcagaucauuaaggagaacacaaccaaucccccucccuauacaccuugaggacuagucccuguucccagagcccacuuuuuuuucuuuuuuugaaauaaaauagccugucuuucagaucuaaaaaaaaaaaaaaaaaaaaaaaaaaaaaaaaaaaaaaaaaaaaaaaaaaaaaaaaaaaaaaaaugcaucccccccccccccccccccccccccccccccaaaggcucuuuucagagccaccagaauu

SEQ ID NO: 13134 - RNA, 595 nt, Artificial Sequence
  mRNA product Design a-2 comprising derived and/or modified sequence from LASV(Togo/2016/7082;Clade VI)__AMR44579__Z (opt5)
gggagaguccgcucagccagguugcagaagcggcuuagcguguguccuaaucuucucucugcguguagguaggccugugccgcaaacaagcuuaccaugggcgccagacagaccaagcaaccccagaucgaggggagcccucgggcuucccuggugccggacgccucucaccucggaccccaguucugcaaaagcuguugguuugaaaacaagggccuggucgagugcaauaaccauuaccuuugucugaauugccucucccugcuucugucuguuagcaaccgcuguccuauuugcaaaaugccccucccuacaaagcugagaguguccucugcgcccagcgcuccuccggccgccacggcucagcccgggaccccucccccuuauucccccugaggacuagucccuguucccagagcccacuuuuuuuucuuuuuuugaaauaaaauagccugucuuucagaucuaaaaaaaaaaaaaaaaaaaaaaaaaaaaaaaaaaaaaaaaaaaaaaaaaaaaaaaaaaaaaaaaugcaucccccccccccccccccccccccccccccccaaaggcucuuuucagagccaccagaauu

SEQ ID NO: 13135 - RNA, 595 nt, Artificial Sequence
  mRNA product Design a-2 comprising derived and/or modified sequence from LASV(KAK-428;Clade n.d. (VII))__ANH09761__Z (opt5)
gggagaguccgcucagccagguugcagaagcggcuuagcguguguccuaaucuucucucugcguguagguaggccugugccgcaaacaagcuuaccaugggcaacaaggggaccaaacccacacagaauagcgagccuuccagagccaaccuggugccggacgcuucuuaccucggaccccaauucugcaagagcuguugguuugaaaauaaaggccuggucgagugcaacaaucacuaucuuugucugaacugccucacgaugcugcuuuccguuuccaaucgguguccuaucugcaagaugccccugccuaccaaaauuaaggccagcgggucccccucugcgccuccgacagaagcuaacagcgccgugucucccccucccuacaccccuugaggacuagucccuguucccagagcccacuuuuuuuucuuuuuuugaaauaaaauagccugucuuucagaucuaaaaaaaaaaaaaaaaaaaaaaaaaaaaaaaaaaaaaaaaaaaaaaaaaaaaaaaaaaaaaaaaugcaucccccccccccccccccccccccccccccccaaaggcucuuuucagagccaccagaauu

SEQ ID NO: 13136 - RNA, 595 nt, Artificial Sequence
  mRNA product Design a-2 comprising derived and/or modified sequence from LASV(ISTH0009-NIG-2011;Clade II)__AIT17402__Z (opt5)
gggagaguccgcucagccagguugcagaagcggcuuagcguguguccuaaucuucucucugcguguagguaggccugugccgcaaacaagcuuaccaugggcaacagacaggccaagagcaccaaaguggacgagcaccaacgggcucaucugguccccgaugccucccaccucgggccucaguucugcaagucuuguugguuugaaaaucgcggacugguugagugcaacaaucauuaccuuugucugaacugccucagccugcuucuguccgugucuagcagauguccgaucugcaaaaugccccucccuacaaagcugaaagcggcugcccagcccuccgccccuucuacggaaaccauucagaauacaacacccccuccguauacccccugaggacuagucccuguucccagagcccacuuuuuuuucuuuuuuugaaauaaaauagccugucuuucagaucuaaaaaaaaaaaaaaaaaaaaaaaaaaaaaaaaaaaaaaaaaaaaaaaaaaaaaaaaaaaaaaaaugcaucccccccccccccccccccccccccccccccaaaggcucuuuucagagccaccagaauu

SEQ ID NO: 13137 - RNA, 595 nt, Artificial Sequence
  mRNA product Design a-2 comprising derived and/or modified sequence from LASV(ISTH2010-NIG-2012;Clade II)__AIT17480__Z (opt5)
gggagaguccgcucagccagguugcagaagcggcuuagcguguguccuaaucuucucucugcguguagguaggccugugccgcaaacaagcuuaccaugggcaacagacacgccaagagcaccaaaguggacgagcaucagcgggcucaccugguccccgaugccucccaucucgggccucaauucugcaagucuuguugguuugaaaaucgcggacugguugagugcaacaaucacuaccuuugucugaacugccucagccugcuucuguccgugucuagcagauguccgaucugcaaaaugccccucccuacaaagcugaaagcggcugcccagcccuccgccccuucuacggaagugauucagagcaccacacccccuccguauacccccugaggacuagucccuguucccagagcccacuuuuuuuucuuuuuuugaaauaaaauagccugucuuucagaucuaaaaaaaaaaaaaaaaaaaaaaaaaaaaaaaaaaaaaaaaaaaaaaaaaaaaaaaaaaaaaaaaugcaucccccccccccccccccccccccccccccccaaaggcucuuuucagagccaccagaauu

SEQ ID NO: 13138 - RNA, 595 nt, Artificial Sequence
  mRNA product Design a-2 comprising derived and/or modified sequence from LASV(Lassa virus/H.sapiens-wt/NGA/2016/ISTH_0017;Clade II)__AVO03713__Z (opt5)
gggagaguccgcucagccagguugcagaagcggcuuagcguguguccuaaucuucucucugcguguagguaggccugugccgcaaacaagcuuaccaugggcaacagacaggccaagagcaccaaaguggacgagcaccaacgggcucaucugguccccgaugccucccaccucgggccucaguucugcaagucuuguugguuugaaaaucgcggacugguugagugcaacaaucauuaccuuugucugaacugccucagccugcuucuguccgugucuagcagauguccgaucugcaaaaugccccucccuacaaagcugaaagcggcuacgcagcccuccgccccuucuaccgaagugaaucagaacacaacacccccuccguauacccccugaggacuagucccuguucccagagcccacuuuuuuuucuuuuuuugaaauaaaauagccugucuuucagaucuaaaaaaaaaaaaaaaaaaaaaaaaaaaaaaaaaaaaaaaaaaaaaaaaaaaaaaaaaaaaaaaaugcaucccccccccccccccccccccccccccccccaaaggcucuuuucagagccaccagaauu

SEQ ID NO: 13139 - RNA, 595 nt, Artificial Sequence
  mRNA product Design a-2 comprising derived and/or modified sequence from LASV(Lassa virus/H.sapiens-wt/NGA/2018/ISTH_0959;Clade II)__AVV65084__Z (opt5)
gggagaguccgcucagccagguugcagaagcggcuuagcguguguccuaaucuucucucugcguguagguaggccugugccgcaaacaagcuuaccaugggcaacaagcaggccaaaagcaccaagguggacgagcaccaaagagcucaucugguccccgaugccucccaccucgggccucaguucugcaaaucuuguugguuugaaaaucggggacugguugagugcaacaaucauuaccuuugucugaacugccucagccugcuucuguccgugucuagccgcuguccgaucugcaagaugccccucccuacaaaacugaaggcggcugcccagcccuccgccccuucuacggaagcuauucagagcaccacacccccuccguauacccccugaggacuagucccuguucccagagcccacuuuuuuuucuuuuuuugaaauaaaauagccugucuuucagaucuaaaaaaaaaaaaaaaaaaaaaaaaaaaaaaaaaaaaaaaaaaaaaaaaaaaaaaaaaaaaaaaaugcaucccccccccccccccccccccccccccccccaaaggcucuuuucagagccaccagaauu

SEQ ID NO: 13140 - RNA, 595 nt, Artificial Sequence
  mRNA product Design a-2 comprising derived and/or modified sequence from LASV(LASV003-NIG-2008;Clade II)__AIT17578__Z (opt5)
gggagaguccgcucagccagguugcagaagcggcuuagcguguguccuaaucuucucucugcguguagguaggccugugccgcaaacaagcuuaccaugggcaacagacaggccaagagcaccaaaguggacgagcaccaacgggcucaucugguccccgaugccucccaccucgggccucaguucugcaagucuuguugguuugaaaauaaaggacugguugagugcaacaaucauuaccuuugucugaacugccucagccugcuucuguccgugucuagccgcuguccgaucugcaagaugccccucccuacaaaacugagagcggcugcccagcccuccgccccuucuacggaaagcgcucagaauaccgcucccccuccguaugcccccugaggacuagucccuguucccagagcccacuuuuuuuucuuuuuuugaaauaaaauagccugucuuucagaucuaaaaaaaaaaaaaaaaaaaaaaaaaaaaaaaaaaaaaaaaaaaaaaaaaaaaaaaaaaaaaaaaugcaucccccccccccccccccccccccccccccccaaaggcucuuuucagagccaccagaauu

SEQ ID NO: 13141 - RNA, 595 nt, Artificial Sequence
  mRNA product Design a-2 comprising derived and/or modified sequence from LASV(LASV035-NIG-2009;Clade II)__AIT17586__Z (opt5)
gggagaguccgcucagccagguugcagaagcggcuuagcguguguccuaaucuucucucugcguguagguaggccugugccgcaaacaagcuuaccaugggcaacaagcaggccaaaagcaccaagguggacgagcaccaaagagcucaucugguccccgaugccucccaccucgggccucaguucugcaaaucuuguugguuugaaaaucggggacugguugagugcaacaaucauuaccuuugucugaacugccucagccugcuucuguccgugucuagccgcuguccgaucugcaagaugccccucccuacaagacugaaagcggcugcccagcccuccgccccuucuacggaagugacccagaauacaacacccccuccguauacccccugaggacuagucccuguucccagagcccacuuuuuuuucuuuuuuugaaauaaaauagccugucuuucagaucuaaaaaaaaaaaaaaaaaaaaaaaaaaaaaaaaaaaaaaaaaaaaaaaaaaaaaaaaaaaaaaaaugcaucccccccccccccccccccccccccccccccaaaggcucuuuucagagccaccagaauu

SEQ ID NO: 13142 - RNA, 595 nt, Artificial Sequence
  mRNA product Design a-2 comprising derived and/or modified sequence from LASV(LASV1000-NIG-2009;Clade II)__AIT17780__Z (opt5)
gggagaguccgcucagccagguugcagaagcggcuuagcguguguccuaaucuucucucugcguguagguaggccugugccgcaaacaagcuuaccaugggcaacagacagaccaagagcacaaaaguggacgagcaccaacgggccuaccugguccccgaugcuucccuccuggggccucaguucugcaagucuuguugguuugaaaauaaaggacuuguugagugcaacaaucauuaucugugucucaacugccugagccuucugcucuccgugucuagccgcuguccgaucugcaagaugccccugccuacgagacugaaagccgcggcucagcccuccgccccucccaccgaagccauucagaauacaaccccuccgcccuacacaccuugaggacuagucccuguucccagagcccacuuuuuuuucuuuuuuugaaauaaaauagccugucuuucagaucuaaaaaaaaaaaaaaaaaaaaaaaaaaaaaaaaaaaaaaaaaaaaaaaaaaaaaaaaaaaaaaaaugcaucccccccccccccccccccccccccccccccaaaggcucuuuucagagccaccagaauu

SEQ ID NO: 13143 - RNA, 595 nt, Artificial Sequence
  mRNA product Design a-2 comprising derived and/or modified sequence from LASV(LASV221-NIG-2010;Clade II)__AIT17622__Z (opt5)
gggagaguccgcucagccagguugcagaagcggcuuagcguguguccuaaucuucucucugcguguagguaggccugugccgcaaacaagcuuaccaugggcaacagacaggccaagagcaccaaaguggacgagcaccaacgggcucaucugguccccgaugccucccaccucgggccucaguucugcaagucuuguugguuugaaaaucgcggacugguugagugcaacaaucauuaccuuugucugaacugccucagccugcuucuguccgugucuagcagauguccgaucugcaaaaugccccucccuacaaagcugaaagcggcuacgcagcccuccgccccuucuaccgaagugacacagaauaccauucccccuccguauagccccugaggacuagucccuguucccagagcccacuuuuuuuucuuuuuuugaaauaaaauagccugucuuucagaucuaaaaaaaaaaaaaaaaaaaaaaaaaaaaaaaaaaaaaaaaaaaaaaaaaaaaaaaaaaaaaaaaugcaucccccccccccccccccccccccccccccccaaaggcucuuuucagagccaccagaauu

SEQ ID NO: 13144 - RNA, 595 nt, Artificial Sequence
  mRNA product Design a-2 comprising derived and/or modified sequence from LASV(LASV237-NIG-2010;Clade II)__AIT17636__Z (opt5)
gggagaguccgcucagccagguugcagaagcggcuuagcguguguccuaaucuucucucugcguguagguaggccugugccgcaaacaagcuuaccaugggcaacagacaggccaagagcaccaaaguggacgagcaccaacgggcucaucugguccccgaugccucccaccucgggccucaguucugcaagucuuguugguuugaaaaucgcggacugguugagugcaacaaucauuaccuuugucugaacugccucagccugcuucuguccgugucuagcagauguccgaucugcaaaaugccccucccuacaaagcugaaagcggcugcccagcccuccgccccuucuauugaaacgauccagaauaccacacccccuccguauacccccugaggacuagucccuguucccagagcccacuuuuuuuucuuuuuuugaaauaaaauagccugucuuucagaucuaaaaaaaaaaaaaaaaaaaaaaaaaaaaaaaaaaaaaaaaaaaaaaaaaaaaaaaaaaaaaaaaugcaucccccccccccccccccccccccccccccccaaaggcucuuuucagagccaccagaauu

SEQ ID NO: 13145 - RNA, 595 nt, Artificial Sequence
  mRNA product Design a-2 comprising derived and/or modified sequence from LASV(LASV253-NIG-2011;Clade II)__AIT17668__Z (opt5)
gggagaguccgcucagccagguugcagaagcggcuuagcguguguccuaaucuucucucugcguguagguaggccugugccgcaaacaagcuuaccaugggcaacagacaggccaagagcaccaaaguggacgagcaccaacgggcucaucugguccccgaugccucccaccucgggccucaguucugcaagucuuguugguuugaaaauaaaggacugguugagugcaacaaucauuaccuuugucugaacugccucagccugcuucuguccgugucuagccgcuguccgaucugcaagaugccccucccuacaaaacugaagacgaccgcgcagcccuccgcuccucccacagaagccgccaagaauaccgcuccuccgcccuaugccccuugaggacuagucccuguucccagagcccacuuuuuuuucuuuuuuugaaauaaaauagccugucuuucagaucuaaaaaaaaaaaaaaaaaaaaaaaaaaaaaaaaaaaaaaaaaaaaaaaaaaaaaaaaaaaaaaaaugcaucccccccccccccccccccccccccccccccaaaggcucuuuucagagccaccagaauu

SEQ ID NO: 13146 - RNA, 595 nt, Artificial Sequence
  mRNA product Design a-2 comprising derived and/or modified sequence from LASV(G1180-SLE-2010;Clade IV)__AIT17166__Z (opt5)
gggagaguccgcucagccagguugcagaagcggcuuagcguguguccuaaucuucucucugcguguagguaggccugugccgcaaacaagcuuaccaugggcaacaagcaggccaaagcucccgaggccaaggacagcccuagagcgucccugaucccggaugcuacccaccucgggccccaauucugcaaaucuuguugguuugaaacaaagggacugguggagugcaauaaccauuaccuuugucugaauugccucacgcugcuucugagcgucuccaaccgguguccuauuugcaaaaugccccucccuaccaagcugcgccccucugccacaccuaccgccccgcccacagaagcugccgacagcaucggcccucccccuuauucccccugaggacuagucccuguucccagagcccacuuuuuuuucuuuuuuugaaauaaaauagccugucuuucagaucuaaaaaaaaaaaaaaaaaaaaaaaaaaaaaaaaaaaaaaaaaaaaaaaaaaaaaaaaaaaaaaaaugcaucccccccccccccccccccccccccccccccaaaggcucuuuucagagccaccagaauu

SEQ ID NO: 13147 - RNA, 595 nt, Artificial Sequence
  mRNA product Design a-2 comprising derived and/or modified sequence from LASV(G1442-SLE-2011;Clade IV)__AIT17178__Z (opt5)
gggagaguccgcucagccagguugcagaagcggcuuagcguguguccuaaucuucucucugcguguagguaggccugugccgcaaacaagcuuaccaugggcaacaagcaggccaaagcuagcgaggccaaggacucccccagagcgucucugaucccugaugcuacccaccucgggccgcaauucugcaaaagcuguugguuugaaaauaagggacugguggagugcaacaaucauuaccuuugucugaacugccucucccugcuucugucugucagcucccggugucccauuugcaaaaugccucuccccacacgccugagaccuucuacggcccccaccgccccuccggcucgggccggcgacaauaucaagcccccucccuauagcccuugaggacuagucccuguucccagagcccacuuuuuuuucuuuuuuugaaauaaaauagccugucuuucagaucuaaaaaaaaaaaaaaaaaaaaaaaaaaaaaaaaaaaaaaaaaaaaaaaaaaaaaaaaaaaaaaaaugcaucccccccccccccccccccccccccccccccaaaggcucuuuucagagccaccagaauu

SEQ ID NO: 13148 - RNA, 595 nt, Artificial Sequence
  mRNA product Design a-2 comprising derived and/or modified sequence from LASV(G502-SLE-2009;Clade IV)__AIT17124__Z (opt5)
gggagaguccgcucagccagguugcagaagcggcuuagcguguguccuaaucuucucucugcguguagguaggccugugccgcaaacaagcuuaccaugggcaacaaacaggugaagacccccgaggccaaggacagcccuagagcuucccugaucccggaugccacacaccucgggccccaauucugcaaaucuuguugguuugaaaauaagggacuggucgagugcaacaaucauuaccuuugucugaacugccucacgcugcuucugagcguuggcaaucgguguccuauuugcaaaaugccccucccuaccaagcugcgccccuccgugacaccuaccgcgccgcccacaagagcugccgacucuaucgggccucccccuuauagccccugaggacuagucccuguucccagagcccacuuuuuuuucuuuuuuugaaauaaaauagccugucuuucagaucuaaaaaaaaaaaaaaaaaaaaaaaaaaaaaaaaaaaaaaaaaaaaaaaaaaaaaaaaaaaaaaaaugcaucccccccccccccccccccccccccccccccaaaggcucuuuucagagccaccagaauu

SEQ ID NO: 13149 - RNA, 595 nt, Artificial Sequence
  mRNA product Design a-2 comprising derived and/or modified sequence from LASV(G733-SLE-2010;Clade IV)__AIT17152__Z (opt5)
gggagaguccgcucagccagguugcagaagcggcuuagcguguguccuaaucuucucucugcguguagguaggccugugccgcaaacaagcuuaccaugggcaacaagcaggccaaaacccccgagacaaaggacagcccuagagcuucccugaucccggaugccacgcaccucgggccccaauucugcaaaucuuguugguuugaaaauaagggacugguggagugcaacaaucauuaccuuugucugaacugccucacccugcuucugagcgucuccaaucgguguccuauuugcaaaaugccccucccuacaaagcugcgccccucuaccgcgccuacagcuccgcccgccggcgccgcugacaacaccagaccucccccuuauagccccugaggacuagucccuguucccagagcccacuuuuuuuucuuuuuuugaaauaaaauagccugucuuucagaucuaaaaaaaaaaaaaaaaaaaaaaaaaaaaaaaaaaaaaaaaaaaaaaaaaaaaaaaaaaaaaaaaugcaucccccccccccccccccccccccccccccccaaaggcucuuuucagagccaccagaauu

SEQ ID NO: 13150 - RNA, 607 nt, Artificial Sequence
  mRNA product Design a-2 comprising derived and/or modified sequence from MOPV/LASV reassortant(IGS-1;Clade IV)__AFY05533__Z (opt5)
gggagaguccgcucagccagguugcagaagcggcuuagcguguguccuaaucuucucucugcguguagguaggccugugccgcaaacaagcuuaccaugggcaagacccagagcaaagggcaacccuccacaaaccugcucaaggagacggaaccuagacacccggugauccccgacgcccggggaaccggcccugaguucugcaaaucuuguugguuugaacgcagagggcugguccggugcaaugaucauuaccuuugucugaacugccucacacugcuucacaccguuagcgaccgcugucccaucugcaagcauaaacugccuuucagacucgagcugcagacacagcccaccgcuccuccggaaauucccccuucccagaaucccccucccuauucuccgugaggacuagucccuguucccagagcccacuuuuuuuucuuuuuuugaaauaaaauagccugucuuucagaucuaaaaaaaaaaaaaaaaaaaaaaaaaaaaaaaaaaaaaaaaaaaaaaaaaaaaaaaaaaaaaaaaugcaucccccccccccccccccccccccccccccccaaaggcucuuuucagagccaccagaauu

SEQ ID NO: 13151 - RNA, 595 nt, Artificial Sequence
  mRNA product Design a-2 comprising derived and/or modified sequence from LASV(LM776-SLE-2012;Clade IV)__AIT17824__Z (opt5)
gggagaguccgcucagccagguugcagaagcggcuuagcguguguccuaaucuucucucugcguguagguaggccugugccgcaaacaagcuuaccaugggcaacaagcaggccaaagcuagcgaggaaaagaacucccccagagccucucugaucccugacgcgacccaccucgggccgcaauucugcaaaagcuguugguuugagaauaagggacugguggaaugcaauaaccauuaccuuugucugaauugccucacacugcuucuguccgucucuaaccggugucccauuugcaaaaugccucuccccacgaagcugcgcccuagcaccacacccaccgcuccuccgacaggcgccgccgauuccaucagacccccucccuauucuccuugaggacuagucccuguucccagagcccacuuuuuuuucuuuuuuugaaauaaaauagccugucuuucagaucuaaaaaaaaaaaaaaaaaaaaaaaaaaaaaaaaaaaaaaaaaaaaaaaaaaaaaaaaaaaaaaaaugcaucccccccccccccccccccccccccccccccaaaggcucuuuucagagccaccagaauu

SEQ ID NO: 13152 - RNA, 595 nt, Artificial Sequence
  mRNA product Design a-2 comprising derived and/or modified sequence from LASV(Mad39;Clade IV)__ANH09743__Z (opt5)
gggagaguccgcucagccagguugcagaagcggcuuagcguguguccuaaucuucucucugcguguagguaggccugugccgcaaacaagcuuaccaugggcaacaagcaggccaaagcuagcgagguggaagacgggcccagagccucccugaucccugaugcgacccaccucggaccgcaauucugcaagucuuguugguuugagaauaaaagccuggucgaaugcaacaaucauuaccuuugucugaacugccucacacugcuucuguccguuucuaaucggugucccauuugcaagaugccucuccccacgcgccugaaaccuagcguggugcccaccgcuccuccgacaagagccggcgacgggacccggcccccucccuauuccccuugaggacuagucccuguucccagagcccacuuuuuuuucuuuuuuugaaauaaaauagccugucuuucagaucuaaaaaaaaaaaaaaaaaaaaaaaaaaaaaaaaaaaaaaaaaaaaaaaaaaaaaaaaaaaaaaaaugcaucccccccccccccccccccccccccccccccaaaggcucuuuucagagccaccagaauu

SEQ ID NO: 13153 - RNA, 595 nt, Artificial Sequence
  mRNA product Design a-2 comprising derived and/or modified sequence from LASV(Z0947-SLE-2011;Clade IV)__AIT17838__Z (opt5)
gggagaguccgcucagccagguugcagaagcggcuuagcguguguccuaaucuucucucugcguguagguaggccugugccgcaaacaagcuuaccaugggcaacaagcaggccaaagugcccgagagcaaggacuccccuagagcuucucugaucccggaugccacccaccucgggccccaauucugcaaaagcuguugguuugaaaauaagggacuggucgagugcaacaaucauuaccuuugucugaacugccucacacugcuucuguccguuucuaaucgguguccuauuugcaaaaugccccucccuacgaagcugaagcccagcgcggcuccuaccgccccgcccacaggcgccgcugacuccauccgcccucccccuuauucucccugaggacuagucccuguucccagagcccacuuuuuuuucuuuuuuugaaauaaaauagccugucuuucagaucuaaaaaaaaaaaaaaaaaaaaaaaaaaaaaaaaaaaaaaaaaaaaaaaaaaaaaaaaaaaaaaaaugcaucccccccccccccccccccccccccccccccaaaggcucuuuucagagccaccagaauu

SEQ ID NO: 13154 - RNA, 595 nt, Artificial Sequence
  mRNA product Design a-2 comprising derived and/or modified sequence from LASV(Josiah;Clade IV)__ADY11072/NP_694871__Z (opt6)
gggagaguccgcucagccagguugcagaagcggcuuagcguguguccuaaucuucucucugcguguagguaggccugugccgcaaacaagcuuaccaugggaaacaaacaagcaaaagcaccagaaucaaaagacucaccaagagcaucacuaauaccagacgcaacacaccuaggaccacaauucugcaaaucaugcugguucgaaaacaaaggacuuguagaaugcaacaaccacuaccuaugccuaaacugccuaacacuacuacuaucaguaucaaacagaugcccaauaugcaaaaugccacuaccaacaaaacuaagaccaucagcagcaccaacagcaccaccaacaggagcagcagacucaauaagaccaccaccauacucaccauaaggacuagucccuguucccagagcccacuuuuuuuucuuuuuuugaaauaaaauagccugucuuucagaucuaaaaaaaaaaaaaaaaaaaaaaaaaaaaaaaaaaaaaaaaaaaaaaaaaaaaaaaaaaaaaaaaugcaucccccccccccccccccccccccccccccccaaaggcucuuuucagagccaccagaauu

SEQ ID NO: 13155 - RNA, 598 nt, Artificial Sequence
  mRNA product Design a-2 comprising derived and/or modified sequence from LASV(Pinneo-NIG-1969;Clade I)__AIT17834__Z (opt6)
gggagaguccgcucagccagguugcagaagcggcuuagcguguguccuaaucuucucucugcguguagguaggccugugccgcaaacaagcuuaccaugggaaacaaacaaacaagaucaccaccaaaaccagaacacccaagaccaacacuacuaccagacgcaucacaccuaggaccacaauucugcaaaucaugcugguucgaaaacaaaggacuaguagaaugcaacaaccacuaccuaugccuaaacugccuaacacuacuacuaucaguaucagacagaugcccaauaugcaaaaugccacuaccaacaaaacuagcaguaagaacacaaccaucagcaccaccacuaaaccaaggaaacacacaaucaucaccaccaccauacucaccauaaggacuagucccuguucccagagcccacuuuuuuuucuuuuuuugaaauaaaauagccugucuuucagaucuaaaaaaaaaaaaaaaaaaaaaaaaaaaaaaaaaaaaaaaaaaaaaaaaaaaaaaaaaaaaaaaaugcaucccccccccccccccccccccccccccccccaaaggcucuuuucagagccaccagaauu

SEQ ID NO: 13156 - RNA, 595 nt, Artificial Sequence
  mRNA product Design a-2 comprising derived and/or modified sequence from LASV(Nig08-04;Clade II)__ADU56612__Z (opt6)
gggagaguccgcucagccagguugcagaagcggcuuagcguguguccuaaucuucucucugcguguagguaggccugugccgcaaacaagcuuaccaugggaaacagacaaacaagaccaacagaagcaacagaacaaucaagagcacaccuaguaccagacgcaucacaccuaggaccacaauucugcaaaucaugcugguucgaaaacagaggacuaguagaaugcaacaaccacuaccuaugccuaaacugccuaucacuacuacuaucaguaucaucaagaugcccaauaugcaaaaugccacuaccaacaagacuaaaagcaucagcacaaccaucagcaccaccaacagaagcaccacaaaacacaacaccaccaccauacacaccauaaggacuagucccuguucccagagcccacuuuuuuuucuuuuuuugaaauaaaauagccugucuuucagaucuaaaaaaaaaaaaaaaaaaaaaaaaaaaaaaaaaaaaaaaaaaaaaaaaaaaaaaaaaaaaaaaaugcaucccccccccccccccccccccccccccccccaaaggcucuuuucagagccaccagaauu

SEQ ID NO: 13157 - RNA, 595 nt, Artificial Sequence
  mRNA product Design a-2 comprising derived and/or modified sequence from LASV(Nig08-A19;Clade III)__ADU56620__Z (opt6)
gggagaguccgcucagccagguugcagaagcggcuuagcguguguccuaaucuucucucugcguguagguaggccugugccgcaaacaagcuuaccaugggaggaaaacacacaaaaccacaaagagaaucaaacucaccaagagcaucacuaauaccagacgcaacacaccuaggaccacaauucugcaaaucaugcugguucgaaaacaaaggauuaguagaaugcaacaaccacuaccuaugccuaaacugccuaacacuacuacuaucaguaucaaacagaugcccaauaugcaaaaugccacuaccaacaagacuaagagcaucaacaaacccaacagcaccacaaguagaacaaguaggaccaacaaacccaccaccauacucaccauaaggacuagucccuguucccagagcccacuuuuuuuucuuuuuuugaaauaaaauagccugucuuucagaucuaaaaaaaaaaaaaaaaaaaaaaaaaaaaaaaaaaaaaaaaaaaaaaaaaaaaaaaaaaaaaaaaugcaucccccccccccccccccccccccccccccccaaaggcucuuuucagagccaccagaauu

SEQ ID NO: 13158 - RNA, 595 nt, Artificial Sequence
  mRNA product Design a-2 comprising derived and/or modified sequence from LASV(AV;Clade V)__CCA30312__Z (opt6)
gggagaguccgcucagccagguugcagaagcggcuuagcguguguccuaaucuucucucugcguguagguaggccugugccgcaaacaagcuuaccaugggaaacagacaagcaaaaaacccagaaguagaaaacucaccaagagcaucacuaauaccagacgcaacacaccuaggaccacaauucugcaaaucaugcugguucgaaaacaaaggacuaguagaaugcaacaaccacuaccuaugccuaaacugccuaucacuacuacuaucaguaucaaacagaugcccaauaugcaaaaugccacuaccaacaagacuaagaccaacaacaacaccaacagcaccacaaauaauaaaagaaaacacaacaaacccaccaccauacacaccauaaggacuagucccuguucccagagcccacuuuuuuuucuuuuuuugaaauaaaauagccugucuuucagaucuaaaaaaaaaaaaaaaaaaaaaaaaaaaaaaaaaaaaaaaaaaaaaaaaaaaaaaaaaaaaaaaaugcaucccccccccccccccccccccccccccccccaaaggcucuuuucagagccaccagaauu

SEQ ID NO: 13159 - RNA, 595 nt, Artificial Sequence
  mRNA product Design a-2 comprising derived and/or modified sequence from LASV(Togo/2016/7082;Clade VI)__AMR44579__Z (opt6)
gggagaguccgcucagccagguugcagaagcggcuuagcguguguccuaaucuucucucugcguguagguaggccugugccgcaaacaagcuuaccaugggagcaagacaaacaaaacaaccacaaauagaaggaucaccaagagcaucacuaguaccagacgcaucacaccuaggaccacaauucugcaaaucaugcugguucgaaaacaaaggacuaguagaaugcaacaaccacuacuuaugccuaaacugccuaucacuacuacuaucaguaucaaacagaugcccaauaugcaaaaugccacuaccaacaaaacuaagaguaucaucagcaccaucagcaccaccagcagcaacagcacaaccaggaacaccaccaccauacucaccauaaggacuagucccuguucccagagcccacuuuuuuuucuuuuuuugaaauaaaauagccugucuuucagaucuaaaaaaaaaaaaaaaaaaaaaaaaaaaaaaaaaaaaaaaaaaaaaaaaaaaaaaaaaaaaaaaaugcaucccccccccccccccccccccccccccccccaaaggcucuuuucagagccaccagaauu

SEQ ID NO: 13160 - RNA, 595 nt, Artificial Sequence
  mRNA product Design a-2 comprising derived and/or modified sequence from LASV(KAK-428;Clade n.d. (VII))__ANH09761__Z (opt6)
gggagaguccgcucagccagguugcagaagcggcuuagcguguguccuaaucuucucucugcguguagguaggccugugccgcaaacaagcuuaccaugggaaacaaaggaacaaaaccaacacaaaacucagaaccaucaagagcaaaccuaguaccagacgcaucauaccuaggaccacaauucugcaaaucaugcugguucgaaaacaaaggacuaguagaaugcaacaaccacuaccuaugccuaaacugccuaacaaugcuacuaucaguaucaaacagaugcccaauaugcaaaaugccacuaccaacaaaaauaaaagcaucaggaucaccaucagcaccaccaacagaagcaaacucagcaguaucaccaccaccauacacaccauaaggacuagucccuguucccagagcccacuuuuuuuucuuuuuuugaaauaaaauagccugucuuucagaucuaaaaaaaaaaaaaaaaaaaaaaaaaaaaaaaaaaaaaaaaaaaaaaaaaaaaaaaaaaaaaaaaugcaucccccccccccccccccccccccccccccccaaaggcucuuuucagagccaccagaauu

SEQ ID NO: 13161 - RNA, 595 nt, Artificial Sequence
  mRNA product Design a-2 comprising derived and/or modified sequence from LASV(ISTH0009-NIG-2011;Clade II)__AIT17402__Z (opt6)
gggagaguccgcucagccagguugcagaagcggcuuagcguguguccuaaucuucucucugcguguagguaggccugugccgcaaacaagcuuaccaugggaaacagacaagcaaaaucaacaaaaguagacgaacaccaaagagcacaccuaguaccagacgcaucacaccuaggaccacaauucugcaaaucaugcugguucgaaaacagaggacuaguagaaugcaacaaccacuaccuaugccuaaacugccuaucacuacuacuaucaguaucaucaagaugcccaauaugcaaaaugccacuaccaacaaaacuaaaagcagcagcacaaccaucagcaccaucaacagaaacaauacaaaacacaacaccaccaccauacacaccauaaggacuagucccuguucccagagcccacuuuuuuuucuuuuuuugaaauaaaauagccugucuuucagaucuaaaaaaaaaaaaaaaaaaaaaaaaaaaaaaaaaaaaaaaaaaaaaaaaaaaaaaaaaaaaaaaaugcaucccccccccccccccccccccccccccccccaaaggcucuuuucagagccaccagaauu

SEQ ID NO: 13162 - RNA, 595 nt, Artificial Sequence
  mRNA product Design a-2 comprising derived and/or modified sequence from LASV(ISTH2010-NIG-2012;Clade II)__AIT17480__Z (opt6)
gggagaguccgcucagccagguugcagaagcggcuuagcguguguccuaaucuucucucugcguguagguaggccugugccgcaaacaagcuuaccaugggaaacagacacgcaaaaucaacaaaaguagacgaacaccaaagagcacaccuaguaccagacgcaucacaccuaggaccacaauucugcaaaucaugcugguucgaaaacagaggacuaguagaaugcaacaaccacuaccuaugccuaaacugccuaucacuacuacuaucaguaucaucaagaugcccaauaugcaaaaugccacuaccaacaaaacuaaaagcagcagcacaaccaucagcaccaucaacagaaguaauacaaucaacaacacccccaccauacacaccauaaggacuagucccuguucccagagcccacuuuuuuuucuuuuuuugaaauaaaauagccugucuuucagaucuaaaaaaaaaaaaaaaaaaaaaaaaaaaaaaaaaaaaaaaaaaaaaaaaaaaaaaaaaaaaaaaaugcaucccccccccccccccccccccccccccccccaaaggcucuuuucagagccaccagaauu

SEQ ID NO: 13163 - RNA, 595 nt, Artificial Sequence
  mRNA product Design a-2 comprising derived and/or modified sequence from LASV(Lassa virus/H.sapiens-wt/NGA/2016/ISTH_0017;Clade II)__AVO03713__Z (opt6)
gggagaguccgcucagccagguugcagaagcggcuuagcguguguccuaaucuucucucugcguguagguaggccugugccgcaaacaagcuuaccaugggaaacagacaagcaaaaucaacaaaaguagacgaacaccaaagagcacaccuaguaccagacgcaucacaccuaggaccacaauucugcaaaucaugcugguucgaaaacagaggacuaguagaaugcaacaaccacuaccuaugccuaaacugccuaucacuacuacuaucaguaucaucaagaugcccaauaugcaaaaugccacuaccaacaaaacuaaaagcagcaacacaaccaucagcaccaucaacagaaguaaaccaaaacacaacaccaccaccauacacaccauaaggacuagucccuguucccagagcccacuuuuuuuucuuuuuuugaaauaaaauagccugucuuucagaucuaaaaaaaaaaaaaaaaaaaaaaaaaaaaaaaaaaaaaaaaaaaaaaaaaaaaaaaaaaaaaaaaugcaucccccccccccccccccccccccccccccccaaaggcucuuuucagagccaccagaauu

SEQ ID NO: 13164 - RNA, 595 nt, Artificial Sequence
  mRNA product Design a-2 comprising derived and/or modified sequence from LASV(Lassa virus/H.sapiens-wt/NGA/2018/ISTH_0959;Clade II)__AVV65084__Z (opt6)
gggagaguccgcucagccagguugcagaagcggcuuagcguguguccuaaucuucucucugcguguagguaggccugugccgcaaacaagcuuaccaugggaaacaaacaagcaaaaucaacaaaaguagacgaacaccaaagagcacaccuaguuccagacgcaucacaccuaggaccacaauucugcaaaucaugcugguucgaaaacagaggacuaguagaaugcaacaaccacuaccuaugccuaaacugccuaucacuacuacuaucaguaucaucaagaugcccaauaugcaaaaugccacuaccaacaaaacuaaaagcagcagcacaaccaucagcaccaucaacagaagcaauacaaucaacaacaccaccaccauacacaccauaaggacuagucccuguucccagagcccacuuuuuuuucuuuuuuugaaauaaaauagccugucuuucagaucuaaaaaaaaaaaaaaaaaaaaaaaaaaaaaaaaaaaaaaaaaaaaaaaaaaaaaaaaaaaaaaaaugcaucccccccccccccccccccccccccccccccaaaggcucuuuucagagccaccagaauu
